United States Patent Application Publication US 2005/0244851 A1 - sequence listing, part 135

SEQ ID NO: 5269758 - DNA, 25 bp, Homo sapien
cagcacgtgcaccacggagtggaga

SEQ ID NO: 5269759 - DNA, 25 bp, Homo sapien
ccagcagaagcaccaaggattggag

SEQ ID NO: 5269760 - DNA, 25 bp, Homo sapien
ggtaaccaagtttataacttgcaga

SEQ ID NO: 5269761 - DNA, 25 bp, Homo sapien
cttgcagacccgatggccgtaaagc

SEQ ID NO: 5269762 - DNA, 25 bp, Homo sapien
tgttccacaccttggcatcagttgc

SEQ ID NO: 5269763 - DNA, 25 bp, Homo sapien
catgttctagaacacagtactgttt

SEQ ID NO: 5269764 - DNA, 25 bp, Homo sapien
tcagtgagattactaggccggcgct

SEQ ID NO: 5269765 - DNA, 25 bp, Homo sapien
caactgaaatgaactcacgtgtcct

SEQ ID NO: 5269766 - DNA, 25 bp, Homo sapien
gtcactggctgagcgaccaagggtc

SEQ ID NO: 5269767 - DNA, 25 bp, Homo sapien
tacattgcacccatactgggaacgc

SEQ ID NO: 5269768 - DNA, 25 bp, Homo sapien
tggggcctctatcctgggatctctg

SEQ ID NO: 5269769 - DNA, 25 bp, Homo sapien
aatgtcatcatgggtggccgctggc

SEQ ID NO: 5269770 - DNA, 25 bp, Homo sapien
gggcctctatcctgggatctctggg

SEQ ID NO: 5269771 - DNA, 25 bp, Homo sapien
tggccgctggcccaaagtcctgctc

SEQ ID NO: 5269772 - DNA, 25 bp, Homo sapien
ttgggcagtgtggacgtctggcgtc

SEQ ID NO: 5269773 - DNA, 25 bp, Homo sapien
ctccaaagtcttgggtgaaccacag

SEQ ID NO: 5269774 - DNA, 25 bp, Homo sapien
tgtggacgtctggcgtcctgagctt

SEQ ID NO: 5269775 - DNA, 25 bp, Homo sapien
tcttgggtgaaccacagcagcttgg

SEQ ID NO: 5269776 - DNA, 25 bp, Homo sapien
gcgaaactagagtccgcaggaggcc

SEQ ID NO: 5269777 - DNA, 25 bp, Homo sapien
tgtgcccaggaacttactcttgcct

SEQ ID NO: 5269778 - DNA, 25 bp, Homo sapien
gatttcaccttaagtgctttagcag

SEQ ID NO: 5269779 - DNA, 25 bp, Homo sapien
tgaagtgaagaaatcccaggcgcca

SEQ ID NO: 5269780 - DNA, 25 bp, Homo sapien
ggcatcatcacaccaccggtgggta

SEQ ID NO: 5269781 - DNA, 25 bp, Homo sapien
ttttctgtgatatgacaaactaggc

SEQ ID NO: 5269782 - DNA, 25 bp, Homo sapien
ctctgtacagtgtggaggtgattaa

SEQ ID NO: 5269783 - DNA, 25 bp, Homo sapien
gaagcaagccctgcggtatatggca

SEQ ID NO: 5269784 - DNA, 25 bp, Homo sapien
aaaattcaacagctttattgtgaaa

SEQ ID NO: 5269785 - DNA, 25 bp, Homo sapien
aaattcaacagctttattgtgaaag

SEQ ID NO: 5269786 - DNA, 25 bp, Homo sapien
aattcaacagctttattgtgaaaga

SEQ ID NO: 5269787 - DNA, 25 bp, Homo sapien
ctgaatataaggtaactccaagcca

SEQ ID NO: 5269788 - DNA, 25 bp, Homo sapien
taacacagctcatatataaattact

SEQ ID NO: 5269789 - DNA, 25 bp, Homo sapien
tatcacatatacctgaatataaggt

SEQ ID NO: 5269790 - DNA, 25 bp, Homo sapien
tataagaacaattatagaaggaatc

SEQ ID NO: 5269791 - DNA, 25 bp, Homo sapien
ggcatcacgtccagatgggcatcta

SEQ ID NO: 5269792 - DNA, 25 bp, Homo sapien
ggattgcaccttcttacacggcagg

SEQ ID NO: 5269793 - DNA, 25 bp, Homo sapien
cataagcaactcagtgtgtgcccct

SEQ ID NO: 5269794 - DNA, 25 bp, Homo sapien
catctaaggaactgcatttcgggag

SEQ ID NO: 5269795 - DNA, 25 bp, Homo sapien
tctgctcagtcattacattggggac

SEQ ID NO: 5269796 - DNA, 25 bp, Homo sapien
gataatctagcctcaaggctatcct

SEQ ID NO: 5269797 - DNA, 25 bp, Homo sapien
aggaaagataatctagcctcaaggc

SEQ ID NO: 5269798 - DNA, 25 bp, Homo sapien
tttacgaggcacgtgttagttccca

SEQ ID NO: 5269799 - DNA, 25 bp, Homo sapien
ggtctgtgccagaaatttcacgtac

SEQ ID NO: 5269800 - DNA, 25 bp, Homo sapien
ctaggcggtctgtgccagaaatttc

SEQ ID NO: 5269801 - DNA, 25 bp, Homo sapien
taggcggtctgtgccagaaatttca

SEQ ID NO: 5269802 - DNA, 25 bp, Homo sapien
ggcggtctgtgccagaaatttcacg

SEQ ID NO: 5269803 - DNA, 25 bp, Homo sapien
cggttctcccacaaacagccgcatg

SEQ ID NO: 5269804 - DNA, 25 bp, Homo sapien
caaacagccgcatggccttcgtgta

SEQ ID NO: 5269805 - DNA, 25 bp, Homo sapien
ggttgtacgctgtccacaccggttc

SEQ ID NO: 5269806 - DNA, 25 bp, Homo sapien
tgcccgcgggcttcaaaatggtcag

SEQ ID NO: 5269807 - DNA, 25 bp, Homo sapien
gccccgcctgggtatgaaatgcaca

SEQ ID NO: 5269808 - DNA, 25 bp, Homo sapien
gaaggacagctgtcacctcggacat

SEQ ID NO: 5269809 - DNA, 25 bp, Homo sapien
aagcacaggtcgaggagtcccgagc

SEQ ID NO: 5269810 - DNA, 25 bp, Homo sapien
gcggctccacagactctccttgaag

SEQ ID NO: 5269811 - DNA, 25 bp, Homo sapien
caccgtgaagcggtgatagatcccc

SEQ ID NO: 5269812 - DNA, 25 bp, Homo sapien
cgtgaagcggtgatagatccccgcg

SEQ ID NO: 5269813 - DNA, 25 bp, Homo sapien
cgtccaccgtgaagcggtgatagat

SEQ ID NO: 5269814 - DNA, 25 bp, Homo sapien
ttctcgtccaccgtgaagcggtgat

SEQ ID NO: 5269815 - DNA, 25 bp, Homo sapien
catgaagatccggatccactggtcc

SEQ ID NO: 5269816 - DNA, 25 bp, Homo sapien
gtccctcacatcgaagtacccactg

SEQ ID NO: 5269817 - DNA, 25 bp, Homo sapien
cggatctcatcgtccaagtgcaaat

SEQ ID NO: 5269818 - DNA, 25 bp, Homo sapien
tgcaaatgctcctcgtagaacatct

SEQ ID NO: 5269819 - DNA, 25 bp, Homo sapien
cactaaagcagtactctggggaaaa

SEQ ID NO: 5269820 - DNA, 25 bp, Homo sapien
aacaaaacatccacacaagtcaaag

SEQ ID NO: 5269821 - DNA, 25 bp, Homo sapien
agaaaaacaacactctgcgaggccg

SEQ ID NO: 5269822 - DNA, 25 bp, Homo sapien
aaaagtatatcgaaattatcaaaag

SEQ ID NO: 5269823 - DNA, 25 bp, Homo sapien
tctttgcatatggttatgatgtcca

SEQ ID NO: 5269824 - DNA, 25 bp, Homo sapien
ctttgcatatggttatgatgtccat

SEQ ID NO: 5269825 - DNA, 25 bp, Homo sapien
atctttgcatatggttatgatgtcc

SEQ ID NO: 5269826 - DNA, 25 bp, Homo sapien
cctctctcttcggatcttttctaat

SEQ ID NO: 5269827 - DNA, 25 bp, Homo sapien
ggagtagttcctctctcttcggatc

SEQ ID NO: 5269828 - DNA, 25 bp, Homo sapien
ctctcttcggatcttttctaattct

SEQ ID NO: 5269829 - DNA, 25 bp, Homo sapien
ccaggagtagttcctctctcttcgg

SEQ ID NO: 5269830 - DNA, 25 bp, Homo sapien
ccactcatgagtctcattgatcctc

SEQ ID NO: 5269831 - DNA, 25 bp, Homo sapien
cccactcatgagtctcattgatcct

SEQ ID NO: 5269832 - DNA, 25 bp, Homo sapien
tcccactcatgagtctcattgatcc

SEQ ID NO: 5269833 - DNA, 25 bp, Homo sapien
gaaggaggtgcatctcaaacagacc

SEQ ID NO: 5269834 - DNA, 25 bp, Homo sapien
gtcactgttttggactgagcccctg

SEQ ID NO: 5269835 - DNA, 25 bp, Homo sapien
tagaacggaggttgccctattcaca

SEQ ID NO: 5269836 - DNA, 25 bp, Homo sapien
gagatgtaagagagcagtttgcccc

SEQ ID NO: 5269837 - DNA, 25 bp, Homo sapien
gactcagagcagaactagacggtag

SEQ ID NO: 5269838 - DNA, 25 bp, Homo sapien
gctttgaagaagtaccctccagcaa

SEQ ID NO: 5269839 - DNA, 25 bp, Homo sapien
tgtaaacattaacatgcatgccctg

SEQ ID NO: 5269840 - DNA, 25 bp, Homo sapien
gccctgtttcgcactggtatgccaa

SEQ ID NO: 5269841 - DNA, 25 bp, Homo sapien
agggcgtcggacaagcccaacgagc

SEQ ID NO: 5269842 - DNA, 25 bp, Homo sapien
ctgggcctttgaccgaggttagcca

SEQ ID NO: 5269843 - DNA, 25 bp, Homo sapien
caggcagggcgtcggacaagcccaa

SEQ ID NO: 5269844 - DNA, 25 bp, Homo sapien
tttgaccgaggttagccaggcaggc

SEQ ID NO: 5269845 - DNA, 25 bp, Homo sapien
caaccccgtaaacttcgctgctgag

SEQ ID NO: 5269846 - DNA, 25 bp, Homo sapien
caggcaacagaaacggaccgccgac

SEQ ID NO: 5269847 - DNA, 25 bp, Homo sapien
gcctccggcgaatcttgcagccctg

SEQ ID NO: 5269848 - DNA, 25 bp, Homo sapien
tcccgctgctgagcatgcgcagcat

SEQ ID NO: 5269849 - DNA, 25 bp, Homo sapien
cttccagtagagcaccccgagccgc

SEQ ID NO: 5269850 - DNA, 25 bp, Homo sapien
gcgtcgtccatataccaggcctgca

SEQ ID NO: 5269851 - DNA, 25 bp, Homo sapien
ccggggcgtcgtccatataccaggc

SEQ ID NO: 5269852 - DNA, 25 bp, Homo sapien
gtcgcccggggcgtcgtccatatac

SEQ ID NO: 5269853 - DNA, 25 bp, Homo sapien
tgttcgaacccaggggccgcgctcg

SEQ ID NO: 5269854 - DNA, 25 bp, Homo sapien
cgcagtgcgggtgccgtgttcgaac

SEQ ID NO: 5269855 - DNA, 25 bp, Homo sapien
gacgcgcagtgcgggtgccgtgttc

SEQ ID NO: 5269856 - DNA, 25 bp, Homo sapien
agtgcgggtgccgtgttcgaaccca

SEQ ID NO: 5269857 - DNA, 25 bp, Homo sapien
ggcgtggacgcgcatgggagccggg

SEQ ID NO: 5269858 - DNA, 25 bp, Homo sapien
ttatagggaggcgtggacgcgcatg

SEQ ID NO: 5269859 - DNA, 25 bp, Homo sapien
gacgcgcatgggagccgggattggg

SEQ ID NO: 5269860 - DNA, 25 bp, Homo sapien
gggaggcgtggacgcgcatgggagc

SEQ ID NO: 5269861 - DNA, 25 bp, Homo sapien
ggcaggtgaagctcaccgtaggcat

SEQ ID NO: 5269862 - DNA, 25 bp, Homo sapien
cgccgggcaggtgaagctcaccgta

SEQ ID NO: 5269863 - DNA, 25 bp, Homo sapien
gggccagccgttcgccagacgcgcc

SEQ ID NO: 5269864 - DNA, 25 bp, Homo sapien
tcgccagacgcgccgggcaggtgaa

SEQ ID NO: 5269865 - DNA, 25 bp, Homo sapien
ctgagaagcatgctgcagtaatgag

SEQ ID NO: 5269866 - DNA, 25 bp, Homo sapien
tgataggcacaggaccgaggccact

SEQ ID NO: 5269867 - DNA, 25 bp, Homo sapien
tcaactagcctgataggcacaggac

SEQ ID NO: 5269868 - DNA, 25 bp, Homo sapien
gaccgaggccactgagaagcatgct

SEQ ID NO: 5269869 - DNA, 25 bp, Homo sapien
gattcagacgcctggtgcttcttct

SEQ ID NO: 5269870 - DNA, 25 bp, Homo sapien
tcgaggacagagcagattcagacgc

SEQ ID NO: 5269871 - DNA, 25 bp, Homo sapien
atgtcggctgtagtcttgtcgagga

SEQ ID NO: 5269872 - DNA, 25 bp, Homo sapien
ctgtagtcttgtcgaggacagagca

SEQ ID NO: 5269873 - DNA, 25 bp, Homo sapien
agtgagcaccaagttcatagagata

SEQ ID NO: 5269874 - DNA, 25 bp, Homo sapien
gggaccattcgtagagcagatgctc

SEQ ID NO: 5269875 - DNA, 25 bp, Homo sapien
gatgctcctatggaagaaggtagcc

SEQ ID NO: 5269876 - DNA, 25 bp, Homo sapien
ttacgtaatgtgatccaggcaagac

SEQ ID NO: 5269877 - DNA, 25 bp, Homo sapien
aatccaacccgaactccaaatgtgg

SEQ ID NO: 5269878 - DNA, 25 bp, Homo sapien
cattgataggtattctggtgatcca

SEQ ID NO: 5269879 - DNA, 25 bp, Homo sapien
tccaacccgaactccaaatgtggct

SEQ ID NO: 5269880 - DNA, 25 bp, Homo sapien
aaacgtcccaggatttgccacctgt

SEQ ID NO: 5269881 - DNA, 25 bp, Homo sapien
gcccatctgctgtctagcactagct

SEQ ID NO: 5269882 - DNA, 25 bp, Homo sapien
ggcttgggatgctaacagtcaccat

SEQ ID NO: 5269883 - DNA, 25 bp, Homo sapien
taattaacaatacttgggcttggga

SEQ ID NO: 5269884 - DNA, 25 bp, Homo sapien
ctaacagtcaccatcttcggagagg

SEQ ID NO: 5269885 - DNA, 25 bp, Homo sapien
tcagagagacgttcacagcaaaggt

SEQ ID NO: 5269886 - DNA, 25 bp, Homo sapien
gagaggtgttacatgcaacggacca

SEQ ID NO: 5269887 - DNA, 25 bp, Homo sapien
tgatagcttctcacccacgtatggt

SEQ ID NO: 5269888 - DNA, 25 bp, Homo sapien
caacggaccagggtagacttcacca

SEQ ID NO: 5269889 - DNA, 25 bp, Homo sapien
tgggcttctacactctgcaccagct

SEQ ID NO: 5269890 - DNA, 25 bp, Homo sapien
cagctctttgtctggctctacagtc

SEQ ID NO: 5269891 - DNA, 25 bp, Homo sapien
cttctgattctgagacgcccttgca

SEQ ID NO: 5269892 - DNA, 25 bp, Homo sapien
cgcccttgcaggaaatcttagcatg

SEQ ID NO: 5269893 - DNA, 25 bp, Homo sapien
atccccacacctcacagtaggccat

SEQ ID NO: 5269894 - DNA, 25 bp, Homo sapien
catccccacacctcacagtaggcca

SEQ ID NO: 5269895 - DNA, 25 bp, Homo sapien
tccatccccacacctcacagtaggc

SEQ ID NO: 5269896 - DNA, 25 bp, Homo sapien
agctccatccccacacctcacagta

SEQ ID NO: 5269897 - DNA, 25 bp, Homo sapien
ccctggagcggaccttcttctcact

SEQ ID NO: 5269898 - DNA, 25 bp, Homo sapien
ccccctggagcggaccttcttctca

SEQ ID NO: 5269899 - DNA, 25 bp, Homo sapien
cccctggagcggaccttcttctcac

SEQ ID NO: 5269900 - DNA, 25 bp, Homo sapien
tcattgatgcagtaggctggaccac

SEQ ID NO: 5269901 - DNA, 25 bp, Homo sapien
atgcagtaggctggaccacgcccct

SEQ ID NO: 5269902 - DNA, 25 bp, Homo sapien
ctctctgcttactccacgtgtgtgc

SEQ ID NO: 5269903 - DNA, 25 bp, Homo sapien
acatagttttcaatgctgaacagac

SEQ ID NO: 5269904 - DNA, 25 bp, Homo sapien
tgaggttagcacttcgattgcaatt

SEQ ID NO: 5269905 - DNA, 25 bp, Homo sapien
aagccatggcaaagcgtgcagaatg

SEQ ID NO: 5269906 - DNA, 25 bp, Homo sapien
tcaacactgccgttcagcaaagggc

SEQ ID NO: 5269907 - DNA, 25 bp, Homo sapien
agcaaagggccaggttgcttctcat

SEQ ID NO: 5269908 - DNA, 25 bp, Homo sapien
tataacgagtaatcatcaacagttc

SEQ ID NO: 5269909 - DNA, 25 bp, Homo sapien
tttataacgagtaatcatcaacagt

SEQ ID NO: 5269910 - DNA, 25 bp, Homo sapien
taacgagtaatcatcaacagttcac

SEQ ID NO: 5269911 - DNA, 25 bp, Homo sapien
tcatttataacgagtaatcatcaac

SEQ ID NO: 5269912 - DNA, 25 bp, Homo sapien
ggagccatgttcgtcctctgaagca

SEQ ID NO: 5269913 - DNA, 25 bp, Homo sapien
agggctgacgtccagcaaggagtcc

SEQ ID NO: 5269914 - DNA, 25 bp, Homo sapien
tgtgtgttaggcaattggctaacat

SEQ ID NO: 5269915 - DNA, 25 bp, Homo sapien
tggtggtgccgctgtcattccactg

SEQ ID NO: 5269916 - DNA, 25 bp, Homo sapien
tgcagtaaagacaccgctgctttaa

SEQ ID NO: 5269917 - DNA, 25 bp, Homo sapien
gacaccgctgctttaaagacacagc

SEQ ID NO: 5269918 - DNA, 25 bp, Homo sapien
accgctgctttaaagacacagcctt

SEQ ID NO: 5269919 - DNA, 25 bp, Homo sapien
taaagacaccgctgctttaaagaca

SEQ ID NO: 5269920 - DNA, 25 bp, Homo sapien
catttccttaacgataattacagta

SEQ ID NO: 5269921 - DNA, 25 bp, Homo sapien
acagtaaaggtgttcctagaatgaa

SEQ ID NO: 5269922 - DNA, 25 bp, Homo sapien
aatcttgcaggtctggatattggtg

SEQ ID NO: 5269923 - DNA, 25 bp, Homo sapien
taataattcaacattgatgttcaga

SEQ ID NO: 5269924 - DNA, 25 bp, Homo sapien
aaatgtgtcctgttctttccatggt

SEQ ID NO: 5269925 - DNA, 25 bp, Homo sapien
tttccatggtgaggcatctccagga

SEQ ID NO: 5269926 - DNA, 25 bp, Homo sapien
gtcctgttctttccatggtgaggca

SEQ ID NO: 5269927 - DNA, 25 bp, Homo sapien
atctccaggagcccggggatcagcc

SEQ ID NO: 5269928 - DNA, 25 bp, Homo sapien
ccttttctgactctgttgcagggag

SEQ ID NO: 5269929 - DNA, 25 bp, Homo sapien
ctctgccgccttttctgactctgtt

SEQ ID NO: 5269930 - DNA, 25 bp, Homo sapien
tgccgccttttctgactctgttgca

SEQ ID NO: 5269931 - DNA, 25 bp, Homo sapien
tctgactctgttgcagggaggagta

SEQ ID NO: 5269932 - DNA, 25 bp, Homo sapien
tgcaggttttcagggcctgcacctc

SEQ ID NO: 5269933 - DNA, 25 bp, Homo sapien
cactttaactcatggggctctcctt

SEQ ID NO: 5269934 - DNA, 25 bp, Homo sapien
ggctctccttggagagagctcatgc

SEQ ID NO: 5269935 - DNA, 25 bp, Homo sapien
agagctcatgctggcagcaccaggg

SEQ ID NO: 5269936 - DNA, 25 bp, Homo sapien
ggcgaatattgggttgagtctcctg

SEQ ID NO: 5269937 - DNA, 25 bp, Homo sapien
cgaatattgggttgagtctcctgtc

SEQ ID NO: 5269938 - DNA, 25 bp, Homo sapien
agggcgaatattgggttgagtctcc

SEQ ID NO: 5269939 - DNA, 25 bp, Homo sapien
gcagggcgaatattgggttgagtct

SEQ ID NO: 5269940 - DNA, 25 bp, Homo sapien
gcccagtgagggcagtaagaaccgc

SEQ ID NO: 5269941 - DNA, 25 bp, Homo sapien
accgcacacgctgaagactggcagg

SEQ ID NO: 5269942 - DNA, 25 bp, Homo sapien
tattccttatgcgagatatcccctt

SEQ ID NO: 5269943 - DNA, 25 bp, Homo sapien
aggaagagcctcatattccttatgc

SEQ ID NO: 5269944 - DNA, 25 bp, Homo sapien
taagctgcatgtgtgatatggctgc

SEQ ID NO: 5269945 - DNA, 25 bp, Homo sapien
tgtctggtatacctgcatgtctgca

SEQ ID NO: 5269946 - DNA, 25 bp, Homo sapien
tgtctggtatacctgcaagtctgca

SEQ ID NO: 5269947 - DNA, 25 bp, Homo sapien
ggctgcatgtatggcaccactgcat

SEQ ID NO: 5269948 - DNA, 25 bp, Homo sapien
gctgcatgtgtggtacagctgcatg

SEQ ID NO: 5269949 - DNA, 25 bp, Homo sapien
tgcagctgtatgtgtggtacagcag

SEQ ID NO: 5269950 - DNA, 25 bp, Homo sapien
ggtacagctgcatgtgtgatgcagc

SEQ ID NO: 5269951 - DNA, 25 bp, Homo sapien
ctgcaagtttgcagttaagctgcat

SEQ ID NO: 5269952 - DNA, 25 bp, Homo sapien
tcgatctgagatcaaaggtcatttg

SEQ ID NO: 5269953 - DNA, 25 bp, Homo sapien
aattgtcttcacttctcgatctgag

SEQ ID NO: 5269954 - DNA, 25 bp, Homo sapien
cggcaccaacaaggcagaacaacag

SEQ ID NO: 5269955 - DNA, 25 bp, Homo sapien
atttggattgccgatgaaaggaggt

SEQ ID NO: 5269956 - DNA, 25 bp, Homo sapien
tatgaccctttatcattgcttttaa

SEQ ID NO: 5269957 - DNA, 25 bp, Homo sapien
gttggatgactgtcactgtttccag

SEQ ID NO: 5269958 - DNA, 25 bp, Homo sapien
ccttttcagcagaatttgttggatg

SEQ ID NO: 5269959 - DNA, 25 bp, Homo sapien
tttaaaatccagccccatgttcttc

SEQ ID NO: 5269960 - DNA, 25 bp, Homo sapien
ttggctggttgcaggcattgttctg

SEQ ID NO: 5269961 - DNA, 25 bp, Homo sapien
ccaagggggctttctgtgcagatac

SEQ ID NO: 5269962 - DNA, 25 bp, Homo sapien
tagggagtacttcagaacccaggta

SEQ ID NO: 5269963 - DNA, 25 bp, Homo sapien
cacaggcaactgttgagttttaggg

SEQ ID NO: 5269964 - DNA, 25 bp, Homo sapien
catgccagggccacaaatccaaggg

SEQ ID NO: 5269965 - DNA, 25 bp, Homo sapien
tggagggcgtcgtgcccatcagagc

SEQ ID NO: 5269966 - DNA, 25 bp, Homo sapien
gcaactgcagaattgccaagacctg

SEQ ID NO: 5269967 - DNA, 25 bp, Homo sapien
agtgtggagggcgtcgtgcccatca

SEQ ID NO: 5269968 - DNA, 25 bp, Homo sapien
cagaacattgttttttatgtggcaa

SEQ ID NO: 5269969 - DNA, 25 bp, Homo sapien
aacagttttgcatcaagcagtttct

SEQ ID NO: 5269970 - DNA, 25 bp, Homo sapien
ctttggaaacagttttgcatcaagc

SEQ ID NO: 5269971 - DNA, 25 bp, Homo sapien
ggaaacagttttgcatcaagcagtt

SEQ ID NO: 5269972 - DNA, 25 bp, Homo sapien
catcaagcagtttctgggtctttac

SEQ ID NO: 5269973 - DNA, 25 bp, Homo sapien
ttcattggcggcttcccaagcgtca

SEQ ID NO: 5269974 - DNA, 25 bp, Homo sapien
tgagtgctgaagagatgttaaggca

SEQ ID NO: 5269975 - DNA, 25 bp, Homo sapien
gcaggcaagcattgccccacctggg

SEQ ID NO: 5269976 - DNA, 25 bp, Homo sapien
ggcacttttcattggcggcttccca

SEQ ID NO: 5269977 - DNA, 25 bp, Homo sapien
accatcacgttgtcaccgagagctg

SEQ ID NO: 5269978 - DNA, 25 bp, Homo sapien
gatcctgtaggacaacaagcacgcc

SEQ ID NO: 5269979 - DNA, 25 bp, Homo sapien
tcttcacagaatgtggagtccgtga

SEQ ID NO: 5269980 - DNA, 25 bp, Homo sapien
gaggcggcccttgtccttagcatga

SEQ ID NO: 5269981 - DNA, 25 bp, Homo sapien
gtccctcagggagagttgctgttcc

SEQ ID NO: 5269982 - DNA, 25 bp, Homo sapien
tccctcagggagagttgctgttcca

SEQ ID NO: 5269983 - DNA, 25 bp, Homo sapien
ccctcagggagagttgctgttccat

SEQ ID NO: 5269984 - DNA, 25 bp, Homo sapien
gagactcaataaacctaaaacagct

SEQ ID NO: 5269985 - DNA, 25 bp, Homo sapien
taaaacagctgtctcgcacgcagtg

SEQ ID NO: 5269986 - DNA, 25 bp, Homo sapien
ctctgagaggtgcattttgctttga

SEQ ID NO: 5269987 - DNA, 25 bp, Homo sapien
gtggtgacccgaagtggagactcaa

SEQ ID NO: 5269988 - DNA, 25 bp, Homo sapien
ctctatactctttctctcacagatg

SEQ ID NO: 5269989 - DNA, 25 bp, Homo sapien
aagctgatactacatctttgcagcc

SEQ ID NO: 5269990 - DNA, 25 bp, Homo sapien
gaagtttatcaaaagctgatactac

SEQ ID NO: 5269991 - DNA, 25 bp, Homo sapien
tgctaaaaaccttatgaagtttatc

SEQ ID NO: 5269992 - DNA, 25 bp, Homo sapien
ccatgcatggggagcaacagctaga

SEQ ID NO: 5269993 - DNA, 25 bp, Homo sapien
catgcatggggagcaacagctagag

SEQ ID NO: 5269994 - DNA, 25 bp, Homo sapien
agcccaggagaacccccatgcatgg

SEQ ID NO: 5269995 - DNA, 25 bp, Homo sapien
gcatggggagcaacagctagaggca

SEQ ID NO: 5269996 - DNA, 25 bp, Homo sapien
acctcatgtccgcagacttctctat

SEQ ID NO: 5269997 - DNA, 25 bp, Homo sapien
tccgcagacttctctatcgttgaga

SEQ ID NO: 5269998 - DNA, 25 bp, Homo sapien
tgcattgccaacaccgacctcatgt

SEQ ID NO: 5269999 - DNA, 25 bp, Homo sapien
gggacgaacctgtgcattgccaaca

SEQ ID NO: 5270000 - DNA, 25 bp, Homo sapien
tcactttcacaactgctatgaccat

SEQ ID NO: 5270001 - DNA, 25 bp, Homo sapien
ttcactttcacaactgctatgacca

SEQ ID NO: 5270002 - DNA, 25 bp, Homo sapien
cattcactttcacaactgctatgac

SEQ ID NO: 5270003 - DNA, 25 bp, Homo sapien
gtccattcactttcacaactgctat

SEQ ID NO: 5270004 - DNA, 25 bp, Homo sapien
tttcacagtgctcattttttcaata

SEQ ID NO: 5270005 - DNA, 25 bp, Homo sapien
ttttcacagtgctcattttttcaat

SEQ ID NO: 5270006 - DNA, 25 bp, Homo sapien
cttttcacagtgctcattttttcaa

SEQ ID NO: 5270007 - DNA, 25 bp, Homo sapien
agctgaacgctcctctctgcgcaat

SEQ ID NO: 5270008 - DNA, 25 bp, Homo sapien
aagctgaacgctcctctctgcgcaa

SEQ ID NO: 5270009 - DNA, 25 bp, Homo sapien
gctgaacgctcctctctgcgcaatg

SEQ ID NO: 5270010 - DNA, 25 bp, Homo sapien
caagctgaacgctcctctctgcgca

SEQ ID NO: 5270011 - DNA, 25 bp, Homo sapien
tctgagggacgctcccatcatgtgg

SEQ ID NO: 5270012 - DNA, 25 bp, Homo sapien
tgcttcttcataggcaagggcagag

SEQ ID NO: 5270013 - DNA, 25 bp, Homo sapien
gaccctgggtccactctgagggacg

SEQ ID NO: 5270014 - DNA, 25 bp, Homo sapien
caccttctgcacgtagtgggggaga

SEQ ID NO: 5270015 - DNA, 25 bp, Homo sapien
agtggagctgaagactttttgaagc

SEQ ID NO: 5270016 - DNA, 25 bp, Homo sapien
gagtggagctgaagactttttgaag

SEQ ID NO: 5270017 - DNA, 25 bp, Homo sapien
acagcttcgtggcaagaggttctct

SEQ ID NO: 5270018 - DNA, 25 bp, Homo sapien
tcgcttgcttggacagcttcgtggc

SEQ ID NO: 5270019 - DNA, 25 bp, Homo sapien
tcttcaccaccagctatgattcctt

SEQ ID NO: 5270020 - DNA, 25 bp, Homo sapien
tgcttggacagcttcgtggcaagag

SEQ ID NO: 5270021 - DNA, 25 bp, Homo sapien
ggaaaagacggcaaaggaaatcaca

SEQ ID NO: 5270022 - DNA, 25 bp, Homo sapien
gtattggaaatgagggaacaactcc

SEQ ID NO: 5270023 - DNA, 25 bp, Homo sapien
aaattaaactctggtgcagcctagc

SEQ ID NO: 5270024 - DNA, 25 bp, Homo sapien
catgggtatgctatcacttgccgct

SEQ ID NO: 5270025 - DNA, 25 bp, Homo sapien
cctggttatgttcagagctggcgca

SEQ ID NO: 5270026 - DNA, 25 bp, Homo sapien
caagtactgaaggtgttgggcaccc

SEQ ID NO: 5270027 - DNA, 25 bp, Homo sapien
gacttgacctggtaagaacacccca

SEQ ID NO: 5270028 - DNA, 25 bp, Homo sapien
gaagccgagtgtggatgcacctgca

SEQ ID NO: 5270029 - DNA, 25 bp, Homo sapien
aagaaaggcagtcccgcagagacag

SEQ ID NO: 5270030 - DNA, 25 bp, Homo sapien
gaaagccgttgttcgtgtgcatatg

SEQ ID NO: 5270031 - DNA, 25 bp, Homo sapien
gccaagggtcatcaacgagtgacca

SEQ ID NO: 5270032 - DNA, 25 bp, Homo sapien
cctccatacaaccagagccaagggt

SEQ ID NO: 5270033 - DNA, 25 bp, Homo sapien
agctctgcccagaccaagggctcgc

SEQ ID NO: 5270034 - DNA, 25 bp, Homo sapien
gctgctcagtgacttcgacaggtaa

SEQ ID NO: 5270035 - DNA, 25 bp, Homo sapien
cagtgacttcgacaggtaatgcctt

SEQ ID NO: 5270036 - DNA, 25 bp, Homo sapien
gacttcgacaggtaatgccttcctt

SEQ ID NO: 5270037 - DNA, 25 bp, Homo sapien
aatcaatctttgcaccagtgaaagc

SEQ ID NO: 5270038 - DNA, 25 bp, Homo sapien
caatctttgcaccagtgaaagctct

SEQ ID NO: 5270039 - DNA, 25 bp, Homo sapien
atctttgcaccagtgaaagctcttc

SEQ ID NO: 5270040 - DNA, 25 bp, Homo sapien
tcaatctttgcaccagtgaaagctc

SEQ ID NO: 5270041 - DNA, 25 bp, Homo sapien
cagcctcttaatccccctacagagc

SEQ ID NO: 5270042 - DNA, 25 bp, Homo sapien
taactgccgtttcctgggcttgctc

SEQ ID NO: 5270043 - DNA, 25 bp, Homo sapien
ttaactgccgtttcctgggcttgct

SEQ ID NO: 5270044 - DNA, 25 bp, Homo sapien
aactgccgtttcctgggcttgctcc

SEQ ID NO: 5270045 - DNA, 25 bp, Homo sapien
ccttaactgccgtttcctgggcttg

SEQ ID NO: 5270046 - DNA, 25 bp, Homo sapien
gggtgacacgatgtttcctcgtcct

SEQ ID NO: 5270047 - DNA, 25 bp, Homo sapien
gactggcacaagacgctgaaatcca

SEQ ID NO: 5270048 - DNA, 25 bp, Homo sapien
tcgtcctctggtatcccactggttg

SEQ ID NO: 5270049 - DNA, 25 bp, Homo sapien
gaccagaaatcactcaatctggaag

SEQ ID NO: 5270050 - DNA, 25 bp, Homo sapien
cgggcatgggtgctacagaatcact

SEQ ID NO: 5270051 - DNA, 25 bp, Homo sapien
tcttgccacagtgcgtgcgggcatg

SEQ ID NO: 5270052 - DNA, 25 bp, Homo sapien
gaatcactgcccgttagaacccagg

SEQ ID NO: 5270053 - DNA, 25 bp, Homo sapien
taaagctccgtcaagatggctcctg

SEQ ID NO: 5270054 - DNA, 25 bp, Homo sapien
gcccattttgctaaagcggagcccc

SEQ ID NO: 5270055 - DNA, 25 bp, Homo sapien
aagcggagcccccagttactgaaca

SEQ ID NO: 5270056 - DNA, 25 bp, Homo sapien
cagttactgaacacggaggcaccat

SEQ ID NO: 5270057 - DNA, 25 bp, Homo sapien
ggagcccccagttactgaacacgga

SEQ ID NO: 5270058 - DNA, 25 bp, Homo sapien
ctatcagtcactgcgtgggagccaa

SEQ ID NO: 5270059 - DNA, 25 bp, Homo sapien
catgggaataactcccggatttcca

SEQ ID NO: 5270060 - DNA, 25 bp, Homo sapien
ccagcctgcagatctttggcccaag

SEQ ID NO: 5270061 - DNA, 25 bp, Homo sapien
tttccaaaggctctatcagtcactg

SEQ ID NO: 5270062 - DNA, 25 bp, Homo sapien
tgaaatcacctattaccgtagagtt

SEQ ID NO: 5270063 - DNA, 25 bp, Homo sapien
gaaatcacctattaccgtagagttc

SEQ ID NO: 5270064 - DNA, 25 bp, Homo sapien
aatcacctattaccgtagagttcat

SEQ ID NO: 5270065 - DNA, 25 bp, Homo sapien
ctgaaatcacctattaccgtagagt

SEQ ID NO: 5270066 - DNA, 25 bp, Homo sapien
cccaaagaagaggacatagggcttg

SEQ ID NO: 5270067 - DNA, 25 bp, Homo sapien
agcagcacgagctgcagtttgcaaa

SEQ ID NO: 5270068 - DNA, 25 bp, Homo sapien
cagccctggacacttccaatgcagg

SEQ ID NO: 5270069 - DNA, 25 bp, Homo sapien
ggccatgagcggatgctggtgccca

SEQ ID NO: 5270070 - DNA, 25 bp, Homo sapien
taatgataatactgcttgttgccaa

SEQ ID NO: 5270071 - DNA, 25 bp, Homo sapien
tcagagactgagacaaaggtttgtt

SEQ ID NO: 5270072 - DNA, 25 bp, Homo sapien
aaagagtgcccttcgctgggagaca

SEQ ID NO: 5270073 - DNA, 25 bp, Homo sapien
tataattcatacttgtcagagactg

SEQ ID NO: 5270074 - DNA, 25 bp, Homo sapien
ctgctggtaccgcatgccaccatat

SEQ ID NO: 5270075 - DNA, 25 bp, Homo sapien
ctactgctggtaccgcatgccacca

SEQ ID NO: 5270076 - DNA, 25 bp, Homo sapien
actgctggtaccgcatgccaccata

SEQ ID NO: 5270077 - DNA, 25 bp, Homo sapien
tactgctggtaccgcatgccaccat

SEQ ID NO: 5270078 - DNA, 25 bp, Homo sapien
ggaagtgatttcctaccctgcgctc

SEQ ID NO: 5270079 - DNA, 25 bp, Homo sapien
cagttttggacgtgagcgttgtgaa

SEQ ID NO: 5270080 - DNA, 25 bp, Homo sapien
ccctggtggactgacacgggcagtt

SEQ ID NO: 5270081 - DNA, 25 bp, Homo sapien
cctgcgctcggtagacacgtttaaa

SEQ ID NO: 5270082 - DNA, 25 bp, Homo sapien
aaaattcgcgtaagttcctctgagg

SEQ ID NO: 5270083 - DNA, 25 bp, Homo sapien
tgaggatctacaacccgcatttttt

SEQ ID NO: 5270084 - DNA, 25 bp, Homo sapien
acagagaagagaatgtgccgtggct

SEQ ID NO: 5270085 - DNA, 25 bp, Homo sapien
ttttatttatctctgtgaaggatgc

SEQ ID NO: 5270086 - DNA, 25 bp, Homo sapien
agcactaggaacccaaagggccctg

SEQ ID NO: 5270087 - DNA, 25 bp, Homo sapien
cagagcactaggaacccaaagggcc

SEQ ID NO: 5270088 - DNA, 25 bp, Homo sapien
cagcagagcactaggaacccaaagg

SEQ ID NO: 5270089 - DNA, 25 bp, Homo sapien
cactaggaacccaaagggccctgtg

SEQ ID NO: 5270090 - DNA, 25 bp, Homo sapien
gagggcgtctttgtgacttgaacca

SEQ ID NO: 5270091 - DNA, 25 bp, Homo sapien
tcaggcactgtcaggaggcgtctcg

SEQ ID NO: 5270092 - DNA, 25 bp, Homo sapien
gcagagggcgtctttgtgacttgaa

SEQ ID NO: 5270093 - DNA, 25 bp, Homo sapien
tgaagcgaagccgtcaggcactgtc

SEQ ID NO: 5270094 - DNA, 25 bp, Homo sapien
cacactgtttggggaagatgctttt

SEQ ID NO: 5270095 - DNA, 25 bp, Homo sapien
cttgcgcacacactgtttggggaag

SEQ ID NO: 5270096 - DNA, 25 bp, Homo sapien
gcacacactgtttggggaagatgct

SEQ ID NO: 5270097 - DNA, 25 bp, Homo sapien
gggaagatgctttttctgatacttt

SEQ ID NO: 5270098 - DNA, 25 bp, Homo sapien
tgaaagttggttctctcaggcccct

SEQ ID NO: 5270099 - DNA, 25 bp, Homo sapien
tatacaatgagaatcatgagaatca

SEQ ID NO: 5270100 - DNA, 25 bp, Homo sapien
cgtgcgtcacaaaatgttatacaat

SEQ ID NO: 5270101 - DNA, 25 bp, Homo sapien
gaatcaaagaaatcatgccggaagg

SEQ ID NO: 5270102 - DNA, 25 bp, Homo sapien
gaacatatatttggaatccttccaa

SEQ ID NO: 5270103 - DNA, 25 bp, Homo sapien
tgccactgagcttgtcaccgtggag

SEQ ID NO: 5270104 - DNA, 25 bp, Homo sapien
ttggagcccatctgcgtgtgccagg

SEQ ID NO: 5270105 - DNA, 25 bp, Homo sapien
aggcaggccccttttgatccactgc

SEQ ID NO: 5270106 - DNA, 25 bp, Homo sapien
gttgatgagcgggacctctctgctt

SEQ ID NO: 5270107 - DNA, 25 bp, Homo sapien
ggaatgttgatgagcgggacctctc

SEQ ID NO: 5270108 - DNA, 25 bp, Homo sapien
tggatagccaactttgatggtaagc

SEQ ID NO: 5270109 - DNA, 25 bp, Homo sapien
ctttgatggtaagcaggctgcagag

SEQ ID NO: 5270110 - DNA, 25 bp, Homo sapien
tcccaataggacctgcccaatttca

SEQ ID NO: 5270111 - DNA, 25 bp, Homo sapien
tgttcctcccaataggacctgccca

SEQ ID NO: 5270112 - DNA, 25 bp, Homo sapien
acctgttcctcccaataggacctgc

SEQ ID NO: 5270113 - DNA, 25 bp, Homo sapien
tttgccttcccactttgcagagtct

SEQ ID NO: 5270114 - DNA, 25 bp, Homo sapien
aggaagagccctgcttgatttatga

SEQ ID NO: 5270115 - DNA, 25 bp, Homo sapien
gatttatgaaggtgttgctgtaacc

SEQ ID NO: 5270116 - DNA, 25 bp, Homo sapien
aaggtgttgctgtaacctgatgacc

SEQ ID NO: 5270117 - DNA, 25 bp, Homo sapien
gtaacctgatgacctgaagacacca

SEQ ID NO: 5270118 - DNA, 25 bp, Homo sapien
ctcaatattacttctaaaccttcgc

SEQ ID NO: 5270119 - DNA, 25 bp, Homo sapien
tcttctcaatattacttctaaacct

SEQ ID NO: 5270120 - DNA, 25 bp, Homo sapien
caatattacttctaaaccttcgctg

SEQ ID NO: 5270121 - DNA, 25 bp, Homo sapien
tattacttctaaaccttcgctgttc

SEQ ID NO: 5270122 - DNA, 25 bp, Homo sapien
gcagttcctgttacacctgctttct

SEQ ID NO: 5270123 - DNA, 25 bp, Homo sapien
cagttcctgttacacctgctttctg

SEQ ID NO: 5270124 - DNA, 25 bp, Homo sapien
cactcaggatctccggtctgacatc

SEQ ID NO: 5270125 - DNA, 25 bp, Homo sapien
tggacactcaggatctccggtctga

SEQ ID NO: 5270126 - DNA, 25 bp, Homo sapien
aggatctccggtctgacatcgtggg

SEQ ID NO: 5270127 - DNA, 25 bp, Homo sapien
gctggacactcaggatctccggtct

SEQ ID NO: 5270128 - DNA, 25 bp, Homo sapien
tgtcagctcctcgagaagactctgc

SEQ ID NO: 5270129 - DNA, 25 bp, Homo sapien
caaagctccagtatcaatatctgta

SEQ ID NO: 5270130 - DNA, 25 bp, Homo sapien
tctttaatcttgaggtcaggtggtc

SEQ ID NO: 5270131 - DNA, 25 bp, Homo sapien
ggtcaggtggtctggcaaagctcca

SEQ ID NO: 5270132 - DNA, 25 bp, Homo sapien
tcaacactgttgatgggccttggac

SEQ ID NO: 5270133 - DNA, 25 bp, Homo sapien
aaaggaggtgcatgcattccagcca

SEQ ID NO: 5270134 - DNA, 25 bp, Homo sapien
taacaagtccgtttccatgcagtgt

SEQ ID NO: 5270135 - DNA, 25 bp, Homo sapien
gcttgaagagggagccaaaaggagg

SEQ ID NO: 5270136 - DNA, 25 bp, Homo sapien
gtggcatcctgtttgttctctcttc

SEQ ID NO: 5270137 - DNA, 25 bp, Homo sapien
tcaaattgcgcagctgtggcatcct

SEQ ID NO: 5270138 - DNA, 25 bp, Homo sapien
cttcaaattgcgcagctgtggcatc

SEQ ID NO: 5270139 - DNA, 25 bp, Homo sapien
agctgtggcatcctgtttgttctct

SEQ ID NO: 5270140 - DNA, 25 bp, Homo sapien
catacctaatatctgttcctccact

SEQ ID NO: 5270141 - DNA, 25 bp, Homo sapien
ttcatacctaatatctgttcctcca

SEQ ID NO: 5270142 - DNA, 25 bp, Homo sapien
ccactcctgtggtgtcgtggagtga

SEQ ID NO: 5270143 - DNA, 25 bp, Homo sapien
tcctccactcctgtggtgtcgtgga

SEQ ID NO: 5270144 - DNA, 25 bp, Homo sapien
tgggtctcctctgtagttgctggac

SEQ ID NO: 5270145 - DNA, 25 bp, Homo sapien
gtctcctctgtagttgctggacggt

SEQ ID NO: 5270146 - DNA, 25 bp, Homo sapien
gacggtgttctgagcaaatccaatt

SEQ ID NO: 5270147 - DNA, 25 bp, Homo sapien
agttgctggacggtgttctgagcaa

SEQ ID NO: 5270148 - DNA, 25 bp, Homo sapien
tcattcgttttcaaagctgacactc

SEQ ID NO: 5270149 - DNA, 25 bp, Homo sapien
cattcgttttcaaagctgacactca

SEQ ID NO: 5270150 - DNA, 25 bp, Homo sapien
ttcgttttcaaagctgacactcata

SEQ ID NO: 5270151 - DNA, 25 bp, Homo sapien
tcgttttcaaagctgacactcatac

SEQ ID NO: 5270152 - DNA, 25 bp, Homo sapien
gaagcctgtttgaattcggatggtt

SEQ ID NO: 5270153 - DNA, 25 bp, Homo sapien
tgaattcggatggttgggttgacct

SEQ ID NO: 5270154 - DNA, 25 bp, Homo sapien
cctgtttgaattcggatggttgggt

SEQ ID NO: 5270155 - DNA, 25 bp, Homo sapien
tttgaattcggatggttgggttgac

SEQ ID NO: 5270156 - DNA, 25 bp, Homo sapien
gagccatgatgcaccagcacatttg

SEQ ID NO: 5270157 - DNA, 25 bp, Homo sapien
ggaaatcgccggctgctgtttgcct

SEQ ID NO: 5270158 - DNA, 25 bp, Homo sapien
gcacatttggtgaagccgagctgga

SEQ ID NO: 5270159 - DNA, 25 bp, Homo sapien
gccaacagccatgcaataagagcca

SEQ ID NO: 5270160 - DNA, 25 bp, Homo sapien
tactgtttccgtggttccctctctc

SEQ ID NO: 5270161 - DNA, 25 bp, Homo sapien
tgtgacacgtggtgtccccacgggt

SEQ ID NO: 5270162 - DNA, 25 bp, Homo sapien
tcgcactgcggcataaaagccagcc

SEQ ID NO: 5270163 - DNA, 25 bp, Homo sapien
taaaagccagccacgcagtgtgaca

SEQ ID NO: 5270164 - DNA, 25 bp, Homo sapien
agtctgcctttaatggttgacatgc

SEQ ID NO: 5270165 - DNA, 25 bp, Homo sapien
tggttgacatgctgcaaggttcatc

SEQ ID NO: 5270166 - DNA, 25 bp, Homo sapien
gacatgctgcaaggttcatccctct

SEQ ID NO: 5270167 - DNA, 25 bp, Homo sapien
tgcaaggttcatccctctcacaact

SEQ ID NO: 5270168 - DNA, 25 bp, Homo sapien
cagcctcctgctctcaaatcctttc

SEQ ID NO: 5270169 - DNA, 25 bp, Homo sapien
gcctactttatcctttttatgttga

SEQ ID NO: 5270170 - DNA, 25 bp, Homo sapien
ttgactttgtcaacaaatgcgctcc

SEQ ID NO: 5270171 - DNA, 25 bp, Homo sapien
cattaggccccaggctatacaacct

SEQ ID NO: 5270172 - DNA, 25 bp, Homo sapien
taggcaaacctacccatcctgtttg

SEQ ID NO: 5270173 - DNA, 25 bp, Homo sapien
ggtaagatgccgagttgcaaacgcc

SEQ ID NO: 5270174 - DNA, 25 bp, Homo sapien
tgcggtaagacctccgggattccaa

SEQ ID NO: 5270175 - DNA, 25 bp, Homo sapien
agttgcaaacgccaggtcctcctgc

SEQ ID NO: 5270176 - DNA, 25 bp, Homo sapien
gaccctggaggctatgcggtaagac

SEQ ID NO: 5270177 - DNA, 25 bp, Homo sapien
ggattcgttctcctgcgaaggtgta

SEQ ID NO: 5270178 - DNA, 25 bp, Homo sapien
gttctcctgcgaaggtgtatgggac

SEQ ID NO: 5270179 - DNA, 25 bp, Homo sapien
acacttcacgatcccatccctcagc

SEQ ID NO: 5270180 - DNA, 25 bp, Homo sapien
tctggcttaggccaagggattcgtt

SEQ ID NO: 5270181 - DNA, 25 bp, Homo sapien
ctcttttataggtagaactcgagag

SEQ ID NO: 5270182 - DNA, 25 bp, Homo sapien
aactcgagagttgtcttggttgctc

SEQ ID NO: 5270183 - DNA, 25 bp, Homo sapien
tacagagccagtgattggacactct

SEQ ID NO: 5270184 - DNA, 25 bp, Homo sapien
agaagaactggatgcatcttggtcc

SEQ ID NO: 5270185 - DNA, 25 bp, Homo sapien
ggtgtcactacgaggatacctctgc

SEQ ID NO: 5270186 - DNA, 25 bp, Homo sapien
aaagcaaggtggattcgatgtctca

SEQ ID NO: 5270187 - DNA, 25 bp, Homo sapien
caagcgggctgtgggacatttgcca

SEQ ID NO: 5270188 - DNA, 25 bp, Homo sapien
tatagtatccgcttgtgcgggtcga

SEQ ID NO: 5270189 - DNA, 25 bp, Homo sapien
cagccttacagatgttgctcgtggc

SEQ ID NO: 5270190 - DNA, 25 bp, Homo sapien
gttgctcgtggccactacagccagc

SEQ ID NO: 5270191 - DNA, 25 bp, Homo sapien
tgttgctcgtggccactacagccag

SEQ ID NO: 5270192 - DNA, 25 bp, Homo sapien
agccttacagatgttgctcgtggcc

SEQ ID NO: 5270193 - DNA, 25 bp, Homo sapien
gggccatctgtcctgtggaccccat

SEQ ID NO: 5270194 - DNA, 25 bp, Homo sapien
tcccatagcgcaggtttgtcagctt

SEQ ID NO: 5270195 - DNA, 25 bp, Homo sapien
tacgaagccataggagcacttctca

SEQ ID NO: 5270196 - DNA, 25 bp, Homo sapien
gctgtggttgctccagggtctatga

SEQ ID NO: 5270197 - DNA, 25 bp, Homo sapien
ccttcaggtctcagtcgaagagtcc

SEQ ID NO: 5270198 - DNA, 25 bp, Homo sapien
gtagcagaattggatgtacccggcc

SEQ ID NO: 5270199 - DNA, 25 bp, Homo sapien
ggcccaagtcgcgtgccttgtcagc

SEQ ID NO: 5270200 - DNA, 25 bp, Homo sapien
gagtccttttgactctcaaatgagg

SEQ ID NO: 5270201 - DNA, 25 bp, Homo sapien
ggccatgtcggggatgcaagatatt

SEQ ID NO: 5270202 - DNA, 25 bp, Homo sapien
tgtgaggcggccatgtcggggatgc

SEQ ID NO: 5270203 - DNA, 25 bp, Homo sapien
gtcggggatgcaagatatttgtctc

SEQ ID NO: 5270204 - DNA, 25 bp, Homo sapien
gaggcggccatgtcggggatgcaag

SEQ ID NO: 5270205 - DNA, 25 bp, Homo sapien
ttaaatcagctaatacagctctggc

SEQ ID NO: 5270206 - DNA, 25 bp, Homo sapien
ggaattaaatcagctaatacagctc

SEQ ID NO: 5270207 - DNA, 25 bp, Homo sapien
tgaaaggaattaaatcagctaatac

SEQ ID NO: 5270208 - DNA, 25 bp, Homo sapien
tgtgaatgtgaaaggaattaaatca

SEQ ID NO: 5270209 - DNA, 25 bp, Homo sapien
tatgctcctaatggccgcccccggc

SEQ ID NO: 5270210 - DNA, 25 bp, Homo sapien
cagctcgctgtcttgtttattgaag

SEQ ID NO: 5270211 - DNA, 25 bp, Homo sapien
tgctatgtggatttgtagggttgtt

SEQ ID NO: 5270212 - DNA, 25 bp, Homo sapien
tgtggatttgtagggttgttaccaa

SEQ ID NO: 5270213 - DNA, 25 bp, Homo sapien
gcttcgtaatggagtgaaggactca

SEQ ID NO: 5270214 - DNA, 25 bp, Homo sapien
tacagtagcctaaaaacctggccag

SEQ ID NO: 5270215 - DNA, 25 bp, Homo sapien
aaagaagccactcctgtttacaggc

SEQ ID NO: 5270216 - DNA, 25 bp, Homo sapien
ggtgctacataaaccacactctaag

SEQ ID NO: 5270217 - DNA, 25 bp, Homo sapien
gtggccggtgctctagctgttgcat

SEQ ID NO: 5270218 - DNA, 25 bp, Homo sapien
tcctggatgtgctgtggccggtgct

SEQ ID NO: 5270219 - DNA, 25 bp, Homo sapien
gattcctggatgtgctgtggccggt

SEQ ID NO: 5270220 - DNA, 25 bp, Homo sapien
ctgtggccggtgctctagctgttgc

SEQ ID NO: 5270221 - DNA, 25 bp, Homo sapien
ctaagcggtgagtggactggaaatc

SEQ ID NO: 5270222 - DNA, 25 bp, Homo sapien
aatctaaggaggaagttgccgttag

SEQ ID NO: 5270223 - DNA, 25 bp, Homo sapien
gttttctcaacaatcgcagatgctt

SEQ ID NO: 5270224 - DNA, 25 bp, Homo sapien
tggaaatctaaggaggaagttgccg

SEQ ID NO: 5270225 - DNA, 25 bp, Homo sapien
gggggttccgcagcatggacccagc

SEQ ID NO: 5270226 - DNA, 25 bp, Homo sapien
gggttccgcagcatggacccagcgc

SEQ ID NO: 5270227 - DNA, 25 bp, Homo sapien
gttccgcagcatggacccagcgctg

SEQ ID NO: 5270228 - DNA, 25 bp, Homo sapien
ttccgcagcatggacccagcgctgg

SEQ ID NO: 5270229 - DNA, 25 bp, Homo sapien
tagaccgaaaataagacctttgcca

SEQ ID NO: 5270230 - DNA, 25 bp, Homo sapien
tcggcctctaaaacgccacttgatt

SEQ ID NO: 5270231 - DNA, 25 bp, Homo sapien
agcacttccgacatcctagaccgaa

SEQ ID NO: 5270232 - DNA, 25 bp, Homo sapien
agaagctttccgtggaaagccagca

SEQ ID NO: 5270233 - DNA, 25 bp, Homo sapien
atgcccaggggcgagtgccttccag

SEQ ID NO: 5270234 - DNA, 25 bp, Homo sapien
cctgtgctgaaagcctgcaatctga

SEQ ID NO: 5270235 - DNA, 25 bp, Homo sapien
gccttccatgagatgcccggggctg

SEQ ID NO: 5270236 - DNA, 25 bp, Homo sapien
cagggatcaacatttgggctgactt

SEQ ID NO: 5270237 - DNA, 25 bp, Homo sapien
ccctgctccggaggtggtgttctga

SEQ ID NO: 5270238 - DNA, 25 bp, Homo sapien
tctaaaacttcctcggacagccacg

SEQ ID NO: 5270239 - DNA, 25 bp, Homo sapien
gaggagccggagagaatcccgtctc

SEQ ID NO: 5270240 - DNA, 25 bp, Homo sapien
ggctggtagagccatgttcgtctct

SEQ ID NO: 5270241 - DNA, 25 bp, Homo sapien
caagtggtttataatgttgctgaga

SEQ ID NO: 5270242 - DNA, 25 bp, Homo sapien
tttgaaaatgggatgacggcagtct

SEQ ID NO: 5270243 - DNA, 25 bp, Homo sapien
atgttcttcacagaccagggaggtg

SEQ ID NO: 5270244 - DNA, 25 bp, Homo sapien
tgttcccaactacaggcaacgcagt

SEQ ID NO: 5270245 - DNA, 25 bp, Homo sapien
tgccctgtagacaaagtccccagag

SEQ ID NO: 5270246 - DNA, 25 bp, Homo sapien
atccctgggattgccaccactgact

SEQ ID NO: 5270247 - DNA, 25 bp, Homo sapien
tgtgtgttgcagcagacttgtgctc

SEQ ID NO: 5270248 - DNA, 25 bp, Homo sapien
cctctgctccgatgttggccctgaa

SEQ ID NO: 5270249 - DNA, 25 bp, Homo sapien
agtccattccgttccccatggctgg

SEQ ID NO: 5270250 - DNA, 25 bp, Homo sapien
ccatggctggtgctttgcatcttgt

SEQ ID NO: 5270251 - DNA, 25 bp, Homo sapien
tcagtccattccgttccccatggct

SEQ ID NO: 5270252 - DNA, 25 bp, Homo sapien
ggctggtgctttgcatcttgtcttt

SEQ ID NO: 5270253 - DNA, 25 bp, Homo sapien
ccatgtgctgcaagcctggattctc

SEQ ID NO: 5270254 - DNA, 25 bp, Homo sapien
tccatgtgctgcaagcctggattct

SEQ ID NO: 5270255 - DNA, 25 bp, Homo sapien
catgtgctgcaagcctggattctca

SEQ ID NO: 5270256 - DNA, 25 bp, Homo sapien
tgtgctgcaagcctggattctcatt

SEQ ID NO: 5270257 - DNA, 25 bp, Homo sapien
taaccagcccagattcccctttgct

SEQ ID NO: 5270258 - DNA, 25 bp, Homo sapien
tattgccccataaccagcccagatt

SEQ ID NO: 5270259 - DNA, 25 bp, Homo sapien
tcaatattgccccataaccagccca

SEQ ID NO: 5270260 - DNA, 25 bp, Homo sapien
tcctcaatattgccccataaccagc

SEQ ID NO: 5270261 - DNA, 25 bp, Homo sapien
agtcacctgcatcaccagatgtccc

SEQ ID NO: 5270262 - DNA, 25 bp, Homo sapien
cagtcacctgcatcaccagatgtcc

SEQ ID NO: 5270263 - DNA, 25 bp, Homo sapien
atatctgcatcactggatgcatatc

SEQ ID NO: 5270264 - DNA, 25 bp, Homo sapien
agttccctccggtctgctactgctg

SEQ ID NO: 5270265 - DNA, 25 bp, Homo sapien
tcacagttccctccggtctgctact

SEQ ID NO: 5270266 - DNA, 25 bp, Homo sapien
gagagacaggagctccacgcaggat

SEQ ID NO: 5270267 - DNA, 25 bp, Homo sapien
tgctgctgtaccaggtgccgtcacc

SEQ ID NO: 5270268 - DNA, 25 bp, Homo sapien
gcatctgcatgcgtgtgatatcaca

SEQ ID NO: 5270269 - DNA, 25 bp, Homo sapien
aagagcgttcttcttgccgcggagc

SEQ ID NO: 5270270 - DNA, 25 bp, Homo sapien
ggatttgcatctgcatgcgtgtgat

SEQ ID NO: 5270271 - DNA, 25 bp, Homo sapien
cgcggagcctgccagacgtggattt

SEQ ID NO: 5270272 - DNA, 25 bp, Homo sapien
cttggtgcttctctccacttcacaa

SEQ ID NO: 5270273 - DNA, 25 bp, Homo sapien
gcttctctccacttcacaaaactct

SEQ ID NO: 5270274 - DNA, 25 bp, Homo sapien
ggtgcttctctccacttcacaaaac

SEQ ID NO: 5270275 - DNA, 25 bp, Homo sapien
ttctctccacttcacaaaactctgt

SEQ ID NO: 5270276 - DNA, 25 bp, Homo sapien
gctctggatcccaccacggagattc

SEQ ID NO: 5270277 - DNA, 25 bp, Homo sapien
caaatgcattcgtttccagaactcc

SEQ ID NO: 5270278 - DNA, 25 bp, Homo sapien
gggcttggccaagatacaagctctg

SEQ ID NO: 5270279 - DNA, 25 bp, Homo sapien
tcttgaagcaggagaaccttcagtg

SEQ ID NO: 5270280 - DNA, 25 bp, Homo sapien
tagtttgatggtagcctcgtcggta

SEQ ID NO: 5270281 - DNA, 25 bp, Homo sapien
cagatgactgcgcttctgcatgtgt

SEQ ID NO: 5270282 - DNA, 25 bp, Homo sapien
ctcgtcggtatctttgccaagcaga

SEQ ID NO: 5270283 - DNA, 25 bp, Homo sapien
ggtgttgttgttggatggctcccca

SEQ ID NO: 5270284 - DNA, 25 bp, Homo sapien
cagattctagagtatgtgttcacac

SEQ ID NO: 5270285 - DNA, 25 bp, Homo sapien
gagcactgctctttcgcagagtttg

SEQ ID NO: 5270286 - DNA, 25 bp, Homo sapien
gatgagtgcttcaggcggtattctc

SEQ ID NO: 5270287 - DNA, 25 bp, Homo sapien
gttcatcgtacaagacagatctgca

SEQ ID NO: 5270288 - DNA, 25 bp, Homo sapien
gcgtggagacccgcaccatagtgct

SEQ ID NO: 5270289 - DNA, 25 bp, Homo sapien
cccagcgtggagacccgcaccatag

SEQ ID NO: 5270290 - DNA, 25 bp, Homo sapien
gtggagacccgcaccatagtgctgg

SEQ ID NO: 5270291 - DNA, 25 bp, Homo sapien
cctgggctgggggattcgtggaggg

SEQ ID NO: 5270292 - DNA, 25 bp, Homo sapien
ccacctgtgcaatgtgagttctcct

SEQ ID NO: 5270293 - DNA, 25 bp, Homo sapien
acaaaaagcaccctgatatccagat

SEQ ID NO: 5270294 - DNA, 25 bp, Homo sapien
caagtatttcaccacctgtgcaatg

SEQ ID NO: 5270295 - DNA, 25 bp, Homo sapien
ccacctgtgccacacccaagtattt

SEQ ID NO: 5270296 - DNA, 25 bp, Homo sapien
tgccccatccactcatgtggtggta

SEQ ID NO: 5270297 - DNA, 25 bp, Homo sapien
gtggtggtatttgttcactcttaac

SEQ ID NO: 5270298 - DNA, 25 bp, Homo sapien
gaaaacagccttctggtcttgagtc

SEQ ID NO: 5270299 - DNA, 25 bp, Homo sapien
ttaactttcatgcttgcctcttctc

SEQ ID NO: 5270300 - DNA, 25 bp, Homo sapien
gttatgttctgaacgagctccctga

SEQ ID NO: 5270301 - DNA, 25 bp, Homo sapien
cccatttggatcagttggtatttgt

SEQ ID NO: 5270302 - DNA, 25 bp, Homo sapien
tatttgttatcggaagaggaggtga

SEQ ID NO: 5270303 - DNA, 25 bp, Homo sapien
cctgacaacgcagtctacccatttg

SEQ ID NO: 5270304 - DNA, 25 bp, Homo sapien
ttcccgctcaggtttgatgtatgaa

SEQ ID NO: 5270305 - DNA, 25 bp, Homo sapien
gaatgctcccattctgcattggcac

SEQ ID NO: 5270306 - DNA, 25 bp, Homo sapien
tgatgatcggcactccacctctttc

SEQ ID NO: 5270307 - DNA, 25 bp, Homo sapien
catatcctgatgatcggcactccac

SEQ ID NO: 5270308 - DNA, 25 bp, Homo sapien
cacgaagagtccgtacagcctggat

SEQ ID NO: 5270309 - DNA, 25 bp, Homo sapien
gtacagcctggatgtccctccatct

SEQ ID NO: 5270310 - DNA, 25 bp, Homo sapien
tacgtgggcacgaagagtccgtaca

SEQ ID NO: 5270311 - DNA, 25 bp, Homo sapien
ctgttacgtgggcacgaagagtccg

SEQ ID NO: 5270312 - DNA, 25 bp, Homo sapien
agaatggcacaacgcaaagttccaa

SEQ ID NO: 5270313 - DNA, 25 bp, Homo sapien
tatttcgccaacatcactgactggc

SEQ ID NO: 5270314 - DNA, 25 bp, Homo sapien
tcccatggccagaatgacaatagat

SEQ ID NO: 5270315 - DNA, 25 bp, Homo sapien
tgagagcttgatgaaagaatggcac

SEQ ID NO: 5270316 - DNA, 25 bp, Homo sapien
gaagacagtgtccaaggctgcatcc

SEQ ID NO: 5270317 - DNA, 25 bp, Homo sapien
cgcagcgcctgtgctttgggatgaa

SEQ ID NO: 5270318 - DNA, 25 bp, Homo sapien
tgtcagctgcgcaaaggaaaggacc

SEQ ID NO: 5270319 - DNA, 25 bp, Homo sapien
tccagaaagggaagccggaagcact

SEQ ID NO: 5270320 - DNA, 25 bp, Homo sapien
gctggaggatggtgagggatctgct

SEQ ID NO: 5270321 - DNA, 25 bp, Homo sapien
ctggaggatggtgagggatctgctt

SEQ ID NO: 5270322 - DNA, 25 bp, Homo sapien
aagacagcctgcatcccatacagcc

SEQ ID NO: 5270323 - DNA, 25 bp, Homo sapien
agctgccacaggaccgcaggcacag

SEQ ID NO: 5270324 - DNA, 25 bp, Homo sapien
cagcaggcacacatgggcagtggcc

SEQ ID NO: 5270325 - DNA, 25 bp, Homo sapien
tacactcagaatcagccagacagct

SEQ ID NO: 5270326 - DNA, 25 bp, Homo sapien
aagctcaacttcagctcatacacag

SEQ ID NO: 5270327 - DNA, 25 bp, Homo sapien
tcaggccagctacaagtttccatcc

SEQ ID NO: 5270328 - DNA, 25 bp, Homo sapien
acagtcaggccagctacaagtttcc

SEQ ID NO: 5270329 - DNA, 25 bp, Homo sapien
ctcaacttcagctcatacacagaca

SEQ ID NO: 5270330 - DNA, 25 bp, Homo sapien
cctttctgtccatgggtcacagcca

SEQ ID NO: 5270331 - DNA, 25 bp, Homo sapien
gccctttctgtccatgggtcacagc

SEQ ID NO: 5270332 - DNA, 25 bp, Homo sapien
agccctttctgtccatgggtcacag

SEQ ID NO: 5270333 - DNA, 25 bp, Homo sapien
ctttctgtccatgggtcacagccat

SEQ ID NO: 5270334 - DNA, 25 bp, Homo sapien
aattctaggtatacagtggactaac

SEQ ID NO: 5270335 - DNA, 25 bp, Homo sapien
tacatatctgggtactagacatcac

SEQ ID NO: 5270336 - DNA, 25 bp, Homo sapien
aatgtagtttggacataacatgccc

SEQ ID NO: 5270337 - DNA, 25 bp, Homo sapien
gactaactgtagtatcacactgaaa

SEQ ID NO: 5270338 - DNA, 25 bp, Homo sapien
ggttctaggcatccaagctgttccc

SEQ ID NO: 5270339 - DNA, 25 bp, Homo sapien
caggttctaggcatccaagctgttc

SEQ ID NO: 5270340 - DNA, 25 bp, Homo sapien
tctaggcatccaagctgttccctca

SEQ ID NO: 5270341 - DNA, 25 bp, Homo sapien
tcaggttctaggcatccaagctgtt

SEQ ID NO: 5270342 - DNA, 25 bp, Homo sapien
tcccacaggcaaaccaagcagactg

SEQ ID NO: 5270343 - DNA, 25 bp, Homo sapien
agactgctccacattctgatgctgg

SEQ ID NO: 5270344 - DNA, 25 bp, Homo sapien
catcttcggatgctgagcgtctgac

SEQ ID NO: 5270345 - DNA, 25 bp, Homo sapien
gggatgtcctccactggaatgggct

SEQ ID NO: 5270346 - DNA, 25 bp, Homo sapien
aattacatatacattcaactccttg

SEQ ID NO: 5270347 - DNA, 25 bp, Homo sapien
gaagatttaactgcagtgagcttgg

SEQ ID NO: 5270348 - DNA, 25 bp, Homo sapien
ttcaactccttgacgctttcccaag

SEQ ID NO: 5270349 - DNA, 25 bp, Homo sapien
tgggttttccccctcatgagctgtt

SEQ ID NO: 5270350 - DNA, 25 bp, Homo sapien
gatggaattactgaaatcattcctg

SEQ ID NO: 5270351 - DNA, 25 bp, Homo sapien
agatatttcctccagtgtatgtgag

SEQ ID NO: 5270352 - DNA, 25 bp, Homo sapien
gcttacgtgaaatgttactccatgt

SEQ ID NO: 5270353 - DNA, 25 bp, Homo sapien
cagtgtatgtgagttatataggttg

SEQ ID NO: 5270354 - DNA, 25 bp, Homo sapien
gaggagggtgaatctgaatggagcc

SEQ ID NO: 5270355 - DNA, 25 bp, Homo sapien
taaccgtcaagagtaggcttgatgg

SEQ ID NO: 5270356 - DNA, 25 bp, Homo sapien
gaatggagccttgagctacagtggg

SEQ ID NO: 5270357 - DNA, 25 bp, Homo sapien
ggattaaatgtaaccgtcaagagta

SEQ ID NO: 5270358 - DNA, 25 bp, Homo sapien
taagacaaccttctgggcctcacac

SEQ ID NO: 5270359 - DNA, 25 bp, Homo sapien
ttaagacaaccttctgggcctcaca

SEQ ID NO: 5270360 - DNA, 25 bp, Homo sapien
tctctgtgtggttgaatctcccttg

SEQ ID NO: 5270361 - DNA, 25 bp, Homo sapien
gcttcctgcaagtatggctcctctg

SEQ ID NO: 5270362 - DNA, 25 bp, Homo sapien
ctgcaagtatggctcctctggtgat

SEQ ID NO: 5270363 - DNA, 25 bp, Homo sapien
tgtgtggttgaatctcccttgttcc

SEQ ID NO: 5270364 - DNA, 25 bp, Homo sapien
ccatgtgtgcatcgcagtgcaggtc

SEQ ID NO: 5270365 - DNA, 25 bp, Homo sapien
gggcccatgtgtgcatcgcagtgca

SEQ ID NO: 5270366 - DNA, 25 bp, Homo sapien
gtgcatcgcagtgcaggtcatacat

SEQ ID NO: 5270367 - DNA, 25 bp, Homo sapien
tccagggggcccatgtgtgcatcgc

SEQ ID NO: 5270368 - DNA, 25 bp, Homo sapien
tcttggcatgatgaagcctcactta

SEQ ID NO: 5270369 - DNA, 25 bp, Homo sapien
tcacgttgtcttggcatgatgaagc

SEQ ID NO: 5270370 - DNA, 25 bp, Homo sapien
tgatgaagcctcacttaaacccatg

SEQ ID NO: 5270371 - DNA, 25 bp, Homo sapien
ctgatcacgttgtcttggcatgatg

SEQ ID NO: 5270372 - DNA, 25 bp, Homo sapien
tatcaatctggatcccttcacagga

SEQ ID NO: 5270373 - DNA, 25 bp, Homo sapien
ttccattcacagaaccgagaaaaaa

SEQ ID NO: 5270374 - DNA, 25 bp, Homo sapien
gctccttgtgatgtgaaacctgttg

SEQ ID NO: 5270375 - DNA, 25 bp, Homo sapien
aaatggaagccagtgcgttgtgctc

SEQ ID NO: 5270376 - DNA, 25 bp, Homo sapien
tattgaagctagaaaaggcttgtcc

SEQ ID NO: 5270377 - DNA, 25 bp, Homo sapien
tagcaagcacgtaaaatgtctcccc

SEQ ID NO: 5270378 - DNA, 25 bp, Homo sapien
taagcgcatgcttcatgacaggcat

SEQ ID NO: 5270379 - DNA, 25 bp, Homo sapien
gtccccttcaaagtaagtaagcgca

SEQ ID NO: 5270380 - DNA, 25 bp, Homo sapien
ttgtgggcactggttgggcctctcc

SEQ ID NO: 5270381 - DNA, 25 bp, Homo sapien
gctatgacattgttgtgggcactgg

SEQ ID NO: 5270382 - DNA, 25 bp, Homo sapien
gttgtgggcactggttgggcctctc

SEQ ID NO: 5270383 - DNA, 25 bp, Homo sapien
ctggggctatgacattgttgtgggc

SEQ ID NO: 5270384 - DNA, 25 bp, Homo sapien
cgtggtatttaggaacccagatatc

SEQ ID NO: 5270385 - DNA, 25 bp, Homo sapien
taggaacccagatatcattcatttg

SEQ ID NO: 5270386 - DNA, 25 bp, Homo sapien
gagtgtgtgagctccgtggtattta

SEQ ID NO: 5270387 - DNA, 25 bp, Homo sapien
tgtgagctccgtggtatttaggaac

SEQ ID NO: 5270388 - DNA, 25 bp, Homo sapien
gagaggaatcaggaggatgtccttc

SEQ ID NO: 5270389 - DNA, 25 bp, Homo sapien
aatcaggaggatgtccttctgtctc

SEQ ID NO: 5270390 - DNA, 25 bp, Homo sapien
tgtcccacaccaactccctgttttc

SEQ ID NO: 5270391 - DNA, 25 bp, Homo sapien
tccactgtgtggcacatctgtccca

SEQ ID NO: 5270392 - DNA, 25 bp, Homo sapien
ctgcatcatcaatgccaatctcagg

SEQ ID NO: 5270393 - DNA, 25 bp, Homo sapien
ctctgcatcatcaatgccaatctca

SEQ ID NO: 5270394 - DNA, 25 bp, Homo sapien
catcaatgccaatctcagggcaggg

SEQ ID NO: 5270395 - DNA, 25 bp, Homo sapien
atcatcaatgccaatctcagggcag

SEQ ID NO: 5270396 - DNA, 25 bp, Homo sapien
tacacaacatccagcagggagtcca

SEQ ID NO: 5270397 - DNA, 25 bp, Homo sapien
tatactgacagagtccccggagaca

SEQ ID NO: 5270398 - DNA, 25 bp, Homo sapien
tgattttggatctgcactgcgatct

SEQ ID NO: 5270399 - DNA, 25 bp, Homo sapien
tagtggcataagcaggagccctcca

SEQ ID NO: 5270400 - DNA, 25 bp, Homo sapien
gatgtaagtaggagatatggagcca

SEQ ID NO: 5270401 - DNA, 25 bp, Homo sapien
tagatgtaagtaggagatatggagc

SEQ ID NO: 5270402 - DNA, 25 bp, Homo sapien
tccttagatgtaagtaggagatatg

SEQ ID NO: 5270403 - DNA, 25 bp, Homo sapien
agtctccttagatgtaagtaggaga

SEQ ID NO: 5270404 - DNA, 25 bp, Homo sapien
tatcagggtcccagaaattctttcg

SEQ ID NO: 5270405 - DNA, 25 bp, Homo sapien
cacaaactcatctgggatgcatctg

SEQ ID NO: 5270406 - DNA, 25 bp, Homo sapien
tgagatgtcctcaaattgcccacta

SEQ ID NO: 5270407 - DNA, 25 bp, Homo sapien
gagtcctacttgctgtgagatgtcc

SEQ ID NO: 5270408 - DNA, 25 bp, Homo sapien
ggcaacttggattgctttatgtgcc

SEQ ID NO: 5270409 - DNA, 25 bp, Homo sapien
gttaaaagagcattactgagactga

SEQ ID NO: 5270410 - DNA, 25 bp, Homo sapien
gagcattactgagactgaagtaggc

SEQ ID NO: 5270411 - DNA, 25 bp, Homo sapien
tctgcaggcaacttggattgcttta

SEQ ID NO: 5270412 - DNA, 25 bp, Homo sapien
caaagccgatgattccctgttcccg

SEQ ID NO: 5270413 - DNA, 25 bp, Homo sapien
tcccagaaatctaccggacacgtgt

SEQ ID NO: 5270414 - DNA, 25 bp, Homo sapien
tcccggtgaggactatccacagaca

SEQ ID NO: 5270415 - DNA, 25 bp, Homo sapien
cctgcacttgtgcttatcaaatccc

SEQ ID NO: 5270416 - DNA, 25 bp, Homo sapien
taattgcccccagaatatccgtaga

SEQ ID NO: 5270417 - DNA, 25 bp, Homo sapien
tccgtagaggtagtagggactcaat

SEQ ID NO: 5270418 - DNA, 25 bp, Homo sapien
agacgaacacggcacgatcgccggg

SEQ ID NO: 5270419 - DNA, 25 bp, Homo sapien
caaaggagacgaacacggcacgatc

SEQ ID NO: 5270420 - DNA, 25 bp, Homo sapien
acgaggctgccggagaagcgctggc

SEQ ID NO: 5270421 - DNA, 25 bp, Homo sapien
ccagaaggcttctagctcacaatcg

SEQ ID NO: 5270422 - DNA, 25 bp, Homo sapien
ttggtttatgagtgacccagaaggc

SEQ ID NO: 5270423 - DNA, 25 bp, Homo sapien
tcgcacgatttcaggacgaggctgc

SEQ ID NO: 5270424 - DNA, 25 bp, Homo sapien
cgcctctcgagctttaaattgattt

SEQ ID NO: 5270425 - DNA, 25 bp, Homo sapien
tccgctgtcgccgtcgggcctcccg

SEQ ID NO: 5270426 - DNA, 25 bp, Homo sapien
agcgcgcgccgtccgctgtcgccgt

SEQ ID NO: 5270427 - DNA, 25 bp, Homo sapien
cgccgtccgctgtcgccgtcgggcc

SEQ ID NO: 5270428 - DNA, 25 bp, Homo sapien
gggagtgagcgcgcgccgtccgctg

SEQ ID NO: 5270429 - DNA, 25 bp, Homo sapien
gtcctcggttagcgccggcgcccga

SEQ ID NO: 5270430 - DNA, 25 bp, Homo sapien
gctccccgtggtgccgcgcgccgct

SEQ ID NO: 5270431 - DNA, 25 bp, Homo sapien
cgcttccgagcatcccgggaacagg

SEQ ID NO: 5270432 - DNA, 25 bp, Homo sapien
ggttagcgccggcgcccgaaccatc

SEQ ID NO: 5270433 - DNA, 25 bp, Homo sapien
gagacgctacaacgtcgccaaagtg

SEQ ID NO: 5270434 - DNA, 25 bp, Homo sapien
ggcaagacggtcaagtgcgtgtttc

SEQ ID NO: 5270435 - DNA, 25 bp, Homo sapien
gacgactacgtgctgggcagcctgc

SEQ ID NO: 5270436 - DNA, 25 bp, Homo sapien
cgaggaggacgaggaaccaccgcac

SEQ ID NO: 5270437 - DNA, 25 bp, Homo sapien
ttttgatacataacagacctcagtc

SEQ ID NO: 5270438 - DNA, 25 bp, Homo sapien
tcttaacaaaactgcagggagcttg

SEQ ID NO: 5270439 - DNA, 25 bp, Homo sapien
taatccttgcatctaaaggccttgt

SEQ ID NO: 5270440 - DNA, 25 bp, Homo sapien
aaatgcagactgtacaaacgcttac

SEQ ID NO: 5270441 - DNA, 25 bp, Homo sapien
ttatttttaacgctgcatcttcgcg

SEQ ID NO: 5270442 - DNA, 25 bp, Homo sapien
tcagaggtggttgttggcggagaac

SEQ ID NO: 5270443 - DNA, 25 bp, Homo sapien
catcttcgcgtgtgctcagaggtgg

SEQ ID NO: 5270444 - DNA, 25 bp, Homo sapien
ggggacagccgtttccagatttgaa

SEQ ID NO: 5270445 - DNA, 25 bp, Homo sapien
aggagagaagtggtcggtgtctgtt

SEQ ID NO: 5270446 - DNA, 25 bp, Homo sapien
gagaagtggtcggtgtctgtttcct

SEQ ID NO: 5270447 - DNA, 25 bp, Homo sapien
gagagaagtggtcggtgtctgtttc

SEQ ID NO: 5270448 - DNA, 25 bp, Homo sapien
agaagtggtcggtgtctgtttcctt

SEQ ID NO: 5270449 - DNA, 25 bp, Homo sapien
gccgccgcaacgaaggtggatccgc

SEQ ID NO: 5270450 - DNA, 25 bp, Homo sapien
ccgcatcttgattgttctccgggag

SEQ ID NO: 5270451 - DNA, 25 bp, Homo sapien
caacgaaggtggatccgcatcttga

SEQ ID NO: 5270452 - DNA, 25 bp, Homo sapien
gctgccccggaatcagctccccggg

SEQ ID NO: 5270453 - DNA, 25 bp, Homo sapien
catttttcctgaccggcctgtgtcc

SEQ ID NO: 5270454 - DNA, 25 bp, Homo sapien
gctgaaccccgtttgcctgtccaca

SEQ ID NO: 5270455 - DNA, 25 bp, Homo sapien
gcccgagcaggcgatcgcggccggg

SEQ ID NO: 5270456 - DNA, 25 bp, Homo sapien
ccgctcgctgaaccccgtttgcctg

SEQ ID NO: 5270457 - DNA, 25 bp, Homo sapien
tagttcacagactctgatggcattt

SEQ ID NO: 5270458 - DNA, 25 bp, Homo sapien
tttaagaaattgaaccagcattctc

SEQ ID NO: 5270459 - DNA, 25 bp, Homo sapien
tggcattttggtaagctttccatct

SEQ ID NO: 5270460 - DNA, 25 bp, Homo sapien
gttcttacactctgatacgcatccc

SEQ ID NO: 5270461 - DNA, 25 bp, Homo sapien
taacactacctatatccattagctg

SEQ ID NO: 5270462 - DNA, 25 bp, Homo sapien
cttacaaagggagacacaagctcat

SEQ ID NO: 5270463 - DNA, 25 bp, Homo sapien
gcagaaagtataaaacggcttacaa

SEQ ID NO: 5270464 - DNA, 25 bp, Homo sapien
tcctgtggagcctacattttcaacc

SEQ ID NO: 5270465 - DNA, 25 bp, Homo sapien
ggaggctcccgtctcactgtttgat

SEQ ID NO: 5270466 - DNA, 25 bp, Homo sapien
tacaagatctagcacctctgccagt

SEQ ID NO: 5270467 - DNA, 25 bp, Homo sapien
tgcctgcagttgtgaacagagaact

SEQ ID NO: 5270468 - DNA, 25 bp, Homo sapien
tgaatttaagcaacctggatgtgca

SEQ ID NO: 5270469 - DNA, 25 bp, Homo sapien
aaaataggatttcctctaggctcct

SEQ ID NO: 5270470 - DNA, 25 bp, Homo sapien
tactttcttagacacgttacatttc

SEQ ID NO: 5270471 - DNA, 25 bp, Homo sapien
ggatttcctctaggctcctcgaaga

SEQ ID NO: 5270472 - DNA, 25 bp, Homo sapien
tctaggctcctcgaagagatttttt

SEQ ID NO: 5270473 - DNA, 25 bp, Homo sapien
catcccataatgcttcgtgacggcc

SEQ ID NO: 5270474 - DNA, 25 bp, Homo sapien
ttagagtttgcatgccagcgcacgg

SEQ ID NO: 5270475 - DNA, 25 bp, Homo sapien
agcgcacggcctattgctgtgaaac

SEQ ID NO: 5270476 - DNA, 25 bp, Homo sapien
cgtagactatctagcatgcagagtg

SEQ ID NO: 5270477 - DNA, 25 bp, Homo sapien
acggaaagtgagttttctgggcagg

SEQ ID NO: 5270478 - DNA, 25 bp, Homo sapien
agtgagttttctgggcaggttggag

SEQ ID NO: 5270479 - DNA, 25 bp, Homo sapien
tcagcacccagcacggctgtcagcc

SEQ ID NO: 5270480 - DNA, 25 bp, Homo sapien
cagcacggctgtcagcctcggcagg

SEQ ID NO: 5270481 - DNA, 25 bp, Homo sapien
gaagctttgggtgttgttgagcaca

SEQ ID NO: 5270482 - DNA, 25 bp, Homo sapien
tagtagccagatgtgtgagagccga

SEQ ID NO: 5270483 - DNA, 25 bp, Homo sapien
caaaattttgttgtgcgtgaagctt

SEQ ID NO: 5270484 - DNA, 25 bp, Homo sapien
cacacgcagatgaaagacggttcct

SEQ ID NO: 5270485 - DNA, 25 bp, Homo sapien
aggaataatgcctgagtcttgaagg

SEQ ID NO: 5270486 - DNA, 25 bp, Homo sapien
cctggaactgtacgttgtttgctct

SEQ ID NO: 5270487 - DNA, 25 bp, Homo sapien
tcttgaaggtgcgtggaaggaaaag

SEQ ID NO: 5270488 - DNA, 25 bp, Homo sapien
ggagaccttgaacgtggccctggaa

SEQ ID NO: 5270489 - DNA, 25 bp, Homo sapien
ctttccgtatggctccattgctggg

SEQ ID NO: 5270490 - DNA, 25 bp, Homo sapien
tgagtgacgtcatcaagaccctttc

SEQ ID NO: 5270491 - DNA, 25 bp, Homo sapien
tccattgctggggtggttccacgtg

SEQ ID NO: 5270492 - DNA, 25 bp, Homo sapien
cacacaggaacccagatgagtgacg

SEQ ID NO: 5270493 - DNA, 25 bp, Homo sapien
gggaatctcgagttgctgaaaattc

SEQ ID NO: 5270494 - DNA, 25 bp, Homo sapien
tactaaaaggggaatctcgagttgc

SEQ ID NO: 5270495 - DNA, 25 bp, Homo sapien
aaaattcactgatatggaaatcttc

SEQ ID NO: 5270496 - DNA, 25 bp, Homo sapien
aaattcactgatatggaaatcttca

SEQ ID NO: 5270497 - DNA, 25 bp, Homo sapien
gttctgcatggagcgtacgggtatc

SEQ ID NO: 5270498 - DNA, 25 bp, Homo sapien
gcctgggtgcatcaagagttgcgct

SEQ ID NO: 5270499 - DNA, 25 bp, Homo sapien
tctgcatggagcgtacgggtatccg

SEQ ID NO: 5270500 - DNA, 25 bp, Homo sapien
tgcatcaagagttgcgctgcccagg

SEQ ID NO: 5270501 - DNA, 25 bp, Homo sapien
ctcttggtactcagtgctccacaga

SEQ ID NO: 5270502 - DNA, 25 bp, Homo sapien
ctaatggctcttggtactcagtgct

SEQ ID NO: 5270503 - DNA, 25 bp, Homo sapien
ggtactcagtgctccacagagggtt

SEQ ID NO: 5270504 - DNA, 25 bp, Homo sapien
aatggctcttggtactcagtgctcc

SEQ ID NO: 5270505 - DNA, 25 bp, Homo sapien
cacttgagtcgcagggaacaatcac

SEQ ID NO: 5270506 - DNA, 25 bp, Homo sapien
acaatgtcttttatgtggtatggac

SEQ ID NO: 5270507 - DNA, 25 bp, Homo sapien
gagaattcccacttgagtcgcaggg

SEQ ID NO: 5270508 - DNA, 25 bp, Homo sapien
tcagcattcagagaattcccacttg

SEQ ID NO: 5270509 - DNA, 25 bp, Homo sapien
tttctcctcggagagaaccaagctt

SEQ ID NO: 5270510 - DNA, 25 bp, Homo sapien
tctcctcggagagaaccaagcttag

SEQ ID NO: 5270511 - DNA, 25 bp, Homo sapien
ttctcctcggagagaaccaagctta

SEQ ID NO: 5270512 - DNA, 25 bp, Homo sapien
gaagactcattacactttccttcag

SEQ ID NO: 5270513 - DNA, 25 bp, Homo sapien
tgatccaaccgtaatcttctgagca

SEQ ID NO: 5270514 - DNA, 25 bp, Homo sapien
gcttgttctcggcaggatgagtgac

SEQ ID NO: 5270515 - DNA, 25 bp, Homo sapien
agtgactgcccgtcctggaggcctc

SEQ ID NO: 5270516 - DNA, 25 bp, Homo sapien
ctctccgatggagcccacggttctt

SEQ ID NO: 5270517 - DNA, 25 bp, Homo sapien
tacttcctccctatggttcctgggc

SEQ ID NO: 5270518 - DNA, 25 bp, Homo sapien
tgtacttcctccctatggttcctgg

SEQ ID NO: 5270519 - DNA, 25 bp, Homo sapien
ctggctctccgatggagcccacggt

SEQ ID NO: 5270520 - DNA, 25 bp, Homo sapien
cagggcaaggcctggattgtgttca

SEQ ID NO: 5270521 - DNA, 25 bp, Homo sapien
acagggcaaggcctggattgtgttc

SEQ ID NO: 5270522 - DNA, 25 bp, Homo sapien
gacagggcaaggcctggattgtgtt

SEQ ID NO: 5270523 - DNA, 25 bp, Homo sapien
ctgagagctcgccctgctgattctt

SEQ ID NO: 5270524 - DNA, 25 bp, Homo sapien
cttgttctgagagctcgccctgctg

SEQ ID NO: 5270525 - DNA, 25 bp, Homo sapien
tgttctgagagctcgccctgctgat

SEQ ID NO: 5270526 - DNA, 25 bp, Homo sapien
gttctgagagctcgccctgctgatt

SEQ ID NO: 5270527 - DNA, 25 bp, Homo sapien
gcagcagctaggtccggaaggatgg

SEQ ID NO: 5270528 - DNA, 25 bp, Homo sapien
aggctttgtgaatgtcactggctca

SEQ ID NO: 5270529 - DNA, 25 bp, Homo sapien
acagcacattctgagtcgaatgggt

SEQ ID NO: 5270530 - DNA, 25 bp, Homo sapien
taggtccggaaggatggccagaagt

SEQ ID NO: 5270531 - DNA, 25 bp, Homo sapien
gcaatggggggcctgcgtcggtttg

SEQ ID NO: 5270532 - DNA, 25 bp, Homo sapien
gcctgcgtcggtttgtaagcaggga

SEQ ID NO: 5270533 - DNA, 25 bp, Homo sapien
gggggcctgcgtcggtttgtaagca

SEQ ID NO: 5270534 - DNA, 25 bp, Homo sapien
caatggggggcctgcgtcggtttgt

SEQ ID NO: 5270535 - DNA, 25 bp, Homo sapien
ccaaactcaacacagcccaatttga

SEQ ID NO: 5270536 - DNA, 25 bp, Homo sapien
ccccaaactcaacacagcccaattt

SEQ ID NO: 5270537 - DNA, 25 bp, Homo sapien
aaactcaacacagcccaatttgagc

SEQ ID NO: 5270538 - DNA, 25 bp, Homo sapien
actcaacacagcccaatttgagctc

SEQ ID NO: 5270539 - DNA, 25 bp, Homo sapien
tttaacaaaataaggacagagaggc

SEQ ID NO: 5270540 - DNA, 25 bp, Homo sapien
aggcactggcccgatgcttcccttg

SEQ ID NO: 5270541 - DNA, 25 bp, Homo sapien
ctcaattgtccatctcctttaacaa

SEQ ID NO: 5270542 - DNA, 25 bp, Homo sapien
agagaggcactggcccgatgcttcc

SEQ ID NO: 5270543 - DNA, 25 bp, Homo sapien
ccacatcacgaaggaggactgtggc

SEQ ID NO: 5270544 - DNA, 25 bp, Homo sapien
gacaccacatcacgaaggaggactg

SEQ ID NO: 5270545 - DNA, 25 bp, Homo sapien
ctgagacaccacatcacgaaggagg

SEQ ID NO: 5270546 - DNA, 25 bp, Homo sapien
gagacaccacatcacgaaggaggac

SEQ ID NO: 5270547 - DNA, 25 bp, Homo sapien
tgggcctgaaacatcgtcttgtggg

SEQ ID NO: 5270548 - DNA, 25 bp, Homo sapien
gcctgaaacatcgtcttgtgggatt

SEQ ID NO: 5270549 - DNA, 25 bp, Homo sapien
aatgtgcattcggtgagtactggct

SEQ ID NO: 5270550 - DNA, 25 bp, Homo sapien
cagaatgctagatgtgaatgtgcat

SEQ ID NO: 5270551 - DNA, 25 bp, Homo sapien
aaggcatcttctgaatgccactgaa

SEQ ID NO: 5270552 - DNA, 25 bp, Homo sapien
ggcccaatacaaagggccagctttg

SEQ ID NO: 5270553 - DNA, 25 bp, Homo sapien
agaaggcccaatacaaagggccagc

SEQ ID NO: 5270554 - DNA, 25 bp, Homo sapien
gccactgaatgtggtcttgctggat

SEQ ID NO: 5270555 - DNA, 25 bp, Homo sapien
tgctaatgccaggacacggtcacct

SEQ ID NO: 5270556 - DNA, 25 bp, Homo sapien
cctggagccacagttaggaggttgc

SEQ ID NO: 5270557 - DNA, 25 bp, Homo sapien
gaagagggaatgaccatctcagcac

SEQ ID NO: 5270558 - DNA, 25 bp, Homo sapien
tctcagcacaacctgggctgaaggt

SEQ ID NO: 5270559 - DNA, 25 bp, Homo sapien
ccaccctatccctgaacagcagcaa

SEQ ID NO: 5270560 - DNA, 25 bp, Homo sapien
agcagcaacaatacagcaatctggg

SEQ ID NO: 5270561 - DNA, 25 bp, Homo sapien
caatacagcaatctggggaaggtgc

SEQ ID NO: 5270562 - DNA, 25 bp, Homo sapien
ttattagggctgttaaatgacaaaa

SEQ ID NO: 5270563 - DNA, 25 bp, Homo sapien
gccaccagacaaaggggcaatggaa

SEQ ID NO: 5270564 - DNA, 25 bp, Homo sapien
gactgcagagagggctgatactgag

SEQ ID NO: 5270565 - DNA, 25 bp, Homo sapien
gcagagagggctgatactgaggaag

SEQ ID NO: 5270566 - DNA, 25 bp, Homo sapien
agaaattaagggaaacgagacactg

SEQ ID NO: 5270567 - DNA, 25 bp, Homo sapien
gcgctggagcacattcacagagccc

SEQ ID NO: 5270568 - DNA, 25 bp, Homo sapien
cagaagccccattaattagtgggat

SEQ ID NO: 5270569 - DNA, 25 bp, Homo sapien
ccaagcaggactggcgctggagcac

SEQ ID NO: 5270570 - DNA, 25 bp, Homo sapien
gttcagcaaggtgcttaaccccaga

SEQ ID NO: 5270571 - DNA, 25 bp, Homo sapien
gctcagaagtcaccacgggttcttt

SEQ ID NO: 5270572 - DNA, 25 bp, Homo sapien
cttgtcaaagttataaggttctcca

SEQ ID NO: 5270573 - DNA, 25 bp, Homo sapien
cctgctcagaagtcaccacgggttc

SEQ ID NO: 5270574 - DNA, 25 bp, Homo sapien
caaagttataaggttctccatatac

SEQ ID NO: 5270575 - DNA, 25 bp, Homo sapien
ttggagccctggtgatcaaagacaa

SEQ ID NO: 5270576 - DNA, 25 bp, Homo sapien
cttggagccctggtgatcaaagaca

SEQ ID NO: 5270577 - DNA, 25 bp, Homo sapien
tggagccctggtgatcaaagacaaa

SEQ ID NO: 5270578 - DNA, 25 bp, Homo sapien
gtgtcgctgccatgggaagccgccc

SEQ ID NO: 5270579 - DNA, 25 bp, Homo sapien
gccgtgtgggttgcagttagtacac

SEQ ID NO: 5270580 - DNA, 25 bp, Homo sapien
tgtttgttccttcttgccgtgtggg

SEQ ID NO: 5270581 - DNA, 25 bp, Homo sapien
tctgtgcgcgtgctccgtcagtggt

SEQ ID NO: 5270582 - DNA, 25 bp, Homo sapien
ccctggaatgaggagcccacaccag

SEQ ID NO: 5270583 - DNA, 25 bp, Homo sapien
gaatcttcttgtggggcaccctgga

SEQ ID NO: 5270584 - DNA, 25 bp, Homo sapien
gctttgggttgagatgttttgaatc

SEQ ID NO: 5270585 - DNA, 25 bp, Homo sapien
atatcctttatccccaacggctttg

SEQ ID NO: 5270586 - DNA, 25 bp, Homo sapien
cactgcccagtttgctttggactaa

SEQ ID NO: 5270587 - DNA, 25 bp, Homo sapien
ccttgacctggttgaaagctcttct

SEQ ID NO: 5270588 - DNA, 25 bp, Homo sapien
tggactaaacgcttgtgctttttcc

SEQ ID NO: 5270589 - DNA, 25 bp, Homo sapien
ttttccttgacctggttgaaagctc

SEQ ID NO: 5270590 - DNA, 25 bp, Homo sapien
tgtcaggctaactccagccagcctt

SEQ ID NO: 5270591 - DNA, 25 bp, Homo sapien
acacctgtcaggctaactccagcca

SEQ ID NO: 5270592 - DNA, 25 bp, Homo sapien
tcttcttcgaatgagtgctggctcc

SEQ ID NO: 5270593 - DNA, 25 bp, Homo sapien
tctggatgagaaagtcttcttcgaa

SEQ ID NO: 5270594 - DNA, 25 bp, Homo sapien
tcagcgctcttggtctgatagcacg

SEQ ID NO: 5270595 - DNA, 25 bp, Homo sapien
tgatagcacgctttgactgccagcc

SEQ ID NO: 5270596 - DNA, 25 bp, Homo sapien
tatgggatggaagtaggacctgtca

SEQ ID NO: 5270597 - DNA, 25 bp, Homo sapien
tgttgagatcctaaatgcaggcagg

SEQ ID NO: 5270598 - DNA, 25 bp, Homo sapien
ccaataggacaccaagataaataag

SEQ ID NO: 5270599 - DNA, 25 bp, Homo sapien
ggacaccaagataaataagatttgg

SEQ ID NO: 5270600 - DNA, 25 bp, Homo sapien
gatttggggccaatcttcaattagg

SEQ ID NO: 5270601 - DNA, 25 bp, Homo sapien
tacttattatgtgtgaggcatggcc

SEQ ID NO: 5270602 - DNA, 25 bp, Homo sapien
tgggcaagtcccttgacattcagtg

SEQ ID NO: 5270603 - DNA, 25 bp, Homo sapien
attcagtgaattctattttctccat

SEQ ID NO: 5270604 - DNA, 25 bp, Homo sapien
ccctgggcaagtcccttgacattca

SEQ ID NO: 5270605 - DNA, 25 bp, Homo sapien
gcaagtcccttgacattcagtgaat

SEQ ID NO: 5270606 - DNA, 25 bp, Homo sapien
tcctcttaacatcgcagccgttcaa

SEQ ID NO: 5270607 - DNA, 25 bp, Homo sapien
tcgcagccgttcaaaaactatgtga

SEQ ID NO: 5270608 - DNA, 25 bp, Homo sapien
tgagaagttctcgttacaatgtcac

SEQ ID NO: 5270609 - DNA, 25 bp, Homo sapien
ccagcgtggtaagctgtcctgggct

SEQ ID NO: 5270610 - DNA, 25 bp, Homo sapien
ttttgttttggtgttgctgctagtt

SEQ ID NO: 5270611 - DNA, 25 bp, Homo sapien
ccagcttgatctttttgttttggtg

SEQ ID NO: 5270612 - DNA, 25 bp, Homo sapien
tctttttgttttggtgttgctgcta

SEQ ID NO: 5270613 - DNA, 25 bp, Homo sapien
cccagcttgatctttttgttttggt

SEQ ID NO: 5270614 - DNA, 25 bp, Homo sapien
agggtctgggctacaccgggctcct

SEQ ID NO: 5270615 - DNA, 25 bp, Homo sapien
gggctcctcggtcaatgccatttcc

SEQ ID NO: 5270616 - DNA, 25 bp, Homo sapien
gagctggagccatttcagggcctgt

SEQ ID NO: 5270617 - DNA, 25 bp, Homo sapien
caaagaccatagtcatggcagggtc

SEQ ID NO: 5270618 - DNA, 25 bp, Homo sapien
ccttacatcgccatatggtgactga

SEQ ID NO: 5270619 - DNA, 25 bp, Homo sapien
cacatcatgtcttagctcccttaca

SEQ ID NO: 5270620 - DNA, 25 bp, Homo sapien
cacacacggagataatgcagcaggt

SEQ ID NO: 5270621 - DNA, 25 bp, Homo sapien
cacggagataatgcagcaggtgact

SEQ ID NO: 5270622 - DNA, 25 bp, Homo sapien
ccattggaagatatggtgtccgact

SEQ ID NO: 5270623 - DNA, 25 bp, Homo sapien
tacagcataacatgccttttatctt

SEQ ID NO: 5270624 - DNA, 25 bp, Homo sapien
tggtgtccgactcaactcttgttct

SEQ ID NO: 5270625 - DNA, 25 bp, Homo sapien
tcttctccgctgcaaagctcagggt

SEQ ID NO: 5270626 - DNA, 25 bp, Homo sapien
ctgaccaggctccacaagtgctctg

SEQ ID NO: 5270627 - DNA, 25 bp, Homo sapien
aatgcccaacaggtcccagggccat

SEQ ID NO: 5270628 - DNA, 25 bp, Homo sapien
aatagggtaggacactcttcccaag

SEQ ID NO: 5270629 - DNA, 25 bp, Homo sapien
tcccaagagacttcttgccgggtgg

SEQ ID NO: 5270630 - DNA, 25 bp, Homo sapien
ccggaagcgtcttatgatcaaagct

SEQ ID NO: 5270631 - DNA, 25 bp, Homo sapien
gttatacagagggtttcagattttc

SEQ ID NO: 5270632 - DNA, 25 bp, Homo sapien
caattggatgtcctgtttgcttgcc

SEQ ID NO: 5270633 - DNA, 25 bp, Homo sapien
cacctgcaccttatctgcagaacaa

SEQ ID NO: 5270634 - DNA, 25 bp, Homo sapien
actcagttatacagagggtttcaga

SEQ ID NO: 5270635 - DNA, 25 bp, Homo sapien
ggcgtcctccgcattcctactgcag

SEQ ID NO: 5270636 - DNA, 25 bp, Homo sapien
aggcgtcctccgcattcctactgca

SEQ ID NO: 5270637 - DNA, 25 bp, Homo sapien
aagaaggcgtcctccgcattcctac

SEQ ID NO: 5270638 - DNA, 25 bp, Homo sapien
gaaggcgtcctccgcattcctactg

SEQ ID NO: 5270639 - DNA, 25 bp, Homo sapien
tcttcatcagcgtttacagatgacc

SEQ ID NO: 5270640 - DNA, 25 bp, Homo sapien
cttcatcttcatcagcgtttacaga

SEQ ID NO: 5270641 - DNA, 25 bp, Homo sapien
tgctggccacggtggtaaagtaggg

SEQ ID NO: 5270642 - DNA, 25 bp, Homo sapien
cttaaataatggtacatagagtggg

SEQ ID NO: 5270643 - DNA, 25 bp, Homo sapien
gtcctgtcggggtgaagcagtcttc

SEQ ID NO: 5270644 - DNA, 25 bp, Homo sapien
gagaaatacagtgcgtggcttctgc

SEQ ID NO: 5270645 - DNA, 25 bp, Homo sapien
cctctggcttcgtggaatgtcctgt

SEQ ID NO: 5270646 - DNA, 25 bp, Homo sapien
cagtcttctccagagaaatacagtg

SEQ ID NO: 5270647 - DNA, 25 bp, Homo sapien
ctgtttaggagtcgcagctctggtg

SEQ ID NO: 5270648 - DNA, 25 bp, Homo sapien
tctggtccggctcaaagtttcaagg

SEQ ID NO: 5270649 - DNA, 25 bp, Homo sapien
tacaggagtccgtagttcattggtt

SEQ ID NO: 5270650 - DNA, 25 bp, Homo sapien
tgcaaggttgctgtccgtgcaggta

SEQ ID NO: 5270651 - DNA, 25 bp, Homo sapien
gagccattccccagttggagtcaat

SEQ ID NO: 5270652 - DNA, 25 bp, Homo sapien
ggcgtatttggaacagtatggctga

SEQ ID NO: 5270653 - DNA, 25 bp, Homo sapien
gatgaccaaattgttctgatgactc

SEQ ID NO: 5270654 - DNA, 25 bp, Homo sapien
tctccaggatgactgatccactggg

SEQ ID NO: 5270655 - DNA, 25 bp, Homo sapien
cccttctggccttattgtgggagat

SEQ ID NO: 5270656 - DNA, 25 bp, Homo sapien
tgggagatgccctgcttcattgctt

SEQ ID NO: 5270657 - DNA, 25 bp, Homo sapien
gcttccgtgacaactattgcttgta

SEQ ID NO: 5270658 - DNA, 25 bp, Homo sapien
ggaggacgtgatctccattctcttg

SEQ ID NO: 5270659 - DNA, 25 bp, Homo sapien
ctgctgtattcccactctcggctgc

SEQ ID NO: 5270660 - DNA, 25 bp, Homo sapien
cctcttcccccgagctttacagcgt

SEQ ID NO: 5270661 - DNA, 25 bp, Homo sapien
ttcccccgagctttacagcgttcat

SEQ ID NO: 5270662 - DNA, 25 bp, Homo sapien
caacctgctgtattcccactctcgg

SEQ ID NO: 5270663 - DNA, 25 bp, Homo sapien
ccacaggataaaaggaccgcttcac

SEQ ID NO: 5270664 - DNA, 25 bp, Homo sapien
cacaggataaaaggaccgcttcacc

SEQ ID NO: 5270665 - DNA, 25 bp, Homo sapien
gataaaaggaccgcttcaccgtggc

SEQ ID NO: 5270666 - DNA, 25 bp, Homo sapien
caggataaaaggaccgcttcaccgt

SEQ ID NO: 5270667 - DNA, 25 bp, Homo sapien
tggcacataccccagcccaggcacc

SEQ ID NO: 5270668 - DNA, 25 bp, Homo sapien
ggcacataccccagcccaggcacca

SEQ ID NO: 5270669 - DNA, 25 bp, Homo sapien
gccttctatggctgtccggatgcat

SEQ ID NO: 5270670 - DNA, 25 bp, Homo sapien
ggccttctatggctgtccggatgca

SEQ ID NO: 5270671 - DNA, 25 bp, Homo sapien
agtcattattttcgctacagcaggg

SEQ ID NO: 5270672 - DNA, 25 bp, Homo sapien
tgaaaggagttcactcaagttccca

SEQ ID NO: 5270673 - DNA, 25 bp, Homo sapien
gactctgaatcacctgggaggagaa

SEQ ID NO: 5270674 - DNA, 25 bp, Homo sapien
agaaggaattgtggcgggcctaaca

SEQ ID NO: 5270675 - DNA, 25 bp, Homo sapien
gcccacattgtaatgccttggaggg

SEQ ID NO: 5270676 - DNA, 25 bp, Homo sapien
tcatcgtctgcgttttcgccgcggc

SEQ ID NO: 5270677 - DNA, 25 bp, Homo sapien
aaccccacacgaatagcggctgcat

SEQ ID NO: 5270678 - DNA, 25 bp, Homo sapien
gcatcctgtgatccccggagagatt

SEQ ID NO: 5270679 - DNA, 25 bp, Homo sapien
agtcttaaagagctgttgattgcac

SEQ ID NO: 5270680 - DNA, 25 bp, Homo sapien
ctgcagtcttaaagagctgttgatt

SEQ ID NO: 5270681 - DNA, 25 bp, Homo sapien
cagtcttaaagagctgttgattgca

SEQ ID NO: 5270682 - DNA, 25 bp, Homo sapien
gcagtcttaaagagctgttgattgc

SEQ ID NO: 5270683 - DNA, 25 bp, Homo sapien
attttccgggaagagaggattattg

SEQ ID NO: 5270684 - DNA, 25 bp, Homo sapien
tcttgacatttgctaaccgcttggt

SEQ ID NO: 5270685 - DNA, 25 bp, Homo sapien
cgggaagagaggattattggcaact

SEQ ID NO: 5270686 - DNA, 25 bp, Homo sapien
ggctgttcccttgttcagctgattt

SEQ ID NO: 5270687 - DNA, 25 bp, Homo sapien
aatcagccctatgtgtacgcaccag

SEQ ID NO: 5270688 - DNA, 25 bp, Homo sapien
tgggatgagcataaaaccaggacgg

SEQ ID NO: 5270689 - DNA, 25 bp, Homo sapien
ttggcagaaggataagatgtccact

SEQ ID NO: 5270690 - DNA, 25 bp, Homo sapien
tgctgctccttgctagactgtgtga

SEQ ID NO: 5270691 - DNA, 25 bp, Homo sapien
tcgtggattcttctcggattttccc

SEQ ID NO: 5270692 - DNA, 25 bp, Homo sapien
ttcttctcggattttcccacttctg

SEQ ID NO: 5270693 - DNA, 25 bp, Homo sapien
gattcttctcggattttcccacttc

SEQ ID NO: 5270694 - DNA, 25 bp, Homo sapien
gtggattcttctcggattttcccac

SEQ ID NO: 5270695 - DNA, 25 bp, Homo sapien
cagatctgcgcttggactggtgcaa

SEQ ID NO: 5270696 - DNA, 25 bp, Homo sapien
tcttctgccagacaatcacgtgaca

SEQ ID NO: 5270697 - DNA, 25 bp, Homo sapien
tgactccctgccatactctaggctg

SEQ ID NO: 5270698 - DNA, 25 bp, Homo sapien
tgtacagccaaccacggagcatctt

SEQ ID NO: 5270699 - DNA, 25 bp, Homo sapien
gaaaattcccaaagatgaccagagt

SEQ ID NO: 5270700 - DNA, 25 bp, Homo sapien
gcataccgtaggtgcctgataaata

SEQ ID NO: 5270701 - DNA, 25 bp, Homo sapien
cactcaggtaggtgtagtgcacaca

SEQ ID NO: 5270702 - DNA, 25 bp, Homo sapien
gatgcacactctggttcaagacaca

SEQ ID NO: 5270703 - DNA, 25 bp, Homo sapien
tgacaccatctctggtcgactattg

SEQ ID NO: 5270704 - DNA, 25 bp, Homo sapien
tctctggtcgactattgactggctg

SEQ ID NO: 5270705 - DNA, 25 bp, Homo sapien
tctggtcgactattgactggctgga

SEQ ID NO: 5270706 - DNA, 25 bp, Homo sapien
accatctctggtcgactattgactg

SEQ ID NO: 5270707 - DNA, 25 bp, Homo sapien
gactgaaggtcgtccatcttttcaa

SEQ ID NO: 5270708 - DNA, 25 bp, Homo sapien
gactgcaggaaggttctcctgatgg

SEQ ID NO: 5270709 - DNA, 25 bp, Homo sapien
gactctgtgactccgcaggtctctc

SEQ ID NO: 5270710 - DNA, 25 bp, Homo sapien
caaggtcgtgaatctatgccagcaa

SEQ ID NO: 5270711 - DNA, 25 bp, Homo sapien
ccagcttcactaagggagtaagtga

SEQ ID NO: 5270712 - DNA, 25 bp, Homo sapien
cagatgtttcacatagactgcacgg

SEQ ID NO: 5270713 - DNA, 25 bp, Homo sapien
cactaagggagtaagtgatggtccg

SEQ ID NO: 5270714 - DNA, 25 bp, Homo sapien
ctgcacggtaaagggaaacagtgct

SEQ ID NO: 5270715 - DNA, 25 bp, Homo sapien
caagttgcacaataccactggggcc

SEQ ID NO: 5270716 - DNA, 25 bp, Homo sapien
tgccatctgatttgtgcctcatatt

SEQ ID NO: 5270717 - DNA, 25 bp, Homo sapien
tctgggagcaattctttcgtttgct

SEQ ID NO: 5270718 - DNA, 25 bp, Homo sapien
catattctgggagcaattctttcgt

SEQ ID NO: 5270719 - DNA, 25 bp, Homo sapien
ttccaaacgactgagtggttttgct

SEQ ID NO: 5270720 - DNA, 25 bp, Homo sapien
gacagaaaagagagtctttctccct

SEQ ID NO: 5270721 - DNA, 25 bp, Homo sapien
cctctccttgttccaaacgactgag

SEQ ID NO: 5270722 - DNA, 25 bp, Homo sapien
ttaccagtgggctgtagcttctgtg

SEQ ID NO: 5270723 - DNA, 25 bp, Homo sapien
ctggagccttgtgtaattgagattt

SEQ ID NO: 5270724 - DNA, 25 bp, Homo sapien
aatgactttccgctggttctccgat

SEQ ID NO: 5270725 - DNA, 25 bp, Homo sapien
tttacggttgctagcctacttggac

SEQ ID NO: 5270726 - DNA, 25 bp, Homo sapien
ggcacagcaacctcctttacggttg

SEQ ID NO: 5270727 - DNA, 25 bp, Homo sapien
gatttatgcttgtcggctttctata

SEQ ID NO: 5270728 - DNA, 25 bp, Homo sapien
cttaataggatttatgcttgtcggc

SEQ ID NO: 5270729 - DNA, 25 bp, Homo sapien
tatgcttgtcggctttctatatgcc

SEQ ID NO: 5270730 - DNA, 25 bp, Homo sapien
ataggatttatgcttgtcggctttc

SEQ ID NO: 5270731 - DNA, 25 bp, Homo sapien
gttaaatcctccaagtgaaacatct

SEQ ID NO: 5270732 - DNA, 25 bp, Homo sapien
ccagatacttctgttaaatcctcca

SEQ ID NO: 5270733 - DNA, 25 bp, Homo sapien
ggtattcagcatcagattgaattca

SEQ ID NO: 5270734 - DNA, 25 bp, Homo sapien
tcagcatcagattgaattcagattt

SEQ ID NO: 5270735 - DNA, 25 bp, Homo sapien
ttctcacgggcatatgatgggacat

SEQ ID NO: 5270736 - DNA, 25 bp, Homo sapien
cagtctaaaaggtcatcataaatgg

SEQ ID NO: 5270737 - DNA, 25 bp, Homo sapien
tctaaaattactcgccctgtttctc

SEQ ID NO: 5270738 - DNA, 25 bp, Homo sapien
taaatccagtctaaaaggtcatcat

SEQ ID NO: 5270739 - DNA, 25 bp, Homo sapien
gctcgatccctcagagaagctcggt

SEQ ID NO: 5270740 - DNA, 25 bp, Homo sapien
gaagctcggtggaacacatcctgaa

SEQ ID NO: 5270741 - DNA, 25 bp, Homo sapien
aagtgtccacgtgctagaattgcga

SEQ ID NO: 5270742 - DNA, 25 bp, Homo sapien
cgtgtacaccgtatgcctcagggca

SEQ ID NO: 5270743 - DNA, 25 bp, Homo sapien
gagaagggtcctacatccaatttgg

SEQ ID NO: 5270744 - DNA, 25 bp, Homo sapien
tcctacatccaatttgggccaggtc

SEQ ID NO: 5270745 - DNA, 25 bp, Homo sapien
agggtcctacatccaatttgggcca

SEQ ID NO: 5270746 - DNA, 25 bp, Homo sapien
gaagggtcctacatccaatttgggc

SEQ ID NO: 5270747 - DNA, 25 bp, Homo sapien
agaactctttctacgtcctgctcag

SEQ ID NO: 5270748 - DNA, 25 bp, Homo sapien
tgcatgcggcattgtgttgacttcg

SEQ ID NO: 5270749 - DNA, 25 bp, Homo sapien
gcctgttcttgtgggtattgatgta

SEQ ID NO: 5270750 - DNA, 25 bp, Homo sapien
tgaaggctagctggtatctactgca

SEQ ID NO: 5270751 - DNA, 25 bp, Homo sapien
ggccctgaagtaatacgactctgtt

SEQ ID NO: 5270752 - DNA, 25 bp, Homo sapien
ttattgggccctgaagtaatacgac

SEQ ID NO: 5270753 - DNA, 25 bp, Homo sapien
cctgaagtaatacgactctgttacc

SEQ ID NO: 5270754 - DNA, 25 bp, Homo sapien
tgggccctgaagtaatacgactctg

SEQ ID NO: 5270755 - DNA, 25 bp, Homo sapien
cttcagtagtgcaagagcctctctc

SEQ ID NO: 5270756 - DNA, 25 bp, Homo sapien
ttcagtagtgcaagagcctctctca

SEQ ID NO: 5270757 - DNA, 25 bp, Homo sapien
ctcatgatcctccagagagtgtgaa

SEQ ID NO: 5270758 - DNA, 25 bp, Homo sapien
ctctcatgatcctccagagagtgtg

SEQ ID NO: 5270759 - DNA, 25 bp, Homo sapien
ccggcactgttcatgggctatttca

SEQ ID NO: 5270760 - DNA, 25 bp, Homo sapien
ggtgccggcactgttcatgggctat

SEQ ID NO: 5270761 - DNA, 25 bp, Homo sapien
ctggtgccggcactgttcatgggct

SEQ ID NO: 5270762 - DNA, 25 bp, Homo sapien
ggcactgttcatgggctatttcata

SEQ ID NO: 5270763 - DNA, 25 bp, Homo sapien
tgatggcttgttgtccactgtacaa

SEQ ID NO: 5270764 - DNA, 25 bp, Homo sapien
gacattccaaacattcaactgatgg

SEQ ID NO: 5270765 - DNA, 25 bp, Homo sapien
tcagggaggatttgaccagactcca

SEQ ID NO: 5270766 - DNA, 25 bp, Homo sapien
gtccactgtacaaggttgcttcaca

SEQ ID NO: 5270767 - DNA, 25 bp, Homo sapien
taccgtggataaaggatcttaattc

SEQ ID NO: 5270768 - DNA, 25 bp, Homo sapien
tcccactggggattaccgtggataa

SEQ ID NO: 5270769 - DNA, 25 bp, Homo sapien
tgacctgtttggctgtccgggagcc

SEQ ID NO: 5270770 - DNA, 25 bp, Homo sapien
agattctggcgtatttcccactggg

SEQ ID NO: 5270771 - DNA, 25 bp, Homo sapien
tgctgctctgcggggctcagctgcc

SEQ ID NO: 5270772 - DNA, 25 bp, Homo sapien
ggtacacagactgctctgctcttct

SEQ ID NO: 5270773 - DNA, 25 bp, Homo sapien
cagctgcctggtacacagactgctc

SEQ ID NO: 5270774 - DNA, 25 bp, Homo sapien
gctctgctcttctttgctcagggct

SEQ ID NO: 5270775 - DNA, 25 bp, Homo sapien
tcctgggcccactgattccttccca

SEQ ID NO: 5270776 - DNA, 25 bp, Homo sapien
tccctcttgcagctgaccagcgttg

SEQ ID NO: 5270777 - DNA, 25 bp, Homo sapien
gaagtttttctcgttccctcttgca

SEQ ID NO: 5270778 - DNA, 25 bp, Homo sapien
caggggagtcaggagagacctgttc

SEQ ID NO: 5270779 - DNA, 25 bp, Homo sapien
tgagctgtggcaatatttccccagc

SEQ ID NO: 5270780 - DNA, 25 bp, Homo sapien
tatgaatgtgcattcataagcagga

SEQ ID NO: 5270781 - DNA, 25 bp, Homo sapien
aatatttccccagccgagaatatga

SEQ ID NO: 5270782 - DNA, 25 bp, Homo sapien
ccccagccgagaatatgaatgtgca

SEQ ID NO: 5270783 - DNA, 25 bp, Homo sapien
gcactgcctgggacacttaggaagt

SEQ ID NO: 5270784 - DNA, 25 bp, Homo sapien
ctgtcctcagttagcgcatattgaa

SEQ ID NO: 5270785 - DNA, 25 bp, Homo sapien
gaagtgaagtttgcccagaagacct

SEQ ID NO: 5270786 - DNA, 25 bp, Homo sapien
gtgctttcaacccagacacactgtc

SEQ ID NO: 5270787 - DNA, 25 bp, Homo sapien
gcacaggaggcaaacaaaagactgc

SEQ ID NO: 5270788 - DNA, 25 bp, Homo sapien
cacaggaggcaaacaaaagactgca

SEQ ID NO: 5270789 - DNA, 25 bp, Homo sapien
gagcacaggaggcaaacaaaagact

SEQ ID NO: 5270790 - DNA, 25 bp, Homo sapien
gggagcacaggaggcaaacaaaaga

SEQ ID NO: 5270791 - DNA, 25 bp, Homo sapien
tgtcttcatctgagtctcgttcaca

SEQ ID NO: 5270792 - DNA, 25 bp, Homo sapien
tccccggtgccatgaaacttgctgg

SEQ ID NO: 5270793 - DNA, 25 bp, Homo sapien
gagtctcgttcacaagcctgacctg

SEQ ID NO: 5270794 - DNA, 25 bp, Homo sapien
cgttcccgcatttcagagtggactc

SEQ ID NO: 5270795 - DNA, 25 bp, Homo sapien
tgtcagctgtggcaaggttatgaac

SEQ ID NO: 5270796 - DNA, 25 bp, Homo sapien
cctgaagaagctaaggttgtttgac

SEQ ID NO: 5270797 - DNA, 25 bp, Homo sapien
gttgtttgacgtgtcagctgtggca

SEQ ID NO: 5270798 - DNA, 25 bp, Homo sapien
caaggttatgaacagcgtagaataa

SEQ ID NO: 5270799 - DNA, 25 bp, Homo sapien
ggtggcatgtcctgcgaggacaggt

SEQ ID NO: 5270800 - DNA, 25 bp, Homo sapien
aaggtggcatgtcctgcgaggacag

SEQ ID NO: 5270801 - DNA, 25 bp, Homo sapien
gaaaggtggcatgtcctgcgaggac

SEQ ID NO: 5270802 - DNA, 25 bp, Homo sapien
ctgcgaggacaggtgccctcttcct

SEQ ID NO: 5270803 - DNA, 25 bp, Homo sapien
ctatttcccatgaaggatgccacac

SEQ ID NO: 5270804 - DNA, 25 bp, Homo sapien
atttcccatgaaggatgccacacac

SEQ ID NO: 5270805 - DNA, 25 bp, Homo sapien
tatttcccatgaaggatgccacaca

SEQ ID NO: 5270806 - DNA, 25 bp, Homo sapien
gggcagtgttatgtccccgcagcct

SEQ ID NO: 5270807 - DNA, 25 bp, Homo sapien
tgggcttcaagacaaactctctgct

SEQ ID NO: 5270808 - DNA, 25 bp, Homo sapien
cctttgaccaggacaggggcagtgt

SEQ ID NO: 5270809 - DNA, 25 bp, Homo sapien
ttctattcttgtgcccaggggccag

SEQ ID NO: 5270810 - DNA, 25 bp, Homo sapien
ctctgggagattgtcttctatgatc

SEQ ID NO: 5270811 - DNA, 25 bp, Homo sapien
ttccttgcagtgactctctcgcctc

SEQ ID NO: 5270812 - DNA, 25 bp, Homo sapien
gcaggattctgggagcttacccttc

SEQ ID NO: 5270813 - DNA, 25 bp, Homo sapien
cttcttcgggtttgcacaaatttca

SEQ ID NO: 5270814 - DNA, 25 bp, Homo sapien
gcacaacgtcacacctttgcaaatt

SEQ ID NO: 5270815 - DNA, 25 bp, Homo sapien
gcagtggcttttgcacaacgtcaca

SEQ ID NO: 5270816 - DNA, 25 bp, Homo sapien
gcttttgcacaacgtcacacctttg

SEQ ID NO: 5270817 - DNA, 25 bp, Homo sapien
caacgtcacacctttgcaaattgtg

SEQ ID NO: 5270818 - DNA, 25 bp, Homo sapien
tctgtgatttgttctgctggatgat

SEQ ID NO: 5270819 - DNA, 25 bp, Homo sapien
aagcgtccttgacatgtcctcacag

SEQ ID NO: 5270820 - DNA, 25 bp, Homo sapien
gagcctgactccgagggctctctgg

SEQ ID NO: 5270821 - DNA, 25 bp, Homo sapien
gtcctcacagtcaccagatctgaga

SEQ ID NO: 5270822 - DNA, 25 bp, Homo sapien
aggtcagaagtgcactctcccggaa

SEQ ID NO: 5270823 - DNA, 25 bp, Homo sapien
ggtcagaagtgcactctcccggaat

SEQ ID NO: 5270824 - DNA, 25 bp, Homo sapien
tcagaagtgcactctcccggaatgc

SEQ ID NO: 5270825 - DNA, 25 bp, Homo sapien
gaagtgcactctcccggaatgcgta

SEQ ID NO: 5270826 - DNA, 25 bp, Homo sapien
gacctcaagggaactgctacctcca

SEQ ID NO: 5270827 - DNA, 25 bp, Homo sapien
gcaggaccatgacctcaagggaact

SEQ ID NO: 5270828 - DNA, 25 bp, Homo sapien
tactggagcgtatgtagcaggacca

SEQ ID NO: 5270829 - DNA, 25 bp, Homo sapien
ctccaccgctacagtgaacagtgag

SEQ ID NO: 5270830 - DNA, 25 bp, Homo sapien
ctccaccgccgcagtgaacggtgac

SEQ ID NO: 5270831 - DNA, 25 bp, Homo sapien
cgccgcagtgaacggtgacgctgta

SEQ ID NO: 5270832 - DNA, 25 bp, Homo sapien
caccgccgcagtgaacggtgacgct

SEQ ID NO: 5270833 - DNA, 25 bp, Homo sapien
ccgccgcagtgaacggtgacgctgt

SEQ ID NO: 5270834 - DNA, 25 bp, Homo sapien
ctccaccgccgcagtgaacggtgac

SEQ ID NO: 5270835 - DNA, 25 bp, Homo sapien
caccgccgcagtgaacggtgacgct

SEQ ID NO: 5270836 - DNA, 25 bp, Homo sapien
cgccgcagtgaacggtgacgctgta

SEQ ID NO: 5270837 - DNA, 25 bp, Homo sapien
ccgccgcagtgaacggtgacgctgt

SEQ ID NO: 5270838 - DNA, 25 bp, Homo sapien
gcagtgaacggtgacgctgtacttc

SEQ ID NO: 5270839 - DNA, 25 bp, Homo sapien
agtgaacggtgacgctgtacttcca

SEQ ID NO: 5270840 - DNA, 25 bp, Homo sapien
cagtgaatagggacactgtgcgcca

SEQ ID NO: 5270841 - DNA, 25 bp, Homo sapien
acttccactgctacagtgaataggg

SEQ ID NO: 5270842 - DNA, 25 bp, Homo sapien
ctcattgccacccatgcagaaggga

SEQ ID NO: 5270843 - DNA, 25 bp, Homo sapien
ggagaaccagtgaccttcttcctct

SEQ ID NO: 5270844 - DNA, 25 bp, Homo sapien
cttcctctctgagtgtctgtctctc

SEQ ID NO: 5270845 - DNA, 25 bp, Homo sapien
gggagaaccagtgaccttcttcctc

SEQ ID NO: 5270846 - DNA, 25 bp, Homo sapien
tgtggcttccgtaaaaattcacttg

SEQ ID NO: 5270847 - DNA, 25 bp, Homo sapien
tcagagctttagactctcgtgttgg

SEQ ID NO: 5270848 - DNA, 25 bp, Homo sapien
ggtcatatcctttttgcacaactat

SEQ ID NO: 5270849 - DNA, 25 bp, Homo sapien
ttcacttggtaattgcagctgcact

SEQ ID NO: 5270850 - DNA, 25 bp, Homo sapien
gttctactaccaggcgtaacaaagc

SEQ ID NO: 5270851 - DNA, 25 bp, Homo sapien
ctccagttctactaccaggcgtaac

SEQ ID NO: 5270852 - DNA, 25 bp, Homo sapien
aggcgtaacaaagcctccaccagat

SEQ ID NO: 5270853 - DNA, 25 bp, Homo sapien
tactaccaggcgtaacaaagcctcc

SEQ ID NO: 5270854 - DNA, 25 bp, Homo sapien
gactctctgaaggatgatgccctcc

SEQ ID NO: 5270855 - DNA, 25 bp, Homo sapien
ccactaggagacagtcgggctctga

SEQ ID NO: 5270856 - DNA, 25 bp, Homo sapien
caatgtatccctccagactctctga

SEQ ID NO: 5270857 - DNA, 25 bp, Homo sapien
ggcttccaccctgctcacaatgtat

SEQ ID NO: 5270858 - DNA, 25 bp, Homo sapien
tctgatgtaatgtctccccagttgg

SEQ ID NO: 5270859 - DNA, 25 bp, Homo sapien
tcttggttacatagtcgttctgatg

SEQ ID NO: 5270860 - DNA, 25 bp, Homo sapien
cccaggcctgatgcgggatctggtc

SEQ ID NO: 5270861 - DNA, 25 bp, Homo sapien
ggctgcttcggcagcccaggcctga

SEQ ID NO: 5270862 - DNA, 25 bp, Homo sapien
ttcacatttcgggaaagcctgggcc

SEQ ID NO: 5270863 - DNA, 25 bp, Homo sapien
taagaaaagatccttggacttcatg

SEQ ID NO: 5270864 - DNA, 25 bp, Homo sapien
acttcatggtctcaagtggactttg

SEQ ID NO: 5270865 - DNA, 25 bp, Homo sapien
tcatggtctcaagtggactttgtgt

SEQ ID NO: 5270866 - DNA, 25 bp, Homo sapien
tctttatttgagaggtttccccaca

SEQ ID NO: 5270867 - DNA, 25 bp, Homo sapien
gacagggtggccgtctttatcacga

SEQ ID NO: 5270868 - DNA, 25 bp, Homo sapien
cctaaatgcttgattctgaccacac

SEQ ID NO: 5270869 - DNA, 25 bp, Homo sapien
cacattgactcagacaaccttgggt

SEQ ID NO: 5270870 - DNA, 25 bp, Homo sapien
cactcctcctcagactctagacttt

SEQ ID NO: 5270871 - DNA, 25 bp, Homo sapien
ttcctgaccctggatttcatcacct

SEQ ID NO: 5270872 - DNA, 25 bp, Homo sapien
ctctgattgtatcttgatgattgct

SEQ ID NO: 5270873 - DNA, 25 bp, Homo sapien
accagctctgattgtatcttgatga

SEQ ID NO: 5270874 - DNA, 25 bp, Homo sapien
gattgtatcttgatgattgctgaca

SEQ ID NO: 5270875 - DNA, 25 bp, Homo sapien
ccagctctgattgtatcttgatgat

SEQ ID NO: 5270876 - DNA, 25 bp, Homo sapien
ccctttgactgacaaactggaacag

SEQ ID NO: 5270877 - DNA, 25 bp, Homo sapien
ctttgactgacaaactggaacagta

SEQ ID NO: 5270878 - DNA, 25 bp, Homo sapien
cctttgactgacaaactggaacagt

SEQ ID NO: 5270879 - DNA, 25 bp, Homo sapien
tttgactgacaaactggaacagtac

SEQ ID NO: 5270880 - DNA, 25 bp, Homo sapien
tattgtgttgacgaatctcaaactg

SEQ ID NO: 5270881 - DNA, 25 bp, Homo sapien
aaggagagcaagatgcaaattgaga

SEQ ID NO: 5270882 - DNA, 25 bp, Homo sapien
attgaatctctctctggccgtctct

SEQ ID NO: 5270883 - DNA, 25 bp, Homo sapien
agttttcatgataatcggtcttttc

SEQ ID NO: 5270884 - DNA, 25 bp, Homo sapien
caccgggatctgagaaaggagcagt

SEQ ID NO: 5270885 - DNA, 25 bp, Homo sapien
agaaaggagcagtaacgataagcat

SEQ ID NO: 5270886 - DNA, 25 bp, Homo sapien
gagaattgaggcaaatgcaccggga

SEQ ID NO: 5270887 - DNA, 25 bp, Homo sapien
gatactccgggagagaattgaggca

SEQ ID NO: 5270888 - DNA, 25 bp, Homo sapien
gaaatgtgtgccctgtctcactggg

SEQ ID NO: 5270889 - DNA, 25 bp, Homo sapien
tgggcacagtaggataagctctttg

SEQ ID NO: 5270890 - DNA, 25 bp, Homo sapien
aatgtgtgccctgtctcactgggca

SEQ ID NO: 5270891 - DNA, 25 bp, Homo sapien
aaactgaaatgtgtgccctgtctca

SEQ ID NO: 5270892 - DNA, 25 bp, Homo sapien
acataagcaaaagctgtgccacaga

SEQ ID NO: 5270893 - DNA, 25 bp, Homo sapien
taagcaaaagctgtgccacagaaat

SEQ ID NO: 5270894 - DNA, 25 bp, Homo sapien
aattttcatgctttgtcagcacgca

SEQ ID NO: 5270895 - DNA, 25 bp, Homo sapien
tttgtcagcacgcagatgggagcag

SEQ ID NO: 5270896 - DNA, 25 bp, Homo sapien
tgtgggtttgagcacatgtaaggca

SEQ ID NO: 5270897 - DNA, 25 bp, Homo sapien
ctgtgggtttgagcacatgtaaggc

SEQ ID NO: 5270898 - DNA, 25 bp, Homo sapien
gtgggtttgagcacatgtaaggcat

SEQ ID NO: 5270899 - DNA, 25 bp, Homo sapien
gcatccccagtgcagctgcttctgg

SEQ ID NO: 5270900 - DNA, 25 bp, Homo sapien
catccccagtgcagctgcttctgga

SEQ ID NO: 5270901 - DNA, 25 bp, Homo sapien
tccccagtgcagctgcttctggact

SEQ ID NO: 5270902 - DNA, 25 bp, Homo sapien
tgcatccccagtgcagctgcttctg

SEQ ID NO: 5270903 - DNA, 25 bp, Homo sapien
tacgtagtaggttgtgcctcctcct

SEQ ID NO: 5270904 - DNA, 25 bp, Homo sapien
tattcctgcactgtctggacccaca

SEQ ID NO: 5270905 - DNA, 25 bp, Homo sapien
ttcctgattgcaaaggctacgtagt

SEQ ID NO: 5270906 - DNA, 25 bp, Homo sapien
tctggacccacaagctcagagaaag

SEQ ID NO: 5270907 - DNA, 25 bp, Homo sapien
ccagtcttataaggcaggtattgtt

SEQ ID NO: 5270908 - DNA, 25 bp, Homo sapien
cagaaccagtcttataaggcaggta

SEQ ID NO: 5270909 - DNA, 25 bp, Homo sapien
aggcaggtattgttctctataagaa

SEQ ID NO: 5270910 - DNA, 25 bp, Homo sapien
tcttataaggcaggtattgttctct

SEQ ID NO: 5270911 - DNA, 25 bp, Homo sapien
gagcctttgacatggcgtctgatgc

SEQ ID NO: 5270912 - DNA, 25 bp, Homo sapien
gggagcctttgacatggcgtctgat

SEQ ID NO: 5270913 - DNA, 25 bp, Homo sapien
gcctttgacatggcgtctgatgcat

SEQ ID NO: 5270914 - DNA, 25 bp, Homo sapien
acagcctttgagatgtaagtctcaa

SEQ ID NO: 5270915 - DNA, 25 bp, Homo sapien
gggcctccatccagtggtgtctgat

SEQ ID NO: 5270916 - DNA, 25 bp, Homo sapien
gtctcaatgatttaggatgatcaga

SEQ ID NO: 5270917 - DNA, 25 bp, Homo sapien
gccccagcctctgagtgtgaaagca

SEQ ID NO: 5270918 - DNA, 25 bp, Homo sapien
tgtctgatagccctgggccaactgc

SEQ ID NO: 5270919 - DNA, 25 bp, Homo sapien
gcgcatttcatctgagtacccagtg

SEQ ID NO: 5270920 - DNA, 25 bp, Homo sapien
gcatttcatctgagtacccagtgat

SEQ ID NO: 5270921 - DNA, 25 bp, Homo sapien
agcgcatttcatctgagtacccagt

SEQ ID NO: 5270922 - DNA, 25 bp, Homo sapien
cgcatttcatctgagtacccagtga

SEQ ID NO: 5270923 - DNA, 25 bp, Homo sapien
tggccaccagacaaacatccctggc

SEQ ID NO: 5270924 - DNA, 25 bp, Homo sapien
tctgggctcaaggtagacgccctcc

SEQ ID NO: 5270925 - DNA, 25 bp, Homo sapien
actctgggctcaaggtagacgccct

SEQ ID NO: 5270926 - DNA, 25 bp, Homo sapien
ccactctgggctcaaggtagacgcc

SEQ ID NO: 5270927 - DNA, 25 bp, Homo sapien
caagcaatcaagtacttggagaagc

SEQ ID NO: 5270928 - DNA, 25 bp, Homo sapien
ggagacacataagtattctggataa

SEQ ID NO: 5270929 - DNA, 25 bp, Homo sapien
gaagctactatagtccaatttcaag

SEQ ID NO: 5270930 - DNA, 25 bp, Homo sapien
ttgggtggtcaatctctggtatgga

SEQ ID NO: 5270931 - DNA, 25 bp, Homo sapien
atctggttatatcagtgttaggaat

SEQ ID NO: 5270932 - DNA, 25 bp, Homo sapien
gatactcatacaccttggtaaatct

SEQ ID NO: 5270933 - DNA, 25 bp, Homo sapien
gaagtttccccgtgaatagtaatga

SEQ ID NO: 5270934 - DNA, 25 bp, Homo sapien
ccttgttttttgatactcatacacc

SEQ ID NO: 5270935 - DNA, 25 bp, Homo sapien
tagtaggacagaatgaattgaaatt

SEQ ID NO: 5270936 - DNA, 25 bp, Homo sapien
ctgttccatagtaggacagaatgaa

SEQ ID NO: 5270937 - DNA, 25 bp, Homo sapien
ttccatagtaggacagaatgaattg

SEQ ID NO: 5270938 - DNA, 25 bp, Homo sapien
ccatagtaggacagaatgaattgaa

SEQ ID NO: 5270939 - DNA, 25 bp, Homo sapien
tctgcactcctaggcccattacctc

SEQ ID NO: 5270940 - DNA, 25 bp, Homo sapien
ggaccatgtcttgcaaggtccacca

SEQ ID NO: 5270941 - DNA, 25 bp, Homo sapien
gaccatgtcttgcaaggtccaccat

SEQ ID NO: 5270942 - DNA, 25 bp, Homo sapien
ctcaccttctgcactcctaggccca

SEQ ID NO: 5270943 - DNA, 25 bp, Homo sapien
ccatggagagcaaggaagggaaaca

SEQ ID NO: 5270944 - DNA, 25 bp, Homo sapien
tggagagcaaggaagggaaacagga

SEQ ID NO: 5270945 - DNA, 25 bp, Homo sapien
tccatggagagcaaggaagggaaac

SEQ ID NO: 5270946 - DNA, 25 bp, Homo sapien
catggagagcaaggaagggaaacag

SEQ ID NO: 5270947 - DNA, 25 bp, Homo sapien
caagtccgtagcatccatcgaaggg

SEQ ID NO: 5270948 - DNA, 25 bp, Homo sapien
gacgtgtttccttggcagtggatcc

SEQ ID NO: 5270949 - DNA, 25 bp, Homo sapien
ggtggagcttagtatgccaaccaca

SEQ ID NO: 5270950 - DNA, 25 bp, Homo sapien
cacacactgctctgtgacgtgtttc

SEQ ID NO: 5270951 - DNA, 25 bp, Homo sapien
taaatgcattgagaaagctaataaa

SEQ ID NO: 5270952 - DNA, 25 bp, Homo sapien
aaatgcattgagaaagctaataaac

SEQ ID NO: 5270953 - DNA, 25 bp, Homo sapien
gtaaatgcattgagaaagctaataa

SEQ ID NO: 5270954 - DNA, 25 bp, Homo sapien
atgtagtaaatgcattgagaaagct

SEQ ID NO: 5270955 - DNA, 25 bp, Homo sapien
tagtcaatcctttatggctccaggg

SEQ ID NO: 5270956 - DNA, 25 bp, Homo sapien
gatttttctctcaaccatgcgaggg

SEQ ID NO: 5270957 - DNA, 25 bp, Homo sapien
tacatttaaacactggtcctgccgc

SEQ ID NO: 5270958 - DNA, 25 bp, Homo sapien
tcttgaacgagaaatggcgggactc

SEQ ID NO: 5270959 - DNA, 25 bp, Homo sapien
gctcatagtcatgtcttttactaaa

SEQ ID NO: 5270960 - DNA, 25 bp, Homo sapien
tccttcttctgctcatagtcatgtc

SEQ ID NO: 5270961 - DNA, 25 bp, Homo sapien
aagcaccatggaagattcaacccgg

SEQ ID NO: 5270962 - DNA, 25 bp, Homo sapien
ccggaatgtgaggtggtccttgcct

SEQ ID NO: 5270963 - DNA, 25 bp, Homo sapien
taaggcatatgggagattcactcct

SEQ ID NO: 5270964 - DNA, 25 bp, Homo sapien
gagcagatggagactaagcatgtca

SEQ ID NO: 5270965 - DNA, 25 bp, Homo sapien
gatggagactaagcatgtcatagaa

SEQ ID NO: 5270966 - DNA, 25 bp, Homo sapien
gcaggcatggcccaatggtaaggca

SEQ ID NO: 5270967 - DNA, 25 bp, Homo sapien
tcagggacgttttgcttgaagacaa

SEQ ID NO: 5270968 - DNA, 25 bp, Homo sapien
ttttgcttgaagacaatgtgtctgc

SEQ ID NO: 5270969 - DNA, 25 bp, Homo sapien
ttcggtggagtctaaatgcagacag

SEQ ID NO: 5270970 - DNA, 25 bp, Homo sapien
tgcagacagcaattgtacgtggctt

SEQ ID NO: 5270971 - DNA, 25 bp, Homo sapien
catatttcccgcagttgaaagtgtt

SEQ ID NO: 5270972 - DNA, 25 bp, Homo sapien
gagtattccatcttgtctgtattgg

SEQ ID NO: 5270973 - DNA, 25 bp, Homo sapien
ccaaagtattgggacatatttcccg

SEQ ID NO: 5270974 - DNA, 25 bp, Homo sapien
ggaattgaattgtactgtggttttc

SEQ ID NO: 5270975 - DNA, 25 bp, Homo sapien
tttttgccttatccagtggatccca

SEQ ID NO: 5270976 - DNA, 25 bp, Homo sapien
tccagtggatcccaacctgagctat

SEQ ID NO: 5270977 - DNA, 25 bp, Homo sapien
caacctgagctatgtatctgcatct

SEQ ID NO: 5270978 - DNA, 25 bp, Homo sapien
gccttatccagtggatcccaacctg

SEQ ID NO: 5270979 - DNA, 25 bp, Homo sapien
gaaggtgtgcacagcacttgcacgt

SEQ ID NO: 5270980 - DNA, 25 bp, Homo sapien
ttctcaagccatggtccggttcctg

SEQ ID NO: 5270981 - DNA, 25 bp, Homo sapien
aggaaggtcctcaactcggaaggtg

SEQ ID NO: 5270982 - DNA, 25 bp, Homo sapien
tgcacgtaaattcccttcaccagaa

SEQ ID NO: 5270983 - DNA, 25 bp, Homo sapien
gcatgccttgcgggtcactcattgg

SEQ ID NO: 5270984 - DNA, 25 bp, Homo sapien
atgccttgcgggtcactcattggct

SEQ ID NO: 5270985 - DNA, 25 bp, Homo sapien
catgccttgcgggtcactcattggc

SEQ ID NO: 5270986 - DNA, 25 bp, Homo sapien
agcatgccttgcgggtcactcattg

SEQ ID NO: 5270987 - DNA, 25 bp, Homo sapien
agcactactgggaaatatataacac

SEQ ID NO: 5270988 - DNA, 25 bp, Homo sapien
aaatagaggcagttgttgttattcc

SEQ ID NO: 5270989 - DNA, 25 bp, Homo sapien
ttgcaaacccatgaagggaacctcg

SEQ ID NO: 5270990 - DNA, 25 bp, Homo sapien
ggagataatatttactaccaagttc

SEQ ID NO: 5270991 - DNA, 25 bp, Homo sapien
tgaccgccaagtgcttggacccagg

SEQ ID NO: 5270992 - DNA, 25 bp, Homo sapien
ggtgaccgccaagtgcttggaccca

SEQ ID NO: 5270993 - DNA, 25 bp, Homo sapien
accgccaagtgcttggacccaggca

SEQ ID NO: 5270994 - DNA, 25 bp, Homo sapien
caggtgaccgccaagtgcttggacc

SEQ ID NO: 5270995 - DNA, 25 bp, Homo sapien
cttcgttaaacttcactcggaagtg

SEQ ID NO: 5270996 - DNA, 25 bp, Homo sapien
taggccctttcacagtagccccgga

SEQ ID NO: 5270997 - DNA, 25 bp, Homo sapien
ttaaacttcactcggaagtgcttca

SEQ ID NO: 5270998 - DNA, 25 bp, Homo sapien
agcccgtggcgccgcaggatggtgt

SEQ ID NO: 5270999 - DNA, 25 bp, Homo sapien
agagaagcccgtggcgccgcaggat

SEQ ID NO: 5271000 - DNA, 25 bp, Homo sapien
atggacaaagtcataggtgaggatg

SEQ ID NO: 5271001 - DNA, 25 bp, Homo sapien
agtcataggtgaggatgaatgggac

SEQ ID NO: 5271002 - DNA, 25 bp, Homo sapien
cataggtgaggatgaatgggacacg

SEQ ID NO: 5271003 - DNA, 25 bp, Homo sapien
caaagtcataggtgaggatgaatgg

SEQ ID NO: 5271004 - DNA, 25 bp, Homo sapien
gcaaaaatcaatgtggaacagctgc

SEQ ID NO: 5271005 - DNA, 25 bp, Homo sapien
aaatcaatgtggaacagctgcccac

SEQ ID NO: 5271006 - DNA, 25 bp, Homo sapien
ttcccccagaaagtggcaaaaatca

SEQ ID NO: 5271007 - DNA, 25 bp, Homo sapien
cttgaaattcccccagaaagtggca

SEQ ID NO: 5271008 - DNA, 25 bp, Homo sapien
tccatccatgttgcggttgttgagt

SEQ ID NO: 5271009 - DNA, 25 bp, Homo sapien
atcaccgatgcccagcacgtacgtg

SEQ ID NO: 5271010 - DNA, 25 bp, Homo sapien
gggtgaactcttcgttgcctccatc

SEQ ID NO: 5271011 - DNA, 25 bp, Homo sapien
gtacgtggccacacagtagccagca

SEQ ID NO: 5271012 - DNA, 25 bp, Homo sapien
gggtggagtagcacctcaacgacgc

SEQ ID NO: 5271013 - DNA, 25 bp, Homo sapien
tgggtggagtagcacctcaacgacg

SEQ ID NO: 5271014 - DNA, 25 bp, Homo sapien
gagccggatcgtctgcatggtcagc

SEQ ID NO: 5271015 - DNA, 25 bp, Homo sapien
cggatcgtctgcatggtcagcatgt

SEQ ID NO: 5271016 - DNA, 25 bp, Homo sapien
tcatccctcttaaggctgacgctca

SEQ ID NO: 5271017 - DNA, 25 bp, Homo sapien
cgtccatgagccggatcgtctgcat

SEQ ID NO: 5271018 - DNA, 25 bp, Homo sapien
tgcctcctcattgctgtacatgatc

SEQ ID NO: 5271019 - DNA, 25 bp, Homo sapien
tcctcattgctgtacatgatccaca

SEQ ID NO: 5271020 - DNA, 25 bp, Homo sapien
tgcctgcctcctcattgctgtacat

SEQ ID NO: 5271021 - DNA, 25 bp, Homo sapien
tcatcttggagtccatgagggtgca

SEQ ID NO: 5271022 - DNA, 25 bp, Homo sapien
cagcagggtgctggggttgagtggg

SEQ ID NO: 5271023 - DNA, 25 bp, Homo sapien
ttcagccagcagggtgctggggttg

SEQ ID NO: 5271024 - DNA, 25 bp, Homo sapien
cagccagcagggtgctggggttgag

SEQ ID NO: 5271025 - DNA, 25 bp, Homo sapien
ccagcagggtgctggggttgagtgg

SEQ ID NO: 5271026 - DNA, 25 bp, Homo sapien
cacttctttctccatattcactagg

SEQ ID NO: 5271027 - DNA, 25 bp, Homo sapien
ttcactaggtccctgggtttgtcac

SEQ ID NO: 5271028 - DNA, 25 bp, Homo sapien
cttctttctccatattcactaggtc

SEQ ID NO: 5271029 - DNA, 25 bp, Homo sapien
aggtccctgggtttgtcactattag

SEQ ID NO: 5271030 - DNA, 25 bp, Homo sapien
gaattgatgtgtgcaaggcaagaac

SEQ ID NO: 5271031 - DNA, 25 bp, Homo sapien
tagtgtgcaggccaagtgactcatg

SEQ ID NO: 5271032 - DNA, 25 bp, Homo sapien
ctccgggcagtgactaggtccaaaa

SEQ ID NO: 5271033 - DNA, 25 bp, Homo sapien
cctgcggtattcatgacagtgagaa

SEQ ID NO: 5271034 - DNA, 25 bp, Homo sapien
ggtacagctgtgctaaccctggctt

SEQ ID NO: 5271035 - DNA, 25 bp, Homo sapien
aggaactgggatgctgacacgccca

SEQ ID NO: 5271036 - DNA, 25 bp, Homo sapien
ggtctcctcaccagttcttgtttgc

SEQ ID NO: 5271037 - DNA, 25 bp, Homo sapien
cgcccaacaagcacaggtacagctg

SEQ ID NO: 5271038 - DNA, 25 bp, Homo sapien
tgtagcctgctgttgagatgctggc

SEQ ID NO: 5271039 - DNA, 25 bp, Homo sapien
gtagcctgctgttgagatgctggca

SEQ ID NO: 5271040 - DNA, 25 bp, Homo sapien
tactatattctgaggaattccattt

SEQ ID NO: 5271041 - DNA, 25 bp, Homo sapien
tttcaccctgccgtctccatgaaaa

SEQ ID NO: 5271042 - DNA, 25 bp, Homo sapien
ctctttcaccctgccgtctccatga

SEQ ID NO: 5271043 - DNA, 25 bp, Homo sapien
agcttgcaggctactatattctgag

SEQ ID NO: 5271044 - DNA, 25 bp, Homo sapien
gtctaggacgtttccatgatatgcc

SEQ ID NO: 5271045 - DNA, 25 bp, Homo sapien
ccaagtctaggacgtttccatgata

SEQ ID NO: 5271046 - DNA, 25 bp, Homo sapien
tagttccaagtctaggacgtttcca

SEQ ID NO: 5271047 - DNA, 25 bp, Homo sapien
gacgtttccatgatatgccttcttc

SEQ ID NO: 5271048 - DNA, 25 bp, Homo sapien
gctttcttgataaccctctgccgat

SEQ ID NO: 5271049 - DNA, 25 bp, Homo sapien
aaaagtgaaatactctggccgtcgt

SEQ ID NO: 5271050 - DNA, 25 bp, Homo sapien
ggtgagctgccctgttaagtgttcc

SEQ ID NO: 5271051 - DNA, 25 bp, Homo sapien
cggccattgatatgcgtgtcgggat

SEQ ID NO: 5271052 - DNA, 25 bp, Homo sapien
tcttgtaattgggatcctacggcgc

SEQ ID NO: 5271053 - DNA, 25 bp, Homo sapien
attgggatcctacggcgctctcttc

SEQ ID NO: 5271054 - DNA, 25 bp, Homo sapien
tgtaattgggatcctacggcgctct

SEQ ID NO: 5271055 - DNA, 25 bp, Homo sapien
gactcttgtaattgggatcctacgg

SEQ ID NO: 5271056 - DNA, 25 bp, Homo sapien
agctctgagtgtgacggtacagact

SEQ ID NO: 5271057 - DNA, 25 bp, Homo sapien
ctgtaaccgacactgctcatgtgca

SEQ ID NO: 5271058 - DNA, 25 bp, Homo sapien
ggtacagactgtaaccgacactgct

SEQ ID NO: 5271059 - DNA, 25 bp, Homo sapien
tgagtgtgacggtacagactgtaac

SEQ ID NO: 5271060 - DNA, 25 bp, Homo sapien
taatattgctcaatgtgtaaaacac

SEQ ID NO: 5271061 - DNA, 25 bp, Homo sapien
ctaatattgctcaatgtgtaaaaca

SEQ ID NO: 5271062 - DNA, 25 bp, Homo sapien
ttggtagccgactgtctgagagcac

SEQ ID NO: 5271063 - DNA, 25 bp, Homo sapien
gagttatatgcaaatcctccatggc

SEQ ID NO: 5271064 - DNA, 25 bp, Homo sapien
caatcaggagtacaacagagttgct

SEQ ID NO: 5271065 - DNA, 25 bp, Homo sapien
gaacatcgagaaatcttggtagccg

SEQ ID NO: 5271066 - DNA, 25 bp, Homo sapien
aggctctacggccatccagcaatcg

SEQ ID NO: 5271067 - DNA, 25 bp, Homo sapien
ctgaaatacctgatagtgagaactg

SEQ ID NO: 5271068 - DNA, 25 bp, Homo sapien
ttagaaaggctctacggccatccag

SEQ ID NO: 5271069 - DNA, 25 bp, Homo sapien
gagaactggcctctcttagaaaggc

SEQ ID NO: 5271070 - DNA, 25 bp, Homo sapien
ctcacaaatttaggattttgaaggc

SEQ ID NO: 5271071 - DNA, 25 bp, Homo sapien
ttcctagttctgcatacccatggtg

SEQ ID NO: 5271072 - DNA, 25 bp, Homo sapien
catggtgcactgaacgatgcttggc

SEQ ID NO: 5271073 - DNA, 25 bp, Homo sapien
acgatgcttggcaaacagtaattct

SEQ ID NO: 5271074 - DNA, 25 bp, Homo sapien
tctcctggaatctcgtgggttttgt

SEQ ID NO: 5271075 - DNA, 25 bp, Homo sapien
acttgctggtgaatggctagccaca

SEQ ID NO: 5271076 - DNA, 25 bp, Homo sapien
tgggtgaaacactcttcaggtttca

SEQ ID NO: 5271077 - DNA, 25 bp, Homo sapien
aacatatgtgctgggtagccatgcc

SEQ ID NO: 5271078 - DNA, 25 bp, Homo sapien
gaaggacaatacatcatcccagcgc

SEQ ID NO: 5271079 - DNA, 25 bp, Homo sapien
ttctctgtgaaagcagggtgtcaag

SEQ ID NO: 5271080 - DNA, 25 bp, Homo sapien
gaggcatcccctctctaaagcattg

SEQ ID NO: 5271081 - DNA, 25 bp, Homo sapien
cactgatgaccgattgtctgaggca

SEQ ID NO: 5271082 - DNA, 25 bp, Homo sapien
catttcgccctttgttctgaggtga

SEQ ID NO: 5271083 - DNA, 25 bp, Homo sapien
taatccagagactcagtacatcagc

SEQ ID NO: 5271084 - DNA, 25 bp, Homo sapien
cagagagaagttcgcagattccggt

SEQ ID NO: 5271085 - DNA, 25 bp, Homo sapien
taagaatggtcttacaaagtgacga

SEQ ID NO: 5271086 - DNA, 25 bp, Homo sapien
atatctagttctgtcttccgttcac

SEQ ID NO: 5271087 - DNA, 25 bp, Homo sapien
caaatttatatctagttctgtcttc

SEQ ID NO: 5271088 - DNA, 25 bp, Homo sapien
agaatctcacagcagttttagcaac

SEQ ID NO: 5271089 - DNA, 25 bp, Homo sapien
gaaactttcttagccagaatctcac

SEQ ID NO: 5271090 - DNA, 25 bp, Homo sapien
atcctgtagctcaggtgaattctcc

SEQ ID NO: 5271091 - DNA, 25 bp, Homo sapien
acatcctgtagctcaggtgaattct

SEQ ID NO: 5271092 - DNA, 25 bp, Homo sapien
catcctgtagctcaggtgaattctc

SEQ ID NO: 5271093 - DNA, 25 bp, Homo sapien
tcctgtagctcaggtgaattctcca

SEQ ID NO: 5271094 - DNA, 25 bp, Homo sapien
ttcgtcacacgtgtgttacaggtga

SEQ ID NO: 5271095 - DNA, 25 bp, Homo sapien
ggccaatttcgtcacacgtgtgtta

SEQ ID NO: 5271096 - DNA, 25 bp, Homo sapien
cgtgtgttacaggtgactccaatag

SEQ ID NO: 5271097 - DNA, 25 bp, Homo sapien
cacaggccaatttcgtcacacgtgt

SEQ ID NO: 5271098 - DNA, 25 bp, Homo sapien
tgctatgctgtcatctttaacttca

SEQ ID NO: 5271099 - DNA, 25 bp, Homo sapien
tgctgctatgctgtcatctttaact

SEQ ID NO: 5271100 - DNA, 25 bp, Homo sapien
ctatgctgtcatctttaacttcata

SEQ ID NO: 5271101 - DNA, 25 bp, Homo sapien
gctgctatgctgtcatctttaactt

SEQ ID NO: 5271102 - DNA, 25 bp, Homo sapien
cataacaacaacataatgctgttgc

SEQ ID NO: 5271103 - DNA, 25 bp, Homo sapien
tgcttgttggctttacctctctctc

SEQ ID NO: 5271104 - DNA, 25 bp, Homo sapien
taatgctgttgcagaaacttggaga

SEQ ID NO: 5271105 - DNA, 25 bp, Homo sapien
aatgctgttgcagaaacttggagat

SEQ ID NO: 5271106 - DNA, 25 bp, Homo sapien
ctgtagggtgaagagctgagcttca

SEQ ID NO: 5271107 - DNA, 25 bp, Homo sapien
gaatattagcaaggacagtgagctt

SEQ ID NO: 5271108 - DNA, 25 bp, Homo sapien
ggacagtgagcttagttttgactga

SEQ ID NO: 5271109 - DNA, 25 bp, Homo sapien
ctggggcagaatattagcaaggaca

SEQ ID NO: 5271110 - DNA, 25 bp, Homo sapien
gggcagaatattagcaaggacagtg

SEQ ID NO: 5271111 - DNA, 25 bp, Homo sapien
cttcacaaagcaaaaaccaaagtat

SEQ ID NO: 5271112 - DNA, 25 bp, Homo sapien
tgcacagccttgtggataatgagct

SEQ ID NO: 5271113 - DNA, 25 bp, Homo sapien
caaatgtggaagcatctagacctct

SEQ ID NO: 5271114 - DNA, 25 bp, Homo sapien
ggtggttctcacatgataactcaga

SEQ ID NO: 5271115 - DNA, 25 bp, Homo sapien
aaactttgcgtcctaacaacagtga

SEQ ID NO: 5271116 - DNA, 25 bp, Homo sapien
ctgcagggatgagagaattttggcc

SEQ ID NO: 5271117 - DNA, 25 bp, Homo sapien
tgcagggatgagagaattttggcca

SEQ ID NO: 5271118 - DNA, 25 bp, Homo sapien
gcagggatgagagaattttggccat

SEQ ID NO: 5271119 - DNA, 25 bp, Homo sapien
ttgcagataatccaccacagtccct

SEQ ID NO: 5271120 - DNA, 25 bp, Homo sapien
gcagataatccaccacagtccctcc

SEQ ID NO: 5271121 - DNA, 25 bp, Homo sapien
tttgcagataatccaccacagtccc

SEQ ID NO: 5271122 - DNA, 25 bp, Homo sapien
agataatccaccacagtccctccat

SEQ ID NO: 5271123 - DNA, 25 bp, Homo sapien
cagcaggtaggtgagtactccacag

SEQ ID NO: 5271124 - DNA, 25 bp, Homo sapien
cagggaagccaaactgtcaatctca

SEQ ID NO: 5271125 - DNA, 25 bp, Homo sapien
tcaagtccctaatctgtgacctgct

SEQ ID NO: 5271126 - DNA, 25 bp, Homo sapien
ggctttgccacccagaacagggaag

SEQ ID NO: 5271127 - DNA, 25 bp, Homo sapien
ggtgaagaccaacgagatgatgaac

SEQ ID NO: 5271128 - DNA, 25 bp, Homo sapien
gatgatgaacatgtagcacatatct

SEQ ID NO: 5271129 - DNA, 25 bp, Homo sapien
tgcctgttagcatgaaaaaagaggc

SEQ ID NO: 5271130 - DNA, 25 bp, Homo sapien
gaattccacgagaagagctcaaact

SEQ ID NO: 5271131 - DNA, 25 bp, Homo sapien
gtgcagaggacttcacagagacagg

SEQ ID NO: 5271132 - DNA, 25 bp, Homo sapien
gaagcatgcaggcattgttcatctt

SEQ ID NO: 5271133 - DNA, 25 bp, Homo sapien
tcttgcatccgttacgagcacacta

SEQ ID NO: 5271134 - DNA, 25 bp, Homo sapien
ggccattgtgcagaggacttcacag

SEQ ID NO: 5271135 - DNA, 25 bp, Homo sapien
ccaagtgggccagagcgagatgtaa

SEQ ID NO: 5271136 - DNA, 25 bp, Homo sapien
tgctgctgagaggaatgctcatgat

SEQ ID NO: 5271137 - DNA, 25 bp, Homo sapien
gagaagtctccatttaggattccct

SEQ ID NO: 5271138 - DNA, 25 bp, Homo sapien
ctctctcacgagcttcttaaacggg

SEQ ID NO: 5271139 - DNA, 25 bp, Homo sapien
tgcagggcacgcagattctcaatct

SEQ ID NO: 5271140 - DNA, 25 bp, Homo sapien
ccaccactgtcagaactgattaagc

SEQ ID NO: 5271141 - DNA, 25 bp, Homo sapien
actgattaagccaaacacattttca

SEQ ID NO: 5271142 - DNA, 25 bp, Homo sapien
gtcagaactgattaagccaaacaca

SEQ ID NO: 5271143 - DNA, 25 bp, Homo sapien
gcgtactgaactgcctgccacgttt

SEQ ID NO: 5271144 - DNA, 25 bp, Homo sapien
tggtgattcctccggttccttccgc

SEQ ID NO: 5271145 - DNA, 25 bp, Homo sapien
tgtcgagccctatccttggctggac

SEQ ID NO: 5271146 - DNA, 25 bp, Homo sapien
tgactctaggcaagcgtactgaact

SEQ ID NO: 5271147 - DNA, 25 bp, Homo sapien
ttgtactctcaggttggtgagtcct

SEQ ID NO: 5271148 - DNA, 25 bp, Homo sapien
gaaggcactggctatcataaggaaa

SEQ ID NO: 5271149 - DNA, 25 bp, Homo sapien
tgctctgttatgtacccaatttgta

SEQ ID NO: 5271150 - DNA, 25 bp, Homo sapien
ggtggctatggcagagaaatactgc

SEQ ID NO: 5271151 - DNA, 25 bp, Homo sapien
ggcctttgtgctccattgcctgaaa

SEQ ID NO: 5271152 - DNA, 25 bp, Homo sapien
gcctttgtgctccattgcctgaaat

SEQ ID NO: 5271153 - DNA, 25 bp, Homo sapien
catgggcatcatgtggtccctgaga

SEQ ID NO: 5271154 - DNA, 25 bp, Homo sapien
ccagtcaagctgtttcatgtgtcca

SEQ ID NO: 5271155 - DNA, 25 bp, Homo sapien
gaggtccgtagaggacttccagaat

SEQ ID NO: 5271156 - DNA, 25 bp, Homo sapien
ggtcatggactcttggaccaaaagc

SEQ ID NO: 5271157 - DNA, 25 bp, Homo sapien
agttatagtgatagccctcgtgggt

SEQ ID NO: 5271158 - DNA, 25 bp, Homo sapien
tagctagtcctcgttcatcacccat

SEQ ID NO: 5271159 - DNA, 25 bp, Homo sapien
ggctgcaggtattatgacctgggca

SEQ ID NO: 5271160 - DNA, 25 bp, Homo sapien
tgacctgggcagctttctgcctagc

SEQ ID NO: 5271161 - DNA, 25 bp, Homo sapien
ttctgttaatcctgacaagatactt

SEQ ID NO: 5271162 - DNA, 25 bp, Homo sapien
tctgttaatcctgacaagatacttg

SEQ ID NO: 5271163 - DNA, 25 bp, Homo sapien
gcttcacaggagctgtgcctttgga

SEQ ID NO: 5271164 - DNA, 25 bp, Homo sapien
caggagctgtgcctttggaaatcaa

SEQ ID NO: 5271165 - DNA, 25 bp, Homo sapien
ggagctgtgcctttggaaatcaaga

SEQ ID NO: 5271166 - DNA, 25 bp, Homo sapien
acaggagctgtgcctttggaaatca

SEQ ID NO: 5271167 - DNA, 25 bp, Homo sapien
gtggccaaaaggtggttgactctcc

SEQ ID NO: 5271168 - DNA, 25 bp, Homo sapien
caaaaggtggttgactctccagaga

SEQ ID NO: 5271169 - DNA, 25 bp, Homo sapien
ggccaaaaggtggttgactctccag

SEQ ID NO: 5271170 - DNA, 25 bp, Homo sapien
gccaaaaggtggttgactctccaga

SEQ ID NO: 5271171 - DNA, 25 bp, Homo sapien
tctatatttagcgaagttagggtga

SEQ ID NO: 5271172 - DNA, 25 bp, Homo sapien
gatgaccacagtgagctactttcag

SEQ ID NO: 5271173 - DNA, 25 bp, Homo sapien
acggcccagaggcagcgactccagg

SEQ ID NO: 5271174 - DNA, 25 bp, Homo sapien
cttgtctgggagttattctgctgga

SEQ ID NO: 5271175 - DNA, 25 bp, Homo sapien
tacatccatttatacccacaggaag

SEQ ID NO: 5271176 - DNA, 25 bp, Homo sapien
taatgttacatccatttatacccac

SEQ ID NO: 5271177 - DNA, 25 bp, Homo sapien
gagcactcaggaggttaatgttaca

SEQ ID NO: 5271178 - DNA, 25 bp, Homo sapien
gcactcaggaggttaatgttacatc

SEQ ID NO: 5271179 - DNA, 25 bp, Homo sapien
cagtctggacatcggaatcaccagc

SEQ ID NO: 5271180 - DNA, 25 bp, Homo sapien
agcttctaaaccagtctggacatcg

SEQ ID NO: 5271181 - DNA, 25 bp, Homo sapien
taaaccagtctggacatcggaatca

SEQ ID NO: 5271182 - DNA, 25 bp, Homo sapien
tctaaaccagtctggacatcggaat

SEQ ID NO: 5271183 - DNA, 25 bp, Homo sapien
agccccgcgtgcactggtagaggat

SEQ ID NO: 5271184 - DNA, 25 bp, Homo sapien
gaggatggacttctggctctgacac

SEQ ID NO: 5271185 - DNA, 25 bp, Homo sapien
gacaagccccgcgtgcactggtaga

SEQ ID NO: 5271186 - DNA, 25 bp, Homo sapien
cttgtgtatacttgggccagctcct

SEQ ID NO: 5271187 - DNA, 25 bp, Homo sapien
gtggctttgcccgtaatgaaagtaa

SEQ ID NO: 5271188 - DNA, 25 bp, Homo sapien
cagactgtggctttgcccgtaatga

SEQ ID NO: 5271189 - DNA, 25 bp, Homo sapien
gactgtggctttgcccgtaatgaaa

SEQ ID NO: 5271190 - DNA, 25 bp, Homo sapien
ggctttgcccgtaatgaaagtaaga

SEQ ID NO: 5271191 - DNA, 25 bp, Homo sapien
aatagtcctcttcagttaacgtagc

SEQ ID NO: 5271192 - DNA, 25 bp, Homo sapien
gatttggatgctaaagtaacccaga

SEQ ID NO: 5271193 - DNA, 25 bp, Homo sapien
cgtagcttgaagtcgattaactgca

SEQ ID NO: 5271194 - DNA, 25 bp, Homo sapien
gaaatttcaatcgtggcatcttcac

SEQ ID NO: 5271195 - DNA, 25 bp, Homo sapien
gcacttgtgtgctgcataaattccc

SEQ ID NO: 5271196 - DNA, 25 bp, Homo sapien
caaagtgcacttgtgtgctgcataa

SEQ ID NO: 5271197 - DNA, 25 bp, Homo sapien
tgtgctgcataaattccctcaccac

SEQ ID NO: 5271198 - DNA, 25 bp, Homo sapien
gttcaaagtgcacttgtgtgctgca

SEQ ID NO: 5271199 - DNA, 25 bp, Homo sapien
taatggtttggactgacaatttatt

SEQ ID NO: 5271200 - DNA, 25 bp, Homo sapien
tttgagtctccatgattctgagact

SEQ ID NO: 5271201 - DNA, 25 bp, Homo sapien
gattttgagtctccatgattctgag

SEQ ID NO: 5271202 - DNA, 25 bp, Homo sapien
gtgattttgagtctccatgattctg

SEQ ID NO: 5271203 - DNA, 25 bp, Homo sapien
ttgagtctccatgattctgagactt

SEQ ID NO: 5271204 - DNA, 25 bp, Homo sapien
gaaacagtcattggtcctctttcac

SEQ ID NO: 5271205 - DNA, 25 bp, Homo sapien
gatgggaatacatcttctccacata

SEQ ID NO: 5271206 - DNA, 25 bp, Homo sapien
taaccatttatattgtgacctgtgc

SEQ ID NO: 5271207 - DNA, 25 bp, Homo sapien
caatatagacactccattcagattc

SEQ ID NO: 5271208 - DNA, 25 bp, Homo sapien
ccagattttaaagggcacaacttga

SEQ ID NO: 5271209 - DNA, 25 bp, Homo sapien
tgttcatcaacctgcaaggactctg

SEQ ID NO: 5271210 - DNA, 25 bp, Homo sapien
agtaggtactgacaggattgctgtc

SEQ ID NO: 5271211 - DNA, 25 bp, Homo sapien
cacaacttgatgtattgtggtggag

SEQ ID NO: 5271212 - DNA, 25 bp, Homo sapien
taagcccgagcatcaacaaggctgt

SEQ ID NO: 5271213 - DNA, 25 bp, Homo sapien
ttgcacttggtaaggcgagactcag

SEQ ID NO: 5271214 - DNA, 25 bp, Homo sapien
tgcacttggtaaggcgagactcagg

SEQ ID NO: 5271215 - DNA, 25 bp, Homo sapien
ggcctgagtaagcccgagcatcaac

SEQ ID NO: 5271216 - DNA, 25 bp, Homo sapien
catatcgttgagcatttgagtcgtt

SEQ ID NO: 5271217 - DNA, 25 bp, Homo sapien
catcagaatctctaaaggcaccatc

SEQ ID NO: 5271218 - DNA, 25 bp, Homo sapien
ggtccttctccatatcgttgagcat

SEQ ID NO: 5271219 - DNA, 25 bp, Homo sapien
catttgagtcgtttcatcagaatct

SEQ ID NO: 5271220 - DNA, 25 bp, Homo sapien
tcagagctgatcgaacaatttggcg

SEQ ID NO: 5271221 - DNA, 25 bp, Homo sapien
ccctgagttaggtcacaatagcaaa

SEQ ID NO: 5271222 - DNA, 25 bp, Homo sapien
catggctggtcactcatcaatcaca

SEQ ID NO: 5271223 - DNA, 25 bp, Homo sapien
gatcgtagtcagattttgcgcacag

SEQ ID NO: 5271224 - DNA, 25 bp, Homo sapien
gaaaagttggagatgtgcagatttt

SEQ ID NO: 5271225 - DNA, 25 bp, Homo sapien
gttggagatgtgcagattttggaaa

SEQ ID NO: 5271226 - DNA, 25 bp, Homo sapien
gtgcagattttggaaagccaagagc

SEQ ID NO: 5271227 - DNA, 25 bp, Homo sapien
ggaaagccaagagcacttctatgtt

SEQ ID NO: 5271228 - DNA, 25 bp, Homo sapien
actccagctaatcaacattccactg

SEQ ID NO: 5271229 - DNA, 25 bp, Homo sapien
gacagagatcttgggtctccactcc

SEQ ID NO: 5271230 - DNA, 25 bp, Homo sapien
ccagctaatcaacattccactgaga

SEQ ID NO: 5271231 - DNA, 25 bp, Homo sapien
ccctgcctggacagagatcttgggt

SEQ ID NO: 5271232 - DNA, 25 bp, Homo sapien
gatagatgcccaccgagaaagcagt

SEQ ID NO: 5271233 - DNA, 25 bp, Homo sapien
ggtcaggtccggcttccaaatgcag

SEQ ID NO: 5271234 - DNA, 25 bp, Homo sapien
gctgaagggaactagcattggtcct

SEQ ID NO: 5271235 - DNA, 25 bp, Homo sapien
ccttgttatgatgcggcaggaggcc

SEQ ID NO: 5271236 - DNA, 25 bp, Homo sapien
ctcacatgtctcttcaatgtgacct

SEQ ID NO: 5271237 - DNA, 25 bp, Homo sapien
gaaacagctcttactctagactgct

SEQ ID NO: 5271238 - DNA, 25 bp, Homo sapien
ctgccaggaaacagctcttactcta

SEQ ID NO: 5271239 - DNA, 25 bp, Homo sapien
cacatgtctcttcaatgtgacctgg

SEQ ID NO: 5271240 - DNA, 25 bp, Homo sapien
ttccaacttgggacatggttgccag

SEQ ID NO: 5271241 - DNA, 25 bp, Homo sapien
aacttgggacatggttgccaggctc

SEQ ID NO: 5271242 - DNA, 25 bp, Homo sapien
caacttgggacatggttgccaggct

SEQ ID NO: 5271243 - DNA, 25 bp, Homo sapien
cttgggacatggttgccaggctcct

SEQ ID NO: 5271244 - DNA, 25 bp, Homo sapien
tcagtcctttcagagtgaactttat

SEQ ID NO: 5271245 - DNA, 25 bp, Homo sapien
atcagtcctttcagagtgaacttta

SEQ ID NO: 5271246 - DNA, 25 bp, Homo sapien
tgtggagaaacatcagtcctttcag

SEQ ID NO: 5271247 - DNA, 25 bp, Homo sapien
ccaggcagaaggcattgcgggtaac

SEQ ID NO: 5271248 - DNA, 25 bp, Homo sapien
aggcattgcgggtaactaaatacag

SEQ ID NO: 5271249 - DNA, 25 bp, Homo sapien
caggataagcttcttgcagtgagat

SEQ ID NO: 5271250 - DNA, 25 bp, Homo sapien
gggcaggataagcttcttgcagtga

SEQ ID NO: 5271251 - DNA, 25 bp, Homo sapien
caatgctttccgctgggcttccgga

SEQ ID NO: 5271252 - DNA, 25 bp, Homo sapien
tccggaaactcctctggcggtgacc

SEQ ID NO: 5271253 - DNA, 25 bp, Homo sapien
caagctgatttgtgcctgatgtagc

SEQ ID NO: 5271254 - DNA, 25 bp, Homo sapien
cagcaagtgctagcgcccagcaaat

SEQ ID NO: 5271255 - DNA, 25 bp, Homo sapien
tgaaatgctgccacggggctgaccc

SEQ ID NO: 5271256 - DNA, 25 bp, Homo sapien
ttctggaggtgccatgtgggccctc

SEQ ID NO: 5271257 - DNA, 25 bp, Homo sapien
tctccttgaaatgctgccacggggc

SEQ ID NO: 5271258 - DNA, 25 bp, Homo sapien
ttttaatggttacatgcttaactct

SEQ ID NO: 5271259 - DNA, 25 bp, Homo sapien
aaggtttcccggtgtctcgctgcct

SEQ ID NO: 5271260 - DNA, 25 bp, Homo sapien
ctaaaggtttcccggtgtctcgctg

SEQ ID NO: 5271261 - DNA, 25 bp, Homo sapien
cggtgtctcgctgcctctggtcttc

SEQ ID NO: 5271262 - DNA, 25 bp, Homo sapien
ttcccggtgtctcgctgcctctggt

SEQ ID NO: 5271263 - DNA, 25 bp, Homo sapien
ccatcactaacaactttgcaaaatt

SEQ ID NO: 5271264 - DNA, 25 bp, Homo sapien
catcactaacaactttgcaaaattt

SEQ ID NO: 5271265 - DNA, 25 bp, Homo sapien
atcactaacaactttgcaaaatttg

SEQ ID NO: 5271266 - DNA, 25 bp, Homo sapien
tcactaacaactttgcaaaatttgc

SEQ ID NO: 5271267 - DNA, 25 bp, Homo sapien
cttaaattgttgtctggggctccca

SEQ ID NO: 5271268 - DNA, 25 bp, Homo sapien
cccagtgatcttaaattgttgtctg

SEQ ID NO: 5271269 - DNA, 25 bp, Homo sapien
gttatttctttcaaccccagtgatc

SEQ ID NO: 5271270 - DNA, 25 bp, Homo sapien
tatttctttcaaccccagtgatctt

SEQ ID NO: 5271271 - DNA, 25 bp, Homo sapien
tgtggagccggatgaaggtcctctc

SEQ ID NO: 5271272 - DNA, 25 bp, Homo sapien
cattagcgatgctcttcactgatct

SEQ ID NO: 5271273 - DNA, 25 bp, Homo sapien
gatttttcagagatgtgccctgcat

SEQ ID NO: 5271274 - DNA, 25 bp, Homo sapien
ctggccatgtgacggaagggttggc

SEQ ID NO: 5271275 - DNA, 25 bp, Homo sapien
gagattattgatatctgtttcaaag

SEQ ID NO: 5271276 - DNA, 25 bp, Homo sapien
tatctgtttcaaagtaagcttcaca

SEQ ID NO: 5271277 - DNA, 25 bp, Homo sapien
gcaaaatagagattattgatatctg

SEQ ID NO: 5271278 - DNA, 25 bp, Homo sapien
gaaatcaaggaaccatgtcagatta

SEQ ID NO: 5271279 - DNA, 25 bp, Homo sapien
cagtgcttgtccaattaaaggacaa

SEQ ID NO: 5271280 - DNA, 25 bp, Homo sapien
aaggacaaatccgttttctcacttg

SEQ ID NO: 5271281 - DNA, 25 bp, Homo sapien
caacagtgcttgtccaattaaagga

SEQ ID NO: 5271282 - DNA, 25 bp, Homo sapien
cctgtcaacagtgcttgtccaatta

SEQ ID NO: 5271283 - DNA, 25 bp, Homo sapien
gagttgatctggttcggtagagcca

SEQ ID NO: 5271284 - DNA, 25 bp, Homo sapien
cagtgcccaactgaggctgcacctt

SEQ ID NO: 5271285 - DNA, 25 bp, Homo sapien
tcggtagagccaatagagacagaag

SEQ ID NO: 5271286 - DNA, 25 bp, Homo sapien
tgtgaatagtgacaactgtcccagc

SEQ ID NO: 5271287 - DNA, 25 bp, Homo sapien
gtttcgacaccaagcacttcaacag

SEQ ID NO: 5271288 - DNA, 25 bp, Homo sapien
ggcgtcaccctccaacgtagatgtt

SEQ ID NO: 5271289 - DNA, 25 bp, Homo sapien
tatcggcaagaagaatcaaccaagc

SEQ ID NO: 5271290 - DNA, 25 bp, Homo sapien
gaagtccaggctgcatatcggcaag

SEQ ID NO: 5271291 - DNA, 25 bp, Homo sapien
tctgttaaaagccttcgggcaaatg

SEQ ID NO: 5271292 - DNA, 25 bp, Homo sapien
gaaaggcctccgcccaggcttggat

SEQ ID NO: 5271293 - DNA, 25 bp, Homo sapien
aaagccttcgggcaaatggagctgc

SEQ ID NO: 5271294 - DNA, 25 bp, Homo sapien
caggcttggatcccaactctcttcc

SEQ ID NO: 5271295 - DNA, 25 bp, Homo sapien
catagaacgtacagaaacacaagta

SEQ ID NO: 5271296 - DNA, 25 bp, Homo sapien
gctttgagggcacgtagcctttgcc

SEQ ID NO: 5271297 - DNA, 25 bp, Homo sapien
cctttgccatgcaatagcttctgga

SEQ ID NO: 5271298 - DNA, 25 bp, Homo sapien
ggaattacacgcatggcctgctccc

SEQ ID NO: 5271299 - DNA, 25 bp, Homo sapien
caaggcctagactcggaattccaag

SEQ ID NO: 5271300 - DNA, 25 bp, Homo sapien
gggaaaatcagtgcaaggcctagac

SEQ ID NO: 5271301 - DNA, 25 bp, Homo sapien
ggaattccaagtcgccccatccaga

SEQ ID NO: 5271302 - DNA, 25 bp, Homo sapien
gacctccgataggagggagctgctt

SEQ ID NO: 5271303 - DNA, 25 bp, Homo sapien
agaagacacaggaccgttttgtcgt

SEQ ID NO: 5271304 - DNA, 25 bp, Homo sapien
gagagaagacacaggaccgttttgt

SEQ ID NO: 5271305 - DNA, 25 bp, Homo sapien
gaagagagaagacacaggaccgttt

SEQ ID NO: 5271306 - DNA, 25 bp, Homo sapien
cacaggaccgttttgtcgttttcat

SEQ ID NO: 5271307 - DNA, 25 bp, Homo sapien
gtgtagaaccggcacggcgcatctt

SEQ ID NO: 5271308 - DNA, 25 bp, Homo sapien
ctcagcacccgtcccgtgtggcaca

SEQ ID NO: 5271309 - DNA, 25 bp, Homo sapien
cctggagcaagggaacaccgtgtag

SEQ ID NO: 5271310 - DNA, 25 bp, Homo sapien
aggtgggcacccagcggtccctcag

SEQ ID NO: 5271311 - DNA, 25 bp, Homo sapien
gaaaataatgatagtttcaatctgg

SEQ ID NO: 5271312 - DNA, 25 bp, Homo sapien
cgaaaataatgatagtttcaatctg

SEQ ID NO: 5271313 - DNA, 25 bp, Homo sapien
tgcattgtaagacctcacccatcca

SEQ ID NO: 5271314 - DNA, 25 bp, Homo sapien
gttttgcattgtaagacctcaccca

SEQ ID NO: 5271315 - DNA, 25 bp, Homo sapien
ctataatcgttcatattcatgattt

SEQ ID NO: 5271316 - DNA, 25 bp, Homo sapien
tttcggatgtagaaatcagcagttt

SEQ ID NO: 5271317 - DNA, 25 bp, Homo sapien
tcgagtgagaaacatggccatagcc

SEQ ID NO: 5271318 - DNA, 25 bp, Homo sapien
cagcctcttggactatcagaactct

SEQ ID NO: 5271319 - DNA, 25 bp, Homo sapien
tcagaactcttaggaagtacaagga

SEQ ID NO: 5271320 - DNA, 25 bp, Homo sapien
ggtctaacagcagagcggtattttt

SEQ ID NO: 5271321 - DNA, 25 bp, Homo sapien
atggagcaacagtgccacccagtgg

SEQ ID NO: 5271322 - DNA, 25 bp, Homo sapien
ttttgtgctcaacgtggccgggtcc

SEQ ID NO: 5271323 - DNA, 25 bp, Homo sapien
ggggacgccgttggcagctctccat

SEQ ID NO: 5271324 - DNA, 25 bp, Homo sapien
cacccagtggtcagtcctcgcgatg

SEQ ID NO: 5271325 - DNA, 25 bp, Homo sapien
tccgcctaaatgtcccctttctctc

SEQ ID NO: 5271326 - DNA, 25 bp, Homo sapien
tctctttacagacctgtaagcgcaa

SEQ ID NO: 5271327 - DNA, 25 bp, Homo sapien
caagcctcttctccaaacgctccat

SEQ ID NO: 5271328 - DNA, 25 bp, Homo sapien
tacagacctgtaagcgcaacgcaga

SEQ ID NO: 5271329 - DNA, 25 bp, Homo sapien
acagtggaactgactgtaaaatata

SEQ ID NO: 5271330 - DNA, 25 bp, Homo sapien
tacagtggaactgactgtaaaatat

SEQ ID NO: 5271331 - DNA, 25 bp, Homo sapien
ttctttctcatcaatataactttct

SEQ ID NO: 5271332 - DNA, 25 bp, Homo sapien
ttacagtggaactgactgtaaaata

SEQ ID NO: 5271333 - DNA, 25 bp, Homo sapien
tcacggcatcccagcatttcctgtc

SEQ ID NO: 5271334 - DNA, 25 bp, Homo sapien
cagcatttcctgtctattaaaacag

SEQ ID NO: 5271335 - DNA, 25 bp, Homo sapien
ttcctgtctattaaaacagatgttc

SEQ ID NO: 5271336 - DNA, 25 bp, Homo sapien
ctcttacgggggctctcacggcatc

SEQ ID NO: 5271337 - DNA, 25 bp, Homo sapien
catggcattaggaaagcactcaggc

SEQ ID NO: 5271338 - DNA, 25 bp, Homo sapien
tgcatcatgaagagtggatggcctc

SEQ ID NO: 5271339 - DNA, 25 bp, Homo sapien
gatggcctcgctgtagcctctactt

SEQ ID NO: 5271340 - DNA, 25 bp, Homo sapien
caggatgagcgtaatgaagccagcc

SEQ ID NO: 5271341 - DNA, 25 bp, Homo sapien
gctgcactgggctcattaacatcct

SEQ ID NO: 5271342 - DNA, 25 bp, Homo sapien
tcactggagatatctctgaaagcca

SEQ ID NO: 5271343 - DNA, 25 bp, Homo sapien
ggaaaactggtggctacgagcatca

SEQ ID NO: 5271344 - DNA, 25 bp, Homo sapien
agcatcactggagatatctctgaaa

SEQ ID NO: 5271345 - DNA, 25 bp, Homo sapien
tgtacagggcatctcataagcagca

SEQ ID NO: 5271346 - DNA, 25 bp, Homo sapien
cggctgtgtgagaggcaggccatct

SEQ ID NO: 5271347 - DNA, 25 bp, Homo sapien
agggcatctcataagcagcacaggg

SEQ ID NO: 5271348 - DNA, 25 bp, Homo sapien
agcacagtgagcatggtaacacggc

SEQ ID NO: 5271349 - DNA, 25 bp, Homo sapien
ccaggattgctctgtgtactagtca

SEQ ID NO: 5271350 - DNA, 25 bp, Homo sapien
tccaggattgctctgtgtactagtc

SEQ ID NO: 5271351 - DNA, 25 bp, Homo sapien
ttccaggattgctctgtgtactagt

SEQ ID NO: 5271352 - DNA, 25 bp, Homo sapien
agcacggaagccacgggagaaagat

SEQ ID NO: 5271353 - DNA, 25 bp, Homo sapien
gagcacggaagccacgggagaaaga

SEQ ID NO: 5271354 - DNA, 25 bp, Homo sapien
aggagcacggaagccacgggagaaa

SEQ ID NO: 5271355 - DNA, 25 bp, Homo sapien
ctgaggagcacggaagccacgggag

SEQ ID NO: 5271356 - DNA, 25 bp, Homo sapien
gagaaccaggtccagagacaagacg

SEQ ID NO: 5271357 - DNA, 25 bp, Homo sapien
ggcgaggactcggattcccaatgga

SEQ ID NO: 5271358 - DNA, 25 bp, Homo sapien
gactgatgcctgattaaagcaccgg

SEQ ID NO: 5271359 - DNA, 25 bp, Homo sapien
cccaagggtcattccagaggcagat

SEQ ID NO: 5271360 - DNA, 25 bp, Homo sapien
ctagagagaaaaaagaaagtctcag

SEQ ID NO: 5271361 - DNA, 25 bp, Homo sapien
tagagagaaaaaagaaagtctcagc

SEQ ID NO: 5271362 - DNA, 25 bp, Homo sapien
agagagaaaaaagaaagtctcagca

SEQ ID NO: 5271363 - DNA, 25 bp, Homo sapien
tgggacggactgctgcaaaggaaat

SEQ ID NO: 5271364 - DNA, 25 bp, Homo sapien
tgggtaaactgggacggactgctgc

SEQ ID NO: 5271365 - DNA, 25 bp, Homo sapien
taaactgggacggactgctgcaaag

SEQ ID NO: 5271366 - DNA, 25 bp, Homo sapien
actgggacggactgctgcaaaggaa

SEQ ID NO: 5271367 - DNA, 25 bp, Homo sapien
gacttttcccttccgcgtgcagacc

SEQ ID NO: 5271368 - DNA, 25 bp, Homo sapien
tgtatagctagaacccgacttttcc

SEQ ID NO: 5271369 - DNA, 25 bp, Homo sapien
gtgtatagctagaacccgacttttc

SEQ ID NO: 5271370 - DNA, 25 bp, Homo sapien
cccgacttttcccttccgcgtgcag

SEQ ID NO: 5271371 - DNA, 25 bp, Homo sapien
cacgtggccttccataagatttgta

SEQ ID NO: 5271372 - DNA, 25 bp, Homo sapien
tatctttttacattcccatggcagg

SEQ ID NO: 5271373 - DNA, 25 bp, Homo sapien
tctcctccagagagtagaatacccc

SEQ ID NO: 5271374 - DNA, 25 bp, Homo sapien
catcaaagccgggtatcacagctca

SEQ ID NO: 5271375 - DNA, 25 bp, Homo sapien
tggatgttctcaacaagacagcaga

SEQ ID NO: 5271376 - DNA, 25 bp, Homo sapien
aatctgctctgcattgggacagtcc

SEQ ID NO: 5271377 - DNA, 25 bp, Homo sapien
taccatcagcatgcttaaagtcgag

SEQ ID NO: 5271378 - DNA, 25 bp, Homo sapien
gtttatctaatgtcgtctcctgcag

SEQ ID NO: 5271379 - DNA, 25 bp, Homo sapien
ttatctcggcaaaagcacagttccc

SEQ ID NO: 5271380 - DNA, 25 bp, Homo sapien
cacagttccctcataaaggttcaaa

SEQ ID NO: 5271381 - DNA, 25 bp, Homo sapien
taatcagggattgaaccaaatgcaa

SEQ ID NO: 5271382 - DNA, 25 bp, Homo sapien
ccctctagtggaaatgtaatgtatt

SEQ ID NO: 5271383 - DNA, 25 bp, Homo sapien
gtgtgtatgtctgcctctctattga

SEQ ID NO: 5271384 - DNA, 25 bp, Homo sapien
gtcactgaataggacaagaaacaca

SEQ ID NO: 5271385 - DNA, 25 bp, Homo sapien
cacagtgatgatcaccaggtgtgta

SEQ ID NO: 5271386 - DNA, 25 bp, Homo sapien
aaaattactaggtcaaagcatgtca

SEQ ID NO: 5271387 - DNA, 25 bp, Homo sapien
gacatggcgaattggagaaattgtg

SEQ ID NO: 5271388 - DNA, 25 bp, Homo sapien
aattgtgactccaaaggtattccca

SEQ ID NO: 5271389 - DNA, 25 bp, Homo sapien
gcaacagagagacatggcgaattgg

SEQ ID NO: 5271390 - DNA, 25 bp, Homo sapien
tccattgtctaataatctgaacagt

SEQ ID NO: 5271391 - DNA, 25 bp, Homo sapien
ggctgaattcagtctgcaagccaca

SEQ ID NO: 5271392 - DNA, 25 bp, Homo sapien
gaattcagtctgcaagccacaccaa

SEQ ID NO: 5271393 - DNA, 25 bp, Homo sapien
acaccaaggacagccttgcttagcc

SEQ ID NO: 5271394 - DNA, 25 bp, Homo sapien
gctggctgaattcagtctgcaagcc

SEQ ID NO: 5271395 - DNA, 25 bp, Homo sapien
tgcaataatccagaggaagtcttca

SEQ ID NO: 5271396 - DNA, 25 bp, Homo sapien
tagtcttcccatgcatcgtgagcag

SEQ ID NO: 5271397 - DNA, 25 bp, Homo sapien
tcgtgagcagttgccaaggcaccag

SEQ ID NO: 5271398 - DNA, 25 bp, Homo sapien
cactggatgagacagaatgctgtac

SEQ ID NO: 5271399 - DNA, 25 bp, Homo sapien
caagtgggaagacattggagcaaca

SEQ ID NO: 5271400 - DNA, 25 bp, Homo sapien
gcctggtgtctgttcttactagcca

SEQ ID NO: 5271401 - DNA, 25 bp, Homo sapien
tagtccattaggttgatccattgca

SEQ ID NO: 5271402 - DNA, 25 bp, Homo sapien
tccacagatcaaacacagattcaag

SEQ ID NO: 5271403 - DNA, 25 bp, Homo sapien
tgttccaaaatgatccacgtgtcca

SEQ ID NO: 5271404 - DNA, 25 bp, Homo sapien
gagagaaggatcagcacaaaaggag

SEQ ID NO: 5271405 - DNA, 25 bp, Homo sapien
cagtttgctgtctctactgtggtga

SEQ ID NO: 5271406 - DNA, 25 bp, Homo sapien
tcatacctcgataaagctgctaaag

SEQ ID NO: 5271407 - DNA, 25 bp, Homo sapien
tcacaatgtgcccatataacctctt

SEQ ID NO: 5271408 - DNA, 25 bp, Homo sapien
tttatgcagacgcaaggaggcaagg

SEQ ID NO: 5271409 - DNA, 25 bp, Homo sapien
aaggtgccagccaggtaggattcat

SEQ ID NO: 5271410 - DNA, 25 bp, Homo sapien
tggctcatgggaggccaccatctca

SEQ ID NO: 5271411 - DNA, 25 bp, Homo sapien
cattccaggccttgactcgagtgtg

SEQ ID NO: 5271412 - DNA, 25 bp, Homo sapien
gatggtataaggttcctcccagctg

SEQ ID NO: 5271413 - DNA, 25 bp, Homo sapien
gattgaactgaacagagagttccca

SEQ ID NO: 5271414 - DNA, 25 bp, Homo sapien
tctgagatgttcttctgggatgtca

SEQ ID NO: 5271415 - DNA, 25 bp, Homo sapien
tctaggctgccagtataagcttttc

SEQ ID NO: 5271416 - DNA, 25 bp, Homo sapien
gataccacattgcaaagaaccctaa

SEQ ID NO: 5271417 - DNA, 25 bp, Homo sapien
tgactcagaagcctatcaaaagggc

SEQ ID NO: 5271418 - DNA, 25 bp, Homo sapien
tcatagctcctatgctgaggaaaca

SEQ ID NO: 5271419 - DNA, 25 bp, Homo sapien
cttgggcagccaggacacatagaca

SEQ ID NO: 5271420 - DNA, 25 bp, Homo sapien
ccaatgtgggcatgtcacgatctca

SEQ ID NO: 5271421 - DNA, 25 bp, Homo sapien
tcagcatgccagtgtaggagaagca

SEQ ID NO: 5271422 - DNA, 25 bp, Homo sapien
tcatgacgagtgcaaccagatgtgg

SEQ ID NO: 5271423 - DNA, 25 bp, Homo sapien
agtgattaagtgaaacatatgttcc

SEQ ID NO: 5271424 - DNA, 25 bp, Homo sapien
tttggtagtgattaagtgaaacata

SEQ ID NO: 5271425 - DNA, 25 bp, Homo sapien
tagtgattaagtgaaacatatgttc

SEQ ID NO: 5271426 - DNA, 25 bp, Homo sapien
tggtagtgattaagtgaaacatatg

SEQ ID NO: 5271427 - DNA, 25 bp, Homo sapien
tcagtcagaagagggtacgatggct

SEQ ID NO: 5271428 - DNA, 25 bp, Homo sapien
aatctagttagacgtggcacctggc

SEQ ID NO: 5271429 - DNA, 25 bp, Homo sapien
cactggaacatgatgagagggacct

SEQ ID NO: 5271430 - DNA, 25 bp, Homo sapien
taaaattaagatgcctggtctccag

SEQ ID NO: 5271431 - DNA, 25 bp, Homo sapien
taaaactattctggattaggcttaa

SEQ ID NO: 5271432 - DNA, 25 bp, Homo sapien
aactattctggattaggcttaatac

SEQ ID NO: 5271433 - DNA, 25 bp, Homo sapien
aaactattctggattaggcttaata

SEQ ID NO: 5271434 - DNA, 25 bp, Homo sapien
aaaactattctggattaggcttaat

SEQ ID NO: 5271435 - DNA, 25 bp, Homo sapien
tggaggggctggcatcaaccacatg

SEQ ID NO: 5271436 - DNA, 25 bp, Homo sapien
catccgctggtaggacatttctacc

SEQ ID NO: 5271437 - DNA, 25 bp, Homo sapien
ccatccgctggtaggacatttctac

SEQ ID NO: 5271438 - DNA, 25 bp, Homo sapien
gaggggctggcatcaaccacatggc

SEQ ID NO: 5271439 - DNA, 25 bp, Homo sapien
agcctctgcaacctctcctcaggac

SEQ ID NO: 5271440 - DNA, 25 bp, Homo sapien
tgttggcctcaagttctgcttcttc

SEQ ID NO: 5271441 - DNA, 25 bp, Homo sapien
tgcttcttccctggtcttctccatg

SEQ ID NO: 5271442 - DNA, 25 bp, Homo sapien
tggtcttctccatgccccggccctg

SEQ ID NO: 5271443 - DNA, 25 bp, Homo sapien
caggtttgagcaggtcctctggcca

SEQ ID NO: 5271444 - DNA, 25 bp, Homo sapien
ctggccactggtacacagggtgatg

SEQ ID NO: 5271445 - DNA, 25 bp, Homo sapien
tcaggtttgagcaggtcctctggcc

SEQ ID NO: 5271446 - DNA, 25 bp, Homo sapien
cctctggccactggtacacagggtg

SEQ ID NO: 5271447 - DNA, 25 bp, Homo sapien
atggcataggtggccgtgctgtgcc

SEQ ID NO: 5271448 - DNA, 25 bp, Homo sapien
ggctatggcataggtggccgtgctg

SEQ ID NO: 5271449 - DNA, 25 bp, Homo sapien
actcacctcagtggctatggcatag

SEQ ID NO: 5271450 - DNA, 25 bp, Homo sapien
tatggcataggtggccgtgctgtgc

SEQ ID NO: 5271451 - DNA, 25 bp, Homo sapien
ccactggccaatgcaagagggtggt

SEQ ID NO: 5271452 - DNA, 25 bp, Homo sapien
tcggaggccacaatataattgccca

SEQ ID NO: 5271453 - DNA, 25 bp, Homo sapien
gattctttagctatttcggaggcca

SEQ ID NO: 5271454 - DNA, 25 bp, Homo sapien
taattgcccaaagagtaaaaagctc

SEQ ID NO: 5271455 - DNA, 25 bp, Homo sapien
cactgactgggtcaccgtggtttta

SEQ ID NO: 5271456 - DNA, 25 bp, Homo sapien
gccactgactgggtcaccgtggttt

SEQ ID NO: 5271457 - DNA, 25 bp, Homo sapien
ccactgactgggtcaccgtggtttt

SEQ ID NO: 5271458 - DNA, 25 bp, Homo sapien
actggtcgaccaggtcaagcactgc

SEQ ID NO: 5271459 - DNA, 25 bp, Homo sapien
catccagtccttcgatggcaacaac

SEQ ID NO: 5271460 - DNA, 25 bp, Homo sapien
tggatctgttttgggcactggtcga

SEQ ID NO: 5271461 - DNA, 25 bp, Homo sapien
cagtccttcgatggcaacaacctgg

SEQ ID NO: 5271462 - DNA, 25 bp, Homo sapien
acgggcacgacctgtgcgcagccca

SEQ ID NO: 5271463 - DNA, 25 bp, Homo sapien
gaactgggcaagtctggcaccaccg

SEQ ID NO: 5271464 - DNA, 25 bp, Homo sapien
gaccacggaactgggcaagtctggc

SEQ ID NO: 5271465 - DNA, 25 bp, Homo sapien
ctccgggacgggcacgacctgtgcg

SEQ ID NO: 5271466 - DNA, 25 bp, Homo sapien
tcgaactcgcccaagtgcgggcgtg

SEQ ID NO: 5271467 - DNA, 25 bp, Homo sapien
tcttgcacctcccagaggcgctgcc

SEQ ID NO: 5271468 - DNA, 25 bp, Homo sapien
gcttgccgggtgtcagggtcatcca

SEQ ID NO: 5271469 - DNA, 25 bp, Homo sapien
gtggtgcctcctgacaggcgcccag

SEQ ID NO: 5271470 - DNA, 25 bp, Homo sapien
ctggccgcccgggcagtagcagagc

SEQ ID NO: 5271471 - DNA, 25 bp, Homo sapien
gccgcccgggcagtagcagagcagc

SEQ ID NO: 5271472 - DNA, 25 bp, Homo sapien
cgcccgggcagtagcagagcagcct

SEQ ID NO: 5271473 - DNA, 25 bp, Homo sapien
tggccgcccgggcagtagcagagca

SEQ ID NO: 5271474 - DNA, 25 bp, Homo sapien
ggggccgcggcgcagctggtgcagc

SEQ ID NO: 5271475 - DNA, 25 bp, Homo sapien
ctggaaggggccgcggcgcagctgg

SEQ ID NO: 5271476 - DNA, 25 bp, Homo sapien
gaaggggccgcggcgcagctggtgc

SEQ ID NO: 5271477 - DNA, 25 bp, Homo sapien
gggccgcggcgcagctggtgcagca

SEQ ID NO: 5271478 - DNA, 25 bp, Homo sapien
gccccgcagccggcgtccggggtca

SEQ ID NO: 5271479 - DNA, 25 bp, Homo sapien
gcagccgcgccgcccggacccgggc

SEQ ID NO: 5271480 - DNA, 25 bp, Homo sapien
gtgcagccgcgccgcccggacccgg

SEQ ID NO: 5271481 - DNA, 25 bp, Homo sapien
ctggtgcagccgcgccgcccggacc

SEQ ID NO: 5271482 - DNA, 25 bp, Homo sapien
aagtgagccagggtgcagtcgggaa

SEQ ID NO: 5271483 - DNA, 25 bp, Homo sapien
cagtcgggaagctccaggacgaagc

SEQ ID NO: 5271484 - DNA, 25 bp, Homo sapien
ggcgtcggcgcctagggcgaagtga

SEQ ID NO: 5271485 - DNA, 25 bp, Homo sapien
cgcctagggcgaagtgagccagggt

SEQ ID NO: 5271486 - DNA, 25 bp, Homo sapien
agcggccccgacagtggcccgcgca

SEQ ID NO: 5271487 - DNA, 25 bp, Homo sapien
gcagcggccccgacagtggcccgcg

SEQ ID NO: 5271488 - DNA, 25 bp, Homo sapien
cccgacagtggcccgcgcaggagcc

SEQ ID NO: 5271489 - DNA, 25 bp, Homo sapien
gacagtggcccgcgcaggagccggc

SEQ ID NO: 5271490 - DNA, 25 bp, Homo sapien
cagcgggaaacgaaagcgaagcgtt

SEQ ID NO: 5271491 - DNA, 25 bp, Homo sapien
gggcgcctcagcgacgccgccctcg

SEQ ID NO: 5271492 - DNA, 25 bp, Homo sapien
gaaacccggagggagccaggcgcca

SEQ ID NO: 5271493 - DNA, 25 bp, Homo sapien
aggcgccagcgggaaacgaaagcga

SEQ ID NO: 5271494 - DNA, 25 bp, Homo sapien
ttgctgactctccaactgggaagtg

SEQ ID NO: 5271495 - DNA, 25 bp, Homo sapien
tcctgcactaaggtgaagtgtgtca

SEQ ID NO: 5271496 - DNA, 25 bp, Homo sapien
gtgtgtcaggatagcaccctctgcc

SEQ ID NO: 5271497 - DNA, 25 bp, Homo sapien
tgtcgcccagattggcacctcgaaa

SEQ ID NO: 5271498 - DNA, 25 bp, Homo sapien
tgaattttctagatgcgctttctga

SEQ ID NO: 5271499 - DNA, 25 bp, Homo sapien
cagtggatttgatgaaaagatgttt

SEQ ID NO: 5271500 - DNA, 25 bp, Homo sapien
ctagatgcgctttctgaactgtaga

SEQ ID NO: 5271501 - DNA, 25 bp, Homo sapien
ggtgtagaagaagctataaaattca

SEQ ID NO: 5271502 - DNA, 25 bp, Homo sapien
tggagttgacatggaggcagtgctt

SEQ ID NO: 5271503 - DNA, 25 bp, Homo sapien
caaagatcctgagcaaaacaaagat

SEQ ID NO: 5271504 - DNA, 25 bp, Homo sapien
tttgttcgcctatcatctggccaca

SEQ ID NO: 5271505 - DNA, 25 bp, Homo sapien
caaagatacgctttccatttgatga

SEQ ID NO: 5271506 - DNA, 25 bp, Homo sapien
tcaaggtgccaactggttaagttcc

SEQ ID NO: 5271507 - DNA, 25 bp, Homo sapien
aacataccgtataccatgtggcaga

SEQ ID NO: 5271508 - DNA, 25 bp, Homo sapien
ttaactacctgctaaagaccctgtg

SEQ ID NO: 5271509 - DNA, 25 bp, Homo sapien
tagatttgacctgactttgatgcca

SEQ ID NO: 5271510 - DNA, 25 bp, Homo sapien
gccagggtgagctagagaacatact

SEQ ID NO: 5271511 - DNA, 25 bp, Homo sapien
ccacagtgattacagaggaggcctc

SEQ ID NO: 5271512 - DNA, 25 bp, Homo sapien
gcatttaactgctagtacaaggctg

SEQ ID NO: 5271513 - DNA, 25 bp, Homo sapien
taagcaaagctactaattccggcca

SEQ ID NO: 5271514 - DNA, 25 bp, Homo sapien
ccagctgactccatttggtggtccc

SEQ ID NO: 5271515 - DNA, 25 bp, Homo sapien
ggtggtcccaccacctcaatatgtg

SEQ ID NO: 5271516 - DNA, 25 bp, Homo sapien
ctgactccatttggtggtcccacca

SEQ ID NO: 5271517 - DNA, 25 bp, Homo sapien
ccaccacctcaatatgtggctctgt

SEQ ID NO: 5271518 - DNA, 25 bp, Homo sapien
tctccagagatagggtgatgcacgt

SEQ ID NO: 5271519 - DNA, 25 bp, Homo sapien
taaggaggcacaaggtgtccgtgac

SEQ ID NO: 5271520 - DNA, 25 bp, Homo sapien
tcatgtaagtgctggaatcctgagg

SEQ ID NO: 5271521 - DNA, 25 bp, Homo sapien
tagaacttatcttgccattgctgga

SEQ ID NO: 5271522 - DNA, 25 bp, Homo sapien
agacagccagactgtatcagaagct

SEQ ID NO: 5271523 - DNA, 25 bp, Homo sapien
catgacatacgagaattatgggagc

SEQ ID NO: 5271524 - DNA, 25 bp, Homo sapien
agctttgccaagaagacccggagag

SEQ ID NO: 5271525 - DNA, 25 bp, Homo sapien
gagtagcaggaactctcctctgttc

SEQ ID NO: 5271526 - DNA, 25 bp, Homo sapien
aagtcttgtgctgtctgctcctgag

SEQ ID NO: 5271527 - DNA, 25 bp, Homo sapien
gcctctggcaggaaagtcttgtgct

SEQ ID NO: 5271528 - DNA, 25 bp, Homo sapien
tgctgtctgctcctgagagaaggca

SEQ ID NO: 5271529 - DNA, 25 bp, Homo sapien
gcaggaaagtcttgtgctgtctgct

SEQ ID NO: 5271530 - DNA, 25 bp, Homo sapien
tgggctgaagatgagacgttacatt

SEQ ID NO: 5271531 - DNA, 25 bp, Homo sapien
atgagatgatcagtagcacagatgg

SEQ ID NO: 5271532 - DNA, 25 bp, Homo sapien
tgaagatgagacgttacattccaca

SEQ ID NO: 5271533 - DNA, 25 bp, Homo sapien
ctggaatgagatgatcagtagcaca

SEQ ID NO: 5271534 - DNA, 25 bp, Homo sapien
tacaatgggctctatgggacagccc

SEQ ID NO: 5271535 - DNA, 25 bp, Homo sapien
ccgggaagtctttgcagggaaatct

SEQ ID NO: 5271536 - DNA, 25 bp, Homo sapien
tattatgttcaaggccctaagaggg

SEQ ID NO: 5271537 - DNA, 25 bp, Homo sapien
ttacaagtctcagttgggtcagggc

SEQ ID NO: 5271538 - DNA, 25 bp, Homo sapien
tgagtgttatacgtctgtgttccat

SEQ ID NO: 5271539 - DNA, 25 bp, Homo sapien
cagatgctcctttgcagtcccccag

SEQ ID NO: 5271540 - DNA, 25 bp, Homo sapien
gcttgagtgttatacgtctgtgttc

SEQ ID NO: 5271541 - DNA, 25 bp, Homo sapien
ccccagcttgagtgttatacgtctg

SEQ ID NO: 5271542 - DNA, 25 bp, Homo sapien
tcttaatacagacccctttattgtg

SEQ ID NO: 5271543 - DNA, 25 bp, Homo sapien
tattgtggggaacacagcacaacgt

SEQ ID NO: 5271544 - DNA, 25 bp, Homo sapien
acacagcacaacgtctgtgcatttg

SEQ ID NO: 5271545 - DNA, 25 bp, Homo sapien
gagaatgcctgcatcttaatacaga

SEQ ID NO: 5271546 - DNA, 25 bp, Homo sapien
aacagacagactttccttgcgaggg

SEQ ID NO: 5271547 - DNA, 25 bp, Homo sapien
tggtatcccagctcggacacgggag

SEQ ID NO: 5271548 - DNA, 25 bp, Homo sapien
gagcttgaatttagaccacacagtg

SEQ ID NO: 5271549 - DNA, 25 bp, Homo sapien
aagcccaggcctttatgcagaacga

SEQ ID NO: 5271550 - DNA, 25 bp, Homo sapien
aggctctgggctcatctcacagccg

SEQ ID NO: 5271551 - DNA, 25 bp, Homo sapien
cccagcgagggtcggggaggcaggt

SEQ ID NO: 5271552 - DNA, 25 bp, Homo sapien
tgggctcatctcacagccgccccag

SEQ ID NO: 5271553 - DNA, 25 bp, Homo sapien
tcacagccgccccagcgagggtcgg

SEQ ID NO: 5271554 - DNA, 25 bp, Homo sapien
acagcgttgggctgggtcacccctt

SEQ ID NO: 5271555 - DNA, 25 bp, Homo sapien
gtcaccccttctttcctagcttgct

SEQ ID NO: 5271556 - DNA, 25 bp, Homo sapien
agctcaacgccggttcgcgccctgg

SEQ ID NO: 5271557 - DNA, 25 bp, Homo sapien
ttcgcgccctggtttacagcgttgg

SEQ ID NO: 5271558 - DNA, 25 bp, Homo sapien
agtgacgcgcgtcccctttgtgtcc

SEQ ID NO: 5271559 - DNA, 25 bp, Homo sapien
aggcccaggtagagtgacgcgcgtc

SEQ ID NO: 5271560 - DNA, 25 bp, Homo sapien
caggtagagtgacgcgcgtcccctt

SEQ ID NO: 5271561 - DNA, 25 bp, Homo sapien
agagtgacgcgcgtcccctttgtgt

SEQ ID NO: 5271562 - DNA, 25 bp, Homo sapien
cagctgtttggtcgcttatgccatc

SEQ ID NO: 5271563 - DNA, 25 bp, Homo sapien
tgtttggtcgcttatgccatcctgg

SEQ ID NO: 5271564 - DNA, 25 bp, Homo sapien
ctcccagctgtttggtcgcttatgc

SEQ ID NO: 5271565 - DNA, 25 bp, Homo sapien
ttggtcgcttatgccatcctggagg

SEQ ID NO: 5271566 - DNA, 25 bp, Homo sapien
cctaatggtcttcgtaggcaggtct

SEQ ID NO: 5271567 - DNA, 25 bp, Homo sapien
aatggtcttcgtaggcaggtctcag

SEQ ID NO: 5271568 - DNA, 25 bp, Homo sapien
tgtccactccaaagttcgtggtctt

SEQ ID NO: 5271569 - DNA, 25 bp, Homo sapien
aggcaggtctcaggatgtccactcc

SEQ ID NO: 5271570 - DNA, 25 bp, Homo sapien
ctggcctatgaacccttgttgtaac

SEQ ID NO: 5271571 - DNA, 25 bp, Homo sapien
cctatgaacccttgttgtaaccatg

SEQ ID NO: 5271572 - DNA, 25 bp, Homo sapien
tgttgtaaccatgggaacctcgtag

SEQ ID NO: 5271573 - DNA, 25 bp, Homo sapien
tgggaacctcgtagcttggaaagga

SEQ ID NO: 5271574 - DNA, 25 bp, Homo sapien
gagcgtctttccctatctgtgttcc

SEQ ID NO: 5271575 - DNA, 25 bp, Homo sapien
tgttttggagcgtctttccctatct

SEQ ID NO: 5271576 - DNA, 25 bp, Homo sapien
tttggagcgtctttccctatctgtg

SEQ ID NO: 5271577 - DNA, 25 bp, Homo sapien
gcgtctttccctatctgtgttccct

SEQ ID NO: 5271578 - DNA, 25 bp, Homo sapien
cctatgggagcctgtgggagcaaaa

SEQ ID NO: 5271579 - DNA, 25 bp, Homo sapien
gaaagtggatgttgtcagagtctct

SEQ ID NO: 5271580 - DNA, 25 bp, Homo sapien
tgcatgtgctggatatggccgtgca

SEQ ID NO: 5271581 - DNA, 25 bp, Homo sapien
tctttattgattgaacgggcttttg

SEQ ID NO: 5271582 - DNA, 25 bp, Homo sapien
tggtgggttgcaggagtcccctctg

SEQ ID NO: 5271583 - DNA, 25 bp, Homo sapien
tccgtcgctgactggtctgcagcct

SEQ ID NO: 5271584 - DNA, 25 bp, Homo sapien
caccctccgtcgctgactggtctgc

SEQ ID NO: 5271585 - DNA, 25 bp, Homo sapien
gtgggttgcaggagtcccctctgtg

SEQ ID NO: 5271586 - DNA, 25 bp, Homo sapien
agcccgcgggttgagtgttcaagcc

SEQ ID NO: 5271587 - DNA, 25 bp, Homo sapien
ccatgtgccagcttcctaatgattc

SEQ ID NO: 5271588 - DNA, 25 bp, Homo sapien
ctgctgacgtgtgccctgggacgct

SEQ ID NO: 5271589 - DNA, 25 bp, Homo sapien
cagctgctgacgtgtgccctgggac

SEQ ID NO: 5271590 - DNA, 25 bp, Homo sapien
gcacagatgagaagatggagccgca

SEQ ID NO: 5271591 - DNA, 25 bp, Homo sapien
atgagaagatggagccgcacggagc

SEQ ID NO: 5271592 - DNA, 25 bp, Homo sapien
ctggcattgcacagatgagaagatg

SEQ ID NO: 5271593 - DNA, 25 bp, Homo sapien
acagatgagaagatggagccgcacg

SEQ ID NO: 5271594 - DNA, 25 bp, Homo sapien
tgaatgtgcccatccgagcgcatgt

SEQ ID NO: 5271595 - DNA, 25 bp, Homo sapien
gacagggctgttggatgaacgctca

SEQ ID NO: 5271596 - DNA, 25 bp, Homo sapien
ggttagaaccaagcgcctgaatgtg

SEQ ID NO: 5271597 - DNA, 25 bp, Homo sapien
cacgggaagcataggacgtggcctt

SEQ ID NO: 5271598 - DNA, 25 bp, Homo sapien
tcccttccgagtgcgggcctctcat

SEQ ID NO: 5271599 - DNA, 25 bp, Homo sapien
ctcatgaaacactaggatgctttcg

SEQ ID NO: 5271600 - DNA, 25 bp, Homo sapien
ggatgctttcgccagtgccttggag

SEQ ID NO: 5271601 - DNA, 25 bp, Homo sapien
gcgggcctctcatgaaacactagga

SEQ ID NO: 5271602 - DNA, 25 bp, Homo sapien
ttgtcaagaagcgacaagcttttcc

SEQ ID NO: 5271603 - DNA, 25 bp, Homo sapien
cagctgcatctgtccgtttttgtca

SEQ ID NO: 5271604 - DNA, 25 bp, Homo sapien
gcttttccaaaagtttggtggctga

SEQ ID NO: 5271605 - DNA, 25 bp, Homo sapien
ttccaaaagtttggtggctgactct

SEQ ID NO: 5271606 - DNA, 25 bp, Homo sapien
gttcaaccagctcaactctgttcag

SEQ ID NO: 5271607 - DNA, 25 bp, Homo sapien
tatggatggttcagactcttgtccc

SEQ ID NO: 5271608 - DNA, 25 bp, Homo sapien
gcacgtcctacatgccttgaggtta

SEQ ID NO: 5271609 - DNA, 25 bp, Homo sapien
tattcagactcaactgttcaaccag

SEQ ID NO: 5271610 - DNA, 25 bp, Homo sapien
ttcccagtgaagactggttgagaga

SEQ ID NO: 5271611 - DNA, 25 bp, Homo sapien
gaatggatcttgcacatatatttga

SEQ ID NO: 5271612 - DNA, 25 bp, Homo sapien
ccttcagcggtcagggcagatggca

SEQ ID NO: 5271613 - DNA, 25 bp, Homo sapien
ccagtgaagactggttgagagaagc

SEQ ID NO: 5271614 - DNA, 25 bp, Homo sapien
ggcgactgcgcattcctcatttgag

SEQ ID NO: 5271615 - DNA, 25 bp, Homo sapien
tatcacctgacaccctctgtggtcg

SEQ ID NO: 5271616 - DNA, 25 bp, Homo sapien
ttgagcccttgccttcagagttgcc

SEQ ID NO: 5271617 - DNA, 25 bp, Homo sapien
gctagccttttctccacggctggct

SEQ ID NO: 5271618 - DNA, 25 bp, Homo sapien
gcagcctgccttcggtgatggtcag

SEQ ID NO: 5271619 - DNA, 25 bp, Homo sapien
ctgccttcggtgatggtcagaaact

SEQ ID NO: 5271620 - DNA, 25 bp, Homo sapien
gcctgccttcggtgatggtcagaaa

SEQ ID NO: 5271621 - DNA, 25 bp, Homo sapien
tggcagcctgccttcggtgatggtc

SEQ ID NO: 5271622 - DNA, 25 bp, Homo sapien
tctgggggttctgcgtggccccttc

SEQ ID NO: 5271623 - DNA, 25 bp, Homo sapien
cagaccctgtcagttccctgagcag

SEQ ID NO: 5271624 - DNA, 25 bp, Homo sapien
ggggttctgcgtggccccttcagac

SEQ ID NO: 5271625 - DNA, 25 bp, Homo sapien
tgacatggaatgaagtcagcatcca

SEQ ID NO: 5271626 - DNA, 25 bp, Homo sapien
ctagacacagcagacttggtgccaa

SEQ ID NO: 5271627 - DNA, 25 bp, Homo sapien
cagcagacttggtgccaagggcctt

SEQ ID NO: 5271628 - DNA, 25 bp, Homo sapien
agacttggtgccaagggcctttgag

SEQ ID NO: 5271629 - DNA, 25 bp, Homo sapien
gacacagcagacttggtgccaaggg

SEQ ID NO: 5271630 - DNA, 25 bp, Homo sapien
tgactgagtactgttcatgtcagaa

SEQ ID NO: 5271631 - DNA, 25 bp, Homo sapien
gaactgggacagtgtgcccggcaga

SEQ ID NO: 5271632 - DNA, 25 bp, Homo sapien
tactgttcatgtcagaactgggaca

SEQ ID NO: 5271633 - DNA, 25 bp, Homo sapien
catctcctagtgcagcggtcgtggt

SEQ ID NO: 5271634 - DNA, 25 bp, Homo sapien
cagaagagatcttgagtaccagaaa

SEQ ID NO: 5271635 - DNA, 25 bp, Homo sapien
tgcttcagaagagatcttgagtacc

SEQ ID NO: 5271636 - DNA, 25 bp, Homo sapien
ttcagaagagatcttgagtaccaga

SEQ ID NO: 5271637 - DNA, 25 bp, Homo sapien
atgtgcttcagaagagatcttgagt

SEQ ID NO: 5271638 - DNA, 25 bp, Homo sapien
tacccatggcgtgtacctgaaatgg

SEQ ID NO: 5271639 - DNA, 25 bp, Homo sapien
tgtacaccacacatctttttggatg

SEQ ID NO: 5271640 - DNA, 25 bp, Homo sapien
tagtcaccttcgtctgtacccatgg

SEQ ID NO: 5271641 - DNA, 25 bp, Homo sapien
tgtgaagtagcccaacaagagagtc

SEQ ID NO: 5271642 - DNA, 25 bp, Homo sapien
ggctgccttcccaatcagacagttg

SEQ ID NO: 5271643 - DNA, 25 bp, Homo sapien
gtgaccgtaatctatttcccagagg

SEQ ID NO: 5271644 - DNA, 25 bp, Homo sapien
gggactgtccacgtgaccgtaatct

SEQ ID NO: 5271645 - DNA, 25 bp, Homo sapien
tgcttctgtgcatcccgcaggagga

SEQ ID NO: 5271646 - DNA, 25 bp, Homo sapien
gtgtggaggtatgagagttcttttc

SEQ ID NO: 5271647 - DNA, 25 bp, Homo sapien
gattcacactcataagtggtttgtt

SEQ ID NO: 5271648 - DNA, 25 bp, Homo sapien
tccttcaccgcagacaggcaggtct

SEQ ID NO: 5271649 - DNA, 25 bp, Homo sapien
caaatacatgggttccccggtgtgg

SEQ ID NO: 5271650 - DNA, 25 bp, Homo sapien
gatccagccttaggagatagtaatg

SEQ ID NO: 5271651 - DNA, 25 bp, Homo sapien
cagagtatttgatacagatccagcc

SEQ ID NO: 5271652 - DNA, 25 bp, Homo sapien
gagtccctgcgatccagagtatttg

SEQ ID NO: 5271653 - DNA, 25 bp, Homo sapien
tccagccttaggagatagtaatgta

SEQ ID NO: 5271654 - DNA, 25 bp, Homo sapien
tgcaacacattctgatccgatttac

SEQ ID NO: 5271655 - DNA, 25 bp, Homo sapien
tccgtttggaggtaggtgaatctcc

SEQ ID NO: 5271656 - DNA, 25 bp, Homo sapien
tgaatctccaatgatttggggggca

SEQ ID NO: 5271657 - DNA, 25 bp, Homo sapien
ccaagcaaggagtctctgggttgaa

SEQ ID NO: 5271658 - DNA, 25 bp, Homo sapien
atcctgttccttaatggactgatga

SEQ ID NO: 5271659 - DNA, 25 bp, Homo sapien
taatggactgatgaacctctctcag

SEQ ID NO: 5271660 - DNA, 25 bp, Homo sapien
ggactgatgaacctctctcagtatc

SEQ ID NO: 5271661 - DNA, 25 bp, Homo sapien
ttccttaatggactgatgaacctct

SEQ ID NO: 5271662 - DNA, 25 bp, Homo sapien
acggtgttctcaggtgttgtgtgtt

SEQ ID NO: 5271663 - DNA, 25 bp, Homo sapien
ggtgttctcaggtgttgtgtgttca

SEQ ID NO: 5271664 - DNA, 25 bp, Homo sapien
gcactgtgaacttggcgagggcatt

SEQ ID NO: 5271665 - DNA, 25 bp, Homo sapien
ggcgagggcattgccagtgtctctt

SEQ ID NO: 5271666 - DNA, 25 bp, Homo sapien
tatacgtggtgattccagtcttctt

SEQ ID NO: 5271667 - DNA, 25 bp, Homo sapien
gggtcccagtgatcaggctgtctag

SEQ ID NO: 5271668 - DNA, 25 bp, Homo sapien
agccccggtagggatggtaaggatg

SEQ ID NO: 5271669 - DNA, 25 bp, Homo sapien
ctgccagaaggatattaaatgttgc

SEQ ID NO: 5271670 - DNA, 25 bp, Homo sapien
aatatggagcaaaccaggtcatggg

SEQ ID NO: 5271671 - DNA, 25 bp, Homo sapien
ctaaaatatggagcaaaccaggtca

SEQ ID NO: 5271672 - DNA, 25 bp, Homo sapien
gagcaaaccaggtcatgggtgagtt

SEQ ID NO: 5271673 - DNA, 25 bp, Homo sapien
caaaccaggtcatgggtgagttaag

SEQ ID NO: 5271674 - DNA, 25 bp, Homo sapien
ctgtcctctgatgtgccatgtatct

SEQ ID NO: 5271675 - DNA, 25 bp, Homo sapien
tgatgtgccatgtatctgagtgaca

SEQ ID NO: 5271676 - DNA, 25 bp, Homo sapien
tgggctctcactagttctgaccatt

SEQ ID NO: 5271677 - DNA, 25 bp, Homo sapien
gctctcactagttctgaccattttg

SEQ ID NO: 5271678 - DNA, 25 bp, Homo sapien
ttctctgcttttcagtgggacctgg

SEQ ID NO: 5271679 - DNA, 25 bp, Homo sapien
tctctgcttttcagtgggacctggg

SEQ ID NO: 5271680 - DNA, 25 bp, Homo sapien
ctctgcttttcagtgggacctggga

SEQ ID NO: 5271681 - DNA, 25 bp, Homo sapien
cattgggattcttcgggtttctgtg

SEQ ID NO: 5271682 - DNA, 25 bp, Homo sapien
aagtggcaacttcatggatcctggg

SEQ ID NO: 5271683 - DNA, 25 bp, Homo sapien
tattatcacattattgtcacagtca

SEQ ID NO: 5271684 - DNA, 25 bp, Homo sapien
tttggagaacatcaaacttggtgac

SEQ ID NO: 5271685 - DNA, 25 bp, Homo sapien
tgtttggcatgctttaagtggtaga

SEQ ID NO: 5271686 - DNA, 25 bp, Homo sapien
gactgtggatctctatgagctcagg

SEQ ID NO: 5271687 - DNA, 25 bp, Homo sapien
ttgtctttctagaacaatccctggg

SEQ ID NO: 5271688 - DNA, 25 bp, Homo sapien
tataagaagtctcctggaagctgtg

SEQ ID NO: 5271689 - DNA, 25 bp, Homo sapien
caaacccagaaatttcccaggcttg

SEQ ID NO: 5271690 - DNA, 25 bp, Homo sapien
cagaaatttcccaggcttgttgctt

SEQ ID NO: 5271691 - DNA, 25 bp, Homo sapien
tcttccattagctcaagggattgac

SEQ ID NO: 5271692 - DNA, 25 bp, Homo sapien
gctcaagggattgacaagctccaaa

SEQ ID NO: 5271693 - DNA, 25 bp, Homo sapien
gttgattgtgtatgttcttctctgt

SEQ ID NO: 5271694 - DNA, 25 bp, Homo sapien
tcagaaggtgggtgcccttcctctg

SEQ ID NO: 5271695 - DNA, 25 bp, Homo sapien
tgtaggtgaaggtagaaagtagaaa

SEQ ID NO: 5271696 - DNA, 25 bp, Homo sapien
ctggcccctgggttcttccttgttg

SEQ ID NO: 5271697 - DNA, 25 bp, Homo sapien
tggccctcgacccgctggtgtcttg

SEQ ID NO: 5271698 - DNA, 25 bp, Homo sapien
ggacctggccctcgacccgctggtg

SEQ ID NO: 5271699 - DNA, 25 bp, Homo sapien
cgctggtgtcttgcaagctctgtct

SEQ ID NO: 5271700 - DNA, 25 bp, Homo sapien
ggtgtcttgcaagctctgtcttggg

SEQ ID NO: 5271701 - DNA, 25 bp, Homo sapien
aaggaagcacttgtgtgttgaagat

SEQ ID NO: 5271702 - DNA, 25 bp, Homo sapien
cactgtagcgtgaagagaaggaagc

SEQ ID NO: 5271703 - DNA, 25 bp, Homo sapien
agagaaggaagcacttgtgtgttga

SEQ ID NO: 5271704 - DNA, 25 bp, Homo sapien
tcactgtagcgtgaagagaaggaag

SEQ ID NO: 5271705 - DNA, 25 bp, Homo sapien
gggtgccctggtcgctttggtggcg

SEQ ID NO: 5271706 - DNA, 25 bp, Homo sapien
tgccctggtcgctttggtggcgcct

SEQ ID NO: 5271707 - DNA, 25 bp, Homo sapien
tggtcgctttggtggcgccttcccc

SEQ ID NO: 5271708 - DNA, 25 bp, Homo sapien
ctttggtggcgccttcccctctgtg

SEQ ID NO: 5271709 - DNA, 25 bp, Homo sapien
tgtggccagaggagttgcaactgtc

SEQ ID NO: 5271710 - DNA, 25 bp, Homo sapien
gaggagccctgagtctgtggccaga

SEQ ID NO: 5271711 - DNA, 25 bp, Homo sapien
agtctgtggccagaggagttgcaac

SEQ ID NO: 5271712 - DNA, 25 bp, Homo sapien
tctgtggccagaggagttgcaactg

SEQ ID NO: 5271713 - DNA, 25 bp, Homo sapien
tgcctggtggattcttcgtgattct

SEQ ID NO: 5271714 - DNA, 25 bp, Homo sapien
tttccttgcttgcagggtgcctggt

SEQ ID NO: 5271715 - DNA, 25 bp, Homo sapien
caattgctaatatggcactcccctg

SEQ ID NO: 5271716 - DNA, 25 bp, Homo sapien
cagtgtgaaagggactggcctagca

SEQ ID NO: 5271717 - DNA, 25 bp, Homo sapien
tggaggtcacaagagcctgtgcaca

SEQ ID NO: 5271718 - DNA, 25 bp, Homo sapien
ggaggtcacaagagcctgtgcacat

SEQ ID NO: 5271719 - DNA, 25 bp, Homo sapien
ctggaggtcacaagagcctgtgcac

SEQ ID NO: 5271720 - DNA, 25 bp, Homo sapien
acctgtgtgtagagtgacctgggaa

SEQ ID NO: 5271721 - DNA, 25 bp, Homo sapien
gccaatcccgtgttcgttttgtcaa

SEQ ID NO: 5271722 - DNA, 25 bp, Homo sapien
cctgggaaattccttatgggctgaa

SEQ ID NO: 5271723 - DNA, 25 bp, Homo sapien
ttgtcaatcagagatgcaacctgtg

SEQ ID NO: 5271724 - DNA, 25 bp, Homo sapien
gaaaatgccgattcctgatagtggc

SEQ ID NO: 5271725 - DNA, 25 bp, Homo sapien
cattgaggaggtaggtgtcccttcc

SEQ ID NO: 5271726 - DNA, 25 bp, Homo sapien
caggtcctggtgacaagcatgggcc

SEQ ID NO: 5271727 - DNA, 25 bp, Homo sapien
gaagtaggctgtctctgcactagaa

SEQ ID NO: 5271728 - DNA, 25 bp, Homo sapien
cactgcctctttggctgccgcccag

SEQ ID NO: 5271729 - DNA, 25 bp, Homo sapien
actgcctctttggctgccgcccaga

SEQ ID NO: 5271730 - DNA, 25 bp, Homo sapien
ctgcctctttggctgccgcccagac

SEQ ID NO: 5271731 - DNA, 25 bp, Homo sapien
tcactgcctctttggctgccgccca

SEQ ID NO: 5271732 - DNA, 25 bp, Homo sapien
gctctgctgacacagtgccctgatt

SEQ ID NO: 5271733 - DNA, 25 bp, Homo sapien
tcctcgggaacgtccagcttctggt

SEQ ID NO: 5271734 - DNA, 25 bp, Homo sapien
ttaagaaccgcaggcctgaccggtc

SEQ ID NO: 5271735 - DNA, 25 bp, Homo sapien
ttctggtggcttttgtagaccgcag

SEQ ID NO: 5271736 - DNA, 25 bp, Homo sapien
taaagcagccgtggatgacacaggc

SEQ ID NO: 5271737 - DNA, 25 bp, Homo sapien
cccgagtgggttcttataaagcagc

SEQ ID NO: 5271738 - DNA, 25 bp, Homo sapien
tgccccgagtgggttcttataaagc

SEQ ID NO: 5271739 - DNA, 25 bp, Homo sapien
tcttataaagcagccgtggatgaca

SEQ ID NO: 5271740 - DNA, 25 bp, Homo sapien
gtctcttcctcgtataaggagatgg

SEQ ID NO: 5271741 - DNA, 25 bp, Homo sapien
ggaataaacagcctccgcatccagt

SEQ ID NO: 5271742 - DNA, 25 bp, Homo sapien
ttggacaaactcaacactggaaggg

SEQ ID NO: 5271743 - DNA, 25 bp, Homo sapien
agtcctgctgtcgtgccttgctcct

SEQ ID NO: 5271744 - DNA, 25 bp, Homo sapien
ctggcctccaccccaggtccctgca

SEQ ID NO: 5271745 - DNA, 25 bp, Homo sapien
tcctggcctccaccccaggtccctg

SEQ ID NO: 5271746 - DNA, 25 bp, Homo sapien
tggcctccaccccaggtccctgcat

SEQ ID NO: 5271747 - DNA, 25 bp, Homo sapien
ctcctggcctccaccccaggtccct

SEQ ID NO: 5271748 - DNA, 25 bp, Homo sapien
caccgtgtgagggccgcatagggcc

SEQ ID NO: 5271749 - DNA, 25 bp, Homo sapien
ccaccgtgtgagggccgcatagggc

SEQ ID NO: 5271750 - DNA, 25 bp, Homo sapien
ccacatgggtgacaggagacccata

SEQ ID NO: 5271751 - DNA, 25 bp, Homo sapien
ggtgacaggagacccatacacagca

SEQ ID NO: 5271752 - DNA, 25 bp, Homo sapien
tgggtgacaggagacccatacacag

SEQ ID NO: 5271753 - DNA, 25 bp, Homo sapien
cctccacatgggtgacaggagaccc

SEQ ID NO: 5271754 - DNA, 25 bp, Homo sapien
tagaatgtctcctctgatataacag

SEQ ID NO: 5271755 - DNA, 25 bp, Homo sapien
taacagccttggttttagcgtcaat

SEQ ID NO: 5271756 - DNA, 25 bp, Homo sapien
tggttttagcgtcaatgtcttcccc

SEQ ID NO: 5271757 - DNA, 25 bp, Homo sapien
cctctgatataacagccttggtttt

SEQ ID NO: 5271758 - DNA, 25 bp, Homo sapien
tgcggcgccagcatgttgtggattc

SEQ ID NO: 5271759 - DNA, 25 bp, Homo sapien
tgaagtcccggtccacgtgcggcgc

SEQ ID NO: 5271760 - DNA, 25 bp, Homo sapien
tgctggtcccgtggcaatgcgtgta

SEQ ID NO: 5271761 - DNA, 25 bp, Homo sapien
gagtaggaatcccatgtgtgacaca

SEQ ID NO: 5271762 - DNA, 25 bp, Homo sapien
cgcctttggaaatagcccacattgc

SEQ ID NO: 5271763 - DNA, 25 bp, Homo sapien
ccctggggtggccactgatcgagaa

SEQ ID NO: 5271764 - DNA, 25 bp, Homo sapien
gaaatagcccacattgcactggcct

SEQ ID NO: 5271765 - DNA, 25 bp, Homo sapien
cactgatcgagaattcggcatcatg

SEQ ID NO: 5271766 - DNA, 25 bp, Homo sapien
caagagggaagatgaaatgaacaac

SEQ ID NO: 5271767 - DNA, 25 bp, Homo sapien
ggacaagagggaagatgaaatgaac

SEQ ID NO: 5271768 - DNA, 25 bp, Homo sapien
ctggacaagagggaagatgaaatga

SEQ ID NO: 5271769 - DNA, 25 bp, Homo sapien
agagggaagatgaaatgaacaacca

SEQ ID NO: 5271770 - DNA, 25 bp, Homo sapien
tccctgtccgtgcactgaggggctc

SEQ ID NO: 5271771 - DNA, 25 bp, Homo sapien
gggtgtctggaggtctgttgcatga

SEQ ID NO: 5271772 - DNA, 25 bp, Homo sapien
gggaagagctacagcggaggtggag

SEQ ID NO: 5271773 - DNA, 25 bp, Homo sapien
gctggctgtattacctggacatgtt

SEQ ID NO: 5271774 - DNA, 25 bp, Homo sapien
cctgtcggacttggtgcccggcgtc

SEQ ID NO: 5271775 - DNA, 25 bp, Homo sapien
tccctgtcggacttggtgcccggcg

SEQ ID NO: 5271776 - DNA, 25 bp, Homo sapien
tgatccctgtcggacttggtgcccg

SEQ ID NO: 5271777 - DNA, 25 bp, Homo sapien
gtcggacttggtgcccggcgtccac

SEQ ID NO: 5271778 - DNA, 25 bp, Homo sapien
agcctgccgtatggaattctgctcc

SEQ ID NO: 5271779 - DNA, 25 bp, Homo sapien
ggagaccatgccgatcaccttcctc

SEQ ID NO: 5271780 - DNA, 25 bp, Homo sapien
ggagaccaggtaccctttgtacaca

SEQ ID NO: 5271781 - DNA, 25 bp, Homo sapien
ccagtgcagtgcaaagcctgccgta

SEQ ID NO: 5271782 - DNA, 25 bp, Homo sapien
ccttccagcacagaagtgtgtcttg

SEQ ID NO: 5271783 - DNA, 25 bp, Homo sapien
ggttccgccccttgctaatggagag

SEQ ID NO: 5271784 - DNA, 25 bp, Homo sapien
ggccgcacttttcctccatcagaga

SEQ ID NO: 5271785 - DNA, 25 bp, Homo sapien
gtcttgtctgctctagtccctgagg

SEQ ID NO: 5271786 - DNA, 25 bp, Homo sapien
cagtgacctgcgtgttcagtagccc

SEQ ID NO: 5271787 - DNA, 25 bp, Homo sapien
aaagctccctctagagcccgaggct

SEQ ID NO: 5271788 - DNA, 25 bp, Homo sapien
actctggtggagtcacacacagccg

SEQ ID NO: 5271789 - DNA, 25 bp, Homo sapien
agctctttggagcagcagtgacctg

SEQ ID NO: 5271790 - DNA, 25 bp, Homo sapien
tccttctgatacactacgataaggg

SEQ ID NO: 5271791 - DNA, 25 bp, Homo sapien
ggaccctgccggaacaagctgggcc

SEQ ID NO: 5271792 - DNA, 25 bp, Homo sapien
gaaccactcgttcatgccgtctctg

SEQ ID NO: 5271793 - DNA, 25 bp, Homo sapien
cgaactgagcaggaaccactcgttc

SEQ ID NO: 5271794 - DNA, 25 bp, Homo sapien
tcaggagagcctctgaggcacatgt

SEQ ID NO: 5271795 - DNA, 25 bp, Homo sapien
gacaatcttaaatgccgaccacgtg

SEQ ID NO: 5271796 - DNA, 25 bp, Homo sapien
ggcgtccacagcaggcgataagaca

SEQ ID NO: 5271797 - DNA, 25 bp, Homo sapien
tgtgtcagcctcatctaaaagatgg

SEQ ID NO: 5271798 - DNA, 25 bp, Homo sapien
tgagtggatgctgttgtgtgcacct

SEQ ID NO: 5271799 - DNA, 25 bp, Homo sapien
caccttggcagaaactgagtcagag

SEQ ID NO: 5271800 - DNA, 25 bp, Homo sapien
cagagcttggtgagaactcggaaac

SEQ ID NO: 5271801 - DNA, 25 bp, Homo sapien
actcggaaaccattgcccaactctg

SEQ ID NO: 5271802 - DNA, 25 bp, Homo sapien
tatctttggaagtagtgcacgggca

SEQ ID NO: 5271803 - DNA, 25 bp, Homo sapien
ccttcggcggctttctacacgtggg

SEQ ID NO: 5271804 - DNA, 25 bp, Homo sapien
tctccacagggctaatggtcctcgt

SEQ ID NO: 5271805 - DNA, 25 bp, Homo sapien
aaatcgcgaatgacccgtttggccg

SEQ ID NO: 5271806 - DNA, 25 bp, Homo sapien
ttaggagccccagctttgctcggac

SEQ ID NO: 5271807 - DNA, 25 bp, Homo sapien
tagttttcaggcttccggcatctcc

SEQ ID NO: 5271808 - DNA, 25 bp, Homo sapien
cactgagcgtgctcccaagtgcagt

SEQ ID NO: 5271809 - DNA, 25 bp, Homo sapien
ggaaatgagtccgtgtaaagagctc

SEQ ID NO: 5271810 - DNA, 25 bp, Homo sapien
catgaagtgcttgccggcctttttc

SEQ ID NO: 5271811 - DNA, 25 bp, Homo sapien
tgccctcctgtgcattcgctgtgca

SEQ ID NO: 5271812 - DNA, 25 bp, Homo sapien
ttttccagcgctatcccagaaatca

SEQ ID NO: 5271813 - DNA, 25 bp, Homo sapien
cattcgctgtgcacacgattgcatg

SEQ ID NO: 5271814 - DNA, 25 bp, Homo sapien
aatcttctgagagcggtaaggagga

SEQ ID NO: 5271815 - DNA, 25 bp, Homo sapien
ctgaaggttcaggtatctgcagggc

SEQ ID NO: 5271816 - DNA, 25 bp, Homo sapien
tgcctgcaggttcccacggcgttct

SEQ ID NO: 5271817 - DNA, 25 bp, Homo sapien
taaggaggatgcccgtgttgctctg

SEQ ID NO: 5271818 - DNA, 25 bp, Homo sapien
ccataggagggagcacggactctga

SEQ ID NO: 5271819 - DNA, 25 bp, Homo sapien
aaggtggacgggtacagcaggtggc

SEQ ID NO: 5271820 - DNA, 25 bp, Homo sapien
gcagttcttccctacgctgggttgc

SEQ ID NO: 5271821 - DNA, 25 bp, Homo sapien
agcacggactctgagtgggctgtct

SEQ ID NO: 5271822 - DNA, 25 bp, Homo sapien
tcttcggacggttcacagaactctt

SEQ ID NO: 5271823 - DNA, 25 bp, Homo sapien
ggacggttcacagaactcttctgta

SEQ ID NO: 5271824 - DNA, 25 bp, Homo sapien
taattcttcggacggttcacagaac

SEQ ID NO: 5271825 - DNA, 25 bp, Homo sapien
ttaattcttcggacggttcacagaa

SEQ ID NO: 5271826 - DNA, 25 bp, Homo sapien
gctgtgtttgttcaaacgttgccca

SEQ ID NO: 5271827 - DNA, 25 bp, Homo sapien
tgttcaaacgttgcccacgggcagc

SEQ ID NO: 5271828 - DNA, 25 bp, Homo sapien
tgtgatatttatttgtgcgtgcacc

SEQ ID NO: 5271829 - DNA, 25 bp, Homo sapien
tgatttgacatagggcaagcagcaa

SEQ ID NO: 5271830 - DNA, 25 bp, Homo sapien
catacctctggcctagtgctctgta

SEQ ID NO: 5271831 - DNA, 25 bp, Homo sapien
tacctgaatagtagatgactggctg

SEQ ID NO: 5271832 - DNA, 25 bp, Homo sapien
gtgaaaatccatacctctggcctag

SEQ ID NO: 5271833 - DNA, 25 bp, Homo sapien
ttggtcctgagatgtgtttcagacc

SEQ ID NO: 5271834 - DNA, 25 bp, Homo sapien
cagttgggtcccttctgttttgctt

SEQ ID NO: 5271835 - DNA, 25 bp, Homo sapien
agaaaaataaacacaggagcagttg

SEQ ID NO: 5271836 - DNA, 25 bp, Homo sapien
ttaggtgtatgttggctttaagaaa

SEQ ID NO: 5271837 - DNA, 25 bp, Homo sapien
acaggagcagttgggtcccttctgt

SEQ ID NO: 5271838 - DNA, 25 bp, Homo sapien
gctcagtggtctatggccgcagtgc

SEQ ID NO: 5271839 - DNA, 25 bp, Homo sapien
tccatcctgggttacgattctcggg

SEQ ID NO: 5271840 - DNA, 25 bp, Homo sapien
tttcatctaagagcggattgaatcc

SEQ ID NO: 5271841 - DNA, 25 bp, Homo sapien
ttaagattggcattccggctcccag

SEQ ID NO: 5271842 - DNA, 25 bp, Homo sapien
ccaagatggaggctgaatctgttgt

SEQ ID NO: 5271843 - DNA, 25 bp, Homo sapien
ggatcttgacaggtccaagatggag

SEQ ID NO: 5271844 - DNA, 25 bp, Homo sapien
tgaaaggatcttgacaggtccaaga

SEQ ID NO: 5271845 - DNA, 25 bp, Homo sapien
cttgaaaggatcttgacaggtccaa

SEQ ID NO: 5271846 - DNA, 25 bp, Homo sapien
ttcccatgaaaggtttgaaacagag

SEQ ID NO: 5271847 - DNA, 25 bp, Homo sapien
taagtgtctggcaaaaagctcaaag

SEQ ID NO: 5271848 - DNA, 25 bp, Homo sapien
ttgaattcattttgtgggcaatggg

SEQ ID NO: 5271849 - DNA, 25 bp, Homo sapien
agctcaaagagagcttgcacacaac

SEQ ID NO: 5271850 - DNA, 25 bp, Homo sapien
gctgccgaggtatctgctggtcttt

SEQ ID NO: 5271851 - DNA, 25 bp, Homo sapien
gcagatattcctgtgtaagaacctc

SEQ ID NO: 5271852 - DNA, 25 bp, Homo sapien
tcaagcatccattggctgccgaggt

SEQ ID NO: 5271853 - DNA, 25 bp, Homo sapien
tttctgatcacccatgagggcagat

SEQ ID NO: 5271854 - DNA, 25 bp, Homo sapien
ttaaattaggaagtttgagagcttg

SEQ ID NO: 5271855 - DNA, 25 bp, Homo sapien
aaattaggaagtttgagagcttgtt

SEQ ID NO: 5271856 - DNA, 25 bp, Homo sapien
tcttaaattaggaagtttgagagct

SEQ ID NO: 5271857 - DNA, 25 bp, Homo sapien
taaattaggaagtttgagagcttgt

SEQ ID NO: 5271858 - DNA, 25 bp, Homo sapien
ttggatgatccacaccattacactc

SEQ ID NO: 5271859 - DNA, 25 bp, Homo sapien
gagaccctgtggaccacctaaatga

SEQ ID NO: 5271860 - DNA, 25 bp, Homo sapien
tattgctactagagaccctgtggac

SEQ ID NO: 5271861 - DNA, 25 bp, Homo sapien
ccattacactcatgccgggttattg

SEQ ID NO: 5271862 - DNA, 25 bp, Homo sapien
aatttacaaggcagacacactcccc

SEQ ID NO: 5271863 - DNA, 25 bp, Homo sapien
gggcacatcaaagccatacgacctg

SEQ ID NO: 5271864 - DNA, 25 bp, Homo sapien
gcacctgctgtttaattaaatttac

SEQ ID NO: 5271865 - DNA, 25 bp, Homo sapien
cactccccgtgatatacaaatccgt

SEQ ID NO: 5271866 - DNA, 25 bp, Homo sapien
gaactcacgggctgtgctccaagtg

SEQ ID NO: 5271867 - DNA, 25 bp, Homo sapien
gatgtactctacaaacgcgggcggt

SEQ ID NO: 5271868 - DNA, 25 bp, Homo sapien
tatgacgcagtgcatcctaagtgct

SEQ ID NO: 5271869 - DNA, 25 bp, Homo sapien
ggcggttcctgctgcattactgagt

SEQ ID NO: 5271870 - DNA, 25 bp, Homo sapien
tctgatcttcagataaactctcggg

SEQ ID NO: 5271871 - DNA, 25 bp, Homo sapien
cgttgagtttacatgctctgatgca

SEQ ID NO: 5271872 - DNA, 25 bp, Homo sapien
ataaactctcgggtcgttccagcat

SEQ ID NO: 5271873 - DNA, 25 bp, Homo sapien
aatataggccagaagaccccgcgtt

SEQ ID NO: 5271874 - DNA, 25 bp, Homo sapien
attaagctaatgagctttcctgctg

SEQ ID NO: 5271875 - DNA, 25 bp, Homo sapien
tgttgccttgctttcaattgcgagt

SEQ ID NO: 5271876 - DNA, 25 bp, Homo sapien
ggaacaggctgtctaacatcaggtg

SEQ ID NO: 5271877 - DNA, 25 bp, Homo sapien
gacctaggtgccttgcacagtctca

SEQ ID NO: 5271878 - DNA, 25 bp, Homo sapien
tccaaccatgagatgaaggtgcctt

SEQ ID NO: 5271879 - DNA, 25 bp, Homo sapien
taagaggattactcacagtgttggg

SEQ ID NO: 5271880 - DNA, 25 bp, Homo sapien
ttatcaaagaacgacatccagaatg

SEQ ID NO: 5271881 - DNA, 25 bp, Homo sapien
aaatcagagtagctcaaaggaaggc

SEQ ID NO: 5271882 - DNA, 25 bp, Homo sapien
atattgcagcatgccagtccgcagg

SEQ ID NO: 5271883 - DNA, 25 bp, Homo sapien
cagccccaggtagagcatattgcag

SEQ ID NO: 5271884 - DNA, 25 bp, Homo sapien
gtcagacggtctcacacaggtatcg

SEQ ID NO: 5271885 - DNA, 25 bp, Homo sapien
acatctgagtgaagtggccaccgct

SEQ ID NO: 5271886 - DNA, 25 bp, Homo sapien
tccactctgtgcccagagttcatgg

SEQ ID NO: 5271887 - DNA, 25 bp, Homo sapien
ggtagcgtcatattcatcactctgt

SEQ ID NO: 5271888 - DNA, 25 bp, Homo sapien
tcatggatttagttccctcagctgt

SEQ ID NO: 5271889 - DNA, 25 bp, Homo sapien
tcagctgttggtagcgtcatattca

SEQ ID NO: 5271890 - DNA, 25 bp, Homo sapien
ttgtgtctaagaagcaccagtgcat

SEQ ID NO: 5271891 - DNA, 25 bp, Homo sapien
tcactctcatcaaaccagggctggt

SEQ ID NO: 5271892 - DNA, 25 bp, Homo sapien
gcagattgggatcagaaagcaggct

SEQ ID NO: 5271893 - DNA, 25 bp, Homo sapien
cgccgtcggcatgggtattctatca

SEQ ID NO: 5271894 - DNA, 25 bp, Homo sapien
gctctgactgagtgcccgtctgctg

SEQ ID NO: 5271895 - DNA, 25 bp, Homo sapien
tcctggactcccgagtgtagccgct

SEQ ID NO: 5271896 - DNA, 25 bp, Homo sapien
tgcctcagtagaaggcgtgctcccc

SEQ ID NO: 5271897 - DNA, 25 bp, Homo sapien
catagccttccgtagatgggacagg

SEQ ID NO: 5271898 - DNA, 25 bp, Homo sapien
cccttgttgcaagccaggtggctgc

SEQ ID NO: 5271899 - DNA, 25 bp, Homo sapien
tcctgcctggagattgatacctgct

SEQ ID NO: 5271900 - DNA, 25 bp, Homo sapien
tgtggtcccattagccccgttagtg

SEQ ID NO: 5271901 - DNA, 25 bp, Homo sapien
gccaagtggctatgccggagcagct

SEQ ID NO: 5271902 - DNA, 25 bp, Homo sapien
gtttttaacagtggtgctgactctg

SEQ ID NO: 5271903 - DNA, 25 bp, Homo sapien
tttaacagtggtgctgactctggct

SEQ ID NO: 5271904 - DNA, 25 bp, Homo sapien
tttttaacagtggtgctgactctgg

SEQ ID NO: 5271905 - DNA, 25 bp, Homo sapien
ttttaacagtggtgctgactctggc

SEQ ID NO: 5271906 - DNA, 25 bp, Homo sapien
gagatggtggccagatttcctgcca

SEQ ID NO: 5271907 - DNA, 25 bp, Homo sapien
agagatggtggccagatttcctgcc

SEQ ID NO: 5271908 - DNA, 25 bp, Homo sapien
agggctcggacctagcatgcctctc

SEQ ID NO: 5271909 - DNA, 25 bp, Homo sapien
aaagggctcggacctagcatgcctc

SEQ ID NO: 5271910 - DNA, 25 bp, Homo sapien
gaccgctggccattaggggtccaca

SEQ ID NO: 5271911 - DNA, 25 bp, Homo sapien
agtgtgcaggtgtttctgagaagca

SEQ ID NO: 5271912 - DNA, 25 bp, Homo sapien
gtttgctgtagcaggaatggaccgc

SEQ ID NO: 5271913 - DNA, 25 bp, Homo sapien
ggccattaggggtccacactcctct

SEQ ID NO: 5271914 - DNA, 25 bp, Homo sapien
tacagactagcaggaaccgtgacca

SEQ ID NO: 5271915 - DNA, 25 bp, Homo sapien
tggtctgagttttgggagtcctccc

SEQ ID NO: 5271916 - DNA, 25 bp, Homo sapien
aagcagattgtctttggcccaagct

SEQ ID NO: 5271917 - DNA, 25 bp, Homo sapien
gaccagtcttgtaaggagagacaca

SEQ ID NO: 5271918 - DNA, 25 bp, Homo sapien
gctaggcatcggtgattatcaagat

SEQ ID NO: 5271919 - DNA, 25 bp, Homo sapien
agcaagaagaaagctaggcatcggt

SEQ ID NO: 5271920 - DNA, 25 bp, Homo sapien
gaaagctaggcatcggtgattatca

SEQ ID NO: 5271921 - DNA, 25 bp, Homo sapien
caagaagaaagctaggcatcggtga

SEQ ID NO: 5271922 - DNA, 25 bp, Homo sapien
gcatgccgtatggaaactccaacac

SEQ ID NO: 5271923 - DNA, 25 bp, Homo sapien
ctagagcagctcagcatgccgtatg

SEQ ID NO: 5271924 - DNA, 25 bp, Homo sapien
gctcagcatgccgtatggaaactcc

SEQ ID NO: 5271925 - DNA, 25 bp, Homo sapien
gagcagctcagcatgccgtatggaa

SEQ ID NO: 5271926 - DNA, 25 bp, Homo sapien
taagcactcccgcaccagtcctcca

SEQ ID NO: 5271927 - DNA, 25 bp, Homo sapien
cgtgaatcacgccgcgctgcatcct

SEQ ID NO: 5271928 - DNA, 25 bp, Homo sapien
ctccagcgtgaatcacgccgcgctg

SEQ ID NO: 5271929 - DNA, 25 bp, Homo sapien
caccagtcctccagcgtgaatcacg

SEQ ID NO: 5271930 - DNA, 25 bp, Homo sapien
gtggttctgatctccctccccagct

SEQ ID NO: 5271931 - DNA, 25 bp, Homo sapien
cttcgatgatgccagcagctccgcg

SEQ ID NO: 5271932 - DNA, 25 bp, Homo sapien
gatgccagcagctccgcgtatttgc

SEQ ID NO: 5271933 - DNA, 25 bp, Homo sapien
gccagcagctccgcgtatttgctct

SEQ ID NO: 5271934 - DNA, 25 bp, Homo sapien
agcagctccgcgtatttgctctggg

SEQ ID NO: 5271935 - DNA, 25 bp, Homo sapien
cagctggcggtactgtgaagacgtc

SEQ ID NO: 5271936 - DNA, 25 bp, Homo sapien
ggtgacccgtagtcactgagcagct

SEQ ID NO: 5271937 - DNA, 25 bp, Homo sapien
gcggtactgtgaagacgtcgccatg

SEQ ID NO: 5271938 - DNA, 25 bp, Homo sapien
tgtagcctagggacggtgacccgta

SEQ ID NO: 5271939 - DNA, 25 bp, Homo sapien
acattgccagaaggcgttgagggcg

SEQ ID NO: 5271940 - DNA, 25 bp, Homo sapien
attgccagaaggcgttgagggcggc

SEQ ID NO: 5271941 - DNA, 25 bp, Homo sapien
ggacattgccagaaggcgttgaggg

SEQ ID NO: 5271942 - DNA, 25 bp, Homo sapien
gacattgccagaaggcgttgagggc

SEQ ID NO: 5271943 - DNA, 25 bp, Homo sapien
caagctggctctatagatcttgcag

SEQ ID NO: 5271944 - DNA, 25 bp, Homo sapien
cataaacagaaacctgtgtcacatg

SEQ ID NO: 5271945 - DNA, 25 bp, Homo sapien
caggcatggcctttatgagtgcata

SEQ ID NO: 5271946 - DNA, 25 bp, Homo sapien
ctcagtgtactggtgcaagctggct

SEQ ID NO: 5271947 - DNA, 25 bp, Homo sapien
tgaatggcagtctgacatgcaccaa

SEQ ID NO: 5271948 - DNA, 25 bp, Homo sapien
ccagaatacccagagtggaggcaga

SEQ ID NO: 5271949 - DNA, 25 bp, Homo sapien
ccttttgttgaatggcagtctgaca

SEQ ID NO: 5271950 - DNA, 25 bp, Homo sapien
gcaccaacacaccaacatgcaggag

SEQ ID NO: 5271951 - DNA, 25 bp, Homo sapien
tgagattcgaagatgtaaacagaaa

SEQ ID NO: 5271952 - DNA, 25 bp, Homo sapien
tctgctgagattcgaagatgtaaac

SEQ ID NO: 5271953 - DNA, 25 bp, Homo sapien
tctctgctgagattcgaagatgtaa

SEQ ID NO: 5271954 - DNA, 25 bp, Homo sapien
gctgagattcgaagatgtaaacaga

SEQ ID NO: 5271955 - DNA, 25 bp, Homo sapien
caacctcagtagcacttgggttaac

SEQ ID NO: 5271956 - DNA, 25 bp, Homo sapien
gcaacctcagtagcacttgggttaa

SEQ ID NO: 5271957 - DNA, 25 bp, Homo sapien
gatgtcacgcaggtttccgtggcaa

SEQ ID NO: 5271958 - DNA, 25 bp, Homo sapien
caatacggcagcactggttgcaggg

SEQ ID NO: 5271959 - DNA, 25 bp, Homo sapien
ttatgactttggatgtcacgcaggt

SEQ ID NO: 5271960 - DNA, 25 bp, Homo sapien
ttccatggttaactcagcctgcttc

SEQ ID NO: 5271961 - DNA, 25 bp, Homo sapien
agttgcccatggctgtgtgtgatgt

SEQ ID NO: 5271962 - DNA, 25 bp, Homo sapien
gtttcggtctgcgttcccacagttg

SEQ ID NO: 5271963 - DNA, 25 bp, Homo sapien
tgcgttcccacagttgcccatggct

SEQ ID NO: 5271964 - DNA, 25 bp, Homo sapien
aagcacagaactttcaatcaaacac

SEQ ID NO: 5271965 - DNA, 25 bp, Homo sapien
tacctctgggggaagctcataggag

SEQ ID NO: 5271966 - DNA, 25 bp, Homo sapien
catgtcctcacggagcacagctctt

SEQ ID NO: 5271967 - DNA, 25 bp, Homo sapien
ctggaatacctctgggggaagctca

SEQ ID NO: 5271968 - DNA, 25 bp, Homo sapien
cagcacagcttgaggtatatcttct

SEQ ID NO: 5271969 - DNA, 25 bp, Homo sapien
ctagactcttgtggtccgaggggca

SEQ ID NO: 5271970 - DNA, 25 bp, Homo sapien
gcaggggtgccttgtgcctgagcct

SEQ ID NO: 5271971 - DNA, 25 bp, Homo sapien
ggtgggccccgcagggatccctgca

SEQ ID NO: 5271972 - DNA, 25 bp, Homo sapien
gcctgaagatgtagggaggtccaga

SEQ ID NO: 5271973 - DNA, 25 bp, Homo sapien
tgcagagtggctctaaatcagcaga

SEQ ID NO: 5271974 - DNA, 25 bp, Homo sapien
aagctggcttcgagcaggttctgca

SEQ ID NO: 5271975 - DNA, 25 bp, Homo sapien
cagtcaccgtggatggattatcagg

SEQ ID NO: 5271976 - DNA, 25 bp, Homo sapien
gattatcaggaagctgtgtcgcaga

SEQ ID NO: 5271977 - DNA, 25 bp, Homo sapien
cttttttgccatctggagccacaac

SEQ ID NO: 5271978 - DNA, 25 bp, Homo sapien
ccttttttgccatctggagccacaa

SEQ ID NO: 5271979 - DNA, 25 bp, Homo sapien
tattcctgcctctaccgctcgtttg

SEQ ID NO: 5271980 - DNA, 25 bp, Homo sapien
tgcgaagctcgtcactgtcctggct

SEQ ID NO: 5271981 - DNA, 25 bp, Homo sapien
cgctcgtttgcaaagccatgtggca

SEQ ID NO: 5271982 - DNA, 25 bp, Homo sapien
tctccgcagagaagggatttgctgg

SEQ ID NO: 5271983 - DNA, 25 bp, Homo sapien
tgtgctctgttcaaggctcctggaa

SEQ ID NO: 5271984 - DNA, 25 bp, Homo sapien
tgtagccggtaagagggctcctaaa

SEQ ID NO: 5271985 - DNA, 25 bp, Homo sapien
gtggccagcgcctgcataatccatc

SEQ ID NO: 5271986 - DNA, 25 bp, Homo sapien
tcagctgcggttcctttgccgtttc

SEQ ID NO: 5271987 - DNA, 25 bp, Homo sapien
ccagttggcccagcgcgtttggggc

SEQ ID NO: 5271988 - DNA, 25 bp, Homo sapien
gcaggtgtctgcgatggcatcaggc

SEQ ID NO: 5271989 - DNA, 25 bp, Homo sapien
cccctgcgcacatacacccagttgg

SEQ ID NO: 5271990 - DNA, 25 bp, Homo sapien
ggtgtctgcgatggcatcaggctca

SEQ ID NO: 5271991 - DNA, 25 bp, Homo sapien
tcaaatgctcgacagctgggccaac

SEQ ID NO: 5271992 - DNA, 25 bp, Homo sapien
tgcttccgcccaaagaagggctctt

SEQ ID NO: 5271993 - DNA, 25 bp, Homo sapien
gtggcgcgggggctcttttctctcc

SEQ ID NO: 5271994 - DNA, 25 bp, Homo sapien
gctctttgccgctcacaatggccgg

SEQ ID NO: 5271995 - DNA, 25 bp, Homo sapien
gactctagcatctttcctcttggtg

SEQ ID NO: 5271996 - DNA, 25 bp, Homo sapien
gaaaagtggcatccggaaatatcct

SEQ ID NO: 5271997 - DNA, 25 bp, Homo sapien
cactgccttgtgtaggtgtcctctc

SEQ ID NO: 5271998 - DNA, 25 bp, Homo sapien
tcttggtgatccgtaaagggcccgc

SEQ ID NO: 5271999 - DNA, 25 bp, Homo sapien
agcatgcgtctgacacaggtcccag

SEQ ID NO: 5272000 - DNA, 25 bp, Homo sapien
ggccagcaggagtaacagcatgcgt

SEQ ID NO: 5272001 - DNA, 25 bp, Homo sapien
tagtagcagaaataccgtcaagcct

SEQ ID NO: 5272002 - DNA, 25 bp, Homo sapien
ttcccacggcagtgaacccattcgt

SEQ ID NO: 5272003 - DNA, 25 bp, Homo sapien
tgcatgtggatatctgcttctaggt

SEQ ID NO: 5272004 - DNA, 25 bp, Homo sapien
tgtgggtatctgcttgtggacatta

SEQ ID NO: 5272005 - DNA, 25 bp, Homo sapien
tggatatctgcttctaggtaactgc

SEQ ID NO: 5272006 - DNA, 25 bp, Homo sapien
gatatctgcttctaggtaactgcat

SEQ ID NO: 5272007 - DNA, 25 bp, Homo sapien
aatcatgaacaattccttccatgtc

SEQ ID NO: 5272008 - DNA, 25 bp, Homo sapien
aaatcatgaacaattccttccatgt

SEQ ID NO: 5272009 - DNA, 25 bp, Homo sapien
gtcttgtagggtgatggtctgtgtt

SEQ ID NO: 5272010 - DNA, 25 bp, Homo sapien
ggtgatggtctgtgttgctagctgg

SEQ ID NO: 5272011 - DNA, 25 bp, Homo sapien
gaagccgattggtgacatgcaccac

SEQ ID NO: 5272012 - DNA, 25 bp, Homo sapien
catgcaccacgtcaaagttttggta

SEQ ID NO: 5272013 - DNA, 25 bp, Homo sapien
gatgtgcatgctcccttaatatgct

SEQ ID NO: 5272014 - DNA, 25 bp, Homo sapien
gatcataaggagaactgtcagtggc

SEQ ID NO: 5272015 - DNA, 25 bp, Homo sapien
gacaatatgagttgtcatatttctg

SEQ ID NO: 5272016 - DNA, 25 bp, Homo sapien
acaatatgagttgtcatatttctgc

SEQ ID NO: 5272017 - DNA, 25 bp, Homo sapien
tgacaatatgagttgtcatatttct

SEQ ID NO: 5272018 - DNA, 25 bp, Homo sapien
aaaggcttccgtagagtcagctttc

SEQ ID NO: 5272019 - DNA, 25 bp, Homo sapien
aacaaaaaggcttccgtagagtcag

SEQ ID NO: 5272020 - DNA, 25 bp, Homo sapien
aggcttccgtagagtcagctttctc

SEQ ID NO: 5272021 - DNA, 25 bp, Homo sapien
aaaaaggcttccgtagagtcagctt

SEQ ID NO: 5272022 - DNA, 25 bp, Homo sapien
gcaggcaatgctcccttgctttcct

SEQ ID NO: 5272023 - DNA, 25 bp, Homo sapien
gcctgcaggcaatgctcccttgctt

SEQ ID NO: 5272024 - DNA, 25 bp, Homo sapien
tcttctttataatgggagcctgcag

SEQ ID NO: 5272025 - DNA, 25 bp, Homo sapien
ggagcctgcaggcaatgctcccttg

SEQ ID NO: 5272026 - DNA, 25 bp, Homo sapien
gtgtagccagaaatccatccctgcc

SEQ ID NO: 5272027 - DNA, 25 bp, Homo sapien
atggttgaaaacttgccgagtttct

SEQ ID NO: 5272028 - DNA, 25 bp, Homo sapien
tgaaaacttgccgagtttcttccat

SEQ ID NO: 5272029 - DNA, 25 bp, Homo sapien
cctgacttgcatattagtaggagtt

SEQ ID NO: 5272030 - DNA, 25 bp, Homo sapien
taggagttcaaagagagcgtggtca

SEQ ID NO: 5272031 - DNA, 25 bp, Homo sapien
agcgtggtcagttgaattgctgcta

SEQ ID NO: 5272032 - DNA, 25 bp, Homo sapien
gagggtcatcggaaccttctgccag

SEQ ID NO: 5272033 - DNA, 25 bp, Homo sapien
catctctgtggaatcatcatatctg

SEQ ID NO: 5272034 - DNA, 25 bp, Homo sapien
tcgcatgggctcaaccacagggcat

SEQ ID NO: 5272035 - DNA, 25 bp, Homo sapien
gaagattcttccctgtcccgttcgc

SEQ ID NO: 5272036 - DNA, 25 bp, Homo sapien
ggaatcatcatatctgcccactgct

SEQ ID NO: 5272037 - DNA, 25 bp, Homo sapien
cagatctaagcaagcctgcctcaca

SEQ ID NO: 5272038 - DNA, 25 bp, Homo sapien
tgcctcacagccgtaggtcccaggg

SEQ ID NO: 5272039 - DNA, 25 bp, Homo sapien
tgccgcagccaaactctattgcaaa

SEQ ID NO: 5272040 - DNA, 25 bp, Homo sapien
atttccctcacatcgcagtcagcca

SEQ ID NO: 5272041 - DNA, 25 bp, Homo sapien
ctcggctctgggaccgattgatgct

SEQ ID NO: 5272042 - DNA, 25 bp, Homo sapien
aagtagtcccgtagcaaggactggg

SEQ ID NO: 5272043 - DNA, 25 bp, Homo sapien
cagagtaagcagaatcaagtagtcc

SEQ ID NO: 5272044 - DNA, 25 bp, Homo sapien
tcagaacaggaaagacagagtaagc

SEQ ID NO: 5272045 - DNA, 25 bp, Homo sapien
tgggcagagcgacacattgggacaa

SEQ ID NO: 5272046 - DNA, 25 bp, Homo sapien
cttttgacagaaacaattgcagcag

SEQ ID NO: 5272047 - DNA, 25 bp, Homo sapien
tagcatctgctaatggccacataag

SEQ ID NO: 5272048 - DNA, 25 bp, Homo sapien
taaagtgcttagagcaacatctgtc

SEQ ID NO: 5272049 - DNA, 25 bp, Homo sapien
gaccctgggttgtgcgctctctccc

SEQ ID NO: 5272050 - DNA, 25 bp, Homo sapien
agagaaggaggcttgattttgagtt

SEQ ID NO: 5272051 - DNA, 25 bp, Homo sapien
cttgctcatcctggcccaaagacag

SEQ ID NO: 5272052 - DNA, 25 bp, Homo sapien
caggagagaaggaggcttgattttg

SEQ ID NO: 5272053 - DNA, 25 bp, Homo sapien
agaagcaagcgctctggatgcaggc

SEQ ID NO: 5272054 - DNA, 25 bp, Homo sapien
cttcagcacaaggtcgcctgtggct

SEQ ID NO: 5272055 - DNA, 25 bp, Homo sapien
aagcgctctggatgcaggcagtgca

SEQ ID NO: 5272056 - DNA, 25 bp, Homo sapien
gcacaaggtcgcctgtggctcagaa

SEQ ID NO: 5272057 - DNA, 25 bp, Homo sapien
ggttaagatccagggcattgagcca

SEQ ID NO: 5272058 - DNA, 25 bp, Homo sapien
caagagggagccaacaacagggatc

SEQ ID NO: 5272059 - DNA, 25 bp, Homo sapien
attgagccacgccttaaatcgaagc

SEQ ID NO: 5272060 - DNA, 25 bp, Homo sapien
taaccccaagcagacaccaagaggg

SEQ ID NO: 5272061 - DNA, 25 bp, Homo sapien
gaggctttgaggtgccgataatgtc

SEQ ID NO: 5272062 - DNA, 25 bp, Homo sapien
tctggaaggaacaacgccaggagag

SEQ ID NO: 5272063 - DNA, 25 bp, Homo sapien
tccaggtgatgtgcaaatgtgtagg

SEQ ID NO: 5272064 - DNA, 25 bp, Homo sapien
cactctggaaggaacaacgccagga

SEQ ID NO: 5272065 - DNA, 25 bp, Homo sapien
gaaacgtctcccctggaaatctcac

SEQ ID NO: 5272066 - DNA, 25 bp, Homo sapien
cacccctccatttgctaaagagaag

SEQ ID NO: 5272067 - DNA, 25 bp, Homo sapien
ggtgatggcagggaaacgtctcccc

SEQ ID NO: 5272068 - DNA, 25 bp, Homo sapien
ttcaaacagatcaaggggtgatggc

SEQ ID NO: 5272069 - DNA, 25 bp, Homo sapien
gccacctccatttgggtcctggaaa

SEQ ID NO: 5272070 - DNA, 25 bp, Homo sapien
gactaagatggccacgtctatctaa

SEQ ID NO: 5272071 - DNA, 25 bp, Homo sapien
cctggaaatggaccgagctcttttg

SEQ ID NO: 5272072 - DNA, 25 bp, Homo sapien
ggttccctgtacatttcagcgtgca

SEQ ID NO: 5272073 - DNA, 25 bp, Homo sapien
tcatccataaatggaaccgattggt

SEQ ID NO: 5272074 - DNA, 25 bp, Homo sapien
gactgtgtgatttgccgcatgtcta

SEQ ID NO: 5272075 - DNA, 25 bp, Homo sapien
gaaccgattggtaataataatccag

SEQ ID NO: 5272076 - DNA, 25 bp, Homo sapien
ttgccgcatgtctattctgagtaca

SEQ ID NO: 5272077 - DNA, 25 bp, Homo sapien
tggaatccagccgaacacccacata

SEQ ID NO: 5272078 - DNA, 25 bp, Homo sapien
tccttatcttgcctcgtagcatctg

SEQ ID NO: 5272079 - DNA, 25 bp, Homo sapien
ggaatccagccgaacacccacatat

SEQ ID NO: 5272080 - DNA, 25 bp, Homo sapien
ttgcctcgtagcatctgtgccacaa

SEQ ID NO: 5272081 - DNA, 25 bp, Homo sapien
tctccattcccacttccgctccttt

SEQ ID NO: 5272082 - DNA, 25 bp, Homo sapien
gtcatccaccaaccttgccgtagca

SEQ ID NO: 5272083 - DNA, 25 bp, Homo sapien
cacttccgctcctttgatctggacc

SEQ ID NO: 5272084 - DNA, 25 bp, Homo sapien
gcagcttctgaataccagtatctct

SEQ ID NO: 5272085 - DNA, 25 bp, Homo sapien
agaattaagtaaggagatgcatgtt

SEQ ID NO: 5272086 - DNA, 25 bp, Homo sapien
gttcatgtatgtcttgtgcctgaaa

SEQ ID NO: 5272087 - DNA, 25 bp, Homo sapien
catgtatgtcttgtgcctgaaacaa

SEQ ID NO: 5272088 - DNA, 25 bp, Homo sapien
taaggagatgcatgttcatgtatgt

SEQ ID NO: 5272089 - DNA, 25 bp, Homo sapien
ctggcaagtctccaccacgtcaaag

SEQ ID NO: 5272090 - DNA, 25 bp, Homo sapien
gccagagcagccctaaaggagtctc

SEQ ID NO: 5272091 - DNA, 25 bp, Homo sapien
gcaagcatagcatggaaagaagtgc

SEQ ID NO: 5272092 - DNA, 25 bp, Homo sapien
tcaagggcactgatgatgcaagcat

SEQ ID NO: 5272093 - DNA, 25 bp, Homo sapien
accctgaggatgctgacaacctggg

SEQ ID NO: 5272094 - DNA, 25 bp, Homo sapien
cagcgggtggctgttcccatatcca

SEQ ID NO: 5272095 - DNA, 25 bp, Homo sapien
tgcagagcaagattgaccagggatc

SEQ ID NO: 5272096 - DNA, 25 bp, Homo sapien
atatccagccacagcagggttccag

SEQ ID NO: 5272097 - DNA, 25 bp, Homo sapien
ggagcagccgatcctactgaggtca

SEQ ID NO: 5272098 - DNA, 25 bp, Homo sapien
gaggaacctggaaagtccttcgcca

SEQ ID NO: 5272099 - DNA, 25 bp, Homo sapien
ggagtcccctggtgctacatcgtca

SEQ ID NO: 5272100 - DNA, 25 bp, Homo sapien
tacatcgtcaactgcctgccgagga

SEQ ID NO: 5272101 - DNA, 25 bp, Homo sapien
cagtggagcccctagatatgtgggc

SEQ ID NO: 5272102 - DNA, 25 bp, Homo sapien
tcccctgggagccatacagtggagc

SEQ ID NO: 5272103 - DNA, 25 bp, Homo sapien
gagcccctagatatgtgggccacca

SEQ ID NO: 5272104 - DNA, 25 bp, Homo sapien
tctctagccacgtggaagtctgagg

SEQ ID NO: 5272105 - DNA, 25 bp, Homo sapien
tcagcatccatgcagtgggtgctct

SEQ ID NO: 5272106 - DNA, 25 bp, Homo sapien
acaggtttcacttggcagcagctcg

SEQ ID NO: 5272107 - DNA, 25 bp, Homo sapien
aaaccctcaggacgacagcagttga

SEQ ID NO: 5272108 - DNA, 25 bp, Homo sapien
catgggtccatggtcagtaggtgct

SEQ ID NO: 5272109 - DNA, 25 bp, Homo sapien
gagtggaggctcctacggaagaaaa

SEQ ID NO: 5272110 - DNA, 25 bp, Homo sapien
acagctatagcgctttgggtggagt

SEQ ID NO: 5272111 - DNA, 25 bp, Homo sapien
tgggtggagtgtgctgctgggcaca

SEQ ID NO: 5272112 - DNA, 25 bp, Homo sapien
aaaaccagacagctatagcgctttg

SEQ ID NO: 5272113 - DNA, 25 bp, Homo sapien
cagacagctatagcgctttgggtgg

SEQ ID NO: 5272114 - DNA, 25 bp, Homo sapien
cgtcgggggtcacaggtcctggagc

SEQ ID NO: 5272115 - DNA, 25 bp, Homo sapien
cagccaaagtgactgcctctagctt

SEQ ID NO: 5272116 - DNA, 25 bp, Homo sapien
ctgctggatggtcctacgggctcca

SEQ ID NO: 5272117 - DNA, 25 bp, Homo sapien
aaagtgactgcctctagcttccctg

SEQ ID NO: 5272118 - DNA, 25 bp, Homo sapien
gggaacatcttcagcttatttccca

SEQ ID NO: 5272119 - DNA, 25 bp, Homo sapien
gggtatagcccagaggaaaacagcc

SEQ ID NO: 5272120 - DNA, 25 bp, Homo sapien
gtgaacatttgacccatagagcctg

SEQ ID NO: 5272121 - DNA, 25 bp, Homo sapien
gtttgacttggctgcagtccccaca

SEQ ID NO: 5272122 - DNA, 25 bp, Homo sapien
ggaaagcctgaagcaagtgcagctc

SEQ ID NO: 5272123 - DNA, 25 bp, Homo sapien
tgatctgtatcacagtcttcaggac

SEQ ID NO: 5272124 - DNA, 25 bp, Homo sapien
gactcattcttatttggggaggaac

SEQ ID NO: 5272125 - DNA, 25 bp, Homo sapien
tctgtccggtgacaaccttccctgt

SEQ ID NO: 5272126 - DNA, 25 bp, Homo sapien
gattcgaaggtaggaacggattgat

SEQ ID NO: 5272127 - DNA, 25 bp, Homo sapien
tctgcgctggcaataagaacaccgc

SEQ ID NO: 5272128 - DNA, 25 bp, Homo sapien
ggccagtgcccttgaggaagctgca

SEQ ID NO: 5272129 - DNA, 25 bp, Homo sapien
tgaatctgcgggaaatgcccgtcag

SEQ ID NO: 5272130 - DNA, 25 bp, Homo sapien
tgtagagcgcttccagaaaggccga

SEQ ID NO: 5272131 - DNA, 25 bp, Homo sapien
ccatgtgaattgaccagtcatagct

SEQ ID NO: 5272132 - DNA, 25 bp, Homo sapien
gctcacatcagccatgtgaattgac

SEQ ID NO: 5272133 - DNA, 25 bp, Homo sapien
ccagatctgactgccttacttgacc

SEQ ID NO: 5272134 - DNA, 25 bp, Homo sapien
tgtcaagcttcttaggccttccaga

SEQ ID NO: 5272135 - DNA, 25 bp, Homo sapien
tttcttgttgaagtcacaccccggc

SEQ ID NO: 5272136 - DNA, 25 bp, Homo sapien
ggaaacctcgagataagcatgtgga

SEQ ID NO: 5272137 - DNA, 25 bp, Homo sapien
caaatcagtggcaagtaagcaaata

SEQ ID NO: 5272138 - DNA, 25 bp, Homo sapien
gacttatcttctcctacctgtactg

SEQ ID NO: 5272139 - DNA, 25 bp, Homo sapien
aaaagctcctgtagaggcaatcccc

SEQ ID NO: 5272140 - DNA, 25 bp, Homo sapien
taaagtccgggatgtccagaagtcc

SEQ ID NO: 5272141 - DNA, 25 bp, Homo sapien
ggctttccccgtctaggagtgtgga

SEQ ID NO: 5272142 - DNA, 25 bp, Homo sapien
caaatcccttgcaaagcgggagcct

SEQ ID NO: 5272143 - DNA, 25 bp, Homo sapien
tcctgtacttgctcatgcagatgga

SEQ ID NO: 5272144 - DNA, 25 bp, Homo sapien
tgcagatggagaagtgtctgaatgt

SEQ ID NO: 5272145 - DNA, 25 bp, Homo sapien
gataaagaccatgtctaggtttctc

SEQ ID NO: 5272146 - DNA, 25 bp, Homo sapien
cttatcctgtacttgctcatgcaga

SEQ ID NO: 5272147 - DNA, 25 bp, Homo sapien
taagtgggcccttggccccatgatc

SEQ ID NO: 5272148 - DNA, 25 bp, Homo sapien
ctttctagtcttgcctttagtgaaa

SEQ ID NO: 5272149 - DNA, 25 bp, Homo sapien
tctgatacagtccattcaggattcg

SEQ ID NO: 5272150 - DNA, 25 bp, Homo sapien
gattcgatcaggacagatcagtggg

SEQ ID NO: 5272151 - DNA, 25 bp, Homo sapien
tgtgatggtgtgtaagccgtaccca

SEQ ID NO: 5272152 - DNA, 25 bp, Homo sapien
tcaatagcaacctcaatgatcgggt

SEQ ID NO: 5272153 - DNA, 25 bp, Homo sapien
cagataagatgtccccgcttgttga

SEQ ID NO: 5272154 - DNA, 25 bp, Homo sapien
tcctgaaaccataagtgtgatcgct

SEQ ID NO: 5272155 - DNA, 25 bp, Homo sapien
gcatgatgctgaggcctggaccttg

SEQ ID NO: 5272156 - DNA, 25 bp, Homo sapien
ccaccaagacgaggaccccttcctg

SEQ ID NO: 5272157 - DNA, 25 bp, Homo sapien
ctggcctctggatgatgcagtgttc

SEQ ID NO: 5272158 - DNA, 25 bp, Homo sapien
ctctggatgatgcagtgttctctgc

SEQ ID NO: 5272159 - DNA, 25 bp, Homo sapien
taattaagcaatttcagcggcatgc

SEQ ID NO: 5272160 - DNA, 25 bp, Homo sapien
cagtgagcaattctatcaaaacggg

SEQ ID NO: 5272161 - DNA, 25 bp, Homo sapien
cccactgttggactgagatgccaga

SEQ ID NO: 5272162 - DNA, 25 bp, Homo sapien
tgaacaatttgtatccgcaggccct

SEQ ID NO: 5272163 - DNA, 25 bp, Homo sapien
tctctccccagctttatgctgcctc

SEQ ID NO: 5272164 - DNA, 25 bp, Homo sapien
ctccccagctttatgctgcctctgg

SEQ ID NO: 5272165 - DNA, 25 bp, Homo sapien
ggagtgtgggctcttccatctttcc

SEQ ID NO: 5272166 - DNA, 25 bp, Homo sapien
cagggagatgttcctctcccggagc

SEQ ID NO: 5272167 - DNA, 25 bp, Homo sapien
gagagttgcacatcctcacagagac

SEQ ID NO: 5272168 - DNA, 25 bp, Homo sapien
ggtgggatccatgccttagctggcc

SEQ ID NO: 5272169 - DNA, 25 bp, Homo sapien
tagaattcccgtcggacacactggc

SEQ ID NO: 5272170 - DNA, 25 bp, Homo sapien
tttttattagcagggctggcgccaa

SEQ ID NO: 5272171 - DNA, 25 bp, Homo sapien
gacctgtcctcttagcagcctgtga

SEQ ID NO: 5272172 - DNA, 25 bp, Homo sapien
gctccggttagcacagatattgcac

SEQ ID NO: 5272173 - DNA, 25 bp, Homo sapien
aaccttcttgtttagactcctcttg

SEQ ID NO: 5272174 - DNA, 25 bp, Homo sapien
cattgatggtgattgaaaatcttcc

SEQ ID NO: 5272175 - DNA, 25 bp, Homo sapien
tcatcagcatctcggaaagcagaag

SEQ ID NO: 5272176 - DNA, 25 bp, Homo sapien
gactcatcagcatctcggaaagcag

SEQ ID NO: 5272177 - DNA, 25 bp, Homo sapien
agactcatcagcatctcggaaagca

SEQ ID NO: 5272178 - DNA, 25 bp, Homo sapien
ctcatcagcatctcggaaagcagaa

SEQ ID NO: 5272179 - DNA, 25 bp, Homo sapien
tgtcatatctgaaaactgcccctgc

SEQ ID NO: 5272180 - DNA, 25 bp, Homo sapien
ggcaaagactatctgccctgactgt

SEQ ID NO: 5272181 - DNA, 25 bp, Homo sapien
aactgtgagttccaggattgcatcc

SEQ ID NO: 5272182 - DNA, 25 bp, Homo sapien
tgaaatgatttcctagtcactgtgg

SEQ ID NO: 5272183 - DNA, 25 bp, Homo sapien
cgcttagatactgtaggccaaccaa

SEQ ID NO: 5272184 - DNA, 25 bp, Homo sapien
gaccgcttagatactgtaggccaac

SEQ ID NO: 5272185 - DNA, 25 bp, Homo sapien
gttacagaccgcttagatactgtag

SEQ ID NO: 5272186 - DNA, 25 bp, Homo sapien
cagaccgcttagatactgtaggcca

SEQ ID NO: 5272187 - DNA, 25 bp, Homo sapien
aaaagaccctttcatatgaggttga

SEQ ID NO: 5272188 - DNA, 25 bp, Homo sapien
taaaagaccctttcatatgaggttg

SEQ ID NO: 5272189 - DNA, 25 bp, Homo sapien
aaagaccctttcatatgaggttgat

SEQ ID NO: 5272190 - DNA, 25 bp, Homo sapien
agaccctttcatatgaggttgatac

SEQ ID NO: 5272191 - DNA, 25 bp, Homo sapien
ctccgagaactttatctttccgtag

SEQ ID NO: 5272192 - DNA, 25 bp, Homo sapien
tccacattcgttcctttgttttgtc

SEQ ID NO: 5272193 - DNA, 25 bp, Homo sapien
tccgtagaggtctttgaaacttctg

SEQ ID NO: 5272194 - DNA, 25 bp, Homo sapien
ttctgttccacattcgttcctttgt

SEQ ID NO: 5272195 - DNA, 25 bp, Homo sapien
tttccagccaatcccatattgctgt

SEQ ID NO: 5272196 - DNA, 25 bp, Homo sapien
ggaatagatggctgcgtttggaatt

SEQ ID NO: 5272197 - DNA, 25 bp, Homo sapien
gtcatctttccagccaatcccatat

SEQ ID NO: 5272198 - DNA, 25 bp, Homo sapien
gatggctgcgtttggaatttatttg

SEQ ID NO: 5272199 - DNA, 25 bp, Homo sapien
tctgaggtacagcacgtaggtaaac

SEQ ID NO: 5272200 - DNA, 25 bp, Homo sapien
agcacgtaggtaaacactgacttaa

SEQ ID NO: 5272201 - DNA, 25 bp, Homo sapien
ggtacagcacgtaggtaaacactga

SEQ ID NO: 5272202 - DNA, 25 bp, Homo sapien
tgacaagtctgaggtacagcacgta

SEQ ID NO: 5272203 - DNA, 25 bp, Homo sapien
tattggtcgtcccttccaagtgcgg

SEQ ID NO: 5272204 - DNA, 25 bp, Homo sapien
tccactgcggatagaagcgaaagac

SEQ ID NO: 5272205 - DNA, 25 bp, Homo sapien
tgatcagccaaatggtccactgcgg

SEQ ID NO: 5272206 - DNA, 25 bp, Homo sapien
ggtcaggaacacagaactattggtc

SEQ ID NO: 5272207 - DNA, 25 bp, Homo sapien
tgcagcgtttgaggcaataattcct

SEQ ID NO: 5272208 - DNA, 25 bp, Homo sapien
cagcgtttgaggcaataattcctga

SEQ ID NO: 5272209 - DNA, 25 bp, Homo sapien
ctgcagcgtttgaggcaataattcc

SEQ ID NO: 5272210 - DNA, 25 bp, Homo sapien
gcgtttgaggcaataattcctgata

SEQ ID NO: 5272211 - DNA, 25 bp, Homo sapien
gatgaagctgaacactaacgccaga

SEQ ID NO: 5272212 - DNA, 25 bp, Homo sapien
aagctgaacactaacgccagagtca

SEQ ID NO: 5272213 - DNA, 25 bp, Homo sapien
aatgatgaagctgaacactaacgcc

SEQ ID NO: 5272214 - DNA, 25 bp, Homo sapien
ggaatgatgaagctgaacactaacg

SEQ ID NO: 5272215 - DNA, 25 bp, Homo sapien
ccatagcagtatctggactccagaa

SEQ ID NO: 5272216 - DNA, 25 bp, Homo sapien
caaaggagacgtgatgaacaaatgc

SEQ ID NO: 5272217 - DNA, 25 bp, Homo sapien
tccatggcatggagaataatgggct

SEQ ID NO: 5272218 - DNA, 25 bp, Homo sapien
tgttttgcaaaacactccatggcat

SEQ ID NO: 5272219 - DNA, 25 bp, Homo sapien
tgccaaaaggaattgcccagtaaac

SEQ ID NO: 5272220 - DNA, 25 bp, Homo sapien
tcactggaccaacagcattaggtgg

SEQ ID NO: 5272221 - DNA, 25 bp, Homo sapien
caacaagtccccgtatgaaaggtga

SEQ ID NO: 5272222 - DNA, 25 bp, Homo sapien
cattcccattaagggcagagacagg

SEQ ID NO: 5272223 - DNA, 25 bp, Homo sapien
gccgagccccgtttccatcataagt

SEQ ID NO: 5272224 - DNA, 25 bp, Homo sapien
aggagccactctggagccttcccat

SEQ ID NO: 5272225 - DNA, 25 bp, Homo sapien
cataagtcgtgtgtttcctgtgcat

SEQ ID NO: 5272226 - DNA, 25 bp, Homo sapien
gaaatgtttgtacaggatctgggct

SEQ ID NO: 5272227 - DNA, 25 bp, Homo sapien
tctgggtccaagctattccctgaga

SEQ ID NO: 5272228 - DNA, 25 bp, Homo sapien
ttatcagtctcatcccagatttctg

SEQ ID NO: 5272229 - DNA, 25 bp, Homo sapien
catcaatgagtattaatggatccat

SEQ ID NO: 5272230 - DNA, 25 bp, Homo sapien
gagttgagtgaaggcccatgttgta

SEQ ID NO: 5272231 - DNA, 25 bp, Homo sapien
tgagccctggtgtatttggcccaac

SEQ ID NO: 5272232 - DNA, 25 bp, Homo sapien
ggtctcgtcaaagcatcccaagttt

SEQ ID NO: 5272233 - DNA, 25 bp, Homo sapien
cctgctcagactacatggagtggag

SEQ ID NO: 5272234 - DNA, 25 bp, Homo sapien
ttggcccaacaaggataaatctagc

SEQ ID NO: 5272235 - DNA, 25 bp, Homo sapien
tcagaagcgtagttactggagcgag

SEQ ID NO: 5272236 - DNA, 25 bp, Homo sapien
gaagaccggcagattggctgttgtc

SEQ ID NO: 5272237 - DNA, 25 bp, Homo sapien
gaggaacggtctctcccaaatcaag

SEQ ID NO: 5272238 - DNA, 25 bp, Homo sapien
gcccctggtcactggagttagctga

SEQ ID NO: 5272239 - DNA, 25 bp, Homo sapien
gctttcttggaacttaacattttca

SEQ ID NO: 5272240 - DNA, 25 bp, Homo sapien
aagcacatgtgtttgagtggaagat

SEQ ID NO: 5272241 - DNA, 25 bp, Homo sapien
ttccaacacgaaaatctccaagatg

SEQ ID NO: 5272242 - DNA, 25 bp, Homo sapien
gatgacaccccacaagctcacattt

SEQ ID NO: 5272243 - DNA, 25 bp, Homo sapien
gcatcctcaagtctggatgcctcca

SEQ ID NO: 5272244 - DNA, 25 bp, Homo sapien
gaattgaatcctgcatcctcaagtc

SEQ ID NO: 5272245 - DNA, 25 bp, Homo sapien
gggtgaattgaatcctgcatcctca

SEQ ID NO: 5272246 - DNA, 25 bp, Homo sapien
tgaatcctgcatcctcaagtctgga

SEQ ID NO: 5272247 - DNA, 25 bp, Homo sapien
tgtccttgtaatggcagattctccg

SEQ ID NO: 5272248 - DNA, 25 bp, Homo sapien
gcagattctccgtgggattggccca

SEQ ID NO: 5272249 - DNA, 25 bp, Homo sapien
ggcccactggttgtctctctatatc

SEQ ID NO: 5272250 - DNA, 25 bp, Homo sapien
tcctagatggcaatctacattgtcc

SEQ ID NO: 5272251 - DNA, 25 bp, Homo sapien
ctgtgaaggctgaacgaggatgacc

SEQ ID NO: 5272252 - DNA, 25 bp, Homo sapien
gaacctgccactttggttggaacca

SEQ ID NO: 5272253 - DNA, 25 bp, Homo sapien
ccttggacacactgggaagtgacca

SEQ ID NO: 5272254 - DNA, 25 bp, Homo sapien
gaagtgaccatccagcaatgtgtga

SEQ ID NO: 5272255 - DNA, 25 bp, Homo sapien
gaggaattcagctgcccctggaaaa

SEQ ID NO: 5272256 - DNA, 25 bp, Homo sapien
cctgtttgcaaatggtcacctgctt

SEQ ID NO: 5272257 - DNA, 25 bp, Homo sapien
cagggtcatcagacacaaaatggat

SEQ ID NO: 5272258 - DNA, 25 bp, Homo sapien
atgtgatcaactcgaagccttgtga

SEQ ID NO: 5272259 - DNA, 25 bp, Homo sapien
cctgggaacatccattacactttgc

SEQ ID NO: 5272260 - DNA, 25 bp, Homo sapien
cagttttcttgaatcccataggcag

SEQ ID NO: 5272261 - DNA, 25 bp, Homo sapien
gaacatccattacactttgctcggt

SEQ ID NO: 5272262 - DNA, 25 bp, Homo sapien
caaatgttactcctctcatacagtt

SEQ ID NO: 5272263 - DNA, 25 bp, Homo sapien
tgaaagacgtcataaggcattgagt

SEQ ID NO: 5272264 - DNA, 25 bp, Homo sapien
gaaagacgtcataaggcattgagtt

SEQ ID NO: 5272265 - DNA, 25 bp, Homo sapien
ctgtgaaagacgtcataaggcattg

SEQ ID NO: 5272266 - DNA, 25 bp, Homo sapien
tgtgaaagacgtcataaggcattga

SEQ ID NO: 5272267 - DNA, 25 bp, Homo sapien
tgtgggatccatgtgggcctttcct

SEQ ID NO: 5272268 - DNA, 25 bp, Homo sapien
cgtagggtctctgttggacactgac

SEQ ID NO: 5272269 - DNA, 25 bp, Homo sapien
tgtgatcttgcttgacagggccaga

SEQ ID NO: 5272270 - DNA, 25 bp, Homo sapien
agctgcacgtgcaaagctgcggaga

SEQ ID NO: 5272271 - DNA, 25 bp, Homo sapien
tcgtggagcgcaatgtgtgatatta

SEQ ID NO: 5272272 - DNA, 25 bp, Homo sapien
gaggcttcaggccacgcatgcttcc

SEQ ID NO: 5272273 - DNA, 25 bp, Homo sapien
ttaactggacgcctggaacacggtg

SEQ ID NO: 5272274 - DNA, 25 bp, Homo sapien
cattcaaactggcactcactgcggc

SEQ ID NO: 5272275 - DNA, 25 bp, Homo sapien
agtgtgtgtagccagggagtgactc

SEQ ID NO: 5272276 - DNA, 25 bp, Homo sapien
tcagtgtgtgtagccagggagtgac

SEQ ID NO: 5272277 - DNA, 25 bp, Homo sapien
ctcagtgtgtgtagccagggagtga

SEQ ID NO: 5272278 - DNA, 25 bp, Homo sapien
gtgtgtgtagccagggagtgactcc

SEQ ID NO: 5272279 - DNA, 25 bp, Homo sapien
taagcctccttaagggaccacctga

SEQ ID NO: 5272280 - DNA, 25 bp, Homo sapien
gctttgagcggtatccctgggacat

SEQ ID NO: 5272281 - DNA, 25 bp, Homo sapien
cagaaggacgtgagttgtggcaacc

SEQ ID NO: 5272282 - DNA, 25 bp, Homo sapien
gactctggcacgtgttcgctggata

SEQ ID NO: 5272283 - DNA, 25 bp, Homo sapien
cggcgccatcatactctggactggg

SEQ ID NO: 5272284 - DNA, 25 bp, Homo sapien
actctagccgggtcccccggctgca

SEQ ID NO: 5272285 - DNA, 25 bp, Homo sapien
cggtggcaccatcgtactctggact

SEQ ID NO: 5272286 - DNA, 25 bp, Homo sapien
ccccggtggcaccatcgtactctgg

SEQ ID NO: 5272287 - DNA, 25 bp, Homo sapien
ctgggcttgttcctgattattgctg

SEQ ID NO: 5272288 - DNA, 25 bp, Homo sapien
gcgcgcaggaccatggtctcctcta

SEQ ID NO: 5272289 - DNA, 25 bp, Homo sapien
agagggagggctgagaccgggcagc

SEQ ID NO: 5272290 - DNA, 25 bp, Homo sapien
ggcagcgcgcaggaccatggtctcc

SEQ ID NO: 5272291 - DNA, 25 bp, Homo sapien
tcattggaggaactaaaggcagaac

SEQ ID NO: 5272292 - DNA, 25 bp, Homo sapien
gaagaacctctttgcgtgcgaactc

SEQ ID NO: 5272293 - DNA, 25 bp, Homo sapien
tgtgaagaatctactttgctcctag

SEQ ID NO: 5272294 - DNA, 25 bp, Homo sapien
taaactggcagatgtctcagtggct

SEQ ID NO: 5272295 - DNA, 25 bp, Homo sapien
cagtcatagcagtgggacagctttc

SEQ ID NO: 5272296 - DNA, 25 bp, Homo sapien
tcatagcagtgggacagctttcatc

SEQ ID NO: 5272297 - DNA, 25 bp, Homo sapien
caggcgatgtgttcggcctgcagtc

SEQ ID NO: 5272298 - DNA, 25 bp, Homo sapien
ctgagcatctcctataggcaggcga

SEQ ID NO: 5272299 - DNA, 25 bp, Homo sapien
tggatcctctggtgagcccaacttc

SEQ ID NO: 5272300 - DNA, 25 bp, Homo sapien
ccatttggctcctcatgcatcccct

SEQ ID NO: 5272301 - DNA, 25 bp, Homo sapien
ggctcctcatgcatccccttcagga

SEQ ID NO: 5272302 - DNA, 25 bp, Homo sapien
tcttctttggatcctctggtgagcc

SEQ ID NO: 5272303 - DNA, 25 bp, Homo sapien
gaatgcatgacaccatcaggaaaag

SEQ ID NO: 5272304 - DNA, 25 bp, Homo sapien
aaaaacccagatcatctctcagagc

SEQ ID NO: 5272305 - DNA, 25 bp, Homo sapien
gggcgacaatgagcacgggactcca

SEQ ID NO: 5272306 - DNA, 25 bp, Homo sapien
cgcagaacgtaagcctgcagggaca

SEQ ID NO: 5272307 - DNA, 25 bp, Homo sapien
ggcctgcaggcaggttgacgcccac

SEQ ID NO: 5272308 - DNA, 25 bp, Homo sapien
tgacgcccacatctgtgggtcctgc

SEQ ID NO: 5272309 - DNA, 25 bp, Homo sapien
caggcaggttgacgcccacatctgt

SEQ ID NO: 5272310 - DNA, 25 bp, Homo sapien
tccacacactttgagcactactttc

SEQ ID NO: 5272311 - DNA, 25 bp, Homo sapien
gtgggagcatctaaggcccaggaga

SEQ ID NO: 5272312 - DNA, 25 bp, Homo sapien
tgagtgggagcatctaaggcccagg

SEQ ID NO: 5272313 - DNA, 25 bp, Homo sapien
tacccgaggtacagaggtatggttc

SEQ ID NO: 5272314 - DNA, 25 bp, Homo sapien
tccttcaatccagaacaaagtaggc

SEQ ID NO: 5272315 - DNA, 25 bp, Homo sapien
gtaaagcatacaggtctacccgagg

SEQ ID NO: 5272316 - DNA, 25 bp, Homo sapien
caagttcttagaaaggtgtgatgca

SEQ ID NO: 5272317 - DNA, 25 bp, Homo sapien
tctcctcatgccaaattgttcacaa

SEQ ID NO: 5272318 - DNA, 25 bp, Homo sapien
tggtatgccgctaatgtctaacaac

SEQ ID NO: 5272319 - DNA, 25 bp, Homo sapien
tgtaaatacaacgaccatgacggat

SEQ ID NO: 5272320 - DNA, 25 bp, Homo sapien
caggagtaaccgctagattgtggga

SEQ ID NO: 5272321 - DNA, 25 bp, Homo sapien
tctgaacatgagagactggacacat

SEQ ID NO: 5272322 - DNA, 25 bp, Homo sapien
gatcagatttcccagagcagaatcc

SEQ ID NO: 5272323 - DNA, 25 bp, Homo sapien
gaatccttgaatctgtacctgaaag

SEQ ID NO: 5272324 - DNA, 25 bp, Homo sapien
tgaaagctacagatctgtctacctg

SEQ ID NO: 5272325 - DNA, 25 bp, Homo sapien
cagtctcatcttgaggttgacgagg

SEQ ID NO: 5272326 - DNA, 25 bp, Homo sapien
atggaattcttggaggagtctgagg

SEQ ID NO: 5272327 - DNA, 25 bp, Homo sapien
tggaacttagagaactcctattatc

SEQ ID NO: 5272328 - DNA, 25 bp, Homo sapien
aatgcaggtgttcaatttgcctata

SEQ ID NO: 5272329 - DNA, 25 bp, Homo sapien
gcaaatgcaggtgttcaatttgcct

SEQ ID NO: 5272330 - DNA, 25 bp, Homo sapien
ctgtcctggttgctggccgcctgtg

SEQ ID NO: 5272331 - DNA, 25 bp, Homo sapien
tctgcaggagcacgtgctcccctct

SEQ ID NO: 5272332 - DNA, 25 bp, Homo sapien
ccctctgcaggagcacgtgctcccc

SEQ ID NO: 5272333 - DNA, 25 bp, Homo sapien
gctcccctctgcaggagcacgtgct

SEQ ID NO: 5272334 - DNA, 25 bp, Homo sapien
caaaggccatatttttcagggtggg

SEQ ID NO: 5272335 - DNA, 25 bp, Homo sapien
tgatggtactatggaagttgctgcc

SEQ ID NO: 5272336 - DNA, 25 bp, Homo sapien
gaagtaaacactccttgctcccagc

SEQ ID NO: 5272337 - DNA, 25 bp, Homo sapien
taagcagcaacgtatggtggcacag

SEQ ID NO: 5272338 - DNA, 25 bp, Homo sapien
gctactccagatctaccttccaaat

SEQ ID NO: 5272339 - DNA, 25 bp, Homo sapien
aggaggtggaccacagctgctactc

SEQ ID NO: 5272340 - DNA, 25 bp, Homo sapien
acagctgctactccagatctacctt

SEQ ID NO: 5272341 - DNA, 25 bp, Homo sapien
tggaccacagctgctactccagatc

SEQ ID NO: 5272342 - DNA, 25 bp, Homo sapien
tgcactttagttgtacatccccatg

SEQ ID NO: 5272343 - DNA, 25 bp, Homo sapien
aatgggcccatgagtttcagactcg

SEQ ID NO: 5272344 - DNA, 25 bp, Homo sapien
ggcattactctagcccaggaaagaa

SEQ ID NO: 5272345 - DNA, 25 bp, Homo sapien
taatggcctcttgtaggttctcccc

SEQ ID NO: 5272346 - DNA, 25 bp, Homo sapien
tctgagcccctcctgtatgaaaatg

SEQ ID NO: 5272347 - DNA, 25 bp, Homo sapien
aaatgatagggaggcacttggagct

SEQ ID NO: 5272348 - DNA, 25 bp, Homo sapien
cccatgtgtgattggatttccagca

SEQ ID NO: 5272349 - DNA, 25 bp, Homo sapien
ctccaggagattagatacttgatca

SEQ ID NO: 5272350 - DNA, 25 bp, Homo sapien
ggcacctctgggagaacgcgaagat

SEQ ID NO: 5272351 - DNA, 25 bp, Homo sapien
taatgccgggaagatgctggcacct

SEQ ID NO: 5272352 - DNA, 25 bp, Homo sapien
gcagccaatgcgaaacagtcactct

SEQ ID NO: 5272353 - DNA, 25 bp, Homo sapien
tatagcagggactgactaacgcagc

SEQ ID NO: 5272354 - DNA, 25 bp, Homo sapien
gaaaaggtccgatcagtttggctaa

SEQ ID NO: 5272355 - DNA, 25 bp, Homo sapien
tcactagctggagaggtgtgttcct

SEQ ID NO: 5272356 - DNA, 25 bp, Homo sapien
tttgccctcggttgccctgctaaga

SEQ ID NO: 5272357 - DNA, 25 bp, Homo sapien
caaactttgaggcagacatagaccc

SEQ ID NO: 5272358 - DNA, 25 bp, Homo sapien
cacgtcgggtgggttgcttattcat

SEQ ID NO: 5272359 - DNA, 25 bp, Homo sapien
aaaaccccagctttgtctgtccgag

SEQ ID NO: 5272360 - DNA, 25 bp, Homo sapien
tcagggtgctaagtgggaaccaaaa

SEQ ID NO: 5272361 - DNA, 25 bp, Homo sapien
cagagaagcaggttatgatggagtc

SEQ ID NO: 5272362 - DNA, 25 bp, Homo sapien
ggttgctcaaatactcccaatggtg

SEQ ID NO: 5272363 - DNA, 25 bp, Homo sapien
cccaatggtggttcaaggccaggta

SEQ ID NO: 5272364 - DNA, 25 bp, Homo sapien
aaggactacaggtcaccgtgtacgg

SEQ ID NO: 5272365 - DNA, 25 bp, Homo sapien
tgtacggtgaaatgaagaacagctg

SEQ ID NO: 5272366 - DNA, 25 bp, Homo sapien
aactccttcacatccgactttggcg

SEQ ID NO: 5272367 - DNA, 25 bp, Homo sapien
tggaaagacacagtttccaaactcc

SEQ ID NO: 5272368 - DNA, 25 bp, Homo sapien
cagcagtcagggcattacgggtaat

SEQ ID NO: 5272369 - DNA, 25 bp, Homo sapien
gactttggcgctaagcatttctcca

SEQ ID NO: 5272370 - DNA, 25 bp, Homo sapien
tgacgacgatcattagctccagccg

SEQ ID NO: 5272371 - DNA, 25 bp, Homo sapien
ccttaaatgcgaacaaacaatgact

SEQ ID NO: 5272372 - DNA, 25 bp, Homo sapien
cacttctgttttgcccttagcacag

SEQ ID NO: 5272373 - DNA, 25 bp, Homo sapien
aatgacttctcctctaatagctggc

SEQ ID NO: 5272374 - DNA, 25 bp, Homo sapien
gatggggaagcgcaaattgaaaagt

SEQ ID NO: 5272375 - DNA, 25 bp, Homo sapien
gaggtacttcattcttggcagtgat

SEQ ID NO: 5272376 - DNA, 25 bp, Homo sapien
aaatcctagagaaaactaagcctgc

SEQ ID NO: 5272377 - DNA, 25 bp, Homo sapien
agagaaaactaagcctgccaggtac

SEQ ID NO: 5272378 - DNA, 25 bp, Homo sapien
aaatgtcaacatcagtagcctgtgt

SEQ ID NO: 5272379 - DNA, 25 bp, Homo sapien
gatatttgagaactgggacagcagc

SEQ ID NO: 5272380 - DNA, 25 bp, Homo sapien
aataaagtaaatcttgggccaggca

SEQ ID NO: 5272381 - DNA, 25 bp, Homo sapien
gggccaccaagctagcctggatatt

SEQ ID NO: 5272382 - DNA, 25 bp, Homo sapien
gataactgctggtctcttgagtcga

SEQ ID NO: 5272383 - DNA, 25 bp, Homo sapien
tccagggccctagatgacctgggtt

SEQ ID NO: 5272384 - DNA, 25 bp, Homo sapien
tagcaggagtatcgttttcaagaaa

SEQ ID NO: 5272385 - DNA, 25 bp, Homo sapien
tggaccgagtccgtaaatgaaggag

SEQ ID NO: 5272386 - DNA, 25 bp, Homo sapien
tttgaaattgcacttgcggtacata

SEQ ID NO: 5272387 - DNA, 25 bp, Homo sapien
gcacttgcggtacataaaagattta

SEQ ID NO: 5272388 - DNA, 25 bp, Homo sapien
ggacctagttctgcatgcttgcaaa

SEQ ID NO: 5272389 - DNA, 25 bp, Homo sapien
gatttataatgatcttacccacaaa

SEQ ID NO: 5272390 - DNA, 25 bp, Homo sapien
gaccatcgtactaaagtccttcacc

SEQ ID NO: 5272391 - DNA, 25 bp, Homo sapien
gactccacggttcttgtcttgacca

SEQ ID NO: 5272392 - DNA, 25 bp, Homo sapien
ccatggtgatgagatctgcatgcag

SEQ ID NO: 5272393 - DNA, 25 bp, Homo sapien
caggcattctgactccacggttctt

SEQ ID NO: 5272394 - DNA, 25 bp, Homo sapien
agcctgagatagttgtattcattcc

SEQ ID NO: 5272395 - DNA, 25 bp, Homo sapien
tctttcatcccagagcctcaaagtg

SEQ ID NO: 5272396 - DNA, 25 bp, Homo sapien
ggcagcatcgtattatagcctgaga

SEQ ID NO: 5272397 - DNA, 25 bp, Homo sapien
gggtctatccacagcaggcgtcttc

SEQ ID NO: 5272398 - DNA, 25 bp, Homo sapien
tccaagtgcatgaaccacaaaatat

SEQ ID NO: 5272399 - DNA, 25 bp, Homo sapien
gaacaaaagcctgtgtccattctgg

SEQ ID NO: 5272400 - DNA, 25 bp, Homo sapien
tttgcatgaaaccatctgccagccc

SEQ ID NO: 5272401 - DNA, 25 bp, Homo sapien
ttattctctgatcctgcatgatgcc

SEQ ID NO: 5272402 - DNA, 25 bp, Homo sapien
tcctgaatctggtaactcagcctgc

SEQ ID NO: 5272403 - DNA, 25 bp, Homo sapien
tatgtctggggtacaggtgctctcc

SEQ ID NO: 5272404 - DNA, 25 bp, Homo sapien
gctaccgcttagctctgggtggccc

SEQ ID NO: 5272405 - DNA, 25 bp, Homo sapien
tgtgcaccgagaaaagaccccagtg

SEQ ID NO: 5272406 - DNA, 25 bp, Homo sapien
ggctgggacacaattcccttgaaca

SEQ ID NO: 5272407 - DNA, 25 bp, Homo sapien
agaaagagcatttcgtggtggtagt

SEQ ID NO: 5272408 - DNA, 25 bp, Homo sapien
ctcccgggccaagacatcaggacat

SEQ ID NO: 5272409 - DNA, 25 bp, Homo sapien
gacatcaggacatgactcatctgga

SEQ ID NO: 5272410 - DNA, 25 bp, Homo sapien
caatgcctgcactttccctttaaca

SEQ ID NO: 5272411 - DNA, 25 bp, Homo sapien
cagcaatgcctgcactttcccttta

SEQ ID NO: 5272412 - DNA, 25 bp, Homo sapien
agcaatgcctgcactttccctttaa

SEQ ID NO: 5272413 - DNA, 25 bp, Homo sapien
gcaatgcctgcactttccctttaac

SEQ ID NO: 5272414 - DNA, 25 bp, Homo sapien
ttctcactgggaacgaagttggagg

SEQ ID NO: 5272415 - DNA, 25 bp, Homo sapien
tctgcaaggacaaccattatataag

SEQ ID NO: 5272416 - DNA, 25 bp, Homo sapien
tatacccttactagagaatgtcaca

SEQ ID NO: 5272417 - DNA, 25 bp, Homo sapien
gatgcccctgctagctgttttataa

SEQ ID NO: 5272418 - DNA, 25 bp, Homo sapien
ttacagtttcctgggtgctttcgtg

SEQ ID NO: 5272419 - DNA, 25 bp, Homo sapien
cttagtggtactttacagtttcctg

SEQ ID NO: 5272420 - DNA, 25 bp, Homo sapien
ctttacagtttcctgggtgctttcg

SEQ ID NO: 5272421 - DNA, 25 bp, Homo sapien
cagtttcctgggtgctttcgtgtgg

SEQ ID NO: 5272422 - DNA, 25 bp, Homo sapien
ccaccggggacaaatagtgggcaga

SEQ ID NO: 5272423 - DNA, 25 bp, Homo sapien
cggggacaaatagtgggcagagcag

SEQ ID NO: 5272424 - DNA, 25 bp, Homo sapien
agcaggatggacttcaaagaaggat

SEQ ID NO: 5272425 - DNA, 25 bp, Homo sapien
tttcctggtgtgaatcccaggccac

SEQ ID NO: 5272426 - DNA, 25 bp, Homo sapien
cactttcatgtcaccctcaggacag

SEQ ID NO: 5272427 - DNA, 25 bp, Homo sapien
tgaagactaagccaactggagcttc

SEQ ID NO: 5272428 - DNA, 25 bp, Homo sapien
gcttgctctcactttcatgtcaccc

SEQ ID NO: 5272429 - DNA, 25 bp, Homo sapien
aagtgacacttttgaagactaagcc

SEQ ID NO: 5272430 - DNA, 25 bp, Homo sapien
ggactgtcgttcctctgcctcacaa

SEQ ID NO: 5272431 - DNA, 25 bp, Homo sapien
ccaaacatcatcacaccaacgaatg

SEQ ID NO: 5272432 - DNA, 25 bp, Homo sapien
aatgctaaggttttgttcgcagcac

SEQ ID NO: 5272433 - DNA, 25 bp, Homo sapien
cacttggccaaagatttggagtaaa

SEQ ID NO: 5272434 - DNA, 25 bp, Homo sapien
tttggtttgcctccaaacacacttg

SEQ ID NO: 5272435 - DNA, 25 bp, Homo sapien
cacaaacagcgagaagacaaacgtc

SEQ ID NO: 5272436 - DNA, 25 bp, Homo sapien
aaatgtaccatttggtttgcctcca

SEQ ID NO: 5272437 - DNA, 25 bp, Homo sapien
tgtaaagacacacgcccttctgttt

SEQ ID NO: 5272438 - DNA, 25 bp, Homo sapien
gctggataaccctccatgatggcag

SEQ ID NO: 5272439 - DNA, 25 bp, Homo sapien
cagccgtcggaaaataaaacttgag

SEQ ID NO: 5272440 - DNA, 25 bp, Homo sapien
caaggatggatgcttgctactccaa

SEQ ID NO: 5272441 - DNA, 25 bp, Homo sapien
cctggttcatgtgcgtctccacaag

SEQ ID NO: 5272442 - DNA, 25 bp, Homo sapien
cagtcccattcttcaatggtacatt

SEQ ID NO: 5272443 - DNA, 25 bp, Homo sapien
ccagtcccattcttcaatggtacat

SEQ ID NO: 5272444 - DNA, 25 bp, Homo sapien
gtcccattcttcaatggtacatttc

SEQ ID NO: 5272445 - DNA, 25 bp, Homo sapien
agtcccattcttcaatggtacattt

SEQ ID NO: 5272446 - DNA, 25 bp, Homo sapien
ttgaacatcaggaagatggtcccaa

SEQ ID NO: 5272447 - DNA, 25 bp, Homo sapien
gatggtcccaaagaattaatgagtt

SEQ ID NO: 5272448 - DNA, 25 bp, Homo sapien
tcttaaagggaaagcctgtttcaca

SEQ ID NO: 5272449 - DNA, 25 bp, Homo sapien
caggaagatggtcccaaagaattaa

SEQ ID NO: 5272450 - DNA, 25 bp, Homo sapien
tccaagctgagacgagggccaggcc

SEQ ID NO: 5272451 - DNA, 25 bp, Homo sapien
gctgtgatgggccttcagatttatt

SEQ ID NO: 5272452 - DNA, 25 bp, Homo sapien
ctgaagctgtgatgggccttcagat

SEQ ID NO: 5272453 - DNA, 25 bp, Homo sapien
cataaggttacaggggagacctcag

SEQ ID NO: 5272454 - DNA, 25 bp, Homo sapien
cctgaatgagttccctactgctgag

SEQ ID NO: 5272455 - DNA, 25 bp, Homo sapien
gatttggtcgtgaactcctctacag

SEQ ID NO: 5272456 - DNA, 25 bp, Homo sapien
gagcaatggatgtgttggccctgaa

SEQ ID NO: 5272457 - DNA, 25 bp, Homo sapien
cagtaattgaacatgggcctcctca

SEQ ID NO: 5272458 - DNA, 25 bp, Homo sapien
agtgtgccgcatcagggaacagctg

SEQ ID NO: 5272459 - DNA, 25 bp, Homo sapien
tcactctgctttaaattcacttgct

SEQ ID NO: 5272460 - DNA, 25 bp, Homo sapien
tctaggaagtgtgccgcatcaggga

SEQ ID NO: 5272461 - DNA, 25 bp, Homo sapien
cacttgcttcttctaggaagtgtgc

SEQ ID NO: 5272462 - DNA, 25 bp, Homo sapien
aatgagcatgccacatcgaagtcgt

SEQ ID NO: 5272463 - DNA, 25 bp, Homo sapien
catcgaagtcgtgggtaaaagtggt

SEQ ID NO: 5272464 - DNA, 25 bp, Homo sapien
aaaagtggtagtctatggaatgtcc

SEQ ID NO: 5272465 - DNA, 25 bp, Homo sapien
cctccaatccacttgccactgcttg

SEQ ID NO: 5272466 - DNA, 25 bp, Homo sapien
ccaggagctccttctgcgacatccc

SEQ ID NO: 5272467 - DNA, 25 bp, Homo sapien
agatgatgaacgcatgtgtcctcca

SEQ ID NO: 5272468 - DNA, 25 bp, Homo sapien
ttgagcagatgatgaacgcatgtgt

SEQ ID NO: 5272469 - DNA, 25 bp, Homo sapien
tccttctgcgacatcccctaggcag

SEQ ID NO: 5272470 - DNA, 25 bp, Homo sapien
tgcctgatccccatgccggtggagg

SEQ ID NO: 5272471 - DNA, 25 bp, Homo sapien
ctccataaatgcagccagtgttgaa

SEQ ID NO: 5272472 - DNA, 25 bp, Homo sapien
cctgatccccatgccggtggaggct

SEQ ID NO: 5272473 - DNA, 25 bp, Homo sapien
aacacccagtagaggatcaggcact

SEQ ID NO: 5272474 - DNA, 25 bp, Homo sapien
cattcaggtgctcagcctttcagct

SEQ ID NO: 5272475 - DNA, 25 bp, Homo sapien
atgctagaaaactcagggacctgcc

SEQ ID NO: 5272476 - DNA, 25 bp, Homo sapien
tgaggcatttatcaccacttagtct

SEQ ID NO: 5272477 - DNA, 25 bp, Homo sapien
gataagagaatgtaagcatggcacc

SEQ ID NO: 5272478 - DNA, 25 bp, Homo sapien
caaaggctgtgcaagatgaaatgta

SEQ ID NO: 5272479 - DNA, 25 bp, Homo sapien
tattcaatgttacggatgttccact

SEQ ID NO: 5272480 - DNA, 25 bp, Homo sapien
gttccactggaaagactacatttac

SEQ ID NO: 5272481 - DNA, 25 bp, Homo sapien
tgcctccctagaacatggcatatgt

SEQ ID NO: 5272482 - DNA, 25 bp, Homo sapien
gtctctaggtgatccgatcagctca

SEQ ID NO: 5272483 - DNA, 25 bp, Homo sapien
agcagtcagttaagggcccctgcaa

SEQ ID NO: 5272484 - DNA, 25 bp, Homo sapien
gggcccctgcaaggcgcttatcttg

SEQ ID NO: 5272485 - DNA, 25 bp, Homo sapien
tgcaaggcgcttatcttgtttctgg

SEQ ID NO: 5272486 - DNA, 25 bp, Homo sapien
agttaagggcccctgcaaggcgctt

SEQ ID NO: 5272487 - DNA, 25 bp, Homo sapien
gatcacggggctttgccgatgaaaa

SEQ ID NO: 5272488 - DNA, 25 bp, Homo sapien
tttgccgatgaaaaccctactgccc

SEQ ID NO: 5272489 - DNA, 25 bp, Homo sapien
ggctttgccgatgaaaaccctactg

SEQ ID NO: 5272490 - DNA, 25 bp, Homo sapien
ggcctgaggtcagggcgaggcatgg

SEQ ID NO: 5272491 - DNA, 25 bp, Homo sapien
ctggactatatcgtaagaccccagt

SEQ ID NO: 5272492 - DNA, 25 bp, Homo sapien
ctatatcgtaagaccccagtctcta

SEQ ID NO: 5272493 - DNA, 25 bp, Homo sapien
tagctttgccgcatttaatttaaaa

SEQ ID NO: 5272494 - DNA, 25 bp, Homo sapien
tattcatagctttgccgcatttaat

SEQ ID NO: 5272495 - DNA, 25 bp, Homo sapien
aaactcagaggcttaggcaacccaa

SEQ ID NO: 5272496 - DNA, 25 bp, Homo sapien
taaccctcttgcaaaaccaatcggc

SEQ ID NO: 5272497 - DNA, 25 bp, Homo sapien
cactcaaacaggagagagggttcca

SEQ ID NO: 5272498 - DNA, 25 bp, Homo sapien
gagtcaaatgaacctccgttgttgg

SEQ ID NO: 5272499 - DNA, 25 bp, Homo sapien
caaagtccgtcatttcccgtgcatc

SEQ ID NO: 5272500 - DNA, 25 bp, Homo sapien
taaccacagaagttcccccatgaag

SEQ ID NO: 5272501 - DNA, 25 bp, Homo sapien
agtccgtcatttcccgtgcatctgg

SEQ ID NO: 5272502 - DNA, 25 bp, Homo sapien
aaatgctcaaagtccgtcatttccc

SEQ ID NO: 5272503 - DNA, 25 bp, Homo sapien
cacacaacctcagcaggcgtcactt

SEQ ID NO: 5272504 - DNA, 25 bp, Homo sapien
acctcagcaggcgtcactttatttt

SEQ ID NO: 5272505 - DNA, 25 bp, Homo sapien
acaacctcagcaggcgtcactttat

SEQ ID NO: 5272506 - DNA, 25 bp, Homo sapien
ctctggtcggcctccactgggtcac

SEQ ID NO: 5272507 - DNA, 25 bp, Homo sapien
cagaggtaaataacactagggtttg

SEQ ID NO: 5272508 - DNA, 25 bp, Homo sapien
agacccagtgtccaggttcctccca

SEQ ID NO: 5272509 - DNA, 25 bp, Homo sapien
gaatctttaaatcaccaagatgcca

SEQ ID NO: 5272510 - DNA, 25 bp, Homo sapien
ttaataagatttgggagaatcttta

SEQ ID NO: 5272511 - DNA, 25 bp, Homo sapien
aatcaccaagatgccacaaatagct

SEQ ID NO: 5272512 - DNA, 25 bp, Homo sapien
gaactgtgggaactgtaccctggga

SEQ ID NO: 5272513 - DNA, 25 bp, Homo sapien
gactaatagtgtccctgtcccaaga

SEQ ID NO: 5272514 - DNA, 25 bp, Homo sapien
cctgggtatgaagaactggccacag

SEQ ID NO: 5272515 - DNA, 25 bp, Homo sapien
taagcctatctgtatgaactgtggg

SEQ ID NO: 5272516 - DNA, 25 bp, Homo sapien
tccacgtgatcagtgcttgaaacag

SEQ ID NO: 5272517 - DNA, 25 bp, Homo sapien
ccttgcaagccactaacaggccgtg

SEQ ID NO: 5272518 - DNA, 25 bp, Homo sapien
gggcaggtcacaccaagggctgatc

SEQ ID NO: 5272519 - DNA, 25 bp, Homo sapien
ggctgatcaataggcttcccgagca

SEQ ID NO: 5272520 - DNA, 25 bp, Homo sapien
aagatcaccctgactaccacaaagg

SEQ ID NO: 5272521 - DNA, 25 bp, Homo sapien
tccatctcagtcagtagcaagaagg

SEQ ID NO: 5272522 - DNA, 25 bp, Homo sapien
tgtccagcatacctcttgtttaaga

SEQ ID NO: 5272523 - DNA, 25 bp, Homo sapien
ttccaagtaaggaagccactcggct

SEQ ID NO: 5272524 - DNA, 25 bp, Homo sapien
taaaggcagtgtttccgctactgaa

SEQ ID NO: 5272525 - DNA, 25 bp, Homo sapien
aggtcatctcctacaaagttctgca

SEQ ID NO: 5272526 - DNA, 25 bp, Homo sapien
caaatgccacttgtgtaggtcatct

SEQ ID NO: 5272527 - DNA, 25 bp, Homo sapien
aaagacctgggcaaacgcagacatg

SEQ ID NO: 5272528 - DNA, 25 bp, Homo sapien
cacttgtcaaatccatacttggagc

SEQ ID NO: 5272529 - DNA, 25 bp, Homo sapien
caggctgcctggtgaaaacggattt

SEQ ID NO: 5272530 - DNA, 25 bp, Homo sapien
tagcagctgcgtacttcagacctgg

SEQ ID NO: 5272531 - DNA, 25 bp, Homo sapien
tattaccctaatgagcttgcttgta

SEQ ID NO: 5272532 - DNA, 25 bp, Homo sapien
tctctttgagatacggctccttgcc

SEQ ID NO: 5272533 - DNA, 25 bp, Homo sapien
tcttacgagatgtatctctttgaga

SEQ ID NO: 5272534 - DNA, 25 bp, Homo sapien
cagcatggcctgcattctcttacga

SEQ ID NO: 5272535 - DNA, 25 bp, Homo sapien
ggcctgcattctcttacgagatgta

SEQ ID NO: 5272536 - DNA, 25 bp, Homo sapien
gagtaacgtactctgtgaacaaatt

SEQ ID NO: 5272537 - DNA, 25 bp, Homo sapien
ctgagtaacgtactctgtgaacaaa

SEQ ID NO: 5272538 - DNA, 25 bp, Homo sapien
tgagtaacgtactctgtgaacaaat

SEQ ID NO: 5272539 - DNA, 25 bp, Homo sapien
agtaacgtactctgtgaacaaattg

SEQ ID NO: 5272540 - DNA, 25 bp, Homo sapien
gaaggctctgcgttcacaagggagc

SEQ ID NO: 5272541 - DNA, 25 bp, Homo sapien
ggccgcctgtgggaattacactgca

SEQ ID NO: 5272542 - DNA, 25 bp, Homo sapien
tgcagcccgcagaaggctctgcgtt

SEQ ID NO: 5272543 - DNA, 25 bp, Homo sapien
ggagcctcgacactgctgcacacaa

SEQ ID NO: 5272544 - DNA, 25 bp, Homo sapien
tgaagccagctgcaacctttttgac

SEQ ID NO: 5272545 - DNA, 25 bp, Homo sapien
gaagccagctgcaacctttttgaca

SEQ ID NO: 5272546 - DNA, 25 bp, Homo sapien
caaggactaattgccgataatgatt

SEQ ID NO: 5272547 - DNA, 25 bp, Homo sapien
ctttttgacaaggactaattgccga

SEQ ID NO: 5272548 - DNA, 25 bp, Homo sapien
gccatcattttcacgagctgataac

SEQ ID NO: 5272549 - DNA, 25 bp, Homo sapien
cgagctgataacgtgtttattcgag

SEQ ID NO: 5272550 - DNA, 25 bp, Homo sapien
ttttcacgagctgataacgtgttta

SEQ ID NO: 5272551 - DNA, 25 bp, Homo sapien
tcattttcacgagctgataacgtgt

SEQ ID NO: 5272552 - DNA, 25 bp, Homo sapien
ccacacccagtcaggttccaaatgt

SEQ ID NO: 5272553 - DNA, 25 bp, Homo sapien
tccaaatgtcagttccacagcggag

SEQ ID NO: 5272554 - DNA, 25 bp, Homo sapien
gcttgttccttggccgcaccttcaa

SEQ ID NO: 5272555 - DNA, 25 bp, Homo sapien
acagcggagattgccacaagcaaga

SEQ ID NO: 5272556 - DNA, 25 bp, Homo sapien
taatgaagagacactgggtcataat

SEQ ID NO: 5272557 - DNA, 25 bp, Homo sapien
cactgggtcataattttggtcacaa

SEQ ID NO: 5272558 - DNA, 25 bp, Homo sapien
aagagacactgggtcataattttgg

SEQ ID NO: 5272559 - DNA, 25 bp, Homo sapien
cagctggcatggtattaatgaagag

SEQ ID NO: 5272560 - DNA, 25 bp, Homo sapien
tctttgaaactaggacaggctctct

SEQ ID NO: 5272561 - DNA, 25 bp, Homo sapien
aggcaacagcgcctgtcttctgagg

SEQ ID NO: 5272562 - DNA, 25 bp, Homo sapien
tcagaggccattcgacactggcact

SEQ ID NO: 5272563 - DNA, 25 bp, Homo sapien
gctctctccgacagtgcgatggcac

SEQ ID NO: 5272564 - DNA, 25 bp, Homo sapien
cattggtgattctcagtgcatgaac

SEQ ID NO: 5272565 - DNA, 25 bp, Homo sapien
tcatcttagagatgctcccatcggg

SEQ ID NO: 5272566 - DNA, 25 bp, Homo sapien
ctcattgctagcaaagcctctgtgg

SEQ ID NO: 5272567 - DNA, 25 bp, Homo sapien
ggtgacggttatccttagaggcaca

SEQ ID NO: 5272568 - DNA, 25 bp, Homo sapien
ttttgaaatagcttacgtggccagg

SEQ ID NO: 5272569 - DNA, 25 bp, Homo sapien
cccgtcactcaaccagtttgcagga

SEQ ID NO: 5272570 - DNA, 25 bp, Homo sapien
caggacagtcgggactgcactgagc

SEQ ID NO: 5272571 - DNA, 25 bp, Homo sapien
tgctgagatgacaaatacttcccct

SEQ ID NO: 5272572 - DNA, 25 bp, Homo sapien
gtaaattggcttcacaaaagccgat

SEQ ID NO: 5272573 - DNA, 25 bp, Homo sapien
tttagttctaagttccagcagtaca

SEQ ID NO: 5272574 - DNA, 25 bp, Homo sapien
tggcttcaagcacattccctttagt

SEQ ID NO: 5272575 - DNA, 25 bp, Homo sapien
ggatgaatttcttcacttcccagaa

SEQ ID NO: 5272576 - DNA, 25 bp, Homo sapien
gatgcacattcagtccacaacacag

SEQ ID NO: 5272577 - DNA, 25 bp, Homo sapien
tccatttctagtgagggtgctcctc

SEQ ID NO: 5272578 - DNA, 25 bp, Homo sapien
ctaagctcagttcctcccttacggg

SEQ ID NO: 5272579 - DNA, 25 bp, Homo sapien
caatgtggtttgtgtcactgtcaac

SEQ ID NO: 5272580 - DNA, 25 bp, Homo sapien
tgcccagctcaagaccaaactgtga

SEQ ID NO: 5272581 - DNA, 25 bp, Homo sapien
gcaggcagaacaggaccctagctta

SEQ ID NO: 5272582 - DNA, 25 bp, Homo sapien
gagcactgggacacatgcgtctgta

SEQ ID NO: 5272583 - DNA, 25 bp, Homo sapien
gaagtgcttataagacatgcccagc

SEQ ID NO: 5272584 - DNA, 25 bp, Homo sapien
taagagtacttagtcctgaggactg

SEQ ID NO: 5272585 - DNA, 25 bp, Homo sapien
gagagcactccaagacttttccaca

SEQ ID NO: 5272586 - DNA, 25 bp, Homo sapien
gaagcttgtacttgactgagagcac

SEQ ID NO: 5272587 - DNA, 25 bp, Homo sapien
tatggcggcttctggatattgaaca

SEQ ID NO: 5272588 - DNA, 25 bp, Homo sapien
gcaaatcagtggctaggaggacacc

SEQ ID NO: 5272589 - DNA, 25 bp, Homo sapien
taaacccagagcaaggtgatccgtc

SEQ ID NO: 5272590 - DNA, 25 bp, Homo sapien
caatctcgcaagaacagccctgtgg

SEQ ID NO: 5272591 - DNA, 25 bp, Homo sapien
tattgtgcggtgctctccaaacaga

SEQ ID NO: 5272592 - DNA, 25 bp, Homo sapien
gatctcaggaatggcttcctaagat

SEQ ID NO: 5272593 - DNA, 25 bp, Homo sapien
tcaggaatggcttcctaagatagat

SEQ ID NO: 5272594 - DNA, 25 bp, Homo sapien
gaatggcttcctaagatagatttct

SEQ ID NO: 5272595 - DNA, 25 bp, Homo sapien
cttcctaagatagatttctgacaaa

SEQ ID NO: 5272596 - DNA, 25 bp, Homo sapien
ctctgcggtcgtggttgatgcgttt

SEQ ID NO: 5272597 - DNA, 25 bp, Homo sapien
tttgctttcgcgaagtaggagctca

SEQ ID NO: 5272598 - DNA, 25 bp, Homo sapien
gattcaatccatcaggaacacgaaa

SEQ ID NO: 5272599 - DNA, 25 bp, Homo sapien
taggagctcattcactcttgattca

SEQ ID NO: 5272600 - DNA, 25 bp, Homo sapien
gggtggccatgactctctggagcac

SEQ ID NO: 5272601 - DNA, 25 bp, Homo sapien
tccagtccacgcagggaatctggct

SEQ ID NO: 5272602 - DNA, 25 bp, Homo sapien
gaattaatgctgacgactccactgc

SEQ ID NO: 5272603 - DNA, 25 bp, Homo sapien
cttggccgagagaactccagctggg

SEQ ID NO: 5272604 - DNA, 25 bp, Homo sapien
ccgacagaggctcgcgacaagagtt

SEQ ID NO: 5272605 - DNA, 25 bp, Homo sapien
ctgctgttgtgaacacatggccaca

SEQ ID NO: 5272606 - DNA, 25 bp, Homo sapien
cagagggttgttagggtgatccggt

SEQ ID NO: 5272607 - DNA, 25 bp, Homo sapien
gaggatcgatgagatggagccgaca

SEQ ID NO: 5272608 - DNA, 25 bp, Homo sapien
tccaggcaatttccacagcgagaag

SEQ ID NO: 5272609 - DNA, 25 bp, Homo sapien
tccggggcagccaactgattcaaga

SEQ ID NO: 5272610 - DNA, 25 bp, Homo sapien
caggttccttccaagggattcagac

SEQ ID NO: 5272611 - DNA, 25 bp, Homo sapien
gaaccaacagttcatagctttccag

SEQ ID NO: 5272612 - DNA, 25 bp, Homo sapien
ctgcaccagcgcttccgggctgggt

SEQ ID NO: 5272613 - DNA, 25 bp, Homo sapien
gcaccagcgcttccgggctgggtca

SEQ ID NO: 5272614 - DNA, 25 bp, Homo sapien
ccagcgcttccgggctgggtcagaa

SEQ ID NO: 5272615 - DNA, 25 bp, Homo sapien
accagcgcttccgggctgggtcaga

SEQ ID NO: 5272616 - DNA, 25 bp, Homo sapien
caaatgccgcagtcaacacgtgtgc

SEQ ID NO: 5272617 - DNA, 25 bp, Homo sapien
gatgtgttgcgccatggtaaaccaa

SEQ ID NO: 5272618 - DNA, 25 bp, Homo sapien
ccaagtcctaacaagggccaagagg

SEQ ID NO: 5272619 - DNA, 25 bp, Homo sapien
gaggccttaggccaacaccatctgg

SEQ ID NO: 5272620 - DNA, 25 bp, Homo sapien
ggtgtgcccgcaggcaagatctgct

SEQ ID NO: 5272621 - DNA, 25 bp, Homo sapien
tctaatgggcaatcgtcaaaacaca

SEQ ID NO: 5272622 - DNA, 25 bp, Homo sapien
gggaatgctccttatttcaccacca

SEQ ID NO: 5272623 - DNA, 25 bp, Homo sapien
tcgcctggtccaatgctcagaggtg

SEQ ID NO: 5272624 - DNA, 25 bp, Homo sapien
actttcatgttttggaactattgta

SEQ ID NO: 5272625 - DNA, 25 bp, Homo sapien
aaactttcatgttttggaactattg

SEQ ID NO: 5272626 - DNA, 25 bp, Homo sapien
aactttcatgttttggaactattgt

SEQ ID NO: 5272627 - DNA, 25 bp, Homo sapien
tttcatgttttggaactattgtaaa

SEQ ID NO: 5272628 - DNA, 25 bp, Homo sapien
tctcctggccgttctggcatgggca

SEQ ID NO: 5272629 - DNA, 25 bp, Homo sapien
cacagactttgaggtcagatgggcg

SEQ ID NO: 5272630 - DNA, 25 bp, Homo sapien
caagtcttaggaggcaactcggtgc

SEQ ID NO: 5272631 - DNA, 25 bp, Homo sapien
aactcggtgcgaacctcaggagcac

SEQ ID NO: 5272632 - DNA, 25 bp, Homo sapien
cctgactgctttctcgggatcagaa

SEQ ID NO: 5272633 - DNA, 25 bp, Homo sapien
ctagcaggacttgatgaactgtaac

SEQ ID NO: 5272634 - DNA, 25 bp, Homo sapien
ggatcagaaatggccacactgggat

SEQ ID NO: 5272635 - DNA, 25 bp, Homo sapien
attcaggactcatgacttgaactag

SEQ ID NO: 5272636 - DNA, 25 bp, Homo sapien
ttttatgcactataaatcatgttgt

SEQ ID NO: 5272637 - DNA, 25 bp, Homo sapien
tgcacaagattatacctagaaactc

SEQ ID NO: 5272638 - DNA, 25 bp, Homo sapien
aatgaatgcacaagattatacctag

SEQ ID NO: 5272639 - DNA, 25 bp, Homo sapien
agattatacctagaaactctgtacc

SEQ ID NO: 5272640 - DNA, 25 bp, Homo sapien
gagatgtctgcatttgttacatggt

SEQ ID NO: 5272641 - DNA, 25 bp, Homo sapien
tcttcatgccaccagcttagacttc

SEQ ID NO: 5272642 - DNA, 25 bp, Homo sapien
acttcctcactgcatggtgatctca

SEQ ID NO: 5272643 - DNA, 25 bp, Homo sapien
tcttttattcccagccaggtgctca

SEQ ID NO: 5272644 - DNA, 25 bp, Homo sapien
gaggagtctgtcattcacgtgtgcc

SEQ ID NO: 5272645 - DNA, 25 bp, Homo sapien
tcttgggctcaaggtgaacagcaaa

SEQ ID NO: 5272646 - DNA, 25 bp, Homo sapien
gtctaggccaccacagaggagtctg

SEQ ID NO: 5272647 - DNA, 25 bp, Homo sapien
cagcaaaagaggtgtgccgtgcaca

SEQ ID NO: 5272648 - DNA, 25 bp, Homo sapien
tgctaaaccagataacaggaccggg

SEQ ID NO: 5272649 - DNA, 25 bp, Homo sapien
tgtaatccaaatgccgtttcctcga

SEQ ID NO: 5272650 - DNA, 25 bp, Homo sapien
tatctggtttcagggtaagggctcc

SEQ ID NO: 5272651 - DNA, 25 bp, Homo sapien
gggctccctcttgccaaggtattaa

SEQ ID NO: 5272652 - DNA, 25 bp, Homo sapien
acccttgagggatccggatgccata

SEQ ID NO: 5272653 - DNA, 25 bp, Homo sapien
tctggcccgcgctttgtagtagtaa

SEQ ID NO: 5272654 - DNA, 25 bp, Homo sapien
gatgccataaactgtccgggagtgt

SEQ ID NO: 5272655 - DNA, 25 bp, Homo sapien
tagtagtaatgagggcgcgaatcgc

SEQ ID NO: 5272656 - DNA, 25 bp, Homo sapien
agtgacggcgcggttgccatggcag

SEQ ID NO: 5272657 - DNA, 25 bp, Homo sapien
tcgaaacttaagacgtgcagcgtct

SEQ ID NO: 5272658 - DNA, 25 bp, Homo sapien
cagggcggcgtgaatgggcggcgtc

SEQ ID NO: 5272659 - DNA, 25 bp, Homo sapien
gagcggcgccgcgaggacaaggctg

SEQ ID NO: 5272660 - DNA, 25 bp, Homo sapien
cacgtgacggtcagagactgctggc

SEQ ID NO: 5272661 - DNA, 25 bp, Homo sapien
tacatcaaaaggctcgaactgtggg

SEQ ID NO: 5272662 - DNA, 25 bp, Homo sapien
gaagagatacggtgcatccaacgct

SEQ ID NO: 5272663 - DNA, 25 bp, Homo sapien
taggaatgcgtcagtatcgaagagc

SEQ ID NO: 5272664 - DNA, 25 bp, Homo sapien
ggcttcattctgagccgagcccggt

SEQ ID NO: 5272665 - DNA, 25 bp, Homo sapien
gacgacccgatgagcctgctataca

SEQ ID NO: 5272666 - DNA, 25 bp, Homo sapien
gtgccaagcgcagctagctcagcag

SEQ ID NO: 5272667 - DNA, 25 bp, Homo sapien
gccccggcgagtgcggataaaagcc

SEQ ID NO: 5272668 - DNA, 25 bp, Homo sapien
aattcccttctgagttaatgtcaaa

SEQ ID NO: 5272669 - DNA, 25 bp, Homo sapien
ttcccttctgagttaatgtcaaatg

SEQ ID NO: 5272670 - DNA, 25 bp, Homo sapien
tctgaattcccttctgagttaatgt

SEQ ID NO: 5272671 - DNA, 25 bp, Homo sapien
tgaattcccttctgagttaatgtca

SEQ ID NO: 5272672 - DNA, 25 bp, Homo sapien
ttatttcagaggaccagtgctttga

SEQ ID NO: 5272673 - DNA, 25 bp, Homo sapien
gagcgtgaataccagaaggatccag

SEQ ID NO: 5272674 - DNA, 25 bp, Homo sapien
ttttcaaccatttcacaaggaggac

SEQ ID NO: 5272675 - DNA, 25 bp, Homo sapien
tttttgacacaagcctactgaatgc

SEQ ID NO: 5272676 - DNA, 25 bp, Homo sapien
ggagcgtccccggacggaagcagtg

SEQ ID NO: 5272677 - DNA, 25 bp, Homo sapien
ggcgtcttccccgtcgcaggctacc

SEQ ID NO: 5272678 - DNA, 25 bp, Homo sapien
gcgtagtccgctcggacggccctgg

SEQ ID NO: 5272679 - DNA, 25 bp, Homo sapien
gagggaagcgcgctctggtcccaac

SEQ ID NO: 5272680 - DNA, 25 bp, Homo sapien
tatcgcagggccttggttgtccacc

SEQ ID NO: 5272681 - DNA, 25 bp, Homo sapien
actgaacaccgctgggcaggagatg

SEQ ID NO: 5272682 - DNA, 25 bp, Homo sapien
gatggctgtgacgaagtctttggca

SEQ ID NO: 5272683 - DNA, 25 bp, Homo sapien
ggttgtccacctaagctcattagaa

SEQ ID NO: 5272684 - DNA, 25 bp, Homo sapien
tctgcgcatggtcccaaactgaaag

SEQ ID NO: 5272685 - DNA, 25 bp, Homo sapien
gagcacactggcctcgacatccgtg

SEQ ID NO: 5272686 - DNA, 25 bp, Homo sapien
actccaggccctgccgagcacactg

SEQ ID NO: 5272687 - DNA, 25 bp, Homo sapien
gcctccgatcgcctctgctttctct

SEQ ID NO: 5272688 - DNA, 25 bp, Homo sapien
taagtatcacgtcaagagtgggcgg

SEQ ID NO: 5272689 - DNA, 25 bp, Homo sapien
taaggccgtggtctaatccatgcat

SEQ ID NO: 5272690 - DNA, 25 bp, Homo sapien
ccctaactggtaaggagcattgacg

SEQ ID NO: 5272691 - DNA, 25 bp, Homo sapien
catgagcgctcacttctggagggtt

SEQ ID NO: 5272692 - DNA, 25 bp, Homo sapien
ccaaaatgaaggagcgtgggcctct

SEQ ID NO: 5272693 - DNA, 25 bp, Homo sapien
atggatttcccatgcaccctggcag

SEQ ID NO: 5272694 - DNA, 25 bp, Homo sapien
gaatcctcatcagcgtctagtggca

SEQ ID NO: 5272695 - DNA, 25 bp, Homo sapien
caaagactcctgtgtgctcaccgaa

SEQ ID NO: 5272696 - DNA, 25 bp, Homo sapien
tacagtaaactaggatggtaaccta

SEQ ID NO: 5272697 - DNA, 25 bp, Homo sapien
ctttcccaatctattgctctaagaa

SEQ ID NO: 5272698 - DNA, 25 bp, Homo sapien
aggctctttcccaatctattgctct

SEQ ID NO: 5272699 - DNA, 25 bp, Homo sapien
tcccaatctattgctctaagaaatg

SEQ ID NO: 5272700 - DNA, 25 bp, Homo sapien
ggatgctgtaagatgcgcaatgtca

SEQ ID NO: 5272701 - DNA, 25 bp, Homo sapien
cgcaatgtcaggttatatggagctt

SEQ ID NO: 5272702 - DNA, 25 bp, Homo sapien
taggtaggccgagtcttcttcaccc

SEQ ID NO: 5272703 - DNA, 25 bp, Homo sapien
ccatcaagtatagcgatatgcagtc

SEQ ID NO: 5272704 - DNA, 25 bp, Homo sapien
ctaagatctacagcgcctgttgcct

SEQ ID NO: 5272705 - DNA, 25 bp, Homo sapien
ggtctatgggcagggtactaagatc

SEQ ID NO: 5272706 - DNA, 25 bp, Homo sapien
aagtgcttgggtctatgggcagggt

SEQ ID NO: 5272707 - DNA, 25 bp, Homo sapien
gcagggtactaagatctacagcgcc

SEQ ID NO: 5272708 - DNA, 25 bp, Homo sapien
cgattttgtcgtgggagcatcacag

SEQ ID NO: 5272709 - DNA, 25 bp, Homo sapien
tcaaaaagggcttctgagttccaga

SEQ ID NO: 5272710 - DNA, 25 bp, Homo sapien
tacagccatgcatcagttgacgaca

SEQ ID NO: 5272711 - DNA, 25 bp, Homo sapien
cttaaacagacctagatggtggcac

SEQ ID NO: 5272712 - DNA, 25 bp, Homo sapien
tatctatctcaaggccagcattttc

SEQ ID NO: 5272713 - DNA, 25 bp, Homo sapien
gagctatctatctcaaggccagcat

SEQ ID NO: 5272714 - DNA, 25 bp, Homo sapien
ctctgaagagctatctatctcaagg

SEQ ID NO: 5272715 - DNA, 25 bp, Homo sapien
gaagagctatctatctcaaggccag

SEQ ID NO: 5272716 - DNA, 25 bp, Homo sapien
tggagagctgatccctaaataccca

SEQ ID NO: 5272717 - DNA, 25 bp, Homo sapien
ccagcactgcggaagttatttcaac

SEQ ID NO: 5272718 - DNA, 25 bp, Homo sapien
cacggtgaatgaatctggcttaaca

SEQ ID NO: 5272719 - DNA, 25 bp, Homo sapien
gcaaatgttctaaaaaggtctcgag

SEQ ID NO: 5272720 - DNA, 25 bp, Homo sapien
aatcaaaatgtgaatcatcatagtg

SEQ ID NO: 5272721 - DNA, 25 bp, Homo sapien
caaaatgtgaatcatcatagtgaat

SEQ ID NO: 5272722 - DNA, 25 bp, Homo sapien
catcatagtgaataaaaattcatga

SEQ ID NO: 5272723 - DNA, 25 bp, Homo sapien
gtgaatcatcatagtgaataaaaat

SEQ ID NO: 5272724 - DNA, 25 bp, Homo sapien
tgccatacagaacgctggatctcgg

SEQ ID NO: 5272725 - DNA, 25 bp, Homo sapien
gctcacttagaaaagttgggcacca

SEQ ID NO: 5272726 - DNA, 25 bp, Homo sapien
gacatataaacccacggaggtcacc

SEQ ID NO: 5272727 - DNA, 25 bp, Homo sapien
tctaattacaaagaccacagaggct

SEQ ID NO: 5272728 - DNA, 25 bp, Homo sapien
gaagcatcgttggtggaaacccctg

SEQ ID NO: 5272729 - DNA, 25 bp, Homo sapien
actcaggctatgtgggattccccgc

SEQ ID NO: 5272730 - DNA, 25 bp, Homo sapien
ggagtttttgatagcgcagcccact

SEQ ID NO: 5272731 - DNA, 25 bp, Homo sapien
aattggatcttgcaggccactcagg

SEQ ID NO: 5272732 - DNA, 25 bp, Homo sapien
aattgagactcgaaagacttggggt

SEQ ID NO: 5272733 - DNA, 25 bp, Homo sapien
tgggaattgagactcgaaagacttg

SEQ ID NO: 5272734 - DNA, 25 bp, Homo sapien
ggaattgagactcgaaagacttggg

SEQ ID NO: 5272735 - DNA, 25 bp, Homo sapien
ctgggaattgagactcgaaagactt

SEQ ID NO: 5272736 - DNA, 25 bp, Homo sapien
cataacacagattaacaaaagctgt

SEQ ID NO: 5272737 - DNA, 25 bp, Homo sapien
tgtgaccttataatgctgttactag

SEQ ID NO: 5272738 - DNA, 25 bp, Homo sapien
aaaaggcataaacatcagcttagga

SEQ ID NO: 5272739 - DNA, 25 bp, Homo sapien
ggactatgggcatgtcccacatgct

SEQ ID NO: 5272740 - DNA, 25 bp, Homo sapien
caatatccgtgaagggtgtgcaggc

SEQ ID NO: 5272741 - DNA, 25 bp, Homo sapien
tgcaggcgtcctggaaaaccaaagg

SEQ ID NO: 5272742 - DNA, 25 bp, Homo sapien
gaatctccaaaggaagaacgcgcct

SEQ ID NO: 5272743 - DNA, 25 bp, Homo sapien
gaacgcgcctacatctaatgccaga

SEQ ID NO: 5272744 - DNA, 25 bp, Homo sapien
aagttgagtgtgtagggcgtctggc

SEQ ID NO: 5272745 - DNA, 25 bp, Homo sapien
ctcggtgtgaggcagctcgttgtgg

SEQ ID NO: 5272746 - DNA, 25 bp, Homo sapien
ggcaccttcatccaggccaagcgtg

SEQ ID NO: 5272747 - DNA, 25 bp, Homo sapien
caagcgtgttcagctcttcgaagct

SEQ ID NO: 5272748 - DNA, 25 bp, Homo sapien
gagtccaactcggaataagcacgaa

SEQ ID NO: 5272749 - DNA, 25 bp, Homo sapien
tctcactacagaagggagtccaact

SEQ ID NO: 5272750 - DNA, 25 bp, Homo sapien
tttattcagaactatggcaacaggg

SEQ ID NO: 5272751 - DNA, 25 bp, Homo sapien
gggtcgtggatggaacattactaag

SEQ ID NO: 5272752 - DNA, 25 bp, Homo sapien
gcttctgaaaaggtgccagtctcca

SEQ ID NO: 5272753 - DNA, 25 bp, Homo sapien
ctaacacacggccatttatgtttgc

SEQ ID NO: 5272754 - DNA, 25 bp, Homo sapien
cactgagctaacacacggccattta

SEQ ID NO: 5272755 - DNA, 25 bp, Homo sapien
tcagctcatcaatgttacactgagc

SEQ ID NO: 5272756 - DNA, 25 bp, Homo sapien
aaaagaacatggtaagacagctact

SEQ ID NO: 5272757 - DNA, 25 bp, Homo sapien
aagaacatggtaagacagctacttt

SEQ ID NO: 5272758 - DNA, 25 bp, Homo sapien
aaagaacatggtaagacagctactt

SEQ ID NO: 5272759 - DNA, 25 bp, Homo sapien
ttcagcttctcacatactgcatcca

SEQ ID NO: 5272760 - DNA, 25 bp, Homo sapien
tgaggcagcatactctggtccagcc

SEQ ID NO: 5272761 - DNA, 25 bp, Homo sapien
ctttttgatcgtggtacaatactga

SEQ ID NO: 5272762 - DNA, 25 bp, Homo sapien
cgtggtacaatactgaggcagcata

SEQ ID NO: 5272763 - DNA, 25 bp, Homo sapien
ttgtggtttagagggtgcatcagcc

SEQ ID NO: 5272764 - DNA, 25 bp, Homo sapien
gaattaattaggaagcagagacagc

SEQ ID NO: 5272765 - DNA, 25 bp, Homo sapien
tgcatcagcctggtcaaaatcagga

SEQ ID NO: 5272766 - DNA, 25 bp, Homo sapien
gataaatgcatcttcccagcacaga

SEQ ID NO: 5272767 - DNA, 25 bp, Homo sapien
tctctgtttgttaaacccagagtca

SEQ ID NO: 5272768 - DNA, 25 bp, Homo sapien
ctctgtttgttaaacccagagtcac

SEQ ID NO: 5272769 - DNA, 25 bp, Homo sapien
tgtctctgtttgttaaacccagagt

SEQ ID NO: 5272770 - DNA, 25 bp, Homo sapien
ctgtctctgtttgttaaacccagag

SEQ ID NO: 5272771 - DNA, 25 bp, Homo sapien
tagttttcatcaacatctaaaggta

SEQ ID NO: 5272772 - DNA, 25 bp, Homo sapien
ggtaacgagtaaaccctgtagctga

SEQ ID NO: 5272773 - DNA, 25 bp, Homo sapien
tgtcatgctttttcaacaagttata

SEQ ID NO: 5272774 - DNA, 25 bp, Homo sapien
ctggagctgtgttaacactgccttt

SEQ ID NO: 5272775 - DNA, 25 bp, Homo sapien
tagccctaatattctgggaagcatg

SEQ ID NO: 5272776 - DNA, 25 bp, Homo sapien
cacacattctatctgtgccatgtgg

SEQ ID NO: 5272777 - DNA, 25 bp, Homo sapien
cctcaagaggaaaggcatgtgtaat

SEQ ID NO: 5272778 - DNA, 25 bp, Homo sapien
tgtaatgtgggttccaggattctgc

SEQ ID NO: 5272779 - DNA, 25 bp, Homo sapien
cgagtctcgctcttgttgccgaggc

SEQ ID NO: 5272780 - DNA, 25 bp, Homo sapien
gattacaggtgcctaccaccatgcc

SEQ ID NO: 5272781 - DNA, 25 bp, Homo sapien
tgggattacaggtgcctaccaccat

SEQ ID NO: 5272782 - DNA, 25 bp, Homo sapien
gaggctggagtgcagcggtgcgatc

SEQ ID NO: 5272783 - DNA, 25 bp, Homo sapien
gaagcaatgagatgccagcgatcca

SEQ ID NO: 5272784 - DNA, 25 bp, Homo sapien
ggaacacccctgacagctgatagaa

SEQ ID NO: 5272785 - DNA, 25 bp, Homo sapien
tcacactgaggagcaaatactacca

SEQ ID NO: 5272786 - DNA, 25 bp, Homo sapien
tgctcatcacaccacaaacgcagag

SEQ ID NO: 5272787 - DNA, 25 bp, Homo sapien
cctcgaggagtctgtgggtgaagaa

SEQ ID NO: 5272788 - DNA, 25 bp, Homo sapien
gtgggtgaagaaagcccctcagcag

SEQ ID NO: 5272789 - DNA, 25 bp, Homo sapien
cagcagcatcctccttgataacttc

SEQ ID NO: 5272790 - DNA, 25 bp, Homo sapien
tcagcagcatcctccttgataactt

SEQ ID NO: 5272791 - DNA, 25 bp, Homo sapien
tccttccatagatatttaccagaaa

SEQ ID NO: 5272792 - DNA, 25 bp, Homo sapien
taaaggtactgtatacacatgttct

SEQ ID NO: 5272793 - DNA, 25 bp, Homo sapien
tcagttgcactcttttactatgtaa

SEQ ID NO: 5272794 - DNA, 25 bp, Homo sapien
caagtcaacatttcttcgctgagac

SEQ ID NO: 5272795 - DNA, 25 bp, Homo sapien
cagggtaataccttggcgtgtaaag

SEQ ID NO: 5272796 - DNA, 25 bp, Homo sapien
gagatgttgggagccgccagggtaa

SEQ ID NO: 5272797 - DNA, 25 bp, Homo sapien
tgatctctgggcaaactcgttttta

SEQ ID NO: 5272798 - DNA, 25 bp, Homo sapien
tactgatggacgtgagatgagatgt

SEQ ID NO: 5272799 - DNA, 25 bp, Homo sapien
caattacagaaatgaaagtgtaatg

SEQ ID NO: 5272800 - DNA, 25 bp, Homo sapien
aaatgaaaccaataagatacaactc

SEQ ID NO: 5272801 - DNA, 25 bp, Homo sapien
gatacaactccaaaactttaatgca

SEQ ID NO: 5272802 - DNA, 25 bp, Homo sapien
aaagcctcactcatattccataaga

SEQ ID NO: 5272803 - DNA, 25 bp, Homo sapien
aaagtgtaaccccaggttcatgctc

SEQ ID NO: 5272804 - DNA, 25 bp, Homo sapien
cagaaagtgtaaccccaggttcatg

SEQ ID NO: 5272805 - DNA, 25 bp, Homo sapien
tccagaaagtgtaaccccaggttca

SEQ ID NO: 5272806 - DNA, 25 bp, Homo sapien
cagttccagaaagtgtaaccccagg

SEQ ID NO: 5272807 - DNA, 25 bp, Homo sapien
ctgtaccctgatggcgccctaggag

SEQ ID NO: 5272808 - DNA, 25 bp, Homo sapien
tccacctgcgaagggcccattgaag

SEQ ID NO: 5272809 - DNA, 25 bp, Homo sapien
gggtacgccagtcctccaatactga

SEQ ID NO: 5272810 - DNA, 25 bp, Homo sapien
tgagggcccgtcatgccgctgtaat

SEQ ID NO: 5272811 - DNA, 25 bp, Homo sapien
cacagccatgtaataccctttgaca

SEQ ID NO: 5272812 - DNA, 25 bp, Homo sapien
gtaataccctttgacatcagccttg

SEQ ID NO: 5272813 - DNA, 25 bp, Homo sapien
aattccacagccatgtaataccctt

SEQ ID NO: 5272814 - DNA, 25 bp, Homo sapien
catgtaataccctttgacatcagcc

SEQ ID NO: 5272815 - DNA, 25 bp, Homo sapien
attcttagaactttagatgaaaaat

SEQ ID NO: 5272816 - DNA, 25 bp, Homo sapien
tacatctcgagccacaagaactggg

SEQ ID NO: 5272817 - DNA, 25 bp, Homo sapien
ctgcaataatttcccgtagtttggg

SEQ ID NO: 5272818 - DNA, 25 bp, Homo sapien
cgtagtttgggatctaggtttacag

SEQ ID NO: 5272819 - DNA, 25 bp, Homo sapien
tttacagtgcatggcaaaaagactt

SEQ ID NO: 5272820 - DNA, 25 bp, Homo sapien
aatttcaagaagtggctcaacatcc

SEQ ID NO: 5272821 - DNA, 25 bp, Homo sapien
ttcaagaagtggctcaacatcctta

SEQ ID NO: 5272822 - DNA, 25 bp, Homo sapien
catccttagttgttggaatattctt

SEQ ID NO: 5272823 - DNA, 25 bp, Homo sapien
caagaagtggctcaacatccttagt

SEQ ID NO: 5272824 - DNA, 25 bp, Homo sapien
gggtcacccctcaatgaagattcat

SEQ ID NO: 5272825 - DNA, 25 bp, Homo sapien
tagaataccacagtttctcctttgc

SEQ ID NO: 5272826 - DNA, 25 bp, Homo sapien
taacaatgagtacggccagaattct

SEQ ID NO: 5272827 - DNA, 25 bp, Homo sapien
cacctaagctggctaagggtcaccc

SEQ ID NO: 5272828 - DNA, 25 bp, Homo sapien
ggaagcagcatgtcctacaacatag

SEQ ID NO: 5272829 - DNA, 25 bp, Homo sapien
ttccaaagggatatgtgaggccgtc

SEQ ID NO: 5272830 - DNA, 25 bp, Homo sapien
tgtcacagtcagttcagtaaatgcc

SEQ ID NO: 5272831 - DNA, 25 bp, Homo sapien
tttaacctttagtcatgagaagcac

SEQ ID NO: 5272832 - DNA, 25 bp, Homo sapien
tccgttgtctcatgaaggccagtac

SEQ ID NO: 5272833 - DNA, 25 bp, Homo sapien
ccattccgttgtctcatgaaggcca

SEQ ID NO: 5272834 - DNA, 25 bp, Homo sapien
cattccgttgtctcatgaaggccag

SEQ ID NO: 5272835 - DNA, 25 bp, Homo sapien
ttccgttgtctcatgaaggccagta

SEQ ID NO: 5272836 - DNA, 25 bp, Homo sapien
ctggttgctgaagttttgaatattt

SEQ ID NO: 5272837 - DNA, 25 bp, Homo sapien
ttgctgaagttttgaatatttgcca

SEQ ID NO: 5272838 - DNA, 25 bp, Homo sapien
ctctggttgctgaagttttgaatat

SEQ ID NO: 5272839 - DNA, 25 bp, Homo sapien
ggttgctgaagttttgaatatttgc

SEQ ID NO: 5272840 - DNA, 25 bp, Homo sapien
ttcagtccttcgaggcagataaccc

SEQ ID NO: 5272841 - DNA, 25 bp, Homo sapien
tcagtccttcgaggcagataaccca

SEQ ID NO: 5272842 - DNA, 25 bp, Homo sapien
agtccttcgaggcagataacccaag

SEQ ID NO: 5272843 - DNA, 25 bp, Homo sapien
tttcagtccttcgaggcagataacc

SEQ ID NO: 5272844 - DNA, 25 bp, Homo sapien
gtcacaactgtctgctccacagcat

SEQ ID NO: 5272845 - DNA, 25 bp, Homo sapien
ggtcacaactgtctgctccacagca

SEQ ID NO: 5272846 - DNA, 25 bp, Homo sapien
cggtcacaactgtctgctccacagc

SEQ ID NO: 5272847 - DNA, 25 bp, Homo sapien
taccaagtgatgaattgtccatgca

SEQ ID NO: 5272848 - DNA, 25 bp, Homo sapien
gacaggcttccactgggagtacaag

SEQ ID NO: 5272849 - DNA, 25 bp, Homo sapien
ccatgcaattgtcgtctttaagaaa

SEQ ID NO: 5272850 - DNA, 25 bp, Homo sapien
tcagctagggtaatgagagaagact

SEQ ID NO: 5272851 - DNA, 25 bp, Homo sapien
caaggacccatgtgagataactagt

SEQ ID NO: 5272852 - DNA, 25 bp, Homo sapien
taaggcacctagcaaagtacctgac

SEQ ID NO: 5272853 - DNA, 25 bp, Homo sapien
ggaacacctacttgatacagcacac

SEQ ID NO: 5272854 - DNA, 25 bp, Homo sapien
agtgactcgacctccttaagcaagg

SEQ ID NO: 5272855 - DNA, 25 bp, Homo sapien
taaagtaaaatacaaagaggtcaca

SEQ ID NO: 5272856 - DNA, 25 bp, Homo sapien
catgaagtccggtatggccactgct

SEQ ID NO: 5272857 - DNA, 25 bp, Homo sapien
ggttgatccagctagcaagcctgtc

SEQ ID NO: 5272858 - DNA, 25 bp, Homo sapien
gccactgctcagtaaggttgatcca

SEQ ID NO: 5272859 - DNA, 25 bp, Homo sapien
taatgtcatttgatctggaatacct

SEQ ID NO: 5272860 - DNA, 25 bp, Homo sapien
caggcaaacatctttcagaactgtg

SEQ ID NO: 5272861 - DNA, 25 bp, Homo sapien
tcgaccacgtatatgcaggcaaaca

SEQ ID NO: 5272862 - DNA, 25 bp, Homo sapien
ggttgtttgatttgccactggtgag

SEQ ID NO: 5272863 - DNA, 25 bp, Homo sapien
ggcttctaaaatccaaagagctgca

SEQ ID NO: 5272864 - DNA, 25 bp, Homo sapien
acatggctatgctggagatatacac

SEQ ID NO: 5272865 - DNA, 25 bp, Homo sapien
gagcattgatggagacatggctatg

SEQ ID NO: 5272866 - DNA, 25 bp, Homo sapien
tggaaggtgagatgtgagcattgat

SEQ ID NO: 5272867 - DNA, 25 bp, Homo sapien
catggctatgctggagatatacaca

SEQ ID NO: 5272868 - DNA, 25 bp, Homo sapien
tgaggacacattacagagttctgag

SEQ ID NO: 5272869 - DNA, 25 bp, Homo sapien
actgtggttgccgtatggagaatag

SEQ ID NO: 5272870 - DNA, 25 bp, Homo sapien
tgcagaaaatcagatcataaagggc

SEQ ID NO: 5272871 - DNA, 25 bp, Homo sapien
agcagagaataacatgactggcttc

SEQ ID NO: 5272872 - DNA, 25 bp, Homo sapien
tctggcgagtgatggtcctctgcat

SEQ ID NO: 5272873 - DNA, 25 bp, Homo sapien
ttgtaagatcaaaggacatctggcg

SEQ ID NO: 5272874 - DNA, 25 bp, Homo sapien
cagtcctcggtaaccagcagttttg

SEQ ID NO: 5272875 - DNA, 25 bp, Homo sapien
atgtcactgaaccagtcctcggtaa

SEQ ID NO: 5272876 - DNA, 25 bp, Homo sapien
actgcatgaaatgctatggtttagc

SEQ ID NO: 5272877 - DNA, 25 bp, Homo sapien
aataaattattatctgtgaggtaga

SEQ ID NO: 5272878 - DNA, 25 bp, Homo sapien
ctgtgaggtagaatcttcgtaaagc

SEQ ID NO: 5272879 - DNA, 25 bp, Homo sapien
aagcaattgtaaagtcatattcaca

SEQ ID NO: 5272880 - DNA, 25 bp, Homo sapien
aagttttgtcatctccccaaggctg

SEQ ID NO: 5272881 - DNA, 25 bp, Homo sapien
tctccccaaggctgttctgtgaaac

SEQ ID NO: 5272882 - DNA, 25 bp, Homo sapien
agggctgtcttgctaccaagttttg

SEQ ID NO: 5272883 - DNA, 25 bp, Homo sapien
aaggctgttctgtgaaactcttctg

SEQ ID NO: 5272884 - DNA, 25 bp, Homo sapien
tatctgagcatggaacgtctccatt

SEQ ID NO: 5272885 - DNA, 25 bp, Homo sapien
ctgtagtatctgagcatggaacgtc

SEQ ID NO: 5272886 - DNA, 25 bp, Homo sapien
agtatctgagcatggaacgtctcca

SEQ ID NO: 5272887 - DNA, 25 bp, Homo sapien
tagtatctgagcatggaacgtctcc

SEQ ID NO: 5272888 - DNA, 25 bp, Homo sapien
tatgtggatcacttgcaaaaatggc

SEQ ID NO: 5272889 - DNA, 25 bp, Homo sapien
tgaatcccgaagcacactattgagg

SEQ ID NO: 5272890 - DNA, 25 bp, Homo sapien
ccacgactattaaggaacacaggca

SEQ ID NO: 5272891 - DNA, 25 bp, Homo sapien
acaggcaagtggactatgttgcgca

SEQ ID NO: 5272892 - DNA, 25 bp, Homo sapien
taatccatcgatgatgaccaccagc

SEQ ID NO: 5272893 - DNA, 25 bp, Homo sapien
gaccaccagccttgtctgattctga

SEQ ID NO: 5272894 - DNA, 25 bp, Homo sapien
aagctgtcaatggtttttgccatcc

SEQ ID NO: 5272895 - DNA, 25 bp, Homo sapien
caggcatctaatccatcgatgatga

SEQ ID NO: 5272896 - DNA, 25 bp, Homo sapien
tgtattgcaaaggaaggtatagaaa

SEQ ID NO: 5272897 - DNA, 25 bp, Homo sapien
aggagcgagtccagcacttgccacc

SEQ ID NO: 5272898 - DNA, 25 bp, Homo sapien
gacagttcaacacaaaggccaatcc

SEQ ID NO: 5272899 - DNA, 25 bp, Homo sapien
gaggctgcattatggaggcgttttc

SEQ ID NO: 5272900 - DNA, 25 bp, Homo sapien
tttgggaattcaggagcgagtccag

SEQ ID NO: 5272901 - DNA, 25 bp, Homo sapien
agtcagatgctttgggtcaactcta

SEQ ID NO: 5272902 - DNA, 25 bp, Homo sapien
taaatatagccagaagagtaattcc

SEQ ID NO: 5272903 - DNA, 25 bp, Homo sapien
tatgaggacagcatttacagtcaga

SEQ ID NO: 5272904 - DNA, 25 bp, Homo sapien
gagtaattccagatataatgcagcc

SEQ ID NO: 5272905 - DNA, 25 bp, Homo sapien
tgcaatcatttcagccagagaagtt

SEQ ID NO: 5272906 - DNA, 25 bp, Homo sapien
tctttcacaagcatccgagagggtt

SEQ ID NO: 5272907 - DNA, 25 bp, Homo sapien
gaatactcgaaaaagcctggttgcc

SEQ ID NO: 5272908 - DNA, 25 bp, Homo sapien
cagagaagtttctccacctacactg

SEQ ID NO: 5272909 - DNA, 25 bp, Homo sapien
tgctctggcaactcaggtggattca

SEQ ID NO: 5272910 - DNA, 25 bp, Homo sapien
aaagctttagtagtctgctctggca

SEQ ID NO: 5272911 - DNA, 25 bp, Homo sapien
ttaaggaggagttccaaatatccaa

SEQ ID NO: 5272912 - DNA, 25 bp, Homo sapien
tcttcgtccaccaaagtaaatgaca

SEQ ID NO: 5272913 - DNA, 25 bp, Homo sapien
gtgacactgctattccaagatttgg

SEQ ID NO: 5272914 - DNA, 25 bp, Homo sapien
gaccgtgaaggcaaacaataaacca

SEQ ID NO: 5272915 - DNA, 25 bp, Homo sapien
gaggctcaatctgttgtccggcgaa

SEQ ID NO: 5272916 - DNA, 25 bp, Homo sapien
ggtaagaaacactatgagccatgag

SEQ ID NO: 5272917 - DNA, 25 bp, Homo sapien
ccccacacaaatgggtggctgcatg

SEQ ID NO: 5272918 - DNA, 25 bp, Homo sapien
tgcatataaccccacacaaatgggt

SEQ ID NO: 5272919 - DNA, 25 bp, Homo sapien
tataaccccacacaaatgggtggct

SEQ ID NO: 5272920 - DNA, 25 bp, Homo sapien
ctgtgcatataaccccacacaaatg

SEQ ID NO: 5272921 - DNA, 25 bp, Homo sapien
caccgtctgtttcagtaggagacaa

SEQ ID NO: 5272922 - DNA, 25 bp, Homo sapien
atcatatccaagcatgtcaccgtct

SEQ ID NO: 5272923 - DNA, 25 bp, Homo sapien
aagcatgtcaccgtctgtttcagta

SEQ ID NO: 5272924 - DNA, 25 bp, Homo sapien
gccagggcactgctatataaatcat

SEQ ID NO: 5272925 - DNA, 25 bp, Homo sapien
tgttgggcctataaagtaatcgccc

SEQ ID NO: 5272926 - DNA, 25 bp, Homo sapien
ggctccttccacgaatagcaatatg

SEQ ID NO: 5272927 - DNA, 25 bp, Homo sapien
caatattataaggagtctcgcctgc

SEQ ID NO: 5272928 - DNA, 25 bp, Homo sapien
aagcagttctgccagtttccggctc

SEQ ID NO: 5272929 - DNA, 25 bp, Homo sapien
aactcagtgaaagaggagaagcaac

SEQ ID NO: 5272930 - DNA, 25 bp, Homo sapien
ccacagccctctagaatgaaggtca

SEQ ID NO: 5272931 - DNA, 25 bp, Homo sapien
tccccataatatccttctgtagctc

SEQ ID NO: 5272932 - DNA, 25 bp, Homo sapien
tatatatagtatgcagacagtaaca

SEQ ID NO: 5272933 - DNA, 25 bp, Homo sapien
tctacagcagacactttagcacctt

SEQ ID NO: 5272934 - DNA, 25 bp, Homo sapien
acttcaatgtttctcatcttggtag

SEQ ID NO: 5272935 - DNA, 25 bp, Homo sapien
tcttggtagcctttataagtggcgt

SEQ ID NO: 5272936 - DNA, 25 bp, Homo sapien
tagcacctttatctagcagcagctc

SEQ ID NO: 5272937 - DNA, 25 bp, Homo sapien
caacagcccaatacaaagcagtttt

SEQ ID NO: 5272938 - DNA, 25 bp, Homo sapien
gtgtcaggattgcactgtaagatat

SEQ ID NO: 5272939 - DNA, 25 bp, Homo sapien
cactgtaagatatctctcaccattg

SEQ ID NO: 5272940 - DNA, 25 bp, Homo sapien
tcaacagcccaatacaaagcagttt

SEQ ID NO: 5272941 - DNA, 25 bp, Homo sapien
tacctcaagactcatacttgaacct

SEQ ID NO: 5272942 - DNA, 25 bp, Homo sapien
gcaatcaatcatataccatcttgtg

SEQ ID NO: 5272943 - DNA, 25 bp, Homo sapien
aggctcttcacctacctaaatccaa

SEQ ID NO: 5272944 - DNA, 25 bp, Homo sapien
catacttgaaccttttgctaggcaa

SEQ ID NO: 5272945 - DNA, 25 bp, Homo sapien
caataatggcagtgaaacttagtaa

SEQ ID NO: 5272946 - DNA, 25 bp, Homo sapien
caacacttacatgcaattatactct

SEQ ID NO: 5272947 - DNA, 25 bp, Homo sapien
aataatatacgtctgttaaatgtac

SEQ ID NO: 5272948 - DNA, 25 bp, Homo sapien
aagtgggaagaataacattatgatc

SEQ ID NO: 5272949 - DNA, 25 bp, Homo sapien
gacagcgccaatcaacacagtatcc

SEQ ID NO: 5272950 - DNA, 25 bp, Homo sapien
tcgaacaatttcaacatgaccacct

SEQ ID NO: 5272951 - DNA, 25 bp, Homo sapien
gtcctctaatgtctatatcagcata

SEQ ID NO: 5272952 - DNA, 25 bp, Homo sapien
ggagaagcgctcgaacaatttcaac

SEQ ID NO: 5272953 - DNA, 25 bp, Homo sapien
gacaaatgtgaaatagatgacctac

SEQ ID NO: 5272954 - DNA, 25 bp, Homo sapien
gaatcttgaaaggtaataagacact

SEQ ID NO: 5272955 - DNA, 25 bp, Homo sapien
ccacttcaccactaggagacaaatg

SEQ ID NO: 5272956 - DNA, 25 bp, Homo sapien
caagtttatgtcatgcatgagaatc

SEQ ID NO: 5272957 - DNA, 25 bp, Homo sapien
tgcacaatctccgtatgtccctcct

SEQ ID NO: 5272958 - DNA, 25 bp, Homo sapien
gccacaataagtgcagtcattgaat

SEQ ID NO: 5272959 - DNA, 25 bp, Homo sapien
gactgtgtgtaacctcctttcactg

SEQ ID NO: 5272960 - DNA, 25 bp, Homo sapien
tgttcacatatgttccagcgtcgag

SEQ ID NO: 5272961 - DNA, 25 bp, Homo sapien
ccaaatgaccctttcgtgcagccca

SEQ ID NO: 5272962 - DNA, 25 bp, Homo sapien
aaatgaccctttcgtgcagcccaaa

SEQ ID NO: 5272963 - DNA, 25 bp, Homo sapien
aatgaccctttcgtgcagcccaaac

SEQ ID NO: 5272964 - DNA, 25 bp, Homo sapien
cgtgcagcccaaactaaaggggtgg

SEQ ID NO: 5272965 - DNA, 25 bp, Homo sapien
gcccaaatgattgggtaaacactgt

SEQ ID NO: 5272966 - DNA, 25 bp, Homo sapien
gatgaactatatctgcatggcctct

SEQ ID NO: 5272967 - DNA, 25 bp, Homo sapien
tgcagtaaaagatgaactatatctg

SEQ ID NO: 5272968 - DNA, 25 bp, Homo sapien
cctgctgcccaaatgattgggtaaa

SEQ ID NO: 5272969 - DNA, 25 bp, Homo sapien
gaggaagatgactaaagatctcaaa

SEQ ID NO: 5272970 - DNA, 25 bp, Homo sapien
caattgagaaatacttagctttaga

SEQ ID NO: 5272971 - DNA, 25 bp, Homo sapien
ctgacaacaattgagaaatacttag

SEQ ID NO: 5272972 - DNA, 25 bp, Homo sapien
aaaagaggaagatgactaaagatct

SEQ ID NO: 5272973 - DNA, 25 bp, Homo sapien
tctactacgtcagtacggcctttgt

SEQ ID NO: 5272974 - DNA, 25 bp, Homo sapien
tggattggcaccatgagaaagaagc

SEQ ID NO: 5272975 - DNA, 25 bp, Homo sapien
gaaagaagcaactctactacgtcag

SEQ ID NO: 5272976 - DNA, 25 bp, Homo sapien
cctttgtaacatgcccacataagag

SEQ ID NO: 5272977 - DNA, 25 bp, Homo sapien
atatcacggtgctccaagttaaccc

SEQ ID NO: 5272978 - DNA, 25 bp, Homo sapien
gcacatgcccttctttcgatgcaga

SEQ ID NO: 5272979 - DNA, 25 bp, Homo sapien
tagttcctctacgatgtgcacatgc

SEQ ID NO: 5272980 - DNA, 25 bp, Homo sapien
cagatataagtgctgtccaattatc

SEQ ID NO: 5272981 - DNA, 25 bp, Homo sapien
taattccttcactatttccagattg

SEQ ID NO: 5272982 - DNA, 25 bp, Homo sapien
ctatcatcagtggagtctggccaca

SEQ ID NO: 5272983 - DNA, 25 bp, Homo sapien
tcttccagattgcagttagctccat

SEQ ID NO: 5272984 - DNA, 25 bp, Homo sapien
tttccagattgccttgttcggcagc

SEQ ID NO: 5272985 - DNA, 25 bp, Homo sapien
taaatgatattaggtaccacaggtc

SEQ ID NO: 5272986 - DNA, 25 bp, Homo sapien
gcaaagttcaaatatggactctacc

SEQ ID NO: 5272987 - DNA, 25 bp, Homo sapien
caacatttccttaacgactgagtta

SEQ ID NO: 5272988 - DNA, 25 bp, Homo sapien
cagctgctacgcaagttaaatgagc

SEQ ID NO: 5272989 - DNA, 25 bp, Homo sapien
ttggcttgccggacgcgatggctca

SEQ ID NO: 5272990 - DNA, 25 bp, Homo sapien
aaaatgtcctgccaaataataatag

SEQ ID NO: 5272991 - DNA, 25 bp, Homo sapien
taataatagcttggcttgccggacg

SEQ ID NO: 5272992 - DNA, 25 bp, Homo sapien
tacaaaactgtattagcacctaaaa

SEQ ID NO: 5272993 - DNA, 25 bp, Homo sapien
ctcatctacatctttgcatttttca

SEQ ID NO: 5272994 - DNA, 25 bp, Homo sapien
tcttcctctacataatttatgacgc

SEQ ID NO: 5272995 - DNA, 25 bp, Homo sapien
aatttatgacgctctgtgatatcaa

SEQ ID NO: 5272996 - DNA, 25 bp, Homo sapien
ttctctcatctacatctttgcattt

SEQ ID NO: 5272997 - DNA, 25 bp, Homo sapien
gctggcccatacaagacactatatt

SEQ ID NO: 5272998 - DNA, 25 bp, Homo sapien
taatgtcttgccacccgttttgaaa

SEQ ID NO: 5272999 - DNA, 25 bp, Homo sapien
aacacttagcttaatagctggccca

SEQ ID NO: 5273000 - DNA, 25 bp, Homo sapien
gcagatgtagccaacagcaatgtca

SEQ ID NO: 5273001 - DNA, 25 bp, Homo sapien
ggaacgggcccgctcggctgcaggc

SEQ ID NO: 5273002 - DNA, 25 bp, Homo sapien
agacggcgactgcaagcgcgtcgcc

SEQ ID NO: 5273003 - DNA, 25 bp, Homo sapien
ccgctcggctgcaggcgatgtcaga

SEQ ID NO: 5273004 - DNA, 25 bp, Homo sapien
gggaagcaagagacggcgactgcaa

SEQ ID NO: 5273005 - DNA, 25 bp, Homo sapien
tcatgtttgggcgactgagggctca

SEQ ID NO: 5273006 - DNA, 25 bp, Homo sapien
acagcggttctgcatgggtcatcac

SEQ ID NO: 5273007 - DNA, 25 bp, Homo sapien
gagggctcaactactactaggcaga

SEQ ID NO: 5273008 - DNA, 25 bp, Homo sapien
cttcagcattgggagcacgcgttca

SEQ ID NO: 5273009 - DNA, 25 bp, Homo sapien
tcagccaggaagaactattaacgcc

SEQ ID NO: 5273010 - DNA, 25 bp, Homo sapien
tattgagggcagttaagattacatc

SEQ ID NO: 5273011 - DNA, 25 bp, Homo sapien
cacagtgttatttaggattctgcac

SEQ ID NO: 5273012 - DNA, 25 bp, Homo sapien
ggacaaatttttagctgacacagat

SEQ ID NO: 5273013 - DNA, 25 bp, Homo sapien
gaattattatcttcgaaggaaccag

SEQ ID NO: 5273014 - DNA, 25 bp, Homo sapien
tagggttagccttatcagccggaaa

SEQ ID NO: 5273015 - DNA, 25 bp, Homo sapien
tatttaacaggagtagacgtaccag

SEQ ID NO: 5273016 - DNA, 25 bp, Homo sapien
tgtaggtggctagataggctgaacc

SEQ ID NO: 5273017 - DNA, 25 bp, Homo sapien
taagtctcacatgacggcgcagagc

SEQ ID NO: 5273018 - DNA, 25 bp, Homo sapien
tcaaaacctttgagcaacctaccag

SEQ ID NO: 5273019 - DNA, 25 bp, Homo sapien
caggagatgcttagtaatccaaggc

SEQ ID NO: 5273020 - DNA, 25 bp, Homo sapien
tccatacataggtcaaacaaaggtg

SEQ ID NO: 5273021 - DNA, 25 bp, Homo sapien
tgtgaccctacggacaagtgctgag

SEQ ID NO: 5273022 - DNA, 25 bp, Homo sapien
cagtgccttgggatacgcaacatac

SEQ ID NO: 5273023 - DNA, 25 bp, Homo sapien
atacattcagcaacagggcacgcgt

SEQ ID NO: 5273024 - DNA, 25 bp, Homo sapien
tattcttacataaggcgtggcccac

SEQ ID NO: 5273025 - DNA, 25 bp, Homo sapien
aatgtgcaggcaataataccaggag

SEQ ID NO: 5273026 - DNA, 25 bp, Homo sapien
tgaatgtctcgaggctatttcttga

SEQ ID NO: 5273027 - DNA, 25 bp, Homo sapien
ctgttctgtcccaaagaattttctc

SEQ ID NO: 5273028 - DNA, 25 bp, Homo sapien
gcaacaacaataatactaagatacc

SEQ ID NO: 5273029 - DNA, 25 bp, Homo sapien
ctgtaaaacgtgagtgatggtttta

SEQ ID NO: 5273030 - DNA, 25 bp, Homo sapien
actgtgtaacttattgctacttgag

SEQ ID NO: 5273031 - DNA, 25 bp, Homo sapien
cttgagttactatccatgttataac

SEQ ID NO: 5273032 - DNA, 25 bp, Homo sapien
gatggttttatagaaagaagcacaa

SEQ ID NO: 5273033 - DNA, 25 bp, Homo sapien
gaagaagcctatcctattctgtctg

SEQ ID NO: 5273034 - DNA, 25 bp, Homo sapien
tgaacaccaggtagggaagaagcct

SEQ ID NO: 5273035 - DNA, 25 bp, Homo sapien
taagacaacactgcctagagatcct

SEQ ID NO: 5273036 - DNA, 25 bp, Homo sapien
tacagtttttaagcgcaagaatgga

SEQ ID NO: 5273037 - DNA, 25 bp, Homo sapien
gatcatctttatttaactcagtttt

SEQ ID NO: 5273038 - DNA, 25 bp, Homo sapien
ttatttaactcagtttttatctctc

SEQ ID NO: 5273039 - DNA, 25 bp, Homo sapien
aactcagtttttatctctccttcag

SEQ ID NO: 5273040 - DNA, 25 bp, Homo sapien
agtttttatctctccttcagaaaat

SEQ ID NO: 5273041 - DNA, 25 bp, Homo sapien
cacacctcgcttctagtggaaagga

SEQ ID NO: 5273042 - DNA, 25 bp, Homo sapien
tactgaccacgaccaaggaaagagg

SEQ ID NO: 5273043 - DNA, 25 bp, Homo sapien
gaaacgtgttttctcctcacaggaa

SEQ ID NO: 5273044 - DNA, 25 bp, Homo sapien
gctcagcaaacatgcacgcagtaca

SEQ ID NO: 5273045 - DNA, 25 bp, Homo sapien
gggtataccccgtgccaaatggcag

SEQ ID NO: 5273046 - DNA, 25 bp, Homo sapien
taatgtcattaacacccctgttaga

SEQ ID NO: 5273047 - DNA, 25 bp, Homo sapien
gaaggaggttcgttcataacacacc

SEQ ID NO: 5273048 - DNA, 25 bp, Homo sapien
gaatgaacgtctggatagttggact

SEQ ID NO: 5273049 - DNA, 25 bp, Homo sapien
gaatattccaattatcaagaaacat

SEQ ID NO: 5273050 - DNA, 25 bp, Homo sapien
aatattccaattatcaagaaacatc

SEQ ID NO: 5273051 - DNA, 25 bp, Homo sapien
tggaaattaagtcccagcgagctgc

SEQ ID NO: 5273052 - DNA, 25 bp, Homo sapien
agctgctccattttcgtcataccct

SEQ ID NO: 5273053 - DNA, 25 bp, Homo sapien
aaagcctgcagcattattaatggca

SEQ ID NO: 5273054 - DNA, 25 bp, Homo sapien
caaagcctgcagcattattaatggc

SEQ ID NO: 5273055 - DNA, 25 bp, Homo sapien
agcctgcagcattattaatggcatc

SEQ ID NO: 5273056 - DNA, 25 bp, Homo sapien
cctgcagcattattaatggcatcag

SEQ ID NO: 5273057 - DNA, 25 bp, Homo sapien
taaacaaggcaagcagaacacaatc

SEQ ID NO: 5273058 - DNA, 25 bp, Homo sapien
taacatctgccacgcaaagcgaggt

SEQ ID NO: 5273059 - DNA, 25 bp, Homo sapien
gcaaggtcctgtgaaagcccatttc

SEQ ID NO: 5273060 - DNA, 25 bp, Homo sapien
ccttcaaaacgtggccagaatcatc

SEQ ID NO: 5273061 - DNA, 25 bp, Homo sapien
gctgtagcttgaaaatgctcatcaa

SEQ ID NO: 5273062 - DNA, 25 bp, Homo sapien
ctagcgtccatgcaaaatagtattt

SEQ ID NO: 5273063 - DNA, 25 bp, Homo sapien
tctttgttggccacgaagctgtagc

SEQ ID NO: 5273064 - DNA, 25 bp, Homo sapien
gttgtactccacaggtaatgttgta

SEQ ID NO: 5273065 - DNA, 25 bp, Homo sapien
tgctgtaaaggctccagataaatct

SEQ ID NO: 5273066 - DNA, 25 bp, Homo sapien
gtaaaggctccagataaatctcatg

SEQ ID NO: 5273067 - DNA, 25 bp, Homo sapien
aaggctccagataaatctcatgacc

SEQ ID NO: 5273068 - DNA, 25 bp, Homo sapien
atacatgctgtaaaggctccagata

SEQ ID NO: 5273069 - DNA, 25 bp, Homo sapien
gccaggatccccatgaagttacagt

SEQ ID NO: 5273070 - DNA, 25 bp, Homo sapien
tgtaagagcaaagtgggcctgccag

SEQ ID NO: 5273071 - DNA, 25 bp, Homo sapien
tacagttgtaactcaaatactccag

SEQ ID NO: 5273072 - DNA, 25 bp, Homo sapien
tatggtatgatctgccttcaatgaa

SEQ ID NO: 5273073 - DNA, 25 bp, Homo sapien
agttcttcatccttccgaaacatcc

SEQ ID NO: 5273074 - DNA, 25 bp, Homo sapien
aatccctctgtgaggaagtcagttc

SEQ ID NO: 5273075 - DNA, 25 bp, Homo sapien
atccctctgtgaggaagtcagttct

SEQ ID NO: 5273076 - DNA, 25 bp, Homo sapien
tcatgcttttaccaggcaagtgaca

SEQ ID NO: 5273077 - DNA, 25 bp, Homo sapien
tctaacagctgatacgggtagtcca

SEQ ID NO: 5273078 - DNA, 25 bp, Homo sapien
tgttgctcagagaagcgattactgc

SEQ ID NO: 5273079 - DNA, 25 bp, Homo sapien
gctagaagtctaaccaagtccaagt

SEQ ID NO: 5273080 - DNA, 25 bp, Homo sapien
tttcgcaagccaaactagtgatctt

SEQ ID NO: 5273081 - DNA, 25 bp, Homo sapien
catcatgaatttcgcaagccaaact

SEQ ID NO: 5273082 - DNA, 25 bp, Homo sapien
gccaaactagtgatcttctgagtaa

SEQ ID NO: 5273083 - DNA, 25 bp, Homo sapien
tgaatttcgcaagccaaactagtga

SEQ ID NO: 5273084 - DNA, 25 bp, Homo sapien
tgttaccgcctcataaaggcggtgg

SEQ ID NO: 5273085 - DNA, 25 bp, Homo sapien
gtgttaccgcctcataaaggcggtg

SEQ ID NO: 5273086 - DNA, 25 bp, Homo sapien
ttccacagcgtggaaacggacccta

SEQ ID NO: 5273087 - DNA, 25 bp, Homo sapien
aaacggaccctagcgggagccactg

SEQ ID NO: 5273088 - DNA, 25 bp, Homo sapien
ccagttactctatgttctacagtaa

SEQ ID NO: 5273089 - DNA, 25 bp, Homo sapien
ttactctatgttctacagtaacaat

SEQ ID NO: 5273090 - DNA, 25 bp, Homo sapien
gtaacaatttatagttttctgcaca

SEQ ID NO: 5273091 - DNA, 25 bp, Homo sapien
tttttccagttactctatgttctac

SEQ ID NO: 5273092 - DNA, 25 bp, Homo sapien
ttataacacattcaagggttccctg

SEQ ID NO: 5273093 - DNA, 25 bp, Homo sapien
ttcagctaattcgactatctaatct

SEQ ID NO: 5273094 - DNA, 25 bp, Homo sapien
aaacaagagccttcaagttcattct

SEQ ID NO: 5273095 - DNA, 25 bp, Homo sapien
gggttccctgtgcttgaatacttca

SEQ ID NO: 5273096 - DNA, 25 bp, Homo sapien
tagaggattccagagcctgaaggag

SEQ ID NO: 5273097 - DNA, 25 bp, Homo sapien
gaaggagtctggttccctgaatgac

SEQ ID NO: 5273098 - DNA, 25 bp, Homo sapien
caggatgcaggcacaagtgttgcgc

SEQ ID NO: 5273099 - DNA, 25 bp, Homo sapien
tctaaagtcacgtcctatacagctg

SEQ ID NO: 5273100 - DNA, 25 bp, Homo sapien
gagcgccttctctaggaaactcaga

SEQ ID NO: 5273101 - DNA, 25 bp, Homo sapien
aaagattcatctagtaccaggaaga

SEQ ID NO: 5273102 - DNA, 25 bp, Homo sapien
gaagtaaaacgcactcttgagcgcc

SEQ ID NO: 5273103 - DNA, 25 bp, Homo sapien
agaaattatttccactactcaactg

SEQ ID NO: 5273104 - DNA, 25 bp, Homo sapien
cactgtgaggtatcccagagcaaac

SEQ ID NO: 5273105 - DNA, 25 bp, Homo sapien
gactcgagtaacttggcacactgtg

SEQ ID NO: 5273106 - DNA, 25 bp, Homo sapien
cagcagaatattgtccatagtcaaa

SEQ ID NO: 5273107 - DNA, 25 bp, Homo sapien
tagtcaaagatatagactcgagtaa

SEQ ID NO: 5273108 - DNA, 25 bp, Homo sapien
cacgtctacatgtgcagggtccatc

SEQ ID NO: 5273109 - DNA, 25 bp, Homo sapien
cagaacttggtgttttgacgccctc

SEQ ID NO: 5273110 - DNA, 25 bp, Homo sapien
cttacaaggagctagcctgaggaca

SEQ ID NO: 5273111 - DNA, 25 bp, Homo sapien
tgacttccagcttcgagaggtaact

SEQ ID NO: 5273112 - DNA, 25 bp, Homo sapien
tgctcagggaaattgctaattccca

SEQ ID NO: 5273113 - DNA, 25 bp, Homo sapien
tatgggaattaatgaactagaactg

SEQ ID NO: 5273114 - DNA, 25 bp, Homo sapien
ggatatagagtggaaattgctcagg

SEQ ID NO: 5273115 - DNA, 25 bp, Homo sapien
catgtagcagcaactatgggaatta

SEQ ID NO: 5273116 - DNA, 25 bp, Homo sapien
tgatgtcaccaaaaggttcaaaatc

SEQ ID NO: 5273117 - DNA, 25 bp, Homo sapien
gtgatgtcaccaaaaggttcaaaat

SEQ ID NO: 5273118 - DNA, 25 bp, Homo sapien
gttttaacacgatgaaatcaaatta

SEQ ID NO: 5273119 - DNA, 25 bp, Homo sapien
tatggacatgccacatttcgtttat

SEQ ID NO: 5273120 - DNA, 25 bp, Homo sapien
gtaaactgccgaatggtattccatt

SEQ ID NO: 5273121 - DNA, 25 bp, Homo sapien
tcgtttatcctttcaccagccggtg

SEQ ID NO: 5273122 - DNA, 25 bp, Homo sapien
ttgtaaactgccgaatggtattcca

SEQ ID NO: 5273123 - DNA, 25 bp, Homo sapien
tagaacctatcactgactgttcctc

SEQ ID NO: 5273124 - DNA, 25 bp, Homo sapien
caagatcttggtttttacaccaaga

SEQ ID NO: 5273125 - DNA, 25 bp, Homo sapien
gccaagatcttggtttttacaccaa

SEQ ID NO: 5273126 - DNA, 25 bp, Homo sapien
acctatcactgactgttcctcaggg

SEQ ID NO: 5273127 - DNA, 25 bp, Homo sapien
atgaggcaagggagataagggcaca

SEQ ID NO: 5273128 - DNA, 25 bp, Homo sapien
aggcaagggagataagggcacaggc

SEQ ID NO: 5273129 - DNA, 25 bp, Homo sapien
tgaggcaagggagataagggcacag

SEQ ID NO: 5273130 - DNA, 25 bp, Homo sapien
gcaagggagataagggcacaggcag

SEQ ID NO: 5273131 - DNA, 25 bp, Homo sapien
tgacaggtaacatggaccccaggac

SEQ ID NO: 5273132 - DNA, 25 bp, Homo sapien
tatctaggaagccactgtaggagtg

SEQ ID NO: 5273133 - DNA, 25 bp, Homo sapien
tcattcattcccagtagagttgagg

SEQ ID NO: 5273134 - DNA, 25 bp, Homo sapien
taccatgtccgctgacctgtggaga

SEQ ID NO: 5273135 - DNA, 25 bp, Homo sapien
gtgtttcattccaccacgtttcatg

SEQ ID NO: 5273136 - DNA, 25 bp, Homo sapien
cgtgtttcatgctgccgtgtttcat

SEQ ID NO: 5273137 - DNA, 25 bp, Homo sapien
accacgtttcatgccgccacatttt

SEQ ID NO: 5273138 - DNA, 25 bp, Homo sapien
cacattttatgctgccacgtttcat

SEQ ID NO: 5273139 - DNA, 25 bp, Homo sapien
cacacaggtcctaggaaacgggctt

SEQ ID NO: 5273140 - DNA, 25 bp, Homo sapien
acacagtcaggccaaagacgttctc

SEQ ID NO: 5273141 - DNA, 25 bp, Homo sapien
tcaggccaaagacgttctcggaccc

SEQ ID NO: 5273142 - DNA, 25 bp, Homo sapien
aacgggcttccgtggctgctttcca

SEQ ID NO: 5273143 - DNA, 25 bp, Homo sapien
ttgtgcatgttctccactcctatga

SEQ ID NO: 5273144 - DNA, 25 bp, Homo sapien
tgcatgttctccactcctatgatga

SEQ ID NO: 5273145 - DNA, 25 bp, Homo sapien
catgatacagtaggaaattccactt

SEQ ID NO: 5273146 - DNA, 25 bp, Homo sapien
tcctatgatgatcatgatacagtag

SEQ ID NO: 5273147 - DNA, 25 bp, Homo sapien
aaggcctaaagccatgcccagtgcc

SEQ ID NO: 5273148 - DNA, 25 bp, Homo sapien
acaaggcctaaagccatgcccagtg

SEQ ID NO: 5273149 - DNA, 25 bp, Homo sapien
gaaaaaacaaggcctaaagccatgc

SEQ ID NO: 5273150 - DNA, 25 bp, Homo sapien
aaaacaaggcctaaagccatgccca

SEQ ID NO: 5273151 - DNA, 25 bp, Homo sapien
tgcatggaagccgtgtgggattaca

SEQ ID NO: 5273152 - DNA, 25 bp, Homo sapien
tagtttctccagtaccaactttgta

SEQ ID NO: 5273153 - DNA, 25 bp, Homo sapien
tcgtcctgacagaacatcggttgtt

SEQ ID NO: 5273154 - DNA, 25 bp, Homo sapien
ggctcaggattatagctttcttcat

SEQ ID NO: 5273155 - DNA, 25 bp, Homo sapien
gttttaagtcatgtagtatgatgcc

SEQ ID NO: 5273156 - DNA, 25 bp, Homo sapien
agttttaagtcatgtagtatgatgc

SEQ ID NO: 5273157 - DNA, 25 bp, Homo sapien
gtgccctgccactagctcttcttag

SEQ ID NO: 5273158 - DNA, 25 bp, Homo sapien
taatctagctagcaatctattggtc

SEQ ID NO: 5273159 - DNA, 25 bp, Homo sapien
cattacaggttcgattttagaactc

SEQ ID NO: 5273160 - DNA, 25 bp, Homo sapien
tagcacatctaatagaaatcagctg

SEQ ID NO: 5273161 - DNA, 25 bp, Homo sapien
tagttccaaagactcgtcttcaagc

SEQ ID NO: 5273162 - DNA, 25 bp, Homo sapien
gttccaaagactcgtcttcaagctc

SEQ ID NO: 5273163 - DNA, 25 bp, Homo sapien
ccaaagactcgtcttcaagctctga

SEQ ID NO: 5273164 - DNA, 25 bp, Homo sapien
ggttagttccaaagactcgtcttca

SEQ ID NO: 5273165 - DNA, 25 bp, Homo sapien
taatctagaagagttgccattccag

SEQ ID NO: 5273166 - DNA, 25 bp, Homo sapien
cctaggcatgcagctgggaaaccat

SEQ ID NO: 5273167 - DNA, 25 bp, Homo sapien
ggcatggaacagacaggataccctt

SEQ ID NO: 5273168 - DNA, 25 bp, Homo sapien
gagttcaacctacaagcccacagat

SEQ ID NO: 5273169 - DNA, 25 bp, Homo sapien
gcaaggcaaagagttggcacactac

SEQ ID NO: 5273170 - DNA, 25 bp, Homo sapien
gataagttcgaaaccaaatggctgc

SEQ ID NO: 5273171 - DNA, 25 bp, Homo sapien
agtgcaagataaaggcccaaaaggg

SEQ ID NO: 5273172 - DNA, 25 bp, Homo sapien
cccaaaagggtagcaactacatgtc

SEQ ID NO: 5273173 - DNA, 25 bp, Homo sapien
gagcatctactatgggcaaacatgg

SEQ ID NO: 5273174 - DNA, 25 bp, Homo sapien
tgagtcccagtcctagctcaggatg

SEQ ID NO: 5273175 - DNA, 25 bp, Homo sapien
tgggaaatctaaacatgcatgagtc

SEQ ID NO: 5273176 - DNA, 25 bp, Homo sapien
catatacagaaggaacgtcaaccca

SEQ ID NO: 5273177 - DNA, 25 bp, Homo sapien
tcctcaaggtgtgagaagcactctg

SEQ ID NO: 5273178 - DNA, 25 bp, Homo sapien
tgtatgccacaccacggcgtttgag

SEQ ID NO: 5273179 - DNA, 25 bp, Homo sapien
gaagcacttggacatgaaagcgcaa

SEQ ID NO: 5273180 - DNA, 25 bp, Homo sapien
ggaagtgatgagattgaccctccac

SEQ ID NO: 5273181 - DNA, 25 bp, Homo sapien
gtaaagatgatagggcccaaaggca

SEQ ID NO: 5273182 - DNA, 25 bp, Homo sapien
caatgtagagcaatgggatttctca

SEQ ID NO: 5273183 - DNA, 25 bp, Homo sapien
cctcgcagccagttaagtaaagatg

SEQ ID NO: 5273184 - DNA, 25 bp, Homo sapien
tagtgtcacaataccaaatgcagac

SEQ ID NO: 5273185 - DNA, 25 bp, Homo sapien
agacaggaaagccagtcgcccccaa

SEQ ID NO: 5273186 - DNA, 25 bp, Homo sapien
aggaaagccagtcgcccccaatggt

SEQ ID NO: 5273187 - DNA, 25 bp, Homo sapien
acaggaggagtcagacaggaaagcc

SEQ ID NO: 5273188 - DNA, 25 bp, Homo sapien
acaggaaagccagtcgcccccaatg

SEQ ID NO: 5273189 - DNA, 25 bp, Homo sapien
gagcctagactactgtgaccacaag

SEQ ID NO: 5273190 - DNA, 25 bp, Homo sapien
tcttgccctccacacagtaatgaga

SEQ ID NO: 5273191 - DNA, 25 bp, Homo sapien
tcccactggagagattctacaaaat

SEQ ID NO: 5273192 - DNA, 25 bp, Homo sapien
tggagaaatctgacagacactgcct

SEQ ID NO: 5273193 - DNA, 25 bp, Homo sapien
gcctctggatctgcgagaaaataaa

SEQ ID NO: 5273194 - DNA, 25 bp, Homo sapien
tatgtggaaactagctgtactatct

SEQ ID NO: 5273195 - DNA, 25 bp, Homo sapien
cagctaactaatacagaccttaacc

SEQ ID NO: 5273196 - DNA, 25 bp, Homo sapien
tactcagcatctaacacttacacct

SEQ ID NO: 5273197 - DNA, 25 bp, Homo sapien
cataaaatagccttgacaatgtaaa

SEQ ID NO: 5273198 - DNA, 25 bp, Homo sapien
gacaatgtaaaccaattaataatag

SEQ ID NO: 5273199 - DNA, 25 bp, Homo sapien
caatgtaaaccaattaataatagta

SEQ ID NO: 5273200 - DNA, 25 bp, Homo sapien
cttgacaatgtaaaccaattaataa

SEQ ID NO: 5273201 - DNA, 25 bp, Homo sapien
aatgctgcatgggatgcgagacagc

SEQ ID NO: 5273202 - DNA, 25 bp, Homo sapien
ctgtgtgaagaggtcccaagtcatg

SEQ ID NO: 5273203 - DNA, 25 bp, Homo sapien
cagaacactggcctcatgacataaa

SEQ ID NO: 5273204 - DNA, 25 bp, Homo sapien
cagatcaggaataccaggggcctct

SEQ ID NO: 5273205 - DNA, 25 bp, Homo sapien
gttggccctgatggacccaataaac

SEQ ID NO: 5273206 - DNA, 25 bp, Homo sapien
ccaataaaccgagttgaaggagatg

SEQ ID NO: 5273207 - DNA, 25 bp, Homo sapien
gatggacccaataaaccgagttgaa

SEQ ID NO: 5273208 - DNA, 25 bp, Homo sapien
ccctgatggacccaataaaccgagt

SEQ ID NO: 5273209 - DNA, 25 bp, Homo sapien
tctctgtgtcaaccacaacccctag

SEQ ID NO: 5273210 - DNA, 25 bp, Homo sapien
cctagtccttcagtgtcgacttcag

SEQ ID NO: 5273211 - DNA, 25 bp, Homo sapien
acaacccctagtccttcagtgtcga

SEQ ID NO: 5273212 - DNA, 25 bp, Homo sapien
agtccttcagtgtcgacttcaggga

SEQ ID NO: 5273213 - DNA, 25 bp, Homo sapien
cagtaggtttggactggcagcacat

SEQ ID NO: 5273214 - DNA, 25 bp, Homo sapien
tgtagtatacacaatgtgctagact

SEQ ID NO: 5273215 - DNA, 25 bp, Homo sapien
catgagtaatgcgtggtgctacgac

SEQ ID NO: 5273216 - DNA, 25 bp, Homo sapien
ccagtgatgcacttaggattatcaa

SEQ ID NO: 5273217 - DNA, 25 bp, Homo sapien
ggctgtcgccggcaacaacgcccgg

SEQ ID NO: 5273218 - DNA, 25 bp, Homo sapien
cacaacccggtccatgcgcaccggg

SEQ ID NO: 5273219 - DNA, 25 bp, Homo sapien
cgaccaccggatccgagcgccgctg

SEQ ID NO: 5273220 - DNA, 25 bp, Homo sapien
gcagggaccgcatgcacacccgcac

SEQ ID NO: 5273221 - DNA, 25 bp, Homo sapien
gcagggtggagcccgtggtgctggt

SEQ ID NO: 5273222 - DNA, 25 bp, Homo sapien
tgcacggcgttgctgaggggctgca

SEQ ID NO: 5273223 - DNA, 25 bp, Homo sapien
ggcagctgcacggcgttgctgaggg

SEQ ID NO: 5273224 - DNA, 25 bp, Homo sapien
ctggtcgatgggcagctgcacggcg

SEQ ID NO: 5273225 - DNA, 25 bp, Homo sapien
gcccgcggtcggagctctgcgcggg

SEQ ID NO: 5273226 - DNA, 25 bp, Homo sapien
cctgggccgcccgcggtcggagctc

SEQ ID NO: 5273227 - DNA, 25 bp, Homo sapien
cccgcggtcggagctctgcgcgggg

SEQ ID NO: 5273228 - DNA, 25 bp, Homo sapien
ccctgggccgcccgcggtcggagct

SEQ ID NO: 5273229 - DNA, 25 bp, Homo sapien
tcttgaatgcattgggatcccggag

SEQ ID NO: 5273230 - DNA, 25 bp, Homo sapien
ctttaatgttggagtccagaacaag

SEQ ID NO: 5273231 - DNA, 25 bp, Homo sapien
agcagcactgttattctacacctct

SEQ ID NO: 5273232 - DNA, 25 bp, Homo sapien
tgacgtgaccttccacttccctgag

SEQ ID NO: 5273233 - DNA, 25 bp, Homo sapien
tggccagtttgcacaaaggatgcct

SEQ ID NO: 5273234 - DNA, 25 bp, Homo sapien
tctgagaagctgacggaaccatctg

SEQ ID NO: 5273235 - DNA, 25 bp, Homo sapien
catttcacaggcctggtctgcctgt

SEQ ID NO: 5273236 - DNA, 25 bp, Homo sapien
tcggctttttaggatcgcctttgcc

SEQ ID NO: 5273237 - DNA, 25 bp, Homo sapien
tctgcctctcggctttttaggatcg

SEQ ID NO: 5273238 - DNA, 25 bp, Homo sapien
cctctcggctttttaggatcgcctt

SEQ ID NO: 5273239 - DNA, 25 bp, Homo sapien
tctcggctttttaggatcgcctttg

SEQ ID NO: 5273240 - DNA, 25 bp, Homo sapien
ttaagcctggcttctaaagcagcag

SEQ ID NO: 5273241 - DNA, 25 bp, Homo sapien
gcagcaggcgatggttcatcaagaa

SEQ ID NO: 5273242 - DNA, 25 bp, Homo sapien
cgtgcaaagcgcttgttggaagcct

SEQ ID NO: 5273243 - DNA, 25 bp, Homo sapien
ccagcaaaatatgtgggcagcgtgc

SEQ ID NO: 5273244 - DNA, 25 bp, Homo sapien
cctgaagaccaagttccaaacactc

SEQ ID NO: 5273245 - DNA, 25 bp, Homo sapien
aagaccaagttccaaacactctggg

SEQ ID NO: 5273246 - DNA, 25 bp, Homo sapien
gaagaccaagttccaaacactctgg

SEQ ID NO: 5273247 - DNA, 25 bp, Homo sapien
tgaagaccaagttccaaacactctg

SEQ ID NO: 5273248 - DNA, 25 bp, Homo sapien
tcttacagcattgaaaggcctatat

SEQ ID NO: 5273249 - DNA, 25 bp, Homo sapien
tctcttacagcattgaaaggcctat

SEQ ID NO: 5273250 - DNA, 25 bp, Homo sapien
ttctcttacagcattgaaaggccta

SEQ ID NO: 5273251 - DNA, 25 bp, Homo sapien
tacagcattgaaaggcctatatttt

SEQ ID NO: 5273252 - DNA, 25 bp, Homo sapien
gttagagaggatgaccaatttcact

SEQ ID NO: 5273253 - DNA, 25 bp, Homo sapien
tccggccaacatttcatagtactct

SEQ ID NO: 5273254 - DNA, 25 bp, Homo sapien
atgagagccagtgagcatactctgt

SEQ ID NO: 5273255 - DNA, 25 bp, Homo sapien
caccagtccggccaacatttcatag

SEQ ID NO: 5273256 - DNA, 25 bp, Homo sapien
ctgtgattaactcttgccgactggt

SEQ ID NO: 5273257 - DNA, 25 bp, Homo sapien
gaaccagctgtgattaactcttgcc

SEQ ID NO: 5273258 - DNA, 25 bp, Homo sapien
ccagctgtgattaactcttgccgac

SEQ ID NO: 5273259 - DNA, 25 bp, Homo sapien
gctgtgattaactcttgccgactgg

SEQ ID NO: 5273260 - DNA, 25 bp, Homo sapien
tatctgcagctcttagggtacaaca

SEQ ID NO: 5273261 - DNA, 25 bp, Homo sapien
tcctatttggctgttagtaccgtct

SEQ ID NO: 5273262 - DNA, 25 bp, Homo sapien
gggtacaacattctaggtcatctag

SEQ ID NO: 5273263 - DNA, 25 bp, Homo sapien
cattctataggaaggtctgtatgca

SEQ ID NO: 5273264 - DNA, 25 bp, Homo sapien
tttgtttagctgagagaacctggcc

SEQ ID NO: 5273265 - DNA, 25 bp, Homo sapien
ctttgtcagaatttcctgcataatt

SEQ ID NO: 5273266 - DNA, 25 bp, Homo sapien
ttgtttagctgagagaacctggcct

SEQ ID NO: 5273267 - DNA, 25 bp, Homo sapien
tgtcagaatttcctgcataatttcc

SEQ ID NO: 5273268 - DNA, 25 bp, Homo sapien
agtactttgtaagcccattgagggt

SEQ ID NO: 5273269 - DNA, 25 bp, Homo sapien
aagtttaggatggttggccaatgcc

SEQ ID NO: 5273270 - DNA, 25 bp, Homo sapien
caaaggcaggcattttgctcagagg

SEQ ID NO: 5273271 - DNA, 25 bp, Homo sapien
agactatgcatcagatctcttggca

SEQ ID NO: 5273272 - DNA, 25 bp, Homo sapien
ggctttttccagtcggagagcattc

SEQ ID NO: 5273273 - DNA, 25 bp, Homo sapien
tgttaggctttttccagtcggagag

SEQ ID NO: 5273274 - DNA, 25 bp, Homo sapien
cgtctgttaggctttttccagtcgg

SEQ ID NO: 5273275 - DNA, 25 bp, Homo sapien
ctgccgtctgttaggctttttccag

SEQ ID NO: 5273276 - DNA, 25 bp, Homo sapien
tgctcactgtgaaggtgggtgtcct

SEQ ID NO: 5273277 - DNA, 25 bp, Homo sapien
gagaagaattggtcacttacatggt

SEQ ID NO: 5273278 - DNA, 25 bp, Homo sapien
taacagtctcgataaagggctaatc

SEQ ID NO: 5273279 - DNA, 25 bp, Homo sapien
ttgtggcctccggaagaacttgggc

SEQ ID NO: 5273280 - DNA, 25 bp, Homo sapien
atgatcctcatcctgcttgaagccc

SEQ ID NO: 5273281 - DNA, 25 bp, Homo sapien
tgatcctcatcctgcttgaagccct

SEQ ID NO: 5273282 - DNA, 25 bp, Homo sapien
gcttccaacttcagcccatgatcct

SEQ ID NO: 5273283 - DNA, 25 bp, Homo sapien
caggcttccaacttcagcccatgat

SEQ ID NO: 5273284 - DNA, 25 bp, Homo sapien
aacagttacacccagcgaggctgag

SEQ ID NO: 5273285 - DNA, 25 bp, Homo sapien
tgtagttcaatcctgagtcggaggc

SEQ ID NO: 5273286 - DNA, 25 bp, Homo sapien
tctttgtagcgggagtgtgccacat

SEQ ID NO: 5273287 - DNA, 25 bp, Homo sapien
gagcttagcattgactgtggcaggc

SEQ ID NO: 5273288 - DNA, 25 bp, Homo sapien
tcctgccaaatgactcatggacgcc

SEQ ID NO: 5273289 - DNA, 25 bp, Homo sapien
actgtatccccacggaagttgcaaa

SEQ ID NO: 5273290 - DNA, 25 bp, Homo sapien
tccccacggaagttgcaaactgaag

SEQ ID NO: 5273291 - DNA, 25 bp, Homo sapien
gttcctgccaaatgactcatggacg

SEQ ID NO: 5273292 - DNA, 25 bp, Homo sapien
tcttggtgcttacactgcgttggct

SEQ ID NO: 5273293 - DNA, 25 bp, Homo sapien
tgcgttggctttgtaaccccagggc

SEQ ID NO: 5273294 - DNA, 25 bp, Homo sapien
atcagcattgaaccgcaggcagcac

SEQ ID NO: 5273295 - DNA, 25 bp, Homo sapien
tgcctggagcggttacagttgttac

SEQ ID NO: 5273296 - DNA, 25 bp, Homo sapien
tcatgacagaatagcgaaaacccag

SEQ ID NO: 5273297 - DNA, 25 bp, Homo sapien
acatgggccccaaacggctggctct

SEQ ID NO: 5273298 - DNA, 25 bp, Homo sapien
catttccccggatgatagacggaag

SEQ ID NO: 5273299 - DNA, 25 bp, Homo sapien
tagacggaagctattagcaggtcct

SEQ ID NO: 5273300 - DNA, 25 bp, Homo sapien
cggctcctttctggggagaagtcat

SEQ ID NO: 5273301 - DNA, 25 bp, Homo sapien
tgattttacggacctgggctttctc

SEQ ID NO: 5273302 - DNA, 25 bp, Homo sapien
cgcacagccactaagccgatgattt

SEQ ID NO: 5273303 - DNA, 25 bp, Homo sapien
gccactaagccgatgattttacgga

SEQ ID NO: 5273304 - DNA, 25 bp, Homo sapien
taagccgatgattttacggacctgg

SEQ ID NO: 5273305 - DNA, 25 bp, Homo sapien
tctccattgtcaaaagtgctatgat

SEQ ID NO: 5273306 - DNA, 25 bp, Homo sapien
tcaaaagtgctatgataactgacat

SEQ ID NO: 5273307 - DNA, 25 bp, Homo sapien
ttgtcaaaagtgctatgataactga

SEQ ID NO: 5273308 - DNA, 25 bp, Homo sapien
ccattgtcaaaagtgctatgataac

SEQ ID NO: 5273309 - DNA, 25 bp, Homo sapien
cttgtgtatgcttggatagtgtggg

SEQ ID NO: 5273310 - DNA, 25 bp, Homo sapien
cttgtttgcctcttaaattgctgcc

SEQ ID NO: 5273311 - DNA, 25 bp, Homo sapien
tagtgtggggccacttgtttgcctc

SEQ ID NO: 5273312 - DNA, 25 bp, Homo sapien
ccacttgtttgcctcttaaattgct

SEQ ID NO: 5273313 - DNA, 25 bp, Homo sapien
gctacagaaaccatgccacaagtct

SEQ ID NO: 5273314 - DNA, 25 bp, Homo sapien
tacataatgtctgacccaagctgcc

SEQ ID NO: 5273315 - DNA, 25 bp, Homo sapien
ctcttggttttaccgctggcagcta

SEQ ID NO: 5273316 - DNA, 25 bp, Homo sapien
taaaagctatccacgaatacagcga

SEQ ID NO: 5273317 - DNA, 25 bp, Homo sapien
tgtctcctaggcctgcgacgatgca

SEQ ID NO: 5273318 - DNA, 25 bp, Homo sapien
tcacttctggcgtccggctgtggtc

SEQ ID NO: 5273319 - DNA, 25 bp, Homo sapien
gatgcaatgactgcacgcaaagcgc

SEQ ID NO: 5273320 - DNA, 25 bp, Homo sapien
cattcacggtcaggtcacttctggc

SEQ ID NO: 5273321 - DNA, 25 bp, Homo sapien
cttccggggccataattctctactt

SEQ ID NO: 5273322 - DNA, 25 bp, Homo sapien
tccttccggggccataattctctac

SEQ ID NO: 5273323 - DNA, 25 bp, Homo sapien
gggccataattctctactttgttgt

SEQ ID NO: 5273324 - DNA, 25 bp, Homo sapien
tccggggccataattctctactttg

SEQ ID NO: 5273325 - DNA, 25 bp, Homo sapien
gcacagggttctaactgcaggggtg

SEQ ID NO: 5273326 - DNA, 25 bp, Homo sapien
aagcacagggttctaactgcagggg

SEQ ID NO: 5273327 - DNA, 25 bp, Homo sapien
cttggcaatcccattgctgtcataa

SEQ ID NO: 5273328 - DNA, 25 bp, Homo sapien
taagcacagggttctaactgcaggg

SEQ ID NO: 5273329 - DNA, 25 bp, Homo sapien
ggttaccaaatgctaaggcactaag

SEQ ID NO: 5273330 - DNA, 25 bp, Homo sapien
taccaaatgctaaggcactaagctg

SEQ ID NO: 5273331 - DNA, 25 bp, Homo sapien
aatgctaaggcactaagctggttca

SEQ ID NO: 5273332 - DNA, 25 bp, Homo sapien
ctgtgggttaccaaatgctaaggca

SEQ ID NO: 5273333 - DNA, 25 bp, Homo sapien
caaatccttgttgcttctcgtttcc

SEQ ID NO: 5273334 - DNA, 25 bp, Homo sapien
cgagtgggtgcttctggcaaatcct

SEQ ID NO: 5273335 - DNA, 25 bp, Homo sapien
tcatctgtcctccttgctgcagaaa

SEQ ID NO: 5273336 - DNA, 25 bp, Homo sapien
tgcagctattgcattgctcgagtgg

SEQ ID NO: 5273337 - DNA, 25 bp, Homo sapien
ccaggggcattgctcacaccctggc

SEQ ID NO: 5273338 - DNA, 25 bp, Homo sapien
caggggcattgctcacaccctggca

SEQ ID NO: 5273339 - DNA, 25 bp, Homo sapien
gccaggggcattgctcacaccctgg

SEQ ID NO: 5273340 - DNA, 25 bp, Homo sapien
tggctttgtcaataaaatcaggcag

SEQ ID NO: 5273341 - DNA, 25 bp, Homo sapien
gctgaagatggctttgtcaataaaa

SEQ ID NO: 5273342 - DNA, 25 bp, Homo sapien
catttttccactccatgctgaagat

SEQ ID NO: 5273343 - DNA, 25 bp, Homo sapien
ctccatgctgaagatggctttgtca

SEQ ID NO: 5273344 - DNA, 25 bp, Homo sapien
gatagagtaagaatcccagtgctgt

SEQ ID NO: 5273345 - DNA, 25 bp, Homo sapien
tcctatagtgacatgcctccaggtt

SEQ ID NO: 5273346 - DNA, 25 bp, Homo sapien
gatttgatcccctcaacagtcctga

SEQ ID NO: 5273347 - DNA, 25 bp, Homo sapien
tcccacaaccagcatttgatagagt

SEQ ID NO: 5273348 - DNA, 25 bp, Homo sapien
ctggctggccacgtagacgataatg

SEQ ID NO: 5273349 - DNA, 25 bp, Homo sapien
gctggctggccacgtagacgataat

SEQ ID NO: 5273350 - DNA, 25 bp, Homo sapien
agctggctggccacgtagacgataa

SEQ ID NO: 5273351 - DNA, 25 bp, Homo sapien
acagctggctggccacgtagacgat

SEQ ID NO: 5273352 - DNA, 25 bp, Homo sapien
ctatgtcacttcttcttccctctta

SEQ ID NO: 5273353 - DNA, 25 bp, Homo sapien
tatgtcacttcttcttccctcttaa

SEQ ID NO: 5273354 - DNA, 25 bp, Homo sapien
atgtcacttcttcttccctcttaag

SEQ ID NO: 5273355 - DNA, 25 bp, Homo sapien
gtcacttcttcttccctcttaagcc

SEQ ID NO: 5273356 - DNA, 25 bp, Homo sapien
taccacgtagggatctggcagttga

SEQ ID NO: 5273357 - DNA, 25 bp, Homo sapien
gccttgttaccacgtagggatctgg

SEQ ID NO: 5273358 - DNA, 25 bp, Homo sapien
ccacgtagggatctggcagttgaag

SEQ ID NO: 5273359 - DNA, 25 bp, Homo sapien
tgttaccacgtagggatctggcagt

SEQ ID NO: 5273360 - DNA, 25 bp, Homo sapien
cggggcaggtggccggtgctgcttc

SEQ ID NO: 5273361 - DNA, 25 bp, Homo sapien
gcggggcaggtggccggtgctgctt

SEQ ID NO: 5273362 - DNA, 25 bp, Homo sapien
ggcaggtggccggtgctgcttccat

SEQ ID NO: 5273363 - DNA, 25 bp, Homo sapien
gggcaggtggccggtgctgcttcca

SEQ ID NO: 5273364 - DNA, 25 bp, Homo sapien
gagggatttcccctgtcgatgaacc

SEQ ID NO: 5273365 - DNA, 25 bp, Homo sapien
gttgtcttcaccctttgacctcact

SEQ ID NO: 5273366 - DNA, 25 bp, Homo sapien
gatgaaccaacctgagtactgtgca

SEQ ID NO: 5273367 - DNA, 25 bp, Homo sapien
acttgagcctggactgagggatttc

SEQ ID NO: 5273368 - DNA, 25 bp, Homo sapien
tctccagacgagctgaatttctcca

SEQ ID NO: 5273369 - DNA, 25 bp, Homo sapien
aagtgccgtgtttcactgtccccgc

SEQ ID NO: 5273370 - DNA, 25 bp, Homo sapien
tctccaagtgccgtgtttcactgtc

SEQ ID NO: 5273371 - DNA, 25 bp, Homo sapien
cgcccgacatatgccaactggagct

SEQ ID NO: 5273372 - DNA, 25 bp, Homo sapien
gcggggatctgtgtgtggctacaga

SEQ ID NO: 5273373 - DNA, 25 bp, Homo sapien
cggggatctgtgtgtggctacagag

SEQ ID NO: 5273374 - DNA, 25 bp, Homo sapien
ggggatctgtgtgtggctacagagt

SEQ ID NO: 5273375 - DNA, 25 bp, Homo sapien
gggatctgtgtgtggctacagagtg

SEQ ID NO: 5273376 - DNA, 25 bp, Homo sapien
gaggccggatgtgtaaatcatcctg

SEQ ID NO: 5273377 - DNA, 25 bp, Homo sapien
ggccggatgtgtaaatcatcctgca

SEQ ID NO: 5273378 - DNA, 25 bp, Homo sapien
ccggatgtgtaaatcatcctgcagc

SEQ ID NO: 5273379 - DNA, 25 bp, Homo sapien
cagaggccggatgtgtaaatcatcc

SEQ ID NO: 5273380 - DNA, 25 bp, Homo sapien
ctggtggagtacattgtatacagta

SEQ ID NO: 5273381 - DNA, 25 bp, Homo sapien
ggaaaaccagtgagatgatcccatc

SEQ ID NO: 5273382 - DNA, 25 bp, Homo sapien
cagtaggtgcccatgtttcttcttt

SEQ ID NO: 5273383 - DNA, 25 bp, Homo sapien
tgatctctgtcccaattcagaagag

SEQ ID NO: 5273384 - DNA, 25 bp, Homo sapien
gcctgtgcagaatccagatcacttt

SEQ ID NO: 5273385 - DNA, 25 bp, Homo sapien
tctgtaacctacacttagtttctga

SEQ ID NO: 5273386 - DNA, 25 bp, Homo sapien
cttctgtaacctacacttagtttct

SEQ ID NO: 5273387 - DNA, 25 bp, Homo sapien
tgtgttgctcgaatatcactataca

SEQ ID NO: 5273388 - DNA, 25 bp, Homo sapien
ttttggtgtgtgttgctcgaatatc

SEQ ID NO: 5273389 - DNA, 25 bp, Homo sapien
tctggaacatgtccaggaactggaa

SEQ ID NO: 5273390 - DNA, 25 bp, Homo sapien
gagctcagctgtcctcgagtctggg

SEQ ID NO: 5273391 - DNA, 25 bp, Homo sapien
tggaacatgtccaggaactggaagt

SEQ ID NO: 5273392 - DNA, 25 bp, Homo sapien
catctggaacatgtccaggaactgg

SEQ ID NO: 5273393 - DNA, 25 bp, Homo sapien
tctgatggggagtaatttgagggac

SEQ ID NO: 5273394 - DNA, 25 bp, Homo sapien
gctctgatggggagtaatttgaggg

SEQ ID NO: 5273395 - DNA, 25 bp, Homo sapien
ggggagtaatttgagggactctcat

SEQ ID NO: 5273396 - DNA, 25 bp, Homo sapien
atggggagtaatttgagggactctc

SEQ ID NO: 5273397 - DNA, 25 bp, Homo sapien
taatccctgatgtccgtcgggtggg

SEQ ID NO: 5273398 - DNA, 25 bp, Homo sapien
ggccctgtggctttccctctagtca

SEQ ID NO: 5273399 - DNA, 25 bp, Homo sapien
ggtactcacgtgtaacagccttagg

SEQ ID NO: 5273400 - DNA, 25 bp, Homo sapien
gaaattgagaagctcgaagcagaac

SEQ ID NO: 5273401 - DNA, 25 bp, Homo sapien
gatttgatgtaaatgcacactgcag

SEQ ID NO: 5273402 - DNA, 25 bp, Homo sapien
cagcttaatgaagtagcctctctgg

SEQ ID NO: 5273403 - DNA, 25 bp, Homo sapien
attcggcagatggtgtcgtcagaga

SEQ ID NO: 5273404 - DNA, 25 bp, Homo sapien
cgtcagagattatggagttcaagcc

SEQ ID NO: 5273405 - DNA, 25 bp, Homo sapien
cctgtcacagggcgtttggtagaaa

SEQ ID NO: 5273406 - DNA, 25 bp, Homo sapien
tccagggtgtctttccctaacagcc

SEQ ID NO: 5273407 - DNA, 25 bp, Homo sapien
gtctttccctaacagcctgtcacag

SEQ ID NO: 5273408 - DNA, 25 bp, Homo sapien
ggtgtctttccctaacagcctgtca

SEQ ID NO: 5273409 - DNA, 25 bp, Homo sapien
caatccgagtaggtgacagtctcca

SEQ ID NO: 5273410 - DNA, 25 bp, Homo sapien
ccccaatccgagtaggtgacagtct

SEQ ID NO: 5273411 - DNA, 25 bp, Homo sapien
ctaaggccccaatccgagtaggtga

SEQ ID NO: 5273412 - DNA, 25 bp, Homo sapien
ggccccaatccgagtaggtgacagt

SEQ ID NO: 5273413 - DNA, 25 bp, Homo sapien
tgcacaatgcatgattttcagtccc

SEQ ID NO: 5273414 - DNA, 25 bp, Homo sapien
cccgccgccacactcatcttctcat

SEQ ID NO: 5273415 - DNA, 25 bp, Homo sapien
cacactcatcttctcattttgcaca

SEQ ID NO: 5273416 - DNA, 25 bp, Homo sapien
ctcatcttctcattttgcacaatgc

SEQ ID NO: 5273417 - DNA, 25 bp, Homo sapien
cgccatccctgcctgttgctgcact

SEQ ID NO: 5273418 - DNA, 25 bp, Homo sapien
ccgccatccctgcctgttgctgcac

SEQ ID NO: 5273419 - DNA, 25 bp, Homo sapien
tgaaggagttacactagtccaagtt

SEQ ID NO: 5273420 - DNA, 25 bp, Homo sapien
gaaggagttacactagtccaagtta

SEQ ID NO: 5273421 - DNA, 25 bp, Homo sapien
aactggcataatatatgttcttgca

SEQ ID NO: 5273422 - DNA, 25 bp, Homo sapien
cgaggaactggcataatatatgttc

SEQ ID NO: 5273423 - DNA, 25 bp, Homo sapien
ctacgaggaactggcataatatatg

SEQ ID NO: 5273424 - DNA, 25 bp, Homo sapien
actggcataatatatgttcttgcac

SEQ ID NO: 5273425 - DNA, 25 bp, Homo sapien
atagtggacatacgatccaatttct

SEQ ID NO: 5273426 - DNA, 25 bp, Homo sapien
tggacatacgatccaatttcttttt

SEQ ID NO: 5273427 - DNA, 25 bp, Homo sapien
aggagtttaaatagtggaggttctg

SEQ ID NO: 5273428 - DNA, 25 bp, Homo sapien
agtggacatacgatccaatttcttt

SEQ ID NO: 5273429 - DNA, 25 bp, Homo sapien
ttggtaacaaaggtagaagattcca

SEQ ID NO: 5273430 - DNA, 25 bp, Homo sapien
gtttaacagattgtagaaaagcaag

SEQ ID NO: 5273431 - DNA, 25 bp, Homo sapien
tctaatctgtttaacagattgtaga

SEQ ID NO: 5273432 - DNA, 25 bp, Homo sapien
tggtaacaaaggtagaagattccat

SEQ ID NO: 5273433 - DNA, 25 bp, Homo sapien
tgctattgaaaactggttcaaaagg

SEQ ID NO: 5273434 - DNA, 25 bp, Homo sapien
tctgctattgaaaactggttcaaaa

SEQ ID NO: 5273435 - DNA, 25 bp, Homo sapien
gattctgctattgaaaactggttca

SEQ ID NO: 5273436 - DNA, 25 bp, Homo sapien
tattgaaaactggttcaaaaggtga

SEQ ID NO: 5273437 - DNA, 25 bp, Homo sapien
tcatcaccaggtcgggaaagagtgg

SEQ ID NO: 5273438 - DNA, 25 bp, Homo sapien
gagaaactgcatgggcccagggtaa

SEQ ID NO: 5273439 - DNA, 25 bp, Homo sapien
taaagatccgtagatgctgccatgg

SEQ ID NO: 5273440 - DNA, 25 bp, Homo sapien
tcatccttatcctagagtggcggcc

SEQ ID NO: 5273441 - DNA, 25 bp, Homo sapien
tatagatattggagggtctggagta

SEQ ID NO: 5273442 - DNA, 25 bp, Homo sapien
ggctgtagtagtgaggtatagatat

SEQ ID NO: 5273443 - DNA, 25 bp, Homo sapien
gctgtagtagtgaggtatagatatt

SEQ ID NO: 5273444 - DNA, 25 bp, Homo sapien
gctggagtagtgaggtatagatatt

SEQ ID NO: 5273445 - DNA, 25 bp, Homo sapien
cacgtggagagttgtagtactgggg

SEQ ID NO: 5273446 - DNA, 25 bp, Homo sapien
ccgtgtcggcttgggtgcctgcgag

SEQ ID NO: 5273447 - DNA, 25 bp, Homo sapien
gatagagataccgggtgggagggct

SEQ ID NO: 5273448 - DNA, 25 bp, Homo sapien
atgcagaagagcagccgtgtcggct

SEQ ID NO: 5273449 - DNA, 25 bp, Homo sapien
actgacatgtccaagcttatccttt

SEQ ID NO: 5273450 - DNA, 25 bp, Homo sapien
ggttgttggtggctgactgacatgt

SEQ ID NO: 5273451 - DNA, 25 bp, Homo sapien
tgagtcctgggttctccagtgctgc

SEQ ID NO: 5273452 - DNA, 25 bp, Homo sapien
ccttcagctggtgtcagtgtggttg

SEQ ID NO: 5273453 - DNA, 25 bp, Homo sapien
gaaatctaggcgtgcttgctgtcgt

SEQ ID NO: 5273454 - DNA, 25 bp, Homo sapien
tctggctgccaggactgtcaatgac

SEQ ID NO: 5273455 - DNA, 25 bp, Homo sapien
cctgcaagtagagggaaatgtggcc

SEQ ID NO: 5273456 - DNA, 25 bp, Homo sapien
gaagccatagccttagtcctgagaa

SEQ ID NO: 5273457 - DNA, 25 bp, Homo sapien
gcttaaggctgatcttagcaagaca

SEQ ID NO: 5273458 - DNA, 25 bp, Homo sapien
gccaggtacgtgagaaatgttgagt

SEQ ID NO: 5273459 - DNA, 25 bp, Homo sapien
tggatgcagacgttattatacacct

SEQ ID NO: 5273460 - DNA, 25 bp, Homo sapien
caagacatagctgatgacattgtac

SEQ ID NO: 5273461 - DNA, 25 bp, Homo sapien
caaatgtttaacagtcaactctgga

SEQ ID NO: 5273462 - DNA, 25 bp, Homo sapien
taaacctttgacgagcctgggacac

SEQ ID NO: 5273463 - DNA, 25 bp, Homo sapien
tcagtatgcctagggttatgaagct

SEQ ID NO: 5273464 - DNA, 25 bp, Homo sapien
ggtttgcaacctgcctgttctcatg

SEQ ID NO: 5273465 - DNA, 25 bp, Homo sapien
ccactttaggtgacgttgcagctca

SEQ ID NO: 5273466 - DNA, 25 bp, Homo sapien
cgggagaggcctgcactatttgaaa

SEQ ID NO: 5273467 - DNA, 25 bp, Homo sapien
gatcctggtcgcaaaggcgcattcc

SEQ ID NO: 5273468 - DNA, 25 bp, Homo sapien
cacgagcgaacatctgggacatggc

SEQ ID NO: 5273469 - DNA, 25 bp, Homo sapien
tctagcccaggagaatgtttactca

SEQ ID NO: 5273470 - DNA, 25 bp, Homo sapien
cagtagaattctgtggcgcagacca

SEQ ID NO: 5273471 - DNA, 25 bp, Homo sapien
gatcctgcctctacggaattagcta

SEQ ID NO: 5273472 - DNA, 25 bp, Homo sapien
taatactccaacaggaatggtagtc

SEQ ID NO: 5273473 - DNA, 25 bp, Homo sapien
tagtcagccttttgaccacctggtg

SEQ ID NO: 5273474 - DNA, 25 bp, Homo sapien
tataggcttggaaagtgaggcagca

SEQ ID NO: 5273475 - DNA, 25 bp, Homo sapien
taggcatatgatacccacttggact

SEQ ID NO: 5273476 - DNA, 25 bp, Homo sapien
gatgatggctcagaacatgtacaca

SEQ ID NO: 5273477 - DNA, 25 bp, Homo sapien
agtacactatcatactgtacatggg

SEQ ID NO: 5273478 - DNA, 25 bp, Homo sapien
aaaaaagtacactatcatactgtac

SEQ ID NO: 5273479 - DNA, 25 bp, Homo sapien
tactgtacatgggatctttacatac

SEQ ID NO: 5273480 - DNA, 25 bp, Homo sapien
cactatcatactgtacatgggatct

SEQ ID NO: 5273481 - DNA, 25 bp, Homo sapien
taagttggcaatgtcactgttccag

SEQ ID NO: 5273482 - DNA, 25 bp, Homo sapien
catgagcggtaatcttttaaggttc

SEQ ID NO: 5273483 - DNA, 25 bp, Homo sapien
tgataccatgactgggaagccacca

SEQ ID NO: 5273484 - DNA, 25 bp, Homo sapien
actctaggaattgtggttggccagc

SEQ ID NO: 5273485 - DNA, 25 bp, Homo sapien
gtgtcactgagtggacctctgtgac

SEQ ID NO: 5273486 - DNA, 25 bp, Homo sapien
gtggacctctgtgacatctcgtctt

SEQ ID NO: 5273487 - DNA, 25 bp, Homo sapien
ctcaggccttcagtgtgtgtcactg

SEQ ID NO: 5273488 - DNA, 25 bp, Homo sapien
tcaggccttcagtgtgtgtcactga

SEQ ID NO: 5273489 - DNA, 25 bp, Homo sapien
ctcaggccttcagtgtgtgtttgtc

SEQ ID NO: 5273490 - DNA, 25 bp, Homo sapien
gtgtttgtcactgagtggacctctg

SEQ ID NO: 5273491 - DNA, 25 bp, Homo sapien
agtggacctctgtgacatctcgtct

SEQ ID NO: 5273492 - DNA, 25 bp, Homo sapien
tggacctctgtgacatctcgtcttc

SEQ ID NO: 5273493 - DNA, 25 bp, Homo sapien
ctcaggccttcagtgtgtgtttgtc

SEQ ID NO: 5273494 - DNA, 25 bp, Homo sapien
agtgtgtgtttgtcactgagtggac

SEQ ID NO: 5273495 - DNA, 25 bp, Homo sapien
tcagtgtgtgtttgtcactgagtgg

SEQ ID NO: 5273496 - DNA, 25 bp, Homo sapien
cttcagtgtgtgtttgtcactgagt

SEQ ID NO: 5273497 - DNA, 25 bp, Homo sapien
cctcaggccttcagtgtgtgtttgt

SEQ ID NO: 5273498 - DNA, 25 bp, Homo sapien
tctgtgacatctagtcttcctcagg

SEQ ID NO: 5273499 - DNA, 25 bp, Homo sapien
ttcctcaggccttcagtgtgtgttt

SEQ ID NO: 5273500 - DNA, 25 bp, Homo sapien
tcctcaggccttcagtgtgtgtttg

SEQ ID NO: 5273501 - DNA, 25 bp, Homo sapien
cctcaggccttcagtgtgtgtttgt

SEQ ID NO: 5273502 - DNA, 25 bp, Homo sapien
gacacttaggttaagcttattagaa

SEQ ID NO: 5273503 - DNA, 25 bp, Homo sapien
acacttaggttaagcttattagaag

SEQ ID NO: 5273504 - DNA, 25 bp, Homo sapien
cacttaggttaagcttattagaagt

SEQ ID NO: 5273505 - DNA, 25 bp, Homo sapien
tcagcattttacacaatccattttc

SEQ ID NO: 5273506 - DNA, 25 bp, Homo sapien
gttgacttctacttgattgcaggat

SEQ ID NO: 5273507 - DNA, 25 bp, Homo sapien
tttgcataacatttcagcattgcag

SEQ ID NO: 5273508 - DNA, 25 bp, Homo sapien
tagagcaagggataacttcattatt

SEQ ID NO: 5273509 - DNA, 25 bp, Homo sapien
aaaccttgcaaatggcttgtgcttg

SEQ ID NO: 5273510 - DNA, 25 bp, Homo sapien
tctcagatgttaatacagagtcaaa

SEQ ID NO: 5273511 - DNA, 25 bp, Homo sapien
tacagagtcaaaagcggtggataaa

SEQ ID NO: 5273512 - DNA, 25 bp, Homo sapien
cggtggataaaaccttgcaaatggc

SEQ ID NO: 5273513 - DNA, 25 bp, Homo sapien
tctaggagggcaacaacgttcggaa

SEQ ID NO: 5273514 - DNA, 25 bp, Homo sapien
aatttggctagcagaggcacacacc

SEQ ID NO: 5273515 - DNA, 25 bp, Homo sapien
caaaggctgatcacgcagtctagga

SEQ ID NO: 5273516 - DNA, 25 bp, Homo sapien
taaatcccggcacaagcgagtgctg

SEQ ID NO: 5273517 - DNA, 25 bp, Homo sapien
cgtcatcgtaacacaccatccggat

SEQ ID NO: 5273518 - DNA, 25 bp, Homo sapien
tcagagccagtaagctttttcccgc

SEQ ID NO: 5273519 - DNA, 25 bp, Homo sapien
ccggattattaagtagagagcatgc

SEQ ID NO: 5273520 - DNA, 25 bp, Homo sapien
tgcactgataaacccacaggctgta

SEQ ID NO: 5273521 - DNA, 25 bp, Homo sapien
atacttttatgccatacttggaaac

SEQ ID NO: 5273522 - DNA, 25 bp, Homo sapien
tgatacttttatgccatacttggaa

SEQ ID NO: 5273523 - DNA, 25 bp, Homo sapien
tgttgatacttttatgccatacttg

SEQ ID NO: 5273524 - DNA, 25 bp, Homo sapien
tattgatctgatgttgatactttta

SEQ ID NO: 5273525 - DNA, 25 bp, Homo sapien
tcttaagtctgactagtcactttga

SEQ ID NO: 5273526 - DNA, 25 bp, Homo sapien
gactagtcactttgagtatctggcc

SEQ ID NO: 5273527 - DNA, 25 bp, Homo sapien
tgagtatctggccatcgcaagccca

SEQ ID NO: 5273528 - DNA, 25 bp, Homo sapien
catcgcaagcccaaaccctttaaag

SEQ ID NO: 5273529 - DNA, 25 bp, Homo sapien
tgctgatgagcagttactccactca

SEQ ID NO: 5273530 - DNA, 25 bp, Homo sapien
catatcctgcccagatgggaaggcg

SEQ ID NO: 5273531 - DNA, 25 bp, Homo sapien
tgtgggatgatcaggaagcagagcc

SEQ ID NO: 5273532 - DNA, 25 bp, Homo sapien
ctggtgatgccacgcctcagggctt

SEQ ID NO: 5273533 - DNA, 25 bp, Homo sapien
taacgtaagacgctgttggcaacct

SEQ ID NO: 5273534 - DNA, 25 bp, Homo sapien
ggttttgtggaaccactcgcccaca

SEQ ID NO: 5273535 - DNA, 25 bp, Homo sapien
ttgccaatcgcttcccacagtgggt

SEQ ID NO: 5273536 - DNA, 25 bp, Homo sapien
gcaattccaagaaccacggtatggg

SEQ ID NO: 5273537 - DNA, 25 bp, Homo sapien
tacttggaggaactaatctaggtgg

SEQ ID NO: 5273538 - DNA, 25 bp, Homo sapien
ccaatcaatgaggttacgtgaggac

SEQ ID NO: 5273539 - DNA, 25 bp, Homo sapien
ccagcccgagttctctcttaaatgg

SEQ ID NO: 5273540 - DNA, 25 bp, Homo sapien
tatacttgtccaaactaccgtgagt

SEQ ID NO: 5273541 - DNA, 25 bp, Homo sapien
taatatccctcttttaatgcgcaca

SEQ ID NO: 5273542 - DNA, 25 bp, Homo sapien
tagattattgagagacagaactggt

SEQ ID NO: 5273543 - DNA, 25 bp, Homo sapien
tgccctgccacgctgtatttcatat

SEQ ID NO: 5273544 - DNA, 25 bp, Homo sapien
ggaaaccttgcatgaataaacagat

SEQ ID NO: 5273545 - DNA, 25 bp, Homo sapien
gagttggctccccagactctcataa

SEQ ID NO: 5273546 - DNA, 25 bp, Homo sapien
agctcagcgctcacgcacatgtgcg

SEQ ID NO: 5273547 - DNA, 25 bp, Homo sapien
acttcagtcgagagcaagcggagcg

SEQ ID NO: 5273548 - DNA, 25 bp, Homo sapien
ccagtggacccgaggagtgagcatt

SEQ ID NO: 5273549 - DNA, 25 bp, Homo sapien
cacaggtatctgaattattgttgct

SEQ ID NO: 5273550 - DNA, 25 bp, Homo sapien
tctgcacaggtatctgaattattgt

SEQ ID NO: 5273551 - DNA, 25 bp, Homo sapien
acatattttattcgaaattctgcac

SEQ ID NO: 5273552 - DNA, 25 bp, Homo sapien
tatcaggtctaatggcccttcaagg

SEQ ID NO: 5273553 - DNA, 25 bp, Homo sapien
ccagactgtcattagaacataacca

SEQ ID NO: 5273554 - DNA, 25 bp, Homo sapien
cctcagtgactcatggtatactaaa

SEQ ID NO: 5273555 - DNA, 25 bp, Homo sapien
tatacaaaggtctcaataataggaa

SEQ ID NO: 5273556 - DNA, 25 bp, Homo sapien
tgcattacagagtatcctcagtccc

SEQ ID NO: 5273557 - DNA, 25 bp, Homo sapien
tctcttaacgtaacagcaacggttg

SEQ ID NO: 5273558 - DNA, 25 bp, Homo sapien
tatatttccagttagccgccagcta

SEQ ID NO: 5273559 - DNA, 25 bp, Homo sapien
ttacagattcactaggacaggttcc

SEQ ID NO: 5273560 - DNA, 25 bp, Homo sapien
gctaaggttagaaaccacctcttga

SEQ ID NO: 5273561 - DNA, 25 bp, Homo sapien
cacagtgctggatcgtgaaagaccc

SEQ ID NO: 5273562 - DNA, 25 bp, Homo sapien
ctgagcttttggtggaatctgtgtc

SEQ ID NO: 5273563 - DNA, 25 bp, Homo sapien
tctgtgtcgaggctggccacagtgc

SEQ ID NO: 5273564 - DNA, 25 bp, Homo sapien
acagtgctggatcgtgaaagacccc

SEQ ID NO: 5273565 - DNA, 25 bp, Homo sapien
tatttaacagcgtggcacatgtggc

SEQ ID NO: 5273566 - DNA, 25 bp, Homo sapien
cacgcttaaggctgaggaagtggca

SEQ ID NO: 5273567 - DNA, 25 bp, Homo sapien
taaaacaagacattgggccacacag

SEQ ID NO: 5273568 - DNA, 25 bp, Homo sapien
gcaggcacccgggatgaaaggtcta

SEQ ID NO: 5273569 - DNA, 25 bp, Homo sapien
cagacatggagtacagcagaggacc

SEQ ID NO: 5273570 - DNA, 25 bp, Homo sapien
aaaaggctgttgagtcacggcatcc

SEQ ID NO: 5273571 - DNA, 25 bp, Homo sapien
caagtctagacattgccgtgaaggt

SEQ ID NO: 5273572 - DNA, 25 bp, Homo sapien
tgagattaacgtctacaccagcaga

SEQ ID NO: 5273573 - DNA, 25 bp, Homo sapien
gccttttctcgggaggaggggcaga

SEQ ID NO: 5273574 - DNA, 25 bp, Homo sapien
cttctcctgtaggcccctgctcaaa

SEQ ID NO: 5273575 - DNA, 25 bp, Homo sapien
ccagatcttatcatggccccacttc

SEQ ID NO: 5273576 - DNA, 25 bp, Homo sapien
atcttatcatggccccacttctcct

SEQ ID NO: 5273577 - DNA, 25 bp, Homo sapien
tattacttgagacaaaagttgccag

SEQ ID NO: 5273578 - DNA, 25 bp, Homo sapien
ttaaacagagtttggcacacagcca

SEQ ID NO: 5273579 - DNA, 25 bp, Homo sapien
aagttgccagttgaatagctcctca

SEQ ID NO: 5273580 - DNA, 25 bp, Homo sapien
gagtgttcacgtgccattgtccagg

SEQ ID NO: 5273581 - DNA, 25 bp, Homo sapien
tttgggaactgctactactgtgtcg

SEQ ID NO: 5273582 - DNA, 25 bp, Homo sapien
gatttcgctactttgggaactgcta

SEQ ID NO: 5273583 - DNA, 25 bp, Homo sapien
ctactgtgtcgttttttgcccttgc

SEQ ID NO: 5273584 - DNA, 25 bp, Homo sapien
cttagtactgatttcgctactttgg

SEQ ID NO: 5273585 - DNA, 25 bp, Homo sapien
tttcaccaccattgcttgatccaga

SEQ ID NO: 5273586 - DNA, 25 bp, Homo sapien
caccaccattgcttgatccagagaa

SEQ ID NO: 5273587 - DNA, 25 bp, Homo sapien
cattgcttgatccagagaagatccc

SEQ ID NO: 5273588 - DNA, 25 bp, Homo sapien
ccaccattgcttgatccagagaaga

SEQ ID NO: 5273589 - DNA, 25 bp, Homo sapien
tagaattgaacactatttgactgtc

SEQ ID NO: 5273590 - DNA, 25 bp, Homo sapien
cacatacagcggtctgcacagagag

SEQ ID NO: 5273591 - DNA, 25 bp, Homo sapien
tcattctgacctgggtgatgctttt

SEQ ID NO: 5273592 - DNA, 25 bp, Homo sapien
tttgactgtcttcaaaggtcccaca

SEQ ID NO: 5273593 - DNA, 25 bp, Homo sapien
taatggcgctcacgggttaaaatgt

SEQ ID NO: 5273594 - DNA, 25 bp, Homo sapien
gaaccttaccagcacaggacacttg

SEQ ID NO: 5273595 - DNA, 25 bp, Homo sapien
ttccaaggcctgcacgaaactaggt

SEQ ID NO: 5273596 - DNA, 25 bp, Homo sapien
gatagcgaactaactccactggata

SEQ ID NO: 5273597 - DNA, 25 bp, Homo sapien
taagggacccacagcttgagtgtac

SEQ ID NO: 5273598 - DNA, 25 bp, Homo sapien
tttcaaggcccgtttcaggctgcag

SEQ ID NO: 5273599 - DNA, 25 bp, Homo sapien
tgcacgctggtcaaaggcggagctc

SEQ ID NO: 5273600 - DNA, 25 bp, Homo sapien
tgatcacagcgccacgatctgctgt

SEQ ID NO: 5273601 - DNA, 25 bp, Homo sapien
gggacgcgcttactgaagccgagaa

SEQ ID NO: 5273602 - DNA, 25 bp, Homo sapien
gcgattcccatgtaccaaacgccta

SEQ ID NO: 5273603 - DNA, 25 bp, Homo sapien
ttactgaagccgagaactttctggg

SEQ ID NO: 5273604 - DNA, 25 bp, Homo sapien
tgctaggtgcacagatccctctcac

SEQ ID NO: 5273605 - DNA, 25 bp, Homo sapien
gataacagcccctttcaaacgagga

SEQ ID NO: 5273606 - DNA, 25 bp, Homo sapien
taacagcccctttcaaacgaggatg

SEQ ID NO: 5273607 - DNA, 25 bp, Homo sapien
tcaaacgaggatgccaaagcgcccg

SEQ ID NO: 5273608 - DNA, 25 bp, Homo sapien
ccaaagcgcccgaagagtcagtgac

SEQ ID NO: 5273609 - DNA, 25 bp, Homo sapien
accagagtaaggacggatgcggcca

SEQ ID NO: 5273610 - DNA, 25 bp, Homo sapien
agggagagccggctccgaagttcct

SEQ ID NO: 5273611 - DNA, 25 bp, Homo sapien
ggcctagggagagccggctccgaag

SEQ ID NO: 5273612 - DNA, 25 bp, Homo sapien
cagggtcaccagagtaaggacggat

SEQ ID NO: 5273613 - DNA, 25 bp, Homo sapien
cgatctgcgtggttccaagctcctc

SEQ ID NO: 5273614 - DNA, 25 bp, Homo sapien
gctcgggaagctgcagtccgcaagc

SEQ ID NO: 5273615 - DNA, 25 bp, Homo sapien
agacaaccccgaccctgagaggcgg

SEQ ID NO: 5273616 - DNA, 25 bp, Homo sapien
tgtcaccgtgatggagcaccttcca

SEQ ID NO: 5273617 - DNA, 25 bp, Homo sapien
cgcgccgctctcgggaccgtgttcc

SEQ ID NO: 5273618 - DNA, 25 bp, Homo sapien
catccttcctggccgtccgcgccgc

SEQ ID NO: 5273619 - DNA, 25 bp, Homo sapien
ccatccttcctggccgtccgcgccg

SEQ ID NO: 5273620 - DNA, 25 bp, Homo sapien
ctccagcgccggcttttccagccct

SEQ ID NO: 5273621 - DNA, 25 bp, Homo sapien
ttcggggtccgcgtgggagtgccgc

SEQ ID NO: 5273622 - DNA, 25 bp, Homo sapien
cgttcccgctccagcgccggctttt

SEQ ID NO: 5273623 - DNA, 25 bp, Homo sapien
agtgccgcggcctttggcgcccagg

SEQ ID NO: 5273624 - DNA, 25 bp, Homo sapien
ctgctgaggagagcgaccagctgct

SEQ ID NO: 5273625 - DNA, 25 bp, Homo sapien
acactttcgggatgtctgcgattcc

SEQ ID NO: 5273626 - DNA, 25 bp, Homo sapien
gcttcgccctcacactttcgggatg

SEQ ID NO: 5273627 - DNA, 25 bp, Homo sapien
tgtctgcgattcctgctgaggagag

SEQ ID NO: 5273628 - DNA, 25 bp, Homo sapien
tgcaccagcaagatccaagtggatt

SEQ ID NO: 5273629 - DNA, 25 bp, Homo sapien
tagtttggcatctagttgactctcc

SEQ ID NO: 5273630 - DNA, 25 bp, Homo sapien
tactgcatagtacaaggttcgcgtg

SEQ ID NO: 5273631 - DNA, 25 bp, Homo sapien
ggttcgcgtgtatgccactccattg

SEQ ID NO: 5273632 - DNA, 25 bp, Homo sapien
gactgtgcctgtatatgaactttga

SEQ ID NO: 5273633 - DNA, 25 bp, Homo sapien
gcacagagactgtacgaggccctga

SEQ ID NO: 5273634 - DNA, 25 bp, Homo sapien
gatctgccgatagcaaccgctgctg

SEQ ID NO: 5273635 - DNA, 25 bp, Homo sapien
aagtgaagacgatgaatccctccga

SEQ ID NO: 5273636 - DNA, 25 bp, Homo sapien
tctggcctcgcttgttgctcttcgg

SEQ ID NO: 5273637 - DNA, 25 bp, Homo sapien
tcccacccgggtcgagatgcgcggt

SEQ ID NO: 5273638 - DNA, 25 bp, Homo sapien
accaaagtgactgcgtgggtgccca

SEQ ID NO: 5273639 - DNA, 25 bp, Homo sapien
tggagacaccggaggagtggcgggt

SEQ ID NO: 5273640 - DNA, 25 bp, Homo sapien
aatgaagtgatacggtctcggctca

SEQ ID NO: 5273641 - DNA, 25 bp, Homo sapien
cacctggccgtgtattgctatttat

SEQ ID NO: 5273642 - DNA, 25 bp, Homo sapien
caaccgcacctggccgtgtattgct

SEQ ID NO: 5273643 - DNA, 25 bp, Homo sapien
ggaatgaagtgatacggtctcggct

SEQ ID NO: 5273644 - DNA, 25 bp, Homo sapien
taatagtagtattcgtgggtgccat

SEQ ID NO: 5273645 - DNA, 25 bp, Homo sapien
gactgagtgcttgctttgtgaaggc

SEQ ID NO: 5273646 - DNA, 25 bp, Homo sapien
tttgcctagtgtggtgttgcgtgcc

SEQ ID NO: 5273647 - DNA, 25 bp, Homo sapien
gacccttgtaatacttcagtgagag

SEQ ID NO: 5273648 - DNA, 25 bp, Homo sapien
cgtggaatgggatactactcggcaa

SEQ ID NO: 5273649 - DNA, 25 bp, Homo sapien
caagcgcagcaacgtgggtgactct

SEQ ID NO: 5273650 - DNA, 25 bp, Homo sapien
catggaatggtgcactgactcagga

SEQ ID NO: 5273651 - DNA, 25 bp, Homo sapien
gacgcagtcacacatacacttaggg

SEQ ID NO: 5273652 - DNA, 25 bp, Homo sapien
gtaggaggagatatgattagtcaca

SEQ ID NO: 5273653 - DNA, 25 bp, Homo sapien
tagtcacaggtttggttaactgccc

SEQ ID NO: 5273654 - DNA, 25 bp, Homo sapien
taatgcagatatcagtgctacagct

SEQ ID NO: 5273655 - DNA, 25 bp, Homo sapien
taccataaggtacaagttcaagtat

SEQ ID NO: 5273656 - DNA, 25 bp, Homo sapien
gaagggccaaaccacacaagaactg

SEQ ID NO: 5273657 - DNA, 25 bp, Homo sapien
caagaactgtttacctgcaggaagt

SEQ ID NO: 5273658 - DNA, 25 bp, Homo sapien
aatcagggccctaaacagttggtag

SEQ ID NO: 5273659 - DNA, 25 bp, Homo sapien
tgtatagccctcactgtaaggtagg

SEQ ID NO: 5273660 - DNA, 25 bp, Homo sapien
aaacccatcctcgtccatatgtgag

SEQ ID NO: 5273661 - DNA, 25 bp, Homo sapien
ttcacttctggtgaccggatggtcc

SEQ ID NO: 5273662 - DNA, 25 bp, Homo sapien
gagatcctcaaatgacttggcagct

SEQ ID NO: 5273663 - DNA, 25 bp, Homo sapien
tgtcaacacgattctgacgctgcag

SEQ ID NO: 5273664 - DNA, 25 bp, Homo sapien
cagagattcatactgtttatccaat

SEQ ID NO: 5273665 - DNA, 25 bp, Homo sapien
aacagagacagagattcatactgtt

SEQ ID NO: 5273666 - DNA, 25 bp, Homo sapien
gacagagattcatactgtttatcca

SEQ ID NO: 5273667 - DNA, 25 bp, Homo sapien
cagagacagagattcatactgttta

SEQ ID NO: 5273668 - DNA, 25 bp, Homo sapien
ccaggacagacccaacgatgttgtc

SEQ ID NO: 5273669 - DNA, 25 bp, Homo sapien
ccaacgatgttgtctgctaaaaact

SEQ ID NO: 5273670 - DNA, 25 bp, Homo sapien
acacaatggacaagaatgctgaaag

SEQ ID NO: 5273671 - DNA, 25 bp, Homo sapien
gacagacccaacgatgttgtctgct

SEQ ID NO: 5273672 - DNA, 25 bp, Homo sapien
cagagctgctggctagacatactac

SEQ ID NO: 5273673 - DNA, 25 bp, Homo sapien
caagtacttcacaaatctaaagtga

SEQ ID NO: 5273674 - DNA, 25 bp, Homo sapien
catactaccgagagcagaatgtctg

SEQ ID NO: 5273675 - DNA, 25 bp, Homo sapien
aacagttaatgtcttgaccaagtac

SEQ ID NO: 5273676 - DNA, 25 bp, Homo sapien
caaaagtattgatgctcagctggtc

SEQ ID NO: 5273677 - DNA, 25 bp, Homo sapien
cagctggtcaatgaaatcccaaaat

SEQ ID NO: 5273678 - DNA, 25 bp, Homo sapien
caaaatcgttcaattacatcctgta

SEQ ID NO: 5273679 - DNA, 25 bp, Homo sapien
cctgtactcgtttctcacatttgcc

SEQ ID NO: 5273680 - DNA, 25 bp, Homo sapien
tcatgtcacaaaatcctactgtaca

SEQ ID NO: 5273681 - DNA, 25 bp, Homo sapien
agcacaccttgcaggagttgtcagt

SEQ ID NO: 5273682 - DNA, 25 bp, Homo sapien
ttcagcatcgacatagggcacacag

SEQ ID NO: 5273683 - DNA, 25 bp, Homo sapien
aatcctactgtacagggctttcctt

SEQ ID NO: 5273684 - DNA, 25 bp, Homo sapien
ggaacagagaacacgcattgacagc

SEQ ID NO: 5273685 - DNA, 25 bp, Homo sapien
aggagtagtttctgaggtcacactc

SEQ ID NO: 5273686 - DNA, 25 bp, Homo sapien
aatagctaatactatccatagcccc

SEQ ID NO: 5273687 - DNA, 25 bp, Homo sapien
ctccctgaccatgctcccaaagagg

SEQ ID NO: 5273688 - DNA, 25 bp, Homo sapien
tctgtccttccagagcaccccaagc

SEQ ID NO: 5273689 - DNA, 25 bp, Homo sapien
cttttactgtgtcgggctctgtcct

SEQ ID NO: 5273690 - DNA, 25 bp, Homo sapien
tccttccagagcaccccaagcctct

SEQ ID NO: 5273691 - DNA, 25 bp, Homo sapien
ttccagagcaccccaagcctcttgg

SEQ ID NO: 5273692 - DNA, 25 bp, Homo sapien
aatggaggaagggagcctggcagac

SEQ ID NO: 5273693 - DNA, 25 bp, Homo sapien
tgctggactgggaataaaactgctc

SEQ ID NO: 5273694 - DNA, 25 bp, Homo sapien
ctgctggactgggaataaaactgct

SEQ ID NO: 5273695 - DNA, 25 bp, Homo sapien
cctggcagacaaaggccatgttttc

SEQ ID NO: 5273696 - DNA, 25 bp, Homo sapien
tccctctcgcagaaagggatgcatt

SEQ ID NO: 5273697 - DNA, 25 bp, Homo sapien
agctgctgttccctctcgcagaaag

SEQ ID NO: 5273698 - DNA, 25 bp, Homo sapien
catccttacacttgccaagatccaa

SEQ ID NO: 5273699 - DNA, 25 bp, Homo sapien
agcaaacagtgtcatcttcagcatt

SEQ ID NO: 5273700 - DNA, 25 bp, Homo sapien
tgcacacggaaaaccaaaatcaagc

SEQ ID NO: 5273701 - DNA, 25 bp, Homo sapien
catgggcaacatgtcatactatgca

SEQ ID NO: 5273702 - DNA, 25 bp, Homo sapien
tgtgatagtgacagatcccaaaaga

SEQ ID NO: 5273703 - DNA, 25 bp, Homo sapien
caggttcctaacatttggcaaagta

SEQ ID NO: 5273704 - DNA, 25 bp, Homo sapien
gtttttacagcaaggactgttcctg

SEQ ID NO: 5273705 - DNA, 25 bp, Homo sapien
agtagcattaatcgcctcctggcac

SEQ ID NO: 5273706 - DNA, 25 bp, Homo sapien
gtaggacacgcctttgcaagtagca

SEQ ID NO: 5273707 - DNA, 25 bp, Homo sapien
ctgtgcagtaggacacgcctttgca

SEQ ID NO: 5273708 - DNA, 25 bp, Homo sapien
caaggcaatccatagctaagacact

SEQ ID NO: 5273709 - DNA, 25 bp, Homo sapien
aatccatagctaagacactcggcag

SEQ ID NO: 5273710 - DNA, 25 bp, Homo sapien
aggtggggccacaaggcaatccata

SEQ ID NO: 5273711 - DNA, 25 bp, Homo sapien
gggccacaaggcaatccatagctaa

SEQ ID NO: 5273712 - DNA, 25 bp, Homo sapien
gctgcgttcttgaaaacactcctgg

SEQ ID NO: 5273713 - DNA, 25 bp, Homo sapien
gatacatgatgccaggatcacactc

SEQ ID NO: 5273714 - DNA, 25 bp, Homo sapien
gcagcaggtgtcgttgttcagatac

SEQ ID NO: 5273715 - DNA, 25 bp, Homo sapien
tcaacgtgcagtcgctgttgcagca

SEQ ID NO: 5273716 - DNA, 25 bp, Homo sapien
gacaggatggtatcatgaatgcccc

SEQ ID NO: 5273717 - DNA, 25 bp, Homo sapien
tacagggctgttttgaagagcccca

SEQ ID NO: 5273718 - DNA, 25 bp, Homo sapien
tgacactatcctcataaccaagaag

SEQ ID NO: 5273719 - DNA, 25 bp, Homo sapien
aaacagtatgcaatatggtagccac

SEQ ID NO: 5273720 - DNA, 25 bp, Homo sapien
gatacatgacatatttccctccctg

SEQ ID NO: 5273721 - DNA, 25 bp, Homo sapien
cactcacagctatgggatacatgac

SEQ ID NO: 5273722 - DNA, 25 bp, Homo sapien
ggcacattctgctagaccatccgga

SEQ ID NO: 5273723 - DNA, 25 bp, Homo sapien
catgagttgtaaccaggtcagcttc

SEQ ID NO: 5273724 - DNA, 25 bp, Homo sapien
ccaattatatgaatttaacagaata

SEQ ID NO: 5273725 - DNA, 25 bp, Homo sapien
ccggactatgattcttctaccaatt

SEQ ID NO: 5273726 - DNA, 25 bp, Homo sapien
atatgaatttaacagaataagtagg

SEQ ID NO: 5273727 - DNA, 25 bp, Homo sapien
aaaagagtaataaccggactatgat

SEQ ID NO: 5273728 - DNA, 25 bp, Homo sapien
tgtgtttcaacaaatgcataatgtc

SEQ ID NO: 5273729 - DNA, 25 bp, Homo sapien
gtatcatacagagtaattaccctgc

SEQ ID NO: 5273730 - DNA, 25 bp, Homo sapien
ttttatagtctgcatggttttgtct

SEQ ID NO: 5273731 - DNA, 25 bp, Homo sapien
agcaatcactgatcattttatagtc

SEQ ID NO: 5273732 - DNA, 25 bp, Homo sapien
taattctttgtgctcgtcaaaccac

SEQ ID NO: 5273733 - DNA, 25 bp, Homo sapien
ttcttcccaactgggctataataag

SEQ ID NO: 5273734 - DNA, 25 bp, Homo sapien
taccataattctttgtgctcgtcaa

SEQ ID NO: 5273735 - DNA, 25 bp, Homo sapien
tgtgctcgtcaaaccactattcaaa

SEQ ID NO: 5273736 - DNA, 25 bp, Homo sapien
tagatgcttcctcagctatatcaaa

SEQ ID NO: 5273737 - DNA, 25 bp, Homo sapien
ccatggctgtttgctctgggagagc

SEQ ID NO: 5273738 - DNA, 25 bp, Homo sapien
taatccaagagttcccatatcaaaa

SEQ ID NO: 5273739 - DNA, 25 bp, Homo sapien
gagagccaacataagctaatccaag

SEQ ID NO: 5273740 - DNA, 25 bp, Homo sapien
catgttgtagtgcttttcaccaggt

SEQ ID NO: 5273741 - DNA, 25 bp, Homo sapien
ggttttacctcttgtggagacttga

SEQ ID NO: 5273742 - DNA, 25 bp, Homo sapien
cttgtggagacttgagaatgcgaat

SEQ ID NO: 5273743 - DNA, 25 bp, Homo sapien
ttcacatcccaagcatccttttctt

SEQ ID NO: 5273744 - DNA, 25 bp, Homo sapien
attatcccatgaagtgttccgatag

SEQ ID NO: 5273745 - DNA, 25 bp, Homo sapien
ctgctctatctgtattccatagcct

SEQ ID NO: 5273746 - DNA, 25 bp, Homo sapien
gaagtgttccgatagatgtcatcaa

SEQ ID NO: 5273747 - DNA, 25 bp, Homo sapien
gtcatcaactctgtcaattagctct

SEQ ID NO: 5273748 - DNA, 25 bp, Homo sapien
ttacctctcctggcaatgcaatata

SEQ ID NO: 5273749 - DNA, 25 bp, Homo sapien
tctttacctctcctggcaatgcaat

SEQ ID NO: 5273750 - DNA, 25 bp, Homo sapien
agacattatgtaactctttacctct

SEQ ID NO: 5273751 - DNA, 25 bp, Homo sapien
gacattatgtaactctttacctctc

SEQ ID NO: 5273752 - DNA, 25 bp, Homo sapien
tgctttggcccgggcaatagaggct

SEQ ID NO: 5273753 - DNA, 25 bp, Homo sapien
tggcccgggcaatagaggctgcagc

SEQ ID NO: 5273754 - DNA, 25 bp, Homo sapien
tttggcccgggcaatagaggctgca

SEQ ID NO: 5273755 - DNA, 25 bp, Homo sapien
gcccgggcaatagaggctgcagcaa

SEQ ID NO: 5273756 - DNA, 25 bp, Homo sapien
cacgtgttcttcatgggatctgggt

SEQ ID NO: 5273757 - DNA, 25 bp, Homo sapien
gaagcgatgatctgctaccaccaat

SEQ ID NO: 5273758 - DNA, 25 bp, Homo sapien
tcttcttttcactcgatgaacaagc

SEQ ID NO: 5273759 - DNA, 25 bp, Homo sapien
gcccatgtatctgtagaagcgatga

SEQ ID NO: 5273760 - DNA, 25 bp, Homo sapien
taaagtctaatctctgttgttccca

SEQ ID NO: 5273761 - DNA, 25 bp, Homo sapien
cacccctactgaagtcaattgtagt

SEQ ID NO: 5273762 - DNA, 25 bp, Homo sapien
ttccctcagatcactccatttccct

SEQ ID NO: 5273763 - DNA, 25 bp, Homo sapien
caaataacaaccacccctactgaag

SEQ ID NO: 5273764 - DNA, 25 bp, Homo sapien
taacccttttgggagcaactcttca

SEQ ID NO: 5273765 - DNA, 25 bp, Homo sapien
gtctttggtatcattaacaaatctc

SEQ ID NO: 5273766 - DNA, 25 bp, Homo sapien
taaccacacacttttggagactgca

SEQ ID NO: 5273767 - DNA, 25 bp, Homo sapien
gactgcaaacgtgaaacattcttga

SEQ ID NO: 5273768 - DNA, 25 bp, Homo sapien
aaggatacagcgtttctttttcagg

SEQ ID NO: 5273769 - DNA, 25 bp, Homo sapien
gatgacccaaacagacaaatctaaa

SEQ ID NO: 5273770 - DNA, 25 bp, Homo sapien
aatatacgaaaactgccgggcgcga

SEQ ID NO: 5273771 - DNA, 25 bp, Homo sapien
gacagtagatccctggttgcctaga

SEQ ID NO: 5273772 - DNA, 25 bp, Homo sapien
gtgtgtgaacagccaatcaccacac

SEQ ID NO: 5273773 - DNA, 25 bp, Homo sapien
gtgtgaacagccaatcaccacactt

SEQ ID NO: 5273774 - DNA, 25 bp, Homo sapien
tgtgtgaacagccaatcaccacact

SEQ ID NO: 5273775 - DNA, 25 bp, Homo sapien
tctatgttatattcggccccatctg

SEQ ID NO: 5273776 - DNA, 25 bp, Homo sapien
tatgtgggctagaaccctagagtca

SEQ ID NO: 5273777 - DNA, 25 bp, Homo sapien
cccatctgtgttgattctgattata

SEQ ID NO: 5273778 - DNA, 25 bp, Homo sapien
catcatcatctcttatgtgggctag

SEQ ID NO: 5273779 - DNA, 25 bp, Homo sapien
ccaccacgaccttgaaattttgtga

SEQ ID NO: 5273780 - DNA, 25 bp, Homo sapien
ccattttacagtgtactcgctttcg

SEQ ID NO: 5273781 - DNA, 25 bp, Homo sapien
aaaacgttcagtacttgatgtcagg

SEQ ID NO: 5273782 - DNA, 25 bp, Homo sapien
acgtgtccagtgaagaagtcctgcc

SEQ ID NO: 5273783 - DNA, 25 bp, Homo sapien
gctgagcttgggcaaactcctgagc

SEQ ID NO: 5273784 - DNA, 25 bp, Homo sapien
ctgagcttgggcaaactcctgagct

SEQ ID NO: 5273785 - DNA, 25 bp, Homo sapien
aggctgagcttgggcaaactcctga

SEQ ID NO: 5273786 - DNA, 25 bp, Homo sapien
ttttgccaaaccaagcccccagtgc

SEQ ID NO: 5273787 - DNA, 25 bp, Homo sapien
tttcttaccgaatgctgctggatat

SEQ ID NO: 5273788 - DNA, 25 bp, Homo sapien
aaaaagttagtagtgtttctacatg

SEQ ID NO: 5273789 - DNA, 25 bp, Homo sapien
gagaatatcgtagtctgagagcaaa

SEQ ID NO: 5273790 - DNA, 25 bp, Homo sapien
tagtgtttctacatgtgttgaagtc

SEQ ID NO: 5273791 - DNA, 25 bp, Homo sapien
aaataatctgtggttgtctggcatc

SEQ ID NO: 5273792 - DNA, 25 bp, Homo sapien
ctaggaaatcctgtgaaagtcaaaa

SEQ ID NO: 5273793 - DNA, 25 bp, Homo sapien
tcaaccacaattggccttggaggaa

SEQ ID NO: 5273794 - DNA, 25 bp, Homo sapien
ctgtctcggccacccacataaataa

SEQ ID NO: 5273795 - DNA, 25 bp, Homo sapien
tttgtactgacttaccacttctcag

SEQ ID NO: 5273796 - DNA, 25 bp, Homo sapien
accttacgatctgcaaatgttatga

SEQ ID NO: 5273797 - DNA, 25 bp, Homo sapien
catgcttatttttacctacgaacaa

SEQ ID NO: 5273798 - DNA, 25 bp, Homo sapien
aaacagttgtgtcagggtggtgcaa

SEQ ID NO: 5273799 - DNA, 25 bp, Homo sapien
tcatccggaggtcgcggcgccagca

SEQ ID NO: 5273800 - DNA, 25 bp, Homo sapien
ggtcaggaataggagagactgcctc

SEQ ID NO: 5273801 - DNA, 25 bp, Homo sapien
cgccagcacgaaaggaaccacgctg

SEQ ID NO: 5273802 - DNA, 25 bp, Homo sapien
cgaagcccgggtcatccggaggtcg

SEQ ID NO: 5273803 - DNA, 25 bp, Homo sapien
gcgccgcctactgggaagattctac

SEQ ID NO: 5273804 - DNA, 25 bp, Homo sapien
ccggcctagcccctcaatcctcttt

SEQ ID NO: 5273805 - DNA, 25 bp, Homo sapien
gaaaactgctcacatcgggggagga

SEQ ID NO: 5273806 - DNA, 25 bp, Homo sapien
ctctgggcagccttcgcctgacggg

SEQ ID NO: 5273807 - DNA, 25 bp, Homo sapien
gcaccacccacagccggaagccggc

SEQ ID NO: 5273808 - DNA, 25 bp, Homo sapien
agtgcaggtggcgttaccaaaggcc

SEQ ID NO: 5273809 - DNA, 25 bp, Homo sapien
ctcgacgcccccagaagtgcaggtg

SEQ ID NO: 5273810 - DNA, 25 bp, Homo sapien
gtggcgttaccaaaggccggctcag

SEQ ID NO: 5273811 - DNA, 25 bp, Homo sapien
gagaccaagtcacagtaggtttgga

SEQ ID NO: 5273812 - DNA, 25 bp, Homo sapien
tgtcctgggccagacatactgtcaa

SEQ ID NO: 5273813 - DNA, 25 bp, Homo sapien
gaaagcttggtattggactgactcc

SEQ ID NO: 5273814 - DNA, 25 bp, Homo sapien
ttggacccaaatgtatgctgctcct

SEQ ID NO: 5273815 - DNA, 25 bp, Homo sapien
tcccattctgaaactgacagttctc

SEQ ID NO: 5273816 - DNA, 25 bp, Homo sapien
gatgcactcttctcccattctgaaa

SEQ ID NO: 5273817 - DNA, 25 bp, Homo sapien
gacagttctctttacaaactgtgta

SEQ ID NO: 5273818 - DNA, 25 bp, Homo sapien
ttcttacgcgttcctccaggatgca

SEQ ID NO: 5273819 - DNA, 25 bp, Homo sapien
tccccacactataaacttgagaggc

SEQ ID NO: 5273820 - DNA, 25 bp, Homo sapien
cttgagaggcaaggccaactctttt

SEQ ID NO: 5273821 - DNA, 25 bp, Homo sapien
tgagctgccgccatggaacgggcat

SEQ ID NO: 5273822 - DNA, 25 bp, Homo sapien
gagttttagcgtgtgtgatgtccca

SEQ ID NO: 5273823 - DNA, 25 bp, Homo sapien
cagataaatatgaactaaagccttc

SEQ ID NO: 5273824 - DNA, 25 bp, Homo sapien
gacaagtgtgtcacaatgcacaatg

SEQ ID NO: 5273825 - DNA, 25 bp, Homo sapien
tccctagacaagtgtgtcacaatgc

SEQ ID NO: 5273826 - DNA, 25 bp, Homo sapien
catccctagacaagtgtgtcacaat

SEQ ID NO: 5273827 - DNA, 25 bp, Homo sapien
tagacaagtgtgtcacaatgcacaa

SEQ ID NO: 5273828 - DNA, 25 bp, Homo sapien
aaactggacaccctctcacatgtgc

SEQ ID NO: 5273829 - DNA, 25 bp, Homo sapien
acaaactggacaccctctcacatgt

SEQ ID NO: 5273830 - DNA, 25 bp, Homo sapien
aactggacaccctctcacatgtgca

SEQ ID NO: 5273831 - DNA, 25 bp, Homo sapien
caaactggacaccctctcacatgtg

SEQ ID NO: 5273832 - DNA, 25 bp, Homo sapien
cacagatacacaagacctccgtatg

SEQ ID NO: 5273833 - DNA, 25 bp, Homo sapien
cctccgtatgtgatacaggagccat

SEQ ID NO: 5273834 - DNA, 25 bp, Homo sapien
tccattcaatctaatacttccggat

SEQ ID NO: 5273835 - DNA, 25 bp, Homo sapien
aatttgtgacccctagacagagatg

SEQ ID NO: 5273836 - DNA, 25 bp, Homo sapien
acagcagtactgcacaccaggaagg

SEQ ID NO: 5273837 - DNA, 25 bp, Homo sapien
tctacagcagtactgcacaccagga

SEQ ID NO: 5273838 - DNA, 25 bp, Homo sapien
ataagtgtttgggagttacttatgt

SEQ ID NO: 5273839 - DNA, 25 bp, Homo sapien
cagcagtactgcacaccaggaaggc

SEQ ID NO: 5273840 - DNA, 25 bp, Homo sapien
ttagttttcagccccttctgccgca

SEQ ID NO: 5273841 - DNA, 25 bp, Homo sapien
ttctgccgcatcacattcttctcct

SEQ ID NO: 5273842 - DNA, 25 bp, Homo sapien
cccttctgccgcatcacattcttct

SEQ ID NO: 5273843 - DNA, 25 bp, Homo sapien
ttttcagccccttctgccgcatcac

SEQ ID NO: 5273844 - DNA, 25 bp, Homo sapien
ttctcatggctagaaatgcagggtc

SEQ ID NO: 5273845 - DNA, 25 bp, Homo sapien
caattgcctatctaagaagcaggga

SEQ ID NO: 5273846 - DNA, 25 bp, Homo sapien
gctgggaggacgagatctatattaa

SEQ ID NO: 5273847 - DNA, 25 bp, Homo sapien
tctcaggaaggtctgataaaatgcc

SEQ ID NO: 5273848 - DNA, 25 bp, Homo sapien
tactttcagctcgtatgtatcttcc

SEQ ID NO: 5273849 - DNA, 25 bp, Homo sapien
atactttcagctcgtatgtatcttc

SEQ ID NO: 5273850 - DNA, 25 bp, Homo sapien
catactttcagctcgtatgtatctt

SEQ ID NO: 5273851 - DNA, 25 bp, Homo sapien
tcatactttcagctcgtatgtatct

SEQ ID NO: 5273852 - DNA, 25 bp, Homo sapien
gacacgaagtccaaaataaaatata

SEQ ID NO: 5273853 - DNA, 25 bp, Homo sapien
agacacgaagtccaaaataaaatat

SEQ ID NO: 5273854 - DNA, 25 bp, Homo sapien
ttgtctctaagcaactgcatgatga

SEQ ID NO: 5273855 - DNA, 25 bp, Homo sapien
caactgcatgatgagggtgctgtct

SEQ ID NO: 5273856 - DNA, 25 bp, Homo sapien
tgttaggttgtctctaagcaactgc

SEQ ID NO: 5273857 - DNA, 25 bp, Homo sapien
taagcaactgcatgatgagggtgct

SEQ ID NO: 5273858 - DNA, 25 bp, Homo sapien
atattaatatccatggtaaaatatg

SEQ ID NO: 5273859 - DNA, 25 bp, Homo sapien
taatatccatggtaaaatatgtgca

SEQ ID NO: 5273860 - DNA, 25 bp, Homo sapien
attaatatccatggtaaaatatgtg

SEQ ID NO: 5273861 - DNA, 25 bp, Homo sapien
tgataaatattaatatccatggtaa

SEQ ID NO: 5273862 - DNA, 25 bp, Homo sapien
caagctctgggttattaagaatctc

SEQ ID NO: 5273863 - DNA, 25 bp, Homo sapien
gccccaggcggattgggtgtgtggg

SEQ ID NO: 5273864 - DNA, 25 bp, Homo sapien
ttttagccagcgtgcaggcaagctc

SEQ ID NO: 5273865 - DNA, 25 bp, Homo sapien
gggtgtgtgggttgcatctctttct

SEQ ID NO: 5273866 - DNA, 25 bp, Homo sapien
tagaatgttgcttacatataaacag

SEQ ID NO: 5273867 - DNA, 25 bp, Homo sapien
accagtttagaatgttgcttacata

SEQ ID NO: 5273868 - DNA, 25 bp, Homo sapien
agggagatcttatccctgtctctac

SEQ ID NO: 5273869 - DNA, 25 bp, Homo sapien
caatattgtgtactgggtatttaag

SEQ ID NO: 5273870 - DNA, 25 bp, Homo sapien
gaagcaccagtgtctcagcaattag

SEQ ID NO: 5273871 - DNA, 25 bp, Homo sapien
tacgtgtgagacctgaaagtgccaa

SEQ ID NO: 5273872 - DNA, 25 bp, Homo sapien
tcgcagcctatcagaatgtacacag

SEQ ID NO: 5273873 - DNA, 25 bp, Homo sapien
gacagcctatctatgaatcgcagcc

SEQ ID NO: 5273874 - DNA, 25 bp, Homo sapien
gttttcgatcatcaccacacgcaac

SEQ ID NO: 5273875 - DNA, 25 bp, Homo sapien
atcaccacacgcaacttcagcaagg

SEQ ID NO: 5273876 - DNA, 25 bp, Homo sapien
cgatcatcaccacacgcaacttcag

SEQ ID NO: 5273877 - DNA, 25 bp, Homo sapien
tttcgatcatcaccacacgcaactt

SEQ ID NO: 5273878 - DNA, 25 bp, Homo sapien
atcatgctactgcactgcagcccgg

SEQ ID NO: 5273879 - DNA, 25 bp, Homo sapien
gatcatgctactgcactgcagcccg

SEQ ID NO: 5273880 - DNA, 25 bp, Homo sapien
agatcatgctactgcactgcagccc

SEQ ID NO: 5273881 - DNA, 25 bp, Homo sapien
ggatttagcggacaccacacagaag

SEQ ID NO: 5273882 - DNA, 25 bp, Homo sapien
tgcgactgatcctatatgctgtggg

SEQ ID NO: 5273883 - DNA, 25 bp, Homo sapien
tcaagttgcaaagcctaatcagatc

SEQ ID NO: 5273884 - DNA, 25 bp, Homo sapien
agtgaccatgtgacctggctgccca

SEQ ID NO: 5273885 - DNA, 25 bp, Homo sapien
tttacccaggctggtaactactgag

SEQ ID NO: 5273886 - DNA, 25 bp, Homo sapien
cagcagcaacttctaggctcgagta

SEQ ID NO: 5273887 - DNA, 25 bp, Homo sapien
tgcagcagcaacttctaggctcgag

SEQ ID NO: 5273888 - DNA, 25 bp, Homo sapien
cagcaacttctaggctcgagtaatc

SEQ ID NO: 5273889 - DNA, 25 bp, Homo sapien
ggtatttccaactatgcaccaaatg

SEQ ID NO: 5273890 - DNA, 25 bp, Homo sapien
cactagcaatgcataaatgttccca

SEQ ID NO: 5273891 - DNA, 25 bp, Homo sapien
tctcaacatctttctgaacccagtg

SEQ ID NO: 5273892 - DNA, 25 bp, Homo sapien
acttaagctgcttccaatcttggta

SEQ ID NO: 5273893 - DNA, 25 bp, Homo sapien
ttgtctacctgaccatatgaaatgg

SEQ ID NO: 5273894 - DNA, 25 bp, Homo sapien
agaggagacttttagttgaaatgca

SEQ ID NO: 5273895 - DNA, 25 bp, Homo sapien
taccaacacttctgaccgacatgag

SEQ ID NO: 5273896 - DNA, 25 bp, Homo sapien
agtagactgaatttcaccatgctgg

SEQ ID NO: 5273897 - DNA, 25 bp, Homo sapien
taagaaggatcaccttccagagatg

SEQ ID NO: 5273898 - DNA, 25 bp, Homo sapien
tgtacagctgatcgtcaacaacaaa

SEQ ID NO: 5273899 - DNA, 25 bp, Homo sapien
gaaatgttcagaaacctgtcctgga

SEQ ID NO: 5273900 - DNA, 25 bp, Homo sapien
aaatcctacctgctgagttattcaa

SEQ ID NO: 5273901 - DNA, 25 bp, Homo sapien
cagatctttagctggtttccaggaa

SEQ ID NO: 5273902 - DNA, 25 bp, Homo sapien
tctagctagacaagaggttcaggta

SEQ ID NO: 5273903 - DNA, 25 bp, Homo sapien
tggactaatccaaggcatctcaacc

SEQ ID NO: 5273904 - DNA, 25 bp, Homo sapien
gagtgtcctgtgcaccgcatgatgt

SEQ ID NO: 5273905 - DNA, 25 bp, Homo sapien
tcaggtaagatatcaacacgttagg

SEQ ID NO: 5273906 - DNA, 25 bp, Homo sapien
tctccccgattgtagcaatttgcct

SEQ ID NO: 5273907 - DNA, 25 bp, Homo sapien
acctctgtctccccgattgtagcaa

SEQ ID NO: 5273908 - DNA, 25 bp, Homo sapien
cccgattgtagcaatttgcctcagc

SEQ ID NO: 5273909 - DNA, 25 bp, Homo sapien
tgtctccccgattgtagcaatttgc

SEQ ID NO: 5273910 - DNA, 25 bp, Homo sapien
agccccaaaccatgagaactcgaag

SEQ ID NO: 5273911 - DNA, 25 bp, Homo sapien
aaattttgctcttgccaacactcag

SEQ ID NO: 5273912 - DNA, 25 bp, Homo sapien
ggctaggacctgcattactctacag

SEQ ID NO: 5273913 - DNA, 25 bp, Homo sapien
gagagacagctctaactggatgaaa

SEQ ID NO: 5273914 - DNA, 25 bp, Homo sapien
cagggactggaagctaagagcacac

SEQ ID NO: 5273915 - DNA, 25 bp, Homo sapien
taatacgagcaattcagtccaaaaa

SEQ ID NO: 5273916 - DNA, 25 bp, Homo sapien
taagagcacacggaagaatacaacg

SEQ ID NO: 5273917 - DNA, 25 bp, Homo sapien
tcagccatgattttgtccggatcgc

SEQ ID NO: 5273918 - DNA, 25 bp, Homo sapien
aacaatcgtccttgctaagactgga

SEQ ID NO: 5273919 - DNA, 25 bp, Homo sapien
tgaaaaatccccagtctagtatgct

SEQ ID NO: 5273920 - DNA, 25 bp, Homo sapien
gactggacagttcaaaacctggaaa

SEQ ID NO: 5273921 - DNA, 25 bp, Homo sapien
tctgatgagatgaagaaaggcggct

SEQ ID NO: 5273922 - DNA, 25 bp, Homo sapien
ctcacagatctcaggacgcagtctc

SEQ ID NO: 5273923 - DNA, 25 bp, Homo sapien
gcagtctccccgcacaagaaactta

SEQ ID NO: 5273924 - DNA, 25 bp, Homo sapien
aaaacgcctttcagtctcgcagaga

SEQ ID NO: 5273925 - DNA, 25 bp, Homo sapien
tgcctgaagcttgtgaaccgactga

SEQ ID NO: 5273926 - DNA, 25 bp, Homo sapien
tttccaagttccatcgtttggtagc

SEQ ID NO: 5273927 - DNA, 25 bp, Homo sapien
gatgtttccaagttccatcgtttgg

SEQ ID NO: 5273928 - DNA, 25 bp, Homo sapien
agttccatcgtttggtagctaccca

SEQ ID NO: 5273929 - DNA, 25 bp, Homo sapien
ttggatgtttccaagttccatcgtt

SEQ ID NO: 5273930 - DNA, 25 bp, Homo sapien
tcacgtttgtttccgtgcccgcgaa

SEQ ID NO: 5273931 - DNA, 25 bp, Homo sapien
gagtctcaacaaccggagggacaca

SEQ ID NO: 5273932 - DNA, 25 bp, Homo sapien
aatgaaaagcatctcacaaaaggcc

SEQ ID NO: 5273933 - DNA, 25 bp, Homo sapien
gaaaagcggcttcttgagtctcaac

SEQ ID NO: 5273934 - DNA, 25 bp, Homo sapien
tcggtcttctgctcgatgctagaga

SEQ ID NO: 5273935 - DNA, 25 bp, Homo sapien
tcgatgctagagatgaccctccagg

SEQ ID NO: 5273936 - DNA, 25 bp, Homo sapien
gctcggcgccctgctcggtcactgc

SEQ ID NO: 5273937 - DNA, 25 bp, Homo sapien
tcttctgctcgatgctagagatgac

SEQ ID NO: 5273938 - DNA, 25 bp, Homo sapien
cgagcgccgacccgcagcgggagga

SEQ ID NO: 5273939 - DNA, 25 bp, Homo sapien
ttttgtctcccgcacacgcggccgc

SEQ ID NO: 5273940 - DNA, 25 bp, Homo sapien
cacgcggccgcttgaatttccctct

SEQ ID NO: 5273941 - DNA, 25 bp, Homo sapien
cagagagggagcgccgtcagacaat

SEQ ID NO: 5273942 - DNA, 25 bp, Homo sapien
gagcgccgtcagacaatgcggcccg

SEQ ID NO: 5273943 - DNA, 25 bp, Homo sapien
ggccctcaatccgagcgcggccgga

SEQ ID NO: 5273944 - DNA, 25 bp, Homo sapien
tccctgaggggagcggcatcgacaa

SEQ ID NO: 5273945 - DNA, 25 bp, Homo sapien
caaccggctgctctcaagggcggca

SEQ ID NO: 5273946 - DNA, 25 bp, Homo sapien
ggagcggcatcgacaaccggctgct

SEQ ID NO: 5273947 - DNA, 25 bp, Homo sapien
ttggctttagctgaggaccctcccg

SEQ ID NO: 5273948 - DNA, 25 bp, Homo sapien
tagctgaggaccctcccgtgtcagc

SEQ ID NO: 5273949 - DNA, 25 bp, Homo sapien
gcgacgcgagtcccaccactttgat

SEQ ID NO: 5273950 - DNA, 25 bp, Homo sapien
ctgcttttggctttagctgaggacc

SEQ ID NO: 5273951 - DNA, 25 bp, Homo sapien
ggatctggaggctgatgctgaaacc

SEQ ID NO: 5273952 - DNA, 25 bp, Homo sapien
gctgccatataagctgtccctgcca

SEQ ID NO: 5273953 - DNA, 25 bp, Homo sapien
tggaggctgatgctgaaacctcggc

SEQ ID NO: 5273954 - DNA, 25 bp, Homo sapien
ttgctggacagttgtagctgccata

SEQ ID NO: 5273955 - DNA, 25 bp, Homo sapien
tagagccagcctcgtgtttagttgc

SEQ ID NO: 5273956 - DNA, 25 bp, Homo sapien
tctcccggatataggacagcctgga

SEQ ID NO: 5273957 - DNA, 25 bp, Homo sapien
agggatctcccggatataggacagc

SEQ ID NO: 5273958 - DNA, 25 bp, Homo sapien
tagttgcagggagaacgtatctctg

SEQ ID NO: 5273959 - DNA, 25 bp, Homo sapien
ctttgtcacctgttcggggctgctc

SEQ ID NO: 5273960 - DNA, 25 bp, Homo sapien
gcatttatgtctgaacctttccaaa

SEQ ID NO: 5273961 - DNA, 25 bp, Homo sapien
ttgtcacctgttcggggctgctccc

SEQ ID NO: 5273962 - DNA, 25 bp, Homo sapien
tttccaaagctggttgaattcccgc

SEQ ID NO: 5273963 - DNA, 25 bp, Homo sapien
gagtggcctcgtatgcttagcttgg

SEQ ID NO: 5273964 - DNA, 25 bp, Homo sapien
tggctgccactagaaagcttgtatg

SEQ ID NO: 5273965 - DNA, 25 bp, Homo sapien
tggactccagtcaatctgcccgtgc

SEQ ID NO: 5273966 - DNA, 25 bp, Homo sapien
cagagactccggctctgaagttgga

SEQ ID NO: 5273967 - DNA, 25 bp, Homo sapien
cacattgttcagcatcccgagtgac

SEQ ID NO: 5273968 - DNA, 25 bp, Homo sapien
tgtgttctcgagctgtatgcatcat

SEQ ID NO: 5273969 - DNA, 25 bp, Homo sapien
tcccgagtgacacactgagtggccc

SEQ ID NO: 5273970 - DNA, 25 bp, Homo sapien
gcagaaccgtgtgttctcgagctgt

SEQ ID NO: 5273971 - DNA, 25 bp, Homo sapien
aaccaaacacatccagagaaatccg

SEQ ID NO: 5273972 - DNA, 25 bp, Homo sapien
gaagtgtcagcacgggcaaaaccaa

SEQ ID NO: 5273973 - DNA, 25 bp, Homo sapien
acatccagagaaatccgaaccagct

SEQ ID NO: 5273974 - DNA, 25 bp, Homo sapien
acacatccagagaaatccgaaccag

SEQ ID NO: 5273975 - DNA, 25 bp, Homo sapien
gcccagggaaaatgggaatcggcca

SEQ ID NO: 5273976 - DNA, 25 bp, Homo sapien
agggaaaatgggaatcggccaccat

SEQ ID NO: 5273977 - DNA, 25 bp, Homo sapien
tgaaggcccagggaaaatgggaatc

SEQ ID NO: 5273978 - DNA, 25 bp, Homo sapien
cagggaaaatgggaatcggccacca

SEQ ID NO: 5273979 - DNA, 25 bp, Homo sapien
tcatgacaagctatagggaaaagtt

SEQ ID NO: 5273980 - DNA, 25 bp, Homo sapien
gcctctgtagagagtctcaaaaatt

SEQ ID NO: 5273981 - DNA, 25 bp, Homo sapien
ttctcgatgccaattatatttcaag

SEQ ID NO: 5273982 - DNA, 25 bp, Homo sapien
tatggtaccgccactgcagaaatct

SEQ ID NO: 5273983 - DNA, 25 bp, Homo sapien
gttttctacatctgggctggccggg

SEQ ID NO: 5273984 - DNA, 25 bp, Homo sapien
gctggccgggctccttctcggattt

SEQ ID NO: 5273985 - DNA, 25 bp, Homo sapien
agcaagtcggccgttttctacatct

SEQ ID NO: 5273986 - DNA, 25 bp, Homo sapien
ctcggatttatcacaggcgggcagc

SEQ ID NO: 5273987 - DNA, 25 bp, Homo sapien
tccatggacgtgtggttaggaaaca

SEQ ID NO: 5273988 - DNA, 25 bp, Homo sapien
gctccatggacgtgtggttaggaaa

SEQ ID NO: 5273989 - DNA, 25 bp, Homo sapien
ctgctccatggacgtgtggttagga

SEQ ID NO: 5273990 - DNA, 25 bp, Homo sapien
ttcctgctccatggacgtgtggtta

SEQ ID NO: 5273991 - DNA, 25 bp, Homo sapien
taaagaaaccatagcgaccgattcg

SEQ ID NO: 5273992 - DNA, 25 bp, Homo sapien
catagattgtgtttcagcaggcggg

SEQ ID NO: 5273993 - DNA, 25 bp, Homo sapien
gatggagccagttctcacgctgaca

SEQ ID NO: 5273994 - DNA, 25 bp, Homo sapien
tctctggaaatagccccgggaagta

SEQ ID NO: 5273995 - DNA, 25 bp, Homo sapien
ccactgttaaagcctaaggccttgt

SEQ ID NO: 5273996 - DNA, 25 bp, Homo sapien
ctgttaaagcctaaggccttgtccg

SEQ ID NO: 5273997 - DNA, 25 bp, Homo sapien
cactgttaaagcctaaggccttgtc

SEQ ID NO: 5273998 - DNA, 25 bp, Homo sapien
cccactgttaaagcctaaggccttg

SEQ ID NO: 5273999 - DNA, 25 bp, Homo sapien
ctcctcgtggaacaggagagccggc

SEQ ID NO: 5274000 - DNA, 25 bp, Homo sapien
cttgtgctcctcgtggaacaggaga

SEQ ID NO: 5274001 - DNA, 25 bp, Homo sapien
aggagagccggcctctgaaccccag

SEQ ID NO: 5274002 - DNA, 25 bp, Homo sapien
tgctcctcgtggaacaggagagccg

SEQ ID NO: 5274003 - DNA, 25 bp, Homo sapien
ctgtcagccggggctcccctccttc

SEQ ID NO: 5274004 - DNA, 25 bp, Homo sapien
tgtcagccggggctcccctccttct

SEQ ID NO: 5274005 - DNA, 25 bp, Homo sapien
tcagccggggctcccctccttctct

SEQ ID NO: 5274006 - DNA, 25 bp, Homo sapien
cagccggggctcccctccttctctt

SEQ ID NO: 5274007 - DNA, 25 bp, Homo sapien
gcctgatccctaatgaagcccttga

SEQ ID NO: 5274008 - DNA, 25 bp, Homo sapien
gaccttggtcttatgttgtcctaca

SEQ ID NO: 5274009 - DNA, 25 bp, Homo sapien
tgttgtcctacatgcctggcctgat

SEQ ID NO: 5274010 - DNA, 25 bp, Homo sapien
aggagccggacagctttgcctgcct

SEQ ID NO: 5274011 - DNA, 25 bp, Homo sapien
tgtgtatgcccacatgctgccactc

SEQ ID NO: 5274012 - DNA, 25 bp, Homo sapien
ctgtgtatgcccacatgctgccact

SEQ ID NO: 5274013 - DNA, 25 bp, Homo sapien
tgtatgcccacatgctgccactctg

SEQ ID NO: 5274014 - DNA, 25 bp, Homo sapien
tatgcccacatgctgccactctgac

SEQ ID NO: 5274015 - DNA, 25 bp, Homo sapien
gctctgagtcttggcctgagcaggt

SEQ ID NO: 5274016 - DNA, 25 bp, Homo sapien
gggcaggcatgtgagtgggctctga

SEQ ID NO: 5274017 - DNA, 25 bp, Homo sapien
gtcccccccgcactcaaatgggcag

SEQ ID NO: 5274018 - DNA, 25 bp, Homo sapien
caggtgcgtgggtgtcccccccgca

SEQ ID NO: 5274019 - DNA, 25 bp, Homo sapien
ttactatgcaccagcacgccgtggc

SEQ ID NO: 5274020 - DNA, 25 bp, Homo sapien
acagatgcttactatgcaccagcac

SEQ ID NO: 5274021 - DNA, 25 bp, Homo sapien
ctccagggacggagagaagtacact

SEQ ID NO: 5274022 - DNA, 25 bp, Homo sapien
gaagtacactcttgcggagctcacc

SEQ ID NO: 5274023 - DNA, 25 bp, Homo sapien
cgctgttcccacaagactcgggtgg

SEQ ID NO: 5274024 - DNA, 25 bp, Homo sapien
tgtcgaaagaatcctgcattcggtg

SEQ ID NO: 5274025 - DNA, 25 bp, Homo sapien
acacgggggtcttacagcagcacct

SEQ ID NO: 5274026 - DNA, 25 bp, Homo sapien
cgtagacccccaacttatggacatt

SEQ ID NO: 5274027 - DNA, 25 bp, Homo sapien
ttcttttccatcggaagcagccaga

SEQ ID NO: 5274028 - DNA, 25 bp, Homo sapien
ctctgcagcattcccgccccttgtt

SEQ ID NO: 5274029 - DNA, 25 bp, Homo sapien
gagagctgtcagaagaaggtcccat

SEQ ID NO: 5274030 - DNA, 25 bp, Homo sapien
aagcccgcatcgcacagatcagctt

SEQ ID NO: 5274031 - DNA, 25 bp, Homo sapien
tcttggcattggtaggccagcagcc

SEQ ID NO: 5274032 - DNA, 25 bp, Homo sapien
tgtttctgaatctaaggctcctcgt

SEQ ID NO: 5274033 - DNA, 25 bp, Homo sapien
tctctgagccagttatctgaggtgc

SEQ ID NO: 5274034 - DNA, 25 bp, Homo sapien
tgattcctcggaaatgtcccaggcc

SEQ ID NO: 5274035 - DNA, 25 bp, Homo sapien
gccacactcggcaaggtgtcatccg

SEQ ID NO: 5274036 - DNA, 25 bp, Homo sapien
ggagtccctgttccacaggagcaac

SEQ ID NO: 5274037 - DNA, 25 bp, Homo sapien
cactcggcaaggtgtcatccgttgg

SEQ ID NO: 5274038 - DNA, 25 bp, Homo sapien
agaattttctgctcggagtccctgt

SEQ ID NO: 5274039 - DNA, 25 bp, Homo sapien
tgtgacgtgacagcaccagctcatg

SEQ ID NO: 5274040 - DNA, 25 bp, Homo sapien
gctgtgccagccgtccgtgtagaaa

SEQ ID NO: 5274041 - DNA, 25 bp, Homo sapien
agcaccagctcatgagggcctggct

SEQ ID NO: 5274042 - DNA, 25 bp, Homo sapien
cagccgtccgtgtagaaagggccca

SEQ ID NO: 5274043 - DNA, 25 bp, Homo sapien
gcctagctgagttgtggccacattc

SEQ ID NO: 5274044 - DNA, 25 bp, Homo sapien
aatatcagggtatcagggatgcagc

SEQ ID NO: 5274045 - DNA, 25 bp, Homo sapien
cagctccaatgtggccacacctgaa

SEQ ID NO: 5274046 - DNA, 25 bp, Homo sapien
taaacttttagctgacttgtcctga

SEQ ID NO: 5274047 - DNA, 25 bp, Homo sapien
gcccgaatcccatgaaggctgtaat

SEQ ID NO: 5274048 - DNA, 25 bp, Homo sapien
tcccatgaaggctgtaatctccaca

SEQ ID NO: 5274049 - DNA, 25 bp, Homo sapien
ctctctaagcccgaatcccatgaag

SEQ ID NO: 5274050 - DNA, 25 bp, Homo sapien
tctaagcccgaatcccatgaaggct

SEQ ID NO: 5274051 - DNA, 25 bp, Homo sapien
ccagatatgaggtaagtggacagtc

SEQ ID NO: 5274052 - DNA, 25 bp, Homo sapien
taagtggacagtccaaggcagtcat

SEQ ID NO: 5274053 - DNA, 25 bp, Homo sapien
tccaaggcagtcatagccggctggc

SEQ ID NO: 5274054 - DNA, 25 bp, Homo sapien
gatatgaggtaagtggacagtccaa

SEQ ID NO: 5274055 - DNA, 25 bp, Homo sapien
tgccctcccgtaactccattcttcc

SEQ ID NO: 5274056 - DNA, 25 bp, Homo sapien
atgaggtcctgttgcttccatgttt

SEQ ID NO: 5274057 - DNA, 25 bp, Homo sapien
aatgaggtcctgttgcttccatgtt

SEQ ID NO: 5274058 - DNA, 25 bp, Homo sapien
tctgtttctactcctgccctcccgt

SEQ ID NO: 5274059 - DNA, 25 bp, Homo sapien
taatgccgtcagttgtgcagtgcca

SEQ ID NO: 5274060 - DNA, 25 bp, Homo sapien
taagcgctgcccctttgatggccat

SEQ ID NO: 5274061 - DNA, 25 bp, Homo sapien
caaatattgctctcggtaatgccgt

SEQ ID NO: 5274062 - DNA, 25 bp, Homo sapien
taaacatgctgagacaatagccgcc

SEQ ID NO: 5274063 - DNA, 25 bp, Homo sapien
gactagactaatattccctcactaa

SEQ ID NO: 5274064 - DNA, 25 bp, Homo sapien
aataatagcgaaaaggccattcaat

SEQ ID NO: 5274065 - DNA, 25 bp, Homo sapien
caataaaatagttctgtgactttga

SEQ ID NO: 5274066 - DNA, 25 bp, Homo sapien
gttctcagtaattaacgtgtgaaaa

SEQ ID NO: 5274067 - DNA, 25 bp, Homo sapien
actttttataatgagacttacacat

SEQ ID NO: 5274068 - DNA, 25 bp, Homo sapien
aactttttataatgagacttacaca

SEQ ID NO: 5274069 - DNA, 25 bp, Homo sapien
cagctgtgccgcagcttctctgccc

SEQ ID NO: 5274070 - DNA, 25 bp, Homo sapien
ttacctaaatgcttgccgcagctgt

SEQ ID NO: 5274071 - DNA, 25 bp, Homo sapien
acacggagcaccctgtaggttgtct

SEQ ID NO: 5274072 - DNA, 25 bp, Homo sapien
tccacatcctcctgatagcagaggc

SEQ ID NO: 5274073 - DNA, 25 bp, Homo sapien
gcacctgtgctgtatcgaacatttt

SEQ ID NO: 5274074 - DNA, 25 bp, Homo sapien
agaatacagaactttggcccaaatg

SEQ ID NO: 5274075 - DNA, 25 bp, Homo sapien
catttacagctatagtgatccaaga

SEQ ID NO: 5274076 - DNA, 25 bp, Homo sapien
gttggaaaaacacggctctgaagcc

SEQ ID NO: 5274077 - DNA, 25 bp, Homo sapien
aaggctcctctggtcccaagcggtc

SEQ ID NO: 5274078 - DNA, 25 bp, Homo sapien
tctccttagcaactgacaccagaat

SEQ ID NO: 5274079 - DNA, 25 bp, Homo sapien
ctccttagcaactgacaccagaata

SEQ ID NO: 5274080 - DNA, 25 bp, Homo sapien
tggtcccaagcggtcacctgctccg

SEQ ID NO: 5274081 - DNA, 25 bp, Homo sapien
tagacatgttaccagcctgcgtgcg

SEQ ID NO: 5274082 - DNA, 25 bp, Homo sapien
tctatccagaaggtgaagctaccgt

SEQ ID NO: 5274083 - DNA, 25 bp, Homo sapien
gaagcctacttcctgactgtcatga

SEQ ID NO: 5274084 - DNA, 25 bp, Homo sapien
aagcactttatccacagcggcggtc

SEQ ID NO: 5274085 - DNA, 25 bp, Homo sapien
tgacgtacctgaacaaaggccagtt

SEQ ID NO: 5274086 - DNA, 25 bp, Homo sapien
gaagccaggagacagtaccatgacg

SEQ ID NO: 5274087 - DNA, 25 bp, Homo sapien
tatagcaagcttccacgagagtaga

SEQ ID NO: 5274088 - DNA, 25 bp, Homo sapien
tgaatgaccgcctgaaattgcagct

SEQ ID NO: 5274089 - DNA, 25 bp, Homo sapien
gactaacttggcagacgcagccagg

SEQ ID NO: 5274090 - DNA, 25 bp, Homo sapien
tgtgcttgtgagcatttagaataaa

SEQ ID NO: 5274091 - DNA, 25 bp, Homo sapien
tcattataaattcgttcaagatctg

SEQ ID NO: 5274092 - DNA, 25 bp, Homo sapien
cgcagccaggtgtgaacagcgctta

SEQ ID NO: 5274093 - DNA, 25 bp, Homo sapien
tgccggcactttcactagacggctg

SEQ ID NO: 5274094 - DNA, 25 bp, Homo sapien
tggtagccaggcgttcgttcgatct

SEQ ID NO: 5274095 - DNA, 25 bp, Homo sapien
gtttcaggcttgagtcctgccggca

SEQ ID NO: 5274096 - DNA, 25 bp, Homo sapien
cctctctttgaaggcgaggcctgca

SEQ ID NO: 5274097 - DNA, 25 bp, Homo sapien
tctggcacccaacccaatgctggtt

SEQ ID NO: 5274098 - DNA, 25 bp, Homo sapien
taggtggaattatctgggactcagg

SEQ ID NO: 5274099 - DNA, 25 bp, Homo sapien
taaattaggactctgctcagaaccc

SEQ ID NO: 5274100 - DNA, 25 bp, Homo sapien
tggatctttgcagtaacccaactgg

SEQ ID NO: 5274101 - DNA, 25 bp, Homo sapien
gacgggatctgtcctctggccactg

SEQ ID NO: 5274102 - DNA, 25 bp, Homo sapien
cgggatctgtcctctggccactgac

SEQ ID NO: 5274103 - DNA, 25 bp, Homo sapien
acgggatctgtcctctggccactga

SEQ ID NO: 5274104 - DNA, 25 bp, Homo sapien
agacgggatctgtcctctggccact

SEQ ID NO: 5274105 - DNA, 25 bp, Homo sapien
gactcttagttttccgttgctgaaa

SEQ ID NO: 5274106 - DNA, 25 bp, Homo sapien
ttacaccatagctgaaggtcctgca

SEQ ID NO: 5274107 - DNA, 25 bp, Homo sapien
gcctgctgaggttacgcgatgtcga

SEQ ID NO: 5274108 - DNA, 25 bp, Homo sapien
gcaaatgtcggcattccggtaataa

SEQ ID NO: 5274109 - DNA, 25 bp, Homo sapien
gttggagacgtttgcccaatcttgg

SEQ ID NO: 5274110 - DNA, 25 bp, Homo sapien
gaaagactcgttttatgagcctcat

SEQ ID NO: 5274111 - DNA, 25 bp, Homo sapien
tcatgtttccaagaagaaagactcg

SEQ ID NO: 5274112 - DNA, 25 bp, Homo sapien
tgaaggctgagcatcaggattgcca

SEQ ID NO: 5274113 - DNA, 25 bp, Homo sapien
catcccattgctgagagtgcaggaa

SEQ ID NO: 5274114 - DNA, 25 bp, Homo sapien
gcaactgtggtcagctttccagccc

SEQ ID NO: 5274115 - DNA, 25 bp, Homo sapien
tcttccccagacagcgttaggaggt

SEQ ID NO: 5274116 - DNA, 25 bp, Homo sapien
gcagggccaacgatacaccttcagt

SEQ ID NO: 5274117 - DNA, 25 bp, Homo sapien
aaggacaagtgctgcgtgggccctc

SEQ ID NO: 5274118 - DNA, 25 bp, Homo sapien
gcatgtaacagatcccctccagggt

SEQ ID NO: 5274119 - DNA, 25 bp, Homo sapien
catttctaggggaccagcaatctgg

SEQ ID NO: 5274120 - DNA, 25 bp, Homo sapien
caatctggggcatgtaacagatccc

SEQ ID NO: 5274121 - DNA, 25 bp, Homo sapien
tccacttctctccccgggaggctcg

SEQ ID NO: 5274122 - DNA, 25 bp, Homo sapien
ttctctccccgggaggctcgcctgt

SEQ ID NO: 5274123 - DNA, 25 bp, Homo sapien
acttctctccccgggaggctcgcct

SEQ ID NO: 5274124 - DNA, 25 bp, Homo sapien
tctctccccgggaggctcgcctgtg

SEQ ID NO: 5274125 - DNA, 25 bp, Homo sapien
taaagatggtgtgtgcggagttccc

SEQ ID NO: 5274126 - DNA, 25 bp, Homo sapien
cacatcttgagagggagggacttct

SEQ ID NO: 5274127 - DNA, 25 bp, Homo sapien
ttagtaaagagaacaccagtagtcc

SEQ ID NO: 5274128 - DNA, 25 bp, Homo sapien
cctgctggagggtaggacactagcc

SEQ ID NO: 5274129 - DNA, 25 bp, Homo sapien
gccaggcgcccacacgaagcacttg

SEQ ID NO: 5274130 - DNA, 25 bp, Homo sapien
gctggtcttgataagagaaagcaaa

SEQ ID NO: 5274131 - DNA, 25 bp, Homo sapien
tggtcttgataagagaaagcaaatg

SEQ ID NO: 5274132 - DNA, 25 bp, Homo sapien
gggtggctcagttgccaggcgccca

SEQ ID NO: 5274133 - DNA, 25 bp, Homo sapien
gagaccagtagcccctctggaagca

SEQ ID NO: 5274134 - DNA, 25 bp, Homo sapien
gaccagtagcccctctggaagcatc

SEQ ID NO: 5274135 - DNA, 25 bp, Homo sapien
cctgagaccagtagcccctctggaa

SEQ ID NO: 5274136 - DNA, 25 bp, Homo sapien
ctgagaccagtagcccctctggaag

SEQ ID NO: 5274137 - DNA, 25 bp, Homo sapien
tgcccttgccctggtgaacacctac

SEQ ID NO: 5274138 - DNA, 25 bp, Homo sapien
ttgcccttgccctggtgaacaccta

SEQ ID NO: 5274139 - DNA, 25 bp, Homo sapien
cggacgtcccgcacctgtgttcggt

SEQ ID NO: 5274140 - DNA, 25 bp, Homo sapien
acaatctagaagcctggcggacgtc

SEQ ID NO: 5274141 - DNA, 25 bp, Homo sapien
tgaaacaaactcagcagcaatctgg

SEQ ID NO: 5274142 - DNA, 25 bp, Homo sapien
aactgcttctgtccgcagcaggtgg

SEQ ID NO: 5274143 - DNA, 25 bp, Homo sapien
tgtttttaagcataggtgccatggc

SEQ ID NO: 5274144 - DNA, 25 bp, Homo sapien
gccataagacggtgacagatagcag

SEQ ID NO: 5274145 - DNA, 25 bp, Homo sapien
tgaccctagagaaggacacacatga

SEQ ID NO: 5274146 - DNA, 25 bp, Homo sapien
cacacatgagggagttccagcttca

SEQ ID NO: 5274147 - DNA, 25 bp, Homo sapien
gcgtcccttgcatcacacatgccca

SEQ ID NO: 5274148 - DNA, 25 bp, Homo sapien
tacttgcaccatacgtgaccgtact

SEQ ID NO: 5274149 - DNA, 25 bp, Homo sapien
catgcccatacttgcaccatacgtg

SEQ ID NO: 5274150 - DNA, 25 bp, Homo sapien
atacgtgaccgtactttcacagagg

SEQ ID NO: 5274151 - DNA, 25 bp, Homo sapien
gacgtggacaagtgtggatggacac

SEQ ID NO: 5274152 - DNA, 25 bp, Homo sapien
acgtggacaagtgtggatggacact

SEQ ID NO: 5274153 - DNA, 25 bp, Homo sapien
cgtggacaagtgtggatggacactt

SEQ ID NO: 5274154 - DNA, 25 bp, Homo sapien
agacgtggacaagtgtggatggaca

SEQ ID NO: 5274155 - DNA, 25 bp, Homo sapien
tgcgactctgtgcacgtggggagtg

SEQ ID NO: 5274156 - DNA, 25 bp, Homo sapien
gcgactctgtgcacgtggggagtgg

SEQ ID NO: 5274157 - DNA, 25 bp, Homo sapien
ccagggaggtgggttgacgcccacg

SEQ ID NO: 5274158 - DNA, 25 bp, Homo sapien
tttccacccccttgccagcatactg

SEQ ID NO: 5274159 - DNA, 25 bp, Homo sapien
cgcccacgtgggctgttttatctgt

SEQ ID NO: 5274160 - DNA, 25 bp, Homo sapien
tgggttgacgcccacgtgggctgtt

SEQ ID NO: 5274161 - DNA, 25 bp, Homo sapien
gacgccggcccctgtccctgccaag

SEQ ID NO: 5274162 - DNA, 25 bp, Homo sapien
ctgcccccggagacgccggcccctg

SEQ ID NO: 5274163 - DNA, 25 bp, Homo sapien
tgccaagctttccagggtcccccca

SEQ ID NO: 5274164 - DNA, 25 bp, Homo sapien
tccctgccaagctttccagggtccc

SEQ ID NO: 5274165 - DNA, 25 bp, Homo sapien
tagcagcaagcgtgcatagccacag

SEQ ID NO: 5274166 - DNA, 25 bp, Homo sapien
aaattgccatccctctgactgcggg

SEQ ID NO: 5274167 - DNA, 25 bp, Homo sapien
ccagagtgccagttcagggagagct

SEQ ID NO: 5274168 - DNA, 25 bp, Homo sapien
taagtagtgactggacggcagctca

SEQ ID NO: 5274169 - DNA, 25 bp, Homo sapien
agagtggcgtgaccttgagagtaca

SEQ ID NO: 5274170 - DNA, 25 bp, Homo sapien
cccggcggtctcatgcagttttgca

SEQ ID NO: 5274171 - DNA, 25 bp, Homo sapien
cgagggttggcatgttccacgcaga

SEQ ID NO: 5274172 - DNA, 25 bp, Homo sapien
caaagtcaaagcagacgagggttgg

SEQ ID NO: 5274173 - DNA, 25 bp, Homo sapien
gagcctgaagtcagtcctataactg

SEQ ID NO: 5274174 - DNA, 25 bp, Homo sapien
tacaaagactcatgggttcctggcc

SEQ ID NO: 5274175 - DNA, 25 bp, Homo sapien
tggctggagcctggctacaaagact

SEQ ID NO: 5274176 - DNA, 25 bp, Homo sapien
tccaactgacggcttgaatacaggt

SEQ ID NO: 5274177 - DNA, 25 bp, Homo sapien
tgatccctgtgactggacaaagtag

SEQ ID NO: 5274178 - DNA, 25 bp, Homo sapien
gagctgtgatgttggtcctgcccca

SEQ ID NO: 5274179 - DNA, 25 bp, Homo sapien
tcaacctgtgttcgtgggacctgct

SEQ ID NO: 5274180 - DNA, 25 bp, Homo sapien
actgtgagacccatcctagctcagg

SEQ ID NO: 5274181 - DNA, 25 bp, Homo sapien
gaaatctttgggtgctaacatagct

SEQ ID NO: 5274182 - DNA, 25 bp, Homo sapien
taaaaagtttgctcgttcggatgag

SEQ ID NO: 5274183 - DNA, 25 bp, Homo sapien
tgtgctcaactgatcgtctccagcc

SEQ ID NO: 5274184 - DNA, 25 bp, Homo sapien
gtttgagccgctgtacttgtacttc

SEQ ID NO: 5274185 - DNA, 25 bp, Homo sapien
caaaaaccacaagttatctggcctt

SEQ ID NO: 5274186 - DNA, 25 bp, Homo sapien
tagatctttttggaatcggacctgg

SEQ ID NO: 5274187 - DNA, 25 bp, Homo sapien
tcggacctggttgagtaaggacctc

SEQ ID NO: 5274188 - DNA, 25 bp, Homo sapien
aaattttgccgtcagcttcttcata

SEQ ID NO: 5274189 - DNA, 25 bp, Homo sapien
tattggttggatgaaactccaccag

SEQ ID NO: 5274190 - DNA, 25 bp, Homo sapien
ggaaatgcaagttacgctaaatggc

SEQ ID NO: 5274191 - DNA, 25 bp, Homo sapien
caactgtatgagcacgtagataacc

SEQ ID NO: 5274192 - DNA, 25 bp, Homo sapien
tagataaccgagagaatgtggccac

SEQ ID NO: 5274193 - DNA, 25 bp, Homo sapien
ccagtattctggtggataaggtctt

SEQ ID NO: 5274194 - DNA, 25 bp, Homo sapien
caaagtaatgtgagtcctgccagta

SEQ ID NO: 5274195 - DNA, 25 bp, Homo sapien
gaggttttcagtctggacactccat

SEQ ID NO: 5274196 - DNA, 25 bp, Homo sapien
tccataggtgagtgtcgtgtcttcg

SEQ ID NO: 5274197 - DNA, 25 bp, Homo sapien
ggtgggctcccctcgtgcactttat

SEQ ID NO: 5274198 - DNA, 25 bp, Homo sapien
cattatttaaacgagcatgtgtaat

SEQ ID NO: 5274199 - DNA, 25 bp, Homo sapien
tatggattcggcatggagccctcag

SEQ ID NO: 5274200 - DNA, 25 bp, Homo sapien
ttctgagaaccacaaaccttgtgta

SEQ ID NO: 5274201 - DNA, 25 bp, Homo sapien
aggcactgggacagactcgggccgg

SEQ ID NO: 5274202 - DNA, 25 bp, Homo sapien
agcccctccgtctcacaggacagag

SEQ ID NO: 5274203 - DNA, 25 bp, Homo sapien
ttccagacaacaacgtgcgtcattt

SEQ ID NO: 5274204 - DNA, 25 bp, Homo sapien
gcagtgagcaaatcccacacgcagt

SEQ ID NO: 5274205 - DNA, 25 bp, Homo sapien
tattatttttaagttcacctacagc

SEQ ID NO: 5274206 - DNA, 25 bp, Homo sapien
tgtgggcgggtcaagccagataacc

SEQ ID NO: 5274207 - DNA, 25 bp, Homo sapien
ttctaaggacctgcgagctggagct

SEQ ID NO: 5274208 - DNA, 25 bp, Homo sapien
gaaatgcccgtttgcggatggccgc

SEQ ID NO: 5274209 - DNA, 25 bp, Homo sapien
aaccttccggaagtgttgtggcgcg

SEQ ID NO: 5274210 - DNA, 25 bp, Homo sapien
tcagcggcagtactcccgctcgatg

SEQ ID NO: 5274211 - DNA, 25 bp, Homo sapien
tcgatgctcgccatcagcccctctt

SEQ ID NO: 5274212 - DNA, 25 bp, Homo sapien
cctcttccgagtggtcgtaggagat

SEQ ID NO: 5274213 - DNA, 25 bp, Homo sapien
cgggcttcttgcgaccgctgcctgg

SEQ ID NO: 5274214 - DNA, 25 bp, Homo sapien
cacaatggctcctagtgggcccatc

SEQ ID NO: 5274215 - DNA, 25 bp, Homo sapien
aggatggtgcgttcacactcatttc

SEQ ID NO: 5274216 - DNA, 25 bp, Homo sapien
tggccaccacaatggctcctagtgg

SEQ ID NO: 5274217 - DNA, 25 bp, Homo sapien
gaggcaggatggtgcgttcacactc

SEQ ID NO: 5274218 - DNA, 25 bp, Homo sapien
ctgagccctcgcagagtggaagcca

SEQ ID NO: 5274219 - DNA, 25 bp, Homo sapien
caggcttctactgcgtccgcttcat

SEQ ID NO: 5274220 - DNA, 25 bp, Homo sapien
tgggaagaccgagcttgaatcccag

SEQ ID NO: 5274221 - DNA, 25 bp, Homo sapien
gccagtgtgtctccgagcctcggtg

SEQ ID NO: 5274222 - DNA, 25 bp, Homo sapien
tgtgtcgaaatgtgcagacctttgc

SEQ ID NO: 5274223 - DNA, 25 bp, Homo sapien
cctcggtcaggctgggtgctgcctc

SEQ ID NO: 5274224 - DNA, 25 bp, Homo sapien
ctgccacggttgtgtcgaaatgtgc

SEQ ID NO: 5274225 - DNA, 25 bp, Homo sapien
cgaaatgtgcagacctttgcaggag

SEQ ID NO: 5274226 - DNA, 25 bp, Homo sapien
ccatcatgggtgcaagggattctcc

SEQ ID NO: 5274227 - DNA, 25 bp, Homo sapien
cctccccatcatgggtgcaagggat

SEQ ID NO: 5274228 - DNA, 25 bp, Homo sapien
ttgcaacctccccatcatgggtgca

SEQ ID NO: 5274229 - DNA, 25 bp, Homo sapien
caacctccccatcatgggtgcaagg

SEQ ID NO: 5274230 - DNA, 25 bp, Homo sapien
agacttcaggtcaggatggcccagc

SEQ ID NO: 5274231 - DNA, 25 bp, Homo sapien
ggatggcccagccaaaagctcaggg

SEQ ID NO: 5274232 - DNA, 25 bp, Homo sapien
agcagcgacttcctcccgcatggct

SEQ ID NO: 5274233 - DNA, 25 bp, Homo sapien
aaagctcagggaagcagcgacttcc

SEQ ID NO: 5274234 - DNA, 25 bp, Homo sapien
tcaagccatcttaaacaccagttct

SEQ ID NO: 5274235 - DNA, 25 bp, Homo sapien
gcgagttcagcagggttcctgtcct

SEQ ID NO: 5274236 - DNA, 25 bp, Homo sapien
ggctcagggtaggacctcccagtgt

SEQ ID NO: 5274237 - DNA, 25 bp, Homo sapien
ctcccagtgtctgttaaataagcga

SEQ ID NO: 5274238 - DNA, 25 bp, Homo sapien
cgagttccttaagggctgtgtcttg

SEQ ID NO: 5274239 - DNA, 25 bp, Homo sapien
cttcaagggtgttcagcgtggttcc

SEQ ID NO: 5274240 - DNA, 25 bp, Homo sapien
ttccctggtaacgtgctgtggagct

SEQ ID NO: 5274241 - DNA, 25 bp, Homo sapien
cctgggctgcgagttccttaagggc

SEQ ID NO: 5274242 - DNA, 25 bp, Homo sapien
gctccccgggtggccctctgtgctc

SEQ ID NO: 5274243 - DNA, 25 bp, Homo sapien
cgctccccgggtggccctctgtgct

SEQ ID NO: 5274244 - DNA, 25 bp, Homo sapien
cagagacattgccgctccccgggtg

SEQ ID NO: 5274245 - DNA, 25 bp, Homo sapien
tcagagacattgccgctccccgggt

SEQ ID NO: 5274246 - DNA, 25 bp, Homo sapien
accgcggtgggtcggagccgggctg

SEQ ID NO: 5274247 - DNA, 25 bp, Homo sapien
gccgcctcagagtccggctgctccg

SEQ ID NO: 5274248 - DNA, 25 bp, Homo sapien
gcagcgtctcgtccctgccgtcggg

SEQ ID NO: 5274249 - DNA, 25 bp, Homo sapien
gcgccacggggctggggtcgcggcc

SEQ ID NO: 5274250 - DNA, 25 bp, Homo sapien
gcgaggtccgggaagcgaccgcggc

SEQ ID NO: 5274251 - DNA, 25 bp, Homo sapien
cttttaaagttggatgtctaccaat

SEQ ID NO: 5274252 - DNA, 25 bp, Homo sapien
gttggatgtctaccaatgtaaaacc

SEQ ID NO: 5274253 - DNA, 25 bp, Homo sapien
aaattcctagatgttgggtaagaca

SEQ ID NO: 5274254 - DNA, 25 bp, Homo sapien
cctagatgttgggtaagacaaacta

SEQ ID NO: 5274255 - DNA, 25 bp, Homo sapien
cagtgaaccctgagactgatttagg

SEQ ID NO: 5274256 - DNA, 25 bp, Homo sapien
tgatttaggcatgcaggagtttggc

SEQ ID NO: 5274257 - DNA, 25 bp, Homo sapien
tgaataaaggtagcttaaggtctgt

SEQ ID NO: 5274258 - DNA, 25 bp, Homo sapien
gggaggacttgcctcctaagaagcc

SEQ ID NO: 5274259 - DNA, 25 bp, Homo sapien
tggaaagaatgaacgacagctgggc

SEQ ID NO: 5274260 - DNA, 25 bp, Homo sapien
gaccagaaccttgtatggagtggaa

SEQ ID NO: 5274261 - DNA, 25 bp, Homo sapien
catggtagtctgagctagtagtccc

SEQ ID NO: 5274262 - DNA, 25 bp, Homo sapien
gctgcaacctaaagtagccgttgta

SEQ ID NO: 5274263 - DNA, 25 bp, Homo sapien
taccatagcagtgacaatggcagtc

SEQ ID NO: 5274264 - DNA, 25 bp, Homo sapien
gccacaccatgaattgtccgtaatg

SEQ ID NO: 5274265 - DNA, 25 bp, Homo sapien
tgtagctacctcacaaccagtcctg

SEQ ID NO: 5274266 - DNA, 25 bp, Homo sapien
gctgaagtgttaccaactagccaca

SEQ ID NO: 5274267 - DNA, 25 bp, Homo sapien
tcttgcattgtgaggtacaggcgga

SEQ ID NO: 5274268 - DNA, 25 bp, Homo sapien
tattcagtatttgaacgtcgtcctg

SEQ ID NO: 5274269 - DNA, 25 bp, Homo sapien
aataatgtgaggattaacttctgcc

SEQ ID NO: 5274270 - DNA, 25 bp, Homo sapien
cagctcagaccatttcctaatcagt

SEQ ID NO: 5274271 - DNA, 25 bp, Homo sapien
tcctctacttcaggggggtctagcc

SEQ ID NO: 5274272 - DNA, 25 bp, Homo sapien
ccaatgttactgaagggcacttcca

SEQ ID NO: 5274273 - DNA, 25 bp, Homo sapien
tggccttcctctggactgatgtggg

SEQ ID NO: 5274274 - DNA, 25 bp, Homo sapien
gatgtgggtcccaatgttactgaag

SEQ ID NO: 5274275 - DNA, 25 bp, Homo sapien
cctcgagggaagtcctagctgccca

SEQ ID NO: 5274276 - DNA, 25 bp, Homo sapien
cagtaaatggtacgacattgagcac

SEQ ID NO: 5274277 - DNA, 25 bp, Homo sapien
gtcagcctgcacttgccgtcagtaa

SEQ ID NO: 5274278 - DNA, 25 bp, Homo sapien
tacgacattgagcaccaaggagctc

SEQ ID NO: 5274279 - DNA, 25 bp, Homo sapien
ctgccgagagtcagaggtggctgca

SEQ ID NO: 5274280 - DNA, 25 bp, Homo sapien
cagctacagcaaaacactagtcttg

SEQ ID NO: 5274281 - DNA, 25 bp, Homo sapien
ggaagacatcactctcggatcctgt

SEQ ID NO: 5274282 - DNA, 25 bp, Homo sapien
aactgaattggccactgacactggg

SEQ ID NO: 5274283 - DNA, 25 bp, Homo sapien
gatactgagcagtgaacagaccaca

SEQ ID NO: 5274284 - DNA, 25 bp, Homo sapien
tctggatagctgcagcccagttgtc

SEQ ID NO: 5274285 - DNA, 25 bp, Homo sapien
ttgtcatggaaaccggtcacgcagg

SEQ ID NO: 5274286 - DNA, 25 bp, Homo sapien
acgcagggctcggtagcaggaccct

SEQ ID NO: 5274287 - DNA, 25 bp, Homo sapien
ctgccacggtgccgcaggctcagag

SEQ ID NO: 5274288 - DNA, 25 bp, Homo sapien
cggctgggcaggttcaggccccttc

SEQ ID NO: 5274289 - DNA, 25 bp, Homo sapien
cacagcggctgggcaggttcaggcc

SEQ ID NO: 5274290 - DNA, 25 bp, Homo sapien
acagcggctgggcaggttcaggccc

SEQ ID NO: 5274291 - DNA, 25 bp, Homo sapien
agcggctgggcaggttcaggcccct

SEQ ID NO: 5274292 - DNA, 25 bp, Homo sapien
acagaggaaggcgaggagagccatc

SEQ ID NO: 5274293 - DNA, 25 bp, Homo sapien
gagagccatccgcttcctgcttctg

SEQ ID NO: 5274294 - DNA, 25 bp, Homo sapien
gaggagagccatccgcttcctgctt

SEQ ID NO: 5274295 - DNA, 25 bp, Homo sapien
gaaggcgaggagagccatccgcttc

SEQ ID NO: 5274296 - DNA, 25 bp, Homo sapien
aagtgagaggctcccgctatctcag

SEQ ID NO: 5274297 - DNA, 25 bp, Homo sapien
gccatgcgcactgggaataagtgag

SEQ ID NO: 5274298 - DNA, 25 bp, Homo sapien
cggctgctgcggaggtaggagtttg

SEQ ID NO: 5274299 - DNA, 25 bp, Homo sapien
ggtctggagggaacacgggcagcca

SEQ ID NO: 5274300 - DNA, 25 bp, Homo sapien
agccgcagccaccgtcccaagagag

SEQ ID NO: 5274301 - DNA, 25 bp, Homo sapien
gtggagggatgcaagctcagaggcc

SEQ ID NO: 5274302 - DNA, 25 bp, Homo sapien
gagccgcagccaccgtcccaagaga

SEQ ID NO: 5274303 - DNA, 25 bp, Homo sapien
acgaaaagtggctcaacagtccaag

SEQ ID NO: 5274304 - DNA, 25 bp, Homo sapien
aacacgaaaagtggctcaacagtcc

SEQ ID NO: 5274305 - DNA, 25 bp, Homo sapien
cgaaaagtggctcaacagtccaaga

SEQ ID NO: 5274306 - DNA, 25 bp, Homo sapien
cacgaaaagtggctcaacagtccaa

SEQ ID NO: 5274307 - DNA, 25 bp, Homo sapien
tgctttgtcaatccagaccctatag

SEQ ID NO: 5274308 - DNA, 25 bp, Homo sapien
cagcttaggttttagtgatctccag

SEQ ID NO: 5274309 - DNA, 25 bp, Homo sapien
tgttctgggtagcacactctgcctc

SEQ ID NO: 5274310 - DNA, 25 bp, Homo sapien
agggcgctttatctcagggttggaa

SEQ ID NO: 5274311 - DNA, 25 bp, Homo sapien
actcgggagaaaaccaggcagagag

SEQ ID NO: 5274312 - DNA, 25 bp, Homo sapien
gactcgggagaaaaccaggcagaga

SEQ ID NO: 5274313 - DNA, 25 bp, Homo sapien
tccagactcgggagaaaaccaggca

SEQ ID NO: 5274314 - DNA, 25 bp, Homo sapien
cagactcgggagaaaaccaggcaga

SEQ ID NO: 5274315 - DNA, 25 bp, Homo sapien
gagacaacactccttacccctagga

SEQ ID NO: 5274316 - DNA, 25 bp, Homo sapien
gaaggatttgaaacaactgcaactc

SEQ ID NO: 5274317 - DNA, 25 bp, Homo sapien
actagctagaacagggatggctgga

SEQ ID NO: 5274318 - DNA, 25 bp, Homo sapien
gactacacactacctctgagctgct

SEQ ID NO: 5274319 - DNA, 25 bp, Homo sapien
tgacgacttccaccccggtcctctg

SEQ ID NO: 5274320 - DNA, 25 bp, Homo sapien
gcaggaaggtgtcactctccccatc

SEQ ID NO: 5274321 - DNA, 25 bp, Homo sapien
ttccatactcagcagtcaggcagca

SEQ ID NO: 5274322 - DNA, 25 bp, Homo sapien
catcggtcatctctgaccctcatgg

SEQ ID NO: 5274323 - DNA, 25 bp, Homo sapien
tggctgtggcactctgatggggagt

SEQ ID NO: 5274324 - DNA, 25 bp, Homo sapien
ttggctgtggcactctgatggggag

SEQ ID NO: 5274325 - DNA, 25 bp, Homo sapien
ggctgtggcactctgatggggagtc

SEQ ID NO: 5274326 - DNA, 25 bp, Homo sapien
ttgttgttggttgggctgctgcagc

SEQ ID NO: 5274327 - DNA, 25 bp, Homo sapien
gggcagcacgatgccagctttcctt

SEQ ID NO: 5274328 - DNA, 25 bp, Homo sapien
ccagctttccttgccattgttgttg

SEQ ID NO: 5274329 - DNA, 25 bp, Homo sapien
ccattgttgttggttgggctgctgc

SEQ ID NO: 5274330 - DNA, 25 bp, Homo sapien
ttggcaaagccggtctgaacgtccc

SEQ ID NO: 5274331 - DNA, 25 bp, Homo sapien
tcactggtggctcctcacttgcgac

SEQ ID NO: 5274332 - DNA, 25 bp, Homo sapien
agcaacgctccagccgtgtggacag

SEQ ID NO: 5274333 - DNA, 25 bp, Homo sapien
tcagggtagcccctaagtaacggca

SEQ ID NO: 5274334 - DNA, 25 bp, Homo sapien
gaccctctggttggcgttgatggtc

SEQ ID NO: 5274335 - DNA, 25 bp, Homo sapien
tccttgcagaccctctggttggcgt

SEQ ID NO: 5274336 - DNA, 25 bp, Homo sapien
gcgttgatggtcctgacatcctgac

SEQ ID NO: 5274337 - DNA, 25 bp, Homo sapien
tggcgttgatggtcctgacatcctg

SEQ ID NO: 5274338 - DNA, 25 bp, Homo sapien
acagctcaagggacctggcggtgct

SEQ ID NO: 5274339 - DNA, 25 bp, Homo sapien
tgcagggtctcagcctgcggacagc

SEQ ID NO: 5274340 - DNA, 25 bp, Homo sapien
tcttccgcaatagcctcacagtgca

SEQ ID NO: 5274341 - DNA, 25 bp, Homo sapien
gccctttgcctcttccgcaatagcc

SEQ ID NO: 5274342 - DNA, 25 bp, Homo sapien
catcctcgtgggtcagagggcagaa

SEQ ID NO: 5274343 - DNA, 25 bp, Homo sapien
ttgtgggtcgaacaaggccagccac

SEQ ID NO: 5274344 - DNA, 25 bp, Homo sapien
tctgcaggcatcttaacttccctga

SEQ ID NO: 5274345 - DNA, 25 bp, Homo sapien
tatccttgtgggtcgaacaaggcca

SEQ ID NO: 5274346 - DNA, 25 bp, Homo sapien
caggaactgctcttgtggaaaaggg

SEQ ID NO: 5274347 - DNA, 25 bp, Homo sapien
agcccctgacagtttcctaatgaca

SEQ ID NO: 5274348 - DNA, 25 bp, Homo sapien
gactccatctgaggcgatgaccacg

SEQ ID NO: 5274349 - DNA, 25 bp, Homo sapien
tttcctaatgacacgcgtgtgggcc

SEQ ID NO: 5274350 - DNA, 25 bp, Homo sapien
gactatccaataccgtcagtgactg

SEQ ID NO: 5274351 - DNA, 25 bp, Homo sapien
tgactgtccagtaccctcgatgagc

SEQ ID NO: 5274352 - DNA, 25 bp, Homo sapien
tacactcagtgcatgttcagtactc

SEQ ID NO: 5274353 - DNA, 25 bp, Homo sapien
tgatggtacaatgccctcgatgagc

SEQ ID NO: 5274354 - DNA, 25 bp, Homo sapien
ccatcgagtcccctggacagcttga

SEQ ID NO: 5274355 - DNA, 25 bp, Homo sapien
tcagggctttctatacagtcgcggc

SEQ ID NO: 5274356 - DNA, 25 bp, Homo sapien
tatacaatgggaacaacagcttcca

SEQ ID NO: 5274357 - DNA, 25 bp, Homo sapien
cagtcgcggcttttgactggagagc

SEQ ID NO: 5274358 - DNA, 25 bp, Homo sapien
cagaacaggaaccatcatcagaagc

SEQ ID NO: 5274359 - DNA, 25 bp, Homo sapien
ccagaacaggaaccatcatcagaag

SEQ ID NO: 5274360 - DNA, 25 bp, Homo sapien
acgtccttggcatatgcaccaggag

SEQ ID NO: 5274361 - DNA, 25 bp, Homo sapien
ctactgttccttgcagggcacgtcc

SEQ ID NO: 5274362 - DNA, 25 bp, Homo sapien
aagaacgcagcctgtgggtaagtac

SEQ ID NO: 5274363 - DNA, 25 bp, Homo sapien
tgtatattaggtaggtttactctag

SEQ ID NO: 5274364 - DNA, 25 bp, Homo sapien
agtgtaagaacgcagcctgtgggta

SEQ ID NO: 5274365 - DNA, 25 bp, Homo sapien
tttctgtacagccagtgtaagaacg

SEQ ID NO: 5274366 - DNA, 25 bp, Homo sapien
ataacgacggtgtgctctctctcca

SEQ ID NO: 5274367 - DNA, 25 bp, Homo sapien
tattgaataacgacggtgtgctctc

SEQ ID NO: 5274368 - DNA, 25 bp, Homo sapien
aactacatattgaataacgacggtg

SEQ ID NO: 5274369 - DNA, 25 bp, Homo sapien
tacatattgaataacgacggtgtgc

SEQ ID NO: 5274370 - DNA, 25 bp, Homo sapien
cgtggagctcgaagaccacagatgc

SEQ ID NO: 5274371 - DNA, 25 bp, Homo sapien
tctcccgcgtggagctcgaagacca

SEQ ID NO: 5274372 - DNA, 25 bp, Homo sapien
cgcgtggagctcgaagaccacagat

SEQ ID NO: 5274373 - DNA, 25 bp, Homo sapien
tcccgcgtggagctcgaagaccaca

SEQ ID NO: 5274374 - DNA, 25 bp, Homo sapien
tgaccccaattccaccagaggagga

SEQ ID NO: 5274375 - DNA, 25 bp, Homo sapien
ctagtccgggaggatgcagctcagc

SEQ ID NO: 5274376 - DNA, 25 bp, Homo sapien
taaaattggcgcttcccgcacatgc

SEQ ID NO: 5274377 - DNA, 25 bp, Homo sapien
gcagctcagctcgtggagtccgaga

SEQ ID NO: 5274378 - DNA, 25 bp, Homo sapien
tcggacgcagcaaggccagctctag

SEQ ID NO: 5274379 - DNA, 25 bp, Homo sapien
tctggagagttctggcgcctcggcg

SEQ ID NO: 5274380 - DNA, 25 bp, Homo sapien
tctttcccttcatcgccttggtgtc

SEQ ID NO: 5274381 - DNA, 25 bp, Homo sapien
ctctcggccagagcgaaggatattc

SEQ ID NO: 5274382 - DNA, 25 bp, Homo sapien
ggctctcaaaatggagcgccggcat

SEQ ID NO: 5274383 - DNA, 25 bp, Homo sapien
gaggctctcaaaatggagcgccggc

SEQ ID NO: 5274384 - DNA, 25 bp, Homo sapien
cggcatggggttgggctgcggaggg

SEQ ID NO: 5274385 - DNA, 25 bp, Homo sapien
tctcaaaatggagcgccggcatggg

SEQ ID NO: 5274386 - DNA, 25 bp, Homo sapien
gcggccttttggtatggatgcgctt

SEQ ID NO: 5274387 - DNA, 25 bp, Homo sapien
ggccttttggtatggatgcgcttcc

SEQ ID NO: 5274388 - DNA, 25 bp, Homo sapien
gggcggccttttggtatggatgcgc

SEQ ID NO: 5274389 - DNA, 25 bp, Homo sapien
cttttggtatggatgcgcttcccaa

SEQ ID NO: 5274390 - DNA, 25 bp, Homo sapien
ctagcaccatttcaccctggagctg

SEQ ID NO: 5274391 - DNA, 25 bp, Homo sapien
ctgtgcagagtttaaggtcttgggc

SEQ ID NO: 5274392 - DNA, 25 bp, Homo sapien
cagactgggttaaggtgggaatcaa

SEQ ID NO: 5274393 - DNA, 25 bp, Homo sapien
tgacagatgccgaggctcccgtttg

SEQ ID NO: 5274394 - DNA, 25 bp, Homo sapien
cagcagcgttcatgagcacagggtg

SEQ ID NO: 5274395 - DNA, 25 bp, Homo sapien
catttgaaagttggctggtgctcgc

SEQ ID NO: 5274396 - DNA, 25 bp, Homo sapien
gttcccggcagtacctccgagcctg

SEQ ID NO: 5274397 - DNA, 25 bp, Homo sapien
tgccctctgaggatgggtcggccat

SEQ ID NO: 5274398 - DNA, 25 bp, Homo sapien
ggtctctgtcaatgttcccggcagt

SEQ ID NO: 5274399 - DNA, 25 bp, Homo sapien
tccgagcctgccctctgaggatggg

SEQ ID NO: 5274400 - DNA, 25 bp, Homo sapien
ggcgtcgcctccacttgatagagga

SEQ ID NO: 5274401 - DNA, 25 bp, Homo sapien
tgaggcgtatccacaaagtgtccag

SEQ ID NO: 5274402 - DNA, 25 bp, Homo sapien
tccatggattccgtagagctttgag

SEQ ID NO: 5274403 - DNA, 25 bp, Homo sapien
ctccacttgatagaggaaaaagcag

SEQ ID NO: 5274404 - DNA, 25 bp, Homo sapien
tggcaagccgtgcactgtcacaata

SEQ ID NO: 5274405 - DNA, 25 bp, Homo sapien
tccatggtagttggtaaatagcccc

SEQ ID NO: 5274406 - DNA, 25 bp, Homo sapien
gaaggctgatctcaatcctcggagt

SEQ ID NO: 5274407 - DNA, 25 bp, Homo sapien
tgagccagcctagtttgtccacaga

SEQ ID NO: 5274408 - DNA, 25 bp, Homo sapien
cttccaggttgacttgccagggtgt

SEQ ID NO: 5274409 - DNA, 25 bp, Homo sapien
tggccaaattaaggccacggtcttg

SEQ ID NO: 5274410 - DNA, 25 bp, Homo sapien
cgaggtgtcgggactcaaattccgg

SEQ ID NO: 5274411 - DNA, 25 bp, Homo sapien
gctgaaaccaatgtcgacttggcca

SEQ ID NO: 5274412 - DNA, 25 bp, Homo sapien
gggatgcagagggagtggaccctgt

SEQ ID NO: 5274413 - DNA, 25 bp, Homo sapien
gatgcagagggagtggaccctgtgg

SEQ ID NO: 5274414 - DNA, 25 bp, Homo sapien
ggatgcagagggagtggaccctgtg

SEQ ID NO: 5274415 - DNA, 25 bp, Homo sapien
cacgtgcctttggatgttctgaata

SEQ ID NO: 5274416 - DNA, 25 bp, Homo sapien
tcctcctgggtgtctggcgtgtgcc

SEQ ID NO: 5274417 - DNA, 25 bp, Homo sapien
ggtgtctggcgtgtgccttgcgtgt

SEQ ID NO: 5274418 - DNA, 25 bp, Homo sapien
tctggcgtgtgccttgcgtgtgctg

SEQ ID NO: 5274419 - DNA, 25 bp, Homo sapien
atatcagccccaggctgattatctg

SEQ ID NO: 5274420 - DNA, 25 bp, Homo sapien
gattatctgcagaccgggatcccat

SEQ ID NO: 5274421 - DNA, 25 bp, Homo sapien
cagggacatatcagccccaggctga

SEQ ID NO: 5274422 - DNA, 25 bp, Homo sapien
tgattatctgcagaccgggatccca

SEQ ID NO: 5274423 - DNA, 25 bp, Homo sapien
cctgcatcaggtaggagtgctgagt

SEQ ID NO: 5274424 - DNA, 25 bp, Homo sapien
tagagagggtgagtttggaccattc

SEQ ID NO: 5274425 - DNA, 25 bp, Homo sapien
tgctgagtcatgagattgggttgaa

SEQ ID NO: 5274426 - DNA, 25 bp, Homo sapien
atggcggctttagcacagctgtggc

SEQ ID NO: 5274427 - DNA, 25 bp, Homo sapien
ctggaacctgcccatcacatcaagg

SEQ ID NO: 5274428 - DNA, 25 bp, Homo sapien
aggctggccaccttcgcactggaac

SEQ ID NO: 5274429 - DNA, 25 bp, Homo sapien
atcacatcaaggagccctctcaggc

SEQ ID NO: 5274430 - DNA, 25 bp, Homo sapien
aggctgaaaaccctgtgccggggtg

SEQ ID NO: 5274431 - DNA, 25 bp, Homo sapien
ttatcttcttccaatcgaattcccg

SEQ ID NO: 5274432 - DNA, 25 bp, Homo sapien
cttcccattccccaaatcgcctctg

SEQ ID NO: 5274433 - DNA, 25 bp, Homo sapien
tcgaattcccgtcagtcgtggagca

SEQ ID NO: 5274434 - DNA, 25 bp, Homo sapien
cttcagtagtggctcccttcccatt

SEQ ID NO: 5274435 - DNA, 25 bp, Homo sapien
tgggtccagtgacccggcatggagc

SEQ ID NO: 5274436 - DNA, 25 bp, Homo sapien
agtgacccggcatggagccagcaaa

SEQ ID NO: 5274437 - DNA, 25 bp, Homo sapien
tgacccggcatggagccagcaaaca

SEQ ID NO: 5274438 - DNA, 25 bp, Homo sapien
ccagtgacccggcatggagccagca

SEQ ID NO: 5274439 - DNA, 25 bp, Homo sapien
gatggtctctgactggatagcccca

SEQ ID NO: 5274440 - DNA, 25 bp, Homo sapien
gagcttttcctaaatcattcgccct

SEQ ID NO: 5274441 - DNA, 25 bp, Homo sapien
gggatggtctctgactggatagccc

SEQ ID NO: 5274442 - DNA, 25 bp, Homo sapien
tcgccctgttcacctgggctttgag

SEQ ID NO: 5274443 - DNA, 25 bp, Homo sapien
ctgggtaggaagcccccagtgtggc

SEQ ID NO: 5274444 - DNA, 25 bp, Homo sapien
ccagtgtggccccaccttggctgtg

SEQ ID NO: 5274445 - DNA, 25 bp, Homo sapien
tgggggtcctgcagagtcctgtgtc

SEQ ID NO: 5274446 - DNA, 25 bp, Homo sapien
tggccccaccttggctgtgacctgg

SEQ ID NO: 5274447 - DNA, 25 bp, Homo sapien
ttctgcggggttggctttatgatgc

SEQ ID NO: 5274448 - DNA, 25 bp, Homo sapien
gacaacccggccatcacaggggctt

SEQ ID NO: 5274449 - DNA, 25 bp, Homo sapien
cttctgggccagacaacccggccat

SEQ ID NO: 5274450 - DNA, 25 bp, Homo sapien
tctttggaactcagggtctttggga

SEQ ID NO: 5274451 - DNA, 25 bp, Homo sapien
tgtagaggagatcacggcaagctgt

SEQ ID NO: 5274452 - DNA, 25 bp, Homo sapien
cagaatccggtgtctgcttggccgc

SEQ ID NO: 5274453 - DNA, 25 bp, Homo sapien
caagctgtctgcatggacgatggca

SEQ ID NO: 5274454 - DNA, 25 bp, Homo sapien
tgtcactaataggatttgccgagcc

SEQ ID NO: 5274455 - DNA, 25 bp, Homo sapien
gagaagcgcttggtgtattccccca

SEQ ID NO: 5274456 - DNA, 25 bp, Homo sapien
ctctagctgctgtggggcacgtcca

SEQ ID NO: 5274457 - DNA, 25 bp, Homo sapien
tggccgagggccatgcggtgacgca

SEQ ID NO: 5274458 - DNA, 25 bp, Homo sapien
cggtgacgcactggggactggctct

SEQ ID NO: 5274459 - DNA, 25 bp, Homo sapien
ccccacagcgttcctggtgctctgg

SEQ ID NO: 5274460 - DNA, 25 bp, Homo sapien
tctgggtgcctgctgtttctgagcc

SEQ ID NO: 5274461 - DNA, 25 bp, Homo sapien
gctctgggtgcctgctgtttctgag

SEQ ID NO: 5274462 - DNA, 25 bp, Homo sapien
ccacagcgttcctggtgctctgggt

SEQ ID NO: 5274463 - DNA, 25 bp, Homo sapien
atgctggtaagcaggcgatactgac

SEQ ID NO: 5274464 - DNA, 25 bp, Homo sapien
gccccatgctggtaagcaggcgata

SEQ ID NO: 5274465 - DNA, 25 bp, Homo sapien
ggccccatgctggtaagcaggcgat

SEQ ID NO: 5274466 - DNA, 25 bp, Homo sapien
cccatgctggtaagcaggcgatact

SEQ ID NO: 5274467 - DNA, 25 bp, Homo sapien
tgaaaggtgacttgtggtctgaaca

SEQ ID NO: 5274468 - DNA, 25 bp, Homo sapien
tttaacagtggtactcagagaggct

SEQ ID NO: 5274469 - DNA, 25 bp, Homo sapien
catgtgacagtgaccaacaggtgaa

SEQ ID NO: 5274470 - DNA, 25 bp, Homo sapien
ggcttgtggccccaactcatgtgac

SEQ ID NO: 5274471 - DNA, 25 bp, Homo sapien
ttaagagtccaggtcgctgcagcat

SEQ ID NO: 5274472 - DNA, 25 bp, Homo sapien
tgggaaggcccatctttgtcaccag

SEQ ID NO: 5274473 - DNA, 25 bp, Homo sapien
tgtgagtgcctcgtcagtgtttaag

SEQ ID NO: 5274474 - DNA, 25 bp, Homo sapien
gaaggcccatctttgtcaccagcag

SEQ ID NO: 5274475 - DNA, 25 bp, Homo sapien
gatgcccagcactaatctgcatgca

SEQ ID NO: 5274476 - DNA, 25 bp, Homo sapien
taacacacatggtgggcactcggcc

SEQ ID NO: 5274477 - DNA, 25 bp, Homo sapien
ggacgctgtccctgtacctaacaca

SEQ ID NO: 5274478 - DNA, 25 bp, Homo sapien
cactcggcctaggtttgcagggcct

SEQ ID NO: 5274479 - DNA, 25 bp, Homo sapien
caattcgagttaatggagtgttccc

SEQ ID NO: 5274480 - DNA, 25 bp, Homo sapien
ccttcaaggtctccggaacagcaga

SEQ ID NO: 5274481 - DNA, 25 bp, Homo sapien
cttagagatagagccaggaggaaat

SEQ ID NO: 5274482 - DNA, 25 bp, Homo sapien
cagcctgagcgccaattccttcaag

SEQ ID NO: 5274483 - DNA, 25 bp, Homo sapien
ccataaacagttgagaatgagctct

SEQ ID NO: 5274484 - DNA, 25 bp, Homo sapien
tctcggagtgtcaaagcagtgcgca

SEQ ID NO: 5274485 - DNA, 25 bp, Homo sapien
gctgggtttctcctcgtggagagcc

SEQ ID NO: 5274486 - DNA, 25 bp, Homo sapien
gctggtgtcccggagtctctttcct

SEQ ID NO: 5274487 - DNA, 25 bp, Homo sapien
cttggggcttctatcaacgttgtcc

SEQ ID NO: 5274488 - DNA, 25 bp, Homo sapien
gcggccttgggcatgtgcccctgtc

SEQ ID NO: 5274489 - DNA, 25 bp, Homo sapien
ttctatcaacgttgtcctgggcttc

SEQ ID NO: 5274490 - DNA, 25 bp, Homo sapien
gccttgggcatgtgcccctgtccat

SEQ ID NO: 5274491 - DNA, 25 bp, Homo sapien
ctgtcataggctcccggggggacac

SEQ ID NO: 5274492 - DNA, 25 bp, Homo sapien
tcagttggggccatggatgtagcaa

SEQ ID NO: 5274493 - DNA, 25 bp, Homo sapien
gggccatggatgtagcaagggtcag

SEQ ID NO: 5274494 - DNA, 25 bp, Homo sapien
agggtcagctgtcataggctcccgg

SEQ ID NO: 5274495 - DNA, 25 bp, Homo sapien
gaggcgatttctccttccgctttct

SEQ ID NO: 5274496 - DNA, 25 bp, Homo sapien
cttagatctgcatcccgtgggtggg

SEQ ID NO: 5274497 - DNA, 25 bp, Homo sapien
ctcttcctgagggaggcgatttctc

SEQ ID NO: 5274498 - DNA, 25 bp, Homo sapien
cgcccttagatctgcatcccgtggg

SEQ ID NO: 5274499 - DNA, 25 bp, Homo sapien
gcatacaaatgtcctggcccgaggc

SEQ ID NO: 5274500 - DNA, 25 bp, Homo sapien
gcctggcccggcaggtcgtgctgag

SEQ ID NO: 5274501 - DNA, 25 bp, Homo sapien
ctgaggctgatacccgtgtcaagaa

SEQ ID NO: 5274502 - DNA, 25 bp, Homo sapien
tgtcctggcccgaggccactgtcag

SEQ ID NO: 5274503 - DNA, 25 bp, Homo sapien
tgaggaagacaggtgcgagcagcat

SEQ ID NO: 5274504 - DNA, 25 bp, Homo sapien
gctggcaaccccgaccgctgaggaa

SEQ ID NO: 5274505 - DNA, 25 bp, Homo sapien
caaccccgaccgctgaggaagacag

SEQ ID NO: 5274506 - DNA, 25 bp, Homo sapien
gggcaggacgctggcaaccccgacc

SEQ ID NO: 5274507 - DNA, 25 bp, Homo sapien
ggctggaacacgctgagcagcttct

SEQ ID NO: 5274508 - DNA, 25 bp, Homo sapien
tttgtaaatatagtgccaggtggca

SEQ ID NO: 5274509 - DNA, 25 bp, Homo sapien
tctgactgggacaaatgaaggattc

SEQ ID NO: 5274510 - DNA, 25 bp, Homo sapien
tttccccacgactgttgagcaagaa

SEQ ID NO: 5274511 - DNA, 25 bp, Homo sapien
ccagcttcatttagggcatttcagc

SEQ ID NO: 5274512 - DNA, 25 bp, Homo sapien
ctgaggcgagcgtgccacacgggtg

SEQ ID NO: 5274513 - DNA, 25 bp, Homo sapien
cacacgggtgaactcatatctgcag

SEQ ID NO: 5274514 - DNA, 25 bp, Homo sapien
tcctcttcctgtcgcagtagcagct

SEQ ID NO: 5274515 - DNA, 25 bp, Homo sapien
gaacgactttcctcctgcatacctg

SEQ ID NO: 5274516 - DNA, 25 bp, Homo sapien
catcatggtgtgcagggaacgactt

SEQ ID NO: 5274517 - DNA, 25 bp, Homo sapien
gagacgaaggctctattccacgcag

SEQ ID NO: 5274518 - DNA, 25 bp, Homo sapien
gaatcaaggactcacagcaaaggca

SEQ ID NO: 5274519 - DNA, 25 bp, Homo sapien
ttaaaccacacacggacatgctgcc

SEQ ID NO: 5274520 - DNA, 25 bp, Homo sapien
ccagagaggagtacgatgccatccc

SEQ ID NO: 5274521 - DNA, 25 bp, Homo sapien
gctgccaggaggaacgtcatcacct

SEQ ID NO: 5274522 - DNA, 25 bp, Homo sapien
caggaggaacgtcatcacctttcag

SEQ ID NO: 5274523 - DNA, 25 bp, Homo sapien
gcaaggaccgtatgggttttgttca

SEQ ID NO: 5274524 - DNA, 25 bp, Homo sapien
cgtgtggtgtcggcccccgaggcaa

SEQ ID NO: 5274525 - DNA, 25 bp, Homo sapien
cgaggcaaggaccgtatgggttttg

SEQ ID NO: 5274526 - DNA, 25 bp, Homo sapien
cggcccccgaggcaaggaccgtatg

SEQ ID NO: 5274527 - DNA, 25 bp, Homo sapien
gagccacatgcggtttggtcgggtg

SEQ ID NO: 5274528 - DNA, 25 bp, Homo sapien
ccacatgcggtttggtcgggtgccc

SEQ ID NO: 5274529 - DNA, 25 bp, Homo sapien
gccacatgcggtttggtcgggtgcc

SEQ ID NO: 5274530 - DNA, 25 bp, Homo sapien
acatgcggtttggtcgggtgcccca

SEQ ID NO: 5274531 - DNA, 25 bp, Homo sapien
tgacagtgccctaaacaggccatgg

SEQ ID NO: 5274532 - DNA, 25 bp, Homo sapien
tgtcacctgattgggcagacccttg

SEQ ID NO: 5274533 - DNA, 25 bp, Homo sapien
ttggtcagaacatcaaggcactggt

SEQ ID NO: 5274534 - DNA, 25 bp, Homo sapien
tctcatgggacacttggttgctacc

SEQ ID NO: 5274535 - DNA, 25 bp, Homo sapien
tggatgccccgcaatcgttcctgct

SEQ ID NO: 5274536 - DNA, 25 bp, Homo sapien
ccgcaatcgttcctgctctcccggg

SEQ ID NO: 5274537 - DNA, 25 bp, Homo sapien
tgcttgcaagagtggatgccccgca

SEQ ID NO: 5274538 - DNA, 25 bp, Homo sapien
gcaagagtggatgccccgcaatcgt

SEQ ID NO: 5274539 - DNA, 25 bp, Homo sapien
aggtccatgccgaggagaccaggca

SEQ ID NO: 5274540 - DNA, 25 bp, Homo sapien
ccacagccgcttgcacgtatagata

SEQ ID NO: 5274541 - DNA, 25 bp, Homo sapien
cgtatagatactgtggtcccctttc

SEQ ID NO: 5274542 - DNA, 25 bp, Homo sapien
ggcccatgcgttttgtgatcccaag

SEQ ID NO: 5274543 - DNA, 25 bp, Homo sapien
ctggtctgtcctccctgttgattgg

SEQ ID NO: 5274544 - DNA, 25 bp, Homo sapien
tcccatccgtgttgtgagcacaggc

SEQ ID NO: 5274545 - DNA, 25 bp, Homo sapien
tgtgtaggtcccgtatttaatgcct

SEQ ID NO: 5274546 - DNA, 25 bp, Homo sapien
tgtgtgccctgagccgtgatgatcc

SEQ ID NO: 5274547 - DNA, 25 bp, Homo sapien
acgggcatagccaagggtgcagtca

SEQ ID NO: 5274548 - DNA, 25 bp, Homo sapien
cgccgctgccgtcagtgcttctggt

SEQ ID NO: 5274549 - DNA, 25 bp, Homo sapien
tgccgtcagtgcttctggtcccagc

SEQ ID NO: 5274550 - DNA, 25 bp, Homo sapien
aggacgggcatagccaagggtgcag

SEQ ID NO: 5274551 - DNA, 25 bp, Homo sapien
ctcggccgtcggggaacagactccg

SEQ ID NO: 5274552 - DNA, 25 bp, Homo sapien
ggggaacagactccggcttggggca

SEQ ID NO: 5274553 - DNA, 25 bp, Homo sapien
cgtcggggaacagactccggcttgg

SEQ ID NO: 5274554 - DNA, 25 bp, Homo sapien
ccgtcggggaacagactccggcttg

SEQ ID NO: 5274555 - DNA, 25 bp, Homo sapien
tggtattccggagccatgggtgctc

SEQ ID NO: 5274556 - DNA, 25 bp, Homo sapien
ccgtctgtggtattccggagccatg

SEQ ID NO: 5274557 - DNA, 25 bp, Homo sapien
aatgcagggccaggtgccaccgtct

SEQ ID NO: 5274558 - DNA, 25 bp, Homo sapien
cctgggtccagcttcgtctgtccag

SEQ ID NO: 5274559 - DNA, 25 bp, Homo sapien
ggcttctgatgggtctgctgccttc

SEQ ID NO: 5274560 - DNA, 25 bp, Homo sapien
tcggcctcatgagctgggttggcat

SEQ ID NO: 5274561 - DNA, 25 bp, Homo sapien
gccttcgtcggcctcatgagctggg

SEQ ID NO: 5274562 - DNA, 25 bp, Homo sapien
cccttggttgctgcaggctatctgt

SEQ ID NO: 5274563 - DNA, 25 bp, Homo sapien
gacaggtccgtcagacttaagtagg

SEQ ID NO: 5274564 - DNA, 25 bp, Homo sapien
tcagagcgagctatacgggattcgt

SEQ ID NO: 5274565 - DNA, 25 bp, Homo sapien
tcctacctgtgtgtgggtggaccca

SEQ ID NO: 5274566 - DNA, 25 bp, Homo sapien
gatgtgcaccgtccacatgggagga

SEQ ID NO: 5274567 - DNA, 25 bp, Homo sapien
ccataggaacacagataagtgtgac

SEQ ID NO: 5274568 - DNA, 25 bp, Homo sapien
catggcgaccctactcttacaaaga

SEQ ID NO: 5274569 - DNA, 25 bp, Homo sapien
taagtgtgacccatatcctagtctt

SEQ ID NO: 5274570 - DNA, 25 bp, Homo sapien
gcagttaacagctaccagagtgcta

SEQ ID NO: 5274571 - DNA, 25 bp, Homo sapien
cggggttctggaattgctgcatgag

SEQ ID NO: 5274572 - DNA, 25 bp, Homo sapien
gttctggaattgctgcatgagttgc

SEQ ID NO: 5274573 - DNA, 25 bp, Homo sapien
tacacattaatactagccgaagcac

SEQ ID NO: 5274574 - DNA, 25 bp, Homo sapien
tctgtggcgtttcatcccactctcc

SEQ ID NO: 5274575 - DNA, 25 bp, Homo sapien
aatcttaggcaagacaatttcttat

SEQ ID NO: 5274576 - DNA, 25 bp, Homo sapien
gcaccatcaacatgcatggcttact

SEQ ID NO: 5274577 - DNA, 25 bp, Homo sapien
cacacatccaagaaggtgcctattc

SEQ ID NO: 5274578 - DNA, 25 bp, Homo sapien
tattcgtctagacaagaagcacaca

SEQ ID NO: 5274579 - DNA, 25 bp, Homo sapien
ccacatgcatttcaggcaggtcaca

SEQ ID NO: 5274580 - DNA, 25 bp, Homo sapien
catagtagatcgtcggcctctggaa

SEQ ID NO: 5274581 - DNA, 25 bp, Homo sapien
cattgaacgtagaggcagcagcaac

SEQ ID NO: 5274582 - DNA, 25 bp, Homo sapien
tccgatcgaggccatcacatgttgg

SEQ ID NO: 5274583 - DNA, 25 bp, Homo sapien
catagagtatgcaattaaatgatcc

SEQ ID NO: 5274584 - DNA, 25 bp, Homo sapien
ggctttacatgtgcgtggtcataga

SEQ ID NO: 5274585 - DNA, 25 bp, Homo sapien
tacataaaggtctgctcactcgact

SEQ ID NO: 5274586 - DNA, 25 bp, Homo sapien
catagacgccatcattcacataata

SEQ ID NO: 5274587 - DNA, 25 bp, Homo sapien
gaagtgattcgtcctttatacatac

SEQ ID NO: 5274588 - DNA, 25 bp, Homo sapien
aatcttaatgactttttgcatcagc

SEQ ID NO: 5274589 - DNA, 25 bp, Homo sapien
tatacatgaagtgattcgtccttta

SEQ ID NO: 5274590 - DNA, 25 bp, Homo sapien
ctagaaaggcagatcaacaatctta

SEQ ID NO: 5274591 - DNA, 25 bp, Homo sapien
cggaaagtatttgtccaacgctggg

SEQ ID NO: 5274592 - DNA, 25 bp, Homo sapien
caatgatattaactgcaagcgtgaa

SEQ ID NO: 5274593 - DNA, 25 bp, Homo sapien
aacgctgggttgattacgccggtga

SEQ ID NO: 5274594 - DNA, 25 bp, Homo sapien
gcaacatagtatctgccgggctcag

SEQ ID NO: 5274595 - DNA, 25 bp, Homo sapien
tattagaacggctactgagtattac

SEQ ID NO: 5274596 - DNA, 25 bp, Homo sapien
atttattagaacggctactgagtat

SEQ ID NO: 5274597 - DNA, 25 bp, Homo sapien
ttagaacggctactgagtattacag

SEQ ID NO: 5274598 - DNA, 25 bp, Homo sapien
tagaacggctactgagtattacagt

SEQ ID NO: 5274599 - DNA, 25 bp, Homo sapien
gatacatgctgaaaccaacctcagc

SEQ ID NO: 5274600 - DNA, 25 bp, Homo sapien
agccaccgccaatatcaagcagata

SEQ ID NO: 5274601 - DNA, 25 bp, Homo sapien
caaatttaagtttcacatcctcaga

SEQ ID NO: 5274602 - DNA, 25 bp, Homo sapien
atccaggaaagccaccgccaatatc

SEQ ID NO: 5274603 - DNA, 25 bp, Homo sapien
tcagagattgcctgcacgaaggtct

SEQ ID NO: 5274604 - DNA, 25 bp, Homo sapien
gtctcaggatcggtacagccgcttc

SEQ ID NO: 5274605 - DNA, 25 bp, Homo sapien
aggatcggtacagccgcttcctaca

SEQ ID NO: 5274606 - DNA, 25 bp, Homo sapien
tgtcaaaaacacagcgggcatcaga

SEQ ID NO: 5274607 - DNA, 25 bp, Homo sapien
tggcaccgaatttcacactgagacg

SEQ ID NO: 5274608 - DNA, 25 bp, Homo sapien
tgctggttctgagcgtggcaccgaa

SEQ ID NO: 5274609 - DNA, 25 bp, Homo sapien
cactgagacgacagactgctttgga

SEQ ID NO: 5274610 - DNA, 25 bp, Homo sapien
tcatcagtggcaatccgcaaaacca

SEQ ID NO: 5274611 - DNA, 25 bp, Homo sapien
tggactccattattagcagcatact

SEQ ID NO: 5274612 - DNA, 25 bp, Homo sapien
tgctttgggatgtgctctggcaact

SEQ ID NO: 5274613 - DNA, 25 bp, Homo sapien
tgcatagataatcctctctggaggc

SEQ ID NO: 5274614 - DNA, 25 bp, Homo sapien
acttgtttacaaggatttgcataga

SEQ ID NO: 5274615 - DNA, 25 bp, Homo sapien
cctgtcccggtagcagcaagggtct

SEQ ID NO: 5274616 - DNA, 25 bp, Homo sapien
atcctgtcccggtagcagcaagggt

SEQ ID NO: 5274617 - DNA, 25 bp, Homo sapien
cacgatggctttgctatcattacat

SEQ ID NO: 5274618 - DNA, 25 bp, Homo sapien
gcagcaagggtcttcacgatggctt

SEQ ID NO: 5274619 - DNA, 25 bp, Homo sapien
gagagcttttaaccacctcagatgt

SEQ ID NO: 5274620 - DNA, 25 bp, Homo sapien
tttctttagaatgtctcccaggtct

SEQ ID NO: 5274621 - DNA, 25 bp, Homo sapien
agagcttttaaccacctcagatgtt

SEQ ID NO: 5274622 - DNA, 25 bp, Homo sapien
ggagagcttttaaccacctcagatg

SEQ ID NO: 5274623 - DNA, 25 bp, Homo sapien
tgctcttccttagaccttgccaaag

SEQ ID NO: 5274624 - DNA, 25 bp, Homo sapien
gccagcatgggcctcatatacttac

SEQ ID NO: 5274625 - DNA, 25 bp, Homo sapien
gctcttttgagtctagccactgata

SEQ ID NO: 5274626 - DNA, 25 bp, Homo sapien
taacaagacatgtaagcctcattgc

SEQ ID NO: 5274627 - DNA, 25 bp, Homo sapien
tcatcgaggaagtggcagtcaaact

SEQ ID NO: 5274628 - DNA, 25 bp, Homo sapien
agtaaaaccttcatcgaggaagtgg

SEQ ID NO: 5274629 - DNA, 25 bp, Homo sapien
ccttcatcgaggaagtggcagtcaa

SEQ ID NO: 5274630 - DNA, 25 bp, Homo sapien
gaggaagtggcagtcaaactcttca

SEQ ID NO: 5274631 - DNA, 25 bp, Homo sapien
gattaacctgcaacataaatgtaaa

SEQ ID NO: 5274632 - DNA, 25 bp, Homo sapien
cttaagattaacctgcaacataaat

SEQ ID NO: 5274633 - DNA, 25 bp, Homo sapien
gagaaattcacttagaagccttagc

SEQ ID NO: 5274634 - DNA, 25 bp, Homo sapien
gccttagcaatacaattcttaagat

SEQ ID NO: 5274635 - DNA, 25 bp, Homo sapien
cacaaaggcaactctccaggaattc

SEQ ID NO: 5274636 - DNA, 25 bp, Homo sapien
tctcacaaaggcaactctccaggaa

SEQ ID NO: 5274637 - DNA, 25 bp, Homo sapien
acaaaggcaactctccaggaattcc

SEQ ID NO: 5274638 - DNA, 25 bp, Homo sapien
tcacaaaggcaactctccaggaatt

SEQ ID NO: 5274639 - DNA, 25 bp, Homo sapien
gaaataaaatagggaatttgctgtc

SEQ ID NO: 5274640 - DNA, 25 bp, Homo sapien
aaataaaatagggaatttgctgtct

SEQ ID NO: 5274641 - DNA, 25 bp, Homo sapien
taaaccttggcagtataaggacaca

SEQ ID NO: 5274642 - DNA, 25 bp, Homo sapien
gcagagctaatcatgccccggatat

SEQ ID NO: 5274643 - DNA, 25 bp, Homo sapien
ttttccaaggcagcacactaagcat

SEQ ID NO: 5274644 - DNA, 25 bp, Homo sapien
tactaggcataaggtacatgattcc

SEQ ID NO: 5274645 - DNA, 25 bp, Homo sapien
cacgcccggctagaactcagtattc

SEQ ID NO: 5274646 - DNA, 25 bp, Homo sapien
caattccgggaatgccaactgtcct

SEQ ID NO: 5274647 - DNA, 25 bp, Homo sapien
aagtttagcaattccgggaatgcca

SEQ ID NO: 5274648 - DNA, 25 bp, Homo sapien
aaccagcgttgcctaccaagtttag

SEQ ID NO: 5274649 - DNA, 25 bp, Homo sapien
tttcatcaaatgtggcaccttgtga

SEQ ID NO: 5274650 - DNA, 25 bp, Homo sapien
caaatgtggcaccttgtgaaccagc

SEQ ID NO: 5274651 - DNA, 25 bp, Homo sapien
caagcaagaacatcactctagtaac

SEQ ID NO: 5274652 - DNA, 25 bp, Homo sapien
ctagtaacaataaaagccactgtat

SEQ ID NO: 5274653 - DNA, 25 bp, Homo sapien
ctttaaaaatttctgccaggtagag

SEQ ID NO: 5274654 - DNA, 25 bp, Homo sapien
aaaatttctgccaggtagagctttc

SEQ ID NO: 5274655 - DNA, 25 bp, Homo sapien
ttctgccaggtagagctttcttctt

SEQ ID NO: 5274656 - DNA, 25 bp, Homo sapien
ttaaaaatttctgccaggtagagct

SEQ ID NO: 5274657 - DNA, 25 bp, Homo sapien
ccactgtgcaacccacttcagtgcc

SEQ ID NO: 5274658 - DNA, 25 bp, Homo sapien
gtgcaacccacttcagtgccagcag

SEQ ID NO: 5274659 - DNA, 25 bp, Homo sapien
tgtgcaacccacttcagtgccagca

SEQ ID NO: 5274660 - DNA, 25 bp, Homo sapien
actgtgcaacccacttcagtgccag

SEQ ID NO: 5274661 - DNA, 25 bp, Homo sapien
cccagggtgacgggcctgtcataaa

SEQ ID NO: 5274662 - DNA, 25 bp, Homo sapien
gggtgacgggcctgtcataaatcca

SEQ ID NO: 5274663 - DNA, 25 bp, Homo sapien
cagggtgacgggcctgtcataaatc

SEQ ID NO: 5274664 - DNA, 25 bp, Homo sapien
gcccagggtgacgggcctgtcataa

SEQ ID NO: 5274665 - DNA, 25 bp, Homo sapien
aatacttttttgcttttctgtatct

SEQ ID NO: 5274666 - DNA, 25 bp, Homo sapien
cgccaatacttttttgcttttctgt

SEQ ID NO: 5274667 - DNA, 25 bp, Homo sapien
gccaatacttttttgcttttctgta

SEQ ID NO: 5274668 - DNA, 25 bp, Homo sapien
tctgtatcttttaaggcgttactta

SEQ ID NO: 5274669 - DNA, 25 bp, Homo sapien
tgaagaacacctttcggtctttctg

SEQ ID NO: 5274670 - DNA, 25 bp, Homo sapien
ctgaagaacacctttcggtctttct

SEQ ID NO: 5274671 - DNA, 25 bp, Homo sapien
acacctttcggtctttctgtaacag

SEQ ID NO: 5274672 - DNA, 25 bp, Homo sapien
aacacctctaagtcatggccgagca

SEQ ID NO: 5274673 - DNA, 25 bp, Homo sapien
tgtatgtccgttcatctaagccaag

SEQ ID NO: 5274674 - DNA, 25 bp, Homo sapien
gacattcctgagaggttctgccttc

SEQ ID NO: 5274675 - DNA, 25 bp, Homo sapien
gcttttccgaaatcaccgagtcatt

SEQ ID NO: 5274676 - DNA, 25 bp, Homo sapien
ctcgtctgtaccaaggcgagcccgg

SEQ ID NO: 5274677 - DNA, 25 bp, Homo sapien
caaggccggggcccgctcgtctgta

SEQ ID NO: 5274678 - DNA, 25 bp, Homo sapien
tctgtagacacagcgaaaataaaaa

SEQ ID NO: 5274679 - DNA, 25 bp, Homo sapien
aaggaaactgaaggcgccaaggccg

SEQ ID NO: 5274680 - DNA, 25 bp, Homo sapien
cccaacggctccccggccagcgcgc

SEQ ID NO: 5274681 - DNA, 25 bp, Homo sapien
tccccaacggctccccggccagcgc

SEQ ID NO: 5274682 - DNA, 25 bp, Homo sapien
ctccccaacggctccccggccagcg

SEQ ID NO: 5274683 - DNA, 25 bp, Homo sapien
ccccaacggctccccggccagcgcg

SEQ ID NO: 5274684 - DNA, 25 bp, Homo sapien
aggagggactgacaaagccccacgg

SEQ ID NO: 5274685 - DNA, 25 bp, Homo sapien
ctacttatagcaccggcgggtcgcc

SEQ ID NO: 5274686 - DNA, 25 bp, Homo sapien
cagccacgatcggttccggccggga

SEQ ID NO: 5274687 - DNA, 25 bp, Homo sapien
atggagacgcaccagctcaaaccag

SEQ ID NO: 5274688 - DNA, 25 bp, Homo sapien
tgcccgagagcggaaaagggaaatc

SEQ ID NO: 5274689 - DNA, 25 bp, Homo sapien
aggaccgatgtgctggccacgtggg

SEQ ID NO: 5274690 - DNA, 25 bp, Homo sapien
attcctccggtgcaagggacctgga

SEQ ID NO: 5274691 - DNA, 25 bp, Homo sapien
gacctggaagtgatcccggtgccgc

SEQ ID NO: 5274692 - DNA, 25 bp, Homo sapien
ttggaggagctcagagcactggccc

SEQ ID NO: 5274693 - DNA, 25 bp, Homo sapien
gatctagatctagccttgggtgggt

SEQ ID NO: 5274694 - DNA, 25 bp, Homo sapien
tccttagggtgggagtacagccgat

SEQ ID NO: 5274695 - DNA, 25 bp, Homo sapien
tacagccgatgaagagttaaggaga

SEQ ID NO: 5274696 - DNA, 25 bp, Homo sapien
tagccgtaagcagaagtgagtcttc

SEQ ID NO: 5274697 - DNA, 25 bp, Homo sapien
tgtgggggtggtacgcccctatcaa

SEQ ID NO: 5274698 - DNA, 25 bp, Homo sapien
gaaacagagcaaacgctagccgtaa

SEQ ID NO: 5274699 - DNA, 25 bp, Homo sapien
cagtgaatacctgtttaatgaatgc

SEQ ID NO: 5274700 - DNA, 25 bp, Homo sapien
gatgagattaaccatcaaaacccat

SEQ ID NO: 5274701 - DNA, 25 bp, Homo sapien
gttagctccacccttaacaagctta

SEQ ID NO: 5274702 - DNA, 25 bp, Homo sapien
aaacccatcagagaacgttatagct

SEQ ID NO: 5274703 - DNA, 25 bp, Homo sapien
agagaacgttatagctccagcgctg

SEQ ID NO: 5274704 - DNA, 25 bp, Homo sapien
ccgtggttgtactctacttcaccaa

SEQ ID NO: 5274705 - DNA, 25 bp, Homo sapien
tggttgtactctacttcaccaaact

SEQ ID NO: 5274706 - DNA, 25 bp, Homo sapien
gtgtccgtggttgtactctacttca

SEQ ID NO: 5274707 - DNA, 25 bp, Homo sapien
gttgtactctacttcaccaaacttc

SEQ ID NO: 5274708 - DNA, 25 bp, Homo sapien
atgaagaatccagaaagatgctgac

SEQ ID NO: 5274709 - DNA, 25 bp, Homo sapien
tgtatgaagaatccagaaagatgct

SEQ ID NO: 5274710 - DNA, 25 bp, Homo sapien
tatgaagaatccagaaagatgctga

SEQ ID NO: 5274711 - DNA, 25 bp, Homo sapien
ctgtatgaagaatccagaaagatgc

SEQ ID NO: 5274712 - DNA, 25 bp, Homo sapien
caagactctggtgccgcaggaggct

SEQ ID NO: 5274713 - DNA, 25 bp, Homo sapien
tcaagactctggtgccgcaggaggc

SEQ ID NO: 5274714 - DNA, 25 bp, Homo sapien
agactctggtgccgcaggaggctgc

SEQ ID NO: 5274715 - DNA, 25 bp, Homo sapien
aagactctggtgccgcaggaggctg

SEQ ID NO: 5274716 - DNA, 25 bp, Homo sapien
ttcttagttctagaagtggggtgct

SEQ ID NO: 5274717 - DNA, 25 bp, Homo sapien
tttcttagttctagaagtggggtgc

SEQ ID NO: 5274718 - DNA, 25 bp, Homo sapien
ctttcttagttctagaagtggggtg

SEQ ID NO: 5274719 - DNA, 25 bp, Homo sapien
tcttagttctagaagtggggtgctg

SEQ ID NO: 5274720 - DNA, 25 bp, Homo sapien
gaaatgccattgtaggattaataag

SEQ ID NO: 5274721 - DNA, 25 bp, Homo sapien
aaatgccattgtaggattaataagc

SEQ ID NO: 5274722 - DNA, 25 bp, Homo sapien
gacgctgcaactgattgaggtctcc

SEQ ID NO: 5274723 - DNA, 25 bp, Homo sapien
catgtatttaacacagacgctgcaa

SEQ ID NO: 5274724 - DNA, 25 bp, Homo sapien
tgaagataagccagtaccagggtga

SEQ ID NO: 5274725 - DNA, 25 bp, Homo sapien
gataactccccataacgcctgtaag

SEQ ID NO: 5274726 - DNA, 25 bp, Homo sapien
cagggatgggtagagcaagcccata

SEQ ID NO: 5274727 - DNA, 25 bp, Homo sapien
agggatgggtagagcaagcccatac

SEQ ID NO: 5274728 - DNA, 25 bp, Homo sapien
ccagggatgggtagagcaagcccat

SEQ ID NO: 5274729 - DNA, 25 bp, Homo sapien
tacagaagctaaagagccagtagcc

SEQ ID NO: 5274730 - DNA, 25 bp, Homo sapien
cagttccacctggtgaggcctctca

SEQ ID NO: 5274731 - DNA, 25 bp, Homo sapien
ttccacctggtgaggcctctcaccc

SEQ ID NO: 5274732 - DNA, 25 bp, Homo sapien
tcacctccagttccacctggtgagg

SEQ ID NO: 5274733 - DNA, 25 bp, Homo sapien
cctccagttccacctggtgaggcct

SEQ ID NO: 5274734 - DNA, 25 bp, Homo sapien
catcagtcaccgtggttaacaaggc

SEQ ID NO: 5274735 - DNA, 25 bp, Homo sapien
cacatctgcgtcatcagtcaccgtg

SEQ ID NO: 5274736 - DNA, 25 bp, Homo sapien
cccagcactggcgttccctgcttgt

SEQ ID NO: 5274737 - DNA, 25 bp, Homo sapien
gcttgtcccacatctgcgtcatcag

SEQ ID NO: 5274738 - DNA, 25 bp, Homo sapien
tagtccgaggcctgcgccttataga

SEQ ID NO: 5274739 - DNA, 25 bp, Homo sapien
agcccatagcccgtgcagagcgcag

SEQ ID NO: 5274740 - DNA, 25 bp, Homo sapien
gcgcagagctgatgtcccatagccc

SEQ ID NO: 5274741 - DNA, 25 bp, Homo sapien
cccatagcccgtgcagagtgcagag

SEQ ID NO: 5274742 - DNA, 25 bp, Homo sapien
aaagctccattgtgaaataccgaaa

SEQ ID NO: 5274743 - DNA, 25 bp, Homo sapien
caaagcccagactctgaatcaactg

SEQ ID NO: 5274744 - DNA, 25 bp, Homo sapien
taggtgtctgcgtttcagcggctcc

SEQ ID NO: 5274745 - DNA, 25 bp, Homo sapien
taccgaaacatcgatgtggaagaaa

SEQ ID NO: 5274746 - DNA, 25 bp, Homo sapien
attcgcggtgctccccttggacact

SEQ ID NO: 5274747 - DNA, 25 bp, Homo sapien
gctccccttggacactggacacagt

SEQ ID NO: 5274748 - DNA, 25 bp, Homo sapien
tcagttcagaccattcgcggtgctc

SEQ ID NO: 5274749 - DNA, 25 bp, Homo sapien
agactgtcacggtcagttcagacca

SEQ ID NO: 5274750 - DNA, 25 bp, Homo sapien
tgttttgaggcagggatgtgcgagc

SEQ ID NO: 5274751 - DNA, 25 bp, Homo sapien
tttgaggcagggatgtgcgagctag

SEQ ID NO: 5274752 - DNA, 25 bp, Homo sapien
tgaggcagggatgtgcgagctaggc

SEQ ID NO: 5274753 - DNA, 25 bp, Homo sapien
ttttgaggcagggatgtgcgagcta

SEQ ID NO: 5274754 - DNA, 25 bp, Homo sapien
gttggagtgaactcgccaccaccca

SEQ ID NO: 5274755 - DNA, 25 bp, Homo sapien
tgcccccgttggagtgaactcgcca

SEQ ID NO: 5274756 - DNA, 25 bp, Homo sapien
ccccgttggagtgaactcgccacca

SEQ ID NO: 5274757 - DNA, 25 bp, Homo sapien
ccgttggagtgaactcgccaccacc

SEQ ID NO: 5274758 - DNA, 25 bp, Homo sapien
gcatcccggatgtctcatgggtgcc

SEQ ID NO: 5274759 - DNA, 25 bp, Homo sapien
tatggggctcgccatcacctgctga

SEQ ID NO: 5274760 - DNA, 25 bp, Homo sapien
gaagatgagcgagccagcatggaca

SEQ ID NO: 5274761 - DNA, 25 bp, Homo sapien
cggtgtggatggaagatgagcgagc

SEQ ID NO: 5274762 - DNA, 25 bp, Homo sapien
ctgaggaataagaaggtgacagtgg

SEQ ID NO: 5274763 - DNA, 25 bp, Homo sapien
aggaataagaaggtgacagtgggca

SEQ ID NO: 5274764 - DNA, 25 bp, Homo sapien
ataagaaggtgacagtgggcaggct

SEQ ID NO: 5274765 - DNA, 25 bp, Homo sapien
gaataagaaggtgacagtgggcagg

SEQ ID NO: 5274766 - DNA, 25 bp, Homo sapien
tcctcgtgccaagtgcaggcaatgc

SEQ ID NO: 5274767 - DNA, 25 bp, Homo sapien
ttcccatgctggtgagtcctcgtgc

SEQ ID NO: 5274768 - DNA, 25 bp, Homo sapien
caagtgcaggcaatgccccagaggt

SEQ ID NO: 5274769 - DNA, 25 bp, Homo sapien
tggtgagtcctcgtgccaagtgcag

SEQ ID NO: 5274770 - DNA, 25 bp, Homo sapien
tgcgttttgcgccagtgaaagctgt

SEQ ID NO: 5274771 - DNA, 25 bp, Homo sapien
cagcctgcgcctcacacaattatta

SEQ ID NO: 5274772 - DNA, 25 bp, Homo sapien
gcgaggtcctccgttgctaataaca

SEQ ID NO: 5274773 - DNA, 25 bp, Homo sapien
tgatttgttgagagcccgcctgtgc

SEQ ID NO: 5274774 - DNA, 25 bp, Homo sapien
tgagaagtcagagtcgcatggagaa

SEQ ID NO: 5274775 - DNA, 25 bp, Homo sapien
ctgtgagaagtcagagtcgcatgga

SEQ ID NO: 5274776 - DNA, 25 bp, Homo sapien
cagagtcgcatggagaatacgtgga

SEQ ID NO: 5274777 - DNA, 25 bp, Homo sapien
aagtcagagtcgcatggagaatacg

SEQ ID NO: 5274778 - DNA, 25 bp, Homo sapien
ttgcttgagccacggtgagatccag

SEQ ID NO: 5274779 - DNA, 25 bp, Homo sapien
gtgagatccagaacccggccggagc

SEQ ID NO: 5274780 - DNA, 25 bp, Homo sapien
gcacttgcttgagccacggtgagat

SEQ ID NO: 5274781 - DNA, 25 bp, Homo sapien
ggagccaggcttcggccaagccgcg

SEQ ID NO: 5274782 - DNA, 25 bp, Homo sapien
ggtgcgctgtgcacaaggtctccag

SEQ ID NO: 5274783 - DNA, 25 bp, Homo sapien
tcctgcgtcctgctgggtgacaggt

SEQ ID NO: 5274784 - DNA, 25 bp, Homo sapien
gaaggggctgctttcgtttgcaaag

SEQ ID NO: 5274785 - DNA, 25 bp, Homo sapien
tgacaggtctaaaggcaatgggtgc

SEQ ID NO: 5274786 - DNA, 25 bp, Homo sapien
tgtctgctgcttcgggctccacagc

SEQ ID NO: 5274787 - DNA, 25 bp, Homo sapien
acagtgcctcccgtgtgactgggcc

SEQ ID NO: 5274788 - DNA, 25 bp, Homo sapien
tccacagtgcctcccgtgtgactgg

SEQ ID NO: 5274789 - DNA, 25 bp, Homo sapien
tctgctgcttcgggctccacagctc

SEQ ID NO: 5274790 - DNA, 25 bp, Homo sapien
tgcactgtcattcccacatctaggt

SEQ ID NO: 5274791 - DNA, 25 bp, Homo sapien
tctcctggtagaggctggattctca

SEQ ID NO: 5274792 - DNA, 25 bp, Homo sapien
tctaggtaacacttccaatgagaga

SEQ ID NO: 5274793 - DNA, 25 bp, Homo sapien
ctccattcacaatgactgcactgtc

SEQ ID NO: 5274794 - DNA, 25 bp, Homo sapien
gctcgggcgggtcctgtgtattggg

SEQ ID NO: 5274795 - DNA, 25 bp, Homo sapien
gatcctgtgtattggggcgtttcag

SEQ ID NO: 5274796 - DNA, 25 bp, Homo sapien
tgctcgggcgggtcctgtgtattgg

SEQ ID NO: 5274797 - DNA, 25 bp, Homo sapien
ggatcctgtgtattggggcgtttca

SEQ ID NO: 5274798 - DNA, 25 bp, Homo sapien
gtgtattggggtgtttgggtagatc

SEQ ID NO: 5274799 - DNA, 25 bp, Homo sapien
ctgtgtattggggtgtttgggtaga

SEQ ID NO: 5274800 - DNA, 25 bp, Homo sapien
tgtgtattggggtgtttgggtagat

SEQ ID NO: 5274801 - DNA, 25 bp, Homo sapien
cgtgtgcgcctctgctgggatgacc

SEQ ID NO: 5274802 - DNA, 25 bp, Homo sapien
ggcgccctcagtgcttgcagcctgg

SEQ ID NO: 5274803 - DNA, 25 bp, Homo sapien
tatcgctgtgaacttccctgacgag

SEQ ID NO: 5274804 - DNA, 25 bp, Homo sapien
ggctcccgaagccactgttctattt

SEQ ID NO: 5274805 - DNA, 25 bp, Homo sapien
tcagacctgagcaagattctgctca

SEQ ID NO: 5274806 - DNA, 25 bp, Homo sapien
cctgagcaagattctgctcatgtgg

SEQ ID NO: 5274807 - DNA, 25 bp, Homo sapien
gaggtgtgtgaggtgcctgtggtgg

SEQ ID NO: 5274808 - DNA, 25 bp, Homo sapien
gcaagattctgctcatgtggcccca

SEQ ID NO: 5274809 - DNA, 25 bp, Homo sapien
gtatgtacagcaggagtaaccgtgc

SEQ ID NO: 5274810 - DNA, 25 bp, Homo sapien
caggagtaaccgtgctctttgccat

SEQ ID NO: 5274811 - DNA, 25 bp, Homo sapien
cagtcgcagcagtgttggctgtcat

SEQ ID NO: 5274812 - DNA, 25 bp, Homo sapien
gcagaaggtggcagtcgcagcagtg

SEQ ID NO: 5274813 - DNA, 25 bp, Homo sapien
aatggagactagtcttccacaaaga

SEQ ID NO: 5274814 - DNA, 25 bp, Homo sapien
tacaatgacagcataaactctagga

SEQ ID NO: 5274815 - DNA, 25 bp, Homo sapien
aaatgaagttttgtaatggccatca

SEQ ID NO: 5274816 - DNA, 25 bp, Homo sapien
tcatggctacatgggtaaagttagg

SEQ ID NO: 5274817 - DNA, 25 bp, Homo sapien
ccccagcatggagggtctgagtcaa

SEQ ID NO: 5274818 - DNA, 25 bp, Homo sapien
tctgagtcaagggtaagctctgtgc

SEQ ID NO: 5274819 - DNA, 25 bp, Homo sapien
gcaatcagaagagcatgtccacctg

SEQ ID NO: 5274820 - DNA, 25 bp, Homo sapien
taaccttgctgcttactccggtgag

SEQ ID NO: 5274821 - DNA, 25 bp, Homo sapien
gaaagagacatgagtcgtgagcagc

SEQ ID NO: 5274822 - DNA, 25 bp, Homo sapien
caaggataacaagcacagagaaaga

SEQ ID NO: 5274823 - DNA, 25 bp, Homo sapien
tcaatgaaactttgtgttcaaggat

SEQ ID NO: 5274824 - DNA, 25 bp, Homo sapien
agtgatcaaagtgcgcccgtgggaa

SEQ ID NO: 5274825 - DNA, 25 bp, Homo sapien
taaacaagccgaacaaacctatcag

SEQ ID NO: 5274826 - DNA, 25 bp, Homo sapien
cacaggcaatacacagacaccaggt

SEQ ID NO: 5274827 - DNA, 25 bp, Homo sapien
gggatgctctcaacctgcaccatta

SEQ ID NO: 5274828 - DNA, 25 bp, Homo sapien
tgtgccaagattaaccaacagcctc

SEQ ID NO: 5274829 - DNA, 25 bp, Homo sapien
gatggtttaatcatgaatggcggta

SEQ ID NO: 5274830 - DNA, 25 bp, Homo sapien
gtttaatcatgaatggcggtaggca

SEQ ID NO: 5274831 - DNA, 25 bp, Homo sapien
ctggatggtttaatcatgaatggcg

SEQ ID NO: 5274832 - DNA, 25 bp, Homo sapien
tggtttaatcatgaatggcggtagg

SEQ ID NO: 5274833 - DNA, 25 bp, Homo sapien
tttccagggagcaacgactcgcaag

SEQ ID NO: 5274834 - DNA, 25 bp, Homo sapien
aacaccctaacgatgatcagtttgg

SEQ ID NO: 5274835 - DNA, 25 bp, Homo sapien
tggttttcatgattaacgccgtggg

SEQ ID NO: 5274836 - DNA, 25 bp, Homo sapien
aaaagttcctagagcatgataaacc

SEQ ID NO: 5274837 - DNA, 25 bp, Homo sapien
ttcctttcttgtcgatgcagtttct

SEQ ID NO: 5274838 - DNA, 25 bp, Homo sapien
tgaaacgaccgtcctcttttgtgtc

SEQ ID NO: 5274839 - DNA, 25 bp, Homo sapien
ttgacttcaggtgtccggccgaacg

SEQ ID NO: 5274840 - DNA, 25 bp, Homo sapien
ttcttgtcgatgcagtttctcagcc

SEQ ID NO: 5274841 - DNA, 25 bp, Homo sapien
ctcttttctggtaaccgtcaggctg

SEQ ID NO: 5274842 - DNA, 25 bp, Homo sapien
agtaccaccaccaatctcagaactg

SEQ ID NO: 5274843 - DNA, 25 bp, Homo sapien
ttctggtaaccgtcaggctgccaac

SEQ ID NO: 5274844 - DNA, 25 bp, Homo sapien
tggtaaccgtcaggctgccaacagt

SEQ ID NO: 5274845 - DNA, 25 bp, Homo sapien
tcagttgataaagcggaaaagcacc

SEQ ID NO: 5274846 - DNA, 25 bp, Homo sapien
aaagcaccgtcttatggacacccag

SEQ ID NO: 5274847 - DNA, 25 bp, Homo sapien
taaccatgtggactctcgggctgac

SEQ ID NO: 5274848 - DNA, 25 bp, Homo sapien
tcttagcggtggaactgcacacatg

SEQ ID NO: 5274849 - DNA, 25 bp, Homo sapien
gtcaattgtttgctgccaacggtgg

SEQ ID NO: 5274850 - DNA, 25 bp, Homo sapien
tggtgtcggatacactcaatgtccc

SEQ ID NO: 5274851 - DNA, 25 bp, Homo sapien
cctctttaacgtgaatgtcaattgt

SEQ ID NO: 5274852 - DNA, 25 bp, Homo sapien
tcaattttcaaacgatcttcaaggg

SEQ ID NO: 5274853 - DNA, 25 bp, Homo sapien
taagcctactgtacgtacaaagaaa

SEQ ID NO: 5274854 - DNA, 25 bp, Homo sapien
gcagccagaaggtaagcctactgta

SEQ ID NO: 5274855 - DNA, 25 bp, Homo sapien
gaaggtaagcctactgtacgtacaa

SEQ ID NO: 5274856 - DNA, 25 bp, Homo sapien
tttatgcagccagaaggtaagccta

SEQ ID NO: 5274857 - DNA, 25 bp, Homo sapien
cttgtcttttctgaggctctcctta

SEQ ID NO: 5274858 - DNA, 25 bp, Homo sapien
ttgtcttttctgaggctctccttac

SEQ ID NO: 5274859 - DNA, 25 bp, Homo sapien
tggtactcgggcccactgccaccca

SEQ ID NO: 5274860 - DNA, 25 bp, Homo sapien
ctggtactcgggcccactgccaccc

SEQ ID NO: 5274861 - DNA, 25 bp, Homo sapien
tacgcaggccatgtcgttcttccca

SEQ ID NO: 5274862 - DNA, 25 bp, Homo sapien
catgagcgcttcaggtacgcaggcc

SEQ ID NO: 5274863 - DNA, 25 bp, Homo sapien
gctcgcactgagcagttgataaatg

SEQ ID NO: 5274864 - DNA, 25 bp, Homo sapien
cctgggtctagaatgctggtatgct

SEQ ID NO: 5274865 - DNA, 25 bp, Homo sapien
gtggtggagaggctgataagtggat

SEQ ID NO: 5274866 - DNA, 25 bp, Homo sapien
tggtggagaggctgataagtggatg

SEQ ID NO: 5274867 - DNA, 25 bp, Homo sapien
gtggatgaacagactcacaaacaaa

SEQ ID NO: 5274868 - DNA, 25 bp, Homo sapien
cagactcacaaacaaagttagccca

SEQ ID NO: 5274869 - DNA, 25 bp, Homo sapien
cacttcggagaaaacaccttctcct

SEQ ID NO: 5274870 - DNA, 25 bp, Homo sapien
ttcggagaaaacaccttctcctgca

SEQ ID NO: 5274871 - DNA, 25 bp, Homo sapien
agaaaacaccttctcctgcacggag

SEQ ID NO: 5274872 - DNA, 25 bp, Homo sapien
ggagaaaacaccttctcctgcacgg

SEQ ID NO: 5274873 - DNA, 25 bp, Homo sapien
tgcatcacttggttttccttccggc

SEQ ID NO: 5274874 - DNA, 25 bp, Homo sapien
tggtcctccttgagtcgttcctgcc

SEQ ID NO: 5274875 - DNA, 25 bp, Homo sapien
tgaactctccgaactttctgcatca

SEQ ID NO: 5274876 - DNA, 25 bp, Homo sapien
gggctttaggactgtctgctggtcc

SEQ ID NO: 5274877 - DNA, 25 bp, Homo sapien
cagtagcaaattctaactgataagg

SEQ ID NO: 5274878 - DNA, 25 bp, Homo sapien
gtagcaaattctaactgataaggag

SEQ ID NO: 5274879 - DNA, 25 bp, Homo sapien
gaaacagtagcaaattctaactgat

SEQ ID NO: 5274880 - DNA, 25 bp, Homo sapien
gcaaattctaactgataaggagtac

SEQ ID NO: 5274881 - DNA, 25 bp, Homo sapien
gtcagggttctcaaacataacttta

SEQ ID NO: 5274882 - DNA, 25 bp, Homo sapien
catcggtgagaatattaggaagact

SEQ ID NO: 5274883 - DNA, 25 bp, Homo sapien
cataactttaaatcgatcatcggtg

SEQ ID NO: 5274884 - DNA, 25 bp, Homo sapien
cgaagttcttgttgctctaagagtc

SEQ ID NO: 5274885 - DNA, 25 bp, Homo sapien
gatgttaaaactgacctgatccaac

SEQ ID NO: 5274886 - DNA, 25 bp, Homo sapien
caggtgtgagcccataatgtttgtg

SEQ ID NO: 5274887 - DNA, 25 bp, Homo sapien
tggcaccagggactagtttcggaag

SEQ ID NO: 5274888 - DNA, 25 bp, Homo sapien
cctaattgtattccctagagagatg

SEQ ID NO: 5274889 - DNA, 25 bp, Homo sapien
gattgacattatgtggtgggccact

SEQ ID NO: 5274890 - DNA, 25 bp, Homo sapien
taggttcaatatcaaccatacagta

SEQ ID NO: 5274891 - DNA, 25 bp, Homo sapien
gcactcggccttaattgttaactag

SEQ ID NO: 5274892 - DNA, 25 bp, Homo sapien
ctcagtggcagcaatatttaggaac

SEQ ID NO: 5274893 - DNA, 25 bp, Homo sapien
tacaaactttttccaagcacagcct

SEQ ID NO: 5274894 - DNA, 25 bp, Homo sapien
tctgatttgggctaggaagtcacca

SEQ ID NO: 5274895 - DNA, 25 bp, Homo sapien
gaagtcaccaacaagaagattaggg

SEQ ID NO: 5274896 - DNA, 25 bp, Homo sapien
ggaagaattctgttatcacgtgata

SEQ ID NO: 5274897 - DNA, 25 bp, Homo sapien
tcctcaattaatttaagtgccagct

SEQ ID NO: 5274898 - DNA, 25 bp, Homo sapien
cctcaattaatttaagtgccagctc

SEQ ID NO: 5274899 - DNA, 25 bp, Homo sapien
tcaattaatttaagtgccagctctt

SEQ ID NO: 5274900 - DNA, 25 bp, Homo sapien
ctcaattaatttaagtgccagctct

SEQ ID NO: 5274901 - DNA, 25 bp, Homo sapien
cttctattttctgtcgtattttatc

SEQ ID NO: 5274902 - DNA, 25 bp, Homo sapien
actctctgtgcacgtgtttcttcta

SEQ ID NO: 5274903 - DNA, 25 bp, Homo sapien
ctggactctctgtgcacgtgtttct

SEQ ID NO: 5274904 - DNA, 25 bp, Homo sapien
tctgtgcacgtgtttcttctatttt

SEQ ID NO: 5274905 - DNA, 25 bp, Homo sapien
tatatgcccggaggaaaggagatcc

SEQ ID NO: 5274906 - DNA, 25 bp, Homo sapien
tgatagagtcttatatccatgaaaa

SEQ ID NO: 5274907 - DNA, 25 bp, Homo sapien
acccatgcatatatgcccggaggaa

SEQ ID NO: 5274908 - DNA, 25 bp, Homo sapien
cttgtgatagagtcttatatccatg

SEQ ID NO: 5274909 - DNA, 25 bp, Homo sapien
gaaagtccttatgaactaagacaaa

SEQ ID NO: 5274910 - DNA, 25 bp, Homo sapien
taatctacttcagcaatatcatcct

SEQ ID NO: 5274911 - DNA, 25 bp, Homo sapien
taagatttcacttcagactaaaaat

SEQ ID NO: 5274912 - DNA, 25 bp, Homo sapien
agggttcccttataccctctgagtg

SEQ ID NO: 5274913 - DNA, 25 bp, Homo sapien
ttttccacggatgcagggagggaca

SEQ ID NO: 5274914 - DNA, 25 bp, Homo sapien
ggcagtcatgctcacttaccactcg

SEQ ID NO: 5274915 - DNA, 25 bp, Homo sapien
taggccacccaccaactggtatggg

SEQ ID NO: 5274916 - DNA, 25 bp, Homo sapien
gggacccctggtataagtgactgtc

SEQ ID NO: 5274917 - DNA, 25 bp, Homo sapien
gtctttcttggtgacaaatttataa

SEQ ID NO: 5274918 - DNA, 25 bp, Homo sapien
tcttctaattcttcggtcaagttgt

SEQ ID NO: 5274919 - DNA, 25 bp, Homo sapien
ggtctttcttggtgacaaatttata

SEQ ID NO: 5274920 - DNA, 25 bp, Homo sapien
ctcttctaattcttcggtcaagttg

SEQ ID NO: 5274921 - DNA, 25 bp, Homo sapien
ctaagaaggaacaccaccgaggagc

SEQ ID NO: 5274922 - DNA, 25 bp, Homo sapien
gaacaccaccgaggagcaggaccca

SEQ ID NO: 5274923 - DNA, 25 bp, Homo sapien
gaaggaacaccaccgaggagcagga

SEQ ID NO: 5274924 - DNA, 25 bp, Homo sapien
aagaaggaacaccaccgaggagcag

SEQ ID NO: 5274925 - DNA, 25 bp, Homo sapien
ggctgggacaccgaattaagtctat

SEQ ID NO: 5274926 - DNA, 25 bp, Homo sapien
acactgaccacaatctccctgaaga

SEQ ID NO: 5274927 - DNA, 25 bp, Homo sapien
ggtttgactccaaccataaaagaca

SEQ ID NO: 5274928 - DNA, 25 bp, Homo sapien
gaagtttaaaatccagctgaagcac

SEQ ID NO: 5274929 - DNA, 25 bp, Homo sapien
tacactgttacccaaagaacctcaa

SEQ ID NO: 5274930 - DNA, 25 bp, Homo sapien
catatgcatcaagtactaaaactga

SEQ ID NO: 5274931 - DNA, 25 bp, Homo sapien
cctcaccataaagctactgggtata

SEQ ID NO: 5274932 - DNA, 25 bp, Homo sapien
taaatcaatcataaacatgggcttc

SEQ ID NO: 5274933 - DNA, 25 bp, Homo sapien
aataaggagggctcaaccacaggca

SEQ ID NO: 5274934 - DNA, 25 bp, Homo sapien
cacattagacctttcgtcagaggcc

SEQ ID NO: 5274935 - DNA, 25 bp, Homo sapien
gtcagaggcctaccattaagtttca

SEQ ID NO: 5274936 - DNA, 25 bp, Homo sapien
tgtagctacatcacagcgtcaatgt

SEQ ID NO: 5274937 - DNA, 25 bp, Homo sapien
tacagcaatacttatgtggaaggac

SEQ ID NO: 5274938 - DNA, 25 bp, Homo sapien
tctgctgaggccgatcaagatagct

SEQ ID NO: 5274939 - DNA, 25 bp, Homo sapien
tgagcaaggccctgaacaactgaga

SEQ ID NO: 5274940 - DNA, 25 bp, Homo sapien
taaccaggaaagcttaactgccaca

SEQ ID NO: 5274941 - DNA, 25 bp, Homo sapien
tctgttacccttactgtgaggccat

SEQ ID NO: 5274942 - DNA, 25 bp, Homo sapien
gcccagcccgctattagaatttaaa

SEQ ID NO: 5274943 - DNA, 25 bp, Homo sapien
tggttctttaacagaaacaactgga

SEQ ID NO: 5274944 - DNA, 25 bp, Homo sapien
tactgtgaggccatgattctttttg

SEQ ID NO: 5274945 - DNA, 25 bp, Homo sapien
gatcactgctcataatcagatccag

SEQ ID NO: 5274946 - DNA, 25 bp, Homo sapien
gagcctggcttaggactatacactt

SEQ ID NO: 5274947 - DNA, 25 bp, Homo sapien
gattatgggtgggtaccacagagcc

SEQ ID NO: 5274948 - DNA, 25 bp, Homo sapien
aaggataaacttcatggtatgtgta

SEQ ID NO: 5274949 - DNA, 25 bp, Homo sapien
tctataccataagcgattggctctg

SEQ ID NO: 5274950 - DNA, 25 bp, Homo sapien
gaacatgcaagcttggtgaaaacca

SEQ ID NO: 5274951 - DNA, 25 bp, Homo sapien
gactatttgccaggagctaccctgg

SEQ ID NO: 5274952 - DNA, 25 bp, Homo sapien
tgaaaagactatgcctacactctgc

SEQ ID NO: 5274953 - DNA, 25 bp, Homo sapien
ggtttagagaactggacagcactgg

SEQ ID NO: 5274954 - DNA, 25 bp, Homo sapien
gagaactggacagcactggtttaga

SEQ ID NO: 5274955 - DNA, 25 bp, Homo sapien
ggtggcagactttggtttagagaac

SEQ ID NO: 5274956 - DNA, 25 bp, Homo sapien
cagatatagaacgtgtccgtcatca

SEQ ID NO: 5274957 - DNA, 25 bp, Homo sapien
tcaagtcagtactagtgctgctggc

SEQ ID NO: 5274958 - DNA, 25 bp, Homo sapien
tactctgtaaaggagcggagaccca

SEQ ID NO: 5274959 - DNA, 25 bp, Homo sapien
gataccaagtggtgaacaagtccct

SEQ ID NO: 5274960 - DNA, 25 bp, Homo sapien
gctgctggctgagaacagatattca

SEQ ID NO: 5274961 - DNA, 25 bp, Homo sapien
tacacagcgataggaagacatgcca

SEQ ID NO: 5274962 - DNA, 25 bp, Homo sapien
caataggtgaatggacagacaagct

SEQ ID NO: 5274963 - DNA, 25 bp, Homo sapien
cctacacgagaatgtttagagcggc

SEQ ID NO: 5274964 - DNA, 25 bp, Homo sapien
ccaagatggaggaaatgccggaacc

SEQ ID NO: 5274965 - DNA, 25 bp, Homo sapien
tatgtccgctattcttgtgatccaa

SEQ ID NO: 5274966 - DNA, 25 bp, Homo sapien
ccaataaattgtgatgggaaacggg

SEQ ID NO: 5274967 - DNA, 25 bp, Homo sapien
taatgcttctgtatgtccgctattc

SEQ ID NO: 5274968 - DNA, 25 bp, Homo sapien
ttcctgattgtcacacattaatgct

SEQ ID NO: 5274969 - DNA, 25 bp, Homo sapien
aaaactttcgtcttcaggccaatgt

SEQ ID NO: 5274970 - DNA, 25 bp, Homo sapien
tgaaaggcgagtgcttcactgcctc

SEQ ID NO: 5274971 - DNA, 25 bp, Homo sapien
cagggtgactggttgaatcgcatcc

SEQ ID NO: 5274972 - DNA, 25 bp, Homo sapien
gagggacaactttggatactatgct

SEQ ID NO: 5274973 - DNA, 25 bp, Homo sapien
caggtgggtaccaccgcaaaaggct

SEQ ID NO: 5274974 - DNA, 25 bp, Homo sapien
taatgtatcataacattggtattaa

SEQ ID NO: 5274975 - DNA, 25 bp, Homo sapien
tgggtaccaccgcaaaaggctctaa

SEQ ID NO: 5274976 - DNA, 25 bp, Homo sapien
atattaatgtatcataacattggta

SEQ ID NO: 5274977 - DNA, 25 bp, Homo sapien
catccaagtggagaagccgagtaga

SEQ ID NO: 5274978 - DNA, 25 bp, Homo sapien
ttacagtaatccagaggcctgatgg

SEQ ID NO: 5274979 - DNA, 25 bp, Homo sapien
caaggcttcagctgaaatggagacc

SEQ ID NO: 5274980 - DNA, 25 bp, Homo sapien
tctaagcctagacagccgagtgagc

SEQ ID NO: 5274981 - DNA, 25 bp, Homo sapien
tattcctgcagcctagtaccgtact

SEQ ID NO: 5274982 - DNA, 25 bp, Homo sapien
gattgtaagctcacaagggcggtga

SEQ ID NO: 5274983 - DNA, 25 bp, Homo sapien
tagggaaaatgcgtaggaagccact

SEQ ID NO: 5274984 - DNA, 25 bp, Homo sapien
gagactgatacaaagtgcctgaccc

SEQ ID NO: 5274985 - DNA, 25 bp, Homo sapien
cctgtgatggcgtcagaaggcctca

SEQ ID NO: 5274986 - DNA, 25 bp, Homo sapien
cctgaggagataccagcgttgaacc

SEQ ID NO: 5274987 - DNA, 25 bp, Homo sapien
tgaacagacgcagaagcactagtgc

SEQ ID NO: 5274988 - DNA, 25 bp, Homo sapien
gctccagtgcgattctgaacagacg

SEQ ID NO: 5274989 - DNA, 25 bp, Homo sapien
tcaagaaagatgatatcagataggc

SEQ ID NO: 5274990 - DNA, 25 bp, Homo sapien
aaagatttcaattactcaagaaaga

SEQ ID NO: 5274991 - DNA, 25 bp, Homo sapien
gtatcaggaactgcattagtttata

SEQ ID NO: 5274992 - DNA, 25 bp, Homo sapien
agttttcaaacctgatttataagat

SEQ ID NO: 5274993 - DNA, 25 bp, Homo sapien
tactgccagcatacagcatcgttcc

SEQ ID NO: 5274994 - DNA, 25 bp, Homo sapien
ccctggatgctgtaatactgccagc

SEQ ID NO: 5274995 - DNA, 25 bp, Homo sapien
tcttgttggattcccaacagtaact

SEQ ID NO: 5274996 - DNA, 25 bp, Homo sapien
cagtaactcctcaaagagaagggca

SEQ ID NO: 5274997 - DNA, 25 bp, Homo sapien
ttgggggtttcattggccgtcagaa

SEQ ID NO: 5274998 - DNA, 25 bp, Homo sapien
tggaatgtaatagatgcccatcttg

SEQ ID NO: 5274999 - DNA, 25 bp, Homo sapien
ggaatgtaatagatgcccatcttgg

SEQ ID NO: 5275000 - DNA, 25 bp, Homo sapien
gggtttcattggccgtcagaagcat

SEQ ID NO: 5275001 - DNA, 25 bp, Homo sapien
agtacatgtcaatgcccacgagtgg

SEQ ID NO: 5275002 - DNA, 25 bp, Homo sapien
atcctcaagggttgaagctctccca

SEQ ID NO: 5275003 - DNA, 25 bp, Homo sapien
tgggccaggcacaagcactactaaa

SEQ ID NO: 5275004 - DNA, 25 bp, Homo sapien
gaaaaactgaggcagcctaccaggc

SEQ ID NO: 5275005 - DNA, 25 bp, Homo sapien
agttggggtagagacaaacatcatt

SEQ ID NO: 5275006 - DNA, 25 bp, Homo sapien
gttggggtagagacaaacatcatta

SEQ ID NO: 5275007 - DNA, 25 bp, Homo sapien
tgagttggggtagagacaaacatca

SEQ ID NO: 5275008 - DNA, 25 bp, Homo sapien
gagttggggtagagacaaacatcat

SEQ ID NO: 5275009 - DNA, 25 bp, Homo sapien
aaatgaacggacttaatgggcagcc

SEQ ID NO: 5275010 - DNA, 25 bp, Homo sapien
ccatactggtgatctttaactagca

SEQ ID NO: 5275011 - DNA, 25 bp, Homo sapien
cagatctaatgaatcctggaaatga

SEQ ID NO: 5275012 - DNA, 25 bp, Homo sapien
ttgacaattcgagagtcagcagaca

SEQ ID NO: 5275013 - DNA, 25 bp, Homo sapien
gttgttccaactgccatggtcaagg

SEQ ID NO: 5275014 - DNA, 25 bp, Homo sapien
tgccatggtcaaggcaccattaaat

SEQ ID NO: 5275015 - DNA, 25 bp, Homo sapien
caactgccatggtcaaggcaccatt

SEQ ID NO: 5275016 - DNA, 25 bp, Homo sapien
tccaactgccatggtcaaggcacca

SEQ ID NO: 5275017 - DNA, 25 bp, Homo sapien
ttaaggcgcagtctaacaggccaac

SEQ ID NO: 5275018 - DNA, 25 bp, Homo sapien
gacactgtttaaggcgcagtctaac

SEQ ID NO: 5275019 - DNA, 25 bp, Homo sapien
tgctgtgacactgtttaaggcgcag

SEQ ID NO: 5275020 - DNA, 25 bp, Homo sapien
tgtttaaggcgcagtctaacaggcc

SEQ ID NO: 5275021 - DNA, 25 bp, Homo sapien
tctgtttcgagttcttgggtcccag

SEQ ID NO: 5275022 - DNA, 25 bp, Homo sapien
tcgagttcttgggtcccagcactcc

SEQ ID NO: 5275023 - DNA, 25 bp, Homo sapien
tgtttcgagttcttgggtcccagca

SEQ ID NO: 5275024 - DNA, 25 bp, Homo sapien
gtttcgagttcttgggtcccagcac

SEQ ID NO: 5275025 - DNA, 25 bp, Homo sapien
ttaaaaaaatgcttgtgcaaacaga

SEQ ID NO: 5275026 - DNA, 25 bp, Homo sapien
aaaatgcttgtgcaaacagaaaaac

SEQ ID NO: 5275027 - DNA, 25 bp, Homo sapien
taaaaaaatgcttgtgcaaacagaa

SEQ ID NO: 5275028 - DNA, 25 bp, Homo sapien
aaaaaatgcttgtgcaaacagaaaa

SEQ ID NO: 5275029 - DNA, 25 bp, Homo sapien
ttcctgtggcaaacaagccatgcac

SEQ ID NO: 5275030 - DNA, 25 bp, Homo sapien
agcatcagtttgtagaggattcagg

SEQ ID NO: 5275031 - DNA, 25 bp, Homo sapien
tcagtttgtagaggattcaggtatc

SEQ ID NO: 5275032 - DNA, 25 bp, Homo sapien
caggtatcgtccttgttctaagttt

SEQ ID NO: 5275033 - DNA, 25 bp, Homo sapien
tagaggattcaggtatcgtccttgt

SEQ ID NO: 5275034 - DNA, 25 bp, Homo sapien
cacgaaatttaggaacagaagttgg

SEQ ID NO: 5275035 - DNA, 25 bp, Homo sapien
ttttttacaagagccacgtatcact

SEQ ID NO: 5275036 - DNA, 25 bp, Homo sapien
taaagcaagttacctaaacagagaa

SEQ ID NO: 5275037 - DNA, 25 bp, Homo sapien
aaatgtacacgaaatttaggaacag

SEQ ID NO: 5275038 - DNA, 25 bp, Homo sapien
cgaatgaaattcaatgtatctatca

SEQ ID NO: 5275039 - DNA, 25 bp, Homo sapien
tgtagtaaaaacctgattgcgaatg

SEQ ID NO: 5275040 - DNA, 25 bp, Homo sapien
tacaagtcacaggatggatagtggt

SEQ ID NO: 5275041 - DNA, 25 bp, Homo sapien
caaagtacaagtcacaggatggata

SEQ ID NO: 5275042 - DNA, 25 bp, Homo sapien
taagctgtaccccatagtttccaaa

SEQ ID NO: 5275043 - DNA, 25 bp, Homo sapien
gagcactctcatggtaccctcaatg

SEQ ID NO: 5275044 - DNA, 25 bp, Homo sapien
ccatagacaaaaggataagctgtac

SEQ ID NO: 5275045 - DNA, 25 bp, Homo sapien
taatgccttcctgtatcctgatagc

SEQ ID NO: 5275046 - DNA, 25 bp, Homo sapien
agtagtcatcagacaaaatttcaaa

SEQ ID NO: 5275047 - DNA, 25 bp, Homo sapien
ctttgagtagtcatcagacaaaatt

SEQ ID NO: 5275048 - DNA, 25 bp, Homo sapien
ttgagtagtcatcagacaaaatttc

SEQ ID NO: 5275049 - DNA, 25 bp, Homo sapien
gagtagtcatcagacaaaatttcaa

SEQ ID NO: 5275050 - DNA, 25 bp, Homo sapien
caaggataattgataggtgtcataa

SEQ ID NO: 5275051 - DNA, 25 bp, Homo sapien
ggtgtcataacatcgaacccgaggt

SEQ ID NO: 5275052 - DNA, 25 bp, Homo sapien
gaatctaaacacctttcaaacttca

SEQ ID NO: 5275053 - DNA, 25 bp, Homo sapien
catcgaacccgaggtttatatgttc

SEQ ID NO: 5275054 - DNA, 25 bp, Homo sapien
ttacaggtgcctgccgccacatctg

SEQ ID NO: 5275055 - DNA, 25 bp, Homo sapien
tggattcaagtgattctcctgcctc

SEQ ID NO: 5275056 - DNA, 25 bp, Homo sapien
agtgcagaggagtaatctcagctca

SEQ ID NO: 5275057 - DNA, 25 bp, Homo sapien
ctgcaacctctgctgcctggattca

SEQ ID NO: 5275058 - DNA, 25 bp, Homo sapien
gttcaaggttacaatgagtgaaacc

SEQ ID NO: 5275059 - DNA, 25 bp, Homo sapien
tcaaggttacaatgagtgaaaccct

SEQ ID NO: 5275060 - DNA, 25 bp, Homo sapien
ttcaaggttacaatgagtgaaaccc

SEQ ID NO: 5275061 - DNA, 25 bp, Homo sapien
taggcatttcaaagtcctgaataag

SEQ ID NO: 5275062 - DNA, 25 bp, Homo sapien
cttaatagtggtacacacagtaggc

SEQ ID NO: 5275063 - DNA, 25 bp, Homo sapien
tgtactgtccatcttttgacacctt

SEQ ID NO: 5275064 - DNA, 25 bp, Homo sapien
cagtaggcatttcaaagtcctgaat

SEQ ID NO: 5275065 - DNA, 25 bp, Homo sapien
cttctgtagcgctctcttcttccta

SEQ ID NO: 5275066 - DNA, 25 bp, Homo sapien
ctacatctttcttctgtagcgctct

SEQ ID NO: 5275067 - DNA, 25 bp, Homo sapien
tctgtagcgctctcttcttcctatc

SEQ ID NO: 5275068 - DNA, 25 bp, Homo sapien
catctttcttctgtagcgctctctt

SEQ ID NO: 5275069 - DNA, 25 bp, Homo sapien
gtgcaagaatcattgagcccagaga

SEQ ID NO: 5275070 - DNA, 25 bp, Homo sapien
gaggtgcaagaatcattgagcccag

SEQ ID NO: 5275071 - DNA, 25 bp, Homo sapien
caagaatcattgagcccagagaagt

SEQ ID NO: 5275072 - DNA, 25 bp, Homo sapien
aatcattgagcccagagaagtcaag

SEQ ID NO: 5275073 - DNA, 25 bp, Homo sapien
tcacctcattgaggctggagacctg

SEQ ID NO: 5275074 - DNA, 25 bp, Homo sapien
tgtaaatcttcacctcattgaggct

SEQ ID NO: 5275075 - DNA, 25 bp, Homo sapien
tcttcacctcattgaggctggagac

SEQ ID NO: 5275076 - DNA, 25 bp, Homo sapien
ctgaggctgtaaatcttcacctcat

SEQ ID NO: 5275077 - DNA, 25 bp, Homo sapien
caccagcgtgctcgagcaccgtaat

SEQ ID NO: 5275078 - DNA, 25 bp, Homo sapien
caacactgttcaagtcccgggtcct

SEQ ID NO: 5275079 - DNA, 25 bp, Homo sapien
ggcgccgcacaacactgttcaagtc

SEQ ID NO: 5275080 - DNA, 25 bp, Homo sapien
tgctcgagcaccgtaatcccgggac

SEQ ID NO: 5275081 - DNA, 25 bp, Homo sapien
gagaaggcacaagcgttttcagggt

SEQ ID NO: 5275082 - DNA, 25 bp, Homo sapien
ttgattgacagagtgcatttcccag

SEQ ID NO: 5275083 - DNA, 25 bp, Homo sapien
gcctgttttgcggtgttgattgaca

SEQ ID NO: 5275084 - DNA, 25 bp, Homo sapien
ggtagcataaacctgtcagcactgc

SEQ ID NO: 5275085 - DNA, 25 bp, Homo sapien
gtgatacgtgtgagtcagttcttgt

SEQ ID NO: 5275086 - DNA, 25 bp, Homo sapien
gatacgtgtgagtcagttcttgtaa

SEQ ID NO: 5275087 - DNA, 25 bp, Homo sapien
gtgtgagtcagttcttgtaagggca

SEQ ID NO: 5275088 - DNA, 25 bp, Homo sapien
ttagtgatacgtgtgagtcagttct

SEQ ID NO: 5275089 - DNA, 25 bp, Homo sapien
cctcctccccgattgtactatcaat

SEQ ID NO: 5275090 - DNA, 25 bp, Homo sapien
accctcctccccgattgtactatca

SEQ ID NO: 5275091 - DNA, 25 bp, Homo sapien
cctccccgattgtactatcaatcat

SEQ ID NO: 5275092 - DNA, 25 bp, Homo sapien
ccaccctcctccccgattgtactat

SEQ ID NO: 5275093 - DNA, 25 bp, Homo sapien
ttggacatgtgaacaaatctcctgg

SEQ ID NO: 5275094 - DNA, 25 bp, Homo sapien
tacccacgtggcttgaattatattt

SEQ ID NO: 5275095 - DNA, 25 bp, Homo sapien
cagctttgggctggagctctagaga

SEQ ID NO: 5275096 - DNA, 25 bp, Homo sapien
ttatatttctatgcacagctttggg

SEQ ID NO: 5275097 - DNA, 25 bp, Homo sapien
acagaagacagaaaccctcgaggct

SEQ ID NO: 5275098 - DNA, 25 bp, Homo sapien
caggcctcctttttgttctcggaca

SEQ ID NO: 5275099 - DNA, 25 bp, Homo sapien
cagtctggttggtcacagtccctca

SEQ ID NO: 5275100 - DNA, 25 bp, Homo sapien
tcttggcttcgtcaggaccggttgt

SEQ ID NO: 5275101 - DNA, 25 bp, Homo sapien
tatcatccgagctgtgatcatcgcc

SEQ ID NO: 5275102 - DNA, 25 bp, Homo sapien
gctgttggcattctatggagcaccc

SEQ ID NO: 5275103 - DNA, 25 bp, Homo sapien
cactggcattatccccgctgtggaa

SEQ ID NO: 5275104 - DNA, 25 bp, Homo sapien
tggtgtaaatgctcctgccgtggct

SEQ ID NO: 5275105 - DNA, 25 bp, Homo sapien
cctgggaggtacccccacttctgca

SEQ ID NO: 5275106 - DNA, 25 bp, Homo sapien
tgggaggtacccccacttctgcaat

SEQ ID NO: 5275107 - DNA, 25 bp, Homo sapien
ctgggaggtacccccacttctgcaa

SEQ ID NO: 5275108 - DNA, 25 bp, Homo sapien
gggaggtacccccacttctgcaatc

SEQ ID NO: 5275109 - DNA, 25 bp, Homo sapien
tgtgtgggctaacaccccaggaata

SEQ ID NO: 5275110 - DNA, 25 bp, Homo sapien
ggaatagctcatcccaacaactggt

SEQ ID NO: 5275111 - DNA, 25 bp, Homo sapien
gcatgcaccgtggaatggccattca

SEQ ID NO: 5275112 - DNA, 25 bp, Homo sapien
tagacaaacgccttggagtccgaat

SEQ ID NO: 5275113 - DNA, 25 bp, Homo sapien
gaaagccttgaactgtataaccagc

SEQ ID NO: 5275114 - DNA, 25 bp, Homo sapien
tattgggcaggaaatcagttctcac

SEQ ID NO: 5275115 - DNA, 25 bp, Homo sapien
taattagtcactagagacagcccaa

SEQ ID NO: 5275116 - DNA, 25 bp, Homo sapien
cactgagcccggtttccatgtaaaa

SEQ ID NO: 5275117 - DNA, 25 bp, Homo sapien
gagaaaaatgtttcgacagccaagt

SEQ ID NO: 5275118 - DNA, 25 bp, Homo sapien
attcaccggctacaacaattcatag

SEQ ID NO: 5275119 - DNA, 25 bp, Homo sapien
gacagaatacgactcaattcaccgg

SEQ ID NO: 5275120 - DNA, 25 bp, Homo sapien
cttgagatgcaaaagttcactgttg

SEQ ID NO: 5275121 - DNA, 25 bp, Homo sapien
tcatctttccctaagtcatcaagct

SEQ ID NO: 5275122 - DNA, 25 bp, Homo sapien
tttccctaagtcatcaagctccaca

SEQ ID NO: 5275123 - DNA, 25 bp, Homo sapien
tcaagctccacatcactgaggtcaa

SEQ ID NO: 5275124 - DNA, 25 bp, Homo sapien
ctgaggtcaatgtcatcctccacgg

SEQ ID NO: 5275125 - DNA, 25 bp, Homo sapien
cattttatggaagagcgactctctg

SEQ ID NO: 5275126 - DNA, 25 bp, Homo sapien
ggagctactcctgctacaatccagg

SEQ ID NO: 5275127 - DNA, 25 bp, Homo sapien
gattatacggatggaaaagctcaga

SEQ ID NO: 5275128 - DNA, 25 bp, Homo sapien
aaagccactgttagatctgcagaag

SEQ ID NO: 5275129 - DNA, 25 bp, Homo sapien
accaggactgctgcccgcacagctt

SEQ ID NO: 5275130 - DNA, 25 bp, Homo sapien
agatgcacaggctcaagagagtaaa

SEQ ID NO: 5275131 - DNA, 25 bp, Homo sapien
gctcaagagagtaaaccaggactgc

SEQ ID NO: 5275132 - DNA, 25 bp, Homo sapien
gctgcccgcacagcttccctcccgg

SEQ ID NO: 5275133 - DNA, 25 bp, Homo sapien
tctcaacgatggtagggaaagcccc

SEQ ID NO: 5275134 - DNA, 25 bp, Homo sapien
cccgcctcctacaggtgccgtggag

SEQ ID NO: 5275135 - DNA, 25 bp, Homo sapien
aggctctctctcaacgatggtaggg

SEQ ID NO: 5275136 - DNA, 25 bp, Homo sapien
tggagccacgcccaaaagagagctc

SEQ ID NO: 5275137 - DNA, 25 bp, Homo sapien
ggaaaccagagccagaaatactgtg

SEQ ID NO: 5275138 - DNA, 25 bp, Homo sapien
tacttgaaacataccagacctggtg

SEQ ID NO: 5275139 - DNA, 25 bp, Homo sapien
tagacataaggtctcaccgtggtgg

SEQ ID NO: 5275140 - DNA, 25 bp, Homo sapien
gactaacaatctatggcaccaatgg

SEQ ID NO: 5275141 - DNA, 25 bp, Homo sapien
tagttccaaatataaacctacaaca

SEQ ID NO: 5275142 - DNA, 25 bp, Homo sapien
agttccaaatataaacctacaacag

SEQ ID NO: 5275143 - DNA, 25 bp, Homo sapien
tgatgccttgctcactgaaggagcc

SEQ ID NO: 5275144 - DNA, 25 bp, Homo sapien
ttcatcttgcgtgcattgatggcgg

SEQ ID NO: 5275145 - DNA, 25 bp, Homo sapien
tccccaacgcggtctcaagttcaga

SEQ ID NO: 5275146 - DNA, 25 bp, Homo sapien
tgaaggagccttttagcagagcaaa

SEQ ID NO: 5275147 - DNA, 25 bp, Homo sapien
tcaggtgcactactccttatgtgtc

SEQ ID NO: 5275148 - DNA, 25 bp, Homo sapien
tgcatgctgtgctgacagcccttca

SEQ ID NO: 5275149 - DNA, 25 bp, Homo sapien
tgaaaatgtgcctagatccagtcct

SEQ ID NO: 5275150 - DNA, 25 bp, Homo sapien
agttcacagtagaattcaggtgcac

SEQ ID NO: 5275151 - DNA, 25 bp, Homo sapien
agaacttccagataagaatttctgc

SEQ ID NO: 5275152 - DNA, 25 bp, Homo sapien
tctttttgtatttgtctgccaactt

SEQ ID NO: 5275153 - DNA, 25 bp, Homo sapien
cctcacacgtcctcttggcaatgtc

SEQ ID NO: 5275154 - DNA, 25 bp, Homo sapien
tcacacgtcctcttggcaatgtcct

SEQ ID NO: 5275155 - DNA, 25 bp, Homo sapien
ctcacacgtcctcttggcaatgtcc

SEQ ID NO: 5275156 - DNA, 25 bp, Homo sapien
tcctcacacgtcctcttggcaatgt

SEQ ID NO: 5275157 - DNA, 25 bp, Homo sapien
ccgggacacgatgtcggatcttgtc

SEQ ID NO: 5275158 - DNA, 25 bp, Homo sapien
tatcttgattgtaggaaatcctcta

SEQ ID NO: 5275159 - DNA, 25 bp, Homo sapien
caggagactcgcctttctgaaatat

SEQ ID NO: 5275160 - DNA, 25 bp, Homo sapien
gcccaccgtcataatccacaggaga

SEQ ID NO: 5275161 - DNA, 25 bp, Homo sapien
gaggccagaacctgattgactgtag

SEQ ID NO: 5275162 - DNA, 25 bp, Homo sapien
tcctttcgtctgctcttttacttct

SEQ ID NO: 5275163 - DNA, 25 bp, Homo sapien
ctgattgactgtagcatccacagct

SEQ ID NO: 5275164 - DNA, 25 bp, Homo sapien
ctgaagctgcggcagcccactctgg

SEQ ID NO: 5275165 - DNA, 25 bp, Homo sapien
ccaaggagcatagaactcaaccatc

SEQ ID NO: 5275166 - DNA, 25 bp, Homo sapien
tcgtctgtcagctcaatcacatcct

SEQ ID NO: 5275167 - DNA, 25 bp, Homo sapien
ttcttacttgaactatcacttctgc

SEQ ID NO: 5275168 - DNA, 25 bp, Homo sapien
ggagcatagaactcaaccatccaaa

SEQ ID NO: 5275169 - DNA, 25 bp, Homo sapien
tagagagaaacctcaacatggctca

SEQ ID NO: 5275170 - DNA, 25 bp, Homo sapien
cataacctgtacctgaatgctgtca

SEQ ID NO: 5275171 - DNA, 25 bp, Homo sapien
aaagaagctagtgtaactggtctcc

SEQ ID NO: 5275172 - DNA, 25 bp, Homo sapien
gaaatctctgggtaagctctgagcc

SEQ ID NO: 5275173 - DNA, 25 bp, Homo sapien
gcagcatctacaatggcttcaccag

SEQ ID NO: 5275174 - DNA, 25 bp, Homo sapien
tggcgcagagcactcagcgcagcat

SEQ ID NO: 5275175 - DNA, 25 bp, Homo sapien
cagaactgtatcctccgctccgtcc

SEQ ID NO: 5275176 - DNA, 25 bp, Homo sapien
cccgaggcgatccttcacgagctgg

SEQ ID NO: 5275177 - DNA, 25 bp, Homo sapien
tcactgtcggcttcaccaggtgtga

SEQ ID NO: 5275178 - DNA, 25 bp, Homo sapien
ttctccccacaatgcattttgcact

SEQ ID NO: 5275179 - DNA, 25 bp, Homo sapien
cagttctgacacgtgtatctctgac

SEQ ID NO: 5275180 - DNA, 25 bp, Homo sapien
tggcccggcccaagactgtgtcttt

SEQ ID NO: 5275181 - DNA, 25 bp, Homo sapien
gggcaaggcctcaacatgaaacagc

SEQ ID NO: 5275182 - DNA, 25 bp, Homo sapien
ttagagatctaaggtgtggcagccg

SEQ ID NO: 5275183 - DNA, 25 bp, Homo sapien
tttgagaacacaccagacctgacac

SEQ ID NO: 5275184 - DNA, 25 bp, Homo sapien
taatcttgcactgtatcgctggctg

SEQ ID NO: 5275185 - DNA, 25 bp, Homo sapien
cttaaaataggtttgcacatcccca

SEQ ID NO: 5275186 - DNA, 25 bp, Homo sapien
tactgtttagttacgacgctggagt

SEQ ID NO: 5275187 - DNA, 25 bp, Homo sapien
gactcaggcaagtcaccgatgacag

SEQ ID NO: 5275188 - DNA, 25 bp, Homo sapien
tatacagagaagcaagacactaagt

SEQ ID NO: 5275189 - DNA, 25 bp, Homo sapien
tgaagtagctaggaaaagtccttac

SEQ ID NO: 5275190 - DNA, 25 bp, Homo sapien
aacagtaggttcttgtctaccaggg

SEQ ID NO: 5275191 - DNA, 25 bp, Homo sapien
ggaatgaagtagctaggaaaagtcc

SEQ ID NO: 5275192 - DNA, 25 bp, Homo sapien
agcttgttaaagaacagtaggttct

SEQ ID NO: 5275193 - DNA, 25 bp, Homo sapien
tcaactgcaccaactttgacaacat

SEQ ID NO: 5275194 - DNA, 25 bp, Homo sapien
taggaaatccctgaacaccatactg

SEQ ID NO: 5275195 - DNA, 25 bp, Homo sapien
tcctagggaatgatgcttatctgca

SEQ ID NO: 5275196 - DNA, 25 bp, Homo sapien
tgttggatccaaaaatcttaatggt

SEQ ID NO: 5275197 - DNA, 25 bp, Homo sapien
caatttttccttccgctaaagcaga

SEQ ID NO: 5275198 - DNA, 25 bp, Homo sapien
taaagcagactccacaagaactcat

SEQ ID NO: 5275199 - DNA, 25 bp, Homo sapien
gggctttagccttgaacaccagaag

SEQ ID NO: 5275200 - DNA, 25 bp, Homo sapien
cagggtgcagtttgcaatcagtcaa

SEQ ID NO: 5275201 - DNA, 25 bp, Homo sapien
taatgcagttgctgctttcttccat

SEQ ID NO: 5275202 - DNA, 25 bp, Homo sapien
aatgcagttgctgctttcttccatt

SEQ ID NO: 5275203 - DNA, 25 bp, Homo sapien
ttaatgcagttgctgctttcttcca

SEQ ID NO: 5275204 - DNA, 25 bp, Homo sapien
ttttaatgcagttgctgctttcttc

SEQ ID NO: 5275205 - DNA, 25 bp, Homo sapien
ggtgttaatctttgacagtgaccac

SEQ ID NO: 5275206 - DNA, 25 bp, Homo sapien
tgttaatctttgacagtgaccacac

SEQ ID NO: 5275207 - DNA, 25 bp, Homo sapien
gtgttaatctttgacagtgaccaca

SEQ ID NO: 5275208 - DNA, 25 bp, Homo sapien
ctggtgttaatctttgacagtgacc

SEQ ID NO: 5275209 - DNA, 25 bp, Homo sapien
ttgggggaagacaacacaaagcaac

SEQ ID NO: 5275210 - DNA, 25 bp, Homo sapien
ttttgggggaagacaacacaaagca

SEQ ID NO: 5275211 - DNA, 25 bp, Homo sapien
gggaagacaacacaaagcaaccatt

SEQ ID NO: 5275212 - DNA, 25 bp, Homo sapien
gggggaagacaacacaaagcaacca

SEQ ID NO: 5275213 - DNA, 25 bp, Homo sapien
aaccttgcaggtactattattggga

SEQ ID NO: 5275214 - DNA, 25 bp, Homo sapien
tattagcccttaccactcattgagg

SEQ ID NO: 5275215 - DNA, 25 bp, Homo sapien
tacatgtgcgtaaacctattagccc

SEQ ID NO: 5275216 - DNA, 25 bp, Homo sapien
tgcacaaatgctaggtgccagcacc

SEQ ID NO: 5275217 - DNA, 25 bp, Homo sapien
tcacatcatcactagaggaatacag

SEQ ID NO: 5275218 - DNA, 25 bp, Homo sapien
tgccagaaagaaggtacagctcacc

SEQ ID NO: 5275219 - DNA, 25 bp, Homo sapien
ggaatacagaccattcactgccaga

SEQ ID NO: 5275220 - DNA, 25 bp, Homo sapien
catggagcatagaattctacaagcc

SEQ ID NO: 5275221 - DNA, 25 bp, Homo sapien
caggctggccaacacagaatagcaa

SEQ ID NO: 5275222 - DNA, 25 bp, Homo sapien
tgtactgctgttttgtataatgcgt

SEQ ID NO: 5275223 - DNA, 25 bp, Homo sapien
ccaggctggccaacacagaatagca

SEQ ID NO: 5275224 - DNA, 25 bp, Homo sapien
tgtataatgcgttttaaggtaagtg

SEQ ID NO: 5275225 - DNA, 25 bp, Homo sapien
cacgtcccgccccaggccagtccgg

SEQ ID NO: 5275226 - DNA, 25 bp, Homo sapien
gggctacgtgcagtccccaccgccg

SEQ ID NO: 5275227 - DNA, 25 bp, Homo sapien
cttcagccctgcagcgtgccgcacg

SEQ ID NO: 5275228 - DNA, 25 bp, Homo sapien
ccgagcgccgggctacgtgcagtcc

SEQ ID NO: 5275229 - DNA, 25 bp, Homo sapien
tccgcacgcgctgtctgcaatgtaa

SEQ ID NO: 5275230 - DNA, 25 bp, Homo sapien
ttgaaagttcttccgtccagggcgc

SEQ ID NO: 5275231 - DNA, 25 bp, Homo sapien
tctggagaaccccagggacttaagc

SEQ ID NO: 5275232 - DNA, 25 bp, Homo sapien
tcttgtgcccgacgaatattccgtg

SEQ ID NO: 5275233 - DNA, 25 bp, Homo sapien
gtgggaagcccaaccggtgatcgca

SEQ ID NO: 5275234 - DNA, 25 bp, Homo sapien
tgatcgcagggctgtttgggattca

SEQ ID NO: 5275235 - DNA, 25 bp, Homo sapien
gaatgtgaaggtgcgtgggaagccc

SEQ ID NO: 5275236 - DNA, 25 bp, Homo sapien
gcagtggactgcgagcctgttcctc

SEQ ID NO: 5275237 - DNA, 25 bp, Homo sapien
aagacagttaactttgtccccatgg

SEQ ID NO: 5275238 - DNA, 25 bp, Homo sapien
taagacagttaactttgtccccatg

SEQ ID NO: 5275239 - DNA, 25 bp, Homo sapien
ctttacattaagacagttaactttg

SEQ ID NO: 5275240 - DNA, 25 bp, Homo sapien
gatggatacattatgggacttttcc

SEQ ID NO: 5275241 - DNA, 25 bp, Homo sapien
tgatggatacattatgggacttttc

SEQ ID NO: 5275242 - DNA, 25 bp, Homo sapien
ggttgatggatacattatgggactt

SEQ ID NO: 5275243 - DNA, 25 bp, Homo sapien
gttgatggatacattatgggacttt

SEQ ID NO: 5275244 - DNA, 25 bp, Homo sapien
ccacacaagcttctcccggaggtct

SEQ ID NO: 5275245 - DNA, 25 bp, Homo sapien
tggaagtcggagctgatgttggctg

SEQ ID NO: 5275246 - DNA, 25 bp, Homo sapien
tggatgctgggggtatcttctctcc

SEQ ID NO: 5275247 - DNA, 25 bp, Homo sapien
tcccggaggtctcttctcatggatg

SEQ ID NO: 5275248 - DNA, 25 bp, Homo sapien
gaatgctcacaacagcagaactggc

SEQ ID NO: 5275249 - DNA, 25 bp, Homo sapien
ccaggagacctaaccttgcagcggg

SEQ ID NO: 5275250 - DNA, 25 bp, Homo sapien
gaattcaccgaaaggcaggcttaag

SEQ ID NO: 5275251 - DNA, 25 bp, Homo sapien
cagccgtgagaatgagcaaactgca

SEQ ID NO: 5275252 - DNA, 25 bp, Homo sapien
agctgtgccacaggaggaaacgcca

SEQ ID NO: 5275253 - DNA, 25 bp, Homo sapien
ctggcagctgtgccacaggaggaaa

SEQ ID NO: 5275254 - DNA, 25 bp, Homo sapien
gctgtgccacaggaggaaacgccat

SEQ ID NO: 5275255 - DNA, 25 bp, Homo sapien
gcagctgtgccacaggaggaaacgc

SEQ ID NO: 5275256 - DNA, 25 bp, Homo sapien
ctgtcggctgtccagatttcaaaaa

SEQ ID NO: 5275257 - DNA, 25 bp, Homo sapien
tagctgtcggctgtccagatttcaa

SEQ ID NO: 5275258 - DNA, 25 bp, Homo sapien
tcttgtcatttgttcctctggtctg

SEQ ID NO: 5275259 - DNA, 25 bp, Homo sapien
tgttcttgtcatttgttcctctggt

SEQ ID NO: 5275260 - DNA, 25 bp, Homo sapien
gattgaccctgaaatccaactaatc

SEQ ID NO: 5275261 - DNA, 25 bp, Homo sapien
cttggacagcaggagtgaggaggct

SEQ ID NO: 5275262 - DNA, 25 bp, Homo sapien
gacagcaggagtgaggaggctgcca

SEQ ID NO: 5275263 - DNA, 25 bp, Homo sapien
acagcaggagtgaggaggctgccat

SEQ ID NO: 5275264 - DNA, 25 bp, Homo sapien
tggacagcaggagtgaggaggctgc

SEQ ID NO: 5275265 - DNA, 25 bp, Homo sapien
tgtgactgctgacgctgacatgctg

SEQ ID NO: 5275266 - DNA, 25 bp, Homo sapien
cttggtgtgactgctgacgctgaca

SEQ ID NO: 5275267 - DNA, 25 bp, Homo sapien
cagtcagctctgtgcggggaggtga

SEQ ID NO: 5275268 - DNA, 25 bp, Homo sapien
gactgctgacgctgacatgctggca

SEQ ID NO: 5275269 - DNA, 25 bp, Homo sapien
taaatcaatcagcagtagttcccag

SEQ ID NO: 5275270 - DNA, 25 bp, Homo sapien
catcaattcttgctgaggaagttaa

SEQ ID NO: 5275271 - DNA, 25 bp, Homo sapien
tgtccttgggggatattaaagctac

SEQ ID NO: 5275272 - DNA, 25 bp, Homo sapien
ctgcaaatgctataatgtccttggg

SEQ ID NO: 5275273 - DNA, 25 bp, Homo sapien
tcttgttgctgcatagaagccatcc

SEQ ID NO: 5275274 - DNA, 25 bp, Homo sapien
cttgttgctgcatagaagccatccc

SEQ ID NO: 5275275 - DNA, 25 bp, Homo sapien
agctcttgagcgtggtgtggcctct

SEQ ID NO: 5275276 - DNA, 25 bp, Homo sapien
gccagctcttgagcgtggtgtggcc

SEQ ID NO: 5275277 - DNA, 25 bp, Homo sapien
ccagctcttgagcgtggtgtggcct

SEQ ID NO: 5275278 - DNA, 25 bp, Homo sapien
tgccagctcttgagcgtggtgtggc

SEQ ID NO: 5275279 - DNA, 25 bp, Homo sapien
ccatctccctgacattgtagaccag

SEQ ID NO: 5275280 - DNA, 25 bp, Homo sapien
catctccctgacattgtagaccagg

SEQ ID NO: 5275281 - DNA, 25 bp, Homo sapien
ctctgggtttccacctgttatgctt

SEQ ID NO: 5275282 - DNA, 25 bp, Homo sapien
cttgcaccttctacaaaccctgttg

SEQ ID NO: 5275283 - DNA, 25 bp, Homo sapien
ctgggtttccacctgttatgcttca

SEQ ID NO: 5275284 - DNA, 25 bp, Homo sapien
atacctctgggtttccacctgttat

SEQ ID NO: 5275285 - DNA, 25 bp, Homo sapien
tggtcctcttttttatgatcttgag

SEQ ID NO: 5275286 - DNA, 25 bp, Homo sapien
gtcctcttttttatgatcttgagtt

SEQ ID NO: 5275287 - DNA, 25 bp, Homo sapien
cttttttatgatcttgagtttcaca

SEQ ID NO: 5275288 - DNA, 25 bp, Homo sapien
ctcttttttatgatcttgagtttca

SEQ ID NO: 5275289 - DNA, 25 bp, Homo sapien
ggtgaacccctacactggtccagag

SEQ ID NO: 5275290 - DNA, 25 bp, Homo sapien
aaagtacgtttcatggcacactgag

SEQ ID NO: 5275291 - DNA, 25 bp, Homo sapien
gggcttgagcaacagacatcgattc

SEQ ID NO: 5275292 - DNA, 25 bp, Homo sapien
ccttcatgaatgagtggcgatccag

SEQ ID NO: 5275293 - DNA, 25 bp, Homo sapien
cctgctgatggcttggcgaggccaa

SEQ ID NO: 5275294 - DNA, 25 bp, Homo sapien
ccaagactgcaaatgagacggcgct

SEQ ID NO: 5275295 - DNA, 25 bp, Homo sapien
gatggaagagttacacagaaaaccc

SEQ ID NO: 5275296 - DNA, 25 bp, Homo sapien
tgagggcaggtatcacactgtacac

SEQ ID NO: 5275297 - DNA, 25 bp, Homo sapien
caactcaagggtttagctgcttaga

SEQ ID NO: 5275298 - DNA, 25 bp, Homo sapien
agattcaaaggagcaccaggcgcct

SEQ ID NO: 5275299 - DNA, 25 bp, Homo sapien
cactgtgcgtatcagtcagcctgga

SEQ ID NO: 5275300 - DNA, 25 bp, Homo sapien
ggtccaactgttgtccaactcaagg

SEQ ID NO: 5275301 - DNA, 25 bp, Homo sapien
tggcagtgggtatcttcgtcttctc

SEQ ID NO: 5275302 - DNA, 25 bp, Homo sapien
catgatggagctgaccaacgtgcag

SEQ ID NO: 5275303 - DNA, 25 bp, Homo sapien
gcgcatcgcgcgcatcttcaagctg

SEQ ID NO: 5275304 - DNA, 25 bp, Homo sapien
tgccctcaagcgcagcttcaaggaa

SEQ ID NO: 5275305 - DNA, 25 bp, Homo sapien
aggtgacacctgtgaggtcccgtga

SEQ ID NO: 5275306 - DNA, 25 bp, Homo sapien
tgtgaggtcccgtgagtccaaattg

SEQ ID NO: 5275307 - DNA, 25 bp, Homo sapien
acacctgtgaggtcccgtgagtcca

SEQ ID NO: 5275308 - DNA, 25 bp, Homo sapien
tcaggtgacacctgtgaggtcccgt

SEQ ID NO: 5275309 - DNA, 25 bp, Homo sapien
ccgggcttctgctggtgcgtctgtt

SEQ ID NO: 5275310 - DNA, 25 bp, Homo sapien
attcagcagaatgggtctgaccttg

SEQ ID NO: 5275311 - DNA, 25 bp, Homo sapien
tgttgtagtcccattgctggattca

SEQ ID NO: 5275312 - DNA, 25 bp, Homo sapien
tagcgaagttgtcactagaagccaa

SEQ ID NO: 5275313 - DNA, 25 bp, Homo sapien
gccaggttgcaggtagactggagcc

SEQ ID NO: 5275314 - DNA, 25 bp, Homo sapien
actggagccgtagggaagcatccgc

SEQ ID NO: 5275315 - DNA, 25 bp, Homo sapien
gaagcatccgcagcttgcacccaca

SEQ ID NO: 5275316 - DNA, 25 bp, Homo sapien
gctccagagtgggtagcaagtgcga

SEQ ID NO: 5275317 - DNA, 25 bp, Homo sapien
tccgcaaaaatctgcttcacagcca

SEQ ID NO: 5275318 - DNA, 25 bp, Homo sapien
cttccgcaaaaatctgcttcacagc

SEQ ID NO: 5275319 - DNA, 25 bp, Homo sapien
tgcctggaaacaccagccgcgttct

SEQ ID NO: 5275320 - DNA, 25 bp, Homo sapien
ggcaggggccatagactgctccact

SEQ ID NO: 5275321 - DNA, 25 bp, Homo sapien
aggctgctcctctcgttctctggcc

SEQ ID NO: 5275322 - DNA, 25 bp, Homo sapien
gatctagcctgcgatgcgtgccctc

SEQ ID NO: 5275323 - DNA, 25 bp, Homo sapien
tgctcctctcgttctctggcctgtt

SEQ ID NO: 5275324 - DNA, 25 bp, Homo sapien
ggagccccaggatctagcctgcgat

SEQ ID NO: 5275325 - DNA, 25 bp, Homo sapien
cagggtttgacgatttctggtcaca

SEQ ID NO: 5275326 - DNA, 25 bp, Homo sapien
tcttccccaaggcagactcggaggc

SEQ ID NO: 5275327 - DNA, 25 bp, Homo sapien
tggatgtcgagcctcagggtttgac

SEQ ID NO: 5275328 - DNA, 25 bp, Homo sapien
cggaggcacgggcagtcattgtctc

SEQ ID NO: 5275329 - DNA, 25 bp, Homo sapien
gagatacaagatcttgtccagcctt

SEQ ID NO: 5275330 - DNA, 25 bp, Homo sapien
tctgtgttgcgtagaccaggctttg

SEQ ID NO: 5275331 - DNA, 25 bp, Homo sapien
caatgcttagtaggcttcctgctga

SEQ ID NO: 5275332 - DNA, 25 bp, Homo sapien
cggctgtgttgaggatttctttgac

SEQ ID NO: 5275333 - DNA, 25 bp, Homo sapien
catccgcagatgtaaatgtcaattc

SEQ ID NO: 5275334 - DNA, 25 bp, Homo sapien
gaatcccgttctctacatccgcaga

SEQ ID NO: 5275335 - DNA, 25 bp, Homo sapien
tgcagaggatagaacggatggaatc

SEQ ID NO: 5275336 - DNA, 25 bp, Homo sapien
cagatgtaaatgtcaattccatcca

SEQ ID NO: 5275337 - DNA, 25 bp, Homo sapien
tacaaatttcgtattttgatatgcc

SEQ ID NO: 5275338 - DNA, 25 bp, Homo sapien
gatgaagaagacagcgtgtaatttt

SEQ ID NO: 5275339 - DNA, 25 bp, Homo sapien
ttcttcttatcactaggattatgca

SEQ ID NO: 5275340 - DNA, 25 bp, Homo sapien
ttcttatcactaggattatgcagct

SEQ ID NO: 5275341 - DNA, 25 bp, Homo sapien
ctgggaggcttcttggcagcatgca

SEQ ID NO: 5275342 - DNA, 25 bp, Homo sapien
caggctggacactgtccgtgggcca

SEQ ID NO: 5275343 - DNA, 25 bp, Homo sapien
ccagcaggccttggcggtcagcagc

SEQ ID NO: 5275344 - DNA, 25 bp, Homo sapien
cagttcttgtcacagggctgcctgg

SEQ ID NO: 5275345 - DNA, 25 bp, Homo sapien
ctcctccaagtgttggagggggcaa

SEQ ID NO: 5275346 - DNA, 25 bp, Homo sapien
ccaagtgttggagggggcaagactg

SEQ ID NO: 5275347 - DNA, 25 bp, Homo sapien
ccactggatccctgttcctcctcca

SEQ ID NO: 5275348 - DNA, 25 bp, Homo sapien
tgtgctggcatccgcgtgcccatct

SEQ ID NO: 5275349 - DNA, 25 bp, Homo sapien
catcaggtggggctaccataggatc

SEQ ID NO: 5275350 - DNA, 25 bp, Homo sapien
gggctaccataggatctgccagcaa

SEQ ID NO: 5275351 - DNA, 25 bp, Homo sapien
ctaccataggatctgccagcaacat

SEQ ID NO: 5275352 - DNA, 25 bp, Homo sapien
caggtggggctaccataggatctgc

SEQ ID NO: 5275353 - DNA, 25 bp, Homo sapien
tatggggagcagacaatactcctgg

SEQ ID NO: 5275354 - DNA, 25 bp, Homo sapien
atggggagcagacaatactcctggt

SEQ ID NO: 5275355 - DNA, 25 bp, Homo sapien
ttatggggagcagacaatactcctg

SEQ ID NO: 5275356 - DNA, 25 bp, Homo sapien
actctgaagatagggcactaatggc

SEQ ID NO: 5275357 - DNA, 25 bp, Homo sapien
gcaggaatggacaagtcagataatt

SEQ ID NO: 5275358 - DNA, 25 bp, Homo sapien
caagtcagataattgccgaaaagga

SEQ ID NO: 5275359 - DNA, 25 bp, Homo sapien
gccttgtcctgacagctgccaggag

SEQ ID NO: 5275360 - DNA, 25 bp, Homo sapien
ctgccagtggtgacaagaacaaggg

SEQ ID NO: 5275361 - DNA, 25 bp, Homo sapien
ggacatcattcgcatgcggcctttg

SEQ ID NO: 5275362 - DNA, 25 bp, Homo sapien
gaggctgactgtatcaagggcagaa

SEQ ID NO: 5275363 - DNA, 25 bp, Homo sapien
catcattcgcatgcggcctttgagg

SEQ ID NO: 5275364 - DNA, 25 bp, Homo sapien
gggagggcaagggattgggctgctc

SEQ ID NO: 5275365 - DNA, 25 bp, Homo sapien
ggggagggcaagggattgggctgct

SEQ ID NO: 5275366 - DNA, 25 bp, Homo sapien
tgcagccagcttttatgctggaaaa

SEQ ID NO: 5275367 - DNA, 25 bp, Homo sapien
ggctgagcgccctttcagctccaca

SEQ ID NO: 5275368 - DNA, 25 bp, Homo sapien
tcccggaagggctgagcgccctttc

SEQ ID NO: 5275369 - DNA, 25 bp, Homo sapien
ctgcagccagcttttatgctggaaa

SEQ ID NO: 5275370 - DNA, 25 bp, Homo sapien
aaaaggattcctgctacatgatgca

SEQ ID NO: 5275371 - DNA, 25 bp, Homo sapien
gagagatgtaccgagttcccagctc

SEQ ID NO: 5275372 - DNA, 25 bp, Homo sapien
tggagaacctgtttgcaagagtcat

SEQ ID NO: 5275373 - DNA, 25 bp, Homo sapien
agatgtaccgagttcccagctccag

SEQ ID NO: 5275374 - DNA, 25 bp, Homo sapien
ctctcagctgtacagccgtggccag

SEQ ID NO: 5275375 - DNA, 25 bp, Homo sapien
tccagtatccgcacctccactccgg

SEQ ID NO: 5275376 - DNA, 25 bp, Homo sapien
tacagaaggttctagagccagagcc

SEQ ID NO: 5275377 - DNA, 25 bp, Homo sapien
agagcctccagtatccgcacctcca

SEQ ID NO: 5275378 - DNA, 25 bp, Homo sapien
agtatccgcacctccactccggaaa

SEQ ID NO: 5275379 - DNA, 25 bp, Homo sapien
tccccttgagcgtctcgggctctct

SEQ ID NO: 5275380 - DNA, 25 bp, Homo sapien
atccccttgagcgtctcgggctctc

SEQ ID NO: 5275381 - DNA, 25 bp, Homo sapien
ccatccccttgagcgtctcgggctc

SEQ ID NO: 5275382 - DNA, 25 bp, Homo sapien
gtcccatccccttgagcgtctcggg

SEQ ID NO: 5275383 - DNA, 25 bp, Homo sapien
gcgtggcttcggtggccacggtccg

SEQ ID NO: 5275384 - DNA, 25 bp, Homo sapien
ccgtcatggaagtgtctggtggctg

SEQ ID NO: 5275385 - DNA, 25 bp, Homo sapien
tggccacggtccgacgggccgtcat

SEQ ID NO: 5275386 - DNA, 25 bp, Homo sapien
tccgacgggccgtcatggaagtgtc

SEQ ID NO: 5275387 - DNA, 25 bp, Homo sapien
tgaggggaggtgggggagctggcgg

SEQ ID NO: 5275388 - DNA, 25 bp, Homo sapien
gtgaggggaggtgggggagctggcg

SEQ ID NO: 5275389 - DNA, 25 bp, Homo sapien
ggtgaggggaggtgggggagctggc

SEQ ID NO: 5275390 - DNA, 25 bp, Homo sapien
gagacttgcttgcatccggatggaa

SEQ ID NO: 5275391 - DNA, 25 bp, Homo sapien
gttcctgagcgatggccgcagccca

SEQ ID NO: 5275392 - DNA, 25 bp, Homo sapien
gcagcccacggcagcgcggagagag

SEQ ID NO: 5275393 - DNA, 25 bp, Homo sapien
cggagagagccgaaggtgagaagag

SEQ ID NO: 5275394 - DNA, 25 bp, Homo sapien
ccgtgcaccggggacaccagcgcat

SEQ ID NO: 5275395 - DNA, 25 bp, Homo sapien
caccgtgcaccggggacaccagcgc

SEQ ID NO: 5275396 - DNA, 25 bp, Homo sapien
gccccaccgtgcaccggggacacca

SEQ ID NO: 5275397 - DNA, 25 bp, Homo sapien
gcaaggccccaccgtgcaccgggga

SEQ ID NO: 5275398 - DNA, 25 bp, Homo sapien
aagccctgtgcggagtctcctggaa

SEQ ID NO: 5275399 - DNA, 25 bp, Homo sapien
tggaacctaagacagaggcggcgcc

SEQ ID NO: 5275400 - DNA, 25 bp, Homo sapien
ttccccgcggcagtgaggccttggc

SEQ ID NO: 5275401 - DNA, 25 bp, Homo sapien
cttggccaaccgggctcgttctgct

SEQ ID NO: 5275402 - DNA, 25 bp, Homo sapien
cctgctcagtcccaatgacattgat

SEQ ID NO: 5275403 - DNA, 25 bp, Homo sapien
ccaatgacattgattatcatgtggg

SEQ ID NO: 5275404 - DNA, 25 bp, Homo sapien
tcagtcccaatgacattgattatca

SEQ ID NO: 5275405 - DNA, 25 bp, Homo sapien
cattgattatcatgtggggctccat

SEQ ID NO: 5275406 - DNA, 25 bp, Homo sapien
gcccccgtggacacttgctccttgt

SEQ ID NO: 5275407 - DNA, 25 bp, Homo sapien
gccgaggccctggcaatgttccttt

SEQ ID NO: 5275408 - DNA, 25 bp, Homo sapien
ctaagaataactagggtttgccgag

SEQ ID NO: 5275409 - DNA, 25 bp, Homo sapien
gatgatgagttgtcaatgaggcccc

SEQ ID NO: 5275410 - DNA, 25 bp, Homo sapien
aacaagggcacggaggtgtccaata

SEQ ID NO: 5275411 - DNA, 25 bp, Homo sapien
aataggccacgcaacaatgatgttc

SEQ ID NO: 5275412 - DNA, 25 bp, Homo sapien
tctggatgatgggtcgatgggccac

SEQ ID NO: 5275413 - DNA, 25 bp, Homo sapien
tgtgacaacgctcttcagacatgag

SEQ ID NO: 5275414 - DNA, 25 bp, Homo sapien
gtcgctcagggatggcaggggttgc

SEQ ID NO: 5275415 - DNA, 25 bp, Homo sapien
tcgctcagggatggcaggggttgcc

SEQ ID NO: 5275416 - DNA, 25 bp, Homo sapien
ctcagggatggcaggggttgcctct

SEQ ID NO: 5275417 - DNA, 25 bp, Homo sapien
cagggatggcaggggttgcctctgg

SEQ ID NO: 5275418 - DNA, 25 bp, Homo sapien
cccccaggtagcaccgatggtcatg

SEQ ID NO: 5275419 - DNA, 25 bp, Homo sapien
ccaggtagcaccgatggtcatggga

SEQ ID NO: 5275420 - DNA, 25 bp, Homo sapien
gctgtggggagatgacccgcaactc

SEQ ID NO: 5275421 - DNA, 25 bp, Homo sapien
tgtggggagatgacccgcaactccc

SEQ ID NO: 5275422 - DNA, 25 bp, Homo sapien
cgcagagtctcacgcgtgttccagg

SEQ ID NO: 5275423 - DNA, 25 bp, Homo sapien
tggtggacagaaacccacacgcttt

SEQ ID NO: 5275424 - DNA, 25 bp, Homo sapien
aatgcacacttttgggcacaggaag

SEQ ID NO: 5275425 - DNA, 25 bp, Homo sapien
tggtcagctgattcttcaggtgcac

SEQ ID NO: 5275426 - DNA, 25 bp, Homo sapien
acagctcgtcctgtttccacagggt

SEQ ID NO: 5275427 - DNA, 25 bp, Homo sapien
ggtgcctcggcatgctgcactgcgc

SEQ ID NO: 5275428 - DNA, 25 bp, Homo sapien
tccggagacctctcataggacagct

SEQ ID NO: 5275429 - DNA, 25 bp, Homo sapien
ggcatgctgcactgcgctcatcttc

SEQ ID NO: 5275430 - DNA, 25 bp, Homo sapien
gtttcatttatagcgagggggacat

SEQ ID NO: 5275431 - DNA, 25 bp, Homo sapien
ctctgtttcatttatagcgaggggg

SEQ ID NO: 5275432 - DNA, 25 bp, Homo sapien
catttatagcgagggggacattctt

SEQ ID NO: 5275433 - DNA, 25 bp, Homo sapien
tcatttatagcgagggggacattct

SEQ ID NO: 5275434 - DNA, 25 bp, Homo sapien
cctcgcattagagccgccccatcct

SEQ ID NO: 5275435 - DNA, 25 bp, Homo sapien
ccagaggactcctcgcattagagcc

SEQ ID NO: 5275436 - DNA, 25 bp, Homo sapien
ctcctcgcattagagccgccccatc

SEQ ID NO: 5275437 - DNA, 25 bp, Homo sapien
gaggactcctcgcattagagccgcc

SEQ ID NO: 5275438 - DNA, 25 bp, Homo sapien
acctctatgagggtggtaggagcaa

SEQ ID NO: 5275439 - DNA, 25 bp, Homo sapien
aatatggcaaggcctgaagcaggat

SEQ ID NO: 5275440 - DNA, 25 bp, Homo sapien
ttacatgatgacaatatggcaaggc

SEQ ID NO: 5275441 - DNA, 25 bp, Homo sapien
aacagagacctctatgagggtggta

SEQ ID NO: 5275442 - DNA, 25 bp, Homo sapien
tccatttctatggtgaagttcaact

SEQ ID NO: 5275443 - DNA, 25 bp, Homo sapien
gtgaagttcaacttgttggtttcca

SEQ ID NO: 5275444 - DNA, 25 bp, Homo sapien
agacaggaggctgttcccagaatcc

SEQ ID NO: 5275445 - DNA, 25 bp, Homo sapien
agagacaggaggctgttcccagaat

SEQ ID NO: 5275446 - DNA, 25 bp, Homo sapien
gccttctgggaggacctgaaatctg

SEQ ID NO: 5275447 - DNA, 25 bp, Homo sapien
ccttctgggaggacctgaaatctga

SEQ ID NO: 5275448 - DNA, 25 bp, Homo sapien
tgtgccctctgctagcctgggcttg

SEQ ID NO: 5275449 - DNA, 25 bp, Homo sapien
cttgcccacttatcacaccgtgtag

SEQ ID NO: 5275450 - DNA, 25 bp, Homo sapien
gagtgcctgaatctccatcatccag

SEQ ID NO: 5275451 - DNA, 25 bp, Homo sapien
caccgtgtagccatcttgtattcgc

SEQ ID NO: 5275452 - DNA, 25 bp, Homo sapien
tgcttcttagggacgtttcaaatcc

SEQ ID NO: 5275453 - DNA, 25 bp, Homo sapien
cagtgcttcttagggacgtttcaaa

SEQ ID NO: 5275454 - DNA, 25 bp, Homo sapien
gtgcttcttagggacgtttcaaatc

SEQ ID NO: 5275455 - DNA, 25 bp, Homo sapien
ttcagtgcttcttagggacgtttca

SEQ ID NO: 5275456 - DNA, 25 bp, Homo sapien
ttaacctctgttccccagcattcat

SEQ ID NO: 5275457 - DNA, 25 bp, Homo sapien
cttcctcacggatttttaacctctg

SEQ ID NO: 5275458 - DNA, 25 bp, Homo sapien
gaactaacagagtgacaaatcattc

SEQ ID NO: 5275459 - DNA, 25 bp, Homo sapien
ctgtacgagaggagtggcaatagca

SEQ ID NO: 5275460 - DNA, 25 bp, Homo sapien
agcagtttacaatggcggctgttca

SEQ ID NO: 5275461 - DNA, 25 bp, Homo sapien
cagtcagctctcgtgtgaactaaca

SEQ ID NO: 5275462 - DNA, 25 bp, Homo sapien
agggcttcaagccccactaaacgat

SEQ ID NO: 5275463 - DNA, 25 bp, Homo sapien
catgagggcttcaagccccactaaa

SEQ ID NO: 5275464 - DNA, 25 bp, Homo sapien
tgagggcttcaagccccactaaacg

SEQ ID NO: 5275465 - DNA, 25 bp, Homo sapien
ccatgagggcttcaagccccactaa

SEQ ID NO: 5275466 - DNA, 25 bp, Homo sapien
gccacaacgaccttgtgcagatttt

SEQ ID NO: 5275467 - DNA, 25 bp, Homo sapien
agccgccacaacgaccttgtgcaga

SEQ ID NO: 5275468 - DNA, 25 bp, Homo sapien
gccgccacaacgaccttgtgcagat

SEQ ID NO: 5275469 - DNA, 25 bp, Homo sapien
caacgaccttgtgcagattttgttt

SEQ ID NO: 5275470 - DNA, 25 bp, Homo sapien
ctggctagttccacttcaccatggc

SEQ ID NO: 5275471 - DNA, 25 bp, Homo sapien
gtttccagttctccgtcctatagtc

SEQ ID NO: 5275472 - DNA, 25 bp, Homo sapien
gctagttccacttcaccatggcaag

SEQ ID NO: 5275473 - DNA, 25 bp, Homo sapien
ctggtttccagttctccgtcctata

SEQ ID NO: 5275474 - DNA, 25 bp, Homo sapien
aattgtaccatgtgtagaggagatg

SEQ ID NO: 5275475 - DNA, 25 bp, Homo sapien
atgttgttattggtgctgacgctgc

SEQ ID NO: 5275476 - DNA, 25 bp, Homo sapien
cagggtccagacatcctgcagagca

SEQ ID NO: 5275477 - DNA, 25 bp, Homo sapien
ccatgtgtagaggagatgttgttat

SEQ ID NO: 5275478 - DNA, 25 bp, Homo sapien
catcaatgacggaatcagggctggc

SEQ ID NO: 5275479 - DNA, 25 bp, Homo sapien
tcaatgacggaatcagggctggcaa

SEQ ID NO: 5275480 - DNA, 25 bp, Homo sapien
ccatcaatgacggaatcagggctgg

SEQ ID NO: 5275481 - DNA, 25 bp, Homo sapien
atgacggaatcagggctggcaaaga

SEQ ID NO: 5275482 - DNA, 25 bp, Homo sapien
aaagactggtttctgaagcgataat

SEQ ID NO: 5275483 - DNA, 25 bp, Homo sapien
ctggtttctgaagcgataatagacc

SEQ ID NO: 5275484 - DNA, 25 bp, Homo sapien
gactggtttctgaagcgataataga

SEQ ID NO: 5275485 - DNA, 25 bp, Homo sapien
ggtttctgaagcgataatagaccat

SEQ ID NO: 5275486 - DNA, 25 bp, Homo sapien
tgggtcacttggaaacaaactgttg

SEQ ID NO: 5275487 - DNA, 25 bp, Homo sapien
cttttttgacatgtatctggagata

SEQ ID NO: 5275488 - DNA, 25 bp, Homo sapien
gaaacgaaacggaagcacaaacatg

SEQ ID NO: 5275489 - DNA, 25 bp, Homo sapien
aactgttgcttgactatattgctga

SEQ ID NO: 5275490 - DNA, 25 bp, Homo sapien
actgttgttgcttttccctgcaatt

SEQ ID NO: 5275491 - DNA, 25 bp, Homo sapien
ctgttgttgcttttccctgcaattc

SEQ ID NO: 5275492 - DNA, 25 bp, Homo sapien
cactgttgttgcttttccctgcaat

SEQ ID NO: 5275493 - DNA, 25 bp, Homo sapien
tactctgcaccagtgggtgacagat

SEQ ID NO: 5275494 - DNA, 25 bp, Homo sapien
cagcagatgaggcaaacgagcagcc

SEQ ID NO: 5275495 - DNA, 25 bp, Homo sapien
ggaaagcacagtccatttgtcattt

SEQ ID NO: 5275496 - DNA, 25 bp, Homo sapien
gagcagcccggcctgttactctgca

SEQ ID NO: 5275497 - DNA, 25 bp, Homo sapien
tacaaacgtagtaagcttatccagc

SEQ ID NO: 5275498 - DNA, 25 bp, Homo sapien
ttcttctctggatcattacaaacgt

SEQ ID NO: 5275499 - DNA, 25 bp, Homo sapien
tggatcattacaaacgtagtaagct

SEQ ID NO: 5275500 - DNA, 25 bp, Homo sapien
cgtagtaagcttatccagcacatct

SEQ ID NO: 5275501 - DNA, 25 bp, Homo sapien
tagtgagaagcgtcagacgcgtgcc

SEQ ID NO: 5275502 - DNA, 25 bp, Homo sapien
tggccccttagtgagaagcgtcaga

SEQ ID NO: 5275503 - DNA, 25 bp, Homo sapien
cccttagtgagaagcgtcagacgcg

SEQ ID NO: 5275504 - DNA, 25 bp, Homo sapien
agcgtcagacgcgtgccaggctcct

SEQ ID NO: 5275505 - DNA, 25 bp, Homo sapien
caccgggggtgtggtctcttctcca

SEQ ID NO: 5275506 - DNA, 25 bp, Homo sapien
accgggggtgtggtctcttctccag

SEQ ID NO: 5275507 - DNA, 25 bp, Homo sapien
catttaatgttcgtgaccaggacgc

SEQ ID NO: 5275508 - DNA, 25 bp, Homo sapien
tcgtgctgccctaactggctggtga

SEQ ID NO: 5275509 - DNA, 25 bp, Homo sapien
gcctcctgaaaaccctgaagggcag

SEQ ID NO: 5275510 - DNA, 25 bp, Homo sapien
caggacgcagggaatgcaaccttca

SEQ ID NO: 5275511 - DNA, 25 bp, Homo sapien
ggtggcctcacagggataatatccc

SEQ ID NO: 5275512 - DNA, 25 bp, Homo sapien
tgacagcatgcctcctattaggtgg

SEQ ID NO: 5275513 - DNA, 25 bp, Homo sapien
tgcttgggcagaaatggtggctctc

SEQ ID NO: 5275514 - DNA, 25 bp, Homo sapien
ccttgtgtaaggcacggctgcatga

SEQ ID NO: 5275515 - DNA, 25 bp, Homo sapien
cgcagggtcctcaaaggacctcttc

SEQ ID NO: 5275516 - DNA, 25 bp, Homo sapien
cagggtcctcaaaggacctcttctt

SEQ ID NO: 5275517 - DNA, 25 bp, Homo sapien
ggtcctcaaaggacctcttcttgca

SEQ ID NO: 5275518 - DNA, 25 bp, Homo sapien
gccgcagggtcctcaaaggacctct

SEQ ID NO: 5275519 - DNA, 25 bp, Homo sapien
gctcagactcggtgggaatgaagac

SEQ ID NO: 5275520 - DNA, 25 bp, Homo sapien
tttccatgacacagagtgacgggtg

SEQ ID NO: 5275521 - DNA, 25 bp, Homo sapien
gtgtagctcacggtcatggccctga

SEQ ID NO: 5275522 - DNA, 25 bp, Homo sapien
actgggcgccaaggacgtgtagctc

SEQ ID NO: 5275523 - DNA, 25 bp, Homo sapien
caggggtttccacgtggccaggcgc

SEQ ID NO: 5275524 - DNA, 25 bp, Homo sapien
gggtttccacgtggccaggcgcagc

SEQ ID NO: 5275525 - DNA, 25 bp, Homo sapien
gtttccacgtggccaggcgcagcag

SEQ ID NO: 5275526 - DNA, 25 bp, Homo sapien
ctacaggggtttccacgtggccagg

SEQ ID NO: 5275527 - DNA, 25 bp, Homo sapien
cagggtcgagcccaggatctgcatt

SEQ ID NO: 5275528 - DNA, 25 bp, Homo sapien
caccgctccacctctcatgaggagg

SEQ ID NO: 5275529 - DNA, 25 bp, Homo sapien
cacacttcccacatcgtgtttggga

SEQ ID NO: 5275530 - DNA, 25 bp, Homo sapien
ggaagggtgcaggagtcttgaggtg

SEQ ID NO: 5275531 - DNA, 25 bp, Homo sapien
gaaatggccatagcgaactaccgtg

SEQ ID NO: 5275532 - DNA, 25 bp, Homo sapien
catagcgaactaccgtgcgtccaac

SEQ ID NO: 5275533 - DNA, 25 bp, Homo sapien
tcagaaatggccatagcgaactacc

SEQ ID NO: 5275534 - DNA, 25 bp, Homo sapien
tggccatagcgaactaccgtgcgtc

SEQ ID NO: 5275535 - DNA, 25 bp, Homo sapien
agcgtgctgcagtcatggccgacgt

SEQ ID NO: 5275536 - DNA, 25 bp, Homo sapien
tcccataatgcattcggctggccac

SEQ ID NO: 5275537 - DNA, 25 bp, Homo sapien
gcctgaaggaggatgcgaagctcca

SEQ ID NO: 5275538 - DNA, 25 bp, Homo sapien
tggcaacctgctccgatcttcagaa

SEQ ID NO: 5275539 - DNA, 25 bp, Homo sapien
ggtgggaagatcacggggcgcagga

SEQ ID NO: 5275540 - DNA, 25 bp, Homo sapien
gtgggaagatcacggggcgcaggag

SEQ ID NO: 5275541 - DNA, 25 bp, Homo sapien
ctgtctgttgagagccactcaatgt

SEQ ID NO: 5275542 - DNA, 25 bp, Homo sapien
gtctgttgagagccactcaatgtcc

SEQ ID NO: 5275543 - DNA, 25 bp, Homo sapien
tgtctgttgagagccactcaatgtc

SEQ ID NO: 5275544 - DNA, 25 bp, Homo sapien
cagcttgtgctaaacctgaacaaaa

SEQ ID NO: 5275545 - DNA, 25 bp, Homo sapien
tcacagcttgtgctaaacctgaaca

SEQ ID NO: 5275546 - DNA, 25 bp, Homo sapien
gatattcatcacagcttgtgctaaa

SEQ ID NO: 5275547 - DNA, 25 bp, Homo sapien
ttcatcacagcttgtgctaaacctg

SEQ ID NO: 5275548 - DNA, 25 bp, Homo sapien
gaggttgtaatgaacagagatcgcc

SEQ ID NO: 5275549 - DNA, 25 bp, Homo sapien
ggttgtaatgaacagagatcgcccc

SEQ ID NO: 5275550 - DNA, 25 bp, Homo sapien
gtaatgaacagagatcgccccgctg

SEQ ID NO: 5275551 - DNA, 25 bp, Homo sapien
ttgtaatgaacagagatcgccccgc

SEQ ID NO: 5275552 - DNA, 25 bp, Homo sapien
gcactctgcgcaggcctctattcgt

SEQ ID NO: 5275553 - DNA, 25 bp, Homo sapien
tgctgcctccctcatagaagcagaa

SEQ ID NO: 5275554 - DNA, 25 bp, Homo sapien
gctacagtgcgagctcagtggttca

SEQ ID NO: 5275555 - DNA, 25 bp, Homo sapien
ttacaaagataggaagcagcgcgcc

SEQ ID NO: 5275556 - DNA, 25 bp, Homo sapien
gagtctctccctgctaagggctaca

SEQ ID NO: 5275557 - DNA, 25 bp, Homo sapien
tgatatcccgacctgtgcatctggt

SEQ ID NO: 5275558 - DNA, 25 bp, Homo sapien
ggactttgccaggtgaaaaccatga

SEQ ID NO: 5275559 - DNA, 25 bp, Homo sapien
cttgttgctgtctattctggaggga

SEQ ID NO: 5275560 - DNA, 25 bp, Homo sapien
tcttcgagttgtcctgtgttactgg

SEQ ID NO: 5275561 - DNA, 25 bp, Homo sapien
cactgagccagactagattgtgaat

SEQ ID NO: 5275562 - DNA, 25 bp, Homo sapien
taaagataaaacagctacatgcctc

SEQ ID NO: 5275563 - DNA, 25 bp, Homo sapien
gattgcttcctcagacctactgtgt

SEQ ID NO: 5275564 - DNA, 25 bp, Homo sapien
cgctgcctagacagaccccatttat

SEQ ID NO: 5275565 - DNA, 25 bp, Homo sapien
tcaattccatgttcccacgtgaagg

SEQ ID NO: 5275566 - DNA, 25 bp, Homo sapien
cacgtgaaggtgtaaccacctaaag

SEQ ID NO: 5275567 - DNA, 25 bp, Homo sapien
gagattggagcttaattattactca

SEQ ID NO: 5275568 - DNA, 25 bp, Homo sapien
gagccaaataattggtctgggtggt

SEQ ID NO: 5275569 - DNA, 25 bp, Homo sapien
tcgctgtcttctgttcccgagcggg

SEQ ID NO: 5275570 - DNA, 25 bp, Homo sapien
gaggctgcctgaccctaaactgtca

SEQ ID NO: 5275571 - DNA, 25 bp, Homo sapien
aactggttgagccaaataattggtc

SEQ ID NO: 5275572 - DNA, 25 bp, Homo sapien
gattcttaacgagcctgctgccttc

SEQ ID NO: 5275573 - DNA, 25 bp, Homo sapien
aggttatagatcaacagcatcccaa

SEQ ID NO: 5275574 - DNA, 25 bp, Homo sapien
gtaaggttatagatcaacagcatcc

SEQ ID NO: 5275575 - DNA, 25 bp, Homo sapien
tagtatttattgttattcttgggtg

SEQ ID NO: 5275576 - DNA, 25 bp, Homo sapien
catcagttaactagcttcttcttag

SEQ ID NO: 5275577 - DNA, 25 bp, Homo sapien
gaagaattgagcatcagttaactag

SEQ ID NO: 5275578 - DNA, 25 bp, Homo sapien
cggcagctggccactagcagtttta

SEQ ID NO: 5275579 - DNA, 25 bp, Homo sapien
ttaggttcataatggcatgttggcc

SEQ ID NO: 5275580 - DNA, 25 bp, Homo sapien
actgtgagtgcgctgacttggagcc

SEQ ID NO: 5275581 - DNA, 25 bp, Homo sapien
cctgtgcaagtaagaaccggactca

SEQ ID NO: 5275582 - DNA, 25 bp, Homo sapien
ttgaagtaacatggtccctggcgct

SEQ ID NO: 5275583 - DNA, 25 bp, Homo sapien
ggccagtaagtttgcacagctccag

SEQ ID NO: 5275584 - DNA, 25 bp, Homo sapien
atctgcagtgttgaggccagtcact

SEQ ID NO: 5275585 - DNA, 25 bp, Homo sapien
tatggtagtgctcagacatctgcag

SEQ ID NO: 5275586 - DNA, 25 bp, Homo sapien
agcccattttgaggccattttgagc

SEQ ID NO: 5275587 - DNA, 25 bp, Homo sapien
ggaagtcatccaagaagcccatttt

SEQ ID NO: 5275588 - DNA, 25 bp, Homo sapien
ggccacaactatagaattaccactg

SEQ ID NO: 5275589 - DNA, 25 bp, Homo sapien
tcgatgaggaaatcccagtaagctt

SEQ ID NO: 5275590 - DNA, 25 bp, Homo sapien
taggttctgtccagttcttagggac

SEQ ID NO: 5275591 - DNA, 25 bp, Homo sapien
caaggcaagcatacatgtagctggc

SEQ ID NO: 5275592 - DNA, 25 bp, Homo sapien
gcaacaaacactcgagccatctcag

SEQ ID NO: 5275593 - DNA, 25 bp, Homo sapien
taaatcatagggcagaagaaacaca

SEQ ID NO: 5275594 - DNA, 25 bp, Homo sapien
aagagcatacttaggtgacagggtc

SEQ ID NO: 5275595 - DNA, 25 bp, Homo sapien
gaggctcagagtgaataacctgccc

SEQ ID NO: 5275596 - DNA, 25 bp, Homo sapien
caaatggtgtcttcacagcataggg

SEQ ID NO: 5275597 - DNA, 25 bp, Homo sapien
tgatttcttagttccccataggagg

SEQ ID NO: 5275598 - DNA, 25 bp, Homo sapien
gaagctcggcagtgacttgctcaaa

SEQ ID NO: 5275599 - DNA, 25 bp, Homo sapien
tgatatccagcgctgtcacacagtg

SEQ ID NO: 5275600 - DNA, 25 bp, Homo sapien
gcatgcactcatgtatgtacatgaa

SEQ ID NO: 5275601 - DNA, 25 bp, Homo sapien
catgtatgtacatgaaagcggcaat

SEQ ID NO: 5275602 - DNA, 25 bp, Homo sapien
caatgcggtaaaaagcgaattctta

SEQ ID NO: 5275603 - DNA, 25 bp, Homo sapien
tgaaagcggcaatgcggtaaaaagc

SEQ ID NO: 5275604 - DNA, 25 bp, Homo sapien
tatctgggatcatgagaatacggca

SEQ ID NO: 5275605 - DNA, 25 bp, Homo sapien
caagaatgtcctgcgtaaactgtaa

SEQ ID NO: 5275606 - DNA, 25 bp, Homo sapien
cattgtagtgtgagcgactgccgag

SEQ ID NO: 5275607 - DNA, 25 bp, Homo sapien
tacatcctaagagctggtaaacgct

SEQ ID NO: 5275608 - DNA, 25 bp, Homo sapien
tgaagacagcgatcatatttgggat

SEQ ID NO: 5275609 - DNA, 25 bp, Homo sapien
ttaagacggacgcacatagggaagc

SEQ ID NO: 5275610 - DNA, 25 bp, Homo sapien
caagcaatctgcaataggaggtttg

SEQ ID NO: 5275611 - DNA, 25 bp, Homo sapien
catgttggccaagtacactttccag

SEQ ID NO: 5275612 - DNA, 25 bp, Homo sapien
tctgatacagctggttaactttgag

SEQ ID NO: 5275613 - DNA, 25 bp, Homo sapien
aacttgtgccaaggaactcatctgg

SEQ ID NO: 5275614 - DNA, 25 bp, Homo sapien
tttagatatgactgaaaagggccca

SEQ ID NO: 5275615 - DNA, 25 bp, Homo sapien
aaaacctgaggcgatttctgataca

SEQ ID NO: 5275616 - DNA, 25 bp, Homo sapien
gtcgacttggccgtctaatagactg

SEQ ID NO: 5275617 - DNA, 25 bp, Homo sapien
tctaatagactggttttgctgtatc

SEQ ID NO: 5275618 - DNA, 25 bp, Homo sapien
cattgaagttctaggagatgatcgg

SEQ ID NO: 5275619 - DNA, 25 bp, Homo sapien
gattctttgccgttgaaatatcata

SEQ ID NO: 5275620 - DNA, 25 bp, Homo sapien
tttgcaaggtgctataatctcctcc

SEQ ID NO: 5275621 - DNA, 25 bp, Homo sapien
catacaagcctcacagttggttggg

SEQ ID NO: 5275622 - DNA, 25 bp, Homo sapien
ttaatatggcaacggcggcactcca

SEQ ID NO: 5275623 - DNA, 25 bp, Homo sapien
ggaggcttaaacatgtgccacaggg

SEQ ID NO: 5275624 - DNA, 25 bp, Homo sapien
taactggtcggacatgaaataactt

SEQ ID NO: 5275625 - DNA, 25 bp, Homo sapien
tgtaactggtcggacatgaaataac

SEQ ID NO: 5275626 - DNA, 25 bp, Homo sapien
tgtctgtgtaactggtcggacatga

SEQ ID NO: 5275627 - DNA, 25 bp, Homo sapien
tctgtgtaactggtcggacatgaaa

SEQ ID NO: 5275628 - DNA, 25 bp, Homo sapien
tcttcttactgcttacaatcacata

SEQ ID NO: 5275629 - DNA, 25 bp, Homo sapien
aaccatgtaaggattggattgttct

SEQ ID NO: 5275630 - DNA, 25 bp, Homo sapien
accatgtaaggattggattgttctt

SEQ ID NO: 5275631 - DNA, 25 bp, Homo sapien
tcatagaaaagaatcttcttactgc

SEQ ID NO: 5275632 - DNA, 25 bp, Homo sapien
gaaagccatccttctaatcttgatt

SEQ ID NO: 5275633 - DNA, 25 bp, Homo sapien
tagtgttgtttcgtacaggcaatga

SEQ ID NO: 5275634 - DNA, 25 bp, Homo sapien
ttcttagtgttgtttcgtacaggca

SEQ ID NO: 5275635 - DNA, 25 bp, Homo sapien
gtttcgtacaggcaatgaaagccat

SEQ ID NO: 5275636 - DNA, 25 bp, Homo sapien
catgtgaggctaaagataacaattc

SEQ ID NO: 5275637 - DNA, 25 bp, Homo sapien
tacaaataagcacaacatgtgaggc

SEQ ID NO: 5275638 - DNA, 25 bp, Homo sapien
tacagtaatagtacaggatcagtag

SEQ ID NO: 5275639 - DNA, 25 bp, Homo sapien
taacaattctccttagataacaaag

SEQ ID NO: 5275640 - DNA, 25 bp, Homo sapien
tgagaactggaaggcttagtggcaa

SEQ ID NO: 5275641 - DNA, 25 bp, Homo sapien
cgctggtaggtgaatgacatggatt

SEQ ID NO: 5275642 - DNA, 25 bp, Homo sapien
catggattccatagtgtgtgactga

SEQ ID NO: 5275643 - DNA, 25 bp, Homo sapien
cagagtcaaggagcgtgtgagaact

SEQ ID NO: 5275644 - DNA, 25 bp, Homo sapien
tgcaaggcttggagttgtgaccgca

SEQ ID NO: 5275645 - DNA, 25 bp, Homo sapien
catctgcagttcaattcgaatctgg

SEQ ID NO: 5275646 - DNA, 25 bp, Homo sapien
ccctggtccactgcctatactggaa

SEQ ID NO: 5275647 - DNA, 25 bp, Homo sapien
tactggaactatccagaccaatatg

SEQ ID NO: 5275648 - DNA, 25 bp, Homo sapien
gatacttgatcatctgctgggtcaa

SEQ ID NO: 5275649 - DNA, 25 bp, Homo sapien
tgtgtcattaccacgcttgacaggt

SEQ ID NO: 5275650 - DNA, 25 bp, Homo sapien
ctgggtcaatttctcacgttcagat

SEQ ID NO: 5275651 - DNA, 25 bp, Homo sapien
tttaagctccatatgtagctttcta

SEQ ID NO: 5275652 - DNA, 25 bp, Homo sapien
aatattggtacattcgatgactact

SEQ ID NO: 5275653 - DNA, 25 bp, Homo sapien
tggtacattcgatgactactgctac

SEQ ID NO: 5275654 - DNA, 25 bp, Homo sapien
cattcgatgactactgctaccaatt

SEQ ID NO: 5275655 - DNA, 25 bp, Homo sapien
tgtgacttcacaaatattggtacat

SEQ ID NO: 5275656 - DNA, 25 bp, Homo sapien
ttaatagctgctgcgcttatttctt

SEQ ID NO: 5275657 - DNA, 25 bp, Homo sapien
tttaatagctgctgcgcttatttct

SEQ ID NO: 5275658 - DNA, 25 bp, Homo sapien
tagctgctgcgcttatttcttcatc

SEQ ID NO: 5275659 - DNA, 25 bp, Homo sapien
aatagctgctgcgcttatttcttca

SEQ ID NO: 5275660 - DNA, 25 bp, Homo sapien
catcactagttagtgtcctattagt

SEQ ID NO: 5275661 - DNA, 25 bp, Homo sapien
gcaacatcactagttagtgtcctat

SEQ ID NO: 5275662 - DNA, 25 bp, Homo sapien
tggcaacatcactagttagtgtcct

SEQ ID NO: 5275663 - DNA, 25 bp, Homo sapien
cactagttagtgtcctattagtttc

SEQ ID NO: 5275664 - DNA, 25 bp, Homo sapien
tactggaaactgtcatactacttac

SEQ ID NO: 5275665 - DNA, 25 bp, Homo sapien
cttaatgtggactttcttctgactg

SEQ ID NO: 5275666 - DNA, 25 bp, Homo sapien
gccaggctgcgattttctatcttac

SEQ ID NO: 5275667 - DNA, 25 bp, Homo sapien
caccttcaactccaaaagtgctgca

SEQ ID NO: 5275668 - DNA, 25 bp, Homo sapien
cgtaagttcctgtttgtgtctagcc

SEQ ID NO: 5275669 - DNA, 25 bp, Homo sapien
gaacgagccagttgctcagaatctg

SEQ ID NO: 5275670 - DNA, 25 bp, Homo sapien
ggtgatctccagttgggcagccaaa

SEQ ID NO: 5275671 - DNA, 25 bp, Homo sapien
gttcttcagcaattgaacgagccag

SEQ ID NO: 5275672 - DNA, 25 bp, Homo sapien
tgctgcaattctttaccaagtttgg

SEQ ID NO: 5275673 - DNA, 25 bp, Homo sapien
gctgcaattctttaccaagtttggt

SEQ ID NO: 5275674 - DNA, 25 bp, Homo sapien
cgttcatcctgtaattcctgtttct

SEQ ID NO: 5275675 - DNA, 25 bp, Homo sapien
tgcaattctttaccaagtttggtct

SEQ ID NO: 5275676 - DNA, 25 bp, Homo sapien
atactgttctgcttcgagctgatcc

SEQ ID NO: 5275677 - DNA, 25 bp, Homo sapien
ttctgcttcgagctgatcctggagc

SEQ ID NO: 5275678 - DNA, 25 bp, Homo sapien
tgcttcgagctgatcctggagctct

SEQ ID NO: 5275679 - DNA, 25 bp, Homo sapien
tgttctgcttcgagctgatcctgga

SEQ ID NO: 5275680 - DNA, 25 bp, Homo sapien
gttgtgtttgcatcttcaggtcatt

SEQ ID NO: 5275681 - DNA, 25 bp, Homo sapien
tcattttgtgtaaggcagcgcttct

SEQ ID NO: 5275682 - DNA, 25 bp, Homo sapien
acatttttagtgtgttaacctgttg

SEQ ID NO: 5275683 - DNA, 25 bp, Homo sapien
tattttcttgctttaactgcttttc

SEQ ID NO: 5275684 - DNA, 25 bp, Homo sapien
tgtgactgtttgaggtcacagtcta

SEQ ID NO: 5275685 - DNA, 25 bp, Homo sapien
ttttctcagcttctagcaataggtt

SEQ ID NO: 5275686 - DNA, 25 bp, Homo sapien
tgctgtgactgtttgaggtcacagt

SEQ ID NO: 5275687 - DNA, 25 bp, Homo sapien
tagcaataggttctccactttctgt

SEQ ID NO: 5275688 - DNA, 25 bp, Homo sapien
tttggcttcttcgatggactcatag

SEQ ID NO: 5275689 - DNA, 25 bp, Homo sapien
tagttggtatgtcatatctatttcc

SEQ ID NO: 5275690 - DNA, 25 bp, Homo sapien
taggctctgctgtataacttttagt

SEQ ID NO: 5275691 - DNA, 25 bp, Homo sapien
tgctagtcgtgcctttgtggcctta

SEQ ID NO: 5275692 - DNA, 25 bp, Homo sapien
cagatgggctattccactcacatga

SEQ ID NO: 5275693 - DNA, 25 bp, Homo sapien
tcttgtcacaacctacaaatctggg

SEQ ID NO: 5275694 - DNA, 25 bp, Homo sapien
tactatagcctactgcagtgcagac

SEQ ID NO: 5275695 - DNA, 25 bp, Homo sapien
taatttggctgtcccataggtaccc

SEQ ID NO: 5275696 - DNA, 25 bp, Homo sapien
tgctgtcaggttagggatgcatccc

SEQ ID NO: 5275697 - DNA, 25 bp, Homo sapien
gacattattcaaggcaaggactgca

SEQ ID NO: 5275698 - DNA, 25 bp, Homo sapien
acagcagggctgaacagttgcaaga

SEQ ID NO: 5275699 - DNA, 25 bp, Homo sapien
tgtgcctttgccctacggacctatc

SEQ ID NO: 5275700 - DNA, 25 bp, Homo sapien
ctccagttctactttcgctagtaag

SEQ ID NO: 5275701 - DNA, 25 bp, Homo sapien
tctactttcgctagtaagattttgc

SEQ ID NO: 5275702 - DNA, 25 bp, Homo sapien
ctactttcgctagtaagattttgcc

SEQ ID NO: 5275703 - DNA, 25 bp, Homo sapien
cagttctactttcgctagtaagatt

SEQ ID NO: 5275704 - DNA, 25 bp, Homo sapien
ccttaaccgggctgcagtatcagac

SEQ ID NO: 5275705 - DNA, 25 bp, Homo sapien
tctattgttagattccagctgctga

SEQ ID NO: 5275706 - DNA, 25 bp, Homo sapien
catgggttcgatccctcctttcaga

SEQ ID NO: 5275707 - DNA, 25 bp, Homo sapien
taattatctctgatccatgggttcg

SEQ ID NO: 5275708 - DNA, 25 bp, Homo sapien
tgttcgcagtaaagcattggtttca

SEQ ID NO: 5275709 - DNA, 25 bp, Homo sapien
ctgttcgcagtaaagcattggtttc

SEQ ID NO: 5275710 - DNA, 25 bp, Homo sapien
ctcagtggatatttgagagttttga

SEQ ID NO: 5275711 - DNA, 25 bp, Homo sapien
ggagttgattcactttctcagtgga

SEQ ID NO: 5275712 - DNA, 25 bp, Homo sapien
cactttctcagtggatatttgagag

SEQ ID NO: 5275713 - DNA, 25 bp, Homo sapien
gattcactttctcagtggatatttg

SEQ ID NO: 5275714 - DNA, 25 bp, Homo sapien
caaatttcgttttttgtctgcttca

SEQ ID NO: 5275715 - DNA, 25 bp, Homo sapien
taactgtcttaatgctgattccaca

SEQ ID NO: 5275716 - DNA, 25 bp, Homo sapien
tgattccacacttttccgtaaggta

SEQ ID NO: 5275717 - DNA, 25 bp, Homo sapien
tgtgctgaagaagcgccttttctct

SEQ ID NO: 5275718 - DNA, 25 bp, Homo sapien
tttttctaggcgagtattaacagat

SEQ ID NO: 5275719 - DNA, 25 bp, Homo sapien
ttttttctaggcgagtattaacaga

SEQ ID NO: 5275720 - DNA, 25 bp, Homo sapien
actacaatgcctgcctcccacgttc

SEQ ID NO: 5275721 - DNA, 25 bp, Homo sapien
aattacttggtagctctcctttatt

SEQ ID NO: 5275722 - DNA, 25 bp, Homo sapien
caagtagctcccttggcccctcaaa

SEQ ID NO: 5275723 - DNA, 25 bp, Homo sapien
cacccggccgtagctctccatttct

SEQ ID NO: 5275724 - DNA, 25 bp, Homo sapien
tcattgctaagatgttcttctaatg

SEQ ID NO: 5275725 - DNA, 25 bp, Homo sapien
gctaagatgttcttctaatgtatac

SEQ ID NO: 5275726 - DNA, 25 bp, Homo sapien
tggcttgcatctcattgctaagatg

SEQ ID NO: 5275727 - DNA, 25 bp, Homo sapien
tcctctttggcttgcatctcattgc

SEQ ID NO: 5275728 - DNA, 25 bp, Homo sapien
cataatgtcctctataatggtacag

SEQ ID NO: 5275729 - DNA, 25 bp, Homo sapien
tgtctttccactaaacataatgtcc

SEQ ID NO: 5275730 - DNA, 25 bp, Homo sapien
taatgtgacttatattgataaaagg

SEQ ID NO: 5275731 - DNA, 25 bp, Homo sapien
atttgtacctccttaatgtgactta

SEQ ID NO: 5275732 - DNA, 25 bp, Homo sapien
caggtctattagactcccatggcaa

SEQ ID NO: 5275733 - DNA, 25 bp, Homo sapien
cttctagtgatcaggttctccatgg

SEQ ID NO: 5275734 - DNA, 25 bp, Homo sapien
ctctcttgggtagatgtagtactcc

SEQ ID NO: 5275735 - DNA, 25 bp, Homo sapien
catagctaataagtcgcagtggcaa

SEQ ID NO: 5275736 - DNA, 25 bp, Homo sapien
tacaagatggagagtcacttaataa

SEQ ID NO: 5275737 - DNA, 25 bp, Homo sapien
tctctacaagatggagagtcactta

SEQ ID NO: 5275738 - DNA, 25 bp, Homo sapien
tcagtttctctacaagatggagagt

SEQ ID NO: 5275739 - DNA, 25 bp, Homo sapien
tccttgattgtatggaatcagtttc

SEQ ID NO: 5275740 - DNA, 25 bp, Homo sapien
gaactcctgggcttctcaaatatct

SEQ ID NO: 5275741 - DNA, 25 bp, Homo sapien
cttcccaatgccaggcggtcaaaag

SEQ ID NO: 5275742 - DNA, 25 bp, Homo sapien
tcaaatatctttaatgcctcattca

SEQ ID NO: 5275743 - DNA, 25 bp, Homo sapien
aaaagccccttagcagagcacacaa

SEQ ID NO: 5275744 - DNA, 25 bp, Homo sapien
tgtagaatggtgtcttgcaataact

SEQ ID NO: 5275745 - DNA, 25 bp, Homo sapien
tatctcctataattgagtctcaaaa

SEQ ID NO: 5275746 - DNA, 25 bp, Homo sapien
taagaattcttctgatgatagtcct

SEQ ID NO: 5275747 - DNA, 25 bp, Homo sapien
cacatcatcttatagctagattcta

SEQ ID NO: 5275748 - DNA, 25 bp, Homo sapien
caatgtcatcgaaattgctgctgtc

SEQ ID NO: 5275749 - DNA, 25 bp, Homo sapien
tgctgctgtctatgtcactgctgag

SEQ ID NO: 5275750 - DNA, 25 bp, Homo sapien
cgatgaaaggcagctgatttccaac

SEQ ID NO: 5275751 - DNA, 25 bp, Homo sapien
tctctatagtaggtaaatccgatga

SEQ ID NO: 5275752 - DNA, 25 bp, Homo sapien
gccattttatcgattcacagaatta

SEQ ID NO: 5275753 - DNA, 25 bp, Homo sapien
tagcagcgcatttgccattttatcg

SEQ ID NO: 5275754 - DNA, 25 bp, Homo sapien
gcaacatattattctagttgttaaa

SEQ ID NO: 5275755 - DNA, 25 bp, Homo sapien
tataaatttgtagcagcgcatttgc

SEQ ID NO: 5275756 - DNA, 25 bp, Homo sapien
ctcttatgttatcccaatgccactg

SEQ ID NO: 5275757 - DNA, 25 bp, Homo sapien
cttatgttatcccaatgccactgat

SEQ ID NO: 5275758 - DNA, 25 bp, Homo sapien
tatgttatcccaatgccactgatca

SEQ ID NO: 5275759 - DNA, 25 bp, Homo sapien
tctcttatgttatcccaatgccact

SEQ ID NO: 5275760 - DNA, 25 bp, Homo sapien
cataattttgctatatgttcctaca

SEQ ID NO: 5275761 - DNA, 25 bp, Homo sapien
caagtgaatccgcataaaatggagt

SEQ ID NO: 5275762 - DNA, 25 bp, Homo sapien
tgttcctacaagtgaatccgcataa

SEQ ID NO: 5275763 - DNA, 25 bp, Homo sapien
acagtgaattcttatgatccataat

SEQ ID NO: 5275764 - DNA, 25 bp, Homo sapien
acattctcgcccatagaaaccatca

SEQ ID NO: 5275765 - DNA, 25 bp, Homo sapien
ggtgatatataatccggtgttccaa

SEQ ID NO: 5275766 - DNA, 25 bp, Homo sapien
ggaaaacacctacagaccaccaatc

SEQ ID NO: 5275767 - DNA, 25 bp, Homo sapien
ccactagcatctcataaaggaaaac

SEQ ID NO: 5275768 - DNA, 25 bp, Homo sapien
catggagtgtattgcatccagagca

SEQ ID NO: 5275769 - DNA, 25 bp, Homo sapien
acttcagcagtgtaaaatttggccc

SEQ ID NO: 5275770 - DNA, 25 bp, Homo sapien
tcataaggtttacaaggtctccacc

SEQ ID NO: 5275771 - DNA, 25 bp, Homo sapien
tagatgtccatgtttatccaagagc

SEQ ID NO: 5275772 - DNA, 25 bp, Homo sapien
tgatactttacacagctagggctaa

SEQ ID NO: 5275773 - DNA, 25 bp, Homo sapien
tgaacacactgaaggagtaagagat

SEQ ID NO: 5275774 - DNA, 25 bp, Homo sapien
tattggcaacaaacctctcagccaa

SEQ ID NO: 5275775 - DNA, 25 bp, Homo sapien
ggcaacatagctatatcttcaaagt

SEQ ID NO: 5275776 - DNA, 25 bp, Homo sapien
taaaaataactgcactgttaccatg

SEQ ID NO: 5275777 - DNA, 25 bp, Homo sapien
caatggcatactggtattcaagcca

SEQ ID NO: 5275778 - DNA, 25 bp, Homo sapien
taagtgggtatgaaacaatggcata

SEQ ID NO: 5275779 - DNA, 25 bp, Homo sapien
tgaagcataagacttggcacacaaa

SEQ ID NO: 5275780 - DNA, 25 bp, Homo sapien
aaacttactaagaagcttcatagca

SEQ ID NO: 5275781 - DNA, 25 bp, Homo sapien
aaccttctgcgatgccttgtgacga

SEQ ID NO: 5275782 - DNA, 25 bp, Homo sapien
ggccataatatctctttcttcccaa

SEQ ID NO: 5275783 - DNA, 25 bp, Homo sapien
gggctattggcaaaggccataatat

SEQ ID NO: 5275784 - DNA, 25 bp, Homo sapien
tcagctgtcggggttactgctgacg

SEQ ID NO: 5275785 - DNA, 25 bp, Homo sapien
cagtggcggcgtcacgatcagctgt

SEQ ID NO: 5275786 - DNA, 25 bp, Homo sapien
agtggcggcgtcacgatcagctgtc

SEQ ID NO: 5275787 - DNA, 25 bp, Homo sapien
tgctgacgcttctgtcaggtggttg

SEQ ID NO: 5275788 - DNA, 25 bp, Homo sapien
ccaaggggtaaagaggacactggtg

SEQ ID NO: 5275789 - DNA, 25 bp, Homo sapien
gggtaaagaggacactggtgtttga

SEQ ID NO: 5275790 - DNA, 25 bp, Homo sapien
aaagaggacactggtgtttgatgtg

SEQ ID NO: 5275791 - DNA, 25 bp, Homo sapien
ggtaaagaggacactggtgtttgat

SEQ ID NO: 5275792 - DNA, 25 bp, Homo sapien
aagatccattgaatatacagcagag

SEQ ID NO: 5275793 - DNA, 25 bp, Homo sapien
taactggataacgatggagtggcct

SEQ ID NO: 5275794 - DNA, 25 bp, Homo sapien
tgcaaagcaggtgttcatacataac

SEQ ID NO: 5275795 - DNA, 25 bp, Homo sapien
gagaacgcaaggatatttcaagcag

SEQ ID NO: 5275796 - DNA, 25 bp, Homo sapien
aacagtaagttgaagtcatgtgaag

SEQ ID NO: 5275797 - DNA, 25 bp, Homo sapien
cacacaattataaagtccagtatta

SEQ ID NO: 5275798 - DNA, 25 bp, Homo sapien
taaacagtaagttgaagtcatgtga

SEQ ID NO: 5275799 - DNA, 25 bp, Homo sapien
aaacagtaagttgaagtcatgtgaa

SEQ ID NO: 5275800 - DNA, 25 bp, Homo sapien
gagtcaatgcaaaccctgtaactcc

SEQ ID NO: 5275801 - DNA, 25 bp, Homo sapien
ctccaatgatgtttcttgcaaaaat

SEQ ID NO: 5275802 - DNA, 25 bp, Homo sapien
cccttgttattagactggaagactt

SEQ ID NO: 5275803 - DNA, 25 bp, Homo sapien
caaaattgcggcatacaaagtcaac

SEQ ID NO: 5275804 - DNA, 25 bp, Homo sapien
cctcatttagcatttgaagttcctt

SEQ ID NO: 5275805 - DNA, 25 bp, Homo sapien
gagcatgatttacaggcaggattcc

SEQ ID NO: 5275806 - DNA, 25 bp, Homo sapien
aagtaagtatatgctgtagaatggc

SEQ ID NO: 5275807 - DNA, 25 bp, Homo sapien
gaatgtcttatggaatcatagagca

SEQ ID NO: 5275808 - DNA, 25 bp, Homo sapien
gaatacgagattaggaagagttcca

SEQ ID NO: 5275809 - DNA, 25 bp, Homo sapien
tagaggagtttcatatactcaggtg

SEQ ID NO: 5275810 - DNA, 25 bp, Homo sapien
ctcaggtgatgaaaacaggaatacg

SEQ ID NO: 5275811 - DNA, 25 bp, Homo sapien
gagttccaaagccaataatataaag

SEQ ID NO: 5275812 - DNA, 25 bp, Homo sapien
ttacaacatcatagtcttctgcctt

SEQ ID NO: 5275813 - DNA, 25 bp, Homo sapien
tacaacatcatagtcttctgccttc

SEQ ID NO: 5275814 - DNA, 25 bp, Homo sapien
ttttacaacatcatagtcttctgcc

SEQ ID NO: 5275815 - DNA, 25 bp, Homo sapien
tttacaacatcatagtcttctgcct

SEQ ID NO: 5275816 - DNA, 25 bp, Homo sapien
agacctctgatttttttcacaattt

SEQ ID NO: 5275817 - DNA, 25 bp, Homo sapien
ctgtagacctctgatttttttcaca

SEQ ID NO: 5275818 - DNA, 25 bp, Homo sapien
cctctgatttttttcacaattttct

SEQ ID NO: 5275819 - DNA, 25 bp, Homo sapien
ctgatttttttcacaattttctcat

SEQ ID NO: 5275820 - DNA, 25 bp, Homo sapien
tcaaggaccaaggaatttaagccat

SEQ ID NO: 5275821 - DNA, 25 bp, Homo sapien
caaggaccaaggaatttaagccatc

SEQ ID NO: 5275822 - DNA, 25 bp, Homo sapien
atcaaggaccaaggaatttaagcca

SEQ ID NO: 5275823 - DNA, 25 bp, Homo sapien
tcattcaattctcgtaaaagttcca

SEQ ID NO: 5275824 - DNA, 25 bp, Homo sapien
tcgctcattcaattctcgtaaaagt

SEQ ID NO: 5275825 - DNA, 25 bp, Homo sapien
gctcattcaattctcgtaaaagttc

SEQ ID NO: 5275826 - DNA, 25 bp, Homo sapien
cgctcattcaattctcgtaaaagtt

SEQ ID NO: 5275827 - DNA, 25 bp, Homo sapien
actctacatctaataagcaacgcca

SEQ ID NO: 5275828 - DNA, 25 bp, Homo sapien
ctctacatctaataagcaacgccat

SEQ ID NO: 5275829 - DNA, 25 bp, Homo sapien
tactctacatctaataagcaacgcc

SEQ ID NO: 5275830 - DNA, 25 bp, Homo sapien
ctactctacatctaataagcaacgc

SEQ ID NO: 5275831 - DNA, 25 bp, Homo sapien
caaaaactttctcctgtgaaaagag

SEQ ID NO: 5275832 - DNA, 25 bp, Homo sapien
gcatatccaaaaactttctcctgtg

SEQ ID NO: 5275833 - DNA, 25 bp, Homo sapien
ttaaatagcatatccaaaaactttc

SEQ ID NO: 5275834 - DNA, 25 bp, Homo sapien
tatccaaaaactttctcctgtgaaa

SEQ ID NO: 5275835 - DNA, 25 bp, Homo sapien
gcattgtattccataaaagtatacc

SEQ ID NO: 5275836 - DNA, 25 bp, Homo sapien
tgtcttgtccttccagaatccaact

SEQ ID NO: 5275837 - DNA, 25 bp, Homo sapien
gaatccaacttcataccagactaaa

SEQ ID NO: 5275838 - DNA, 25 bp, Homo sapien
ccaaaggcaaggctactttttgtgt

SEQ ID NO: 5275839 - DNA, 25 bp, Homo sapien
cgtgagttgcacatccactaccaaa

SEQ ID NO: 5275840 - DNA, 25 bp, Homo sapien
tgcgtactgtcatagaagccaacag

SEQ ID NO: 5275841 - DNA, 25 bp, Homo sapien
aaacagctgaggctttgcgtactgt

SEQ ID NO: 5275842 - DNA, 25 bp, Homo sapien
tccagatgatcttggagcgagcagt

SEQ ID NO: 5275843 - DNA, 25 bp, Homo sapien
tggagaagtgaacagaacatgagac

SEQ ID NO: 5275844 - DNA, 25 bp, Homo sapien
ctcaaaggataaccaaccgcctctg

SEQ ID NO: 5275845 - DNA, 25 bp, Homo sapien
gaccaaacaggactgagtcactctg

SEQ ID NO: 5275846 - DNA, 25 bp, Homo sapien
gtcactctgcaaacgatgcctgaaa

SEQ ID NO: 5275847 - DNA, 25 bp, Homo sapien
ctgcattttgaccaaacaggactga

SEQ ID NO: 5275848 - DNA, 25 bp, Homo sapien
gagggtctcggatcagcgcctccag

SEQ ID NO: 5275849 - DNA, 25 bp, Homo sapien
ccacgttgatgggggagcgagggtc

SEQ ID NO: 5275850 - DNA, 25 bp, Homo sapien
gagcgagggtctcggatcagcgcct

SEQ ID NO: 5275851 - DNA, 25 bp, Homo sapien
ttcctctggcggctcgcgcctgccc

SEQ ID NO: 5275852 - DNA, 25 bp, Homo sapien
gacccgcactcaggctcctcgcgct

SEQ ID NO: 5275853 - DNA, 25 bp, Homo sapien
tcgcgctcaggtcccgcagcctcgg

SEQ ID NO: 5275854 - DNA, 25 bp, Homo sapien
actcaggctcctcgcgctcaggtcc

SEQ ID NO: 5275855 - DNA, 25 bp, Homo sapien
gccgccaccgctggacccgcactca

SEQ ID NO: 5275856 - DNA, 25 bp, Homo sapien
agcgagtgcccgcaggagtcctcgg

SEQ ID NO: 5275857 - DNA, 25 bp, Homo sapien
gccggtccgctggtcctcagcgagt

SEQ ID NO: 5275858 - DNA, 25 bp, Homo sapien
tctagctccggcttcgggtctccaa

SEQ ID NO: 5275859 - DNA, 25 bp, Homo sapien
ctcagtcagattcgcgccgccggtc

SEQ ID NO: 5275860 - DNA, 25 bp, Homo sapien
ctgttatgcggtcaaatcggttgat

SEQ ID NO: 5275861 - DNA, 25 bp, Homo sapien
caaatcggttgatattgtcctctac

SEQ ID NO: 5275862 - DNA, 25 bp, Homo sapien
ggttgatattgtcctctacagcttc

SEQ ID NO: 5275863 - DNA, 25 bp, Homo sapien
gcggtcaaatcggttgatattgtcc

SEQ ID NO: 5275864 - DNA, 25 bp, Homo sapien
tgtgttaaggaggatttccaaccca

SEQ ID NO: 5275865 - DNA, 25 bp, Homo sapien
ccaacccagtttttaggtcacacag

SEQ ID NO: 5275866 - DNA, 25 bp, Homo sapien
caacaggttatgaggaaatggcagt

SEQ ID NO: 5275867 - DNA, 25 bp, Homo sapien
cccagtttttaggtcacacagaata

SEQ ID NO: 5275868 - DNA, 25 bp, Homo sapien
ttccttctacattcaatttgagcat

SEQ ID NO: 5275869 - DNA, 25 bp, Homo sapien
tctcaggccagtttcctatctcctg

SEQ ID NO: 5275870 - DNA, 25 bp, Homo sapien
caggccagtttcctatctcctgctt

SEQ ID NO: 5275871 - DNA, 25 bp, Homo sapien
ctttccttctacattcaatttgagc

SEQ ID NO: 5275872 - DNA, 25 bp, Homo sapien
tgcaataaagctgggcctctgggta

SEQ ID NO: 5275873 - DNA, 25 bp, Homo sapien
taagagacacccattctgagagaca

SEQ ID NO: 5275874 - DNA, 25 bp, Homo sapien
aacacgaggatgaggtctagaagcc

SEQ ID NO: 5275875 - DNA, 25 bp, Homo sapien
gctcagctctggcactttgtccggc

SEQ ID NO: 5275876 - DNA, 25 bp, Homo sapien
tccatcgatgacctgcttctgctgg

SEQ ID NO: 5275877 - DNA, 25 bp, Homo sapien
gtaggctgacccctccatcgatgac

SEQ ID NO: 5275878 - DNA, 25 bp, Homo sapien
tgtaggctgacccctccatcgatga

SEQ ID NO: 5275879 - DNA, 25 bp, Homo sapien
tgacccctccatcgatgacctgctt

SEQ ID NO: 5275880 - DNA, 25 bp, Homo sapien
tgcaggccctgtctggaagcagtgt

SEQ ID NO: 5275881 - DNA, 25 bp, Homo sapien
caaatcatcacgtggccatgtcggg

SEQ ID NO: 5275882 - DNA, 25 bp, Homo sapien
taactgtgacaactctggtggatct

SEQ ID NO: 5275883 - DNA, 25 bp, Homo sapien
gcagaggcctggtatcttctcagag

SEQ ID NO: 5275884 - DNA, 25 bp, Homo sapien
cacagtcacgatgaattgtttgagc

SEQ ID NO: 5275885 - DNA, 25 bp, Homo sapien
gaattgtttgagcacctgcaatgct

SEQ ID NO: 5275886 - DNA, 25 bp, Homo sapien
cgtgtattcaagagctaaggagcat

SEQ ID NO: 5275887 - DNA, 25 bp, Homo sapien
agggtagaaacagccacaatctgcg

SEQ ID NO: 5275888 - DNA, 25 bp, Homo sapien
ctttgtaaattatgaagtgggagga

SEQ ID NO: 5275889 - DNA, 25 bp, Homo sapien
gtaaattatgaagtgggaggagatc

SEQ ID NO: 5275890 - DNA, 25 bp, Homo sapien
taaattatgaagtgggaggagatca

SEQ ID NO: 5275891 - DNA, 25 bp, Homo sapien
ttgtaaattatgaagtgggaggaga

SEQ ID NO: 5275892 - DNA, 25 bp, Homo sapien
gctgtagatgcttgctgtggcctct

SEQ ID NO: 5275893 - DNA, 25 bp, Homo sapien
gtagatgcttgctgtggcctctctg

SEQ ID NO: 5275894 - DNA, 25 bp, Homo sapien
ccttgctgtagatgcttgctgtggc

SEQ ID NO: 5275895 - DNA, 25 bp, Homo sapien
tgctgtagatgcttgctgtggcctc

SEQ ID NO: 5275896 - DNA, 25 bp, Homo sapien
cgatggtggcattttaaggcctaca

SEQ ID NO: 5275897 - DNA, 25 bp, Homo sapien
gaatccgagcgttctctggtctgga

SEQ ID NO: 5275898 - DNA, 25 bp, Homo sapien
gaatctgatctgctgtcggccactg

SEQ ID NO: 5275899 - DNA, 25 bp, Homo sapien
gccatggctggaaactgaccctgaa

SEQ ID NO: 5275900 - DNA, 25 bp, Homo sapien
atttcaaacgtgagtagatcagccc

SEQ ID NO: 5275901 - DNA, 25 bp, Homo sapien
agtagatcagcccttgccatccaag

SEQ ID NO: 5275902 - DNA, 25 bp, Homo sapien
tgagaatttcaaacgtgagtagatc

SEQ ID NO: 5275903 - DNA, 25 bp, Homo sapien
tcagcccttgccatccaagagctta

SEQ ID NO: 5275904 - DNA, 25 bp, Homo sapien
tctcgtgtgaggcagacacagtgca

SEQ ID NO: 5275905 - DNA, 25 bp, Homo sapien
cagacacagtgcagcgctctcttga

SEQ ID NO: 5275906 - DNA, 25 bp, Homo sapien
cagtgcagcgctctcttgaggtctc

SEQ ID NO: 5275907 - DNA, 25 bp, Homo sapien
tcctgcagctcgtttctctcgtgtg

SEQ ID NO: 5275908 - DNA, 25 bp, Homo sapien
cagccaggttgcaaacatttatgac

SEQ ID NO: 5275909 - DNA, 25 bp, Homo sapien
gggcttctgcaggctcggacgtcat

SEQ ID NO: 5275910 - DNA, 25 bp, Homo sapien
gcacccgactgctagctgttcagga

SEQ ID NO: 5275911 - DNA, 25 bp, Homo sapien
attcatgtatcaggcagcacccgac

SEQ ID NO: 5275912 - DNA, 25 bp, Homo sapien
tatttgaacattaagctcagcaatt

SEQ ID NO: 5275913 - DNA, 25 bp, Homo sapien
aggattccgtcgaggccacgcaagg

SEQ ID NO: 5275914 - DNA, 25 bp, Homo sapien
ttcgaaaagtggtgtcagtctgcct

SEQ ID NO: 5275915 - DNA, 25 bp, Homo sapien
tcttgatgggccgtcatcttgggca

SEQ ID NO: 5275916 - DNA, 25 bp, Homo sapien
ccagtaactgcttaaatgcggttgc

SEQ ID NO: 5275917 - DNA, 25 bp, Homo sapien
acccggagggcattgagcttatcag

SEQ ID NO: 5275918 - DNA, 25 bp, Homo sapien
acctctcagcttcgcaaggaatctg

SEQ ID NO: 5275919 - DNA, 25 bp, Homo sapien
tgttatacatacagcacctctcagc

SEQ ID NO: 5275920 - DNA, 25 bp, Homo sapien
caaggaatctgtcaagagatagcat

SEQ ID NO: 5275921 - DNA, 25 bp, Homo sapien
cgtgcccctcttacagatcaggaaa

SEQ ID NO: 5275922 - DNA, 25 bp, Homo sapien
taactccaagcagggacgaccagat

SEQ ID NO: 5275923 - DNA, 25 bp, Homo sapien
gaggatgaccatcagacaactagga

SEQ ID NO: 5275924 - DNA, 25 bp, Homo sapien
cacagcttgctgagatctgagcaca

SEQ ID NO: 5275925 - DNA, 25 bp, Homo sapien
gatgagtggatcctcagcacacagg

SEQ ID NO: 5275926 - DNA, 25 bp, Homo sapien
tgtgtcgcacagacgaaatgcttcg

SEQ ID NO: 5275927 - DNA, 25 bp, Homo sapien
aatgcttcgactgcttggaaatgac

SEQ ID NO: 5275928 - DNA, 25 bp, Homo sapien
caggatggacgcatgctatcagctc

SEQ ID NO: 5275929 - DNA, 25 bp, Homo sapien
aggaatagctagatttctggacccc

SEQ ID NO: 5275930 - DNA, 25 bp, Homo sapien
ttctcaccgagcagcgtcatacagt

SEQ ID NO: 5275931 - DNA, 25 bp, Homo sapien
cttcttctcaccgagcagcgtcata

SEQ ID NO: 5275932 - DNA, 25 bp, Homo sapien
caccgagcagcgtcatacagtatgt

SEQ ID NO: 5275933 - DNA, 25 bp, Homo sapien
tacagtatgtattcctacccatgca

SEQ ID NO: 5275934 - DNA, 25 bp, Homo sapien
caggtacacaaatatgaagagaaat

SEQ ID NO: 5275935 - DNA, 25 bp, Homo sapien
tggtaaaacgtcttctctggcaata

SEQ ID NO: 5275936 - DNA, 25 bp, Homo sapien
ttatctccgttggtagaatggttgc

SEQ ID NO: 5275937 - DNA, 25 bp, Homo sapien
caagggacgtaagatggtgcatgtt

SEQ ID NO: 5275938 - DNA, 25 bp, Homo sapien
catgaatgtgtccaattgccgggta

SEQ ID NO: 5275939 - DNA, 25 bp, Homo sapien
gggtatgtgggggagcccgcatatg

SEQ ID NO: 5275940 - DNA, 25 bp, Homo sapien
aatgtgtccaattgccgggtatgtg

SEQ ID NO: 5275941 - DNA, 25 bp, Homo sapien
gggagcccgcatatgagtgaacagt

SEQ ID NO: 5275942 - DNA, 25 bp, Homo sapien
gaaggtccgaatgctgcagagagct

SEQ ID NO: 5275943 - DNA, 25 bp, Homo sapien
tggctggggctttcaatgggataac

SEQ ID NO: 5275944 - DNA, 25 bp, Homo sapien
tgttcatggaaggtccgaatgctgc

SEQ ID NO: 5275945 - DNA, 25 bp, Homo sapien
tgggataacaatctgttcatggaag

SEQ ID NO: 5275946 - DNA, 25 bp, Homo sapien
tccattgaccgtgatgctggggtct

SEQ ID NO: 5275947 - DNA, 25 bp, Homo sapien
attgaccgtgatgctggggtctgtt

SEQ ID NO: 5275948 - DNA, 25 bp, Homo sapien
ccattgaccgtgatgctggggtctg

SEQ ID NO: 5275949 - DNA, 25 bp, Homo sapien
gtccattgaccgtgatgctggggtc

SEQ ID NO: 5275950 - DNA, 25 bp, Homo sapien
gaaattcccgaacagaggaaagcca

SEQ ID NO: 5275951 - DNA, 25 bp, Homo sapien
caggaaattcccgaacagaggaaag

SEQ ID NO: 5275952 - DNA, 25 bp, Homo sapien
gaaagccaaagtcaccaagcctttc

SEQ ID NO: 5275953 - DNA, 25 bp, Homo sapien
caggcaggaaattcccgaacagagg

SEQ ID NO: 5275954 - DNA, 25 bp, Homo sapien
gcctaaggccaacaaggcaccaggt

SEQ ID NO: 5275955 - DNA, 25 bp, Homo sapien
ctgactggagtgacaatagggccta

SEQ ID NO: 5275956 - DNA, 25 bp, Homo sapien
ggagtgacaatagggcctaaggcca

SEQ ID NO: 5275957 - DNA, 25 bp, Homo sapien
aatagggcctaaggccaacaaggca

SEQ ID NO: 5275958 - DNA, 25 bp, Homo sapien
ttaaatatagatgcccttaggcctg

SEQ ID NO: 5275959 - DNA, 25 bp, Homo sapien
gacttttccgctgagcacctgacct

SEQ ID NO: 5275960 - DNA, 25 bp, Homo sapien
tgacatctgcctgacgtactacaca

SEQ ID NO: 5275961 - DNA, 25 bp, Homo sapien
cagagctcagaggtatgtgaatcct

SEQ ID NO: 5275962 - DNA, 25 bp, Homo sapien
caaagacactactggccatgatgcc

SEQ ID NO: 5275963 - DNA, 25 bp, Homo sapien
ctggagagagggcaaggtacaactt

SEQ ID NO: 5275964 - DNA, 25 bp, Homo sapien
gaagatattcccaaaaaactcagtg

SEQ ID NO: 5275965 - DNA, 25 bp, Homo sapien
catgatgccgctactgagaacgaga

SEQ ID NO: 5275966 - DNA, 25 bp, Homo sapien
tcttcactttgctgaggattttctt

SEQ ID NO: 5275967 - DNA, 25 bp, Homo sapien
tcagttgcttacttcaagcaattct

SEQ ID NO: 5275968 - DNA, 25 bp, Homo sapien
aattcttcactttgctgaggatttt

SEQ ID NO: 5275969 - DNA, 25 bp, Homo sapien
aagcaattcttcactttgctgagga

SEQ ID NO: 5275970 - DNA, 25 bp, Homo sapien
gggccttctggatgagtgctctcag

SEQ ID NO: 5275971 - DNA, 25 bp, Homo sapien
tgttactggtctgaccctgctccac

SEQ ID NO: 5275972 - DNA, 25 bp, Homo sapien
ccttttgttactggtctgaccctgc

SEQ ID NO: 5275973 - DNA, 25 bp, Homo sapien
gccttctggatgagtgctctcagat

SEQ ID NO: 5275974 - DNA, 25 bp, Homo sapien
ttggtgctccttatgtgcactgtga

SEQ ID NO: 5275975 - DNA, 25 bp, Homo sapien
aaatagacatcgataggtccgttgg

SEQ ID NO: 5275976 - DNA, 25 bp, Homo sapien
ggtccgttggtgctccttatgtgca

SEQ ID NO: 5275977 - DNA, 25 bp, Homo sapien
acatcgataggtccgttggtgctcc

SEQ ID NO: 5275978 - DNA, 25 bp, Homo sapien
tcagcttctagagtgccaggtcaca

SEQ ID NO: 5275979 - DNA, 25 bp, Homo sapien
cattgtgatcttataccagggtgag

SEQ ID NO: 5275980 - DNA, 25 bp, Homo sapien
gacttcctggtactacaagtgggct

SEQ ID NO: 5275981 - DNA, 25 bp, Homo sapien
caagtgggctagagaacatctgtgc

SEQ ID NO: 5275982 - DNA, 25 bp, Homo sapien
gaggatgtgtcccaagaatggccac

SEQ ID NO: 5275983 - DNA, 25 bp, Homo sapien
aagaaaatattcttcgctaggcagg

SEQ ID NO: 5275984 - DNA, 25 bp, Homo sapien
ccgatgggtctatcaaggctgtcag

SEQ ID NO: 5275985 - DNA, 25 bp, Homo sapien
tgtcctcatcaagcagccttctgat

SEQ ID NO: 5275986 - DNA, 25 bp, Homo sapien
gaaggcctgaatgctatgaatgtct

SEQ ID NO: 5275987 - DNA, 25 bp, Homo sapien
tggagctttaactgcaatgacgatc

SEQ ID NO: 5275988 - DNA, 25 bp, Homo sapien
tgggagctggaacatccaatctggt

SEQ ID NO: 5275989 - DNA, 25 bp, Homo sapien
gacgatctgttcatggaaggcctga

SEQ ID NO: 5275990 - DNA, 25 bp, Homo sapien
cttggtttggtactgtacccctgag

SEQ ID NO: 5275991 - DNA, 25 bp, Homo sapien
atttaatctaagaaatgccacacag

SEQ ID NO: 5275992 - DNA, 25 bp, Homo sapien
aagtggtaccatcaaccttggtttg

SEQ ID NO: 5275993 - DNA, 25 bp, Homo sapien
tgtgtatgtttgaggttatactact

SEQ ID NO: 5275994 - DNA, 25 bp, Homo sapien
tctgttttggaagcagaaattttaa

SEQ ID NO: 5275995 - DNA, 25 bp, Homo sapien
gtaatctgttttggaagcagaaatt

SEQ ID NO: 5275996 - DNA, 25 bp, Homo sapien
aatctgttttggaagcagaaatttt

SEQ ID NO: 5275997 - DNA, 25 bp, Homo sapien
taatctgttttggaagcagaaattt

SEQ ID NO: 5275998 - DNA, 25 bp, Homo sapien
cttaattaactcatccaaagcatct

SEQ ID NO: 5275999 - DNA, 25 bp, Homo sapien
tgctgagcacaatccttaattaact

SEQ ID NO: 5276000 - DNA, 25 bp, Homo sapien
tccttaattaactcatccaaagcat

SEQ ID NO: 5276001 - DNA, 25 bp, Homo sapien
ccttaattaactcatccaaagcatc

SEQ ID NO: 5276002 - DNA, 25 bp, Homo sapien
ggggaactgctccaaaattgctaag

SEQ ID NO: 5276003 - DNA, 25 bp, Homo sapien
tggggaactgctccaaaattgctaa

SEQ ID NO: 5276004 - DNA, 25 bp, Homo sapien
tccaaaattgctaagatcagatcct

SEQ ID NO: 5276005 - DNA, 25 bp, Homo sapien
tgctccaaaattgctaagatcagat

SEQ ID NO: 5276006 - DNA, 25 bp, Homo sapien
gatgtcatacactctccgctttcgg

SEQ ID NO: 5276007 - DNA, 25 bp, Homo sapien
cttggatttcttttcaacgaggtcg

SEQ ID NO: 5276008 - DNA, 25 bp, Homo sapien
aacgaggtcgattccatctaagaca

SEQ ID NO: 5276009 - DNA, 25 bp, Homo sapien
tcgttgcaaccttgtttaagtcaag

SEQ ID NO: 5276010 - DNA, 25 bp, Homo sapien
gttaaataaaccagcgatacatcaa

SEQ ID NO: 5276011 - DNA, 25 bp, Homo sapien
gatacatcaaaacgaggtctcttca

SEQ ID NO: 5276012 - DNA, 25 bp, Homo sapien
taaaccagcgatacatcaaaacgag

SEQ ID NO: 5276013 - DNA, 25 bp, Homo sapien
tttcgagttaaataaaccagcgata

SEQ ID NO: 5276014 - DNA, 25 bp, Homo sapien
cactggcggttacttcaggaacaaa

SEQ ID NO: 5276015 - DNA, 25 bp, Homo sapien
gttacttcaggaacaaaggtacata

SEQ ID NO: 5276016 - DNA, 25 bp, Homo sapien
ttaaagaccactggcggttacttca

SEQ ID NO: 5276017 - DNA, 25 bp, Homo sapien
caggaacaaaggtacatatttcata

SEQ ID NO: 5276018 - DNA, 25 bp, Homo sapien
tgtacattatcttctaaattaatcc

SEQ ID NO: 5276019 - DNA, 25 bp, Homo sapien
ttctcatggacacatattgtacatt

SEQ ID NO: 5276020 - DNA, 25 bp, Homo sapien
tctcatggacacatattgtacatta

SEQ ID NO: 5276021 - DNA, 25 bp, Homo sapien
ctaaattaatccttatttttgatgg

SEQ ID NO: 5276022 - DNA, 25 bp, Homo sapien
caagccagatttgcctgaataaaca

SEQ ID NO: 5276023 - DNA, 25 bp, Homo sapien
gagcctagcccagcaagccagattt

SEQ ID NO: 5276024 - DNA, 25 bp, Homo sapien
agcaagccagatttgcctgaataaa

SEQ ID NO: 5276025 - DNA, 25 bp, Homo sapien
tcagctgagcctagcccagcaagcc

SEQ ID NO: 5276026 - DNA, 25 bp, Homo sapien
tcgcagcacgtgatgggcagcgcct

SEQ ID NO: 5276027 - DNA, 25 bp, Homo sapien
gagcagacgacccagacgacggcca

SEQ ID NO: 5276028 - DNA, 25 bp, Homo sapien
agcagatgctgaaagcagaaggcgg

SEQ ID NO: 5276029 - DNA, 25 bp, Homo sapien
cgcagttcgcagcacgtgatgggca

SEQ ID NO: 5276030 - DNA, 25 bp, Homo sapien
gcaggccctccacgttgatggggtc

SEQ ID NO: 5276031 - DNA, 25 bp, Homo sapien
aggccctccacgttgatggggtctc

SEQ ID NO: 5276032 - DNA, 25 bp, Homo sapien
caggccctccacgttgatggggtct

SEQ ID NO: 5276033 - DNA, 25 bp, Homo sapien
tcgcaccccacgagctctcccgccc

SEQ ID NO: 5276034 - DNA, 25 bp, Homo sapien
cgcaccccacgagctctcccgccct

SEQ ID NO: 5276035 - DNA, 25 bp, Homo sapien
ctcgcaccccacgagctctcccgcc

SEQ ID NO: 5276036 - DNA, 25 bp, Homo sapien
gggagctcccgacgcagacggaaaa

SEQ ID NO: 5276037 - DNA, 25 bp, Homo sapien
gtaaacgcggcacggcctcacgtgc

SEQ ID NO: 5276038 - DNA, 25 bp, Homo sapien
gggagacccgcggatctcaagtcgc

SEQ ID NO: 5276039 - DNA, 25 bp, Homo sapien
tcacgtgcccgggagctcccgacgc

SEQ ID NO: 5276040 - DNA, 25 bp, Homo sapien
taaacatttgaagcaagtgtggccc

SEQ ID NO: 5276041 - DNA, 25 bp, Homo sapien
tgaacacacgcatatgcagtaatag

SEQ ID NO: 5276042 - DNA, 25 bp, Homo sapien
cattactctcctagtttagcgtgtg

SEQ ID NO: 5276043 - DNA, 25 bp, Homo sapien
cccgatgttaggattggcttgttct

SEQ ID NO: 5276044 - DNA, 25 bp, Homo sapien
cgctcaggtgcgaggttccgtccat

SEQ ID NO: 5276045 - DNA, 25 bp, Homo sapien
aatctccgcgtcctgagcggtcggc

SEQ ID NO: 5276046 - DNA, 25 bp, Homo sapien
gacaaaatgacctcgctcctccgag

SEQ ID NO: 5276047 - DNA, 25 bp, Homo sapien
atgtccagtgtgaccccgcgggaat

SEQ ID NO: 5276048 - DNA, 25 bp, Homo sapien
gttcagttttcatggctctccacat

SEQ ID NO: 5276049 - DNA, 25 bp, Homo sapien
tgagtatagatgctggaatttcctg

SEQ ID NO: 5276050 - DNA, 25 bp, Homo sapien
gtaatgtgccaacaggtagttacca

SEQ ID NO: 5276051 - DNA, 25 bp, Homo sapien
gcagctgagccagggtcaaatggtt

SEQ ID NO: 5276052 - DNA, 25 bp, Homo sapien
ctgtccttgagaagcgtggtttggt

SEQ ID NO: 5276053 - DNA, 25 bp, Homo sapien
cctatggtagaggtttgctttcttc

SEQ ID NO: 5276054 - DNA, 25 bp, Homo sapien
catttcgcctatggtagaggtttgc

SEQ ID NO: 5276055 - DNA, 25 bp, Homo sapien
cttctagtccatttcgcctatggta

SEQ ID NO: 5276056 - DNA, 25 bp, Homo sapien
agtccatttcgcctatggtagaggt

SEQ ID NO: 5276057 - DNA, 25 bp, Homo sapien
tctgcatcgggacacatgaggctgg

SEQ ID NO: 5276058 - DNA, 25 bp, Homo sapien
cgtgggtcttcagcagaacgggctt

SEQ ID NO: 5276059 - DNA, 25 bp, Homo sapien
tgaggctggcgttggaatatttccc

SEQ ID NO: 5276060 - DNA, 25 bp, Homo sapien
ttttccaacaaagaacagcgccctg

SEQ ID NO: 5276061 - DNA, 25 bp, Homo sapien
agttccagaaacctagagtcagggc

SEQ ID NO: 5276062 - DNA, 25 bp, Homo sapien
tcagggcatcgaatgagaatgcagc

SEQ ID NO: 5276063 - DNA, 25 bp, Homo sapien
ttgagttccagaaacctagagtcag

SEQ ID NO: 5276064 - DNA, 25 bp, Homo sapien
tgcagctttatctgtgcacagggct

SEQ ID NO: 5276065 - DNA, 25 bp, Homo sapien
tcaatttgaatagaacttgggcaag

SEQ ID NO: 5276066 - DNA, 25 bp, Homo sapien
taataagggctatctggatgttact

SEQ ID NO: 5276067 - DNA, 25 bp, Homo sapien
tatctggatgttactgcttgttgga

SEQ ID NO: 5276068 - DNA, 25 bp, Homo sapien
gttactgcttgttggattattaaag

SEQ ID NO: 5276069 - DNA, 25 bp, Homo sapien
tactgttggtaataagggctatctg

SEQ ID NO: 5276070 - DNA, 25 bp, Homo sapien
aacttggctgggtctgtcacaactg

SEQ ID NO: 5276071 - DNA, 25 bp, Homo sapien
gaatactggtttttgtgctggaccc

SEQ ID NO: 5276072 - DNA, 25 bp, Homo sapien
tgcaggactcgcagcaggaacctac

SEQ ID NO: 5276073 - DNA, 25 bp, Homo sapien
tgtcacaactgtcgcctgaatactg

SEQ ID NO: 5276074 - DNA, 25 bp, Homo sapien
ttagttgtagaagacaagttggaca

SEQ ID NO: 5276075 - DNA, 25 bp, Homo sapien
agacaagttggacattattgataag

SEQ ID NO: 5276076 - DNA, 25 bp, Homo sapien
gaagacaagttggacattattgata

SEQ ID NO: 5276077 - DNA, 25 bp, Homo sapien
gttgtagaagacaagttggacatta

SEQ ID NO: 5276078 - DNA, 25 bp, Homo sapien
tgcctggactctcagcatcattgct

SEQ ID NO: 5276079 - DNA, 25 bp, Homo sapien
tcctgcctggactctcagcatcatt

SEQ ID NO: 5276080 - DNA, 25 bp, Homo sapien
cctggactctcagcatcattgcttt

SEQ ID NO: 5276081 - DNA, 25 bp, Homo sapien
cctgcctggactctcagcatcattg

SEQ ID NO: 5276082 - DNA, 25 bp, Homo sapien
gaaggggacttcaaagacgatgatg

SEQ ID NO: 5276083 - DNA, 25 bp, Homo sapien
caagaaggggacttcaaagacgatg

SEQ ID NO: 5276084 - DNA, 25 bp, Homo sapien
aggggacttcaaagacgatgatgaa

SEQ ID NO: 5276085 - DNA, 25 bp, Homo sapien
gacaagaaggggacttcaaagacga

SEQ ID NO: 5276086 - DNA, 25 bp, Homo sapien
tttgactttgcaagcgagcacctgc

SEQ ID NO: 5276087 - DNA, 25 bp, Homo sapien
tgacttacgaagacagctgtggcct

SEQ ID NO: 5276088 - DNA, 25 bp, Homo sapien
tgtggagtgcctgaagtgaccagct

SEQ ID NO: 5276089 - DNA, 25 bp, Homo sapien
aggcacagatcaaaggcgcagccca

SEQ ID NO: 5276090 - DNA, 25 bp, Homo sapien
tagaacaggccagaagctgtccatg

SEQ ID NO: 5276091 - DNA, 25 bp, Homo sapien
catagaacaggccagaagctgtcca

SEQ ID NO: 5276092 - DNA, 25 bp, Homo sapien
caggcatagaacaggccagaagctg

SEQ ID NO: 5276093 - DNA, 25 bp, Homo sapien
gaacaggccagaagctgtccatgtg

SEQ ID NO: 5276094 - DNA, 25 bp, Homo sapien
gggatcatcggcagagtcaatgcca

SEQ ID NO: 5276095 - DNA, 25 bp, Homo sapien
gctgcatctgctcttggagcttggg

SEQ ID NO: 5276096 - DNA, 25 bp, Homo sapien
tgcagatccactctcccgtaagaaa

SEQ ID NO: 5276097 - DNA, 25 bp, Homo sapien
agtaggatctgcagcgtgggatcat

SEQ ID NO: 5276098 - DNA, 25 bp, Homo sapien
tgtgggcaaacttttggctgttcta

SEQ ID NO: 5276099 - DNA, 25 bp, Homo sapien
gtgggcaaacttttggctgttctat

SEQ ID NO: 5276100 - DNA, 25 bp, Homo sapien
tgggcaaacttttggctgttctatt

SEQ ID NO: 5276101 - DNA, 25 bp, Homo sapien
ctgtgggcaaacttttggctgttct

SEQ ID NO: 5276102 - DNA, 25 bp, Homo sapien
atccctgcggtccaacaacctggtg

SEQ ID NO: 5276103 - DNA, 25 bp, Homo sapien
cttgcacaattccatcgaggcatcc

SEQ ID NO: 5276104 - DNA, 25 bp, Homo sapien
tgagcagcagcttgccgctctagaa

SEQ ID NO: 5276105 - DNA, 25 bp, Homo sapien
aagctgagcagcagcttgccgctct

SEQ ID NO: 5276106 - DNA, 25 bp, Homo sapien
ccatccaagtgttaaccaggcccga

SEQ ID NO: 5276107 - DNA, 25 bp, Homo sapien
cagacgagatcaggtgcgttcaggg

SEQ ID NO: 5276108 - DNA, 25 bp, Homo sapien
cccatccaagtgttaaccaggcccg

SEQ ID NO: 5276109 - DNA, 25 bp, Homo sapien
agatcagacgagatcaggtgcgttc

SEQ ID NO: 5276110 - DNA, 25 bp, Homo sapien
ggatgctgtaccacagacggtgagc

SEQ ID NO: 5276111 - DNA, 25 bp, Homo sapien
ggacagtctcaactttaccagtggc

SEQ ID NO: 5276112 - DNA, 25 bp, Homo sapien
gagacaccatcctgggatgctaagg

SEQ ID NO: 5276113 - DNA, 25 bp, Homo sapien
tgcaccctctgcctgaaggatgctg

SEQ ID NO: 5276114 - DNA, 25 bp, Homo sapien
tgaaagtgagtacgcgaggccatgc

SEQ ID NO: 5276115 - DNA, 25 bp, Homo sapien
gatggctatacaggacaaggtggtc

SEQ ID NO: 5276116 - DNA, 25 bp, Homo sapien
ttggcccgcagagaggaggatcttc

SEQ ID NO: 5276117 - DNA, 25 bp, Homo sapien
ggtagtaaatcaaggaggctctgcc

SEQ ID NO: 5276118 - DNA, 25 bp, Homo sapien
ccgtgtttcttatgggacagaggcc

SEQ ID NO: 5276119 - DNA, 25 bp, Homo sapien
ttggcatttccggtctctcccaggg

SEQ ID NO: 5276120 - DNA, 25 bp, Homo sapien
gattctggatatccacacccggcag

SEQ ID NO: 5276121 - DNA, 25 bp, Homo sapien
aacctgcttagctgtctctggagag

SEQ ID NO: 5276122 - DNA, 25 bp, Homo sapien
tgtgcatcttggagccgctggtacc

SEQ ID NO: 5276123 - DNA, 25 bp, Homo sapien
gggcagcgccttggtcatgtgcatc

SEQ ID NO: 5276124 - DNA, 25 bp, Homo sapien
tccgccagagggcatgacgctggct

SEQ ID NO: 5276125 - DNA, 25 bp, Homo sapien
cacagctgaagtgtcggagttcctg

SEQ ID NO: 5276126 - DNA, 25 bp, Homo sapien
ggttcgcaatggagaagtgctgccc

SEQ ID NO: 5276127 - DNA, 25 bp, Homo sapien
tggtaaaggatggatttgttgtccc

SEQ ID NO: 5276128 - DNA, 25 bp, Homo sapien
caggcccagggtcttactggcattt

SEQ ID NO: 5276129 - DNA, 25 bp, Homo sapien
ccaaacaggctacataatgagtcat

SEQ ID NO: 5276130 - DNA, 25 bp, Homo sapien
cactgtccgattgggatagaaggag

SEQ ID NO: 5276131 - DNA, 25 bp, Homo sapien
tccccagggtcatatcactgtccga

SEQ ID NO: 5276132 - DNA, 25 bp, Homo sapien
tacaggagagaatgcaaaggccttt

SEQ ID NO: 5276133 - DNA, 25 bp, Homo sapien
tgtcccacggaaaagtgcagagctg

SEQ ID NO: 5276134 - DNA, 25 bp, Homo sapien
gcctggagctcgaggacgagtggca

SEQ ID NO: 5276135 - DNA, 25 bp, Homo sapien
gctcgaggacgagtggcagttccgg

SEQ ID NO: 5276136 - DNA, 25 bp, Homo sapien
cgtccgcctggagctcgaggacgag

SEQ ID NO: 5276137 - DNA, 25 bp, Homo sapien
tggagctcgaggacgagtggcagtt

SEQ ID NO: 5276138 - DNA, 25 bp, Homo sapien
gcgcctggcctcagaatgcattctt

SEQ ID NO: 5276139 - DNA, 25 bp, Homo sapien
tgcattcttacacatctatcctaga

SEQ ID NO: 5276140 - DNA, 25 bp, Homo sapien
gcactctaatggataacaatccaag

SEQ ID NO: 5276141 - DNA, 25 bp, Homo sapien
tgatgccgaagagttgatgtcaatc

SEQ ID NO: 5276142 - DNA, 25 bp, Homo sapien
gcttcccgccgtgcttcccatgctc

SEQ ID NO: 5276143 - DNA, 25 bp, Homo sapien
gggagcggtttggagcagccagcct

SEQ ID NO: 5276144 - DNA, 25 bp, Homo sapien
gcatttgtctggatgatcaccaggg

SEQ ID NO: 5276145 - DNA, 25 bp, Homo sapien
gcctggttgattccctgcagcgctt

SEQ ID NO: 5276146 - DNA, 25 bp, Homo sapien
taagcatttcggatgaccactggga

SEQ ID NO: 5276147 - DNA, 25 bp, Homo sapien
ttaagcatttcggatgaccactggg

SEQ ID NO: 5276148 - DNA, 25 bp, Homo sapien
gatggtgccgtagacttgaccccag

SEQ ID NO: 5276149 - DNA, 25 bp, Homo sapien
tccttgaagcccttgatggtgccgt

SEQ ID NO: 5276150 - DNA, 25 bp, Homo sapien
ttgaagcccttgatggtgccgtaga

SEQ ID NO: 5276151 - DNA, 25 bp, Homo sapien
atggtgccgtagacttgaccccagg

SEQ ID NO: 5276152 - DNA, 25 bp, Homo sapien
tacttgttattcagcttcttctcac

SEQ ID NO: 5276153 - DNA, 25 bp, Homo sapien
ttacttgttattcagcttcttctca

SEQ ID NO: 5276154 - DNA, 25 bp, Homo sapien
gcctggtagagttggggctccctct

SEQ ID NO: 5276155 - DNA, 25 bp, Homo sapien
tgttctagatgcctggtagagttgg

SEQ ID NO: 5276156 - DNA, 25 bp, Homo sapien
tgggaatgctcactggactggattc

SEQ ID NO: 5276157 - DNA, 25 bp, Homo sapien
tgcagcctgggaatgctcactggac

SEQ ID NO: 5276158 - DNA, 25 bp, Homo sapien
gaaccatcaggagctattttgtcag

SEQ ID NO: 5276159 - DNA, 25 bp, Homo sapien
tttgtcaggccagcatctaacccag

SEQ ID NO: 5276160 - DNA, 25 bp, Homo sapien
tgatccacccacgtgctgtctggct

SEQ ID NO: 5276161 - DNA, 25 bp, Homo sapien
ctccctgcatagaaccatcaggagc

SEQ ID NO: 5276162 - DNA, 25 bp, Homo sapien
cttccttaagaacagttggatctag

SEQ ID NO: 5276163 - DNA, 25 bp, Homo sapien
ttcctcgttgtatgtctcactggcc

SEQ ID NO: 5276164 - DNA, 25 bp, Homo sapien
gaacagttggatctaggcctctctc

SEQ ID NO: 5276165 - DNA, 25 bp, Homo sapien
ccagttcctcgttgtatgtctcact

SEQ ID NO: 5276166 - DNA, 25 bp, Homo sapien
tgtgcatggccgtttcccggcaagc

SEQ ID NO: 5276167 - DNA, 25 bp, Homo sapien
catgtgcctcgtggcagagtgtgca

SEQ ID NO: 5276168 - DNA, 25 bp, Homo sapien
tcaactcttgtccagcattgcgctg

SEQ ID NO: 5276169 - DNA, 25 bp, Homo sapien
cattgcgctggccagagcataactg

SEQ ID NO: 5276170 - DNA, 25 bp, Homo sapien
tttatctccactacacagacgaggg

SEQ ID NO: 5276171 - DNA, 25 bp, Homo sapien
gcttccctgcgcttgatggttctca

SEQ ID NO: 5276172 - DNA, 25 bp, Homo sapien
tgagcatctactacgcaccaggttc

SEQ ID NO: 5276173 - DNA, 25 bp, Homo sapien
tcaggcaacactaagagatgggtgc

SEQ ID NO: 5276174 - DNA, 25 bp, Homo sapien
gaagctgtatccattagggtgggac

SEQ ID NO: 5276175 - DNA, 25 bp, Homo sapien
ctgtatccattagggtgggactctg

SEQ ID NO: 5276176 - DNA, 25 bp, Homo sapien
ggtaaccgcttcatggggtggtgct

SEQ ID NO: 5276177 - DNA, 25 bp, Homo sapien
agctgtatccattagggtgggactc

SEQ ID NO: 5276178 - DNA, 25 bp, Homo sapien
gtagtggtagaaattgtacagtggg

SEQ ID NO: 5276179 - DNA, 25 bp, Homo sapien
gaagtagtggtagaaattgtacagt

SEQ ID NO: 5276180 - DNA, 25 bp, Homo sapien
tgagctgacgtagaaaagtgtgttg

SEQ ID NO: 5276181 - DNA, 25 bp, Homo sapien
aagtagtggtagaaattgtacagtg

SEQ ID NO: 5276182 - DNA, 25 bp, Homo sapien
taagagccgaagttccgtctgagga

SEQ ID NO: 5276183 - DNA, 25 bp, Homo sapien
tgccccggactgctgcgtgtggtca

SEQ ID NO: 5276184 - DNA, 25 bp, Homo sapien
ctcatggtaaggtgacactgctgac

SEQ ID NO: 5276185 - DNA, 25 bp, Homo sapien
agatgtggctgcactaagagccgaa

SEQ ID NO: 5276186 - DNA, 25 bp, Homo sapien
tcttctccaaccatgtcataaaagg

SEQ ID NO: 5276187 - DNA, 25 bp, Homo sapien
tgtttgattcccacttatgattggg

SEQ ID NO: 5276188 - DNA, 25 bp, Homo sapien
cttctccaaccatgtcataaaaggg

SEQ ID NO: 5276189 - DNA, 25 bp, Homo sapien
atgattggggcacagtgatttctga

SEQ ID NO: 5276190 - DNA, 25 bp, Homo sapien
tgcgggcatggtacggcagccagca

SEQ ID NO: 5276191 - DNA, 25 bp, Homo sapien
cacgcgtcatcaggtacgtagcagt

SEQ ID NO: 5276192 - DNA, 25 bp, Homo sapien
ggtacgtagcagtacatgagcctgc

SEQ ID NO: 5276193 - DNA, 25 bp, Homo sapien
gatgacatacatgaccacgatggct

SEQ ID NO: 5276194 - DNA, 25 bp, Homo sapien
ttccctctaacttggtcctggagtc

SEQ ID NO: 5276195 - DNA, 25 bp, Homo sapien
aaacacattctcagttacaccattg

SEQ ID NO: 5276196 - DNA, 25 bp, Homo sapien
caccattgcaaagggaggctgatgc

SEQ ID NO: 5276197 - DNA, 25 bp, Homo sapien
tgcccgaggggatagcagcatttcc

SEQ ID NO: 5276198 - DNA, 25 bp, Homo sapien
ggacacagcatgcttctaggacctc

SEQ ID NO: 5276199 - DNA, 25 bp, Homo sapien
tcctcctggccactagaatatactc

SEQ ID NO: 5276200 - DNA, 25 bp, Homo sapien
ccagggctagatatccctaccaggt

SEQ ID NO: 5276201 - DNA, 25 bp, Homo sapien
ggttatctatctgcatatacaacag

SEQ ID NO: 5276202 - DNA, 25 bp, Homo sapien
gactcttaccgcctctgtactggac

SEQ ID NO: 5276203 - DNA, 25 bp, Homo sapien
tctggttaatttacagcactgccat

SEQ ID NO: 5276204 - DNA, 25 bp, Homo sapien
tgtactggactatgacgagtttccc

SEQ ID NO: 5276205 - DNA, 25 bp, Homo sapien
tcttgtcttagaaagcctcttgctc

SEQ ID NO: 5276206 - DNA, 25 bp, Homo sapien
ggccccgcggcttgcattttacaac

SEQ ID NO: 5276207 - DNA, 25 bp, Homo sapien
gcagtgtcaacatcagtgagaagcc

SEQ ID NO: 5276208 - DNA, 25 bp, Homo sapien
agtttgagaggcaccgtttagccca

SEQ ID NO: 5276209 - DNA, 25 bp, Homo sapien
tccaaagagctgagcgcaataggtc

SEQ ID NO: 5276210 - DNA, 25 bp, Homo sapien
gagagtccacaatttgcagccgcag

SEQ ID NO: 5276211 - DNA, 25 bp, Homo sapien
tgatccttccataccctagctagtg

SEQ ID NO: 5276212 - DNA, 25 bp, Homo sapien
gactggatttaggtacccagcccat

SEQ ID NO: 5276213 - DNA, 25 bp, Homo sapien
gaagtctgacaccttcatgtgctga

SEQ ID NO: 5276214 - DNA, 25 bp, Homo sapien
ggtaaaggaagccttgagagaggta

SEQ ID NO: 5276215 - DNA, 25 bp, Homo sapien
aggcagccctggaacttaggcccct

SEQ ID NO: 5276216 - DNA, 25 bp, Homo sapien
aagccttgagagaggtagtgacttg

SEQ ID NO: 5276217 - DNA, 25 bp, Homo sapien
gctgaggtcacccggccagggattg

SEQ ID NO: 5276218 - DNA, 25 bp, Homo sapien
tccggcgcacgtctttatgtctcac

SEQ ID NO: 5276219 - DNA, 25 bp, Homo sapien
gacgctgcgctggaggctgcggatc

SEQ ID NO: 5276220 - DNA, 25 bp, Homo sapien
tggaggctgcggatccggcgcacgt

SEQ ID NO: 5276221 - DNA, 25 bp, Homo sapien
gcggatccggcgcacgtctttatgt

SEQ ID NO: 5276222 - DNA, 25 bp, Homo sapien
tccatacgatgaagctgaggagacc

SEQ ID NO: 5276223 - DNA, 25 bp, Homo sapien
aggtcttcttccatacgatgaagct

SEQ ID NO: 5276224 - DNA, 25 bp, Homo sapien
tcttccatacgatgaagctgaggag

SEQ ID NO: 5276225 - DNA, 25 bp, Homo sapien
tacgatgaagctgaggagaccctcc

SEQ ID NO: 5276226 - DNA, 25 bp, Homo sapien
caggaaagcagttagtgccaagggg

SEQ ID NO: 5276227 - DNA, 25 bp, Homo sapien
aggtggctcactgtgaccccattca

SEQ ID NO: 5276228 - DNA, 25 bp, Homo sapien
agtggacggcacttgggagcagagg

SEQ ID NO: 5276229 - DNA, 25 bp, Homo sapien
gcagttagtgccaaggggagcacga

SEQ ID NO: 5276230 - DNA, 25 bp, Homo sapien
tctgagcggcaatgcgctggctctt

SEQ ID NO: 5276231 - DNA, 25 bp, Homo sapien
agctgggaggtagattcctgtacct

SEQ ID NO: 5276232 - DNA, 25 bp, Homo sapien
ccggctcccaggcattgtggaaata

SEQ ID NO: 5276233 - DNA, 25 bp, Homo sapien
aactgcgcagccaggtctgagcggc

SEQ ID NO: 5276234 - DNA, 25 bp, Homo sapien
gtttaaagtcacagtccatggtcac

SEQ ID NO: 5276235 - DNA, 25 bp, Homo sapien
ggacagcttcagtttaaagtcacag

SEQ ID NO: 5276236 - DNA, 25 bp, Homo sapien
acaggtcctcaagcggctcccactt

SEQ ID NO: 5276237 - DNA, 25 bp, Homo sapien
ttcagtttaaagtcacagtccatgg

SEQ ID NO: 5276238 - DNA, 25 bp, Homo sapien
ctgggcatgtgaacgctacccacag

SEQ ID NO: 5276239 - DNA, 25 bp, Homo sapien
atgtgaacgctacccacagacaccc

SEQ ID NO: 5276240 - DNA, 25 bp, Homo sapien
ggcatgtgaacgctacccacagaca

SEQ ID NO: 5276241 - DNA, 25 bp, Homo sapien
tgggcatgtgaacgctacccacaga

SEQ ID NO: 5276242 - DNA, 25 bp, Homo sapien
accgtgcacactcgcgaggcgggct

SEQ ID NO: 5276243 - DNA, 25 bp, Homo sapien
cgtccgccgtctcgagttcgtgctt

SEQ ID NO: 5276244 - DNA, 25 bp, Homo sapien
gtctcgagttcgtgcttctgcccca

SEQ ID NO: 5276245 - DNA, 25 bp, Homo sapien
acttggagcgcggtgcggctcacca

SEQ ID NO: 5276246 - DNA, 25 bp, Homo sapien
tccggcgtggcgtcagcaggctgcg

SEQ ID NO: 5276247 - DNA, 25 bp, Homo sapien
agccaccgggtccggcgtggcgtca

SEQ ID NO: 5276248 - DNA, 25 bp, Homo sapien
cgccaccagccaccgggtccggcgt

SEQ ID NO: 5276249 - DNA, 25 bp, Homo sapien
accgggtccggcgtggcgtcagcag

SEQ ID NO: 5276250 - DNA, 25 bp, Homo sapien
tggcgtaggcgcacagctcgtgcac

SEQ ID NO: 5276251 - DNA, 25 bp, Homo sapien
cgtaggcgcacagctcgtgcacgaa

SEQ ID NO: 5276252 - DNA, 25 bp, Homo sapien
gcaccgtggcgtaggcgcacagctc

SEQ ID NO: 5276253 - DNA, 25 bp, Homo sapien
agctcgtgcacgaagtagtagccgc

SEQ ID NO: 5276254 - DNA, 25 bp, Homo sapien
agctccaccggcacgccgaccagca

SEQ ID NO: 5276255 - DNA, 25 bp, Homo sapien
tagtggaaccacacgaagctgtaga

SEQ ID NO: 5276256 - DNA, 25 bp, Homo sapien
ggaaccacacgaagctgtagagctc

SEQ ID NO: 5276257 - DNA, 25 bp, Homo sapien
caggtcgccgaagacccaggggtag

SEQ ID NO: 5276258 - DNA, 25 bp, Homo sapien
cggcccgcgccttcagcaccacgtg

SEQ ID NO: 5276259 - DNA, 25 bp, Homo sapien
cgccttcagcaccacgtgcgcggac

SEQ ID NO: 5276260 - DNA, 25 bp, Homo sapien
ccgcgccttcagcaccacgtgcgcg

SEQ ID NO: 5276261 - DNA, 25 bp, Homo sapien
ctgagcacgtggtggcgcaggcgcc

SEQ ID NO: 5276262 - DNA, 25 bp, Homo sapien
cccagcgcccagatgagtgcgtaga

SEQ ID NO: 5276263 - DNA, 25 bp, Homo sapien
tgagtgcgtagagcgcggtgaacag

SEQ ID NO: 5276264 - DNA, 25 bp, Homo sapien
cagcgcccagatgagtgcgtagagc

SEQ ID NO: 5276265 - DNA, 25 bp, Homo sapien
cgcccagcgcccagatgagtgcgta

SEQ ID NO: 5276266 - DNA, 25 bp, Homo sapien
ggcccagaggcgagtgtccacgccc

SEQ ID NO: 5276267 - DNA, 25 bp, Homo sapien
tggcccagaggcgagtgtccacgcc

SEQ ID NO: 5276268 - DNA, 25 bp, Homo sapien
ttggcccagaggcgagtgtccacgc

SEQ ID NO: 5276269 - DNA, 25 bp, Homo sapien
cccagaggcgagtgtccacgcccag

SEQ ID NO: 5276270 - DNA, 25 bp, Homo sapien
tctcactgcccggagtctgggcgag

SEQ ID NO: 5276271 - DNA, 25 bp, Homo sapien
agccaacgtgggaccgcgagtgcca

SEQ ID NO: 5276272 - DNA, 25 bp, Homo sapien
ctctagaactgggaggacacgcccc

SEQ ID NO: 5276273 - DNA, 25 bp, Homo sapien
gaaagggtgtccctgagccaacgtg

SEQ ID NO: 5276274 - DNA, 25 bp, Homo sapien
catgtagctcattaaggcctgtagg

SEQ ID NO: 5276275 - DNA, 25 bp, Homo sapien
tagggaaagtaggtttctgcttctc

SEQ ID NO: 5276276 - DNA, 25 bp, Homo sapien
ccaaggtctaggttggtgtgatgct

SEQ ID NO: 5276277 - DNA, 25 bp, Homo sapien
tgaggacgcagccaaactatgtcaa

SEQ ID NO: 5276278 - DNA, 25 bp, Homo sapien
cacgcgagacagtggtagagtacaa

SEQ ID NO: 5276279 - DNA, 25 bp, Homo sapien
ggagtgcagcatcgcactggacccg

SEQ ID NO: 5276280 - DNA, 25 bp, Homo sapien
ggactccagaacctttcacgcgaga

SEQ ID NO: 5276281 - DNA, 25 bp, Homo sapien
tccagcactcagcacgaggtggtct

SEQ ID NO: 5276282 - DNA, 25 bp, Homo sapien
tcagttcgtggttggggataggagc

SEQ ID NO: 5276283 - DNA, 25 bp, Homo sapien
tggttggggataggagctcccgtcg

SEQ ID NO: 5276284 - DNA, 25 bp, Homo sapien
taggagctcccgtcgcgatcgtcat

SEQ ID NO: 5276285 - DNA, 25 bp, Homo sapien
gggataggagctcccgtcgcgatcg

SEQ ID NO: 5276286 - DNA, 25 bp, Homo sapien
tttgggcacgcttccggctttcagg

SEQ ID NO: 5276287 - DNA, 25 bp, Homo sapien
tttctcaagcagcaccaagacggtg

SEQ ID NO: 5276288 - DNA, 25 bp, Homo sapien
aattgggtcccggtcagaagtgagt

SEQ ID NO: 5276289 - DNA, 25 bp, Homo sapien
tacatggtgatgcaaagatttgggc

SEQ ID NO: 5276290 - DNA, 25 bp, Homo sapien
cataagttgatgtcagggtcgaccc

SEQ ID NO: 5276291 - DNA, 25 bp, Homo sapien
tataaatcagtaacgggtcctcagg

SEQ ID NO: 5276292 - DNA, 25 bp, Homo sapien
gggtcgacccacagcttagacttga

SEQ ID NO: 5276293 - DNA, 25 bp, Homo sapien
tcgccgaggaagcatgaagatggtc

SEQ ID NO: 5276294 - DNA, 25 bp, Homo sapien
agcgcggccgcaggcagagtgagag

SEQ ID NO: 5276295 - DNA, 25 bp, Homo sapien
ccagaggcgtcagtgacatggatga

SEQ ID NO: 5276296 - DNA, 25 bp, Homo sapien
tgagaggttcgtcgttgagacgaat

SEQ ID NO: 5276297 - DNA, 25 bp, Homo sapien
cgttgagacgaatccagaggcgtca

SEQ ID NO: 5276298 - DNA, 25 bp, Homo sapien
ctcgggcagcttcccgtggttcagt

SEQ ID NO: 5276299 - DNA, 25 bp, Homo sapien
gcttcccgtggttcagtcccattct

SEQ ID NO: 5276300 - DNA, 25 bp, Homo sapien
ggagcgcaggccacatagtcatgga

SEQ ID NO: 5276301 - DNA, 25 bp, Homo sapien
cacatagtcatggaggcggcctcgg

SEQ ID NO: 5276302 - DNA, 25 bp, Homo sapien
tgaatgccagcccttagacactagg

SEQ ID NO: 5276303 - DNA, 25 bp, Homo sapien
gacagaagccctggtcacgtagaag

SEQ ID NO: 5276304 - DNA, 25 bp, Homo sapien
gatccatcattgtcacggctctgca

SEQ ID NO: 5276305 - DNA, 25 bp, Homo sapien
tgggtcacctcatggacagagcctg

SEQ ID NO: 5276306 - DNA, 25 bp, Homo sapien
tacagaagagcctagcacttagaac

SEQ ID NO: 5276307 - DNA, 25 bp, Homo sapien
gagcatactttgtaggactctgcag

SEQ ID NO: 5276308 - DNA, 25 bp, Homo sapien
tgtgcaaatcccacgctgttactag

SEQ ID NO: 5276309 - DNA, 25 bp, Homo sapien
tccaaggtaccatgaactagagaca

SEQ ID NO: 5276310 - DNA, 25 bp, Homo sapien
ttgatttcgtgaaagaacctgcccc

SEQ ID NO: 5276311 - DNA, 25 bp, Homo sapien
tcaaacttagccgagataccatcaa

SEQ ID NO: 5276312 - DNA, 25 bp, Homo sapien
caagccttctatcggcctctggtgt

SEQ ID NO: 5276313 - DNA, 25 bp, Homo sapien
gcagacttctgatgcttaagtggca

SEQ ID NO: 5276314 - DNA, 25 bp, Homo sapien
tgtcccccatcgggcttctcaggcc

SEQ ID NO: 5276315 - DNA, 25 bp, Homo sapien
cacaggtcaatgtgtcccccatcgg

SEQ ID NO: 5276316 - DNA, 25 bp, Homo sapien
cagagcttcccggtgacacaggtca

SEQ ID NO: 5276317 - DNA, 25 bp, Homo sapien
tcccggtgacacaggtcaatgtgtc

SEQ ID NO: 5276318 - DNA, 25 bp, Homo sapien
tatggcacccagttgaaacactttt

SEQ ID NO: 5276319 - DNA, 25 bp, Homo sapien
gataccgagagattcacttgtcagt

SEQ ID NO: 5276320 - DNA, 25 bp, Homo sapien
tctgcagatgcggagggctgacttt

SEQ ID NO: 5276321 - DNA, 25 bp, Homo sapien
gactccaattcagaccacaaggtac

SEQ ID NO: 5276322 - DNA, 25 bp, Homo sapien
acggagaagacaggcttgacaagga

SEQ ID NO: 5276323 - DNA, 25 bp, Homo sapien
gacaaggagcaggacggccttcaca

SEQ ID NO: 5276324 - DNA, 25 bp, Homo sapien
cagcacaaatgggaggccctgtgaa

SEQ ID NO: 5276325 - DNA, 25 bp, Homo sapien
gcacaaatgggaggccctgtgaaat

SEQ ID NO: 5276326 - DNA, 25 bp, Homo sapien
gaggctgtcaccatcaggatgaagg

SEQ ID NO: 5276327 - DNA, 25 bp, Homo sapien
gagtggaggctgtcaccatcaggat

SEQ ID NO: 5276328 - DNA, 25 bp, Homo sapien
tgaaggacaggggtggcccggcgtg

SEQ ID NO: 5276329 - DNA, 25 bp, Homo sapien
cgggagtggaggctgtcaccatcag

SEQ ID NO: 5276330 - DNA, 25 bp, Homo sapien
gcataggtcaagtcagagtgttgaa

SEQ ID NO: 5276331 - DNA, 25 bp, Homo sapien
tcatcggcataggtcaagtcagagt

SEQ ID NO: 5276332 - DNA, 25 bp, Homo sapien
cagtcatcggcataggtcaagtcag

SEQ ID NO: 5276333 - DNA, 25 bp, Homo sapien
tcccccagtcatcggcataggtcaa

SEQ ID NO: 5276334 - DNA, 25 bp, Homo sapien
tgagagaccgcagggattcctggtt

SEQ ID NO: 5276335 - DNA, 25 bp, Homo sapien
agaccgcagggattcctggttgtag

SEQ ID NO: 5276336 - DNA, 25 bp, Homo sapien
gagaacgcgagggttcaggtgagag

SEQ ID NO: 5276337 - DNA, 25 bp, Homo sapien
tggtgtgggagagaacgcgagggtt

SEQ ID NO: 5276338 - DNA, 25 bp, Homo sapien
ctgaaatgttcgctttctgagctgt

SEQ ID NO: 5276339 - DNA, 25 bp, Homo sapien
ctatcggatggctgtttctgaaatg

SEQ ID NO: 5276340 - DNA, 25 bp, Homo sapien
ttttgatgaagtcgtcctccgcgtt

SEQ ID NO: 5276341 - DNA, 25 bp, Homo sapien
tgatgaagtcgtcctccgcgttcat

SEQ ID NO: 5276342 - DNA, 25 bp, Homo sapien
tttttgatgaagtcgtcctccgcgt

SEQ ID NO: 5276343 - DNA, 25 bp, Homo sapien
tttgatgaagtcgtcctccgcgttc

SEQ ID NO: 5276344 - DNA, 25 bp, Homo sapien
tacctggtctgtggagtgctccagc

SEQ ID NO: 5276345 - DNA, 25 bp, Homo sapien
gccagttgaagaaataggagcttat

SEQ ID NO: 5276346 - DNA, 25 bp, Homo sapien
agttttggcggcgttgcagaccctg

SEQ ID NO: 5276347 - DNA, 25 bp, Homo sapien
gactgaggtttagttcatcccgagg

SEQ ID NO: 5276348 - DNA, 25 bp, Homo sapien
catgcaaacagtggaagaatctaga

SEQ ID NO: 5276349 - DNA, 25 bp, Homo sapien
gaagaccagatgaactgtttgctgc

SEQ ID NO: 5276350 - DNA, 25 bp, Homo sapien
tagatgggccccaaatgctgtgttg

SEQ ID NO: 5276351 - DNA, 25 bp, Homo sapien
tgtcattgacgtgattctgcctgaa

SEQ ID NO: 5276352 - DNA, 25 bp, Homo sapien
taaaaatagtcctgcctgaggttgc

SEQ ID NO: 5276353 - DNA, 25 bp, Homo sapien
tattacactggctcgtggacagaac

SEQ ID NO: 5276354 - DNA, 25 bp, Homo sapien
tagctcatggtaactttgcaacgcc

SEQ ID NO: 5276355 - DNA, 25 bp, Homo sapien
tactgacttctgttgggagctctcc

SEQ ID NO: 5276356 - DNA, 25 bp, Homo sapien
gacatctacattgactgccagtgaa

SEQ ID NO: 5276357 - DNA, 25 bp, Homo sapien
cattgcctcacaggacaaatgtggc

SEQ ID NO: 5276358 - DNA, 25 bp, Homo sapien
tgcaaacttttacaccaaggatggg

SEQ ID NO: 5276359 - DNA, 25 bp, Homo sapien
cacttacggatgtacagggagcggt

SEQ ID NO: 5276360 - DNA, 25 bp, Homo sapien
caggcagagcttgctctttcaattc

SEQ ID NO: 5276361 - DNA, 25 bp, Homo sapien
tcagagatatcttcaaggacccaat

SEQ ID NO: 5276362 - DNA, 25 bp, Homo sapien
agatatcttcaaggacccaattatg

SEQ ID NO: 5276363 - DNA, 25 bp, Homo sapien
gctctttcaattcagagatatcttc

SEQ ID NO: 5276364 - DNA, 25 bp, Homo sapien
tgtctgtctccaaccagacataagc

SEQ ID NO: 5276365 - DNA, 25 bp, Homo sapien
gccccgcttctgtgcatgatttctt

SEQ ID NO: 5276366 - DNA, 25 bp, Homo sapien
cagacataagctcctagatccccta

SEQ ID NO: 5276367 - DNA, 25 bp, Homo sapien
aatgcttggcattgcgtcatccaca

SEQ ID NO: 5276368 - DNA, 25 bp, Homo sapien
ccaatgctttattgtcgagtataat

SEQ ID NO: 5276369 - DNA, 25 bp, Homo sapien
tcttccaatgctttattgtcgagta

SEQ ID NO: 5276370 - DNA, 25 bp, Homo sapien
tttcttccaatgctttattgtcgag

SEQ ID NO: 5276371 - DNA, 25 bp, Homo sapien
tccaatgctttattgtcgagtataa

SEQ ID NO: 5276372 - DNA, 25 bp, Homo sapien
gcttgtgtgtcccatcagaatgacg

SEQ ID NO: 5276373 - DNA, 25 bp, Homo sapien
ggatgcagcggcttgtgtgtcccat

SEQ ID NO: 5276374 - DNA, 25 bp, Homo sapien
ccatcagaatgacggctgcagctga

SEQ ID NO: 5276375 - DNA, 25 bp, Homo sapien
tgttctgcacgggatgcagcggctt

SEQ ID NO: 5276376 - DNA, 25 bp, Homo sapien
tcaacttggagtgtttacatcataa

SEQ ID NO: 5276377 - DNA, 25 bp, Homo sapien
cattgtggatttgaaagactcagac

SEQ ID NO: 5276378 - DNA, 25 bp, Homo sapien
aagactcagactgtggcttcaacca

SEQ ID NO: 5276379 - DNA, 25 bp, Homo sapien
cacagcagcgtgatggtggatttta

SEQ ID NO: 5276380 - DNA, 25 bp, Homo sapien
ctgttgtctacccaaatgggtctgc

SEQ ID NO: 5276381 - DNA, 25 bp, Homo sapien
gctcttgtcagatctgtagacctca

SEQ ID NO: 5276382 - DNA, 25 bp, Homo sapien
cagatctgtagacctcagaaggcat

SEQ ID NO: 5276383 - DNA, 25 bp, Homo sapien
caaatgggtctgctcttgtcagatc

SEQ ID NO: 5276384 - DNA, 25 bp, Homo sapien
gtcccagggcttattggcctgcccc

SEQ ID NO: 5276385 - DNA, 25 bp, Homo sapien
tccccagtgcactcaaactgatctt

SEQ ID NO: 5276386 - DNA, 25 bp, Homo sapien
ggtctcaaagggcaccttgtcccag

SEQ ID NO: 5276387 - DNA, 25 bp, Homo sapien
cagtgcactcaaactgatcttcctc

SEQ ID NO: 5276388 - DNA, 25 bp, Homo sapien
cacagagccagtaatacatgtcagc

SEQ ID NO: 5276389 - DNA, 25 bp, Homo sapien
cagccttttggctgtccccggcggt

SEQ ID NO: 5276390 - DNA, 25 bp, Homo sapien
gtaatacatgtcagctttagtcagc

SEQ ID NO: 5276391 - DNA, 25 bp, Homo sapien
gtttccatgcaatgacacagagcca

SEQ ID NO: 5276392 - DNA, 25 bp, Homo sapien
ctgctccaggataccaggctccagc

SEQ ID NO: 5276393 - DNA, 25 bp, Homo sapien
ctccaggataccaggctccagccct

SEQ ID NO: 5276394 - DNA, 25 bp, Homo sapien
ggctccagccctgatgcagctgatc

SEQ ID NO: 5276395 - DNA, 25 bp, Homo sapien
tccagccctgatgcagctgatcagg

SEQ ID NO: 5276396 - DNA, 25 bp, Homo sapien
catgacataaatgactgttgagttg

SEQ ID NO: 5276397 - DNA, 25 bp, Homo sapien
gacataaatgactgttgagttgagc

SEQ ID NO: 5276398 - DNA, 25 bp, Homo sapien
gcaggacagctcatgacataaatga

SEQ ID NO: 5276399 - DNA, 25 bp, Homo sapien
cagctcatgacataaatgactgttg

SEQ ID NO: 5276400 - DNA, 25 bp, Homo sapien
cacatttgcagaggtgcctggtgac

SEQ ID NO: 5276401 - DNA, 25 bp, Homo sapien
ttttaaattagatctggctgacttt

SEQ ID NO: 5276402 - DNA, 25 bp, Homo sapien
tttaaattagatctggctgactttg

SEQ ID NO: 5276403 - DNA, 25 bp, Homo sapien
ttaaattagatctggctgactttgc

SEQ ID NO: 5276404 - DNA, 25 bp, Homo sapien
taaattagatctggctgactttgcc

SEQ ID NO: 5276405 - DNA, 25 bp, Homo sapien
ttctctctgggatctttcctgtatc

SEQ ID NO: 5276406 - DNA, 25 bp, Homo sapien
ggctggccctccaggtgtggagagg

SEQ ID NO: 5276407 - DNA, 25 bp, Homo sapien
aggaaactgggtcttctctctggga

SEQ ID NO: 5276408 - DNA, 25 bp, Homo sapien
tgtggagaggaaactgggtcttctc

SEQ ID NO: 5276409 - DNA, 25 bp, Homo sapien
gtaaaggtggtgaggtactctctct

SEQ ID NO: 5276410 - DNA, 25 bp, Homo sapien
gagtaaaggtggtgaggtactctct

SEQ ID NO: 5276411 - DNA, 25 bp, Homo sapien
taaaggtggtgaggtactctctctg

SEQ ID NO: 5276412 - DNA, 25 bp, Homo sapien
gagagtaaaggtggtgaggtactct

SEQ ID NO: 5276413 - DNA, 25 bp, Homo sapien
ttccctagccactgcctctccttgg

SEQ ID NO: 5276414 - DNA, 25 bp, Homo sapien
tgcttccctagccactgcctctcct

SEQ ID NO: 5276415 - DNA, 25 bp, Homo sapien
cttgcttccctagccactgcctctc

SEQ ID NO: 5276416 - DNA, 25 bp, Homo sapien
cttccctagccactgcctctccttg

SEQ ID NO: 5276417 - DNA, 25 bp, Homo sapien
caaggtatccgggaagaacttgact

SEQ ID NO: 5276418 - DNA, 25 bp, Homo sapien
gaatttcctcttcagaggcgatggg

SEQ ID NO: 5276419 - DNA, 25 bp, Homo sapien
catctccttgttggcaccagtggta

SEQ ID NO: 5276420 - DNA, 25 bp, Homo sapien
ggtatgactcttccaatgcaaacaa

SEQ ID NO: 5276421 - DNA, 25 bp, Homo sapien
gaagaggttcctcagggaacactgt

SEQ ID NO: 5276422 - DNA, 25 bp, Homo sapien
ttcctcagggaacactgtgggtggt

SEQ ID NO: 5276423 - DNA, 25 bp, Homo sapien
ggaacactgtgggtggtgccagttt

SEQ ID NO: 5276424 - DNA, 25 bp, Homo sapien
agggaacactgtgggtggtgccagt

SEQ ID NO: 5276425 - DNA, 25 bp, Homo sapien
atgggatggattctgctctcccaca

SEQ ID NO: 5276426 - DNA, 25 bp, Homo sapien
tgggatggattctgctctcccacac

SEQ ID NO: 5276427 - DNA, 25 bp, Homo sapien
ctgcatgcaaagttggtcttctcct

SEQ ID NO: 5276428 - DNA, 25 bp, Homo sapien
agtacagcttggcaacaccgcaggg

SEQ ID NO: 5276429 - DNA, 25 bp, Homo sapien
tcactcagacccagtacagcttggc

SEQ ID NO: 5276430 - DNA, 25 bp, Homo sapien
tggcaacaccgcagggaactgcatg

SEQ ID NO: 5276431 - DNA, 25 bp, Homo sapien
aaaatgcagggccactaggatggag

SEQ ID NO: 5276432 - DNA, 25 bp, Homo sapien
gcagttcgcctctgtgtctcgagta

SEQ ID NO: 5276433 - DNA, 25 bp, Homo sapien
gtctacattggtcttggtaaaatgc

SEQ ID NO: 5276434 - DNA, 25 bp, Homo sapien
gtctcgagtaatgagagtgtctaca

SEQ ID NO: 5276435 - DNA, 25 bp, Homo sapien
gaaaagcgcatgatcgcatagacgc

SEQ ID NO: 5276436 - DNA, 25 bp, Homo sapien
ccatagccatggcatgaggcttcca

SEQ ID NO: 5276437 - DNA, 25 bp, Homo sapien
gcatagacgcagtgcttgcgcctct

SEQ ID NO: 5276438 - DNA, 25 bp, Homo sapien
aattcgcagccactgctgatgcagg

SEQ ID NO: 5276439 - DNA, 25 bp, Homo sapien
caattccgcgttgatatccagtatg

SEQ ID NO: 5276440 - DNA, 25 bp, Homo sapien
tgtgttgacacccattaagtctccc

SEQ ID NO: 5276441 - DNA, 25 bp, Homo sapien
tgtgcagatgagatgacaacacggc

SEQ ID NO: 5276442 - DNA, 25 bp, Homo sapien
ccagtatgtcaaatcgctgtgcaga

SEQ ID NO: 5276443 - DNA, 25 bp, Homo sapien
cctccggccattccatcatagggct

SEQ ID NO: 5276444 - DNA, 25 bp, Homo sapien
gcaatgacaactggggggcaggggt

SEQ ID NO: 5276445 - DNA, 25 bp, Homo sapien
cgaggcaatgacaactggggggcag

SEQ ID NO: 5276446 - DNA, 25 bp, Homo sapien
cagcgaggcaatgacaactgggggg

SEQ ID NO: 5276447 - DNA, 25 bp, Homo sapien
gcgaggcaatgacaactggggggca

SEQ ID NO: 5276448 - DNA, 25 bp, Homo sapien
tactcctggtgtgtgggagagcaag

SEQ ID NO: 5276449 - DNA, 25 bp, Homo sapien
atgtggctgcgtactcctggtgtgt

SEQ ID NO: 5276450 - DNA, 25 bp, Homo sapien
cgtactcctggtgtgtgggagagca

SEQ ID NO: 5276451 - DNA, 25 bp, Homo sapien
tcatgtggctgcgtactcctggtgt

SEQ ID NO: 5276452 - DNA, 25 bp, Homo sapien
gttggcatctatgttttctgctccg

SEQ ID NO: 5276453 - DNA, 25 bp, Homo sapien
tctatgttttctgctccgactgtcc

SEQ ID NO: 5276454 - DNA, 25 bp, Homo sapien
tgctcctgttggcatctatgttttc

SEQ ID NO: 5276455 - DNA, 25 bp, Homo sapien
catcagtctggggaagtggaaccca

SEQ ID NO: 5276456 - DNA, 25 bp, Homo sapien
ggagcacggctctcatctttttcat

SEQ ID NO: 5276457 - DNA, 25 bp, Homo sapien
aggagcacggctctcatctttttca

SEQ ID NO: 5276458 - DNA, 25 bp, Homo sapien
caggagcacggctctcatctttttc

SEQ ID NO: 5276459 - DNA, 25 bp, Homo sapien
ggaggtggtaagtcacaggaatgac

SEQ ID NO: 5276460 - DNA, 25 bp, Homo sapien
ctcttgaggttgagacccgtctcct

SEQ ID NO: 5276461 - DNA, 25 bp, Homo sapien
ccgtctcctatggaggtggtaagtc

SEQ ID NO: 5276462 - DNA, 25 bp, Homo sapien
ttgagacccgtctcctatggaggtg

SEQ ID NO: 5276463 - DNA, 25 bp, Homo sapien
tttgcatgcgtggaaggatgaacac

SEQ ID NO: 5276464 - DNA, 25 bp, Homo sapien
cgtggaaggatgaacaccccagagg

SEQ ID NO: 5276465 - DNA, 25 bp, Homo sapien
ggagacaagaggaatctattttcac

SEQ ID NO: 5276466 - DNA, 25 bp, Homo sapien
tcctggctaggcgttgccgctactg

SEQ ID NO: 5276467 - DNA, 25 bp, Homo sapien
tgtctctgggtctgaactgtctgct

SEQ ID NO: 5276468 - DNA, 25 bp, Homo sapien
tgccgacactgcctatgtctctggg

SEQ ID NO: 5276469 - DNA, 25 bp, Homo sapien
gcttctcaggccaaaagacaggggt

SEQ ID NO: 5276470 - DNA, 25 bp, Homo sapien
ggctgaaggaacaccggtctctgcc

SEQ ID NO: 5276471 - DNA, 25 bp, Homo sapien
ggaccacgccagctgtttctgtcag

SEQ ID NO: 5276472 - DNA, 25 bp, Homo sapien
ctttgtgtgcatggtcgcctcgctg

SEQ ID NO: 5276473 - DNA, 25 bp, Homo sapien
caggatttgggtttccgctttctca

SEQ ID NO: 5276474 - DNA, 25 bp, Homo sapien
ggcagactcaattgatggccttggg

SEQ ID NO: 5276475 - DNA, 25 bp, Homo sapien
cctcttgcttgcaaagggttacagg

SEQ ID NO: 5276476 - DNA, 25 bp, Homo sapien
tcttcattggaccatttgactttct

SEQ ID NO: 5276477 - DNA, 25 bp, Homo sapien
gggacagtaggtctgattaattcca

SEQ ID NO: 5276478 - DNA, 25 bp, Homo sapien
ccttcctcttgcttgcaaagggtta

SEQ ID NO: 5276479 - DNA, 25 bp, Homo sapien
gatggaatgcagtcctcagacacct

SEQ ID NO: 5276480 - DNA, 25 bp, Homo sapien
agtgagacctgtaccagacctctga

SEQ ID NO: 5276481 - DNA, 25 bp, Homo sapien
aatgaggaccttagcccagaaccag

SEQ ID NO: 5276482 - DNA, 25 bp, Homo sapien
gcagcaatagaagcagcggcaggac

SEQ ID NO: 5276483 - DNA, 25 bp, Homo sapien
aataggacacttttagtcactagtc

SEQ ID NO: 5276484 - DNA, 25 bp, Homo sapien
gggttgaaaggctgacattcatggt

SEQ ID NO: 5276485 - DNA, 25 bp, Homo sapien
tcactagtctatatcccacaggcat

SEQ ID NO: 5276486 - DNA, 25 bp, Homo sapien
ttggtctgggttgaaaggctgacat

SEQ ID NO: 5276487 - DNA, 25 bp, Homo sapien
tatcctgagaccaatatatatacaa

SEQ ID NO: 5276488 - DNA, 25 bp, Homo sapien
gcctagattactgaacttatcttca

SEQ ID NO: 5276489 - DNA, 25 bp, Homo sapien
agataaccaaagagttcatttagca

SEQ ID NO: 5276490 - DNA, 25 bp, Homo sapien
tatcttcaaacccatatccctgctt

SEQ ID NO: 5276491 - DNA, 25 bp, Homo sapien
agcaccttggtggatgcagcgtctg

SEQ ID NO: 5276492 - DNA, 25 bp, Homo sapien
tactcaagcaccttggtggatgcag

SEQ ID NO: 5276493 - DNA, 25 bp, Homo sapien
tggatgcagcgtctgggtgatgttt

SEQ ID NO: 5276494 - DNA, 25 bp, Homo sapien
ggtgatgttttgcaaagtgcaaatg

SEQ ID NO: 5276495 - DNA, 25 bp, Homo sapien
tttctagaccccattcctgacattc

SEQ ID NO: 5276496 - DNA, 25 bp, Homo sapien
ccagggctagcactggatttgtcca

SEQ ID NO: 5276497 - DNA, 25 bp, Homo sapien
cattctctccagggctagcactgga

SEQ ID NO: 5276498 - DNA, 25 bp, Homo sapien
ctttctagaccccattcctgacatt

SEQ ID NO: 5276499 - DNA, 25 bp, Homo sapien
tgttatctttgattgcctggacaca

SEQ ID NO: 5276500 - DNA, 25 bp, Homo sapien
gtgcctgccttgtctgttatctttg

SEQ ID NO: 5276501 - DNA, 25 bp, Homo sapien
gttatctttgattgcctggacacac

SEQ ID NO: 5276502 - DNA, 25 bp, Homo sapien
tgaagccagtgcctgccttgtctgt

SEQ ID NO: 5276503 - DNA, 25 bp, Homo sapien
gccaccctcaatggtttagcagaag

SEQ ID NO: 5276504 - DNA, 25 bp, Homo sapien
gctcttccggtttacatgctcacaa

SEQ ID NO: 5276505 - DNA, 25 bp, Homo sapien
gaagacagtatctctgcgtcccggg

SEQ ID NO: 5276506 - DNA, 25 bp, Homo sapien
tctggtggcccaaatactgagtgtt

SEQ ID NO: 5276507 - DNA, 25 bp, Homo sapien
cccagttaataatttgcgttcattc

SEQ ID NO: 5276508 - DNA, 25 bp, Homo sapien
tgcgttcattctcaaagcagctcat

SEQ ID NO: 5276509 - DNA, 25 bp, Homo sapien
taatcaattctcttgcgtgctgccc

SEQ ID NO: 5276510 - DNA, 25 bp, Homo sapien
tagaaaacagctcttccgttaatca

SEQ ID NO: 5276511 - DNA, 25 bp, Homo sapien
gttcctctgggcatcgggtgcaaga

SEQ ID NO: 5276512 - DNA, 25 bp, Homo sapien
gcaagaagatgatgagcctctgatg

SEQ ID NO: 5276513 - DNA, 25 bp, Homo sapien
catcgggtgcaagaagatgatgagc

SEQ ID NO: 5276514 - DNA, 25 bp, Homo sapien
tcctctgggcatcgggtgcaagaag

SEQ ID NO: 5276515 - DNA, 25 bp, Homo sapien
gacaggaacttctaagctaggagaa

SEQ ID NO: 5276516 - DNA, 25 bp, Homo sapien
agaagagaatgcacggccaaggctc

SEQ ID NO: 5276517 - DNA, 25 bp, Homo sapien
tctagaggccctaatacaaagacag

SEQ ID NO: 5276518 - DNA, 25 bp, Homo sapien
ggaagccctcgaattccaccatgga

SEQ ID NO: 5276519 - DNA, 25 bp, Homo sapien
gctgcaaagctgttattctctttgg

SEQ ID NO: 5276520 - DNA, 25 bp, Homo sapien
ctttcatcaacctggctgccaacca

SEQ ID NO: 5276521 - DNA, 25 bp, Homo sapien
ttctcctttcatcaacctggctgcc

SEQ ID NO: 5276522 - DNA, 25 bp, Homo sapien
gctgctgcaaagctgttattctctt

SEQ ID NO: 5276523 - DNA, 25 bp, Homo sapien
ttctgcaaacttcaattcagttgtt

SEQ ID NO: 5276524 - DNA, 25 bp, Homo sapien
caggacaactgccatgggtcgagtt

SEQ ID NO: 5276525 - DNA, 25 bp, Homo sapien
aagcttaacatcattatactcagga

SEQ ID NO: 5276526 - DNA, 25 bp, Homo sapien
ggtcgagttgttactacagtcccac

SEQ ID NO: 5276527 - DNA, 25 bp, Homo sapien
gaagcccgtagggaccaccaagcat

SEQ ID NO: 5276528 - DNA, 25 bp, Homo sapien
caaggcgtcataaaagctagagttg

SEQ ID NO: 5276529 - DNA, 25 bp, Homo sapien
agtcatcaaggcgtcataaaagcta

SEQ ID NO: 5276530 - DNA, 25 bp, Homo sapien
cattagtcatcaaggcgtcataaaa

SEQ ID NO: 5276531 - DNA, 25 bp, Homo sapien
ctgtccctcgggactttgatacaat

SEQ ID NO: 5276532 - DNA, 25 bp, Homo sapien
ggtcctgtccctcgggactttgata

SEQ ID NO: 5276533 - DNA, 25 bp, Homo sapien
tcctgtccctcgggactttgataca

SEQ ID NO: 5276534 - DNA, 25 bp, Homo sapien
tgtccctcgggactttgatacaatt

SEQ ID NO: 5276535 - DNA, 25 bp, Homo sapien
agggagccctgtttagggacttcat

SEQ ID NO: 5276536 - DNA, 25 bp, Homo sapien
ccctgtttagggacttcatctggaa

SEQ ID NO: 5276537 - DNA, 25 bp, Homo sapien
acgtgaataaattctcgttgggaag

SEQ ID NO: 5276538 - DNA, 25 bp, Homo sapien
tctggatagtgccttataaagcatg

SEQ ID NO: 5276539 - DNA, 25 bp, Homo sapien
gctgtgagctgactggctcttcttc

SEQ ID NO: 5276540 - DNA, 25 bp, Homo sapien
tcctccaggggacgacccagaccat

SEQ ID NO: 5276541 - DNA, 25 bp, Homo sapien
ctgcatctgctgtgagctgactggc

SEQ ID NO: 5276542 - DNA, 25 bp, Homo sapien
tccaggggacgacccagaccatcat

SEQ ID NO: 5276543 - DNA, 25 bp, Homo sapien
ctggcaggagaaagaacgccaagct

SEQ ID NO: 5276544 - DNA, 25 bp, Homo sapien
tggcaggagaaagaacgccaagctg

SEQ ID NO: 5276545 - DNA, 25 bp, Homo sapien
gctggcaggagaaagaacgccaagc

SEQ ID NO: 5276546 - DNA, 25 bp, Homo sapien
tggacggcctcgaccctgatgctga

SEQ ID NO: 5276547 - DNA, 25 bp, Homo sapien
tgaaattctcttccacgactggacg

SEQ ID NO: 5276548 - DNA, 25 bp, Homo sapien
ggcctcgaccctgatgctgaggctt

SEQ ID NO: 5276549 - DNA, 25 bp, Homo sapien
aattctcttccacgactggacggcc

SEQ ID NO: 5276550 - DNA, 25 bp, Homo sapien
gccattcatcatggtccgtgcaata

SEQ ID NO: 5276551 - DNA, 25 bp, Homo sapien
taaacaagaagggagattgcacagc

SEQ ID NO: 5276552 - DNA, 25 bp, Homo sapien
tcatggtccgtgcaataaacaagaa

SEQ ID NO: 5276553 - DNA, 25 bp, Homo sapien
aagggagattgcacagcagcgtgca

SEQ ID NO: 5276554 - DNA, 25 bp, Homo sapien
tctgtgttgaatactggcctgggaa

SEQ ID NO: 5276555 - DNA, 25 bp, Homo sapien
cttggtaaatggagggagtacgatc

SEQ ID NO: 5276556 - DNA, 25 bp, Homo sapien
cctgggaacttgctcatcagttgga

SEQ ID NO: 5276557 - DNA, 25 bp, Homo sapien
tgtcggcatctactctcttgggtgt

SEQ ID NO: 5276558 - DNA, 25 bp, Homo sapien
tgggccacgtcagtttcccaaattc

SEQ ID NO: 5276559 - DNA, 25 bp, Homo sapien
gccacgtcagtttcccaaattccaa

SEQ ID NO: 5276560 - DNA, 25 bp, Homo sapien
gaagatgggccacgtcagtttccca

SEQ ID NO: 5276561 - DNA, 25 bp, Homo sapien
ccaggaagatgggccacgtcagttt

SEQ ID NO: 5276562 - DNA, 25 bp, Homo sapien
catgggtgtgagtggctcctttgga

SEQ ID NO: 5276563 - DNA, 25 bp, Homo sapien
aaagaataaacagtctcagaaggag

SEQ ID NO: 5276564 - DNA, 25 bp, Homo sapien
cgagagtggattatattgcagctga

SEQ ID NO: 5276565 - DNA, 25 bp, Homo sapien
caaatcatttgaccccagactatgg

SEQ ID NO: 5276566 - DNA, 25 bp, Homo sapien
tggcagctgcagtcggaataggcac

SEQ ID NO: 5276567 - DNA, 25 bp, Homo sapien
tcattcgtagagtggctgaggagag

SEQ ID NO: 5276568 - DNA, 25 bp, Homo sapien
taggcacctccttgtgccatgaggg

SEQ ID NO: 5276569 - DNA, 25 bp, Homo sapien
atgtcaggacgccagcaagtggcag

SEQ ID NO: 5276570 - DNA, 25 bp, Homo sapien
ttccaatattggcagcgagcacgcg

SEQ ID NO: 5276571 - DNA, 25 bp, Homo sapien
tgttgtgatcaatgctaggacgctc

SEQ ID NO: 5276572 - DNA, 25 bp, Homo sapien
ggaagaaaggcaacggttcacgcga

SEQ ID NO: 5276573 - DNA, 25 bp, Homo sapien
cacagcccacaggacgaattccaat

SEQ ID NO: 5276574 - DNA, 25 bp, Homo sapien
cagccatgcagtagctgggtccatc

SEQ ID NO: 5276575 - DNA, 25 bp, Homo sapien
ccccaggggcttggatcatctggtt

SEQ ID NO: 5276576 - DNA, 25 bp, Homo sapien
tgcttgtaccccaggggcttggatc

SEQ ID NO: 5276577 - DNA, 25 bp, Homo sapien
cagtagctgggtccatccttgctgc

SEQ ID NO: 5276578 - DNA, 25 bp, Homo sapien
gggtgcacactctgggatcctgggt

SEQ ID NO: 5276579 - DNA, 25 bp, Homo sapien
gatcctgggtcccatcgtgcagagg

SEQ ID NO: 5276580 - DNA, 25 bp, Homo sapien
ctgggtcccatcgtgcagaggctgc

SEQ ID NO: 5276581 - DNA, 25 bp, Homo sapien
agacaaagtgggtgcacactctggg

SEQ ID NO: 5276582 - DNA, 25 bp, Homo sapien
gacaggaagagtgtttttctctctg

SEQ ID NO: 5276583 - DNA, 25 bp, Homo sapien
aagatgaaggatcctgcacctccat

SEQ ID NO: 5276584 - DNA, 25 bp, Homo sapien
ttgaaagatgaaggatcctgcacct

SEQ ID NO: 5276585 - DNA, 25 bp, Homo sapien
ctttgccatccttgaaagatgaagg

SEQ ID NO: 5276586 - DNA, 25 bp, Homo sapien
ttctttgccatccttgaaagatgaa

SEQ ID NO: 5276587 - DNA, 25 bp, Homo sapien
gactctttgtacgagctgtaggaag

SEQ ID NO: 5276588 - DNA, 25 bp, Homo sapien
gatcttcaggtcatggccaattgct

SEQ ID NO: 5276589 - DNA, 25 bp, Homo sapien
tgtatgagcttgtagatcttcaggt

SEQ ID NO: 5276590 - DNA, 25 bp, Homo sapien
ctgtaggaagatgtttgtatgagct

SEQ ID NO: 5276591 - DNA, 25 bp, Homo sapien
ggcgtcactgctgcatgctcatttc

SEQ ID NO: 5276592 - DNA, 25 bp, Homo sapien
tgctcatttccttcgccaatcactg

SEQ ID NO: 5276593 - DNA, 25 bp, Homo sapien
cacctttcagcatcaggcgtcactg

SEQ ID NO: 5276594 - DNA, 25 bp, Homo sapien
ttcgccaatcactgcataaacatga

SEQ ID NO: 5276595 - DNA, 25 bp, Homo sapien
ctgtaaggccttttctatcaggata

SEQ ID NO: 5276596 - DNA, 25 bp, Homo sapien
atcaggatagcatactttaaagagc

SEQ ID NO: 5276597 - DNA, 25 bp, Homo sapien
tctatcaggatagcatactttaaag

SEQ ID NO: 5276598 - DNA, 25 bp, Homo sapien
ggccttttctatcaggatagcatac

SEQ ID NO: 5276599 - DNA, 25 bp, Homo sapien
aataacaattcctgccacggaagat

SEQ ID NO: 5276600 - DNA, 25 bp, Homo sapien
ctggagaggaacataattttccttt

SEQ ID NO: 5276601 - DNA, 25 bp, Homo sapien
taaaaataacaattcctgccacgga

SEQ ID NO: 5276602 - DNA, 25 bp, Homo sapien
acaattcctgccacggaagatgaat

SEQ ID NO: 5276603 - DNA, 25 bp, Homo sapien
gcttcatccactactggaagtgtca

SEQ ID NO: 5276604 - DNA, 25 bp, Homo sapien
agcccatcttcaaggagacacttgt

SEQ ID NO: 5276605 - DNA, 25 bp, Homo sapien
gtagtggatgatgcactctgtgcag

SEQ ID NO: 5276606 - DNA, 25 bp, Homo sapien
tgtgcacacagtgcttcatccacta

SEQ ID NO: 5276607 - DNA, 25 bp, Homo sapien
cctgttattggaatgtccagatccc

SEQ ID NO: 5276608 - DNA, 25 bp, Homo sapien
tgcctctgtattgtccagtgcagct

SEQ ID NO: 5276609 - DNA, 25 bp, Homo sapien
tctgttttgtcctagtgtcactgta

SEQ ID NO: 5276610 - DNA, 25 bp, Homo sapien
agatccctgctgtatccactgctgg

SEQ ID NO: 5276611 - DNA, 25 bp, Homo sapien
ccttcagatcttactcgcacgtctt

SEQ ID NO: 5276612 - DNA, 25 bp, Homo sapien
ctcgcacgtcttgtggcttggcaac

SEQ ID NO: 5276613 - DNA, 25 bp, Homo sapien
tgtatgcagtttcctccttcagatc

SEQ ID NO: 5276614 - DNA, 25 bp, Homo sapien
tccaggatctctggggtgtatgcag

SEQ ID NO: 5276615 - DNA, 25 bp, Homo sapien
caatctgtatgttggactcctaaga

SEQ ID NO: 5276616 - DNA, 25 bp, Homo sapien
catgtaatatcttttgttacctgat

SEQ ID NO: 5276617 - DNA, 25 bp, Homo sapien
tgtgctcatgcttactctgcatgta

SEQ ID NO: 5276618 - DNA, 25 bp, Homo sapien
accagcacgtactcacataagcaca

SEQ ID NO: 5276619 - DNA, 25 bp, Homo sapien
gacaccgcttaaagaagtgcactga

SEQ ID NO: 5276620 - DNA, 25 bp, Homo sapien
tatctttgaggcctggacaccgctt

SEQ ID NO: 5276621 - DNA, 25 bp, Homo sapien
ttgactagcctgcaagatgacgctg

SEQ ID NO: 5276622 - DNA, 25 bp, Homo sapien
taagtccatggacttgattctcctg

SEQ ID NO: 5276623 - DNA, 25 bp, Homo sapien
agcttggcatagaatggaagctcgg

SEQ ID NO: 5276624 - DNA, 25 bp, Homo sapien
tcttatgcctatgaagagcttggca

SEQ ID NO: 5276625 - DNA, 25 bp, Homo sapien
tcattaggcaatttgtttagcttct

SEQ ID NO: 5276626 - DNA, 25 bp, Homo sapien
agcttgtcttgagcagttttttact

SEQ ID NO: 5276627 - DNA, 25 bp, Homo sapien
tagtgacctgacagttcccatcggt

SEQ ID NO: 5276628 - DNA, 25 bp, Homo sapien
gactgatgtgaactgtccaacttac

SEQ ID NO: 5276629 - DNA, 25 bp, Homo sapien
ttccttgcaaaagggcagctacacc

SEQ ID NO: 5276630 - DNA, 25 bp, Homo sapien
gactgccagagatagacttccttgc

SEQ ID NO: 5276631 - DNA, 25 bp, Homo sapien
ggtagtgggctgaaaggaaatccac

SEQ ID NO: 5276632 - DNA, 25 bp, Homo sapien
aatccacggcgctattatggtataa

SEQ ID NO: 5276633 - DNA, 25 bp, Homo sapien
gaaagcagcgctgaggttcctggaa

SEQ ID NO: 5276634 - DNA, 25 bp, Homo sapien
catctgtgctgcctttatacagaaa

SEQ ID NO: 5276635 - DNA, 25 bp, Homo sapien
gaaactgaggctagtgtcacccatg

SEQ ID NO: 5276636 - DNA, 25 bp, Homo sapien
cagtgagaaaccatcattgaggccg

SEQ ID NO: 5276637 - DNA, 25 bp, Homo sapien
gagtccccagaagctacaagcacag

SEQ ID NO: 5276638 - DNA, 25 bp, Homo sapien
agtgatcaagggtgaggagtcccca

SEQ ID NO: 5276639 - DNA, 25 bp, Homo sapien
gcagcaatgccaacttgcagaccca

SEQ ID NO: 5276640 - DNA, 25 bp, Homo sapien
cagacatgatcctgtgtctgtccca

SEQ ID NO: 5276641 - DNA, 25 bp, Homo sapien
tccctgacaaatgaactatagtgct

SEQ ID NO: 5276642 - DNA, 25 bp, Homo sapien
tgtcccactcgaaaacattcaatgg

SEQ ID NO: 5276643 - DNA, 25 bp, Homo sapien
tctgccgtagctcctactgtctcag

SEQ ID NO: 5276644 - DNA, 25 bp, Homo sapien
ctctgccgtagctcctactgtctca

SEQ ID NO: 5276645 - DNA, 25 bp, Homo sapien
ccgtagctcctactgtctcagtcat

SEQ ID NO: 5276646 - DNA, 25 bp, Homo sapien
tgccgtagctcctactgtctcagtc

SEQ ID NO: 5276647 - DNA, 25 bp, Homo sapien
agtatcaggtagtgaagatgtcccc

SEQ ID NO: 5276648 - DNA, 25 bp, Homo sapien
cagtatcaggtagtgaagatgtccc

SEQ ID NO: 5276649 - DNA, 25 bp, Homo sapien
tatcaggtagtgaagatgtcccccc

SEQ ID NO: 5276650 - DNA, 25 bp, Homo sapien
caggtagtgaagatgtcccccccat

SEQ ID NO: 5276651 - DNA, 25 bp, Homo sapien
ttggatctaaacctgtaccatgagg

SEQ ID NO: 5276652 - DNA, 25 bp, Homo sapien
cctgttatcttacggtaggtggtca

SEQ ID NO: 5276653 - DNA, 25 bp, Homo sapien
tgtagatgagaagcggcatacagga

SEQ ID NO: 5276654 - DNA, 25 bp, Homo sapien
gaggtctctcaaacttggaatggga

SEQ ID NO: 5276655 - DNA, 25 bp, Homo sapien
ttccttcctgcaaggaaatccacac

SEQ ID NO: 5276656 - DNA, 25 bp, Homo sapien
aggaaatccacacactcttatttca

SEQ ID NO: 5276657 - DNA, 25 bp, Homo sapien
tccttcctgcaaggaaatccacaca

SEQ ID NO: 5276658 - DNA, 25 bp, Homo sapien
atccacacactcttatttcatccgg

SEQ ID NO: 5276659 - DNA, 25 bp, Homo sapien
gcaaacagatccctgagttctaagt

SEQ ID NO: 5276660 - DNA, 25 bp, Homo sapien
ttccactgcctttgcaaacagatcc

SEQ ID NO: 5276661 - DNA, 25 bp, Homo sapien
ctgagttctaagtgaatcagagcct

SEQ ID NO: 5276662 - DNA, 25 bp, Homo sapien
gcctttgcaaacagatccctgagtt

SEQ ID NO: 5276663 - DNA, 25 bp, Homo sapien
gaacatgtaagtgctgtcagcctcc

SEQ ID NO: 5276664 - DNA, 25 bp, Homo sapien
taagtcaacaccctcaagaggcagt

SEQ ID NO: 5276665 - DNA, 25 bp, Homo sapien
ctggccatgcctaagtcaacaccct

SEQ ID NO: 5276666 - DNA, 25 bp, Homo sapien
tgaacatgtaagtgctgtcagcctc

SEQ ID NO: 5276667 - DNA, 25 bp, Homo sapien
tggctcccaaggctacattgttact

SEQ ID NO: 5276668 - DNA, 25 bp, Homo sapien
tgtctgccagcattatgcatcgagt

SEQ ID NO: 5276669 - DNA, 25 bp, Homo sapien
catttctctggcaatagatgtggct

SEQ ID NO: 5276670 - DNA, 25 bp, Homo sapien
tgcatcgagttacatctcttcccgg

SEQ ID NO: 5276671 - DNA, 25 bp, Homo sapien
ctgaagagcaagcatgaagatggga

SEQ ID NO: 5276672 - DNA, 25 bp, Homo sapien
tacttgttgaggctacagacaggcc

SEQ ID NO: 5276673 - DNA, 25 bp, Homo sapien
gcagaagaaaatccgatgagagagc

SEQ ID NO: 5276674 - DNA, 25 bp, Homo sapien
gattcctaggaggaggtacaagcct

SEQ ID NO: 5276675 - DNA, 25 bp, Homo sapien
gatttgctgagatacacagcagatc

SEQ ID NO: 5276676 - DNA, 25 bp, Homo sapien
cacagcagatctttcaaccaaggct

SEQ ID NO: 5276677 - DNA, 25 bp, Homo sapien
gctgagatacacagcagatctttca

SEQ ID NO: 5276678 - DNA, 25 bp, Homo sapien
gatacacagcagatctttcaaccaa

SEQ ID NO: 5276679 - DNA, 25 bp, Homo sapien
ctcatttggcctgggatgcaggaag

SEQ ID NO: 5276680 - DNA, 25 bp, Homo sapien
tcatttggcctgggatgcaggaagc

SEQ ID NO: 5276681 - DNA, 25 bp, Homo sapien
catttggcctgggatgcaggaagct

SEQ ID NO: 5276682 - DNA, 25 bp, Homo sapien
atttggcctgggatgcaggaagctt

SEQ ID NO: 5276683 - DNA, 25 bp, Homo sapien
tattctggtcttgttgaggtattcg

SEQ ID NO: 5276684 - DNA, 25 bp, Homo sapien
attctggtcttgttgaggtattcgg

SEQ ID NO: 5276685 - DNA, 25 bp, Homo sapien
atattctggtcttgttgaggtattc

SEQ ID NO: 5276686 - DNA, 25 bp, Homo sapien
tgaaagcagctgaacattatcccgt

SEQ ID NO: 5276687 - DNA, 25 bp, Homo sapien
acctgcacgccttccattcgggaac

SEQ ID NO: 5276688 - DNA, 25 bp, Homo sapien
gatctcttgccagcagctagcttgg

SEQ ID NO: 5276689 - DNA, 25 bp, Homo sapien
tgttggccagtcagagcagtaaaag

SEQ ID NO: 5276690 - DNA, 25 bp, Homo sapien
agaagctcagccaaattatctgaaa

SEQ ID NO: 5276691 - DNA, 25 bp, Homo sapien
gaagctcagccaaattatctgaaag

SEQ ID NO: 5276692 - DNA, 25 bp, Homo sapien
aagctcagccaaattatctgaaagt

SEQ ID NO: 5276693 - DNA, 25 bp, Homo sapien
gagaagctcagccaaattatctgaa

SEQ ID NO: 5276694 - DNA, 25 bp, Homo sapien
caccataaggtaaaactgctttata

SEQ ID NO: 5276695 - DNA, 25 bp, Homo sapien
aatacagagtcttcatatagcttca

SEQ ID NO: 5276696 - DNA, 25 bp, Homo sapien
ttcagtatcctcacaccataaggta

SEQ ID NO: 5276697 - DNA, 25 bp, Homo sapien
tcctcacaccataaggtaaaactgc

SEQ ID NO: 5276698 - DNA, 25 bp, Homo sapien
ccacagtgatctgcgaagtttcacc

SEQ ID NO: 5276699 - DNA, 25 bp, Homo sapien
cccctacatagatggtcagattcaa

SEQ ID NO: 5276700 - DNA, 25 bp, Homo sapien
gtttcacccctacatagatggtcag

SEQ ID NO: 5276701 - DNA, 25 bp, Homo sapien
tgcgaagtttcacccctacatagat

SEQ ID NO: 5276702 - DNA, 25 bp, Homo sapien
aaaacatatggagtacttcacgaat

SEQ ID NO: 5276703 - DNA, 25 bp, Homo sapien
ctggccctgggtggtcgttgttcat

SEQ ID NO: 5276704 - DNA, 25 bp, Homo sapien
tcttgaatctctatcagctggccct

SEQ ID NO: 5276705 - DNA, 25 bp, Homo sapien
aatgcttccggtattacagaaaggg

SEQ ID NO: 5276706 - DNA, 25 bp, Homo sapien
gaccatgcgtcagaaaatggttaca

SEQ ID NO: 5276707 - DNA, 25 bp, Homo sapien
gagagcctgatctgccgacatgact

SEQ ID NO: 5276708 - DNA, 25 bp, Homo sapien
atgccattacctccactgtgaggaa

SEQ ID NO: 5276709 - DNA, 25 bp, Homo sapien
tggggattagctatgacaattctcc

SEQ ID NO: 5276710 - DNA, 25 bp, Homo sapien
gaaaacattggctgtatcttaggga

SEQ ID NO: 5276711 - DNA, 25 bp, Homo sapien
tccagggccaatggatagtttatgg

SEQ ID NO: 5276712 - DNA, 25 bp, Homo sapien
tatggtagtggtcctagctctgtgc

SEQ ID NO: 5276713 - DNA, 25 bp, Homo sapien
ttccttggaggaatgtgtaaggtac

SEQ ID NO: 5276714 - DNA, 25 bp, Homo sapien
tcgttgagtaagcaggttgtggatc

SEQ ID NO: 5276715 - DNA, 25 bp, Homo sapien
gctccttgctgaacttatacgtttt

SEQ ID NO: 5276716 - DNA, 25 bp, Homo sapien
taagtcccataaaggcgatgattcg

SEQ ID NO: 5276717 - DNA, 25 bp, Homo sapien
gatgattcggggagacccactttcc

SEQ ID NO: 5276718 - DNA, 25 bp, Homo sapien
aatcctatacattctctttcagggc

SEQ ID NO: 5276719 - DNA, 25 bp, Homo sapien
gacgtacattcttaggatatacagg

SEQ ID NO: 5276720 - DNA, 25 bp, Homo sapien
caggataaacacagtatttcatttc

SEQ ID NO: 5276721 - DNA, 25 bp, Homo sapien
gggcttgcagctgacgtacattctt

SEQ ID NO: 5276722 - DNA, 25 bp, Homo sapien
ttaggatatacaggataaacacagt

SEQ ID NO: 5276723 - DNA, 25 bp, Homo sapien
cttctagcttctcatcaaggtgaat

SEQ ID NO: 5276724 - DNA, 25 bp, Homo sapien
ggctgattcttcataatggctattt

SEQ ID NO: 5276725 - DNA, 25 bp, Homo sapien
tcaccttctagcttctcatcaaggt

SEQ ID NO: 5276726 - DNA, 25 bp, Homo sapien
ttagggtaacacattcttggctgat

SEQ ID NO: 5276727 - DNA, 25 bp, Homo sapien
atttgtctggtaagctcttgaggag

SEQ ID NO: 5276728 - DNA, 25 bp, Homo sapien
tatatttgtctggtaagctcttgag

SEQ ID NO: 5276729 - DNA, 25 bp, Homo sapien
gaaaacttcatccagcatatattta

SEQ ID NO: 5276730 - DNA, 25 bp, Homo sapien
gaggctcctgtaactcattttctgt

SEQ ID NO: 5276731 - DNA, 25 bp, Homo sapien
tgcaaaatgctccagcaggcgagtg

SEQ ID NO: 5276732 - DNA, 25 bp, Homo sapien
gggctccaggcatctagaatgaggg

SEQ ID NO: 5276733 - DNA, 25 bp, Homo sapien
gatgctccaggcttctgtactacaa

SEQ ID NO: 5276734 - DNA, 25 bp, Homo sapien
ggcgggtaaatcaagtgagctgtct

SEQ ID NO: 5276735 - DNA, 25 bp, Homo sapien
tctctgtgacagctgggtatgtccc

SEQ ID NO: 5276736 - DNA, 25 bp, Homo sapien
gacagctgggtatgtcccctctgaa

SEQ ID NO: 5276737 - DNA, 25 bp, Homo sapien
tgtgacagctgggtatgtcccctct

SEQ ID NO: 5276738 - DNA, 25 bp, Homo sapien
tcccctctgaatctggttggccagc

SEQ ID NO: 5276739 - DNA, 25 bp, Homo sapien
gagtggactggaattgacttgtctg

SEQ ID NO: 5276740 - DNA, 25 bp, Homo sapien
tgtaaacggtgacttaattattcgc

SEQ ID NO: 5276741 - DNA, 25 bp, Homo sapien
tccttttacaacgtcgggctgcttc

SEQ ID NO: 5276742 - DNA, 25 bp, Homo sapien
aattattcgcctgcatccttttaca

SEQ ID NO: 5276743 - DNA, 25 bp, Homo sapien
ttggcgtgggctttttaggcaagaa

SEQ ID NO: 5276744 - DNA, 25 bp, Homo sapien
aggtcaccacgaaaagcttcagcag

SEQ ID NO: 5276745 - DNA, 25 bp, Homo sapien
tgcaggcactcatgtagacttggcg

SEQ ID NO: 5276746 - DNA, 25 bp, Homo sapien
gaatgaagcacatccgagaatgaaa

SEQ ID NO: 5276747 - DNA, 25 bp, Homo sapien
gcattcgccccatgtgtggactgca

SEQ ID NO: 5276748 - DNA, 25 bp, Homo sapien
taaattcagttgtttcccaggcatt

SEQ ID NO: 5276749 - DNA, 25 bp, Homo sapien
tgtggattcccgcagactctagaac

SEQ ID NO: 5276750 - DNA, 25 bp, Homo sapien
ggagccacccttgtagtctttctag

SEQ ID NO: 5276751 - DNA, 25 bp, Homo sapien
gaataacacccatgagttctccagt

SEQ ID NO: 5276752 - DNA, 25 bp, Homo sapien
gctcatgctgaataacacccatgag

SEQ ID NO: 5276753 - DNA, 25 bp, Homo sapien
aagctccagtgcatggccctctgcc

SEQ ID NO: 5276754 - DNA, 25 bp, Homo sapien
tctccagtgtcatcaagatgaaatc

SEQ ID NO: 5276755 - DNA, 25 bp, Homo sapien
agggacagccagactgagatctctg

SEQ ID NO: 5276756 - DNA, 25 bp, Homo sapien
gagatctctgaattcacatagcctc

SEQ ID NO: 5276757 - DNA, 25 bp, Homo sapien
ttaagggacagccagactgagatct

SEQ ID NO: 5276758 - DNA, 25 bp, Homo sapien
gggagtctccatatgccaccgaggc

SEQ ID NO: 5276759 - DNA, 25 bp, Homo sapien
tacaagcaggttatatgagtgacaa

SEQ ID NO: 5276760 - DNA, 25 bp, Homo sapien
gcaatgtcgtttcctcagtttcctg

SEQ ID NO: 5276761 - DNA, 25 bp, Homo sapien
gggacttataccctagaacagcact

SEQ ID NO: 5276762 - DNA, 25 bp, Homo sapien
tccctaagaagcaaggcatgtgagt

SEQ ID NO: 5276763 - DNA, 25 bp, Homo sapien
agcctgcccaatgtcttagagcctc

SEQ ID NO: 5276764 - DNA, 25 bp, Homo sapien
ccagcctgcccaatgtcttagagcc

SEQ ID NO: 5276765 - DNA, 25 bp, Homo sapien
ctgcccaatgtcttagagcctccgt

SEQ ID NO: 5276766 - DNA, 25 bp, Homo sapien
cctgcccaatgtcttagagcctccg

SEQ ID NO: 5276767 - DNA, 25 bp, Homo sapien
aggacgactcataccgaaagccggg

SEQ ID NO: 5276768 - DNA, 25 bp, Homo sapien
acctgacagagcttttgcttctatg

SEQ ID NO: 5276769 - DNA, 25 bp, Homo sapien
cctttgtttgctggtgcaggtttga

SEQ ID NO: 5276770 - DNA, 25 bp, Homo sapien
gaacatcaggacgactcataccgaa

SEQ ID NO: 5276771 - DNA, 25 bp, Homo sapien
acgcgattggtctgaaatgatgttc

SEQ ID NO: 5276772 - DNA, 25 bp, Homo sapien
ctcacataggaacgcgattggtctg

SEQ ID NO: 5276773 - DNA, 25 bp, Homo sapien
tctctcacataggaacgcgattggt

SEQ ID NO: 5276774 - DNA, 25 bp, Homo sapien
taggaacgcgattggtctgaaatga

SEQ ID NO: 5276775 - DNA, 25 bp, Homo sapien
cttagaagatttcgtgtgctcaact

SEQ ID NO: 5276776 - DNA, 25 bp, Homo sapien
ccagagacaagatgcgcaaccattc

SEQ ID NO: 5276777 - DNA, 25 bp, Homo sapien
agatttcgtgtgctcaacttcactg

SEQ ID NO: 5276778 - DNA, 25 bp, Homo sapien
acttcactgaatcatcaatgaattt

SEQ ID NO: 5276779 - DNA, 25 bp, Homo sapien
gagtaacggcaccttcaccttgaat

SEQ ID NO: 5276780 - DNA, 25 bp, Homo sapien
aaatccttgtcatgagagtaacggc

SEQ ID NO: 5276781 - DNA, 25 bp, Homo sapien
ccttctaattacagctgaaataaaa

SEQ ID NO: 5276782 - DNA, 25 bp, Homo sapien
ctggatcattgaaacgagaagtact

SEQ ID NO: 5276783 - DNA, 25 bp, Homo sapien
tgttagtgtgtttaggtttacagaa

SEQ ID NO: 5276784 - DNA, 25 bp, Homo sapien
gtgtgtttaggtttacagaacaatg

SEQ ID NO: 5276785 - DNA, 25 bp, Homo sapien
tagtgtgtttaggtttacagaacaa

SEQ ID NO: 5276786 - DNA, 25 bp, Homo sapien
ttctgttagtgtgtttaggtttaca

SEQ ID NO: 5276787 - DNA, 25 bp, Homo sapien
ctgcaagggtgatatcttcttcccc

SEQ ID NO: 5276788 - DNA, 25 bp, Homo sapien
tgcaagggtgatatcttcttcccca

SEQ ID NO: 5276789 - DNA, 25 bp, Homo sapien
catgataccgcttccaccatcattg

SEQ ID NO: 5276790 - DNA, 25 bp, Homo sapien
cttcttccccatgataccgcttcca

SEQ ID NO: 5276791 - DNA, 25 bp, Homo sapien
atctatgtgcatttgatcatgtaga

SEQ ID NO: 5276792 - DNA, 25 bp, Homo sapien
cacatcatggaaggtctttcgatga

SEQ ID NO: 5276793 - DNA, 25 bp, Homo sapien
gccacatcatggaaggtctttcgat

SEQ ID NO: 5276794 - DNA, 25 bp, Homo sapien
tgatcatgtagacgtccattctttt

SEQ ID NO: 5276795 - DNA, 25 bp, Homo sapien
gagactgggatgaacatgcacagaa

SEQ ID NO: 5276796 - DNA, 25 bp, Homo sapien
gactgggatgaacatgcacagaaat

SEQ ID NO: 5276797 - DNA, 25 bp, Homo sapien
agactgggatgaacatgcacagaaa

SEQ ID NO: 5276798 - DNA, 25 bp, Homo sapien
caggtcctaaagatgctggtaaatc

SEQ ID NO: 5276799 - DNA, 25 bp, Homo sapien
ctaaagatgctggtaaatccgacat

SEQ ID NO: 5276800 - DNA, 25 bp, Homo sapien
aggcaggtcctaaagatgctggtaa

SEQ ID NO: 5276801 - DNA, 25 bp, Homo sapien
agggcaggcaggtcctaaagatgct

SEQ ID NO: 5276802 - DNA, 25 bp, Homo sapien
taagccatgatggaataattagcat

SEQ ID NO: 5276803 - DNA, 25 bp, Homo sapien
caaacaactataaaacagggtgaat

SEQ ID NO: 5276804 - DNA, 25 bp, Homo sapien
caaggtcaaaccatacgtgcgtgga

SEQ ID NO: 5276805 - DNA, 25 bp, Homo sapien
tcccggcactatttgttagagacta

SEQ ID NO: 5276806 - DNA, 25 bp, Homo sapien
tgtgaaagccttccattgtgtgtag

SEQ ID NO: 5276807 - DNA, 25 bp, Homo sapien
aagccttccattgtgtgtaggtggc

SEQ ID NO: 5276808 - DNA, 25 bp, Homo sapien
gggtgcagggaattgctgtgaaagc

SEQ ID NO: 5276809 - DNA, 25 bp, Homo sapien
ctatcctaatcctggagacctgggc

SEQ ID NO: 5276810 - DNA, 25 bp, Homo sapien
cagtccatagtgtacgctcttaaag

SEQ ID NO: 5276811 - DNA, 25 bp, Homo sapien
tggagcatggactttctacacgaca

SEQ ID NO: 5276812 - DNA, 25 bp, Homo sapien
caatgctccagttgttaaaagtgct

SEQ ID NO: 5276813 - DNA, 25 bp, Homo sapien
gcaataaactgtccatgccagagga

SEQ ID NO: 5276814 - DNA, 25 bp, Homo sapien
gctctttctggcgtcttggtgtatg

SEQ ID NO: 5276815 - DNA, 25 bp, Homo sapien
tggctaccagaaacacacaggtgga

SEQ ID NO: 5276816 - DNA, 25 bp, Homo sapien
cataactgtgttacagtgggaggaa

SEQ ID NO: 5276817 - DNA, 25 bp, Homo sapien
taacagtgtccctcataactgtgtt

SEQ ID NO: 5276818 - DNA, 25 bp, Homo sapien
gctgctacctctaccgtgttttcca

SEQ ID NO: 5276819 - DNA, 25 bp, Homo sapien
tattcaaaatgcatcgggcatacag

SEQ ID NO: 5276820 - DNA, 25 bp, Homo sapien
cagctctgttacatgatattcaaaa

SEQ ID NO: 5276821 - DNA, 25 bp, Homo sapien
gctacctctaccgtgttttccacta

SEQ ID NO: 5276822 - DNA, 25 bp, Homo sapien
aaggcctgtacactggtcaagagca

SEQ ID NO: 5276823 - DNA, 25 bp, Homo sapien
aacagaagattcatcagaagacctg

SEQ ID NO: 5276824 - DNA, 25 bp, Homo sapien
gcaaaggcctgtacactggtcaaga

SEQ ID NO: 5276825 - DNA, 25 bp, Homo sapien
ttcatcagaagacctgcaaaggcct

SEQ ID NO: 5276826 - DNA, 25 bp, Homo sapien
ctggcatgtcccttagtaactccag

SEQ ID NO: 5276827 - DNA, 25 bp, Homo sapien
tggcatgtcccttagtaactccagc

SEQ ID NO: 5276828 - DNA, 25 bp, Homo sapien
cactggcatgtcccttagtaactcc

SEQ ID NO: 5276829 - DNA, 25 bp, Homo sapien
actggcatgtcccttagtaactcca

SEQ ID NO: 5276830 - DNA, 25 bp, Homo sapien
tgctcagtgccgctcagtgaatctc

SEQ ID NO: 5276831 - DNA, 25 bp, Homo sapien
tggcctttacaccactgtctgagtg

SEQ ID NO: 5276832 - DNA, 25 bp, Homo sapien
ggagaagatgccaaaccacggtgat

SEQ ID NO: 5276833 - DNA, 25 bp, Homo sapien
tcaacttgagactttgtggagaaga

SEQ ID NO: 5276834 - DNA, 25 bp, Homo sapien
tgaaggaggaaattagacaaggatt

SEQ ID NO: 5276835 - DNA, 25 bp, Homo sapien
tctgcagaagagctaatgcctgaga

SEQ ID NO: 5276836 - DNA, 25 bp, Homo sapien
ggaaattagacaaggattctgcaga

SEQ ID NO: 5276837 - DNA, 25 bp, Homo sapien
agacagacaggtatttgtcagtcac

SEQ ID NO: 5276838 - DNA, 25 bp, Homo sapien
ttcttcttaggctccatcgtctctt

SEQ ID NO: 5276839 - DNA, 25 bp, Homo sapien
tcttcttaggctccatcgtctcttc

SEQ ID NO: 5276840 - DNA, 25 bp, Homo sapien
ctccactcccgcatcagtaaggaca

SEQ ID NO: 5276841 - DNA, 25 bp, Homo sapien
atcagtaaggacagctcccataggc

SEQ ID NO: 5276842 - DNA, 25 bp, Homo sapien
actcccgcatcagtaaggacagctc

SEQ ID NO: 5276843 - DNA, 25 bp, Homo sapien
ctgtcaggtaagctctccactcccg

SEQ ID NO: 5276844 - DNA, 25 bp, Homo sapien
tggcatttggtggcatggttctcct

SEQ ID NO: 5276845 - DNA, 25 bp, Homo sapien
actccagtgtaggtggtgcctccag

SEQ ID NO: 5276846 - DNA, 25 bp, Homo sapien
tccagtgtaggtggtgcctccagct

SEQ ID NO: 5276847 - DNA, 25 bp, Homo sapien
ctggcatttggtggcatggttctcc

SEQ ID NO: 5276848 - DNA, 25 bp, Homo sapien
aatctgcaaaagactgatgtttttg

SEQ ID NO: 5276849 - DNA, 25 bp, Homo sapien
gcagcactaaccacattattgttat

SEQ ID NO: 5276850 - DNA, 25 bp, Homo sapien
tgttaagcccataaatcaatctgca

SEQ ID NO: 5276851 - DNA, 25 bp, Homo sapien
tcggtgctcattgcctaactcagag

SEQ ID NO: 5276852 - DNA, 25 bp, Homo sapien
gcgaccctcaggagaccaactgtta

SEQ ID NO: 5276853 - DNA, 25 bp, Homo sapien
atggtatattgaaggaccacccaga

SEQ ID NO: 5276854 - DNA, 25 bp, Homo sapien
tatatttgaaactgaactgcgaccc

SEQ ID NO: 5276855 - DNA, 25 bp, Homo sapien
tcacagaaactcacacaagtcatgg

SEQ ID NO: 5276856 - DNA, 25 bp, Homo sapien
tggtagtcacggctgctccaaactc

SEQ ID NO: 5276857 - DNA, 25 bp, Homo sapien
gacttggcaaaaatcaccctggtag

SEQ ID NO: 5276858 - DNA, 25 bp, Homo sapien
taaataaatgtggtcctgtcagcaa

SEQ ID NO: 5276859 - DNA, 25 bp, Homo sapien
cacagattgtacaggagttctaccc

SEQ ID NO: 5276860 - DNA, 25 bp, Homo sapien
caacacggctgcagtccatttgggt

SEQ ID NO: 5276861 - DNA, 25 bp, Homo sapien
aatcatcgaccactactccagaggg

SEQ ID NO: 5276862 - DNA, 25 bp, Homo sapien
cctgtctgaatcatcgaccactact

SEQ ID NO: 5276863 - DNA, 25 bp, Homo sapien
gataaagcaagctctcaacacggct

SEQ ID NO: 5276864 - DNA, 25 bp, Homo sapien
gaggtgccgtctgttttgatcatgg

SEQ ID NO: 5276865 - DNA, 25 bp, Homo sapien
tacaggaagccgttgagaagggcat

SEQ ID NO: 5276866 - DNA, 25 bp, Homo sapien
gatcatggctccatttgcctgctga

SEQ ID NO: 5276867 - DNA, 25 bp, Homo sapien
ggccaattcaggagcttcgtttttg

SEQ ID NO: 5276868 - DNA, 25 bp, Homo sapien
gcatgagaaagacttgcacccatga

SEQ ID NO: 5276869 - DNA, 25 bp, Homo sapien
caccagcggggagaggtcagcccac

SEQ ID NO: 5276870 - DNA, 25 bp, Homo sapien
ttaggaaccgcagtgaagagagagc

SEQ ID NO: 5276871 - DNA, 25 bp, Homo sapien
tcccatgttgcattccttcacttgt

SEQ ID NO: 5276872 - DNA, 25 bp, Homo sapien
cagccacattaggaaccgcagtgaa

SEQ ID NO: 5276873 - DNA, 25 bp, Homo sapien
ttgctccaggcacatgcctcatgga

SEQ ID NO: 5276874 - DNA, 25 bp, Homo sapien
aaactgtgcagagttgatatttgaa

SEQ ID NO: 5276875 - DNA, 25 bp, Homo sapien
gagttgatatttgaaaaccccattc

SEQ ID NO: 5276876 - DNA, 25 bp, Homo sapien
catggactgcaataacaatgggttc

SEQ ID NO: 5276877 - DNA, 25 bp, Homo sapien
cttgtggggctcaatcagacttgct

SEQ ID NO: 5276878 - DNA, 25 bp, Homo sapien
ttgattctttcccatacagaaaaat

SEQ ID NO: 5276879 - DNA, 25 bp, Homo sapien
gacaatggcaatgccaaatcagcct

SEQ ID NO: 5276880 - DNA, 25 bp, Homo sapien
tttccatgagtcctgccgagttgca

SEQ ID NO: 5276881 - DNA, 25 bp, Homo sapien
tgagggcctgcaatggaaatacggc

SEQ ID NO: 5276882 - DNA, 25 bp, Homo sapien
gccaacaccgactcaattttaaatg

SEQ ID NO: 5276883 - DNA, 25 bp, Homo sapien
actctggccaacaccgactcaattt

SEQ ID NO: 5276884 - DNA, 25 bp, Homo sapien
gcctgcaatggaaatacggctgtga

SEQ ID NO: 5276885 - DNA, 25 bp, Homo sapien
gattatgtgttccaagctgctagca

SEQ ID NO: 5276886 - DNA, 25 bp, Homo sapien
gagtcatttgagttacctgaggaac

SEQ ID NO: 5276887 - DNA, 25 bp, Homo sapien
gatgtggtgtaatgagcacacgcag

SEQ ID NO: 5276888 - DNA, 25 bp, Homo sapien
cctctagcaacagtcaggaaatcat

SEQ ID NO: 5276889 - DNA, 25 bp, Homo sapien
ctactgcattgttctattaatcatt

SEQ ID NO: 5276890 - DNA, 25 bp, Homo sapien
taatcatttgcatctttattggaga

SEQ ID NO: 5276891 - DNA, 25 bp, Homo sapien
tggagatttaaccattaatgcttca

SEQ ID NO: 5276892 - DNA, 25 bp, Homo sapien
gagatttaaccattaatgcttcaag

SEQ ID NO: 5276893 - DNA, 25 bp, Homo sapien
gaaactcgccctcgtggagtgctac

SEQ ID NO: 5276894 - DNA, 25 bp, Homo sapien
ttgccacgtgcattagagtctttgc

SEQ ID NO: 5276895 - DNA, 25 bp, Homo sapien
tacatgcagggctaagccatttcca

SEQ ID NO: 5276896 - DNA, 25 bp, Homo sapien
ttccatttgccacgtgcattagagt

SEQ ID NO: 5276897 - DNA, 25 bp, Homo sapien
tagtctcccagggtaacgcagcagg

SEQ ID NO: 5276898 - DNA, 25 bp, Homo sapien
ccagggtaacgcagcagggaatcct

SEQ ID NO: 5276899 - DNA, 25 bp, Homo sapien
cagctgctgggattgagcaatagtc

SEQ ID NO: 5276900 - DNA, 25 bp, Homo sapien
ggattgagcaatagtctcccagggt

SEQ ID NO: 5276901 - DNA, 25 bp, Homo sapien
atcagaaaccactatcctacagatg

SEQ ID NO: 5276902 - DNA, 25 bp, Homo sapien
aaatcagaaaccactatcctacaga

SEQ ID NO: 5276903 - DNA, 25 bp, Homo sapien
cagaaaccactatcctacagatgtc

SEQ ID NO: 5276904 - DNA, 25 bp, Homo sapien
gaaaccactatcctacagatgtcac

SEQ ID NO: 5276905 - DNA, 25 bp, Homo sapien
atgctttcctgtttagcgatggcta

SEQ ID NO: 5276906 - DNA, 25 bp, Homo sapien
cctgtttagcgatggctaatgttgc

SEQ ID NO: 5276907 - DNA, 25 bp, Homo sapien
ctttttgttcagacatgctttcctg

SEQ ID NO: 5276908 - DNA, 25 bp, Homo sapien
gcgatggctaatgttgcattcacat

SEQ ID NO: 5276909 - DNA, 25 bp, Homo sapien
gcacagggccctgatgcatgatcca

SEQ ID NO: 5276910 - DNA, 25 bp, Homo sapien
gggccctgatgcatgatccaaaaat

SEQ ID NO: 5276911 - DNA, 25 bp, Homo sapien
cctgatgcatgatccaaaaattgtc

SEQ ID NO: 5276912 - DNA, 25 bp, Homo sapien
caaaaattgtcttagatttagaatg

SEQ ID NO: 5276913 - DNA, 25 bp, Homo sapien
cattctaaatcgaagacaatgattg

SEQ ID NO: 5276914 - DNA, 25 bp, Homo sapien
gtccaaatagcattctaaatcgaag

SEQ ID NO: 5276915 - DNA, 25 bp, Homo sapien
cgaagacaatgattggatcatgcat

SEQ ID NO: 5276916 - DNA, 25 bp, Homo sapien
caaatagcattctaaatcgaagaca

SEQ ID NO: 5276917 - DNA, 25 bp, Homo sapien
tagaacatgggaacaaaagtggacc

SEQ ID NO: 5276918 - DNA, 25 bp, Homo sapien
gtggaggtccccaagtcatagaaca

SEQ ID NO: 5276919 - DNA, 25 bp, Homo sapien
caccaacgagtagaaggaatggcct

SEQ ID NO: 5276920 - DNA, 25 bp, Homo sapien
ttccatagggaggaactctcgggca

SEQ ID NO: 5276921 - DNA, 25 bp, Homo sapien
gacagctagtaagtctcgtgggcca

SEQ ID NO: 5276922 - DNA, 25 bp, Homo sapien
cccaagagatggtcgagagtccctg

SEQ ID NO: 5276923 - DNA, 25 bp, Homo sapien
cacggtgcctgtggttcgagatccc

SEQ ID NO: 5276924 - DNA, 25 bp, Homo sapien
taataaccttcattcgagcagaggc

SEQ ID NO: 5276925 - DNA, 25 bp, Homo sapien
gatgctttatgcctgcgcagcagga

SEQ ID NO: 5276926 - DNA, 25 bp, Homo sapien
taggtgacacgtggactctagtatg

SEQ ID NO: 5276927 - DNA, 25 bp, Homo sapien
ggcttcacccttcgtaaccaggaga

SEQ ID NO: 5276928 - DNA, 25 bp, Homo sapien
cacttgttcggatttgactgcctgt

SEQ ID NO: 5276929 - DNA, 25 bp, Homo sapien
agtttataccactttcccgcaggca

SEQ ID NO: 5276930 - DNA, 25 bp, Homo sapien
tacaagtttataccactttcccgca

SEQ ID NO: 5276931 - DNA, 25 bp, Homo sapien
ttataccactttcccgcaggcactg

SEQ ID NO: 5276932 - DNA, 25 bp, Homo sapien
caagtttataccactttcccgcagg

SEQ ID NO: 5276933 - DNA, 25 bp, Homo sapien
tgcttggccagatggagacgcgcct

SEQ ID NO: 5276934 - DNA, 25 bp, Homo sapien
gggtggtcgcatcccagacagaaga

SEQ ID NO: 5276935 - DNA, 25 bp, Homo sapien
gcagctcattgagtccccggaattg

SEQ ID NO: 5276936 - DNA, 25 bp, Homo sapien
gaattgtcatgtagggacgtgtccc

SEQ ID NO: 5276937 - DNA, 25 bp, Homo sapien
aggacaaagatctggctaggtgttg

SEQ ID NO: 5276938 - DNA, 25 bp, Homo sapien
ggcagctggagtcccatgatgaatg

SEQ ID NO: 5276939 - DNA, 25 bp, Homo sapien
ctcgtgattgcacacaaaggcagct

SEQ ID NO: 5276940 - DNA, 25 bp, Homo sapien
tggctaggtgttgatgaccagtaga

SEQ ID NO: 5276941 - DNA, 25 bp, Homo sapien
gcaactgtggagctgatcaggccgc

SEQ ID NO: 5276942 - DNA, 25 bp, Homo sapien
tcctccaaggaagaacttgtgcaac

SEQ ID NO: 5276943 - DNA, 25 bp, Homo sapien
gaacttgtgcaactgtggagctgat

SEQ ID NO: 5276944 - DNA, 25 bp, Homo sapien
tgatcaggccgcccgggctgccttt

SEQ ID NO: 5276945 - DNA, 25 bp, Homo sapien
caggagaaataggcagttggagaac

SEQ ID NO: 5276946 - DNA, 25 bp, Homo sapien
gaagtggaaaacttcgcacttgctc

SEQ ID NO: 5276947 - DNA, 25 bp, Homo sapien
cagtgctgtatcaggagaaataggc

SEQ ID NO: 5276948 - DNA, 25 bp, Homo sapien
acttgctcccttgccagtgctgtat

SEQ ID NO: 5276949 - DNA, 25 bp, Homo sapien
taagtgggatgggttcttgctcagt

SEQ ID NO: 5276950 - DNA, 25 bp, Homo sapien
gatgaaaacctttcacttgctcctg

SEQ ID NO: 5276951 - DNA, 25 bp, Homo sapien
tctacaatgataagtgggatgggtt

SEQ ID NO: 5276952 - DNA, 25 bp, Homo sapien
ctaaaactgcgctttaatcattcta

SEQ ID NO: 5276953 - DNA, 25 bp, Homo sapien
tacatctaaagactggcctaccgca

SEQ ID NO: 5276954 - DNA, 25 bp, Homo sapien
ggcttagctggtgggaaaaacttca

SEQ ID NO: 5276955 - DNA, 25 bp, Homo sapien
tagcaaatgtgtgaaggcttagctg

SEQ ID NO: 5276956 - DNA, 25 bp, Homo sapien
gaaaggtccttgagctacatctaaa

SEQ ID NO: 5276957 - DNA, 25 bp, Homo sapien
cagagaggaattgctcagcccagaa

SEQ ID NO: 5276958 - DNA, 25 bp, Homo sapien
aagcactgctttggcgagcctaaca

SEQ ID NO: 5276959 - DNA, 25 bp, Homo sapien
tcagtgggtcacattgcagaagcac

SEQ ID NO: 5276960 - DNA, 25 bp, Homo sapien
acagacagcgccaagaaggtcctgg

SEQ ID NO: 5276961 - DNA, 25 bp, Homo sapien
ggaatgatgccctcctggacgccat

SEQ ID NO: 5276962 - DNA, 25 bp, Homo sapien
ctgctgatattttggaggctggtca

SEQ ID NO: 5276963 - DNA, 25 bp, Homo sapien
tcaccccttgtgagttggtccagtc

SEQ ID NO: 5276964 - DNA, 25 bp, Homo sapien
aatgatgccctcctggacgccatta

SEQ ID NO: 5276965 - DNA, 25 bp, Homo sapien
tgtttgaatggttgtgcatctgggt

SEQ ID NO: 5276966 - DNA, 25 bp, Homo sapien
ccttgtgtgtttgaatggttgtgca

SEQ ID NO: 5276967 - DNA, 25 bp, Homo sapien
ttgccttgtgtgtttgaatggttgt

SEQ ID NO: 5276968 - DNA, 25 bp, Homo sapien
tgtgtgtttgaatggttgtgcatct

SEQ ID NO: 5276969 - DNA, 25 bp, Homo sapien
tgtagctagattgggcttcctgtcc

SEQ ID NO: 5276970 - DNA, 25 bp, Homo sapien
cctttggagctctgtagctagattg

SEQ ID NO: 5276971 - DNA, 25 bp, Homo sapien
ttctttgggagactgtgttgatcct

SEQ ID NO: 5276972 - DNA, 25 bp, Homo sapien
gcagggtgagtcgtgtgatcacaca

SEQ ID NO: 5276973 - DNA, 25 bp, Homo sapien
tattgtaaagcactatgcgtttgct

SEQ ID NO: 5276974 - DNA, 25 bp, Homo sapien
aaagcactatgcgtttgctagctac

SEQ ID NO: 5276975 - DNA, 25 bp, Homo sapien
gtaaagcactatgcgtttgctagct

SEQ ID NO: 5276976 - DNA, 25 bp, Homo sapien
ttgtaaagcactatgcgtttgctag

SEQ ID NO: 5276977 - DNA, 25 bp, Homo sapien
aacccatagggccagccactgggca

SEQ ID NO: 5276978 - DNA, 25 bp, Homo sapien
taggcctaacccatagggccagcca

SEQ ID NO: 5276979 - DNA, 25 bp, Homo sapien
tagccccaagtataggcctaaccca

SEQ ID NO: 5276980 - DNA, 25 bp, Homo sapien
ttgcttggacaagggcctctggctt

SEQ ID NO: 5276981 - DNA, 25 bp, Homo sapien
agtggggatgatggcattgtgatga

SEQ ID NO: 5276982 - DNA, 25 bp, Homo sapien
gggatgatggcattgtgatgacaca

SEQ ID NO: 5276983 - DNA, 25 bp, Homo sapien
ctgtagtggggatgatggcattgtg

SEQ ID NO: 5276984 - DNA, 25 bp, Homo sapien
ggggatgatggcattgtgatgacac

SEQ ID NO: 5276985 - DNA, 25 bp, Homo sapien
ctttactgccaaactccacttcaaa

SEQ ID NO: 5276986 - DNA, 25 bp, Homo sapien
tactgccaaactccacttcaaaagc

SEQ ID NO: 5276987 - DNA, 25 bp, Homo sapien
tttactgccaaactccacttcaaaa

SEQ ID NO: 5276988 - DNA, 25 bp, Homo sapien
ttactgccaaactccacttcaaaag

SEQ ID NO: 5276989 - DNA, 25 bp, Homo sapien
ctgtcttcactagaggtgcatcttg

SEQ ID NO: 5276990 - DNA, 25 bp, Homo sapien
tcactagaggtgcatcttgcaacat

SEQ ID NO: 5276991 - DNA, 25 bp, Homo sapien
tcttcactagaggtgcatcttgcaa

SEQ ID NO: 5276992 - DNA, 25 bp, Homo sapien
tgtcttcactagaggtgcatcttgc

SEQ ID NO: 5276993 - DNA, 25 bp, Homo sapien
tttgtggtcatagtttcccagaacc

SEQ ID NO: 5276994 - DNA, 25 bp, Homo sapien
ctgatttgtggtcatagtttcccag

SEQ ID NO: 5276995 - DNA, 25 bp, Homo sapien
gtggtcatagtttcccagaacccca

SEQ ID NO: 5276996 - DNA, 25 bp, Homo sapien
ccagaaccccaagggacccatccag

SEQ ID NO: 5276997 - DNA, 25 bp, Homo sapien
tctccgggtgagagcaaggcttccg

SEQ ID NO: 5276998 - DNA, 25 bp, Homo sapien
tgtgacaaggattgttctgtctccg

SEQ ID NO: 5276999 - DNA, 25 bp, Homo sapien
ccatagctggctgcgtgtgacaagg

SEQ ID NO: 5277000 - DNA, 25 bp, Homo sapien
cagagattgtgtgcccatagctggc

SEQ ID NO: 5277001 - DNA, 25 bp, Homo sapien
taacatgtagggaaattactgattc

SEQ ID NO: 5277002 - DNA, 25 bp, Homo sapien
tgattcatctcccatgagcaaatct

SEQ ID NO: 5277003 - DNA, 25 bp, Homo sapien
gtagggaaattactgattcatctcc

SEQ ID NO: 5277004 - DNA, 25 bp, Homo sapien
gaaattactgattcatctcccatga

SEQ ID NO: 5277005 - DNA, 25 bp, Homo sapien
tgttggagataccacaccaggcggc

SEQ ID NO: 5277006 - DNA, 25 bp, Homo sapien
gaatttggaggcaacttcctggagc

SEQ ID NO: 5277007 - DNA, 25 bp, Homo sapien
gctgaaaggttgactgaagtttccc

SEQ ID NO: 5277008 - DNA, 25 bp, Homo sapien
taagcatgtagtctgcattgactgt

SEQ ID NO: 5277009 - DNA, 25 bp, Homo sapien
agggattggccattgagcagctgaa

SEQ ID NO: 5277010 - DNA, 25 bp, Homo sapien
cacttccagacaagcagtttctgta

SEQ ID NO: 5277011 - DNA, 25 bp, Homo sapien
tccaagaaagaagtgtgacctctgc

SEQ ID NO: 5277012 - DNA, 25 bp, Homo sapien
tgcaaggcccgaggttgttcccata

SEQ ID NO: 5277013 - DNA, 25 bp, Homo sapien
aataactgtgagtcacggccttccc

SEQ ID NO: 5277014 - DNA, 25 bp, Homo sapien
tgacctctgcttgaactgagagaac

SEQ ID NO: 5277015 - DNA, 25 bp, Homo sapien
tttccctggataagatcccctcgtc

SEQ ID NO: 5277016 - DNA, 25 bp, Homo sapien
tcgtcaagccaatgactcgcctgct

SEQ ID NO: 5277017 - DNA, 25 bp, Homo sapien
tagctttaggataattttttgcaac

SEQ ID NO: 5277018 - DNA, 25 bp, Homo sapien
gctcaatggtctagctttaggataa

SEQ ID NO: 5277019 - DNA, 25 bp, Homo sapien
cccacagtagcctgtgtaggattgg

SEQ ID NO: 5277020 - DNA, 25 bp, Homo sapien
gaggcccacagtagcctgtgtagga

SEQ ID NO: 5277021 - DNA, 25 bp, Homo sapien
aggttgaggcccacagtagcctgtg

SEQ ID NO: 5277022 - DNA, 25 bp, Homo sapien
ttgaggcccacagtagcctgtgtag

SEQ ID NO: 5277023 - DNA, 25 bp, Homo sapien
tgtgggaaaacctatatagcctgtg

SEQ ID NO: 5277024 - DNA, 25 bp, Homo sapien
tatcatgggcaacttaggtaagggc

SEQ ID NO: 5277025 - DNA, 25 bp, Homo sapien
taatttatataggtgacacccaggc

SEQ ID NO: 5277026 - DNA, 25 bp, Homo sapien
tattggaggtactagcagtggtctc

SEQ ID NO: 5277027 - DNA, 25 bp, Homo sapien
acttgattccgaaataaaagaccag

SEQ ID NO: 5277028 - DNA, 25 bp, Homo sapien
caagcctatggcatcagtttcatga

SEQ ID NO: 5277029 - DNA, 25 bp, Homo sapien
aaagaccaggaaagtttatgcacag

SEQ ID NO: 5277030 - DNA, 25 bp, Homo sapien
acagagtggcacctatatgttctta

SEQ ID NO: 5277031 - DNA, 25 bp, Homo sapien
gaaattcaggattttaattgacata

SEQ ID NO: 5277032 - DNA, 25 bp, Homo sapien
tgtcccttcccataccagcacacca

SEQ ID NO: 5277033 - DNA, 25 bp, Homo sapien
cccataccagcacaccagtccccat

SEQ ID NO: 5277034 - DNA, 25 bp, Homo sapien
tcttggaattggactctgccatcca

SEQ ID NO: 5277035 - DNA, 25 bp, Homo sapien
tgatcttggaattggactctgccat

SEQ ID NO: 5277036 - DNA, 25 bp, Homo sapien
ctatggcccaaagacacttgttctc

SEQ ID NO: 5277037 - DNA, 25 bp, Homo sapien
tgttgacttcaaggatttgcctggg

SEQ ID NO: 5277038 - DNA, 25 bp, Homo sapien
tattggcggatgtttgcataagcct

SEQ ID NO: 5277039 - DNA, 25 bp, Homo sapien
gtttcccgtgctctagctgcatgtg

SEQ ID NO: 5277040 - DNA, 25 bp, Homo sapien
gcaggaggagggacatttaaaatat

SEQ ID NO: 5277041 - DNA, 25 bp, Homo sapien
aaaatattccttttggagagaagca

SEQ ID NO: 5277042 - DNA, 25 bp, Homo sapien
ggagcaggaggagggacatttaaaa

SEQ ID NO: 5277043 - DNA, 25 bp, Homo sapien
taaaatattccttttggagagaagc

SEQ ID NO: 5277044 - DNA, 25 bp, Homo sapien
tgtttagcatctgaacatgcggacc

SEQ ID NO: 5277045 - DNA, 25 bp, Homo sapien
aatacttcctgtgttgcatcgttaa

SEQ ID NO: 5277046 - DNA, 25 bp, Homo sapien
tgaacatgcggaccccagaatactt

SEQ ID NO: 5277047 - DNA, 25 bp, Homo sapien
tcctgtgttgcatcgttaaatatca

SEQ ID NO: 5277048 - DNA, 25 bp, Homo sapien
ggcaattttgaaggttgccattcat

SEQ ID NO: 5277049 - DNA, 25 bp, Homo sapien
ctccaccttcaaattggttatggct

SEQ ID NO: 5277050 - DNA, 25 bp, Homo sapien
caaattggttatggctgaattgcct

SEQ ID NO: 5277051 - DNA, 25 bp, Homo sapien
ggctgaattgcctacataggcaatt

SEQ ID NO: 5277052 - DNA, 25 bp, Homo sapien
tgaacgctgcagtatgacctcaggg

SEQ ID NO: 5277053 - DNA, 25 bp, Homo sapien
tggacaggtcctcacttaaataaga

SEQ ID NO: 5277054 - DNA, 25 bp, Homo sapien
catgcgatgtgcttcagagtatgca

SEQ ID NO: 5277055 - DNA, 25 bp, Homo sapien
taggtgagctcacagtccaaatgtg

SEQ ID NO: 5277056 - DNA, 25 bp, Homo sapien
gtctctgaatacactgacatgttca

SEQ ID NO: 5277057 - DNA, 25 bp, Homo sapien
agtctctgaatacactgacatgttc

SEQ ID NO: 5277058 - DNA, 25 bp, Homo sapien
accagcaaagcctcggtgtgcttta

SEQ ID NO: 5277059 - DNA, 25 bp, Homo sapien
aactgaaacgaataacagatcccag

SEQ ID NO: 5277060 - DNA, 25 bp, Homo sapien
cttaggcttaactgtgaacaactga

SEQ ID NO: 5277061 - DNA, 25 bp, Homo sapien
gtatcaccagcaaagcctcggtgtg

SEQ ID NO: 5277062 - DNA, 25 bp, Homo sapien
tggaatgcttggtatgttacacttg

SEQ ID NO: 5277063 - DNA, 25 bp, Homo sapien
gaatgcttggtatgttacacttgct

SEQ ID NO: 5277064 - DNA, 25 bp, Homo sapien
ggaatgcttggtatgttacacttgc

SEQ ID NO: 5277065 - DNA, 25 bp, Homo sapien
caggtgcaagcactctgagttggat

SEQ ID NO: 5277066 - DNA, 25 bp, Homo sapien
caggaaacaggtgcaagcactctga

SEQ ID NO: 5277067 - DNA, 25 bp, Homo sapien
tgagttggattcagatcatctagga

SEQ ID NO: 5277068 - DNA, 25 bp, Homo sapien
gagcttctagctgaagagtaaatct

SEQ ID NO: 5277069 - DNA, 25 bp, Homo sapien
caatcccaatgatggaccagagtca

SEQ ID NO: 5277070 - DNA, 25 bp, Homo sapien
catggttaaaacatccttgttcatg

SEQ ID NO: 5277071 - DNA, 25 bp, Homo sapien
caaatggccaggtcaagaaacatgg

SEQ ID NO: 5277072 - DNA, 25 bp, Homo sapien
aacatccttgggatccaaatggcca

SEQ ID NO: 5277073 - DNA, 25 bp, Homo sapien
caaggatggctgtttgcgaagttgt

SEQ ID NO: 5277074 - DNA, 25 bp, Homo sapien
tccggagtgaatcagctgggtcata

SEQ ID NO: 5277075 - DNA, 25 bp, Homo sapien
tgggtcatatggtcatctgccagac

SEQ ID NO: 5277076 - DNA, 25 bp, Homo sapien
gcatgataccgtgaacaaggatggc

SEQ ID NO: 5277077 - DNA, 25 bp, Homo sapien
tgcagtcctattaaactcagccagg

SEQ ID NO: 5277078 - DNA, 25 bp, Homo sapien
tgttgcagtcctattaaactcagcc

SEQ ID NO: 5277079 - DNA, 25 bp, Homo sapien
tgttgttgcagtcctattaaactca

SEQ ID NO: 5277080 - DNA, 25 bp, Homo sapien
tcttctctatacaagtaggacagtc

SEQ ID NO: 5277081 - DNA, 25 bp, Homo sapien
caagatcatttccaggactatcctg

SEQ ID NO: 5277082 - DNA, 25 bp, Homo sapien
cgaggaacagatagcatcaagatca

SEQ ID NO: 5277083 - DNA, 25 bp, Homo sapien
gctggtgaaagacaatcctccttct

SEQ ID NO: 5277084 - DNA, 25 bp, Homo sapien
gagcaggtctgctgtaacgaggaac

SEQ ID NO: 5277085 - DNA, 25 bp, Homo sapien
ctagggagggagcaaacccacctag

SEQ ID NO: 5277086 - DNA, 25 bp, Homo sapien
aaaccggaggacagcatttctcatg

SEQ ID NO: 5277087 - DNA, 25 bp, Homo sapien
caaggagcttgtatgcagacgggct

SEQ ID NO: 5277088 - DNA, 25 bp, Homo sapien
cagtaagttgaacacaaaccggagg

SEQ ID NO: 5277089 - DNA, 25 bp, Homo sapien
ggagtcacacagtcgcaaggagctt

SEQ ID NO: 5277090 - DNA, 25 bp, Homo sapien
ttgctcatttacataaaaacagtca

SEQ ID NO: 5277091 - DNA, 25 bp, Homo sapien
cttggtaattcttgctcatttacat

SEQ ID NO: 5277092 - DNA, 25 bp, Homo sapien
tttacataaaaacagtcactagtca

SEQ ID NO: 5277093 - DNA, 25 bp, Homo sapien
taattcttgctcatttacataaaaa

SEQ ID NO: 5277094 - DNA, 25 bp, Homo sapien
gaccacaagagctaaatgaaagtag

SEQ ID NO: 5277095 - DNA, 25 bp, Homo sapien
gaaagtagaagtctgcatacacatc

SEQ ID NO: 5277096 - DNA, 25 bp, Homo sapien
cagggacatgtctatcttcttgagg

SEQ ID NO: 5277097 - DNA, 25 bp, Homo sapien
gacaacagaaagtatattatccaag

SEQ ID NO: 5277098 - DNA, 25 bp, Homo sapien
tcctctaggtgtaggcatcttctct

SEQ ID NO: 5277099 - DNA, 25 bp, Homo sapien
tactcctctaggtgtaggcatcttc

SEQ ID NO: 5277100 - DNA, 25 bp, Homo sapien
tgagcttactcctctaggtgtaggc

SEQ ID NO: 5277101 - DNA, 25 bp, Homo sapien
gcttactcctctaggtgtaggcatc

SEQ ID NO: 5277102 - DNA, 25 bp, Homo sapien
cctccttcccacttatcctcttcat

SEQ ID NO: 5277103 - DNA, 25 bp, Homo sapien
tcctccttcccacttatcctcttca

SEQ ID NO: 5277104 - DNA, 25 bp, Homo sapien
tgtacattttgtattgagatttgtc

SEQ ID NO: 5277105 - DNA, 25 bp, Homo sapien
gtccttgctgattttggcttctgag

SEQ ID NO: 5277106 - DNA, 25 bp, Homo sapien
gcttctgaggtaccccaaagagtca

SEQ ID NO: 5277107 - DNA, 25 bp, Homo sapien
ctttgattcatgtctcaacctgcct

SEQ ID NO: 5277108 - DNA, 25 bp, Homo sapien
tacattaatctgtcagtggcttcaa

SEQ ID NO: 5277109 - DNA, 25 bp, Homo sapien
ccagtggattgacctttctcagccc

SEQ ID NO: 5277110 - DNA, 25 bp, Homo sapien
caattagaatcgaaagagtagtgac

SEQ ID NO: 5277111 - DNA, 25 bp, Homo sapien
gccattcatactaaggtagagctga

SEQ ID NO: 5277112 - DNA, 25 bp, Homo sapien
agaatgtgagaaattgtgtttaaga

SEQ ID NO: 5277113 - DNA, 25 bp, Homo sapien
gagaatgtgagaaattgtgtttaag

SEQ ID NO: 5277114 - DNA, 25 bp, Homo sapien
ttgctaagggaaggtcatcatgttt

SEQ ID NO: 5277115 - DNA, 25 bp, Homo sapien
tttgctaagggaaggtcatcatgtt

SEQ ID NO: 5277116 - DNA, 25 bp, Homo sapien
gactaaattacccaagagctttatg

SEQ ID NO: 5277117 - DNA, 25 bp, Homo sapien
tacccaagagctttatgataccata

SEQ ID NO: 5277118 - DNA, 25 bp, Homo sapien
tactggtctgctgtaaatctgtccc

SEQ ID NO: 5277119 - DNA, 25 bp, Homo sapien
taatattgcattcaactgcttccat

SEQ ID NO: 5277120 - DNA, 25 bp, Homo sapien
gctctctgaatttagcataaacttc

SEQ ID NO: 5277121 - DNA, 25 bp, Homo sapien
ttctcacccacttaaaaaatgccag

SEQ ID NO: 5277122 - DNA, 25 bp, Homo sapien
tacttcgctacttcaaagcccagtg

SEQ ID NO: 5277123 - DNA, 25 bp, Homo sapien
tgctgtctatcaaagtacttcgcta

SEQ ID NO: 5277124 - DNA, 25 bp, Homo sapien
tgctcctcacgcttttgctgtctat

SEQ ID NO: 5277125 - DNA, 25 bp, Homo sapien
caaagtacttcgctacttcaaagcc

SEQ ID NO: 5277126 - DNA, 25 bp, Homo sapien
ctaacctcaggatgtttttatctct

SEQ ID NO: 5277127 - DNA, 25 bp, Homo sapien
gtttttatctctgttatgactgcac

SEQ ID NO: 5277128 - DNA, 25 bp, Homo sapien
ttttatctctgttatgactgcacat

SEQ ID NO: 5277129 - DNA, 25 bp, Homo sapien
ctctaacctcaggatgtttttatct

SEQ ID NO: 5277130 - DNA, 25 bp, Homo sapien
catccaaagtgcatcttgctgcact

SEQ ID NO: 5277131 - DNA, 25 bp, Homo sapien
ctatgcatgcaaatcgaaactcaag

SEQ ID NO: 5277132 - DNA, 25 bp, Homo sapien
aaatcgaaactcaagtctctgggca

SEQ ID NO: 5277133 - DNA, 25 bp, Homo sapien
ttgctgcactttcattaacccatgg

SEQ ID NO: 5277134 - DNA, 25 bp, Homo sapien
cattagtggctactttggctttcat

SEQ ID NO: 5277135 - DNA, 25 bp, Homo sapien
cagatgcattagtggctactttggc

SEQ ID NO: 5277136 - DNA, 25 bp, Homo sapien
tgcattagtggctactttggctttc

SEQ ID NO: 5277137 - DNA, 25 bp, Homo sapien
agtttcagatgcattagtggctact

SEQ ID NO: 5277138 - DNA, 25 bp, Homo sapien
tgctagtaactatagcgagttgctc

SEQ ID NO: 5277139 - DNA, 25 bp, Homo sapien
gagaaattttactgctagtaactat

SEQ ID NO: 5277140 - DNA, 25 bp, Homo sapien
aactatagcgagttgctctttctta

SEQ ID NO: 5277141 - DNA, 25 bp, Homo sapien
tagcgagttgctctttcttaatata

SEQ ID NO: 5277142 - DNA, 25 bp, Homo sapien
tcattgccccagtgacgtgtcacag

SEQ ID NO: 5277143 - DNA, 25 bp, Homo sapien
aatgtcagcatgttcgggaacggta

SEQ ID NO: 5277144 - DNA, 25 bp, Homo sapien
cggtaagccgctagagaagtcttca

SEQ ID NO: 5277145 - DNA, 25 bp, Homo sapien
gcagcatatccagtggcccagtgtt

SEQ ID NO: 5277146 - DNA, 25 bp, Homo sapien
tatttgatttgaatgagactttaaa

SEQ ID NO: 5277147 - DNA, 25 bp, Homo sapien
ctttgtaccatagtgacaaagtgaa

SEQ ID NO: 5277148 - DNA, 25 bp, Homo sapien
agccacaattctattctccactttc

SEQ ID NO: 5277149 - DNA, 25 bp, Homo sapien
cagttgaactctaaatgccagccac

SEQ ID NO: 5277150 - DNA, 25 bp, Homo sapien
ctctggcaatgttttccatggagtt

SEQ ID NO: 5277151 - DNA, 25 bp, Homo sapien
tggcaatgttttccatggagttcat

SEQ ID NO: 5277152 - DNA, 25 bp, Homo sapien
ctggcaatgttttccatggagttca

SEQ ID NO: 5277153 - DNA, 25 bp, Homo sapien
tctggcaatgttttccatggagttc

SEQ ID NO: 5277154 - DNA, 25 bp, Homo sapien
cactgagtgatggacacgtacacaa

SEQ ID NO: 5277155 - DNA, 25 bp, Homo sapien
cagagtcctttcactccactgagtg

SEQ ID NO: 5277156 - DNA, 25 bp, Homo sapien
tgttcagagtcctttcactccactg

SEQ ID NO: 5277157 - DNA, 25 bp, Homo sapien
ccactgagtgatggacacgtacaca

SEQ ID NO: 5277158 - DNA, 25 bp, Homo sapien
ttctttttcctttttaatgctctca

SEQ ID NO: 5277159 - DNA, 25 bp, Homo sapien
gaacctgaatacactgttggggtcc

SEQ ID NO: 5277160 - DNA, 25 bp, Homo sapien
cactgttggggtcctaggagaagca

SEQ ID NO: 5277161 - DNA, 25 bp, Homo sapien
gaatacactgttggggtcctaggag

SEQ ID NO: 5277162 - DNA, 25 bp, Homo sapien
cctgaatacactgttggggtcctag

SEQ ID NO: 5277163 - DNA, 25 bp, Homo sapien
atgttgtgaggctccacaaaaatta

SEQ ID NO: 5277164 - DNA, 25 bp, Homo sapien
ccagagtgatggctagacatacaca

SEQ ID NO: 5277165 - DNA, 25 bp, Homo sapien
acacaaggccacggcactgcagtca

SEQ ID NO: 5277166 - DNA, 25 bp, Homo sapien
ggagccagagtgatggctagacata

SEQ ID NO: 5277167 - DNA, 25 bp, Homo sapien
gagtgatggctagacatacacacaa

SEQ ID NO: 5277168 - DNA, 25 bp, Homo sapien
ctagggatagaattgatggagaaca

SEQ ID NO: 5277169 - DNA, 25 bp, Homo sapien
cacagttcaggggacacgaataaca

SEQ ID NO: 5277170 - DNA, 25 bp, Homo sapien
gaacaaggttgtggttgagaccaca

SEQ ID NO: 5277171 - DNA, 25 bp, Homo sapien
tggagaacaaggttgtggttgagac

SEQ ID NO: 5277172 - DNA, 25 bp, Homo sapien
catgcattatctaagtgttctttgc

SEQ ID NO: 5277173 - DNA, 25 bp, Homo sapien
gtgtcgtttcacaaaagttacatct

SEQ ID NO: 5277174 - DNA, 25 bp, Homo sapien
aatttctagcccctgctaagtgtcg

SEQ ID NO: 5277175 - DNA, 25 bp, Homo sapien
ctcaactctaaatccttcctcagag

SEQ ID NO: 5277176 - DNA, 25 bp, Homo sapien
gtaggtttcccattcattctgatgg

SEQ ID NO: 5277177 - DNA, 25 bp, Homo sapien
gaagtccttgtccatgcctacatcc

SEQ ID NO: 5277178 - DNA, 25 bp, Homo sapien
gtatggccattcatcctgataccaa

SEQ ID NO: 5277179 - DNA, 25 bp, Homo sapien
agtccttgtccatgcctacatcctg

SEQ ID NO: 5277180 - DNA, 25 bp, Homo sapien
gcattgccaaggtagctatctgaat

SEQ ID NO: 5277181 - DNA, 25 bp, Homo sapien
tcccattccatgttcgtgaataccg

SEQ ID NO: 5277182 - DNA, 25 bp, Homo sapien
gaaaatgtgacatcctgcattgcca

SEQ ID NO: 5277183 - DNA, 25 bp, Homo sapien
ttcgtgaataccgtgaaaatgtgac

SEQ ID NO: 5277184 - DNA, 25 bp, Homo sapien
caggattggccttgaaaataaaaca

SEQ ID NO: 5277185 - DNA, 25 bp, Homo sapien
cgtgtgtctctgatactaggccaca

SEQ ID NO: 5277186 - DNA, 25 bp, Homo sapien
ccacagacaaatgttcacccaggat

SEQ ID NO: 5277187 - DNA, 25 bp, Homo sapien
tgcgtgtgtctctgatactaggcca

SEQ ID NO: 5277188 - DNA, 25 bp, Homo sapien
cacaatccagttgagaaacggttca

SEQ ID NO: 5277189 - DNA, 25 bp, Homo sapien
attcgctagcacttcctgggccaaa

SEQ ID NO: 5277190 - DNA, 25 bp, Homo sapien
acttgaaacatcaccacactgtgca

SEQ ID NO: 5277191 - DNA, 25 bp, Homo sapien
acttccgatggccagctactacact

SEQ ID NO: 5277192 - DNA, 25 bp, Homo sapien
aagccatcctctcacatcagcctac

SEQ ID NO: 5277193 - DNA, 25 bp, Homo sapien
gccatcctctcacatcagcctacca

SEQ ID NO: 5277194 - DNA, 25 bp, Homo sapien
catcctctcacatcagcctaccaag

SEQ ID NO: 5277195 - DNA, 25 bp, Homo sapien
caagccatcctctcacatcagccta

SEQ ID NO: 5277196 - DNA, 25 bp, Homo sapien
acaaaggctacactgtctacttctg

SEQ ID NO: 5277197 - DNA, 25 bp, Homo sapien
aaggctacactgtctacttctggcc

SEQ ID NO: 5277198 - DNA, 25 bp, Homo sapien
aaaggctacactgtctacttctggc

SEQ ID NO: 5277199 - DNA, 25 bp, Homo sapien
aggctacactgtctacttctggcct

SEQ ID NO: 5277200 - DNA, 25 bp, Homo sapien
caatcaggacccaggccaagatcat

SEQ ID NO: 5277201 - DNA, 25 bp, Homo sapien
aaactttcggccattatttattcag

SEQ ID NO: 5277202 - DNA, 25 bp, Homo sapien
taaactttcggccattatttattca

SEQ ID NO: 5277203 - DNA, 25 bp, Homo sapien
ggctcattcttggataatcctcagt

SEQ ID NO: 5277204 - DNA, 25 bp, Homo sapien
cagacttcagactgctcggagctat

SEQ ID NO: 5277205 - DNA, 25 bp, Homo sapien
taaacttttcctaggcatagtgtgg

SEQ ID NO: 5277206 - DNA, 25 bp, Homo sapien
gcagtgatgatcaatctcttaggcc

SEQ ID NO: 5277207 - DNA, 25 bp, Homo sapien
gacaatcattaaatgcagtagtttg

SEQ ID NO: 5277208 - DNA, 25 bp, Homo sapien
tgtactgctcacattctactgatgt

SEQ ID NO: 5277209 - DNA, 25 bp, Homo sapien
tcaatggtcctagtttaccaattcc

SEQ ID NO: 5277210 - DNA, 25 bp, Homo sapien
ggaccaactatggcaactacattgg

SEQ ID NO: 5277211 - DNA, 25 bp, Homo sapien
caggatctgcgtctctcaggctggt

SEQ ID NO: 5277212 - DNA, 25 bp, Homo sapien
taattttcggcctgtgaatacggta

SEQ ID NO: 5277213 - DNA, 25 bp, Homo sapien
atacggtatcatttgtgcaacaatt

SEQ ID NO: 5277214 - DNA, 25 bp, Homo sapien
ttcggcctgtgaatacggtatcatt

SEQ ID NO: 5277215 - DNA, 25 bp, Homo sapien
tatcatttgtgcaacaatttcctca

SEQ ID NO: 5277216 - DNA, 25 bp, Homo sapien
gtaggtgtttgtactttaatgtgga

SEQ ID NO: 5277217 - DNA, 25 bp, Homo sapien
ctagtaggtgtttgtactttaatgt

SEQ ID NO: 5277218 - DNA, 25 bp, Homo sapien
cctccactgggtgtagtaatggcac

SEQ ID NO: 5277219 - DNA, 25 bp, Homo sapien
cagttcacctctaaggtgattgtcc

SEQ ID NO: 5277220 - DNA, 25 bp, Homo sapien
ggttgtgacaaggaatggggggaca

SEQ ID NO: 5277221 - DNA, 25 bp, Homo sapien
gttgtgacaaggaatggggggacac

SEQ ID NO: 5277222 - DNA, 25 bp, Homo sapien
tgtgacaaggaatggggggacacca

SEQ ID NO: 5277223 - DNA, 25 bp, Homo sapien
ttgtgacaaggaatggggggacacc

SEQ ID NO: 5277224 - DNA, 25 bp, Homo sapien
agaagctctttaaacctttcggctg

SEQ ID NO: 5277225 - DNA, 25 bp, Homo sapien
tctttaaacctttcggctggcatgg

SEQ ID NO: 5277226 - DNA, 25 bp, Homo sapien
cagaagctctttaaacctttcggct

SEQ ID NO: 5277227 - DNA, 25 bp, Homo sapien
agctctttaaacctttcggctggca

SEQ ID NO: 5277228 - DNA, 25 bp, Homo sapien
ccatagatccaacagagctggtggc

SEQ ID NO: 5277229 - DNA, 25 bp, Homo sapien
taggaacaggatgcacagctaccat

SEQ ID NO: 5277230 - DNA, 25 bp, Homo sapien
gaatatccagtaaagccaaacaggg

SEQ ID NO: 5277231 - DNA, 25 bp, Homo sapien
tcaatgcagacccaggaatatccag

SEQ ID NO: 5277232 - DNA, 25 bp, Homo sapien
agaatccaaaatcgactagcagctt

SEQ ID NO: 5277233 - DNA, 25 bp, Homo sapien
gcgttcaagcaaaaacttacactcc

SEQ ID NO: 5277234 - DNA, 25 bp, Homo sapien
ctgtatagcttttggagaatccaaa

SEQ ID NO: 5277235 - DNA, 25 bp, Homo sapien
ttagtttgtcataagcgttcaagca

SEQ ID NO: 5277236 - DNA, 25 bp, Homo sapien
tatgatctacatgatctagcatcat

SEQ ID NO: 5277237 - DNA, 25 bp, Homo sapien
cttttatgatctacatgatctagca

SEQ ID NO: 5277238 - DNA, 25 bp, Homo sapien
ttatgatctacatgatctagcatca

SEQ ID NO: 5277239 - DNA, 25 bp, Homo sapien
tttatgatctacatgatctagcatc

SEQ ID NO: 5277240 - DNA, 25 bp, Homo sapien
taataaccttctgagagtggtcctt

SEQ ID NO: 5277241 - DNA, 25 bp, Homo sapien
taaccttctgagagtggtccttggg

SEQ ID NO: 5277242 - DNA, 25 bp, Homo sapien
cttctgagagtggtccttgggacat

SEQ ID NO: 5277243 - DNA, 25 bp, Homo sapien
ccttctgagagtggtccttgggaca

SEQ ID NO: 5277244 - DNA, 25 bp, Homo sapien
ccttcattcacaggattagtgcact

SEQ ID NO: 5277245 - DNA, 25 bp, Homo sapien
taccatgcaatggtcccatgcaagg

SEQ ID NO: 5277246 - DNA, 25 bp, Homo sapien
tggaggccttcagccactaattcta

SEQ ID NO: 5277247 - DNA, 25 bp, Homo sapien
taatctagactctgtagcattggtg

SEQ ID NO: 5277248 - DNA, 25 bp, Homo sapien
tacacacctactggaacagctaaaa

SEQ ID NO: 5277249 - DNA, 25 bp, Homo sapien
taatgacttgaatggatcacaagga

SEQ ID NO: 5277250 - DNA, 25 bp, Homo sapien
gaagaatccaccatcaaaatgtcac

SEQ ID NO: 5277251 - DNA, 25 bp, Homo sapien
tttgaatgcggagaaactagattcc

SEQ ID NO: 5277252 - DNA, 25 bp, Homo sapien
aactgttatgaggagctcagactca

SEQ ID NO: 5277253 - DNA, 25 bp, Homo sapien
gtcaactccgcccaactttctgcat

SEQ ID NO: 5277254 - DNA, 25 bp, Homo sapien
aatgactcacctagtgtcaactccg

SEQ ID NO: 5277255 - DNA, 25 bp, Homo sapien
tgcagccacagctgttgtgaactgt

SEQ ID NO: 5277256 - DNA, 25 bp, Homo sapien
tcttctgtggcctgaatggaaaatg

SEQ ID NO: 5277257 - DNA, 25 bp, Homo sapien
aaatgtactctcattgtgtagcacc

SEQ ID NO: 5277258 - DNA, 25 bp, Homo sapien
tgtcagtataaacaagggtgtagcc

SEQ ID NO: 5277259 - DNA, 25 bp, Homo sapien
tctgccgtggactaaacaagaactt

SEQ ID NO: 5277260 - DNA, 25 bp, Homo sapien
tagttttaccctccttaagcagcca

SEQ ID NO: 5277261 - DNA, 25 bp, Homo sapien
gctcatgcaagactggaaaaacccc

SEQ ID NO: 5277262 - DNA, 25 bp, Homo sapien
gatgtcttattaattgcgaaggata

SEQ ID NO: 5277263 - DNA, 25 bp, Homo sapien
gaagaagacactatgggtatccagt

SEQ ID NO: 5277264 - DNA, 25 bp, Homo sapien
gatgatagacggtttctcctgggtg

SEQ ID NO: 5277265 - DNA, 25 bp, Homo sapien
taattaatgaccatacagaggtctg

SEQ ID NO: 5277266 - DNA, 25 bp, Homo sapien
gattttgctgagcattcattctgtg

SEQ ID NO: 5277267 - DNA, 25 bp, Homo sapien
ttgtggagataagccacactactgg

SEQ ID NO: 5277268 - DNA, 25 bp, Homo sapien
agggaaacctttggtgatgactttg

SEQ ID NO: 5277269 - DNA, 25 bp, Homo sapien
gatttaagattttgctgagcattca

SEQ ID NO: 5277270 - DNA, 25 bp, Homo sapien
gaatttgttagctcattggattgta

SEQ ID NO: 5277271 - DNA, 25 bp, Homo sapien
gtcattggagcatagaagctgacat

SEQ ID NO: 5277272 - DNA, 25 bp, Homo sapien
ggattattctgctagtgatttcata

SEQ ID NO: 5277273 - DNA, 25 bp, Homo sapien
taagctcggtggattagaatttgtt

SEQ ID NO: 5277274 - DNA, 25 bp, Homo sapien
cgtgttcactgtgcgagagtgagaa

SEQ ID NO: 5277275 - DNA, 25 bp, Homo sapien
ttcactgtgcgagagtgagaagtca

SEQ ID NO: 5277276 - DNA, 25 bp, Homo sapien
tcactgtgcgagagtgagaagtcat

SEQ ID NO: 5277277 - DNA, 25 bp, Homo sapien
tgttcactgtgcgagagtgagaagt

SEQ ID NO: 5277278 - DNA, 25 bp, Homo sapien
catacccagttgactacactggtac

SEQ ID NO: 5277279 - DNA, 25 bp, Homo sapien
cccagttgactacactggtacttct

SEQ ID NO: 5277280 - DNA, 25 bp, Homo sapien
gttgactacactggtacttctgctg

SEQ ID NO: 5277281 - DNA, 25 bp, Homo sapien
ttgccatacccagttgactacactg

SEQ ID NO: 5277282 - DNA, 25 bp, Homo sapien
catgatgtaaggagcaagagtctct

SEQ ID NO: 5277283 - DNA, 25 bp, Homo sapien
agagtctctcttgagtctgttctac

SEQ ID NO: 5277284 - DNA, 25 bp, Homo sapien
tccaagatcaaggaacggtttcctg

SEQ ID NO: 5277285 - DNA, 25 bp, Homo sapien
tctgttctacaagggcagtcatctc

SEQ ID NO: 5277286 - DNA, 25 bp, Homo sapien
aataactgtgaactgggcatgtgaa

SEQ ID NO: 5277287 - DNA, 25 bp, Homo sapien
gataccgttgtagacctgattgaaa

SEQ ID NO: 5277288 - DNA, 25 bp, Homo sapien
gatctggccacataccctgtttaca

SEQ ID NO: 5277289 - DNA, 25 bp, Homo sapien
cattgatgcagattcaactgggtga

SEQ ID NO: 5277290 - DNA, 25 bp, Homo sapien
cccatcttctgagttgctcacgctg

SEQ ID NO: 5277291 - DNA, 25 bp, Homo sapien
tcacccatcttctgagttgctcacg

SEQ ID NO: 5277292 - DNA, 25 bp, Homo sapien
aaatcacccatcttctgagttgctc

SEQ ID NO: 5277293 - DNA, 25 bp, Homo sapien
ccatcttctgagttgctcacgctgg

SEQ ID NO: 5277294 - DNA, 25 bp, Homo sapien
ggtgtgtagttttcccaatgcaaag

SEQ ID NO: 5277295 - DNA, 25 bp, Homo sapien
ttaattacaagttggagcaccacat

SEQ ID NO: 5277296 - DNA, 25 bp, Homo sapien
cccaatgcaaagtcgaattgttgtt

SEQ ID NO: 5277297 - DNA, 25 bp, Homo sapien
gaacacaattaatagggtgtgtagt

SEQ ID NO: 5277298 - DNA, 25 bp, Homo sapien
caataattcacgtttcaagttgagt

SEQ ID NO: 5277299 - DNA, 25 bp, Homo sapien
gagtttagatgccttgtttggaaga

SEQ ID NO: 5277300 - DNA, 25 bp, Homo sapien
tgtacagaacctacaaactctaaga

SEQ ID NO: 5277301 - DNA, 25 bp, Homo sapien
aataactgtcacttctacatcatag

SEQ ID NO: 5277302 - DNA, 25 bp, Homo sapien
tcaccacttaaagataccacaccag

SEQ ID NO: 5277303 - DNA, 25 bp, Homo sapien
caattcttatcagcaggtagacaag

SEQ ID NO: 5277304 - DNA, 25 bp, Homo sapien
taggtagccagatcagtaaatcttg

SEQ ID NO: 5277305 - DNA, 25 bp, Homo sapien
atcttgtccaattcttatcagcagg

SEQ ID NO: 5277306 - DNA, 25 bp, Homo sapien
tctccattggctttagctatggtgg

SEQ ID NO: 5277307 - DNA, 25 bp, Homo sapien
gctatggtggctttatttgaggcca

SEQ ID NO: 5277308 - DNA, 25 bp, Homo sapien
ctttagctatggtggctttatttga

SEQ ID NO: 5277309 - DNA, 25 bp, Homo sapien
ccattggctttagctatggtggctt

SEQ ID NO: 5277310 - DNA, 25 bp, Homo sapien
tttgtcttttaaattcagcaacaga

SEQ ID NO: 5277311 - DNA, 25 bp, Homo sapien
tagagtttgccttccattttgtctt

SEQ ID NO: 5277312 - DNA, 25 bp, Homo sapien
cttttaaattcagcaacagagattc

SEQ ID NO: 5277313 - DNA, 25 bp, Homo sapien
ctagagtttgccttccattttgtct

SEQ ID NO: 5277314 - DNA, 25 bp, Homo sapien
tcttgatctttcttcagcacagtgc

SEQ ID NO: 5277315 - DNA, 25 bp, Homo sapien
tcagatgacatctcttgatctttct

SEQ ID NO: 5277316 - DNA, 25 bp, Homo sapien
ttgatctttcttcagcacagtgcag

SEQ ID NO: 5277317 - DNA, 25 bp, Homo sapien
atctttcttcagcacagtgcaggaa

SEQ ID NO: 5277318 - DNA, 25 bp, Homo sapien
taatttcattccttgggacaatttc

SEQ ID NO: 5277319 - DNA, 25 bp, Homo sapien
tttcattgactcttccaattagtga

SEQ ID NO: 5277320 - DNA, 25 bp, Homo sapien
cattccttgggacaatttcattgac

SEQ ID NO: 5277321 - DNA, 25 bp, Homo sapien
cattgactcttccaattagtgaata

SEQ ID NO: 5277322 - DNA, 25 bp, Homo sapien
gtttagcagaagacgtagagcggca

SEQ ID NO: 5277323 - DNA, 25 bp, Homo sapien
tagagcggcaagacaagtaagcaac

SEQ ID NO: 5277324 - DNA, 25 bp, Homo sapien
gcaaaccactggctacttagagggt

SEQ ID NO: 5277325 - DNA, 25 bp, Homo sapien
tgaacgctgctgcatgaaactagca

SEQ ID NO: 5277326 - DNA, 25 bp, Homo sapien
taatgaagcaatgttgtccagctca

SEQ ID NO: 5277327 - DNA, 25 bp, Homo sapien
gaaataatgaagcaatgttgtccag

SEQ ID NO: 5277328 - DNA, 25 bp, Homo sapien
aaataatgaagcaatgttgtccagc

SEQ ID NO: 5277329 - DNA, 25 bp, Homo sapien
cacaagcagctgaaataatgaagca

SEQ ID NO: 5277330 - DNA, 25 bp, Homo sapien
tccagttaattcaaggacaccgtac

SEQ ID NO: 5277331 - DNA, 25 bp, Homo sapien
gactgctatcatctgggtaaccatg

SEQ ID NO: 5277332 - DNA, 25 bp, Homo sapien
gtatgacagaccatcttcaatatga

SEQ ID NO: 5277333 - DNA, 25 bp, Homo sapien
tctggatgaaactcaacaaatcttg

SEQ ID NO: 5277334 - DNA, 25 bp, Homo sapien
ttaatattgtagccagtgctacaat

SEQ ID NO: 5277335 - DNA, 25 bp, Homo sapien
ggattaatattgtagccagtgctac

SEQ ID NO: 5277336 - DNA, 25 bp, Homo sapien
gattaatattgtagccagtgctaca

SEQ ID NO: 5277337 - DNA, 25 bp, Homo sapien
tggattaatattgtagccagtgcta

SEQ ID NO: 5277338 - DNA, 25 bp, Homo sapien
gactgtttgtgaaaagaacttcttc

SEQ ID NO: 5277339 - DNA, 25 bp, Homo sapien
tttgtgaaaagaacttcttccagga

SEQ ID NO: 5277340 - DNA, 25 bp, Homo sapien
tgtttgtgaaaagaacttcttccag

SEQ ID NO: 5277341 - DNA, 25 bp, Homo sapien
ccaggaacctggtgtagatgcacat

SEQ ID NO: 5277342 - DNA, 25 bp, Homo sapien
ttaattctctcgagaagctgatgat

SEQ ID NO: 5277343 - DNA, 25 bp, Homo sapien
aatcagtgcacctgcaaaagcagac

SEQ ID NO: 5277344 - DNA, 25 bp, Homo sapien
cgatttgttttgaatgcacactctt

SEQ ID NO: 5277345 - DNA, 25 bp, Homo sapien
ttaaatcagtgcacctgcaaaagca

SEQ ID NO: 5277346 - DNA, 25 bp, Homo sapien
tgcccactcaactaaaatgcctcga

SEQ ID NO: 5277347 - DNA, 25 bp, Homo sapien
tggtggttgttcaaatatctctgca

SEQ ID NO: 5277348 - DNA, 25 bp, Homo sapien
aatatctctgcatagttgatctgtg

SEQ ID NO: 5277349 - DNA, 25 bp, Homo sapien
ccagagtactttctaggagtttgct

SEQ ID NO: 5277350 - DNA, 25 bp, Homo sapien
tgaggaaattggaactcggcgttgt

SEQ ID NO: 5277351 - DNA, 25 bp, Homo sapien
atgaagctaccagaaccccgagagc

SEQ ID NO: 5277352 - DNA, 25 bp, Homo sapien
gaagctaccagaaccccgagagcct

SEQ ID NO: 5277353 - DNA, 25 bp, Homo sapien
tgaagctaccagaaccccgagagcc

SEQ ID NO: 5277354 - DNA, 25 bp, Homo sapien
cccagaaatctgctcgaaatgactt

SEQ ID NO: 5277355 - DNA, 25 bp, Homo sapien
tcgaaatgacttttcatctcctagg

SEQ ID NO: 5277356 - DNA, 25 bp, Homo sapien
agtttctggatgactgctacctctg

SEQ ID NO: 5277357 - DNA, 25 bp, Homo sapien
tcctagggcattctcgctaagtttc

SEQ ID NO: 5277358 - DNA, 25 bp, Homo sapien
ccccatcccctgcttccacagtctg

SEQ ID NO: 5277359 - DNA, 25 bp, Homo sapien
ctgctctaggggagcccccatcccc

SEQ ID NO: 5277360 - DNA, 25 bp, Homo sapien
agcccccatcccctgcttccacagt

SEQ ID NO: 5277361 - DNA, 25 bp, Homo sapien
gagcccccatcccctgcttccacag

SEQ ID NO: 5277362 - DNA, 25 bp, Homo sapien
agatcataagggatcaggtagtggc

SEQ ID NO: 5277363 - DNA, 25 bp, Homo sapien
gctttgagatcataagggatcaggt

SEQ ID NO: 5277364 - DNA, 25 bp, Homo sapien
atcataagggatcaggtagtggcaa

SEQ ID NO: 5277365 - DNA, 25 bp, Homo sapien
ttctgctttgagatcataagggatc

SEQ ID NO: 5277366 - DNA, 25 bp, Homo sapien
tgtcaatggacagcgcctttctcta

SEQ ID NO: 5277367 - DNA, 25 bp, Homo sapien
aatggacagcgcctttctctaagaa

SEQ ID NO: 5277368 - DNA, 25 bp, Homo sapien
ttgtcaatggacagcgcctttctct

SEQ ID NO: 5277369 - DNA, 25 bp, Homo sapien
tcaatggacagcgcctttctctaag

SEQ ID NO: 5277370 - DNA, 25 bp, Homo sapien
tacgcgtagagtgttgtcgtgacaa

SEQ ID NO: 5277371 - DNA, 25 bp, Homo sapien
cttctaaacataaacagtcccattt

SEQ ID NO: 5277372 - DNA, 25 bp, Homo sapien
taaacagtcccatttacgcgtagag

SEQ ID NO: 5277373 - DNA, 25 bp, Homo sapien
gagtgttgtcgtgacaaatgcaaca

SEQ ID NO: 5277374 - DNA, 25 bp, Homo sapien
caatatacttagtttataggctcaa

SEQ ID NO: 5277375 - DNA, 25 bp, Homo sapien
gctagttttccctagataagtaatg

SEQ ID NO: 5277376 - DNA, 25 bp, Homo sapien
gttttccctagataagtaatgagca

SEQ ID NO: 5277377 - DNA, 25 bp, Homo sapien
catcacaatatacttagtttatagg

SEQ ID NO: 5277378 - DNA, 25 bp, Homo sapien
gaaggcaactatgggaagaattctc

SEQ ID NO: 5277379 - DNA, 25 bp, Homo sapien
ttttcttgattggaagcagtgcagt

SEQ ID NO: 5277380 - DNA, 25 bp, Homo sapien
tcctttagagcctattatgatataa

SEQ ID NO: 5277381 - DNA, 25 bp, Homo sapien
gatataacagctataatttccttac

SEQ ID NO: 5277382 - DNA, 25 bp, Homo sapien
aattatgtacctcgagttcaaagca

SEQ ID NO: 5277383 - DNA, 25 bp, Homo sapien
tctttgtttacaagaggctaccctc

SEQ ID NO: 5277384 - DNA, 25 bp, Homo sapien
ggctgactagattaggagctccaac

SEQ ID NO: 5277385 - DNA, 25 bp, Homo sapien
ggattcattccattacagacagcat

SEQ ID NO: 5277386 - DNA, 25 bp, Homo sapien
tctagttcaggcacaggggaatctt

SEQ ID NO: 5277387 - DNA, 25 bp, Homo sapien
cagtctagttcaggcacaggggaat

SEQ ID NO: 5277388 - DNA, 25 bp, Homo sapien
caggcacaggggaatcttctgtcac

SEQ ID NO: 5277389 - DNA, 25 bp, Homo sapien
ggcacaggggaatcttctgtcactg

SEQ ID NO: 5277390 - DNA, 25 bp, Homo sapien
tcccaagaacctttctgtgggaggc

SEQ ID NO: 5277391 - DNA, 25 bp, Homo sapien
aagaactgcagtaacttctgtctgc

SEQ ID NO: 5277392 - DNA, 25 bp, Homo sapien
ggcaagaactgcagtaacttctgtc

SEQ ID NO: 5277393 - DNA, 25 bp, Homo sapien
gaactgcagtaacttctgtctgcat

SEQ ID NO: 5277394 - DNA, 25 bp, Homo sapien
ctgcattcagacttagtctgaatct

SEQ ID NO: 5277395 - DNA, 25 bp, Homo sapien
tcaagctctgaggataatgatctca

SEQ ID NO: 5277396 - DNA, 25 bp, Homo sapien
aaaagtatatcttcaatctgatcaa

SEQ ID NO: 5277397 - DNA, 25 bp, Homo sapien
ttcaatctgatcaagctctgaggat

SEQ ID NO: 5277398 - DNA, 25 bp, Homo sapien
tttttacccattcttatctgagaat

SEQ ID NO: 5277399 - DNA, 25 bp, Homo sapien
ctatctttttacccattcttatctg

SEQ ID NO: 5277400 - DNA, 25 bp, Homo sapien
atctttttacccattcttatctgag

SEQ ID NO: 5277401 - DNA, 25 bp, Homo sapien
tctttttacccattcttatctgaga

SEQ ID NO: 5277402 - DNA, 25 bp, Homo sapien
caggattcccatttttgtagtgttc

SEQ ID NO: 5277403 - DNA, 25 bp, Homo sapien
gattacattctattactgctacagg

SEQ ID NO: 5277404 - DNA, 25 bp, Homo sapien
attacaccttgggatcctttgctga

SEQ ID NO: 5277405 - DNA, 25 bp, Homo sapien
ctttgctgatttttcgattacattc

SEQ ID NO: 5277406 - DNA, 25 bp, Homo sapien
gctcctggaaacacagcgtttctat

SEQ ID NO: 5277407 - DNA, 25 bp, Homo sapien
tgggccagttggtgagtgatcaaca

SEQ ID NO: 5277408 - DNA, 25 bp, Homo sapien
aagctgctaatatgttctctgcatc

SEQ ID NO: 5277409 - DNA, 25 bp, Homo sapien
cactttcttaaaaggggttgctgat

SEQ ID NO: 5277410 - DNA, 25 bp, Homo sapien
catgggtaaactgcctgtcatggga

SEQ ID NO: 5277411 - DNA, 25 bp, Homo sapien
cacatccctgggaatttggaactca

SEQ ID NO: 5277412 - DNA, 25 bp, Homo sapien
tgcagtagatgtacgcctctggatg

SEQ ID NO: 5277413 - DNA, 25 bp, Homo sapien
gctgaagttattaggcctaggagcc

SEQ ID NO: 5277414 - DNA, 25 bp, Homo sapien
taaacacctccaattggctcgtaag

SEQ ID NO: 5277415 - DNA, 25 bp, Homo sapien
caattggctcgtaagaataactttc

SEQ ID NO: 5277416 - DNA, 25 bp, Homo sapien
cctccaattggctcgtaagaataac

SEQ ID NO: 5277417 - DNA, 25 bp, Homo sapien
ctattaaacacctccaattggctcg

SEQ ID NO: 5277418 - DNA, 25 bp, Homo sapien
caacgtggctgtgggaaagctgcct

SEQ ID NO: 5277419 - DNA, 25 bp, Homo sapien
tgagaatccacatgaaagcgaccac

SEQ ID NO: 5277420 - DNA, 25 bp, Homo sapien
tctgccggatgcctgctttaacagc

SEQ ID NO: 5277421 - DNA, 25 bp, Homo sapien
tgacatggccagcaaatgtttgggc

SEQ ID NO: 5277422 - DNA, 25 bp, Homo sapien
ccttctgccatgattatacgtttcc

SEQ ID NO: 5277423 - DNA, 25 bp, Homo sapien
tcctgaggcctcccagccatgcctc

SEQ ID NO: 5277424 - DNA, 25 bp, Homo sapien
cagcttcccctttgccttctgccat

SEQ ID NO: 5277425 - DNA, 25 bp, Homo sapien
ctgccatgattatacgtttcctgag

SEQ ID NO: 5277426 - DNA, 25 bp, Homo sapien
tattccgggaatctttttctgtgcc

SEQ ID NO: 5277427 - DNA, 25 bp, Homo sapien
tccagtaacatttgatagaaaggct

SEQ ID NO: 5277428 - DNA, 25 bp, Homo sapien
tgagcatatatgactacctccaaga

SEQ ID NO: 5277429 - DNA, 25 bp, Homo sapien
ggcttatgatttccaattgagtaac

SEQ ID NO: 5277430 - DNA, 25 bp, Homo sapien
tatcatactcattttagtgtatgtg

SEQ ID NO: 5277431 - DNA, 25 bp, Homo sapien
agaatgtgtctgtcatccttgtgca

SEQ ID NO: 5277432 - DNA, 25 bp, Homo sapien
ctctgtatcatactcattttagtgt

SEQ ID NO: 5277433 - DNA, 25 bp, Homo sapien
aactatagaatgtttcaagaatgtg

SEQ ID NO: 5277434 - DNA, 25 bp, Homo sapien
acccacagacaccaattactattaa

SEQ ID NO: 5277435 - DNA, 25 bp, Homo sapien
taaatccatatgtcggcactgactt

SEQ ID NO: 5277436 - DNA, 25 bp, Homo sapien
gttcatacctaatgacaggctggag

SEQ ID NO: 5277437 - DNA, 25 bp, Homo sapien
gcagccagccatttcatatgcagaa

SEQ ID NO: 5277438 - DNA, 25 bp, Homo sapien
tgcctgtggtaggtgcaattctcta

SEQ ID NO: 5277439 - DNA, 25 bp, Homo sapien
tagccaaggcatcggacaccatttg

SEQ ID NO: 5277440 - DNA, 25 bp, Homo sapien
tctaaaaagatctcctgcctgtggt

SEQ ID NO: 5277441 - DNA, 25 bp, Homo sapien
accatttgcctattagtgactgctg

SEQ ID NO: 5277442 - DNA, 25 bp, Homo sapien
tctgaaataaatgagtgtagacatt

SEQ ID NO: 5277443 - DNA, 25 bp, Homo sapien
agtgtgggcctgaatgtactccaca

SEQ ID NO: 5277444 - DNA, 25 bp, Homo sapien
gtgtgggcctgaatgtactccacat

SEQ ID NO: 5277445 - DNA, 25 bp, Homo sapien
tgtgggcctgaatgtactccacatc

SEQ ID NO: 5277446 - DNA, 25 bp, Homo sapien
taatcctttgcactggtaaaatccc

SEQ ID NO: 5277447 - DNA, 25 bp, Homo sapien
tgcttcctgctctcactggttggtt

SEQ ID NO: 5277448 - DNA, 25 bp, Homo sapien
tgtctcgaggtgttcttgcttcctg

SEQ ID NO: 5277449 - DNA, 25 bp, Homo sapien
gccatcaattgggtggattaatcct

SEQ ID NO: 5277450 - DNA, 25 bp, Homo sapien
tctgagtatttgccaaagtcatttg

SEQ ID NO: 5277451 - DNA, 25 bp, Homo sapien
cttctgagtatttgccaaagtcatt

SEQ ID NO: 5277452 - DNA, 25 bp, Homo sapien
tgcttctgagtatttgccaaagtca

SEQ ID NO: 5277453 - DNA, 25 bp, Homo sapien
gcttctgagtatttgccaaagtcat

SEQ ID NO: 5277454 - DNA, 25 bp, Homo sapien
gaaagtaactgtgtagatgtacaca

SEQ ID NO: 5277455 - DNA, 25 bp, Homo sapien
cagcaggaaagtaactgtgtagatg

SEQ ID NO: 5277456 - DNA, 25 bp, Homo sapien
gacagcaggaaagtaactgtgtaga

SEQ ID NO: 5277457 - DNA, 25 bp, Homo sapien
caggaaagtaactgtgtagatgtac

SEQ ID NO: 5277458 - DNA, 25 bp, Homo sapien
gagtgtgtacagagagagcttgagc

SEQ ID NO: 5277459 - DNA, 25 bp, Homo sapien
ttaagagtgtgtacagagagagctt

SEQ ID NO: 5277460 - DNA, 25 bp, Homo sapien
ccagactggagattaagagtgtgta

SEQ ID NO: 5277461 - DNA, 25 bp, Homo sapien
cagactggagattaagagtgtgtac

SEQ ID NO: 5277462 - DNA, 25 bp, Homo sapien
gaattccatagaataagtttgacca

SEQ ID NO: 5277463 - DNA, 25 bp, Homo sapien
tgtctctctatgtgcgactctgtgc

SEQ ID NO: 5277464 - DNA, 25 bp, Homo sapien
tcagtttcatgtgctatcctatcct

SEQ ID NO: 5277465 - DNA, 25 bp, Homo sapien
tagcctgaagcagctaaggccgtgc

SEQ ID NO: 5277466 - DNA, 25 bp, Homo sapien
cacatatatacctcaatagatacag

SEQ ID NO: 5277467 - DNA, 25 bp, Homo sapien
ccctgggttgcaacagtggttcagc

SEQ ID NO: 5277468 - DNA, 25 bp, Homo sapien
ttatatgccgtgatcaagagaaatt

SEQ ID NO: 5277469 - DNA, 25 bp, Homo sapien
gaaatttatccctgggttgcaacag

SEQ ID NO: 5277470 - DNA, 25 bp, Homo sapien
gaacttcccagagggatcgctgact

SEQ ID NO: 5277471 - DNA, 25 bp, Homo sapien
caggatgctgtgttcgtgtataata

SEQ ID NO: 5277472 - DNA, 25 bp, Homo sapien
ggttgctggagaagggaacttccca

SEQ ID NO: 5277473 - DNA, 25 bp, Homo sapien
tcgtggtagaagaagtgagtctgca

SEQ ID NO: 5277474 - DNA, 25 bp, Homo sapien
tcaagcatggaataaactggactcc

SEQ ID NO: 5277475 - DNA, 25 bp, Homo sapien
cacagcatgaagtaccctgcccata

SEQ ID NO: 5277476 - DNA, 25 bp, Homo sapien
gatagatctcaatggtcacactgta

SEQ ID NO: 5277477 - DNA, 25 bp, Homo sapien
ccagccagtctgcaatgtgatagat

SEQ ID NO: 5277478 - DNA, 25 bp, Homo sapien
acatcttgactagactcacttaccc

SEQ ID NO: 5277479 - DNA, 25 bp, Homo sapien
agactcacttacccattggcaagtc

SEQ ID NO: 5277480 - DNA, 25 bp, Homo sapien
tacatcttgactagactcacttacc

SEQ ID NO: 5277481 - DNA, 25 bp, Homo sapien
aaccttctcgtgttctctctgctgt

SEQ ID NO: 5277482 - DNA, 25 bp, Homo sapien
acatgctgttggtgaacaagcttcc

SEQ ID NO: 5277483 - DNA, 25 bp, Homo sapien
aatatcttctcttcgcattattctg

SEQ ID NO: 5277484 - DNA, 25 bp, Homo sapien
tatccaaatactctgctgcgcatct

SEQ ID NO: 5277485 - DNA, 25 bp, Homo sapien
cagctctctctaatgaatgacccat

SEQ ID NO: 5277486 - DNA, 25 bp, Homo sapien
ctccagctctctctaatgaatgacc

SEQ ID NO: 5277487 - DNA, 25 bp, Homo sapien
ccagctctctctaatgaatgaccca

SEQ ID NO: 5277488 - DNA, 25 bp, Homo sapien
tccagctctctctaatgaatgaccc

SEQ ID NO: 5277489 - DNA, 25 bp, Homo sapien
aggtctgtattcttcctccacccca

SEQ ID NO: 5277490 - DNA, 25 bp, Homo sapien
gaggtctgtattcttcctccacccc

SEQ ID NO: 5277491 - DNA, 25 bp, Homo sapien
ggtctgtattcttcctccaccccat

SEQ ID NO: 5277492 - DNA, 25 bp, Homo sapien
ttacttgcctctcgttggtttccat

SEQ ID NO: 5277493 - DNA, 25 bp, Homo sapien
ctgttacttgcctctcgttggtttc

SEQ ID NO: 5277494 - DNA, 25 bp, Homo sapien
gttacttgcctctcgttggtttcca

SEQ ID NO: 5277495 - DNA, 25 bp, Homo sapien
tgttacttgcctctcgttggtttcc

SEQ ID NO: 5277496 - DNA, 25 bp, Homo sapien
gaataagaggaacttctgtgagcag

SEQ ID NO: 5277497 - DNA, 25 bp, Homo sapien
ctgaataagaggaacttctgtgagc

SEQ ID NO: 5277498 - DNA, 25 bp, Homo sapien
aatctctgagtcaagctggcctcct

SEQ ID NO: 5277499 - DNA, 25 bp, Homo sapien
cttttcctgaataagaggaacttct

SEQ ID NO: 5277500 - DNA, 25 bp, Homo sapien
cccaggttcacgagattctggtgcc

SEQ ID NO: 5277501 - DNA, 25 bp, Homo sapien
tctggtgccttagcccccgagtagt

SEQ ID NO: 5277502 - DNA, 25 bp, Homo sapien
aggttcacgagattctggtgcctta

SEQ ID NO: 5277503 - DNA, 25 bp, Homo sapien
cacgagattctggtgccttagcccc

SEQ ID NO: 5277504 - DNA, 25 bp, Homo sapien
caagagggacacaaagcggttgagt

SEQ ID NO: 5277505 - DNA, 25 bp, Homo sapien
taggacagtcaatcaattcaaagtt

SEQ ID NO: 5277506 - DNA, 25 bp, Homo sapien
tctgaccctcatgtggtcttgggct

SEQ ID NO: 5277507 - DNA, 25 bp, Homo sapien
tctcccctgaattccaaggtgttcg

SEQ ID NO: 5277508 - DNA, 25 bp, Homo sapien
gacgaaacctttcaaagcggctgat

SEQ ID NO: 5277509 - DNA, 25 bp, Homo sapien
cttgactccgtacatcacagcttga

SEQ ID NO: 5277510 - DNA, 25 bp, Homo sapien
gcagcgtccacagctactggagcct

SEQ ID NO: 5277511 - DNA, 25 bp, Homo sapien
ggaaccttcccagagttgacattgg

SEQ ID NO: 5277512 - DNA, 25 bp, Homo sapien
gatttgaaagagtgttttttgctcc

SEQ ID NO: 5277513 - DNA, 25 bp, Homo sapien
cattgtacttgggaactcaggttac

SEQ ID NO: 5277514 - DNA, 25 bp, Homo sapien
cagaatactagcagatttgaaagag

SEQ ID NO: 5277515 - DNA, 25 bp, Homo sapien
gtaatttgagatgcttcaaacccat

SEQ ID NO: 5277516 - DNA, 25 bp, Homo sapien
cagcttcagtagaatgagaggtgtt

SEQ ID NO: 5277517 - DNA, 25 bp, Homo sapien
gaatgagaggtgttgtaacatcatc

SEQ ID NO: 5277518 - DNA, 25 bp, Homo sapien
tcacagcttcagtagaatgagaggt

SEQ ID NO: 5277519 - DNA, 25 bp, Homo sapien
aatgagaggtgttgtaacatcatct

SEQ ID NO: 5277520 - DNA, 25 bp, Homo sapien
tagttaatggtgatccatataacag

SEQ ID NO: 5277521 - DNA, 25 bp, Homo sapien
cgaaattgcatacaagcccttgaca

SEQ ID NO: 5277522 - DNA, 25 bp, Homo sapien
cagcattgttaatcttcgaaattgc

SEQ ID NO: 5277523 - DNA, 25 bp, Homo sapien
gatagttaatggtgatccatataac

SEQ ID NO: 5277524 - DNA, 25 bp, Homo sapien
tatcagcgggaagtacacataggag

SEQ ID NO: 5277525 - DNA, 25 bp, Homo sapien
gcttctgaatcacctactgcatgca

SEQ ID NO: 5277526 - DNA, 25 bp, Homo sapien
tggagccaaactcataccagcattg

SEQ ID NO: 5277527 - DNA, 25 bp, Homo sapien
cacataggagtatcatggagccaaa

SEQ ID NO: 5277528 - DNA, 25 bp, Homo sapien
gctcatctcttgaaggtagtcttcc

SEQ ID NO: 5277529 - DNA, 25 bp, Homo sapien
caaaatcacctttagcaaattcatg

SEQ ID NO: 5277530 - DNA, 25 bp, Homo sapien
aagctcatctcttgaaggtagtctt

SEQ ID NO: 5277531 - DNA, 25 bp, Homo sapien
ttcctcgttctccacatctctctgt

SEQ ID NO: 5277532 - DNA, 25 bp, Homo sapien
tatcagctctacacagtcattcagg

SEQ ID NO: 5277533 - DNA, 25 bp, Homo sapien
ggagctccggccttcttccatctag

SEQ ID NO: 5277534 - DNA, 25 bp, Homo sapien
cttgtcatttagctgggtgcccaga

SEQ ID NO: 5277535 - DNA, 25 bp, Homo sapien
gtttcaggagctttcaggagcggca

SEQ ID NO: 5277536 - DNA, 25 bp, Homo sapien
aggagctcgccgacctcgtggacga

SEQ ID NO: 5277537 - DNA, 25 bp, Homo sapien
cggacttcgcagtcagcggttctca

SEQ ID NO: 5277538 - DNA, 25 bp, Homo sapien
tggacgacaaggagtagccgcctag

SEQ ID NO: 5277539 - DNA, 25 bp, Homo sapien
gcacccggacttcgcagtcagcggt

SEQ ID NO: 5277540 - DNA, 25 bp, Homo sapien
tgactgtggcccgactcgaaaacaa

SEQ ID NO: 5277541 - DNA, 25 bp, Homo sapien
ctcttctcaaaagggaccatcaccg

SEQ ID NO: 5277542 - DNA, 25 bp, Homo sapien
acacagaccggtcggaggcgagaac

SEQ ID NO: 5277543 - DNA, 25 bp, Homo sapien
ggagaaaggacatggccttccccgc

SEQ ID NO: 5277544 - DNA, 25 bp, Homo sapien
caagacagcacttcgggattccggg

SEQ ID NO: 5277545 - DNA, 25 bp, Homo sapien
tggatgcgtccccagatcgcaggat

SEQ ID NO: 5277546 - DNA, 25 bp, Homo sapien
ccttgtgcacttgggaataattccc

SEQ ID NO: 5277547 - DNA, 25 bp, Homo sapien
agaaatcgagcctgtcccttgtgca

SEQ ID NO: 5277548 - DNA, 25 bp, Homo sapien
ccagacagtgtttgcctccggttct

SEQ ID NO: 5277549 - DNA, 25 bp, Homo sapien
ctaagccagacagtgtttgcctccg

SEQ ID NO: 5277550 - DNA, 25 bp, Homo sapien
tgcgggctaagccagacagtgtttg

SEQ ID NO: 5277551 - DNA, 25 bp, Homo sapien
aagccagacagtgtttgcctccggt

SEQ ID NO: 5277552 - DNA, 25 bp, Homo sapien
gcctttgcctgcgagtctccctcgc

SEQ ID NO: 5277553 - DNA, 25 bp, Homo sapien
ctttgcctgcgagtctccctcgctg

SEQ ID NO: 5277554 - DNA, 25 bp, Homo sapien
ccgcctttgcctgcgagtctccctc

SEQ ID NO: 5277555 - DNA, 25 bp, Homo sapien
tttgcctgcgagtctccctcgctgg

SEQ ID NO: 5277556 - DNA, 25 bp, Homo sapien
gagctcgctcgttcacctggtgtct

SEQ ID NO: 5277557 - DNA, 25 bp, Homo sapien
tcctcgggctgcatttcaaaaatag

SEQ ID NO: 5277558 - DNA, 25 bp, Homo sapien
tgaagggcgcttattgttctgaacc

SEQ ID NO: 5277559 - DNA, 25 bp, Homo sapien
cattgttacaacaccatagccagta

SEQ ID NO: 5277560 - DNA, 25 bp, Homo sapien
gctaagagcttagctaacattgcct

SEQ ID NO: 5277561 - DNA, 25 bp, Homo sapien
gaaattgctagcaggttccacgatg

SEQ ID NO: 5277562 - DNA, 25 bp, Homo sapien
gggccattaagagtggatgtagcta

SEQ ID NO: 5277563 - DNA, 25 bp, Homo sapien
caacagcagccctagtaatggtgga

SEQ ID NO: 5277564 - DNA, 25 bp, Homo sapien
tatacttgctgaggctagactgaca

SEQ ID NO: 5277565 - DNA, 25 bp, Homo sapien
tatagttacgaaacacttgtgccag

SEQ ID NO: 5277566 - DNA, 25 bp, Homo sapien
cagcaagtattatggccaaagccag

SEQ ID NO: 5277567 - DNA, 25 bp, Homo sapien
caagtaacaggtggcagatcataaa

SEQ ID NO: 5277568 - DNA, 25 bp, Homo sapien
gctcacttccaagtccactgtagat

SEQ ID NO: 5277569 - DNA, 25 bp, Homo sapien
tctagggagatcatacccatgatga

SEQ ID NO: 5277570 - DNA, 25 bp, Homo sapien
tctcagtgcaagtgtctgcccaggg

SEQ ID NO: 5277571 - DNA, 25 bp, Homo sapien
tcccaacagcacacgcactttattt

SEQ ID NO: 5277572 - DNA, 25 bp, Homo sapien
aacagctaaaactggccaaattcat

SEQ ID NO: 5277573 - DNA, 25 bp, Homo sapien
cctctcccatttgaacttctggtgt

SEQ ID NO: 5277574 - DNA, 25 bp, Homo sapien
gaacttctggtgtagcactttctcc

SEQ ID NO: 5277575 - DNA, 25 bp, Homo sapien
gctgttctgtgaagcttctcctttt

SEQ ID NO: 5277576 - DNA, 25 bp, Homo sapien
tcccaatgcttacagttaacttctc

SEQ ID NO: 5277577 - DNA, 25 bp, Homo sapien
gagaactattgcactctcgtctatg

SEQ ID NO: 5277578 - DNA, 25 bp, Homo sapien
tgcactctcgtctatgttcactgct

SEQ ID NO: 5277579 - DNA, 25 bp, Homo sapien
gaaaactctattgcaaggtttatct

SEQ ID NO: 5277580 - DNA, 25 bp, Homo sapien
caccaactccttgtattgcaactgg

SEQ ID NO: 5277581 - DNA, 25 bp, Homo sapien
tggaccccctcgacctgggtgaatg

SEQ ID NO: 5277582 - DNA, 25 bp, Homo sapien
gtgaatgtactcttttcagcaacca

SEQ ID NO: 5277583 - DNA, 25 bp, Homo sapien
caaccaccaactccttgtattgcaa

SEQ ID NO: 5277584 - DNA, 25 bp, Homo sapien
aaataccacggtagcttcctgctcg

SEQ ID NO: 5277585 - DNA, 25 bp, Homo sapien
taccacggtagcttcctgctcgtac

SEQ ID NO: 5277586 - DNA, 25 bp, Homo sapien
ctctaaaataccacggtagcttcct

SEQ ID NO: 5277587 - DNA, 25 bp, Homo sapien
cacggtagcttcctgctcgtaccat

SEQ ID NO: 5277588 - DNA, 25 bp, Homo sapien
gaggtctttttgatggcaaatctca

SEQ ID NO: 5277589 - DNA, 25 bp, Homo sapien
aaagaggtctttttgatggcaaatc

SEQ ID NO: 5277590 - DNA, 25 bp, Homo sapien
aagaggtctttttgatggcaaatct

SEQ ID NO: 5277591 - DNA, 25 bp, Homo sapien
agaggtctttttgatggcaaatctc

SEQ ID NO: 5277592 - DNA, 25 bp, Homo sapien
atgattccagtctccgaacagctct

SEQ ID NO: 5277593 - DNA, 25 bp, Homo sapien
tccgaacagctctagtacctttatt

SEQ ID NO: 5277594 - DNA, 25 bp, Homo sapien
gtcttctaagcatgattccagtctc

SEQ ID NO: 5277595 - DNA, 25 bp, Homo sapien
ttaaaagcagccgcaggtcttctaa

SEQ ID NO: 5277596 - DNA, 25 bp, Homo sapien
tatcatgtcatagtcatcacctgtc

SEQ ID NO: 5277597 - DNA, 25 bp, Homo sapien
aaatatcatgtcatagtcatcacct

SEQ ID NO: 5277598 - DNA, 25 bp, Homo sapien
tcactgtgctttagcaactggtcca

SEQ ID NO: 5277599 - DNA, 25 bp, Homo sapien
ttagcaactggtccacccttcagag

SEQ ID NO: 5277600 - DNA, 25 bp, Homo sapien
gaaaatctcctgagcggttcagcaa

SEQ ID NO: 5277601 - DNA, 25 bp, Homo sapien
tcccagtgttgctgacaaaaccaaa

SEQ ID NO: 5277602 - DNA, 25 bp, Homo sapien
tccgttatcagggtctgtcagctca

SEQ ID NO: 5277603 - DNA, 25 bp, Homo sapien
agtgccatctcttcgttgacaattg

SEQ ID NO: 5277604 - DNA, 25 bp, Homo sapien
ggcatctcctttgtataccagtctt

SEQ ID NO: 5277605 - DNA, 25 bp, Homo sapien
gaaaaggacatctctgatgatctgt

SEQ ID NO: 5277606 - DNA, 25 bp, Homo sapien
tataccagtctttcagtacatgagt

SEQ ID NO: 5277607 - DNA, 25 bp, Homo sapien
ttggcatctcctttgtataccagtc

SEQ ID NO: 5277608 - DNA, 25 bp, Homo sapien
ctccggccagttgtaacggtccctg

SEQ ID NO: 5277609 - DNA, 25 bp, Homo sapien
tatatccaagcaagatttgttgctg

SEQ ID NO: 5277610 - DNA, 25 bp, Homo sapien
taaactcactttgctacaattattt

SEQ ID NO: 5277611 - DNA, 25 bp, Homo sapien
cggtccctgtaattcagtgtctgga

SEQ ID NO: 5277612 - DNA, 25 bp, Homo sapien
ttactgttcacggtagtcaggaaag

SEQ ID NO: 5277613 - DNA, 25 bp, Homo sapien
aataaacacactaaactctctctgt

SEQ ID NO: 5277614 - DNA, 25 bp, Homo sapien
tcacggtagtcaggaaagggtaagc

SEQ ID NO: 5277615 - DNA, 25 bp, Homo sapien
ggtaagcggtgaagaatgcattcat

SEQ ID NO: 5277616 - DNA, 25 bp, Homo sapien
attccaaaatgagctcattggaaag

SEQ ID NO: 5277617 - DNA, 25 bp, Homo sapien
tctagggttccacccttgacattcc

SEQ ID NO: 5277618 - DNA, 25 bp, Homo sapien
cattggaaaggttctctcaggcaat

SEQ ID NO: 5277619 - DNA, 25 bp, Homo sapien
ttctagggttccacccttgacattc

SEQ ID NO: 5277620 - DNA, 25 bp, Homo sapien
catcttcctccgagggaaatgccta

SEQ ID NO: 5277621 - DNA, 25 bp, Homo sapien
gacgtatccaaactctattaccatt

SEQ ID NO: 5277622 - DNA, 25 bp, Homo sapien
caggtcacctctatcataccttgag

SEQ ID NO: 5277623 - DNA, 25 bp, Homo sapien
gccagtgtctacattgacgtatcca

SEQ ID NO: 5277624 - DNA, 25 bp, Homo sapien
gaatggctccatagcataaatctgg

SEQ ID NO: 5277625 - DNA, 25 bp, Homo sapien
tacatcagtactgcagctgctaccg

SEQ ID NO: 5277626 - DNA, 25 bp, Homo sapien
gcctcgttaagggtacagaagacag

SEQ ID NO: 5277627 - DNA, 25 bp, Homo sapien
aatctggaagccgatcctaagcgca

SEQ ID NO: 5277628 - DNA, 25 bp, Homo sapien
ccccatccccctgtcacacctgatg

SEQ ID NO: 5277629 - DNA, 25 bp, Homo sapien
ctgagaaaatcgaagttcaggggag

SEQ ID NO: 5277630 - DNA, 25 bp, Homo sapien
acagctgagaaaatcgaagttcagg

SEQ ID NO: 5277631 - DNA, 25 bp, Homo sapien
cacacctgatgggatgttagacaca

SEQ ID NO: 5277632 - DNA, 25 bp, Homo sapien
aaacaggaaagtcgacagtgcagcc

SEQ ID NO: 5277633 - DNA, 25 bp, Homo sapien
gaggtgaagtcctaccatacgccat

SEQ ID NO: 5277634 - DNA, 25 bp, Homo sapien
agaactggctcacacgatcacgagg

SEQ ID NO: 5277635 - DNA, 25 bp, Homo sapien
tcaaaaacaggaaagtcgacagtgc

SEQ ID NO: 5277636 - DNA, 25 bp, Homo sapien
tgcccaatgtcccaccagaatctgg

SEQ ID NO: 5277637 - DNA, 25 bp, Homo sapien
agaacaagacccaatggcctggctc

SEQ ID NO: 5277638 - DNA, 25 bp, Homo sapien
tactcgctattgttcctacccaggc

SEQ ID NO: 5277639 - DNA, 25 bp, Homo sapien
ggagtcctgaagctctgagggataa

SEQ ID NO: 5277640 - DNA, 25 bp, Homo sapien
ccattattctccgatttttctgatg

SEQ ID NO: 5277641 - DNA, 25 bp, Homo sapien
gatgttgcgattccaagctcagtcc

SEQ ID NO: 5277642 - DNA, 25 bp, Homo sapien
tcagtgctttctccattattctccg

SEQ ID NO: 5277643 - DNA, 25 bp, Homo sapien
tttttctgatgttgcgattccaagc

SEQ ID NO: 5277644 - DNA, 25 bp, Homo sapien
tgaaccttcctctcaaatttagctt

SEQ ID NO: 5277645 - DNA, 25 bp, Homo sapien
tgttatcgaaagcaaatttttgaac

SEQ ID NO: 5277646 - DNA, 25 bp, Homo sapien
gatgttatcgaaagcaaatttttga

SEQ ID NO: 5277647 - DNA, 25 bp, Homo sapien
agatgttatcgaaagcaaatttttg

SEQ ID NO: 5277648 - DNA, 25 bp, Homo sapien
tggttttgctatgatgtcccagctg

SEQ ID NO: 5277649 - DNA, 25 bp, Homo sapien
gaccaccatgtgctgtaacatcaaa

SEQ ID NO: 5277650 - DNA, 25 bp, Homo sapien
tgtgcctggccgaacatgtttagtc

SEQ ID NO: 5277651 - DNA, 25 bp, Homo sapien
gaatagctgcaattataggggtgca

SEQ ID NO: 5277652 - DNA, 25 bp, Homo sapien
taacactataaaatattgccctgat

SEQ ID NO: 5277653 - DNA, 25 bp, Homo sapien
tattgccctgatattgctatctcca

SEQ ID NO: 5277654 - DNA, 25 bp, Homo sapien
tgaaatgcctatgccacagggatgt

SEQ ID NO: 5277655 - DNA, 25 bp, Homo sapien
cctcagggcgtgtttggatacaaaa

SEQ ID NO: 5277656 - DNA, 25 bp, Homo sapien
cagggatcagtgagtgacagatatc

SEQ ID NO: 5277657 - DNA, 25 bp, Homo sapien
cctgccaggagtgagcttaacaccc

SEQ ID NO: 5277658 - DNA, 25 bp, Homo sapien
tgagctaccagacccagcaacagtt

SEQ ID NO: 5277659 - DNA, 25 bp, Homo sapien
taaacattgtttcactcagacatgc

SEQ ID NO: 5277660 - DNA, 25 bp, Homo sapien
tactgcaccatataccaaacggacc

SEQ ID NO: 5277661 - DNA, 25 bp, Homo sapien
tctaaaaggagagatagacacttgt

SEQ ID NO: 5277662 - DNA, 25 bp, Homo sapien
caggattgaacatgttatctggaca

SEQ ID NO: 5277663 - DNA, 25 bp, Homo sapien
tatatatccacccaacactgaacca

SEQ ID NO: 5277664 - DNA, 25 bp, Homo sapien
cttatgcaggtgaaggctggacccc

SEQ ID NO: 5277665 - DNA, 25 bp, Homo sapien
ctgaggcaaaccaagtggcaggtga

SEQ ID NO: 5277666 - DNA, 25 bp, Homo sapien
tgccagtaagggctaggcccatgca

SEQ ID NO: 5277667 - DNA, 25 bp, Homo sapien
caggtaaaagctggacccatgcaga

SEQ ID NO: 5277668 - DNA, 25 bp, Homo sapien
gatgaaggctgggctcatgcaggta

SEQ ID NO: 5277669 - DNA, 25 bp, Homo sapien
tgaaggctgggctcatgcaggtaaa

SEQ ID NO: 5277670 - DNA, 25 bp, Homo sapien
ctgtgcagatgaaggctgggctcat

SEQ ID NO: 5277671 - DNA, 25 bp, Homo sapien
aaggctgggctcatgcaggtaaaag

SEQ ID NO: 5277672 - DNA, 25 bp, Homo sapien
tttggtccaggactcaaggccggca

SEQ ID NO: 5277673 - DNA, 25 bp, Homo sapien
tcagccaggcgaagggactttgcag

SEQ ID NO: 5277674 - DNA, 25 bp, Homo sapien
gaattgtgaactgctcgctgccgct

SEQ ID NO: 5277675 - DNA, 25 bp, Homo sapien
tgatgcctcatacaccagtttggtc

SEQ ID NO: 5277676 - DNA, 25 bp, Homo sapien
tccctgagtcaggctttggccacct

SEQ ID NO: 5277677 - DNA, 25 bp, Homo sapien
cctgagtcaggctttggccacctgc

SEQ ID NO: 5277678 - DNA, 25 bp, Homo sapien
ccctgagtcaggctttggccacctg

SEQ ID NO: 5277679 - DNA, 25 bp, Homo sapien
gcctcctgatgtggcccttctgagc

SEQ ID NO: 5277680 - DNA, 25 bp, Homo sapien
agatagatcctcgtgctccttcggg

SEQ ID NO: 5277681 - DNA, 25 bp, Homo sapien
tctaaaacaggaaactcaaggccat

SEQ ID NO: 5277682 - DNA, 25 bp, Homo sapien
cccaggatgtcagcagacaggctag

SEQ ID NO: 5277683 - DNA, 25 bp, Homo sapien
gaaatggtgttgaattcccagccca

SEQ ID NO: 5277684 - DNA, 25 bp, Homo sapien
ccaactgatcagatgtgtcacatgc

SEQ ID NO: 5277685 - DNA, 25 bp, Homo sapien
tctttggaaggcagcccatgatgag

SEQ ID NO: 5277686 - DNA, 25 bp, Homo sapien
gaacctccagatcgggccaactgat

SEQ ID NO: 5277687 - DNA, 25 bp, Homo sapien
gatgttgggaatgttcaccatcagc

SEQ ID NO: 5277688 - DNA, 25 bp, Homo sapien
agctaagcttttggcaaaggctggc

SEQ ID NO: 5277689 - DNA, 25 bp, Homo sapien
aaaggctggctgtgtcaaaggcagg

SEQ ID NO: 5277690 - DNA, 25 bp, Homo sapien
tgagctaagcttttggcaaaggctg

SEQ ID NO: 5277691 - DNA, 25 bp, Homo sapien
ggctggctgtgtcaaaggcaggaag

SEQ ID NO: 5277692 - DNA, 25 bp, Homo sapien
gaggccttgctacaaacaccagctt

SEQ ID NO: 5277693 - DNA, 25 bp, Homo sapien
tgttcagcccctgttttgggattcc

SEQ ID NO: 5277694 - DNA, 25 bp, Homo sapien
tgaacctccatgtctcaaaggctct

SEQ ID NO: 5277695 - DNA, 25 bp, Homo sapien
tccctggtccttgcaaaatctgtcc

SEQ ID NO: 5277696 - DNA, 25 bp, Homo sapien
caggaccccaatagcatactccaga

SEQ ID NO: 5277697 - DNA, 25 bp, Homo sapien
catactccagaaggctgttctctgg

SEQ ID NO: 5277698 - DNA, 25 bp, Homo sapien
ccagtcctgcccctgagagaaattc

SEQ ID NO: 5277699 - DNA, 25 bp, Homo sapien
catcaagcgggagtaacattgcaaa

SEQ ID NO: 5277700 - DNA, 25 bp, Homo sapien
cacagaaggtgccatctgctggaat

SEQ ID NO: 5277701 - DNA, 25 bp, Homo sapien
gaaggtgccatctgctggaattcag

SEQ ID NO: 5277702 - DNA, 25 bp, Homo sapien
agccacagaaggtgccatctgctgg

SEQ ID NO: 5277703 - DNA, 25 bp, Homo sapien
gccatctgctggaattcagttgggc

SEQ ID NO: 5277704 - DNA, 25 bp, Homo sapien
tgatccatacattcatcgatgccga

SEQ ID NO: 5277705 - DNA, 25 bp, Homo sapien
gggaaacatctgtcatgatccatac

SEQ ID NO: 5277706 - DNA, 25 bp, Homo sapien
cgtagtctgttgtgagcgttaatga

SEQ ID NO: 5277707 - DNA, 25 bp, Homo sapien
ttcagtggcagctacaattaagaag

SEQ ID NO: 5277708 - DNA, 25 bp, Homo sapien
gattagatggatcacacagccccag

SEQ ID NO: 5277709 - DNA, 25 bp, Homo sapien
gaacagtccagtgtatccagccaga

SEQ ID NO: 5277710 - DNA, 25 bp, Homo sapien
tagttcgctggtcaacccaggtgtg

SEQ ID NO: 5277711 - DNA, 25 bp, Homo sapien
tttggtccacaaagagagggtgcat

SEQ ID NO: 5277712 - DNA, 25 bp, Homo sapien
tgggtgcccaaagctgtgactgagt

SEQ ID NO: 5277713 - DNA, 25 bp, Homo sapien
gagggacagcaacttgcccagtacc

SEQ ID NO: 5277714 - DNA, 25 bp, Homo sapien
gatggagcaaaagtgtgggacacca

SEQ ID NO: 5277715 - DNA, 25 bp, Homo sapien
gggacaccatggagctcatcttaag

SEQ ID NO: 5277716 - DNA, 25 bp, Homo sapien
gaaacggcacagtatctgacagtgt

SEQ ID NO: 5277717 - DNA, 25 bp, Homo sapien
caggcgcaagctcccttcgggaact

SEQ ID NO: 5277718 - DNA, 25 bp, Homo sapien
gtagtgagtgactgcccagcttccc

SEQ ID NO: 5277719 - DNA, 25 bp, Homo sapien
tgttctccatcccactgccatcaga

SEQ ID NO: 5277720 - DNA, 25 bp, Homo sapien
tgcagagccctacacagtcaatggg

SEQ ID NO: 5277721 - DNA, 25 bp, Homo sapien
acagatggcaagtacccaggtacca

SEQ ID NO: 5277722 - DNA, 25 bp, Homo sapien
tctttacaactcttggaggcaggtc

SEQ ID NO: 5277723 - DNA, 25 bp, Homo sapien
tacacagcatatggtacagatggca

SEQ ID NO: 5277724 - DNA, 25 bp, Homo sapien
cacacttgtatggagaattaagctc

SEQ ID NO: 5277725 - DNA, 25 bp, Homo sapien
tttccaagagcccacacttgtatgg

SEQ ID NO: 5277726 - DNA, 25 bp, Homo sapien
tcagctgcaccctctaatttagagc

SEQ ID NO: 5277727 - DNA, 25 bp, Homo sapien
caagagcccacacttgtatggagaa

SEQ ID NO: 5277728 - DNA, 25 bp, Homo sapien
gatgagacttgggtttcaccaagga

SEQ ID NO: 5277729 - DNA, 25 bp, Homo sapien
tcaagctaaggaggggacggtgagg

SEQ ID NO: 5277730 - DNA, 25 bp, Homo sapien
gggacggtgaggtttgcttcttcaa

SEQ ID NO: 5277731 - DNA, 25 bp, Homo sapien
gacttaaactgttctgcagtttgct

SEQ ID NO: 5277732 - DNA, 25 bp, Homo sapien
ccttccccaggtcaagcaacggttg

SEQ ID NO: 5277733 - DNA, 25 bp, Homo sapien
caggtcaagcaacggttgcacctca

SEQ ID NO: 5277734 - DNA, 25 bp, Homo sapien
gtcttagtcttgattgtctgctgaa

SEQ ID NO: 5277735 - DNA, 25 bp, Homo sapien
ctgtcttagtcttgattgtctgctg

SEQ ID NO: 5277736 - DNA, 25 bp, Homo sapien
gacctttgagtcttcaaacaaataa

SEQ ID NO: 5277737 - DNA, 25 bp, Homo sapien
tcctctaaactcagacctcagaatg

SEQ ID NO: 5277738 - DNA, 25 bp, Homo sapien
tctaaactcagacctcagaatggag

SEQ ID NO: 5277739 - DNA, 25 bp, Homo sapien
agtccacagacctttgagtcttcaa

SEQ ID NO: 5277740 - DNA, 25 bp, Homo sapien
cctgctgggccttgctaaaaactcc

SEQ ID NO: 5277741 - DNA, 25 bp, Homo sapien
gggctatttccacggtgccggctgt

SEQ ID NO: 5277742 - DNA, 25 bp, Homo sapien
tgggccttgctaaaaactccaaata

SEQ ID NO: 5277743 - DNA, 25 bp, Homo sapien
cacggtgccggctgtaaagtcttcc

SEQ ID NO: 5277744 - DNA, 25 bp, Homo sapien
tttggatgaagggtcccacgtctta

SEQ ID NO: 5277745 - DNA, 25 bp, Homo sapien
taataatcattgtctacagagaatg

SEQ ID NO: 5277746 - DNA, 25 bp, Homo sapien
agagaatgttaacggtgacaaatct

SEQ ID NO: 5277747 - DNA, 25 bp, Homo sapien
gtgacaaatctgcacacaccttctg

SEQ ID NO: 5277748 - DNA, 25 bp, Homo sapien
aatttgttggaaccatggagaacaa

SEQ ID NO: 5277749 - DNA, 25 bp, Homo sapien
tggaaccatggagaacaatcggcag

SEQ ID NO: 5277750 - DNA, 25 bp, Homo sapien
ggaaccatggagaacaatcggcaga

SEQ ID NO: 5277751 - DNA, 25 bp, Homo sapien
gcaatttgttggaaccatggagaac

SEQ ID NO: 5277752 - DNA, 25 bp, Homo sapien
acacatgttgcttctgggaacagca

SEQ ID NO: 5277753 - DNA, 25 bp, Homo sapien
cacatgttgcttctgggaacagcat

SEQ ID NO: 5277754 - DNA, 25 bp, Homo sapien
tacacatgttgcttctgggaacagc

SEQ ID NO: 5277755 - DNA, 25 bp, Homo sapien
tgctttttctgctaaggagcagggc

SEQ ID NO: 5277756 - DNA, 25 bp, Homo sapien
agatgctttttctgctaaggagcag

SEQ ID NO: 5277757 - DNA, 25 bp, Homo sapien
tttttctgctaaggagcagggccac

SEQ ID NO: 5277758 - DNA, 25 bp, Homo sapien
ctttttctgctaaggagcagggcca

SEQ ID NO: 5277759 - DNA, 25 bp, Homo sapien
ccagtgctgtgctgcgcggagggct

SEQ ID NO: 5277760 - DNA, 25 bp, Homo sapien
gttctgaaggcctggtgagtccccc

SEQ ID NO: 5277761 - DNA, 25 bp, Homo sapien
gcgcggagggctgtactgaaggttc

SEQ ID NO: 5277762 - DNA, 25 bp, Homo sapien
tgaaggcctggtgagtccccctcac

SEQ ID NO: 5277763 - DNA, 25 bp, Homo sapien
tcaacaatacgtggatagaagggag

SEQ ID NO: 5277764 - DNA, 25 bp, Homo sapien
agagacccggcttcggcttcatggc

SEQ ID NO: 5277765 - DNA, 25 bp, Homo sapien
cagaaggagagacccggcttcggct

SEQ ID NO: 5277766 - DNA, 25 bp, Homo sapien
ccttgctggaggctagccaagaggt

SEQ ID NO: 5277767 - DNA, 25 bp, Homo sapien
tgtgggtcacgagcacctctgaggt

SEQ ID NO: 5277768 - DNA, 25 bp, Homo sapien
taggtcacagattgggatgacagac

SEQ ID NO: 5277769 - DNA, 25 bp, Homo sapien
ctggcctgggtttaaaagcgtgtgt

SEQ ID NO: 5277770 - DNA, 25 bp, Homo sapien
catcatcattcatgccctggcctgg

SEQ ID NO: 5277771 - DNA, 25 bp, Homo sapien
cattgtaaccagttgtagagccaga

SEQ ID NO: 5277772 - DNA, 25 bp, Homo sapien
aaactgaggtgtagcaactttgctt

SEQ ID NO: 5277773 - DNA, 25 bp, Homo sapien
tacgagtaagataaccaacagtggg

SEQ ID NO: 5277774 - DNA, 25 bp, Homo sapien
gagaagagtatgtccctcaagccca

SEQ ID NO: 5277775 - DNA, 25 bp, Homo sapien
gctcttcaggctgtgtgacggtaat

SEQ ID NO: 5277776 - DNA, 25 bp, Homo sapien
ttgtttaactctcttggccaagctg

SEQ ID NO: 5277777 - DNA, 25 bp, Homo sapien
ttcctccatactcccaaggcacctg

SEQ ID NO: 5277778 - DNA, 25 bp, Homo sapien
gtgtgacggtaatttgtatgtcatc

SEQ ID NO: 5277779 - DNA, 25 bp, Homo sapien
agcaagcatatacctctgctctaga

SEQ ID NO: 5277780 - DNA, 25 bp, Homo sapien
actgtcttgagtagcaagcatatac

SEQ ID NO: 5277781 - DNA, 25 bp, Homo sapien
cagtgatgtcttttcatcaacctct

SEQ ID NO: 5277782 - DNA, 25 bp, Homo sapien
tgagtagcaagcatatacctctgct

SEQ ID NO: 5277783 - DNA, 25 bp, Homo sapien
tctccacacaaaagggcttcagtaa

SEQ ID NO: 5277784 - DNA, 25 bp, Homo sapien
gtaaggatcatacaacatgagttcg

SEQ ID NO: 5277785 - DNA, 25 bp, Homo sapien
tatagtgtacatactcaaacagaca

SEQ ID NO: 5277786 - DNA, 25 bp, Homo sapien
catacacttcaaatgaaagaatgat

SEQ ID NO: 5277787 - DNA, 25 bp, Homo sapien
tcctaatcataataacaaggcaaca

SEQ ID NO: 5277788 - DNA, 25 bp, Homo sapien
ctaatcataataacaaggcaacagg

SEQ ID NO: 5277789 - DNA, 25 bp, Homo sapien
cttcctaatcataataacaaggcaa

SEQ ID NO: 5277790 - DNA, 25 bp, Homo sapien
tcttcctaatcataataacaaggca

SEQ ID NO: 5277791 - DNA, 25 bp, Homo sapien
tgatcttcttaaggagactaacatc

SEQ ID NO: 5277792 - DNA, 25 bp, Homo sapien
gatcttcttaaggagactaacatcc

SEQ ID NO: 5277793 - DNA, 25 bp, Homo sapien
tcttaaggagactaacatcctgctt

SEQ ID NO: 5277794 - DNA, 25 bp, Homo sapien
tcttcttaaggagactaacatcctg

SEQ ID NO: 5277795 - DNA, 25 bp, Homo sapien
tagtgactgccgtgatttgctccag

SEQ ID NO: 5277796 - DNA, 25 bp, Homo sapien
tcggctctcgaggagaagtttcaga

SEQ ID NO: 5277797 - DNA, 25 bp, Homo sapien
catctcgtgcagatgctcatctcgg

SEQ ID NO: 5277798 - DNA, 25 bp, Homo sapien
caggagggactggttaagcagcagc

SEQ ID NO: 5277799 - DNA, 25 bp, Homo sapien
caaggccctcacgtttcagagtaga

SEQ ID NO: 5277800 - DNA, 25 bp, Homo sapien
tccattacactaaagcaagggttgc

SEQ ID NO: 5277801 - DNA, 25 bp, Homo sapien
aatatgggcgttggtacctgcttca

SEQ ID NO: 5277802 - DNA, 25 bp, Homo sapien
taaagccacatatggtaccgcactg

SEQ ID NO: 5277803 - DNA, 25 bp, Homo sapien
ctgtgtgacaatgatcaataccagc

SEQ ID NO: 5277804 - DNA, 25 bp, Homo sapien
taccagcagggtagcagtttgtaaa

SEQ ID NO: 5277805 - DNA, 25 bp, Homo sapien
gtttgtaaaacacattcctcataca

SEQ ID NO: 5277806 - DNA, 25 bp, Homo sapien
tcatacatcgggaattctaattcaa

SEQ ID NO: 5277807 - DNA, 25 bp, Homo sapien
ctgaaagaacacgtgacacagagca

SEQ ID NO: 5277808 - DNA, 25 bp, Homo sapien
cagacttttcatccgggatgccgaa

SEQ ID NO: 5277809 - DNA, 25 bp, Homo sapien
ggcagacttttcatccgggatgccg

SEQ ID NO: 5277810 - DNA, 25 bp, Homo sapien
gcagacttttcatccgggatgccga

SEQ ID NO: 5277811 - DNA, 25 bp, Homo sapien
gacttttcatccgggatgccgaaac

SEQ ID NO: 5277812 - DNA, 25 bp, Homo sapien
cattccacacaaagtgatgtgcggg

SEQ ID NO: 5277813 - DNA, 25 bp, Homo sapien
tgtgcggggccccttctgacacaac

SEQ ID NO: 5277814 - DNA, 25 bp, Homo sapien
aggcacaagctacatttgaggtggg

SEQ ID NO: 5277815 - DNA, 25 bp, Homo sapien
cctcctctcgggtcatggcagtgct

SEQ ID NO: 5277816 - DNA, 25 bp, Homo sapien
tgcagccccaggttgatcacaatct

SEQ ID NO: 5277817 - DNA, 25 bp, Homo sapien
gcagccccaggttgatcacaatctt

SEQ ID NO: 5277818 - DNA, 25 bp, Homo sapien
gccccaggttgatcacaatcttggc

SEQ ID NO: 5277819 - DNA, 25 bp, Homo sapien
cagccccaggttgatcacaatcttg

SEQ ID NO: 5277820 - DNA, 25 bp, Homo sapien
tgatctctaccagcaaggcagctgc

SEQ ID NO: 5277821 - DNA, 25 bp, Homo sapien
gatctctaccagcaaggcagctgct

SEQ ID NO: 5277822 - DNA, 25 bp, Homo sapien
tccagggcactagccgtgcctcttg

SEQ ID NO: 5277823 - DNA, 25 bp, Homo sapien
tagccgtgcctcttggactgtgatc

SEQ ID NO: 5277824 - DNA, 25 bp, Homo sapien
acaaagagcgacacattttcaaaac

SEQ ID NO: 5277825 - DNA, 25 bp, Homo sapien
atacaaagagcgacacattttcaaa

SEQ ID NO: 5277826 - DNA, 25 bp, Homo sapien
tgcttggtgttatacaaagagcgac

SEQ ID NO: 5277827 - DNA, 25 bp, Homo sapien
agcatctgcttggtgttatacaaag

SEQ ID NO: 5277828 - DNA, 25 bp, Homo sapien
gtagctagtctcacccatggattat

SEQ ID NO: 5277829 - DNA, 25 bp, Homo sapien
actgtagctagtctcacccatggat

SEQ ID NO: 5277830 - DNA, 25 bp, Homo sapien
cactgtagctagtctcacccatgga

SEQ ID NO: 5277831 - DNA, 25 bp, Homo sapien
tgtagctagtctcacccatggatta

SEQ ID NO: 5277832 - DNA, 25 bp, Homo sapien
cagacacgtggagatgttcactggc

SEQ ID NO: 5277833 - DNA, 25 bp, Homo sapien
agaaaagcatccttctttaacctca

SEQ ID NO: 5277834 - DNA, 25 bp, Homo sapien
ttctttaacctcagacacgtggaga

SEQ ID NO: 5277835 - DNA, 25 bp, Homo sapien
tcagaaaagcatccttctttaacct

SEQ ID NO: 5277836 - DNA, 25 bp, Homo sapien
gaaattcagcctcgtggtgactaga

SEQ ID NO: 5277837 - DNA, 25 bp, Homo sapien
ggtgactagattccaggagttccat

SEQ ID NO: 5277838 - DNA, 25 bp, Homo sapien
ggtggccaagcttgcaaaagtaaaa

SEQ ID NO: 5277839 - DNA, 25 bp, Homo sapien
gagttccatgaatagacagtagcgg

SEQ ID NO: 5277840 - DNA, 25 bp, Homo sapien
cgttcttctatggaataatagccca

SEQ ID NO: 5277841 - DNA, 25 bp, Homo sapien
tctatggaataatagcccacagcca

SEQ ID NO: 5277842 - DNA, 25 bp, Homo sapien
acctgccttaaaagcccatgtcgtt

SEQ ID NO: 5277843 - DNA, 25 bp, Homo sapien
taaaagcccatgtcgttcttctatg

SEQ ID NO: 5277844 - DNA, 25 bp, Homo sapien
tcaatcatatagtgccatgtgaccc

SEQ ID NO: 5277845 - DNA, 25 bp, Homo sapien
caagcagcctacacatccgtgggta

SEQ ID NO: 5277846 - DNA, 25 bp, Homo sapien
cgtgggtacagaaacatatctaaac

SEQ ID NO: 5277847 - DNA, 25 bp, Homo sapien
aaagtctctcctagggcactgcaaa

SEQ ID NO: 5277848 - DNA, 25 bp, Homo sapien
tgattagcccaactgagacttgacc

SEQ ID NO: 5277849 - DNA, 25 bp, Homo sapien
cctctaagcagaaggcacttggaca

SEQ ID NO: 5277850 - DNA, 25 bp, Homo sapien
tacccagagatggtgttagagcaga

SEQ ID NO: 5277851 - DNA, 25 bp, Homo sapien
taactaggacacattaaggccatga

SEQ ID NO: 5277852 - DNA, 25 bp, Homo sapien
ctcctgcatgtgctaataagttcag

SEQ ID NO: 5277853 - DNA, 25 bp, Homo sapien
tgctaataagttcagcagcaccact

SEQ ID NO: 5277854 - DNA, 25 bp, Homo sapien
gcatgtgctaataagttcagcagca

SEQ ID NO: 5277855 - DNA, 25 bp, Homo sapien
tcctgcatgtgctaataagttcagc

SEQ ID NO: 5277856 - DNA, 25 bp, Homo sapien
cagtaatgccagacagacatcttta

SEQ ID NO: 5277857 - DNA, 25 bp, Homo sapien
aatgccagacagacatctttacttt

SEQ ID NO: 5277858 - DNA, 25 bp, Homo sapien
gtaatgccagacagacatctttact

SEQ ID NO: 5277859 - DNA, 25 bp, Homo sapien
tcagtaatgccagacagacatcttt

SEQ ID NO: 5277860 - DNA, 25 bp, Homo sapien
aaaatctgcagcacgtgaatgcggg

SEQ ID NO: 5277861 - DNA, 25 bp, Homo sapien
ttgagaatggcttcagttctaaaga

SEQ ID NO: 5277862 - DNA, 25 bp, Homo sapien
taaagaacacgaggagcttgctgtc

SEQ ID NO: 5277863 - DNA, 25 bp, Homo sapien
agtcaggtgaaatgattgccccaaa

SEQ ID NO: 5277864 - DNA, 25 bp, Homo sapien
tgtcaaagagacaaggtaagacctt

SEQ ID NO: 5277865 - DNA, 25 bp, Homo sapien
catggactgggtatcacttgggagc

SEQ ID NO: 5277866 - DNA, 25 bp, Homo sapien
cactgctttactttcctgtgctggc

SEQ ID NO: 5277867 - DNA, 25 bp, Homo sapien
tatactggctcacgcttgtgggaca

SEQ ID NO: 5277868 - DNA, 25 bp, Homo sapien
gcgtggactgctgcaacaacacctt

SEQ ID NO: 5277869 - DNA, 25 bp, Homo sapien
ggcgtggactgctgcaacaacacct

SEQ ID NO: 5277870 - DNA, 25 bp, Homo sapien
cgtggactgctgcaacaacaccttc

SEQ ID NO: 5277871 - DNA, 25 bp, Homo sapien
tggactgctgcaacaacaccttcca

SEQ ID NO: 5277872 - DNA, 25 bp, Homo sapien
gaggctgaccatctaaacaaatagc

SEQ ID NO: 5277873 - DNA, 25 bp, Homo sapien
gctgaatcattgctagaggctgacc

SEQ ID NO: 5277874 - DNA, 25 bp, Homo sapien
atcgggacagatcatagaggtgact

SEQ ID NO: 5277875 - DNA, 25 bp, Homo sapien
actctgcactatatccttgggtgag

SEQ ID NO: 5277876 - DNA, 25 bp, Homo sapien
ccttagcttcttgagcttcgtcttc

SEQ ID NO: 5277877 - DNA, 25 bp, Homo sapien
aagtatctgcataggtaactttaga

SEQ ID NO: 5277878 - DNA, 25 bp, Homo sapien
aactttagaatccttagcttcttga

SEQ ID NO: 5277879 - DNA, 25 bp, Homo sapien
actgtcttaatagcctttctagtca

SEQ ID NO: 5277880 - DNA, 25 bp, Homo sapien
aatagtgagaccaaagaaccctgca

SEQ ID NO: 5277881 - DNA, 25 bp, Homo sapien
gagaccaaagaaccctgcattatta

SEQ ID NO: 5277882 - DNA, 25 bp, Homo sapien
aagaatagtgagaccaaagaaccct

SEQ ID NO: 5277883 - DNA, 25 bp, Homo sapien
tgagaccaaagaaccctgcattatt

SEQ ID NO: 5277884 - DNA, 25 bp, Homo sapien
atttgtgctgctttggatcctgggc

SEQ ID NO: 5277885 - DNA, 25 bp, Homo sapien
tattcagtgacacgcatcagattcc

SEQ ID NO: 5277886 - DNA, 25 bp, Homo sapien
gatcctgggctgtagtcttctgtca

SEQ ID NO: 5277887 - DNA, 25 bp, Homo sapien
gataaagactcctacgacagactct

SEQ ID NO: 5277888 - DNA, 25 bp, Homo sapien
ctggactgaaaatgcctgtgactgt

SEQ ID NO: 5277889 - DNA, 25 bp, Homo sapien
taacacttgggccttcaaccttgag

SEQ ID NO: 5277890 - DNA, 25 bp, Homo sapien
caacaagcactcctcatgtggccca

SEQ ID NO: 5277891 - DNA, 25 bp, Homo sapien
gagggtacaggcctccaacaagcac

SEQ ID NO: 5277892 - DNA, 25 bp, Homo sapien
ctgcaaaagctcttggtggtgcaaa

SEQ ID NO: 5277893 - DNA, 25 bp, Homo sapien
tgtgcttaggcaagggattgtccag

SEQ ID NO: 5277894 - DNA, 25 bp, Homo sapien
tgtgtatgcgtgtgcttaggcaagg

SEQ ID NO: 5277895 - DNA, 25 bp, Homo sapien
caaaagctcttggtggtgcaaatgt

SEQ ID NO: 5277896 - DNA, 25 bp, Homo sapien
aagtggctgagattgcaaaagcctg

SEQ ID NO: 5277897 - DNA, 25 bp, Homo sapien
tgagattgcaaaagcctgccaccac

SEQ ID NO: 5277898 - DNA, 25 bp, Homo sapien
gattacaggcccaatgctgtgcttt

SEQ ID NO: 5277899 - DNA, 25 bp, Homo sapien
agtggctgagattgcaaaagcctgc

SEQ ID NO: 5277900 - DNA, 25 bp, Homo sapien
agggaaccatgaggtctgactgcct

SEQ ID NO: 5277901 - DNA, 25 bp, Homo sapien
cttgtgatctttattggcctcagaa

SEQ ID NO: 5277902 - DNA, 25 bp, Homo sapien
gatctttattggcctcagaagcatg

SEQ ID NO: 5277903 - DNA, 25 bp, Homo sapien
tgtgatctttattggcctcagaagc

SEQ ID NO: 5277904 - DNA, 25 bp, Homo sapien
catcctgcgatagctgcaattttac

SEQ ID NO: 5277905 - DNA, 25 bp, Homo sapien
ggctgtcaagtcgacatcctgcgat

SEQ ID NO: 5277906 - DNA, 25 bp, Homo sapien
atttatgaagagatctccctggctg

SEQ ID NO: 5277907 - DNA, 25 bp, Homo sapien
caattttacatcctatgggtgccac

SEQ ID NO: 5277908 - DNA, 25 bp, Homo sapien
ttgacaagcaatagaggagcaactc

SEQ ID NO: 5277909 - DNA, 25 bp, Homo sapien
tagaagcagtggtttacgatggcaa

SEQ ID NO: 5277910 - DNA, 25 bp, Homo sapien
gcaatgaatcacaaacggtgggagt

SEQ ID NO: 5277911 - DNA, 25 bp, Homo sapien
taacactgggcaaggtaccagaagg

SEQ ID NO: 5277912 - DNA, 25 bp, Homo sapien
gcactggagctcctttacatttgtc

SEQ ID NO: 5277913 - DNA, 25 bp, Homo sapien
ttagcctggtttccgaatgcaggta

SEQ ID NO: 5277914 - DNA, 25 bp, Homo sapien
tccgaatgcaggtaatctgggctgg

SEQ ID NO: 5277915 - DNA, 25 bp, Homo sapien
tggtttccgaatgcaggtaatctgg

SEQ ID NO: 5277916 - DNA, 25 bp, Homo sapien
gaactggctccaatgcttcaagagg

SEQ ID NO: 5277917 - DNA, 25 bp, Homo sapien
cctgggtggagacgatcaaagtact

SEQ ID NO: 5277918 - DNA, 25 bp, Homo sapien
taaccagatggtgtacagagagctt

SEQ ID NO: 5277919 - DNA, 25 bp, Homo sapien
cataggcatgaagccactccggtga

SEQ ID NO: 5277920 - DNA, 25 bp, Homo sapien
aatactgcagcctttcgtgatcaaa

SEQ ID NO: 5277921 - DNA, 25 bp, Homo sapien
gtgatcaaagccaccaatagtaggg

SEQ ID NO: 5277922 - DNA, 25 bp, Homo sapien
ggcacagttccccaaatctgcacag

SEQ ID NO: 5277923 - DNA, 25 bp, Homo sapien
aacttcttcagcagtcgaatgtggg

SEQ ID NO: 5277924 - DNA, 25 bp, Homo sapien
aagtagctttaacttcaagttcctg

SEQ ID NO: 5277925 - DNA, 25 bp, Homo sapien
tacagcaaccctgtgaagtagcttt

SEQ ID NO: 5277926 - DNA, 25 bp, Homo sapien
gcaaccctgtgaagtagctttaact

SEQ ID NO: 5277927 - DNA, 25 bp, Homo sapien
gctttaacttcaagttcctgcagtt

SEQ ID NO: 5277928 - DNA, 25 bp, Homo sapien
tttgtgccactatcaggcgtttctg

SEQ ID NO: 5277929 - DNA, 25 bp, Homo sapien
ttgtgccactatcaggcgtttctga

SEQ ID NO: 5277930 - DNA, 25 bp, Homo sapien
gttttgtgccactatcaggcgtttc

SEQ ID NO: 5277931 - DNA, 25 bp, Homo sapien
atgttttgtgccactatcaggcgtt

SEQ ID NO: 5277932 - DNA, 25 bp, Homo sapien
atcctgggggattaataactaatag

SEQ ID NO: 5277933 - DNA, 25 bp, Homo sapien
taataggggttagatgctccctctc

SEQ ID NO: 5277934 - DNA, 25 bp, Homo sapien
taactaataggggttagatgctccc

SEQ ID NO: 5277935 - DNA, 25 bp, Homo sapien
taataactaataggggttagatgct

SEQ ID NO: 5277936 - DNA, 25 bp, Homo sapien
tcttcaagagtcttcaaaaatagac

SEQ ID NO: 5277937 - DNA, 25 bp, Homo sapien
aattgtactttacaacttcttcaag

SEQ ID NO: 5277938 - DNA, 25 bp, Homo sapien
caagacactagtccactgtagatta

SEQ ID NO: 5277939 - DNA, 25 bp, Homo sapien
acactagtccactgtagattaaagg

SEQ ID NO: 5277940 - DNA, 25 bp, Homo sapien
acttcccagcgggagacactgtaac

SEQ ID NO: 5277941 - DNA, 25 bp, Homo sapien
gagaaatagcaatgctgtagacgct

SEQ ID NO: 5277942 - DNA, 25 bp, Homo sapien
tgctgtagacgctttcctctagagt

SEQ ID NO: 5277943 - DNA, 25 bp, Homo sapien
gacactgtaacgttgtgccagagaa

SEQ ID NO: 5277944 - DNA, 25 bp, Homo sapien
catgtgggcatccccctgtaggcac

SEQ ID NO: 5277945 - DNA, 25 bp, Homo sapien
ccatgtgggcatccccctgtaggca

SEQ ID NO: 5277946 - DNA, 25 bp, Homo sapien
agacatcccgcataggcatcccagg

SEQ ID NO: 5277947 - DNA, 25 bp, Homo sapien
tgagcaccccatggaggtagcccga

SEQ ID NO: 5277948 - DNA, 25 bp, Homo sapien
gtaggcagtcccgtggaggcatccc

SEQ ID NO: 5277949 - DNA, 25 bp, Homo sapien
gtagcccgagcaccgtgcgtaggca

SEQ ID NO: 5277950 - DNA, 25 bp, Homo sapien
cccgagcacccagcgtgggcatccc

SEQ ID NO: 5277951 - DNA, 25 bp, Homo sapien
agcacccagcgtgggcatcccgagc

SEQ ID NO: 5277952 - DNA, 25 bp, Homo sapien
cacccagcgtgggcatcccgagcat

SEQ ID NO: 5277953 - DNA, 25 bp, Homo sapien
cgagcacccagcgtgggcatcccga

SEQ ID NO: 5277954 - DNA, 25 bp, Homo sapien
ttgagaaaccaaggtctccgcctgg

SEQ ID NO: 5277955 - DNA, 25 bp, Homo sapien
gagaaaccaaggtctccgcctgggc

SEQ ID NO: 5277956 - DNA, 25 bp, Homo sapien
cattgagaaaccaaggtctccgcct

SEQ ID NO: 5277957 - DNA, 25 bp, Homo sapien
caaggtctccgcctgggccttgaac

SEQ ID NO: 5277958 - DNA, 25 bp, Homo sapien
ggcacacatcccacataagactaga

SEQ ID NO: 5277959 - DNA, 25 bp, Homo sapien
aaatccatccccttatgaaacaaag

SEQ ID NO: 5277960 - DNA, 25 bp, Homo sapien
tactgatcggtttggagaaggcaca

SEQ ID NO: 5277961 - DNA, 25 bp, Homo sapien
gaaagccctattcatagcaaccatg

SEQ ID NO: 5277962 - DNA, 25 bp, Homo sapien
actggtcatctgcagtaaaccgctg

SEQ ID NO: 5277963 - DNA, 25 bp, Homo sapien
tggtcatctgcagtaaaccgctgca

SEQ ID NO: 5277964 - DNA, 25 bp, Homo sapien
catctgcagtaaaccgctgcacgtc

SEQ ID NO: 5277965 - DNA, 25 bp, Homo sapien
tgcagtaaaccgctgcacgtccaca

SEQ ID NO: 5277966 - DNA, 25 bp, Homo sapien
tcatgtcgagtcacatgcctggtga

SEQ ID NO: 5277967 - DNA, 25 bp, Homo sapien
cttggtcagtgaaataaggtcttca

SEQ ID NO: 5277968 - DNA, 25 bp, Homo sapien
gaaatccaggagacgttcattgtag

SEQ ID NO: 5277969 - DNA, 25 bp, Homo sapien
ggccaggcttcgtgctcatgtcgag

SEQ ID NO: 5277970 - DNA, 25 bp, Homo sapien
agggatgctgctcatgggccagctg

SEQ ID NO: 5277971 - DNA, 25 bp, Homo sapien
ggatgctgctcatgggccagctggc

SEQ ID NO: 5277972 - DNA, 25 bp, Homo sapien
gggatgctgctcatgggccagctgg

SEQ ID NO: 5277973 - DNA, 25 bp, Homo sapien
agccagaacataagcttcaaaagaa

SEQ ID NO: 5277974 - DNA, 25 bp, Homo sapien
gcagccagaacataagcttcaaaag

SEQ ID NO: 5277975 - DNA, 25 bp, Homo sapien
tgagcagccagaacataagcttcaa

SEQ ID NO: 5277976 - DNA, 25 bp, Homo sapien
gagcagccagaacataagcttcaaa

SEQ ID NO: 5277977 - DNA, 25 bp, Homo sapien
gggctttacatgacaggatgttact

SEQ ID NO: 5277978 - DNA, 25 bp, Homo sapien
aaacaaagcttgagcggtcgctgtc

SEQ ID NO: 5277979 - DNA, 25 bp, Homo sapien
tcgctgtccaagtaaaaagcaggta

SEQ ID NO: 5277980 - DNA, 25 bp, Homo sapien
aaagcaggtaaagcctggaatcagg

SEQ ID NO: 5277981 - DNA, 25 bp, Homo sapien
ttcacttctacttttagacctacaa

SEQ ID NO: 5277982 - DNA, 25 bp, Homo sapien
gaagtccctggagaactagctgact

SEQ ID NO: 5277983 - DNA, 25 bp, Homo sapien
caagaagtccctggagaactagctg

SEQ ID NO: 5277984 - DNA, 25 bp, Homo sapien
gacctacaatcggatgctttccaga

SEQ ID NO: 5277985 - DNA, 25 bp, Homo sapien
tgaaaggtgggatagaattgaacaa

SEQ ID NO: 5277986 - DNA, 25 bp, Homo sapien
tttggaaagagtgatggcgagatat

SEQ ID NO: 5277987 - DNA, 25 bp, Homo sapien
gactgcattatctgagtttggaaag

SEQ ID NO: 5277988 - DNA, 25 bp, Homo sapien
ctaaaacgggctttcctatagagtg

SEQ ID NO: 5277989 - DNA, 25 bp, Homo sapien
tctgctcaataataagctggaaatc

SEQ ID NO: 5277990 - DNA, 25 bp, Homo sapien
tgctcaataataagctggaaatcat

SEQ ID NO: 5277991 - DNA, 25 bp, Homo sapien
gctcaataataagctggaaatcatg

SEQ ID NO: 5277992 - DNA, 25 bp, Homo sapien
actctgctcaataataagctggaaa

SEQ ID NO: 5277993 - DNA, 25 bp, Homo sapien
tcaaagcaccggttagcatctaaca

SEQ ID NO: 5277994 - DNA, 25 bp, Homo sapien
tgtaaagaggatggcacttgtccct

SEQ ID NO: 5277995 - DNA, 25 bp, Homo sapien
catggggccaatcgggcatagatct

SEQ ID NO: 5277996 - DNA, 25 bp, Homo sapien
tctggaggctatagtaatacgctgc

SEQ ID NO: 5277997 - DNA, 25 bp, Homo sapien
aggtaagcaagagccaaggtcatgt

SEQ ID NO: 5277998 - DNA, 25 bp, Homo sapien
caagaaggtaagcaagagccaaggt

SEQ ID NO: 5277999 - DNA, 25 bp, Homo sapien
catttggcaaggcttcacttgctag

SEQ ID NO: 5278000 - DNA, 25 bp, Homo sapien
ggcttcacttgctagttgcaagaga

SEQ ID NO: 5278001 - DNA, 25 bp, Homo sapien
taagactggccttaccaactccttg

SEQ ID NO: 5278002 - DNA, 25 bp, Homo sapien
gccagcacttggttcctcgtcaaat

SEQ ID NO: 5278003 - DNA, 25 bp, Homo sapien
gacggagtattttcatggtgcccaa

SEQ ID NO: 5278004 - DNA, 25 bp, Homo sapien
caactccttgttggacactgccact

SEQ ID NO: 5278005 - DNA, 25 bp, Homo sapien
tatttttagcctctgccaattttcc

SEQ ID NO: 5278006 - DNA, 25 bp, Homo sapien
caattttccagttctcagcaatact

SEQ ID NO: 5278007 - DNA, 25 bp, Homo sapien
gataggtgtcataggtcccttcaga

SEQ ID NO: 5278008 - DNA, 25 bp, Homo sapien
tgataggtgtcataggtcccttcag

SEQ ID NO: 5278009 - DNA, 25 bp, Homo sapien
ctgataggtgtcataggtcccttca

SEQ ID NO: 5278010 - DNA, 25 bp, Homo sapien
tgtagttccgatttgatatgcacca

SEQ ID NO: 5278011 - DNA, 25 bp, Homo sapien
gttccgatttgatatgcaccaccac

SEQ ID NO: 5278012 - DNA, 25 bp, Homo sapien
gatcttcattggctgtagttccgat

SEQ ID NO: 5278013 - DNA, 25 bp, Homo sapien
cattggctgtagttccgatttgata

SEQ ID NO: 5278014 - DNA, 25 bp, Homo sapien
acggcctgcagcaccgctttggtgg

SEQ ID NO: 5278015 - DNA, 25 bp, Homo sapien
actgacggcctgcagcaccgctttg

SEQ ID NO: 5278016 - DNA, 25 bp, Homo sapien
cctgcagcaccgctttggtggtggt

SEQ ID NO: 5278017 - DNA, 25 bp, Homo sapien
cactgcccatcactgacggcctgca

SEQ ID NO: 5278018 - DNA, 25 bp, Homo sapien
agcagtggtccagcgcaataggtca

SEQ ID NO: 5278019 - DNA, 25 bp, Homo sapien
gcagtggtccagcgcaataggtcag

SEQ ID NO: 5278020 - DNA, 25 bp, Homo sapien
attgctacctggaacacctacttca

SEQ ID NO: 5278021 - DNA, 25 bp, Homo sapien
tgctacctggaacacctacttcatc

SEQ ID NO: 5278022 - DNA, 25 bp, Homo sapien
gaattgctacctggaacacctactt

SEQ ID NO: 5278023 - DNA, 25 bp, Homo sapien
ctgaattgctacctggaacacctac

SEQ ID NO: 5278024 - DNA, 25 bp, Homo sapien
caaagccgtaatgcgtgcattgcag

SEQ ID NO: 5278025 - DNA, 25 bp, Homo sapien
tagcacttcatgagatctagatcta

SEQ ID NO: 5278026 - DNA, 25 bp, Homo sapien
gaaatgtgcctcataaatcaaagcc

SEQ ID NO: 5278027 - DNA, 25 bp, Homo sapien
gcaggtttggactagcacttcatga

SEQ ID NO: 5278028 - DNA, 25 bp, Homo sapien
gctttactagttaatggtgaagcac

SEQ ID NO: 5278029 - DNA, 25 bp, Homo sapien
tgctttactagttaatggtgaagca

SEQ ID NO: 5278030 - DNA, 25 bp, Homo sapien
tctggaaattcactctttgataaag

SEQ ID NO: 5278031 - DNA, 25 bp, Homo sapien
tgatggatctggaaattcactcttt

SEQ ID NO: 5278032 - DNA, 25 bp, Homo sapien
ctgcagagagctgctagctgccaaa

SEQ ID NO: 5278033 - DNA, 25 bp, Homo sapien
ccatgagctcttgacgagtggccaa

SEQ ID NO: 5278034 - DNA, 25 bp, Homo sapien
gggcaatgtgtcaaagcaaaagcca

SEQ ID NO: 5278035 - DNA, 25 bp, Homo sapien
taaccttctgattgtcctaactggc

SEQ ID NO: 5278036 - DNA, 25 bp, Homo sapien
tcctgacaatgcatactggctgctt

SEQ ID NO: 5278037 - DNA, 25 bp, Homo sapien
gctccactaaaaggattagaacctg

SEQ ID NO: 5278038 - DNA, 25 bp, Homo sapien
gctttgtagtcatggaagcgaagtg

SEQ ID NO: 5278039 - DNA, 25 bp, Homo sapien
agtgcctgctccactaaaaggatta

SEQ ID NO: 5278040 - DNA, 25 bp, Homo sapien
catattagtctagcccaaacactgg

SEQ ID NO: 5278041 - DNA, 25 bp, Homo sapien
cacacatattagtctagcccaaaca

SEQ ID NO: 5278042 - DNA, 25 bp, Homo sapien
ttagtctagcccaaacactgggtca

SEQ ID NO: 5278043 - DNA, 25 bp, Homo sapien
caaacactgggtcaggacatcaata

SEQ ID NO: 5278044 - DNA, 25 bp, Homo sapien
gggactgggaaatacactccttgat

SEQ ID NO: 5278045 - DNA, 25 bp, Homo sapien
cttggtggattgtttatagcatgtg

SEQ ID NO: 5278046 - DNA, 25 bp, Homo sapien
ctgatccgatcagggcacaatcgca

SEQ ID NO: 5278047 - DNA, 25 bp, Homo sapien
tacactccttgatgagactgatccg

SEQ ID NO: 5278048 - DNA, 25 bp, Homo sapien
gcttcagtaacatgaggcttggccc

SEQ ID NO: 5278049 - DNA, 25 bp, Homo sapien
tacctacatctgagtatagcttctg

SEQ ID NO: 5278050 - DNA, 25 bp, Homo sapien
cgtggaattccactacagatctttc

SEQ ID NO: 5278051 - DNA, 25 bp, Homo sapien
gaaagctgttaagagtcatcgtgga

SEQ ID NO: 5278052 - DNA, 25 bp, Homo sapien
gaaaaagataggcatgtacgtacct

SEQ ID NO: 5278053 - DNA, 25 bp, Homo sapien
gcccctcaaaagatagctgtgcaat

SEQ ID NO: 5278054 - DNA, 25 bp, Homo sapien
atttgtctcctgttgccctaagcga

SEQ ID NO: 5278055 - DNA, 25 bp, Homo sapien
cgtgcatgcacgtctcagatgtaaa

SEQ ID NO: 5278056 - DNA, 25 bp, Homo sapien
cttgcaaaggcaggatctttacccc

SEQ ID NO: 5278057 - DNA, 25 bp, Homo sapien
taagatctagctcctcttgaatggc

SEQ ID NO: 5278058 - DNA, 25 bp, Homo sapien
gtctgttatcagttgtaagcagcac

SEQ ID NO: 5278059 - DNA, 25 bp, Homo sapien
tcttcaagacatccaacggcttgga

SEQ ID NO: 5278060 - DNA, 25 bp, Homo sapien
gttttcaaggcgactagagcacaga

SEQ ID NO: 5278061 - DNA, 25 bp, Homo sapien
ctttatgggctataccagctggagg

SEQ ID NO: 5278062 - DNA, 25 bp, Homo sapien
catgcagctatcagtgaggttggta

SEQ ID NO: 5278063 - DNA, 25 bp, Homo sapien
ttttcgtagctgaccctgtagtggg

SEQ ID NO: 5278064 - DNA, 25 bp, Homo sapien
caatgagactcactgacaggaggct

SEQ ID NO: 5278065 - DNA, 25 bp, Homo sapien
catagttaacatgtcttgcagcaac

SEQ ID NO: 5278066 - DNA, 25 bp, Homo sapien
tgcagcaacgttctccaatgagact

SEQ ID NO: 5278067 - DNA, 25 bp, Homo sapien
tacattctgctgcatagttaacatg

SEQ ID NO: 5278068 - DNA, 25 bp, Homo sapien
caaagcaactcacagagcactccag

SEQ ID NO: 5278069 - DNA, 25 bp, Homo sapien
gagactactggcagcagtccacaaa

SEQ ID NO: 5278070 - DNA, 25 bp, Homo sapien
tagtcgctggcattgctgtgtccgg

SEQ ID NO: 5278071 - DNA, 25 bp, Homo sapien
gccagagcctcagagagtagtcgct

SEQ ID NO: 5278072 - DNA, 25 bp, Homo sapien
cacggacagagaagtggtaaacagg

SEQ ID NO: 5278073 - DNA, 25 bp, Homo sapien
tccacggacagagaagtggtaaaca

SEQ ID NO: 5278074 - DNA, 25 bp, Homo sapien
aatgtccacggacagagaagtggta

SEQ ID NO: 5278075 - DNA, 25 bp, Homo sapien
acccaaatgtccacggacagagaag

SEQ ID NO: 5278076 - DNA, 25 bp, Homo sapien
caaatgaaattggtttctcgagtcc

SEQ ID NO: 5278077 - DNA, 25 bp, Homo sapien
tgcctcttctgagctagattgagtg

SEQ ID NO: 5278078 - DNA, 25 bp, Homo sapien
tccggccagtgtgcctcgtcaatct

SEQ ID NO: 5278079 - DNA, 25 bp, Homo sapien
aatctaaccatcagcttgcgtgcct

SEQ ID NO: 5278080 - DNA, 25 bp, Homo sapien
gaatttgttccagttggtctaccat

SEQ ID NO: 5278081 - DNA, 25 bp, Homo sapien
agaatttgttccagttggtctacca

SEQ ID NO: 5278082 - DNA, 25 bp, Homo sapien
gagaatttgttccagttggtctacc

SEQ ID NO: 5278083 - DNA, 25 bp, Homo sapien
ctgagaatttgttccagttggtcta

SEQ ID NO: 5278084 - DNA, 25 bp, Homo sapien
agctttgtggttgcctctgtcttat

SEQ ID NO: 5278085 - DNA, 25 bp, Homo sapien
ctttgtggttgcctctgtcttatca

SEQ ID NO: 5278086 - DNA, 25 bp, Homo sapien
gaagctttgtggttgcctctgtctt

SEQ ID NO: 5278087 - DNA, 25 bp, Homo sapien
atgaagctttgtggttgcctctgtc

SEQ ID NO: 5278088 - DNA, 25 bp, Homo sapien
acccgcaggtcaaaattggcgtggg

SEQ ID NO: 5278089 - DNA, 25 bp, Homo sapien
gcagcacccgcaggtcaaaattggc

SEQ ID NO: 5278090 - DNA, 25 bp, Homo sapien
cacccgcaggtcaaaattggcgtgg

SEQ ID NO: 5278091 - DNA, 25 bp, Homo sapien
agcacccgcaggtcaaaattggcgt

SEQ ID NO: 5278092 - DNA, 25 bp, Homo sapien
ataggtttcaaagacgctcgcttca

SEQ ID NO: 5278093 - DNA, 25 bp, Homo sapien
acataggtttcaaagacgctcgctt

SEQ ID NO: 5278094 - DNA, 25 bp, Homo sapien
tgggaagcacataggtttcaaagac

SEQ ID NO: 5278095 - DNA, 25 bp, Homo sapien
agcacataggtttcaaagacgctcg

SEQ ID NO: 5278096 - DNA, 25 bp, Homo sapien
atttcttaatgcccttgtactcggg

SEQ ID NO: 5278097 - DNA, 25 bp, Homo sapien
tttcttaatgcccttgtactcgggc

SEQ ID NO: 5278098 - DNA, 25 bp, Homo sapien
tctttctggcagacattctagtagg

SEQ ID NO: 5278099 - DNA, 25 bp, Homo sapien
tgatcatttcgttcacaggtataga

SEQ ID NO: 5278100 - DNA, 25 bp, Homo sapien
caggtatagatgcactctagtgcta

SEQ ID NO: 5278101 - DNA, 25 bp, Homo sapien
tctggcagacattctagtaggtcat

SEQ ID NO: 5278102 - DNA, 25 bp, Homo sapien
tcagttggtcctgatcaggaataat

SEQ ID NO: 5278103 - DNA, 25 bp, Homo sapien
cagttggtcctgatcaggaataatt

SEQ ID NO: 5278104 - DNA, 25 bp, Homo sapien
catcagttggtcctgatcaggaata

SEQ ID NO: 5278105 - DNA, 25 bp, Homo sapien
ccatcagttggtcctgatcaggaat

SEQ ID NO: 5278106 - DNA, 25 bp, Homo sapien
ggaatgcttattactctcatgacag

SEQ ID NO: 5278107 - DNA, 25 bp, Homo sapien
tcaaatctagaagttctatgtgctc

SEQ ID NO: 5278108 - DNA, 25 bp, Homo sapien
gattttaggaaagtcccacattgaa

SEQ ID NO: 5278109 - DNA, 25 bp, Homo sapien
actgtctgcttattgtcatctctag

SEQ ID NO: 5278110 - DNA, 25 bp, Homo sapien
tgcagcttccaaggccttgaacacg

SEQ ID NO: 5278111 - DNA, 25 bp, Homo sapien
cgtgggatcccagtgctgcagcttc

SEQ ID NO: 5278112 - DNA, 25 bp, Homo sapien
tgggcatcttctcgtgggtctcctg

SEQ ID NO: 5278113 - DNA, 25 bp, Homo sapien
tcctgcagttccgtgggatcccagt

SEQ ID NO: 5278114 - DNA, 25 bp, Homo sapien
gctgctggggccaaccgactggcca

SEQ ID NO: 5278115 - DNA, 25 bp, Homo sapien
ggatggcttctcagcctacagcagc

SEQ ID NO: 5278116 - DNA, 25 bp, Homo sapien
tggggccaaccgactggccatggct

SEQ ID NO: 5278117 - DNA, 25 bp, Homo sapien
tgcttggtacccctcctcggtggat

SEQ ID NO: 5278118 - DNA, 25 bp, Homo sapien
ttgtcacatatttatcctcagaaca

SEQ ID NO: 5278119 - DNA, 25 bp, Homo sapien
tcacaacgatgaagaaagggaacca

SEQ ID NO: 5278120 - DNA, 25 bp, Homo sapien
ttaatagctcattagccacaccagg

SEQ ID NO: 5278121 - DNA, 25 bp, Homo sapien
catccactggtaggcacttgtcaca

SEQ ID NO: 5278122 - DNA, 25 bp, Homo sapien
tgcatagaaaatgctttaaaatatt

SEQ ID NO: 5278123 - DNA, 25 bp, Homo sapien
gcatagaaaatgctttaaaatattt

SEQ ID NO: 5278124 - DNA, 25 bp, Homo sapien
gtgcatagaaaatgctttaaaatat

SEQ ID NO: 5278125 - DNA, 25 bp, Homo sapien
ttcagggttagagttacatcacacc

SEQ ID NO: 5278126 - DNA, 25 bp, Homo sapien
aaaccaggaatattccgctccatcc

SEQ ID NO: 5278127 - DNA, 25 bp, Homo sapien
gttagagttacatcacacctggctt

SEQ ID NO: 5278128 - DNA, 25 bp, Homo sapien
tcgaataagtgacaatgcacagtcc

SEQ ID NO: 5278129 - DNA, 25 bp, Homo sapien
ctgccgagcataatgctctatttcc

SEQ ID NO: 5278130 - DNA, 25 bp, Homo sapien
catcttggagattcggctcaacaac

SEQ ID NO: 5278131 - DNA, 25 bp, Homo sapien
caggctgtgcagcatacaagaattc

SEQ ID NO: 5278132 - DNA, 25 bp, Homo sapien
tgaaccttagtaactcaggctgtgc

SEQ ID NO: 5278133 - DNA, 25 bp, Homo sapien
ccgtaagctgggtcatcctgaacct

SEQ ID NO: 5278134 - DNA, 25 bp, Homo sapien
gcaccctttgatagaactgaccgct

SEQ ID NO: 5278135 - DNA, 25 bp, Homo sapien
tacatgactggtgctacaatggttc

SEQ ID NO: 5278136 - DNA, 25 bp, Homo sapien
tcatctaaagcaagctggcagtaca

SEQ ID NO: 5278137 - DNA, 25 bp, Homo sapien
ttcaaaataacagagcactgcctgg

SEQ ID NO: 5278138 - DNA, 25 bp, Homo sapien
cggtgtttatgttcatgccaaggaa

SEQ ID NO: 5278139 - DNA, 25 bp, Homo sapien
ccaatctttagctcggtgtttatgt

SEQ ID NO: 5278140 - DNA, 25 bp, Homo sapien
tcctcgcaccaatctttagctcggt

SEQ ID NO: 5278141 - DNA, 25 bp, Homo sapien
ctgcaagccaactcctcgcaccaat

SEQ ID NO: 5278142 - DNA, 25 bp, Homo sapien
gaagtgctaataaaatcaccgtaag

SEQ ID NO: 5278143 - DNA, 25 bp, Homo sapien
cccagccggtagagggcaatttgag

SEQ ID NO: 5278144 - DNA, 25 bp, Homo sapien
tcagcacccaaaatagtatctggca

SEQ ID NO: 5278145 - DNA, 25 bp, Homo sapien
tggcatttagcagactcaaaaaact

SEQ ID NO: 5278146 - DNA, 25 bp, Homo sapien
tttcaaacaataaactacgctggct

SEQ ID NO: 5278147 - DNA, 25 bp, Homo sapien
gtaattgccaccttttaagcattgg

SEQ ID NO: 5278148 - DNA, 25 bp, Homo sapien
aagctgtccgaaggcattattcaga

SEQ ID NO: 5278149 - DNA, 25 bp, Homo sapien
tattcatgttctatgcctcggaaac

SEQ ID NO: 5278150 - DNA, 25 bp, Homo sapien
cgccgtgcacaagccgaagtagggc

SEQ ID NO: 5278151 - DNA, 25 bp, Homo sapien
gtgcagcgcgccgtgcacaagccga

SEQ ID NO: 5278152 - DNA, 25 bp, Homo sapien
aaaatggtgcatcaggagattatat

SEQ ID NO: 5278153 - DNA, 25 bp, Homo sapien
agcgcgccgtgcacaagccgaagta

SEQ ID NO: 5278154 - DNA, 25 bp, Homo sapien
ttcttagctgatacaaccacaaggt

SEQ ID NO: 5278155 - DNA, 25 bp, Homo sapien
ggaactgccagcatattccactctg

SEQ ID NO: 5278156 - DNA, 25 bp, Homo sapien
tctgttaagtactctgtggactcct

SEQ ID NO: 5278157 - DNA, 25 bp, Homo sapien
gccaatagaggctgttaggcctttc

SEQ ID NO: 5278158 - DNA, 25 bp, Homo sapien
cggacagtcacctcagaaggccaaa

SEQ ID NO: 5278159 - DNA, 25 bp, Homo sapien
ccaacagtaattgattctgggactg

SEQ ID NO: 5278160 - DNA, 25 bp, Homo sapien
gccaatagctgctttgcaagaaaca

SEQ ID NO: 5278161 - DNA, 25 bp, Homo sapien
taaatgagtttacatgtactcatga

SEQ ID NO: 5278162 - DNA, 25 bp, Homo sapien
acagtggagcggtcacagctgactg

SEQ ID NO: 5278163 - DNA, 25 bp, Homo sapien
agttgggactatagctgtgcgccac

SEQ ID NO: 5278164 - DNA, 25 bp, Homo sapien
gtagttgggactatagctgtgcgcc

SEQ ID NO: 5278165 - DNA, 25 bp, Homo sapien
tagttgggactatagctgtgcgcca

SEQ ID NO: 5278166 - DNA, 25 bp, Homo sapien
tctgaactgcttccaagtgagctga

SEQ ID NO: 5278167 - DNA, 25 bp, Homo sapien
ccttaacgatgggttgaaacagcag

SEQ ID NO: 5278168 - DNA, 25 bp, Homo sapien
aagcgccgccctaactgggatctga

SEQ ID NO: 5278169 - DNA, 25 bp, Homo sapien
tggaggaaagcactcatgcaccaac

SEQ ID NO: 5278170 - DNA, 25 bp, Homo sapien
tgaggaagcaggtcggaaccatggt

SEQ ID NO: 5278171 - DNA, 25 bp, Homo sapien
cttcgggcagcaaaacagaatattc

SEQ ID NO: 5278172 - DNA, 25 bp, Homo sapien
caagcttcgggcagcaaaacagaat

SEQ ID NO: 5278173 - DNA, 25 bp, Homo sapien
gcaggtcggaaccatggtaagtaaa

SEQ ID NO: 5278174 - DNA, 25 bp, Homo sapien
aagaattcagcatcatatctctgtt

SEQ ID NO: 5278175 - DNA, 25 bp, Homo sapien
aaagaattcagcatcatatctctgt

SEQ ID NO: 5278176 - DNA, 25 bp, Homo sapien
agaattcagcatcatatctctgttc

SEQ ID NO: 5278177 - DNA, 25 bp, Homo sapien
ttaataacttccgtctacaacggca

SEQ ID NO: 5278178 - DNA, 25 bp, Homo sapien
tcgatctaagtaggttaataacttc

SEQ ID NO: 5278179 - DNA, 25 bp, Homo sapien
ctcatatgttgcaagtcgatctaag

SEQ ID NO: 5278180 - DNA, 25 bp, Homo sapien
ataacttccgtctacaacggcaaag

SEQ ID NO: 5278181 - DNA, 25 bp, Homo sapien
ctgttttgaataactatgttaggcc

SEQ ID NO: 5278182 - DNA, 25 bp, Homo sapien
actatgttaggccacttatatttac

SEQ ID NO: 5278183 - DNA, 25 bp, Homo sapien
ggccacttatatttacacagaatta

SEQ ID NO: 5278184 - DNA, 25 bp, Homo sapien
tgttttgaataactatgttaggcca

SEQ ID NO: 5278185 - DNA, 25 bp, Homo sapien
agatactgtcaatgtctatttcacc

SEQ ID NO: 5278186 - DNA, 25 bp, Homo sapien
tcactaatttcagtagttcttgtct

SEQ ID NO: 5278187 - DNA, 25 bp, Homo sapien
taatttcagtagttcttgtctcttc

SEQ ID NO: 5278188 - DNA, 25 bp, Homo sapien
cataggagatactgtcaatgtctat

SEQ ID NO: 5278189 - DNA, 25 bp, Homo sapien
ggagaacccaggatcgcttctttat

SEQ ID NO: 5278190 - DNA, 25 bp, Homo sapien
tttcaggaactctttccaaacactc

SEQ ID NO: 5278191 - DNA, 25 bp, Homo sapien
gccttttaatccatactgaagcagt

SEQ ID NO: 5278192 - DNA, 25 bp, Homo sapien
ccctattgctaaaagagcctccagg

SEQ ID NO: 5278193 - DNA, 25 bp, Homo sapien
agtactctaaaatgaagccctataa

SEQ ID NO: 5278194 - DNA, 25 bp, Homo sapien
tagaaaagtcagcaatgtaaagtac

SEQ ID NO: 5278195 - DNA, 25 bp, Homo sapien
aaattgtacttcattggctgtatta

SEQ ID NO: 5278196 - DNA, 25 bp, Homo sapien
tcagcatcaaagtccagttgcaggg

SEQ ID NO: 5278197 - DNA, 25 bp, Homo sapien
ttgaagcaacgttgaccgctgactt

SEQ ID NO: 5278198 - DNA, 25 bp, Homo sapien
tacaaggtcagtatccaggccgtag

SEQ ID NO: 5278199 - DNA, 25 bp, Homo sapien
ggccgtaggtatgagccaaggacaa

SEQ ID NO: 5278200 - DNA, 25 bp, Homo sapien
tcctccactgcctctgatatacaag

SEQ ID NO: 5278201 - DNA, 25 bp, Homo sapien
ccctggactagaaagcaagtctgaa

SEQ ID NO: 5278202 - DNA, 25 bp, Homo sapien
caccctctgtagatggctgatttaa

SEQ ID NO: 5278203 - DNA, 25 bp, Homo sapien
gactagaaagcaagtctgaacttct

SEQ ID NO: 5278204 - DNA, 25 bp, Homo sapien
tgtagatggctgatttaaacacaga

SEQ ID NO: 5278205 - DNA, 25 bp, Homo sapien
tttcagtcaccaagtaaaggccctg

SEQ ID NO: 5278206 - DNA, 25 bp, Homo sapien
tatataaccaaagtagcgagccttg

SEQ ID NO: 5278207 - DNA, 25 bp, Homo sapien
tctggtgtcgtggagcgcaaactca

SEQ ID NO: 5278208 - DNA, 25 bp, Homo sapien
gcgtttccgtggtggtgcaaatcgc

SEQ ID NO: 5278209 - DNA, 25 bp, Homo sapien
gcactgtctgcccaccaattgacat

SEQ ID NO: 5278210 - DNA, 25 bp, Homo sapien
cagttaaagcaccagagcatcgagc

SEQ ID NO: 5278211 - DNA, 25 bp, Homo sapien
gcatcgagctaaagtcactgcactg

SEQ ID NO: 5278212 - DNA, 25 bp, Homo sapien
tgacttgaggtgatggttcaaacca

SEQ ID NO: 5278213 - DNA, 25 bp, Homo sapien
agtagagagcctccaatcaggatta

SEQ ID NO: 5278214 - DNA, 25 bp, Homo sapien
tccaatcaggattaaggtcatcata

SEQ ID NO: 5278215 - DNA, 25 bp, Homo sapien
gagcctccaatcaggattaaggtca

SEQ ID NO: 5278216 - DNA, 25 bp, Homo sapien
tagagagcctccaatcaggattaag

SEQ ID NO: 5278217 - DNA, 25 bp, Homo sapien
gaaaacagctgtggattatatcaag

SEQ ID NO: 5278218 - DNA, 25 bp, Homo sapien
cttactcttcattcatctacttaag

SEQ ID NO: 5278219 - DNA, 25 bp, Homo sapien
tatcaagattcatcgcatcaactgc

SEQ ID NO: 5278220 - DNA, 25 bp, Homo sapien
catctacttaagattagtccaacac

SEQ ID NO: 5278221 - DNA, 25 bp, Homo sapien
ctagagcagccataaagagaggtga

SEQ ID NO: 5278222 - DNA, 25 bp, Homo sapien
tacataatgaactgcgtgactccag

SEQ ID NO: 5278223 - DNA, 25 bp, Homo sapien
tgatgagtacacacagccactttac

SEQ ID NO: 5278224 - DNA, 25 bp, Homo sapien
tacctggctgatccaagctcacttg

SEQ ID NO: 5278225 - DNA, 25 bp, Homo sapien
ggtttaccaatgagaggcttcccca

SEQ ID NO: 5278226 - DNA, 25 bp, Homo sapien
cccttggaagcctgtgaatatctta

SEQ ID NO: 5278227 - DNA, 25 bp, Homo sapien
ggaacaacctactctactgtacagt

SEQ ID NO: 5278228 - DNA, 25 bp, Homo sapien
tggtacacactaactagctcaagag

SEQ ID NO: 5278229 - DNA, 25 bp, Homo sapien
aatctcaaaccacccacccaaagct

SEQ ID NO: 5278230 - DNA, 25 bp, Homo sapien
gacactaacaaagagttccatcctt

SEQ ID NO: 5278231 - DNA, 25 bp, Homo sapien
ttggaacgatgagaataaacagctg

SEQ ID NO: 5278232 - DNA, 25 bp, Homo sapien
agagaaggtaactcccttcaaggag

SEQ ID NO: 5278233 - DNA, 25 bp, Homo sapien
tatcttagctatccacatttcagtg

SEQ ID NO: 5278234 - DNA, 25 bp, Homo sapien
tgccaggagcatcccatctggagaa

SEQ ID NO: 5278235 - DNA, 25 bp, Homo sapien
gccaggagcatcccatctggagaaa

SEQ ID NO: 5278236 - DNA, 25 bp, Homo sapien
ccaggagcatcccatctggagaaag

SEQ ID NO: 5278237 - DNA, 25 bp, Homo sapien
gagctgatgcccaaagatgagaaaa

SEQ ID NO: 5278238 - DNA, 25 bp, Homo sapien
tatacaatggtgatagccacacaag

SEQ ID NO: 5278239 - DNA, 25 bp, Homo sapien
tacagaaacgggaagtagctcaccc

SEQ ID NO: 5278240 - DNA, 25 bp, Homo sapien
gaacatggcacccttgatgagctga

SEQ ID NO: 5278241 - DNA, 25 bp, Homo sapien
tcatctggatgaaaccgtctaacat

SEQ ID NO: 5278242 - DNA, 25 bp, Homo sapien
ttccccagtgtaggtcaagactctt

SEQ ID NO: 5278243 - DNA, 25 bp, Homo sapien
aggaggcacatttcttcttggagca

SEQ ID NO: 5278244 - DNA, 25 bp, Homo sapien
ttttcatatcagcaggtcctacagg

SEQ ID NO: 5278245 - DNA, 25 bp, Homo sapien
ttgtccctggcgactgtaaaacttg

SEQ ID NO: 5278246 - DNA, 25 bp, Homo sapien
ggcgactgtaaaacttgacacttaa

SEQ ID NO: 5278247 - DNA, 25 bp, Homo sapien
cacttaacatccttaataatcccag

SEQ ID NO: 5278248 - DNA, 25 bp, Homo sapien
ttaataatcccagtgtcttcggtac

SEQ ID NO: 5278249 - DNA, 25 bp, Homo sapien
cacgttctctccttatatcctctat

SEQ ID NO: 5278250 - DNA, 25 bp, Homo sapien
ctctccttatatcctctatacacat

SEQ ID NO: 5278251 - DNA, 25 bp, Homo sapien
tccttatatcctctatacacatcca

SEQ ID NO: 5278252 - DNA, 25 bp, Homo sapien
ccttatatcctctatacacatccat

SEQ ID NO: 5278253 - DNA, 25 bp, Homo sapien
cattagtaacctgcttataatacgg

SEQ ID NO: 5278254 - DNA, 25 bp, Homo sapien
tagtaacctgcttataatacggtga

SEQ ID NO: 5278255 - DNA, 25 bp, Homo sapien
cctgcttataatacggtgatcctga

SEQ ID NO: 5278256 - DNA, 25 bp, Homo sapien
taatacggtgatcctgaaagaactc

SEQ ID NO: 5278257 - DNA, 25 bp, Homo sapien
cagcagtttcacatccaccaacaag

SEQ ID NO: 5278258 - DNA, 25 bp, Homo sapien
ttcacatccaccaacaagtaaaagt

SEQ ID NO: 5278259 - DNA, 25 bp, Homo sapien
gcagtttcacatccaccaacaagta

SEQ ID NO: 5278260 - DNA, 25 bp, Homo sapien
agtttcacatccaccaacaagtaaa

SEQ ID NO: 5278261 - DNA, 25 bp, Homo sapien
gactggttggtagtttagctgcaca

SEQ ID NO: 5278262 - DNA, 25 bp, Homo sapien
tagctgcacactatgagtggttcac

SEQ ID NO: 5278263 - DNA, 25 bp, Homo sapien
gcagggatctgtataacagacatca

SEQ ID NO: 5278264 - DNA, 25 bp, Homo sapien
gctatgttcagtacttctggcaggg

SEQ ID NO: 5278265 - DNA, 25 bp, Homo sapien
catgaatgaagacggagagatacta

SEQ ID NO: 5278266 - DNA, 25 bp, Homo sapien
catcatcacagtgttcagaacaggc

SEQ ID NO: 5278267 - DNA, 25 bp, Homo sapien
tgaagaaggtacaaagagacccatc

SEQ ID NO: 5278268 - DNA, 25 bp, Homo sapien
cactctatgtttcagcagtaagata

SEQ ID NO: 5278269 - DNA, 25 bp, Homo sapien
caaagcaccgtgctgctgagactaa

SEQ ID NO: 5278270 - DNA, 25 bp, Homo sapien
gacaggtactccatgcaaagcaccg

SEQ ID NO: 5278271 - DNA, 25 bp, Homo sapien
tcgttggtcaccctgaagagatgtg

SEQ ID NO: 5278272 - DNA, 25 bp, Homo sapien
agagttatctagaccaggagccagc

SEQ ID NO: 5278273 - DNA, 25 bp, Homo sapien
cttatgggcccagttttttaggcag

SEQ ID NO: 5278274 - DNA, 25 bp, Homo sapien
gagaagatggatatctagttctgct

SEQ ID NO: 5278275 - DNA, 25 bp, Homo sapien
gctacttctacacctatgtcaacca

SEQ ID NO: 5278276 - DNA, 25 bp, Homo sapien
tatgtcaaccatcaatcttagctcc

SEQ ID NO: 5278277 - DNA, 25 bp, Homo sapien
atttatccaaattcaactctggctg

SEQ ID NO: 5278278 - DNA, 25 bp, Homo sapien
caaaacgatgaatttcataaaatcc

SEQ ID NO: 5278279 - DNA, 25 bp, Homo sapien
tattaccaatttatccaaattcaac

SEQ ID NO: 5278280 - DNA, 25 bp, Homo sapien
cacaacattaggcaaaacgatgaat

SEQ ID NO: 5278281 - DNA, 25 bp, Homo sapien
acatcacaggcccacattactagaa

SEQ ID NO: 5278282 - DNA, 25 bp, Homo sapien
tcacaggcccacattactagaataa

SEQ ID NO: 5278283 - DNA, 25 bp, Homo sapien
gataaacatcacaggcccacattac

SEQ ID NO: 5278284 - DNA, 25 bp, Homo sapien
gatgataaacatcacaggcccacat

SEQ ID NO: 5278285 - DNA, 25 bp, Homo sapien
accagggtggtaaatagctgtgttg

SEQ ID NO: 5278286 - DNA, 25 bp, Homo sapien
tgactactgaagctgaaacagtgac

SEQ ID NO: 5278287 - DNA, 25 bp, Homo sapien
taaatagctgtgttgattccatgag

SEQ ID NO: 5278288 - DNA, 25 bp, Homo sapien
ttccatgaggataatgactactgaa

SEQ ID NO: 5278289 - DNA, 25 bp, Homo sapien
ctcggtaattgatgaccaggagttc

SEQ ID NO: 5278290 - DNA, 25 bp, Homo sapien
ttaagtcacctataaaactagatgc

SEQ ID NO: 5278291 - DNA, 25 bp, Homo sapien
taattgatgaccaggagttctgcag

SEQ ID NO: 5278292 - DNA, 25 bp, Homo sapien
tgtgcacttgctttatattctaaaa

SEQ ID NO: 5278293 - DNA, 25 bp, Homo sapien
cacagttcctgtgctttcggcatag

SEQ ID NO: 5278294 - DNA, 25 bp, Homo sapien
catgagatcaaacaccctcacagtt

SEQ ID NO: 5278295 - DNA, 25 bp, Homo sapien
caaagagttcacttcccatgagatc

SEQ ID NO: 5278296 - DNA, 25 bp, Homo sapien
agtagggtacaatcgtaactccatg

SEQ ID NO: 5278297 - DNA, 25 bp, Homo sapien
cttgacatttcccaataatggatgt

SEQ ID NO: 5278298 - DNA, 25 bp, Homo sapien
ataatggatgtaaaatcatcttttg

SEQ ID NO: 5278299 - DNA, 25 bp, Homo sapien
taatggatgtaaaatcatcttttgc

SEQ ID NO: 5278300 - DNA, 25 bp, Homo sapien
gacatttcccaataatggatgtaaa

SEQ ID NO: 5278301 - DNA, 25 bp, Homo sapien
ctgatcttgaacagcagccaaaagc

SEQ ID NO: 5278302 - DNA, 25 bp, Homo sapien
cactgatcttgaacagcagccaaaa

SEQ ID NO: 5278303 - DNA, 25 bp, Homo sapien
actgatcttgaacagcagccaaaag

SEQ ID NO: 5278304 - DNA, 25 bp, Homo sapien
tatctgtttattaaccaagcgaacc

SEQ ID NO: 5278305 - DNA, 25 bp, Homo sapien
gcgaaccagtccatcagggagcaaa

SEQ ID NO: 5278306 - DNA, 25 bp, Homo sapien
ttaaccaagcgaaccagtccatcag

SEQ ID NO: 5278307 - DNA, 25 bp, Homo sapien
cttgcaagtaccaaatgccagttta

SEQ ID NO: 5278308 - DNA, 25 bp, Homo sapien
ccagatgtattggcgtaaaaataat

SEQ ID NO: 5278309 - DNA, 25 bp, Homo sapien
tgtaccagatgtattggcgtaaaaa

SEQ ID NO: 5278310 - DNA, 25 bp, Homo sapien
ctgtaccagatgtattggcgtaaaa

SEQ ID NO: 5278311 - DNA, 25 bp, Homo sapien
taccagatgtattggcgtaaaaata

SEQ ID NO: 5278312 - DNA, 25 bp, Homo sapien
aaaggatgcaccatgtttttggttg

SEQ ID NO: 5278313 - DNA, 25 bp, Homo sapien
ctcgaattgctttcgtgatgataaa

SEQ ID NO: 5278314 - DNA, 25 bp, Homo sapien
ctttcgtgatgataaaggatgcacc

SEQ ID NO: 5278315 - DNA, 25 bp, Homo sapien
tcgtgatgataaaggatgcaccatg

SEQ ID NO: 5278316 - DNA, 25 bp, Homo sapien
gctctacccacgaagcgcccgcgcc

SEQ ID NO: 5278317 - DNA, 25 bp, Homo sapien
aagcgcccgcgccaagctggctgct

SEQ ID NO: 5278318 - DNA, 25 bp, Homo sapien
acgaagcgcccgcgccaagctggct

SEQ ID NO: 5278319 - DNA, 25 bp, Homo sapien
gctgctgtagatgggcctggttcac

SEQ ID NO: 5278320 - DNA, 25 bp, Homo sapien
tctccggtggccactcggtgttgac

SEQ ID NO: 5278321 - DNA, 25 bp, Homo sapien
ggtgttgaccaacaagtcatagaga

SEQ ID NO: 5278322 - DNA, 25 bp, Homo sapien
tggccactcggtgttgaccaacaag

SEQ ID NO: 5278323 - DNA, 25 bp, Homo sapien
gtcatagagaatcgtctcctcctca

SEQ ID NO: 5278324 - DNA, 25 bp, Homo sapien
ggactcaaagccggccctgactcgg

SEQ ID NO: 5278325 - DNA, 25 bp, Homo sapien
gcctggactcaaagccggccctgac

SEQ ID NO: 5278326 - DNA, 25 bp, Homo sapien
tcaaagccggccctgactcgggggc

SEQ ID NO: 5278327 - DNA, 25 bp, Homo sapien
actcaaagccggccctgactcgggg

SEQ ID NO: 5278328 - DNA, 25 bp, Homo sapien
ttcgccgaggactcaggcagcggag

SEQ ID NO: 5278329 - DNA, 25 bp, Homo sapien
gttcgccgaggactcaggcagcgga

SEQ ID NO: 5278330 - DNA, 25 bp, Homo sapien
tctccctctccccatatatctggag

SEQ ID NO: 5278331 - DNA, 25 bp, Homo sapien
gatggactttatgaccacttcttca

SEQ ID NO: 5278332 - DNA, 25 bp, Homo sapien
gggatacggaattatagatctctgg

SEQ ID NO: 5278333 - DNA, 25 bp, Homo sapien
tggagtgatggactttatgaccact

SEQ ID NO: 5278334 - DNA, 25 bp, Homo sapien
cctatgacttgtgttggctgacaga

SEQ ID NO: 5278335 - DNA, 25 bp, Homo sapien
tggccatatatagctaccaggaagg

SEQ ID NO: 5278336 - DNA, 25 bp, Homo sapien
gaataatgggcgaccacacatggga

SEQ ID NO: 5278337 - DNA, 25 bp, Homo sapien
gacactgtattacttccaaggctgg

SEQ ID NO: 5278338 - DNA, 25 bp, Homo sapien
cttggtggtgagatcctcagaaact

SEQ ID NO: 5278339 - DNA, 25 bp, Homo sapien
tggtggtgagatcctcagaaactaa

SEQ ID NO: 5278340 - DNA, 25 bp, Homo sapien
ggtgagatcctcagaaactaagcag

SEQ ID NO: 5278341 - DNA, 25 bp, Homo sapien
tgagatcctcagaaactaagcagct

SEQ ID NO: 5278342 - DNA, 25 bp, Homo sapien
tgaacaaaagcctacgctgggagtt

SEQ ID NO: 5278343 - DNA, 25 bp, Homo sapien
taggaatctcccagttagtaggcaa

SEQ ID NO: 5278344 - DNA, 25 bp, Homo sapien
ggagaggagccaatcataccccaat

SEQ ID NO: 5278345 - DNA, 25 bp, Homo sapien
ggtgttattctacctgccaaggaga

SEQ ID NO: 5278346 - DNA, 25 bp, Homo sapien
ctctatgggttatttctttccctga

SEQ ID NO: 5278347 - DNA, 25 bp, Homo sapien
tctatgggttatttctttccctgac

SEQ ID NO: 5278348 - DNA, 25 bp, Homo sapien
cttgaaatcatctctatgggttatt

SEQ ID NO: 5278349 - DNA, 25 bp, Homo sapien
aatcatctctatgggttatttcttt

SEQ ID NO: 5278350 - DNA, 25 bp, Homo sapien
tctggtcactctgagacaatgaaga

SEQ ID NO: 5278351 - DNA, 25 bp, Homo sapien
tgtaaactatcatgtccaggatcgt

SEQ ID NO: 5278352 - DNA, 25 bp, Homo sapien
caatgaagagttgtctggttacttt

SEQ ID NO: 5278353 - DNA, 25 bp, Homo sapien
cacgccagaagcctgcagtgggatg

SEQ ID NO: 5278354 - DNA, 25 bp, Homo sapien
tgataccgcgtggtgtgctccgaac

SEQ ID NO: 5278355 - DNA, 25 bp, Homo sapien
acatggtgcccagaacgaaggcggc

SEQ ID NO: 5278356 - DNA, 25 bp, Homo sapien
tgctcagggcaatgaatccagtcca

SEQ ID NO: 5278357 - DNA, 25 bp, Homo sapien
tctgtagctgtgaccctgataccgc

SEQ ID NO: 5278358 - DNA, 25 bp, Homo sapien
tccgctcagcggcaggcgcataagg

SEQ ID NO: 5278359 - DNA, 25 bp, Homo sapien
actgccacgccgtgtcagtcgggag

SEQ ID NO: 5278360 - DNA, 25 bp, Homo sapien
gggcggcttgttgcacgcctcagcc

SEQ ID NO: 5278361 - DNA, 25 bp, Homo sapien
aagatggcggccttctccggtgcgt

SEQ ID NO: 5278362 - DNA, 25 bp, Homo sapien
tgccagtgcaccttcggctgcaaaa

SEQ ID NO: 5278363 - DNA, 25 bp, Homo sapien
aggacgattcttcccaggagcgggc

SEQ ID NO: 5278364 - DNA, 25 bp, Homo sapien
gctcgggttcggaggacgattcttc

SEQ ID NO: 5278365 - DNA, 25 bp, Homo sapien
tttcctgccagtgcaccttcggctg

SEQ ID NO: 5278366 - DNA, 25 bp, Homo sapien
taacgtggcagtgaccctttgggaa

SEQ ID NO: 5278367 - DNA, 25 bp, Homo sapien
cggcgttgctctggcggctcccaga

SEQ ID NO: 5278368 - DNA, 25 bp, Homo sapien
ggcctcctgcctcttaacgtggcag

SEQ ID NO: 5278369 - DNA, 25 bp, Homo sapien
ctaggcggcggcgttgctctggcgg

SEQ ID NO: 5278370 - DNA, 25 bp, Homo sapien
tggcttatcgaaccctacagttgat

SEQ ID NO: 5278371 - DNA, 25 bp, Homo sapien
tttatttgccgtctgctaccctcct

SEQ ID NO: 5278372 - DNA, 25 bp, Homo sapien
cagttgatattttcgcctcttgctt

SEQ ID NO: 5278373 - DNA, 25 bp, Homo sapien
caaatatgatttgatatggcttatc

SEQ ID NO: 5278374 - DNA, 25 bp, Homo sapien
gatgaatttgatgggaaagttacct

SEQ ID NO: 5278375 - DNA, 25 bp, Homo sapien
tgaactgtaccatttctcaggttga

SEQ ID NO: 5278376 - DNA, 25 bp, Homo sapien
cggatataaaggtaccagtggatga

SEQ ID NO: 5278377 - DNA, 25 bp, Homo sapien
ttctcaggttgagccggatataaag

SEQ ID NO: 5278378 - DNA, 25 bp, Homo sapien
tgttcaagagttggctgcccttgaa

SEQ ID NO: 5278379 - DNA, 25 bp, Homo sapien
ccttgaaaaggaggcgcagacatct

SEQ ID NO: 5278380 - DNA, 25 bp, Homo sapien
tcttggctaccttcctaaccagctg

SEQ ID NO: 5278381 - DNA, 25 bp, Homo sapien
gcttccaagcagcagtatttatagt

SEQ ID NO: 5278382 - DNA, 25 bp, Homo sapien
tgggtaactcattctgttcaccaga

SEQ ID NO: 5278383 - DNA, 25 bp, Homo sapien
gaaaagactgtgattggttgctagt

SEQ ID NO: 5278384 - DNA, 25 bp, Homo sapien
gattggttgctagttttgtgtttcc

SEQ ID NO: 5278385 - DNA, 25 bp, Homo sapien
agctgggtaactcattctgttcacc

SEQ ID NO: 5278386 - DNA, 25 bp, Homo sapien
ttctctgcagggcaataattgggtg

SEQ ID NO: 5278387 - DNA, 25 bp, Homo sapien
tagagtctcggggaagacactctga

SEQ ID NO: 5278388 - DNA, 25 bp, Homo sapien
ctgcagggcaataattgggtgtgaa

SEQ ID NO: 5278389 - DNA, 25 bp, Homo sapien
gttttttgtggtggattagagtctc

SEQ ID NO: 5278390 - DNA, 25 bp, Homo sapien
tgtttccaggtgggttaaattctgc

SEQ ID NO: 5278391 - DNA, 25 bp, Homo sapien
ctgtttccaggtgggttaaattctg

SEQ ID NO: 5278392 - DNA, 25 bp, Homo sapien
tgtaacatcctcttgttttcctcct

SEQ ID NO: 5278393 - DNA, 25 bp, Homo sapien
gtgtaacatcctcttgttttcctcc

SEQ ID NO: 5278394 - DNA, 25 bp, Homo sapien
tgtgtaacatcctcttgttttcctc

SEQ ID NO: 5278395 - DNA, 25 bp, Homo sapien
tttgtgtaacatcctcttgttttcc

SEQ ID NO: 5278396 - DNA, 25 bp, Homo sapien
tcaagccctgagattgagtgtatta

SEQ ID NO: 5278397 - DNA, 25 bp, Homo sapien
caagccctgagattgagtgtattac

SEQ ID NO: 5278398 - DNA, 25 bp, Homo sapien
tccgcagaccgatagaacaagggtt

SEQ ID NO: 5278399 - DNA, 25 bp, Homo sapien
tgaacaccactcacgggagggctgg

SEQ ID NO: 5278400 - DNA, 25 bp, Homo sapien
gagaaactcgatcaccttgacctgg

SEQ ID NO: 5278401 - DNA, 25 bp, Homo sapien
caagggttcagcgatggtttcccag

SEQ ID NO: 5278402 - DNA, 25 bp, Homo sapien
tgccagagccacgaggccagcgtgt

SEQ ID NO: 5278403 - DNA, 25 bp, Homo sapien
gccagcgtgtaagagaaccagtcct

SEQ ID NO: 5278404 - DNA, 25 bp, Homo sapien
agcaatgcgagactgtgccagagcc

SEQ ID NO: 5278405 - DNA, 25 bp, Homo sapien
caaggtccacaacctcgtgcaaggg

SEQ ID NO: 5278406 - DNA, 25 bp, Homo sapien
aagatggaggaaagacttggccctg

SEQ ID NO: 5278407 - DNA, 25 bp, Homo sapien
tgtaagatggaggaaagacttggcc

SEQ ID NO: 5278408 - DNA, 25 bp, Homo sapien
taagatggaggaaagacttggccct

SEQ ID NO: 5278409 - DNA, 25 bp, Homo sapien
gatggaggaaagacttggccctgaa

SEQ ID NO: 5278410 - DNA, 25 bp, Homo sapien
ttttccttctgaaaagaagcctgaa

SEQ ID NO: 5278411 - DNA, 25 bp, Homo sapien
agaagcctgaaaaatgccattgcac

SEQ ID NO: 5278412 - DNA, 25 bp, Homo sapien
tttccttctgaaaagaagcctgaaa

SEQ ID NO: 5278413 - DNA, 25 bp, Homo sapien
gaaaagaagcctgaaaaatgccatt

SEQ ID NO: 5278414 - DNA, 25 bp, Homo sapien
cccttttaactgaaccttgatgtcg

SEQ ID NO: 5278415 - DNA, 25 bp, Homo sapien
tgagagccgccaccgcctaatgagg

SEQ ID NO: 5278416 - DNA, 25 bp, Homo sapien
attaaaggccgtatgtgagagccgc

SEQ ID NO: 5278417 - DNA, 25 bp, Homo sapien
actgaaccttgatgtcgtgccagcc

SEQ ID NO: 5278418 - DNA, 25 bp, Homo sapien
gatctcagatgaatgagcagggttc

SEQ ID NO: 5278419 - DNA, 25 bp, Homo sapien
cacccaggaccagcagaggtgagtg

SEQ ID NO: 5278420 - DNA, 25 bp, Homo sapien
caagcaggatgccacccaggaccag

SEQ ID NO: 5278421 - DNA, 25 bp, Homo sapien
gggcccggatctcagatgaatgagc

SEQ ID NO: 5278422 - DNA, 25 bp, Homo sapien
agcacgacgcaggagttgggaccac

SEQ ID NO: 5278423 - DNA, 25 bp, Homo sapien
gggaccaccagagtgaactgcagtg

SEQ ID NO: 5278424 - DNA, 25 bp, Homo sapien
cagtgtcaccgaagacgcagcttcc

SEQ ID NO: 5278425 - DNA, 25 bp, Homo sapien
aatgagccacatgtgggccgaggac

SEQ ID NO: 5278426 - DNA, 25 bp, Homo sapien
cctcgtccacactgcaaggctgtgt

SEQ ID NO: 5278427 - DNA, 25 bp, Homo sapien
cctgaggccacagtctgggctccct

SEQ ID NO: 5278428 - DNA, 25 bp, Homo sapien
tccacactgcaaggctgtgtgtgct

SEQ ID NO: 5278429 - DNA, 25 bp, Homo sapien
agtctgggctccctcgtccacactg

SEQ ID NO: 5278430 - DNA, 25 bp, Homo sapien
ttcatctgcccattatcctcgtgct

SEQ ID NO: 5278431 - DNA, 25 bp, Homo sapien
ttagggcctgtagctttgaccttca

SEQ ID NO: 5278432 - DNA, 25 bp, Homo sapien
cacaacaagtgctcaatagtggttg

SEQ ID NO: 5278433 - DNA, 25 bp, Homo sapien
tcctcgtgctctgtagagacagcca

SEQ ID NO: 5278434 - DNA, 25 bp, Homo sapien
ggagagcctcagcccttggaactgg

SEQ ID NO: 5278435 - DNA, 25 bp, Homo sapien
gcatgcttgagctggtgataacgta

SEQ ID NO: 5278436 - DNA, 25 bp, Homo sapien
tctgaacatcaatgcttgcctgggt

SEQ ID NO: 5278437 - DNA, 25 bp, Homo sapien
ccggagtggctgaacatcgcatgct

SEQ ID NO: 5278438 - DNA, 25 bp, Homo sapien
tgataacgtattccaccactaagtg

SEQ ID NO: 5278439 - DNA, 25 bp, Homo sapien
agatggcagtcattcgatgtaagtg

SEQ ID NO: 5278440 - DNA, 25 bp, Homo sapien
tggcagtcattcgatgtaagtgtct

SEQ ID NO: 5278441 - DNA, 25 bp, Homo sapien
gcagtcattcgatgtaagtgtctgt

SEQ ID NO: 5278442 - DNA, 25 bp, Homo sapien
gatggcagtcattcgatgtaagtgt

SEQ ID NO: 5278443 - DNA, 25 bp, Homo sapien
ctctgttgttcttagggtcaaatga

SEQ ID NO: 5278444 - DNA, 25 bp, Homo sapien
tctgttgttcttagggtcaaatgat

SEQ ID NO: 5278445 - DNA, 25 bp, Homo sapien
ctgggaaatgacaagcaggccatgg

SEQ ID NO: 5278446 - DNA, 25 bp, Homo sapien
tcgaatctgaaccaagcaaggccat

SEQ ID NO: 5278447 - DNA, 25 bp, Homo sapien
cctgctgtttcgaatctgaaccaag

SEQ ID NO: 5278448 - DNA, 25 bp, Homo sapien
cctaccacctgctgtttcgaatctg

SEQ ID NO: 5278449 - DNA, 25 bp, Homo sapien
tgtttcgaatctgaaccaagcaagg

SEQ ID NO: 5278450 - DNA, 25 bp, Homo sapien
ggtggagcaagaagtccgattcctt

SEQ ID NO: 5278451 - DNA, 25 bp, Homo sapien
aggtggagcaagaagtccgattcct

SEQ ID NO: 5278452 - DNA, 25 bp, Homo sapien
tggagcaagaagtccgattccttcc

SEQ ID NO: 5278453 - DNA, 25 bp, Homo sapien
gagcaagaagtccgattccttcctc

SEQ ID NO: 5278454 - DNA, 25 bp, Homo sapien
tgggaagtgcaacccatgtaaggcg

SEQ ID NO: 5278455 - DNA, 25 bp, Homo sapien
tggacagctccacgggaaagcggag

SEQ ID NO: 5278456 - DNA, 25 bp, Homo sapien
gcagccatgttcgtgggaagtgcaa

SEQ ID NO: 5278457 - DNA, 25 bp, Homo sapien
caacccatgtaaggcgggagggaca

SEQ ID NO: 5278458 - DNA, 25 bp, Homo sapien
ttggcttttcccagactccgcgaga

SEQ ID NO: 5278459 - DNA, 25 bp, Homo sapien
ggcctgaacgggagcttggcttttc

SEQ ID NO: 5278460 - DNA, 25 bp, Homo sapien
gacatgacggtcagtctcaaaactc

SEQ ID NO: 5278461 - DNA, 25 bp, Homo sapien
gaacctaattaaagagccttgtgaa

SEQ ID NO: 5278462 - DNA, 25 bp, Homo sapien
tggatgaggccatgctgcgtttcct

SEQ ID NO: 5278463 - DNA, 25 bp, Homo sapien
gcgtttcctacgaagcagtccatac

SEQ ID NO: 5278464 - DNA, 25 bp, Homo sapien
catgctgcgtttcctacgaagcagt

SEQ ID NO: 5278465 - DNA, 25 bp, Homo sapien
aggccatgctgcgtttcctacgaag

SEQ ID NO: 5278466 - DNA, 25 bp, Homo sapien
ctttcagagttcctggagccctcgt

SEQ ID NO: 5278467 - DNA, 25 bp, Homo sapien
tttctgccagcaatggttattccca

SEQ ID NO: 5278468 - DNA, 25 bp, Homo sapien
cagcgtccaaaataatacacttctt

SEQ ID NO: 5278469 - DNA, 25 bp, Homo sapien
ggagccctcgtcatgtctttcttga

SEQ ID NO: 5278470 - DNA, 25 bp, Homo sapien
acacagaaatcagcctgctccctga

SEQ ID NO: 5278471 - DNA, 25 bp, Homo sapien
tgccccattggaatctgctctaaga

SEQ ID NO: 5278472 - DNA, 25 bp, Homo sapien
acttctctgaacatcaccccgatgc

SEQ ID NO: 5278473 - DNA, 25 bp, Homo sapien
aggaggaggattctgagtacttctc

SEQ ID NO: 5278474 - DNA, 25 bp, Homo sapien
ccaaatgaatggagacttccctgtc

SEQ ID NO: 5278475 - DNA, 25 bp, Homo sapien
tcctgagactgaagcctgggaggtc

SEQ ID NO: 5278476 - DNA, 25 bp, Homo sapien
gatgtctctctatcgaaagtgtagg

SEQ ID NO: 5278477 - DNA, 25 bp, Homo sapien
aaagtgtaggttcctctgggattca

SEQ ID NO: 5278478 - DNA, 25 bp, Homo sapien
caattgcggcaaactggcattccca

SEQ ID NO: 5278479 - DNA, 25 bp, Homo sapien
aagtcacgtagaactgccaggccag

SEQ ID NO: 5278480 - DNA, 25 bp, Homo sapien
caacagtgtgggcaagcaggccttc

SEQ ID NO: 5278481 - DNA, 25 bp, Homo sapien
ccttgcagaggtgggcacattgaac

SEQ ID NO: 5278482 - DNA, 25 bp, Homo sapien
gaattttggggatgacccttctgtc

SEQ ID NO: 5278483 - DNA, 25 bp, Homo sapien
tgctggtctcttaagggctcaccag

SEQ ID NO: 5278484 - DNA, 25 bp, Homo sapien
gagccctgttctagctccaggaggc

SEQ ID NO: 5278485 - DNA, 25 bp, Homo sapien
tggatggagggcagtcgaagaggcc

SEQ ID NO: 5278486 - DNA, 25 bp, Homo sapien
tctctgtggaggagtgtctgtacaa

SEQ ID NO: 5278487 - DNA, 25 bp, Homo sapien
caggccctgtgctggtttcaaagtg

SEQ ID NO: 5278488 - DNA, 25 bp, Homo sapien
cagttccccagacttgctcagcagc

SEQ ID NO: 5278489 - DNA, 25 bp, Homo sapien
tttcaaggatagacaccaggccctg

SEQ ID NO: 5278490 - DNA, 25 bp, Homo sapien
ccctcctggagcctgtttcaaggat

SEQ ID NO: 5278491 - DNA, 25 bp, Homo sapien
catccctgtttaaagagggacatcc

SEQ ID NO: 5278492 - DNA, 25 bp, Homo sapien
caaagcaggccttttatcatgaggg

SEQ ID NO: 5278493 - DNA, 25 bp, Homo sapien
gcaagaaccatttggagcgcccact

SEQ ID NO: 5278494 - DNA, 25 bp, Homo sapien
aaaacagcatagagctctcccagcc

SEQ ID NO: 5278495 - DNA, 25 bp, Homo sapien
aaagtgaaattagcgcctgttgaat

SEQ ID NO: 5278496 - DNA, 25 bp, Homo sapien
atttataaagtgaaattagcgcctg

SEQ ID NO: 5278497 - DNA, 25 bp, Homo sapien
gaatgcggtgattcagtttccattt

SEQ ID NO: 5278498 - DNA, 25 bp, Homo sapien
gcctggaatgcggtgattcagtttc

SEQ ID NO: 5278499 - DNA, 25 bp, Homo sapien
tgtcaggagataggatgaacggctt

SEQ ID NO: 5278500 - DNA, 25 bp, Homo sapien
caaggctcagtgaccgagggactga

SEQ ID NO: 5278501 - DNA, 25 bp, Homo sapien
taattggttctagagcagcagctcc

SEQ ID NO: 5278502 - DNA, 25 bp, Homo sapien
gatgaacggcttatggataattggt

SEQ ID NO: 5278503 - DNA, 25 bp, Homo sapien
gctgatgagtgttctcacacacgta

SEQ ID NO: 5278504 - DNA, 25 bp, Homo sapien
gagtttttgcccatcctcaaggcct

SEQ ID NO: 5278505 - DNA, 25 bp, Homo sapien
caagtcccatggtgtgaagtaacgt

SEQ ID NO: 5278506 - DNA, 25 bp, Homo sapien
ggattcgggattcagagagtttttg

SEQ ID NO: 5278507 - DNA, 25 bp, Homo sapien
caccactaatcccatcttcagaagg

SEQ ID NO: 5278508 - DNA, 25 bp, Homo sapien
attgcaccactaatcccatcttcag

SEQ ID NO: 5278509 - DNA, 25 bp, Homo sapien
tgcaccactaatcccatcttcagaa

SEQ ID NO: 5278510 - DNA, 25 bp, Homo sapien
accactaatcccatcttcagaaggg

SEQ ID NO: 5278511 - DNA, 25 bp, Homo sapien
gaaatgacatcagtccagttggcag

SEQ ID NO: 5278512 - DNA, 25 bp, Homo sapien
gagagaaatcggacaccagaccatt

SEQ ID NO: 5278513 - DNA, 25 bp, Homo sapien
ttggcaggcagtgtgtaagtgacca

SEQ ID NO: 5278514 - DNA, 25 bp, Homo sapien
catggcggaggctgatgggtactgg

SEQ ID NO: 5278515 - DNA, 25 bp, Homo sapien
gcaatgcccagtgcaaccatagatc

SEQ ID NO: 5278516 - DNA, 25 bp, Homo sapien
gaatctttgatgagagcaatgccca

SEQ ID NO: 5278517 - DNA, 25 bp, Homo sapien
caaagggcccctgggaatctttgat

SEQ ID NO: 5278518 - DNA, 25 bp, Homo sapien
gatctgagggtgatcactgtaaccc

SEQ ID NO: 5278519 - DNA, 25 bp, Homo sapien
cgagagatagttgcccttttccgct

SEQ ID NO: 5278520 - DNA, 25 bp, Homo sapien
gatagttgcccttttccgcttgaca

SEQ ID NO: 5278521 - DNA, 25 bp, Homo sapien
gggctgcgagagatagttgcccttt

SEQ ID NO: 5278522 - DNA, 25 bp, Homo sapien
tcccttcatcctgccagattcactg

SEQ ID NO: 5278523 - DNA, 25 bp, Homo sapien
tctctttgaagacttccgtgtcttt

SEQ ID NO: 5278524 - DNA, 25 bp, Homo sapien
cgtgtcttttccttgaaaaggctgg

SEQ ID NO: 5278525 - DNA, 25 bp, Homo sapien
ccgtgtcttttccttgaaaaggctg

SEQ ID NO: 5278526 - DNA, 25 bp, Homo sapien
ctcatgcagcaggtcaagcagccgt

SEQ ID NO: 5278527 - DNA, 25 bp, Homo sapien
caagcagccgtggacgggcggctgt

SEQ ID NO: 5278528 - DNA, 25 bp, Homo sapien
gtctcctggctcatgcagcaggtca

SEQ ID NO: 5278529 - DNA, 25 bp, Homo sapien
accctgcacgttccctccctctgct

SEQ ID NO: 5278530 - DNA, 25 bp, Homo sapien
tgatttactgaagttggtgcccaga

SEQ ID NO: 5278531 - DNA, 25 bp, Homo sapien
agggaggcagccttgaaaagtcctt

SEQ ID NO: 5278532 - DNA, 25 bp, Homo sapien
ttgatttactgaagttggtgcccag

SEQ ID NO: 5278533 - DNA, 25 bp, Homo sapien
gggaggcagccttgaaaagtccttg

SEQ ID NO: 5278534 - DNA, 25 bp, Homo sapien
tgtgggtctccacacagggacgcac

SEQ ID NO: 5278535 - DNA, 25 bp, Homo sapien
tccctgcagcaggtagatacctgca

SEQ ID NO: 5278536 - DNA, 25 bp, Homo sapien
cctgcagcaggtagatacctgcaga

SEQ ID NO: 5278537 - DNA, 25 bp, Homo sapien
acagggacgcacactccaagaaagg

SEQ ID NO: 5278538 - DNA, 25 bp, Homo sapien
gtggccatggtgagccacgtgactc

SEQ ID NO: 5278539 - DNA, 25 bp, Homo sapien
tgcagagctcagcacctcatgagca

SEQ ID NO: 5278540 - DNA, 25 bp, Homo sapien
atgagcacagatgaagggtggccat

SEQ ID NO: 5278541 - DNA, 25 bp, Homo sapien
gccatggtgagccacgtgactctgg

SEQ ID NO: 5278542 - DNA, 25 bp, Homo sapien
ctttgtgatggtcatagctggtggc

SEQ ID NO: 5278543 - DNA, 25 bp, Homo sapien
ctctggagcatagactgagcctttg

SEQ ID NO: 5278544 - DNA, 25 bp, Homo sapien
agcatagactgagcctttgtgatgg

SEQ ID NO: 5278545 - DNA, 25 bp, Homo sapien
acttgtccgagcagcgctctggagc

SEQ ID NO: 5278546 - DNA, 25 bp, Homo sapien
gatgccggctgctgcggtttggcag

SEQ ID NO: 5278547 - DNA, 25 bp, Homo sapien
gcagatgccggctgctgcggtttgg

SEQ ID NO: 5278548 - DNA, 25 bp, Homo sapien
gccaggctgcttgtccagccctggg

SEQ ID NO: 5278549 - DNA, 25 bp, Homo sapien
agccaggctgcttgtccagccctgg

SEQ ID NO: 5278550 - DNA, 25 bp, Homo sapien
gcggatctgggcataggaaagaaat

SEQ ID NO: 5278551 - DNA, 25 bp, Homo sapien
gagcatcagggtcgggtaagcctcc

SEQ ID NO: 5278552 - DNA, 25 bp, Homo sapien
gctggagggattgccctgatcccat

SEQ ID NO: 5278553 - DNA, 25 bp, Homo sapien
aatgcaatcaggaatgcagcaaggc

SEQ ID NO: 5278554 - DNA, 25 bp, Homo sapien
tggaattagtgacattggcaaggtg

SEQ ID NO: 5278555 - DNA, 25 bp, Homo sapien
tcctttaaggacaccgaatcagtag

SEQ ID NO: 5278556 - DNA, 25 bp, Homo sapien
gaatcctgccttagatctgcttcac

SEQ ID NO: 5278557 - DNA, 25 bp, Homo sapien
gggccttgttggaattagtgacatt

SEQ ID NO: 5278558 - DNA, 25 bp, Homo sapien
gacaacgctaacattgcttttgcca

SEQ ID NO: 5278559 - DNA, 25 bp, Homo sapien
ttggatgagacaacgctaacattgc

SEQ ID NO: 5278560 - DNA, 25 bp, Homo sapien
gcttgttggatgagacaacgctaac

SEQ ID NO: 5278561 - DNA, 25 bp, Homo sapien
gctgctgttgcaatgaaatgagaca

SEQ ID NO: 5278562 - DNA, 25 bp, Homo sapien
cctcaaataagccgcatttcctgaa

SEQ ID NO: 5278563 - DNA, 25 bp, Homo sapien
tttctggaagtatgaaagctttgcc

SEQ ID NO: 5278564 - DNA, 25 bp, Homo sapien
catttcctgaaagcccggatttctg

SEQ ID NO: 5278565 - DNA, 25 bp, Homo sapien
aagctttgccaagatgtggagaaca

SEQ ID NO: 5278566 - DNA, 25 bp, Homo sapien
agacccttctctggcctgccttggg

SEQ ID NO: 5278567 - DNA, 25 bp, Homo sapien
gtcagggcagacccttctctggcct

SEQ ID NO: 5278568 - DNA, 25 bp, Homo sapien
caggtcagggcagacccttctctgg

SEQ ID NO: 5278569 - DNA, 25 bp, Homo sapien
agggcagacccttctctggcctgcc

SEQ ID NO: 5278570 - DNA, 25 bp, Homo sapien
ccctgcctagcatgagagaatgtcc

SEQ ID NO: 5278571 - DNA, 25 bp, Homo sapien
cagttgaagctgacgggtagagccc

SEQ ID NO: 5278572 - DNA, 25 bp, Homo sapien
ggtagagcccaggatacgagctcct

SEQ ID NO: 5278573 - DNA, 25 bp, Homo sapien
tagcatgagagaatgtcctcccgct

SEQ ID NO: 5278574 - DNA, 25 bp, Homo sapien
ccagctctgcctgtttgacactcga

SEQ ID NO: 5278575 - DNA, 25 bp, Homo sapien
aaccagctctgcctgtttgacactc

SEQ ID NO: 5278576 - DNA, 25 bp, Homo sapien
tgtttgacactcgatctgggctggg

SEQ ID NO: 5278577 - DNA, 25 bp, Homo sapien
tctgcctgtttgacactcgatctgg

SEQ ID NO: 5278578 - DNA, 25 bp, Homo sapien
catggccggcagcatcttcggcatt

SEQ ID NO: 5278579 - DNA, 25 bp, Homo sapien
gttctgtgcgatgactgtgcctgca

SEQ ID NO: 5278580 - DNA, 25 bp, Homo sapien
tctgctgactcttggttcaaaccac

SEQ ID NO: 5278581 - DNA, 25 bp, Homo sapien
ccagctgatcgtggcttgtgcgtcg

SEQ ID NO: 5278582 - DNA, 25 bp, Homo sapien
ggctgtcgtcagtggagacttgctg

SEQ ID NO: 5278583 - DNA, 25 bp, Homo sapien
ccacgctggagcaccgaggcgaggt

SEQ ID NO: 5278584 - DNA, 25 bp, Homo sapien
ctggagcaccgaggcgaggtggccc

SEQ ID NO: 5278585 - DNA, 25 bp, Homo sapien
cgctggagcaccgaggcgaggtggc

SEQ ID NO: 5278586 - DNA, 25 bp, Homo sapien
cacgctggagcaccgaggcgaggtg

SEQ ID NO: 5278587 - DNA, 25 bp, Homo sapien
ccgaaatagtgaggccatcagctct

SEQ ID NO: 5278588 - DNA, 25 bp, Homo sapien
gagggacaagcttcactctccagac

SEQ ID NO: 5278589 - DNA, 25 bp, Homo sapien
gacttcgtcccgttccagtgttcag

SEQ ID NO: 5278590 - DNA, 25 bp, Homo sapien
caagctgctgcctgacattgcacag

SEQ ID NO: 5278591 - DNA, 25 bp, Homo sapien
agcctcggaaagtggagctgataat

SEQ ID NO: 5278592 - DNA, 25 bp, Homo sapien
tgctgttgaaatgagggacctctct

SEQ ID NO: 5278593 - DNA, 25 bp, Homo sapien
ctctgagcctcggaaagtggagctg

SEQ ID NO: 5278594 - DNA, 25 bp, Homo sapien
tggagctgataatgcccaggacatg

SEQ ID NO: 5278595 - DNA, 25 bp, Homo sapien
tacggtccgtcctgtgccttcagtt

SEQ ID NO: 5278596 - DNA, 25 bp, Homo sapien
tgtccttacggtccgtcctgtgcct

SEQ ID NO: 5278597 - DNA, 25 bp, Homo sapien
gtgctgatgtccttacggtccgtcc

SEQ ID NO: 5278598 - DNA, 25 bp, Homo sapien
gctgatgtccttacggtccgtcctg

SEQ ID NO: 5278599 - DNA, 25 bp, Homo sapien
ggcagtgtactttgctccccaaatg

SEQ ID NO: 5278600 - DNA, 25 bp, Homo sapien
ggctttggttttgcaggcagtgtac

SEQ ID NO: 5278601 - DNA, 25 bp, Homo sapien
tgagggtagagacagaccctcttgg

SEQ ID NO: 5278602 - DNA, 25 bp, Homo sapien
ttgttttggaagctgaaggaccaga

SEQ ID NO: 5278603 - DNA, 25 bp, Homo sapien
gccagcacgctccatggcttcgcat

SEQ ID NO: 5278604 - DNA, 25 bp, Homo sapien
ggcttcgcatcctcccatagtcaga

SEQ ID NO: 5278605 - DNA, 25 bp, Homo sapien
tagtcagagagtctctacccatgac

SEQ ID NO: 5278606 - DNA, 25 bp, Homo sapien
tcagagccagccatggcgttttctc

SEQ ID NO: 5278607 - DNA, 25 bp, Homo sapien
catgggtggtcttgaaagatacctc

SEQ ID NO: 5278608 - DNA, 25 bp, Homo sapien
tgtcccatggcggagcagccgtttc

SEQ ID NO: 5278609 - DNA, 25 bp, Homo sapien
tcttctgtacgctggtcacacagac

SEQ ID NO: 5278610 - DNA, 25 bp, Homo sapien
gaaagatacctccaagatcagtcct

SEQ ID NO: 5278611 - DNA, 25 bp, Homo sapien
ctgcttcagtgtccacccatgcctg

SEQ ID NO: 5278612 - DNA, 25 bp, Homo sapien
tgcttcagtgtccacccatgcctgg

SEQ ID NO: 5278613 - DNA, 25 bp, Homo sapien
cagtgtccacccatgcctggccttt

SEQ ID NO: 5278614 - DNA, 25 bp, Homo sapien
tctgcttcagtgtccacccatgcct

SEQ ID NO: 5278615 - DNA, 25 bp, Homo sapien
cacaattgtctttacaggaagcttc

SEQ ID NO: 5278616 - DNA, 25 bp, Homo sapien
catccagcgcattcaccaaagcacc

SEQ ID NO: 5278617 - DNA, 25 bp, Homo sapien
ctgagggccatttgcacaattgtct

SEQ ID NO: 5278618 - DNA, 25 bp, Homo sapien
tgactccacctctccagcggggagg

SEQ ID NO: 5278619 - DNA, 25 bp, Homo sapien
ccatgtggacatgtgaactcagtga

SEQ ID NO: 5278620 - DNA, 25 bp, Homo sapien
ttgggaaaaggagcaggatgtttct

SEQ ID NO: 5278621 - DNA, 25 bp, Homo sapien
tgcggtgagggccacttcttggaga

SEQ ID NO: 5278622 - DNA, 25 bp, Homo sapien
gaggtgctgcggtgagggccacttc

SEQ ID NO: 5278623 - DNA, 25 bp, Homo sapien
accctgacattgagcggcggcacat

SEQ ID NO: 5278624 - DNA, 25 bp, Homo sapien
cacatcctgttgaccgggagccagg

SEQ ID NO: 5278625 - DNA, 25 bp, Homo sapien
tcatttgcttgacagatgaagcttt

SEQ ID NO: 5278626 - DNA, 25 bp, Homo sapien
ttgacagatgaagcttttccttaga

SEQ ID NO: 5278627 - DNA, 25 bp, Homo sapien
ttccgacgtgggcttcaggccagga

SEQ ID NO: 5278628 - DNA, 25 bp, Homo sapien
gaaaagcctctgaagcgcattccga

SEQ ID NO: 5278629 - DNA, 25 bp, Homo sapien
gttccagcaggcgtaagtagtggct

SEQ ID NO: 5278630 - DNA, 25 bp, Homo sapien
ttgggttcaagagggagttccagca

SEQ ID NO: 5278631 - DNA, 25 bp, Homo sapien
ctcatccccaacaagggcgggcatc

SEQ ID NO: 5278632 - DNA, 25 bp, Homo sapien
caacaagggcgggcatctcccaggc

SEQ ID NO: 5278633 - DNA, 25 bp, Homo sapien
ccagacctccaggtccgcaccaggc

SEQ ID NO: 5278634 - DNA, 25 bp, Homo sapien
cccctctccggaaagcataatcagc

SEQ ID NO: 5278635 - DNA, 25 bp, Homo sapien
attccctcaccaaatatgcatccgt

SEQ ID NO: 5278636 - DNA, 25 bp, Homo sapien
tcaccaaatatgcatccgtggaggc

SEQ ID NO: 5278637 - DNA, 25 bp, Homo sapien
aaatatgcatccgtggaggccgcag

SEQ ID NO: 5278638 - DNA, 25 bp, Homo sapien
caatgataatacccagtttccacat

SEQ ID NO: 5278639 - DNA, 25 bp, Homo sapien
ttgcttcatggtcagaggtacaagc

SEQ ID NO: 5278640 - DNA, 25 bp, Homo sapien
tttgcttcatggtcagaggtacaag

SEQ ID NO: 5278641 - DNA, 25 bp, Homo sapien
ttgctcctactggtctggaagcacc

SEQ ID NO: 5278642 - DNA, 25 bp, Homo sapien
caagcacaagtcaccctcttgctcc

SEQ ID NO: 5278643 - DNA, 25 bp, Homo sapien
ttcaaacgcttgatggcccagactc

SEQ ID NO: 5278644 - DNA, 25 bp, Homo sapien
tttgatgacgcaagacccaggcctt

SEQ ID NO: 5278645 - DNA, 25 bp, Homo sapien
cagtggaggtgcagtcagcaacgct

SEQ ID NO: 5278646 - DNA, 25 bp, Homo sapien
aaccaagatcctagggatggctgcc

SEQ ID NO: 5278647 - DNA, 25 bp, Homo sapien
gggccagtatcggtgatttcattac

SEQ ID NO: 5278648 - DNA, 25 bp, Homo sapien
gtatcttagtttattcccacagcca

SEQ ID NO: 5278649 - DNA, 25 bp, Homo sapien
tagctgggttcaggcagggtcttct

SEQ ID NO: 5278650 - DNA, 25 bp, Homo sapien
tgacaaagctggcactaaaagcaag

SEQ ID NO: 5278651 - DNA, 25 bp, Homo sapien
cggcagaggcgcctcagaaactcag

SEQ ID NO: 5278652 - DNA, 25 bp, Homo sapien
cagggtcccgtcacccattctctgc

SEQ ID NO: 5278653 - DNA, 25 bp, Homo sapien
caggtcggtcctcagcagggcatgt

SEQ ID NO: 5278654 - DNA, 25 bp, Homo sapien
tcagaaactcaggtcggtcctcagc

SEQ ID NO: 5278655 - DNA, 25 bp, Homo sapien
gtaaagatgaaaggcctgtgtgctg

SEQ ID NO: 5278656 - DNA, 25 bp, Homo sapien
tctttgctggtccactctgagacct

SEQ ID NO: 5278657 - DNA, 25 bp, Homo sapien
ctgtgcagtaaatgtcatttctctt

SEQ ID NO: 5278658 - DNA, 25 bp, Homo sapien
cactctgagacctgagagtaaagat

SEQ ID NO: 5278659 - DNA, 25 bp, Homo sapien
tgatcaggaaatccgtagcgaactt

SEQ ID NO: 5278660 - DNA, 25 bp, Homo sapien
tccacactggaggtcttagttttcc

SEQ ID NO: 5278661 - DNA, 25 bp, Homo sapien
gctcacttggcctgctatagaacaa

SEQ ID NO: 5278662 - DNA, 25 bp, Homo sapien
tctgaaagggtaacgattgcatacc

SEQ ID NO: 5278663 - DNA, 25 bp, Homo sapien
tgtaagctgaggtgcggtgaggcac

SEQ ID NO: 5278664 - DNA, 25 bp, Homo sapien
ttttcggcagaagacactctgccat

SEQ ID NO: 5278665 - DNA, 25 bp, Homo sapien
tgaggcacgtgaccgaggaagggct

SEQ ID NO: 5278666 - DNA, 25 bp, Homo sapien
agaaaaggcccgcagatgccagcag

SEQ ID NO: 5278667 - DNA, 25 bp, Homo sapien
ctgaccccaactctcacggctttgc

SEQ ID NO: 5278668 - DNA, 25 bp, Homo sapien
ggctttgcccacagcatgctccagg

SEQ ID NO: 5278669 - DNA, 25 bp, Homo sapien
tgaccccaactctcacggctttgcc

SEQ ID NO: 5278670 - DNA, 25 bp, Homo sapien
ccccaactctcacggctttgcccac

SEQ ID NO: 5278671 - DNA, 25 bp, Homo sapien
tgagcacccggagtatcaccttggt

SEQ ID NO: 5278672 - DNA, 25 bp, Homo sapien
gggcggtcacaccaatgagcacccg

SEQ ID NO: 5278673 - DNA, 25 bp, Homo sapien
tctgccctcaggtggaactgatgga

SEQ ID NO: 5278674 - DNA, 25 bp, Homo sapien
gagtatcaccttggtgcactgcctt

SEQ ID NO: 5278675 - DNA, 25 bp, Homo sapien
cctcacaggatttctggtgctcaag

SEQ ID NO: 5278676 - DNA, 25 bp, Homo sapien
gatcagaatgggcaggtcctccttg

SEQ ID NO: 5278677 - DNA, 25 bp, Homo sapien
aaggatgaagtccaagtccacctcc

SEQ ID NO: 5278678 - DNA, 25 bp, Homo sapien
tgcttcgctccacgctgctttctgg

SEQ ID NO: 5278679 - DNA, 25 bp, Homo sapien
acagatgtgccccttccttccaggg

SEQ ID NO: 5278680 - DNA, 25 bp, Homo sapien
gacagatgtgccccttccttccagg

SEQ ID NO: 5278681 - DNA, 25 bp, Homo sapien
catgatgttggcgcttggctgacag

SEQ ID NO: 5278682 - DNA, 25 bp, Homo sapien
tgatgttggcgcttggctgacaggg

SEQ ID NO: 5278683 - DNA, 25 bp, Homo sapien
ctggatgacatgatgttggcgcttg

SEQ ID NO: 5278684 - DNA, 25 bp, Homo sapien
ggatgacatgatgttggcgcttggc

SEQ ID NO: 5278685 - DNA, 25 bp, Homo sapien
tcggaggccgacaggcaaccaataa

SEQ ID NO: 5278686 - DNA, 25 bp, Homo sapien
agtccagtcggaggccgacaggcaa

SEQ ID NO: 5278687 - DNA, 25 bp, Homo sapien
cagacaggcatgaaagacactcgca

SEQ ID NO: 5278688 - DNA, 25 bp, Homo sapien
aaagacactcgcagtccagtcggag

SEQ ID NO: 5278689 - DNA, 25 bp, Homo sapien
ggcagagggtccgcacctgagccac

SEQ ID NO: 5278690 - DNA, 25 bp, Homo sapien
cagagggtccgcacctgagccacca

SEQ ID NO: 5278691 - DNA, 25 bp, Homo sapien
tgcagggtggaggattcagcctggc

SEQ ID NO: 5278692 - DNA, 25 bp, Homo sapien
ctgcagggtggaggattcagcctgg

SEQ ID NO: 5278693 - DNA, 25 bp, Homo sapien
cgggaggctgaggcaagagaatcac

SEQ ID NO: 5278694 - DNA, 25 bp, Homo sapien
ttgaacccaggaggcaggggttgaa

SEQ ID NO: 5278695 - DNA, 25 bp, Homo sapien
gcggatgcctgtaatcctaactact

SEQ ID NO: 5278696 - DNA, 25 bp, Homo sapien
gtggcggatgcctgtaatcctaact

SEQ ID NO: 5278697 - DNA, 25 bp, Homo sapien
gagtccaggtatcccccacgcctct

SEQ ID NO: 5278698 - DNA, 25 bp, Homo sapien
ggggcttatctggaaaacaatgagt

SEQ ID NO: 5278699 - DNA, 25 bp, Homo sapien
ctaagcctggaatctggcggtgtga

SEQ ID NO: 5278700 - DNA, 25 bp, Homo sapien
atcccccacgcctctaagcctggaa

SEQ ID NO: 5278701 - DNA, 25 bp, Homo sapien
tatgtgatggactaaaccaggacac

SEQ ID NO: 5278702 - DNA, 25 bp, Homo sapien
ggtaatcacaccgagacacagcaac

SEQ ID NO: 5278703 - DNA, 25 bp, Homo sapien
gacacagcaacgtccgggaccaact

SEQ ID NO: 5278704 - DNA, 25 bp, Homo sapien
gaacttgggtgctattggtaatcac

SEQ ID NO: 5278705 - DNA, 25 bp, Homo sapien
ccaaataggcaaggagatcgtttca

SEQ ID NO: 5278706 - DNA, 25 bp, Homo sapien
gaactgattcccatatgtgtctgcc

SEQ ID NO: 5278707 - DNA, 25 bp, Homo sapien
gatcgtttcaatactgtctgctgaa

SEQ ID NO: 5278708 - DNA, 25 bp, Homo sapien
ggtctgcatccttttaaaccactgt

SEQ ID NO: 5278709 - DNA, 25 bp, Homo sapien
tgtgccagacattagccatttgatt

SEQ ID NO: 5278710 - DNA, 25 bp, Homo sapien
ggctgaagtggtgggcaaagaggca

SEQ ID NO: 5278711 - DNA, 25 bp, Homo sapien
tgttgcagcaagttcctggaagccc

SEQ ID NO: 5278712 - DNA, 25 bp, Homo sapien
ccctcttgtgccagacattagccat

SEQ ID NO: 5278713 - DNA, 25 bp, Homo sapien
tgtggcatctggcttaagggctaaa

SEQ ID NO: 5278714 - DNA, 25 bp, Homo sapien
caaagcgagcccttggcatctgacc

SEQ ID NO: 5278715 - DNA, 25 bp, Homo sapien
taagggctaaatagtccacagtgtt

SEQ ID NO: 5278716 - DNA, 25 bp, Homo sapien
gctctaggccagtgggtaagccata

SEQ ID NO: 5278717 - DNA, 25 bp, Homo sapien
taagaggattcaaacgtgtccatcc

SEQ ID NO: 5278718 - DNA, 25 bp, Homo sapien
cgtgtccatcccaaacagccttgtt

SEQ ID NO: 5278719 - DNA, 25 bp, Homo sapien
ggaaatatgaccattataagcattg

SEQ ID NO: 5278720 - DNA, 25 bp, Homo sapien
cagccttgttttaggaactccatac

SEQ ID NO: 5278721 - DNA, 25 bp, Homo sapien
tgtcatgtctggtgtcagagctgtt

SEQ ID NO: 5278722 - DNA, 25 bp, Homo sapien
tagcagaactcgctgtcatgtctgg

SEQ ID NO: 5278723 - DNA, 25 bp, Homo sapien
catagcagaactcgctgtcatgtct

SEQ ID NO: 5278724 - DNA, 25 bp, Homo sapien
aacatagcagaactcgctgtcatgt

SEQ ID NO: 5278725 - DNA, 25 bp, Homo sapien
cattttgacttttagcataaggaaa

SEQ ID NO: 5278726 - DNA, 25 bp, Homo sapien
tcccattttgacttttagcataagg

SEQ ID NO: 5278727 - DNA, 25 bp, Homo sapien
tctttcccattttgacttttagcat

SEQ ID NO: 5278728 - DNA, 25 bp, Homo sapien
gcctccagggacatctttcccattt

SEQ ID NO: 5278729 - DNA, 25 bp, Homo sapien
tcctagccagtcatgatttgggccc

SEQ ID NO: 5278730 - DNA, 25 bp, Homo sapien
tctggaaaaaccatctagaggctgt

SEQ ID NO: 5278731 - DNA, 25 bp, Homo sapien
gatcctaggagaaactgtgctcttg

SEQ ID NO: 5278732 - DNA, 25 bp, Homo sapien
cacagtgagctccttgcggctgtac

SEQ ID NO: 5278733 - DNA, 25 bp, Homo sapien
tatatacaggtacactgctgtgccg

SEQ ID NO: 5278734 - DNA, 25 bp, Homo sapien
tgtgccgtaaggattccctctggag

SEQ ID NO: 5278735 - DNA, 25 bp, Homo sapien
tccacagtgtcacggaagtgagcac

SEQ ID NO: 5278736 - DNA, 25 bp, Homo sapien
gacaggatgctaggcgagaattcag

SEQ ID NO: 5278737 - DNA, 25 bp, Homo sapien
atgtctgaccccctgcaaacaaata

SEQ ID NO: 5278738 - DNA, 25 bp, Homo sapien
gggcaataatgtctgaccccctgca

SEQ ID NO: 5278739 - DNA, 25 bp, Homo sapien
aataatgtctgaccccctgcaaaca

SEQ ID NO: 5278740 - DNA, 25 bp, Homo sapien
tgtctgaccccctgcaaacaaatac

SEQ ID NO: 5278741 - DNA, 25 bp, Homo sapien
ctggggacggctgcagggaacgtac

SEQ ID NO: 5278742 - DNA, 25 bp, Homo sapien
ccctggggacggctgcagggaacgt

SEQ ID NO: 5278743 - DNA, 25 bp, Homo sapien
cctggggacggctgcagggaacgta

SEQ ID NO: 5278744 - DNA, 25 bp, Homo sapien
tggtgaggacgcgtggacagtcccg

SEQ ID NO: 5278745 - DNA, 25 bp, Homo sapien
gaggacgcgtggacagtcccgcggg

SEQ ID NO: 5278746 - DNA, 25 bp, Homo sapien
cagtggtgaggacgcgtggacagtc

SEQ ID NO: 5278747 - DNA, 25 bp, Homo sapien
gcagtggtgaggacgcgtggacagt

SEQ ID NO: 5278748 - DNA, 25 bp, Homo sapien
ctgcggagtggccgcactccaggtc

SEQ ID NO: 5278749 - DNA, 25 bp, Homo sapien
ttctgctcagtctccgcgaggtgtc

SEQ ID NO: 5278750 - DNA, 25 bp, Homo sapien
tggccgcactccaggtccgcgccaa

SEQ ID NO: 5278751 - DNA, 25 bp, Homo sapien
tctgctcagtctccgcgaggtgtcg

SEQ ID NO: 5278752 - DNA, 25 bp, Homo sapien
tgggttagaagcatcggtctcccct

SEQ ID NO: 5278753 - DNA, 25 bp, Homo sapien
tcagctgcacaacacgcagtcaaag

SEQ ID NO: 5278754 - DNA, 25 bp, Homo sapien
gggcgcccctcttctttcaatttga

SEQ ID NO: 5278755 - DNA, 25 bp, Homo sapien
tgcaaggccttgctcaacgttggcc

SEQ ID NO: 5278756 - DNA, 25 bp, Homo sapien
tttcttttaatgacaagcaattgcc

SEQ ID NO: 5278757 - DNA, 25 bp, Homo sapien
aagcaattgccaggctcgcagggtg

SEQ ID NO: 5278758 - DNA, 25 bp, Homo sapien
caggctcgcagggtgggtgctgcat

SEQ ID NO: 5278759 - DNA, 25 bp, Homo sapien
taatgacaagcaattgccaggctcg

SEQ ID NO: 5278760 - DNA, 25 bp, Homo sapien
cagctggttctcagagtgcagccgg

SEQ ID NO: 5278761 - DNA, 25 bp, Homo sapien
caaaagggcgggaggagcacaccct

SEQ ID NO: 5278762 - DNA, 25 bp, Homo sapien
tccgcgcgcagctggttctcagagt

SEQ ID NO: 5278763 - DNA, 25 bp, Homo sapien
ttctcagagtgcagccggtgcaagc

SEQ ID NO: 5278764 - DNA, 25 bp, Homo sapien
ctcctgggaactgtgttggagccga

SEQ ID NO: 5278765 - DNA, 25 bp, Homo sapien
ctagccaggcgcaagcgcgcacaga

SEQ ID NO: 5278766 - DNA, 25 bp, Homo sapien
catctgtctggacgcgctgggtgga

SEQ ID NO: 5278767 - DNA, 25 bp, Homo sapien
tgttggagccgagcaagcgctagcc

SEQ ID NO: 5278768 - DNA, 25 bp, Homo sapien
cggagacacccgcgcagaatcgcct

SEQ ID NO: 5278769 - DNA, 25 bp, Homo sapien
gagacacccgcgcagaatcgcctcc

SEQ ID NO: 5278770 - DNA, 25 bp, Homo sapien
acacccgcgcagaatcgcctccgga

SEQ ID NO: 5278771 - DNA, 25 bp, Homo sapien
acccgcgcagaatcgcctccggatc

SEQ ID NO: 5278772 - DNA, 25 bp, Homo sapien
tctgtgtttgagctgtcggagagcc

SEQ ID NO: 5278773 - DNA, 25 bp, Homo sapien
tctgcgaaaagaaattccctcggct

SEQ ID NO: 5278774 - DNA, 25 bp, Homo sapien
aatggcttctgcgaaaagaaattcc

SEQ ID NO: 5278775 - DNA, 25 bp, Homo sapien
ctctagaagatctgtctgtgtttga

SEQ ID NO: 5278776 - DNA, 25 bp, Homo sapien
ggctctcccggcgaccctcctcgcg

SEQ ID NO: 5278777 - DNA, 25 bp, Homo sapien
ggcgaccctcctcgcgcgggcgccc

SEQ ID NO: 5278778 - DNA, 25 bp, Homo sapien
cagcttggaggagaggcggctctcc

SEQ ID NO: 5278779 - DNA, 25 bp, Homo sapien
gccgccgcggtcgcaatctgggtca

SEQ ID NO: 5278780 - DNA, 25 bp, Homo sapien
cccggtagctgggtcggagagcctg

SEQ ID NO: 5278781 - DNA, 25 bp, Homo sapien
ttcccggtagctgggtcggagagcc

SEQ ID NO: 5278782 - DNA, 25 bp, Homo sapien
cattcccggtagctgggtcggagag

SEQ ID NO: 5278783 - DNA, 25 bp, Homo sapien
ttcccctgagcagccggccccacac

SEQ ID NO: 5278784 - DNA, 25 bp, Homo sapien
gtttccaaagttgcggagcctcgcc

SEQ ID NO: 5278785 - DNA, 25 bp, Homo sapien
tctgcgtgctcgtgagagctagaat

SEQ ID NO: 5278786 - DNA, 25 bp, Homo sapien
ctgcgagtgcggttgtctgcgtgct

SEQ ID NO: 5278787 - DNA, 25 bp, Homo sapien
ccttgtgtgaatgaaatggcagttt

SEQ ID NO: 5278788 - DNA, 25 bp, Homo sapien
aagatgacttctacttcggcggccc

SEQ ID NO: 5278789 - DNA, 25 bp, Homo sapien
atgacttctacttcggcggccccga

SEQ ID NO: 5278790 - DNA, 25 bp, Homo sapien
ggacatctggaagaagtttgagctg

SEQ ID NO: 5278791 - DNA, 25 bp, Homo sapien
ccggacgaagatgacttctacttcg

SEQ ID NO: 5278792 - DNA, 25 bp, Homo sapien
tagtgctcgtatgtcttggcctggg

SEQ ID NO: 5278793 - DNA, 25 bp, Homo sapien
aaggccctcagtacctccggagagg

SEQ ID NO: 5278794 - DNA, 25 bp, Homo sapien
tgcactgcctggacagaaacctgtt

SEQ ID NO: 5278795 - DNA, 25 bp, Homo sapien
tcttttgcagcgcagtctgaggaat

SEQ ID NO: 5278796 - DNA, 25 bp, Homo sapien
gttggtaaagaatgagaaggccgcc

SEQ ID NO: 5278797 - DNA, 25 bp, Homo sapien
caaatcggtcccctgtcgagttcgg

SEQ ID NO: 5278798 - DNA, 25 bp, Homo sapien
tgaacacgctcggacttgctagacg

SEQ ID NO: 5278799 - DNA, 25 bp, Homo sapien
catgacagcgctaaacgttggtgac

SEQ ID NO: 5278800 - DNA, 25 bp, Homo sapien
aggtgcacacacactgccgtgcctg

SEQ ID NO: 5278801 - DNA, 25 bp, Homo sapien
cgtggagtggctaatctcaggcaca

SEQ ID NO: 5278802 - DNA, 25 bp, Homo sapien
tggacatccagtaggcatagggtgc

SEQ ID NO: 5278803 - DNA, 25 bp, Homo sapien
tagggtgctacagctcagaacttct

SEQ ID NO: 5278804 - DNA, 25 bp, Homo sapien
tatttaacagttaccatgtatcaag

SEQ ID NO: 5278805 - DNA, 25 bp, Homo sapien
tgcttgggagacatcaatgaacaaa

SEQ ID NO: 5278806 - DNA, 25 bp, Homo sapien
gagtgacagctgtacaaataaacat

SEQ ID NO: 5278807 - DNA, 25 bp, Homo sapien
gttctaagtgcttgggagacatcaa

SEQ ID NO: 5278808 - DNA, 25 bp, Homo sapien
agtgtcatggtagctgtacttgtcc

SEQ ID NO: 5278809 - DNA, 25 bp, Homo sapien
taatctcacgtcaaggtttcgctca

SEQ ID NO: 5278810 - DNA, 25 bp, Homo sapien
tttttacaactcattagtgtcatgg

SEQ ID NO: 5278811 - DNA, 25 bp, Homo sapien
tcatctggccaagtttaatctcacg

SEQ ID NO: 5278812 - DNA, 25 bp, Homo sapien
ggcacagggatgctacattagccat

SEQ ID NO: 5278813 - DNA, 25 bp, Homo sapien
taatggccagcaaattgttcagagc

SEQ ID NO: 5278814 - DNA, 25 bp, Homo sapien
tagagaccttctccatcattgtgga

SEQ ID NO: 5278815 - DNA, 25 bp, Homo sapien
caactttgtgggtatacttaatgcc

SEQ ID NO: 5278816 - DNA, 25 bp, Homo sapien
aattcctctcccaatgtgcccaggg

SEQ ID NO: 5278817 - DNA, 25 bp, Homo sapien
ccctgccaggctgggcgcaagaaag

SEQ ID NO: 5278818 - DNA, 25 bp, Homo sapien
gctgggcgcaagaaagcgtgtttac

SEQ ID NO: 5278819 - DNA, 25 bp, Homo sapien
tgtttactaacaccatccacacggc

SEQ ID NO: 5278820 - DNA, 25 bp, Homo sapien
gaaagcgtgtttactaacaccatcc

SEQ ID NO: 5278821 - DNA, 25 bp, Homo sapien
aacggtgctctccagaatcagcttc

SEQ ID NO: 5278822 - DNA, 25 bp, Homo sapien
taacggtgctctccagaatcagctt

SEQ ID NO: 5278823 - DNA, 25 bp, Homo sapien
ctaacggtgctctccagaatcagct

SEQ ID NO: 5278824 - DNA, 25 bp, Homo sapien
cggtgctctccagaatcagcttctc

SEQ ID NO: 5278825 - DNA, 25 bp, Homo sapien
ggaccaagtattggggctgagcagg

SEQ ID NO: 5278826 - DNA, 25 bp, Homo sapien
aggtggaccaagtattggggctgag

SEQ ID NO: 5278827 - DNA, 25 bp, Homo sapien
tcagcgaggtggaccaagtattggg

SEQ ID NO: 5278828 - DNA, 25 bp, Homo sapien
gtggaccaagtattggggctgagca

SEQ ID NO: 5278829 - DNA, 25 bp, Homo sapien
aaagattcccggcatcttctgctgg

SEQ ID NO: 5278830 - DNA, 25 bp, Homo sapien
catcctcataaagattcccggcatc

SEQ ID NO: 5278831 - DNA, 25 bp, Homo sapien
ggtcagtgcatgtgatgaagcagaa

SEQ ID NO: 5278832 - DNA, 25 bp, Homo sapien
tgagagacaaggcatagagtgcaag

SEQ ID NO: 5278833 - DNA, 25 bp, Homo sapien
gtttccactggataaacagatgctc

SEQ ID NO: 5278834 - DNA, 25 bp, Homo sapien
ttgcctttaacacgatgcccttgac

SEQ ID NO: 5278835 - DNA, 25 bp, Homo sapien
tctcagcctagtggattcttctttc

SEQ ID NO: 5278836 - DNA, 25 bp, Homo sapien
tggtagaagagcacgagcttatcct

SEQ ID NO: 5278837 - DNA, 25 bp, Homo sapien
gcttgagaggtaccgctcaaatgcc

SEQ ID NO: 5278838 - DNA, 25 bp, Homo sapien
ctgtctgttgaagtattacccaggc

SEQ ID NO: 5278839 - DNA, 25 bp, Homo sapien
ttacccaggcttgagaggtaccgct

SEQ ID NO: 5278840 - DNA, 25 bp, Homo sapien
ccgatgctccttcgccccatatctg

SEQ ID NO: 5278841 - DNA, 25 bp, Homo sapien
tctacccaactcttcttgtttgttg

SEQ ID NO: 5278842 - DNA, 25 bp, Homo sapien
ctacccaactcttcttgtttgttgg

SEQ ID NO: 5278843 - DNA, 25 bp, Homo sapien
tcttttttacaggactgaacacctc

SEQ ID NO: 5278844 - DNA, 25 bp, Homo sapien
tgccgtgggccaagccgaaattgct

SEQ ID NO: 5278845 - DNA, 25 bp, Homo sapien
cacatagcgggtggagtcactgcaa

SEQ ID NO: 5278846 - DNA, 25 bp, Homo sapien
tctgaaggcactgacttggacgctt

SEQ ID NO: 5278847 - DNA, 25 bp, Homo sapien
tctcgttaggatgggcattggcaca

SEQ ID NO: 5278848 - DNA, 25 bp, Homo sapien
tcttacacccgtcccttcctggatc

SEQ ID NO: 5278849 - DNA, 25 bp, Homo sapien
gcgtgcgaggactctgccaagaaag

SEQ ID NO: 5278850 - DNA, 25 bp, Homo sapien
gaggagtctgtaaggaagggaacca

SEQ ID NO: 5278851 - DNA, 25 bp, Homo sapien
tctgccaagaaagcggccctgaggt

SEQ ID NO: 5278852 - DNA, 25 bp, Homo sapien
agcctgggcagagcgtgcgaggact

SEQ ID NO: 5278853 - DNA, 25 bp, Homo sapien
tatttctggaatgtaacagacattt

SEQ ID NO: 5278854 - DNA, 25 bp, Homo sapien
tgacattgtcatcaacgggcatagc

SEQ ID NO: 5278855 - DNA, 25 bp, Homo sapien
ctcttactatgatgctttccttggc

SEQ ID NO: 5278856 - DNA, 25 bp, Homo sapien
taacgtatggacaagtgtagccatg

SEQ ID NO: 5278857 - DNA, 25 bp, Homo sapien
gggcacaagctagtctcaggcaatt

SEQ ID NO: 5278858 - DNA, 25 bp, Homo sapien
gaggctcgtagtagggtttctggat

SEQ ID NO: 5278859 - DNA, 25 bp, Homo sapien
tctggatgtcttgggttggtacccg

SEQ ID NO: 5278860 - DNA, 25 bp, Homo sapien
tgtcttgggttggtacccgtggcca

SEQ ID NO: 5278861 - DNA, 25 bp, Homo sapien
ccttcccactggtcggaggctcgta

SEQ ID NO: 5278862 - DNA, 25 bp, Homo sapien
aaatttctacaaatgacatggccat

SEQ ID NO: 5278863 - DNA, 25 bp, Homo sapien
tgaaatttctacaaatgacatggcc

SEQ ID NO: 5278864 - DNA, 25 bp, Homo sapien
ctgtgaaatttctacaaatgacatg

SEQ ID NO: 5278865 - DNA, 25 bp, Homo sapien
cttgaatcagctgtgaaatttctac

SEQ ID NO: 5278866 - DNA, 25 bp, Homo sapien
tatttcaatacttttggccaatgtc

SEQ ID NO: 5278867 - DNA, 25 bp, Homo sapien
tttatttccacaaccacggcttggc

SEQ ID NO: 5278868 - DNA, 25 bp, Homo sapien
aagcactcagtgcttcctcactcag

SEQ ID NO: 5278869 - DNA, 25 bp, Homo sapien
ttatttccacaaccacggcttggct

SEQ ID NO: 5278870 - DNA, 25 bp, Homo sapien
cacggtgtttagcactgatacggta

SEQ ID NO: 5278871 - DNA, 25 bp, Homo sapien
gcacacgccaaatagagtccttgag

SEQ ID NO: 5278872 - DNA, 25 bp, Homo sapien
cagcctgggcccattggtaaattta

SEQ ID NO: 5278873 - DNA, 25 bp, Homo sapien
tatgcactgaagcacctacacggtg

SEQ ID NO: 5278874 - DNA, 25 bp, Homo sapien
gagcaatttgcccttgaatcttcca

SEQ ID NO: 5278875 - DNA, 25 bp, Homo sapien
agccataatggtcgcggacactcca

SEQ ID NO: 5278876 - DNA, 25 bp, Homo sapien
taggtgagttccatccatccgtcag

SEQ ID NO: 5278877 - DNA, 25 bp, Homo sapien
gaagatctgctgaggctgcgagttc

SEQ ID NO: 5278878 - DNA, 25 bp, Homo sapien
cgggccctctgcatcttcagaagcc

SEQ ID NO: 5278879 - DNA, 25 bp, Homo sapien
cacgggccctctgcatcttcagaag

SEQ ID NO: 5278880 - DNA, 25 bp, Homo sapien
cacacgggccctctgcatcttcaga

SEQ ID NO: 5278881 - DNA, 25 bp, Homo sapien
acacgggccctctgcatcttcagaa

SEQ ID NO: 5278882 - DNA, 25 bp, Homo sapien
taattctcagacaagacaataggag

SEQ ID NO: 5278883 - DNA, 25 bp, Homo sapien
tgtgatgtgactgagaaattgggcc

SEQ ID NO: 5278884 - DNA, 25 bp, Homo sapien
tagaaggtgcacttcaccaagtttg

SEQ ID NO: 5278885 - DNA, 25 bp, Homo sapien
tgggccagttaaaaatagaaggtgc

SEQ ID NO: 5278886 - DNA, 25 bp, Homo sapien
cccaccatgggtccagcaatgcctg

SEQ ID NO: 5278887 - DNA, 25 bp, Homo sapien
gccacactgagacctgccagtttca

SEQ ID NO: 5278888 - DNA, 25 bp, Homo sapien
cacccaccatgggtccagcaatgcc

SEQ ID NO: 5278889 - DNA, 25 bp, Homo sapien
gtcttcacaagccttgcctgcatag

SEQ ID NO: 5278890 - DNA, 25 bp, Homo sapien
gatgatatacacttgcaggccttgc

SEQ ID NO: 5278891 - DNA, 25 bp, Homo sapien
aggacagagggtccgaggaaggcca

SEQ ID NO: 5278892 - DNA, 25 bp, Homo sapien
ccagaactcccagacctgattccct

SEQ ID NO: 5278893 - DNA, 25 bp, Homo sapien
aggccttgcagggttcccaggacag

SEQ ID NO: 5278894 - DNA, 25 bp, Homo sapien
cagacggaggttcggtctcagcttt

SEQ ID NO: 5278895 - DNA, 25 bp, Homo sapien
tgctgatgacggtggcgttgctgga

SEQ ID NO: 5278896 - DNA, 25 bp, Homo sapien
acggaggttcggtctcagctttgct

SEQ ID NO: 5278897 - DNA, 25 bp, Homo sapien
cagcagacggaggttcggtctcagc

SEQ ID NO: 5278898 - DNA, 25 bp, Homo sapien
caccttccaagtttatactttgaga

SEQ ID NO: 5278899 - DNA, 25 bp, Homo sapien
ccaccttccaagtttatactttgag

SEQ ID NO: 5278900 - DNA, 25 bp, Homo sapien
cttttggacaattaatcttagggca

SEQ ID NO: 5278901 - DNA, 25 bp, Homo sapien
taatcttagggcagctggcgaagga

SEQ ID NO: 5278902 - DNA, 25 bp, Homo sapien
tggacaattaatcttagggcagctg

SEQ ID NO: 5278903 - DNA, 25 bp, Homo sapien
caattaatcttagggcagctggcga

SEQ ID NO: 5278904 - DNA, 25 bp, Homo sapien
ttgctgctctttctaggttctcctc

SEQ ID NO: 5278905 - DNA, 25 bp, Homo sapien
acagagtcttgaggacatcactagg

SEQ ID NO: 5278906 - DNA, 25 bp, Homo sapien
gactggtagctttctcttggttttg

SEQ ID NO: 5278907 - DNA, 25 bp, Homo sapien
catcactaggagactggtagctttc

SEQ ID NO: 5278908 - DNA, 25 bp, Homo sapien
tctggaatccaatagcctctgccct

SEQ ID NO: 5278909 - DNA, 25 bp, Homo sapien
cttctggaatccaatagcctctgcc

SEQ ID NO: 5278910 - DNA, 25 bp, Homo sapien
accttctggaatccaatagcctctg

SEQ ID NO: 5278911 - DNA, 25 bp, Homo sapien
gaaaaccttctggaatccaatagcc

SEQ ID NO: 5278912 - DNA, 25 bp, Homo sapien
aggagaagaatgagtgcccagcaaa

SEQ ID NO: 5278913 - DNA, 25 bp, Homo sapien
caggaaggagaagaatgagtgccca

SEQ ID NO: 5278914 - DNA, 25 bp, Homo sapien
agaagaatgagtgcccagcaaaggg

SEQ ID NO: 5278915 - DNA, 25 bp, Homo sapien
gagtgcccagcaaagggggaagccc

SEQ ID NO: 5278916 - DNA, 25 bp, Homo sapien
tcatctcggtaaagacagagtaagg

SEQ ID NO: 5278917 - DNA, 25 bp, Homo sapien
gatcctcttgtgtgttccggtaccg

SEQ ID NO: 5278918 - DNA, 25 bp, Homo sapien
gaacagactccgctcgtggtttcat

SEQ ID NO: 5278919 - DNA, 25 bp, Homo sapien
gattcagtttttaggattccaggag

SEQ ID NO: 5278920 - DNA, 25 bp, Homo sapien
ctaggctggtctgaatgacagcagt

SEQ ID NO: 5278921 - DNA, 25 bp, Homo sapien
ctggtctgaatgacagcagtgtagc

SEQ ID NO: 5278922 - DNA, 25 bp, Homo sapien
ggctggtctgaatgacagcagtgta

SEQ ID NO: 5278923 - DNA, 25 bp, Homo sapien
tggtctgaatgacagcagtgtagcg

SEQ ID NO: 5278924 - DNA, 25 bp, Homo sapien
tagacacgaggggaccgtgttgaat

SEQ ID NO: 5278925 - DNA, 25 bp, Homo sapien
cttgcttcttaattcattgaggtta

SEQ ID NO: 5278926 - DNA, 25 bp, Homo sapien
cttagaggaaggccctagacacgag

SEQ ID NO: 5278927 - DNA, 25 bp, Homo sapien
ttttcttgcttcttaattcattgag

SEQ ID NO: 5278928 - DNA, 25 bp, Homo sapien
cgccctcggctccagtgggataata

SEQ ID NO: 5278929 - DNA, 25 bp, Homo sapien
tagggcgacatgacaagctcttcgt

SEQ ID NO: 5278930 - DNA, 25 bp, Homo sapien
gctccagtgggataatagggcgaca

SEQ ID NO: 5278931 - DNA, 25 bp, Homo sapien
aagctcttcgtgctccctggaggct

SEQ ID NO: 5278932 - DNA, 25 bp, Homo sapien
ctggccggcagcgtcgtggggccgg

SEQ ID NO: 5278933 - DNA, 25 bp, Homo sapien
cggcagcgtcgtggggccggctggc

SEQ ID NO: 5278934 - DNA, 25 bp, Homo sapien
ggccggctggcaggggaaatgtgtc

SEQ ID NO: 5278935 - DNA, 25 bp, Homo sapien
gggccggctggcaggggaaatgtgt

SEQ ID NO: 5278936 - DNA, 25 bp, Homo sapien
ggcctcagagcaagaaaagctctct

SEQ ID NO: 5278937 - DNA, 25 bp, Homo sapien
tggcctcagagcaagaaaagctctc

SEQ ID NO: 5278938 - DNA, 25 bp, Homo sapien
tcagagcaagaaaagctctctctgc

SEQ ID NO: 5278939 - DNA, 25 bp, Homo sapien
cctcagagcaagaaaagctctctct

SEQ ID NO: 5278940 - DNA, 25 bp, Homo sapien
cctaaggtagggcaccttgaatgca

SEQ ID NO: 5278941 - DNA, 25 bp, Homo sapien
cagtgtctccctgagtcctgatgcc

SEQ ID NO: 5278942 - DNA, 25 bp, Homo sapien
tagggcaccttgaatgcatcctggg

SEQ ID NO: 5278943 - DNA, 25 bp, Homo sapien
tcctgggctgattctggggtctgag

SEQ ID NO: 5278944 - DNA, 25 bp, Homo sapien
tgggaatgaaacagggacaatgagt

SEQ ID NO: 5278945 - DNA, 25 bp, Homo sapien
atccagtgcttggaagccgtcctgg

SEQ ID NO: 5278946 - DNA, 25 bp, Homo sapien
cctggagttaccactaacagtgctg

SEQ ID NO: 5278947 - DNA, 25 bp, Homo sapien
caatgagttggatgttttcatccag

SEQ ID NO: 5278948 - DNA, 25 bp, Homo sapien
tctgcactggctctccaaagagaga

SEQ ID NO: 5278949 - DNA, 25 bp, Homo sapien
ccgaggcttttgcaagtgtttttct

SEQ ID NO: 5278950 - DNA, 25 bp, Homo sapien
cacagtcattccgaggcttttgcaa

SEQ ID NO: 5278951 - DNA, 25 bp, Homo sapien
ttgcagatacactcatggtgggaat

SEQ ID NO: 5278952 - DNA, 25 bp, Homo sapien
tcagccaaaatgccccgatgtgctt

SEQ ID NO: 5278953 - DNA, 25 bp, Homo sapien
catgaactcgcagggccatgggaga

SEQ ID NO: 5278954 - DNA, 25 bp, Homo sapien
tccagccatgaactcgcagggccat

SEQ ID NO: 5278955 - DNA, 25 bp, Homo sapien
ccccgatgtgcttctcagagtgtgt

SEQ ID NO: 5278956 - DNA, 25 bp, Homo sapien
cagcacctagatctggaacccagag

SEQ ID NO: 5278957 - DNA, 25 bp, Homo sapien
tgcacagcacctagatctggaaccc

SEQ ID NO: 5278958 - DNA, 25 bp, Homo sapien
cacagcacctagatctggaacccag

SEQ ID NO: 5278959 - DNA, 25 bp, Homo sapien
gcctgcacagcacctagatctggaa

SEQ ID NO: 5278960 - DNA, 25 bp, Homo sapien
ctctggtgtaggcatgtactaggag

SEQ ID NO: 5278961 - DNA, 25 bp, Homo sapien
cagtctctggtgtaggcatgtacta

SEQ ID NO: 5278962 - DNA, 25 bp, Homo sapien
taggcatgtactaggaggaagggat

SEQ ID NO: 5278963 - DNA, 25 bp, Homo sapien
ggcatgtactaggaggaagggattg

SEQ ID NO: 5278964 - DNA, 25 bp, Homo sapien
tgcgctgccgtaaatctagggcgag

SEQ ID NO: 5278965 - DNA, 25 bp, Homo sapien
agctgtgtgcgctgccgtaaatcta

SEQ ID NO: 5278966 - DNA, 25 bp, Homo sapien
aatctagggcgagctctgaggctgc

SEQ ID NO: 5278967 - DNA, 25 bp, Homo sapien
gccgtaaatctagggcgagctctga

SEQ ID NO: 5278968 - DNA, 25 bp, Homo sapien
tggtctggctgaagacactcggtct

SEQ ID NO: 5278969 - DNA, 25 bp, Homo sapien
tgatgacggaggacgcttcaggctt

SEQ ID NO: 5278970 - DNA, 25 bp, Homo sapien
tctattggtgatcagtggcaggcct

SEQ ID NO: 5278971 - DNA, 25 bp, Homo sapien
ggaccctgattctcgcacgtagctg

SEQ ID NO: 5278972 - DNA, 25 bp, Homo sapien
gagaagggagaagggagagtactct

SEQ ID NO: 5278973 - DNA, 25 bp, Homo sapien
agggagaagggagagtactcttggg

SEQ ID NO: 5278974 - DNA, 25 bp, Homo sapien
gaagggagaagggagagtactcttg

SEQ ID NO: 5278975 - DNA, 25 bp, Homo sapien
agagaagggagaagggagagtactc

SEQ ID NO: 5278976 - DNA, 25 bp, Homo sapien
tctcaaggtggaataacgacaaatc

SEQ ID NO: 5278977 - DNA, 25 bp, Homo sapien
gaaattgcagaacgtgccattctcc

SEQ ID NO: 5278978 - DNA, 25 bp, Homo sapien
gcgcttttgagtaggccacgtgcag

SEQ ID NO: 5278979 - DNA, 25 bp, Homo sapien
ggtggatgtttatgtcagcagcaag

SEQ ID NO: 5278980 - DNA, 25 bp, Homo sapien
gggaggcagagtgggaagcaaggct

SEQ ID NO: 5278981 - DNA, 25 bp, Homo sapien
gaggcagagtgggaagcaaggctct

SEQ ID NO: 5278982 - DNA, 25 bp, Homo sapien
ggggaggcagagtgggaagcaaggc

SEQ ID NO: 5278983 - DNA, 25 bp, Homo sapien
ctggggaggcagagtgggaagcaag

SEQ ID NO: 5278984 - DNA, 25 bp, Homo sapien
ggatcagaacctggcatagctgcct

SEQ ID NO: 5278985 - DNA, 25 bp, Homo sapien
tgcagaatggttgcagccagacgca

SEQ ID NO: 5278986 - DNA, 25 bp, Homo sapien
gccagacgcaggtctccatgaggag

SEQ ID NO: 5278987 - DNA, 25 bp, Homo sapien
gcatccggtcaagaggtgcctctct

SEQ ID NO: 5278988 - DNA, 25 bp, Homo sapien
taactgaaattcaaaggcggttgga

SEQ ID NO: 5278989 - DNA, 25 bp, Homo sapien
catgtgattaaccttccacagccac

SEQ ID NO: 5278990 - DNA, 25 bp, Homo sapien
tactgggttcgccatgtgattaacc

SEQ ID NO: 5278991 - DNA, 25 bp, Homo sapien
tctcctaatcttggttactgggttc

SEQ ID NO: 5278992 - DNA, 25 bp, Homo sapien
cccctgtggaaaagaaagggctgag

SEQ ID NO: 5278993 - DNA, 25 bp, Homo sapien
tctggtcgtacttcccttgtgatgc

SEQ ID NO: 5278994 - DNA, 25 bp, Homo sapien
gatgctcgaatctcctgcaaggcct

SEQ ID NO: 5278995 - DNA, 25 bp, Homo sapien
gagagatcttctggtcgtacttccc

SEQ ID NO: 5278996 - DNA, 25 bp, Homo sapien
gccactgaagggtcaggtgtttctt

SEQ ID NO: 5278997 - DNA, 25 bp, Homo sapien
gcagccactgaagggtcaggtgttt

SEQ ID NO: 5278998 - DNA, 25 bp, Homo sapien
agccactgaagggtcaggtgtttct

SEQ ID NO: 5278999 - DNA, 25 bp, Homo sapien
ggcagccactgaagggtcaggtgtt

SEQ ID NO: 5279000 - DNA, 25 bp, Homo sapien
tcttcgctggttaatccataaggtg

SEQ ID NO: 5279001 - DNA, 25 bp, Homo sapien
ccttctctgttcttcgctggttaat

SEQ ID NO: 5279002 - DNA, 25 bp, Homo sapien
ctctgttcttcgctggttaatccat

SEQ ID NO: 5279003 - DNA, 25 bp, Homo sapien
cgctggttaatccataaggtggtaa

SEQ ID NO: 5279004 - DNA, 25 bp, Homo sapien
ccactcatgagcagtagactcctga

SEQ ID NO: 5279005 - DNA, 25 bp, Homo sapien
tgagtggcctccaagccccataaaa

SEQ ID NO: 5279006 - DNA, 25 bp, Homo sapien
actggccacggctgctactggaacg

SEQ ID NO: 5279007 - DNA, 25 bp, Homo sapien
tagcctcaggactttctggagctca

SEQ ID NO: 5279008 - DNA, 25 bp, Homo sapien
catccactggatagactttgcaact

SEQ ID NO: 5279009 - DNA, 25 bp, Homo sapien
ctgggctttgctggatgatccatgg

SEQ ID NO: 5279010 - DNA, 25 bp, Homo sapien
ggtcagtggccttggtcagtcccat

SEQ ID NO: 5279011 - DNA, 25 bp, Homo sapien
tccttgcagttgtgccatccactgg

SEQ ID NO: 5279012 - DNA, 25 bp, Homo sapien
ctgtttgtccaataatgcgaaggca

SEQ ID NO: 5279013 - DNA, 25 bp, Homo sapien
ttggcccgtattgaatttcctccag

SEQ ID NO: 5279014 - DNA, 25 bp, Homo sapien
caaattctccgtcatggcgattagg

SEQ ID NO: 5279015 - DNA, 25 bp, Homo sapien
aaggcatttcagactcattccaaat

SEQ ID NO: 5279016 - DNA, 25 bp, Homo sapien
atctattccatgatccacatcctct

SEQ ID NO: 5279017 - DNA, 25 bp, Homo sapien
catccacccaatgatttacatcttc

SEQ ID NO: 5279018 - DNA, 25 bp, Homo sapien
ccatgattcacatgctccccatgat

SEQ ID NO: 5279019 - DNA, 25 bp, Homo sapien
catcaatccgatgatccacattctc

SEQ ID NO: 5279020 - DNA, 25 bp, Homo sapien
cctatgatcgacgtcctccttgtaa

SEQ ID NO: 5279021 - DNA, 25 bp, Homo sapien
catctttcctatgatcgacgtcctc

SEQ ID NO: 5279022 - DNA, 25 bp, Homo sapien
tcgacgtcctccttgtaatctaaac

SEQ ID NO: 5279023 - DNA, 25 bp, Homo sapien
gatcgacgtcctccttgtaatctaa

SEQ ID NO: 5279024 - DNA, 25 bp, Homo sapien
gatacaatggctcttggctgaaggg

SEQ ID NO: 5279025 - DNA, 25 bp, Homo sapien
gaggaattgtcagagcagtccctgg

SEQ ID NO: 5279026 - DNA, 25 bp, Homo sapien
tcctaggagggcatgctgtcttgca

SEQ ID NO: 5279027 - DNA, 25 bp, Homo sapien
tctgaacagagggtgagcccgtcat

SEQ ID NO: 5279028 - DNA, 25 bp, Homo sapien
tccttgaggatccacgtggcccttg

SEQ ID NO: 5279029 - DNA, 25 bp, Homo sapien
tgctctaccttctaccttaatggcg

SEQ ID NO: 5279030 - DNA, 25 bp, Homo sapien
tgggggtccagttagcctcatcctc

SEQ ID NO: 5279031 - DNA, 25 bp, Homo sapien
ggatggtgcggtcccagctgatctc

SEQ ID NO: 5279032 - DNA, 25 bp, Homo sapien
atctggggcaggcagtgtccctgga

SEQ ID NO: 5279033 - DNA, 25 bp, Homo sapien
gagcacacagaacagcaaatccttc

SEQ ID NO: 5279034 - DNA, 25 bp, Homo sapien
tctagatccccatgagtgatctggg

SEQ ID NO: 5279035 - DNA, 25 bp, Homo sapien
gtccctggaggggtgtatgtgtggg

SEQ ID NO: 5279036 - DNA, 25 bp, Homo sapien
tgtctcctgagaatgacagccgctg

SEQ ID NO: 5279037 - DNA, 25 bp, Homo sapien
gaattaacttctggcccgctgacag

SEQ ID NO: 5279038 - DNA, 25 bp, Homo sapien
tgccagcgcacaagagcggattaag

SEQ ID NO: 5279039 - DNA, 25 bp, Homo sapien
cctttgttgacttggtgccagcgca

SEQ ID NO: 5279040 - DNA, 25 bp, Homo sapien
ggcctcagggagttctgaaggtgag

SEQ ID NO: 5279041 - DNA, 25 bp, Homo sapien
tgagagaggtatgggacacgccagc

SEQ ID NO: 5279042 - DNA, 25 bp, Homo sapien
gagttctgaaggtgagagaggtatg

SEQ ID NO: 5279043 - DNA, 25 bp, Homo sapien
ctctgatgacagacagaaagaacat

SEQ ID NO: 5279044 - DNA, 25 bp, Homo sapien
acttccggttcaagaaatccggatg

SEQ ID NO: 5279045 - DNA, 25 bp, Homo sapien
gagcccgataacttccggttcaaga

SEQ ID NO: 5279046 - DNA, 25 bp, Homo sapien
gcacttgagcccgataacttccggt

SEQ ID NO: 5279047 - DNA, 25 bp, Homo sapien
caagaaatccggatgtaccacaaca

SEQ ID NO: 5279048 - DNA, 25 bp, Homo sapien
tttttgtagccgctaatgaaatctt

SEQ ID NO: 5279049 - DNA, 25 bp, Homo sapien
ttgtagccgctaatgaaatctttaa

SEQ ID NO: 5279050 - DNA, 25 bp, Homo sapien
gcagaacgtaaaaggtagagccacg

SEQ ID NO: 5279051 - DNA, 25 bp, Homo sapien
gagccacgtttggtatccgaggtaa

SEQ ID NO: 5279052 - DNA, 25 bp, Homo sapien
tgtatccatgttggttctccacttc

SEQ ID NO: 5279053 - DNA, 25 bp, Homo sapien
ctcttggatgaaagccgtgtgtatc

SEQ ID NO: 5279054 - DNA, 25 bp, Homo sapien
ggaactgatcgcagcctccaaactc

SEQ ID NO: 5279055 - DNA, 25 bp, Homo sapien
tcttctgacgctactctttctctct

SEQ ID NO: 5279056 - DNA, 25 bp, Homo sapien
ctcaggaagcaggtgagcaggaagt

SEQ ID NO: 5279057 - DNA, 25 bp, Homo sapien
tcaggaagcaggtgagcaggaagtg

SEQ ID NO: 5279058 - DNA, 25 bp, Homo sapien
caggaagcaggtgagcaggaagtga

SEQ ID NO: 5279059 - DNA, 25 bp, Homo sapien
ttggatgcacgagaaagcaagggaa

SEQ ID NO: 5279060 - DNA, 25 bp, Homo sapien
ctgttggatgcacgagaaagcaagg

SEQ ID NO: 5279061 - DNA, 25 bp, Homo sapien
gatgcacgagaaagcaagggaacca

SEQ ID NO: 5279062 - DNA, 25 bp, Homo sapien
tgcacgagaaagcaagggaaccaca

SEQ ID NO: 5279063 - DNA, 25 bp, Homo sapien
tcccacactcttgagaaggcttgtc

SEQ ID NO: 5279064 - DNA, 25 bp, Homo sapien
aaggcttgtcagaggacctaaatga

SEQ ID NO: 5279065 - DNA, 25 bp, Homo sapien
ctcccacactcttgagaaggcttgt

SEQ ID NO: 5279066 - DNA, 25 bp, Homo sapien
tcttgagaaggcttgtcagaggacc

SEQ ID NO: 5279067 - DNA, 25 bp, Homo sapien
ggtggtattgggattccatgggata

SEQ ID NO: 5279068 - DNA, 25 bp, Homo sapien
tgggtggtattgggattccatggga

SEQ ID NO: 5279069 - DNA, 25 bp, Homo sapien
tggtattgggattccatgggatacc

SEQ ID NO: 5279070 - DNA, 25 bp, Homo sapien
gtggtattgggattccatgggatac

SEQ ID NO: 5279071 - DNA, 25 bp, Homo sapien
cttccctgtgtttagctgcgagtga

SEQ ID NO: 5279072 - DNA, 25 bp, Homo sapien
cttggcactggttctttttgggatc

SEQ ID NO: 5279073 - DNA, 25 bp, Homo sapien
gatctgttggcactgaatggcactg

SEQ ID NO: 5279074 - DNA, 25 bp, Homo sapien
tgctcagagcactggtgccgggctt

SEQ ID NO: 5279075 - DNA, 25 bp, Homo sapien
gattcttgtcctcaagaatcctgga

SEQ ID NO: 5279076 - DNA, 25 bp, Homo sapien
agaaggggagattcttgtcctcaag

SEQ ID NO: 5279077 - DNA, 25 bp, Homo sapien
gggagattcttgtcctcaagaatcc

SEQ ID NO: 5279078 - DNA, 25 bp, Homo sapien
ttcttgtcctcaagaatcctggagg

SEQ ID NO: 5279079 - DNA, 25 bp, Homo sapien
tgtgagcagcccaagactgatgccc

SEQ ID NO: 5279080 - DNA, 25 bp, Homo sapien
cccagcggaggcgaagttgaaaaca

SEQ ID NO: 5279081 - DNA, 25 bp, Homo sapien
gttgaaaacagaggccacaactcta

SEQ ID NO: 5279082 - DNA, 25 bp, Homo sapien
caaaatgatgccttgtgaagctctt

SEQ ID NO: 5279083 - DNA, 25 bp, Homo sapien
ccttgagcaccttcatcacaaagtg

SEQ ID NO: 5279084 - DNA, 25 bp, Homo sapien
tggccgaggatctgggaggctgcct

SEQ ID NO: 5279085 - DNA, 25 bp, Homo sapien
gccgaggatctgggaggctgcctgc

SEQ ID NO: 5279086 - DNA, 25 bp, Homo sapien
gtgggattctgggccaccttgagca

SEQ ID NO: 5279087 - DNA, 25 bp, Homo sapien
acatgggagtagaaacaacaccccg

SEQ ID NO: 5279088 - DNA, 25 bp, Homo sapien
ctgcaacatgggagtagaaacaaca

SEQ ID NO: 5279089 - DNA, 25 bp, Homo sapien
caacatgggagtagaaacaacaccc

SEQ ID NO: 5279090 - DNA, 25 bp, Homo sapien
gcaacatgggagtagaaacaacacc

SEQ ID NO: 5279091 - DNA, 25 bp, Homo sapien
tggcacgcgatgaaagctccctttg

SEQ ID NO: 5279092 - DNA, 25 bp, Homo sapien
cagctgcccacgcttcaatctggca

SEQ ID NO: 5279093 - DNA, 25 bp, Homo sapien
cacgcttcaatctggcacgcgatga

SEQ ID NO: 5279094 - DNA, 25 bp, Homo sapien
gatgaaagctccctttgcttcgctt

SEQ ID NO: 5279095 - DNA, 25 bp, Homo sapien
ggtcaacatgcaaattaggtgcagg

SEQ ID NO: 5279096 - DNA, 25 bp, Homo sapien
catgcaaattaggtgcaggtgacca

SEQ ID NO: 5279097 - DNA, 25 bp, Homo sapien
caggccacagcagtacaagataaag

SEQ ID NO: 5279098 - DNA, 25 bp, Homo sapien
gtgaccaacactgccatggctcaga

SEQ ID NO: 5279099 - DNA, 25 bp, Homo sapien
tagtgtgatcaggttcgggctgcca

SEQ ID NO: 5279100 - DNA, 25 bp, Homo sapien
tgtgatcaggttcgggctgccattc

SEQ ID NO: 5279101 - DNA, 25 bp, Homo sapien
tcagggctacagatgctatttagtg

SEQ ID NO: 5279102 - DNA, 25 bp, Homo sapien
tgctatttagtgtgatcaggttcgg

SEQ ID NO: 5279103 - DNA, 25 bp, Homo sapien
aaggcctcgtttttgtataacagca

SEQ ID NO: 5279104 - DNA, 25 bp, Homo sapien
gaaatgaaggctgctctatagccag

SEQ ID NO: 5279105 - DNA, 25 bp, Homo sapien
gacaactctgtaagggtggagatca

SEQ ID NO: 5279106 - DNA, 25 bp, Homo sapien
gacttctaggcatctggagtcctcc

SEQ ID NO: 5279107 - DNA, 25 bp, Homo sapien
agctggacccggcattcttccatca

SEQ ID NO: 5279108 - DNA, 25 bp, Homo sapien
gcattcttccatcaagacagtgccg

SEQ ID NO: 5279109 - DNA, 25 bp, Homo sapien
catcaagacagtgccgatgcccttc

SEQ ID NO: 5279110 - DNA, 25 bp, Homo sapien
tcagtggtgagttgcagctggaccc

SEQ ID NO: 5279111 - DNA, 25 bp, Homo sapien
ccggggaggagctggctaccttggc

SEQ ID NO: 5279112 - DNA, 25 bp, Homo sapien
tggctaccttggcagagcctggatg

SEQ ID NO: 5279113 - DNA, 25 bp, Homo sapien
ggagctggctaccttggcagagcct

SEQ ID NO: 5279114 - DNA, 25 bp, Homo sapien
ctgagatcacaccaggagccgggga

SEQ ID NO: 5279115 - DNA, 25 bp, Homo sapien
tccttgagccttccttggtggtccg

SEQ ID NO: 5279116 - DNA, 25 bp, Homo sapien
catcttgccaatccaggcgaaggca

SEQ ID NO: 5279117 - DNA, 25 bp, Homo sapien
tggtccgatgtcagcatcttgccaa

SEQ ID NO: 5279118 - DNA, 25 bp, Homo sapien
caatccaggcgaaggcatcatgcca

SEQ ID NO: 5279119 - DNA, 25 bp, Homo sapien
tgagacgatgtctacacgcggtggt

SEQ ID NO: 5279120 - DNA, 25 bp, Homo sapien
tctggcccctatgtaatgaagatgc

SEQ ID NO: 5279121 - DNA, 25 bp, Homo sapien
tctgagatgcaattgtgggtcccca

SEQ ID NO: 5279122 - DNA, 25 bp, Homo sapien
gaacatggctttttacactgctgag

SEQ ID NO: 5279123 - DNA, 25 bp, Homo sapien
aaatatgatgaacgtacctttctta

SEQ ID NO: 5279124 - DNA, 25 bp, Homo sapien
gtaaaatatgatgaacgtacctttc

SEQ ID NO: 5279125 - DNA, 25 bp, Homo sapien
ttccagtggaccacatagtaaaata

SEQ ID NO: 5279126 - DNA, 25 bp, Homo sapien
tgtgccttttattcccacgacaagt

SEQ ID NO: 5279127 - DNA, 25 bp, Homo sapien
attccattccaataggtcctcagcc

SEQ ID NO: 5279128 - DNA, 25 bp, Homo sapien
tgggattccattccaataggtcctc

SEQ ID NO: 5279129 - DNA, 25 bp, Homo sapien
cattccaataggtcctcagccctta

SEQ ID NO: 5279130 - DNA, 25 bp, Homo sapien
ggattccattccaataggtcctcag

SEQ ID NO: 5279131 - DNA, 25 bp, Homo sapien
tccacaatgtgcgtggcagccagtg

SEQ ID NO: 5279132 - DNA, 25 bp, Homo sapien
agcctgtttccagcgcatcgcatct

SEQ ID NO: 5279133 - DNA, 25 bp, Homo sapien
ttggtgtagcatcaaggccctccac

SEQ ID NO: 5279134 - DNA, 25 bp, Homo sapien
cagtgtcctgcatgtctacatttcc

SEQ ID NO: 5279135 - DNA, 25 bp, Homo sapien
ggcagctgcattacagacctcctct

SEQ ID NO: 5279136 - DNA, 25 bp, Homo sapien
cctctgatgggcctgatcgccgtgt

SEQ ID NO: 5279137 - DNA, 25 bp, Homo sapien
ccgactgggtgtactgaatgtgaac

SEQ ID NO: 5279138 - DNA, 25 bp, Homo sapien
gaaatgggccttttggtcatgacca

SEQ ID NO: 5279139 - DNA, 25 bp, Homo sapien
aatgtcgggactgctttgagttaat

SEQ ID NO: 5279140 - DNA, 25 bp, Homo sapien
aaatgtcgggactgctttgagttaa

SEQ ID NO: 5279141 - DNA, 25 bp, Homo sapien
taaatgtcgggactgctttgagtta

SEQ ID NO: 5279142 - DNA, 25 bp, Homo sapien
tggaataacttctggtggacccgct

SEQ ID NO: 5279143 - DNA, 25 bp, Homo sapien
aacaggccaatcactaatttgatca

SEQ ID NO: 5279144 - DNA, 25 bp, Homo sapien
cccgcttagtgaaaaacaggccaat

SEQ ID NO: 5279145 - DNA, 25 bp, Homo sapien
tttaaagatctgatggcagtgccac

SEQ ID NO: 5279146 - DNA, 25 bp, Homo sapien
tgtccctgcacagtacctgaaggct

SEQ ID NO: 5279147 - DNA, 25 bp, Homo sapien
caaggtgccttctaggagtgtgact

SEQ ID NO: 5279148 - DNA, 25 bp, Homo sapien
gaaggcttatctcacctagtagacc

SEQ ID NO: 5279149 - DNA, 25 bp, Homo sapien
taactctttcactggcaaggtgcct

SEQ ID NO: 5279150 - DNA, 25 bp, Homo sapien
ctgccatctcagcacctttcctgct

SEQ ID NO: 5279151 - DNA, 25 bp, Homo sapien
tcagcacctttcctgctctgccaca

SEQ ID NO: 5279152 - DNA, 25 bp, Homo sapien
atctcagcacctttcctgctctgcc

SEQ ID NO: 5279153 - DNA, 25 bp, Homo sapien
cagcacctttcctgctctgccacat

SEQ ID NO: 5279154 - DNA, 25 bp, Homo sapien
tctgactgtgtggttgagaggaaga

SEQ ID NO: 5279155 - DNA, 25 bp, Homo sapien
gcctctgagtctgactgtgtggttg

SEQ ID NO: 5279156 - DNA, 25 bp, Homo sapien
gcctgaaggatagcctctgagtctg

SEQ ID NO: 5279157 - DNA, 25 bp, Homo sapien
aaggactgccagaaattaaccaggg

SEQ ID NO: 5279158 - DNA, 25 bp, Homo sapien
ggatttcctgtgcagatcaagcagg

SEQ ID NO: 5279159 - DNA, 25 bp, Homo sapien
gatttcctgtgcagatcaagcaggc

SEQ ID NO: 5279160 - DNA, 25 bp, Homo sapien
ctggatttcctgtgcagatcaagca

SEQ ID NO: 5279161 - DNA, 25 bp, Homo sapien
tggatttcctgtgcagatcaagcag

SEQ ID NO: 5279162 - DNA, 25 bp, Homo sapien
gtcctggaaatagtacatgctccat

SEQ ID NO: 5279163 - DNA, 25 bp, Homo sapien
ttaaacatacagctctttgggggtc

SEQ ID NO: 5279164 - DNA, 25 bp, Homo sapien
tcattgtcacctcaattaaacatac

SEQ ID NO: 5279165 - DNA, 25 bp, Homo sapien
ccaggagtcctggaaatagtacatg

SEQ ID NO: 5279166 - DNA, 25 bp, Homo sapien
gccagaggctactctctttgtgtcc

SEQ ID NO: 5279167 - DNA, 25 bp, Homo sapien
aggtctctgttgtcactctgctgcc

SEQ ID NO: 5279168 - DNA, 25 bp, Homo sapien
tggaaggtctctgttgtcactctgc

SEQ ID NO: 5279169 - DNA, 25 bp, Homo sapien
tgtggaaggtctctgttgtcactct

SEQ ID NO: 5279170 - DNA, 25 bp, Homo sapien
ggtgctcctgcgcattggttttaca

SEQ ID NO: 5279171 - DNA, 25 bp, Homo sapien
tgccacaggatgcagatgcaaatgc

SEQ ID NO: 5279172 - DNA, 25 bp, Homo sapien
gaaggcagcaaaattcctactccac

SEQ ID NO: 5279173 - DNA, 25 bp, Homo sapien
cctactccacgggactcttgagggt

SEQ ID NO: 5279174 - DNA, 25 bp, Homo sapien
tgcaaagcactgttcaaaagcttag

SEQ ID NO: 5279175 - DNA, 25 bp, Homo sapien
ttaggtcttgttgagctcatgaagc

SEQ ID NO: 5279176 - DNA, 25 bp, Homo sapien
tacttggcagccacaccaaacttca

SEQ ID NO: 5279177 - DNA, 25 bp, Homo sapien
aaaagcttaggtcttgttgagctca

SEQ ID NO: 5279178 - DNA, 25 bp, Homo sapien
tgattttacttagacaacatctcag

SEQ ID NO: 5279179 - DNA, 25 bp, Homo sapien
ccaccgggcaccatggagcatgggc

SEQ ID NO: 5279180 - DNA, 25 bp, Homo sapien
ggcacagacttttgagaattgtgat

SEQ ID NO: 5279181 - DNA, 25 bp, Homo sapien
agacatccttatagccaccgggcac

SEQ ID NO: 5279182 - DNA, 25 bp, Homo sapien
caaaatttagggactcttgggctca

SEQ ID NO: 5279183 - DNA, 25 bp, Homo sapien
gaagaggcaattcatcacttccgta

SEQ ID NO: 5279184 - DNA, 25 bp, Homo sapien
actgttgctgccagttacataggac

SEQ ID NO: 5279185 - DNA, 25 bp, Homo sapien
ggacagccgtcaggctccttaaaac

SEQ ID NO: 5279186 - DNA, 25 bp, Homo sapien
gccttaatagcaatatcaggtgtca

SEQ ID NO: 5279187 - DNA, 25 bp, Homo sapien
gaagttagcaaccatttacatagtc

SEQ ID NO: 5279188 - DNA, 25 bp, Homo sapien
caccttttaaccgactgccgaagtg

SEQ ID NO: 5279189 - DNA, 25 bp, Homo sapien
cgttcatgggcttctgccgtgacct

SEQ ID NO: 5279190 - DNA, 25 bp, Homo sapien
agagcccggaaggatcgtggttgcc

SEQ ID NO: 5279191 - DNA, 25 bp, Homo sapien
gagtaaagagttggggagtgagagc

SEQ ID NO: 5279192 - DNA, 25 bp, Homo sapien
gtgagagcccggaaggatcgtggtt

SEQ ID NO: 5279193 - DNA, 25 bp, Homo sapien
gcccggaaggatcgtggttgcccat

SEQ ID NO: 5279194 - DNA, 25 bp, Homo sapien
tttgtgcgcaaaaacatggccacac

SEQ ID NO: 5279195 - DNA, 25 bp, Homo sapien
cattccaacctttgtgcgcaaaaac

SEQ ID NO: 5279196 - DNA, 25 bp, Homo sapien
ggcaggcaaacaaccatgagatgga

SEQ ID NO: 5279197 - DNA, 25 bp, Homo sapien
ggacacgtcatgtgcacgtactgca

SEQ ID NO: 5279198 - DNA, 25 bp, Homo sapien
tgtgagctccttgtagccatccatc

SEQ ID NO: 5279199 - DNA, 25 bp, Homo sapien
ctccttgtagccatccatccagtca

SEQ ID NO: 5279200 - DNA, 25 bp, Homo sapien
tccttgtagccatccatccagtcat

SEQ ID NO: 5279201 - DNA, 25 bp, Homo sapien
gagctccttgtagccatccatccag

SEQ ID NO: 5279202 - DNA, 25 bp, Homo sapien
tggaccagggacacgtgtttcctct

SEQ ID NO: 5279203 - DNA, 25 bp, Homo sapien
tggtgaacgtgatccagctgctcaa

SEQ ID NO: 5279204 - DNA, 25 bp, Homo sapien
agaacgtggcttggttcactgggac

SEQ ID NO: 5279205 - DNA, 25 bp, Homo sapien
gtgaagagcagtgtagctggtctca

SEQ ID NO: 5279206 - DNA, 25 bp, Homo sapien
cttctcagctgtaggtactacccga

SEQ ID NO: 5279207 - DNA, 25 bp, Homo sapien
tttgcactagagactaactcacaga

SEQ ID NO: 5279208 - DNA, 25 bp, Homo sapien
taggtactacccgatttggtgacaa

SEQ ID NO: 5279209 - DNA, 25 bp, Homo sapien
gaagcaccgtaatacaaagactttg

SEQ ID NO: 5279210 - DNA, 25 bp, Homo sapien
gaagtggttgacgttcctatctctg

SEQ ID NO: 5279211 - DNA, 25 bp, Homo sapien
aagaaacaggccacgccaggaatgt

SEQ ID NO: 5279212 - DNA, 25 bp, Homo sapien
gagctaatgaatgcccctgaagtgg

SEQ ID NO: 5279213 - DNA, 25 bp, Homo sapien
gactcgaatgtcagacggtgtttaa

SEQ ID NO: 5279214 - DNA, 25 bp, Homo sapien
gaactttagcctgtcgactgttttc

SEQ ID NO: 5279215 - DNA, 25 bp, Homo sapien
caaggggtcgagatttcccatgaca

SEQ ID NO: 5279216 - DNA, 25 bp, Homo sapien
gcgtggcataaggatctgctggcaa

SEQ ID NO: 5279217 - DNA, 25 bp, Homo sapien
gctggcaaggagttggaactttagc

SEQ ID NO: 5279218 - DNA, 25 bp, Homo sapien
tggagggttttgcttggcccttgtc

SEQ ID NO: 5279219 - DNA, 25 bp, Homo sapien
cttgtccagaatgaatccatggatc

SEQ ID NO: 5279220 - DNA, 25 bp, Homo sapien
gaaagatgctgatggagggttttgc

SEQ ID NO: 5279221 - DNA, 25 bp, Homo sapien
ttgtccagaatgaatccatggatct

SEQ ID NO: 5279222 - DNA, 25 bp, Homo sapien
agggcacaggcatgggagagcaaga

SEQ ID NO: 5279223 - DNA, 25 bp, Homo sapien
aaattgctcgtaattcttccagctc

SEQ ID NO: 5279224 - DNA, 25 bp, Homo sapien
tcagtgtggcggaaaggagggtgtg

SEQ ID NO: 5279225 - DNA, 25 bp, Homo sapien
caggtagacgaaaaagtgtgtgcga

SEQ ID NO: 5279226 - DNA, 25 bp, Homo sapien
ggccttgtcccacctgaatcactac

SEQ ID NO: 5279227 - DNA, 25 bp, Homo sapien
cattggaacccatggggatgcctct

SEQ ID NO: 5279228 - DNA, 25 bp, Homo sapien
cctgaatcactactgaattcctcct

SEQ ID NO: 5279229 - DNA, 25 bp, Homo sapien
tatcatttccggttgggaaggacac

SEQ ID NO: 5279230 - DNA, 25 bp, Homo sapien
tgactggcagaagcagccatggcct

SEQ ID NO: 5279231 - DNA, 25 bp, Homo sapien
cttgactggcagaagcagccatggc

SEQ ID NO: 5279232 - DNA, 25 bp, Homo sapien
ttgactggcagaagcagccatggcc

SEQ ID NO: 5279233 - DNA, 25 bp, Homo sapien
caggaggtatttcagccgggtgttc

SEQ ID NO: 5279234 - DNA, 25 bp, Homo sapien
tatttcagccgggtgttcccattgc

SEQ ID NO: 5279235 - DNA, 25 bp, Homo sapien
tgaaagcttgcctggtgttgaaggt

SEQ ID NO: 5279236 - DNA, 25 bp, Homo sapien
cctggtgttgaaggttgcaaataaa

SEQ ID NO: 5279237 - DNA, 25 bp, Homo sapien
tctgccttgaggagcgcatatctgg

SEQ ID NO: 5279238 - DNA, 25 bp, Homo sapien
cgttctcatagacaagactcctgca

SEQ ID NO: 5279239 - DNA, 25 bp, Homo sapien
atctggacgcctcgtatctgagctc

SEQ ID NO: 5279240 - DNA, 25 bp, Homo sapien
gagctctttcgttctcatagacaag

SEQ ID NO: 5279241 - DNA, 25 bp, Homo sapien
tgtttacaactgtgggaaggttctc

SEQ ID NO: 5279242 - DNA, 25 bp, Homo sapien
taggagtccggtttgaagtcaatgt

SEQ ID NO: 5279243 - DNA, 25 bp, Homo sapien
ctcctgctgctctgttgaggctaat

SEQ ID NO: 5279244 - DNA, 25 bp, Homo sapien
ttgccgaatccacaatgcaggcttt

SEQ ID NO: 5279245 - DNA, 25 bp, Homo sapien
caagtttcaactggtgcatggctaa

SEQ ID NO: 5279246 - DNA, 25 bp, Homo sapien
gcatatctcccatcagacccgtggg

SEQ ID NO: 5279247 - DNA, 25 bp, Homo sapien
cttgaccagggatcagtggctcttc

SEQ ID NO: 5279248 - DNA, 25 bp, Homo sapien
acaacagtggcttccgagcgtgggc

SEQ ID NO: 5279249 - DNA, 25 bp, Homo sapien
ggcttgctctgctatttcccagtat

SEQ ID NO: 5279250 - DNA, 25 bp, Homo sapien
tctctcagggataacaggcttgctc

SEQ ID NO: 5279251 - DNA, 25 bp, Homo sapien
tgatttctgtcctcaactcagtgag

SEQ ID NO: 5279252 - DNA, 25 bp, Homo sapien
gagggcagttcccataacagttcat

SEQ ID NO: 5279253 - DNA, 25 bp, Homo sapien
tgtggccagaagtcgactcataagc

SEQ ID NO: 5279254 - DNA, 25 bp, Homo sapien
gatgaatgccttgcactagaaccca

SEQ ID NO: 5279255 - DNA, 25 bp, Homo sapien
gctttgcaagtgaacctcagggcac

SEQ ID NO: 5279256 - DNA, 25 bp, Homo sapien
tgaggccacccatgctgtcgattga

SEQ ID NO: 5279257 - DNA, 25 bp, Homo sapien
cttgaaacattccccgcaaactact

SEQ ID NO: 5279258 - DNA, 25 bp, Homo sapien
aaacattccccgcaaactactctgg

SEQ ID NO: 5279259 - DNA, 25 bp, Homo sapien
aacattccccgcaaactactctgga

SEQ ID NO: 5279260 - DNA, 25 bp, Homo sapien
tgaaacattccccgcaaactactct

SEQ ID NO: 5279261 - DNA, 25 bp, Homo sapien
gactgaacacatagcttgcatacat

SEQ ID NO: 5279262 - DNA, 25 bp, Homo sapien
ggttgactgaacacatagcttgcat

SEQ ID NO: 5279263 - DNA, 25 bp, Homo sapien
gctaccaggttgactgaacacatag

SEQ ID NO: 5279264 - DNA, 25 bp, Homo sapien
caggttgactgaacacatagcttgc

SEQ ID NO: 5279265 - DNA, 25 bp, Homo sapien
tcatttcagctgcataagattggtt

SEQ ID NO: 5279266 - DNA, 25 bp, Homo sapien
ctgcataagattggttggatccaga

SEQ ID NO: 5279267 - DNA, 25 bp, Homo sapien
ctgatgctctgagccagccttgagg

SEQ ID NO: 5279268 - DNA, 25 bp, Homo sapien
ctctgagccagccttgaggaaccac

SEQ ID NO: 5279269 - DNA, 25 bp, Homo sapien
ggcaatgactttgctctgcaagttt

SEQ ID NO: 5279270 - DNA, 25 bp, Homo sapien
aatgactttgctctgcaagttttcc

SEQ ID NO: 5279271 - DNA, 25 bp, Homo sapien
tggcaatgactttgctctgcaagtt

SEQ ID NO: 5279272 - DNA, 25 bp, Homo sapien
tttggcaatgactttgctctgcaag

SEQ ID NO: 5279273 - DNA, 25 bp, Homo sapien
gcttcagcacattggttggtgtgga

SEQ ID NO: 5279274 - DNA, 25 bp, Homo sapien
tagcttcagcacattggttggtgtg

SEQ ID NO: 5279275 - DNA, 25 bp, Homo sapien
tctttagcttcagcacattggttgg

SEQ ID NO: 5279276 - DNA, 25 bp, Homo sapien
tctctttagcttcagcacattggtt

SEQ ID NO: 5279277 - DNA, 25 bp, Homo sapien
ttctgccactgcataagggtagaca

SEQ ID NO: 5279278 - DNA, 25 bp, Homo sapien
cacaggagatgaaaggcggccttca

SEQ ID NO: 5279279 - DNA, 25 bp, Homo sapien
cactgcataagggtagacacaggag

SEQ ID NO: 5279280 - DNA, 25 bp, Homo sapien
cataagggtagacacaggagatgaa

SEQ ID NO: 5279281 - DNA, 25 bp, Homo sapien
cttcccactgcctgtatttccaaag

SEQ ID NO: 5279282 - DNA, 25 bp, Homo sapien
accaaacttcccactgcctgtattt

SEQ ID NO: 5279283 - DNA, 25 bp, Homo sapien
actgcctgtatttccaaagttgacc

SEQ ID NO: 5279284 - DNA, 25 bp, Homo sapien
tcacagtcctcaggacaccaaactt

SEQ ID NO: 5279285 - DNA, 25 bp, Homo sapien
gcccatactccgtggatcagtgttt

SEQ ID NO: 5279286 - DNA, 25 bp, Homo sapien
tcagcccatactccgtggatcagtg

SEQ ID NO: 5279287 - DNA, 25 bp, Homo sapien
cacattcagcccatactccgtggat

SEQ ID NO: 5279288 - DNA, 25 bp, Homo sapien
tactccgtggatcagtgtttccctc

SEQ ID NO: 5279289 - DNA, 25 bp, Homo sapien
gaatgctgattaaatgactcccttg

SEQ ID NO: 5279290 - DNA, 25 bp, Homo sapien
gactaggagctaagtgaatgctgat

SEQ ID NO: 5279291 - DNA, 25 bp, Homo sapien
taaatgactcccttgactgatgatg

SEQ ID NO: 5279292 - DNA, 25 bp, Homo sapien
gtaaaatttctggtagctgccttca

SEQ ID NO: 5279293 - DNA, 25 bp, Homo sapien
acttttaataaccagcgtttgtcag

SEQ ID NO: 5279294 - DNA, 25 bp, Homo sapien
tagcactgtgcgagaggtagcacct

SEQ ID NO: 5279295 - DNA, 25 bp, Homo sapien
tgtcagatccaactgttagctgtcc

SEQ ID NO: 5279296 - DNA, 25 bp, Homo sapien
tagctgtccttcttttagtaacctc

SEQ ID NO: 5279297 - DNA, 25 bp, Homo sapien
gctgctctcattcctcagggatgtc

SEQ ID NO: 5279298 - DNA, 25 bp, Homo sapien
aaggctgctctcattcctcagggat

SEQ ID NO: 5279299 - DNA, 25 bp, Homo sapien
ctggcgccgctgctgggcatgagca

SEQ ID NO: 5279300 - DNA, 25 bp, Homo sapien
ctgtctgtctggccggtccactggg

SEQ ID NO: 5279301 - DNA, 25 bp, Homo sapien
ctgccccgccgctgcggcgtctgcg

SEQ ID NO: 5279302 - DNA, 25 bp, Homo sapien
ggccgcctgggagcgggcatgggtg

SEQ ID NO: 5279303 - DNA, 25 bp, Homo sapien
ggccgcagggtagcctcgcccccgc

SEQ ID NO: 5279304 - DNA, 25 bp, Homo sapien
gtgggcggggcccgtggcggcgctg

SEQ ID NO: 5279305 - DNA, 25 bp, Homo sapien
cagttggaggcataattcacagttt

SEQ ID NO: 5279306 - DNA, 25 bp, Homo sapien
tcttgtcccacatcacagttggagg

SEQ ID NO: 5279307 - DNA, 25 bp, Homo sapien
tctgagaaccagcatctagatcatt

SEQ ID NO: 5279308 - DNA, 25 bp, Homo sapien
gatatctgggagtgtgtctctgaga

SEQ ID NO: 5279309 - DNA, 25 bp, Homo sapien
atcgaccactttgatccctctgcag

SEQ ID NO: 5279310 - DNA, 25 bp, Homo sapien
ctgccattgtcctagagaagctttc

SEQ ID NO: 5279311 - DNA, 25 bp, Homo sapien
gacacagcttaacatctgccattgt

SEQ ID NO: 5279312 - DNA, 25 bp, Homo sapien
tctgactgtgagtacatcgaccact

SEQ ID NO: 5279313 - DNA, 25 bp, Homo sapien
tacttcgcgtctgctctgagcaggc

SEQ ID NO: 5279314 - DNA, 25 bp, Homo sapien
tctccacttctgagaaggaaataga

SEQ ID NO: 5279315 - DNA, 25 bp, Homo sapien
gacacgtagtcttataggaaaccat

SEQ ID NO: 5279316 - DNA, 25 bp, Homo sapien
gaataatcaatttcctacaagcttg

SEQ ID NO: 5279317 - DNA, 25 bp, Homo sapien
aagatggcaacaggcagagtccttt

SEQ ID NO: 5279318 - DNA, 25 bp, Homo sapien
tgtggttttagctgctggctgacat

SEQ ID NO: 5279319 - DNA, 25 bp, Homo sapien
tctggatgttgagactggcctaatc

SEQ ID NO: 5279320 - DNA, 25 bp, Homo sapien
gcagagtcctttgccgatgccagat

SEQ ID NO: 5279321 - DNA, 25 bp, Homo sapien
tgtggccacacatgtttccgatgaa

SEQ ID NO: 5279322 - DNA, 25 bp, Homo sapien
acagagcggtcacagagaacagcag

SEQ ID NO: 5279323 - DNA, 25 bp, Homo sapien
catattatcaaaggcccgaggccct

SEQ ID NO: 5279324 - DNA, 25 bp, Homo sapien
caaggactggcatgtttcgttcaaa

SEQ ID NO: 5279325 - DNA, 25 bp, Homo sapien
tatcggggtaacgtatcacagaaaa

SEQ ID NO: 5279326 - DNA, 25 bp, Homo sapien
tattagactgagttgaaatgtgatc

SEQ ID NO: 5279327 - DNA, 25 bp, Homo sapien
ctttcccccttaagcaaatatctat

SEQ ID NO: 5279328 - DNA, 25 bp, Homo sapien
tgtgatccaaccaaacatactcttt

SEQ ID NO: 5279329 - DNA, 25 bp, Homo sapien
ctccacattcttctccctttagctg

SEQ ID NO: 5279330 - DNA, 25 bp, Homo sapien
ttcctcattatctccacattcttct

SEQ ID NO: 5279331 - DNA, 25 bp, Homo sapien
cacattcttctccctttagctgcat

SEQ ID NO: 5279332 - DNA, 25 bp, Homo sapien
cttcctcattatctccacattcttc

SEQ ID NO: 5279333 - DNA, 25 bp, Homo sapien
atagtaagcaggtcgttgccacatg

SEQ ID NO: 5279334 - DNA, 25 bp, Homo sapien
taggcattcacggttgttgacccag

SEQ ID NO: 5279335 - DNA, 25 bp, Homo sapien
taaaagcgttcatatccgggtgcag

SEQ ID NO: 5279336 - DNA, 25 bp, Homo sapien
tacaagaactttagtgtggcacagg

SEQ ID NO: 5279337 - DNA, 25 bp, Homo sapien
tggtttcacaactcagcaaggagag

SEQ ID NO: 5279338 - DNA, 25 bp, Homo sapien
gcctggacttcagctataagcgaga

SEQ ID NO: 5279339 - DNA, 25 bp, Homo sapien
ttggcaaagtgaagctcccaccaga

SEQ ID NO: 5279340 - DNA, 25 bp, Homo sapien
gaacatgcccttagcagacattgaa

SEQ ID NO: 5279341 - DNA, 25 bp, Homo sapien
tcccaccagagggagatcagcaggc

SEQ ID NO: 5279342 - DNA, 25 bp, Homo sapien
ggtctcaggtgatcagcttcagaag

SEQ ID NO: 5279343 - DNA, 25 bp, Homo sapien
tttgcacagggcatcatggaaggtc

SEQ ID NO: 5279344 - DNA, 25 bp, Homo sapien
taaaagcaatgctctaggaaagcct

SEQ ID NO: 5279345 - DNA, 25 bp, Homo sapien
tagcacacacaattaggtctcaggt

SEQ ID NO: 5279346 - DNA, 25 bp, Homo sapien
tcagagtacgtgtctagcaagtatc

SEQ ID NO: 5279347 - DNA, 25 bp, Homo sapien
taagaaattcaggtgtagagaggtg

SEQ ID NO: 5279348 - DNA, 25 bp, Homo sapien
agcaagtatctatgtagacgaatca

SEQ ID NO: 5279349 - DNA, 25 bp, Homo sapien
cgaatcatcacgtgcttatcaccca

SEQ ID NO: 5279350 - DNA, 25 bp, Homo sapien
tagtggtgcacaacgagtttctgag

SEQ ID NO: 5279351 - DNA, 25 bp, Homo sapien
caattggatcctaagattgggaggc

SEQ ID NO: 5279352 - DNA, 25 bp, Homo sapien
taatggcctttatagacgtagtgag

SEQ ID NO: 5279353 - DNA, 25 bp, Homo sapien
cgccaaagtagcagtgcatctgaga

SEQ ID NO: 5279354 - DNA, 25 bp, Homo sapien
gagacacacgacatgggttcaagcc

SEQ ID NO: 5279355 - DNA, 25 bp, Homo sapien
taatgtttagatgcagaccagggaa

SEQ ID NO: 5279356 - DNA, 25 bp, Homo sapien
tgttcaatgactcctgatgccggga

SEQ ID NO: 5279357 - DNA, 25 bp, Homo sapien
gactccttctagtggaaacaggcaa

SEQ ID NO: 5279358 - DNA, 25 bp, Homo sapien
tcaaaggtaaggctctcaagtcaat

SEQ ID NO: 5279359 - DNA, 25 bp, Homo sapien
caggagtaaattcaggtgcaccagg

SEQ ID NO: 5279360 - DNA, 25 bp, Homo sapien
tgtagctgagccgacacaggaaatc

SEQ ID NO: 5279361 - DNA, 25 bp, Homo sapien
tatattgcaacaagctagcaacggg

SEQ ID NO: 5279362 - DNA, 25 bp, Homo sapien
tgattcatcgttcaagtgctttgta

SEQ ID NO: 5279363 - DNA, 25 bp, Homo sapien
tgaagcattgctcgaatctgtttgg

SEQ ID NO: 5279364 - DNA, 25 bp, Homo sapien
tgctcgaatctgtttggaagttgat

SEQ ID NO: 5279365 - DNA, 25 bp, Homo sapien
ctgtttggaagttgattcatcgttc

SEQ ID NO: 5279366 - DNA, 25 bp, Homo sapien
gaggttagcggcaaacagtgctctg

SEQ ID NO: 5279367 - DNA, 25 bp, Homo sapien
tctgtgtaagcttcagcccatcttt

SEQ ID NO: 5279368 - DNA, 25 bp, Homo sapien
ctttaccttcggaaacacaattgat

SEQ ID NO: 5279369 - DNA, 25 bp, Homo sapien
gcttatttctttagacaaaaatcca

SEQ ID NO: 5279370 - DNA, 25 bp, Homo sapien
tcaaaacttttatgcagcctttcat

SEQ ID NO: 5279371 - DNA, 25 bp, Homo sapien
ctgagggcatttagcagcccctcca

SEQ ID NO: 5279372 - DNA, 25 bp, Homo sapien
tgctccttcaaaacttttatgcagc

SEQ ID NO: 5279373 - DNA, 25 bp, Homo sapien
tccacactgtctggggcctgctcct

SEQ ID NO: 5279374 - DNA, 25 bp, Homo sapien
cggattgggagaagctacaagcatg

SEQ ID NO: 5279375 - DNA, 25 bp, Homo sapien
cccagggatgcagagattctgtccc

SEQ ID NO: 5279376 - DNA, 25 bp, Homo sapien
tgcagagattctgtccctctcccat

SEQ ID NO: 5279377 - DNA, 25 bp, Homo sapien
tacaagcatgccaggtatatgccac

SEQ ID NO: 5279378 - DNA, 25 bp, Homo sapien
agatcactctcagtggagaggtcct

SEQ ID NO: 5279379 - DNA, 25 bp, Homo sapien
aaagatcactctcagtggagaggtc

SEQ ID NO: 5279380 - DNA, 25 bp, Homo sapien
aagatcactctcagtggagaggtcc

SEQ ID NO: 5279381 - DNA, 25 bp, Homo sapien
ttggatgtcttgcagaaagctccca

SEQ ID NO: 5279382 - DNA, 25 bp, Homo sapien
cccacagggtggacatggtcataga

SEQ ID NO: 5279383 - DNA, 25 bp, Homo sapien
caccctcatgcagaacatcagggtc

SEQ ID NO: 5279384 - DNA, 25 bp, Homo sapien
cagggtctcttcactcgtaaaccta

SEQ ID NO: 5279385 - DNA, 25 bp, Homo sapien
acacttgtcattgtgctgaggcagt

SEQ ID NO: 5279386 - DNA, 25 bp, Homo sapien
ggtgttctctattggcagagttttg

SEQ ID NO: 5279387 - DNA, 25 bp, Homo sapien
tgtcattgtgctgaggcagtctgtg

SEQ ID NO: 5279388 - DNA, 25 bp, Homo sapien
cagcatgactttacagacacttgtc

SEQ ID NO: 5279389 - DNA, 25 bp, Homo sapien
agcacctcgttgctcaacttcactt

SEQ ID NO: 5279390 - DNA, 25 bp, Homo sapien
gcagctcttgtgtggaattaaggaa

SEQ ID NO: 5279391 - DNA, 25 bp, Homo sapien
aaggaaaaaagcacctcgttgctca

SEQ ID NO: 5279392 - DNA, 25 bp, Homo sapien
tgtgtggaattaaggaaaaaagcac

SEQ ID NO: 5279393 - DNA, 25 bp, Homo sapien
agagggacattcgattggccatctc

SEQ ID NO: 5279394 - DNA, 25 bp, Homo sapien
gggttttcagcattggcgtggcttc

SEQ ID NO: 5279395 - DNA, 25 bp, Homo sapien
gattggccatctcattattgacttc

SEQ ID NO: 5279396 - DNA, 25 bp, Homo sapien
gtgcattgtggcattgctaagggtt

SEQ ID NO: 5279397 - DNA, 25 bp, Homo sapien
taagaagagaagatggatttataaa

SEQ ID NO: 5279398 - DNA, 25 bp, Homo sapien
ttataaagagaaagtccaaatcctc

SEQ ID NO: 5279399 - DNA, 25 bp, Homo sapien
aataagaagagaagatggatttata

SEQ ID NO: 5279400 - DNA, 25 bp, Homo sapien
agaagagaagatggatttataaaga

SEQ ID NO: 5279401 - DNA, 25 bp, Homo sapien
tcattctgaatagccgggttcctca

SEQ ID NO: 5279402 - DNA, 25 bp, Homo sapien
tagctgaagtcattctgaatagccg

SEQ ID NO: 5279403 - DNA, 25 bp, Homo sapien
catgttgttgatgcggttgcgactg

SEQ ID NO: 5279404 - DNA, 25 bp, Homo sapien
gttgcgactgattgttcttctgtag

SEQ ID NO: 5279405 - DNA, 25 bp, Homo sapien
cttcagctcatcgaatcgaagggta

SEQ ID NO: 5279406 - DNA, 25 bp, Homo sapien
tcagagattccaataaactctgaag

SEQ ID NO: 5279407 - DNA, 25 bp, Homo sapien
tcggcaaactcctttgccagggcct

SEQ ID NO: 5279408 - DNA, 25 bp, Homo sapien
gtagggtggacaagtcagagattcc

SEQ ID NO: 5279409 - DNA, 25 bp, Homo sapien
gagggcacaccgcattccaagcttt

SEQ ID NO: 5279410 - DNA, 25 bp, Homo sapien
acaacaagagggcacaccgcattcc

SEQ ID NO: 5279411 - DNA, 25 bp, Homo sapien
tttagcctcacaacaagagggcaca

SEQ ID NO: 5279412 - DNA, 25 bp, Homo sapien
tagcctcacaacaagagggcacacc

SEQ ID NO: 5279413 - DNA, 25 bp, Homo sapien
cacttgaacatacagcaaatggctc

SEQ ID NO: 5279414 - DNA, 25 bp, Homo sapien
ggctctacaattacatcctgtgtca

SEQ ID NO: 5279415 - DNA, 25 bp, Homo sapien
ggttcatcggatggtcctccaacat

SEQ ID NO: 5279416 - DNA, 25 bp, Homo sapien
ccaacatgctcaatatgaatggaaa

SEQ ID NO: 5279417 - DNA, 25 bp, Homo sapien
ggcctgcgcctttgtaagcctgcag

SEQ ID NO: 5279418 - DNA, 25 bp, Homo sapien
tgggcctgcgcctttgtaagcctgc

SEQ ID NO: 5279419 - DNA, 25 bp, Homo sapien
ggacggcgctgatctggttccagat

SEQ ID NO: 5279420 - DNA, 25 bp, Homo sapien
atcctgaaggacggcgctgatctgg

SEQ ID NO: 5279421 - DNA, 25 bp, Homo sapien
acagggaaaccgagagacagagtgc

SEQ ID NO: 5279422 - DNA, 25 bp, Homo sapien
aaaccgagagacagagtgctggtgt

SEQ ID NO: 5279423 - DNA, 25 bp, Homo sapien
cgagagacagagtgctggtgtttac

SEQ ID NO: 5279424 - DNA, 25 bp, Homo sapien
cagggaaaccgagagacagagtgct

SEQ ID NO: 5279425 - DNA, 25 bp, Homo sapien
tactggcactagagacaaacaagct

SEQ ID NO: 5279426 - DNA, 25 bp, Homo sapien
taagactgtttctgatagggtggcc

SEQ ID NO: 5279427 - DNA, 25 bp, Homo sapien
cacagagttgcatgagtaaccaggg

SEQ ID NO: 5279428 - DNA, 25 bp, Homo sapien
gtgatctataagacaggaccctcag

SEQ ID NO: 5279429 - DNA, 25 bp, Homo sapien
agtcaaattggccatccactctttc

SEQ ID NO: 5279430 - DNA, 25 bp, Homo sapien
tcaatttccctggtaaggactttga

SEQ ID NO: 5279431 - DNA, 25 bp, Homo sapien
aatccaggaaaaagtgtggatagtt

SEQ ID NO: 5279432 - DNA, 25 bp, Homo sapien
tgtggatagttttcaatttccctgg

SEQ ID NO: 5279433 - DNA, 25 bp, Homo sapien
tttccctggtaaggactttgagcag

SEQ ID NO: 5279434 - DNA, 25 bp, Homo sapien
aaagggcttggcattccccatggaa

SEQ ID NO: 5279435 - DNA, 25 bp, Homo sapien
gctgctagagtccagttgtaaggca

SEQ ID NO: 5279436 - DNA, 25 bp, Homo sapien
accatggtgtccctcaaaagggctt

SEQ ID NO: 5279437 - DNA, 25 bp, Homo sapien
catcgatcattaataccatggtgtc

SEQ ID NO: 5279438 - DNA, 25 bp, Homo sapien
gaggactcctcgctcagaggacctt

SEQ ID NO: 5279439 - DNA, 25 bp, Homo sapien
ctggaatcctaagacctttccttgg

SEQ ID NO: 5279440 - DNA, 25 bp, Homo sapien
tctgagaggactcctcgctcagagg

SEQ ID NO: 5279441 - DNA, 25 bp, Homo sapien
tcctgcctctggaatcctaagacct

SEQ ID NO: 5279442 - DNA, 25 bp, Homo sapien
ttctgtcctgtgcttagcttcgtga

SEQ ID NO: 5279443 - DNA, 25 bp, Homo sapien
cagaaaagtcaaggtatctagctga

SEQ ID NO: 5279444 - DNA, 25 bp, Homo sapien
aagtcaaggtatctagctgaaaaag

SEQ ID NO: 5279445 - DNA, 25 bp, Homo sapien
tgtgcttagcttcgtgaaatgcttc

SEQ ID NO: 5279446 - DNA, 25 bp, Homo sapien
gacggtggcctcctagagtcctgta

SEQ ID NO: 5279447 - DNA, 25 bp, Homo sapien
ttggacttcccaaatcaggacggtg

SEQ ID NO: 5279448 - DNA, 25 bp, Homo sapien
tggaaatatctcctgtgattcagtt

SEQ ID NO: 5279449 - DNA, 25 bp, Homo sapien
gggatgaaccagcttagctgctgtc

SEQ ID NO: 5279450 - DNA, 25 bp, Homo sapien
gaaaccggattgtgatggtaacagg

SEQ ID NO: 5279451 - DNA, 25 bp, Homo sapien
cttcccaccaccaagcaccgcctgg

SEQ ID NO: 5279452 - DNA, 25 bp, Homo sapien
accggattgtgatggtaacagggca

SEQ ID NO: 5279453 - DNA, 25 bp, Homo sapien
ttaggaaaccggattgtgatggtaa

SEQ ID NO: 5279454 - DNA, 25 bp, Homo sapien
ctcaggtgtagacatggaaggtggt

SEQ ID NO: 5279455 - DNA, 25 bp, Homo sapien
tcaggtgtagacatggaaggtggtg

SEQ ID NO: 5279456 - DNA, 25 bp, Homo sapien
gaggggccaggcgtgtcacaaaagg

SEQ ID NO: 5279457 - DNA, 25 bp, Homo sapien
ctgaggggccaggcgtgtcacaaaa

SEQ ID NO: 5279458 - DNA, 25 bp, Homo sapien
ggggccaggcgtgtcacaaaaggat

SEQ ID NO: 5279459 - DNA, 25 bp, Homo sapien
aggggccaggcgtgtcacaaaagga

SEQ ID NO: 5279460 - DNA, 25 bp, Homo sapien
agtgaaatgcttttccatatctttt

SEQ ID NO: 5279461 - DNA, 25 bp, Homo sapien
gaaatgcttttccatatcttttcat

SEQ ID NO: 5279462 - DNA, 25 bp, Homo sapien
tggcagccagtgaaatgcttttcca

SEQ ID NO: 5279463 - DNA, 25 bp, Homo sapien
ctggcagccagtgaaatgcttttcc

SEQ ID NO: 5279464 - DNA, 25 bp, Homo sapien
caggcaacaccagtaaatgacatcc

SEQ ID NO: 5279465 - DNA, 25 bp, Homo sapien
gcaacaccagtaaatgacatcctgg

SEQ ID NO: 5279466 - DNA, 25 bp, Homo sapien
cctggtgttggtgtttatacagcat

SEQ ID NO: 5279467 - DNA, 25 bp, Homo sapien
gggtagcagccgaccaatgtcaggc

SEQ ID NO: 5279468 - DNA, 25 bp, Homo sapien
tcccaggctaacgttggaccacaga

SEQ ID NO: 5279469 - DNA, 25 bp, Homo sapien
ctaagcaaccaagtgggcagcaggc

SEQ ID NO: 5279470 - DNA, 25 bp, Homo sapien
ggagaacctggatcgctgaataact

SEQ ID NO: 5279471 - DNA, 25 bp, Homo sapien
taagtaacagcatctagtccctgcc

SEQ ID NO: 5279472 - DNA, 25 bp, Homo sapien
catggaagtagcttgaaaccagcca

SEQ ID NO: 5279473 - DNA, 25 bp, Homo sapien
gatctcttgccctaacatggtaccg

SEQ ID NO: 5279474 - DNA, 25 bp, Homo sapien
ggtgtaaaacattgccacggatgct

SEQ ID NO: 5279475 - DNA, 25 bp, Homo sapien
cacggatgctacaggtttacaatgc

SEQ ID NO: 5279476 - DNA, 25 bp, Homo sapien
gattgaaaatgcatttagcacaaac

SEQ ID NO: 5279477 - DNA, 25 bp, Homo sapien
cacttgggattgaaaatgcatttag

SEQ ID NO: 5279478 - DNA, 25 bp, Homo sapien
gggattgaaaatgcatttagcacaa

SEQ ID NO: 5279479 - DNA, 25 bp, Homo sapien
ttgggattgaaaatgcatttagcac

SEQ ID NO: 5279480 - DNA, 25 bp, Homo sapien
gaagcagaaacagcgttggataaga

SEQ ID NO: 5279481 - DNA, 25 bp, Homo sapien
gttggataagaaacgcgaccgacat

SEQ ID NO: 5279482 - DNA, 25 bp, Homo sapien
gaaacagcgttggataagaaacgcg

SEQ ID NO: 5279483 - DNA, 25 bp, Homo sapien
cagcgttggataagaaacgcgaccg

SEQ ID NO: 5279484 - DNA, 25 bp, Homo sapien
cccttgcaagactccggattctgag

SEQ ID NO: 5279485 - DNA, 25 bp, Homo sapien
acagccgttgctggaagtcccttgc

SEQ ID NO: 5279486 - DNA, 25 bp, Homo sapien
caatggcaggcagcatatctactgt

SEQ ID NO: 5279487 - DNA, 25 bp, Homo sapien
ggcaccactcagacatgcacaagga

SEQ ID NO: 5279488 - DNA, 25 bp, Homo sapien
tacaatccatctgggacctagggcc

SEQ ID NO: 5279489 - DNA, 25 bp, Homo sapien
tggcttctcaagcaccagaactgtg

SEQ ID NO: 5279490 - DNA, 25 bp, Homo sapien
tcagaactccggacaagctggttac

SEQ ID NO: 5279491 - DNA, 25 bp, Homo sapien
taattcgagatgtggcaagacccag

SEQ ID NO: 5279492 - DNA, 25 bp, Homo sapien
gggatggttgcacagtacaggggac

SEQ ID NO: 5279493 - DNA, 25 bp, Homo sapien
ggaaggatgtacagcacaggggatg

SEQ ID NO: 5279494 - DNA, 25 bp, Homo sapien
ttgcacagtacaggggacggttgta

SEQ ID NO: 5279495 - DNA, 25 bp, Homo sapien
aggatgtacagcacaggggatggtt

SEQ ID NO: 5279496 - DNA, 25 bp, Homo sapien
tctgagctcaacagacaagctctgt

SEQ ID NO: 5279497 - DNA, 25 bp, Homo sapien
caagctctgtagtggctctgtgaca

SEQ ID NO: 5279498 - DNA, 25 bp, Homo sapien
tctgtgacaagtatctcagaatgcc

SEQ ID NO: 5279499 - DNA, 25 bp, Homo sapien
gcaaccctaaacatctcagagagac

SEQ ID NO: 5279500 - DNA, 25 bp, Homo sapien
caggtagcaccttgtgaacatgggt

SEQ ID NO: 5279501 - DNA, 25 bp, Homo sapien
gcaccttgtgaacatgggtcccgca

SEQ ID NO: 5279502 - DNA, 25 bp, Homo sapien
accttgtgaacatgggtcccgcaca

SEQ ID NO: 5279503 - DNA, 25 bp, Homo sapien
tagcaccttgtgaacatgggtcccg

SEQ ID NO: 5279504 - DNA, 25 bp, Homo sapien
ccaaatgcttttcttagccatcctc

SEQ ID NO: 5279505 - DNA, 25 bp, Homo sapien
gggccaaatgcttttcttagccatc

SEQ ID NO: 5279506 - DNA, 25 bp, Homo sapien
catcctctctccccttgccgtatac

SEQ ID NO: 5279507 - DNA, 25 bp, Homo sapien
tggggccaaatgcttttcttagcca

SEQ ID NO: 5279508 - DNA, 25 bp, Homo sapien
ttccttctggaaaggtctccagaga

SEQ ID NO: 5279509 - DNA, 25 bp, Homo sapien
aggtctccagagatgaagtcttccg

SEQ ID NO: 5279510 - DNA, 25 bp, Homo sapien
tatatttgctaggatttttccctgc

SEQ ID NO: 5279511 - DNA, 25 bp, Homo sapien
gaagtcttccgggtcccacagactc

SEQ ID NO: 5279512 - DNA, 25 bp, Homo sapien
gacggatgaatttgacggggacctg

SEQ ID NO: 5279513 - DNA, 25 bp, Homo sapien
gagaagtgcacaactcattgtaggt

SEQ ID NO: 5279514 - DNA, 25 bp, Homo sapien
tctgttgaataagtagatggacaga

SEQ ID NO: 5279515 - DNA, 25 bp, Homo sapien
gttgaataagtagatggacagatgg

SEQ ID NO: 5279516 - DNA, 25 bp, Homo sapien
gatgtagctcatgtgtgatcctgcg

SEQ ID NO: 5279517 - DNA, 25 bp, Homo sapien
gcaagtctatgatgagccatgaaac

SEQ ID NO: 5279518 - DNA, 25 bp, Homo sapien
tctgtaatacgaagctaacgcatag

SEQ ID NO: 5279519 - DNA, 25 bp, Homo sapien
gactttgggtgagctaaactgagcc

SEQ ID NO: 5279520 - DNA, 25 bp, Homo sapien
ttggataccacctgcctcaactggg

SEQ ID NO: 5279521 - DNA, 25 bp, Homo sapien
gcatgcatgcctgtcactctgtaag

SEQ ID NO: 5279522 - DNA, 25 bp, Homo sapien
tgaaggacgtcagccaaacacagac

SEQ ID NO: 5279523 - DNA, 25 bp, Homo sapien
tgcaagctgtaccaaggaagggcct

SEQ ID NO: 5279524 - DNA, 25 bp, Homo sapien
gccttccaggacaagcgtgtttctg

SEQ ID NO: 5279525 - DNA, 25 bp, Homo sapien
gagatctgctcttcccttacgagga

SEQ ID NO: 5279526 - DNA, 25 bp, Homo sapien
tacgaggaagtaaggactgcagctg

SEQ ID NO: 5279527 - DNA, 25 bp, Homo sapien
catcaggtgtaattcaggtggtcca

SEQ ID NO: 5279528 - DNA, 25 bp, Homo sapien
tgccctggggactcgacactgtgca

SEQ ID NO: 5279529 - DNA, 25 bp, Homo sapien
gtcccagatcagcattctgtgccct

SEQ ID NO: 5279530 - DNA, 25 bp, Homo sapien
gtgccctggggactcgacactgtgc

SEQ ID NO: 5279531 - DNA, 25 bp, Homo sapien
aatagctttggaggccttaaatgac

SEQ ID NO: 5279532 - DNA, 25 bp, Homo sapien
actggctagcgagtaggagcagctt

SEQ ID NO: 5279533 - DNA, 25 bp, Homo sapien
gggacactggctagcgagtaggagc

SEQ ID NO: 5279534 - DNA, 25 bp, Homo sapien
ctttggaggccttaaatgacaaaga

SEQ ID NO: 5279535 - DNA, 25 bp, Homo sapien
ccgctccgccgccgccgagtacgcc

SEQ ID NO: 5279536 - DNA, 25 bp, Homo sapien
gcccgctccgccgccgccgagtacg

SEQ ID NO: 5279537 - DNA, 25 bp, Homo sapien
cgagtcgccgccgccctgctctgcc

SEQ ID NO: 5279538 - DNA, 25 bp, Homo sapien
gccgccctgctctgccgcccgctcc

SEQ ID NO: 5279539 - DNA, 25 bp, Homo sapien
aggcaagcccactatgaccctgcca

SEQ ID NO: 5279540 - DNA, 25 bp, Homo sapien
gcaagcccactatgaccctgccaga

SEQ ID NO: 5279541 - DNA, 25 bp, Homo sapien
tacaggcaagcccactatgaccctg

SEQ ID NO: 5279542 - DNA, 25 bp, Homo sapien
aagcccactatgaccctgccagagc

SEQ ID NO: 5279543 - DNA, 25 bp, Homo sapien
tgtctcattagtgtcactcatgtag

SEQ ID NO: 5279544 - DNA, 25 bp, Homo sapien
tgataaactccatcaaactgcttcc

SEQ ID NO: 5279545 - DNA, 25 bp, Homo sapien
gtctcattagtgtcactcatgtagg

SEQ ID NO: 5279546 - DNA, 25 bp, Homo sapien
agctgcttcctctgataaactccat

SEQ ID NO: 5279547 - DNA, 25 bp, Homo sapien
ccctcctgtagcatgttggagttgt

SEQ ID NO: 5279548 - DNA, 25 bp, Homo sapien
ttataaccatacttaacccaactga

SEQ ID NO: 5279549 - DNA, 25 bp, Homo sapien
catgttggagttgttataaccatac

SEQ ID NO: 5279550 - DNA, 25 bp, Homo sapien
ttaacccaactgacacatcttccag

SEQ ID NO: 5279551 - DNA, 25 bp, Homo sapien
tagtaagcggcagaaagagtgggca

SEQ ID NO: 5279552 - DNA, 25 bp, Homo sapien
agcagcacaaggatccaagaagtca

SEQ ID NO: 5279553 - DNA, 25 bp, Homo sapien
tctgtggtttttttagtaagcggca

SEQ ID NO: 5279554 - DNA, 25 bp, Homo sapien
gaaatacactgttggcagcagcaca

SEQ ID NO: 5279555 - DNA, 25 bp, Homo sapien
tgttgctgagatcccagcccatgct

SEQ ID NO: 5279556 - DNA, 25 bp, Homo sapien
tcccagcccatgctggcctgaagct

SEQ ID NO: 5279557 - DNA, 25 bp, Homo sapien
cccatgctggcctgaagcttgatac

SEQ ID NO: 5279558 - DNA, 25 bp, Homo sapien
ctgttgctgagatcccagcccatgc

SEQ ID NO: 5279559 - DNA, 25 bp, Homo sapien
ccatcaaattctgctgtcccagcat

SEQ ID NO: 5279560 - DNA, 25 bp, Homo sapien
tttcatccaagctgaggcattcaag

SEQ ID NO: 5279561 - DNA, 25 bp, Homo sapien
gctctggtaattcagtccactaatg

SEQ ID NO: 5279562 - DNA, 25 bp, Homo sapien
tgcggcagtcttggtctacaacaag

SEQ ID NO: 5279563 - DNA, 25 bp, Homo sapien
caaaaatatcaatgcagatggctct

SEQ ID NO: 5279564 - DNA, 25 bp, Homo sapien
ccaaaaatatcaatgcagatggctc

SEQ ID NO: 5279565 - DNA, 25 bp, Homo sapien
tggtgtatggttcgtttttcctgca

SEQ ID NO: 5279566 - DNA, 25 bp, Homo sapien
catgcaatcctggtgtatggttcgt

SEQ ID NO: 5279567 - DNA, 25 bp, Homo sapien
tcgtttttcctgcatgaggcaaccc

SEQ ID NO: 5279568 - DNA, 25 bp, Homo sapien
tgaggcaacccagctctttggatat

SEQ ID NO: 5279569 - DNA, 25 bp, Homo sapien
gtgactgtgttctgaacactgcttc

SEQ ID NO: 5279570 - DNA, 25 bp, Homo sapien
tgtgactgtgttctgaacactgctt

SEQ ID NO: 5279571 - DNA, 25 bp, Homo sapien
tgactgtgttctgaacactgcttct

SEQ ID NO: 5279572 - DNA, 25 bp, Homo sapien
tagtactccgccagttgtctgggca

SEQ ID NO: 5279573 - DNA, 25 bp, Homo sapien
tgcacgtagtactccgccagttgtc

SEQ ID NO: 5279574 - DNA, 25 bp, Homo sapien
tgcagagcacgggattgttctgcac

SEQ ID NO: 5279575 - DNA, 25 bp, Homo sapien
cgggattgttctgcacgtagtactc

SEQ ID NO: 5279576 - DNA, 25 bp, Homo sapien
agactatgtcatggcgtgctctctc

SEQ ID NO: 5279577 - DNA, 25 bp, Homo sapien
tttccactagaaagactatgtcatg

SEQ ID NO: 5279578 - DNA, 25 bp, Homo sapien
ttgaagtcatcatatgacgtggact

SEQ ID NO: 5279579 - DNA, 25 bp, Homo sapien
gtcatcatatgacgtggactccata

SEQ ID NO: 5279580 - DNA, 25 bp, Homo sapien
acctgtgcctcttcacatgcctggc

SEQ ID NO: 5279581 - DNA, 25 bp, Homo sapien
tgtgcctcttcacatgcctggctgg

SEQ ID NO: 5279582 - DNA, 25 bp, Homo sapien
ctaaacacctgtgcctcttcacatg

SEQ ID NO: 5279583 - DNA, 25 bp, Homo sapien
ctctaaacacctgtgcctcttcaca

SEQ ID NO: 5279584 - DNA, 25 bp, Homo sapien
ttcagggctacttgaaaagctttat

SEQ ID NO: 5279585 - DNA, 25 bp, Homo sapien
tatttgcattccctgaagtttgaag

SEQ ID NO: 5279586 - DNA, 25 bp, Homo sapien
ttgcattccctgaagtttgaaggac

SEQ ID NO: 5279587 - DNA, 25 bp, Homo sapien
gctttatttgcattccctgaagttt

SEQ ID NO: 5279588 - DNA, 25 bp, Homo sapien
ccttggcatctaggattccctggag

SEQ ID NO: 5279589 - DNA, 25 bp, Homo sapien
cctgtttgttagaggagccaaggca

SEQ ID NO: 5279590 - DNA, 25 bp, Homo sapien
gctggcttgtgtagctcccttggca

SEQ ID NO: 5279591 - DNA, 25 bp, Homo sapien
gagtcctgcccattcagtaatgcca

SEQ ID NO: 5279592 - DNA, 25 bp, Homo sapien
ttttgtgccgattacaaagccccac

SEQ ID NO: 5279593 - DNA, 25 bp, Homo sapien
gccccacattctctatgatgttttc

SEQ ID NO: 5279594 - DNA, 25 bp, Homo sapien
caaaattttgtgccgattacaaagc

SEQ ID NO: 5279595 - DNA, 25 bp, Homo sapien
cccacattctctatgatgttttctt

SEQ ID NO: 5279596 - DNA, 25 bp, Homo sapien
caagcttttggctgattgaggatgc

SEQ ID NO: 5279597 - DNA, 25 bp, Homo sapien
tccggtggtaggcaagcttttggct

SEQ ID NO: 5279598 - DNA, 25 bp, Homo sapien
tgaggatgcctctgttccatgggca

SEQ ID NO: 5279599 - DNA, 25 bp, Homo sapien
taacttgtccggtggtaggcaagct

SEQ ID NO: 5279600 - DNA, 25 bp, Homo sapien
agaggcagcaaaaggaatgacagca

SEQ ID NO: 5279601 - DNA, 25 bp, Homo sapien
cctgcccttgaaggtgtatctgtca

SEQ ID NO: 5279602 - DNA, 25 bp, Homo sapien
ccttgaaggtgtatctgtcagaggc

SEQ ID NO: 5279603 - DNA, 25 bp, Homo sapien
ggaatgacagcacaggctcctaagg

SEQ ID NO: 5279604 - DNA, 25 bp, Homo sapien
gagttttggatccaaaggtatcctg

SEQ ID NO: 5279605 - DNA, 25 bp, Homo sapien
aaccagatgcttatttctggttgaa

SEQ ID NO: 5279606 - DNA, 25 bp, Homo sapien
tgggcataggctgaaaaaagcccaa

SEQ ID NO: 5279607 - DNA, 25 bp, Homo sapien
tggtgtttggattcaaccagatgct

SEQ ID NO: 5279608 - DNA, 25 bp, Homo sapien
gtgttgcaggaagaatgagcgctgc

SEQ ID NO: 5279609 - DNA, 25 bp, Homo sapien
aggtgttgcaggaagaatgagcgct

SEQ ID NO: 5279610 - DNA, 25 bp, Homo sapien
gctgctatagatgcaaaagtgtgcc

SEQ ID NO: 5279611 - DNA, 25 bp, Homo sapien
atagatgcaaaagtgtgcctgcagc

SEQ ID NO: 5279612 - DNA, 25 bp, Homo sapien
cagccagcacgtgccatgaatccct

SEQ ID NO: 5279613 - DNA, 25 bp, Homo sapien
gtccctgtctgttcaaccatcttga

SEQ ID NO: 5279614 - DNA, 25 bp, Homo sapien
tcaaccatcttgattggaacatccg

SEQ ID NO: 5279615 - DNA, 25 bp, Homo sapien
ccgttgtgtagtcaagaatcctggc

SEQ ID NO: 5279616 - DNA, 25 bp, Homo sapien
actggtagtcatacaaggccccgag

SEQ ID NO: 5279617 - DNA, 25 bp, Homo sapien
gtagtcatacaaggccccgagtgcc

SEQ ID NO: 5279618 - DNA, 25 bp, Homo sapien
tgcagaccactggtagtcatacaag

SEQ ID NO: 5279619 - DNA, 25 bp, Homo sapien
gaccactggtagtcatacaaggccc

SEQ ID NO: 5279620 - DNA, 25 bp, Homo sapien
tgtgctcctgaccaataaaaatccc

SEQ ID NO: 5279621 - DNA, 25 bp, Homo sapien
taaaaatcccactcggcgggtcaca

SEQ ID NO: 5279622 - DNA, 25 bp, Homo sapien
caggttgggctaactctcttcaggc

SEQ ID NO: 5279623 - DNA, 25 bp, Homo sapien
taagaatcctaaaagcgacccactg

SEQ ID NO: 5279624 - DNA, 25 bp, Homo sapien
catctctttcatggacatgtggacc

SEQ ID NO: 5279625 - DNA, 25 bp, Homo sapien
gccaatcagcaacatagctgctgtg

SEQ ID NO: 5279626 - DNA, 25 bp, Homo sapien
gccatcattaggtagcaaccatggt

SEQ ID NO: 5279627 - DNA, 25 bp, Homo sapien
gatgtcacagacaaccaatttcaca

SEQ ID NO: 5279628 - DNA, 25 bp, Homo sapien
gagtgaccccactcctggtgggaga

SEQ ID NO: 5279629 - DNA, 25 bp, Homo sapien
gggagtgaccccactcctggtggga

SEQ ID NO: 5279630 - DNA, 25 bp, Homo sapien
agtgaccccactcctggtgggagaa

SEQ ID NO: 5279631 - DNA, 25 bp, Homo sapien
tgaccccactcctggtgggagaaac

SEQ ID NO: 5279632 - DNA, 25 bp, Homo sapien
tccttcctcgcaacatccatcactg

SEQ ID NO: 5279633 - DNA, 25 bp, Homo sapien
tcctcgcaacatccatcactgactc

SEQ ID NO: 5279634 - DNA, 25 bp, Homo sapien
tcttagcctccttcctcgcaacatc

SEQ ID NO: 5279635 - DNA, 25 bp, Homo sapien
gaaggcactcacagctcttagcctc

SEQ ID NO: 5279636 - DNA, 25 bp, Homo sapien
ctagtgtgccttggcccggttgttc

SEQ ID NO: 5279637 - DNA, 25 bp, Homo sapien
tgtgccttggcccggttgttcgctg

SEQ ID NO: 5279638 - DNA, 25 bp, Homo sapien
ttggcccggttgttcgctgcaccac

SEQ ID NO: 5279639 - DNA, 25 bp, Homo sapien
tgccttggcccggttgttcgctgca

SEQ ID NO: 5279640 - DNA, 25 bp, Homo sapien
gattcgcccgaagggcacagagtcc

SEQ ID NO: 5279641 - DNA, 25 bp, Homo sapien
tgtccggcctgaagattcgcccgaa

SEQ ID NO: 5279642 - DNA, 25 bp, Homo sapien
aagttgtccggcctgaagattcgcc

SEQ ID NO: 5279643 - DNA, 25 bp, Homo sapien
ggcctgaagattcgcccgaagggca

SEQ ID NO: 5279644 - DNA, 25 bp, Homo sapien
aacactggttgctctaggctgggac

SEQ ID NO: 5279645 - DNA, 25 bp, Homo sapien
ccactgttctcggatgttaggtcag

SEQ ID NO: 5279646 - DNA, 25 bp, Homo sapien
gcttcttaaccctgacacagctcat

SEQ ID NO: 5279647 - DNA, 25 bp, Homo sapien
gtctagtgagtcttgtgtcagctgc

SEQ ID NO: 5279648 - DNA, 25 bp, Homo sapien
cagcaaacgccagaaattgtggagt

SEQ ID NO: 5279649 - DNA, 25 bp, Homo sapien
ttagtaatcagcaaacgccagaaat

SEQ ID NO: 5279650 - DNA, 25 bp, Homo sapien
ggagtctgtcctatccacagtaggg

SEQ ID NO: 5279651 - DNA, 25 bp, Homo sapien
gccagaaattgtggagtctgtccta

SEQ ID NO: 5279652 - DNA, 25 bp, Homo sapien
ctaggttttgatctttctcctggtt

SEQ ID NO: 5279653 - DNA, 25 bp, Homo sapien
gaatcttcgggaccttgtatttgta

SEQ ID NO: 5279654 - DNA, 25 bp, Homo sapien
tattagatccctcgctgaaccttcc

SEQ ID NO: 5279655 - DNA, 25 bp, Homo sapien
ccccttttctgactgtcaaaatgtg

SEQ ID NO: 5279656 - DNA, 25 bp, Homo sapien
ccttcttgagtacctttttcttcat

SEQ ID NO: 5279657 - DNA, 25 bp, Homo sapien
tttggatagtcttgtatctcttgga

SEQ ID NO: 5279658 - DNA, 25 bp, Homo sapien
ctcctctatcacttgaaattttatc

SEQ ID NO: 5279659 - DNA, 25 bp, Homo sapien
cctctatcacttgaaattttatctg

SEQ ID NO: 5279660 - DNA, 25 bp, Homo sapien
tctttttggatagtcttgtatctct

SEQ ID NO: 5279661 - DNA, 25 bp, Homo sapien
agaaccactcaagacagatatttgc

SEQ ID NO: 5279662 - DNA, 25 bp, Homo sapien
ggaaggatattccagcttttcacag

SEQ ID NO: 5279663 - DNA, 25 bp, Homo sapien
gcttttcacagaaccactcaagaca

SEQ ID NO: 5279664 - DNA, 25 bp, Homo sapien
cagatatttgctaagcttaaaggtt

SEQ ID NO: 5279665 - DNA, 25 bp, Homo sapien
cctgccaagggtgaccctctttctt

SEQ ID NO: 5279666 - DNA, 25 bp, Homo sapien
tctccctgccaagggtgaccctctt

SEQ ID NO: 5279667 - DNA, 25 bp, Homo sapien
caagggtgaccctctttcttcagct

SEQ ID NO: 5279668 - DNA, 25 bp, Homo sapien
ccaagggtgaccctctttcttcagc

SEQ ID NO: 5279669 - DNA, 25 bp, Homo sapien
gctggcatagaagaaggctcatact

SEQ ID NO: 5279670 - DNA, 25 bp, Homo sapien
ggctcatactcctaaagacatgcaa

SEQ ID NO: 5279671 - DNA, 25 bp, Homo sapien
agtcggatctcagcatactcaaggg

SEQ ID NO: 5279672 - DNA, 25 bp, Homo sapien
tattgacatcggtgcatgaacctga

SEQ ID NO: 5279673 - DNA, 25 bp, Homo sapien
cacacatacatgagggccccaattg

SEQ ID NO: 5279674 - DNA, 25 bp, Homo sapien
gtggccacacacatacatgagggcc

SEQ ID NO: 5279675 - DNA, 25 bp, Homo sapien
agtggccacacacatacatgagggc

SEQ ID NO: 5279676 - DNA, 25 bp, Homo sapien
atacatgagggccccaattgggtca

SEQ ID NO: 5279677 - DNA, 25 bp, Homo sapien
gcaaatggcagttgattccccagtc

SEQ ID NO: 5279678 - DNA, 25 bp, Homo sapien
caaatggcagttgattccccagtct

SEQ ID NO: 5279679 - DNA, 25 bp, Homo sapien
agcaaatggcagttgattccccagt

SEQ ID NO: 5279680 - DNA, 25 bp, Homo sapien
ggggtaaaccctatagcaaatggca

SEQ ID NO: 5279681 - DNA, 25 bp, Homo sapien
aataaaactgattgccatggagggc

SEQ ID NO: 5279682 - DNA, 25 bp, Homo sapien
ggacacccgcacagctttgaatgag

SEQ ID NO: 5279683 - DNA, 25 bp, Homo sapien
taaaaactgcatataagggcctgga

SEQ ID NO: 5279684 - DNA, 25 bp, Homo sapien
tgagaaacgtgtgggctggactccc

SEQ ID NO: 5279685 - DNA, 25 bp, Homo sapien
gcaccaagcttgatactgaaaacag

SEQ ID NO: 5279686 - DNA, 25 bp, Homo sapien
caagcagataccagggtggctttca

SEQ ID NO: 5279687 - DNA, 25 bp, Homo sapien
gtaggtacccactgttcatctgatg

SEQ ID NO: 5279688 - DNA, 25 bp, Homo sapien
tgttaccctagtctgggagtgcccc

SEQ ID NO: 5279689 - DNA, 25 bp, Homo sapien
caatgcagcacccaatctgactgaa

SEQ ID NO: 5279690 - DNA, 25 bp, Homo sapien
ttattccagagacaaccccaaaatg

SEQ ID NO: 5279691 - DNA, 25 bp, Homo sapien
gaacaaagtccaggagaacctctac

SEQ ID NO: 5279692 - DNA, 25 bp, Homo sapien
tctgactgaacctccaccaatagct

SEQ ID NO: 5279693 - DNA, 25 bp, Homo sapien
gaatgtcaccctcctcgaccaaacg

SEQ ID NO: 5279694 - DNA, 25 bp, Homo sapien
ctcgaccaaacgcacagcttccgga

SEQ ID NO: 5279695 - DNA, 25 bp, Homo sapien
gagtcaaccctggttatcatggggt

SEQ ID NO: 5279696 - DNA, 25 bp, Homo sapien
ccctcctcgaccaaacgcacagctt

SEQ ID NO: 5279697 - DNA, 25 bp, Homo sapien
taattataagcctgacaaccacatg

SEQ ID NO: 5279698 - DNA, 25 bp, Homo sapien
tggcatgcacagtttctaatgagaa

SEQ ID NO: 5279699 - DNA, 25 bp, Homo sapien
tacttttgaatatgcagtaaacccc

SEQ ID NO: 5279700 - DNA, 25 bp, Homo sapien
gatatcactccatcgtcttctggca

SEQ ID NO: 5279701 - DNA, 25 bp, Homo sapien
taacgtgaactccatgttgactctg

SEQ ID NO: 5279702 - DNA, 25 bp, Homo sapien
ggcacagtgcttgtaccaatagatt

SEQ ID NO: 5279703 - DNA, 25 bp, Homo sapien
gacaactttaatgggtcaggaacca

SEQ ID NO: 5279704 - DNA, 25 bp, Homo sapien
taccaagtgttctcagggaaaattc

SEQ ID NO: 5279705 - DNA, 25 bp, Homo sapien
gaatatcttctccatcaggagagct

SEQ ID NO: 5279706 - DNA, 25 bp, Homo sapien
tatggacaaatcaaacaggagcccc

SEQ ID NO: 5279707 - DNA, 25 bp, Homo sapien
tcaggagagctgctcatcaatctct

SEQ ID NO: 5279708 - DNA, 25 bp, Homo sapien
aacattgataaatcctcttggtttc

SEQ ID NO: 5279709 - DNA, 25 bp, Homo sapien
ctggctcacactctcgctgttgttt

SEQ ID NO: 5279710 - DNA, 25 bp, Homo sapien
tgcatgcttctgcacatgtgcagtc

SEQ ID NO: 5279711 - DNA, 25 bp, Homo sapien
cttctgcacatgtgcagtctctgtg

SEQ ID NO: 5279712 - DNA, 25 bp, Homo sapien
gcagctgcatttccccactccacca

SEQ ID NO: 5279713 - DNA, 25 bp, Homo sapien
cagacacatcagaatcttttaagat

SEQ ID NO: 5279714 - DNA, 25 bp, Homo sapien
tttggaactatccagaagacagaca

SEQ ID NO: 5279715 - DNA, 25 bp, Homo sapien
atatgctggatctgttatttggaac

SEQ ID NO: 5279716 - DNA, 25 bp, Homo sapien
ttagacagcacagtcagaactctgc

SEQ ID NO: 5279717 - DNA, 25 bp, Homo sapien
ccaagggcagggattagtagcatta

SEQ ID NO: 5279718 - DNA, 25 bp, Homo sapien
tcatctgaatcatcggtatccaagg

SEQ ID NO: 5279719 - DNA, 25 bp, Homo sapien
gatagccgtcagctttttccaactt

SEQ ID NO: 5279720 - DNA, 25 bp, Homo sapien
tagtagcattaggatagccgtcagc

SEQ ID NO: 5279721 - DNA, 25 bp, Homo sapien
acctcagatccactgtggctccaag

SEQ ID NO: 5279722 - DNA, 25 bp, Homo sapien
actgtggctccaaggtgtaaggcac

SEQ ID NO: 5279723 - DNA, 25 bp, Homo sapien
gatccactgtggctccaaggtgtaa

SEQ ID NO: 5279724 - DNA, 25 bp, Homo sapien
cctcagatccactgtggctccaagg

SEQ ID NO: 5279725 - DNA, 25 bp, Homo sapien
caaggctcattattgggctctgaac

SEQ ID NO: 5279726 - DNA, 25 bp, Homo sapien
tgcttccttgaaaattacccaaggc

SEQ ID NO: 5279727 - DNA, 25 bp, Homo sapien
tacccaaggctcattattgggctct

SEQ ID NO: 5279728 - DNA, 25 bp, Homo sapien
gaaaattacccaaggctcattattg

SEQ ID NO: 5279729 - DNA, 25 bp, Homo sapien
aatccaattaactgatactgcctgg

SEQ ID NO: 5279730 - DNA, 25 bp, Homo sapien
accagtgagaagttaaagggataga

SEQ ID NO: 5279731 - DNA, 25 bp, Homo sapien
gataaaatccaattaactgatactg

SEQ ID NO: 5279732 - DNA, 25 bp, Homo sapien
attaactgatactgcctggtctctg

SEQ ID NO: 5279733 - DNA, 25 bp, Homo sapien
aactgaaggctcggtttatggccat

SEQ ID NO: 5279734 - DNA, 25 bp, Homo sapien
aaactgaaggctcggtttatggcca

SEQ ID NO: 5279735 - DNA, 25 bp, Homo sapien
taaaactgaaggctcggtttatggc

SEQ ID NO: 5279736 - DNA, 25 bp, Homo sapien
aataaaactgaaggctcggtttatg

SEQ ID NO: 5279737 - DNA, 25 bp, Homo sapien
tccggagcacaggtgtatgcagaac

SEQ ID NO: 5279738 - DNA, 25 bp, Homo sapien
tatgcagaacaaccatggtcctggg

SEQ ID NO: 5279739 - DNA, 25 bp, Homo sapien
tgcaagatagcctgtcactgtggtg

SEQ ID NO: 5279740 - DNA, 25 bp, Homo sapien
caaagcaagggtctagagtgcaaac

SEQ ID NO: 5279741 - DNA, 25 bp, Homo sapien
taataaacacattgtcctcagacca

SEQ ID NO: 5279742 - DNA, 25 bp, Homo sapien
tcagaccacaaggatagttatccca

SEQ ID NO: 5279743 - DNA, 25 bp, Homo sapien
tggctaagggtggttcccaagatag

SEQ ID NO: 5279744 - DNA, 25 bp, Homo sapien
caaatgtatcagcataagtgtcacc

SEQ ID NO: 5279745 - DNA, 25 bp, Homo sapien
tgttgtcttagttgacagtgaggcc

SEQ ID NO: 5279746 - DNA, 25 bp, Homo sapien
agagtactccctgcgtagcctttcg

SEQ ID NO: 5279747 - DNA, 25 bp, Homo sapien
tgaggcctcctcgtcacaaagtgga

SEQ ID NO: 5279748 - DNA, 25 bp, Homo sapien
tagcctttcgcatacacagtcacac

SEQ ID NO: 5279749 - DNA, 25 bp, Homo sapien
gaggttgagctcctgacagttaagg

SEQ ID NO: 5279750 - DNA, 25 bp, Homo sapien
tccttagaacgtgattggtgacaac

SEQ ID NO: 5279751 - DNA, 25 bp, Homo sapien
gagtagaggcgaagatgctttccac

SEQ ID NO: 5279752 - DNA, 25 bp, Homo sapien
catgaagtgccctttgtccacggac

SEQ ID NO: 5279753 - DNA, 25 bp, Homo sapien
ccttcagcatgtacttgccttgact

SEQ ID NO: 5279754 - DNA, 25 bp, Homo sapien
acttgttcctgatgtctagtccagg

SEQ ID NO: 5279755 - DNA, 25 bp, Homo sapien
cttcagcatgtacttgccttgactt

SEQ ID NO: 5279756 - DNA, 25 bp, Homo sapien
tgtctagtccaggtattacaatcct

SEQ ID NO: 5279757 - DNA, 25 bp, Homo sapien
gctgtagggtgtactgattactgga

SEQ ID NO: 5279758 - DNA, 25 bp, Homo sapien
aaccgtagtggctcatggtaaacca

SEQ ID NO: 5279759 - DNA, 25 bp, Homo sapien
ctcagggcctgatggtgaccaaacc

SEQ ID NO: 5279760 - DNA, 25 bp, Homo sapien
gagctgtagggtgtactgattactg

SEQ ID NO: 5279761 - DNA, 25 bp, Homo sapien
aaccattcttgttgcactaatgcca

SEQ ID NO: 5279762 - DNA, 25 bp, Homo sapien
ctcttgcataaaggaaagcttcttg

SEQ ID NO: 5279763 - DNA, 25 bp, Homo sapien
ggtttcccaaagtccatctctatca

SEQ ID NO: 5279764 - DNA, 25 bp, Homo sapien
ggttgccagggtaacaataatcttc

SEQ ID NO: 5279765 - DNA, 25 bp, Homo sapien
ctctttctggtgacaagcaccagga

SEQ ID NO: 5279766 - DNA, 25 bp, Homo sapien
gctattcagtttgctgaggacccag

SEQ ID NO: 5279767 - DNA, 25 bp, Homo sapien
ctattcagtttgctgaggacccagc

SEQ ID NO: 5279768 - DNA, 25 bp, Homo sapien
gcccttctccattgcaatgtatgat

SEQ ID NO: 5279769 - DNA, 25 bp, Homo sapien
gttctgagtaatgcctgagacttgc

SEQ ID NO: 5279770 - DNA, 25 bp, Homo sapien
aatgtatgatctgacaaagggaaag

SEQ ID NO: 5279771 - DNA, 25 bp, Homo sapien
ggatctcccacatccgctgtggttc

SEQ ID NO: 5279772 - DNA, 25 bp, Homo sapien
catattccaaatcaagagattgtac

SEQ ID NO: 5279773 - DNA, 25 bp, Homo sapien
acaggcaaggtacataaggcttccc

SEQ ID NO: 5279774 - DNA, 25 bp, Homo sapien
cattcataaaatgcgcacatattcc

SEQ ID NO: 5279775 - DNA, 25 bp, Homo sapien
aatcaagagattgtacttaaaacca

SEQ ID NO: 5279776 - DNA, 25 bp, Homo sapien
aactgatgtacccagtgaccaccat

SEQ ID NO: 5279777 - DNA, 25 bp, Homo sapien
cttttgaggtataggagcagagagt

SEQ ID NO: 5279778 - DNA, 25 bp, Homo sapien
tctgtacaactgatgtacccagtga

SEQ ID NO: 5279779 - DNA, 25 bp, Homo sapien
gagggagcccctgagatgtttccac

SEQ ID NO: 5279780 - DNA, 25 bp, Homo sapien
tgaacgttgtgctgaggtgcctctg

SEQ ID NO: 5279781 - DNA, 25 bp, Homo sapien
ctgatgaacgttgtgctgaggtgcc

SEQ ID NO: 5279782 - DNA, 25 bp, Homo sapien
agaaggtctggctgatgaacgttgt

SEQ ID NO: 5279783 - DNA, 25 bp, Homo sapien
gatgaacgttgtgctgaggtgcctc

SEQ ID NO: 5279784 - DNA, 25 bp, Homo sapien
cactgggctatgatcccacaaatca

SEQ ID NO: 5279785 - DNA, 25 bp, Homo sapien
actgggctatgatcccacaaatcat

SEQ ID NO: 5279786 - DNA, 25 bp, Homo sapien
ttctttatcattgtgaatttcctga

SEQ ID NO: 5279787 - DNA, 25 bp, Homo sapien
ttgtgaatttcctgatttcctatgg

SEQ ID NO: 5279788 - DNA, 25 bp, Homo sapien
gtgaatttcctgatttcctatgggc

SEQ ID NO: 5279789 - DNA, 25 bp, Homo sapien
aatttcctgatttcctatgggctca

SEQ ID NO: 5279790 - DNA, 25 bp, Homo sapien
taaaagagatagctgaccatcccca

SEQ ID NO: 5279791 - DNA, 25 bp, Homo sapien
taagcaagccatgctcaacggtagt

SEQ ID NO: 5279792 - DNA, 25 bp, Homo sapien
ccagagtgagacctctaacactggg

SEQ ID NO: 5279793 - DNA, 25 bp, Homo sapien
tagtgtgctcatgaacatttgcccc

SEQ ID NO: 5279794 - DNA, 25 bp, Homo sapien
ggccaaagagaatgctaattggaaa

SEQ ID NO: 5279795 - DNA, 25 bp, Homo sapien
ggaaagtgttgcacatctccaagag

SEQ ID NO: 5279796 - DNA, 25 bp, Homo sapien
gagaatgctaattggaaagtgttgc

SEQ ID NO: 5279797 - DNA, 25 bp, Homo sapien
aagtgttgcacatctccaagagcac

SEQ ID NO: 5279798 - DNA, 25 bp, Homo sapien
ctattcctggactcctgtcctgttt

SEQ ID NO: 5279799 - DNA, 25 bp, Homo sapien
tattcctggactcctgtcctgtttt

SEQ ID NO: 5279800 - DNA, 25 bp, Homo sapien
atgattagatattccattctcccct

SEQ ID NO: 5279801 - DNA, 25 bp, Homo sapien
gcagttctcaatgtgagagaattca

SEQ ID NO: 5279802 - DNA, 25 bp, Homo sapien
tccacagtccatgagtttaaggcca

SEQ ID NO: 5279803 - DNA, 25 bp, Homo sapien
tttattgtagcagatggtaccatgc

SEQ ID NO: 5279804 - DNA, 25 bp, Homo sapien
tcaataattctgctactggagaatg

SEQ ID NO: 5279805 - DNA, 25 bp, Homo sapien
gctcaataattctgctactggagaa

SEQ ID NO: 5279806 - DNA, 25 bp, Homo sapien
attctgctactggagaatgactcac

SEQ ID NO: 5279807 - DNA, 25 bp, Homo sapien
taattctgctactggagaatgactc

SEQ ID NO: 5279808 - DNA, 25 bp, Homo sapien
tgaactgccagtgacttttccaggt

SEQ ID NO: 5279809 - DNA, 25 bp, Homo sapien
ttccaggtgttctgttaaattcacg

SEQ ID NO: 5279810 - DNA, 25 bp, Homo sapien
ttgaactgccagtgacttttccagg

SEQ ID NO: 5279811 - DNA, 25 bp, Homo sapien
tgttctgttaaattcacgggaacca

SEQ ID NO: 5279812 - DNA, 25 bp, Homo sapien
tctggctgattggaggctgtgctgc

SEQ ID NO: 5279813 - DNA, 25 bp, Homo sapien
tgagaaaggtaagtgcggacagcag

SEQ ID NO: 5279814 - DNA, 25 bp, Homo sapien
accttcatacaatcttctgagaaag

SEQ ID NO: 5279815 - DNA, 25 bp, Homo sapien
ttttcaccttcatacaatcttctga

SEQ ID NO: 5279816 - DNA, 25 bp, Homo sapien
agaaaggtaagtgcggacagcagac

SEQ ID NO: 5279817 - DNA, 25 bp, Homo sapien
ggcacagcacaatgtggccaaaacc

SEQ ID NO: 5279818 - DNA, 25 bp, Homo sapien
aatgactctcattagctactgaatt

SEQ ID NO: 5279819 - DNA, 25 bp, Homo sapien
aaccaataattgtagccttatctcc

SEQ ID NO: 5279820 - DNA, 25 bp, Homo sapien
ttgtagccttatctccagccattcc

SEQ ID NO: 5279821 - DNA, 25 bp, Homo sapien
tggctctgtgctttggccgatcttg

SEQ ID NO: 5279822 - DNA, 25 bp, Homo sapien
ttggctctgtgctttggccgatctt

SEQ ID NO: 5279823 - DNA, 25 bp, Homo sapien
ttgtccattcagcattcccgaacat

SEQ ID NO: 5279824 - DNA, 25 bp, Homo sapien
gctctgtgctttggccgatcttgtc

SEQ ID NO: 5279825 - DNA, 25 bp, Homo sapien
actgaatttgtttgtcatatctagg

SEQ ID NO: 5279826 - DNA, 25 bp, Homo sapien
tttgtttgtcatatctaggagcttt

SEQ ID NO: 5279827 - DNA, 25 bp, Homo sapien
tccttctcttgtaggattgctctgg

SEQ ID NO: 5279828 - DNA, 25 bp, Homo sapien
gttgttggtgtatagccaactactg

SEQ ID NO: 5279829 - DNA, 25 bp, Homo sapien
tttccatgagaggatgtccataatt

SEQ ID NO: 5279830 - DNA, 25 bp, Homo sapien
ggatgtccataattgtcggttacgg

SEQ ID NO: 5279831 - DNA, 25 bp, Homo sapien
tgagaggatgtccataattgtcggt

SEQ ID NO: 5279832 - DNA, 25 bp, Homo sapien
tgtccataattgtcggttacggtcc

SEQ ID NO: 5279833 - DNA, 25 bp, Homo sapien
gccccacaccgttaagaagatgatt

SEQ ID NO: 5279834 - DNA, 25 bp, Homo sapien
ccacaccgttaagaagatgattatg

SEQ ID NO: 5279835 - DNA, 25 bp, Homo sapien
ccctgccccacaccgttaagaagat

SEQ ID NO: 5279836 - DNA, 25 bp, Homo sapien
caccgttaagaagatgattatgtca

SEQ ID NO: 5279837 - DNA, 25 bp, Homo sapien
taatggactgaaaaccctagcgttc

SEQ ID NO: 5279838 - DNA, 25 bp, Homo sapien
gaacggctcatataccaccaagtgg

SEQ ID NO: 5279839 - DNA, 25 bp, Homo sapien
cataatcaagggtggtgaggatacc

SEQ ID NO: 5279840 - DNA, 25 bp, Homo sapien
gaaggtttgtctcaagaagtcagca

SEQ ID NO: 5279841 - DNA, 25 bp, Homo sapien
ctctctggagagtaatagaaccata

SEQ ID NO: 5279842 - DNA, 25 bp, Homo sapien
tcagaaggaagaggtagaccaaggc

SEQ ID NO: 5279843 - DNA, 25 bp, Homo sapien
gcaacaaggatgcactagaggcaga

SEQ ID NO: 5279844 - DNA, 25 bp, Homo sapien
agcagaactgcgtctctcttggcaa

SEQ ID NO: 5279845 - DNA, 25 bp, Homo sapien
tgaagaaacgttcgtccatgtattc

SEQ ID NO: 5279846 - DNA, 25 bp, Homo sapien
ctgaagaaacgttcgtccatgtatt

SEQ ID NO: 5279847 - DNA, 25 bp, Homo sapien
caaattatcccttcctgttaacaga

SEQ ID NO: 5279848 - DNA, 25 bp, Homo sapien
tggaataccctagacacacatagcc

SEQ ID NO: 5279849 - DNA, 25 bp, Homo sapien
tagtaactgcctgctgattcaagtc

SEQ ID NO: 5279850 - DNA, 25 bp, Homo sapien
tagccatgtctcacaacacaggatg

SEQ ID NO: 5279851 - DNA, 25 bp, Homo sapien
taacttgaattgactgaggcccaca

SEQ ID NO: 5279852 - DNA, 25 bp, Homo sapien
agaaggatattaccagtttccccag

SEQ ID NO: 5279853 - DNA, 25 bp, Homo sapien
gaacctgaagtatcaatcgcccact

SEQ ID NO: 5279854 - DNA, 25 bp, Homo sapien
tggattgtacaaaacagggcctcac

SEQ ID NO: 5279855 - DNA, 25 bp, Homo sapien
aatggtgcatcgctatcagcaaccc

SEQ ID NO: 5279856 - DNA, 25 bp, Homo sapien
atggtgcatcgctatcagcaacccc

SEQ ID NO: 5279857 - DNA, 25 bp, Homo sapien
ttaatggtgcatcgctatcagcaac

SEQ ID NO: 5279858 - DNA, 25 bp, Homo sapien
ggttaatggtgcatcgctatcagca

SEQ ID NO: 5279859 - DNA, 25 bp, Homo sapien
tcttcaactgtgtagcagttgcaga

SEQ ID NO: 5279860 - DNA, 25 bp, Homo sapien
tcaactgtgtagcagttgcagattc

SEQ ID NO: 5279861 - DNA, 25 bp, Homo sapien
tagcagttgcagattctgctaaatg

SEQ ID NO: 5279862 - DNA, 25 bp, Homo sapien
actgtgtagcagttgcagattctgc

SEQ ID NO: 5279863 - DNA, 25 bp, Homo sapien
cctttctagtatgggaacttgtaca

SEQ ID NO: 5279864 - DNA, 25 bp, Homo sapien
tattccttgatgtgctagcatgtag

SEQ ID NO: 5279865 - DNA, 25 bp, Homo sapien
catagactgaagataggctttctgg

SEQ ID NO: 5279866 - DNA, 25 bp, Homo sapien
tatagtaattaagcacatagactga

SEQ ID NO: 5279867 - DNA, 25 bp, Homo sapien
ggatacatcttagggaaatctttga

SEQ ID NO: 5279868 - DNA, 25 bp, Homo sapien
atacatcttagggaaatctttgaac

SEQ ID NO: 5279869 - DNA, 25 bp, Homo sapien
ctggatacatcttagggaaatcttt

SEQ ID NO: 5279870 - DNA, 25 bp, Homo sapien
tacatcttagggaaatctttgaact

SEQ ID NO: 5279871 - DNA, 25 bp, Homo sapien
cattttactctatcgtacatttggc

SEQ ID NO: 5279872 - DNA, 25 bp, Homo sapien
actctatcgtacatttggctcttaa

SEQ ID NO: 5279873 - DNA, 25 bp, Homo sapien
ggaccattttactctatcgtacatt

SEQ ID NO: 5279874 - DNA, 25 bp, Homo sapien
tttactctatcgtacatttggctct

SEQ ID NO: 5279875 - DNA, 25 bp, Homo sapien
tcataactctgctctggggtcaaag

SEQ ID NO: 5279876 - DNA, 25 bp, Homo sapien
aactctgctctggggtcaaagatag

SEQ ID NO: 5279877 - DNA, 25 bp, Homo sapien
tctgctctggggtcaaagatagact

SEQ ID NO: 5279878 - DNA, 25 bp, Homo sapien
cataactctgctctggggtcaaaga

SEQ ID NO: 5279879 - DNA, 25 bp, Homo sapien
gcctactgcatgtcttaagcggtcg

SEQ ID NO: 5279880 - DNA, 25 bp, Homo sapien
cccaagctggaagaacatatatcca

SEQ ID NO: 5279881 - DNA, 25 bp, Homo sapien
tcttgacaaaccaatcctgattggc

SEQ ID NO: 5279882 - DNA, 25 bp, Homo sapien
ttgtttcagataaggatgaagttgt

SEQ ID NO: 5279883 - DNA, 25 bp, Homo sapien
ctcctctcaataaataattaaattc

SEQ ID NO: 5279884 - DNA, 25 bp, Homo sapien
taaattcttctttacattcatcagg

SEQ ID NO: 5279885 - DNA, 25 bp, Homo sapien
cttctttacattcatcagggagaaa

SEQ ID NO: 5279886 - DNA, 25 bp, Homo sapien
ttcttctttacattcatcagggaga

SEQ ID NO: 5279887 - DNA, 25 bp, Homo sapien
aataatgttctaaaatgaatttcat

SEQ ID NO: 5279888 - DNA, 25 bp, Homo sapien
taatgttctaaaatgaatttcatac

SEQ ID NO: 5279889 - DNA, 25 bp, Homo sapien
gaaataatgttctaaaatgaatttc

SEQ ID NO: 5279890 - DNA, 25 bp, Homo sapien
ctagcatgagaaataatgttctaaa

SEQ ID NO: 5279891 - DNA, 25 bp, Homo sapien
taggacctgctatagtatcatggaa

SEQ ID NO: 5279892 - DNA, 25 bp, Homo sapien
cagtactagaattatagtgagccca

SEQ ID NO: 5279893 - DNA, 25 bp, Homo sapien
tatgttgtggcttgctggtatggcc

SEQ ID NO: 5279894 - DNA, 25 bp, Homo sapien
tatcatggaacgaggaagatgcacg

SEQ ID NO: 5279895 - DNA, 25 bp, Homo sapien
aatatgtctaacgttacagtcccag

SEQ ID NO: 5279896 - DNA, 25 bp, Homo sapien
taccatttagccaaacagtcgttat

SEQ ID NO: 5279897 - DNA, 25 bp, Homo sapien
agtggtaatcttccttgcttaaaag

SEQ ID NO: 5279898 - DNA, 25 bp, Homo sapien
cagcctggtaagtacgtaactgtcc

SEQ ID NO: 5279899 - DNA, 25 bp, Homo sapien
tttgtgaaatccctaacatatgcct

SEQ ID NO: 5279900 - DNA, 25 bp, Homo sapien
catcaggtctattttgggaccagta

SEQ ID NO: 5279901 - DNA, 25 bp, Homo sapien
gagggacacttattgtgccgctatc

SEQ ID NO: 5279902 - DNA, 25 bp, Homo sapien
aaatagctaggtttggcaatttcca

SEQ ID NO: 5279903 - DNA, 25 bp, Homo sapien
cattcgttgaaacaaggagtccctt

SEQ ID NO: 5279904 - DNA, 25 bp, Homo sapien
tattactgcggtgcacactgaaagc

SEQ ID NO: 5279905 - DNA, 25 bp, Homo sapien
tatatcgtgtatagaggtgctgggc

SEQ ID NO: 5279906 - DNA, 25 bp, Homo sapien
gttgactaacccctgctttggagct

SEQ ID NO: 5279907 - DNA, 25 bp, Homo sapien
ttaaagacacctccaggctcctcaa

SEQ ID NO: 5279908 - DNA, 25 bp, Homo sapien
gacagagccgcttgctactaggtgg

SEQ ID NO: 5279909 - DNA, 25 bp, Homo sapien
tttttccgcctcagacaagcgaggc

SEQ ID NO: 5279910 - DNA, 25 bp, Homo sapien
aggcagtcgccagcccgccttaaag

SEQ ID NO: 5279911 - DNA, 25 bp, Homo sapien
tgaaagccactgactcaaggaatct

SEQ ID NO: 5279912 - DNA, 25 bp, Homo sapien
ccaatatttagcatgggacctacca

SEQ ID NO: 5279913 - DNA, 25 bp, Homo sapien
tgtaaaacaggatctaggaagcctc

SEQ ID NO: 5279914 - DNA, 25 bp, Homo sapien
tcagggtgaaaagcaacaagggcct

SEQ ID NO: 5279915 - DNA, 25 bp, Homo sapien
gagtgtcaccataactaccaaagag

SEQ ID NO: 5279916 - DNA, 25 bp, Homo sapien
ggcacctttccgcttattcatacta

SEQ ID NO: 5279917 - DNA, 25 bp, Homo sapien
ataaaatgtgtcaccaagtaacagc

SEQ ID NO: 5279918 - DNA, 25 bp, Homo sapien
tctctctggagaagattctatcata

SEQ ID NO: 5279919 - DNA, 25 bp, Homo sapien
gtgccaatagcctttcaaatgcaag

SEQ ID NO: 5279920 - DNA, 25 bp, Homo sapien
acatgtccagcagttaagtcaatcc

SEQ ID NO: 5279921 - DNA, 25 bp, Homo sapien
tatatgtgtaatccaagcacactgg

SEQ ID NO: 5279922 - DNA, 25 bp, Homo sapien
tgctggacctctccacctatatgtg

SEQ ID NO: 5279923 - DNA, 25 bp, Homo sapien
aatccagggtgtgaaagttgtagag

SEQ ID NO: 5279924 - DNA, 25 bp, Homo sapien
cgtaatctccgcttttttgtgatca

SEQ ID NO: 5279925 - DNA, 25 bp, Homo sapien
aggagcgcccggcagcgtaatctcc

SEQ ID NO: 5279926 - DNA, 25 bp, Homo sapien
taacgggacaactggtaaagctgat

SEQ ID NO: 5279927 - DNA, 25 bp, Homo sapien
ttcctaaacacaagttgcaagtaag

SEQ ID NO: 5279928 - DNA, 25 bp, Homo sapien
cacaagttgcaagtaagttatctaa

SEQ ID NO: 5279929 - DNA, 25 bp, Homo sapien
taaaatcgaacaccgccacgaaaga

SEQ ID NO: 5279930 - DNA, 25 bp, Homo sapien
agttatctaaaatcgaacaccgcca

SEQ ID NO: 5279931 - DNA, 25 bp, Homo sapien
ttctcgagagagaaactagaactca

SEQ ID NO: 5279932 - DNA, 25 bp, Homo sapien
gagaaatggcatcatgaccctttgg

SEQ ID NO: 5279933 - DNA, 25 bp, Homo sapien
gaccctttgggttgatgcagattac

SEQ ID NO: 5279934 - DNA, 25 bp, Homo sapien
ttacagtgcggaggctgttctcgag

SEQ ID NO: 5279935 - DNA, 25 bp, Homo sapien
gtgacttattcaggactgactcccc

SEQ ID NO: 5279936 - DNA, 25 bp, Homo sapien
agtgacttattcaggactgactccc

SEQ ID NO: 5279937 - DNA, 25 bp, Homo sapien
agtcttctttcggagatttctgcag

SEQ ID NO: 5279938 - DNA, 25 bp, Homo sapien
tcttctttcggagatttctgcagtt

SEQ ID NO: 5279939 - DNA, 25 bp, Homo sapien
tgggaagtcttctttcggagatttc

SEQ ID NO: 5279940 - DNA, 25 bp, Homo sapien
gaagtcttctttcggagatttctgc

SEQ ID NO: 5279941 - DNA, 25 bp, Homo sapien
tagccggactcccttttcctatata

SEQ ID NO: 5279942 - DNA, 25 bp, Homo sapien
ccaggttcggtaaccactgggcgtg

SEQ ID NO: 5279943 - DNA, 25 bp, Homo sapien
tggcgagtccgggtaacccgcagtc

SEQ ID NO: 5279944 - DNA, 25 bp, Homo sapien
agaaagcagcgggaaaagcggctcc

SEQ ID NO: 5279945 - DNA, 25 bp, Homo sapien
aggctcccgagttctcctagctggg

SEQ ID NO: 5279946 - DNA, 25 bp, Homo sapien
caggcggcttttggtcacaggctcc

SEQ ID NO: 5279947 - DNA, 25 bp, Homo sapien
tgcgccatcgccaggcggcttttgg

SEQ ID NO: 5279948 - DNA, 25 bp, Homo sapien
cggaaactccgagcccctccgactg

SEQ ID NO: 5279949 - DNA, 25 bp, Homo sapien
tgcctttgcattccgtgttcgccat

SEQ ID NO: 5279950 - DNA, 25 bp, Homo sapien
tgcattccgtgttcgccatccggaa

SEQ ID NO: 5279951 - DNA, 25 bp, Homo sapien
ctgcctttgcattccgtgttcgcca

SEQ ID NO: 5279952 - DNA, 25 bp, Homo sapien
ctttgcattccgtgttcgccatccg

SEQ ID NO: 5279953 - DNA, 25 bp, Homo sapien
gagttgccctcctgtccgtattttg

SEQ ID NO: 5279954 - DNA, 25 bp, Homo sapien
cattgcctgatcagtgccctgtgag

SEQ ID NO: 5279955 - DNA, 25 bp, Homo sapien
cctgtgagatgccagagtgggaatc

SEQ ID NO: 5279956 - DNA, 25 bp, Homo sapien
gaaatgatgagtgctccgcattgcc

SEQ ID NO: 5279957 - DNA, 25 bp, Homo sapien
tcctggaaatcctccagataaagcc

SEQ ID NO: 5279958 - DNA, 25 bp, Homo sapien
gccttcctggaaatcctccagataa

SEQ ID NO: 5279959 - DNA, 25 bp, Homo sapien
gaacccaaattagagatgcctgtct

SEQ ID NO: 5279960 - DNA, 25 bp, Homo sapien
tctggctcctaggaggcagaaccca

SEQ ID NO: 5279961 - DNA, 25 bp, Homo sapien
tatacccattcatatacccttgcag

SEQ ID NO: 5279962 - DNA, 25 bp, Homo sapien
cattcatatacccttgcagaatacc

SEQ ID NO: 5279963 - DNA, 25 bp, Homo sapien
tacccattcatatacccttgcagaa

SEQ ID NO: 5279964 - DNA, 25 bp, Homo sapien
tcatatacccttgcagaatacccat

SEQ ID NO: 5279965 - DNA, 25 bp, Homo sapien
gaagctattaattggagcttctcat

SEQ ID NO: 5279966 - DNA, 25 bp, Homo sapien
tctcgctttggagctattaatagct

SEQ ID NO: 5279967 - DNA, 25 bp, Homo sapien
ctactctctgtcttatctcgctttg

SEQ ID NO: 5279968 - DNA, 25 bp, Homo sapien
tgtgcccacatgtggacttgtttta

SEQ ID NO: 5279969 - DNA, 25 bp, Homo sapien
tcaactataattccaggagattcag

SEQ ID NO: 5279970 - DNA, 25 bp, Homo sapien
gcttatggggtgaaacctcaactat

SEQ ID NO: 5279971 - DNA, 25 bp, Homo sapien
cctgcccgctgggaaatgctgctgg

SEQ ID NO: 5279972 - DNA, 25 bp, Homo sapien
gaagctgcttttgtccccagacaca

SEQ ID NO: 5279973 - DNA, 25 bp, Homo sapien
tccgtcaagttaattatgccatggg

SEQ ID NO: 5279974 - DNA, 25 bp, Homo sapien
agagttttctgcctgattccgtcaa

SEQ ID NO: 5279975 - DNA, 25 bp, Homo sapien
aacatctgccaaacttagttgtgca

SEQ ID NO: 5279976 - DNA, 25 bp, Homo sapien
gccaaacttagttgtgcagagagtt

SEQ ID NO: 5279977 - DNA, 25 bp, Homo sapien
gaaatacatacgtaacttctctgct

SEQ ID NO: 5279978 - DNA, 25 bp, Homo sapien
cctatagagcccagaacccagattt

SEQ ID NO: 5279979 - DNA, 25 bp, Homo sapien
ttacgaaggaaaagggatatcaatg

SEQ ID NO: 5279980 - DNA, 25 bp, Homo sapien
gaccttgtagtgcttgcctatagag

SEQ ID NO: 5279981 - DNA, 25 bp, Homo sapien
ccacagaagcttgtattatcagtga

SEQ ID NO: 5279982 - DNA, 25 bp, Homo sapien
aatactattggacagacacagaggg

SEQ ID NO: 5279983 - DNA, 25 bp, Homo sapien
taagctatgtcactaccctcctgta

SEQ ID NO: 5279984 - DNA, 25 bp, Homo sapien
ctcatttgcatcctatcgatctgga

SEQ ID NO: 5279985 - DNA, 25 bp, Homo sapien
ggttgaagagtcacctgtgtgatgt

SEQ ID NO: 5279986 - DNA, 25 bp, Homo sapien
tagctgcattgatgacaaactaggg

SEQ ID NO: 5279987 - DNA, 25 bp, Homo sapien
tatttaggtcacgattcatggagga

SEQ ID NO: 5279988 - DNA, 25 bp, Homo sapien
ggaacttcattcagtgatagctgca

SEQ ID NO: 5279989 - DNA, 25 bp, Homo sapien
tgagctactctcctgctccatgagg

SEQ ID NO: 5279990 - DNA, 25 bp, Homo sapien
tataagctcttggtagggtggacag

SEQ ID NO: 5279991 - DNA, 25 bp, Homo sapien
tgtgaggccaaagcaatgaataatc

SEQ ID NO: 5279992 - DNA, 25 bp, Homo sapien
tatttggtcattctaagcagcacac

SEQ ID NO: 5279993 - DNA, 25 bp, Homo sapien
caaactaaacagatatgtacatgta

SEQ ID NO: 5279994 - DNA, 25 bp, Homo sapien
aacccaaactaaacagatatgtaca

SEQ ID NO: 5279995 - DNA, 25 bp, Homo sapien
gaacccaaactaaacagatatgtac

SEQ ID NO: 5279996 - DNA, 25 bp, Homo sapien
cccaaactaaacagatatgtacatg

SEQ ID NO: 5279997 - DNA, 25 bp, Homo sapien
gattgtggttggatatataaaggag

SEQ ID NO: 5279998 - DNA, 25 bp, Homo sapien
tggttggatatataaaggagtttct

SEQ ID NO: 5279999 - DNA, 25 bp, Homo sapien
tgtttgattgtggttggatatataa

SEQ ID NO: 5280000 - DNA, 25 bp, Homo sapien
ccaggcttatttatatgtttgattg

SEQ ID NO: 5280001 - DNA, 25 bp, Homo sapien
acatcaggacaaggcatgttaagtt

SEQ ID NO: 5280002 - DNA, 25 bp, Homo sapien
atcaggacaaggcatgttaagttac

SEQ ID NO: 5280003 - DNA, 25 bp, Homo sapien
catcaggacaaggcatgttaagtta

SEQ ID NO: 5280004 - DNA, 25 bp, Homo sapien
tttattatatcaaagagtccagaat

SEQ ID NO: 5280005 - DNA, 25 bp, Homo sapien
aaggcaatgtagtttgtcctctttc

SEQ ID NO: 5280006 - DNA, 25 bp, Homo sapien
cggagaattcttatcagtttactgg

SEQ ID NO: 5280007 - DNA, 25 bp, Homo sapien
tcaggatcagacattcggagaattc

SEQ ID NO: 5280008 - DNA, 25 bp, Homo sapien
tatcagtttactggatggaagtgaa

SEQ ID NO: 5280009 - DNA, 25 bp, Homo sapien
tggcaattctcctattaaccatatc

SEQ ID NO: 5280010 - DNA, 25 bp, Homo sapien
tgaggtgtgagcaagataaactgtc

SEQ ID NO: 5280011 - DNA, 25 bp, Homo sapien
tcttcagtatcaagtccatggcaat

SEQ ID NO: 5280012 - DNA, 25 bp, Homo sapien
taaactgtctaaaacgctgggaatc

SEQ ID NO: 5280013 - DNA, 25 bp, Homo sapien
ctgtgggctgatacaagctcctgga

SEQ ID NO: 5280014 - DNA, 25 bp, Homo sapien
catccagggatcagtcattacatta

SEQ ID NO: 5280015 - DNA, 25 bp, Homo sapien
ccaggaactcaagggtatagtaagc

SEQ ID NO: 5280016 - DNA, 25 bp, Homo sapien
cagcctgtgtataatagcgagaccc

SEQ ID NO: 5280017 - DNA, 25 bp, Homo sapien
tccagacaaggctctcatgtcattg

SEQ ID NO: 5280018 - DNA, 25 bp, Homo sapien
gaaaggagattctgcgatggaccac

SEQ ID NO: 5280019 - DNA, 25 bp, Homo sapien
gaaagaacgttcacctccagacaag

SEQ ID NO: 5280020 - DNA, 25 bp, Homo sapien
tgtagacatcaaattcatccaggca

SEQ ID NO: 5280021 - DNA, 25 bp, Homo sapien
gagaatgagttgacaaggaacaaaa

SEQ ID NO: 5280022 - DNA, 25 bp, Homo sapien
aagagaatgagttgacaaggaacaa

SEQ ID NO: 5280023 - DNA, 25 bp, Homo sapien
tgaagagaatgagttgacaaggaac

SEQ ID NO: 5280024 - DNA, 25 bp, Homo sapien
ttgaagagaatgagttgacaaggaa

SEQ ID NO: 5280025 - DNA, 25 bp, Homo sapien
cccgctgagatagtaagttgtcaaa

SEQ ID NO: 5280026 - DNA, 25 bp, Homo sapien
taatttgcatcgtaaagtcaaacac

SEQ ID NO: 5280027 - DNA, 25 bp, Homo sapien
tttccacaataggcccgctgagata

SEQ ID NO: 5280028 - DNA, 25 bp, Homo sapien
ttcattcttgtggtcaaaattcatt

SEQ ID NO: 5280029 - DNA, 25 bp, Homo sapien
gatttggcctgtcctacaaagccag

SEQ ID NO: 5280030 - DNA, 25 bp, Homo sapien
caatagccagtcagtggagcaggaa

SEQ ID NO: 5280031 - DNA, 25 bp, Homo sapien
taaaggtatcactacgtacagcagc

SEQ ID NO: 5280032 - DNA, 25 bp, Homo sapien
taagggcactctcttaagcactggg

SEQ ID NO: 5280033 - DNA, 25 bp, Homo sapien
cttctaaattgttgatatgtcttga

SEQ ID NO: 5280034 - DNA, 25 bp, Homo sapien
tactatccagatcaagataggtctc

SEQ ID NO: 5280035 - DNA, 25 bp, Homo sapien
tttaaagtcctcactttactatcca

SEQ ID NO: 5280036 - DNA, 25 bp, Homo sapien
ctaaattgttgatatgtcttgaatc

SEQ ID NO: 5280037 - DNA, 25 bp, Homo sapien
tatggaatcagtggatacagagagc

SEQ ID NO: 5280038 - DNA, 25 bp, Homo sapien
aaaatttcgtttgagctccagttgc

SEQ ID NO: 5280039 - DNA, 25 bp, Homo sapien
caataatggatgcatgtctatggca

SEQ ID NO: 5280040 - DNA, 25 bp, Homo sapien
gagtgactagcagaccatggaatta

SEQ ID NO: 5280041 - DNA, 25 bp, Homo sapien
ggaaaacaggcactctaacacatcg

SEQ ID NO: 5280042 - DNA, 25 bp, Homo sapien
cacacgctgtttaggctgtaggaaa

SEQ ID NO: 5280043 - DNA, 25 bp, Homo sapien
taacacatcgctaatgggaatgcaa

SEQ ID NO: 5280044 - DNA, 25 bp, Homo sapien
agaatctaagaaggccacacgctgt

SEQ ID NO: 5280045 - DNA, 25 bp, Homo sapien
tcgatctccatgactagcatgttct

SEQ ID NO: 5280046 - DNA, 25 bp, Homo sapien
gcctgtatcttctgccttaatcgat

SEQ ID NO: 5280047 - DNA, 25 bp, Homo sapien
tctacttctatacgctctgggcaga

SEQ ID NO: 5280048 - DNA, 25 bp, Homo sapien
ctttgtccagaattgatgcagattt

SEQ ID NO: 5280049 - DNA, 25 bp, Homo sapien
aataatcatggctaaggctgaaaac

SEQ ID NO: 5280050 - DNA, 25 bp, Homo sapien
aatcatggctaaggctgaaaacaaa

SEQ ID NO: 5280051 - DNA, 25 bp, Homo sapien
taatcatggctaaggctgaaaacaa

SEQ ID NO: 5280052 - DNA, 25 bp, Homo sapien
tttaataatcatggctaaggctgaa

SEQ ID NO: 5280053 - DNA, 25 bp, Homo sapien
ttcttcataatgtcgtttccctcgt

SEQ ID NO: 5280054 - DNA, 25 bp, Homo sapien
cataatgtcgtttccctcgtttttg

SEQ ID NO: 5280055 - DNA, 25 bp, Homo sapien
ttcagaatcagcaaggtttaattca

SEQ ID NO: 5280056 - DNA, 25 bp, Homo sapien
ggttatccacttcagaatcagcaag

SEQ ID NO: 5280057 - DNA, 25 bp, Homo sapien
ttaagtgggtctgctagctccgata

SEQ ID NO: 5280058 - DNA, 25 bp, Homo sapien
gctagctccgatagttgattaattt

SEQ ID NO: 5280059 - DNA, 25 bp, Homo sapien
gacttttaagatgctccatattttc

SEQ ID NO: 5280060 - DNA, 25 bp, Homo sapien
ttttgttgctccatatgttcctcaa

SEQ ID NO: 5280061 - DNA, 25 bp, Homo sapien
tacagactggtgttcttctatgttc

SEQ ID NO: 5280062 - DNA, 25 bp, Homo sapien
tctcaagttcccgaatttcagaaat

SEQ ID NO: 5280063 - DNA, 25 bp, Homo sapien
tatctacagactggtgttcttctat

SEQ ID NO: 5280064 - DNA, 25 bp, Homo sapien
gttcttctatgttctcaagttcccg

SEQ ID NO: 5280065 - DNA, 25 bp, Homo sapien
ttagttctttataatgtagttggca

SEQ ID NO: 5280066 - DNA, 25 bp, Homo sapien
tagttctttataatgtagttggcac

SEQ ID NO: 5280067 - DNA, 25 bp, Homo sapien
aagaagttcctcattgtgtttaata

SEQ ID NO: 5280068 - DNA, 25 bp, Homo sapien
tcctcattgtgtttaatatcttttt

SEQ ID NO: 5280069 - DNA, 25 bp, Homo sapien
cctcattgtgtttaatatctttttc

SEQ ID NO: 5280070 - DNA, 25 bp, Homo sapien
ctttttcaagggcagataaatgttg

SEQ ID NO: 5280071 - DNA, 25 bp, Homo sapien
aagatttaatatctgggccgtctta

SEQ ID NO: 5280072 - DNA, 25 bp, Homo sapien
gatttaatatctgggccgtcttatt

SEQ ID NO: 5280073 - DNA, 25 bp, Homo sapien
gccgtcttattttcaacctcattct

SEQ ID NO: 5280074 - DNA, 25 bp, Homo sapien
atctgggccgtcttattttcaacct

SEQ ID NO: 5280075 - DNA, 25 bp, Homo sapien
tgcattactgcacgagctacagaat

SEQ ID NO: 5280076 - DNA, 25 bp, Homo sapien
ctctacaatttttgggtggcttttg

SEQ ID NO: 5280077 - DNA, 25 bp, Homo sapien
tctctgcttaggaacttaggtcttg

SEQ ID NO: 5280078 - DNA, 25 bp, Homo sapien
tgaataataacgtcctgcaaaaact

SEQ ID NO: 5280079 - DNA, 25 bp, Homo sapien
tctctatgcctctcatgtcaattag

SEQ ID NO: 5280080 - DNA, 25 bp, Homo sapien
tgattagtagcactgtctctatgcc

SEQ ID NO: 5280081 - DNA, 25 bp, Homo sapien
taaagctgtcagaactgttggaaag

SEQ ID NO: 5280082 - DNA, 25 bp, Homo sapien
taggctatttgccacaaccgcatta

SEQ ID NO: 5280083 - DNA, 25 bp, Homo sapien
cttcttcagagtctttgtgtcagtt

SEQ ID NO: 5280084 - DNA, 25 bp, Homo sapien
tgtcacatgtgtttcgtggctaagt

SEQ ID NO: 5280085 - DNA, 25 bp, Homo sapien
gggacacacaatgtgccagcaaggc

SEQ ID NO: 5280086 - DNA, 25 bp, Homo sapien
ggcattatgacacatacactggatc

SEQ ID NO: 5280087 - DNA, 25 bp, Homo sapien
tcatgagtgcctgaaggaccctttc

SEQ ID NO: 5280088 - DNA, 25 bp, Homo sapien
gattatggcaacaataggcctgcag

SEQ ID NO: 5280089 - DNA, 25 bp, Homo sapien
caaagcaagttctgggtcccgaaga

SEQ ID NO: 5280090 - DNA, 25 bp, Homo sapien
cagaaactattatcggtggccgtga

SEQ ID NO: 5280091 - DNA, 25 bp, Homo sapien
aaaatgtccttgtctataagcatca

SEQ ID NO: 5280092 - DNA, 25 bp, Homo sapien
tggcttcaagaagagctggaacatt

SEQ ID NO: 5280093 - DNA, 25 bp, Homo sapien
tgattgtagctcagtgcatgcttca

SEQ ID NO: 5280094 - DNA, 25 bp, Homo sapien
tcttttgagtcgatcagttttacta

SEQ ID NO: 5280095 - DNA, 25 bp, Homo sapien
ccttttctatggcttgctgaaactg

SEQ ID NO: 5280096 - DNA, 25 bp, Homo sapien
actgttcgatctcttgattgactga

SEQ ID NO: 5280097 - DNA, 25 bp, Homo sapien
ttcaggttccaaagattggtcagta

SEQ ID NO: 5280098 - DNA, 25 bp, Homo sapien
tgtctttccaaccgttcaggttcca

SEQ ID NO: 5280099 - DNA, 25 bp, Homo sapien
tgctttatattcgtttaaggatcgg

SEQ ID NO: 5280100 - DNA, 25 bp, Homo sapien
tattcgtttaaggatcggttatata

SEQ ID NO: 5280101 - DNA, 25 bp, Homo sapien
ttaatgctttatattcgtttaagga

SEQ ID NO: 5280102 - DNA, 25 bp, Homo sapien
tatattcgtttaaggatcggttata

SEQ ID NO: 5280103 - DNA, 25 bp, Homo sapien
tctggtgctcgtgcatttgtctctt

SEQ ID NO: 5280104 - DNA, 25 bp, Homo sapien
atgccatacattctggtgctcgtgc

SEQ ID NO: 5280105 - DNA, 25 bp, Homo sapien
ttttctagtttgtcttgaatatcct

SEQ ID NO: 5280106 - DNA, 25 bp, Homo sapien
caacatctgctttcaatgccataca

SEQ ID NO: 5280107 - DNA, 25 bp, Homo sapien
ggaccataaatctcagttcccttag

SEQ ID NO: 5280108 - DNA, 25 bp, Homo sapien
tctagcacccctttatttctcaggt

SEQ ID NO: 5280109 - DNA, 25 bp, Homo sapien
ttctgatacttacctttaatgtggt

SEQ ID NO: 5280110 - DNA, 25 bp, Homo sapien
ccttagcaatctctgggcattgttt

SEQ ID NO: 5280111 - DNA, 25 bp, Homo sapien
ccctagcctctgacaggtttatcaa

SEQ ID NO: 5280112 - DNA, 25 bp, Homo sapien
gagagtcaccacaacaggccttgaa

SEQ ID NO: 5280113 - DNA, 25 bp, Homo sapien
ggccttgaaaacaagcttaggtcta

SEQ ID NO: 5280114 - DNA, 25 bp, Homo sapien
ggtgggtcataaatagtctaatatc

SEQ ID NO: 5280115 - DNA, 25 bp, Homo sapien
cctgtcaagtctagcagcacgatct

SEQ ID NO: 5280116 - DNA, 25 bp, Homo sapien
tgatattatctctgatggcattcaa

SEQ ID NO: 5280117 - DNA, 25 bp, Homo sapien
ccattttcctgtcaagtctagcagc

SEQ ID NO: 5280118 - DNA, 25 bp, Homo sapien
gcagcacgatcttctccaattttga

SEQ ID NO: 5280119 - DNA, 25 bp, Homo sapien
tacacactggcgctttagttcagta

SEQ ID NO: 5280120 - DNA, 25 bp, Homo sapien
gccatttcatgtttcaaggactcta

SEQ ID NO: 5280121 - DNA, 25 bp, Homo sapien
gactctaaattagtcttcattgtac

SEQ ID NO: 5280122 - DNA, 25 bp, Homo sapien
tctttctctacacactggcgcttta

SEQ ID NO: 5280123 - DNA, 25 bp, Homo sapien
tactataagaatttggctgatctca

SEQ ID NO: 5280124 - DNA, 25 bp, Homo sapien
actataagaatttggctgatctcaa

SEQ ID NO: 5280125 - DNA, 25 bp, Homo sapien
ctataagaatttggctgatctcaaa

SEQ ID NO: 5280126 - DNA, 25 bp, Homo sapien
tataagaatttggctgatctcaaaa

SEQ ID NO: 5280127 - DNA, 25 bp, Homo sapien
caagttgcgttgctttcatgaagaa

SEQ ID NO: 5280128 - DNA, 25 bp, Homo sapien
tcatctgttcaagttgcgttgcttt

SEQ ID NO: 5280129 - DNA, 25 bp, Homo sapien
tctccttgatgtatctgctcctttg

SEQ ID NO: 5280130 - DNA, 25 bp, Homo sapien
atgtatgaataatcttccttcatct

SEQ ID NO: 5280131 - DNA, 25 bp, Homo sapien
tttgtaaacttccatagaactgtta

SEQ ID NO: 5280132 - DNA, 25 bp, Homo sapien
gcaattaggagtttgtaaacttcca

SEQ ID NO: 5280133 - DNA, 25 bp, Homo sapien
tgtaaacttccatagaactgttaaa

SEQ ID NO: 5280134 - DNA, 25 bp, Homo sapien
ttaggagtttgtaaacttccataga

SEQ ID NO: 5280135 - DNA, 25 bp, Homo sapien
gcttgctcatttcttgtgttaaaac

SEQ ID NO: 5280136 - DNA, 25 bp, Homo sapien
tagactgtaagaactgcttgctcat

SEQ ID NO: 5280137 - DNA, 25 bp, Homo sapien
tcatttttagactgtaagaactgct

SEQ ID NO: 5280138 - DNA, 25 bp, Homo sapien
tttttagactgtaagaactgcttgc

SEQ ID NO: 5280139 - DNA, 25 bp, Homo sapien
gcatctgacttcttaatagacctaa

SEQ ID NO: 5280140 - DNA, 25 bp, Homo sapien
tattatatagaccagactccatctg

SEQ ID NO: 5280141 - DNA, 25 bp, Homo sapien
tctcaagtacgatgttgggcctctc

SEQ ID NO: 5280142 - DNA, 25 bp, Homo sapien
caaaaagattcagggtcattactca

SEQ ID NO: 5280143 - DNA, 25 bp, Homo sapien
tgtgatcaatagctccaaaatagag

SEQ ID NO: 5280144 - DNA, 25 bp, Homo sapien
gatgctattttgactaggacagcaa

SEQ ID NO: 5280145 - DNA, 25 bp, Homo sapien
aattttagcctagagcagtatagac

SEQ ID NO: 5280146 - DNA, 25 bp, Homo sapien
tagaaactaaacactcatccagaaa

SEQ ID NO: 5280147 - DNA, 25 bp, Homo sapien
aatcagctcttctttcctcgtggaa

SEQ ID NO: 5280148 - DNA, 25 bp, Homo sapien
tctttcctcgtggaaaccacggagc

SEQ ID NO: 5280149 - DNA, 25 bp, Homo sapien
ctggatgttaaaatgatcaagaatt

SEQ ID NO: 5280150 - DNA, 25 bp, Homo sapien
aaatgatcaagaattgcaatcagct

SEQ ID NO: 5280151 - DNA, 25 bp, Homo sapien
taccatacacactggctttaaaggc

SEQ ID NO: 5280152 - DNA, 25 bp, Homo sapien
ctatgctgatgtgttgctgtataag

SEQ ID NO: 5280153 - DNA, 25 bp, Homo sapien
caatgttattgagatatctgcagag

SEQ ID NO: 5280154 - DNA, 25 bp, Homo sapien
taagatcgacttccatctatgctga

SEQ ID NO: 5280155 - DNA, 25 bp, Homo sapien
gatcctctattagtagcaactgctc

SEQ ID NO: 5280156 - DNA, 25 bp, Homo sapien
caagaccgactatgagagctgtgag

SEQ ID NO: 5280157 - DNA, 25 bp, Homo sapien
tagtagcaactgctcttccaccaag

SEQ ID NO: 5280158 - DNA, 25 bp, Homo sapien
agctgtgagtactgcactcttccca

SEQ ID NO: 5280159 - DNA, 25 bp, Homo sapien
tccattgttgccaacaacaaagttg

SEQ ID NO: 5280160 - DNA, 25 bp, Homo sapien
acttaaaaggtccaagcattgaatg

SEQ ID NO: 5280161 - DNA, 25 bp, Homo sapien
tttttaggtgaatactctcaattat

SEQ ID NO: 5280162 - DNA, 25 bp, Homo sapien
ccaagcattgaatgacacatgaagt

SEQ ID NO: 5280163 - DNA, 25 bp, Homo sapien
tagtacctttacattcgtcttcgtc

SEQ ID NO: 5280164 - DNA, 25 bp, Homo sapien
tcgtcttcgtcaccatctttatcaa

SEQ ID NO: 5280165 - DNA, 25 bp, Homo sapien
acctttacattcgtcttcgtcacca

SEQ ID NO: 5280166 - DNA, 25 bp, Homo sapien
acattcgtcttcgtcaccatcttta

SEQ ID NO: 5280167 - DNA, 25 bp, Homo sapien
tccacagaagcgtaagatagtaagt

SEQ ID NO: 5280168 - DNA, 25 bp, Homo sapien
tcatagagatggcatggtgactcct

SEQ ID NO: 5280169 - DNA, 25 bp, Homo sapien
tataagcctacctaaatgttgtgac

SEQ ID NO: 5280170 - DNA, 25 bp, Homo sapien
gaacatagccctactgacatctgga

SEQ ID NO: 5280171 - DNA, 25 bp, Homo sapien
tctggacttccaccctagtgaggct

SEQ ID NO: 5280172 - DNA, 25 bp, Homo sapien
ccatgataatggtgtcagcggagac

SEQ ID NO: 5280173 - DNA, 25 bp, Homo sapien
catgcaagcaaaatccaagtgggta

SEQ ID NO: 5280174 - DNA, 25 bp, Homo sapien
tagttggctagtatcaaaggaggcc

SEQ ID NO: 5280175 - DNA, 25 bp, Homo sapien
tcataaattataaggcacagctagg

SEQ ID NO: 5280176 - DNA, 25 bp, Homo sapien
tgtgagtcatcacggctggccaaaa

SEQ ID NO: 5280177 - DNA, 25 bp, Homo sapien
gttttggccttgtagatcccttgca

SEQ ID NO: 5280178 - DNA, 25 bp, Homo sapien
gcaagagtctcatggattcctgcac

SEQ ID NO: 5280179 - DNA, 25 bp, Homo sapien
tgatacgcttctcacaaggaatgtg

SEQ ID NO: 5280180 - DNA, 25 bp, Homo sapien
gacagtacacccaaacactacgtga

SEQ ID NO: 5280181 - DNA, 25 bp, Homo sapien
cacggtaacttgcatctaacagaca

SEQ ID NO: 5280182 - DNA, 25 bp, Homo sapien
tttgctgagcatgacctgggatttg

SEQ ID NO: 5280183 - DNA, 25 bp, Homo sapien
atgatgatggattttcaaacacaga

SEQ ID NO: 5280184 - DNA, 25 bp, Homo sapien
aatgatgatggattttcaaacacag

SEQ ID NO: 5280185 - DNA, 25 bp, Homo sapien
gaactaagagtagtgacacacataa

SEQ ID NO: 5280186 - DNA, 25 bp, Homo sapien
aaaggcaaattactactacttctga

SEQ ID NO: 5280187 - DNA, 25 bp, Homo sapien
ctggcctgtgtttaccacatcctca

SEQ ID NO: 5280188 - DNA, 25 bp, Homo sapien
tctactctgcctatcacaacagaca

SEQ ID NO: 5280189 - DNA, 25 bp, Homo sapien
tattggttctacaacctttctctac

SEQ ID NO: 5280190 - DNA, 25 bp, Homo sapien
ctattggttctacaacctttctcta

SEQ ID NO: 5280191 - DNA, 25 bp, Homo sapien
cctattggttctacaacctttctct

SEQ ID NO: 5280192 - DNA, 25 bp, Homo sapien
aattgggattcttctccggttcatt

SEQ ID NO: 5280193 - DNA, 25 bp, Homo sapien
tgttttccgcaattcccaattggga

SEQ ID NO: 5280194 - DNA, 25 bp, Homo sapien
tccgcaattcccaattgggattctt

SEQ ID NO: 5280195 - DNA, 25 bp, Homo sapien
attgggattcttctccggttcattt

SEQ ID NO: 5280196 - DNA, 25 bp, Homo sapien
ttcccgcggctcaggagaccggtgc

SEQ ID NO: 5280197 - DNA, 25 bp, Homo sapien
tttacagttattcgccacagcccgg

SEQ ID NO: 5280198 - DNA, 25 bp, Homo sapien
cggagcagacgccaggtttcccgcg

SEQ ID NO: 5280199 - DNA, 25 bp, Homo sapien
ggagagcgcgcgaaggtgccgccgg

SEQ ID NO: 5280200 - DNA, 25 bp, Homo sapien
cgcccgggcccgcaaggacgaccat

SEQ ID NO: 5280201 - DNA, 25 bp, Homo sapien
gccaacaagtcgaagtctcccaaag

SEQ ID NO: 5280202 - DNA, 25 bp, Homo sapien
gctggattcgaaacgcttcctggtg

SEQ ID NO: 5280203 - DNA, 25 bp, Homo sapien
ggcagctggtctacgcatgcgtccg

SEQ ID NO: 5280204 - DNA, 25 bp, Homo sapien
tctcccaaaggaacctgatcggcgg

SEQ ID NO: 5280205 - DNA, 25 bp, Homo sapien
cgcgggacgtggagagacggcgccg

SEQ ID NO: 5280206 - DNA, 25 bp, Homo sapien
gacgtggagagacggcgccgcccgg

SEQ ID NO: 5280207 - DNA, 25 bp, Homo sapien
actggtaaatgacgaaggggcttct

SEQ ID NO: 5280208 - DNA, 25 bp, Homo sapien
tgattcctttgaccatctggcttac

SEQ ID NO: 5280209 - DNA, 25 bp, Homo sapien
ttcgctgctcctccgaaaacgcctt

SEQ ID NO: 5280210 - DNA, 25 bp, Homo sapien
gctcctccgaaaacgccttcaatga

SEQ ID NO: 5280211 - DNA, 25 bp, Homo sapien
gttcgctgctcctccgaaaacgcct

SEQ ID NO: 5280212 - DNA, 25 bp, Homo sapien
gctgctcctccgaaaacgccttcaa

SEQ ID NO: 5280213 - DNA, 25 bp, Homo sapien
ctgttttccactcgcgagggccctg

SEQ ID NO: 5280214 - DNA, 25 bp, Homo sapien
gccaggccgcgacttggcccctgtt

SEQ ID NO: 5280215 - DNA, 25 bp, Homo sapien
gtaggaagtccgaaccgagccgcca

SEQ ID NO: 5280216 - DNA, 25 bp, Homo sapien
ttttccactcgcgagggccctgcgt

SEQ ID NO: 5280217 - DNA, 25 bp, Homo sapien
ccgcttgcgcttggccgaagctgct

SEQ ID NO: 5280218 - DNA, 25 bp, Homo sapien
gggataattcccacgcctcgctcaa

SEQ ID NO: 5280219 - DNA, 25 bp, Homo sapien
tccctggtccccataggcacagttg

SEQ ID NO: 5280220 - DNA, 25 bp, Homo sapien
aaagctgcgcgttctccggccgctt

SEQ ID NO: 5280221 - DNA, 25 bp, Homo sapien
taccagttggtcatgcaattcaaat

SEQ ID NO: 5280222 - DNA, 25 bp, Homo sapien
ggcaccatatggttacatcaaagga

SEQ ID NO: 5280223 - DNA, 25 bp, Homo sapien
ttttgcatcagttaagcccctgacc

SEQ ID NO: 5280224 - DNA, 25 bp, Homo sapien
tattagaatcttgtaatgcatctgg

SEQ ID NO: 5280225 - DNA, 25 bp, Homo sapien
catacacctaatcagtggtatattc

SEQ ID NO: 5280226 - DNA, 25 bp, Homo sapien
ggtcatacacctaatcagtggtata

SEQ ID NO: 5280227 - DNA, 25 bp, Homo sapien
tacacctaatcagtggtatattcaa

SEQ ID NO: 5280228 - DNA, 25 bp, Homo sapien
ccaaggtcatacacctaatcagtgg

SEQ ID NO: 5280229 - DNA, 25 bp, Homo sapien
tttttatctgtaaagtgacatccat

SEQ ID NO: 5280230 - DNA, 25 bp, Homo sapien
tatatttttatctgtaaagtgacat

SEQ ID NO: 5280231 - DNA, 25 bp, Homo sapien
ctttaagtctgtatatttttatctg

SEQ ID NO: 5280232 - DNA, 25 bp, Homo sapien
tatttttatctgtaaagtgacatcc

SEQ ID NO: 5280233 - DNA, 25 bp, Homo sapien
cattttgaaacgctgactgatgaaa

SEQ ID NO: 5280234 - DNA, 25 bp, Homo sapien
cctgggtatgatagagaattagtcc

SEQ ID NO: 5280235 - DNA, 25 bp, Homo sapien
tacagcatccttgcattcgctaccg

SEQ ID NO: 5280236 - DNA, 25 bp, Homo sapien
tctatgaattatcctgaactggctt

SEQ ID NO: 5280237 - DNA, 25 bp, Homo sapien
tcttaggcattttgtgtcagttcag

SEQ ID NO: 5280238 - DNA, 25 bp, Homo sapien
ggaaaaattgcaacagccttatagg

SEQ ID NO: 5280239 - DNA, 25 bp, Homo sapien
tgtactcttcagttactaggccctg

SEQ ID NO: 5280240 - DNA, 25 bp, Homo sapien
catggtcctcaatcttagagtgtta

SEQ ID NO: 5280241 - DNA, 25 bp, Homo sapien
ttcccctatccacacatcattttga

SEQ ID NO: 5280242 - DNA, 25 bp, Homo sapien
tcaacacaaaagtaacccatcacta

SEQ ID NO: 5280243 - DNA, 25 bp, Homo sapien
aaatcgtagacataatattgtatca

SEQ ID NO: 5280244 - DNA, 25 bp, Homo sapien
taaaccattatcttggctcatcttg

SEQ ID NO: 5280245 - DNA, 25 bp, Homo sapien
tatctcaatgctggtggtcatgtcg

SEQ ID NO: 5280246 - DNA, 25 bp, Homo sapien
ttcagtgcctccatatgctcgaatg

SEQ ID NO: 5280247 - DNA, 25 bp, Homo sapien
tgctcgaatgcttaggaatcccctg

SEQ ID NO: 5280248 - DNA, 25 bp, Homo sapien
tcgatggctgcctcaccaatgatgg

SEQ ID NO: 5280249 - DNA, 25 bp, Homo sapien
gaatcaataagaaaggaactaggac

SEQ ID NO: 5280250 - DNA, 25 bp, Homo sapien
cctccagcaggttcgagatggcaag

SEQ ID NO: 5280251 - DNA, 25 bp, Homo sapien
tgaaatcttactcgactggcctttg

SEQ ID NO: 5280252 - DNA, 25 bp, Homo sapien
tctatagttggaggattcagaacaa

SEQ ID NO: 5280253 - DNA, 25 bp, Homo sapien
gaagttatatgctggaaagatagga

SEQ ID NO: 5280254 - DNA, 25 bp, Homo sapien
gataggaacagatattcactctgat

SEQ ID NO: 5280255 - DNA, 25 bp, Homo sapien
tgaaggttatcaggtaccaaagacc

SEQ ID NO: 5280256 - DNA, 25 bp, Homo sapien
tctgattggtcttagaggaggttta

SEQ ID NO: 5280257 - DNA, 25 bp, Homo sapien
ccagtagctagggtggaatttctct

SEQ ID NO: 5280258 - DNA, 25 bp, Homo sapien
gccttaaatctagaagcagccgtat

SEQ ID NO: 5280259 - DNA, 25 bp, Homo sapien
caagcataaaaggatatagccaggc

SEQ ID NO: 5280260 - DNA, 25 bp, Homo sapien
tatcatccaggaggtaaatcgcttc

SEQ ID NO: 5280261 - DNA, 25 bp, Homo sapien
ggtcgcactcaaaaattctagagag

SEQ ID NO: 5280262 - DNA, 25 bp, Homo sapien
tgacaagattgtatgcatcaaaaat

SEQ ID NO: 5280263 - DNA, 25 bp, Homo sapien
taaagcgagttcatccaggtcgtag

SEQ ID NO: 5280264 - DNA, 25 bp, Homo sapien
tagagaggcatccagattgaaaagg

SEQ ID NO: 5280265 - DNA, 25 bp, Homo sapien
gaaccaactgtcttctggatctatt

SEQ ID NO: 5280266 - DNA, 25 bp, Homo sapien
aaaagccttcacgtttatggtcagt

SEQ ID NO: 5280267 - DNA, 25 bp, Homo sapien
gacatttgattcctacttcacatga

SEQ ID NO: 5280268 - DNA, 25 bp, Homo sapien
gattttaaaccagagtgccaagaca

SEQ ID NO: 5280269 - DNA, 25 bp, Homo sapien
gctcagtgcttctcctcaaagaaca

SEQ ID NO: 5280270 - DNA, 25 bp, Homo sapien
caaggacaggaggtaccatggctac

SEQ ID NO: 5280271 - DNA, 25 bp, Homo sapien
tctcctcaaagaacatacaaggaca

SEQ ID NO: 5280272 - DNA, 25 bp, Homo sapien
ggagcccacggcatgagctgttttt

SEQ ID NO: 5280273 - DNA, 25 bp, Homo sapien
tcacatgttaaatcaccacacgtgg

SEQ ID NO: 5280274 - DNA, 25 bp, Homo sapien
cacagtactggcttttgaggtcatg

SEQ ID NO: 5280275 - DNA, 25 bp, Homo sapien
ccattggtgttttcgtttggctagc

SEQ ID NO: 5280276 - DNA, 25 bp, Homo sapien
agtcccttccaaagagtctccattg

SEQ ID NO: 5280277 - DNA, 25 bp, Homo sapien
acatgggtaacgtcagtccctacct

SEQ ID NO: 5280278 - DNA, 25 bp, Homo sapien
tcagtccctacctcctcgtgctgtc

SEQ ID NO: 5280279 - DNA, 25 bp, Homo sapien
gagacaccacaatgggatgagcagc

SEQ ID NO: 5280280 - DNA, 25 bp, Homo sapien
tacaccagccgagacaccacaatgg

SEQ ID NO: 5280281 - DNA, 25 bp, Homo sapien
gaaaacatacaccagccgagacacc

SEQ ID NO: 5280282 - DNA, 25 bp, Homo sapien
acaatgggatgagcagcctgtcttc

SEQ ID NO: 5280283 - DNA, 25 bp, Homo sapien
ttcttacttgtacccaccaagccta

SEQ ID NO: 5280284 - DNA, 25 bp, Homo sapien
ttacttgtacccaccaagcctagcc

SEQ ID NO: 5280285 - DNA, 25 bp, Homo sapien
gctttcttacttgtacccaccaagc

SEQ ID NO: 5280286 - DNA, 25 bp, Homo sapien
tcttacttgtacccaccaagcctag

SEQ ID NO: 5280287 - DNA, 25 bp, Homo sapien
tgagccaaccatttatctgagtgtg

SEQ ID NO: 5280288 - DNA, 25 bp, Homo sapien
cagtcattatcacaggattccgttt

SEQ ID NO: 5280289 - DNA, 25 bp, Homo sapien
cgtgcagctgttctttaaagtccac

SEQ ID NO: 5280290 - DNA, 25 bp, Homo sapien
cagcagctgcaataatgagccaacc

SEQ ID NO: 5280291 - DNA, 25 bp, Homo sapien
cacactttgcagtcccctctctgcc

SEQ ID NO: 5280292 - DNA, 25 bp, Homo sapien
ctttgcagtcccctctctgccaccc

SEQ ID NO: 5280293 - DNA, 25 bp, Homo sapien
cagacgaggctctgcttttcagctt

SEQ ID NO: 5280294 - DNA, 25 bp, Homo sapien
gataaagtccaagtgtcttatcatt

SEQ ID NO: 5280295 - DNA, 25 bp, Homo sapien
tccaagtgtcttatcattgcagacg

SEQ ID NO: 5280296 - DNA, 25 bp, Homo sapien
tgtcttatcattgcagacgaggctc

SEQ ID NO: 5280297 - DNA, 25 bp, Homo sapien
acatggaacagctctcaatttcttg

SEQ ID NO: 5280298 - DNA, 25 bp, Homo sapien
gaacatggaacagctctcaatttct

SEQ ID NO: 5280299 - DNA, 25 bp, Homo sapien
tgccttcacttgaccttgtggaaca

SEQ ID NO: 5280300 - DNA, 25 bp, Homo sapien
ctctttgccttcacttgaccttgtg

SEQ ID NO: 5280301 - DNA, 25 bp, Homo sapien
tgctcggtaacagcaagggttttat

SEQ ID NO: 5280302 - DNA, 25 bp, Homo sapien
gcctctggtaggatgtttcctgctc

SEQ ID NO: 5280303 - DNA, 25 bp, Homo sapien
tgctggcctttgtcgttctgagtgt

SEQ ID NO: 5280304 - DNA, 25 bp, Homo sapien
tttgctgtgcggaatccaaatctgc

SEQ ID NO: 5280305 - DNA, 25 bp, Homo sapien
gctctcgaagttgacctctgggcac

SEQ ID NO: 5280306 - DNA, 25 bp, Homo sapien
ggaggctctcgaagttgacctctgg

SEQ ID NO: 5280307 - DNA, 25 bp, Homo sapien
cagaaggaggctctcgaagttgacc

SEQ ID NO: 5280308 - DNA, 25 bp, Homo sapien
gaaggaggctctcgaagttgacctc

SEQ ID NO: 5280309 - DNA, 25 bp, Homo sapien
tttgcatcacatattgccatactgc

SEQ ID NO: 5280310 - DNA, 25 bp, Homo sapien
gcatagcaggtctgacatgggtttc

SEQ ID NO: 5280311 - DNA, 25 bp, Homo sapien
aatgtacttgttttgcatagcaggt

SEQ ID NO: 5280312 - DNA, 25 bp, Homo sapien
gtttctttgcatcacatattgccat

SEQ ID NO: 5280313 - DNA, 25 bp, Homo sapien
caagaggaatcttgatagaaattgt

SEQ ID NO: 5280314 - DNA, 25 bp, Homo sapien
tgccatcactcttcaattcatagtg

SEQ ID NO: 5280315 - DNA, 25 bp, Homo sapien
gatagaaattgtcttgccatcactc

SEQ ID NO: 5280316 - DNA, 25 bp, Homo sapien
aatcttgatagaaattgtcttgcca

SEQ ID NO: 5280317 - DNA, 25 bp, Homo sapien
caatgtcagctgtggacagtttgtg

SEQ ID NO: 5280318 - DNA, 25 bp, Homo sapien
taatggtgtccgtggagtaatacat

SEQ ID NO: 5280319 - DNA, 25 bp, Homo sapien
agctgtggacagtttgtgaagactc

SEQ ID NO: 5280320 - DNA, 25 bp, Homo sapien
gatggtcaaagtaatggtgtccgtg

SEQ ID NO: 5280321 - DNA, 25 bp, Homo sapien
ttctgcatcttcaatgtcataactc

SEQ ID NO: 5280322 - DNA, 25 bp, Homo sapien
tcatctaataggtgactgagcttct

SEQ ID NO: 5280323 - DNA, 25 bp, Homo sapien
aataggtgactgagcttctgcatct

SEQ ID NO: 5280324 - DNA, 25 bp, Homo sapien
atctaataggtgactgagcttctgc

SEQ ID NO: 5280325 - DNA, 25 bp, Homo sapien
caagttgcacagttatgataaagtc

SEQ ID NO: 5280326 - DNA, 25 bp, Homo sapien
caggatccgtggcaacatcaagttg

SEQ ID NO: 5280327 - DNA, 25 bp, Homo sapien
ggcagcccacgcttttctgataaga

SEQ ID NO: 5280328 - DNA, 25 bp, Homo sapien
aaaccatgaggtataggggcagccc

SEQ ID NO: 5280329 - DNA, 25 bp, Homo sapien
tgtaggccttaaaactgatggggcc

SEQ ID NO: 5280330 - DNA, 25 bp, Homo sapien
ttgtaggccttaaaactgatggggc

SEQ ID NO: 5280331 - DNA, 25 bp, Homo sapien
ctacgtttccccagtggtcagagag

SEQ ID NO: 5280332 - DNA, 25 bp, Homo sapien
tgtatataggtgtagcagctgagga

SEQ ID NO: 5280333 - DNA, 25 bp, Homo sapien
gttggtgtagccactctgggcagcc

SEQ ID NO: 5280334 - DNA, 25 bp, Homo sapien
gatgcctggagcctacgtttcccca

SEQ ID NO: 5280335 - DNA, 25 bp, Homo sapien
tcctggttgggtaacctgtgctcag

SEQ ID NO: 5280336 - DNA, 25 bp, Homo sapien
tgggcacttagcacagccctgacaa

SEQ ID NO: 5280337 - DNA, 25 bp, Homo sapien
gcagcttatggctgatgggcactta

SEQ ID NO: 5280338 - DNA, 25 bp, Homo sapien
ctcagccaccaatcctggttgggta

SEQ ID NO: 5280339 - DNA, 25 bp, Homo sapien
tcatttgctgccagtgatgggccaa

SEQ ID NO: 5280340 - DNA, 25 bp, Homo sapien
tgatgggccaaacgctggaaggttt

SEQ ID NO: 5280341 - DNA, 25 bp, Homo sapien
gtgatgggccaaacgctggaaggtt

SEQ ID NO: 5280342 - DNA, 25 bp, Homo sapien
atttgctgccagtgatgggccaaac

SEQ ID NO: 5280343 - DNA, 25 bp, Homo sapien
tgctctcctctttgggctgggcttc

SEQ ID NO: 5280344 - DNA, 25 bp, Homo sapien
tcttaaggagccaccacgaacattg

SEQ ID NO: 5280345 - DNA, 25 bp, Homo sapien
tgtgtctgtagcctgctgagtgctc

SEQ ID NO: 5280346 - DNA, 25 bp, Homo sapien
ttggcctggacgatctccgagggcc

SEQ ID NO: 5280347 - DNA, 25 bp, Homo sapien
tggtcgctgagctgcagcttttgca

SEQ ID NO: 5280348 - DNA, 25 bp, Homo sapien
atcttcctcctacaagggctgtggt

SEQ ID NO: 5280349 - DNA, 25 bp, Homo sapien
gctagcctgggtgctccatgctttt

SEQ ID NO: 5280350 - DNA, 25 bp, Homo sapien
gcctgggtgctccatgctttttttg

SEQ ID NO: 5280351 - DNA, 25 bp, Homo sapien
cataaaaggcttgttcctctctgtc

SEQ ID NO: 5280352 - DNA, 25 bp, Homo sapien
ccaggtcccatcagtcacagaccac

SEQ ID NO: 5280353 - DNA, 25 bp, Homo sapien
ccactccaggtcccatcagtcacag

SEQ ID NO: 5280354 - DNA, 25 bp, Homo sapien
tccaggtcccatcagtcacagacca

SEQ ID NO: 5280355 - DNA, 25 bp, Homo sapien
ctccaggtcccatcagtcacagacc

SEQ ID NO: 5280356 - DNA, 25 bp, Homo sapien
gctatgtcccgtggcgtctacttga

SEQ ID NO: 5280357 - DNA, 25 bp, Homo sapien
ggcagtcctcccatgtgaggtgcct

SEQ ID NO: 5280358 - DNA, 25 bp, Homo sapien
tgcaaggtggcccaacctgagctat

SEQ ID NO: 5280359 - DNA, 25 bp, Homo sapien
tccttgtgccagatgggcagtcctc

SEQ ID NO: 5280360 - DNA, 25 bp, Homo sapien
ttgattacatttccggttgcaagta

SEQ ID NO: 5280361 - DNA, 25 bp, Homo sapien
aatttgattacatttccggttgcaa

SEQ ID NO: 5280362 - DNA, 25 bp, Homo sapien
caaagagctcataagattcagaagt

SEQ ID NO: 5280363 - DNA, 25 bp, Homo sapien
ggcaaagagctcataagattcagaa

SEQ ID NO: 5280364 - DNA, 25 bp, Homo sapien
ataaaaataataccacagggcagtt

SEQ ID NO: 5280365 - DNA, 25 bp, Homo sapien
cagggcagttagagtaagcatacaa

SEQ ID NO: 5280366 - DNA, 25 bp, Homo sapien
aacattctagctgattgagaactaa

SEQ ID NO: 5280367 - DNA, 25 bp, Homo sapien
gaaaagagcatgatcattgtagcaa

SEQ ID NO: 5280368 - DNA, 25 bp, Homo sapien
cacaaacatgcagatccaacagaag

SEQ ID NO: 5280369 - DNA, 25 bp, Homo sapien
tcagatgaaactgggcagccttcag

SEQ ID NO: 5280370 - DNA, 25 bp, Homo sapien
tatccactgaatctcatcctaaggg

SEQ ID NO: 5280371 - DNA, 25 bp, Homo sapien
tagattctatgaaagtgggaggcaa

SEQ ID NO: 5280372 - DNA, 25 bp, Homo sapien
cattggcttcacatgattaccctgg

SEQ ID NO: 5280373 - DNA, 25 bp, Homo sapien
cagggctgaaagacgaagtggctcc

SEQ ID NO: 5280374 - DNA, 25 bp, Homo sapien
gctcagcagggtaagaagtcctgtc

SEQ ID NO: 5280375 - DNA, 25 bp, Homo sapien
ggagaaagacctcactgccaactct

SEQ ID NO: 5280376 - DNA, 25 bp, Homo sapien
tggctccgaggaattgttccacgtc

SEQ ID NO: 5280377 - DNA, 25 bp, Homo sapien
ccacgtctgcacaacttaaaaatct

SEQ ID NO: 5280378 - DNA, 25 bp, Homo sapien
tatgctgcgggtaggaacccaggga

SEQ ID NO: 5280379 - DNA, 25 bp, Homo sapien
gaacactgggcgccttagcttggag

SEQ ID NO: 5280380 - DNA, 25 bp, Homo sapien
gcgaggccagcgatgccttctggac

SEQ ID NO: 5280381 - DNA, 25 bp, Homo sapien
ccttctggaccacacgctgtcctcg

SEQ ID NO: 5280382 - DNA, 25 bp, Homo sapien
cagcgaggccagcgatgccttctgg

SEQ ID NO: 5280383 - DNA, 25 bp, Homo sapien
gaggccagcgatgccttctggacca

SEQ ID NO: 5280384 - DNA, 25 bp, Homo sapien
tgttcctcaacgtcggctgaaggca

SEQ ID NO: 5280385 - DNA, 25 bp, Homo sapien
tgaaggcatcgtcccctgacttcct

SEQ ID NO: 5280386 - DNA, 25 bp, Homo sapien
tcaacgtcggctgaaggcatcgtcc

SEQ ID NO: 5280387 - DNA, 25 bp, Homo sapien
ctggtttgttcctcaacgtcggctg

SEQ ID NO: 5280388 - DNA, 25 bp, Homo sapien
cgatggcaaacattggcaggaactg

SEQ ID NO: 5280389 - DNA, 25 bp, Homo sapien
tctgcactgtgcctgagtcttcagg

SEQ ID NO: 5280390 - DNA, 25 bp, Homo sapien
ttcaggcagcgggaccgatggcaaa

SEQ ID NO: 5280391 - DNA, 25 bp, Homo sapien
gcaggaactggagctatatgtactc

SEQ ID NO: 5280392 - DNA, 25 bp, Homo sapien
tttccgtccttctgggcgtctggcc

SEQ ID NO: 5280393 - DNA, 25 bp, Homo sapien
tctacggccgcagagcactttccgt

SEQ ID NO: 5280394 - DNA, 25 bp, Homo sapien
aaggtatttaggatcagctttcggg

SEQ ID NO: 5280395 - DNA, 25 bp, Homo sapien
taaggctccgcctgttgcgtgaact

SEQ ID NO: 5280396 - DNA, 25 bp, Homo sapien
ggagaccgagccgaaagcttcactc

SEQ ID NO: 5280397 - DNA, 25 bp, Homo sapien
gcaagcgagccagtcttgccggcag

SEQ ID NO: 5280398 - DNA, 25 bp, Homo sapien
tgttccttacgttcctgccggagag

SEQ ID NO: 5280399 - DNA, 25 bp, Homo sapien
gcctttcgcattgcagggcttgtcc

SEQ ID NO: 5280400 - DNA, 25 bp, Homo sapien
ccttcttgaggagattgactcgttc

SEQ ID NO: 5280401 - DNA, 25 bp, Homo sapien
tcgttcagtatgcatttccaaccag

SEQ ID NO: 5280402 - DNA, 25 bp, Homo sapien
gtggtgaccttcttgaggagattga

SEQ ID NO: 5280403 - DNA, 25 bp, Homo sapien
gaggagattgactcgttcagtatgc

SEQ ID NO: 5280404 - DNA, 25 bp, Homo sapien
taccaagtgacttttgggtcccatg

SEQ ID NO: 5280405 - DNA, 25 bp, Homo sapien
aaggaatctcaaagactgcgttagc

SEQ ID NO: 5280406 - DNA, 25 bp, Homo sapien
tgcctttgacaaaatggtctgcttt

SEQ ID NO: 5280407 - DNA, 25 bp, Homo sapien
tgcttttcggtgaaattctgcccag

SEQ ID NO: 5280408 - DNA, 25 bp, Homo sapien
tgaagaaattaaggcaaactgagcc

SEQ ID NO: 5280409 - DNA, 25 bp, Homo sapien
ggacagaagttaggaagcccatatt

SEQ ID NO: 5280410 - DNA, 25 bp, Homo sapien
gttataagctataggtgggacagaa

SEQ ID NO: 5280411 - DNA, 25 bp, Homo sapien
tgtaggaactttcacatgggatatc

SEQ ID NO: 5280412 - DNA, 25 bp, Homo sapien
ctggtcttcttcattgcatgagacg

SEQ ID NO: 5280413 - DNA, 25 bp, Homo sapien
tgcatgagacgcttcctctgtacgc

SEQ ID NO: 5280414 - DNA, 25 bp, Homo sapien
ggtcttcttcattgcatgagacgct

SEQ ID NO: 5280415 - DNA, 25 bp, Homo sapien
catgagacgcttcctctgtacgcat

SEQ ID NO: 5280416 - DNA, 25 bp, Homo sapien
cttgttctttcttgtatggagaact

SEQ ID NO: 5280417 - DNA, 25 bp, Homo sapien
aacttggaaactcagagagctgggt

SEQ ID NO: 5280418 - DNA, 25 bp, Homo sapien
gagaaaggataggtgtgagaattca

SEQ ID NO: 5280419 - DNA, 25 bp, Homo sapien
agctgggtgaatttagaaaatgggc

SEQ ID NO: 5280420 - DNA, 25 bp, Homo sapien
tacatctatgcgaagacagccctgc

SEQ ID NO: 5280421 - DNA, 25 bp, Homo sapien
caaagccctccagcttataggatgg

SEQ ID NO: 5280422 - DNA, 25 bp, Homo sapien
tgatccagccaataacttgtaggtg

SEQ ID NO: 5280423 - DNA, 25 bp, Homo sapien
gtttaatatgtaagcagccatgcct

SEQ ID NO: 5280424 - DNA, 25 bp, Homo sapien
aggcaacacagctgcgtccctgctg

SEQ ID NO: 5280425 - DNA, 25 bp, Homo sapien
gagtgaccctagagccctgtcaaca

SEQ ID NO: 5280426 - DNA, 25 bp, Homo sapien
ttccgcagggaagcgcctggtctgc

SEQ ID NO: 5280427 - DNA, 25 bp, Homo sapien
ttctatgaggtgcacacccttccgc

SEQ ID NO: 5280428 - DNA, 25 bp, Homo sapien
tgaatatattagaccctgagaagtt

SEQ ID NO: 5280429 - DNA, 25 bp, Homo sapien
gaatatattagaccctgagaagttt

SEQ ID NO: 5280430 - DNA, 25 bp, Homo sapien
tttgaatgctgtagtcaacccacca

SEQ ID NO: 5280431 - DNA, 25 bp, Homo sapien
ttttccctctcaataatggaggcag

SEQ ID NO: 5280432 - DNA, 25 bp, Homo sapien
aatggaggcagtcatttgttcactt

SEQ ID NO: 5280433 - DNA, 25 bp, Homo sapien
ctgtagtcaacccaccaggaaatgc

SEQ ID NO: 5280434 - DNA, 25 bp, Homo sapien
ttccaattctgtttacgtttgcttg

SEQ ID NO: 5280435 - DNA, 25 bp, Homo sapien
tggattgagtttaggtttccaattc

SEQ ID NO: 5280436 - DNA, 25 bp, Homo sapien
gaggagacatgggtatggattgagt

SEQ ID NO: 5280437 - DNA, 25 bp, Homo sapien
ccaattctgtttacgtttgcttggt

SEQ ID NO: 5280438 - DNA, 25 bp, Homo sapien
cattcaggcctttgatgtatttaaa

SEQ ID NO: 5280439 - DNA, 25 bp, Homo sapien
taattttaacacctacattcaggcc

SEQ ID NO: 5280440 - DNA, 25 bp, Homo sapien
aagactcttcttacccctgttgaat

SEQ ID NO: 5280441 - DNA, 25 bp, Homo sapien
taagaagccattccctaactcaagg

SEQ ID NO: 5280442 - DNA, 25 bp, Homo sapien
tgactaggcagactatgcaggcact

SEQ ID NO: 5280443 - DNA, 25 bp, Homo sapien
gaataactcaatttgcctctcggag

SEQ ID NO: 5280444 - DNA, 25 bp, Homo sapien
caaaacatgggtcagttgcactgca

SEQ ID NO: 5280445 - DNA, 25 bp, Homo sapien
tgaccaatggacttagggcatgctg

SEQ ID NO: 5280446 - DNA, 25 bp, Homo sapien
tgccagcttcatgggtcaaaggaga

SEQ ID NO: 5280447 - DNA, 25 bp, Homo sapien
ccagatacgggtatttgtaggtgag

SEQ ID NO: 5280448 - DNA, 25 bp, Homo sapien
catcctgtttgccagcttcatgggt

SEQ ID NO: 5280449 - DNA, 25 bp, Homo sapien
gatgagcaccctttgcaccagatac

SEQ ID NO: 5280450 - DNA, 25 bp, Homo sapien
ataattgccattcctagtgtgctcc

SEQ ID NO: 5280451 - DNA, 25 bp, Homo sapien
cataattgccattcctagtgtgctc

SEQ ID NO: 5280452 - DNA, 25 bp, Homo sapien
tcataattgccattcctagtgtgct

SEQ ID NO: 5280453 - DNA, 25 bp, Homo sapien
tcagcctccatcatcacagacagta

SEQ ID NO: 5280454 - DNA, 25 bp, Homo sapien
cctccatcatcacagacagtaaaag

SEQ ID NO: 5280455 - DNA, 25 bp, Homo sapien
agcctccatcatcacagacagtaaa

SEQ ID NO: 5280456 - DNA, 25 bp, Homo sapien
tccatcatcacagacagtaaaagtc

SEQ ID NO: 5280457 - DNA, 25 bp, Homo sapien
agggggtgtggcagggccctctgca

SEQ ID NO: 5280458 - DNA, 25 bp, Homo sapien
tttcctcctctgccattctttttct

SEQ ID NO: 5280459 - DNA, 25 bp, Homo sapien
ggtgtggcagggccctctgcatttc

SEQ ID NO: 5280460 - DNA, 25 bp, Homo sapien
tgtggcagggccctctgcatttcct

SEQ ID NO: 5280461 - DNA, 25 bp, Homo sapien
cagaactaacaatcatggagtgtaa

SEQ ID NO: 5280462 - DNA, 25 bp, Homo sapien
agaactaacaatcatggagtgtaag

SEQ ID NO: 5280463 - DNA, 25 bp, Homo sapien
tgtgtggaaccacacagaactaaca

SEQ ID NO: 5280464 - DNA, 25 bp, Homo sapien
gtggaaccacacagaactaacaatc

SEQ ID NO: 5280465 - DNA, 25 bp, Homo sapien
gccacctgaggacaactcattgacg

SEQ ID NO: 5280466 - DNA, 25 bp, Homo sapien
tgaggacaactcattgacgcagagc

SEQ ID NO: 5280467 - DNA, 25 bp, Homo sapien
gacaactcattgacgcagagccata

SEQ ID NO: 5280468 - DNA, 25 bp, Homo sapien
cattgacgcagagccatatctggat

SEQ ID NO: 5280469 - DNA, 25 bp, Homo sapien
tctgccagtgagctactgaagccct

SEQ ID NO: 5280470 - DNA, 25 bp, Homo sapien
tcttctctgccagtgagctactgaa

SEQ ID NO: 5280471 - DNA, 25 bp, Homo sapien
ttctctgccagtgagctactgaagc

SEQ ID NO: 5280472 - DNA, 25 bp, Homo sapien
catcttctctgccagtgagctactg

SEQ ID NO: 5280473 - DNA, 25 bp, Homo sapien
ccaaggccacaagggtcctggatct

SEQ ID NO: 5280474 - DNA, 25 bp, Homo sapien
tgagtgctccggtgggtgaggggca

SEQ ID NO: 5280475 - DNA, 25 bp, Homo sapien
cagcagctgagtgctccggtgggtg

SEQ ID NO: 5280476 - DNA, 25 bp, Homo sapien
caaggccacaagggtcctggatctc

SEQ ID NO: 5280477 - DNA, 25 bp, Homo sapien
tgtggtcgcattgctatacaatagc

SEQ ID NO: 5280478 - DNA, 25 bp, Homo sapien
cgcattgctatacaatagctttgat

SEQ ID NO: 5280479 - DNA, 25 bp, Homo sapien
gctatacaatagctttgattccaaa

SEQ ID NO: 5280480 - DNA, 25 bp, Homo sapien
gggatgtggtcgcattgctatacaa

SEQ ID NO: 5280481 - DNA, 25 bp, Homo sapien
ttgtatcccatgcttgatctgactg

SEQ ID NO: 5280482 - DNA, 25 bp, Homo sapien
gcctgatgaccatttgagtggcagc

SEQ ID NO: 5280483 - DNA, 25 bp, Homo sapien
gagattgaagaacaattgtatccca

SEQ ID NO: 5280484 - DNA, 25 bp, Homo sapien
ctgatatggaaatgcctgatgacca

SEQ ID NO: 5280485 - DNA, 25 bp, Homo sapien
agcttctcaggggtcacttgagcag

SEQ ID NO: 5280486 - DNA, 25 bp, Homo sapien
ctggagcagccaggatccagcttct

SEQ ID NO: 5280487 - DNA, 25 bp, Homo sapien
cttctcaggggtcacttgagcagcc

SEQ ID NO: 5280488 - DNA, 25 bp, Homo sapien
gagcagccaggatccagcttctcag

SEQ ID NO: 5280489 - DNA, 25 bp, Homo sapien
taagaattccctgcaggcaaatgaa

SEQ ID NO: 5280490 - DNA, 25 bp, Homo sapien
agtgcaccacgacgtttttctcagg

SEQ ID NO: 5280491 - DNA, 25 bp, Homo sapien
cagggctgtgccaatacctgccagg

SEQ ID NO: 5280492 - DNA, 25 bp, Homo sapien
cctgccaggttgtgagaagttcaca

SEQ ID NO: 5280493 - DNA, 25 bp, Homo sapien
catcttaaagtaacgttgttcaagc

SEQ ID NO: 5280494 - DNA, 25 bp, Homo sapien
ttgttcaagcattccagtgactccc

SEQ ID NO: 5280495 - DNA, 25 bp, Homo sapien
tctttcctttgatctagtctccacg

SEQ ID NO: 5280496 - DNA, 25 bp, Homo sapien
tagtctccacgcattgtcaaaatca

SEQ ID NO: 5280497 - DNA, 25 bp, Homo sapien
gcatagcaggtagatctgcagcccc

SEQ ID NO: 5280498 - DNA, 25 bp, Homo sapien
ccaggaaggggcatagcaggtagat

SEQ ID NO: 5280499 - DNA, 25 bp, Homo sapien
aaggggcatagcaggtagatctgca

SEQ ID NO: 5280500 - DNA, 25 bp, Homo sapien
gggcatagcaggtagatctgcagcc

SEQ ID NO: 5280501 - DNA, 25 bp, Homo sapien
gtaagactttatccacaagttaagc

SEQ ID NO: 5280502 - DNA, 25 bp, Homo sapien
tgtaagactttatccacaagttaag

SEQ ID NO: 5280503 - DNA, 25 bp, Homo sapien
gtctgtaagactttatccacaagtt

SEQ ID NO: 5280504 - DNA, 25 bp, Homo sapien
aagactttatccacaagttaagcaa

SEQ ID NO: 5280505 - DNA, 25 bp, Homo sapien
tggtgtaggacgctaccaccgccac

SEQ ID NO: 5280506 - DNA, 25 bp, Homo sapien
ttctctggcttcattatcttggtgt

SEQ ID NO: 5280507 - DNA, 25 bp, Homo sapien
cattatcttggtgtaggacgctacc

SEQ ID NO: 5280508 - DNA, 25 bp, Homo sapien
ctggcttcattatcttggtgtagga

SEQ ID NO: 5280509 - DNA, 25 bp, Homo sapien
tgttcccgaaggttggtctccacag

SEQ ID NO: 5280510 - DNA, 25 bp, Homo sapien
taccaaaggatccacttcagaggcc

SEQ ID NO: 5280511 - DNA, 25 bp, Homo sapien
tcctgttaagacaacctggtttcca

SEQ ID NO: 5280512 - DNA, 25 bp, Homo sapien
caaaagcggcagaaggaaaagccca

SEQ ID NO: 5280513 - DNA, 25 bp, Homo sapien
tggcccacatttagtccatgagaaa

SEQ ID NO: 5280514 - DNA, 25 bp, Homo sapien
agaacctaagatggctccactcagc

SEQ ID NO: 5280515 - DNA, 25 bp, Homo sapien
tcttcacccctctggtagccttgtt

SEQ ID NO: 5280516 - DNA, 25 bp, Homo sapien
tagccttgttgggtagaacctaaga

SEQ ID NO: 5280517 - DNA, 25 bp, Homo sapien
ggaaggaaagcaggttgtccatggc

SEQ ID NO: 5280518 - DNA, 25 bp, Homo sapien
aaggaaagcaggttgtccatggcac

SEQ ID NO: 5280519 - DNA, 25 bp, Homo sapien
aggaaagcaggttgtccatggcaca

SEQ ID NO: 5280520 - DNA, 25 bp, Homo sapien
ggaaagcaggttgtccatggcacaa

SEQ ID NO: 5280521 - DNA, 25 bp, Homo sapien
aattagttttcctttctgcagccac

SEQ ID NO: 5280522 - DNA, 25 bp, Homo sapien
ttagttttcctttctgcagccacag

SEQ ID NO: 5280523 - DNA, 25 bp, Homo sapien
ctgcctcttcaattagttttccttt

SEQ ID NO: 5280524 - DNA, 25 bp, Homo sapien
agttttcctttctgcagccacagtt

SEQ ID NO: 5280525 - DNA, 25 bp, Homo sapien
catttcctacacgaaacatcgtata

SEQ ID NO: 5280526 - DNA, 25 bp, Homo sapien
cacgaaacatcgtatattcctccat

SEQ ID NO: 5280527 - DNA, 25 bp, Homo sapien
gagatcctcacatttcctacacgaa

SEQ ID NO: 5280528 - DNA, 25 bp, Homo sapien
tctttgagatcctcacatttcctac

SEQ ID NO: 5280529 - DNA, 25 bp, Homo sapien
ttaccataagtccacgaatgcttct

SEQ ID NO: 5280530 - DNA, 25 bp, Homo sapien
taagtccacgaatgcttctaatagt

SEQ ID NO: 5280531 - DNA, 25 bp, Homo sapien
gtccacgaatgcttctaatagtctg

SEQ ID NO: 5280532 - DNA, 25 bp, Homo sapien
cgaatgcttctaatagtctgtgtat

SEQ ID NO: 5280533 - DNA, 25 bp, Homo sapien
caggactctcctgcacagggcttag

SEQ ID NO: 5280534 - DNA, 25 bp, Homo sapien
caagaggaacgctctagaaagctca

SEQ ID NO: 5280535 - DNA, 25 bp, Homo sapien
taacagggtagctctgaactgggta

SEQ ID NO: 5280536 - DNA, 25 bp, Homo sapien
gtgagtcagcgaatgtggtgtttcc

SEQ ID NO: 5280537 - DNA, 25 bp, Homo sapien
gaatttggagcctgtctctggtccc

SEQ ID NO: 5280538 - DNA, 25 bp, Homo sapien
cctgtctctggtcccagggttctat

SEQ ID NO: 5280539 - DNA, 25 bp, Homo sapien
gactgttgaatttggagcctgtctc

SEQ ID NO: 5280540 - DNA, 25 bp, Homo sapien
agcctgtctctggtcccagggttct

SEQ ID NO: 5280541 - DNA, 25 bp, Homo sapien
gaatttctaaaccatctaaacatat

SEQ ID NO: 5280542 - DNA, 25 bp, Homo sapien
tgaatttctaaaccatctaaacata

SEQ ID NO: 5280543 - DNA, 25 bp, Homo sapien
aatttctaaaccatctaaacatatt

SEQ ID NO: 5280544 - DNA, 25 bp, Homo sapien
gcttggggcagagcttagttcaaga

SEQ ID NO: 5280545 - DNA, 25 bp, Homo sapien
tgattccattgtgatctgagagaca

SEQ ID NO: 5280546 - DNA, 25 bp, Homo sapien
atttgattccattgtgatctgagag

SEQ ID NO: 5280547 - DNA, 25 bp, Homo sapien
ggcagagcttagttcaagacctgga

SEQ ID NO: 5280548 - DNA, 25 bp, Homo sapien
aatcacccatcatctctgtgcatca

SEQ ID NO: 5280549 - DNA, 25 bp, Homo sapien
atctctgtgcatcatgctgggagct

SEQ ID NO: 5280550 - DNA, 25 bp, Homo sapien
gctgcaaactggagctgttcctatt

SEQ ID NO: 5280551 - DNA, 25 bp, Homo sapien
cagaaatcacccatcatctctgtgc

SEQ ID NO: 5280552 - DNA, 25 bp, Homo sapien
ggtctctgaccatgattttaactgg

SEQ ID NO: 5280553 - DNA, 25 bp, Homo sapien
cagaaaactgccactgaaggctaaa

SEQ ID NO: 5280554 - DNA, 25 bp, Homo sapien
tgaatgttcaacgatgcggcatctg

SEQ ID NO: 5280555 - DNA, 25 bp, Homo sapien
gcatctgggccagttgtagagtatc

SEQ ID NO: 5280556 - DNA, 25 bp, Homo sapien
cagaggaactttgggcaagcctgcc

SEQ ID NO: 5280557 - DNA, 25 bp, Homo sapien
gacgtcacatgcaggaaagtcggga

SEQ ID NO: 5280558 - DNA, 25 bp, Homo sapien
tttgcaaagctgatggacgtcacat

SEQ ID NO: 5280559 - DNA, 25 bp, Homo sapien
ggaactttgggcaagcctgccattt

SEQ ID NO: 5280560 - DNA, 25 bp, Homo sapien
agattaacaaataggataaagggca

SEQ ID NO: 5280561 - DNA, 25 bp, Homo sapien
tacctccctgataaaacctgcccat

SEQ ID NO: 5280562 - DNA, 25 bp, Homo sapien
gtgccacctcatacattctgaccag

SEQ ID NO: 5280563 - DNA, 25 bp, Homo sapien
gaaacaggtgccacctcatacattc

SEQ ID NO: 5280564 - DNA, 25 bp, Homo sapien
gggattagcaattgagttttctcga

SEQ ID NO: 5280565 - DNA, 25 bp, Homo sapien
gaataacttgcttcccaaggatcca

SEQ ID NO: 5280566 - DNA, 25 bp, Homo sapien
aattggtgctgtagcagttcagagc

SEQ ID NO: 5280567 - DNA, 25 bp, Homo sapien
gttttctcgaagatgtacacatgga

SEQ ID NO: 5280568 - DNA, 25 bp, Homo sapien
gatcagccagcaaattaagacagga

SEQ ID NO: 5280569 - DNA, 25 bp, Homo sapien
gagtagtcactggtgggcgcaacac

SEQ ID NO: 5280570 - DNA, 25 bp, Homo sapien
caggaaccctcttggctgttcaggg

SEQ ID NO: 5280571 - DNA, 25 bp, Homo sapien
tctagggctctgatgatatgtggca

SEQ ID NO: 5280572 - DNA, 25 bp, Homo sapien
cttgtcatccatgccccaccagctg

SEQ ID NO: 5280573 - DNA, 25 bp, Homo sapien
aatatgcccttctcagatgctcttt

SEQ ID NO: 5280574 - DNA, 25 bp, Homo sapien
accagctggacccatccagatctgg

SEQ ID NO: 5280575 - DNA, 25 bp, Homo sapien
ccaatatgcccttctcagatgctct

SEQ ID NO: 5280576 - DNA, 25 bp, Homo sapien
gacaccagcatgcttcagatgccat

SEQ ID NO: 5280577 - DNA, 25 bp, Homo sapien
gtgtttgggcccctaagacaccagc

SEQ ID NO: 5280578 - DNA, 25 bp, Homo sapien
ccctaagacaccagcatgcttcaga

SEQ ID NO: 5280579 - DNA, 25 bp, Homo sapien
tctcctgtgtttgggcccctaagac

SEQ ID NO: 5280580 - DNA, 25 bp, Homo sapien
aggcagggcagctccagtgcactca

SEQ ID NO: 5280581 - DNA, 25 bp, Homo sapien
ccagaggcagggcagctccagtgca

SEQ ID NO: 5280582 - DNA, 25 bp, Homo sapien
agaggcagggcagctccagtgcact

SEQ ID NO: 5280583 - DNA, 25 bp, Homo sapien
ggcagggcagctccagtgcactcac

SEQ ID NO: 5280584 - DNA, 25 bp, Homo sapien
tgggagactgtgtgcaaggaagaca

SEQ ID NO: 5280585 - DNA, 25 bp, Homo sapien
agactgtgtgcaaggaagacaaagg

SEQ ID NO: 5280586 - DNA, 25 bp, Homo sapien
gggtccaagctggcaatgccctctt

SEQ ID NO: 5280587 - DNA, 25 bp, Homo sapien
aagacaaaggggtccaagctggcaa

SEQ ID NO: 5280588 - DNA, 25 bp, Homo sapien
tcttggtcaccatctcctctaatca

SEQ ID NO: 5280589 - DNA, 25 bp, Homo sapien
atcagcatgcacagcggaaatccta

SEQ ID NO: 5280590 - DNA, 25 bp, Homo sapien
gaaatcctactgataacagcccatg

SEQ ID NO: 5280591 - DNA, 25 bp, Homo sapien
tgctgtccaccgttcagggcctctt

SEQ ID NO: 5280592 - DNA, 25 bp, Homo sapien
taaacaggcatttagttttcagtct

SEQ ID NO: 5280593 - DNA, 25 bp, Homo sapien
tataatttgagttaaggcaaatacc

SEQ ID NO: 5280594 - DNA, 25 bp, Homo sapien
aaccacttggcttagtaaacaggca

SEQ ID NO: 5280595 - DNA, 25 bp, Homo sapien
tctggtgagattgtcctctgaggct

SEQ ID NO: 5280596 - DNA, 25 bp, Homo sapien
taatgatattaataagtgtgtcatc

SEQ ID NO: 5280597 - DNA, 25 bp, Homo sapien
gagggtttcagaattttgagcactc

SEQ ID NO: 5280598 - DNA, 25 bp, Homo sapien
gctggaatagttagctgctcagtgt

SEQ ID NO: 5280599 - DNA, 25 bp, Homo sapien
accagtgtgaaactgtcatctgtgc

SEQ ID NO: 5280600 - DNA, 25 bp, Homo sapien
agacaagtcttcaagtgttctgtta

SEQ ID NO: 5280601 - DNA, 25 bp, Homo sapien
ggcaacttcataaaagctacttaca

SEQ ID NO: 5280602 - DNA, 25 bp, Homo sapien
tcactggcaacttcataaaagctac

SEQ ID NO: 5280603 - DNA, 25 bp, Homo sapien
taaatgaatatagagggatatcact

SEQ ID NO: 5280604 - DNA, 25 bp, Homo sapien
cttttctttgctatccatgggctgt

SEQ ID NO: 5280605 - DNA, 25 bp, Homo sapien
catgggctgtaaatagttactggga

SEQ ID NO: 5280606 - DNA, 25 bp, Homo sapien
attttggatcatagagctgcttctc

SEQ ID NO: 5280607 - DNA, 25 bp, Homo sapien
gtattttggatcatagagctgcttc

SEQ ID NO: 5280608 - DNA, 25 bp, Homo sapien
tttaaagctaaacaatgctaggtcc

SEQ ID NO: 5280609 - DNA, 25 bp, Homo sapien
gcatttaaagctaaacaatgctagg

SEQ ID NO: 5280610 - DNA, 25 bp, Homo sapien
taaagctaaacaatgctaggtccat

SEQ ID NO: 5280611 - DNA, 25 bp, Homo sapien
catttaaagctaaacaatgctaggt

SEQ ID NO: 5280612 - DNA, 25 bp, Homo sapien
ctctttgtaatttgtcagatgacca

SEQ ID NO: 5280613 - DNA, 25 bp, Homo sapien
tctttgtaatttgtcagatgaccag

SEQ ID NO: 5280614 - DNA, 25 bp, Homo sapien
ctttgtaatttgtcagatgaccagg

SEQ ID NO: 5280615 - DNA, 25 bp, Homo sapien
ttgtaatttgtcagatgaccaggac

SEQ ID NO: 5280616 - DNA, 25 bp, Homo sapien
tgccagagatctattattttcccca

SEQ ID NO: 5280617 - DNA, 25 bp, Homo sapien
tggattcttgtcaaacctttcagaa

SEQ ID NO: 5280618 - DNA, 25 bp, Homo sapien
actggattcttgtcaaacctttcag

SEQ ID NO: 5280619 - DNA, 25 bp, Homo sapien
ctttcagaatgccagagatctatta

SEQ ID NO: 5280620 - DNA, 25 bp, Homo sapien
aaacagtagatgtaaggctctgcct

SEQ ID NO: 5280621 - DNA, 25 bp, Homo sapien
aaggcttcaggccatctgttgtagc

SEQ ID NO: 5280622 - DNA, 25 bp, Homo sapien
ttcttcaaacagtagatgtaaggct

SEQ ID NO: 5280623 - DNA, 25 bp, Homo sapien
cttctgaaggcttcaggccatctgt

SEQ ID NO: 5280624 - DNA, 25 bp, Homo sapien
tgcctactgtcacctgagcatcctg

SEQ ID NO: 5280625 - DNA, 25 bp, Homo sapien
aggtaattctcgtgttctcagtgtc

SEQ ID NO: 5280626 - DNA, 25 bp, Homo sapien
cacatgcctactgtcacctgagcat

SEQ ID NO: 5280627 - DNA, 25 bp, Homo sapien
ccaggactgatacctggaataggta

SEQ ID NO: 5280628 - DNA, 25 bp, Homo sapien
tgtagccttgtttctgagcctgttt

SEQ ID NO: 5280629 - DNA, 25 bp, Homo sapien
gatgtagccttgtttctgagcctgt

SEQ ID NO: 5280630 - DNA, 25 bp, Homo sapien
cttagatgtagccttgtttctgagc

SEQ ID NO: 5280631 - DNA, 25 bp, Homo sapien
tagatgtagccttgtttctgagcct

SEQ ID NO: 5280632 - DNA, 25 bp, Homo sapien
gacgcgtctatcctatggttcctgc

SEQ ID NO: 5280633 - DNA, 25 bp, Homo sapien
gtgtcctggaatatagacgcgtcta

SEQ ID NO: 5280634 - DNA, 25 bp, Homo sapien
cgctgagcatcttataggtgtcctg

SEQ ID NO: 5280635 - DNA, 25 bp, Homo sapien
cactttataggtgtcctcgctgagc

SEQ ID NO: 5280636 - DNA, 25 bp, Homo sapien
tgtgagaaccgcgatgatgccagat

SEQ ID NO: 5280637 - DNA, 25 bp, Homo sapien
ccgctgtgagaaccgcgatgatgcc

SEQ ID NO: 5280638 - DNA, 25 bp, Homo sapien
catcagccgctgtgagaaccgcgat

SEQ ID NO: 5280639 - DNA, 25 bp, Homo sapien
aaccgcgatgatgccagatcttgcc

SEQ ID NO: 5280640 - DNA, 25 bp, Homo sapien
tagtgggtgtctcaagtaggattcc

SEQ ID NO: 5280641 - DNA, 25 bp, Homo sapien
tcttccaggtctttagtgggtgtct

SEQ ID NO: 5280642 - DNA, 25 bp, Homo sapien
gtctcaagtaggattccagatctct

SEQ ID NO: 5280643 - DNA, 25 bp, Homo sapien
ccaggtctttagtgggtgtctcaag

SEQ ID NO: 5280644 - DNA, 25 bp, Homo sapien
tccttgtgcagtacctcagccattc

SEQ ID NO: 5280645 - DNA, 25 bp, Homo sapien
ttccttgtgcagtacctcagccatt

SEQ ID NO: 5280646 - DNA, 25 bp, Homo sapien
cttccttgtgcagtacctcagccat

SEQ ID NO: 5280647 - DNA, 25 bp, Homo sapien
ttctggaatcagctcttaacagaaa

SEQ ID NO: 5280648 - DNA, 25 bp, Homo sapien
gacttaagcagagattcatccacag

SEQ ID NO: 5280649 - DNA, 25 bp, Homo sapien
agaaaatcttcagtggaacagctgg

SEQ ID NO: 5280650 - DNA, 25 bp, Homo sapien
gctcaacataacatgctgcccagta

SEQ ID NO: 5280651 - DNA, 25 bp, Homo sapien
tctgagtatagcttaagttcccgtc

SEQ ID NO: 5280652 - DNA, 25 bp, Homo sapien
ggactagtacacctcccttcctcat

SEQ ID NO: 5280653 - DNA, 25 bp, Homo sapien
tgtttttatcagttgcgtgaaaacg

SEQ ID NO: 5280654 - DNA, 25 bp, Homo sapien
ttttagtattcctcagcacttggac

SEQ ID NO: 5280655 - DNA, 25 bp, Homo sapien
tttgtaaccagggaaatgaatgcca

SEQ ID NO: 5280656 - DNA, 25 bp, Homo sapien
ctcaagttattgatgaatctggaaa

SEQ ID NO: 5280657 - DNA, 25 bp, Homo sapien
aagccatttttgatactcaagttat

SEQ ID NO: 5280658 - DNA, 25 bp, Homo sapien
atgaatgccacttttacattctgtt

SEQ ID NO: 5280659 - DNA, 25 bp, Homo sapien
aaaatcaaaggtgtcttttgcaact

SEQ ID NO: 5280660 - DNA, 25 bp, Homo sapien
aatcaaaggtgtcttttgcaactga

SEQ ID NO: 5280661 - DNA, 25 bp, Homo sapien
gtctctcctctattaaccatgttga

SEQ ID NO: 5280662 - DNA, 25 bp, Homo sapien
tcctctattaaccatgttgatctta

SEQ ID NO: 5280663 - DNA, 25 bp, Homo sapien
tgaattaccgtactaagtccctagc

SEQ ID NO: 5280664 - DNA, 25 bp, Homo sapien
gcatgcttatagatcccagaatagc

SEQ ID NO: 5280665 - DNA, 25 bp, Homo sapien
gctttaagtcttgtgtctgaattac

SEQ ID NO: 5280666 - DNA, 25 bp, Homo sapien
catccacttgcatgcttatagatcc

SEQ ID NO: 5280667 - DNA, 25 bp, Homo sapien
cgtttccttacttgagtaaagaatg

SEQ ID NO: 5280668 - DNA, 25 bp, Homo sapien
gacatgacctcgtttccttacttga

SEQ ID NO: 5280669 - DNA, 25 bp, Homo sapien
cagccctgatagactgccgacatga

SEQ ID NO: 5280670 - DNA, 25 bp, Homo sapien
tagactgccgacatgacctcgtttc

SEQ ID NO: 5280671 - DNA, 25 bp, Homo sapien
gatgcaactggtgaacaataccata

SEQ ID NO: 5280672 - DNA, 25 bp, Homo sapien
gaattttaatctctggaggtaagac

SEQ ID NO: 5280673 - DNA, 25 bp, Homo sapien
taatctctggaggtaagacttggat

SEQ ID NO: 5280674 - DNA, 25 bp, Homo sapien
agacttggattgcatttcttaaagg

SEQ ID NO: 5280675 - DNA, 25 bp, Homo sapien
cacctgtagcactctattggccatg

SEQ ID NO: 5280676 - DNA, 25 bp, Homo sapien
tgtagcactctattggccatgacca

SEQ ID NO: 5280677 - DNA, 25 bp, Homo sapien
actctattggccatgaccacacctg

SEQ ID NO: 5280678 - DNA, 25 bp, Homo sapien
gttcacctgtagcactctattggcc

SEQ ID NO: 5280679 - DNA, 25 bp, Homo sapien
catgttcagggataaatacaagata

SEQ ID NO: 5280680 - DNA, 25 bp, Homo sapien
gtacaaaacatgttcagggataaat

SEQ ID NO: 5280681 - DNA, 25 bp, Homo sapien
gagaactataaacggaagggacaga

SEQ ID NO: 5280682 - DNA, 25 bp, Homo sapien
caaaacatgttcagggataaataca

SEQ ID NO: 5280683 - DNA, 25 bp, Homo sapien
tcttcatcctgctccacaatcagaa

SEQ ID NO: 5280684 - DNA, 25 bp, Homo sapien
cctcttcatcctgctccacaatcag

SEQ ID NO: 5280685 - DNA, 25 bp, Homo sapien
ttcatcctgctccacaatcagaaat

SEQ ID NO: 5280686 - DNA, 25 bp, Homo sapien
catcctgctccacaatcagaaattc

SEQ ID NO: 5280687 - DNA, 25 bp, Homo sapien
tctattactgcacattacaacctgc

SEQ ID NO: 5280688 - DNA, 25 bp, Homo sapien
tggagtcctcctgtggggaacgtct

SEQ ID NO: 5280689 - DNA, 25 bp, Homo sapien
gtgtccatctggatatctattactg

SEQ ID NO: 5280690 - DNA, 25 bp, Homo sapien
tactgcacattacaacctgccttgc

SEQ ID NO: 5280691 - DNA, 25 bp, Homo sapien
ccagagagacaatagaaggtagacg

SEQ ID NO: 5280692 - DNA, 25 bp, Homo sapien
tagatactcaggcatactcagcttg

SEQ ID NO: 5280693 - DNA, 25 bp, Homo sapien
gagcaactaccaattgatgcagcag

SEQ ID NO: 5280694 - DNA, 25 bp, Homo sapien
tcttatttgaacagccggagcattc

SEQ ID NO: 5280695 - DNA, 25 bp, Homo sapien
gatcctagggttgctgggctcaacg

SEQ ID NO: 5280696 - DNA, 25 bp, Homo sapien
ctagggactgcgctgatgaggacct

SEQ ID NO: 5280697 - DNA, 25 bp, Homo sapien
ttgctgggctcaacgctagggactg

SEQ ID NO: 5280698 - DNA, 25 bp, Homo sapien
gtctttcaaggccttgatcctaggg

SEQ ID NO: 5280699 - DNA, 25 bp, Homo sapien
gagaaataagttggctctaatcctc

SEQ ID NO: 5280700 - DNA, 25 bp, Homo sapien
gtgagaaataagttggctctaatcc

SEQ ID NO: 5280701 - DNA, 25 bp, Homo sapien
gaaataagttggctctaatcctcat

SEQ ID NO: 5280702 - DNA, 25 bp, Homo sapien
tgagaaataagttggctctaatcct

SEQ ID NO: 5280703 - DNA, 25 bp, Homo sapien
ggtgttactcaaggagtgtcttatc

SEQ ID NO: 5280704 - DNA, 25 bp, Homo sapien
gttactcaaggagtgtcttatctgt

SEQ ID NO: 5280705 - DNA, 25 bp, Homo sapien
cctttggtgttactcaaggagtgtc

SEQ ID NO: 5280706 - DNA, 25 bp, Homo sapien
tgcctttggtgttactcaaggagtg

SEQ ID NO: 5280707 - DNA, 25 bp, Homo sapien
tatgggttcccacaagtgtgctttg

SEQ ID NO: 5280708 - DNA, 25 bp, Homo sapien
atagatcccgtgtttttcagcaagg

SEQ ID NO: 5280709 - DNA, 25 bp, Homo sapien
gatgatctcagactcaattatgggt

SEQ ID NO: 5280710 - DNA, 25 bp, Homo sapien
tcagcaaggttctgtaagcttcctg

SEQ ID NO: 5280711 - DNA, 25 bp, Homo sapien
tccactgccagaagtattcctcctc

SEQ ID NO: 5280712 - DNA, 25 bp, Homo sapien
gccagaagtattcctcctcatcttc

SEQ ID NO: 5280713 - DNA, 25 bp, Homo sapien
cactgccagaagtattcctcctcat

SEQ ID NO: 5280714 - DNA, 25 bp, Homo sapien
tgccagaagtattcctcctcatctt

SEQ ID NO: 5280715 - DNA, 25 bp, Homo sapien
tttcctcagtggatctttgtcatag

SEQ ID NO: 5280716 - DNA, 25 bp, Homo sapien
ttgtcataggcaaaacgtgagctac

SEQ ID NO: 5280717 - DNA, 25 bp, Homo sapien
tgtggtttcttagccagccagaaaa

SEQ ID NO: 5280718 - DNA, 25 bp, Homo sapien
gtctgagaaattatactgtgtggtt

SEQ ID NO: 5280719 - DNA, 25 bp, Homo sapien
agcactcccgttgctggatttgcac

SEQ ID NO: 5280720 - DNA, 25 bp, Homo sapien
ttagttctaccacctgtttcttgat

SEQ ID NO: 5280721 - DNA, 25 bp, Homo sapien
tgtttcttgatgaagcagcaccagc

SEQ ID NO: 5280722 - DNA, 25 bp, Homo sapien
caccagcagcactcccgttgctgga

SEQ ID NO: 5280723 - DNA, 25 bp, Homo sapien
ctataattggagatataggtggcta

SEQ ID NO: 5280724 - DNA, 25 bp, Homo sapien
tatccttttcattaagtactcggga

SEQ ID NO: 5280725 - DNA, 25 bp, Homo sapien
tcttgggcagatgtaagctgtaatc

SEQ ID NO: 5280726 - DNA, 25 bp, Homo sapien
gccagtagactgacacctcagtaag

SEQ ID NO: 5280727 - DNA, 25 bp, Homo sapien
tctattttcttaaggtggccctgca

SEQ ID NO: 5280728 - DNA, 25 bp, Homo sapien
tacacctgggaggtattctattttc

SEQ ID NO: 5280729 - DNA, 25 bp, Homo sapien
ctcttccaggccaattagtcttcct

SEQ ID NO: 5280730 - DNA, 25 bp, Homo sapien
aaagggcaggttctcacctcttcct

SEQ ID NO: 5280731 - DNA, 25 bp, Homo sapien
caataatcgccacaaagggcaggtt

SEQ ID NO: 5280732 - DNA, 25 bp, Homo sapien
tttttgcccaataatcgccacaaag

SEQ ID NO: 5280733 - DNA, 25 bp, Homo sapien
gcgttcaatcagcaatgttgaggta

SEQ ID NO: 5280734 - DNA, 25 bp, Homo sapien
tgtcacctcgcacatattgtccttg

SEQ ID NO: 5280735 - DNA, 25 bp, Homo sapien
ggtttcctgtggattgcgttcaatc

SEQ ID NO: 5280736 - DNA, 25 bp, Homo sapien
gcatggtagattcctgtctccaaaa

SEQ ID NO: 5280737 - DNA, 25 bp, Homo sapien
ttccatgtaagcaaactattgatga

SEQ ID NO: 5280738 - DNA, 25 bp, Homo sapien
caaactattgatgaatgtggagtct

SEQ ID NO: 5280739 - DNA, 25 bp, Homo sapien
tgtaagcaaactattgatgaatgtg

SEQ ID NO: 5280740 - DNA, 25 bp, Homo sapien
actattgatgaatgtggagtctaag

SEQ ID NO: 5280741 - DNA, 25 bp, Homo sapien
ccggtccttgctggcccatggtctg

SEQ ID NO: 5280742 - DNA, 25 bp, Homo sapien
cccatggtctggtgataatatcaac

SEQ ID NO: 5280743 - DNA, 25 bp, Homo sapien
cgaggactaatcctgaccaggtccc

SEQ ID NO: 5280744 - DNA, 25 bp, Homo sapien
tgagtgctggtctactgcctccgag

SEQ ID NO: 5280745 - DNA, 25 bp, Homo sapien
cataaagcagaactccagagtcatt

SEQ ID NO: 5280746 - DNA, 25 bp, Homo sapien
taatagtccaagacattgtaaagag

SEQ ID NO: 5280747 - DNA, 25 bp, Homo sapien
tgtgcaagctttcaaggctgctcgg

SEQ ID NO: 5280748 - DNA, 25 bp, Homo sapien
taaatgttcccaaactaatagtcca

SEQ ID NO: 5280749 - DNA, 25 bp, Homo sapien
gctgttgctcgaaccttcagattct

SEQ ID NO: 5280750 - DNA, 25 bp, Homo sapien
ctgtcgtggacacaaagtgtttctg

SEQ ID NO: 5280751 - DNA, 25 bp, Homo sapien
ttctgctgttgctcgaaccttcaga

SEQ ID NO: 5280752 - DNA, 25 bp, Homo sapien
gcagacttgtttaggaagctgtcgt

SEQ ID NO: 5280753 - DNA, 25 bp, Homo sapien
tgccagccacgtctaacagggtcaa

SEQ ID NO: 5280754 - DNA, 25 bp, Homo sapien
aaagcactggtagcgtgccagccac

SEQ ID NO: 5280755 - DNA, 25 bp, Homo sapien
tcagggctgtagagataaagcactg

SEQ ID NO: 5280756 - DNA, 25 bp, Homo sapien
tcggcctattttagcctttctcaaa

SEQ ID NO: 5280757 - DNA, 25 bp, Homo sapien
tggagagcattcgtcttctcctagg

SEQ ID NO: 5280758 - DNA, 25 bp, Homo sapien
cctggagagcattcgtcttctccta

SEQ ID NO: 5280759 - DNA, 25 bp, Homo sapien
gagagcattcgtcttctcctaggac

SEQ ID NO: 5280760 - DNA, 25 bp, Homo sapien
aggggtggaaaaagtgagtctcctg

SEQ ID NO: 5280761 - DNA, 25 bp, Homo sapien
ctgtctccagggcagtccgtcgacc

SEQ ID NO: 5280762 - DNA, 25 bp, Homo sapien
gagatgttctccttatagcaggcaa

SEQ ID NO: 5280763 - DNA, 25 bp, Homo sapien
agggcagtccgtcgacccagagcca

SEQ ID NO: 5280764 - DNA, 25 bp, Homo sapien
tgtcacgtgactatgcttctgctct

SEQ ID NO: 5280765 - DNA, 25 bp, Homo sapien
agcaggacatcaaggatgaaaggtt

SEQ ID NO: 5280766 - DNA, 25 bp, Homo sapien
ggatgaaaggtttatatgtagacct

SEQ ID NO: 5280767 - DNA, 25 bp, Homo sapien
ctggaaaggtagctggagtgtcatg

SEQ ID NO: 5280768 - DNA, 25 bp, Homo sapien
aaaggtagctggagtgtcatgagtg

SEQ ID NO: 5280769 - DNA, 25 bp, Homo sapien
taggttttgagccaacatgactctg

SEQ ID NO: 5280770 - DNA, 25 bp, Homo sapien
tttgagccaacatgactctgaaggt

SEQ ID NO: 5280771 - DNA, 25 bp, Homo sapien
cttaggttttgagccaacatgactc

SEQ ID NO: 5280772 - DNA, 25 bp, Homo sapien
ggttttgagccaacatgactctgaa

SEQ ID NO: 5280773 - DNA, 25 bp, Homo sapien
gacatcgggctgagcagtgccaata

SEQ ID NO: 5280774 - DNA, 25 bp, Homo sapien
tgtactgcactatagaggatgacct

SEQ ID NO: 5280775 - DNA, 25 bp, Homo sapien
gaaaaataatgagccaacgtggcca

SEQ ID NO: 5280776 - DNA, 25 bp, Homo sapien
taaatgtgttctgccgacatcgggc

SEQ ID NO: 5280777 - DNA, 25 bp, Homo sapien
gtctatggggacgtactgtctctta

SEQ ID NO: 5280778 - DNA, 25 bp, Homo sapien
atttgatcatgattgtgcaagactc

SEQ ID NO: 5280779 - DNA, 25 bp, Homo sapien
aagtctccatctcagggctagtgga

SEQ ID NO: 5280780 - DNA, 25 bp, Homo sapien
ccactgggaggctaaaagcagcacc

SEQ ID NO: 5280781 - DNA, 25 bp, Homo sapien
tagctctctccagtggatcctgtga

SEQ ID NO: 5280782 - DNA, 25 bp, Homo sapien
atagctctctccagtggatcctgtg

SEQ ID NO: 5280783 - DNA, 25 bp, Homo sapien
gctgggggagtaacacccaagccaa

SEQ ID NO: 5280784 - DNA, 25 bp, Homo sapien
catagctctctccagtggatcctgt

SEQ ID NO: 5280785 - DNA, 25 bp, Homo sapien
acaaactagctcaaagcaccacaag

SEQ ID NO: 5280786 - DNA, 25 bp, Homo sapien
actagctcaaagcaccacaaggcca

SEQ ID NO: 5280787 - DNA, 25 bp, Homo sapien
ggcaacaaactagctcaaagcacca

SEQ ID NO: 5280788 - DNA, 25 bp, Homo sapien
aactagctcaaagcaccacaaggcc

SEQ ID NO: 5280789 - DNA, 25 bp, Homo sapien
tcagtgaaggggcaaataccaggat

SEQ ID NO: 5280790 - DNA, 25 bp, Homo sapien
agtgaaggggcaaataccaggatgt

SEQ ID NO: 5280791 - DNA, 25 bp, Homo sapien
tagctctacaggtgcttgtgtcatt

SEQ ID NO: 5280792 - DNA, 25 bp, Homo sapien
ataccaggatgtttagctctacagg

SEQ ID NO: 5280793 - DNA, 25 bp, Homo sapien
tcctgctgtctaaccagttggtcat

SEQ ID NO: 5280794 - DNA, 25 bp, Homo sapien
gtatttcctgctgtctaaccagttg

SEQ ID NO: 5280795 - DNA, 25 bp, Homo sapien
tatttcctgctgtctaaccagttgg

SEQ ID NO: 5280796 - DNA, 25 bp, Homo sapien
tttcctgctgtctaaccagttggtc

SEQ ID NO: 5280797 - DNA, 25 bp, Homo sapien
tagaaaagcacgtgcatgaagggcc

SEQ ID NO: 5280798 - DNA, 25 bp, Homo sapien
cagcagggcaccacaagaaggtgtg

SEQ ID NO: 5280799 - DNA, 25 bp, Homo sapien
taaatcataaccaggtatgaatgac

SEQ ID NO: 5280800 - DNA, 25 bp, Homo sapien
taaagcagagtatgcagacctagaa

SEQ ID NO: 5280801 - DNA, 25 bp, Homo sapien
gccacaagcaaatctgaaaggcgga

SEQ ID NO: 5280802 - DNA, 25 bp, Homo sapien
ttaaatcgaagagagctgggaaagt

SEQ ID NO: 5280803 - DNA, 25 bp, Homo sapien
ctcagtggcagtctctgtagcctgt

SEQ ID NO: 5280804 - DNA, 25 bp, Homo sapien
taaagccaatccttcatgctcagtg

SEQ ID NO: 5280805 - DNA, 25 bp, Homo sapien
gagcaatgctcaagacttcagtctg

SEQ ID NO: 5280806 - DNA, 25 bp, Homo sapien
acttcagtctgtccagatgattcca

SEQ ID NO: 5280807 - DNA, 25 bp, Homo sapien
tcttcccgtcagagcaatgctcaag

SEQ ID NO: 5280808 - DNA, 25 bp, Homo sapien
ctgtggaaagctcttcccgtcagag

SEQ ID NO: 5280809 - DNA, 25 bp, Homo sapien
ttctattatccccagttgtagagca

SEQ ID NO: 5280810 - DNA, 25 bp, Homo sapien
cccagttgtagagcatagcacagct

SEQ ID NO: 5280811 - DNA, 25 bp, Homo sapien
cacccttctattatccccagttgta

SEQ ID NO: 5280812 - DNA, 25 bp, Homo sapien
agcacagcttaagcttggagatggg

SEQ ID NO: 5280813 - DNA, 25 bp, Homo sapien
ccatggcttttgaggatctggcctc

SEQ ID NO: 5280814 - DNA, 25 bp, Homo sapien
ccatggtggcaattccactgaactt

SEQ ID NO: 5280815 - DNA, 25 bp, Homo sapien
tggccatggtggcaattccactgaa

SEQ ID NO: 5280816 - DNA, 25 bp, Homo sapien
ggccatggtggcaattccactgaac

SEQ ID NO: 5280817 - DNA, 25 bp, Homo sapien
ccagaagaatttgagggctgatcca

SEQ ID NO: 5280818 - DNA, 25 bp, Homo sapien
gaagatgaatggaagtggaatccca

SEQ ID NO: 5280819 - DNA, 25 bp, Homo sapien
tccagtacagatgtcttgcatttcc

SEQ ID NO: 5280820 - DNA, 25 bp, Homo sapien
ggctgatccaagagctttactggca

SEQ ID NO: 5280821 - DNA, 25 bp, Homo sapien
cgggcaccacgagcatcaagctcaa

SEQ ID NO: 5280822 - DNA, 25 bp, Homo sapien
aagcttgtggaagagcgggcaccac

SEQ ID NO: 5280823 - DNA, 25 bp, Homo sapien
atgcagcacgcaatcaccatcagag

SEQ ID NO: 5280824 - DNA, 25 bp, Homo sapien
tccttgcccaagcttgtggaagagc

SEQ ID NO: 5280825 - DNA, 25 bp, Homo sapien
gcatacaagccttgtgtttcacagg

SEQ ID NO: 5280826 - DNA, 25 bp, Homo sapien
agaacgagaagagtcactgctcccc

SEQ ID NO: 5280827 - DNA, 25 bp, Homo sapien
gctgagaacgagaagagtcactgct

SEQ ID NO: 5280828 - DNA, 25 bp, Homo sapien
ggttgggcatacaagccttgtgttt

SEQ ID NO: 5280829 - DNA, 25 bp, Homo sapien
cttttctagcactaactgtactggc

SEQ ID NO: 5280830 - DNA, 25 bp, Homo sapien
aatgatattgtcaattccagcactg

SEQ ID NO: 5280831 - DNA, 25 bp, Homo sapien
gcactgaaagaagggattccttttc

SEQ ID NO: 5280832 - DNA, 25 bp, Homo sapien
ggtcctggtgattagatagattgtc

SEQ ID NO: 5280833 - DNA, 25 bp, Homo sapien
gccaaacttagagcccagcactggt

SEQ ID NO: 5280834 - DNA, 25 bp, Homo sapien
aacttagagcccagcactggtttgg

SEQ ID NO: 5280835 - DNA, 25 bp, Homo sapien
tctttgccaaacttagagcccagca

SEQ ID NO: 5280836 - DNA, 25 bp, Homo sapien
gaccctctttgccaaacttagagcc

SEQ ID NO: 5280837 - DNA, 25 bp, Homo sapien
ctagaaattatgaaaatggagacag

SEQ ID NO: 5280838 - DNA, 25 bp, Homo sapien
tagaaattatgaaaatggagacagg

SEQ ID NO: 5280839 - DNA, 25 bp, Homo sapien
agacaggaaacaagaagatcctcat

SEQ ID NO: 5280840 - DNA, 25 bp, Homo sapien
tggagacaggaaacaagaagatcct

SEQ ID NO: 5280841 - DNA, 25 bp, Homo sapien
gcagataggagaggcatccaggtca

SEQ ID NO: 5280842 - DNA, 25 bp, Homo sapien
cattgaaccatgacagaactgcgca

SEQ ID NO: 5280843 - DNA, 25 bp, Homo sapien
aagaggtgccaactgccagtgcagg

SEQ ID NO: 5280844 - DNA, 25 bp, Homo sapien
ggttctgtccccttccgttgatgct

SEQ ID NO: 5280845 - DNA, 25 bp, Homo sapien
aataagccattgaaaccattttctc

SEQ ID NO: 5280846 - DNA, 25 bp, Homo sapien
tgctgatcatttgggttagtttgtc

SEQ ID NO: 5280847 - DNA, 25 bp, Homo sapien
ctggacaactccctgtcccgaggga

SEQ ID NO: 5280848 - DNA, 25 bp, Homo sapien
cctcctgttactgctcgcttctgga

SEQ ID NO: 5280849 - DNA, 25 bp, Homo sapien
tgttactgctcgcttctggacaact

SEQ ID NO: 5280850 - DNA, 25 bp, Homo sapien
tggcagaggaagagacttgatgaca

SEQ ID NO: 5280851 - DNA, 25 bp, Homo sapien
tgacaatgaagagagtttccatttc

SEQ ID NO: 5280852 - DNA, 25 bp, Homo sapien
gacaatgaagagagtttccatttct

SEQ ID NO: 5280853 - DNA, 25 bp, Homo sapien
gaagagacttgatgacaatgaagag

SEQ ID NO: 5280854 - DNA, 25 bp, Homo sapien
gcaagccagactgtgcgctgactta

SEQ ID NO: 5280855 - DNA, 25 bp, Homo sapien
agcctgtaagccctggaaactcaat

SEQ ID NO: 5280856 - DNA, 25 bp, Homo sapien
tgtgcgctgacttacaggagaggaa

SEQ ID NO: 5280857 - DNA, 25 bp, Homo sapien
tggaaactcaatagaataactcccc

SEQ ID NO: 5280858 - DNA, 25 bp, Homo sapien
tgtcctgactgttgtgcagctattg

SEQ ID NO: 5280859 - DNA, 25 bp, Homo sapien
ctctgtcctgactgttgtgcagcta

SEQ ID NO: 5280860 - DNA, 25 bp, Homo sapien
cctgactgttgtgcagctattggtg

SEQ ID NO: 5280861 - DNA, 25 bp, Homo sapien
tgactgttgtgcagctattggtgag

SEQ ID NO: 5280862 - DNA, 25 bp, Homo sapien
aggtggcagagatggactttccaac

SEQ ID NO: 5280863 - DNA, 25 bp, Homo sapien
gatcagacatttgaacaaggtggca

SEQ ID NO: 5280864 - DNA, 25 bp, Homo sapien
tggcagagatggactttccaaccat

SEQ ID NO: 5280865 - DNA, 25 bp, Homo sapien
cagctggtgatcagacatttgaaca

SEQ ID NO: 5280866 - DNA, 25 bp, Homo sapien
ttcccagcatcctttatgaatgtgc

SEQ ID NO: 5280867 - DNA, 25 bp, Homo sapien
atgtgcacagccaagttcactaaag

SEQ ID NO: 5280868 - DNA, 25 bp, Homo sapien
tcctttatgaatgtgcacagccaag

SEQ ID NO: 5280869 - DNA, 25 bp, Homo sapien
aagcttcttcccagcatcctttatg

SEQ ID NO: 5280870 - DNA, 25 bp, Homo sapien
actgctgtttccacttgtcctgatt

SEQ ID NO: 5280871 - DNA, 25 bp, Homo sapien
gcagagcggacgtctttgagcaaca

SEQ ID NO: 5280872 - DNA, 25 bp, Homo sapien
cctagcgtcctcttttgctctgaga

SEQ ID NO: 5280873 - DNA, 25 bp, Homo sapien
cattaggttacatccctcactgctg

SEQ ID NO: 5280874 - DNA, 25 bp, Homo sapien
tattcacgtggccaattgagagttc

SEQ ID NO: 5280875 - DNA, 25 bp, Homo sapien
gccaattgagagttccatatgagtg

SEQ ID NO: 5280876 - DNA, 25 bp, Homo sapien
tccatatgagtggttggttcactaa

SEQ ID NO: 5280877 - DNA, 25 bp, Homo sapien
gagttccatatgagtggttggttca

SEQ ID NO: 5280878 - DNA, 25 bp, Homo sapien
tctcagagactattttctcagtacc

SEQ ID NO: 5280879 - DNA, 25 bp, Homo sapien
gtaccaaggcagatttctatgtggc

SEQ ID NO: 5280880 - DNA, 25 bp, Homo sapien
ttgtggtgacaacttctcagagact

SEQ ID NO: 5280881 - DNA, 25 bp, Homo sapien
gttagggataatttgtggtgacaac

SEQ ID NO: 5280882 - DNA, 25 bp, Homo sapien
ctgtgggaaactcatcacacttgtc

SEQ ID NO: 5280883 - DNA, 25 bp, Homo sapien
gaactgtgggaaactcatcacactt

SEQ ID NO: 5280884 - DNA, 25 bp, Homo sapien
aactgtgggaaactcatcacacttg

SEQ ID NO: 5280885 - DNA, 25 bp, Homo sapien
tgaactgtgggaaactcatcacact

SEQ ID NO: 5280886 - DNA, 25 bp, Homo sapien
tcagactcgatcttgagaacgtgct

SEQ ID NO: 5280887 - DNA, 25 bp, Homo sapien
gaatcagactcgatcttgagaacgt

SEQ ID NO: 5280888 - DNA, 25 bp, Homo sapien
tgagaatcagactcgatcttgagaa

SEQ ID NO: 5280889 - DNA, 25 bp, Homo sapien
atcagactcgatcttgagaacgtgc

SEQ ID NO: 5280890 - DNA, 25 bp, Homo sapien
aatgaacttgtctggtgatggctcc

SEQ ID NO: 5280891 - DNA, 25 bp, Homo sapien
tatattcgacgttcttattccagga

SEQ ID NO: 5280892 - DNA, 25 bp, Homo sapien
tgtgaaaggtgcattaaggcctgct

SEQ ID NO: 5280893 - DNA, 25 bp, Homo sapien
gatggctccgtcacattaatgtctg

SEQ ID NO: 5280894 - DNA, 25 bp, Homo sapien
ctgcgtgtgcgagtcaggaatgtga

SEQ ID NO: 5280895 - DNA, 25 bp, Homo sapien
ttgtttagagtgaacccaaatggag

SEQ ID NO: 5280896 - DNA, 25 bp, Homo sapien
tgaacccaaatggagtcgatttaac

SEQ ID NO: 5280897 - DNA, 25 bp, Homo sapien
ctggaatgtgagcttgtttagagtg

SEQ ID NO: 5280898 - DNA, 25 bp, Homo sapien
tgtgagcttgtttagagtgaaccca

SEQ ID NO: 5280899 - DNA, 25 bp, Homo sapien
caagaagctgactttcctagtgcct

SEQ ID NO: 5280900 - DNA, 25 bp, Homo sapien
gtccaaaattaaccaatcctgattc

SEQ ID NO: 5280901 - DNA, 25 bp, Homo sapien
ggtcctactgagaatactccaaagt

SEQ ID NO: 5280902 - DNA, 25 bp, Homo sapien
gggggtgccactatgatttctgcca

SEQ ID NO: 5280903 - DNA, 25 bp, Homo sapien
cgtacccacggtctcttttcgcatt

SEQ ID NO: 5280904 - DNA, 25 bp, Homo sapien
caatcttccaaaacctagggacttg

SEQ ID NO: 5280905 - DNA, 25 bp, Homo sapien
gcaaagcccaagttctgtcttccgt

SEQ ID NO: 5280906 - DNA, 25 bp, Homo sapien
cgagcagcggcattatatcatttcc

SEQ ID NO: 5280907 - DNA, 25 bp, Homo sapien
ccaacagtgtccgatgcacttgtaa

SEQ ID NO: 5280908 - DNA, 25 bp, Homo sapien
ccgatgcacttgtaatgtagatcat

SEQ ID NO: 5280909 - DNA, 25 bp, Homo sapien
tatgaggaatttggcatctcctggc

SEQ ID NO: 5280910 - DNA, 25 bp, Homo sapien
tatatgaggaatttggcatctcctg

SEQ ID NO: 5280911 - DNA, 25 bp, Homo sapien
ggccctggatggcatacctatggat

SEQ ID NO: 5280912 - DNA, 25 bp, Homo sapien
gatggcatacctatggatcaaagcc

SEQ ID NO: 5280913 - DNA, 25 bp, Homo sapien
ctgcaagctcctttatccagtcctt

SEQ ID NO: 5280914 - DNA, 25 bp, Homo sapien
tacctatggatcaaagccaggtggg

SEQ ID NO: 5280915 - DNA, 25 bp, Homo sapien
tcgtcaaacatgagctcccctcgat

SEQ ID NO: 5280916 - DNA, 25 bp, Homo sapien
aataaaggagcattcgtcaaacatg

SEQ ID NO: 5280917 - DNA, 25 bp, Homo sapien
gagcattcgtcaaacatgagctccc

SEQ ID NO: 5280918 - DNA, 25 bp, Homo sapien
caaacatgagctcccctcgattgtg

SEQ ID NO: 5280919 - DNA, 25 bp, Homo sapien
gaggcaaagtcgagagtttcaccac

SEQ ID NO: 5280920 - DNA, 25 bp, Homo sapien
ggcaaagtcgagagtttcaccactc

SEQ ID NO: 5280921 - DNA, 25 bp, Homo sapien
gagaggcaaagtcgagagtttcacc

SEQ ID NO: 5280922 - DNA, 25 bp, Homo sapien
aggagaggcaaagtcgagagtttca

SEQ ID NO: 5280923 - DNA, 25 bp, Homo sapien
ttaggaggagaaaagatggaggaac

SEQ ID NO: 5280924 - DNA, 25 bp, Homo sapien
gagaaaagatggaggaacattccca

SEQ ID NO: 5280925 - DNA, 25 bp, Homo sapien
gaaaagatggaggaacattcccagc

SEQ ID NO: 5280926 - DNA, 25 bp, Homo sapien
gaggagaaaagatggaggaacattc

SEQ ID NO: 5280927 - DNA, 25 bp, Homo sapien
ctccctgtggttgccgtctagaggc

SEQ ID NO: 5280928 - DNA, 25 bp, Homo sapien
tttctccctgtggttgccgtctaga

SEQ ID NO: 5280929 - DNA, 25 bp, Homo sapien
tgtggttgccgtctagaggcagtca

SEQ ID NO: 5280930 - DNA, 25 bp, Homo sapien
ctgtggttgccgtctagaggcagtc

SEQ ID NO: 5280931 - DNA, 25 bp, Homo sapien
caaatggtttgccaggatattgaca

SEQ ID NO: 5280932 - DNA, 25 bp, Homo sapien
taagaaagtctgctctttgaatgca

SEQ ID NO: 5280933 - DNA, 25 bp, Homo sapien
tattgacagtgttcccaaagacagg

SEQ ID NO: 5280934 - DNA, 25 bp, Homo sapien
tcagaaacagctttgctggggaaaa

SEQ ID NO: 5280935 - DNA, 25 bp, Homo sapien
tctctgctcagtgccttaagatttc

SEQ ID NO: 5280936 - DNA, 25 bp, Homo sapien
agactccaatgtttctctgctcagt

SEQ ID NO: 5280937 - DNA, 25 bp, Homo sapien
gactccaatgtttctctgctcagtg

SEQ ID NO: 5280938 - DNA, 25 bp, Homo sapien
tctgctcagtgccttaagatttctc

SEQ ID NO: 5280939 - DNA, 25 bp, Homo sapien
cagctgctctcggttctgattttct

SEQ ID NO: 5280940 - DNA, 25 bp, Homo sapien
aaaggcctcagtgacttttgcaaca

SEQ ID NO: 5280941 - DNA, 25 bp, Homo sapien
taaagaacccgatccatcagtaaac

SEQ ID NO: 5280942 - DNA, 25 bp, Homo sapien
ttttaaagttcagccaagccagctg

SEQ ID NO: 5280943 - DNA, 25 bp, Homo sapien
gacaatagctcccacacacagggtt

SEQ ID NO: 5280944 - DNA, 25 bp, Homo sapien
taaggctacgggttcaactggtatc

SEQ ID NO: 5280945 - DNA, 25 bp, Homo sapien
tagcatccctgcatggagcaaatcc

SEQ ID NO: 5280946 - DNA, 25 bp, Homo sapien
tggaaaaacatgcttcacgacacag

SEQ ID NO: 5280947 - DNA, 25 bp, Homo sapien
gatacctctgctgtacaatagaagc

SEQ ID NO: 5280948 - DNA, 25 bp, Homo sapien
gacaaaatagctttccattggaaga

SEQ ID NO: 5280949 - DNA, 25 bp, Homo sapien
gatacatctagtctgcagcccatgg

SEQ ID NO: 5280950 - DNA, 25 bp, Homo sapien
gacctattgcttagaaaagatgcct

SEQ ID NO: 5280951 - DNA, 25 bp, Homo sapien
taagcaacggatttttaatgcagac

SEQ ID NO: 5280952 - DNA, 25 bp, Homo sapien
aactagttaacactttggccatgaa

SEQ ID NO: 5280953 - DNA, 25 bp, Homo sapien
gaaaaacctctcgatagcactttga

SEQ ID NO: 5280954 - DNA, 25 bp, Homo sapien
cccacatgtacctcttagcaggcta

SEQ ID NO: 5280955 - DNA, 25 bp, Homo sapien
tggccatgaaactcaaagatacttg

SEQ ID NO: 5280956 - DNA, 25 bp, Homo sapien
agaatgttagccagtttgctccggc

SEQ ID NO: 5280957 - DNA, 25 bp, Homo sapien
tatgtgcctccccagatttgtccgt

SEQ ID NO: 5280958 - DNA, 25 bp, Homo sapien
gaaactaccacaatcctgctgggag

SEQ ID NO: 5280959 - DNA, 25 bp, Homo sapien
tattgatcaagacatccagcctagg

SEQ ID NO: 5280960 - DNA, 25 bp, Homo sapien
tgacttgcccagtatcagaactcct

SEQ ID NO: 5280961 - DNA, 25 bp, Homo sapien
caggctttgtgcttttcgcatgtca

SEQ ID NO: 5280962 - DNA, 25 bp, Homo sapien
gaaagttgactacgtgatcagtacc

SEQ ID NO: 5280963 - DNA, 25 bp, Homo sapien
ggtctatcgatcagagaactacttg

SEQ ID NO: 5280964 - DNA, 25 bp, Homo sapien
aactgttatcgaagcccacctgtca

SEQ ID NO: 5280965 - DNA, 25 bp, Homo sapien
gaactgtggcctacagcattgcagc

SEQ ID NO: 5280966 - DNA, 25 bp, Homo sapien
gcttatctgattgctgactctgccg

SEQ ID NO: 5280967 - DNA, 25 bp, Homo sapien
tcacttaacttcagagccaggcagg

SEQ ID NO: 5280968 - DNA, 25 bp, Homo sapien
gagactctacgtcatataggcacct

SEQ ID NO: 5280969 - DNA, 25 bp, Homo sapien
aatgcctactccacagggttactgt

SEQ ID NO: 5280970 - DNA, 25 bp, Homo sapien
caacggagaacatccacttatgtgg

SEQ ID NO: 5280971 - DNA, 25 bp, Homo sapien
ttcaatgacagttataggcaaggac

SEQ ID NO: 5280972 - DNA, 25 bp, Homo sapien
tcagaggccatggatctacttcggg

SEQ ID NO: 5280973 - DNA, 25 bp, Homo sapien
tatgaggtccttagctagcaacttc

SEQ ID NO: 5280974 - DNA, 25 bp, Homo sapien
ttactggtggcagcgagctccttac

SEQ ID NO: 5280975 - DNA, 25 bp, Homo sapien
gggcggtcctcacgtaacgaaatga

SEQ ID NO: 5280976 - DNA, 25 bp, Homo sapien
ccacaccgtgcccaggccctcccca

SEQ ID NO: 5280977 - DNA, 25 bp, Homo sapien
cacaccgtgcccaggccctccccac

SEQ ID NO: 5280978 - DNA, 25 bp, Homo sapien
ccctcccacaccgtgcccaggccct

SEQ ID NO: 5280979 - DNA, 25 bp, Homo sapien
ctcccacaccgtgcccaggccctcc

SEQ ID NO: 5280980 - DNA, 25 bp, Homo sapien
gcatttcctggcagaaggcgcgcac

SEQ ID NO: 5280981 - DNA, 25 bp, Homo sapien
tggagcatttcctggcagaaggcgc

SEQ ID NO: 5280982 - DNA, 25 bp, Homo sapien
ctggagcatttcctggcagaaggcg

SEQ ID NO: 5280983 - DNA, 25 bp, Homo sapien
gagcatttcctggcagaaggcgcgc

SEQ ID NO: 5280984 - DNA, 25 bp, Homo sapien
gtccagctcccggactatgagctcg

SEQ ID NO: 5280985 - DNA, 25 bp, Homo sapien
gctgttcgccccggtgatcagcaca

SEQ ID NO: 5280986 - DNA, 25 bp, Homo sapien
aggcgcagtagctcggcggccgtgg

SEQ ID NO: 5280987 - DNA, 25 bp, Homo sapien
cagcacagtcttcccgtgcatgagg

SEQ ID NO: 5280988 - DNA, 25 bp, Homo sapien
cggcccctccacgggagttccgcag

SEQ ID NO: 5280989 - DNA, 25 bp, Homo sapien
tccacgggagttccgcagccgccgc

SEQ ID NO: 5280990 - DNA, 25 bp, Homo sapien
gcccctccacgggagttccgcagcc

SEQ ID NO: 5280991 - DNA, 25 bp, Homo sapien
cctccacgggagttccgcagccgcc

SEQ ID NO: 5280992 - DNA, 25 bp, Homo sapien
gggtcggcccctgacggtgcgcgtg

SEQ ID NO: 5280993 - DNA, 25 bp, Homo sapien
cggcgggtcggcccctgacggtgcg

SEQ ID NO: 5280994 - DNA, 25 bp, Homo sapien
gcgggtcggcccctgacggtgcgcg

SEQ ID NO: 5280995 - DNA, 25 bp, Homo sapien
cgcggcgggtcggcccctgacggtg

SEQ ID NO: 5280996 - DNA, 25 bp, Homo sapien
aaataaccaggtcactgtgcctaac

SEQ ID NO: 5280997 - DNA, 25 bp, Homo sapien
aaaataaccaggtcactgtgcctaa

SEQ ID NO: 5280998 - DNA, 25 bp, Homo sapien
gatcagaggcatttaacccaccaaa

SEQ ID NO: 5280999 - DNA, 25 bp, Homo sapien
ctgccaggcccaaagccggagactt

SEQ ID NO: 5281000 - DNA, 25 bp, Homo sapien
caaatatgaaactctgtggatcaga

SEQ ID NO: 5281001 - DNA, 25 bp, Homo sapien
cactttttgaagtggtagcgtaggg

SEQ ID NO: 5281002 - DNA, 25 bp, Homo sapien
ctaagtaagcttctaaaacagtgcc

SEQ ID NO: 5281003 - DNA, 25 bp, Homo sapien
gaagtggcttctgtaacaccagact

SEQ ID NO: 5281004 - DNA, 25 bp, Homo sapien
taatggcattcaacagtattggtag

SEQ ID NO: 5281005 - DNA, 25 bp, Homo sapien
ctcatgcaggtagagtgaaattctc

SEQ ID NO: 5281006 - DNA, 25 bp, Homo sapien
tattaaagccataagctgcgatgga

SEQ ID NO: 5281007 - DNA, 25 bp, Homo sapien
taaagccataagctgcgatggaacc

SEQ ID NO: 5281008 - DNA, 25 bp, Homo sapien
aagccataagctgcgatggaaccta

SEQ ID NO: 5281009 - DNA, 25 bp, Homo sapien
gccataagctgcgatggaacctaac

SEQ ID NO: 5281010 - DNA, 25 bp, Homo sapien
tctatctctagaccccagcgtcgaa

SEQ ID NO: 5281011 - DNA, 25 bp, Homo sapien
ggctgcactcctagctgtaaccagg

SEQ ID NO: 5281012 - DNA, 25 bp, Homo sapien
cgtcgaagggtcttcagcacacggg

SEQ ID NO: 5281013 - DNA, 25 bp, Homo sapien
caaggaaaagagcttcgtctatctc

SEQ ID NO: 5281014 - DNA, 25 bp, Homo sapien
ggcatggcaagatccaggatgttca

SEQ ID NO: 5281015 - DNA, 25 bp, Homo sapien
gcatggcaagatccaggatgttcat

SEQ ID NO: 5281016 - DNA, 25 bp, Homo sapien
ggtaaaatgttcagactcatcagag

SEQ ID NO: 5281017 - DNA, 25 bp, Homo sapien
tactggaagaatttgtcgagcccat

SEQ ID NO: 5281018 - DNA, 25 bp, Homo sapien
gaggcttactttcacataatgtatc

SEQ ID NO: 5281019 - DNA, 25 bp, Homo sapien
aagaggacagcatccccatcaaagg

SEQ ID NO: 5281020 - DNA, 25 bp, Homo sapien
gtgtcacagtaagccatgtctttgg

SEQ ID NO: 5281021 - DNA, 25 bp, Homo sapien
ctttggctccatcaaacattgtcgc

SEQ ID NO: 5281022 - DNA, 25 bp, Homo sapien
ctacacggagctgagtgtcacagta

SEQ ID NO: 5281023 - DNA, 25 bp, Homo sapien
catcaaacattgtcgcagaggcaat

SEQ ID NO: 5281024 - DNA, 25 bp, Homo sapien
aatctgcagcaatatacaagttggt

SEQ ID NO: 5281025 - DNA, 25 bp, Homo sapien
ccccggtcagacagaagcggtcaat

SEQ ID NO: 5281026 - DNA, 25 bp, Homo sapien
ttgcctcttgcactttttcagaatc

SEQ ID NO: 5281027 - DNA, 25 bp, Homo sapien
agatatgccttcaaatagccaatgg

SEQ ID NO: 5281028 - DNA, 25 bp, Homo sapien
caaataaacattcctggcgcagaag

SEQ ID NO: 5281029 - DNA, 25 bp, Homo sapien
gcatttggttaagccacagttagca

SEQ ID NO: 5281030 - DNA, 25 bp, Homo sapien
gcctttgggttgacggcttcttgaa

SEQ ID NO: 5281031 - DNA, 25 bp, Homo sapien
gagaaatatattgcaggacctagga

SEQ ID NO: 5281032 - DNA, 25 bp, Homo sapien
gggcatggttattagtcatcagtac

SEQ ID NO: 5281033 - DNA, 25 bp, Homo sapien
tttataagccgcactcccacttggg

SEQ ID NO: 5281034 - DNA, 25 bp, Homo sapien
caggatatagatcacggagtctagc

SEQ ID NO: 5281035 - DNA, 25 bp, Homo sapien
tagtgattgacgctgtttataagcc

SEQ ID NO: 5281036 - DNA, 25 bp, Homo sapien
tcatgcaaatcgtctctcttttgtt

SEQ ID NO: 5281037 - DNA, 25 bp, Homo sapien
gaggtcatgcaaatcgtctctcttt

SEQ ID NO: 5281038 - DNA, 25 bp, Homo sapien
ggtcatgcaaatcgtctctcttttg

SEQ ID NO: 5281039 - DNA, 25 bp, Homo sapien
agaggtcatgcaaatcgtctctctt

SEQ ID NO: 5281040 - DNA, 25 bp, Homo sapien
ttcacttagggaagactaacatacc

SEQ ID NO: 5281041 - DNA, 25 bp, Homo sapien
tgtgcgaaatcataaactgacctgg

SEQ ID NO: 5281042 - DNA, 25 bp, Homo sapien
cataccaaatctagggctgtgggct

SEQ ID NO: 5281043 - DNA, 25 bp, Homo sapien
gtcctggcgggccaaagacagcttg

SEQ ID NO: 5281044 - DNA, 25 bp, Homo sapien
tccagaccctcttgctcgtagattt

SEQ ID NO: 5281045 - DNA, 25 bp, Homo sapien
caggatgacgttctcattggtgagc

SEQ ID NO: 5281046 - DNA, 25 bp, Homo sapien
gatactccatgtacttttccagacc

SEQ ID NO: 5281047 - DNA, 25 bp, Homo sapien
gattttcctgccgtccaccatgttg

SEQ ID NO: 5281048 - DNA, 25 bp, Homo sapien
ccaggggcgcgagcagctcgggttc

SEQ ID NO: 5281049 - DNA, 25 bp, Homo sapien
cggccaggggcgcgagcagctcggg

SEQ ID NO: 5281050 - DNA, 25 bp, Homo sapien
aggggcgcgagcagctcgggttctt

SEQ ID NO: 5281051 - DNA, 25 bp, Homo sapien
gccaggggcgcgagcagctcgggtt

SEQ ID NO: 5281052 - DNA, 25 bp, Homo sapien
tgcgctggctggaggacttccactc

SEQ ID NO: 5281053 - DNA, 25 bp, Homo sapien
tgcgcgaatattccagcggctgcga

SEQ ID NO: 5281054 - DNA, 25 bp, Homo sapien
gatttcccgcacgatgccttgggcc

SEQ ID NO: 5281055 - DNA, 25 bp, Homo sapien
tagaacgacctcatggatgcccagt

SEQ ID NO: 5281056 - DNA, 25 bp, Homo sapien
tgctgcgccgggagccaggatcggg

SEQ ID NO: 5281057 - DNA, 25 bp, Homo sapien
gtgctgcgccgggagccaggatcgg

SEQ ID NO: 5281058 - DNA, 25 bp, Homo sapien
tttggtgctgcgccgggagccagga

SEQ ID NO: 5281059 - DNA, 25 bp, Homo sapien
tggtgctgcgccgggagccaggatc

SEQ ID NO: 5281060 - DNA, 25 bp, Homo sapien
gcgtgggaggcgcgagtccagcgac

SEQ ID NO: 5281061 - DNA, 25 bp, Homo sapien
cgtgggaggcgcgagtccagcgacc

SEQ ID NO: 5281062 - DNA, 25 bp, Homo sapien
tgggaggcgcgagtccagcgaccgg

SEQ ID NO: 5281063 - DNA, 25 bp, Homo sapien
ctggggcgacgcgggtggctggagc

SEQ ID NO: 5281064 - DNA, 25 bp, Homo sapien
ggggcgacgcgggtggctggagcga

SEQ ID NO: 5281065 - DNA, 25 bp, Homo sapien
tggggcgacgcgggtggctggagcg

SEQ ID NO: 5281066 - DNA, 25 bp, Homo sapien
gggcgacgcgggtggctggagcgag

SEQ ID NO: 5281067 - DNA, 25 bp, Homo sapien
ctgcccggacagcggcggcggtgag

SEQ ID NO: 5281068 - DNA, 25 bp, Homo sapien
gaggtggatggagtccgggagctcg

SEQ ID NO: 5281069 - DNA, 25 bp, Homo sapien
ggtggatggagtccgggagctcgtg

SEQ ID NO: 5281070 - DNA, 25 bp, Homo sapien
gagtcatgcaggcttggggaggtgg

SEQ ID NO: 5281071 - DNA, 25 bp, Homo sapien
gggaggtggatggagtccgggagct

SEQ ID NO: 5281072 - DNA, 25 bp, Homo sapien
gaacactctacatagcacctcaggg

SEQ ID NO: 5281073 - DNA, 25 bp, Homo sapien
tccccgctccccatgtgaatgatgt

SEQ ID NO: 5281074 - DNA, 25 bp, Homo sapien
tcagagctccttgtgccggtgaagc

SEQ ID NO: 5281075 - DNA, 25 bp, Homo sapien
ccggtgaagcacagttacatagaat

SEQ ID NO: 5281076 - DNA, 25 bp, Homo sapien
tgcttctaggctcatctatggatgg

SEQ ID NO: 5281077 - DNA, 25 bp, Homo sapien
tctagaccattgactgcgcacaagg

SEQ ID NO: 5281078 - DNA, 25 bp, Homo sapien
gatgggctccgggatattctagacc

SEQ ID NO: 5281079 - DNA, 25 bp, Homo sapien
tcttccgcagtgatgattcttgtga

SEQ ID NO: 5281080 - DNA, 25 bp, Homo sapien
tgtgcctgcagaatagtcatgtcag

SEQ ID NO: 5281081 - DNA, 25 bp, Homo sapien
aactccttctatacgtgtgcctgca

SEQ ID NO: 5281082 - DNA, 25 bp, Homo sapien
gctgaaaaggaatggagccctcaag

SEQ ID NO: 5281083 - DNA, 25 bp, Homo sapien
aactggtgccccactgaggttgcag

SEQ ID NO: 5281084 - DNA, 25 bp, Homo sapien
tccagaatcggtagtgtgatctctg

SEQ ID NO: 5281085 - DNA, 25 bp, Homo sapien
tgtggttcccctccagaatcggtag

SEQ ID NO: 5281086 - DNA, 25 bp, Homo sapien
tggttcccctccagaatcggtagtg

SEQ ID NO: 5281087 - DNA, 25 bp, Homo sapien
tcccctccagaatcggtagtgtgat

SEQ ID NO: 5281088 - DNA, 25 bp, Homo sapien
cctgctcccacaacaggcacatgtg

SEQ ID NO: 5281089 - DNA, 25 bp, Homo sapien
ggccctgctcccacaacaggcacat

SEQ ID NO: 5281090 - DNA, 25 bp, Homo sapien
tataaatacgtattgtgtggcaggg

SEQ ID NO: 5281091 - DNA, 25 bp, Homo sapien
caggcacatgtgaatataaatacgt

SEQ ID NO: 5281092 - DNA, 25 bp, Homo sapien
gggcaacatctcagcgagtgattcg

SEQ ID NO: 5281093 - DNA, 25 bp, Homo sapien
gattcggattgactgcacgcctcat

SEQ ID NO: 5281094 - DNA, 25 bp, Homo sapien
catctcagcgagtgattcggattga

SEQ ID NO: 5281095 - DNA, 25 bp, Homo sapien
cagcgagtgattcggattgactgca

SEQ ID NO: 5281096 - DNA, 25 bp, Homo sapien
tttctgcttctagactctcttttga

SEQ ID NO: 5281097 - DNA, 25 bp, Homo sapien
tctagactctcttttgaggacctca

SEQ ID NO: 5281098 - DNA, 25 bp, Homo sapien
ctgattgctcagacgaactcctgtt

SEQ ID NO: 5281099 - DNA, 25 bp, Homo sapien
aactcctgttttgtcagattccttt

SEQ ID NO: 5281100 - DNA, 25 bp, Homo sapien
tcaaactttttgtggctctagcctc

SEQ ID NO: 5281101 - DNA, 25 bp, Homo sapien
tctagcctcaccaatattagtttga

SEQ ID NO: 5281102 - DNA, 25 bp, Homo sapien
tttccttgccatttagaattcaatt

SEQ ID NO: 5281103 - DNA, 25 bp, Homo sapien
ttcatcatcactacagctcaaactt

SEQ ID NO: 5281104 - DNA, 25 bp, Homo sapien
tctgtttgagagatgtttgactcat

SEQ ID NO: 5281105 - DNA, 25 bp, Homo sapien
tttctgtttgagagatgtttgactc

SEQ ID NO: 5281106 - DNA, 25 bp, Homo sapien
tttttctgtttgagagatgtttgac

SEQ ID NO: 5281107 - DNA, 25 bp, Homo sapien
ctttttctgtttgagagatgtttga

SEQ ID NO: 5281108 - DNA, 25 bp, Homo sapien
gaaattcttttgttgttatccacat

SEQ ID NO: 5281109 - DNA, 25 bp, Homo sapien
gttgaaattcttttgttgttatcca

SEQ ID NO: 5281110 - DNA, 25 bp, Homo sapien
tgaaattcttttgttgttatccaca

SEQ ID NO: 5281111 - DNA, 25 bp, Homo sapien
ctgttgaaattcttttgttgttatc

SEQ ID NO: 5281112 - DNA, 25 bp, Homo sapien
tcccttgctcagtctagctttgcat

SEQ ID NO: 5281113 - DNA, 25 bp, Homo sapien
gtccaaaatatcgactagaggtcag

SEQ ID NO: 5281114 - DNA, 25 bp, Homo sapien
ccaaatgctggtaagtgaaaatccc

SEQ ID NO: 5281115 - DNA, 25 bp, Homo sapien
tagaggtcagtgtgtatctactggc

SEQ ID NO: 5281116 - DNA, 25 bp, Homo sapien
ggtgcatatgcagaatactcttgcc

SEQ ID NO: 5281117 - DNA, 25 bp, Homo sapien
tcctgctcactgtctagttcctgcc

SEQ ID NO: 5281118 - DNA, 25 bp, Homo sapien
tcatcctgctcactgtctagttcct

SEQ ID NO: 5281119 - DNA, 25 bp, Homo sapien
atcctgctcactgtctagttcctgc

SEQ ID NO: 5281120 - DNA, 25 bp, Homo sapien
catatttcattaggattgctttgga

SEQ ID NO: 5281121 - DNA, 25 bp, Homo sapien
tttgggactgtgcaacaaggatagg

SEQ ID NO: 5281122 - DNA, 25 bp, Homo sapien
gagggcgcttagattccctgctgct

SEQ ID NO: 5281123 - DNA, 25 bp, Homo sapien
aaatgagggcgcttagattccctgc

SEQ ID NO: 5281124 - DNA, 25 bp, Homo sapien
gggtagactctgcctggctgggcat

SEQ ID NO: 5281125 - DNA, 25 bp, Homo sapien
agggtagactctgcctggctgggca

SEQ ID NO: 5281126 - DNA, 25 bp, Homo sapien
cagggtagactctgcctggctgggc

SEQ ID NO: 5281127 - DNA, 25 bp, Homo sapien
cggttcttgccaaatatgttttgat

SEQ ID NO: 5281128 - DNA, 25 bp, Homo sapien
tttctgacattttcggttcttgcca

SEQ ID NO: 5281129 - DNA, 25 bp, Homo sapien
taggtttctacctggtctgtgatga

SEQ ID NO: 5281130 - DNA, 25 bp, Homo sapien
tttgattaaaggtcgcataggtttc

SEQ ID NO: 5281131 - DNA, 25 bp, Homo sapien
aagtgcttcagaggtccactgaagg

SEQ ID NO: 5281132 - DNA, 25 bp, Homo sapien
ggctgagtgcaaaatagaggcttgc

SEQ ID NO: 5281133 - DNA, 25 bp, Homo sapien
ttcagcagacctttgtagaaagtgc

SEQ ID NO: 5281134 - DNA, 25 bp, Homo sapien
gagtgcaaaatagaggcttgcagaa

SEQ ID NO: 5281135 - DNA, 25 bp, Homo sapien
gtcctccagtttagctcttggctac

SEQ ID NO: 5281136 - DNA, 25 bp, Homo sapien
ctccagtttagctcttggctacttt

SEQ ID NO: 5281137 - DNA, 25 bp, Homo sapien
tcctccagtttagctcttggctact

SEQ ID NO: 5281138 - DNA, 25 bp, Homo sapien
tttcctgtcctccagtttagctctt

SEQ ID NO: 5281139 - DNA, 25 bp, Homo sapien
cagggcatggcactgaagctgcctt

SEQ ID NO: 5281140 - DNA, 25 bp, Homo sapien
gttgtctgcagatctaactttcagg

SEQ ID NO: 5281141 - DNA, 25 bp, Homo sapien
tcaggatcagcatcgttccaaggtc

SEQ ID NO: 5281142 - DNA, 25 bp, Homo sapien
taagcttgccagatatctactgttt

SEQ ID NO: 5281143 - DNA, 25 bp, Homo sapien
tctggttcctaggtgtaactcagct

SEQ ID NO: 5281144 - DNA, 25 bp, Homo sapien
gtagacagaaaagaggagtatcccc

SEQ ID NO: 5281145 - DNA, 25 bp, Homo sapien
gagtgttagaatgtagccaaggaag

SEQ ID NO: 5281146 - DNA, 25 bp, Homo sapien
gaaaaaccttcaagcagccaaagga

SEQ ID NO: 5281147 - DNA, 25 bp, Homo sapien
tccggacagctagaaagcttggctg

SEQ ID NO: 5281148 - DNA, 25 bp, Homo sapien
ctgtgcactgtaaacacaaaccctg

SEQ ID NO: 5281149 - DNA, 25 bp, Homo sapien
agctagaaagcttggctgggaattg

SEQ ID NO: 5281150 - DNA, 25 bp, Homo sapien
ctattccttccggacagctagaaag

SEQ ID NO: 5281151 - DNA, 25 bp, Homo sapien
tatatcctgttagagatgccttcag

SEQ ID NO: 5281152 - DNA, 25 bp, Homo sapien
cgatgataatcattgccagataatc

SEQ ID NO: 5281153 - DNA, 25 bp, Homo sapien
gaacccaggttagtgggtacgatga

SEQ ID NO: 5281154 - DNA, 25 bp, Homo sapien
ttcaacttggagcttgaagttggct

SEQ ID NO: 5281155 - DNA, 25 bp, Homo sapien
tctgtattacactaacggactcagt

SEQ ID NO: 5281156 - DNA, 25 bp, Homo sapien
tttctgaacttgtagcccccatgca

SEQ ID NO: 5281157 - DNA, 25 bp, Homo sapien
cttggctgggcggtaattagatcat

SEQ ID NO: 5281158 - DNA, 25 bp, Homo sapien
gggcggtaattagatcattctgtat

SEQ ID NO: 5281159 - DNA, 25 bp, Homo sapien
ctgagttatgggagtgtaattatta

SEQ ID NO: 5281160 - DNA, 25 bp, Homo sapien
tttgatgtggttctctgagttatgg

SEQ ID NO: 5281161 - DNA, 25 bp, Homo sapien
tgatgtggttctctgagttatggga

SEQ ID NO: 5281162 - DNA, 25 bp, Homo sapien
tggttctctgagttatgggagtgta

SEQ ID NO: 5281163 - DNA, 25 bp, Homo sapien
tccaactctagagcaagttctattt

SEQ ID NO: 5281164 - DNA, 25 bp, Homo sapien
ccttccaactctagagcaagttcta

SEQ ID NO: 5281165 - DNA, 25 bp, Homo sapien
tccttccaactctagagcaagttct

SEQ ID NO: 5281166 - DNA, 25 bp, Homo sapien
cttccaactctagagcaagttctat

SEQ ID NO: 5281167 - DNA, 25 bp, Homo sapien
tgtcagatctctgctatgtgatggg

SEQ ID NO: 5281168 - DNA, 25 bp, Homo sapien
tattgtgtcagatctctgctatgtg

SEQ ID NO: 5281169 - DNA, 25 bp, Homo sapien
tctccttacatattgtgtcagatct

SEQ ID NO: 5281170 - DNA, 25 bp, Homo sapien
gctatgtgatgggtttggaaaatgc

SEQ ID NO: 5281171 - DNA, 25 bp, Homo sapien
ttggaactaggccaaatgctgaatc

SEQ ID NO: 5281172 - DNA, 25 bp, Homo sapien
gggaacaagattcagaaactcggga

SEQ ID NO: 5281173 - DNA, 25 bp, Homo sapien
gaagacagatctttgtgggaacaag

SEQ ID NO: 5281174 - DNA, 25 bp, Homo sapien
tcagaaactcgggaatacgttggaa

SEQ ID NO: 5281175 - DNA, 25 bp, Homo sapien
tattgcattgtcctcagcaagtgac

SEQ ID NO: 5281176 - DNA, 25 bp, Homo sapien
agtatccatagtatcttgcacagag

SEQ ID NO: 5281177 - DNA, 25 bp, Homo sapien
gaccagcgtcctctttcttattgca

SEQ ID NO: 5281178 - DNA, 25 bp, Homo sapien
tgcacagagtgaatgttcccagaat

SEQ ID NO: 5281179 - DNA, 25 bp, Homo sapien
tacatgaccactctttctctgtctc

SEQ ID NO: 5281180 - DNA, 25 bp, Homo sapien
taattgtaccatcatgccttttaat

SEQ ID NO: 5281181 - DNA, 25 bp, Homo sapien
taatctcagcagtacatgaccactc

SEQ ID NO: 5281182 - DNA, 25 bp, Homo sapien
tgtaatggggctcaaatttctctgg

SEQ ID NO: 5281183 - DNA, 25 bp, Homo sapien
ttcaccctgcttttggctcttataa

SEQ ID NO: 5281184 - DNA, 25 bp, Homo sapien
ttctcactggtctttcccctatgcc

SEQ ID NO: 5281185 - DNA, 25 bp, Homo sapien
ctggtctttcccctatgccctgcag

SEQ ID NO: 5281186 - DNA, 25 bp, Homo sapien
caccctgcttttggctcttataaat

SEQ ID NO: 5281187 - DNA, 25 bp, Homo sapien
agagaagcctgagggtcatttatca

SEQ ID NO: 5281188 - DNA, 25 bp, Homo sapien
tgggaatgggggattgagcggtagt

SEQ ID NO: 5281189 - DNA, 25 bp, Homo sapien
ttatcacttgaacagtgggaatggg

SEQ ID NO: 5281190 - DNA, 25 bp, Homo sapien
ggattgagcggtagtttttttgctg

SEQ ID NO: 5281191 - DNA, 25 bp, Homo sapien
caccttgataactgtgcccagctca

SEQ ID NO: 5281192 - DNA, 25 bp, Homo sapien
ataactgtgcccagctcagacttac

SEQ ID NO: 5281193 - DNA, 25 bp, Homo sapien
tgataactgtgcccagctcagactt

SEQ ID NO: 5281194 - DNA, 25 bp, Homo sapien
cccaccttgataactgtgcccagct

SEQ ID NO: 5281195 - DNA, 25 bp, Homo sapien
cactccggattcttcactgtggtca

SEQ ID NO: 5281196 - DNA, 25 bp, Homo sapien
tccactgtgtggtattgtagccctt

SEQ ID NO: 5281197 - DNA, 25 bp, Homo sapien
ccaggtggcacagttatcaaggttg

SEQ ID NO: 5281198 - DNA, 25 bp, Homo sapien
ggcagttatgattcttcactccgga

SEQ ID NO: 5281199 - DNA, 25 bp, Homo sapien
caatttcagcatcagcaatcttttc

SEQ ID NO: 5281200 - DNA, 25 bp, Homo sapien
ggtggaacagtgagcagctcactgc

SEQ ID NO: 5281201 - DNA, 25 bp, Homo sapien
caatcttttcccttgcagaggaccc

SEQ ID NO: 5281202 - DNA, 25 bp, Homo sapien
cactgcctgcgtccatttctccatg

SEQ ID NO: 5281203 - DNA, 25 bp, Homo sapien
ctgcaaacagcaatctgtcatgagt

SEQ ID NO: 5281204 - DNA, 25 bp, Homo sapien
cacatgacctcagcacttgaagcca

SEQ ID NO: 5281205 - DNA, 25 bp, Homo sapien
caagtagagaggcaaacacatgacc

SEQ ID NO: 5281206 - DNA, 25 bp, Homo sapien
cttggtctgcaagtagagaggcaaa

SEQ ID NO: 5281207 - DNA, 25 bp, Homo sapien
aaacacatgacctcagcacttgaag

SEQ ID NO: 5281208 - DNA, 25 bp, Homo sapien
catctgtggaaaggactgtggtccc

SEQ ID NO: 5281209 - DNA, 25 bp, Homo sapien
gagcctcaggaacttggtagatgtt

SEQ ID NO: 5281210 - DNA, 25 bp, Homo sapien
gaagaaaatccaggccaattttgag

SEQ ID NO: 5281211 - DNA, 25 bp, Homo sapien
tccccagagagtgtcgtagtctttg

SEQ ID NO: 5281212 - DNA, 25 bp, Homo sapien
gattaactgtattccattcagcctg

SEQ ID NO: 5281213 - DNA, 25 bp, Homo sapien
ttgtacctctactgtcacctggtcc

SEQ ID NO: 5281214 - DNA, 25 bp, Homo sapien
tcttgccagacatcaatgcctgctg

SEQ ID NO: 5281215 - DNA, 25 bp, Homo sapien
cctcttgacttggttctggctgagc

SEQ ID NO: 5281216 - DNA, 25 bp, Homo sapien
tgtatttccactcctcctgctcata

SEQ ID NO: 5281217 - DNA, 25 bp, Homo sapien
caccccatgtatttccactcctcct

SEQ ID NO: 5281218 - DNA, 25 bp, Homo sapien
gtatttccactcctcctgctcatac

SEQ ID NO: 5281219 - DNA, 25 bp, Homo sapien
ctacaccccatgtatttccactcct

SEQ ID NO: 5281220 - DNA, 25 bp, Homo sapien
tcccataggctctgtgtccttcatg

SEQ ID NO: 5281221 - DNA, 25 bp, Homo sapien
ttctcaactgccattggtttacgct

SEQ ID NO: 5281222 - DNA, 25 bp, Homo sapien
cattggtttacgctttggtctccca

SEQ ID NO: 5281223 - DNA, 25 bp, Homo sapien
gcttgtcatgagctcattcttctca

SEQ ID NO: 5281224 - DNA, 25 bp, Homo sapien
tgctcctgaagatcaaagcactctc

SEQ ID NO: 5281225 - DNA, 25 bp, Homo sapien
gctcctgaagatcaaagcactctcc

SEQ ID NO: 5281226 - DNA, 25 bp, Homo sapien
ctcctgaagatcaaagcactctcca

SEQ ID NO: 5281227 - DNA, 25 bp, Homo sapien
ctgctcctgaagatcaaagcactct

SEQ ID NO: 5281228 - DNA, 25 bp, Homo sapien
tgaggagtgttgtgcacgacaccag

SEQ ID NO: 5281229 - DNA, 25 bp, Homo sapien
gagctggttccacagttacggtgtc

SEQ ID NO: 5281230 - DNA, 25 bp, Homo sapien
ctagactaaagatctgggcaagagc

SEQ ID NO: 5281231 - DNA, 25 bp, Homo sapien
tacggtgtcaatttcgccacttctg

SEQ ID NO: 5281232 - DNA, 25 bp, Homo sapien
tgatggatgttgaatttcagacaac

SEQ ID NO: 5281233 - DNA, 25 bp, Homo sapien
acaaacatcacatttgtgcttcagg

SEQ ID NO: 5281234 - DNA, 25 bp, Homo sapien
tgctgcacccacaaacatcacattt

SEQ ID NO: 5281235 - DNA, 25 bp, Homo sapien
gatgttgaatttcagacaacatgct

SEQ ID NO: 5281236 - DNA, 25 bp, Homo sapien
aagagcaaaggacctgtgccaacca

SEQ ID NO: 5281237 - DNA, 25 bp, Homo sapien
tgactttccctttaggctcactggc

SEQ ID NO: 5281238 - DNA, 25 bp, Homo sapien
gtgccaaccaagtctttcaaaatga

SEQ ID NO: 5281239 - DNA, 25 bp, Homo sapien
caaaggacctgtgccaaccaagtct

SEQ ID NO: 5281240 - DNA, 25 bp, Homo sapien
gtcctttgctgagaatgccttctat

SEQ ID NO: 5281241 - DNA, 25 bp, Homo sapien
ccagaggttgaatggatctctgcct

SEQ ID NO: 5281242 - DNA, 25 bp, Homo sapien
gaatgccttctatccagaggttgaa

SEQ ID NO: 5281243 - DNA, 25 bp, Homo sapien
tctatccagaggttgaatggatctc

SEQ ID NO: 5281244 - DNA, 25 bp, Homo sapien
aattctatgaattgacagaggtgga

SEQ ID NO: 5281245 - DNA, 25 bp, Homo sapien
ataaaggatagataaaggataggtc

SEQ ID NO: 5281246 - DNA, 25 bp, Homo sapien
gattgattccatggatattgacaat

SEQ ID NO: 5281247 - DNA, 25 bp, Homo sapien
cgcaaatatggtccttggataaagg

SEQ ID NO: 5281248 - DNA, 25 bp, Homo sapien
gaaaatcattagtgggcacacaggg

SEQ ID NO: 5281249 - DNA, 25 bp, Homo sapien
aggaaaatcattagtgggcacacag

SEQ ID NO: 5281250 - DNA, 25 bp, Homo sapien
gagaaaggaaaatcattagtgggca

SEQ ID NO: 5281251 - DNA, 25 bp, Homo sapien
aaaggaaaatcattagtgggcacac

SEQ ID NO: 5281252 - DNA, 25 bp, Homo sapien
gccagtctctgatttgagcattcag

SEQ ID NO: 5281253 - DNA, 25 bp, Homo sapien
caaaagtgacctccaaaggccatgg

SEQ ID NO: 5281254 - DNA, 25 bp, Homo sapien
gccatggaatgccaacaagcagaag

SEQ ID NO: 5281255 - DNA, 25 bp, Homo sapien
cagctgtccaatactggtctggtct

SEQ ID NO: 5281256 - DNA, 25 bp, Homo sapien
tgaagagttatctgcataaaaacac

SEQ ID NO: 5281257 - DNA, 25 bp, Homo sapien
aagagttatctgcataaaaacactc

SEQ ID NO: 5281258 - DNA, 25 bp, Homo sapien
ctgcatgaagagttatctgcataaa

SEQ ID NO: 5281259 - DNA, 25 bp, Homo sapien
gcatgaagagttatctgcataaaaa

SEQ ID NO: 5281260 - DNA, 25 bp, Homo sapien
caaacagcccacacatacaaataat

SEQ ID NO: 5281261 - DNA, 25 bp, Homo sapien
gctcctcctaatacactgtccacag

SEQ ID NO: 5281262 - DNA, 25 bp, Homo sapien
agctgccctcaccaacaaacagccc

SEQ ID NO: 5281263 - DNA, 25 bp, Homo sapien
cttggacctcctttgggaacagctc

SEQ ID NO: 5281264 - DNA, 25 bp, Homo sapien
gttgccaaagaatggctgcgcctca

SEQ ID NO: 5281265 - DNA, 25 bp, Homo sapien
cgagttgccaaagaatggctgcgcc

SEQ ID NO: 5281266 - DNA, 25 bp, Homo sapien
gagttgccaaagaatggctgcgcct

SEQ ID NO: 5281267 - DNA, 25 bp, Homo sapien
agttgccaaagaatggctgcgcctc

SEQ ID NO: 5281268 - DNA, 25 bp, Homo sapien
tggctctgggtcacaaaaaccacag

SEQ ID NO: 5281269 - DNA, 25 bp, Homo sapien
aaaaccacaggaaagagcctactgg

SEQ ID NO: 5281270 - DNA, 25 bp, Homo sapien
cgatctcagcctggtaattatccaa

SEQ ID NO: 5281271 - DNA, 25 bp, Homo sapien
caaagatatggccttttatatccct

SEQ ID NO: 5281272 - DNA, 25 bp, Homo sapien
taggtaagaaactgcgaccagcctg

SEQ ID NO: 5281273 - DNA, 25 bp, Homo sapien
catttggtcattgtgtcagatactc

SEQ ID NO: 5281274 - DNA, 25 bp, Homo sapien
tcaatacccaagaatttaggtggct

SEQ ID NO: 5281275 - DNA, 25 bp, Homo sapien
ggccattgtagccaattaacatgaa

SEQ ID NO: 5281276 - DNA, 25 bp, Homo sapien
tctgagtcaggctcacaagggacat

SEQ ID NO: 5281277 - DNA, 25 bp, Homo sapien
ctttctgagtcaggctcacaaggga

SEQ ID NO: 5281278 - DNA, 25 bp, Homo sapien
ttctgagtcaggctcacaagggaca

SEQ ID NO: 5281279 - DNA, 25 bp, Homo sapien
ggctttctgagtcaggctcacaagg

SEQ ID NO: 5281280 - DNA, 25 bp, Homo sapien
ccccgacagttattgttactggagt

SEQ ID NO: 5281281 - DNA, 25 bp, Homo sapien
ttccagcccccgacagttattgtta

SEQ ID NO: 5281282 - DNA, 25 bp, Homo sapien
gcccccgacagttattgttactgga

SEQ ID NO: 5281283 - DNA, 25 bp, Homo sapien
cgacagttattgttactggagtcat

SEQ ID NO: 5281284 - DNA, 25 bp, Homo sapien
aaggaccagccggaagagaactgca

SEQ ID NO: 5281285 - DNA, 25 bp, Homo sapien
caagaataccagtcgaataaggcct

SEQ ID NO: 5281286 - DNA, 25 bp, Homo sapien
gaaagaaatccgtagccttggctct

SEQ ID NO: 5281287 - DNA, 25 bp, Homo sapien
tgatgggagaagaccctccagagat

SEQ ID NO: 5281288 - DNA, 25 bp, Homo sapien
ggaagacctcctgagaacaaaagcg

SEQ ID NO: 5281289 - DNA, 25 bp, Homo sapien
caaaagcgatgatccagaatgggcg

SEQ ID NO: 5281290 - DNA, 25 bp, Homo sapien
cagcgcatcgcggattctacgtggg

SEQ ID NO: 5281291 - DNA, 25 bp, Homo sapien
tgggtgaggaccaccgtggctctca

SEQ ID NO: 5281292 - DNA, 25 bp, Homo sapien
cacttggcctcaaaacatgtttaca

SEQ ID NO: 5281293 - DNA, 25 bp, Homo sapien
tccctagggaagtcctagagatcca

SEQ ID NO: 5281294 - DNA, 25 bp, Homo sapien
caaacaagagcgagttccctaggga

SEQ ID NO: 5281295 - DNA, 25 bp, Homo sapien
gagggaaaagcgcacccacaaaaca

SEQ ID NO: 5281296 - DNA, 25 bp, Homo sapien
agaagaacgtggaagccctattatc

SEQ ID NO: 5281297 - DNA, 25 bp, Homo sapien
gaagaacgtggaagccctattatca

SEQ ID NO: 5281298 - DNA, 25 bp, Homo sapien
aagaacgtggaagccctattatcat

SEQ ID NO: 5281299 - DNA, 25 bp, Homo sapien
gcttctggataaaaggccttggccc

SEQ ID NO: 5281300 - DNA, 25 bp, Homo sapien
ttggcccaagcaacgccaaggctgt

SEQ ID NO: 5281301 - DNA, 25 bp, Homo sapien
taagagtcttgacgaggacagtggc

SEQ ID NO: 5281302 - DNA, 25 bp, Homo sapien
gcctggtgacaccaaagtttcattg

SEQ ID NO: 5281303 - DNA, 25 bp, Homo sapien
atacaatgttcccaaccacaagcca

SEQ ID NO: 5281304 - DNA, 25 bp, Homo sapien
ggaaacaagatttatccttctggga

SEQ ID NO: 5281305 - DNA, 25 bp, Homo sapien
ccacagaacatgacttgtttaaggc

SEQ ID NO: 5281306 - DNA, 25 bp, Homo sapien
acaagatttatccttctgggaaact

SEQ ID NO: 5281307 - DNA, 25 bp, Homo sapien
taaactctggcagcaactgggtaca

SEQ ID NO: 5281308 - DNA, 25 bp, Homo sapien
catttctaagccatacatgagccag

SEQ ID NO: 5281309 - DNA, 25 bp, Homo sapien
cagaatgaacaatgcgagatccaca

SEQ ID NO: 5281310 - DNA, 25 bp, Homo sapien
cagggattggctacttctgtgacag

SEQ ID NO: 5281311 - DNA, 25 bp, Homo sapien
tccatgagcccaatttcttgcttag

SEQ ID NO: 5281312 - DNA, 25 bp, Homo sapien
tcagcaggcgaaacaattgatcttt

SEQ ID NO: 5281313 - DNA, 25 bp, Homo sapien
gttctgaagttctgatcagcaggcg

SEQ ID NO: 5281314 - DNA, 25 bp, Homo sapien
tgcttagacactccttgcctgcaac

SEQ ID NO: 5281315 - DNA, 25 bp, Homo sapien
gaacttgtggctgttactacaagat

SEQ ID NO: 5281316 - DNA, 25 bp, Homo sapien
tagtactcaatggttctagaacttg

SEQ ID NO: 5281317 - DNA, 25 bp, Homo sapien
cactatgcctagttgtgaaaaccta

SEQ ID NO: 5281318 - DNA, 25 bp, Homo sapien
taatactttactaacctgacaacca

SEQ ID NO: 5281319 - DNA, 25 bp, Homo sapien
ggtccctgaaatccccatctgtgaa

SEQ ID NO: 5281320 - DNA, 25 bp, Homo sapien
tagaatgtgacagattaccttcctg

SEQ ID NO: 5281321 - DNA, 25 bp, Homo sapien
taaaatgactagatcatgccgtgat

SEQ ID NO: 5281322 - DNA, 25 bp, Homo sapien
taaacaagggcatgcagatacctct

SEQ ID NO: 5281323 - DNA, 25 bp, Homo sapien
tatcagtcgcagcataatcagatgg

SEQ ID NO: 5281324 - DNA, 25 bp, Homo sapien
cctgtgcaaataggcagacacctgt

SEQ ID NO: 5281325 - DNA, 25 bp, Homo sapien
tagaggtgaccccagactatgagtc

SEQ ID NO: 5281326 - DNA, 25 bp, Homo sapien
tttagatgtgaagaagcgaaggctc

SEQ ID NO: 5281327 - DNA, 25 bp, Homo sapien
tttttccaaatgtccaagtagccaa

SEQ ID NO: 5281328 - DNA, 25 bp, Homo sapien
caagtgaaaagtatgcagatggcag

SEQ ID NO: 5281329 - DNA, 25 bp, Homo sapien
tctggtatgtatcagaggaacagtc

SEQ ID NO: 5281330 - DNA, 25 bp, Homo sapien
tatagaatcgtctctccaatgccac

SEQ ID NO: 5281331 - DNA, 25 bp, Homo sapien
cagggatggtccagtggtggcaggc

SEQ ID NO: 5281332 - DNA, 25 bp, Homo sapien
acagggatggtccagtggtggcagg

SEQ ID NO: 5281333 - DNA, 25 bp, Homo sapien
gatggtccagtggtggcaggctgga

SEQ ID NO: 5281334 - DNA, 25 bp, Homo sapien
gggatggtccagtggtggcaggctg

SEQ ID NO: 5281335 - DNA, 25 bp, Homo sapien
gatcagggtatattacaactgccag

SEQ ID NO: 5281336 - DNA, 25 bp, Homo sapien
caactgccagtgcatgaactatttt

SEQ ID NO: 5281337 - DNA, 25 bp, Homo sapien
tctttgccggctggtctactggtac

SEQ ID NO: 5281338 - DNA, 25 bp, Homo sapien
tactggtacagtgggcccaaattga

SEQ ID NO: 5281339 - DNA, 25 bp, Homo sapien
tagtagtcatttcaccctccgactt

SEQ ID NO: 5281340 - DNA, 25 bp, Homo sapien
cttgtgtcctggtaatcaggctcca

SEQ ID NO: 5281341 - DNA, 25 bp, Homo sapien
gctatagaatttgacgatgctaacc

SEQ ID NO: 5281342 - DNA, 25 bp, Homo sapien
gactttactacaatggtcccgtatg

SEQ ID NO: 5281343 - DNA, 25 bp, Homo sapien
aacatagctggttgctgtgtgtccc

SEQ ID NO: 5281344 - DNA, 25 bp, Homo sapien
tgccctaaagtggtttgctatgaca

SEQ ID NO: 5281345 - DNA, 25 bp, Homo sapien
tattctactgcttaacacaggcctg

SEQ ID NO: 5281346 - DNA, 25 bp, Homo sapien
tagtcatccagccagctgaaccaga

SEQ ID NO: 5281347 - DNA, 25 bp, Homo sapien
aaccccagacaatctggacacccac

SEQ ID NO: 5281348 - DNA, 25 bp, Homo sapien
ttaaccccagacaatctggacaccc

SEQ ID NO: 5281349 - DNA, 25 bp, Homo sapien
ccccagacaatctggacacccacaa

SEQ ID NO: 5281350 - DNA, 25 bp, Homo sapien
cccagacaatctggacacccacaaa

SEQ ID NO: 5281351 - DNA, 25 bp, Homo sapien
agcagaatcagattccacgtgcttc

SEQ ID NO: 5281352 - DNA, 25 bp, Homo sapien
cagcagaatcagattccacgtgctt

SEQ ID NO: 5281353 - DNA, 25 bp, Homo sapien
cagaatcagattccacgtgcttcat

SEQ ID NO: 5281354 - DNA, 25 bp, Homo sapien
gcagaatcagattccacgtgcttca

SEQ ID NO: 5281355 - DNA, 25 bp, Homo sapien
acctctaaagctgctcttgccattg

SEQ ID NO: 5281356 - DNA, 25 bp, Homo sapien
tactcttgtttttgccatcactcaa

SEQ ID NO: 5281357 - DNA, 25 bp, Homo sapien
ctctaaagctgctcttgccattgga

SEQ ID NO: 5281358 - DNA, 25 bp, Homo sapien
catcactcaaaggtatcccaaatct

SEQ ID NO: 5281359 - DNA, 25 bp, Homo sapien
tcagaagcccatgtgtgtgaaaggc

SEQ ID NO: 5281360 - DNA, 25 bp, Homo sapien
cagaagcccatgtgtgtgaaaggca

SEQ ID NO: 5281361 - DNA, 25 bp, Homo sapien
tgtgggtgggttgacttgtataatt

SEQ ID NO: 5281362 - DNA, 25 bp, Homo sapien
gaggaatgtgggtgggttgacttgt

SEQ ID NO: 5281363 - DNA, 25 bp, Homo sapien
tatacttatccgctgaggccaggag

SEQ ID NO: 5281364 - DNA, 25 bp, Homo sapien
cttgcgtatgactgtaaggttggag

SEQ ID NO: 5281365 - DNA, 25 bp, Homo sapien
ttgttccctggatcttcatatcctg

SEQ ID NO: 5281366 - DNA, 25 bp, Homo sapien
caatccaggtgttgttctttgaggt

SEQ ID NO: 5281367 - DNA, 25 bp, Homo sapien
acctgatgtgcagtgggacaacttc

SEQ ID NO: 5281368 - DNA, 25 bp, Homo sapien
gaaagaaacctgatgtgcagtggga

SEQ ID NO: 5281369 - DNA, 25 bp, Homo sapien
atgaggctttcactgtaggtttcat

SEQ ID NO: 5281370 - DNA, 25 bp, Homo sapien
gacaacttcattgttcgttccacct

SEQ ID NO: 5281371 - DNA, 25 bp, Homo sapien
tagaccacagcaaagccaatctcct

SEQ ID NO: 5281372 - DNA, 25 bp, Homo sapien
cacagcaaagccaatctccttagat

SEQ ID NO: 5281373 - DNA, 25 bp, Homo sapien
agtagaccacagcaaagccaatctc

SEQ ID NO: 5281374 - DNA, 25 bp, Homo sapien
caaagccaatctccttagatcccat

SEQ ID NO: 5281375 - DNA, 25 bp, Homo sapien
cagaagcccatgtgtgtgaaaggca

SEQ ID NO: 5281376 - DNA, 25 bp, Homo sapien
tgtgggtgggttgacttgtataatt

SEQ ID NO: 5281377 - DNA, 25 bp, Homo sapien
tcagaagcccatgtgtgtgaaaggc

SEQ ID NO: 5281378 - DNA, 25 bp, Homo sapien
gaggaatgtgggtgggttgacttgt

SEQ ID NO: 5281379 - DNA, 25 bp, Homo sapien
ttgttccctggatcttcatatcctg

SEQ ID NO: 5281380 - DNA, 25 bp, Homo sapien
tatacttatccgctgaggccaggag

SEQ ID NO: 5281381 - DNA, 25 bp, Homo sapien
cttgcgtatgactgtaaggttggag

SEQ ID NO: 5281382 - DNA, 25 bp, Homo sapien
caatccaggtgttgttctttgaggt

SEQ ID NO: 5281383 - DNA, 25 bp, Homo sapien
acctgatgtgcagtgggacaacttc

SEQ ID NO: 5281384 - DNA, 25 bp, Homo sapien
atgaggctttcactgtaggtttcat

SEQ ID NO: 5281385 - DNA, 25 bp, Homo sapien
gaaagaaacctgatgtgcagtggga

SEQ ID NO: 5281386 - DNA, 25 bp, Homo sapien
gacaacttcattgttcgttccacct

SEQ ID NO: 5281387 - DNA, 25 bp, Homo sapien
caacacaagacctatcatcccgaat

SEQ ID NO: 5281388 - DNA, 25 bp, Homo sapien
gacgatggcagcaccccgtttcttt

SEQ ID NO: 5281389 - DNA, 25 bp, Homo sapien
cctatcatcccgaattctgttgcca

SEQ ID NO: 5281390 - DNA, 25 bp, Homo sapien
ttaattcagacgtacacggacgatg

SEQ ID NO: 5281391 - DNA, 25 bp, Homo sapien
tagaccacagcaaagccaatctcct

SEQ ID NO: 5281392 - DNA, 25 bp, Homo sapien
caaagccaatctccttagatcccat

SEQ ID NO: 5281393 - DNA, 25 bp, Homo sapien
cacagcaaagccaatctccttagat

SEQ ID NO: 5281394 - DNA, 25 bp, Homo sapien
agtagaccacagcaaagccaatctc

SEQ ID NO: 5281395 - DNA, 25 bp, Homo sapien
caaagcaactctggccatgaagaga

SEQ ID NO: 5281396 - DNA, 25 bp, Homo sapien
cagtgaaagcagcattcccataatc

SEQ ID NO: 5281397 - DNA, 25 bp, Homo sapien
tcatttggctatgtgggaacatatg

SEQ ID NO: 5281398 - DNA, 25 bp, Homo sapien
gaaaacatgttgttaaacaatgcac

SEQ ID NO: 5281399 - DNA, 25 bp, Homo sapien
tcttgggttttagcataattcctga

SEQ ID NO: 5281400 - DNA, 25 bp, Homo sapien
gttttagcataattcctgaacctga

SEQ ID NO: 5281401 - DNA, 25 bp, Homo sapien
cctatctggagctttggaaatcaaa

SEQ ID NO: 5281402 - DNA, 25 bp, Homo sapien
cagacattccataatgactcttggg

SEQ ID NO: 5281403 - DNA, 25 bp, Homo sapien
gagctgatttatcagtgcctgccca

SEQ ID NO: 5281404 - DNA, 25 bp, Homo sapien
cagtgcctgcccatgtgagaaccag

SEQ ID NO: 5281405 - DNA, 25 bp, Homo sapien
aaccagaaaggaactaggaggtgtg

SEQ ID NO: 5281406 - DNA, 25 bp, Homo sapien
ccagaaaggaactaggaggtgtgac

SEQ ID NO: 5281407 - DNA, 25 bp, Homo sapien
taagcctaactccaccatgtatgag

SEQ ID NO: 5281408 - DNA, 25 bp, Homo sapien
cagcagcatggtggaacgaagacag

SEQ ID NO: 5281409 - DNA, 25 bp, Homo sapien
tatctgacatctggtaggtcctcaa

SEQ ID NO: 5281410 - DNA, 25 bp, Homo sapien
caaatgcagtacactcctagaggga

SEQ ID NO: 5281411 - DNA, 25 bp, Homo sapien
cagttgctcatatacagctgtgcac

SEQ ID NO: 5281412 - DNA, 25 bp, Homo sapien
gaccaaacgcacagttgttaaacta

SEQ ID NO: 5281413 - DNA, 25 bp, Homo sapien
gatacagatagatcagcagttgctc

SEQ ID NO: 5281414 - DNA, 25 bp, Homo sapien
taatttaaagaaacaggcacttggc

SEQ ID NO: 5281415 - DNA, 25 bp, Homo sapien
tcccctcaaacaacacttgcacata

SEQ ID NO: 5281416 - DNA, 25 bp, Homo sapien
tgctcccctcaaacaacacttgcac

SEQ ID NO: 5281417 - DNA, 25 bp, Homo sapien
tcaaacaacacttgcacataacctc

SEQ ID NO: 5281418 - DNA, 25 bp, Homo sapien
ccctcaaacaacacttgcacataac

SEQ ID NO: 5281419 - DNA, 25 bp, Homo sapien
acatctgagctcctgttctctccca

SEQ ID NO: 5281420 - DNA, 25 bp, Homo sapien
catctgagctcctgttctctcccac

SEQ ID NO: 5281421 - DNA, 25 bp, Homo sapien
tcacatctgagctcctgttctctcc

SEQ ID NO: 5281422 - DNA, 25 bp, Homo sapien
cacatctgagctcctgttctctccc

SEQ ID NO: 5281423 - DNA, 25 bp, Homo sapien
tctcccctcatgatctgcatggcgg

SEQ ID NO: 5281424 - DNA, 25 bp, Homo sapien
cacaatgtgtgagaaagacacagac

SEQ ID NO: 5281425 - DNA, 25 bp, Homo sapien
taccagcgcatcagagggactgtcc

SEQ ID NO: 5281426 - DNA, 25 bp, Homo sapien
ggcaggattccccgaagcagcctgc

SEQ ID NO: 5281427 - DNA, 25 bp, Homo sapien
tgagaagggtcttacagcactgcct

SEQ ID NO: 5281428 - DNA, 25 bp, Homo sapien
caaagacaaggcaattccactctga

SEQ ID NO: 5281429 - DNA, 25 bp, Homo sapien
ccttgcatcacaagggctccttcag

SEQ ID NO: 5281430 - DNA, 25 bp, Homo sapien
tcaggaatggtgtgccaaagacaag

SEQ ID NO: 5281431 - DNA, 25 bp, Homo sapien
cactctaggtatgccctgagctact

SEQ ID NO: 5281432 - DNA, 25 bp, Homo sapien
caggcatgtgttagctggatcctct

SEQ ID NO: 5281433 - DNA, 25 bp, Homo sapien
ggtcttgcaagactacactctaggt

SEQ ID NO: 5281434 - DNA, 25 bp, Homo sapien
tggtggcttgagaaacaacccttta

SEQ ID NO: 5281435 - DNA, 25 bp, Homo sapien
taaggtatggttgtcctaggtacac

SEQ ID NO: 5281436 - DNA, 25 bp, Homo sapien
caagtgatattacatagaaggtgac

SEQ ID NO: 5281437 - DNA, 25 bp, Homo sapien
tgtttaccacactgaagcatacatt

SEQ ID NO: 5281438 - DNA, 25 bp, Homo sapien
tattatgtcaggatatctcagggag

SEQ ID NO: 5281439 - DNA, 25 bp, Homo sapien
cctgaaacctgatcccatttcaatg

SEQ ID NO: 5281440 - DNA, 25 bp, Homo sapien
agatgctgcttgaagttcagatatg

SEQ ID NO: 5281441 - DNA, 25 bp, Homo sapien
ctgatcccatttcaatgaggccaca

SEQ ID NO: 5281442 - DNA, 25 bp, Homo sapien
gatgctgcttgaagttcagatatgg

SEQ ID NO: 5281443 - DNA, 25 bp, Homo sapien
ttctgtttgctaggtcctgacgtca

SEQ ID NO: 5281444 - DNA, 25 bp, Homo sapien
attctgtttgctaggtcctgacgtc

SEQ ID NO: 5281445 - DNA, 25 bp, Homo sapien
gattctgtttgctaggtcctgacgt

SEQ ID NO: 5281446 - DNA, 25 bp, Homo sapien
tctgtttgctaggtcctgacgtcat

SEQ ID NO: 5281447 - DNA, 25 bp, Homo sapien
cctctttctcgatttagatgccctt

SEQ ID NO: 5281448 - DNA, 25 bp, Homo sapien
aatttcctctttctcgatttagatg

SEQ ID NO: 5281449 - DNA, 25 bp, Homo sapien
atttcctctttctcgatttagatgc

SEQ ID NO: 5281450 - DNA, 25 bp, Homo sapien
tattttggaacagctcaataggatt

SEQ ID NO: 5281451 - DNA, 25 bp, Homo sapien
gaaacacatttgatcacggcggatt

SEQ ID NO: 5281452 - DNA, 25 bp, Homo sapien
gctgtggatccatctaatgctgaac

SEQ ID NO: 5281453 - DNA, 25 bp, Homo sapien
catcaattttaatcagggatactgg

SEQ ID NO: 5281454 - DNA, 25 bp, Homo sapien
ggcagcggagggacataaaatcttt

SEQ ID NO: 5281455 - DNA, 25 bp, Homo sapien
tctgcattatagtggccagagcaag

SEQ ID NO: 5281456 - DNA, 25 bp, Homo sapien
tattagtgacaacagcagtggagta

SEQ ID NO: 5281457 - DNA, 25 bp, Homo sapien
ccaccatggtctaagagagtacttg

SEQ ID NO: 5281458 - DNA, 25 bp, Homo sapien
ttaactgcctccgtaggagagaaga

SEQ ID NO: 5281459 - DNA, 25 bp, Homo sapien
taactgcctccgtaggagagaagag

SEQ ID NO: 5281460 - DNA, 25 bp, Homo sapien
actgcctccgtaggagagaagagat

SEQ ID NO: 5281461 - DNA, 25 bp, Homo sapien
cttaactgcctccgtaggagagaag

SEQ ID NO: 5281462 - DNA, 25 bp, Homo sapien
ttatggattgttgggagaaaggtgg

SEQ ID NO: 5281463 - DNA, 25 bp, Homo sapien
atcaaagatagctgctttctaccta

SEQ ID NO: 5281464 - DNA, 25 bp, Homo sapien
gggtgtttatggattgttgggagaa

SEQ ID NO: 5281465 - DNA, 25 bp, Homo sapien
agatagctgctttctacctagactt

SEQ ID NO: 5281466 - DNA, 25 bp, Homo sapien
tcttcacgcttcctgggactgtctc

SEQ ID NO: 5281467 - DNA, 25 bp, Homo sapien
tgtctccccttttccatactgtgga

SEQ ID NO: 5281468 - DNA, 25 bp, Homo sapien
gacctttcctcttcacgcttcctgg

SEQ ID NO: 5281469 - DNA, 25 bp, Homo sapien
cttttccatactgtggaactgtccc

SEQ ID NO: 5281470 - DNA, 25 bp, Homo sapien
atgctgatgacacacttcgcagccg

SEQ ID NO: 5281471 - DNA, 25 bp, Homo sapien
tgatgacacacttcgcagccgagat

SEQ ID NO: 5281472 - DNA, 25 bp, Homo sapien
acacacttcgcagccgagatctcat

SEQ ID NO: 5281473 - DNA, 25 bp, Homo sapien
aagacacatccctgaccacatcata

SEQ ID NO: 5281474 - DNA, 25 bp, Homo sapien
tcgtgagaacggcatgatggaaact

SEQ ID NO: 5281475 - DNA, 25 bp, Homo sapien
gagccaagcaagcattgttcaccat

SEQ ID NO: 5281476 - DNA, 25 bp, Homo sapien
ttctgtatacaaacggagccaagca

SEQ ID NO: 5281477 - DNA, 25 bp, Homo sapien
taagtccagagtctatgctacagtc

SEQ ID NO: 5281478 - DNA, 25 bp, Homo sapien
tttaaaatgtactctgtggccaggt

SEQ ID NO: 5281479 - DNA, 25 bp, Homo sapien
aatcctcagtgactcccgttctctg

SEQ ID NO: 5281480 - DNA, 25 bp, Homo sapien
ttaatcctcagtgactcccgttctc

SEQ ID NO: 5281481 - DNA, 25 bp, Homo sapien
gactcccgttctctgagtcctgaat

SEQ ID NO: 5281482 - DNA, 25 bp, Homo sapien
tcagtgactcccgttctctgagtcc

SEQ ID NO: 5281483 - DNA, 25 bp, Homo sapien
tcccctgcagagcaaactggcatct

SEQ ID NO: 5281484 - DNA, 25 bp, Homo sapien
cctgcagagcaaactggcatctttc

SEQ ID NO: 5281485 - DNA, 25 bp, Homo sapien
cagagaacgggtttccaagccagcc

SEQ ID NO: 5281486 - DNA, 25 bp, Homo sapien
tctttcagagaacgggtttccaagc

SEQ ID NO: 5281487 - DNA, 25 bp, Homo sapien
atgatcagtgctgatgctacactct

SEQ ID NO: 5281488 - DNA, 25 bp, Homo sapien
aaaacctgttgtgatgctggacaca

SEQ ID NO: 5281489 - DNA, 25 bp, Homo sapien
gctacactctttccatctatgcaaa

SEQ ID NO: 5281490 - DNA, 25 bp, Homo sapien
cagtgctgatgctacactctttcca

SEQ ID NO: 5281491 - DNA, 25 bp, Homo sapien
cagtgagctatagccacagagcgag

SEQ ID NO: 5281492 - DNA, 25 bp, Homo sapien
aataaatctaaattacacaatgcaa

SEQ ID NO: 5281493 - DNA, 25 bp, Homo sapien
aaattatacttaatccaacatggtt

SEQ ID NO: 5281494 - DNA, 25 bp, Homo sapien
agtgagctatagccacagagcgaga

SEQ ID NO: 5281495 - DNA, 25 bp, Homo sapien
gccttctccgcatctggagcaaaaa

SEQ ID NO: 5281496 - DNA, 25 bp, Homo sapien
cgcatctggagcaaaaagaagtcca

SEQ ID NO: 5281497 - DNA, 25 bp, Homo sapien
ggaagttgccttctccgcatctgga

SEQ ID NO: 5281498 - DNA, 25 bp, Homo sapien
tagagactccgggaagttgccttct

SEQ ID NO: 5281499 - DNA, 25 bp, Homo sapien
tctgtcatctgcacagtgactgtga

SEQ ID NO: 5281500 - DNA, 25 bp, Homo sapien
gatggtaccatgatgtctgaagaag

SEQ ID NO: 5281501 - DNA, 25 bp, Homo sapien
cagtaactgggccaattcctaaagc

SEQ ID NO: 5281502 - DNA, 25 bp, Homo sapien
caactctgtggatcctgccagtaac

SEQ ID NO: 5281503 - DNA, 25 bp, Homo sapien
tctgacctcagatcaatcttcttat

SEQ ID NO: 5281504 - DNA, 25 bp, Homo sapien
gtagcataatgagactcaaactcaa

SEQ ID NO: 5281505 - DNA, 25 bp, Homo sapien
tttttctgacctcagatcaatcttc

SEQ ID NO: 5281506 - DNA, 25 bp, Homo sapien
tttctgacctcagatcaatcttctt

SEQ ID NO: 5281507 - DNA, 25 bp, Homo sapien
gaagcaataaccctctgccctcgtt

SEQ ID NO: 5281508 - DNA, 25 bp, Homo sapien
gaagggtggcatattccatatcatg

SEQ ID NO: 5281509 - DNA, 25 bp, Homo sapien
cttcagatactattccagaatgaac

SEQ ID NO: 5281510 - DNA, 25 bp, Homo sapien
gaagggttactctaattagaaatga

SEQ ID NO: 5281511 - DNA, 25 bp, Homo sapien
gctgtatataactttcgacttccaa

SEQ ID NO: 5281512 - DNA, 25 bp, Homo sapien
ccagacctgctgtatataactttcg

SEQ ID NO: 5281513 - DNA, 25 bp, Homo sapien
tttcaagtgatattggacattaata

SEQ ID NO: 5281514 - DNA, 25 bp, Homo sapien
tgatattggacattaatatatcttc

SEQ ID NO: 5281515 - DNA, 25 bp, Homo sapien
tgatctctatcaggaaggccttccc

SEQ ID NO: 5281516 - DNA, 25 bp, Homo sapien
taacaagttccacattgcagacaaa

SEQ ID NO: 5281517 - DNA, 25 bp, Homo sapien
catcccaccactaagtaaattaaag

SEQ ID NO: 5281518 - DNA, 25 bp, Homo sapien
catctgctcgaatggaaacgtgtgg

SEQ ID NO: 5281519 - DNA, 25 bp, Homo sapien
tggtaaccaggccacctatgagtga

SEQ ID NO: 5281520 - DNA, 25 bp, Homo sapien
agcaccatgcaggtgttccccattc

SEQ ID NO: 5281521 - DNA, 25 bp, Homo sapien
tgagtgagtgcagccgacacaaagc

SEQ ID NO: 5281522 - DNA, 25 bp, Homo sapien
ctgctggctgaacacgggaaaccat

SEQ ID NO: 5281523 - DNA, 25 bp, Homo sapien
ccatctgtggttgcttggtgtcacc

SEQ ID NO: 5281524 - DNA, 25 bp, Homo sapien
tgtcatctaaaatagtccccgcttg

SEQ ID NO: 5281525 - DNA, 25 bp, Homo sapien
gcagggtaactaagcatcacagcag

SEQ ID NO: 5281526 - DNA, 25 bp, Homo sapien
ccccgcttgcctagaaatgtggaca

SEQ ID NO: 5281527 - DNA, 25 bp, Homo sapien
tggtgcttcatttcgccagacctgg

SEQ ID NO: 5281528 - DNA, 25 bp, Homo sapien
gacctggcagattgccacccgcaat

SEQ ID NO: 5281529 - DNA, 25 bp, Homo sapien
gcaatctccctttacgaggctgcac

SEQ ID NO: 5281530 - DNA, 25 bp, Homo sapien
caaaggcgaactctattttctggtg

SEQ ID NO: 5281531 - DNA, 25 bp, Homo sapien
caaagagattcatctgtttatcaca

SEQ ID NO: 5281532 - DNA, 25 bp, Homo sapien
tccaccctcaaaaggcacagtcatt

SEQ ID NO: 5281533 - DNA, 25 bp, Homo sapien
agcatggtgaataatctccaccctc

SEQ ID NO: 5281534 - DNA, 25 bp, Homo sapien
agtcattctgaaaagccacgtgctc

SEQ ID NO: 5281535 - DNA, 25 bp, Homo sapien
ctagaggagtggctcttgtcatctc

SEQ ID NO: 5281536 - DNA, 25 bp, Homo sapien
tgcctgaagacctgaggaagtccct

SEQ ID NO: 5281537 - DNA, 25 bp, Homo sapien
cctggaaaggctgacaatcaccaca

SEQ ID NO: 5281538 - DNA, 25 bp, Homo sapien
acatcccgtagcacaaagacgccca

SEQ ID NO: 5281539 - DNA, 25 bp, Homo sapien
acaagggacaccctttacaaggcag

SEQ ID NO: 5281540 - DNA, 25 bp, Homo sapien
tgacagctggaaagccaactggagt

SEQ ID NO: 5281541 - DNA, 25 bp, Homo sapien
gcccttgggctcacccagatgtttt

SEQ ID NO: 5281542 - DNA, 25 bp, Homo sapien
agccaactggagtgtcagctagaac

SEQ ID NO: 5281543 - DNA, 25 bp, Homo sapien
tggaaagccaactggagtgtcagct

SEQ ID NO: 5281544 - DNA, 25 bp, Homo sapien
gcttcaattagccagaatgacaaaa

SEQ ID NO: 5281545 - DNA, 25 bp, Homo sapien
gagcataagcttcaattagccagaa

SEQ ID NO: 5281546 - DNA, 25 bp, Homo sapien
caattagccagaatgacaaaattac

SEQ ID NO: 5281547 - DNA, 25 bp, Homo sapien
cagaagagagcataagcttcaatta

SEQ ID NO: 5281548 - DNA, 25 bp, Homo sapien
ctttacagtcaaggtgggaattaag

SEQ ID NO: 5281549 - DNA, 25 bp, Homo sapien
caggatactagtgtggtctctgcac

SEQ ID NO: 5281550 - DNA, 25 bp, Homo sapien
gcacgatgatccaggatactagtgt

SEQ ID NO: 5281551 - DNA, 25 bp, Homo sapien
ttttcgggggtcttgtcacagtgaa

SEQ ID NO: 5281552 - DNA, 25 bp, Homo sapien
agtggtgcaatttccaatctcagct

SEQ ID NO: 5281553 - DNA, 25 bp, Homo sapien
cagaagccactttccgcatgaagaa

SEQ ID NO: 5281554 - DNA, 25 bp, Homo sapien
caatgaagagggtgtcaagcatccc

SEQ ID NO: 5281555 - DNA, 25 bp, Homo sapien
ttagacaagcaaatggtgggcaacc

SEQ ID NO: 5281556 - DNA, 25 bp, Homo sapien
tccctaaaagatgggctgaccttgt

SEQ ID NO: 5281557 - DNA, 25 bp, Homo sapien
ctccaccccagaggggctctgcagg

SEQ ID NO: 5281558 - DNA, 25 bp, Homo sapien
ccaccccagaggggctctgcaggta

SEQ ID NO: 5281559 - DNA, 25 bp, Homo sapien
tccaccccagaggggctctgcaggt

SEQ ID NO: 5281560 - DNA, 25 bp, Homo sapien
ttcatgactgagagttgagaggctg

SEQ ID NO: 5281561 - DNA, 25 bp, Homo sapien
tgggcttccatgagctttggcccct

SEQ ID NO: 5281562 - DNA, 25 bp, Homo sapien
ccattcatgactgagagttgagagg

SEQ ID NO: 5281563 - DNA, 25 bp, Homo sapien
tcacaccccattcatgactgagagt

SEQ ID NO: 5281564 - DNA, 25 bp, Homo sapien
aggggaacagcagatggatgttcct

SEQ ID NO: 5281565 - DNA, 25 bp, Homo sapien
agaggggaacagcagatggatgttc

SEQ ID NO: 5281566 - DNA, 25 bp, Homo sapien
ggaacagcagatggatgttcctggc

SEQ ID NO: 5281567 - DNA, 25 bp, Homo sapien
agaaagaggggaacagcagatggat

SEQ ID NO: 5281568 - DNA, 25 bp, Homo sapien
cagctgagtctcgaaaagcgagtgt

SEQ ID NO: 5281569 - DNA, 25 bp, Homo sapien
tagttcagctgagtctcgaaaagcg

SEQ ID NO: 5281570 - DNA, 25 bp, Homo sapien
tctcgaaaagcgagtgtgactttta

SEQ ID NO: 5281571 - DNA, 25 bp, Homo sapien
gcagttagttcagctgagtctcgaa

SEQ ID NO: 5281572 - DNA, 25 bp, Homo sapien
tgtcagaggttgtttcgcaggttac

SEQ ID NO: 5281573 - DNA, 25 bp, Homo sapien
tcagcgtttaatgatgtcagaggtt

SEQ ID NO: 5281574 - DNA, 25 bp, Homo sapien
tgatgtcagaggttgtttcgcaggt

SEQ ID NO: 5281575 - DNA, 25 bp, Homo sapien
ttaatgatgtcagaggttgtttcgc

SEQ ID NO: 5281576 - DNA, 25 bp, Homo sapien
gcctgtgattctggtaataacaacc

SEQ ID NO: 5281577 - DNA, 25 bp, Homo sapien
tgactcccctcacaacaggggcaga

SEQ ID NO: 5281578 - DNA, 25 bp, Homo sapien
gtgattctggtaataacaaccacat

SEQ ID NO: 5281579 - DNA, 25 bp, Homo sapien
gcagaggctccggatccaagaagtg

SEQ ID NO: 5281580 - DNA, 25 bp, Homo sapien
taagtattcatgcaagccttcaaag

SEQ ID NO: 5281581 - DNA, 25 bp, Homo sapien
cacctctctgccttaagtattcatg

SEQ ID NO: 5281582 - DNA, 25 bp, Homo sapien
cctagccgctcgcaggaagaaatct

SEQ ID NO: 5281583 - DNA, 25 bp, Homo sapien
ctcgcctagccgctcgcaggaagaa

SEQ ID NO: 5281584 - DNA, 25 bp, Homo sapien
aatttgtggaaaagactgagtcatc

SEQ ID NO: 5281585 - DNA, 25 bp, Homo sapien
taaatttgtggaaaagactgagtca

SEQ ID NO: 5281586 - DNA, 25 bp, Homo sapien
cttaaatttgtggaaaagactgagt

SEQ ID NO: 5281587 - DNA, 25 bp, Homo sapien
ttgtggaaaagactgagtcatccac

SEQ ID NO: 5281588 - DNA, 25 bp, Homo sapien
agcaggattgtgggccaccccccca

SEQ ID NO: 5281589 - DNA, 25 bp, Homo sapien
gcaggattgtgggccacccccccat

SEQ ID NO: 5281590 - DNA, 25 bp, Homo sapien
caaggagccctcaaaggtaagtgct

SEQ ID NO: 5281591 - DNA, 25 bp, Homo sapien
tactcagtgccggacatctctctaa

SEQ ID NO: 5281592 - DNA, 25 bp, Homo sapien
tagctttcccatgcaggagtcagga

SEQ ID NO: 5281593 - DNA, 25 bp, Homo sapien
tgtgctgcaccttcacgtctgagtg

SEQ ID NO: 5281594 - DNA, 25 bp, Homo sapien
tctgcaatatacaggaagctgatga

SEQ ID NO: 5281595 - DNA, 25 bp, Homo sapien
tgcagcacggcctgattgaggttct

SEQ ID NO: 5281596 - DNA, 25 bp, Homo sapien
ttttcatgagaattgagctggagga

SEQ ID NO: 5281597 - DNA, 25 bp, Homo sapien
gatgaggatttcacggccacctctt

SEQ ID NO: 5281598 - DNA, 25 bp, Homo sapien
tgtcatgttaaggaacacgcaggaa

SEQ ID NO: 5281599 - DNA, 25 bp, Homo sapien
tatctgtagggtccacagtgggctg

SEQ ID NO: 5281600 - DNA, 25 bp, Homo sapien
gaaaagcagcctatgagtatctgta

SEQ ID NO: 5281601 - DNA, 25 bp, Homo sapien
tggccactggcaccgaagtgacctt

SEQ ID NO: 5281602 - DNA, 25 bp, Homo sapien
ttctcctgaatcacattgtaggctc

SEQ ID NO: 5281603 - DNA, 25 bp, Homo sapien
gaatcacattgtaggctccaaaatc

SEQ ID NO: 5281604 - DNA, 25 bp, Homo sapien
cctgaatcacattgtaggctccaaa

SEQ ID NO: 5281605 - DNA, 25 bp, Homo sapien
tcacattgtaggctccaaaatcttc

SEQ ID NO: 5281606 - DNA, 25 bp, Homo sapien
aaaagcagtaagctcagtggtatca

SEQ ID NO: 5281607 - DNA, 25 bp, Homo sapien
tccagaaaagcagtaagctcagtgg

SEQ ID NO: 5281608 - DNA, 25 bp, Homo sapien
ctggagttgggaacacgttcttcca

SEQ ID NO: 5281609 - DNA, 25 bp, Homo sapien
tgggaacacgttcttccagaaaagc

SEQ ID NO: 5281610 - DNA, 25 bp, Homo sapien
cccaaaattgatccagacagcagaa

SEQ ID NO: 5281611 - DNA, 25 bp, Homo sapien
gcttcaactgaaaggctaaattctc

SEQ ID NO: 5281612 - DNA, 25 bp, Homo sapien
tactttaacacagcaattggtccag

SEQ ID NO: 5281613 - DNA, 25 bp, Homo sapien
tagcagcaagttggaaaagcccagt

SEQ ID NO: 5281614 - DNA, 25 bp, Homo sapien
ttcagtctagaattttcatcatcac

SEQ ID NO: 5281615 - DNA, 25 bp, Homo sapien
tcatttcagtctagaattttcatca

SEQ ID NO: 5281616 - DNA, 25 bp, Homo sapien
catttcagtctagaattttcatcat

SEQ ID NO: 5281617 - DNA, 25 bp, Homo sapien
cagtctagaattttcatcatcactg

SEQ ID NO: 5281618 - DNA, 25 bp, Homo sapien
tttcactctccaaaaaacagccatc

SEQ ID NO: 5281619 - DNA, 25 bp, Homo sapien
gaaacattacatgacttgcactcag

SEQ ID NO: 5281620 - DNA, 25 bp, Homo sapien
acatgacttgcactcagtttcactc

SEQ ID NO: 5281621 - DNA, 25 bp, Homo sapien
ttacatgacttgcactcagtttcac

SEQ ID NO: 5281622 - DNA, 25 bp, Homo sapien
tagacagaagtacttggacctatgc

SEQ ID NO: 5281623 - DNA, 25 bp, Homo sapien
ggtacatgtgctgtttgttgcatgg

SEQ ID NO: 5281624 - DNA, 25 bp, Homo sapien
gagagtatagtcaccgataggtagt

SEQ ID NO: 5281625 - DNA, 25 bp, Homo sapien
gcatgtcactgggtctgatatacaa

SEQ ID NO: 5281626 - DNA, 25 bp, Homo sapien
ttggttgtttgcactctgggaatcc

SEQ ID NO: 5281627 - DNA, 25 bp, Homo sapien
ggttgtttgcactctgggaatcctc

SEQ ID NO: 5281628 - DNA, 25 bp, Homo sapien
tttggttgtttgcactctgggaatc

SEQ ID NO: 5281629 - DNA, 25 bp, Homo sapien
ctgtttggttgtttgcactctggga

SEQ ID NO: 5281630 - DNA, 25 bp, Homo sapien
tggattccacggcagcactgctgag

SEQ ID NO: 5281631 - DNA, 25 bp, Homo sapien
gctgagtctcttggcaatagccagc

SEQ ID NO: 5281632 - DNA, 25 bp, Homo sapien
tctcttggcaatagccagcctgctt

SEQ ID NO: 5281633 - DNA, 25 bp, Homo sapien
gagcagtgtggattccacggcagca

SEQ ID NO: 5281634 - DNA, 25 bp, Homo sapien
atgtgaggaataccaacagaaatga

SEQ ID NO: 5281635 - DNA, 25 bp, Homo sapien
tagacttttaccctcgcattgcatt

SEQ ID NO: 5281636 - DNA, 25 bp, Homo sapien
gaccttctgggtatattaatgcatg

SEQ ID NO: 5281637 - DNA, 25 bp, Homo sapien
cattgagaggcactagcaggaaagc

SEQ ID NO: 5281638 - DNA, 25 bp, Homo sapien
tccagctctcaccaaggtccagtaa

SEQ ID NO: 5281639 - DNA, 25 bp, Homo sapien
gaagagtcagcattaagcatcacta

SEQ ID NO: 5281640 - DNA, 25 bp, Homo sapien
tagaatagatcacaagccattagct

SEQ ID NO: 5281641 - DNA, 25 bp, Homo sapien
tagctgcctttaagagttactagag

SEQ ID NO: 5281642 - DNA, 25 bp, Homo sapien
gagcctctgttggattccctaaccc

SEQ ID NO: 5281643 - DNA, 25 bp, Homo sapien
catctattccactgctaaaatcata

SEQ ID NO: 5281644 - DNA, 25 bp, Homo sapien
tgctcaaagcagacatctattccac

SEQ ID NO: 5281645 - DNA, 25 bp, Homo sapien
tctattccactgctaaaatcataaa

SEQ ID NO: 5281646 - DNA, 25 bp, Homo sapien
acatctattccactgctaaaatcat

SEQ ID NO: 5281647 - DNA, 25 bp, Homo sapien
caagtagatgccaatacttgtatct

SEQ ID NO: 5281648 - DNA, 25 bp, Homo sapien
gtagatgccaatacttgtatctttg

SEQ ID NO: 5281649 - DNA, 25 bp, Homo sapien
caatacttgtatctttgagcaggtg

SEQ ID NO: 5281650 - DNA, 25 bp, Homo sapien
gatgccaatacttgtatctttgagc

SEQ ID NO: 5281651 - DNA, 25 bp, Homo sapien
tttgtcacccccacaggccttttca

SEQ ID NO: 5281652 - DNA, 25 bp, Homo sapien
tctccaagaaaatccaatcgtacgt

SEQ ID NO: 5281653 - DNA, 25 bp, Homo sapien
ctggtgaaggctttgtgatctccaa

SEQ ID NO: 5281654 - DNA, 25 bp, Homo sapien
ctttgtgatctccaagaaaatccaa

SEQ ID NO: 5281655 - DNA, 25 bp, Homo sapien
acaagtccttcttctctaattgcac

SEQ ID NO: 5281656 - DNA, 25 bp, Homo sapien
cacaccattgttgagatccagaaag

SEQ ID NO: 5281657 - DNA, 25 bp, Homo sapien
gcaagaaaccgatgattgtgcccac

SEQ ID NO: 5281658 - DNA, 25 bp, Homo sapien
tttccagaaacagctacaagtcctt

SEQ ID NO: 5281659 - DNA, 25 bp, Homo sapien
ttccacacaggcaaaggaaagccca

SEQ ID NO: 5281660 - DNA, 25 bp, Homo sapien
cttccacacaggcaaaggaaagccc

SEQ ID NO: 5281661 - DNA, 25 bp, Homo sapien
tccacacaggcaaaggaaagcccat

SEQ ID NO: 5281662 - DNA, 25 bp, Homo sapien
cagttaggcattcactgattatgtc

SEQ ID NO: 5281663 - DNA, 25 bp, Homo sapien
caaagtctttataagagcagttgcc

SEQ ID NO: 5281664 - DNA, 25 bp, Homo sapien
aatcaaagtctttataagagcagtt

SEQ ID NO: 5281665 - DNA, 25 bp, Homo sapien
aagtctttataagagcagttgccat

SEQ ID NO: 5281666 - DNA, 25 bp, Homo sapien
tcctcagagcgcttgggagcctttg

SEQ ID NO: 5281667 - DNA, 25 bp, Homo sapien
ctttatcctcagagcgcttgggagc

SEQ ID NO: 5281668 - DNA, 25 bp, Homo sapien
gaagagtcctccaaagtcacataag

SEQ ID NO: 5281669 - DNA, 25 bp, Homo sapien
aatagattttaggagatggctctgg

SEQ ID NO: 5281670 - DNA, 25 bp, Homo sapien
tatttgaaaagtgcaggggaggagc

SEQ ID NO: 5281671 - DNA, 25 bp, Homo sapien
cttatttgaaaagtgcaggggagga

SEQ ID NO: 5281672 - DNA, 25 bp, Homo sapien
ttgaaaagtgcaggggaggagccaa

SEQ ID NO: 5281673 - DNA, 25 bp, Homo sapien
gatggccgaataggaacagctccgg

SEQ ID NO: 5281674 - DNA, 25 bp, Homo sapien
cagcaatggtaggaaaggctttatt

SEQ ID NO: 5281675 - DNA, 25 bp, Homo sapien
gacagcaatggtaggaaaggcttta

SEQ ID NO: 5281676 - DNA, 25 bp, Homo sapien
tagacagcaatggtaggaaaggctt

SEQ ID NO: 5281677 - DNA, 25 bp, Homo sapien
ttagacagcaatggtaggaaaggct

SEQ ID NO: 5281678 - DNA, 25 bp, Homo sapien
tctttgaccaggatcataatctttc

SEQ ID NO: 5281679 - DNA, 25 bp, Homo sapien
ctcctaaatccaaccccactgggat

SEQ ID NO: 5281680 - DNA, 25 bp, Homo sapien
tgggatctcttctttgaccaggatc

SEQ ID NO: 5281681 - DNA, 25 bp, Homo sapien
taaatccaaccccactgggatctct

SEQ ID NO: 5281682 - DNA, 25 bp, Homo sapien
tagctagctgactcagcgtccaccc

SEQ ID NO: 5281683 - DNA, 25 bp, Homo sapien
tgctaccaggtctgtctcatccctt

SEQ ID NO: 5281684 - DNA, 25 bp, Homo sapien
tctgtctcatcccttgtaagagatg

SEQ ID NO: 5281685 - DNA, 25 bp, Homo sapien
accccaacactgctaccaggtctgt

SEQ ID NO: 5281686 - DNA, 25 bp, Homo sapien
gaaaatgcctttccactttgtctaa

SEQ ID NO: 5281687 - DNA, 25 bp, Homo sapien
ccagcttaaagcatcgtgagttaac

SEQ ID NO: 5281688 - DNA, 25 bp, Homo sapien
caggcagttgttgaatcctagaggt

SEQ ID NO: 5281689 - DNA, 25 bp, Homo sapien
aggttcgctttgctccccattgcca

SEQ ID NO: 5281690 - DNA, 25 bp, Homo sapien
tccccagctttgttctgaggtccat

SEQ ID NO: 5281691 - DNA, 25 bp, Homo sapien
gatccccagctttgttctgaggtcc

SEQ ID NO: 5281692 - DNA, 25 bp, Homo sapien
tgatccccagctttgttctgaggtc

SEQ ID NO: 5281693 - DNA, 25 bp, Homo sapien
ctgatccccagctttgttctgaggt

SEQ ID NO: 5281694 - DNA, 25 bp, Homo sapien
ctgcactgacaagataggagcctag

SEQ ID NO: 5281695 - DNA, 25 bp, Homo sapien
gagctgcactgacaagataggagcc

SEQ ID NO: 5281696 - DNA, 25 bp, Homo sapien
agagctgcactgacaagataggagc

SEQ ID NO: 5281697 - DNA, 25 bp, Homo sapien
gctgcactgacaagataggagccta

SEQ ID NO: 5281698 - DNA, 25 bp, Homo sapien
taattggaccaaggctgttctcctc

SEQ ID NO: 5281699 - DNA, 25 bp, Homo sapien
aggaacaccttctcaagctcaggtg

SEQ ID NO: 5281700 - DNA, 25 bp, Homo sapien
tgttctcctccaaagtccggcttag

SEQ ID NO: 5281701 - DNA, 25 bp, Homo sapien
ggtgccacaaaaggcacagggaatg

SEQ ID NO: 5281702 - DNA, 25 bp, Homo sapien
gcactgagaccaaggttccctgcct

SEQ ID NO: 5281703 - DNA, 25 bp, Homo sapien
ccagagatgctacaggatttgacta

SEQ ID NO: 5281704 - DNA, 25 bp, Homo sapien
ggaaaacatagggaccgctcctctc

SEQ ID NO: 5281705 - DNA, 25 bp, Homo sapien
gaggtaagccgtctttagcaatgtt

SEQ ID NO: 5281706 - DNA, 25 bp, Homo sapien
tacacactaaagtgtcagttaggaa

SEQ ID NO: 5281707 - DNA, 25 bp, Homo sapien
tcacggcgggagtttttaatacaca

SEQ ID NO: 5281708 - DNA, 25 bp, Homo sapien
taaagtgagatggtagaagataaca

SEQ ID NO: 5281709 - DNA, 25 bp, Homo sapien
ataagaaaatgacagttccaccatc

SEQ ID NO: 5281710 - DNA, 25 bp, Homo sapien
atgcaatgagtcctgatcgcaccgc

SEQ ID NO: 5281711 - DNA, 25 bp, Homo sapien
ggatgcaatgagtcctgatcgcacc

SEQ ID NO: 5281712 - DNA, 25 bp, Homo sapien
gatgcaatgagtcctgatcgcaccg

SEQ ID NO: 5281713 - DNA, 25 bp, Homo sapien
taccaactgggctctagagacggcc

SEQ ID NO: 5281714 - DNA, 25 bp, Homo sapien
tgaagaccgtctgagagctctacct

SEQ ID NO: 5281715 - DNA, 25 bp, Homo sapien
agcgaactttctggccttgggtagg

SEQ ID NO: 5281716 - DNA, 25 bp, Homo sapien
gactgggcactccaagtcaagggct

SEQ ID NO: 5281717 - DNA, 25 bp, Homo sapien
cacatacgccaacggctggatgcgc

SEQ ID NO: 5281718 - DNA, 25 bp, Homo sapien
tgaactccgcgacgatttccacgca

SEQ ID NO: 5281719 - DNA, 25 bp, Homo sapien
aagcaaaacactgaactccgcgacg

SEQ ID NO: 5281720 - DNA, 25 bp, Homo sapien
tctgcattttctgcccacacatacg

SEQ ID NO: 5281721 - DNA, 25 bp, Homo sapien
cactggcctgcgagttccttttgcg

SEQ ID NO: 5281722 - DNA, 25 bp, Homo sapien
cgccgtcagcttccggactccggca

SEQ ID NO: 5281723 - DNA, 25 bp, Homo sapien
agcttccggactccggcaccagcag

SEQ ID NO: 5281724 - DNA, 25 bp, Homo sapien
agcagcactggcctgcgagttcctt

SEQ ID NO: 5281725 - DNA, 25 bp, Homo sapien
tagtggagacgaaccgattcgtggc

SEQ ID NO: 5281726 - DNA, 25 bp, Homo sapien
gtgggatgagtacgccgcggcaact

SEQ ID NO: 5281727 - DNA, 25 bp, Homo sapien
gagaccactctaaaccactgattca

SEQ ID NO: 5281728 - DNA, 25 bp, Homo sapien
agctgccaacgcttcgggtctgcgg

SEQ ID NO: 5281729 - DNA, 25 bp, Homo sapien
ctaggccagatagcttccccagccg

SEQ ID NO: 5281730 - DNA, 25 bp, Homo sapien
atagcttccccagccgtacacaaaa

SEQ ID NO: 5281731 - DNA, 25 bp, Homo sapien
agatagcttccccagccgtacacaa

SEQ ID NO: 5281732 - DNA, 25 bp, Homo sapien
aggccagatagcttccccagccgta

SEQ ID NO: 5281733 - DNA, 25 bp, Homo sapien
cacacagtcactgggaccagcgaag

SEQ ID NO: 5281734 - DNA, 25 bp, Homo sapien
tgaaaaatagccccagcaacgctga

SEQ ID NO: 5281735 - DNA, 25 bp, Homo sapien
gaccagcgaagcttattgtgatggg

SEQ ID NO: 5281736 - DNA, 25 bp, Homo sapien
tggccagcaccatcggcctcttttt

SEQ ID NO: 5281737 - DNA, 25 bp, Homo sapien
gagtccaccgggataacagcaaaca

SEQ ID NO: 5281738 - DNA, 25 bp, Homo sapien
aattgtagcctggatagggtcggat

SEQ ID NO: 5281739 - DNA, 25 bp, Homo sapien
gagacgtgatctctgagtccaccgg

SEQ ID NO: 5281740 - DNA, 25 bp, Homo sapien
gaatcactagaacaagctgcaggga

SEQ ID NO: 5281741 - DNA, 25 bp, Homo sapien
gataaatgtccgttaccgatggtca

SEQ ID NO: 5281742 - DNA, 25 bp, Homo sapien
gctgccagtgctaaggacttcgttg

SEQ ID NO: 5281743 - DNA, 25 bp, Homo sapien
gtgccaatcgcaatataacgcccgg

SEQ ID NO: 5281744 - DNA, 25 bp, Homo sapien
tacagggattacacttttgcaggct

SEQ ID NO: 5281745 - DNA, 25 bp, Homo sapien
cggctccgcggagctttcgttcttt

SEQ ID NO: 5281746 - DNA, 25 bp, Homo sapien
ccgctgcggctccgcggagctttcg

SEQ ID NO: 5281747 - DNA, 25 bp, Homo sapien
gctgcggctccgcggagctttcgtt

SEQ ID NO: 5281748 - DNA, 25 bp, Homo sapien
tgcggctccgcggagctttcgttct

SEQ ID NO: 5281749 - DNA, 25 bp, Homo sapien
ttcccttccgccacgtgagtaccgc

SEQ ID NO: 5281750 - DNA, 25 bp, Homo sapien
gccttttggccaagagtttagccgc

SEQ ID NO: 5281751 - DNA, 25 bp, Homo sapien
ttttggccaagagtttagccgcgtc

SEQ ID NO: 5281752 - DNA, 25 bp, Homo sapien
gccacgtgagtaccgccttttggcc

SEQ ID NO: 5281753 - DNA, 25 bp, Homo sapien
gagagggccgctgggcctagggtcc

SEQ ID NO: 5281754 - DNA, 25 bp, Homo sapien
ccgctgcccgccagagtcaggcttc

SEQ ID NO: 5281755 - DNA, 25 bp, Homo sapien
tgttggagaggtggaaggtcccgag

SEQ ID NO: 5281756 - DNA, 25 bp, Homo sapien
gggctctgaagtgccgcgtgcgcca

SEQ ID NO: 5281757 - DNA, 25 bp, Homo sapien
tcttggaggttttgagctccttcac

SEQ ID NO: 5281758 - DNA, 25 bp, Homo sapien
ttagcatttgatcttggaggttttg

SEQ ID NO: 5281759 - DNA, 25 bp, Homo sapien
tgatcttggaggttttgagctcctt

SEQ ID NO: 5281760 - DNA, 25 bp, Homo sapien
agcatttgatcttggaggttttgag

SEQ ID NO: 5281761 - DNA, 25 bp, Homo sapien
ttgtggacagcgagagtcctggact

SEQ ID NO: 5281762 - DNA, 25 bp, Homo sapien
tagcgtcttgtggacagcgagagtc

SEQ ID NO: 5281763 - DNA, 25 bp, Homo sapien
tgagtgtagcgtcttgtggacagcg

SEQ ID NO: 5281764 - DNA, 25 bp, Homo sapien
acagcgagagtcctggactggcaga

SEQ ID NO: 5281765 - DNA, 25 bp, Homo sapien
ttggcaaaatcaaagcgcggcttgg

SEQ ID NO: 5281766 - DNA, 25 bp, Homo sapien
tgcaacgcgctgaaaccatacaggt

SEQ ID NO: 5281767 - DNA, 25 bp, Homo sapien
ttggtcttggaaggcagacgtcccc

SEQ ID NO: 5281768 - DNA, 25 bp, Homo sapien
tctggagacagcttggtcacgtcga

SEQ ID NO: 5281769 - DNA, 25 bp, Homo sapien
gcgccggcaaggttttgctgcccat

SEQ ID NO: 5281770 - DNA, 25 bp, Homo sapien
ggaagggtggataggcaccggcgcc

SEQ ID NO: 5281771 - DNA, 25 bp, Homo sapien
cagggaagggtggataggcaccggc

SEQ ID NO: 5281772 - DNA, 25 bp, Homo sapien
caccggcgccggcaaggttttgctg

SEQ ID NO: 5281773 - DNA, 25 bp, Homo sapien
ggtagttgcagtggcttctcaatcc

SEQ ID NO: 5281774 - DNA, 25 bp, Homo sapien
gttgcagtggcttctcaatccggat

SEQ ID NO: 5281775 - DNA, 25 bp, Homo sapien
ttcggtagttgcagtggcttctcaa

SEQ ID NO: 5281776 - DNA, 25 bp, Homo sapien
tagttgcagtggcttctcaatccgg

SEQ ID NO: 5281777 - DNA, 25 bp, Homo sapien
tgtaaaaacaccacgagctggccgt

SEQ ID NO: 5281778 - DNA, 25 bp, Homo sapien
gaagtcattgtcacagcagggtccg

SEQ ID NO: 5281779 - DNA, 25 bp, Homo sapien
aaattgacatccaggtaagcccggg

SEQ ID NO: 5281780 - DNA, 25 bp, Homo sapien
taagggctccctccaaatggcgtct

SEQ ID NO: 5281781 - DNA, 25 bp, Homo sapien
ccacaggcgcccctggagctctagt

SEQ ID NO: 5281782 - DNA, 25 bp, Homo sapien
acacgcgggagcgagcgctcagcag

SEQ ID NO: 5281783 - DNA, 25 bp, Homo sapien
gggacggtgagcctcgctcgcggct

SEQ ID NO: 5281784 - DNA, 25 bp, Homo sapien
gcagccccggatcctgcacgccggg

SEQ ID NO: 5281785 - DNA, 25 bp, Homo sapien
ctgagaacgtgccggggagaggccg

SEQ ID NO: 5281786 - DNA, 25 bp, Homo sapien
ccggcgatgggactcggagagagtc

SEQ ID NO: 5281787 - DNA, 25 bp, Homo sapien
tccagacaccggagggttattatct

SEQ ID NO: 5281788 - DNA, 25 bp, Homo sapien
tctgcagagcgatttccggcgatgg

SEQ ID NO: 5281789 - DNA, 25 bp, Homo sapien
agtccggctgcgaggtttcgagatt

SEQ ID NO: 5281790 - DNA, 25 bp, Homo sapien
tcctgcatttgcaagctcggtccgc

SEQ ID NO: 5281791 - DNA, 25 bp, Homo sapien
cccatcctgcatttgcaagctcggt

SEQ ID NO: 5281792 - DNA, 25 bp, Homo sapien
gcatttgcaagctcggtccgcgtgc

SEQ ID NO: 5281793 - DNA, 25 bp, Homo sapien
ctgcatttgcaagctcggtccgcgt

SEQ ID NO: 5281794 - DNA, 25 bp, Homo sapien
aggtctgcacgtcctgcttcggatc

SEQ ID NO: 5281795 - DNA, 25 bp, Homo sapien
tgcttcggatcccaaatcctggctt

SEQ ID NO: 5281796 - DNA, 25 bp, Homo sapien
gtccgcagcccctcgtaggtctgca

SEQ ID NO: 5281797 - DNA, 25 bp, Homo sapien
gagaagtgccctccggtgcctccgt

SEQ ID NO: 5281798 - DNA, 25 bp, Homo sapien
agagggaggacaaagcttgcatcag

SEQ ID NO: 5281799 - DNA, 25 bp, Homo sapien
ggacaaagcttgcatcaggcagtga

SEQ ID NO: 5281800 - DNA, 25 bp, Homo sapien
agggaggacaaagcttgcatcaggc

SEQ ID NO: 5281801 - DNA, 25 bp, Homo sapien
gaggacaaagcttgcatcaggcagt

SEQ ID NO: 5281802 - DNA, 25 bp, Homo sapien
ccaaaccgctggctgcatttccctc

SEQ ID NO: 5281803 - DNA, 25 bp, Homo sapien
caaaccgctggctgcatttccctct

SEQ ID NO: 5281804 - DNA, 25 bp, Homo sapien
gagggcagtttgccaaaccgctggc

SEQ ID NO: 5281805 - DNA, 25 bp, Homo sapien
tggcccgcctcgagctgctcaggaa

SEQ ID NO: 5281806 - DNA, 25 bp, Homo sapien
aacggcttccactgtaatgcttcat

SEQ ID NO: 5281807 - DNA, 25 bp, Homo sapien
ttgaagctctgaagatgaacggctt

SEQ ID NO: 5281808 - DNA, 25 bp, Homo sapien
aaccttcatcaaccattcaaccact

SEQ ID NO: 5281809 - DNA, 25 bp, Homo sapien
tctgaagatgaacggcttccactgt

SEQ ID NO: 5281810 - DNA, 25 bp, Homo sapien
agggaatgagatacatagggaagaa

SEQ ID NO: 5281811 - DNA, 25 bp, Homo sapien
tgagatacatagggaagaatgggac

SEQ ID NO: 5281812 - DNA, 25 bp, Homo sapien
gccaagggaatgagatacataggga

SEQ ID NO: 5281813 - DNA, 25 bp, Homo sapien
gaatgagatacatagggaagaatgg

SEQ ID NO: 5281814 - DNA, 25 bp, Homo sapien
ctgaattaggatgttctcgaacggt

SEQ ID NO: 5281815 - DNA, 25 bp, Homo sapien
gtcaaggtcaggaagtgcccttctc

SEQ ID NO: 5281816 - DNA, 25 bp, Homo sapien
cttgggctgttccttgactgttcag

SEQ ID NO: 5281817 - DNA, 25 bp, Homo sapien
tccttgactgttcagctctgactgc

SEQ ID NO: 5281818 - DNA, 25 bp, Homo sapien
tggaatgaggcttccctagagcatg

SEQ ID NO: 5281819 - DNA, 25 bp, Homo sapien
tagagcatgctaaggtggaatccac

SEQ ID NO: 5281820 - DNA, 25 bp, Homo sapien
gtaaccacaaaggaggatgcagctg

SEQ ID NO: 5281821 - DNA, 25 bp, Homo sapien
ggtggaatccacaaattgggagctt

SEQ ID NO: 5281822 - DNA, 25 bp, Homo sapien
tggaacaactcgggtaactgcttct

SEQ ID NO: 5281823 - DNA, 25 bp, Homo sapien
ttactgaaatccccaacttctggag

SEQ ID NO: 5281824 - DNA, 25 bp, Homo sapien
agttggaacaactcgggtaactgct

SEQ ID NO: 5281825 - DNA, 25 bp, Homo sapien
ttggaacaactcgggtaactgcttc

SEQ ID NO: 5281826 - DNA, 25 bp, Homo sapien
tctgcgagcattgtctattcttccc

SEQ ID NO: 5281827 - DNA, 25 bp, Homo sapien
cagaaattgggtcaggtataccctt

SEQ ID NO: 5281828 - DNA, 25 bp, Homo sapien
aattccgcaatgctctgacaatcag

SEQ ID NO: 5281829 - DNA, 25 bp, Homo sapien
tttcctgcccacgttgtacatcttc

SEQ ID NO: 5281830 - DNA, 25 bp, Homo sapien
cctgccgtagaggatcccagagccc

SEQ ID NO: 5281831 - DNA, 25 bp, Homo sapien
agagccctgcagaaagggagcttct

SEQ ID NO: 5281832 - DNA, 25 bp, Homo sapien
gagccctgcagaaagggagcttctt

SEQ ID NO: 5281833 - DNA, 25 bp, Homo sapien
gccgtagaggatcccagagccctgc

SEQ ID NO: 5281834 - DNA, 25 bp, Homo sapien
ctctgtggacagcaccatacctcat

SEQ ID NO: 5281835 - DNA, 25 bp, Homo sapien
gccataattcaccaccgtctgcccc

SEQ ID NO: 5281836 - DNA, 25 bp, Homo sapien
cataattcaccaccgtctgcccctc

SEQ ID NO: 5281837 - DNA, 25 bp, Homo sapien
cttctctgtggacagcaccatacct

SEQ ID NO: 5281838 - DNA, 25 bp, Homo sapien
gaaagcatacacttcctctggatgt

SEQ ID NO: 5281839 - DNA, 25 bp, Homo sapien
catacacttcctctggatgtttagg

SEQ ID NO: 5281840 - DNA, 25 bp, Homo sapien
tcagccagaaagcatacacttcctc

SEQ ID NO: 5281841 - DNA, 25 bp, Homo sapien
ttcctctggatgtttaggatgactt

SEQ ID NO: 5281842 - DNA, 25 bp, Homo sapien
tcatttaaaagctggaggaaactcc

SEQ ID NO: 5281843 - DNA, 25 bp, Homo sapien
tggtactaacaaccctgaactgtgg

SEQ ID NO: 5281844 - DNA, 25 bp, Homo sapien
tgatcctaacaatcgcatgcagctg

SEQ ID NO: 5281845 - DNA, 25 bp, Homo sapien
ggttattcagtttaaggcccagaga

SEQ ID NO: 5281846 - DNA, 25 bp, Homo sapien
taatgcagagatagacaattgcgac

SEQ ID NO: 5281847 - DNA, 25 bp, Homo sapien
tcagcttgtcttagtttcatttcag

SEQ ID NO: 5281848 - DNA, 25 bp, Homo sapien
taatgtaagtcaattcagcttgtct

SEQ ID NO: 5281849 - DNA, 25 bp, Homo sapien
tttttgccagttaaccacactgaca

SEQ ID NO: 5281850 - DNA, 25 bp, Homo sapien
ccgctttgcccttccataatgtaag

SEQ ID NO: 5281851 - DNA, 25 bp, Homo sapien
atccatgtggtaaattctgacttac

SEQ ID NO: 5281852 - DNA, 25 bp, Homo sapien
taatccatgtggtaaattctgactt

SEQ ID NO: 5281853 - DNA, 25 bp, Homo sapien
tgtaatccatgtggtaaattctgac

SEQ ID NO: 5281854 - DNA, 25 bp, Homo sapien
catttgtaatccatgtggtaaattc

SEQ ID NO: 5281855 - DNA, 25 bp, Homo sapien
aaccaaagagcttggtgccggtact

SEQ ID NO: 5281856 - DNA, 25 bp, Homo sapien
agcttggtgccggtactgcctcttc

SEQ ID NO: 5281857 - DNA, 25 bp, Homo sapien
aaagagcttggtgccggtactgcct

SEQ ID NO: 5281858 - DNA, 25 bp, Homo sapien
tcccagtggacaccggccagatgca

SEQ ID NO: 5281859 - DNA, 25 bp, Homo sapien
ctgtgcttaaaagacccttttgttg

SEQ ID NO: 5281860 - DNA, 25 bp, Homo sapien
tgctgtgcttaaaagacccttttgt

SEQ ID NO: 5281861 - DNA, 25 bp, Homo sapien
atctgcgagtgcagggtaaggaatg

SEQ ID NO: 5281862 - DNA, 25 bp, Homo sapien
gatctgcgagtgcagggtaaggaat

SEQ ID NO: 5281863 - DNA, 25 bp, Homo sapien
ggattgcctcatatatgtcaccaca

SEQ ID NO: 5281864 - DNA, 25 bp, Homo sapien
gaagaagcgaggcacatacagagca

SEQ ID NO: 5281865 - DNA, 25 bp, Homo sapien
tatatgcagcacttatacgccttgc

SEQ ID NO: 5281866 - DNA, 25 bp, Homo sapien
ccttgcctttagtgtggagtgcttt

SEQ ID NO: 5281867 - DNA, 25 bp, Homo sapien
ctctggaatgtattataagaagtcc

SEQ ID NO: 5281868 - DNA, 25 bp, Homo sapien
tttcaaggtatagcagtctaacaca

SEQ ID NO: 5281869 - DNA, 25 bp, Homo sapien
taatcccaaacagcaggcaatataa

SEQ ID NO: 5281870 - DNA, 25 bp, Homo sapien
gcaaattatcccctcaaagatcttg

SEQ ID NO: 5281871 - DNA, 25 bp, Homo sapien
aaagtgcaactgcttcacatgggac

SEQ ID NO: 5281872 - DNA, 25 bp, Homo sapien
ttcaacctgagagaacacattttgc

SEQ ID NO: 5281873 - DNA, 25 bp, Homo sapien
tatgaggagccaagcttccctggtt

SEQ ID NO: 5281874 - DNA, 25 bp, Homo sapien
tccattgaccaaacacacattctat

SEQ ID NO: 5281875 - DNA, 25 bp, Homo sapien
aacgccagatccatttcagaagctg

SEQ ID NO: 5281876 - DNA, 25 bp, Homo sapien
caagggaacgccagatccatttcag

SEQ ID NO: 5281877 - DNA, 25 bp, Homo sapien
ggatactgagccagcaagggaacgc

SEQ ID NO: 5281878 - DNA, 25 bp, Homo sapien
ctgagccagcaagggaacgccagat

SEQ ID NO: 5281879 - DNA, 25 bp, Homo sapien
aggaggctcacttccttcagagatg

SEQ ID NO: 5281880 - DNA, 25 bp, Homo sapien
tcagagatgcctccttccaaatcct

SEQ ID NO: 5281881 - DNA, 25 bp, Homo sapien
ttggagcccaggtgaactccctgcc

SEQ ID NO: 5281882 - DNA, 25 bp, Homo sapien
tcctccttgagtcttggagcccagg

SEQ ID NO: 5281883 - DNA, 25 bp, Homo sapien
ctggcccactgagttgctctccagg

SEQ ID NO: 5281884 - DNA, 25 bp, Homo sapien
tgcccgcatgcactccactggccca

SEQ ID NO: 5281885 - DNA, 25 bp, Homo sapien
tcagcagccatgcccgcatgcactc

SEQ ID NO: 5281886 - DNA, 25 bp, Homo sapien
gccatgcccgcatgcactccactgg

SEQ ID NO: 5281887 - DNA, 25 bp, Homo sapien
gacctaatctcgtccttcagaagga

SEQ ID NO: 5281888 - DNA, 25 bp, Homo sapien
caggtatttcccacaaattccggtg

SEQ ID NO: 5281889 - DNA, 25 bp, Homo sapien
gaaggaagttttctatcaccaccca

SEQ ID NO: 5281890 - DNA, 25 bp, Homo sapien
gatatcagcatcagacctaatctcg

SEQ ID NO: 5281891 - DNA, 25 bp, Homo sapien
tagaccggatcatcatcgaagcaca

SEQ ID NO: 5281892 - DNA, 25 bp, Homo sapien
cttagaccggatcatcatcgaagca

SEQ ID NO: 5281893 - DNA, 25 bp, Homo sapien
accggatcatcatcgaagcacagag

SEQ ID NO: 5281894 - DNA, 25 bp, Homo sapien
gaccggatcatcatcgaagcacaga

SEQ ID NO: 5281895 - DNA, 25 bp, Homo sapien
ctgggccagtcccttgattctgcag

SEQ ID NO: 5281896 - DNA, 25 bp, Homo sapien
gattctgcagtccaactgactgtct

SEQ ID NO: 5281897 - DNA, 25 bp, Homo sapien
ctgcagtccaactgactgtctctga

SEQ ID NO: 5281898 - DNA, 25 bp, Homo sapien
tctgcagtccaactgactgtctctg

SEQ ID NO: 5281899 - DNA, 25 bp, Homo sapien
caccagggcaaatctttctgccact

SEQ ID NO: 5281900 - DNA, 25 bp, Homo sapien
gaaatgacaccagggcaaatctttc

SEQ ID NO: 5281901 - DNA, 25 bp, Homo sapien
aaatctttctgccactagctcaaca

SEQ ID NO: 5281902 - DNA, 25 bp, Homo sapien
ggaaggaagaaatgacaccagggca

SEQ ID NO: 5281903 - DNA, 25 bp, Homo sapien
cagccagaatgttcatggcaaggaa

SEQ ID NO: 5281904 - DNA, 25 bp, Homo sapien
cagaatgttcatggcaaggaagtgg

SEQ ID NO: 5281905 - DNA, 25 bp, Homo sapien
caacagccaggataatggcagccag

SEQ ID NO: 5281906 - DNA, 25 bp, Homo sapien
cagccaggataatggcagccagaat

SEQ ID NO: 5281907 - DNA, 25 bp, Homo sapien
cagttcctggttgatgacggtgggt

SEQ ID NO: 5281908 - DNA, 25 bp, Homo sapien
gttgatgacggtgggtttcatttca

SEQ ID NO: 5281909 - DNA, 25 bp, Homo sapien
gatgacggtgggtttcatttcagct

SEQ ID NO: 5281910 - DNA, 25 bp, Homo sapien
tcctggttgatgacggtgggtttca

SEQ ID NO: 5281911 - DNA, 25 bp, Homo sapien
gaacctcttccgaatgttgaaatag

SEQ ID NO: 5281912 - DNA, 25 bp, Homo sapien
atgttgaaatagtgtcagtgacagc

SEQ ID NO: 5281913 - DNA, 25 bp, Homo sapien
ctggaacctcttccgaatgttgaaa

SEQ ID NO: 5281914 - DNA, 25 bp, Homo sapien
tcttccgaatgttgaaatagtgtca

SEQ ID NO: 5281915 - DNA, 25 bp, Homo sapien
ccctatggtggcagtgtgtgatcac

SEQ ID NO: 5281916 - DNA, 25 bp, Homo sapien
ttccctatggtggcagtgtgtgatc

SEQ ID NO: 5281917 - DNA, 25 bp, Homo sapien
atggtggcagtgtgtgatcacctgc

SEQ ID NO: 5281918 - DNA, 25 bp, Homo sapien
cctatggtggcagtgtgtgatcacc

SEQ ID NO: 5281919 - DNA, 25 bp, Homo sapien
tcaagagtctgctggtggaccgagg

SEQ ID NO: 5281920 - DNA, 25 bp, Homo sapien
tgccaccggagatctgttttcacag

SEQ ID NO: 5281921 - DNA, 25 bp, Homo sapien
gttgccaaatgtggccgaagctgcc

SEQ ID NO: 5281922 - DNA, 25 bp, Homo sapien
tggaccgaggacgtgtacagttgcc

SEQ ID NO: 5281923 - DNA, 25 bp, Homo sapien
tgaactgtggtttccgtgctgaaag

SEQ ID NO: 5281924 - DNA, 25 bp, Homo sapien
tttggattcggggtatgaggcctgc

SEQ ID NO: 5281925 - DNA, 25 bp, Homo sapien
tttccgtgctgaaagtttcaaactg

SEQ ID NO: 5281926 - DNA, 25 bp, Homo sapien
tgggagagcaaatctacactaccac

SEQ ID NO: 5281927 - DNA, 25 bp, Homo sapien
ctgggatggaagtcctgtggcactc

SEQ ID NO: 5281928 - DNA, 25 bp, Homo sapien
acaagtgcttgcattctgggcatgc

SEQ ID NO: 5281929 - DNA, 25 bp, Homo sapien
cagctgccctcactaaggtggaagg

SEQ ID NO: 5281930 - DNA, 25 bp, Homo sapien
gaaggtgctagaagtccttgcccaa

SEQ ID NO: 5281931 - DNA, 25 bp, Homo sapien
gcttctcatgtttcagatcttccaa

SEQ ID NO: 5281932 - DNA, 25 bp, Homo sapien
tgtttgcttctcatgtttcagatct

SEQ ID NO: 5281933 - DNA, 25 bp, Homo sapien
tgctgtttgcttctcatgtttcaga

SEQ ID NO: 5281934 - DNA, 25 bp, Homo sapien
ctgtgctggacatcaaatttatttc

SEQ ID NO: 5281935 - DNA, 25 bp, Homo sapien
gcttgattcatacccaagctctcct

SEQ ID NO: 5281936 - DNA, 25 bp, Homo sapien
gctactcttgttaacgcttgattca

SEQ ID NO: 5281937 - DNA, 25 bp, Homo sapien
tcagaaatgctactcttgttaacgc

SEQ ID NO: 5281938 - DNA, 25 bp, Homo sapien
tgttaacgcttgattcatacccaag

SEQ ID NO: 5281939 - DNA, 25 bp, Homo sapien
taatcaaggctcatgaggaacaaaa

SEQ ID NO: 5281940 - DNA, 25 bp, Homo sapien
ctaatcaaggctcatgaggaacaaa

SEQ ID NO: 5281941 - DNA, 25 bp, Homo sapien
gctgaagtctctggcgctatttgcg

SEQ ID NO: 5281942 - DNA, 25 bp, Homo sapien
tatttgcgtatcagccacatcttca

SEQ ID NO: 5281943 - DNA, 25 bp, Homo sapien
gaacggatatagctaaaccagtggc

SEQ ID NO: 5281944 - DNA, 25 bp, Homo sapien
tcacctacaatctgaacggatatag

SEQ ID NO: 5281945 - DNA, 25 bp, Homo sapien
ggttctgcaaacagagtctagtctc

SEQ ID NO: 5281946 - DNA, 25 bp, Homo sapien
tctttctgtgcgctgtcatatcttc

SEQ ID NO: 5281947 - DNA, 25 bp, Homo sapien
gctgctgctatagaaggagccccta

SEQ ID NO: 5281948 - DNA, 25 bp, Homo sapien
gcaggacccacgaggagctggttct

SEQ ID NO: 5281949 - DNA, 25 bp, Homo sapien
tgagcaattggagccttctttgtaa

SEQ ID NO: 5281950 - DNA, 25 bp, Homo sapien
tcttcctatgtagggtttggaccca

SEQ ID NO: 5281951 - DNA, 25 bp, Homo sapien
cagagacagccatagctccaggagc

SEQ ID NO: 5281952 - DNA, 25 bp, Homo sapien
tctttgtaaataggtggtatgcccc

SEQ ID NO: 5281953 - DNA, 25 bp, Homo sapien
ggcatggcaatagaatgaagtatga

SEQ ID NO: 5281954 - DNA, 25 bp, Homo sapien
caactcaataatgaaatagttgcaa

SEQ ID NO: 5281955 - DNA, 25 bp, Homo sapien
gagggattttcttgcataaaagcaa

SEQ ID NO: 5281956 - DNA, 25 bp, Homo sapien
caccctcatgacatttccatgaggg

SEQ ID NO: 5281957 - DNA, 25 bp, Homo sapien
aagatgcaatcagtagtaaggagac

SEQ ID NO: 5281958 - DNA, 25 bp, Homo sapien
catctgtggcttcgtaaatgttaca

SEQ ID NO: 5281959 - DNA, 25 bp, Homo sapien
caaatgaaaacactccccaattggt

SEQ ID NO: 5281960 - DNA, 25 bp, Homo sapien
tctggtgatcctgctaatcaatcta

SEQ ID NO: 5281961 - DNA, 25 bp, Homo sapien
taagcatctgctcacgacaactgtc

SEQ ID NO: 5281962 - DNA, 25 bp, Homo sapien
agcctcgtcctggtcttaaagtgta

SEQ ID NO: 5281963 - DNA, 25 bp, Homo sapien
gacacttgccttgattgatgtgcat

SEQ ID NO: 5281964 - DNA, 25 bp, Homo sapien
agattccatgcaaccagctgggtgg

SEQ ID NO: 5281965 - DNA, 25 bp, Homo sapien
tgtgtaacctccaaacatatgaata

SEQ ID NO: 5281966 - DNA, 25 bp, Homo sapien
tttctcataacagatcggcctgatt

SEQ ID NO: 5281967 - DNA, 25 bp, Homo sapien
tgattgtgtaactgtatccctttac

SEQ ID NO: 5281968 - DNA, 25 bp, Homo sapien
gtatccctttacttctgacagcatt

SEQ ID NO: 5281969 - DNA, 25 bp, Homo sapien
ttgcacgaggcctttgctcccctag

SEQ ID NO: 5281970 - DNA, 25 bp, Homo sapien
gctcggccacctgaatggaagacaa

SEQ ID NO: 5281971 - DNA, 25 bp, Homo sapien
gccatggcagcacgcttgcacgagg

SEQ ID NO: 5281972 - DNA, 25 bp, Homo sapien
tgctcccctagcattggaagccact

SEQ ID NO: 5281973 - DNA, 25 bp, Homo sapien
ttcactagttagtgctttgtcatgc

SEQ ID NO: 5281974 - DNA, 25 bp, Homo sapien
tttgtcatgctcagcaaggaggatg

SEQ ID NO: 5281975 - DNA, 25 bp, Homo sapien
cccaaaaggttgtcgtattgcctga

SEQ ID NO: 5281976 - DNA, 25 bp, Homo sapien
cacctccgtgttagcttccctgaaa

SEQ ID NO: 5281977 - DNA, 25 bp, Homo sapien
ttggagagcttaatgacagccctgc

SEQ ID NO: 5281978 - DNA, 25 bp, Homo sapien
agccagcacctgcatacaccattgg

SEQ ID NO: 5281979 - DNA, 25 bp, Homo sapien
cactgtcaatactcatgcatgttac

SEQ ID NO: 5281980 - DNA, 25 bp, Homo sapien
gacttgaggataggtctgccccacc

SEQ ID NO: 5281981 - DNA, 25 bp, Homo sapien
ccacaaagacaaagaccctgattcc

SEQ ID NO: 5281982 - DNA, 25 bp, Homo sapien
aagtagacagtggttttgccagctc

SEQ ID NO: 5281983 - DNA, 25 bp, Homo sapien
catccgtgttgctggtagtgaggca

SEQ ID NO: 5281984 - DNA, 25 bp, Homo sapien
tagtgaggcaggataccgctacaat

SEQ ID NO: 5281985 - DNA, 25 bp, Homo sapien
cctaacatttggacccaataaggca

SEQ ID NO: 5281986 - DNA, 25 bp, Homo sapien
cataagattatggataccaaaggaa

SEQ ID NO: 5281987 - DNA, 25 bp, Homo sapien
gaaagaaactttgcatagtaaaata

SEQ ID NO: 5281988 - DNA, 25 bp, Homo sapien
tatccagtgatctcaaagcatatgt

SEQ ID NO: 5281989 - DNA, 25 bp, Homo sapien
cacgcaggcgttcacattaaagtcc

SEQ ID NO: 5281990 - DNA, 25 bp, Homo sapien
tcagacggccacaaatcagcttcag

SEQ ID NO: 5281991 - DNA, 25 bp, Homo sapien
tccgaggctgtaaattcagacggcc

SEQ ID NO: 5281992 - DNA, 25 bp, Homo sapien
tgaaatatggctgcacatgttccct

SEQ ID NO: 5281993 - DNA, 25 bp, Homo sapien
ggcgatgcaccatagaaatcaggat

SEQ ID NO: 5281994 - DNA, 25 bp, Homo sapien
gttaccatagccaacaaataaacaa

SEQ ID NO: 5281995 - DNA, 25 bp, Homo sapien
ggcagcaaggtccaggcgatgcacc

SEQ ID NO: 5281996 - DNA, 25 bp, Homo sapien
tggctgtcagtagccccatcactgg

SEQ ID NO: 5281997 - DNA, 25 bp, Homo sapien
gaatcgcctttccatatgccatctt

SEQ ID NO: 5281998 - DNA, 25 bp, Homo sapien
ttccttctgagtataagaatcgcct

SEQ ID NO: 5281999 - DNA, 25 bp, Homo sapien
catggcttccatgggaacttttcct

SEQ ID NO: 5282000 - DNA, 25 bp, Homo sapien
ttgtcatgaatgaatccatggcttc

SEQ ID NO: 5282001 - DNA, 25 bp, Homo sapien
acgaattccatgaagtcagtaaagc

SEQ ID NO: 5282002 - DNA, 25 bp, Homo sapien
ttctaggttgtgctccagtagtacc

SEQ ID NO: 5282003 - DNA, 25 bp, Homo sapien
gcaggatcccagcaagacgaattcc

SEQ ID NO: 5282004 - DNA, 25 bp, Homo sapien
aagcctgagtgatgggcaggatccc

SEQ ID NO: 5282005 - DNA, 25 bp, Homo sapien
cctgattagtaatggccggagctga

SEQ ID NO: 5282006 - DNA, 25 bp, Homo sapien
tcagtgtggcgcctgctatagccaa

SEQ ID NO: 5282007 - DNA, 25 bp, Homo sapien
gggtgccccagtcgaaaagcctgat

SEQ ID NO: 5282008 - DNA, 25 bp, Homo sapien
tgcctcagcgttggaaatcagtgtg

SEQ ID NO: 5282009 - DNA, 25 bp, Homo sapien
agaacgcacagctgccgccctgtct

SEQ ID NO: 5282010 - DNA, 25 bp, Homo sapien
tttatacatcatccgtcttgagaga

SEQ ID NO: 5282011 - DNA, 25 bp, Homo sapien
gaaagcagacatatcttcaccaggc

SEQ ID NO: 5282012 - DNA, 25 bp, Homo sapien
acatcatccgtcttgagagaagcag

SEQ ID NO: 5282013 - DNA, 25 bp, Homo sapien
aatgaaagcctgattcaagttgtta

SEQ ID NO: 5282014 - DNA, 25 bp, Homo sapien
gtaatgttgtaattgatgtcaaacc

SEQ ID NO: 5282015 - DNA, 25 bp, Homo sapien
tgtgtgtaatgttgtaattgatgtc

SEQ ID NO: 5282016 - DNA, 25 bp, Homo sapien
gcctgattcaagttgttaaatttta

SEQ ID NO: 5282017 - DNA, 25 bp, Homo sapien
tccactcaagggctcagttaccgaa

SEQ ID NO: 5282018 - DNA, 25 bp, Homo sapien
cactgacattggacagtctactcca

SEQ ID NO: 5282019 - DNA, 25 bp, Homo sapien
gctcagttaccgaagttgagattaa

SEQ ID NO: 5282020 - DNA, 25 bp, Homo sapien
tggacagtctactccactcaagggc

SEQ ID NO: 5282021 - DNA, 25 bp, Homo sapien
tgagccaaatatagccattctctct

SEQ ID NO: 5282022 - DNA, 25 bp, Homo sapien
tctgagccaaatatagccattctct

SEQ ID NO: 5282023 - DNA, 25 bp, Homo sapien
gagccaaatatagccattctctctc

SEQ ID NO: 5282024 - DNA, 25 bp, Homo sapien
agccaaatatagccattctctctcc

SEQ ID NO: 5282025 - DNA, 25 bp, Homo sapien
gaaagtcccagtgctgggatgtgta

SEQ ID NO: 5282026 - DNA, 25 bp, Homo sapien
ggatgtgtatgaggagctcagatca

SEQ ID NO: 5282027 - DNA, 25 bp, Homo sapien
tccaggacgcctgctgctgaaagtc

SEQ ID NO: 5282028 - DNA, 25 bp, Homo sapien
tgttaccaaagtaggcttccaggac

SEQ ID NO: 5282029 - DNA, 25 bp, Homo sapien
tgggctggcctccataagagctgca

SEQ ID NO: 5282030 - DNA, 25 bp, Homo sapien
ctgggctggcctccataagagctgc

SEQ ID NO: 5282031 - DNA, 25 bp, Homo sapien
tgcaaacctctctaaggcagcaaga

SEQ ID NO: 5282032 - DNA, 25 bp, Homo sapien
gctgggcactgactagacacacttc

SEQ ID NO: 5282033 - DNA, 25 bp, Homo sapien
caggtctaatcgatccatctgcaaa

SEQ ID NO: 5282034 - DNA, 25 bp, Homo sapien
agcagagaggtactcaggtctaatc

SEQ ID NO: 5282035 - DNA, 25 bp, Homo sapien
tccttcgacgcctgcagattccatg

SEQ ID NO: 5282036 - DNA, 25 bp, Homo sapien
atccttcgacgcctgcagattccat

SEQ ID NO: 5282037 - DNA, 25 bp, Homo sapien
caggaacgcttcaatcacattccag

SEQ ID NO: 5282038 - DNA, 25 bp, Homo sapien
atgtcagcagctcagcaccggatcc

SEQ ID NO: 5282039 - DNA, 25 bp, Homo sapien
tgaggggttcagggatggaattcat

SEQ ID NO: 5282040 - DNA, 25 bp, Homo sapien
atgaggggttcagggatggaattca

SEQ ID NO: 5282041 - DNA, 25 bp, Homo sapien
catgaggggttcagggatggaattc

SEQ ID NO: 5282042 - DNA, 25 bp, Homo sapien
ccaactgcgaggaaggagagcctcc

SEQ ID NO: 5282043 - DNA, 25 bp, Homo sapien
cactcaaaagttcccggacagagga

SEQ ID NO: 5282044 - DNA, 25 bp, Homo sapien
cacagcttttctgggaagcttgcat

SEQ ID NO: 5282045 - DNA, 25 bp, Homo sapien
gagctggcatagaggatagctcggg

SEQ ID NO: 5282046 - DNA, 25 bp, Homo sapien
tctcataatgacctcagcccaaggg

SEQ ID NO: 5282047 - DNA, 25 bp, Homo sapien
tgtagcttcagtgtctagggtcaca

SEQ ID NO: 5282048 - DNA, 25 bp, Homo sapien
cagcaacgattattctggaccaagg

SEQ ID NO: 5282049 - DNA, 25 bp, Homo sapien
gcctgggtaagacgctggagtcctt

SEQ ID NO: 5282050 - DNA, 25 bp, Homo sapien
ttccgtcaagagctgtcccggaaga

SEQ ID NO: 5282051 - DNA, 25 bp, Homo sapien
ccatgctaaggtcagtgcttccgtc

SEQ ID NO: 5282052 - DNA, 25 bp, Homo sapien
tcccggaagaggtgacagtcgagca

SEQ ID NO: 5282053 - DNA, 25 bp, Homo sapien
aactgacagtcctttgctgctgccc

SEQ ID NO: 5282054 - DNA, 25 bp, Homo sapien
aggattcccagtggccgtgactgtg

SEQ ID NO: 5282055 - DNA, 25 bp, Homo sapien
cagcaggattcccagtggccgtgac

SEQ ID NO: 5282056 - DNA, 25 bp, Homo sapien
gatcagcaggattcccagtggccgt

SEQ ID NO: 5282057 - DNA, 25 bp, Homo sapien
gcaggattcccagtggccgtgactg

SEQ ID NO: 5282058 - DNA, 25 bp, Homo sapien
actgtgcgctctataaagtgagggc

SEQ ID NO: 5282059 - DNA, 25 bp, Homo sapien
tagtgcacaatggtccccacatgct

SEQ ID NO: 5282060 - DNA, 25 bp, Homo sapien
aaagggcagatcctattaatccagg

SEQ ID NO: 5282061 - DNA, 25 bp, Homo sapien
tctcctggctccaacaatattgctg

SEQ ID NO: 5282062 - DNA, 25 bp, Homo sapien
tgatccattcatgggagtccacaat

SEQ ID NO: 5282063 - DNA, 25 bp, Homo sapien
ggtagaggtgaccacctgatccatt

SEQ ID NO: 5282064 - DNA, 25 bp, Homo sapien
caatgcccttcactgggtagaggtg

SEQ ID NO: 5282065 - DNA, 25 bp, Homo sapien
cagttgcaagaacacaagagcagct

SEQ ID NO: 5282066 - DNA, 25 bp, Homo sapien
ctagtcaaaagtgtcaggcgccttt

SEQ ID NO: 5282067 - DNA, 25 bp, Homo sapien
atgaacgaggagctgattaagaaac

SEQ ID NO: 5282068 - DNA, 25 bp, Homo sapien
gtgtcaggcgcctttagagaaatga

SEQ ID NO: 5282069 - DNA, 25 bp, Homo sapien
taagaaacgcggctgctgacaagca

SEQ ID NO: 5282070 - DNA, 25 bp, Homo sapien
agacagcaggcagccgatactggga

SEQ ID NO: 5282071 - DNA, 25 bp, Homo sapien
tttccatggacaatcagacagcagg

SEQ ID NO: 5282072 - DNA, 25 bp, Homo sapien
cagcggccatctggctgggctttcc

SEQ ID NO: 5282073 - DNA, 25 bp, Homo sapien
gctgctcagacataaccaaatcggg

SEQ ID NO: 5282074 - DNA, 25 bp, Homo sapien
agtggccatactcagtcggcagaca

SEQ ID NO: 5282075 - DNA, 25 bp, Homo sapien
atactcagtcggcagacaccaactt

SEQ ID NO: 5282076 - DNA, 25 bp, Homo sapien
gacaagtggccatactcagtcggca

SEQ ID NO: 5282077 - DNA, 25 bp, Homo sapien
agcagtgacaagtggccatactcag

SEQ ID NO: 5282078 - DNA, 25 bp, Homo sapien
tcctcagtctgcccacatgtcgtag

SEQ ID NO: 5282079 - DNA, 25 bp, Homo sapien
ttttactgccaactaaggctccagc

SEQ ID NO: 5282080 - DNA, 25 bp, Homo sapien
catgtcgtagcccaccccatgatga

SEQ ID NO: 5282081 - DNA, 25 bp, Homo sapien
tcagttgccttgaaagggcacacat

SEQ ID NO: 5282082 - DNA, 25 bp, Homo sapien
gccatgcaaccccaatggtgttgtg

SEQ ID NO: 5282083 - DNA, 25 bp, Homo sapien
ggtgggcctcacttaatccttgagt

SEQ ID NO: 5282084 - DNA, 25 bp, Homo sapien
cacttaatccttgagtggaaggagc

SEQ ID NO: 5282085 - DNA, 25 bp, Homo sapien
gttgtggtgggcctcacttaatcct

SEQ ID NO: 5282086 - DNA, 25 bp, Homo sapien
taccataccattgttccatcgccat

SEQ ID NO: 5282087 - DNA, 25 bp, Homo sapien
tgcataattacacagtgaggtcatg

SEQ ID NO: 5282088 - DNA, 25 bp, Homo sapien
gtcatgtgtttaccataccattgtt

SEQ ID NO: 5282089 - DNA, 25 bp, Homo sapien
gcataattacacagtgaggtcatgt

SEQ ID NO: 5282090 - DNA, 25 bp, Homo sapien
ccagctgggtaaggtagcatgggca

SEQ ID NO: 5282091 - DNA, 25 bp, Homo sapien
catgggcagcctgcccagagtgacc

SEQ ID NO: 5282092 - DNA, 25 bp, Homo sapien
tgagtgtcatccttggcccatgggc

SEQ ID NO: 5282093 - DNA, 25 bp, Homo sapien
tggagcctccattaggagagccaaa

SEQ ID NO: 5282094 - DNA, 25 bp, Homo sapien
cagggagaaaggcttgtccaggagt

SEQ ID NO: 5282095 - DNA, 25 bp, Homo sapien
tggcagggagaaaggcttgtccagg

SEQ ID NO: 5282096 - DNA, 25 bp, Homo sapien
gggagaaaggcttgtccaggagtac

SEQ ID NO: 5282097 - DNA, 25 bp, Homo sapien
aggtgcaaagggtggcagggagaaa

SEQ ID NO: 5282098 - DNA, 25 bp, Homo sapien
ttctatctcgatgcagatcccctgc

SEQ ID NO: 5282099 - DNA, 25 bp, Homo sapien
cctaggggaccagcatgagggacta

SEQ ID NO: 5282100 - DNA, 25 bp, Homo sapien
ggcaacaggcaaattcctggagtct

SEQ ID NO: 5282101 - DNA, 25 bp, Homo sapien
tgtagggctctcgtttcttgccctt

SEQ ID NO: 5282102 - DNA, 25 bp, Homo sapien
cagagctggtactcagtaagagggt

SEQ ID NO: 5282103 - DNA, 25 bp, Homo sapien
tgcctgttgtgtgtgtttccggaag

SEQ ID NO: 5282104 - DNA, 25 bp, Homo sapien
aagcagagctggtactcagtaagag

SEQ ID NO: 5282105 - DNA, 25 bp, Homo sapien
gtgtttccggaagataccaaacatg

SEQ ID NO: 5282106 - DNA, 25 bp, Homo sapien
gaaccaccagaacatcagaggggaa

SEQ ID NO: 5282107 - DNA, 25 bp, Homo sapien
agaaccaccagaacatcagagggga

SEQ ID NO: 5282108 - DNA, 25 bp, Homo sapien
gagaaccaccagaacatcagagggg

SEQ ID NO: 5282109 - DNA, 25 bp, Homo sapien
tggaaatgagcctacccctctccag

SEQ ID NO: 5282110 - DNA, 25 bp, Homo sapien
gaaatgagcctacccctctccagcc

SEQ ID NO: 5282111 - DNA, 25 bp, Homo sapien
aggctggaaatgagcctacccctct

SEQ ID NO: 5282112 - DNA, 25 bp, Homo sapien
ggctggaaatgagcctacccctctc

SEQ ID NO: 5282113 - DNA, 25 bp, Homo sapien
gcacaggaaccaaaaactcgaccac

SEQ ID NO: 5282114 - DNA, 25 bp, Homo sapien
agggtgctgcaaacatgcgtggtca

SEQ ID NO: 5282115 - DNA, 25 bp, Homo sapien
ctcctgcagtacttcctgtggggca

SEQ ID NO: 5282116 - DNA, 25 bp, Homo sapien
atgccccgtgctccctcagtgcctc

SEQ ID NO: 5282117 - DNA, 25 bp, Homo sapien
tgcaatttgggcagcctcattctgc

SEQ ID NO: 5282118 - DNA, 25 bp, Homo sapien
ctgcaatttgggcagcctcattctg

SEQ ID NO: 5282119 - DNA, 25 bp, Homo sapien
caatttgggcagcctcattctgcac

SEQ ID NO: 5282120 - DNA, 25 bp, Homo sapien
gcaatttgggcagcctcattctgca

SEQ ID NO: 5282121 - DNA, 25 bp, Homo sapien
gctttcccagagccaatatccctga

SEQ ID NO: 5282122 - DNA, 25 bp, Homo sapien
ctttcccagagccaatatccctgaa

SEQ ID NO: 5282123 - DNA, 25 bp, Homo sapien
gggagacccattccatcgtctgcag

SEQ ID NO: 5282124 - DNA, 25 bp, Homo sapien
gcatcagcgaatttccttcaaacat

SEQ ID NO: 5282125 - DNA, 25 bp, Homo sapien
tcatcacatcatcagaggtctcggg

SEQ ID NO: 5282126 - DNA, 25 bp, Homo sapien
tggtagagctctgtccatatcccag

SEQ ID NO: 5282127 - DNA, 25 bp, Homo sapien
tgtattcacaggtacccaatagccc

SEQ ID NO: 5282128 - DNA, 25 bp, Homo sapien
ggaggcccactacccttctctgaaa

SEQ ID NO: 5282129 - DNA, 25 bp, Homo sapien
tatgggcgtcctcgttataaaggga

SEQ ID NO: 5282130 - DNA, 25 bp, Homo sapien
gcgcatctgggaacactttgagtga

SEQ ID NO: 5282131 - DNA, 25 bp, Homo sapien
atccagttcaaaaagtggctcctcc

SEQ ID NO: 5282132 - DNA, 25 bp, Homo sapien
ccagttcaaaaagtggctcctccat

SEQ ID NO: 5282133 - DNA, 25 bp, Homo sapien
tccagttcaaaaagtggctcctcca

SEQ ID NO: 5282134 - DNA, 25 bp, Homo sapien
tcatgggcatggctctgatgtgaca

SEQ ID NO: 5282135 - DNA, 25 bp, Homo sapien
cctgggcacttcttttaaagcccat

SEQ ID NO: 5282136 - DNA, 25 bp, Homo sapien
tcgtcctatgcaaggcactatgagt

SEQ ID NO: 5282137 - DNA, 25 bp, Homo sapien
caagagcttgagtcctatggacaga

SEQ ID NO: 5282138 - DNA, 25 bp, Homo sapien
tatgagtaataggagatgagtcccc

SEQ ID NO: 5282139 - DNA, 25 bp, Homo sapien
ttcatctcagtgtctcttgatctcg

SEQ ID NO: 5282140 - DNA, 25 bp, Homo sapien
atcatatccagttgaactctttact

SEQ ID NO: 5282141 - DNA, 25 bp, Homo sapien
catatccagttgaactctttactgg

SEQ ID NO: 5282142 - DNA, 25 bp, Homo sapien
tcatatccagttgaactctttactg

SEQ ID NO: 5282143 - DNA, 25 bp, Homo sapien
tcagtagaacccgatagggatcagt

SEQ ID NO: 5282144 - DNA, 25 bp, Homo sapien
taatggagattgaaaggcgttctgc

SEQ ID NO: 5282145 - DNA, 25 bp, Homo sapien
cattaccaagcatgggcttcctgct

SEQ ID NO: 5282146 - DNA, 25 bp, Homo sapien
gcaaccctgccgtttttcagtagaa

SEQ ID NO: 5282147 - DNA, 25 bp, Homo sapien
cacctcagacactcgggtgagctgc

SEQ ID NO: 5282148 - DNA, 25 bp, Homo sapien
ccacctcagacactcgggtgagctg

SEQ ID NO: 5282149 - DNA, 25 bp, Homo sapien
ctcagacactcgggtgagctgcagg

SEQ ID NO: 5282150 - DNA, 25 bp, Homo sapien
cagacactcgggtgagctgcaggaa

SEQ ID NO: 5282151 - DNA, 25 bp, Homo sapien
gactcagtgaggttacagacattgc

SEQ ID NO: 5282152 - DNA, 25 bp, Homo sapien
gaatttattaggcatcctgggagca

SEQ ID NO: 5282153 - DNA, 25 bp, Homo sapien
taagagctgctactatacaccgagc

SEQ ID NO: 5282154 - DNA, 25 bp, Homo sapien
tcagggctgcggtgtgccaacattc

SEQ ID NO: 5282155 - DNA, 25 bp, Homo sapien
ccacagcatgggtattatcttcaat

SEQ ID NO: 5282156 - DNA, 25 bp, Homo sapien
cttagcttcttctggaccgcaatgg

SEQ ID NO: 5282157 - DNA, 25 bp, Homo sapien
aatggtgaatagcaagagtcccggc

SEQ ID NO: 5282158 - DNA, 25 bp, Homo sapien
ccaggatccctgaacttagcttctt

SEQ ID NO: 5282159 - DNA, 25 bp, Homo sapien
gctggccctatagacagattctgct

SEQ ID NO: 5282160 - DNA, 25 bp, Homo sapien
catggctttaggaccagtagttggg

SEQ ID NO: 5282161 - DNA, 25 bp, Homo sapien
gccagctggccctatagacagattc

SEQ ID NO: 5282162 - DNA, 25 bp, Homo sapien
ctgcttcatggctttaggaccagta

SEQ ID NO: 5282163 - DNA, 25 bp, Homo sapien
tcatgattagactgatgctatgggt

SEQ ID NO: 5282164 - DNA, 25 bp, Homo sapien
agttcctctggtctgtaacagtttc

SEQ ID NO: 5282165 - DNA, 25 bp, Homo sapien
gagagttttgggacaccctggtcag

SEQ ID NO: 5282166 - DNA, 25 bp, Homo sapien
gaaaaagcgcaaaggtagtacatgg

SEQ ID NO: 5282167 - DNA, 25 bp, Homo sapien
ccatcggcacgagcatagaggagat

SEQ ID NO: 5282168 - DNA, 25 bp, Homo sapien
caaagggctgaccacacttggctag

SEQ ID NO: 5282169 - DNA, 25 bp, Homo sapien
caaaaagtgtgtctagtctcaaggc

SEQ ID NO: 5282170 - DNA, 25 bp, Homo sapien
tgggaacagtgtatcctcggcagat

SEQ ID NO: 5282171 - DNA, 25 bp, Homo sapien
caccattaacaagcggagatttccc

SEQ ID NO: 5282172 - DNA, 25 bp, Homo sapien
ttggcgcctgaaagtgaagcattcc

SEQ ID NO: 5282173 - DNA, 25 bp, Homo sapien
tcctcgccaggttcattgggcagaa

SEQ ID NO: 5282174 - DNA, 25 bp, Homo sapien
gatttccctaggctgatcctcgcca

SEQ ID NO: 5282175 - DNA, 25 bp, Homo sapien
tggatcctgagccccgccggaatcc

SEQ ID NO: 5282176 - DNA, 25 bp, Homo sapien
agccccgccggaatccgtggcccat

SEQ ID NO: 5282177 - DNA, 25 bp, Homo sapien
ctgcatgcaggaggggcccaacaac

SEQ ID NO: 5282178 - DNA, 25 bp, Homo sapien
atcctgagccccgccggaatccgtg

SEQ ID NO: 5282179 - DNA, 25 bp, Homo sapien
gaagggactaatacaggaccaaatc

SEQ ID NO: 5282180 - DNA, 25 bp, Homo sapien
tataagaaagggtcagccagtcctc

SEQ ID NO: 5282181 - DNA, 25 bp, Homo sapien
aggaacttcccctgacttctaacag

SEQ ID NO: 5282182 - DNA, 25 bp, Homo sapien
tgtgcagcttctcagttaggaactt

SEQ ID NO: 5282183 - DNA, 25 bp, Homo sapien
aatagttttgctgaagaaaatacca

SEQ ID NO: 5282184 - DNA, 25 bp, Homo sapien
ctgaagagtttattatactttcaac

SEQ ID NO: 5282185 - DNA, 25 bp, Homo sapien
tcaacttttctgcagatgtaacatt

SEQ ID NO: 5282186 - DNA, 25 bp, Homo sapien
gttttgctgaagaaaataccacaca

SEQ ID NO: 5282187 - DNA, 25 bp, Homo sapien
taaacacactatttaactttcagtg

SEQ ID NO: 5282188 - DNA, 25 bp, Homo sapien
cattggtattatttacacttcatta

SEQ ID NO: 5282189 - DNA, 25 bp, Homo sapien
gatgtaaggatcatgaatcaatact

SEQ ID NO: 5282190 - DNA, 25 bp, Homo sapien
tctaaattactgataactagatgca

SEQ ID NO: 5282191 - DNA, 25 bp, Homo sapien
tagtctgttttaagctcaaagtagc

SEQ ID NO: 5282192 - DNA, 25 bp, Homo sapien
tctgttttaagctcaaagtagcatc

SEQ ID NO: 5282193 - DNA, 25 bp, Homo sapien
ttaagctcaaagtagcatcttgaaa

SEQ ID NO: 5282194 - DNA, 25 bp, Homo sapien
gatttaagtctaagaccttcttgaa

SEQ ID NO: 5282195 - DNA, 25 bp, Homo sapien
tatggtccctttaatccaagaatct

SEQ ID NO: 5282196 - DNA, 25 bp, Homo sapien
caggtgaacatctgaattgccctca

SEQ ID NO: 5282197 - DNA, 25 bp, Homo sapien
gctctgctgtgatctataacgccta

SEQ ID NO: 5282198 - DNA, 25 bp, Homo sapien
gaatgcacaagcacaaagtaatggg

SEQ ID NO: 5282199 - DNA, 25 bp, Homo sapien
cagatgtgtagtcatccatggcttc

SEQ ID NO: 5282200 - DNA, 25 bp, Homo sapien
tgttatatgcagtagccaaatcctc

SEQ ID NO: 5282201 - DNA, 25 bp, Homo sapien
aaattgggttggacttctatggcag

SEQ ID NO: 5282202 - DNA, 25 bp, Homo sapien
tatcaaccctctgttgtaatatgga

SEQ ID NO: 5282203 - DNA, 25 bp, Homo sapien
tgtcaaacttcacagcctataacat

SEQ ID NO: 5282204 - DNA, 25 bp, Homo sapien
ggtattgtcaaacttcacagcctat

SEQ ID NO: 5282205 - DNA, 25 bp, Homo sapien
acaccgtgttaccaaattcctctca

SEQ ID NO: 5282206 - DNA, 25 bp, Homo sapien
ttttgggtattgtcaaacttcacag

SEQ ID NO: 5282207 - DNA, 25 bp, Homo sapien
tgtacagccaggtagctctgaccag

SEQ ID NO: 5282208 - DNA, 25 bp, Homo sapien
tgaactaactgcgaaaagggaacca

SEQ ID NO: 5282209 - DNA, 25 bp, Homo sapien
aattcaacatgctacgatccccagg

SEQ ID NO: 5282210 - DNA, 25 bp, Homo sapien
cagacagtaacaggtgaagccgctc

SEQ ID NO: 5282211 - DNA, 25 bp, Homo sapien
tctgtcctaagtctctgggtgcgaa

SEQ ID NO: 5282212 - DNA, 25 bp, Homo sapien
acactgagatgggagtcgcggtact

SEQ ID NO: 5282213 - DNA, 25 bp, Homo sapien
gacgttcgttatgctctcttccaca

SEQ ID NO: 5282214 - DNA, 25 bp, Homo sapien
tttcccgccagctaaaatcacgagt

SEQ ID NO: 5282215 - DNA, 25 bp, Homo sapien
gcggccccaggtctcgcgatagtta

SEQ ID NO: 5282216 - DNA, 25 bp, Homo sapien
tgggttatgacaagcgccgaccgtg

SEQ ID NO: 5282217 - DNA, 25 bp, Homo sapien
gcaaagataggagcccaaacaaccc

SEQ ID NO: 5282218 - DNA, 25 bp, Homo sapien
agctggctcctcacgggtgggcttc

SEQ ID NO: 5282219 - DNA, 25 bp, Homo sapien
tcccgggactctcgtcgctggaggc

SEQ ID NO: 5282220 - DNA, 25 bp, Homo sapien
tgtaagcggagtacagtgcctcggc

SEQ ID NO: 5282221 - DNA, 25 bp, Homo sapien
cgcgcaagcgcaccggcgaatgtaa

SEQ ID NO: 5282222 - DNA, 25 bp, Homo sapien
gcctccgcgtactctccattgttga

SEQ ID NO: 5282223 - DNA, 25 bp, Homo sapien
gccaaggcctagttttcggtgtaga

SEQ ID NO: 5282224 - DNA, 25 bp, Homo sapien
tcgtctcgcgagataacggttccgc

SEQ ID NO: 5282225 - DNA, 25 bp, Homo sapien
ctccgagcggttagaggtggcacca

SEQ ID NO: 5282226 - DNA, 25 bp, Homo sapien
tctaccttgacagccaaccttggcg

SEQ ID NO: 5282227 - DNA, 25 bp, Homo sapien
tttgcaaggagaacaacataactgt

SEQ ID NO: 5282228 - DNA, 25 bp, Homo sapien
caacttggcattactcaacgggaag

SEQ ID NO: 5282229 - DNA, 25 bp, Homo sapien
cacagaagacaaaggtccccaagac

SEQ ID NO: 5282230 - DNA, 25 bp, Homo sapien
tatgcaacttctcaccaggtaattg

SEQ ID NO: 5282231 - DNA, 25 bp, Homo sapien
caacaggtgattctagaactaaagc

SEQ ID NO: 5282232 - DNA, 25 bp, Homo sapien
tgcaaccaacaaatcacagtaaggg

SEQ ID NO: 5282233 - DNA, 25 bp, Homo sapien
taaggggctagaggcatgacaatcg

SEQ ID NO: 5282234 - DNA, 25 bp, Homo sapien
gacaatcgaatgaattctcagctga

SEQ ID NO: 5282235 - DNA, 25 bp, Homo sapien
tctggaatagcttgcgaggcagtct

SEQ ID NO: 5282236 - DNA, 25 bp, Homo sapien
aaggtaattttccacgaggcgcatg

SEQ ID NO: 5282237 - DNA, 25 bp, Homo sapien
aagtgtacatcgttggcctcaggca

SEQ ID NO: 5282238 - DNA, 25 bp, Homo sapien
tgtgtgaccacagatagaaaggagc

SEQ ID NO: 5282239 - DNA, 25 bp, Homo sapien
gaaaatcggccttattatttcacag

SEQ ID NO: 5282240 - DNA, 25 bp, Homo sapien
atgaaaatcggccttattatttcac

SEQ ID NO: 5282241 - DNA, 25 bp, Homo sapien
tgaaaatcggccttattatttcaca

SEQ ID NO: 5282242 - DNA, 25 bp, Homo sapien
ctgcacatccagaattgatactcag

SEQ ID NO: 5282243 - DNA, 25 bp, Homo sapien
caaggacaccgtgtttgcatacact

SEQ ID NO: 5282244 - DNA, 25 bp, Homo sapien
cttcctgtggcaacgcatgttggca

SEQ ID NO: 5282245 - DNA, 25 bp, Homo sapien
gaattgatactcagtgattgggctt

SEQ ID NO: 5282246 - DNA, 25 bp, Homo sapien
taatgaaagcttttgaacaagtccc

SEQ ID NO: 5282247 - DNA, 25 bp, Homo sapien
catgcgcagagtgctagcagagagt

SEQ ID NO: 5282248 - DNA, 25 bp, Homo sapien
gcagagagtagatctccacaggagg

SEQ ID NO: 5282249 - DNA, 25 bp, Homo sapien
ccacaggagggatgatgtcttcata

SEQ ID NO: 5282250 - DNA, 25 bp, Homo sapien
aaaaaagttggccttggctggcaag

SEQ ID NO: 5282251 - DNA, 25 bp, Homo sapien
aaaaaagttgacctcgtggagcgtg

SEQ ID NO: 5282252 - DNA, 25 bp, Homo sapien
aagttgacctcgtggagcgtgcagt

SEQ ID NO: 5282253 - DNA, 25 bp, Homo sapien
ctttagaaacacagatacataagtg

SEQ ID NO: 5282254 - DNA, 25 bp, Homo sapien
catcaggcctctcctacaagagctc

SEQ ID NO: 5282255 - DNA, 25 bp, Homo sapien
ccacacatccctcatagagctgcct

SEQ ID NO: 5282256 - DNA, 25 bp, Homo sapien
gtcttcagtgcagtgtccacacatc

SEQ ID NO: 5282257 - DNA, 25 bp, Homo sapien
ctgtcttcagtgcagtgtccacaca

SEQ ID NO: 5282258 - DNA, 25 bp, Homo sapien
agtgtccacacatccctcatagagc

SEQ ID NO: 5282259 - DNA, 25 bp, Homo sapien
ctgtgcaagtataaagaagtggtaa

SEQ ID NO: 5282260 - DNA, 25 bp, Homo sapien
taaagaagtggtaagcctctgcccc

SEQ ID NO: 5282261 - DNA, 25 bp, Homo sapien
tgcccctctccatgcattatctgtg

SEQ ID NO: 5282262 - DNA, 25 bp, Homo sapien
tctgtgaaacgatctgttgtagaca

SEQ ID NO: 5282263 - DNA, 25 bp, Homo sapien
ctgacagtacatagagcttcttgac

SEQ ID NO: 5282264 - DNA, 25 bp, Homo sapien
cctttaacttttcctcgctgggcat

SEQ ID NO: 5282265 - DNA, 25 bp, Homo sapien
gttcatggtattgctctataagtaa

SEQ ID NO: 5282266 - DNA, 25 bp, Homo sapien
tattgctctataagtaaggctgaca

SEQ ID NO: 5282267 - DNA, 25 bp, Homo sapien
aaaagtaattggctttccgatagag

SEQ ID NO: 5282268 - DNA, 25 bp, Homo sapien
taaacatcagtttagctgcatcaaa

SEQ ID NO: 5282269 - DNA, 25 bp, Homo sapien
cgatagagttctatggcatcaagag

SEQ ID NO: 5282270 - DNA, 25 bp, Homo sapien
aatgagatgcatacctagctaacag

SEQ ID NO: 5282271 - DNA, 25 bp, Homo sapien
gtcactgcttgttcacacattccaa

SEQ ID NO: 5282272 - DNA, 25 bp, Homo sapien
tgagatgtacgcaggtatctactgc

SEQ ID NO: 5282273 - DNA, 25 bp, Homo sapien
acattccaactctgacaaacatttg

SEQ ID NO: 5282274 - DNA, 25 bp, Homo sapien
aaaaatgcagtcactgcttgttcac

SEQ ID NO: 5282275 - DNA, 25 bp, Homo sapien
tcttaacagactacacaagactgtg

SEQ ID NO: 5282276 - DNA, 25 bp, Homo sapien
tccctagcaacatatcatttcatct

SEQ ID NO: 5282277 - DNA, 25 bp, Homo sapien
caagactgtgatcatattaaagtag

SEQ ID NO: 5282278 - DNA, 25 bp, Homo sapien
taaacttaagttatagcaaatttca

SEQ ID NO: 5282279 - DNA, 25 bp, Homo sapien
ggttccgtccttgtacataatattg

SEQ ID NO: 5282280 - DNA, 25 bp, Homo sapien
tcataatcctctaacatatagtaac

SEQ ID NO: 5282281 - DNA, 25 bp, Homo sapien
aatggcaaggttctctaacccttca

SEQ ID NO: 5282282 - DNA, 25 bp, Homo sapien
atagtaacattcagctaagcgttcc

SEQ ID NO: 5282283 - DNA, 25 bp, Homo sapien
gtcatctgcatcaccagatccagtt

SEQ ID NO: 5282284 - DNA, 25 bp, Homo sapien
ttttgtcgatcagcaaagtagtctc

SEQ ID NO: 5282285 - DNA, 25 bp, Homo sapien
tcaccagatccagttttcaggagct

SEQ ID NO: 5282286 - DNA, 25 bp, Homo sapien
tcagcaaagtagtctccaatggcat

SEQ ID NO: 5282287 - DNA, 25 bp, Homo sapien
cagccggaggccaatagcaagatcc

SEQ ID NO: 5282288 - DNA, 25 bp, Homo sapien
atttcagccggaggccaatagcaag

SEQ ID NO: 5282289 - DNA, 25 bp, Homo sapien
caatcccccaatttcagccggaggc

SEQ ID NO: 5282290 - DNA, 25 bp, Homo sapien
cccaatttcagccggaggccaatag

SEQ ID NO: 5282291 - DNA, 25 bp, Homo sapien
tcactcagtagtttgcccaagcgct

SEQ ID NO: 5282292 - DNA, 25 bp, Homo sapien
aaacctgccgaagtagccaacaact

SEQ ID NO: 5282293 - DNA, 25 bp, Homo sapien
aagagctgcttcagccagtaggcgc

SEQ ID NO: 5282294 - DNA, 25 bp, Homo sapien
tctttgcagcgcacaaatgcttgct

SEQ ID NO: 5282295 - DNA, 25 bp, Homo sapien
tcgcagagaccgaatctcaaagtta

SEQ ID NO: 5282296 - DNA, 25 bp, Homo sapien
tgtggattgtcctctatgaactgag

SEQ ID NO: 5282297 - DNA, 25 bp, Homo sapien
gcatctttaattccaaccttctcaa

SEQ ID NO: 5282298 - DNA, 25 bp, Homo sapien
tcagtgctcggctatctcgcagaga

SEQ ID NO: 5282299 - DNA, 25 bp, Homo sapien
tatatccagaggtctgaatgggttc

SEQ ID NO: 5282300 - DNA, 25 bp, Homo sapien
atatatccagaggtctgaatgggtt

SEQ ID NO: 5282301 - DNA, 25 bp, Homo sapien
tgttaacactcatttcttgttttta

SEQ ID NO: 5282302 - DNA, 25 bp, Homo sapien
atttatagactgttaacactcattt

SEQ ID NO: 5282303 - DNA, 25 bp, Homo sapien
gactgttaacactcatttcttgttt

SEQ ID NO: 5282304 - DNA, 25 bp, Homo sapien
tttatagactgttaacactcatttc

SEQ ID NO: 5282305 - DNA, 25 bp, Homo sapien
tccgttactcgagcatccaagtcaa

SEQ ID NO: 5282306 - DNA, 25 bp, Homo sapien
tatcccagacatctcttcgttccaa

SEQ ID NO: 5282307 - DNA, 25 bp, Homo sapien
tccaactacttgctgtcccgtactg

SEQ ID NO: 5282308 - DNA, 25 bp, Homo sapien
tgagatgtctatgatagcaagacgg

SEQ ID NO: 5282309 - DNA, 25 bp, Homo sapien
cattcttcttcaaaatcagattatc

SEQ ID NO: 5282310 - DNA, 25 bp, Homo sapien
tcttcaaaatcagattatcagaaac

SEQ ID NO: 5282311 - DNA, 25 bp, Homo sapien
tcttcttcaaaatcagattatcaga

SEQ ID NO: 5282312 - DNA, 25 bp, Homo sapien
ctatagccattcttcttcaaaatca

SEQ ID NO: 5282313 - DNA, 25 bp, Homo sapien
tctgaatggtgccagattcacgacc

SEQ ID NO: 5282314 - DNA, 25 bp, Homo sapien
caattcaaggataactggtaggctc

SEQ ID NO: 5282315 - DNA, 25 bp, Homo sapien
taggctcgacaattaagggaatatt

SEQ ID NO: 5282316 - DNA, 25 bp, Homo sapien
caacattaggtagactgtatctctg

SEQ ID NO: 5282317 - DNA, 25 bp, Homo sapien
gttatggcacaaattggatcccttg

SEQ ID NO: 5282318 - DNA, 25 bp, Homo sapien
cacaatcaatatcttatctgatgca

SEQ ID NO: 5282319 - DNA, 25 bp, Homo sapien
atcttatctgatgcagttatggcac

SEQ ID NO: 5282320 - DNA, 25 bp, Homo sapien
tgcagttatggcacaaattggatcc

SEQ ID NO: 5282321 - DNA, 25 bp, Homo sapien
ttgaatggttttactataatcaagc

SEQ ID NO: 5282322 - DNA, 25 bp, Homo sapien
gttttactataatcaagcacaccat

SEQ ID NO: 5282323 - DNA, 25 bp, Homo sapien
tataatcaagcacaccatccattga

SEQ ID NO: 5282324 - DNA, 25 bp, Homo sapien
gaatggttttactataatcaagcac

SEQ ID NO: 5282325 - DNA, 25 bp, Homo sapien
cacagagtatcactaatggagacaa

SEQ ID NO: 5282326 - DNA, 25 bp, Homo sapien
tactatgtggcagagcccttttcac

SEQ ID NO: 5282327 - DNA, 25 bp, Homo sapien
ggtcactgatattggaatcacccca

SEQ ID NO: 5282328 - DNA, 25 bp, Homo sapien
tcccatcttagcacatgagtgagtc

SEQ ID NO: 5282329 - DNA, 25 bp, Homo sapien
tataaaatgcttctttcgaggctgc

SEQ ID NO: 5282330 - DNA, 25 bp, Homo sapien
tcgaggctgctatcacatgggtttt

SEQ ID NO: 5282331 - DNA, 25 bp, Homo sapien
cacgatattgccaggtataaaatgc

SEQ ID NO: 5282332 - DNA, 25 bp, Homo sapien
ccttcttttcgagaccgtgtgatct

SEQ ID NO: 5282333 - DNA, 25 bp, Homo sapien
gacataacgttactaggaggtacca

SEQ ID NO: 5282334 - DNA, 25 bp, Homo sapien
gagttcttgccagagtgcagacaaa

SEQ ID NO: 5282335 - DNA, 25 bp, Homo sapien
tatggccggaataaagacataacgt

SEQ ID NO: 5282336 - DNA, 25 bp, Homo sapien
gaggtaccatttatagagttcttgc

SEQ ID NO: 5282337 - DNA, 25 bp, Homo sapien
tactattaccaacctctggagggag

SEQ ID NO: 5282338 - DNA, 25 bp, Homo sapien
cctggtcttcactaaatcttaagaa

SEQ ID NO: 5282339 - DNA, 25 bp, Homo sapien
tagtaaattccaccatggatactct

SEQ ID NO: 5282340 - DNA, 25 bp, Homo sapien
gccaggtcaggctgcgctctccttt

SEQ ID NO: 5282341 - DNA, 25 bp, Homo sapien
acaggcacttgttaattctgtggcc

SEQ ID NO: 5282342 - DNA, 25 bp, Homo sapien
gcctggcatagagtacacgcttaat

SEQ ID NO: 5282343 - DNA, 25 bp, Homo sapien
tgttagtggttcaaggtaagagtca

SEQ ID NO: 5282344 - DNA, 25 bp, Homo sapien
taataatgccaaccctacagagctg

SEQ ID NO: 5282345 - DNA, 25 bp, Homo sapien
ccaagggtgtaccaatagaattaca

SEQ ID NO: 5282346 - DNA, 25 bp, Homo sapien
aatatcaatgtatttgggatccaag

SEQ ID NO: 5282347 - DNA, 25 bp, Homo sapien
caagggtgtaccaatagaattacaa

SEQ ID NO: 5282348 - DNA, 25 bp, Homo sapien
caatatcaatgtatttgggatccaa

SEQ ID NO: 5282349 - DNA, 25 bp, Homo sapien
gatcagctataacctcaaaactcat

SEQ ID NO: 5282350 - DNA, 25 bp, Homo sapien
aactcatttttatcctatgatcagc

SEQ ID NO: 5282351 - DNA, 25 bp, Homo sapien
tcagctatataagagctaatttcat

SEQ ID NO: 5282352 - DNA, 25 bp, Homo sapien
tcccctcatattgctacagtttctg

SEQ ID NO: 5282353 - DNA, 25 bp, Homo sapien
caaatgtctccatctcgttctcctc

SEQ ID NO: 5282354 - DNA, 25 bp, Homo sapien
ttgcaccaaatgtctccatctcgtt

SEQ ID NO: 5282355 - DNA, 25 bp, Homo sapien
cgttgcaccaaatgtctccatctcg

SEQ ID NO: 5282356 - DNA, 25 bp, Homo sapien
gcaccaaatgtctccatctcgttct

SEQ ID NO: 5282357 - DNA, 25 bp, Homo sapien
gactcaacctaatgaaagtggctta

SEQ ID NO: 5282358 - DNA, 25 bp, Homo sapien
acatgactcaacctaatgaaagtgg

SEQ ID NO: 5282359 - DNA, 25 bp, Homo sapien
ctcaacctaatgaaagtggcttata

SEQ ID NO: 5282360 - DNA, 25 bp, Homo sapien
catgactcaacctaatgaaagtggc

SEQ ID NO: 5282361 - DNA, 25 bp, Homo sapien
tgtcaggtagtctattgttatcccc

SEQ ID NO: 5282362 - DNA, 25 bp, Homo sapien
catctgactcactggacacactgca

SEQ ID NO: 5282363 - DNA, 25 bp, Homo sapien
tatgtatatcttgctgcaagggctc

SEQ ID NO: 5282364 - DNA, 25 bp, Homo sapien
gcaagggctcaaatatgtcaggtag

SEQ ID NO: 5282365 - DNA, 25 bp, Homo sapien
ttaccttctaatcctccagccaaag

SEQ ID NO: 5282366 - DNA, 25 bp, Homo sapien
tatggatgtaatatctcttaactct

SEQ ID NO: 5282367 - DNA, 25 bp, Homo sapien
gaaggtaatattaatggttctttca

SEQ ID NO: 5282368 - DNA, 25 bp, Homo sapien
tattgaaatgctaagcttcccggac

SEQ ID NO: 5282369 - DNA, 25 bp, Homo sapien
aatggagtcacagagttttccaaaa

SEQ ID NO: 5282370 - DNA, 25 bp, Homo sapien
tcaatggagtcacagagttttccaa

SEQ ID NO: 5282371 - DNA, 25 bp, Homo sapien
tggagtcacagagttttccaaaatt

SEQ ID NO: 5282372 - DNA, 25 bp, Homo sapien
catcaatggagtcacagagttttcc

SEQ ID NO: 5282373 - DNA, 25 bp, Homo sapien
ctagaccaatagtgccaacagaccc

SEQ ID NO: 5282374 - DNA, 25 bp, Homo sapien
caacagacccaatgttttgatgtac

SEQ ID NO: 5282375 - DNA, 25 bp, Homo sapien
tttgatgtacttgccagtgtagagg

SEQ ID NO: 5282376 - DNA, 25 bp, Homo sapien
tagtgccaacagacccaatgttttg

SEQ ID NO: 5282377 - DNA, 25 bp, Homo sapien
aggtagaaaactataacccaagcag

SEQ ID NO: 5282378 - DNA, 25 bp, Homo sapien
cccaagcagttagcccagctatgtc

SEQ ID NO: 5282379 - DNA, 25 bp, Homo sapien
agaaaactataacccaagcagttag

SEQ ID NO: 5282380 - DNA, 25 bp, Homo sapien
tataacccaagcagttagcccagct

SEQ ID NO: 5282381 - DNA, 25 bp, Homo sapien
actacagtgtttgagcaataacccc

SEQ ID NO: 5282382 - DNA, 25 bp, Homo sapien
ggtagtaatagaaatgagacccttc

SEQ ID NO: 5282383 - DNA, 25 bp, Homo sapien
cattgtttttcgtatcccagaagac

SEQ ID NO: 5282384 - DNA, 25 bp, Homo sapien
aatattctggacgatcaggtctggt

SEQ ID NO: 5282385 - DNA, 25 bp, Homo sapien
cttataattaggtcgaatgtttgca

SEQ ID NO: 5282386 - DNA, 25 bp, Homo sapien
caacagctagtgcaattttcagtcc

SEQ ID NO: 5282387 - DNA, 25 bp, Homo sapien
ccttcccaagatagtgcagatattt

SEQ ID NO: 5282388 - DNA, 25 bp, Homo sapien
taaaggaatcaacagctagtgcaat

SEQ ID NO: 5282389 - DNA, 25 bp, Homo sapien
ctcaccaaacggagtgtaaaactgc

SEQ ID NO: 5282390 - DNA, 25 bp, Homo sapien
tggttccactggatgcctactacgt

SEQ ID NO: 5282391 - DNA, 25 bp, Homo sapien
tggaagcctgccacagctaacacgc

SEQ ID NO: 5282392 - DNA, 25 bp, Homo sapien
gagtgtaaaactgcacaatgttcac

SEQ ID NO: 5282393 - DNA, 25 bp, Homo sapien
tccagtgacattcaccaaacaactc

SEQ ID NO: 5282394 - DNA, 25 bp, Homo sapien
gctccacgtagccttctgtgccatg

SEQ ID NO: 5282395 - DNA, 25 bp, Homo sapien
catggtaccaatgaattccagcaat

SEQ ID NO: 5282396 - DNA, 25 bp, Homo sapien
cagcaatgctgatagctccagtgac

SEQ ID NO: 5282397 - DNA, 25 bp, Homo sapien
tccccatttgccattccaaaaagta

SEQ ID NO: 5282398 - DNA, 25 bp, Homo sapien
tactgtccgcagaccatgttacatg

SEQ ID NO: 5282399 - DNA, 25 bp, Homo sapien
tgttacatgggatagctgtataccc

SEQ ID NO: 5282400 - DNA, 25 bp, Homo sapien
tttccttgattatcgtaaatgtgta

SEQ ID NO: 5282401 - DNA, 25 bp, Homo sapien
gctcatactgcgaacaactgattta

SEQ ID NO: 5282402 - DNA, 25 bp, Homo sapien
cccatcttcatatacaatgcagatc

SEQ ID NO: 5282403 - DNA, 25 bp, Homo sapien
tatttcgattgttgatcatctcctc

SEQ ID NO: 5282404 - DNA, 25 bp, Homo sapien
tcagcattccagctcatactgcgaa

SEQ ID NO: 5282405 - DNA, 25 bp, Homo sapien
tataaactggaactacctagaagta

SEQ ID NO: 5282406 - DNA, 25 bp, Homo sapien
tacagtctactgaggaaccaatatt

SEQ ID NO: 5282407 - DNA, 25 bp, Homo sapien
aaggaaactaactggcccatgcagg

SEQ ID NO: 5282408 - DNA, 25 bp, Homo sapien
cccatgcaggaagtgaattattccc

SEQ ID NO: 5282409 - DNA, 25 bp, Homo sapien
tgctcattccatgttacaacttgaa

SEQ ID NO: 5282410 - DNA, 25 bp, Homo sapien
gataagcccgttttcatcactggta

SEQ ID NO: 5282411 - DNA, 25 bp, Homo sapien
ggtagtcaacttctgatactgctca

SEQ ID NO: 5282412 - DNA, 25 bp, Homo sapien
catccacacaatgataagcccgttt

SEQ ID NO: 5282413 - DNA, 25 bp, Homo sapien
catggtttactcaattggcctgact

SEQ ID NO: 5282414 - DNA, 25 bp, Homo sapien
gagcatatcttaaacctctagggta

SEQ ID NO: 5282415 - DNA, 25 bp, Homo sapien
ttcaaaggacaccataacaagtact

SEQ ID NO: 5282416 - DNA, 25 bp, Homo sapien
gacaccaatcatggctagctaccag

SEQ ID NO: 5282417 - DNA, 25 bp, Homo sapien
cataggacagattctaaaaaggatt

SEQ ID NO: 5282418 - DNA, 25 bp, Homo sapien
tattacttatgtctcaacagaaatg

SEQ ID NO: 5282419 - DNA, 25 bp, Homo sapien
cctttaatctggaatcataggacag

SEQ ID NO: 5282420 - DNA, 25 bp, Homo sapien
tttcggtgatgggaatgcaatgcac

SEQ ID NO: 5282421 - DNA, 25 bp, Homo sapien
ttcatagaaaggttactgggggctg

SEQ ID NO: 5282422 - DNA, 25 bp, Homo sapien
gcaaggcccctcaattttgcatcat

SEQ ID NO: 5282423 - DNA, 25 bp, Homo sapien
ccttcaagagtctgattcatagaaa

SEQ ID NO: 5282424 - DNA, 25 bp, Homo sapien
ctatgaccttcaagagtctgattca

SEQ ID NO: 5282425 - DNA, 25 bp, Homo sapien
tctggtaatactgacataaatcttc

SEQ ID NO: 5282426 - DNA, 25 bp, Homo sapien
cagttattccaacaatccgaagtac

SEQ ID NO: 5282427 - DNA, 25 bp, Homo sapien
aactggtatgtgaacaaaaatctgg

SEQ ID NO: 5282428 - DNA, 25 bp, Homo sapien
ccgaagtacatcaaaaagtccaaag

SEQ ID NO: 5282429 - DNA, 25 bp, Homo sapien
tttctggtcaattttgttgtcctgg

SEQ ID NO: 5282430 - DNA, 25 bp, Homo sapien
ttttgttgtcctgggcatattggaa

SEQ ID NO: 5282431 - DNA, 25 bp, Homo sapien
aattttgttgtcctgggcatattgg

SEQ ID NO: 5282432 - DNA, 25 bp, Homo sapien
ggtcaattttgttgtcctgggcata

SEQ ID NO: 5282433 - DNA, 25 bp, Homo sapien
ttcaccaccgcatgctatgaaccct

SEQ ID NO: 5282434 - DNA, 25 bp, Homo sapien
aactttcagtaatccatcttcacca

SEQ ID NO: 5282435 - DNA, 25 bp, Homo sapien
catcttcaccaccgcatgctatgaa

SEQ ID NO: 5282436 - DNA, 25 bp, Homo sapien
tcaaaactttcagtaatccatcttc

SEQ ID NO: 5282437 - DNA, 25 bp, Homo sapien
aaccacagccgcactagcaactttt

SEQ ID NO: 5282438 - DNA, 25 bp, Homo sapien
gcactagcaacttttcacgaaggag

SEQ ID NO: 5282439 - DNA, 25 bp, Homo sapien
aaagcaaccacagccgcactagcaa

SEQ ID NO: 5282440 - DNA, 25 bp, Homo sapien
acagccgcactagcaacttttcacg

SEQ ID NO: 5282441 - DNA, 25 bp, Homo sapien
cggcgggaaggatggctgcggaatg

SEQ ID NO: 5282442 - DNA, 25 bp, Homo sapien
agagggcagcaagctcggccaaaga

SEQ ID NO: 5282443 - DNA, 25 bp, Homo sapien
tgcggaatggcgaagccacgaccag

SEQ ID NO: 5282444 - DNA, 25 bp, Homo sapien
aatgggagagtgctgcgagagggca

SEQ ID NO: 5282445 - DNA, 25 bp, Homo sapien
gcgggaatggcggagaaacgaggac

SEQ ID NO: 5282446 - DNA, 25 bp, Homo sapien
ggaatggcggagaaacgaggacgcc

SEQ ID NO: 5282447 - DNA, 25 bp, Homo sapien
ctgcgggaatggcggagaaacgagg

SEQ ID NO: 5282448 - DNA, 25 bp, Homo sapien
gaatggcggagaaacgaggacgccc

SEQ ID NO: 5282449 - DNA, 25 bp, Homo sapien
gccgctaaggccctcgacaagtaac

SEQ ID NO: 5282450 - DNA, 25 bp, Homo sapien
gacaagtaacggttctacgtctcca

SEQ ID NO: 5282451 - DNA, 25 bp, Homo sapien
tgggatccccgagagggtcacggcg

SEQ ID NO: 5282452 - DNA, 25 bp, Homo sapien
gtctccaatcgggagtaccagcagc

SEQ ID NO: 5282453 - DNA, 25 bp, Homo sapien
gaggcggtagctgggctagtcctgt

SEQ ID NO: 5282454 - DNA, 25 bp, Homo sapien
ctgcgcggacgtcgatgggtttgtg

SEQ ID NO: 5282455 - DNA, 25 bp, Homo sapien
gcggacgtcgatgggtttgtgggcg

SEQ ID NO: 5282456 - DNA, 25 bp, Homo sapien
cgcggacgtcgatgggtttgtgggc

SEQ ID NO: 5282457 - DNA, 25 bp, Homo sapien
ttaatagacaaaattgatgagtcat

SEQ ID NO: 5282458 - DNA, 25 bp, Homo sapien
gacaaaattgatgagtcatcaaaaa

SEQ ID NO: 5282459 - DNA, 25 bp, Homo sapien
tagacaaaattgatgagtcatcaaa

SEQ ID NO: 5282460 - DNA, 25 bp, Homo sapien
attgatgagtcatcaaaaatagaca

SEQ ID NO: 5282461 - DNA, 25 bp, Homo sapien
gaatgcatgagtattaagtacacca

SEQ ID NO: 5282462 - DNA, 25 bp, Homo sapien
tagcaggaacattggcaataacagg

SEQ ID NO: 5282463 - DNA, 25 bp, Homo sapien
acaccaagctgtccacattttcagg

SEQ ID NO: 5282464 - DNA, 25 bp, Homo sapien
caggtggatcactaacattaaaaag

SEQ ID NO: 5282465 - DNA, 25 bp, Homo sapien
taacgatgtatttgtccatattcat

SEQ ID NO: 5282466 - DNA, 25 bp, Homo sapien
ttcaacttctccaaaatgtcatcaa

SEQ ID NO: 5282467 - DNA, 25 bp, Homo sapien
ttaacgatgtatttgtccatattca

SEQ ID NO: 5282468 - DNA, 25 bp, Homo sapien
ttcatttattttcaacttctccaaa

SEQ ID NO: 5282469 - DNA, 25 bp, Homo sapien
cacttgcctgtggaatgtcttaaag

SEQ ID NO: 5282470 - DNA, 25 bp, Homo sapien
agtgtttggctcgatcgtagtacct

SEQ ID NO: 5282471 - DNA, 25 bp, Homo sapien
cgatcgtagtaccttggttggctcc

SEQ ID NO: 5282472 - DNA, 25 bp, Homo sapien
taccactgctcatattaaaacctaa

SEQ ID NO: 5282473 - DNA, 25 bp, Homo sapien
tcagtctttgaagatacgagctgac

SEQ ID NO: 5282474 - DNA, 25 bp, Homo sapien
tagcttcacatccacaagcatcttc

SEQ ID NO: 5282475 - DNA, 25 bp, Homo sapien
cttgtcctggaatgccagtgtagct

SEQ ID NO: 5282476 - DNA, 25 bp, Homo sapien
ggaatgccagtgtagcttcacatcc

SEQ ID NO: 5282477 - DNA, 25 bp, Homo sapien
tcagtggaaacaagtcttcgtgctt

SEQ ID NO: 5282478 - DNA, 25 bp, Homo sapien
caatgacagtacacaaatatactat

SEQ ID NO: 5282479 - DNA, 25 bp, Homo sapien
caaaggaaatagccttaaagggctg

SEQ ID NO: 5282480 - DNA, 25 bp, Homo sapien
gaaatagccttaaagggctgatcct

SEQ ID NO: 5282481 - DNA, 25 bp, Homo sapien
aatagccttaaagggctgatcctca

SEQ ID NO: 5282482 - DNA, 25 bp, Homo sapien
aaggaaatagccttaaagggctgat

SEQ ID NO: 5282483 - DNA, 25 bp, Homo sapien
tcatttaaggtgtagccaggatagc

SEQ ID NO: 5282484 - DNA, 25 bp, Homo sapien
aatgtgctggcaaccatgagagcct

SEQ ID NO: 5282485 - DNA, 25 bp, Homo sapien
caatcacagtggtaggatgcggccc

SEQ ID NO: 5282486 - DNA, 25 bp, Homo sapien
agagcctagggcacacttgtcacgg

SEQ ID NO: 5282487 - DNA, 25 bp, Homo sapien
ttagggacctaatcatacatggagc

SEQ ID NO: 5282488 - DNA, 25 bp, Homo sapien
catgttcagactggcctaggacaaa

SEQ ID NO: 5282489 - DNA, 25 bp, Homo sapien
catgggcagaaccttttgtggctca

SEQ ID NO: 5282490 - DNA, 25 bp, Homo sapien
catggagctaagtttgatgctgcac

SEQ ID NO: 5282491 - DNA, 25 bp, Homo sapien
cagagtgtagccctcatagcattca

SEQ ID NO: 5282492 - DNA, 25 bp, Homo sapien
aatgatgggaccctgttctgtcatt

SEQ ID NO: 5282493 - DNA, 25 bp, Homo sapien
catgggtacccaaagcacatttatc

SEQ ID NO: 5282494 - DNA, 25 bp, Homo sapien
caaatgtgctgacacccatgggtac

SEQ ID NO: 5282495 - DNA, 25 bp, Homo sapien
gcactcacaatgataagagccactt

SEQ ID NO: 5282496 - DNA, 25 bp, Homo sapien
cattcaaggtataaccttcatagca

SEQ ID NO: 5282497 - DNA, 25 bp, Homo sapien
gtcttcattcaaggtataaccttca

SEQ ID NO: 5282498 - DNA, 25 bp, Homo sapien
ccttcatagcactcacaatgataag

SEQ ID NO: 5282499 - DNA, 25 bp, Homo sapien
tgctcacatccgtgggtgttaagag

SEQ ID NO: 5282500 - DNA, 25 bp, Homo sapien
cacatccgtgggtgttaagagcaca

SEQ ID NO: 5282501 - DNA, 25 bp, Homo sapien
tcacatccgtgggtgttaagagcac

SEQ ID NO: 5282502 - DNA, 25 bp, Homo sapien
gatgtgctcacatccgtgggtgtta

SEQ ID NO: 5282503 - DNA, 25 bp, Homo sapien
tcttgtcggcattcaaggtgtatcc

SEQ ID NO: 5282504 - DNA, 25 bp, Homo sapien
tccttggctacactcacagtggtgc

SEQ ID NO: 5282505 - DNA, 25 bp, Homo sapien
catcactgatgcagacgtgctggca

SEQ ID NO: 5282506 - DNA, 25 bp, Homo sapien
actgatgcagacgtgctggcactgg

SEQ ID NO: 5282507 - DNA, 25 bp, Homo sapien
aatgtccagagtgtcgattatccgg

SEQ ID NO: 5282508 - DNA, 25 bp, Homo sapien
tcaataccagatgcttgggcccgag

SEQ ID NO: 5282509 - DNA, 25 bp, Homo sapien
tcatcttgagggacgccatgtctgc

SEQ ID NO: 5282510 - DNA, 25 bp, Homo sapien
tgtaacaatgatggccaccttaggg

SEQ ID NO: 5282511 - DNA, 25 bp, Homo sapien
caagcaatgatcagaccacaattag

SEQ ID NO: 5282512 - DNA, 25 bp, Homo sapien
aaaagaccaagcaatgatcagacca

SEQ ID NO: 5282513 - DNA, 25 bp, Homo sapien
gcaatgatcagaccacaattagaaa

SEQ ID NO: 5282514 - DNA, 25 bp, Homo sapien
gatcagaccacaattagaaatgcag

SEQ ID NO: 5282515 - DNA, 25 bp, Homo sapien
ccaacatcaccactgcctgcgacct

SEQ ID NO: 5282516 - DNA, 25 bp, Homo sapien
accactgcctgcgaccttccccaag

SEQ ID NO: 5282517 - DNA, 25 bp, Homo sapien
tgcctgcgaccttccccaagaccat

SEQ ID NO: 5282518 - DNA, 25 bp, Homo sapien
aacatcaccactgcctgcgaccttc

SEQ ID NO: 5282519 - DNA, 25 bp, Homo sapien
cttccagtctgaggcagcctgagga

SEQ ID NO: 5282520 - DNA, 25 bp, Homo sapien
ctccagcctccggaagcccgggcgg

SEQ ID NO: 5282521 - DNA, 25 bp, Homo sapien
cgggcgcggccaggctcgctggtcc

SEQ ID NO: 5282522 - DNA, 25 bp, Homo sapien
gcgccgtcgggagccgcaggagagg

SEQ ID NO: 5282523 - DNA, 25 bp, Homo sapien
tggtcccggaagcgggcgcgccgtc

SEQ ID NO: 5282524 - DNA, 25 bp, Homo sapien
cctggtggtgtccgtcgggggccag

SEQ ID NO: 5282525 - DNA, 25 bp, Homo sapien
tggtgtccgtcgggggccaggagcc

SEQ ID NO: 5282526 - DNA, 25 bp, Homo sapien
tggtggtgtccgtcgggggccagga

SEQ ID NO: 5282527 - DNA, 25 bp, Homo sapien
gggccaggagcccacgcgaggctcg

SEQ ID NO: 5282528 - DNA, 25 bp, Homo sapien
tccttcataggttggctgcagctct

SEQ ID NO: 5282529 - DNA, 25 bp, Homo sapien
gacataggagcaggcccaatctgga

SEQ ID NO: 5282530 - DNA, 25 bp, Homo sapien
tatgctatggtaaccaatggcccca

SEQ ID NO: 5282531 - DNA, 25 bp, Homo sapien
gatggtagaatcatgcacctgcaag

SEQ ID NO: 5282532 - DNA, 25 bp, Homo sapien
aagtgagtcacagaaggtcagagga

SEQ ID NO: 5282533 - DNA, 25 bp, Homo sapien
aattcatataattggtgggagggcc

SEQ ID NO: 5282534 - DNA, 25 bp, Homo sapien
gataacagatatactagtccccggt

SEQ ID NO: 5282535 - DNA, 25 bp, Homo sapien
tgatgcaacctaaccaaatgataac

SEQ ID NO: 5282536 - DNA, 25 bp, Homo sapien
ggcactttgctcttgcttaacctag

SEQ ID NO: 5282537 - DNA, 25 bp, Homo sapien
gaaactatgtggcaagtaccctctt

SEQ ID NO: 5282538 - DNA, 25 bp, Homo sapien
tcctgaaagtactcagggtagcaag

SEQ ID NO: 5282539 - DNA, 25 bp, Homo sapien
cgtttaacagatgtcaaaaagctcc

SEQ ID NO: 5282540 - DNA, 25 bp, Homo sapien
ggatttattgtcaaaggcagaattt

SEQ ID NO: 5282541 - DNA, 25 bp, Homo sapien
gctggtataggatttattgtcaaag

SEQ ID NO: 5282542 - DNA, 25 bp, Homo sapien
tataggatttattgtcaaaggcaga

SEQ ID NO: 5282543 - DNA, 25 bp, Homo sapien
ggtataggatttattgtcaaaggca

SEQ ID NO: 5282544 - DNA, 25 bp, Homo sapien
caggcaggtaagtaaggaggtggtg

SEQ ID NO: 5282545 - DNA, 25 bp, Homo sapien
tttttcaggcattttcacggccatt

SEQ ID NO: 5282546 - DNA, 25 bp, Homo sapien
tcaggcaggtaagtaaggaggtggt

SEQ ID NO: 5282547 - DNA, 25 bp, Homo sapien
ggaggtggtggttctttttcaggca

SEQ ID NO: 5282548 - DNA, 25 bp, Homo sapien
gatgtatttatagcagttccaaaca

SEQ ID NO: 5282549 - DNA, 25 bp, Homo sapien
cggcacgtttcggttgttgatgtat

SEQ ID NO: 5282550 - DNA, 25 bp, Homo sapien
ggtacacagcaatctccggcacgtt

SEQ ID NO: 5282551 - DNA, 25 bp, Homo sapien
tccaaacacagttaattagataagc

SEQ ID NO: 5282552 - DNA, 25 bp, Homo sapien
gaacaatgaacaggaggcagctgga

SEQ ID NO: 5282553 - DNA, 25 bp, Homo sapien
tggagtccaaggccaggaggtcatc

SEQ ID NO: 5282554 - DNA, 25 bp, Homo sapien
gaacacaagaacaatgaacaggagg

SEQ ID NO: 5282555 - DNA, 25 bp, Homo sapien
caaagaacacaagaacaatgaacag

SEQ ID NO: 5282556 - DNA, 25 bp, Homo sapien
caccagggtctctaaaaggaataat

SEQ ID NO: 5282557 - DNA, 25 bp, Homo sapien
ggaaatgtcaacaagaaggcctaat

SEQ ID NO: 5282558 - DNA, 25 bp, Homo sapien
cagggaggcaccacttgaaatttct

SEQ ID NO: 5282559 - DNA, 25 bp, Homo sapien
gactgtgtacaaggcaatgagctaa

SEQ ID NO: 5282560 - DNA, 25 bp, Homo sapien
accaggcaactgaggacgaagtcaa

SEQ ID NO: 5282561 - DNA, 25 bp, Homo sapien
agttgatccagatattctttgattc

SEQ ID NO: 5282562 - DNA, 25 bp, Homo sapien
ctgaggacgaagtcaaaaagtcggt

SEQ ID NO: 5282563 - DNA, 25 bp, Homo sapien
aactaatagcaaccaggcaactgag

SEQ ID NO: 5282564 - DNA, 25 bp, Homo sapien
ataaacataagaacagagacggcaa

SEQ ID NO: 5282565 - DNA, 25 bp, Homo sapien
taaacataagaacagagacggcaaa

SEQ ID NO: 5282566 - DNA, 25 bp, Homo sapien
aaacataagaacagagacggcaaaa

SEQ ID NO: 5282567 - DNA, 25 bp, Homo sapien
tatataatttatcactgggcagtaa

SEQ ID NO: 5282568 - DNA, 25 bp, Homo sapien
gtatatataatttatcactgggcag

SEQ ID NO: 5282569 - DNA, 25 bp, Homo sapien
ccaccatgcacagcatgtatatata

SEQ ID NO: 5282570 - DNA, 25 bp, Homo sapien
tttatcactgggcagtaaaacctca

SEQ ID NO: 5282571 - DNA, 25 bp, Homo sapien
cattctctcagacgaatagtaatta

SEQ ID NO: 5282572 - DNA, 25 bp, Homo sapien
attctctcagacgaatagtaattac

SEQ ID NO: 5282573 - DNA, 25 bp, Homo sapien
agccattctctcagacgaatagtaa

SEQ ID NO: 5282574 - DNA, 25 bp, Homo sapien
gccattctctcagacgaatagtaat

SEQ ID NO: 5282575 - DNA, 25 bp, Homo sapien
ttggatgagtcacttccacagtcag

SEQ ID NO: 5282576 - DNA, 25 bp, Homo sapien
tttggatgagtcacttccacagtca

SEQ ID NO: 5282577 - DNA, 25 bp, Homo sapien
aagattgtcttacttgaagtaacaa

SEQ ID NO: 5282578 - DNA, 25 bp, Homo sapien
ggaaaagataacattctatcagtta

SEQ ID NO: 5282579 - DNA, 25 bp, Homo sapien
tcttagcacaatctctagatgtcct

SEQ ID NO: 5282580 - DNA, 25 bp, Homo sapien
tacattaattaccatcacgacgcaa

SEQ ID NO: 5282581 - DNA, 25 bp, Homo sapien
tccgcttgaaactcatggacaccat

SEQ ID NO: 5282582 - DNA, 25 bp, Homo sapien
cgggtgctgtagaaccggtcactgc

SEQ ID NO: 5282583 - DNA, 25 bp, Homo sapien
catgtaccaggtccccaggatgatc

SEQ ID NO: 5282584 - DNA, 25 bp, Homo sapien
caggatgatcgtcccggtgcggaca

SEQ ID NO: 5282585 - DNA, 25 bp, Homo sapien
tgcactattcccgagatgagacccg

SEQ ID NO: 5282586 - DNA, 25 bp, Homo sapien
tactggatgggaagcgtcacaggct

SEQ ID NO: 5282587 - DNA, 25 bp, Homo sapien
tgagcaatgtgtgccacgtactgga

SEQ ID NO: 5282588 - DNA, 25 bp, Homo sapien
gataacgtgacctttgcgcgcagct

SEQ ID NO: 5282589 - DNA, 25 bp, Homo sapien
gagtcagttcttccgcctcttaggg

SEQ ID NO: 5282590 - DNA, 25 bp, Homo sapien
tatttcattgatgcaggccataggt

SEQ ID NO: 5282591 - DNA, 25 bp, Homo sapien
cttgcagatgggagaccaatattct

SEQ ID NO: 5282592 - DNA, 25 bp, Homo sapien
cattgagcactttgccaggaggtgt

SEQ ID NO: 5282593 - DNA, 25 bp, Homo sapien
cccctactatccctgccacattcag

SEQ ID NO: 5282594 - DNA, 25 bp, Homo sapien
cacattcaggacaaggtcaaatgag

SEQ ID NO: 5282595 - DNA, 25 bp, Homo sapien
aatacatttgcccctactatccctg

SEQ ID NO: 5282596 - DNA, 25 bp, Homo sapien
ttgcccctactatccctgccacatt

SEQ ID NO: 5282597 - DNA, 25 bp, Homo sapien
gatcctgtgtgtgtaagcgacagca

SEQ ID NO: 5282598 - DNA, 25 bp, Homo sapien
taaccaagtttgtgagtctccaggg

SEQ ID NO: 5282599 - DNA, 25 bp, Homo sapien
tctaaatacttactactgagagtga

SEQ ID NO: 5282600 - DNA, 25 bp, Homo sapien
gattctttgtacactgagtttaccc

SEQ ID NO: 5282601 - DNA, 25 bp, Homo sapien
tacatagaagaggtcaaagtctgcc

SEQ ID NO: 5282602 - DNA, 25 bp, Homo sapien
tccaagagaagcataacaagcccag

SEQ ID NO: 5282603 - DNA, 25 bp, Homo sapien
gatgggcacgatatgttaacctctg

SEQ ID NO: 5282604 - DNA, 25 bp, Homo sapien
tagatttgccaaacacccggactat

SEQ ID NO: 5282605 - DNA, 25 bp, Homo sapien
ctgacagtaagagcttcataaagcc

SEQ ID NO: 5282606 - DNA, 25 bp, Homo sapien
gacagtaagagcttcataaagccgc

SEQ ID NO: 5282607 - DNA, 25 bp, Homo sapien
agtaagagcttcataaagccgcttt

SEQ ID NO: 5282608 - DNA, 25 bp, Homo sapien
cagtaagagcttcataaagccgctt

SEQ ID NO: 5282609 - DNA, 25 bp, Homo sapien
ttagggccaggcaagaagcattcag

SEQ ID NO: 5282610 - DNA, 25 bp, Homo sapien
caagcactgtggtactgactcatct

SEQ ID NO: 5282611 - DNA, 25 bp, Homo sapien
aggctgccaagtggtgaggagtgcc

SEQ ID NO: 5282612 - DNA, 25 bp, Homo sapien
gccaagggcctgtatgggcctggca

SEQ ID NO: 5282613 - DNA, 25 bp, Homo sapien
ggttctcaggcaagcactgatttgc

SEQ ID NO: 5282614 - DNA, 25 bp, Homo sapien
tgaaatggccatcacaatcaaaata

SEQ ID NO: 5282615 - DNA, 25 bp, Homo sapien
gagtttcaacgtaagtgaaatggcc

SEQ ID NO: 5282616 - DNA, 25 bp, Homo sapien
caatataaatttgcaactgggacga

SEQ ID NO: 5282617 - DNA, 25 bp, Homo sapien
ttaccagttgatgggcctttggttg

SEQ ID NO: 5282618 - DNA, 25 bp, Homo sapien
cactaacagggtgagttccagttgc

SEQ ID NO: 5282619 - DNA, 25 bp, Homo sapien
aacacttaatatggccagtctatac

SEQ ID NO: 5282620 - DNA, 25 bp, Homo sapien
taggagtgtaatgtcggtgtcacct

SEQ ID NO: 5282621 - DNA, 25 bp, Homo sapien
gcaagacatacccaagctagcctgg

SEQ ID NO: 5282622 - DNA, 25 bp, Homo sapien
gcttggcgcgtgcatgatgacatat

SEQ ID NO: 5282623 - DNA, 25 bp, Homo sapien
taacacagtggttaaaatatgggct

SEQ ID NO: 5282624 - DNA, 25 bp, Homo sapien
ctagcctggctattgcttggaggga

SEQ ID NO: 5282625 - DNA, 25 bp, Homo sapien
gccgcctttgcccggtgccactgcc

SEQ ID NO: 5282626 - DNA, 25 bp, Homo sapien
tctgccgcctttgcccggtgccact

SEQ ID NO: 5282627 - DNA, 25 bp, Homo sapien
tgccgcctttgcccggtgccactgc

SEQ ID NO: 5282628 - DNA, 25 bp, Homo sapien
tgttccagcggccacttcaggagac

SEQ ID NO: 5282629 - DNA, 25 bp, Homo sapien
gccagtgttccagcggccacttcag

SEQ ID NO: 5282630 - DNA, 25 bp, Homo sapien
aggccagtgttccagcggccacttc

SEQ ID NO: 5282631 - DNA, 25 bp, Homo sapien
tccagcggccacttcaggagacaca

SEQ ID NO: 5282632 - DNA, 25 bp, Homo sapien
tgctattgtggccaacgatcccgcg

SEQ ID NO: 5282633 - DNA, 25 bp, Homo sapien
ggtccacgaacgggattcagcctcc

SEQ ID NO: 5282634 - DNA, 25 bp, Homo sapien
gaagaggcaacggcggtccacgaac

SEQ ID NO: 5282635 - DNA, 25 bp, Homo sapien
atcccgcgaagaggcaacggcggtc

SEQ ID NO: 5282636 - DNA, 25 bp, Homo sapien
catcatccttctccagaggcggaag

SEQ ID NO: 5282637 - DNA, 25 bp, Homo sapien
catccttctccagaggcggaaggtt

SEQ ID NO: 5282638 - DNA, 25 bp, Homo sapien
tccttctccagaggcggaaggttgt

SEQ ID NO: 5282639 - DNA, 25 bp, Homo sapien
tcatccttctccagaggcggaaggt

SEQ ID NO: 5282640 - DNA, 25 bp, Homo sapien
tgtgggtgagtccaagatcagcaaa

SEQ ID NO: 5282641 - DNA, 25 bp, Homo sapien
ttcttgagcaccgaacacaccagga

SEQ ID NO: 5282642 - DNA, 25 bp, Homo sapien
accagcagatgtgttgatgctccca

SEQ ID NO: 5282643 - DNA, 25 bp, Homo sapien
accctggcccaaggcctgagtccca

SEQ ID NO: 5282644 - DNA, 25 bp, Homo sapien
ctcagctaatttttgtagttttgta

SEQ ID NO: 5282645 - DNA, 25 bp, Homo sapien
aggcacccgccatcaggctcagcta

SEQ ID NO: 5282646 - DNA, 25 bp, Homo sapien
gcacccgccatcaggctcagctaat

SEQ ID NO: 5282647 - DNA, 25 bp, Homo sapien
ctgtgcctggcctattggtaggatt

SEQ ID NO: 5282648 - DNA, 25 bp, Homo sapien
aactttttggactcacagcgaagga

SEQ ID NO: 5282649 - DNA, 25 bp, Homo sapien
aaggaggccagctaccagcaaggtc

SEQ ID NO: 5282650 - DNA, 25 bp, Homo sapien
actcacagcgaaggaggccagctac

SEQ ID NO: 5282651 - DNA, 25 bp, Homo sapien
gaggccagctaccagcaaggtctgg

SEQ ID NO: 5282652 - DNA, 25 bp, Homo sapien
ctgatggacagcacaaatctgggcc

SEQ ID NO: 5282653 - DNA, 25 bp, Homo sapien
acaaatctgggccacatgactacca

SEQ ID NO: 5282654 - DNA, 25 bp, Homo sapien
caaatctgggccacatgactaccac

SEQ ID NO: 5282655 - DNA, 25 bp, Homo sapien
atggacagcacaaatctgggccaca

SEQ ID NO: 5282656 - DNA, 25 bp, Homo sapien
ttcacatgaacacaaatgttcacac

SEQ ID NO: 5282657 - DNA, 25 bp, Homo sapien
cttcacatgaacacaaatgttcaca

SEQ ID NO: 5282658 - DNA, 25 bp, Homo sapien
gacctgcgcatactgcagtgggccc

SEQ ID NO: 5282659 - DNA, 25 bp, Homo sapien
tagcatatgcagctcgatcatctcc

SEQ ID NO: 5282660 - DNA, 25 bp, Homo sapien
tggcccttttcttgcatccaaagac

SEQ ID NO: 5282661 - DNA, 25 bp, Homo sapien
ccattgctgtgtttgccgggcgcca

SEQ ID NO: 5282662 - DNA, 25 bp, Homo sapien
gagagaagccccattcaggcagctc

SEQ ID NO: 5282663 - DNA, 25 bp, Homo sapien
cctttctccagagcacggggcttca

SEQ ID NO: 5282664 - DNA, 25 bp, Homo sapien
tgccgccccatgatgtggtcctttc

SEQ ID NO: 5282665 - DNA, 25 bp, Homo sapien
ttctctcgtactcaaaggccccaga

SEQ ID NO: 5282666 - DNA, 25 bp, Homo sapien
tgcttcctgagggtctaagagcccc

SEQ ID NO: 5282667 - DNA, 25 bp, Homo sapien
cacagggcagcttgggttgcttcct

SEQ ID NO: 5282668 - DNA, 25 bp, Homo sapien
tcatgagtgggtagaacgtgcagtc

SEQ ID NO: 5282669 - DNA, 25 bp, Homo sapien
tgcagtcagcgctgtaggaccagcc

SEQ ID NO: 5282670 - DNA, 25 bp, Homo sapien
agcctcgcccggttggtgggcaggg

SEQ ID NO: 5282671 - DNA, 25 bp, Homo sapien
ggatcggagcctcgcccggttggtg

SEQ ID NO: 5282672 - DNA, 25 bp, Homo sapien
gagcctcgcccggttggtgggcagg

SEQ ID NO: 5282673 - DNA, 25 bp, Homo sapien
tcggagcctcgcccggttggtgggc

SEQ ID NO: 5282674 - DNA, 25 bp, Homo sapien
tgtgcctcggagtctttcatgtcgg

SEQ ID NO: 5282675 - DNA, 25 bp, Homo sapien
gtgtgtttgtctctcggcatctttg

SEQ ID NO: 5282676 - DNA, 25 bp, Homo sapien
tctttcatgtcggaggctgtcctct

SEQ ID NO: 5282677 - DNA, 25 bp, Homo sapien
catctttgatgtgcctcggagtctt

SEQ ID NO: 5282678 - DNA, 25 bp, Homo sapien
tctgggccatcgttcgtacacacct

SEQ ID NO: 5282679 - DNA, 25 bp, Homo sapien
gacaaacccatagggcctcgaaggc

SEQ ID NO: 5282680 - DNA, 25 bp, Homo sapien
taccaggtcctgaatgtgagacgca

SEQ ID NO: 5282681 - DNA, 25 bp, Homo sapien
caaaaggctcagataggcgagagag

SEQ ID NO: 5282682 - DNA, 25 bp, Homo sapien
tgtaaaatgggacactggcattgac

SEQ ID NO: 5282683 - DNA, 25 bp, Homo sapien
ctgtaaaatgggacactggcattga

SEQ ID NO: 5282684 - DNA, 25 bp, Homo sapien
gaaggtcatgatgcatggaaagaga

SEQ ID NO: 5282685 - DNA, 25 bp, Homo sapien
cttgaaggtcatgatgcatggaaag

SEQ ID NO: 5282686 - DNA, 25 bp, Homo sapien
catggaaagagagggttagatcttg

SEQ ID NO: 5282687 - DNA, 25 bp, Homo sapien
gagggttagatcttgtgaaaggggc

SEQ ID NO: 5282688 - DNA, 25 bp, Homo sapien
tgggggacatcagaagaccctcttg

SEQ ID NO: 5282689 - DNA, 25 bp, Homo sapien
caatttccctggtgctttgaggagg

SEQ ID NO: 5282690 - DNA, 25 bp, Homo sapien
cgatgcctcctcctttgacgtcgtg

SEQ ID NO: 5282691 - DNA, 25 bp, Homo sapien
tgcctcctcctttgacgtcgtgagc

SEQ ID NO: 5282692 - DNA, 25 bp, Homo sapien
tttgcagaaaagtccggtcacgtca

SEQ ID NO: 5282693 - DNA, 25 bp, Homo sapien
cagcagatgagcatggtcagccgac

SEQ ID NO: 5282694 - DNA, 25 bp, Homo sapien
cacagagattcgagccaagtttccc

SEQ ID NO: 5282695 - DNA, 25 bp, Homo sapien
tacactccaggcagaaagtcgcagt

SEQ ID NO: 5282696 - DNA, 25 bp, Homo sapien
tggaaaggtcctatgcgagaaaccc

SEQ ID NO: 5282697 - DNA, 25 bp, Homo sapien
catgaggccatttaggtccaaagca

SEQ ID NO: 5282698 - DNA, 25 bp, Homo sapien
gctgtctcccgaccatagattaggg

SEQ ID NO: 5282699 - DNA, 25 bp, Homo sapien
ggagctaacggagaacctggccttg

SEQ ID NO: 5282700 - DNA, 25 bp, Homo sapien
tgcggtacagcatgaaacccaccag

SEQ ID NO: 5282701 - DNA, 25 bp, Homo sapien
tctggtaggccccgccgttggcttg

SEQ ID NO: 5282702 - DNA, 25 bp, Homo sapien
cgttggcttgtttcggctcctccaa

SEQ ID NO: 5282703 - DNA, 25 bp, Homo sapien
gagtagctgccttcgtccttcttct

SEQ ID NO: 5282704 - DNA, 25 bp, Homo sapien
tccacggccactacagccgtattct

SEQ ID NO: 5282705 - DNA, 25 bp, Homo sapien
tggccccctgatccactggggactg

SEQ ID NO: 5282706 - DNA, 25 bp, Homo sapien
ctacagccgtattctcccccgaggt

SEQ ID NO: 5282707 - DNA, 25 bp, Homo sapien
cggcggtcaggctccacggccacta

SEQ ID NO: 5282708 - DNA, 25 bp, Homo sapien
gctgtagcctccaggccggtgggtt

SEQ ID NO: 5282709 - DNA, 25 bp, Homo sapien
agccctctcggtggcagaaggacct

SEQ ID NO: 5282710 - DNA, 25 bp, Homo sapien
cacttctggcaggactacagcctct

SEQ ID NO: 5282711 - DNA, 25 bp, Homo sapien
tgggagctgactggaggctccatcc

SEQ ID NO: 5282712 - DNA, 25 bp, Homo sapien
gggaatagccgtcaggagctgcgtg

SEQ ID NO: 5282713 - DNA, 25 bp, Homo sapien
gaatagccgtcaggagctgcgtgtc

SEQ ID NO: 5282714 - DNA, 25 bp, Homo sapien
tccttccaagtggagggggtctgct

SEQ ID NO: 5282715 - DNA, 25 bp, Homo sapien
ggtctgctgtgacaaggtgatatct

SEQ ID NO: 5282716 - DNA, 25 bp, Homo sapien
ggggcaaattagtagccacaatttg

SEQ ID NO: 5282717 - DNA, 25 bp, Homo sapien
cagggggcaaattagtagccacaat

SEQ ID NO: 5282718 - DNA, 25 bp, Homo sapien
agggggcaaattagtagccacaatt

SEQ ID NO: 5282719 - DNA, 25 bp, Homo sapien
gcaatgaacagtcacagtccaccat

SEQ ID NO: 5282720 - DNA, 25 bp, Homo sapien
tgcaatgaacagtcacagtccacca

SEQ ID NO: 5282721 - DNA, 25 bp, Homo sapien
ctgcaatgaacagtcacagtccacc

SEQ ID NO: 5282722 - DNA, 25 bp, Homo sapien
gaaagggaagctgatctgtcagctg

SEQ ID NO: 5282723 - DNA, 25 bp, Homo sapien
cgtgtggccacgaaatccccggctt

SEQ ID NO: 5282724 - DNA, 25 bp, Homo sapien
ttcgcagtcattcgtggtggagcag

SEQ ID NO: 5282725 - DNA, 25 bp, Homo sapien
tgtcagctgtacctgccccgtgtgg

SEQ ID NO: 5282726 - DNA, 25 bp, Homo sapien
agggtccccaagaatcaccaggaga

SEQ ID NO: 5282727 - DNA, 25 bp, Homo sapien
ccagaggctgactctgtcattcaca

SEQ ID NO: 5282728 - DNA, 25 bp, Homo sapien
caccaggagaccactacaaatgaag

SEQ ID NO: 5282729 - DNA, 25 bp, Homo sapien
ccaggtcctgtagggggtcttcaga

SEQ ID NO: 5282730 - DNA, 25 bp, Homo sapien
tcccaccagccggcccggctggacc

SEQ ID NO: 5282731 - DNA, 25 bp, Homo sapien
gctgaggctccttcgtgcctggggc

SEQ ID NO: 5282732 - DNA, 25 bp, Homo sapien
ggctgaggctccttcgtgcctgggg

SEQ ID NO: 5282733 - DNA, 25 bp, Homo sapien
gcttcccaccagccggcccggctgg

SEQ ID NO: 5282734 - DNA, 25 bp, Homo sapien
tatcctaaatcaaggtgaccgtggg

SEQ ID NO: 5282735 - DNA, 25 bp, Homo sapien
cactgacttggtatcatcaccctca

SEQ ID NO: 5282736 - DNA, 25 bp, Homo sapien
tcccaaggggagtcatggcttaggc

SEQ ID NO: 5282737 - DNA, 25 bp, Homo sapien
ccacaaggacactcgatcacactga

SEQ ID NO: 5282738 - DNA, 25 bp, Homo sapien
caccttaggttctagtaccatgcac

SEQ ID NO: 5282739 - DNA, 25 bp, Homo sapien
gaggagctggcaatcagttttttcc

SEQ ID NO: 5282740 - DNA, 25 bp, Homo sapien
agcagtcttgctctggcagtcatgc

SEQ ID NO: 5282741 - DNA, 25 bp, Homo sapien
ccaagcactttctctgaattaatta

SEQ ID NO: 5282742 - DNA, 25 bp, Homo sapien
cagtctggcccagctttgtcggcat

SEQ ID NO: 5282743 - DNA, 25 bp, Homo sapien
cagtctgaagttctggggacaggcc

SEQ ID NO: 5282744 - DNA, 25 bp, Homo sapien
cagctttgtcggcatccatagaaaa

SEQ ID NO: 5282745 - DNA, 25 bp, Homo sapien
ggcatccatagaaaacccagctcct

SEQ ID NO: 5282746 - DNA, 25 bp, Homo sapien
ttacacatcggtctcagaaacgact

SEQ ID NO: 5282747 - DNA, 25 bp, Homo sapien
cacatcggtctcagaaacgactgtc

SEQ ID NO: 5282748 - DNA, 25 bp, Homo sapien
tacacatcggtctcagaaacgactg

SEQ ID NO: 5282749 - DNA, 25 bp, Homo sapien
acatcggtctcagaaacgactgtcc

SEQ ID NO: 5282750 - DNA, 25 bp, Homo sapien
cggcccgcgctgacacctggctgcg

SEQ ID NO: 5282751 - DNA, 25 bp, Homo sapien
cctctgcatccctggggatggccga

SEQ ID NO: 5282752 - DNA, 25 bp, Homo sapien
aactcgggcggcagactcgggcacc

SEQ ID NO: 5282753 - DNA, 25 bp, Homo sapien
cgggacgccagcaccgggcgcgggg

SEQ ID NO: 5282754 - DNA, 25 bp, Homo sapien
agcgccagcgcgcacagccagagcc

SEQ ID NO: 5282755 - DNA, 25 bp, Homo sapien
gccagagccagagcgccgcgcgcct

SEQ ID NO: 5282756 - DNA, 25 bp, Homo sapien
gctgcaggctcagcgccagcgcgca

SEQ ID NO: 5282757 - DNA, 25 bp, Homo sapien
aggctcagcgccagcgcgcacagcc

SEQ ID NO: 5282758 - DNA, 25 bp, Homo sapien
ggaccggcggcgggagagcggcagg

SEQ ID NO: 5282759 - DNA, 25 bp, Homo sapien
tgcccggaccggcggcgggagagcg

SEQ ID NO: 5282760 - DNA, 25 bp, Homo sapien
ccggaccggcggcgggagagcggca

SEQ ID NO: 5282761 - DNA, 25 bp, Homo sapien
gctgcccggaccggcggcgggagag

SEQ ID NO: 5282762 - DNA, 25 bp, Homo sapien
ccgctctctactgccggattcctct

SEQ ID NO: 5282763 - DNA, 25 bp, Homo sapien
tgctcgatgctctcttgggcgcctg

SEQ ID NO: 5282764 - DNA, 25 bp, Homo sapien
cggcttcgcgggttccgctgctcga

SEQ ID NO: 5282765 - DNA, 25 bp, Homo sapien
gggtccgccggctggagtccgctct

SEQ ID NO: 5282766 - DNA, 25 bp, Homo sapien
gctgtggtccccgcaagccgcggtt

SEQ ID NO: 5282767 - DNA, 25 bp, Homo sapien
ccgaacgtcgctttcgggagctgtg

SEQ ID NO: 5282768 - DNA, 25 bp, Homo sapien
ttcccggcctttcagctcggctgct

SEQ ID NO: 5282769 - DNA, 25 bp, Homo sapien
ccgctcctccggtggccgaacgtcg

SEQ ID NO: 5282770 - DNA, 25 bp, Homo sapien
agctgtccttgggtctgttgtgaga

SEQ ID NO: 5282771 - DNA, 25 bp, Homo sapien
taatgcaccgtaggattggctctca

SEQ ID NO: 5282772 - DNA, 25 bp, Homo sapien
tgtctgaaggccacactggcgtatg

SEQ ID NO: 5282773 - DNA, 25 bp, Homo sapien
gccacactggcgtatgtctcctcta

SEQ ID NO: 5282774 - DNA, 25 bp, Homo sapien
gatggattccggacgcagggataaa

SEQ ID NO: 5282775 - DNA, 25 bp, Homo sapien
tccggacgcagggataaagttccca

SEQ ID NO: 5282776 - DNA, 25 bp, Homo sapien
aaaggtttcaatgatgaggaaggtt

SEQ ID NO: 5282777 - DNA, 25 bp, Homo sapien
aggaaatgatggattccggacgcag

SEQ ID NO: 5282778 - DNA, 25 bp, Homo sapien
gtaccactgaggatgtgtaacctgg

SEQ ID NO: 5282779 - DNA, 25 bp, Homo sapien
cgaagtgccagttttggtgcctcca

SEQ ID NO: 5282780 - DNA, 25 bp, Homo sapien
ggtgacagcaaggtaagactaacga

SEQ ID NO: 5282781 - DNA, 25 bp, Homo sapien
catagatgaccagcctaccaggtct

SEQ ID NO: 5282782 - DNA, 25 bp, Homo sapien
gggatataaactctgtttccttcca

SEQ ID NO: 5282783 - DNA, 25 bp, Homo sapien
ggatataaactctgtttccttccac

SEQ ID NO: 5282784 - DNA, 25 bp, Homo sapien
tcagctgtagcatcactacgtagag

SEQ ID NO: 5282785 - DNA, 25 bp, Homo sapien
cgtagagtcacatcggcattatgaa

SEQ ID NO: 5282786 - DNA, 25 bp, Homo sapien
catcggcattatgaatcttgtattc

SEQ ID NO: 5282787 - DNA, 25 bp, Homo sapien
gcatcactacgtagagtcacatcgg

SEQ ID NO: 5282788 - DNA, 25 bp, Homo sapien
ctgtgggcaagtggctgtgagatga

SEQ ID NO: 5282789 - DNA, 25 bp, Homo sapien
gatgaatgcctcccttgtccttctt

SEQ ID NO: 5282790 - DNA, 25 bp, Homo sapien
ctgtgagatgaatgcctcccttgtc

SEQ ID NO: 5282791 - DNA, 25 bp, Homo sapien
tgagatgaatgcctcccttgtcctt

SEQ ID NO: 5282792 - DNA, 25 bp, Homo sapien
agccattgttggggggcggtggttg

SEQ ID NO: 5282793 - DNA, 25 bp, Homo sapien
caaaggtttcaggacatccagaaca

SEQ ID NO: 5282794 - DNA, 25 bp, Homo sapien
ggtttcaggacatccagaacaatca

SEQ ID NO: 5282795 - DNA, 25 bp, Homo sapien
cccaaaggtttcaggacatccagaa

SEQ ID NO: 5282796 - DNA, 25 bp, Homo sapien
gtcccaaaggtttcaggacatccag

SEQ ID NO: 5282797 - DNA, 25 bp, Homo sapien
ttcgggccactgcaatgatcgacga

SEQ ID NO: 5282798 - DNA, 25 bp, Homo sapien
ggttcgggccactgcaatgatcgac

SEQ ID NO: 5282799 - DNA, 25 bp, Homo sapien
tcgggccactgcaatgatcgacgac

SEQ ID NO: 5282800 - DNA, 25 bp, Homo sapien
aggttcgggccactgcaatgatcga

SEQ ID NO: 5282801 - DNA, 25 bp, Homo sapien
tccaggagctggattttggcacctt

SEQ ID NO: 5282802 - DNA, 25 bp, Homo sapien
gagatccaggagctggattttggca

SEQ ID NO: 5282803 - DNA, 25 bp, Homo sapien
ggagctggattttggcacctttgta

SEQ ID NO: 5282804 - DNA, 25 bp, Homo sapien
gagctggattttggcacctttgtat

SEQ ID NO: 5282805 - DNA, 25 bp, Homo sapien
gagtagtgaattcataggctgccac

SEQ ID NO: 5282806 - DNA, 25 bp, Homo sapien
gtagtgaattcataggctgccacct

SEQ ID NO: 5282807 - DNA, 25 bp, Homo sapien
cagagtagtgaattcataggctgcc

SEQ ID NO: 5282808 - DNA, 25 bp, Homo sapien
tcagagtagtgaattcataggctgc

SEQ ID NO: 5282809 - DNA, 25 bp, Homo sapien
tcctcttctgtctccgcgatcttag

SEQ ID NO: 5282810 - DNA, 25 bp, Homo sapien
acaaagctgactctttgtcttccag

SEQ ID NO: 5282811 - DNA, 25 bp, Homo sapien
cttcctgtgacaaagctgactcttt

SEQ ID NO: 5282812 - DNA, 25 bp, Homo sapien
ctggtggctgccgttgtgtctacag

SEQ ID NO: 5282813 - DNA, 25 bp, Homo sapien
tccaggtcccttctctagttttcta

SEQ ID NO: 5282814 - DNA, 25 bp, Homo sapien
cttgctctcaatcccccaaagccat

SEQ ID NO: 5282815 - DNA, 25 bp, Homo sapien
gatttcccatcacaatgtctttgat

SEQ ID NO: 5282816 - DNA, 25 bp, Homo sapien
gagatataccaagatttcccatcac

SEQ ID NO: 5282817 - DNA, 25 bp, Homo sapien
tgtgagagatataccaagatttccc

SEQ ID NO: 5282818 - DNA, 25 bp, Homo sapien
cagcttctgggtctctaatatgctt

SEQ ID NO: 5282819 - DNA, 25 bp, Homo sapien
gaacttgagctctccggctttgtaa

SEQ ID NO: 5282820 - DNA, 25 bp, Homo sapien
tcactgggtcgttctgatcggtcca

SEQ ID NO: 5282821 - DNA, 25 bp, Homo sapien
gatcggtccagggtgttgctcacca

SEQ ID NO: 5282822 - DNA, 25 bp, Homo sapien
taaaagttctatggcacttccgcct

SEQ ID NO: 5282823 - DNA, 25 bp, Homo sapien
tcaataatccaagagggttgctcag

SEQ ID NO: 5282824 - DNA, 25 bp, Homo sapien
tccttaggttggtaagccagggtgc

SEQ ID NO: 5282825 - DNA, 25 bp, Homo sapien
caggcaattctaccaggcatgttaa

SEQ ID NO: 5282826 - DNA, 25 bp, Homo sapien
cagagaaagtgtcatcgagggcatc

SEQ ID NO: 5282827 - DNA, 25 bp, Homo sapien
gatacgggccgaaatactctgaggt

SEQ ID NO: 5282828 - DNA, 25 bp, Homo sapien
cagtgactgggacatgctgatgacc

SEQ ID NO: 5282829 - DNA, 25 bp, Homo sapien
cccagagtgactatgagaaggaacg

SEQ ID NO: 5282830 - DNA, 25 bp, Homo sapien
gaatgagtatcaggaccccaagaag

SEQ ID NO: 5282831 - DNA, 25 bp, Homo sapien
aaagtgatccaaattctagcaggtc

SEQ ID NO: 5282832 - DNA, 25 bp, Homo sapien
agagggcagggacgtaaatgtacac

SEQ ID NO: 5282833 - DNA, 25 bp, Homo sapien
tatattgccaggtcaaagagggcag

SEQ ID NO: 5282834 - DNA, 25 bp, Homo sapien
tgttgggaaatgtacataaggccgc

SEQ ID NO: 5282835 - DNA, 25 bp, Homo sapien
gattcatagttgagttgtgttttga

SEQ ID NO: 5282836 - DNA, 25 bp, Homo sapien
tacatcatatacaggcattctgtgc

SEQ ID NO: 5282837 - DNA, 25 bp, Homo sapien
cactcagggctgaatataatttata

SEQ ID NO: 5282838 - DNA, 25 bp, Homo sapien
tttgccagcaatccaatctgatagg

SEQ ID NO: 5282839 - DNA, 25 bp, Homo sapien
tgcgcaaagtagtaatgtgaggtcg

SEQ ID NO: 5282840 - DNA, 25 bp, Homo sapien
ccagtatatgcttcccgtatgtgta

SEQ ID NO: 5282841 - DNA, 25 bp, Homo sapien
tggtggtcctccaataggtcctagg

SEQ ID NO: 5282842 - DNA, 25 bp, Homo sapien
cctaggtccgggctattcttcaaat

SEQ ID NO: 5282843 - DNA, 25 bp, Homo sapien
taactatgtcacgtggaaacaggca

SEQ ID NO: 5282844 - DNA, 25 bp, Homo sapien
tctatatgaggagacgaccaaaggg

SEQ ID NO: 5282845 - DNA, 25 bp, Homo sapien
cacttagaggccagtactttgggac

SEQ ID NO: 5282846 - DNA, 25 bp, Homo sapien
gactaaagggttgcaccatgatgct

SEQ ID NO: 5282847 - DNA, 25 bp, Homo sapien
ccagttataacatacgggaggaaat

SEQ ID NO: 5282848 - DNA, 25 bp, Homo sapien
caaaggatatccatcgattttaatt

SEQ ID NO: 5282849 - DNA, 25 bp, Homo sapien
gatatccatcgattttaatttttcc

SEQ ID NO: 5282850 - DNA, 25 bp, Homo sapien
tataacatacgggaggaaatgaaag

SEQ ID NO: 5282851 - DNA, 25 bp, Homo sapien
gttatctgagtgttacatgctgtat

SEQ ID NO: 5282852 - DNA, 25 bp, Homo sapien
ttatctgagtgttacatgctgtatt

SEQ ID NO: 5282853 - DNA, 25 bp, Homo sapien
cagttatctgagtgttacatgctgt

SEQ ID NO: 5282854 - DNA, 25 bp, Homo sapien
agttatctgagtgttacatgctgta

SEQ ID NO: 5282855 - DNA, 25 bp, Homo sapien
cagtaaagctctctcagcacgggag

SEQ ID NO: 5282856 - DNA, 25 bp, Homo sapien
gcaggttcagccatatcaatcatct

SEQ ID NO: 5282857 - DNA, 25 bp, Homo sapien
catcttttgaaccacgtaattggca

SEQ ID NO: 5282858 - DNA, 25 bp, Homo sapien
ggcagcaaacctcgtcaatcagtaa

SEQ ID NO: 5282859 - DNA, 25 bp, Homo sapien
gcatttccagtgtcgggagtaatta

SEQ ID NO: 5282860 - DNA, 25 bp, Homo sapien
tacagtttaatgctacatgctacac

SEQ ID NO: 5282861 - DNA, 25 bp, Homo sapien
catgctacacgtatttctgtgataa

SEQ ID NO: 5282862 - DNA, 25 bp, Homo sapien
aaggaaaccagatcattaaagctgt

SEQ ID NO: 5282863 - DNA, 25 bp, Homo sapien
cctgatttcggaaacaattttgctc

SEQ ID NO: 5282864 - DNA, 25 bp, Homo sapien
gaccgtgttccagtacatgctgaat

SEQ ID NO: 5282865 - DNA, 25 bp, Homo sapien
tgtgttgactcagggctaaaacctt

SEQ ID NO: 5282866 - DNA, 25 bp, Homo sapien
tgctcttgtcttcaggtcgaccgtg

SEQ ID NO: 5282867 - DNA, 25 bp, Homo sapien
cactcttgtctatagtgtgtttagt

SEQ ID NO: 5282868 - DNA, 25 bp, Homo sapien
tccctaagtcattccttaagaatga

SEQ ID NO: 5282869 - DNA, 25 bp, Homo sapien
tctaaaaatccagtaggatagttag

SEQ ID NO: 5282870 - DNA, 25 bp, Homo sapien
gaatacaacagccttttgtctcact

SEQ ID NO: 5282871 - DNA, 25 bp, Homo sapien
taagataggtaaggtctgttctgca

SEQ ID NO: 5282872 - DNA, 25 bp, Homo sapien
caactgctctgtatgttggtggagt

SEQ ID NO: 5282873 - DNA, 25 bp, Homo sapien
tctaggatgcgctgaattactctgc

SEQ ID NO: 5282874 - DNA, 25 bp, Homo sapien
tgttctgcagtgcaatgctctagga

SEQ ID NO: 5282875 - DNA, 25 bp, Homo sapien
tgtggctgaacacattcgatacatt

SEQ ID NO: 5282876 - DNA, 25 bp, Homo sapien
tgaccatccagctcctttaccattt

SEQ ID NO: 5282877 - DNA, 25 bp, Homo sapien
cacattcgatacatttttgtacaac

SEQ ID NO: 5282878 - DNA, 25 bp, Homo sapien
gcacatgaccatccagctcctttac

SEQ ID NO: 5282879 - DNA, 25 bp, Homo sapien
tatcgggcggtaactaacatgacta

SEQ ID NO: 5282880 - DNA, 25 bp, Homo sapien
aatcatccgctaatatttatcgggc

SEQ ID NO: 5282881 - DNA, 25 bp, Homo sapien
tgttgaaacaacgtagtgatgctga

SEQ ID NO: 5282882 - DNA, 25 bp, Homo sapien
aataaagtgcttatagccagatgcg

SEQ ID NO: 5282883 - DNA, 25 bp, Homo sapien
gaaatagattctaatgctttctgaa

SEQ ID NO: 5282884 - DNA, 25 bp, Homo sapien
gattctaatgctttctgaataacgc

SEQ ID NO: 5282885 - DNA, 25 bp, Homo sapien
tgctttctgaataacgcggcagcca

SEQ ID NO: 5282886 - DNA, 25 bp, Homo sapien
taatgctttctgaataacgcggcag

SEQ ID NO: 5282887 - DNA, 25 bp, Homo sapien
ggctaatttttgatccagactccca

SEQ ID NO: 5282888 - DNA, 25 bp, Homo sapien
agggtagaacatgaccacgaatacg

SEQ ID NO: 5282889 - DNA, 25 bp, Homo sapien
cacgaatacgagtagccagggctaa

SEQ ID NO: 5282890 - DNA, 25 bp, Homo sapien
cagggctaatttttgatccagactc

SEQ ID NO: 5282891 - DNA, 25 bp, Homo sapien
aactacattctgatatgattgagga

SEQ ID NO: 5282892 - DNA, 25 bp, Homo sapien
aatatataactttcttagccatacg

SEQ ID NO: 5282893 - DNA, 25 bp, Homo sapien
taaagtcattaagctacaacacaga

SEQ ID NO: 5282894 - DNA, 25 bp, Homo sapien
catacgttgaccaccaaaactcttc

SEQ ID NO: 5282895 - DNA, 25 bp, Homo sapien
tatatactggtgttcaggttcctgc

SEQ ID NO: 5282896 - DNA, 25 bp, Homo sapien
gctttcaattgtacccctaggagta

SEQ ID NO: 5282897 - DNA, 25 bp, Homo sapien
caaatcttttccgtggcctcaaaca

SEQ ID NO: 5282898 - DNA, 25 bp, Homo sapien
gacatttcatactggtagatcacta

SEQ ID NO: 5282899 - DNA, 25 bp, Homo sapien
ctcaaaaaacttctgtataacatag

SEQ ID NO: 5282900 - DNA, 25 bp, Homo sapien
gtcattaattgataggctgcttgca

SEQ ID NO: 5282901 - DNA, 25 bp, Homo sapien
tcattaattgataggctgcttgcag

SEQ ID NO: 5282902 - DNA, 25 bp, Homo sapien
gtataacatagttgccaaaaacatc

SEQ ID NO: 5282903 - DNA, 25 bp, Homo sapien
gctggagtagctctctctagttttt

SEQ ID NO: 5282904 - DNA, 25 bp, Homo sapien
tcagacctattataccgaagccggg

SEQ ID NO: 5282905 - DNA, 25 bp, Homo sapien
gctgcagagatatatcgaccactac

SEQ ID NO: 5282906 - DNA, 25 bp, Homo sapien
tccaataatctactgcggccagaag

SEQ ID NO: 5282907 - DNA, 25 bp, Homo sapien
gctgctggagctaaatagactggaa

SEQ ID NO: 5282908 - DNA, 25 bp, Homo sapien
aatctctagtttttgcattcggtca

SEQ ID NO: 5282909 - DNA, 25 bp, Homo sapien
ccactgatggtatgaactttaaaaa

SEQ ID NO: 5282910 - DNA, 25 bp, Homo sapien
tatttgacataaggttgggcgtcgt

SEQ ID NO: 5282911 - DNA, 25 bp, Homo sapien
aaagcagctatggtcagcaagtatt

SEQ ID NO: 5282912 - DNA, 25 bp, Homo sapien
ccattttacttgtgagacaacagct

SEQ ID NO: 5282913 - DNA, 25 bp, Homo sapien
cctcttaatagcctatgaggcagac

SEQ ID NO: 5282914 - DNA, 25 bp, Homo sapien
gaggcagacatatctccattttact

SEQ ID NO: 5282915 - DNA, 25 bp, Homo sapien
cagatacatttaatacagctcatgc

SEQ ID NO: 5282916 - DNA, 25 bp, Homo sapien
tacacacatgtcaaacgtactacct

SEQ ID NO: 5282917 - DNA, 25 bp, Homo sapien
gggcagactatcaccatacaaggta

SEQ ID NO: 5282918 - DNA, 25 bp, Homo sapien
tggaggaaagactaagactacaatg

SEQ ID NO: 5282919 - DNA, 25 bp, Homo sapien
tgcaaattacaagccaagtgttcta

SEQ ID NO: 5282920 - DNA, 25 bp, Homo sapien
tgcccaagtcactgaaacacctgtt

SEQ ID NO: 5282921 - DNA, 25 bp, Homo sapien
tttttctcctagtcaagcagaggct

SEQ ID NO: 5282922 - DNA, 25 bp, Homo sapien
taataagttaacaaacgagcaagcc

SEQ ID NO: 5282923 - DNA, 25 bp, Homo sapien
gcagtacaacatctggaagaagcca

SEQ ID NO: 5282924 - DNA, 25 bp, Homo sapien
gagtcagaactggatgctagcctta

SEQ ID NO: 5282925 - DNA, 25 bp, Homo sapien
aactcagaaaaatggcaggtggcct

SEQ ID NO: 5282926 - DNA, 25 bp, Homo sapien
gaagaatagtatcacgagtcagaac

SEQ ID NO: 5282927 - DNA, 25 bp, Homo sapien
cataagagaagcacaagactaagtc

SEQ ID NO: 5282928 - DNA, 25 bp, Homo sapien
tcaggctggtcatctcacaatggag

SEQ ID NO: 5282929 - DNA, 25 bp, Homo sapien
cgtgtctcccgatacagtgcaacaa

SEQ ID NO: 5282930 - DNA, 25 bp, Homo sapien
gaagcaatcagcaaggtcaagagtg

SEQ ID NO: 5282931 - DNA, 25 bp, Homo sapien
gaccaagcctctagatcgaattcca

SEQ ID NO: 5282932 - DNA, 25 bp, Homo sapien
gcagctcctgcgactaagaatacat

SEQ ID NO: 5282933 - DNA, 25 bp, Homo sapien
gatagggattcatacacagcccctg

SEQ ID NO: 5282934 - DNA, 25 bp, Homo sapien
tactgcaaagtggatcttagggctc

SEQ ID NO: 5282935 - DNA, 25 bp, Homo sapien
ggatgcagatctcaagccttacagg

SEQ ID NO: 5282936 - DNA, 25 bp, Homo sapien
tgtggcactactacttgcagaactg

SEQ ID NO: 5282937 - DNA, 25 bp, Homo sapien
gccctatgggtgctaggctgctact

SEQ ID NO: 5282938 - DNA, 25 bp, Homo sapien
gaggcatgcctattggacttggaga

SEQ ID NO: 5282939 - DNA, 25 bp, Homo sapien
tagagactctctccttgtggcacta

SEQ ID NO: 5282940 - DNA, 25 bp, Homo sapien
tgaaagaattgagtaggggcctaga

SEQ ID NO: 5282941 - DNA, 25 bp, Homo sapien
aaatctgaaccagacgatcagtgac

SEQ ID NO: 5282942 - DNA, 25 bp, Homo sapien
cagacgatcagtgacatactacgtg

SEQ ID NO: 5282943 - DNA, 25 bp, Homo sapien
cagtgacatactacgtgagaaagga

SEQ ID NO: 5282944 - DNA, 25 bp, Homo sapien
caggctgcctatagtgagttaaaca

SEQ ID NO: 5282945 - DNA, 25 bp, Homo sapien
gcagagtacactcatcgtaaaaaca

SEQ ID NO: 5282946 - DNA, 25 bp, Homo sapien
acagtaatcaattcctagagccagg

SEQ ID NO: 5282947 - DNA, 25 bp, Homo sapien
tcatatacctcttccacttagcaga

SEQ ID NO: 5282948 - DNA, 25 bp, Homo sapien
tgagggctgagcctatagcagcacc

SEQ ID NO: 5282949 - DNA, 25 bp, Homo sapien
gaccatttgtgctgcctgtaaggct

SEQ ID NO: 5282950 - DNA, 25 bp, Homo sapien
tgccaattggccgaaacagaccatt

SEQ ID NO: 5282951 - DNA, 25 bp, Homo sapien
caaagccaagagatgtacttccagg

SEQ ID NO: 5282952 - DNA, 25 bp, Homo sapien
ctgtaaaataaatttcagatacttc

SEQ ID NO: 5282953 - DNA, 25 bp, Homo sapien
cagatacttctttaaaccacccaga

SEQ ID NO: 5282954 - DNA, 25 bp, Homo sapien
ttcagatacttctttaaaccaccca

SEQ ID NO: 5282955 - DNA, 25 bp, Homo sapien
tgtaaaataaatttcagatacttct

SEQ ID NO: 5282956 - DNA, 25 bp, Homo sapien
ttgctccagggccaaccactaaggc

SEQ ID NO: 5282957 - DNA, 25 bp, Homo sapien
taaccgaactggagctccaaggcca

SEQ ID NO: 5282958 - DNA, 25 bp, Homo sapien
tctgatcataataggcagttggagc

SEQ ID NO: 5282959 - DNA, 25 bp, Homo sapien
aattaaaacaggtgttggagccatt

SEQ ID NO: 5282960 - DNA, 25 bp, Homo sapien
gccagtagcaagaccctgaccaaaa

SEQ ID NO: 5282961 - DNA, 25 bp, Homo sapien
ctggcatgccagtagcaagaccctg

SEQ ID NO: 5282962 - DNA, 25 bp, Homo sapien
tagcaagaccctgaccaaaagccaa

SEQ ID NO: 5282963 - DNA, 25 bp, Homo sapien
caaaagccaatgttggatttgctgc

SEQ ID NO: 5282964 - DNA, 25 bp, Homo sapien
ggagtaagaggacgctgacctgctc

SEQ ID NO: 5282965 - DNA, 25 bp, Homo sapien
attgggagtaagaggacgctgacct

SEQ ID NO: 5282966 - DNA, 25 bp, Homo sapien
ctgattgggagtaagaggacgctga

SEQ ID NO: 5282967 - DNA, 25 bp, Homo sapien
gtaagaggacgctgacctgctccag

SEQ ID NO: 5282968 - DNA, 25 bp, Homo sapien
gtatttattacaaacagcctttgga

SEQ ID NO: 5282969 - DNA, 25 bp, Homo sapien
agtaaatttatcttggacaactgtg

SEQ ID NO: 5282970 - DNA, 25 bp, Homo sapien
tatctgtgctctttaacaaagtagt

SEQ ID NO: 5282971 - DNA, 25 bp, Homo sapien
taacagctagaacaatctataaagc

SEQ ID NO: 5282972 - DNA, 25 bp, Homo sapien
aagaaagggcattgtttgtcgccca

SEQ ID NO: 5282973 - DNA, 25 bp, Homo sapien
ctcacatgctgccatatatgggatc

SEQ ID NO: 5282974 - DNA, 25 bp, Homo sapien
ttcatgtcttttattgcctcacatg

SEQ ID NO: 5282975 - DNA, 25 bp, Homo sapien
catttggtgaccataccgtttgcaa

SEQ ID NO: 5282976 - DNA, 25 bp, Homo sapien
aattatgaagcaatccaatgaaaag

SEQ ID NO: 5282977 - DNA, 25 bp, Homo sapien
ttatgaagcaatccaatgaaaagta

SEQ ID NO: 5282978 - DNA, 25 bp, Homo sapien
aagaaattatgaagcaatccaatga

SEQ ID NO: 5282979 - DNA, 25 bp, Homo sapien
gaaattatgaagcaatccaatgaaa

SEQ ID NO: 5282980 - DNA, 25 bp, Homo sapien
catgttcattgcctggtacatctgg

SEQ ID NO: 5282981 - DNA, 25 bp, Homo sapien
acatctggtatgcagtcttctggct

SEQ ID NO: 5282982 - DNA, 25 bp, Homo sapien
tggtgtgtgagccagaaattccctg

SEQ ID NO: 5282983 - DNA, 25 bp, Homo sapien
aagtcctttagttggtgtgtgagcc

SEQ ID NO: 5282984 - DNA, 25 bp, Homo sapien
gactccaggtgcatgagctgcatca

SEQ ID NO: 5282985 - DNA, 25 bp, Homo sapien
tttttcataaaaggactccaggtgc

SEQ ID NO: 5282986 - DNA, 25 bp, Homo sapien
cttgataagcccaggaggaggtttt

SEQ ID NO: 5282987 - DNA, 25 bp, Homo sapien
ccaggtgcatgagctgcatcatgct

SEQ ID NO: 5282988 - DNA, 25 bp, Homo sapien
agatttgtttgggagtaggaggaat

SEQ ID NO: 5282989 - DNA, 25 bp, Homo sapien
gatttgtttgggagtaggaggaatg

SEQ ID NO: 5282990 - DNA, 25 bp, Homo sapien
atttgttacgagactgatgcagacc

SEQ ID NO: 5282991 - DNA, 25 bp, Homo sapien
aatatattacccgagagcggtggct

SEQ ID NO: 5282992 - DNA, 25 bp, Homo sapien
tctggtcaaggtttactattccgca

SEQ ID NO: 5282993 - DNA, 25 bp, Homo sapien
tccggcactttgaaaggtcgaggtg

SEQ ID NO: 5282994 - DNA, 25 bp, Homo sapien
gaaataagttggctggatacacccc

SEQ ID NO: 5282995 - DNA, 25 bp, Homo sapien
tactgaggtggaaccactgctggac

SEQ ID NO: 5282996 - DNA, 25 bp, Homo sapien
ttgtgatgctgcttgctgactggct

SEQ ID NO: 5282997 - DNA, 25 bp, Homo sapien
catggaacgccgtaatactgaggtg

SEQ ID NO: 5282998 - DNA, 25 bp, Homo sapien
tcaaataagactgtgcctgatcagc

SEQ ID NO: 5282999 - DNA, 25 bp, Homo sapien
tataaacaatgcctcagactaactc

SEQ ID NO: 5283000 - DNA, 25 bp, Homo sapien
tgtctttgtagccacctcaacctaa

SEQ ID NO: 5283001 - DNA, 25 bp, Homo sapien
caagaaccccaactaagatcagcaa

SEQ ID NO: 5283002 - DNA, 25 bp, Homo sapien
taatgtatggatttggcacaaatgc

SEQ ID NO: 5283003 - DNA, 25 bp, Homo sapien
gccaatcctgctgcagtatacggat

SEQ ID NO: 5283004 - DNA, 25 bp, Homo sapien
gcagtatacggatcggtccctggag

SEQ ID NO: 5283005 - DNA, 25 bp, Homo sapien
gcagcactaataatgtatggatttg

SEQ ID NO: 5283006 - DNA, 25 bp, Homo sapien
ttctgagtaacatacgtccatatga

SEQ ID NO: 5283007 - DNA, 25 bp, Homo sapien
cgtccatatgaatttagtaaaggct

SEQ ID NO: 5283008 - DNA, 25 bp, Homo sapien
tctgagtaacatacgtccatatgaa

SEQ ID NO: 5283009 - DNA, 25 bp, Homo sapien
aacatacgtccatatgaatttagta

SEQ ID NO: 5283010 - DNA, 25 bp, Homo sapien
taccatagggaatttcagtgttctg

SEQ ID NO: 5283011 - DNA, 25 bp, Homo sapien
tctgggcgaccatctacgttttata

SEQ ID NO: 5283012 - DNA, 25 bp, Homo sapien
tcatttagcggtaggtgatagccaa

SEQ ID NO: 5283013 - DNA, 25 bp, Homo sapien
tagccaattatgcagctcacctaga

SEQ ID NO: 5283014 - DNA, 25 bp, Homo sapien
cctgaactgcataggcccctttttg

SEQ ID NO: 5283015 - DNA, 25 bp, Homo sapien
tccttgtactctaggaactctccaa

SEQ ID NO: 5283016 - DNA, 25 bp, Homo sapien
catactatagggtcaaatctccaaa

SEQ ID NO: 5283017 - DNA, 25 bp, Homo sapien
gggagctcttacatggttactacaa

SEQ ID NO: 5283018 - DNA, 25 bp, Homo sapien
tgagctgcagttaactgttgaactg

SEQ ID NO: 5283019 - DNA, 25 bp, Homo sapien
ctgctgttgagctgcagttaactgt

SEQ ID NO: 5283020 - DNA, 25 bp, Homo sapien
gctgctgctaatgcatattgctgct

SEQ ID NO: 5283021 - DNA, 25 bp, Homo sapien
agctgctgctaatgcatattgctgc

SEQ ID NO: 5283022 - DNA, 25 bp, Homo sapien
gtatacagttaagaggaccttctta

SEQ ID NO: 5283023 - DNA, 25 bp, Homo sapien
cttcaggctaaaccagtatacagtt

SEQ ID NO: 5283024 - DNA, 25 bp, Homo sapien
caggctaaaccagtatacagttaag

SEQ ID NO: 5283025 - DNA, 25 bp, Homo sapien
tatacagttaagaggaccttcttaa

SEQ ID NO: 5283026 - DNA, 25 bp, Homo sapien
cagtagctcctgaagagtccattgg

SEQ ID NO: 5283027 - DNA, 25 bp, Homo sapien
aaaaaggcctacagtagctcctgaa

SEQ ID NO: 5283028 - DNA, 25 bp, Homo sapien
tagctcctgaagagtccattggtac

SEQ ID NO: 5283029 - DNA, 25 bp, Homo sapien
gtcaaaaaggcctacagtagctcct

SEQ ID NO: 5283030 - DNA, 25 bp, Homo sapien
taaggattccagaccaacttgttcc

SEQ ID NO: 5283031 - DNA, 25 bp, Homo sapien
tacttcagttggagaggcttgacga

SEQ ID NO: 5283032 - DNA, 25 bp, Homo sapien
ggcttgacgacttccaggagtacga

SEQ ID NO: 5283033 - DNA, 25 bp, Homo sapien
ggcccaagcgctcaactacttcagt

SEQ ID NO: 5283034 - DNA, 25 bp, Homo sapien
gcaaacctctgccatttattttaga

SEQ ID NO: 5283035 - DNA, 25 bp, Homo sapien
ctttgcaatcggcatccattccatt

SEQ ID NO: 5283036 - DNA, 25 bp, Homo sapien
taaaatctttgcaatcggcatccat

SEQ ID NO: 5283037 - DNA, 25 bp, Homo sapien
cttgcctttttgatctcctttctca

SEQ ID NO: 5283038 - DNA, 25 bp, Homo sapien
taacgtaaccaaataactctcaagc

SEQ ID NO: 5283039 - DNA, 25 bp, Homo sapien
aacgtaaccaaataactctcaagca

SEQ ID NO: 5283040 - DNA, 25 bp, Homo sapien
acgtaaccaaataactctcaagcaa

SEQ ID NO: 5283041 - DNA, 25 bp, Homo sapien
tattctaccatgctcacaccaaggc

SEQ ID NO: 5283042 - DNA, 25 bp, Homo sapien
tctctgtaccataataggctgggac

SEQ ID NO: 5283043 - DNA, 25 bp, Homo sapien
gagaatccaatttatcagcaggaga

SEQ ID NO: 5283044 - DNA, 25 bp, Homo sapien
tccactttctgatcgcggagacagt

SEQ ID NO: 5283045 - DNA, 25 bp, Homo sapien
tactataatctttatataaagctct

SEQ ID NO: 5283046 - DNA, 25 bp, Homo sapien
taatctttatataaagctcttcata

SEQ ID NO: 5283047 - DNA, 25 bp, Homo sapien
agctcttcataggacacaaacaaat

SEQ ID NO: 5283048 - DNA, 25 bp, Homo sapien
agtaagaaaaatcagcacattgttt

SEQ ID NO: 5283049 - DNA, 25 bp, Homo sapien
cacagttacgcactggatagatcag

SEQ ID NO: 5283050 - DNA, 25 bp, Homo sapien
ataaactttcgatttggcagaaaca

SEQ ID NO: 5283051 - DNA, 25 bp, Homo sapien
tataacgctataatcacaaatgagt

SEQ ID NO: 5283052 - DNA, 25 bp, Homo sapien
gatcagaactcacgactataacgct

SEQ ID NO: 5283053 - DNA, 25 bp, Homo sapien
tccatgatactatgagatctgaaag

SEQ ID NO: 5283054 - DNA, 25 bp, Homo sapien
cacagtttgtcctcaagagtacagg

SEQ ID NO: 5283055 - DNA, 25 bp, Homo sapien
gaaagatgggcattcaagtctaaca

SEQ ID NO: 5283056 - DNA, 25 bp, Homo sapien
gcaaaagtacgaaagatgggcatca

SEQ ID NO: 5283057 - DNA, 25 bp, Homo sapien
gaagctccccatgcagtctctctcc

SEQ ID NO: 5283058 - DNA, 25 bp, Homo sapien
agaagctccccatgcagtctctctc

SEQ ID NO: 5283059 - DNA, 25 bp, Homo sapien
cccaagaaatatgcctttttgtcca

SEQ ID NO: 5283060 - DNA, 25 bp, Homo sapien
tccccaagaaatatgcctttttgtc

SEQ ID NO: 5283061 - DNA, 25 bp, Homo sapien
catccccaagaaatatgcctttttg

SEQ ID NO: 5283062 - DNA, 25 bp, Homo sapien
ccaagaaatatgcctttttgtccat

SEQ ID NO: 5283063 - DNA, 25 bp, Homo sapien
tgaatcatcaggttcccaaaacttt

SEQ ID NO: 5283064 - DNA, 25 bp, Homo sapien
gttgaatcatcaggttcccaaaact

SEQ ID NO: 5283065 - DNA, 25 bp, Homo sapien
tttgttgaatcatcaggttcccaaa

SEQ ID NO: 5283066 - DNA, 25 bp, Homo sapien
tgttgaatcatcaggttcccaaaac

SEQ ID NO: 5283067 - DNA, 25 bp, Homo sapien
gaaaggaggagaagactggtgagag

SEQ ID NO: 5283068 - DNA, 25 bp, Homo sapien
gaggagaagactggtgagagagaga

SEQ ID NO: 5283069 - DNA, 25 bp, Homo sapien
gaaatcccagaaggttccttgctgc

SEQ ID NO: 5283070 - DNA, 25 bp, Homo sapien
aggaaatcccagaaggttccttgct

SEQ ID NO: 5283071 - DNA, 25 bp, Homo sapien
tggaaaacgctgttctgaagaaggg

SEQ ID NO: 5283072 - DNA, 25 bp, Homo sapien
agaaggggagggttagctagctgca

SEQ ID NO: 5283073 - DNA, 25 bp, Homo sapien
ctctttggaaaacgctgttctgaag

SEQ ID NO: 5283074 - DNA, 25 bp, Homo sapien
atactctttggaaaacgctgttctg

SEQ ID NO: 5283075 - DNA, 25 bp, Homo sapien
tccccgagattctaatgcaagagct

SEQ ID NO: 5283076 - DNA, 25 bp, Homo sapien
cgagattctaatgcaagagcttgaa

SEQ ID NO: 5283077 - DNA, 25 bp, Homo sapien
ttctaatgcaagagcttgaaaatca

SEQ ID NO: 5283078 - DNA, 25 bp, Homo sapien
tcccattccccgagattctaatgca

SEQ ID NO: 5283079 - DNA, 25 bp, Homo sapien
ccctcagtgctactcttgtgatagt

SEQ ID NO: 5283080 - DNA, 25 bp, Homo sapien
tagcgagaccctgagatatggtttg

SEQ ID NO: 5283081 - DNA, 25 bp, Homo sapien
tcatgtcaaaacgtaaaccccagtg

SEQ ID NO: 5283082 - DNA, 25 bp, Homo sapien
catcccctcagtgctactcttgtga

SEQ ID NO: 5283083 - DNA, 25 bp, Homo sapien
gtcttagctatgtaaacgttcaaca

SEQ ID NO: 5283084 - DNA, 25 bp, Homo sapien
gggtcaaagggattagtgactgtct

SEQ ID NO: 5283085 - DNA, 25 bp, Homo sapien
gcactctactgccacatggtactaa

SEQ ID NO: 5283086 - DNA, 25 bp, Homo sapien
taacaccatagtagaaattaacctc

SEQ ID NO: 5283087 - DNA, 25 bp, Homo sapien
tcacacaatgttgaacaaggacggt

SEQ ID NO: 5283088 - DNA, 25 bp, Homo sapien
gaaacagtaccaccacatatgaaga

SEQ ID NO: 5283089 - DNA, 25 bp, Homo sapien
agcacagtgacgtaatcagggttca

SEQ ID NO: 5283090 - DNA, 25 bp, Homo sapien
gactgtggtataggcctaaatgtca

SEQ ID NO: 5283091 - DNA, 25 bp, Homo sapien
caatctctacctcttgggatcaaga

SEQ ID NO: 5283092 - DNA, 25 bp, Homo sapien
tacacagtaattctctaaggctttc

SEQ ID NO: 5283093 - DNA, 25 bp, Homo sapien
taggcgcccagcctcatagtctttc

SEQ ID NO: 5283094 - DNA, 25 bp, Homo sapien
gctttcaaggacaccatgattgtct

SEQ ID NO: 5283095 - DNA, 25 bp, Homo sapien
tagctccaaataggtgatgactacc

SEQ ID NO: 5283096 - DNA, 25 bp, Homo sapien
tatgcaatacgcaacctgaaaatgg

SEQ ID NO: 5283097 - DNA, 25 bp, Homo sapien
aatggttgggatccagtagctaaac

SEQ ID NO: 5283098 - DNA, 25 bp, Homo sapien
ttccctgggcagtactgactaagtg

SEQ ID NO: 5283099 - DNA, 25 bp, Homo sapien
tagaagccgctaatcttgtctttgg

SEQ ID NO: 5283100 - DNA, 25 bp, Homo sapien
aacttttacacgtgtttgggcatga

SEQ ID NO: 5283101 - DNA, 25 bp, Homo sapien
tgaagagtcacctgttaaacacgaa

SEQ ID NO: 5283102 - DNA, 25 bp, Homo sapien
caatactccaggtcacatggtgaag

SEQ ID NO: 5283103 - DNA, 25 bp, Homo sapien
acacactcgggcctttgaaaatgcc

SEQ ID NO: 5283104 - DNA, 25 bp, Homo sapien
taaacaaggcgaatccaagtcactg

SEQ ID NO: 5283105 - DNA, 25 bp, Homo sapien
ctgtccacggcaagcttttcccgga

SEQ ID NO: 5283106 - DNA, 25 bp, Homo sapien
cttgcaatccgcatgcttctctggg

SEQ ID NO: 5283107 - DNA, 25 bp, Homo sapien
cagagggaaggaagcgggaaagcgg

SEQ ID NO: 5283108 - DNA, 25 bp, Homo sapien
aggcggcggccccgcagagggaagg

SEQ ID NO: 5283109 - DNA, 25 bp, Homo sapien
cggcggccccgcagagggaaggaag

SEQ ID NO: 5283110 - DNA, 25 bp, Homo sapien
cgaggcggcggccccgcagagggaa

SEQ ID NO: 5283111 - DNA, 25 bp, Homo sapien
acaccgaccgttgggcacacggcgg

SEQ ID NO: 5283112 - DNA, 25 bp, Homo sapien
ctcagccggggacaccgaccgttgg

SEQ ID NO: 5283113 - DNA, 25 bp, Homo sapien
acacggcggcgtcgctcttggcggt

SEQ ID NO: 5283114 - DNA, 25 bp, Homo sapien
tccgccttcggtggcggcaatgtct

SEQ ID NO: 5283115 - DNA, 25 bp, Homo sapien
aagtaccgagggtgagacacagaga

SEQ ID NO: 5283116 - DNA, 25 bp, Homo sapien
acagagactcacaacaacatggctg

SEQ ID NO: 5283117 - DNA, 25 bp, Homo sapien
caccgaagtaccgagggtgagacac

SEQ ID NO: 5283118 - DNA, 25 bp, Homo sapien
acacagagactcacaacaacatggc

SEQ ID NO: 5283119 - DNA, 25 bp, Homo sapien
gcgtactgttgccaaacgctgtgtt

SEQ ID NO: 5283120 - DNA, 25 bp, Homo sapien
tgtgttcgactgtcttcccgcgtgg

SEQ ID NO: 5283121 - DNA, 25 bp, Homo sapien
tgccaaacgctgtgttcgactgtct

SEQ ID NO: 5283122 - DNA, 25 bp, Homo sapien
tggggcctcgccttctgaatcttct

SEQ ID NO: 5283123 - DNA, 25 bp, Homo sapien
cctcggcttcctacccggttgctca

SEQ ID NO: 5283124 - DNA, 25 bp, Homo sapien
gcccaccgtggggtactcctggcat

SEQ ID NO: 5283125 - DNA, 25 bp, Homo sapien
tcctacccggttgctcactgttttc

SEQ ID NO: 5283126 - DNA, 25 bp, Homo sapien
ccaactgggtgtgcgggtgtctgcg

SEQ ID NO: 5283127 - DNA, 25 bp, Homo sapien
tcgcagatttttacttcccaagtaa

SEQ ID NO: 5283128 - DNA, 25 bp, Homo sapien
gcctcgcagatttttacttcccaag

SEQ ID NO: 5283129 - DNA, 25 bp, Homo sapien
caagcctcgcagatttttacttccc

SEQ ID NO: 5283130 - DNA, 25 bp, Homo sapien
agcctcgcagatttttacttcccaa

SEQ ID NO: 5283131 - DNA, 25 bp, Homo sapien
cccttgggcagactggttccatcct

SEQ ID NO: 5283132 - DNA, 25 bp, Homo sapien
atcccttgggcagactggttccatc

SEQ ID NO: 5283133 - DNA, 25 bp, Homo sapien
tcccttgggcagactggttccatcc

SEQ ID NO: 5283134 - DNA, 25 bp, Homo sapien
gatcccttgggcagactggttccat

SEQ ID NO: 5283135 - DNA, 25 bp, Homo sapien
gtacaatgcactcatctgcatttgc

SEQ ID NO: 5283136 - DNA, 25 bp, Homo sapien
tgtacaatgcactcatctgcatttg

SEQ ID NO: 5283137 - DNA, 25 bp, Homo sapien
ctgtacaatgcactcatctgcattt

SEQ ID NO: 5283138 - DNA, 25 bp, Homo sapien
tttggctgctggctcatactccctc

SEQ ID NO: 5283139 - DNA, 25 bp, Homo sapien
cctctggtgccgtaatcattaactc

SEQ ID NO: 5283140 - DNA, 25 bp, Homo sapien
tacactatgccctggatttttggct

SEQ ID NO: 5283141 - DNA, 25 bp, Homo sapien
ggctcatactccctctggtgccgta

SEQ ID NO: 5283142 - DNA, 25 bp, Homo sapien
tgctcaacaagaggcagtgtctgtt

SEQ ID NO: 5283143 - DNA, 25 bp, Homo sapien
ttttgctcaacaagaggcagtgtct

SEQ ID NO: 5283144 - DNA, 25 bp, Homo sapien
tgttttgctcaacaagaggcagtgt

SEQ ID NO: 5283145 - DNA, 25 bp, Homo sapien
tttgctcaacaagaggcagtgtctg

SEQ ID NO: 5283146 - DNA, 25 bp, Homo sapien
ctgatggtggctaactgctggagct

SEQ ID NO: 5283147 - DNA, 25 bp, Homo sapien
tgatggtggctaactgctggagctt

SEQ ID NO: 5283148 - DNA, 25 bp, Homo sapien
tggtggctaactgctggagcttgaa

SEQ ID NO: 5283149 - DNA, 25 bp, Homo sapien
ctgctgatggtggctaactgctgga

SEQ ID NO: 5283150 - DNA, 25 bp, Homo sapien
ggctaccaaagtattctcattgctg

SEQ ID NO: 5283151 - DNA, 25 bp, Homo sapien
taccaaagtattctcattgctggtc

SEQ ID NO: 5283152 - DNA, 25 bp, Homo sapien
gctaccaaagtattctcattgctgg

SEQ ID NO: 5283153 - DNA, 25 bp, Homo sapien
ctaccaaagtattctcattgctggt

SEQ ID NO: 5283154 - DNA, 25 bp, Homo sapien
caggcccgactctgcttagtttcca

SEQ ID NO: 5283155 - DNA, 25 bp, Homo sapien
cgttcagggtggtatggccgtaggc

SEQ ID NO: 5283156 - DNA, 25 bp, Homo sapien
tttccatccaagtgctaaccaggcc

SEQ ID NO: 5283157 - DNA, 25 bp, Homo sapien
agacgagatcgggcacgttcagggt

SEQ ID NO: 5283158 - DNA, 25 bp, Homo sapien
ccagcgattggaaaagagggccact

SEQ ID NO: 5283159 - DNA, 25 bp, Homo sapien
tacctcactactgctgaaagtggcc

SEQ ID NO: 5283160 - DNA, 25 bp, Homo sapien
tgtgcccacataggtaattcccagg

SEQ ID NO: 5283161 - DNA, 25 bp, Homo sapien
gaagctactacaggaacattcagag

SEQ ID NO: 5283162 - DNA, 25 bp, Homo sapien
cagttgattctaacagttgactcct

SEQ ID NO: 5283163 - DNA, 25 bp, Homo sapien
aacatttattgtagggccagcatag

SEQ ID NO: 5283164 - DNA, 25 bp, Homo sapien
tgtgcatctcctctaccagtgagtt

SEQ ID NO: 5283165 - DNA, 25 bp, Homo sapien
cagcatagtggtgattaattccctt

SEQ ID NO: 5283166 - DNA, 25 bp, Homo sapien
cttcttgggtctggatgttcatatt

SEQ ID NO: 5283167 - DNA, 25 bp, Homo sapien
catatttgttcccagacttgggaag

SEQ ID NO: 5283168 - DNA, 25 bp, Homo sapien
tgcttcagtcttgtatatgatgaca

SEQ ID NO: 5283169 - DNA, 25 bp, Homo sapien
tctcctggactacaaggttgtctgc

SEQ ID NO: 5283170 - DNA, 25 bp, Homo sapien
tgtgggcatgtcctgggccctccca

SEQ ID NO: 5283171 - DNA, 25 bp, Homo sapien
ggccctcccacagctctaggaattg

SEQ ID NO: 5283172 - DNA, 25 bp, Homo sapien
gggccctcccacagctctaggaatt

SEQ ID NO: 5283173 - DNA, 25 bp, Homo sapien
gtggctgggtgtgggcatgtcctgg

SEQ ID NO: 5283174 - DNA, 25 bp, Homo sapien
gtgctttggaagatgaatctggctc

SEQ ID NO: 5283175 - DNA, 25 bp, Homo sapien
gagaggacagcggtgctttggaaga

SEQ ID NO: 5283176 - DNA, 25 bp, Homo sapien
agaggacagcggtgctttggaagat

SEQ ID NO: 5283177 - DNA, 25 bp, Homo sapien
tgctttggaagatgaatctggctcg

SEQ ID NO: 5283178 - DNA, 25 bp, Homo sapien
gaggtgactatggtagcagtccgtc

SEQ ID NO: 5283179 - DNA, 25 bp, Homo sapien
ttcgggcacatctgcttgtaatgcc

SEQ ID NO: 5283180 - DNA, 25 bp, Homo sapien
cttgtaatgcccctgaggtgactat

SEQ ID NO: 5283181 - DNA, 25 bp, Homo sapien
gcacatctgcttgtaatgcccctga

SEQ ID NO: 5283182 - DNA, 25 bp, Homo sapien
cttggctgactagtcctgtggtcag

SEQ ID NO: 5283183 - DNA, 25 bp, Homo sapien
tggctgactagtcctgtggtcagcc

SEQ ID NO: 5283184 - DNA, 25 bp, Homo sapien
tgactagtcctgtggtcagccttac

SEQ ID NO: 5283185 - DNA, 25 bp, Homo sapien
gctgactagtcctgtggtcagcctt

SEQ ID NO: 5283186 - DNA, 25 bp, Homo sapien
aatcaagattgcactgcacggagga

SEQ ID NO: 5283187 - DNA, 25 bp, Homo sapien
gaccttgatccatgatggctcccag

SEQ ID NO: 5283188 - DNA, 25 bp, Homo sapien
tcaggctcgcctggatggcacttcc

SEQ ID NO: 5283189 - DNA, 25 bp, Homo sapien
cctaatatgggagtgagaccttgat

SEQ ID NO: 5283190 - DNA, 25 bp, Homo sapien
ctctgcctccgcagctggtaatcca

SEQ ID NO: 5283191 - DNA, 25 bp, Homo sapien
aatctggattagaatcttctcgacc

SEQ ID NO: 5283192 - DNA, 25 bp, Homo sapien
tctgcctccgcagctggtaatccag

SEQ ID NO: 5283193 - DNA, 25 bp, Homo sapien
gaatctggattagaatcttctcgac

SEQ ID NO: 5283194 - DNA, 25 bp, Homo sapien
atccctcgcctggtccttgtgagaa

SEQ ID NO: 5283195 - DNA, 25 bp, Homo sapien
tccctcgcctggtccttgtgagaag

SEQ ID NO: 5283196 - DNA, 25 bp, Homo sapien
ccctcgcctggtccttgtgagaagg

SEQ ID NO: 5283197 - DNA, 25 bp, Homo sapien
gctgctggctttaaggtacaagggc

SEQ ID NO: 5283198 - DNA, 25 bp, Homo sapien
aaatgtccactcatacagacagcac

SEQ ID NO: 5283199 - DNA, 25 bp, Homo sapien
ggaaatgtccactcatacagacagc

SEQ ID NO: 5283200 - DNA, 25 bp, Homo sapien
tgctggctttaaggtacaagggcaa

SEQ ID NO: 5283201 - DNA, 25 bp, Homo sapien
caccatggatacagatgcagccctc

SEQ ID NO: 5283202 - DNA, 25 bp, Homo sapien
ctccaccatggatacagatgcagcc

SEQ ID NO: 5283203 - DNA, 25 bp, Homo sapien
ccatggatacagatgcagccctccc

SEQ ID NO: 5283204 - DNA, 25 bp, Homo sapien
tccaccatggatacagatgcagccc

SEQ ID NO: 5283205 - DNA, 25 bp, Homo sapien
tcatggcggccatccgcaagaagct

SEQ ID NO: 5283206 - DNA, 25 bp, Homo sapien
cccgaggtgagcagtgagcggcgag

SEQ ID NO: 5283207 - DNA, 25 bp, Homo sapien
cagccgaagcgcagcgagagaacgc

SEQ ID NO: 5283208 - DNA, 25 bp, Homo sapien
ggagggcagcgaggcgttcgcgggc

SEQ ID NO: 5283209 - DNA, 25 bp, Homo sapien
cgtgcctgctgatcgtgttcagtaa

SEQ ID NO: 5283210 - DNA, 25 bp, Homo sapien
cgtgcccaccgtcttcgagaactat

SEQ ID NO: 5283211 - DNA, 25 bp, Homo sapien
ccgaggtgtacgtgcccaccgtctt

SEQ ID NO: 5283212 - DNA, 25 bp, Homo sapien
cagtaaggacgagttccccgaggtg

SEQ ID NO: 5283213 - DNA, 25 bp, Homo sapien
gccgacattgaggtggacggcaagc

SEQ ID NO: 5283214 - DNA, 25 bp, Homo sapien
gacggcaagcaggtggagctggcgc

SEQ ID NO: 5283215 - DNA, 25 bp, Homo sapien
gtggccgacattgaggtggacggca

SEQ ID NO: 5283216 - DNA, 25 bp, Homo sapien
ccgacattgaggtggacggcaagca

SEQ ID NO: 5283217 - DNA, 25 bp, Homo sapien
agatgttcgcccttcaccagcggga

SEQ ID NO: 5283218 - DNA, 25 bp, Homo sapien
aggaagatgagtggataccccgaca

SEQ ID NO: 5283219 - DNA, 25 bp, Homo sapien
taagcgaactttgtgcctgtcctag

SEQ ID NO: 5283220 - DNA, 25 bp, Homo sapien
tgtctgtaacatagaccccgggtac

SEQ ID NO: 5283221 - DNA, 25 bp, Homo sapien
ggttcgccctcctcgcatttcagtg

SEQ ID NO: 5283222 - DNA, 25 bp, Homo sapien
tgacagtgccaaatgccaagttctg

SEQ ID NO: 5283223 - DNA, 25 bp, Homo sapien
gcttgaccttaacgggatctgggca

SEQ ID NO: 5283224 - DNA, 25 bp, Homo sapien
tttcagtgttttcgggaagccagcc

SEQ ID NO: 5283225 - DNA, 25 bp, Homo sapien
tacagctgagcatgttgaggctgaa

SEQ ID NO: 5283226 - DNA, 25 bp, Homo sapien
tacctggtgcctttctatagcccca

SEQ ID NO: 5283227 - DNA, 25 bp, Homo sapien
ctggtaaacaaaatcactgtatagg

SEQ ID NO: 5283228 - DNA, 25 bp, Homo sapien
tttgcaacagtcttcgggaatatga

SEQ ID NO: 5283229 - DNA, 25 bp, Homo sapien
ggaaatgctcttacaagccagatgc

SEQ ID NO: 5283230 - DNA, 25 bp, Homo sapien
tggaaatgctcttacaagccagatg

SEQ ID NO: 5283231 - DNA, 25 bp, Homo sapien
ctggaaatgctcttacaagccagat

SEQ ID NO: 5283232 - DNA, 25 bp, Homo sapien
taaccttgtggtgttgacgctaccc

SEQ ID NO: 5283233 - DNA, 25 bp, Homo sapien
cagctgtaaccttgtggtgttgacg

SEQ ID NO: 5283234 - DNA, 25 bp, Homo sapien
cagcctcagctgtaaccttgtggtg

SEQ ID NO: 5283235 - DNA, 25 bp, Homo sapien
tggtgttgacgctacccaggccctt

SEQ ID NO: 5283236 - DNA, 25 bp, Homo sapien
taccctggaaatagctgtgatagcc

SEQ ID NO: 5283237 - DNA, 25 bp, Homo sapien
tccagcagagtgcttgacaagggcc

SEQ ID NO: 5283238 - DNA, 25 bp, Homo sapien
ttgggtggacagacatccaggacac

SEQ ID NO: 5283239 - DNA, 25 bp, Homo sapien
gctcagatacaaatagaaccaggtg

SEQ ID NO: 5283240 - DNA, 25 bp, Homo sapien
ctgctatacactgcccaggaagaat

SEQ ID NO: 5283241 - DNA, 25 bp, Homo sapien
gcttctaggcatggacacgtttgga

SEQ ID NO: 5283242 - DNA, 25 bp, Homo sapien
aggaagaatccctggtactgcagtg

SEQ ID NO: 5283243 - DNA, 25 bp, Homo sapien
catggacacgtttggaaaggtgaga

SEQ ID NO: 5283244 - DNA, 25 bp, Homo sapien
gacagcatgagtcagccacacttca

SEQ ID NO: 5283245 - DNA, 25 bp, Homo sapien
cagcatgagtcagccacacttcagc

SEQ ID NO: 5283246 - DNA, 25 bp, Homo sapien
tagatgatggcccaattggggtcag

SEQ ID NO: 5283247 - DNA, 25 bp, Homo sapien
cacttcagccatctgaaaaattctc

SEQ ID NO: 5283248 - DNA, 25 bp, Homo sapien
tcccctgcatgggtcagaatcaggg

SEQ ID NO: 5283249 - DNA, 25 bp, Homo sapien
ctgtcccctgcatgggtcagaatca

SEQ ID NO: 5283250 - DNA, 25 bp, Homo sapien
tgtcccctgcatgggtcagaatcag

SEQ ID NO: 5283251 - DNA, 25 bp, Homo sapien
cctgcatgggtcagaatcagggtgc

SEQ ID NO: 5283252 - DNA, 25 bp, Homo sapien
gctaaaatagtcgcatccatatacg

SEQ ID NO: 5283253 - DNA, 25 bp, Homo sapien
ctaaaatagtcgcatccatatacgt

SEQ ID NO: 5283254 - DNA, 25 bp, Homo sapien
tgtggctcttgccatctcgtggcat

SEQ ID NO: 5283255 - DNA, 25 bp, Homo sapien
cctggctgaaaggttttaccagtgc

SEQ ID NO: 5283256 - DNA, 25 bp, Homo sapien
ggctgaaaggttttaccagtgctgc

SEQ ID NO: 5283257 - DNA, 25 bp, Homo sapien
gaaaggttttaccagtgctgctggg

SEQ ID NO: 5283258 - DNA, 25 bp, Homo sapien
gatcctggctgaaaggttttaccag

SEQ ID NO: 5283259 - DNA, 25 bp, Homo sapien
cctcactggtctctttactaaggag

SEQ ID NO: 5283260 - DNA, 25 bp, Homo sapien
tatttgttcccgaattggtccgtgc

SEQ ID NO: 5283261 - DNA, 25 bp, Homo sapien
cacaaggcgcggaacaaatcctgag

SEQ ID NO: 5283262 - DNA, 25 bp, Homo sapien
cttgacagcgatctccacaaggcgc

SEQ ID NO: 5283263 - DNA, 25 bp, Homo sapien
cccgcagtaggggtaatgctccagc

SEQ ID NO: 5283264 - DNA, 25 bp, Homo sapien
ccgcagtaggggtaatgctccagcc

SEQ ID NO: 5283265 - DNA, 25 bp, Homo sapien
gacccgcagtaggggtaatgctcca

SEQ ID NO: 5283266 - DNA, 25 bp, Homo sapien
gggacccgcagtaggggtaatgctc

SEQ ID NO: 5283267 - DNA, 25 bp, Homo sapien
tcaggccttcagagtcttggagggg

SEQ ID NO: 5283268 - DNA, 25 bp, Homo sapien
ggatctcaactctccaaagggaggg

SEQ ID NO: 5283269 - DNA, 25 bp, Homo sapien
caggctgtaatcactggaggagttc

SEQ ID NO: 5283270 - DNA, 25 bp, Homo sapien
gacgttaacactagcggaagctggg

SEQ ID NO: 5283271 - DNA, 25 bp, Homo sapien
catggacaacagagggttaacggcc

SEQ ID NO: 5283272 - DNA, 25 bp, Homo sapien
gcacccatttgtaatgaaatggaag

SEQ ID NO: 5283273 - DNA, 25 bp, Homo sapien
cacccatttgtaatgaaatggaagc

SEQ ID NO: 5283274 - DNA, 25 bp, Homo sapien
catttctaagctatgacttctgggc

SEQ ID NO: 5283275 - DNA, 25 bp, Homo sapien
tatttgggccatgactgccgtgttc

SEQ ID NO: 5283276 - DNA, 25 bp, Homo sapien
gagggattctcttactgcacacgcc

SEQ ID NO: 5283277 - DNA, 25 bp, Homo sapien
gatttcctttcagggcaccacactg

SEQ ID NO: 5283278 - DNA, 25 bp, Homo sapien
tgagataatttggaagtgtaggaca

SEQ ID NO: 5283279 - DNA, 25 bp, Homo sapien
tatccatgtgatttagttgagcggg

SEQ ID NO: 5283280 - DNA, 25 bp, Homo sapien
agttgagcgggttgctttcctcttg

SEQ ID NO: 5283281 - DNA, 25 bp, Homo sapien
ttggacattgttcactgcgtctgta

SEQ ID NO: 5283282 - DNA, 25 bp, Homo sapien
tttggacacctggtacttttgtgcc

SEQ ID NO: 5283283 - DNA, 25 bp, Homo sapien
gcttccagggaggctgaaccgcttg

SEQ ID NO: 5283284 - DNA, 25 bp, Homo sapien
ttccagggaggctgaaccgcttgcg

SEQ ID NO: 5283285 - DNA, 25 bp, Homo sapien
aggctgaaccgcttgcggcccctct

SEQ ID NO: 5283286 - DNA, 25 bp, Homo sapien
ttgaaatcccttatgagccagtgtc

SEQ ID NO: 5283287 - DNA, 25 bp, Homo sapien
acattgaaatcccttatgagccagt

SEQ ID NO: 5283288 - DNA, 25 bp, Homo sapien
cattgaaatcccttatgagccagtg

SEQ ID NO: 5283289 - DNA, 25 bp, Homo sapien
gcacattgaaatcccttatgagcca

SEQ ID NO: 5283290 - DNA, 25 bp, Homo sapien
gtggagagggacattagcaacagcc

SEQ ID NO: 5283291 - DNA, 25 bp, Homo sapien
gggatcatggccttaacctgccaaa

SEQ ID NO: 5283292 - DNA, 25 bp, Homo sapien
gagcttgagagcaggttacccactt

SEQ ID NO: 5283293 - DNA, 25 bp, Homo sapien
caagtaggcatcgtgctgcaggctc

SEQ ID NO: 5283294 - DNA, 25 bp, Homo sapien
tggaacttttggaacaatgggctct

SEQ ID NO: 5283295 - DNA, 25 bp, Homo sapien
tattgttgttgggcatttgtttgga

SEQ ID NO: 5283296 - DNA, 25 bp, Homo sapien
cttttggaacaatgggctctggagt

SEQ ID NO: 5283297 - DNA, 25 bp, Homo sapien
tttctctggaacttttggaacaatg

SEQ ID NO: 5283298 - DNA, 25 bp, Homo sapien
tgagactggctttattggtgttacc

SEQ ID NO: 5283299 - DNA, 25 bp, Homo sapien
taaaagcaagcgcattccagatgtt

SEQ ID NO: 5283300 - DNA, 25 bp, Homo sapien
gtgtagaccgtaacaccagccctct

SEQ ID NO: 5283301 - DNA, 25 bp, Homo sapien
tttttggcgggaaagatcagacatc

SEQ ID NO: 5283302 - DNA, 25 bp, Homo sapien
ccccttggcgatctctggttccagc

SEQ ID NO: 5283303 - DNA, 25 bp, Homo sapien
tcgctccccttggcgatctctggtt

SEQ ID NO: 5283304 - DNA, 25 bp, Homo sapien
agcctcgctccccttggcgatctct

SEQ ID NO: 5283305 - DNA, 25 bp, Homo sapien
ccacagcctcgctccccttggcgat

SEQ ID NO: 5283306 - DNA, 25 bp, Homo sapien
tccaaatgcaggaggcggaatcaga

SEQ ID NO: 5283307 - DNA, 25 bp, Homo sapien
ccgatgatgagtgctgcagagacca

SEQ ID NO: 5283308 - DNA, 25 bp, Homo sapien
gaccatgggaggaatgccagcctca

SEQ ID NO: 5283309 - DNA, 25 bp, Homo sapien
aagggaatccaggaaactgcatctc

SEQ ID NO: 5283310 - DNA, 25 bp, Homo sapien
cgaacaccccaggtggttgcatggg

SEQ ID NO: 5283311 - DNA, 25 bp, Homo sapien
tttctgagagtttctgagcagcgaa

SEQ ID NO: 5283312 - DNA, 25 bp, Homo sapien
gatggtccaaggacagaacagcccc

SEQ ID NO: 5283313 - DNA, 25 bp, Homo sapien
gacggttcaacatcacgtcccatgg

SEQ ID NO: 5283314 - DNA, 25 bp, Homo sapien
ctgcatcaccgtagtgactccccga

SEQ ID NO: 5283315 - DNA, 25 bp, Homo sapien
gactctcctatgcagctaggagtaa

SEQ ID NO: 5283316 - DNA, 25 bp, Homo sapien
agctaggagtaagcccaggagagca

SEQ ID NO: 5283317 - DNA, 25 bp, Homo sapien
gtagtgactccccgacagctctgtc

SEQ ID NO: 5283318 - DNA, 25 bp, Homo sapien
ggtggcagcaccacgcccatccctg

SEQ ID NO: 5283319 - DNA, 25 bp, Homo sapien
gtgtcagcaggaccctgcgccctca

SEQ ID NO: 5283320 - DNA, 25 bp, Homo sapien
agttcctggcgttcccccgctggtg

SEQ ID NO: 5283321 - DNA, 25 bp, Homo sapien
ccgctggtggcagcaccacgcccat

SEQ ID NO: 5283322 - DNA, 25 bp, Homo sapien
tttgcctgcaactagatggtcccac

SEQ ID NO: 5283323 - DNA, 25 bp, Homo sapien
tgccacgcttgggaatgaacaactg

SEQ ID NO: 5283324 - DNA, 25 bp, Homo sapien
tctgtgcagtcggaccaaatgctgg

SEQ ID NO: 5283325 - DNA, 25 bp, Homo sapien
caacagctcaatagggtcccaaggg

SEQ ID NO: 5283326 - DNA, 25 bp, Homo sapien
gaacaactgtgatctacgggtgtca

SEQ ID NO: 5283327 - DNA, 25 bp, Homo sapien
aattggtgcagagaattctagggtg

SEQ ID NO: 5283328 - DNA, 25 bp, Homo sapien
tgccttcttgcaattgagtacaatg

SEQ ID NO: 5283329 - DNA, 25 bp, Homo sapien
caagagggcactgtttcggagagtt

SEQ ID NO: 5283330 - DNA, 25 bp, Homo sapien
cattgtgaaaggtgcagattctacc

SEQ ID NO: 5283331 - DNA, 25 bp, Homo sapien
tatgtctttggagcacttcttcttt

SEQ ID NO: 5283332 - DNA, 25 bp, Homo sapien
tttggccttgtccccggatttgctc

SEQ ID NO: 5283333 - DNA, 25 bp, Homo sapien
tttcctggccaactttccagcgtct

SEQ ID NO: 5283334 - DNA, 25 bp, Homo sapien
ccttgtccccggatttgctcactgg

SEQ ID NO: 5283335 - DNA, 25 bp, Homo sapien
cagagagcagcggtgaacgctacag

SEQ ID NO: 5283336 - DNA, 25 bp, Homo sapien
agagagcagcggtgaacgctacagc

SEQ ID NO: 5283337 - DNA, 25 bp, Homo sapien
ggaccaggagagggaaaccgatgtg

SEQ ID NO: 5283338 - DNA, 25 bp, Homo sapien
tgaccacatcgtgcgcaaagttcag

SEQ ID NO: 5283339 - DNA, 25 bp, Homo sapien
tccacttgaccacatcgtgcgcaaa

SEQ ID NO: 5283340 - DNA, 25 bp, Homo sapien
acatcgtgcgcaaagttcagggacc

SEQ ID NO: 5283341 - DNA, 25 bp, Homo sapien
agtggttttgtatgtgcccattccc

SEQ ID NO: 5283342 - DNA, 25 bp, Homo sapien
tggacacagggtccctcaatcccag

SEQ ID NO: 5283343 - DNA, 25 bp, Homo sapien
gacacagggtccctcaatcccaggg

SEQ ID NO: 5283344 - DNA, 25 bp, Homo sapien
ggtctccagtggttttgtatgtgcc

SEQ ID NO: 5283345 - DNA, 25 bp, Homo sapien
acatgaagaattatatccaagaaag

SEQ ID NO: 5283346 - DNA, 25 bp, Homo sapien
aaactagctctgaacatgaagaatt

SEQ ID NO: 5283347 - DNA, 25 bp, Homo sapien
gtgcctagacctgtgtaccagcgct

SEQ ID NO: 5283348 - DNA, 25 bp, Homo sapien
agaagtctaaggcacgggccctgcc

SEQ ID NO: 5283349 - DNA, 25 bp, Homo sapien
gtcgggagaagtctaaggcacgggc

SEQ ID NO: 5283350 - DNA, 25 bp, Homo sapien
tgagaatttccaaagcactgtgtgg

SEQ ID NO: 5283351 - DNA, 25 bp, Homo sapien
aagtccagaccctgaggacgacgaa

SEQ ID NO: 5283352 - DNA, 25 bp, Homo sapien
gctgcaatgacgaacattggctctg

SEQ ID NO: 5283353 - DNA, 25 bp, Homo sapien
tgaaaggccactgaccaagtccaga

SEQ ID NO: 5283354 - DNA, 25 bp, Homo sapien
ggaaagctatgacccagtttgctga

SEQ ID NO: 5283355 - DNA, 25 bp, Homo sapien
tcttactatgcgaacagaggcagag

SEQ ID NO: 5283356 - DNA, 25 bp, Homo sapien
agaacccgtgggcatgaagcttccc

SEQ ID NO: 5283357 - DNA, 25 bp, Homo sapien
gggccgtctataccctggagaggca

SEQ ID NO: 5283358 - DNA, 25 bp, Homo sapien
gagacttgcatcagaacactccaga

SEQ ID NO: 5283359 - DNA, 25 bp, Homo sapien
atggaaccatgcagttctgggtgct

SEQ ID NO: 5283360 - DNA, 25 bp, Homo sapien
tggttggcaaggcatccccacaccc

SEQ ID NO: 5283361 - DNA, 25 bp, Homo sapien
cacagccccggagaaaatggaacca

SEQ ID NO: 5283362 - DNA, 25 bp, Homo sapien
gaataagacacattgggctctggct

SEQ ID NO: 5283363 - DNA, 25 bp, Homo sapien
tgggccaggggccagcatggaaggg

SEQ ID NO: 5283364 - DNA, 25 bp, Homo sapien
ctgctgggccaggggccagcatgga

SEQ ID NO: 5283365 - DNA, 25 bp, Homo sapien
tgctgggccaggggccagcatggaa

SEQ ID NO: 5283366 - DNA, 25 bp, Homo sapien
gctgggccaggggccagcatggaag

SEQ ID NO: 5283367 - DNA, 25 bp, Homo sapien
tatcaccggcttagctgccactggt

SEQ ID NO: 5283368 - DNA, 25 bp, Homo sapien
agctggttttctgggtatcaccggc

SEQ ID NO: 5283369 - DNA, 25 bp, Homo sapien
caagatgtccatctcgtccatggct

SEQ ID NO: 5283370 - DNA, 25 bp, Homo sapien
tgccactggtggcttgggcttaagc

SEQ ID NO: 5283371 - DNA, 25 bp, Homo sapien
cccgtgacaggaacaagaccccagg

SEQ ID NO: 5283372 - DNA, 25 bp, Homo sapien
gcataacactgccaccccgtgacag

SEQ ID NO: 5283373 - DNA, 25 bp, Homo sapien
ataacactgccaccccgtgacagga

SEQ ID NO: 5283374 - DNA, 25 bp, Homo sapien
tgccaccccgtgacaggaacaagac

SEQ ID NO: 5283375 - DNA, 25 bp, Homo sapien
cctggatagtcacagggcagacaca

SEQ ID NO: 5283376 - DNA, 25 bp, Homo sapien
aatcccagtgttacggctctttttg

SEQ ID NO: 5283377 - DNA, 25 bp, Homo sapien
aggaagtccaactactccctggata

SEQ ID NO: 5283378 - DNA, 25 bp, Homo sapien
caactactccctggatagtcacagg

SEQ ID NO: 5283379 - DNA, 25 bp, Homo sapien
tggtgtcacataagccgttcctgga

SEQ ID NO: 5283380 - DNA, 25 bp, Homo sapien
taaggagtctggcttactgcgtaca

SEQ ID NO: 5283381 - DNA, 25 bp, Homo sapien
tgtaaataccagaagccgtcacggt

SEQ ID NO: 5283382 - DNA, 25 bp, Homo sapien
gagcccctttgaagatagcctttga

SEQ ID NO: 5283383 - DNA, 25 bp, Homo sapien
gactggttgtgcacacaaagttctc

SEQ ID NO: 5283384 - DNA, 25 bp, Homo sapien
tgagactgggcaatgagccgggccc

SEQ ID NO: 5283385 - DNA, 25 bp, Homo sapien
cacaggcttctacttttcacaggcc

SEQ ID NO: 5283386 - DNA, 25 bp, Homo sapien
ctcagagctggccaagcgccgctgg

SEQ ID NO: 5283387 - DNA, 25 bp, Homo sapien
tgggtgtgggccctccactctcaca

SEQ ID NO: 5283388 - DNA, 25 bp, Homo sapien
gaacagttccttggaggcgtccctg

SEQ ID NO: 5283389 - DNA, 25 bp, Homo sapien
atggccccgccgaggtcaggatcat

SEQ ID NO: 5283390 - DNA, 25 bp, Homo sapien
tcaggatcatcaaatagcttcaggg

SEQ ID NO: 5283391 - DNA, 25 bp, Homo sapien
ggtccacggatgacacgtcctccga

SEQ ID NO: 5283392 - DNA, 25 bp, Homo sapien
tcctcgtcaaagatggtgagccggg

SEQ ID NO: 5283393 - DNA, 25 bp, Homo sapien
tggagacagcttcctgcccgggcca

SEQ ID NO: 5283394 - DNA, 25 bp, Homo sapien
acctcctcgtcaaagatggtgagcc

SEQ ID NO: 5283395 - DNA, 25 bp, Homo sapien
atcaggcagagccagctcggctctc

SEQ ID NO: 5283396 - DNA, 25 bp, Homo sapien
caggcagagccagctcggctctcat

SEQ ID NO: 5283397 - DNA, 25 bp, Homo sapien
caatcaggcagagccagctcggctc

SEQ ID NO: 5283398 - DNA, 25 bp, Homo sapien
tcaggcagagccagctcggctctca

SEQ ID NO: 5283399 - DNA, 25 bp, Homo sapien
ggaacaaagatgaggacgagccgcc

SEQ ID NO: 5283400 - DNA, 25 bp, Homo sapien
aagatgaggacgagccgccgctgtc

SEQ ID NO: 5283401 - DNA, 25 bp, Homo sapien
gagggaacaaagatgaggacgagcc

SEQ ID NO: 5283402 - DNA, 25 bp, Homo sapien
tgctggggacgagggaacaaagatg

SEQ ID NO: 5283403 - DNA, 25 bp, Homo sapien
gagcagggtcacatagaaactgatc

SEQ ID NO: 5283404 - DNA, 25 bp, Homo sapien
gcagagcagggtcacatagaaactg

SEQ ID NO: 5283405 - DNA, 25 bp, Homo sapien
gcagggtcacatagaaactgatcat

SEQ ID NO: 5283406 - DNA, 25 bp, Homo sapien
cagagcagggtcacatagaaactga

SEQ ID NO: 5283407 - DNA, 25 bp, Homo sapien
taaatagcatcttgggtacaggacc

SEQ ID NO: 5283408 - DNA, 25 bp, Homo sapien
agaggacagagccaaccaagcctga

SEQ ID NO: 5283409 - DNA, 25 bp, Homo sapien
gactaggacataactgggaacccag

SEQ ID NO: 5283410 - DNA, 25 bp, Homo sapien
tcattagcacacagggtgttccgct

SEQ ID NO: 5283411 - DNA, 25 bp, Homo sapien
ctcccttcattggaaggacagctgg

SEQ ID NO: 5283412 - DNA, 25 bp, Homo sapien
tctcccttcattggaaggacagctg

SEQ ID NO: 5283413 - DNA, 25 bp, Homo sapien
ttctcccttcattggaaggacagct

SEQ ID NO: 5283414 - DNA, 25 bp, Homo sapien
tcttctcccttcattggaaggacag

SEQ ID NO: 5283415 - DNA, 25 bp, Homo sapien
ttccttctccacaatggggccagag

SEQ ID NO: 5283416 - DNA, 25 bp, Homo sapien
aatggggccagagactgcccctcac

SEQ ID NO: 5283417 - DNA, 25 bp, Homo sapien
agcttgtgggtgatgccatttttcc

SEQ ID NO: 5283418 - DNA, 25 bp, Homo sapien
ctgagcttgtgggtgatgccatttt

SEQ ID NO: 5283419 - DNA, 25 bp, Homo sapien
cagcaatcgggacagaccatagggt

SEQ ID NO: 5283420 - DNA, 25 bp, Homo sapien
ggtttcccgcagaggatttccagca

SEQ ID NO: 5283421 - DNA, 25 bp, Homo sapien
gcctcccgagaagaacagaaagtcc

SEQ ID NO: 5283422 - DNA, 25 bp, Homo sapien
agttcatcgtcacaggagccctaag

SEQ ID NO: 5283423 - DNA, 25 bp, Homo sapien
ataatgcccagagggtccagcgcct

SEQ ID NO: 5283424 - DNA, 25 bp, Homo sapien
tctggacgggcggaccctcttctgc

SEQ ID NO: 5283425 - DNA, 25 bp, Homo sapien
tcagcatcctcgcccttcaggctct

SEQ ID NO: 5283426 - DNA, 25 bp, Homo sapien
cgcataatgcccagagggtccagcg

SEQ ID NO: 5283427 - DNA, 25 bp, Homo sapien
cctgtctgactgtctgtgccatcca

SEQ ID NO: 5283428 - DNA, 25 bp, Homo sapien
caaaaaagtcgaaagcctcttcatc

SEQ ID NO: 5283429 - DNA, 25 bp, Homo sapien
ttggtcttgctcctcaaaaaagtcg

SEQ ID NO: 5283430 - DNA, 25 bp, Homo sapien
tccaggacagaggaatctctgctgg

SEQ ID NO: 5283431 - DNA, 25 bp, Homo sapien
cagctttcccgggatactgcaggtc

SEQ ID NO: 5283432 - DNA, 25 bp, Homo sapien
tggatcaattcctcagcccggagct

SEQ ID NO: 5283433 - DNA, 25 bp, Homo sapien
cagacgttcagtccctcaagggtag

SEQ ID NO: 5283434 - DNA, 25 bp, Homo sapien
catgggaagggcttgacgtctccac

SEQ ID NO: 5283435 - DNA, 25 bp, Homo sapien
gacacagcgcaggatctcattgaac

SEQ ID NO: 5283436 - DNA, 25 bp, Homo sapien
tgtcagactccccaacaaacaggac

SEQ ID NO: 5283437 - DNA, 25 bp, Homo sapien
gctggctgctgcataacgactgctc

SEQ ID NO: 5283438 - DNA, 25 bp, Homo sapien
caactcggcatccttggagacacag

SEQ ID NO: 5283439 - DNA, 25 bp, Homo sapien
tggaatgagaggagcatgtggtttc

SEQ ID NO: 5283440 - DNA, 25 bp, Homo sapien
ctggaatgagaggagcatgtggttt

SEQ ID NO: 5283441 - DNA, 25 bp, Homo sapien
agcagtggagacagatatttccaag

SEQ ID NO: 5283442 - DNA, 25 bp, Homo sapien
ttcggcgggccagccaatgcaagca

SEQ ID NO: 5283443 - DNA, 25 bp, Homo sapien
ggccttcggcgggccagccaatgca

SEQ ID NO: 5283444 - DNA, 25 bp, Homo sapien
tcattctcccgtgaaccagtgtggc

SEQ ID NO: 5283445 - DNA, 25 bp, Homo sapien
tcttatgctcccaggcccggactgt

SEQ ID NO: 5283446 - DNA, 25 bp, Homo sapien
tcggggagatcccttggtgcagggt

SEQ ID NO: 5283447 - DNA, 25 bp, Homo sapien
tgcgggcatctgacgccctcgggct

SEQ ID NO: 5283448 - DNA, 25 bp, Homo sapien
agcaacaccacccagaatgcccagc

SEQ ID NO: 5283449 - DNA, 25 bp, Homo sapien
agggcccacgtccatcaggggttca

SEQ ID NO: 5283450 - DNA, 25 bp, Homo sapien
gggcccacgtccatcaggggttcag

SEQ ID NO: 5283451 - DNA, 25 bp, Homo sapien
cccacgtccatcaggggttcaggca

SEQ ID NO: 5283452 - DNA, 25 bp, Homo sapien
ggcccacgtccatcaggggttcagg

SEQ ID NO: 5283453 - DNA, 25 bp, Homo sapien
caggatctggtactccacgtgtcca

SEQ ID NO: 5283454 - DNA, 25 bp, Homo sapien
tggacgacatcctcgggcctgtgct

SEQ ID NO: 5283455 - DNA, 25 bp, Homo sapien
ggcacagtcaggtcgaggccagtgt

SEQ ID NO: 5283456 - DNA, 25 bp, Homo sapien
ccgacttgaacgcagccagacgggt

SEQ ID NO: 5283457 - DNA, 25 bp, Homo sapien
cagccctcataagcctggcttccca

SEQ ID NO: 5283458 - DNA, 25 bp, Homo sapien
gttgctcagggacaaaggtctgctc

SEQ ID NO: 5283459 - DNA, 25 bp, Homo sapien
ggttgctcagggacaaaggtctgct

SEQ ID NO: 5283460 - DNA, 25 bp, Homo sapien
gggttgctcagggacaaaggtctgc

SEQ ID NO: 5283461 - DNA, 25 bp, Homo sapien
ctcatctgggcagtcgatgctgccc

SEQ ID NO: 5283462 - DNA, 25 bp, Homo sapien
ccagagaggcactgataggcccgtc

SEQ ID NO: 5283463 - DNA, 25 bp, Homo sapien
gaggcactgataggcccgtccctca

SEQ ID NO: 5283464 - DNA, 25 bp, Homo sapien
tgataggcccgtccctcatctgggc

SEQ ID NO: 5283465 - DNA, 25 bp, Homo sapien
gtgacgagcaccgccggggactgca

SEQ ID NO: 5283466 - DNA, 25 bp, Homo sapien
tgacgagcaccgccggggactgcat

SEQ ID NO: 5283467 - DNA, 25 bp, Homo sapien
ggaggtgacgagcaccgccggggac

SEQ ID NO: 5283468 - DNA, 25 bp, Homo sapien
aggtgacgagcaccgccggggactg

SEQ ID NO: 5283469 - DNA, 25 bp, Homo sapien
cggggactccgggcggggcgcgcag

SEQ ID NO: 5283470 - DNA, 25 bp, Homo sapien
gcggggactccgggcggggcgcgca

SEQ ID NO: 5283471 - DNA, 25 bp, Homo sapien
catacagcgagtggacagtggctcc

SEQ ID NO: 5283472 - DNA, 25 bp, Homo sapien
cagtggctccagcagcattagccca

SEQ ID NO: 5283473 - DNA, 25 bp, Homo sapien
gaagtgaagtctcagttggagcaca

SEQ ID NO: 5283474 - DNA, 25 bp, Homo sapien
tctcagttggagcacatacagcgag

SEQ ID NO: 5283475 - DNA, 25 bp, Homo sapien
tctgatctcggattctggcccgcgg

SEQ ID NO: 5283476 - DNA, 25 bp, Homo sapien
cgataagtctccttaaggcccagga

SEQ ID NO: 5283477 - DNA, 25 bp, Homo sapien
tggctcccacatcgaagacagctgg

SEQ ID NO: 5283478 - DNA, 25 bp, Homo sapien
aattttccgttttcgcacagccagg

SEQ ID NO: 5283479 - DNA, 25 bp, Homo sapien
aggaaagagagcttattccgggaga

SEQ ID NO: 5283480 - DNA, 25 bp, Homo sapien
ttattccgggagatccgcgcccagg

SEQ ID NO: 5283481 - DNA, 25 bp, Homo sapien
agagagcttattccgggagatccgc

SEQ ID NO: 5283482 - DNA, 25 bp, Homo sapien
agcttattccgggagatccgcgccc

SEQ ID NO: 5283483 - DNA, 25 bp, Homo sapien
caagccgttgcacgtggacttcaag

SEQ ID NO: 5283484 - DNA, 25 bp, Homo sapien
tctacaagcaatacgaggacatggt

SEQ ID NO: 5283485 - DNA, 25 bp, Homo sapien
acttcaaggagctcggctgggacga

SEQ ID NO: 5283486 - DNA, 25 bp, Homo sapien
gaggcgtaccactgcgagggccttt

SEQ ID NO: 5283487 - DNA, 25 bp, Homo sapien
gaggggagctactgcttttcctaga

SEQ ID NO: 5283488 - DNA, 25 bp, Homo sapien
ggatctgccaggttcggaagctccc

SEQ ID NO: 5283489 - DNA, 25 bp, Homo sapien
tcggaagctccccagttggtcaggg

SEQ ID NO: 5283490 - DNA, 25 bp, Homo sapien
aggaagttagtgcaatggcccggaa

SEQ ID NO: 5283491 - DNA, 25 bp, Homo sapien
gccaccgtcctagcctgaggagaca

SEQ ID NO: 5283492 - DNA, 25 bp, Homo sapien
agaagttgccgcgtgagctctgatc

SEQ ID NO: 5283493 - DNA, 25 bp, Homo sapien
aggtacccaccttaaccagagcttg

SEQ ID NO: 5283494 - DNA, 25 bp, Homo sapien
tggaacctcctgaccatgtaggctg

SEQ ID NO: 5283495 - DNA, 25 bp, Homo sapien
gaaggttgttgcagagctcccgtac

SEQ ID NO: 5283496 - DNA, 25 bp, Homo sapien
cattgtgaggtgttgccgatgccca

SEQ ID NO: 5283497 - DNA, 25 bp, Homo sapien
tgtagccacagcagaactccgaggc

SEQ ID NO: 5283498 - DNA, 25 bp, Homo sapien
gaattctgcacatgacgagtggctg

SEQ ID NO: 5283499 - DNA, 25 bp, Homo sapien
ggtattttaggccacgtctcatggg

SEQ ID NO: 5283500 - DNA, 25 bp, Homo sapien
gattcctgtacagaggagtccacag

SEQ ID NO: 5283501 - DNA, 25 bp, Homo sapien
ggaagctcccgtgcgtggcataaga

SEQ ID NO: 5283502 - DNA, 25 bp, Homo sapien
caaagctggagcagtgattcctgta

SEQ ID NO: 5283503 - DNA, 25 bp, Homo sapien
aaggaagggccctcatgactcagac

SEQ ID NO: 5283504 - DNA, 25 bp, Homo sapien
catcctccctggcaaaaggtggaag

SEQ ID NO: 5283505 - DNA, 25 bp, Homo sapien
caaacttgcagcctaatattgtggc

SEQ ID NO: 5283506 - DNA, 25 bp, Homo sapien
ggtgaggacctttgtgctacatcct

SEQ ID NO: 5283507 - DNA, 25 bp, Homo sapien
ggaatctcaatcctcttaaaaagtg

SEQ ID NO: 5283508 - DNA, 25 bp, Homo sapien
gaagatgtctcaagccatctaagaa

SEQ ID NO: 5283509 - DNA, 25 bp, Homo sapien
cctaagggaaggagcagcccaaata

SEQ ID NO: 5283510 - DNA, 25 bp, Homo sapien
cacagatgtatttgttcacagagca

SEQ ID NO: 5283511 - DNA, 25 bp, Homo sapien
aacagactaggaacaaacacgggtg

SEQ ID NO: 5283512 - DNA, 25 bp, Homo sapien
cacgaggtctcgttttttgcacggg

SEQ ID NO: 5283513 - DNA, 25 bp, Homo sapien
tgactgggacatacaggcagagctg

SEQ ID NO: 5283514 - DNA, 25 bp, Homo sapien
gagcactcggtaactctgcaggaag

SEQ ID NO: 5283515 - DNA, 25 bp, Homo sapien
acagaatgaacttcagtctcttgaa

SEQ ID NO: 5283516 - DNA, 25 bp, Homo sapien
ggagaactgctcaaattgtaccctc

SEQ ID NO: 5283517 - DNA, 25 bp, Homo sapien
taaaagagagactttgagccgagtc

SEQ ID NO: 5283518 - DNA, 25 bp, Homo sapien
cagagatcaggccagaccaggtcag

SEQ ID NO: 5283519 - DNA, 25 bp, Homo sapien
tgagccgagtctaactcaggagaac

SEQ ID NO: 5283520 - DNA, 25 bp, Homo sapien
atctttcttaggctctaaaaaccag

SEQ ID NO: 5283521 - DNA, 25 bp, Homo sapien
ttcatacgtgcagacttttgaaata

SEQ ID NO: 5283522 - DNA, 25 bp, Homo sapien
tctttcttaggctctaaaaaccaga

SEQ ID NO: 5283523 - DNA, 25 bp, Homo sapien
agacacaatttcatacgtgcagact

SEQ ID NO: 5283524 - DNA, 25 bp, Homo sapien
tgggctaacagcactccttgtctgg

SEQ ID NO: 5283525 - DNA, 25 bp, Homo sapien
tacagccctgtgcttacggcctatg

SEQ ID NO: 5283526 - DNA, 25 bp, Homo sapien
tgtagaagctatgccaaagcacagt

SEQ ID NO: 5283527 - DNA, 25 bp, Homo sapien
gatttctaggcctctcatgcagatg

SEQ ID NO: 5283528 - DNA, 25 bp, Homo sapien
tcattgtccttagggaatgataatg

SEQ ID NO: 5283529 - DNA, 25 bp, Homo sapien
ctttaggatttgagcggagggacat

SEQ ID NO: 5283530 - DNA, 25 bp, Homo sapien
atcagagccaaatctttcatcaggg

SEQ ID NO: 5283531 - DNA, 25 bp, Homo sapien
caataagttggcagcaaatcagagc

SEQ ID NO: 5283532 - DNA, 25 bp, Homo sapien
agcaatattgtcagcccactctagg

SEQ ID NO: 5283533 - DNA, 25 bp, Homo sapien
gcaggtacattagacgtcacattga

SEQ ID NO: 5283534 - DNA, 25 bp, Homo sapien
cctgctcctggaacatgagtgtatc

SEQ ID NO: 5283535 - DNA, 25 bp, Homo sapien
cagcctataacatggcgagcggaga

SEQ ID NO: 5283536 - DNA, 25 bp, Homo sapien
ggacaagtcatcctttagggagtca

SEQ ID NO: 5283537 - DNA, 25 bp, Homo sapien
taaaatgggtgatgaaagcatgagg

SEQ ID NO: 5283538 - DNA, 25 bp, Homo sapien
gccatttcctggttaaaatgggtga

SEQ ID NO: 5283539 - DNA, 25 bp, Homo sapien
ttagggagtcagcaatcatgtctgc

SEQ ID NO: 5283540 - DNA, 25 bp, Homo sapien
catagtactcttttggacaccaagg

SEQ ID NO: 5283541 - DNA, 25 bp, Homo sapien
atagtactcttttggacaccaagga

SEQ ID NO: 5283542 - DNA, 25 bp, Homo sapien
tagtactcttttggacaccaaggat

SEQ ID NO: 5283543 - DNA, 25 bp, Homo sapien
tcatagtactcttttggacaccaag

SEQ ID NO: 5283544 - DNA, 25 bp, Homo sapien
ctatagtaccataataaaatgtaag

SEQ ID NO: 5283545 - DNA, 25 bp, Homo sapien
ttttgccatggttcttagcagagta

SEQ ID NO: 5283546 - DNA, 25 bp, Homo sapien
gccatggttcttagcagagtaagaa

SEQ ID NO: 5283547 - DNA, 25 bp, Homo sapien
gaggacctgcaacttacagatttat

SEQ ID NO: 5283548 - DNA, 25 bp, Homo sapien
gggttccagttttgcacgctgcaga

SEQ ID NO: 5283549 - DNA, 25 bp, Homo sapien
caggtctgttcctctgctgcagggc

SEQ ID NO: 5283550 - DNA, 25 bp, Homo sapien
ctgtcaggtctgttcctctgctgca

SEQ ID NO: 5283551 - DNA, 25 bp, Homo sapien
gtcaggtctgttcctctgctgcagg

SEQ ID NO: 5283552 - DNA, 25 bp, Homo sapien
ggtctgttcctctgctgcagggcat

SEQ ID NO: 5283553 - DNA, 25 bp, Homo sapien
agttgtcaacaggagctaacacagc

SEQ ID NO: 5283554 - DNA, 25 bp, Homo sapien
cattgaagagctgggctacaaatcc

SEQ ID NO: 5283555 - DNA, 25 bp, Homo sapien
tgacaactggcaggtcttaaactgg

SEQ ID NO: 5283556 - DNA, 25 bp, Homo sapien
catgatgaaccaatgggccgagagc

SEQ ID NO: 5283557 - DNA, 25 bp, Homo sapien
taactgtttaatgtgcacctaaggg

SEQ ID NO: 5283558 - DNA, 25 bp, Homo sapien
gccctgagggagtgaacatgaacaa

SEQ ID NO: 5283559 - DNA, 25 bp, Homo sapien
gaggtatggacaaagccctacggga

SEQ ID NO: 5283560 - DNA, 25 bp, Homo sapien
tactaggctaagtggctgacattca

SEQ ID NO: 5283561 - DNA, 25 bp, Homo sapien
cctggcagcttacgctgcatggcag

SEQ ID NO: 5283562 - DNA, 25 bp, Homo sapien
tgcaaggctttctgttagcacttca

SEQ ID NO: 5283563 - DNA, 25 bp, Homo sapien
acgctgcatggcagggcaaccagga

SEQ ID NO: 5283564 - DNA, 25 bp, Homo sapien
tgagcaatgcaaggctttctgttag

SEQ ID NO: 5283565 - DNA, 25 bp, Homo sapien
tactcagcatcactaatacctttca

SEQ ID NO: 5283566 - DNA, 25 bp, Homo sapien
ttatggttcctatacaacagctcct

SEQ ID NO: 5283567 - DNA, 25 bp, Homo sapien
gcattgggcattccggggtctcttg

SEQ ID NO: 5283568 - DNA, 25 bp, Homo sapien
ctgttgtttagaatggcattgggca

SEQ ID NO: 5283569 - DNA, 25 bp, Homo sapien
cacaccagctgtttccgtaagcctg

SEQ ID NO: 5283570 - DNA, 25 bp, Homo sapien
gctgtttccgtaagcctgggccaaa

SEQ ID NO: 5283571 - DNA, 25 bp, Homo sapien
cagattcagtctggcagtagcacac

SEQ ID NO: 5283572 - DNA, 25 bp, Homo sapien
tcagattcagtctggcagtagcaca

SEQ ID NO: 5283573 - DNA, 25 bp, Homo sapien
tctatccccttgcagcactaaagtg

SEQ ID NO: 5283574 - DNA, 25 bp, Homo sapien
tatgtcattctaccaacccttaaag

SEQ ID NO: 5283575 - DNA, 25 bp, Homo sapien
tagtcctttgccctcgtatctctgc

SEQ ID NO: 5283576 - DNA, 25 bp, Homo sapien
ttctcagtagaaggcctagagaggc

SEQ ID NO: 5283577 - DNA, 25 bp, Homo sapien
tggtttcgtcatctctcttcaccac

SEQ ID NO: 5283578 - DNA, 25 bp, Homo sapien
tacataaatgctcctttatggtttc

SEQ ID NO: 5283579 - DNA, 25 bp, Homo sapien
taaatgctcctttatggtttcgtca

SEQ ID NO: 5283580 - DNA, 25 bp, Homo sapien
cttggcccccaaggtaggcagcatt

SEQ ID NO: 5283581 - DNA, 25 bp, Homo sapien
gtccaggacctgatagaaacactgc

SEQ ID NO: 5283582 - DNA, 25 bp, Homo sapien
catagggcatatgttaggtcaccaa

SEQ ID NO: 5283583 - DNA, 25 bp, Homo sapien
tactatcaacagctacatgccaatg

SEQ ID NO: 5283584 - DNA, 25 bp, Homo sapien
taataagtctcccatgaaaggaaag

SEQ ID NO: 5283585 - DNA, 25 bp, Homo sapien
ggtcttctgagactcgggcaatggt

SEQ ID NO: 5283586 - DNA, 25 bp, Homo sapien
ccaaaaccaggtacatctagatgtt

SEQ ID NO: 5283587 - DNA, 25 bp, Homo sapien
tccagtaattgctccaaggaagcca

SEQ ID NO: 5283588 - DNA, 25 bp, Homo sapien
agtaagtgagatgggcagaagcata

SEQ ID NO: 5283589 - DNA, 25 bp, Homo sapien
ggaaatccagcagaactcagaattt

SEQ ID NO: 5283590 - DNA, 25 bp, Homo sapien
tggaaatccagcagaactcagaatt

SEQ ID NO: 5283591 - DNA, 25 bp, Homo sapien
tgaaatggctgttctaggtactaca

SEQ ID NO: 5283592 - DNA, 25 bp, Homo sapien
tgtagaaaccttacttgccattatg

SEQ ID NO: 5283593 - DNA, 25 bp, Homo sapien
gaagaaagttgcatttgtccacatt

SEQ ID NO: 5283594 - DNA, 25 bp, Homo sapien
tagaaccataagagacagtgctata

SEQ ID NO: 5283595 - DNA, 25 bp, Homo sapien
agtattaaagaccagaggccaggtg

SEQ ID NO: 5283596 - DNA, 25 bp, Homo sapien
tgatggtggccccattactgcaggg

SEQ ID NO: 5283597 - DNA, 25 bp, Homo sapien
tcttctgggacagtaccgtagagca

SEQ ID NO: 5283598 - DNA, 25 bp, Homo sapien
cactatggccacgtagggtagagtc

SEQ ID NO: 5283599 - DNA, 25 bp, Homo sapien
ctatatgcggaagaagtgtttctca

SEQ ID NO: 5283600 - DNA, 25 bp, Homo sapien
tatgcggaagaagtgtttctcactg

SEQ ID NO: 5283601 - DNA, 25 bp, Homo sapien
gcggaagaagtgtttctcactgtgc

SEQ ID NO: 5283602 - DNA, 25 bp, Homo sapien
tatatgcggaagaagtgtttctcac

SEQ ID NO: 5283603 - DNA, 25 bp, Homo sapien
ttgaaggccccttctgattagcaag

SEQ ID NO: 5283604 - DNA, 25 bp, Homo sapien
gttcattacttgaaggccccttctg

SEQ ID NO: 5283605 - DNA, 25 bp, Homo sapien
cattctctaggttcattacttgaag

SEQ ID NO: 5283606 - DNA, 25 bp, Homo sapien
tctaggttcattacttgaaggcccc

SEQ ID NO: 5283607 - DNA, 25 bp, Homo sapien
tcgttcaattgttggaaagagcaga

SEQ ID NO: 5283608 - DNA, 25 bp, Homo sapien
gccagtaacatagagaacatatcga

SEQ ID NO: 5283609 - DNA, 25 bp, Homo sapien
tatcgaaaccagcacaaaagtggag

SEQ ID NO: 5283610 - DNA, 25 bp, Homo sapien
tgggtgactcagacattcgttcaat

SEQ ID NO: 5283611 - DNA, 25 bp, Homo sapien
tacaaaatcgaaagcactgttgcta

SEQ ID NO: 5283612 - DNA, 25 bp, Homo sapien
ccactttataagtagtgtatcatac

SEQ ID NO: 5283613 - DNA, 25 bp, Homo sapien
aataatcctaagtcttccctcctgc

SEQ ID NO: 5283614 - DNA, 25 bp, Homo sapien
gaacaaacttatcagttagatcaat

SEQ ID NO: 5283615 - DNA, 25 bp, Homo sapien
tctgatgcagaaggttagagctgac

SEQ ID NO: 5283616 - DNA, 25 bp, Homo sapien
caggctctaataataccccagcagg

SEQ ID NO: 5283617 - DNA, 25 bp, Homo sapien
gcagaccttgttaagaagagcacag

SEQ ID NO: 5283618 - DNA, 25 bp, Homo sapien
tgcctctggtgtacaaacttctaag

SEQ ID NO: 5283619 - DNA, 25 bp, Homo sapien
tacttctgttggctgtatcacttca

SEQ ID NO: 5283620 - DNA, 25 bp, Homo sapien
gtagttctactaatgctcttgcaac

SEQ ID NO: 5283621 - DNA, 25 bp, Homo sapien
tcttgcaacagtgtacaaggcacac

SEQ ID NO: 5283622 - DNA, 25 bp, Homo sapien
cttcaaagtagaaacactgggtcat

SEQ ID NO: 5283623 - DNA, 25 bp, Homo sapien
cagtacaactatctcttaggaagca

SEQ ID NO: 5283624 - DNA, 25 bp, Homo sapien
tctccaggtagcctcagaattcagt

SEQ ID NO: 5283625 - DNA, 25 bp, Homo sapien
ggtctatagctacaaaattctcaca

SEQ ID NO: 5283626 - DNA, 25 bp, Homo sapien
tagtgaatagcaaaccttaaggtct

SEQ ID NO: 5283627 - DNA, 25 bp, Homo sapien
gagactcttaacttccctaatggga

SEQ ID NO: 5283628 - DNA, 25 bp, Homo sapien
cctaatgggactggatagcattgct

SEQ ID NO: 5283629 - DNA, 25 bp, Homo sapien
gctcagagaaaggacaacagactct

SEQ ID NO: 5283630 - DNA, 25 bp, Homo sapien
ttgtccatcaaaagtgcctccacgg

SEQ ID NO: 5283631 - DNA, 25 bp, Homo sapien
tagtttcactgtacagtaacagccc

SEQ ID NO: 5283632 - DNA, 25 bp, Homo sapien
taaactctagtttcactgtacagta

SEQ ID NO: 5283633 - DNA, 25 bp, Homo sapien
tcataaacacatgcatcaggtcaat

SEQ ID NO: 5283634 - DNA, 25 bp, Homo sapien
catgcatcaggtcaatctggttctc

SEQ ID NO: 5283635 - DNA, 25 bp, Homo sapien
tttcactgtcgaacaagacaactgt

SEQ ID NO: 5283636 - DNA, 25 bp, Homo sapien
tatagctgctaactcttgctgctga

SEQ ID NO: 5283637 - DNA, 25 bp, Homo sapien
gctcctttggatgtatatagctgct

SEQ ID NO: 5283638 - DNA, 25 bp, Homo sapien
tttccttaaggtcaatgcagtggtt

SEQ ID NO: 5283639 - DNA, 25 bp, Homo sapien
tctgctgtccagaaaatgagcccat

SEQ ID NO: 5283640 - DNA, 25 bp, Homo sapien
ctgctatcatcagagatccttcaat

SEQ ID NO: 5283641 - DNA, 25 bp, Homo sapien
tcatcagagatccttcaatggcttt

SEQ ID NO: 5283642 - DNA, 25 bp, Homo sapien
ggctttctgctgtccagaaaatgag

SEQ ID NO: 5283643 - DNA, 25 bp, Homo sapien
tctgaagtgtgaaatagctgcctat

SEQ ID NO: 5283644 - DNA, 25 bp, Homo sapien
ttctcaggaaagctagtttgtgctc

SEQ ID NO: 5283645 - DNA, 25 bp, Homo sapien
gtttgtgctctatttgtccatttag

SEQ ID NO: 5283646 - DNA, 25 bp, Homo sapien
tggccaatgagcacaagtttcatgt

SEQ ID NO: 5283647 - DNA, 25 bp, Homo sapien
gaacctgagcctatttcttagaccc

SEQ ID NO: 5283648 - DNA, 25 bp, Homo sapien
ttaaattcccttatagcctcagaac

SEQ ID NO: 5283649 - DNA, 25 bp, Homo sapien
gaactgcccgaattggtggatgaca

SEQ ID NO: 5283650 - DNA, 25 bp, Homo sapien
cacagctcacctaacggttctagag

SEQ ID NO: 5283651 - DNA, 25 bp, Homo sapien
tattaaatcttgctcccttctgtgc

SEQ ID NO: 5283652 - DNA, 25 bp, Homo sapien
gaggtagtttgcatctccatggtat

SEQ ID NO: 5283653 - DNA, 25 bp, Homo sapien
taggtgaaaccctatgcccaaatgc

SEQ ID NO: 5283654 - DNA, 25 bp, Homo sapien
tctgtctgttgtacctctgcaccca

SEQ ID NO: 5283655 - DNA, 25 bp, Homo sapien
aacccggccacacagatgaaggtgt

SEQ ID NO: 5283656 - DNA, 25 bp, Homo sapien
ggttgcacacctgttaatctgaggt

SEQ ID NO: 5283657 - DNA, 25 bp, Homo sapien
ggcaccatgggcctaatgccacaag

SEQ ID NO: 5283658 - DNA, 25 bp, Homo sapien
gattagcaggccacggtttatcact

SEQ ID NO: 5283659 - DNA, 25 bp, Homo sapien
ggagccaacgcatgcccagcatgac

SEQ ID NO: 5283660 - DNA, 25 bp, Homo sapien
cagcatgactgatagtccaaactgg

SEQ ID NO: 5283661 - DNA, 25 bp, Homo sapien
ctgatgttgtaagaatcttcttgtc

SEQ ID NO: 5283662 - DNA, 25 bp, Homo sapien
actggaaagcgtctgtttgtcaaag

SEQ ID NO: 5283663 - DNA, 25 bp, Homo sapien
tggtcagtttattggccactgtata

SEQ ID NO: 5283664 - DNA, 25 bp, Homo sapien
cttctttgtcaaataggatgaaaac

SEQ ID NO: 5283665 - DNA, 25 bp, Homo sapien
ggtcagtttattggccactgtatag

SEQ ID NO: 5283666 - DNA, 25 bp, Homo sapien
tggcttctttgtcaaataggatgaa

SEQ ID NO: 5283667 - DNA, 25 bp, Homo sapien
ctgtccagggcccacattttagaac

SEQ ID NO: 5283668 - DNA, 25 bp, Homo sapien
gctccaccacacaaaatgaattcct

SEQ ID NO: 5283669 - DNA, 25 bp, Homo sapien
tgatcatgaaagaggtctgtccagg

SEQ ID NO: 5283670 - DNA, 25 bp, Homo sapien
cagggcccacattttagaacctggg

SEQ ID NO: 5283671 - DNA, 25 bp, Homo sapien
caaggtagttcagttctgcaaataa

SEQ ID NO: 5283672 - DNA, 25 bp, Homo sapien
atcaatcaaatgtaggcaagagtgg

SEQ ID NO: 5283673 - DNA, 25 bp, Homo sapien
aatgagagtcttggtaatgatatgg

SEQ ID NO: 5283674 - DNA, 25 bp, Homo sapien
gagtttggcagctatcaaaataatc

SEQ ID NO: 5283675 - DNA, 25 bp, Homo sapien
cagagggactggattaactggatta

SEQ ID NO: 5283676 - DNA, 25 bp, Homo sapien
tcagagagacctcttggagggtgtc

SEQ ID NO: 5283677 - DNA, 25 bp, Homo sapien
cttggagccggtggtccagatcaga

SEQ ID NO: 5283678 - DNA, 25 bp, Homo sapien
gagctgatccgggaagccgatgtca

SEQ ID NO: 5283679 - DNA, 25 bp, Homo sapien
cctcaggtgacgtcacagtaccgcg

SEQ ID NO: 5283680 - DNA, 25 bp, Homo sapien
tctgtccgggtctaataaattttgc

SEQ ID NO: 5283681 - DNA, 25 bp, Homo sapien
aagccagtattcacttctgtccggg

SEQ ID NO: 5283682 - DNA, 25 bp, Homo sapien
caattgccctaaggcatgggaaggc

SEQ ID NO: 5283683 - DNA, 25 bp, Homo sapien
ggcagagcttaacttgtttaccaag

SEQ ID NO: 5283684 - DNA, 25 bp, Homo sapien
gttgaggatgatggtctcaggcata

SEQ ID NO: 5283685 - DNA, 25 bp, Homo sapien
tcaggcataaatggcccctctttgc

SEQ ID NO: 5283686 - DNA, 25 bp, Homo sapien
ttacatgggtctagaaggggcaaag

SEQ ID NO: 5283687 - DNA, 25 bp, Homo sapien
caatccatatagactcatgtctgag

SEQ ID NO: 5283688 - DNA, 25 bp, Homo sapien
tctattagaccatgatcaagaggaa

SEQ ID NO: 5283689 - DNA, 25 bp, Homo sapien
caatcatgaatatcaccaagttcag

SEQ ID NO: 5283690 - DNA, 25 bp, Homo sapien
tcctttagtgttgtatctgacattt

SEQ ID NO: 5283691 - DNA, 25 bp, Homo sapien
cattagcaacacgatttcaatcatg

SEQ ID NO: 5283692 - DNA, 25 bp, Homo sapien
tacttccatagttcatgaggttctg

SEQ ID NO: 5283693 - DNA, 25 bp, Homo sapien
ccatagttcatgaggttctgatgaa

SEQ ID NO: 5283694 - DNA, 25 bp, Homo sapien
ctgatgaagataccttttgcttgga

SEQ ID NO: 5283695 - DNA, 25 bp, Homo sapien
ttctgatgaagataccttttgcttg

SEQ ID NO: 5283696 - DNA, 25 bp, Homo sapien
ggaatttcatgagcagagtgatggc

SEQ ID NO: 5283697 - DNA, 25 bp, Homo sapien
gtcaaggatgacagggctgcatcca

SEQ ID NO: 5283698 - DNA, 25 bp, Homo sapien
gagagagatgtactgtgcaccacct

SEQ ID NO: 5283699 - DNA, 25 bp, Homo sapien
aggagagagatgtactgtgcaccac

SEQ ID NO: 5283700 - DNA, 25 bp, Homo sapien
gagatgtactgtgcaccacctgcac

SEQ ID NO: 5283701 - DNA, 25 bp, Homo sapien
acctgcaccccccaatctctgttgg

SEQ ID NO: 5283702 - DNA, 25 bp, Homo sapien
gacctcataactcaatagcatcttc

SEQ ID NO: 5283703 - DNA, 25 bp, Homo sapien
ctgacctcataactcaatagcatct

SEQ ID NO: 5283704 - DNA, 25 bp, Homo sapien
tgacctcataactcaatagcatctt

SEQ ID NO: 5283705 - DNA, 25 bp, Homo sapien
acctcataactcaatagcatcttca

SEQ ID NO: 5283706 - DNA, 25 bp, Homo sapien
gagtaaaatccttcagaggccttgt

SEQ ID NO: 5283707 - DNA, 25 bp, Homo sapien
tgtcttgtactttcagcttcagaac

SEQ ID NO: 5283708 - DNA, 25 bp, Homo sapien
gaattattccgcaaagagactttca

SEQ ID NO: 5283709 - DNA, 25 bp, Homo sapien
tggagtagagtgtctttgttgtctt

SEQ ID NO: 5283710 - DNA, 25 bp, Homo sapien
gttctgcacagaaagactttctctg

SEQ ID NO: 5283711 - DNA, 25 bp, Homo sapien
tctggagggctttctagctcaggat

SEQ ID NO: 5283712 - DNA, 25 bp, Homo sapien
tctgcacagaaagactttctctggg

SEQ ID NO: 5283713 - DNA, 25 bp, Homo sapien
agggctttctagctcaggatactcc

SEQ ID NO: 5283714 - DNA, 25 bp, Homo sapien
acccagtgaaggaatagaaaacatg

SEQ ID NO: 5283715 - DNA, 25 bp, Homo sapien
tatttgatcatgacggcaagcccag

SEQ ID NO: 5283716 - DNA, 25 bp, Homo sapien
gaaaactgaatatttgctgcacctg

SEQ ID NO: 5283717 - DNA, 25 bp, Homo sapien
tgaatatttgctgcacctgtgaaaa

SEQ ID NO: 5283718 - DNA, 25 bp, Homo sapien
tctgcatagccacactgttccccat

SEQ ID NO: 5283719 - DNA, 25 bp, Homo sapien
caagtctcgtgctgccaacagtggg

SEQ ID NO: 5283720 - DNA, 25 bp, Homo sapien
atttttcaagcttagtgccccagac

SEQ ID NO: 5283721 - DNA, 25 bp, Homo sapien
ttcaaagcaagtctcgtgctgccaa

SEQ ID NO: 5283722 - DNA, 25 bp, Homo sapien
ggagcagctgtaggttgctgtccca

SEQ ID NO: 5283723 - DNA, 25 bp, Homo sapien
agcagctgtaggttgctgtcccata

SEQ ID NO: 5283724 - DNA, 25 bp, Homo sapien
gctgtaggttgctgtcccatatttg

SEQ ID NO: 5283725 - DNA, 25 bp, Homo sapien
cagctgtaggttgctgtcccatatt

SEQ ID NO: 5283726 - DNA, 25 bp, Homo sapien
caactatacccgaaaactccaggat

SEQ ID NO: 5283727 - DNA, 25 bp, Homo sapien
gaatcaatggacgaaacaggaccat

SEQ ID NO: 5283728 - DNA, 25 bp, Homo sapien
gtcctccccagggaatcaatggacg

SEQ ID NO: 5283729 - DNA, 25 bp, Homo sapien
tccccagggaatcaatggacgaaac

SEQ ID NO: 5283730 - DNA, 25 bp, Homo sapien
gaattagtgatgctctacagtaggg

SEQ ID NO: 5283731 - DNA, 25 bp, Homo sapien
caactcgaagggagaccagctgtac

SEQ ID NO: 5283732 - DNA, 25 bp, Homo sapien
cttttgctcccgctcaaagggcacg

SEQ ID NO: 5283733 - DNA, 25 bp, Homo sapien
taaaggtctaatgggaaatatgtcc

SEQ ID NO: 5283734 - DNA, 25 bp, Homo sapien
ttcaccgcagataccagctctgatc

SEQ ID NO: 5283735 - DNA, 25 bp, Homo sapien
aacttcaccgcagataccagctctg

SEQ ID NO: 5283736 - DNA, 25 bp, Homo sapien
ccgcagataccagctctgatctgct

SEQ ID NO: 5283737 - DNA, 25 bp, Homo sapien
caccgcagataccagctctgatctg

SEQ ID NO: 5283738 - DNA, 25 bp, Homo sapien
tttggcccctggctgctcaaaaccc

SEQ ID NO: 5283739 - DNA, 25 bp, Homo sapien
ttttggcccctggctgctcaaaacc

SEQ ID NO: 5283740 - DNA, 25 bp, Homo sapien
ttggcccctggctgctcaaaaccca

SEQ ID NO: 5283741 - DNA, 25 bp, Homo sapien
tggcccctggctgctcaaaacccac

SEQ ID NO: 5283742 - DNA, 25 bp, Homo sapien
tcagttccaaaagcttcttctccaa

SEQ ID NO: 5283743 - DNA, 25 bp, Homo sapien
aagcttcttctccaatcaacctgca

SEQ ID NO: 5283744 - DNA, 25 bp, Homo sapien
catcttgatggcctgcgaggcctgc

SEQ ID NO: 5283745 - DNA, 25 bp, Homo sapien
cttccttgatggcaacagatcccag

SEQ ID NO: 5283746 - DNA, 25 bp, Homo sapien
tccaccggcttatgtgtacacatgt

SEQ ID NO: 5283747 - DNA, 25 bp, Homo sapien
gcctttgatttccaccggcttatgt

SEQ ID NO: 5283748 - DNA, 25 bp, Homo sapien
cgagtgctctcctagagaaggagct

SEQ ID NO: 5283749 - DNA, 25 bp, Homo sapien
gagtgctctcctagagaaggagctc

SEQ ID NO: 5283750 - DNA, 25 bp, Homo sapien
ttgccatagaatccccccgtgaagg

SEQ ID NO: 5283751 - DNA, 25 bp, Homo sapien
cccaactcggttgccatagaatccc

SEQ ID NO: 5283752 - DNA, 25 bp, Homo sapien
ccccgtgaaggcctgcaagaaagtc

SEQ ID NO: 5283753 - DNA, 25 bp, Homo sapien
tagaatccccccgtgaaggcctgca

SEQ ID NO: 5283754 - DNA, 25 bp, Homo sapien
ggcggatggatttctggcatttatt

SEQ ID NO: 5283755 - DNA, 25 bp, Homo sapien
ctggacaaggcggatggatttctgg

SEQ ID NO: 5283756 - DNA, 25 bp, Homo sapien
caatctcagccccggatttttctgc

SEQ ID NO: 5283757 - DNA, 25 bp, Homo sapien
gacaaggcggatggatttctggcat

SEQ ID NO: 5283758 - DNA, 25 bp, Homo sapien
aaagtcatatctcaagtttacaatt

SEQ ID NO: 5283759 - DNA, 25 bp, Homo sapien
tgcactagaaactgccctgggtcct

SEQ ID NO: 5283760 - DNA, 25 bp, Homo sapien
tttccagggttaaggtgcaattctc

SEQ ID NO: 5283761 - DNA, 25 bp, Homo sapien
tccatttgtggagactgcactagaa

SEQ ID NO: 5283762 - DNA, 25 bp, Homo sapien
catccttcctctccccctcattctc

SEQ ID NO: 5283763 - DNA, 25 bp, Homo sapien
tctgcaggtctgcatccttcctctc

SEQ ID NO: 5283764 - DNA, 25 bp, Homo sapien
tgcaggtctgcatccttcctctccc

SEQ ID NO: 5283765 - DNA, 25 bp, Homo sapien
catctgcaggtctgcatccttcctc

SEQ ID NO: 5283766 - DNA, 25 bp, Homo sapien
agaggttggtctagaaactccctgg

SEQ ID NO: 5283767 - DNA, 25 bp, Homo sapien
ctggggtaccacatagaatgagctt

SEQ ID NO: 5283768 - DNA, 25 bp, Homo sapien
gggtaccacatagaatgagcttcca

SEQ ID NO: 5283769 - DNA, 25 bp, Homo sapien
aagcagcagaggttggtctagaaac

SEQ ID NO: 5283770 - DNA, 25 bp, Homo sapien
gagtcatgagtactgaacccacatt

SEQ ID NO: 5283771 - DNA, 25 bp, Homo sapien
cttgcaaatagaggctgatcagcac

SEQ ID NO: 5283772 - DNA, 25 bp, Homo sapien
agcactataaatccttgaatacagc

SEQ ID NO: 5283773 - DNA, 25 bp, Homo sapien
gcagcttcttgttcgttgggagtca

SEQ ID NO: 5283774 - DNA, 25 bp, Homo sapien
ccagatctcagagcctggcagagca

SEQ ID NO: 5283775 - DNA, 25 bp, Homo sapien
ccccagatctcagagcctggcagag

SEQ ID NO: 5283776 - DNA, 25 bp, Homo sapien
cctgtacccccagatctcagagcct

SEQ ID NO: 5283777 - DNA, 25 bp, Homo sapien
tgtacccccagatctcagagcctgg

SEQ ID NO: 5283778 - DNA, 25 bp, Homo sapien
gccacacagacccagtgaaggactg

SEQ ID NO: 5283779 - DNA, 25 bp, Homo sapien
tctgagccacacagacccagtgaag

SEQ ID NO: 5283780 - DNA, 25 bp, Homo sapien
tctcaacttggccaagacaatgcag

SEQ ID NO: 5283781 - DNA, 25 bp, Homo sapien
cccatggcagatattctcaacttgg

SEQ ID NO: 5283782 - DNA, 25 bp, Homo sapien
aggattgttgggacagtgaacagat

SEQ ID NO: 5283783 - DNA, 25 bp, Homo sapien
tgaagaagtaaaaatcttctcggag

SEQ ID NO: 5283784 - DNA, 25 bp, Homo sapien
aatcttctcggagaatgatgctgct

SEQ ID NO: 5283785 - DNA, 25 bp, Homo sapien
ggattgttgggacagtgaacagatt

SEQ ID NO: 5283786 - DNA, 25 bp, Homo sapien
gtctccctctgggatggcattgcta

SEQ ID NO: 5283787 - DNA, 25 bp, Homo sapien
tctccctctgggatggcattgctac

SEQ ID NO: 5283788 - DNA, 25 bp, Homo sapien
tctgtctccctctgggatggcattg

SEQ ID NO: 5283789 - DNA, 25 bp, Homo sapien
ctgtctccctctgggatggcattgc

SEQ ID NO: 5283790 - DNA, 25 bp, Homo sapien
tcttcttctttcagcttaggatcct

SEQ ID NO: 5283791 - DNA, 25 bp, Homo sapien
cttctttcagcttaggatccttctc

SEQ ID NO: 5283792 - DNA, 25 bp, Homo sapien
tttcagcttaggatccttctctggg

SEQ ID NO: 5283793 - DNA, 25 bp, Homo sapien
tctttcagcttaggatccttctctg

SEQ ID NO: 5283794 - DNA, 25 bp, Homo sapien
aagccctggaggcacatctgctgag

SEQ ID NO: 5283795 - DNA, 25 bp, Homo sapien
gagggagcctctgggagcctttttg

SEQ ID NO: 5283796 - DNA, 25 bp, Homo sapien
gaaggggtggcatcccactgagaaa

SEQ ID NO: 5283797 - DNA, 25 bp, Homo sapien
tttccccagatgtcagaagggctgg

SEQ ID NO: 5283798 - DNA, 25 bp, Homo sapien
gaccctgcatccacggcttatctct

SEQ ID NO: 5283799 - DNA, 25 bp, Homo sapien
cctgcatccacggcttatctctgta

SEQ ID NO: 5283800 - DNA, 25 bp, Homo sapien
gagaccctgcatccacggcttatct

SEQ ID NO: 5283801 - DNA, 25 bp, Homo sapien
ctgcatccacggcttatctctgtac

SEQ ID NO: 5283802 - DNA, 25 bp, Homo sapien
agagtcagccctgcatgggcagcca

SEQ ID NO: 5283803 - DNA, 25 bp, Homo sapien
aagagtcagccctgcatgggcagcc

SEQ ID NO: 5283804 - DNA, 25 bp, Homo sapien
ctgtcataggaaagagtcagccctg

SEQ ID NO: 5283805 - DNA, 25 bp, Homo sapien
tcataggaaagagtcagccctgcat

SEQ ID NO: 5283806 - DNA, 25 bp, Homo sapien
agggcatgagggtcacccacgttga

SEQ ID NO: 5283807 - DNA, 25 bp, Homo sapien
ctccagcatgagaatgagggcatga

SEQ ID NO: 5283808 - DNA, 25 bp, Homo sapien
taacctatccggaatgttgagttta

SEQ ID NO: 5283809 - DNA, 25 bp, Homo sapien
ccaccagatcgtaacctatccggaa

SEQ ID NO: 5283810 - DNA, 25 bp, Homo sapien
aaaaggggaattgagctattcaact

SEQ ID NO: 5283811 - DNA, 25 bp, Homo sapien
aaaggggaattgagctattcaactg

SEQ ID NO: 5283812 - DNA, 25 bp, Homo sapien
aggggaattgagctattcaactgac

SEQ ID NO: 5283813 - DNA, 25 bp, Homo sapien
aaggggaattgagctattcaactga

SEQ ID NO: 5283814 - DNA, 25 bp, Homo sapien
ggaggtagctctgaagacatctggt

SEQ ID NO: 5283815 - DNA, 25 bp, Homo sapien
tgctgagtcccattggacccatttc

SEQ ID NO: 5283816 - DNA, 25 bp, Homo sapien
gaagaaaatggaggtagctctgaag

SEQ ID NO: 5283817 - DNA, 25 bp, Homo sapien
tctggtggtgctgagtcccattgga

SEQ ID NO: 5283818 - DNA, 25 bp, Homo sapien
tatagctcatcagggaaactcttgc

SEQ ID NO: 5283819 - DNA, 25 bp, Homo sapien
cagtgggtaccatgtgactgcacaa

SEQ ID NO: 5283820 - DNA, 25 bp, Homo sapien
taagcactgggaatcttggactccc

SEQ ID NO: 5283821 - DNA, 25 bp, Homo sapien
tatgagggacactggtcaaggaact

SEQ ID NO: 5283822 - DNA, 25 bp, Homo sapien
ttatttcatctcgaggcctaccgga

SEQ ID NO: 5283823 - DNA, 25 bp, Homo sapien
taccggagagccttgccttgcaaag

SEQ ID NO: 5283824 - DNA, 25 bp, Homo sapien
tcagtgaggaagactatgtggcaca

SEQ ID NO: 5283825 - DNA, 25 bp, Homo sapien
ggtccgtattgccatgaagcccctg

SEQ ID NO: 5283826 - DNA, 25 bp, Homo sapien
ccagaacattttatcaatgccctcg

SEQ ID NO: 5283827 - DNA, 25 bp, Homo sapien
tgtctttcaatacaaatgagccaca

SEQ ID NO: 5283828 - DNA, 25 bp, Homo sapien
tctgttacttaaatcacactatgtg

SEQ ID NO: 5283829 - DNA, 25 bp, Homo sapien
cactatgtgttctagaggttttgct

SEQ ID NO: 5283830 - DNA, 25 bp, Homo sapien
gagccctggtgccagctttggtgca

SEQ ID NO: 5283831 - DNA, 25 bp, Homo sapien
gttcagagaccttccgagccctggt

SEQ ID NO: 5283832 - DNA, 25 bp, Homo sapien
gcaggtccagttcatatgtgcttct

SEQ ID NO: 5283833 - DNA, 25 bp, Homo sapien
tctactgcctactgcaaggctggct

SEQ ID NO: 5283834 - DNA, 25 bp, Homo sapien
ccatctggatcggtaaggatgctaa

SEQ ID NO: 5283835 - DNA, 25 bp, Homo sapien
caaaatattcttcacgaagggccat

SEQ ID NO: 5283836 - DNA, 25 bp, Homo sapien
gattgcagctttttcagtaactccg

SEQ ID NO: 5283837 - DNA, 25 bp, Homo sapien
tattttcttcgtcgcaatggcctgg

SEQ ID NO: 5283838 - DNA, 25 bp, Homo sapien
cagttcctggtacagattctgggcc

SEQ ID NO: 5283839 - DNA, 25 bp, Homo sapien
tgagtccctggaaactggcttggcc

SEQ ID NO: 5283840 - DNA, 25 bp, Homo sapien
tggactttcgaatatacctgggaca

SEQ ID NO: 5283841 - DNA, 25 bp, Homo sapien
tgaagattacgtagcacctctgtgg

SEQ ID NO: 5283842 - DNA, 25 bp, Homo sapien
tatcatcaatttgcctaatggcccc

SEQ ID NO: 5283843 - DNA, 25 bp, Homo sapien
taatcataaaggacccctgtggcct

SEQ ID NO: 5283844 - DNA, 25 bp, Homo sapien
ggccttgggcacgttgtctttcaga

SEQ ID NO: 5283845 - DNA, 25 bp, Homo sapien
ccagtggtacttgttgacataatca

SEQ ID NO: 5283846 - DNA, 25 bp, Homo sapien
gttccatttagaaaagtcgtcatct

SEQ ID NO: 5283847 - DNA, 25 bp, Homo sapien
ccatttagaaaagtcgtcatcttca

SEQ ID NO: 5283848 - DNA, 25 bp, Homo sapien
ctgagggctgtagtagaagttccat

SEQ ID NO: 5283849 - DNA, 25 bp, Homo sapien
gagggctgtagtagaagttccattt

SEQ ID NO: 5283850 - DNA, 25 bp, Homo sapien
tcggtgaacgctgggcttttgatat

SEQ ID NO: 5283851 - DNA, 25 bp, Homo sapien
tgatattgaggtgcgcttttccttc

SEQ ID NO: 5283852 - DNA, 25 bp, Homo sapien
gatggagatcggtgaacgctgggct

SEQ ID NO: 5283853 - DNA, 25 bp, Homo sapien
cttgtctttctggtagcgcagatgg

SEQ ID NO: 5283854 - DNA, 25 bp, Homo sapien
tagtcttagaggctaacgtaccatc

SEQ ID NO: 5283855 - DNA, 25 bp, Homo sapien
aacgtaccatcttcgattttgtgtg

SEQ ID NO: 5283856 - DNA, 25 bp, Homo sapien
catattctgcactgaagtcacggtg

SEQ ID NO: 5283857 - DNA, 25 bp, Homo sapien
tcacggtgtgcaaatgttcctttag

SEQ ID NO: 5283858 - DNA, 25 bp, Homo sapien
ggaatctcaatggtctgctcaggca

SEQ ID NO: 5283859 - DNA, 25 bp, Homo sapien
tgggctgacttgcatggacctgaac

SEQ ID NO: 5283860 - DNA, 25 bp, Homo sapien
tggaaagctcgacctggctctggaa

SEQ ID NO: 5283861 - DNA, 25 bp, Homo sapien
ggagagtctacctcaaagcgtgcag

SEQ ID NO: 5283862 - DNA, 25 bp, Homo sapien
tgtggtgccctctaatttgtactgc

SEQ ID NO: 5283863 - DNA, 25 bp, Homo sapien
caagtaagtgttggcctcactagca

SEQ ID NO: 5283864 - DNA, 25 bp, Homo sapien
tgaatattcccgagaaagaaccgaa

SEQ ID NO: 5283865 - DNA, 25 bp, Homo sapien
tggtcaactgctcctttagcggtag

SEQ ID NO: 5283866 - DNA, 25 bp, Homo sapien
tgtatgaaggcacacggacgtcaga

SEQ ID NO: 5283867 - DNA, 25 bp, Homo sapien
aaggactggcagctctaatgatggc

SEQ ID NO: 5283868 - DNA, 25 bp, Homo sapien
tttgggaacacatagccgaatgccg

SEQ ID NO: 5283869 - DNA, 25 bp, Homo sapien
cgtcagaacctaggatggagaaact

SEQ ID NO: 5283870 - DNA, 25 bp, Homo sapien
ccgtgatctcaaatggctgggctga

SEQ ID NO: 5283871 - DNA, 25 bp, Homo sapien
gatctcgttgcgcaggtcagcctga

SEQ ID NO: 5283872 - DNA, 25 bp, Homo sapien
gggagccagattcataaaccaagtt

SEQ ID NO: 5283873 - DNA, 25 bp, Homo sapien
tcagagccagcggattaatcttagg

SEQ ID NO: 5283874 - DNA, 25 bp, Homo sapien
ttctggtatgtgaaggtcaggaact

SEQ ID NO: 5283875 - DNA, 25 bp, Homo sapien
aagtctggcagggtgattctcgcta

SEQ ID NO: 5283876 - DNA, 25 bp, Homo sapien
cagagacaggtatcgttgaagttcc

SEQ ID NO: 5283877 - DNA, 25 bp, Homo sapien
tatatatctggaacgggccactgca

SEQ ID NO: 5283878 - DNA, 25 bp, Homo sapien
tgacaagtgtgctataaacctggcc

SEQ ID NO: 5283879 - DNA, 25 bp, Homo sapien
gaatccaggatgcagtactacttcc

SEQ ID NO: 5283880 - DNA, 25 bp, Homo sapien
ccttcaacttgtattggtgggccaa

SEQ ID NO: 5283881 - DNA, 25 bp, Homo sapien
gattaactcatggactttggctctg

SEQ ID NO: 5283882 - DNA, 25 bp, Homo sapien
cattagcttgctgtgggagttttcc

SEQ ID NO: 5283883 - DNA, 25 bp, Homo sapien
ctagaaatttgtggcgtagagaccc

SEQ ID NO: 5283884 - DNA, 25 bp, Homo sapien
ttgagccggccagtgttaggatccc

SEQ ID NO: 5283885 - DNA, 25 bp, Homo sapien
ggtcagccagagttcgtccagtaag

SEQ ID NO: 5283886 - DNA, 25 bp, Homo sapien
aatccttagtgtcgccttgtgagca

SEQ ID NO: 5283887 - DNA, 25 bp, Homo sapien
tctcgagatggcagatggaatccca

SEQ ID NO: 5283888 - DNA, 25 bp, Homo sapien
tcatgtggtaacgagcccgaaggct

SEQ ID NO: 5283889 - DNA, 25 bp, Homo sapien
caaggtatatttgacccggccatcg

SEQ ID NO: 5283890 - DNA, 25 bp, Homo sapien
taggaggcggaccagttgtacaagt

SEQ ID NO: 5283891 - DNA, 25 bp, Homo sapien
ggtataaggaagactcccagatgcc

SEQ ID NO: 5283892 - DNA, 25 bp, Homo sapien
gtggaagtctggcaatcccatgttc

SEQ ID NO: 5283893 - DNA, 25 bp, Homo sapien
gaagtctggcaatcccatgttctgg

SEQ ID NO: 5283894 - DNA, 25 bp, Homo sapien
gctattgaggtggtcttgcaaagtc

SEQ ID NO: 5283895 - DNA, 25 bp, Homo sapien
catgtctgtttgagggactctgtga

SEQ ID NO: 5283896 - DNA, 25 bp, Homo sapien
tatgcaagctcttaggataatcgga

SEQ ID NO: 5283897 - DNA, 25 bp, Homo sapien
gataatcggagagatccacagggaa

SEQ ID NO: 5283898 - DNA, 25 bp, Homo sapien
tgatccaggagtctattagcataca

SEQ ID NO: 5283899 - DNA, 25 bp, Homo sapien
catttggagaagcagtttggcaggc

SEQ ID NO: 5283900 - DNA, 25 bp, Homo sapien
tgtggagccataagctgtagcagat

SEQ ID NO: 5283901 - DNA, 25 bp, Homo sapien
gccatgccaccctcttggaaactgt

SEQ ID NO: 5283902 - DNA, 25 bp, Homo sapien
gcgaccagtgggcgaggatctcact

SEQ ID NO: 5283903 - DNA, 25 bp, Homo sapien
gagggcgacctcagtaattttcttg

SEQ ID NO: 5283904 - DNA, 25 bp, Homo sapien
ggacaaggtcatactctgccgatta

SEQ ID NO: 5283905 - DNA, 25 bp, Homo sapien
gaatgtcatggtagcctcagtctgc

SEQ ID NO: 5283906 - DNA, 25 bp, Homo sapien
tctgaggattgttccgaggtcaaca

SEQ ID NO: 5283907 - DNA, 25 bp, Homo sapien
gagttacaaacttcagggtatccac

SEQ ID NO: 5283908 - DNA, 25 bp, Homo sapien
tctctctggagctcataggttgcgc

SEQ ID NO: 5283909 - DNA, 25 bp, Homo sapien
tactgctcaatctctcctgtaggcc

SEQ ID NO: 5283910 - DNA, 25 bp, Homo sapien
gttgcgctgacagaatactgctcaa

SEQ ID NO: 5283911 - DNA, 25 bp, Homo sapien
ggatcacctccgttttggtggtaga

SEQ ID NO: 5283912 - DNA, 25 bp, Homo sapien
cttgcaaactgaccaggactgcctg

SEQ ID NO: 5283913 - DNA, 25 bp, Homo sapien
taagcgcctgaggtgcagtaattca

SEQ ID NO: 5283914 - DNA, 25 bp, Homo sapien
tggtggtagagaccaaatgtaatgt

SEQ ID NO: 5283915 - DNA, 25 bp, Homo sapien
catcttccacactagagtcagagta

SEQ ID NO: 5283916 - DNA, 25 bp, Homo sapien
gatcgtaagagatgtccaatggtct

SEQ ID NO: 5283917 - DNA, 25 bp, Homo sapien
aactccttaggatggctttcgcagc

SEQ ID NO: 5283918 - DNA, 25 bp, Homo sapien
agctcttagccacataggatcgtaa

SEQ ID NO: 5283919 - DNA, 25 bp, Homo sapien
caaatcaatggttgagggtgccact

SEQ ID NO: 5283920 - DNA, 25 bp, Homo sapien
ggagtttcatgctttacctacctag

SEQ ID NO: 5283921 - DNA, 25 bp, Homo sapien
ccgtggctggccaattaaatattat

SEQ ID NO: 5283922 - DNA, 25 bp, Homo sapien
gaggctgtattccattatcacgagg

SEQ ID NO: 5283923 - DNA, 25 bp, Homo sapien
gcttttagggcaacatgagcctcca

SEQ ID NO: 5283924 - DNA, 25 bp, Homo sapien
tccagacccgactcgtggaagaagt

SEQ ID NO: 5283925 - DNA, 25 bp, Homo sapien
gaagtccggaatgatgatgcccata

SEQ ID NO: 5283926 - DNA, 25 bp, Homo sapien
cacggagggttttgccaccagttca

SEQ ID NO: 5283927 - DNA, 25 bp, Homo sapien
gcaactgtaatccagctccagtggg

SEQ ID NO: 5283928 - DNA, 25 bp, Homo sapien
cagtggggagttcaaaggcattctc

SEQ ID NO: 5283929 - DNA, 25 bp, Homo sapien
gggagttcaaaggcattctccatga

SEQ ID NO: 5283930 - DNA, 25 bp, Homo sapien
atttgcaactgtaatccagctccag

SEQ ID NO: 5283931 - DNA, 25 bp, Homo sapien
ccagcctgacatggttgtcaacagg

SEQ ID NO: 5283932 - DNA, 25 bp, Homo sapien
catttccatgtgatccaagagtcat

SEQ ID NO: 5283933 - DNA, 25 bp, Homo sapien
tagaggaaggtataccgaacattgt

SEQ ID NO: 5283934 - DNA, 25 bp, Homo sapien
taaaaggaccttcaggtcaggtgca

SEQ ID NO: 5283935 - DNA, 25 bp, Homo sapien
ttgtgcagctgggatcgtaagggag

SEQ ID NO: 5283936 - DNA, 25 bp, Homo sapien
ctgggatcgtaagggagtctgggcg

SEQ ID NO: 5283937 - DNA, 25 bp, Homo sapien
gaaagtacaagcatcttttcgggct

SEQ ID NO: 5283938 - DNA, 25 bp, Homo sapien
ccatctctgaagaaagtacaagcat

SEQ ID NO: 5283939 - DNA, 25 bp, Homo sapien
tctgggggatcccctgcagagtgcg

SEQ ID NO: 5283940 - DNA, 25 bp, Homo sapien
atctgggggatcccctgcagagtgc

SEQ ID NO: 5283941 - DNA, 25 bp, Homo sapien
gaggtcatggagactggcaaaacca

SEQ ID NO: 5283942 - DNA, 25 bp, Homo sapien
gcggaggtaggctctggcttccggg

SEQ ID NO: 5283943 - DNA, 25 bp, Homo sapien
aggagctggaggtcatggagactgg

SEQ ID NO: 5283944 - DNA, 25 bp, Homo sapien
ggtaggctctggcttccgggacttc

SEQ ID NO: 5283945 - DNA, 25 bp, Homo sapien
aaagtggtccactaagaccttagag

SEQ ID NO: 5283946 - DNA, 25 bp, Homo sapien
gttgacactgtctgggaaaaatcct

SEQ ID NO: 5283947 - DNA, 25 bp, Homo sapien
aagagcttccaatgttggctcaaag

SEQ ID NO: 5283948 - DNA, 25 bp, Homo sapien
tagagacaccatcaggaacttgacc

SEQ ID NO: 5283949 - DNA, 25 bp, Homo sapien
gatagttccgagagaattttctgaa

SEQ ID NO: 5283950 - DNA, 25 bp, Homo sapien
cagatttgtagagttgatagttccg

SEQ ID NO: 5283951 - DNA, 25 bp, Homo sapien
ctcgatgaggtcagctgaagcaaat

SEQ ID NO: 5283952 - DNA, 25 bp, Homo sapien
caaatccaaaggcagtgagggtagt

SEQ ID NO: 5283953 - DNA, 25 bp, Homo sapien
cagttggaagttgagattctttcag

SEQ ID NO: 5283954 - DNA, 25 bp, Homo sapien
agttggaagttgagattctttcaga

SEQ ID NO: 5283955 - DNA, 25 bp, Homo sapien
gacagttggaagttgagattctttc

SEQ ID NO: 5283956 - DNA, 25 bp, Homo sapien
ttggaagttgagattctttcagagc

SEQ ID NO: 5283957 - DNA, 25 bp, Homo sapien
tcccggagaagcatcatcaaggaaa

SEQ ID NO: 5283958 - DNA, 25 bp, Homo sapien
agccagtcgcttatctcccggagaa

SEQ ID NO: 5283959 - DNA, 25 bp, Homo sapien
aaagtctgaagaagaacctcctggt

SEQ ID NO: 5283960 - DNA, 25 bp, Homo sapien
tcaacataagataggcagccagtcg

SEQ ID NO: 5283961 - DNA, 25 bp, Homo sapien
tcaattccattaaaacacataaatt

SEQ ID NO: 5283962 - DNA, 25 bp, Homo sapien
cctgttgaattcaattccattaaaa

SEQ ID NO: 5283963 - DNA, 25 bp, Homo sapien
ctgttgaattcaattccattaaaac

SEQ ID NO: 5283964 - DNA, 25 bp, Homo sapien
attccattaaaacacataaattatg

SEQ ID NO: 5283965 - DNA, 25 bp, Homo sapien
caaagtcaagtatttctctcacgtc

SEQ ID NO: 5283966 - DNA, 25 bp, Homo sapien
tctcacgttctgcatgttgacatag

SEQ ID NO: 5283967 - DNA, 25 bp, Homo sapien
gctatcctagcctaagcttattggg

SEQ ID NO: 5283968 - DNA, 25 bp, Homo sapien
taatgtgaggataaagatgagaagg

SEQ ID NO: 5283969 - DNA, 25 bp, Homo sapien
tctttaggctccattttccgcagag

SEQ ID NO: 5283970 - DNA, 25 bp, Homo sapien
caggattgaagacttgagttctgga

SEQ ID NO: 5283971 - DNA, 25 bp, Homo sapien
tttgtactttggacacatttcagga

SEQ ID NO: 5283972 - DNA, 25 bp, Homo sapien
ttctggatcatcagtgatggctttg

SEQ ID NO: 5283973 - DNA, 25 bp, Homo sapien
aatctgttccatcaggtaattagca

SEQ ID NO: 5283974 - DNA, 25 bp, Homo sapien
ccctgtagggtttgtcttatgatag

SEQ ID NO: 5283975 - DNA, 25 bp, Homo sapien
ggtccctgtagggtttgtcttatga

SEQ ID NO: 5283976 - DNA, 25 bp, Homo sapien
gtaattagcaatgtccagcagctcc

SEQ ID NO: 5283977 - DNA, 25 bp, Homo sapien
aagggggttggcatgcacacgtttc

SEQ ID NO: 5283978 - DNA, 25 bp, Homo sapien
tgcgctgatccctcgccatgttgaa

SEQ ID NO: 5283979 - DNA, 25 bp, Homo sapien
tacaaggtggctcggctgcgctgat

SEQ ID NO: 5283980 - DNA, 25 bp, Homo sapien
accgcgtggctcagcgcatacaagg

SEQ ID NO: 5283981 - DNA, 25 bp, Homo sapien
gagagatgtgactgcttcatcactg

SEQ ID NO: 5283982 - DNA, 25 bp, Homo sapien
taaccagcttattgaagagattagc

SEQ ID NO: 5283983 - DNA, 25 bp, Homo sapien
gagtcttcaaaacagcttcggcctg

SEQ ID NO: 5283984 - DNA, 25 bp, Homo sapien
tttggtgctctcaaatgcgaggccc

SEQ ID NO: 5283985 - DNA, 25 bp, Homo sapien
ttgtgctaccatcccatacttattc

SEQ ID NO: 5283986 - DNA, 25 bp, Homo sapien
aaagtctgtgtcacttgtgctacca

SEQ ID NO: 5283987 - DNA, 25 bp, Homo sapien
gtcttcaagtttcaaagtctgtgtc

SEQ ID NO: 5283988 - DNA, 25 bp, Homo sapien
gtgtcacttgtgctaccatcccata

SEQ ID NO: 5283989 - DNA, 25 bp, Homo sapien
tgcttcctcttagcgtccagtgtgt

SEQ ID NO: 5283990 - DNA, 25 bp, Homo sapien
tcctcttagcgtccagtgtgtactg

SEQ ID NO: 5283991 - DNA, 25 bp, Homo sapien
tcttagcgtccagtgtgtactgaca

SEQ ID NO: 5283992 - DNA, 25 bp, Homo sapien
cacatgcttcctcttagcgtccagt

SEQ ID NO: 5283993 - DNA, 25 bp, Homo sapien
gatgggcttgaagcgatcacactgc

SEQ ID NO: 5283994 - DNA, 25 bp, Homo sapien
cctttgatgagagcaagtgggctga

SEQ ID NO: 5283995 - DNA, 25 bp, Homo sapien
tcttgacggtaaagtgagtggagca

SEQ ID NO: 5283996 - DNA, 25 bp, Homo sapien
acattgcccttcctcgtcttgacgg

SEQ ID NO: 5283997 - DNA, 25 bp, Homo sapien
ggtgaagcatcaaacaaaagcaggg

SEQ ID NO: 5283998 - DNA, 25 bp, Homo sapien
gaacctcgggcaccagtatttcacg

SEQ ID NO: 5283999 - DNA, 25 bp, Homo sapien
caggttgcatcggtgtcttctccca

SEQ ID NO: 5284000 - DNA, 25 bp, Homo sapien
cacacaaaagtgctcatgggactga

SEQ ID NO: 5284001 - DNA, 25 bp, Homo sapien
gaaatgatgcccctcttgatgttca

SEQ ID NO: 5284002 - DNA, 25 bp, Homo sapien
tgttcaggatgtaagtaggttcatc

SEQ ID NO: 5284003 - DNA, 25 bp, Homo sapien
cccttctggaatggccagcttgagc

SEQ ID NO: 5284004 - DNA, 25 bp, Homo sapien
gggcagaaatgatgcccctcttgat

SEQ ID NO: 5284005 - DNA, 25 bp, Homo sapien
cctcagggttgaagccatacacctc

SEQ ID NO: 5284006 - DNA, 25 bp, Homo sapien
ggttgaagccatacacctctttcag

SEQ ID NO: 5284007 - DNA, 25 bp, Homo sapien
caaggctttgccctcagggttgaag

SEQ ID NO: 5284008 - DNA, 25 bp, Homo sapien
tttgccctcagggttgaagccatac

SEQ ID NO: 5284009 - DNA, 25 bp, Homo sapien
tgtctatcaagaatgagaggtggcc

SEQ ID NO: 5284010 - DNA, 25 bp, Homo sapien
attgaggttgtctatcaagaatgag

SEQ ID NO: 5284011 - DNA, 25 bp, Homo sapien
gaattcagggtagcagagcattgag

SEQ ID NO: 5284012 - DNA, 25 bp, Homo sapien
tatcaagaatgagaggtggcccctg

SEQ ID NO: 5284013 - DNA, 25 bp, Homo sapien
tactgggcctctctcacgctgaaat

SEQ ID NO: 5284014 - DNA, 25 bp, Homo sapien
cactgctgctaatctagatcatgga

SEQ ID NO: 5284015 - DNA, 25 bp, Homo sapien
tgtggctgacttacaaacagaggca

SEQ ID NO: 5284016 - DNA, 25 bp, Homo sapien
ttcacagtgcgattccgagttgcct

SEQ ID NO: 5284017 - DNA, 25 bp, Homo sapien
ctgtgggctctaggtccctcctgcc

SEQ ID NO: 5284018 - DNA, 25 bp, Homo sapien
tgtgggctctaggtccctcctgcct

SEQ ID NO: 5284019 - DNA, 25 bp, Homo sapien
agttgtatgtgtacttccggaggtg

SEQ ID NO: 5284020 - DNA, 25 bp, Homo sapien
tctcagcctcatagttgtatgtgta

SEQ ID NO: 5284021 - DNA, 25 bp, Homo sapien
tacttccggaggtgcttgaatcggg

SEQ ID NO: 5284022 - DNA, 25 bp, Homo sapien
gaggtgcttgaatcgggtcgcatct

SEQ ID NO: 5284023 - DNA, 25 bp, Homo sapien
tacgtcagccacatagcagaaatag

SEQ ID NO: 5284024 - DNA, 25 bp, Homo sapien
taacgtggggagaaatacgtcagcc

SEQ ID NO: 5284025 - DNA, 25 bp, Homo sapien
gggagaaatacgtcagccacatagc

SEQ ID NO: 5284026 - DNA, 25 bp, Homo sapien
catagcagaaatagctctcccaagg

SEQ ID NO: 5284027 - DNA, 25 bp, Homo sapien
aatgcttttttagcttgaacacgcc

SEQ ID NO: 5284028 - DNA, 25 bp, Homo sapien
catgtcttgaatatctcatctgagg

SEQ ID NO: 5284029 - DNA, 25 bp, Homo sapien
gccgtaattccgtgactctaagact

SEQ ID NO: 5284030 - DNA, 25 bp, Homo sapien
tgagagaccctctggcaaattaaga

SEQ ID NO: 5284031 - DNA, 25 bp, Homo sapien
ttggacagaccaggctgacattttc

SEQ ID NO: 5284032 - DNA, 25 bp, Homo sapien
accaggctgacattttccagcattt

SEQ ID NO: 5284033 - DNA, 25 bp, Homo sapien
ggctgacattttccagcatttcctc

SEQ ID NO: 5284034 - DNA, 25 bp, Homo sapien
caggctgacattttccagcatttcc

SEQ ID NO: 5284035 - DNA, 25 bp, Homo sapien
agcgccagcagcgcgggcctcggcg

SEQ ID NO: 5284036 - DNA, 25 bp, Homo sapien
gcagcgcgggcctcggcgggtccat

SEQ ID NO: 5284037 - DNA, 25 bp, Homo sapien
ccagcagcgcgggcctcggcgggtc

SEQ ID NO: 5284038 - DNA, 25 bp, Homo sapien
gcgccagcagcgcgggcctcggcgg

SEQ ID NO: 5284039 - DNA, 25 bp, Homo sapien
tcccggtgggaatgcgcggccggcg

SEQ ID NO: 5284040 - DNA, 25 bp, Homo sapien
cgcaggtcccggtgggaatgcgcgg

SEQ ID NO: 5284041 - DNA, 25 bp, Homo sapien
agcaaccgagaagggcactcagccc

SEQ ID NO: 5284042 - DNA, 25 bp, Homo sapien
tcctcagcggcagcaaccgagaagg

SEQ ID NO: 5284043 - DNA, 25 bp, Homo sapien
cttttctacactggcttctctttga

SEQ ID NO: 5284044 - DNA, 25 bp, Homo sapien
tctttgagccttgaagagcctcggg

SEQ ID NO: 5284045 - DNA, 25 bp, Homo sapien
tccccaagcgtcttcagtgctctgg

SEQ ID NO: 5284046 - DNA, 25 bp, Homo sapien
ctggcgcggcccttcctgtgtctca

SEQ ID NO: 5284047 - DNA, 25 bp, Homo sapien
ccctgaccaggggtgccttcttcag

SEQ ID NO: 5284048 - DNA, 25 bp, Homo sapien
gaccaggggtgccttcttcagatga

SEQ ID NO: 5284049 - DNA, 25 bp, Homo sapien
ccaggggtgccttcttcagatgacc

SEQ ID NO: 5284050 - DNA, 25 bp, Homo sapien
ggtgccttcttcagatgacccacca

SEQ ID NO: 5284051 - DNA, 25 bp, Homo sapien
tcagatgagctatttgctcccttac

SEQ ID NO: 5284052 - DNA, 25 bp, Homo sapien
ttcattaataacatcgccgtgtctc

SEQ ID NO: 5284053 - DNA, 25 bp, Homo sapien
ccgtgtctccttgtgagaagtcaga

SEQ ID NO: 5284054 - DNA, 25 bp, Homo sapien
ccttactggtcagaaaagtaagagc

SEQ ID NO: 5284055 - DNA, 25 bp, Homo sapien
cccagtgtctgagtgcttcctgaga

SEQ ID NO: 5284056 - DNA, 25 bp, Homo sapien
tgaccaggcacagtagtcctaatgg

SEQ ID NO: 5284057 - DNA, 25 bp, Homo sapien
tcgaatgtggcctgcccagtgtctg

SEQ ID NO: 5284058 - DNA, 25 bp, Homo sapien
tcttgagagtgcctcgaatgtggcc

SEQ ID NO: 5284059 - DNA, 25 bp, Homo sapien
ggctaggtactgatgcttcctttgt

SEQ ID NO: 5284060 - DNA, 25 bp, Homo sapien
agggctaggtactgatgcttccttt

SEQ ID NO: 5284061 - DNA, 25 bp, Homo sapien
gggctaggtactgatgcttcctttg

SEQ ID NO: 5284062 - DNA, 25 bp, Homo sapien
gctaggtactgatgcttcctttgtt

SEQ ID NO: 5284063 - DNA, 25 bp, Homo sapien
gcttcaagcagggtggactttctct

SEQ ID NO: 5284064 - DNA, 25 bp, Homo sapien
atgcgctgccaaacccttgctagct

SEQ ID NO: 5284065 - DNA, 25 bp, Homo sapien
agctcccatggctgatgcgctgcca

SEQ ID NO: 5284066 - DNA, 25 bp, Homo sapien
ttcaagcagggtggactttctctgg

SEQ ID NO: 5284067 - DNA, 25 bp, Homo sapien
taatacatcggctttcctgggagta

SEQ ID NO: 5284068 - DNA, 25 bp, Homo sapien
atatatcaaaccctgcatctctcct

SEQ ID NO: 5284069 - DNA, 25 bp, Homo sapien
tcaagttggaatgctgtctgtcagc

SEQ ID NO: 5284070 - DNA, 25 bp, Homo sapien
tcagcggcagttccactggatatat

SEQ ID NO: 5284071 - DNA, 25 bp, Homo sapien
gagggcagcaagttggcctccaagg

SEQ ID NO: 5284072 - DNA, 25 bp, Homo sapien
ggcagcaagttggcctccaagggtt

SEQ ID NO: 5284073 - DNA, 25 bp, Homo sapien
agcaagttggcctccaagggtttct

SEQ ID NO: 5284074 - DNA, 25 bp, Homo sapien
cagcaagttggcctccaagggtttc

SEQ ID NO: 5284075 - DNA, 25 bp, Homo sapien
aaatatgtgactttagcctagcccc

SEQ ID NO: 5284076 - DNA, 25 bp, Homo sapien
caaaggccctagaatgagggtgact

SEQ ID NO: 5284077 - DNA, 25 bp, Homo sapien
caaactagtattgcctaatgactcc

SEQ ID NO: 5284078 - DNA, 25 bp, Homo sapien
aatcctaactctcccatttatgaaa

SEQ ID NO: 5284079 - DNA, 25 bp, Homo sapien
tttacctcccaaaagaatctggcca

SEQ ID NO: 5284080 - DNA, 25 bp, Homo sapien
tattgcagcaagttctatcagacag

SEQ ID NO: 5284081 - DNA, 25 bp, Homo sapien
gaaagcagaggttctcaactggtgg

SEQ ID NO: 5284082 - DNA, 25 bp, Homo sapien
tgtacatggcaggtctcagaagcac

SEQ ID NO: 5284083 - DNA, 25 bp, Homo sapien
caagacagtgaagacaacaaggtgc

SEQ ID NO: 5284084 - DNA, 25 bp, Homo sapien
tctcagaggaagcagcctgtaagct

SEQ ID NO: 5284085 - DNA, 25 bp, Homo sapien
tgttaaaaattgttgagtggccacc

SEQ ID NO: 5284086 - DNA, 25 bp, Homo sapien
gggaacatcagtacactcttggtgg

SEQ ID NO: 5284087 - DNA, 25 bp, Homo sapien
cacacagcttccgccctcaggaagc

SEQ ID NO: 5284088 - DNA, 25 bp, Homo sapien
cttccgccctcaggaagccagggac

SEQ ID NO: 5284089 - DNA, 25 bp, Homo sapien
agcttccgccctcaggaagccaggg

SEQ ID NO: 5284090 - DNA, 25 bp, Homo sapien
cgcacacagcttccgccctcaggaa

SEQ ID NO: 5284091 - DNA, 25 bp, Homo sapien
tgaatttgccaaggctgagttatcc

SEQ ID NO: 5284092 - DNA, 25 bp, Homo sapien
taaacggatgaactggaagtggcca

SEQ ID NO: 5284093 - DNA, 25 bp, Homo sapien
gaactgcctgatggtttgaagaaca

SEQ ID NO: 5284094 - DNA, 25 bp, Homo sapien
gctattattagtgagcttcctgcgc

SEQ ID NO: 5284095 - DNA, 25 bp, Homo sapien
tcctcagtcagctggccacaaggag

SEQ ID NO: 5284096 - DNA, 25 bp, Homo sapien
gcataataatgctccagcaatctgt

SEQ ID NO: 5284097 - DNA, 25 bp, Homo sapien
gtcagctggccacaaggagctctcc

SEQ ID NO: 5284098 - DNA, 25 bp, Homo sapien
ctgtgcaaggccacttgaattgcat

SEQ ID NO: 5284099 - DNA, 25 bp, Homo sapien
ttttgttttcattcttgtactctat

SEQ ID NO: 5284100 - DNA, 25 bp, Homo sapien
ttgttttcattcttgtactctatag

SEQ ID NO: 5284101 - DNA, 25 bp, Homo sapien
gttttcattcttgtactctatagcc

SEQ ID NO: 5284102 - DNA, 25 bp, Homo sapien
tttcattcttgtactctatagccat

SEQ ID NO: 5284103 - DNA, 25 bp, Homo sapien
gaccaatgggcgagacatcagtgtt

SEQ ID NO: 5284104 - DNA, 25 bp, Homo sapien
tggcaattaccgcaacatctgttac

SEQ ID NO: 5284105 - DNA, 25 bp, Homo sapien
aaataattgctcgtgactgtatcac

SEQ ID NO: 5284106 - DNA, 25 bp, Homo sapien
gcagaagcagcttgaccaatgggcg

SEQ ID NO: 5284107 - DNA, 25 bp, Homo sapien
tgttcattggaaacatgcaccagaa

SEQ ID NO: 5284108 - DNA, 25 bp, Homo sapien
ttgttcattggaaacatgcaccaga

SEQ ID NO: 5284109 - DNA, 25 bp, Homo sapien
tttgttcattggaaacatgcaccag

SEQ ID NO: 5284110 - DNA, 25 bp, Homo sapien
gttcattggaaacatgcaccagaac

SEQ ID NO: 5284111 - DNA, 25 bp, Homo sapien
ggcaaatacccattaaacctctgtg

SEQ ID NO: 5284112 - DNA, 25 bp, Homo sapien
tcctcggtgatacagaggcgtcctt

SEQ ID NO: 5284113 - DNA, 25 bp, Homo sapien
aagtgaagttgcaggctctggccca

SEQ ID NO: 5284114 - DNA, 25 bp, Homo sapien
ggcagataaggaaatactcctcggt

SEQ ID NO: 5284115 - DNA, 25 bp, Homo sapien
gggcaggaaacgactctgctctctg

SEQ ID NO: 5284116 - DNA, 25 bp, Homo sapien
tctgaggattgaagggctcatacct

SEQ ID NO: 5284117 - DNA, 25 bp, Homo sapien
ctgaggattgaagggctcatacctc

SEQ ID NO: 5284118 - DNA, 25 bp, Homo sapien
gccattccccatggattaatgaatg

SEQ ID NO: 5284119 - DNA, 25 bp, Homo sapien
tggcagccattccccatggattaat

SEQ ID NO: 5284120 - DNA, 25 bp, Homo sapien
gcagccattccccatggattaatga

SEQ ID NO: 5284121 - DNA, 25 bp, Homo sapien
ggattaatgaatgggccttggagat

SEQ ID NO: 5284122 - DNA, 25 bp, Homo sapien
caatccgctgctgcattcagcagta

SEQ ID NO: 5284123 - DNA, 25 bp, Homo sapien
tccaatccgctgctgcattcagcag

SEQ ID NO: 5284124 - DNA, 25 bp, Homo sapien
ctttccaatccgctgctgcattcag

SEQ ID NO: 5284125 - DNA, 25 bp, Homo sapien
aatccgctgctgcattcagcagtaa

SEQ ID NO: 5284126 - DNA, 25 bp, Homo sapien
catgggtgctggacaactgtgattg

SEQ ID NO: 5284127 - DNA, 25 bp, Homo sapien
cattgcttccccagttccatgggtg

SEQ ID NO: 5284128 - DNA, 25 bp, Homo sapien
tgtgattgaagccttttgccaagga

SEQ ID NO: 5284129 - DNA, 25 bp, Homo sapien
ttgcttccccagttccatgggtgct

SEQ ID NO: 5284130 - DNA, 25 bp, Homo sapien
ttcaggaaacctgtcatttctcctt

SEQ ID NO: 5284131 - DNA, 25 bp, Homo sapien
tccttccatcagcaaccagccccat

SEQ ID NO: 5284132 - DNA, 25 bp, Homo sapien
tgggttcttttcaggaaacctgtca

SEQ ID NO: 5284133 - DNA, 25 bp, Homo sapien
tttgcccactgaggagctcttgggt

SEQ ID NO: 5284134 - DNA, 25 bp, Homo sapien
tgtgctttgctttcaatgataactg

SEQ ID NO: 5284135 - DNA, 25 bp, Homo sapien
tgctttgctttcaatgataactgga

SEQ ID NO: 5284136 - DNA, 25 bp, Homo sapien
gctttgctttcaatgataactggag

SEQ ID NO: 5284137 - DNA, 25 bp, Homo sapien
cttgtgctttgctttcaatgataac

SEQ ID NO: 5284138 - DNA, 25 bp, Homo sapien
atttcaggaatgtgacccctttcat

SEQ ID NO: 5284139 - DNA, 25 bp, Homo sapien
gacatagtgacatttacagataaag

SEQ ID NO: 5284140 - DNA, 25 bp, Homo sapien
aaactgaagcatgctatttcaggaa

SEQ ID NO: 5284141 - DNA, 25 bp, Homo sapien
atgacatagtgacatttacagataa

SEQ ID NO: 5284142 - DNA, 25 bp, Homo sapien
ggaagatatttgccgctgcctccct

SEQ ID NO: 5284143 - DNA, 25 bp, Homo sapien
tctttgaaaacttggtgattattaa

SEQ ID NO: 5284144 - DNA, 25 bp, Homo sapien
agatatttgccgctgcctccctgct

SEQ ID NO: 5284145 - DNA, 25 bp, Homo sapien
ctgctcctggctgcgtctgctctga

SEQ ID NO: 5284146 - DNA, 25 bp, Homo sapien
tctgtgatgcttgcatagcaatgaa

SEQ ID NO: 5284147 - DNA, 25 bp, Homo sapien
ggtttgttgcataggaccaatagac

SEQ ID NO: 5284148 - DNA, 25 bp, Homo sapien
cctatggtatgcagtggtcacatgc

SEQ ID NO: 5284149 - DNA, 25 bp, Homo sapien
ccttgtagttaagtaggcatgactg

SEQ ID NO: 5284150 - DNA, 25 bp, Homo sapien
attgatctttgtctctggatggacc

SEQ ID NO: 5284151 - DNA, 25 bp, Homo sapien
tcatgtgtccgtcccgtagccattg

SEQ ID NO: 5284152 - DNA, 25 bp, Homo sapien
gtccgtcccgtagccattgatcttt

SEQ ID NO: 5284153 - DNA, 25 bp, Homo sapien
tgatctttgtctctggatggaccaa

SEQ ID NO: 5284154 - DNA, 25 bp, Homo sapien
ctgctgtgcctttcgcttaagactg

SEQ ID NO: 5284155 - DNA, 25 bp, Homo sapien
gcttaagactgtttctgtcaccggg

SEQ ID NO: 5284156 - DNA, 25 bp, Homo sapien
gcctttcgcttaagactgtttctgt

SEQ ID NO: 5284157 - DNA, 25 bp, Homo sapien
gactgtttctgtcaccgggtgtcat

SEQ ID NO: 5284158 - DNA, 25 bp, Homo sapien
tttcaggctgcggagcacaactttc

SEQ ID NO: 5284159 - DNA, 25 bp, Homo sapien
tagctctttcggcaaccccagtgag

SEQ ID NO: 5284160 - DNA, 25 bp, Homo sapien
ctgtggattccaacattgcaggttt

SEQ ID NO: 5284161 - DNA, 25 bp, Homo sapien
cattcctcgcagtgtgaccaacaca

SEQ ID NO: 5284162 - DNA, 25 bp, Homo sapien
gctcagggcattgccatacttaggt

SEQ ID NO: 5284163 - DNA, 25 bp, Homo sapien
cttaggtgtagtcagtgctgctgga

SEQ ID NO: 5284164 - DNA, 25 bp, Homo sapien
tgccatacttaggtgtagtcagtgc

SEQ ID NO: 5284165 - DNA, 25 bp, Homo sapien
atgaaccttatggtgtgtttcttca

SEQ ID NO: 5284166 - DNA, 25 bp, Homo sapien
gcagggactgtgacaacgtgcttct

SEQ ID NO: 5284167 - DNA, 25 bp, Homo sapien
agcagggactgtgacaacgtgcttc

SEQ ID NO: 5284168 - DNA, 25 bp, Homo sapien
agggactgtgacaacgtgcttctga

SEQ ID NO: 5284169 - DNA, 25 bp, Homo sapien
cagggactgtgacaacgtgcttctg

SEQ ID NO: 5284170 - DNA, 25 bp, Homo sapien
gaagaggtcaaagatctggccctga

SEQ ID NO: 5284171 - DNA, 25 bp, Homo sapien
aggtcaaagatctggccctgagccc

SEQ ID NO: 5284172 - DNA, 25 bp, Homo sapien
gggaagaggtcaaagatctggccct

SEQ ID NO: 5284173 - DNA, 25 bp, Homo sapien
ctgtgggaagaggtcaaagatctgg

SEQ ID NO: 5284174 - DNA, 25 bp, Homo sapien
gctggagggttgagtttaaaaatca

SEQ ID NO: 5284175 - DNA, 25 bp, Homo sapien
acagtggttctttccttgtcttgtt

SEQ ID NO: 5284176 - DNA, 25 bp, Homo sapien
tgacagtggttctttccttgtcttg

SEQ ID NO: 5284177 - DNA, 25 bp, Homo sapien
caatccagtggtgttatgacatagg

SEQ ID NO: 5284178 - DNA, 25 bp, Homo sapien
aaagagtttatgtagtgttgcattc

SEQ ID NO: 5284179 - DNA, 25 bp, Homo sapien
accactagcaaagagtttatgtagt

SEQ ID NO: 5284180 - DNA, 25 bp, Homo sapien
gcaaagagtttatgtagtgttgcat

SEQ ID NO: 5284181 - DNA, 25 bp, Homo sapien
ctagcaaagagtttatgtagtgttg

SEQ ID NO: 5284182 - DNA, 25 bp, Homo sapien
ctaaatcagatgataggttgggcca

SEQ ID NO: 5284183 - DNA, 25 bp, Homo sapien
caagttgaaattttgctggcagaag

SEQ ID NO: 5284184 - DNA, 25 bp, Homo sapien
gttgaaattttgctggcagaagtcc

SEQ ID NO: 5284185 - DNA, 25 bp, Homo sapien
tggccagagctgagcaagttgaaat

SEQ ID NO: 5284186 - DNA, 25 bp, Homo sapien
agttgaaattttgctggcagaagtc

SEQ ID NO: 5284187 - DNA, 25 bp, Homo sapien
aagtctcaatactgccccctcgtgg

SEQ ID NO: 5284188 - DNA, 25 bp, Homo sapien
gaggccaactttcgtttaagtctca

SEQ ID NO: 5284189 - DNA, 25 bp, Homo sapien
cccctcgtggcagtataaactaagg

SEQ ID NO: 5284190 - DNA, 25 bp, Homo sapien
cagtagacgtggtgattgaggccaa

SEQ ID NO: 5284191 - DNA, 25 bp, Homo sapien
tgatgtaggatgtagatttctgagc

SEQ ID NO: 5284192 - DNA, 25 bp, Homo sapien
cctccaactctgctgatgtaggatg

SEQ ID NO: 5284193 - DNA, 25 bp, Homo sapien
aggaggtgaagcaaaccaaatctga

SEQ ID NO: 5284194 - DNA, 25 bp, Homo sapien
aaatctgaaattgtccacacccctc

SEQ ID NO: 5284195 - DNA, 25 bp, Homo sapien
gggctttccaaatcatgaagtaact

SEQ ID NO: 5284196 - DNA, 25 bp, Homo sapien
tattgaatgagggtttgaaagttta

SEQ ID NO: 5284197 - DNA, 25 bp, Homo sapien
actgaaaatgctgtaggaactgtcc

SEQ ID NO: 5284198 - DNA, 25 bp, Homo sapien
ggattttatctgacagggaagactg

SEQ ID NO: 5284199 - DNA, 25 bp, Homo sapien
tgcccactgctctgggtcccgatgc

SEQ ID NO: 5284200 - DNA, 25 bp, Homo sapien
gggtcccgatgcctcgacgctgcat

SEQ ID NO: 5284201 - DNA, 25 bp, Homo sapien
cctgtttctaacaatctgcccactg

SEQ ID NO: 5284202 - DNA, 25 bp, Homo sapien
tttcttcaaatactcgcctgtttct

SEQ ID NO: 5284203 - DNA, 25 bp, Homo sapien
tggcgtcactctccgagctgtctga

SEQ ID NO: 5284204 - DNA, 25 bp, Homo sapien
cactgcgtagggttcagcatttcag

SEQ ID NO: 5284205 - DNA, 25 bp, Homo sapien
gaatcgttaacctttggcactgcgt

SEQ ID NO: 5284206 - DNA, 25 bp, Homo sapien
ttcaagaatgtaactggagcagcaa

SEQ ID NO: 5284207 - DNA, 25 bp, Homo sapien
ttttgagctgctaatcaagtgtgcc

SEQ ID NO: 5284208 - DNA, 25 bp, Homo sapien
tatggaataatgatggacaggctct

SEQ ID NO: 5284209 - DNA, 25 bp, Homo sapien
tgcttagaggtttgcgcttgtctcc

SEQ ID NO: 5284210 - DNA, 25 bp, Homo sapien
ttgtggttgtgtttgcttagaggtt

SEQ ID NO: 5284211 - DNA, 25 bp, Homo sapien
tgccccatcggaccatctgctggac

SEQ ID NO: 5284212 - DNA, 25 bp, Homo sapien
tcacaaatcaactatagtgactcct

SEQ ID NO: 5284213 - DNA, 25 bp, Homo sapien
tcaactatagtgactcctaaaacca

SEQ ID NO: 5284214 - DNA, 25 bp, Homo sapien
tagtgactcctaaaaccacatctgc

SEQ ID NO: 5284215 - DNA, 25 bp, Homo sapien
tattaacaggaccatttctctccac

SEQ ID NO: 5284216 - DNA, 25 bp, Homo sapien
tccacacatggctctacttgtcctc

SEQ ID NO: 5284217 - DNA, 25 bp, Homo sapien
acagaatattaacaggaccatttct

SEQ ID NO: 5284218 - DNA, 25 bp, Homo sapien
ggctgcccgtcctgtgtttgttcag

SEQ ID NO: 5284219 - DNA, 25 bp, Homo sapien
gctgtcccacacttgccaatctcta

SEQ ID NO: 5284220 - DNA, 25 bp, Homo sapien
tgcttcagtcccacattcacagctt

SEQ ID NO: 5284221 - DNA, 25 bp, Homo sapien
atccagatgcctacttgcacagctg

SEQ ID NO: 5284222 - DNA, 25 bp, Homo sapien
cagatgcctacttgcacagctgtcc

SEQ ID NO: 5284223 - DNA, 25 bp, Homo sapien
gataacaagcacaggactgcaggct

SEQ ID NO: 5284224 - DNA, 25 bp, Homo sapien
ctgttattgcctgccattgtgatgc

SEQ ID NO: 5284225 - DNA, 25 bp, Homo sapien
tgctgtgttctgacattggctctgt

SEQ ID NO: 5284226 - DNA, 25 bp, Homo sapien
tgctaggttatgtttgaagggtcca

SEQ ID NO: 5284227 - DNA, 25 bp, Homo sapien
tcatgaacatgtcggtggcagcagt

SEQ ID NO: 5284228 - DNA, 25 bp, Homo sapien
cccttgttgcgcagggcaagcctga

SEQ ID NO: 5284229 - DNA, 25 bp, Homo sapien
aaacagcacgagtgcctggctggga

SEQ ID NO: 5284230 - DNA, 25 bp, Homo sapien
acatgtcattggtgcgaacccacac

SEQ ID NO: 5284231 - DNA, 25 bp, Homo sapien
cttcatctgccttaagttggcctac

SEQ ID NO: 5284232 - DNA, 25 bp, Homo sapien
gcttgcttaggacattcatccactg

SEQ ID NO: 5284233 - DNA, 25 bp, Homo sapien
tcatgagcttcagaggtcaccaatc

SEQ ID NO: 5284234 - DNA, 25 bp, Homo sapien
ccactgcagggacatatgtctcatg

SEQ ID NO: 5284235 - DNA, 25 bp, Homo sapien
cttgcttgcttaggacattcatcca

SEQ ID NO: 5284236 - DNA, 25 bp, Homo sapien
gttctatgggtactggcttcccaga

SEQ ID NO: 5284237 - DNA, 25 bp, Homo sapien
cctgcctttggttctatgggtactg

SEQ ID NO: 5284238 - DNA, 25 bp, Homo sapien
gagcatgtgcatcactgaaagctgc

SEQ ID NO: 5284239 - DNA, 25 bp, Homo sapien
ctgcaggaaagtttagcgagctaga

SEQ ID NO: 5284240 - DNA, 25 bp, Homo sapien
ttgggaacagcatgtggccacatgt

SEQ ID NO: 5284241 - DNA, 25 bp, Homo sapien
tgccacagagccgagcgtgaatgct

SEQ ID NO: 5284242 - DNA, 25 bp, Homo sapien
tgtctttaccccagaaagcctggac

SEQ ID NO: 5284243 - DNA, 25 bp, Homo sapien
ctttttgtaagcaggagcccgatcc

SEQ ID NO: 5284244 - DNA, 25 bp, Homo sapien
cataatttgggtcattacactctcc

SEQ ID NO: 5284245 - DNA, 25 bp, Homo sapien
gacaggccataatttgggtcattac

SEQ ID NO: 5284246 - DNA, 25 bp, Homo sapien
tacactctcccatgggcagtaatga

SEQ ID NO: 5284247 - DNA, 25 bp, Homo sapien
ggcaagcactgcctcatctgacagg

SEQ ID NO: 5284248 - DNA, 25 bp, Homo sapien
gaatcatcttgcttaggtgagtttc

SEQ ID NO: 5284249 - DNA, 25 bp, Homo sapien
tcatcttgcttaggtgagtttcctt

SEQ ID NO: 5284250 - DNA, 25 bp, Homo sapien
aatcatcttgcttaggtgagtttcc

SEQ ID NO: 5284251 - DNA, 25 bp, Homo sapien
gagaatcatcttgcttaggtgagtt

SEQ ID NO: 5284252 - DNA, 25 bp, Homo sapien
cctggaggtaggagatagttccttc

SEQ ID NO: 5284253 - DNA, 25 bp, Homo sapien
tctcttcccagtgttgatcctgaca

SEQ ID NO: 5284254 - DNA, 25 bp, Homo sapien
taagggcctactgcactcagaagag

SEQ ID NO: 5284255 - DNA, 25 bp, Homo sapien
acagcatcatgtccgggtatgaggc

SEQ ID NO: 5284256 - DNA, 25 bp, Homo sapien
aaaggatctgagtcaggatttgccc

SEQ ID NO: 5284257 - DNA, 25 bp, Homo sapien
tcctccatcaaaggatctgagtcag

SEQ ID NO: 5284258 - DNA, 25 bp, Homo sapien
ccatcaaaggatctgagtcaggatt

SEQ ID NO: 5284259 - DNA, 25 bp, Homo sapien
atgtcctccatcaaaggatctgagt

SEQ ID NO: 5284260 - DNA, 25 bp, Homo sapien
ggagcacggccaaaaagttcttcac

SEQ ID NO: 5284261 - DNA, 25 bp, Homo sapien
gatcccaatttaggagcacggccaa

SEQ ID NO: 5284262 - DNA, 25 bp, Homo sapien
aggataagatcccaatttaggagca

SEQ ID NO: 5284263 - DNA, 25 bp, Homo sapien
taagatcccaatttaggagcacggc

SEQ ID NO: 5284264 - DNA, 25 bp, Homo sapien
tctccaaagtttgggcaagcagagt

SEQ ID NO: 5284265 - DNA, 25 bp, Homo sapien
caatttaacctcagtagcatttatg

SEQ ID NO: 5284266 - DNA, 25 bp, Homo sapien
tctttgctgtgcctagcctttcctt

SEQ ID NO: 5284267 - DNA, 25 bp, Homo sapien
gcaagcagagtcaacttgaactcct

SEQ ID NO: 5284268 - DNA, 25 bp, Homo sapien
atgcctcctccagggttctggaact

SEQ ID NO: 5284269 - DNA, 25 bp, Homo sapien
tcctccagggttctggaactcctct

SEQ ID NO: 5284270 - DNA, 25 bp, Homo sapien
ggaaaaaggtgtttgtcatgctcat

SEQ ID NO: 5284271 - DNA, 25 bp, Homo sapien
tggaaaaaggtgtttgtcatgctca

SEQ ID NO: 5284272 - DNA, 25 bp, Homo sapien
tactcccgtggatgtgcaacaccaa

SEQ ID NO: 5284273 - DNA, 25 bp, Homo sapien
gaagtcaccgtagtagatcctcatt

SEQ ID NO: 5284274 - DNA, 25 bp, Homo sapien
accaagaggtggctgacaacatcaa

SEQ ID NO: 5284275 - DNA, 25 bp, Homo sapien
acccacttatggaaaattctggcca

SEQ ID NO: 5284276 - DNA, 25 bp, Homo sapien
tcctagttaccaaagctattgtctc

SEQ ID NO: 5284277 - DNA, 25 bp, Homo sapien
gctattgtctctctttggtctggaa

SEQ ID NO: 5284278 - DNA, 25 bp, Homo sapien
ctattgtctctctttggtctggaac

SEQ ID NO: 5284279 - DNA, 25 bp, Homo sapien
atgacggcgctgtgaacatgcccac

SEQ ID NO: 5284280 - DNA, 25 bp, Homo sapien
ccccgaaagaggtgcttgatttgac

SEQ ID NO: 5284281 - DNA, 25 bp, Homo sapien
gatgttcatcgaagttctgctctct

SEQ ID NO: 5284282 - DNA, 25 bp, Homo sapien
cactgaagcgctatacatgacggcg

SEQ ID NO: 5284283 - DNA, 25 bp, Homo sapien
tctctaggtgtttagagctctgtgc

SEQ ID NO: 5284284 - DNA, 25 bp, Homo sapien
ctcttttgccctgtggtctctaggt

SEQ ID NO: 5284285 - DNA, 25 bp, Homo sapien
gctcttttgccctgtggtctctagg

SEQ ID NO: 5284286 - DNA, 25 bp, Homo sapien
tggtctctaggtgtttagagctctg

SEQ ID NO: 5284287 - DNA, 25 bp, Homo sapien
acaatttgctgagaagacaagaggc

SEQ ID NO: 5284288 - DNA, 25 bp, Homo sapien
tggaatcagccaacttttgatgtta

SEQ ID NO: 5284289 - DNA, 25 bp, Homo sapien
gatgtgatcacttccgacaatttgc

SEQ ID NO: 5284290 - DNA, 25 bp, Homo sapien
cctattggaatcagccaacttttga

SEQ ID NO: 5284291 - DNA, 25 bp, Homo sapien
gcagccggccccatggagcaagcag

SEQ ID NO: 5284292 - DNA, 25 bp, Homo sapien
acaggaaaatccctggtgttcagag

SEQ ID NO: 5284293 - DNA, 25 bp, Homo sapien
agcagccggccccatggagcaagca

SEQ ID NO: 5284294 - DNA, 25 bp, Homo sapien
cagccggccccatggagcaagcagc

SEQ ID NO: 5284295 - DNA, 25 bp, Homo sapien
ttgctgtctaggcaagcttgtgata

SEQ ID NO: 5284296 - DNA, 25 bp, Homo sapien
tgctgtctaggcaagcttgtgatat

SEQ ID NO: 5284297 - DNA, 25 bp, Homo sapien
tgtctaggcaagcttgtgatatttc

SEQ ID NO: 5284298 - DNA, 25 bp, Homo sapien
gctgtctaggcaagcttgtgatatt

SEQ ID NO: 5284299 - DNA, 25 bp, Homo sapien
aggatgcagccaatacttcctctga

SEQ ID NO: 5284300 - DNA, 25 bp, Homo sapien
atgcagccaatacttcctctgagct

SEQ ID NO: 5284301 - DNA, 25 bp, Homo sapien
agattgtcagctcctaaaggacagg

SEQ ID NO: 5284302 - DNA, 25 bp, Homo sapien
gagattgtcagctcctaaaggacag

SEQ ID NO: 5284303 - DNA, 25 bp, Homo sapien
atttgcacagatctgtgataagaca

SEQ ID NO: 5284304 - DNA, 25 bp, Homo sapien
ttctgccactccttgacagatattc

SEQ ID NO: 5284305 - DNA, 25 bp, Homo sapien
gtcacctccaacgtcaaactcattt

SEQ ID NO: 5284306 - DNA, 25 bp, Homo sapien
agatattctgtcattccatgaattt

SEQ ID NO: 5284307 - DNA, 25 bp, Homo sapien
tcttgtggccttgatagacgactgt

SEQ ID NO: 5284308 - DNA, 25 bp, Homo sapien
tctctgcagctgctaattgtgcctt

SEQ ID NO: 5284309 - DNA, 25 bp, Homo sapien
cttgggagtgcctgggatatgcaga

SEQ ID NO: 5284310 - DNA, 25 bp, Homo sapien
tcgtggatccacaatgcttcttgtg

SEQ ID NO: 5284311 - DNA, 25 bp, Homo sapien
tacaactaagatccttactaacaag

SEQ ID NO: 5284312 - DNA, 25 bp, Homo sapien
tactaacaagtagttaccagtgttc

SEQ ID NO: 5284313 - DNA, 25 bp, Homo sapien
tgttctgggattaagtgattgaact

SEQ ID NO: 5284314 - DNA, 25 bp, Homo sapien
agtgttctgggattaagtgattgaa

SEQ ID NO: 5284315 - DNA, 25 bp, Homo sapien
gctgggttttcatattccaagaaag

SEQ ID NO: 5284316 - DNA, 25 bp, Homo sapien
tcaatacaggtatgttggttgttca

SEQ ID NO: 5284317 - DNA, 25 bp, Homo sapien
caatacaggtatgttggttgttcat

SEQ ID NO: 5284318 - DNA, 25 bp, Homo sapien
gatcagagtccctgagttccgactt

SEQ ID NO: 5284319 - DNA, 25 bp, Homo sapien
ttggccatggtgaggcgtacacagt

SEQ ID NO: 5284320 - DNA, 25 bp, Homo sapien
catgcgtgtggaaggaggaccctca

SEQ ID NO: 5284321 - DNA, 25 bp, Homo sapien
tgtccatgctgcgaaatttagtccc

SEQ ID NO: 5284322 - DNA, 25 bp, Homo sapien
caatgctcagcggatgcactgcttg

SEQ ID NO: 5284323 - DNA, 25 bp, Homo sapien
gatggagtgagctccacttgaggat

SEQ ID NO: 5284324 - DNA, 25 bp, Homo sapien
actgcttgatggagtgagctccact

SEQ ID NO: 5284325 - DNA, 25 bp, Homo sapien
tgagcatagagcaatgctcagcgga

SEQ ID NO: 5284326 - DNA, 25 bp, Homo sapien
tggtaacttggggacatttacagac

SEQ ID NO: 5284327 - DNA, 25 bp, Homo sapien
catatggtaacttggggacatttac

SEQ ID NO: 5284328 - DNA, 25 bp, Homo sapien
ctgttcacatatggtaacttgggga

SEQ ID NO: 5284329 - DNA, 25 bp, Homo sapien
tcacatatggtaacttggggacatt

SEQ ID NO: 5284330 - DNA, 25 bp, Homo sapien
cacactccgggctgtaggtcctgct

SEQ ID NO: 5284331 - DNA, 25 bp, Homo sapien
tgcaccaacgctgctccgggctgtg

SEQ ID NO: 5284332 - DNA, 25 bp, Homo sapien
gggaagagctctgtactgcctgcat

SEQ ID NO: 5284333 - DNA, 25 bp, Homo sapien
cagcctgtgctttgggtgcagcagg

SEQ ID NO: 5284334 - DNA, 25 bp, Homo sapien
gacacttaatagctctgtcaccttg

SEQ ID NO: 5284335 - DNA, 25 bp, Homo sapien
tagattgtctatttgatgcctgctg

SEQ ID NO: 5284336 - DNA, 25 bp, Homo sapien
cctgactttatgattactgattgat

SEQ ID NO: 5284337 - DNA, 25 bp, Homo sapien
ttagcttatgaaagccctctgaatt

SEQ ID NO: 5284338 - DNA, 25 bp, Homo sapien
tcctgggaactctgaatctcaggga

SEQ ID NO: 5284339 - DNA, 25 bp, Homo sapien
ccacaggtaagaaatagtgtcaatc

SEQ ID NO: 5284340 - DNA, 25 bp, Homo sapien
cagcttcgtggctttgggaggatca

SEQ ID NO: 5284341 - DNA, 25 bp, Homo sapien
gcagcagtgaaactccacaggtaag

SEQ ID NO: 5284342 - DNA, 25 bp, Homo sapien
ttggttcacaataatgctcagacgc

SEQ ID NO: 5284343 - DNA, 25 bp, Homo sapien
cacccattctgtagcatttgaactt

SEQ ID NO: 5284344 - DNA, 25 bp, Homo sapien
cattctgtagcatttgaactttgct

SEQ ID NO: 5284345 - DNA, 25 bp, Homo sapien
cccattctgtagcatttgaactttg

SEQ ID NO: 5284346 - DNA, 25 bp, Homo sapien
tctgtagcatttgaactttgctgat

SEQ ID NO: 5284347 - DNA, 25 bp, Homo sapien
ccttgaagagctgcaagacaaactc

SEQ ID NO: 5284348 - DNA, 25 bp, Homo sapien
ctttcaccatttgctacaaggtcac

SEQ ID NO: 5284349 - DNA, 25 bp, Homo sapien
catgcaagagcgactctcttctgta

SEQ ID NO: 5284350 - DNA, 25 bp, Homo sapien
actcactgacgtcttcagcaaaatg

SEQ ID NO: 5284351 - DNA, 25 bp, Homo sapien
cagtgacattcaaggtttggcagcc

SEQ ID NO: 5284352 - DNA, 25 bp, Homo sapien
tccaagcctcatcacagatgctaat

SEQ ID NO: 5284353 - DNA, 25 bp, Homo sapien
cattcaaggtttggcagccacctcc

SEQ ID NO: 5284354 - DNA, 25 bp, Homo sapien
ttcatctcagtgacattcaaggttt

SEQ ID NO: 5284355 - DNA, 25 bp, Homo sapien
tttgagcagctcatgaaaaaaggat

SEQ ID NO: 5284356 - DNA, 25 bp, Homo sapien
ctttgagcagctcatgaaaaaagga

SEQ ID NO: 5284357 - DNA, 25 bp, Homo sapien
ggatgttaacacatttgtggagagg

SEQ ID NO: 5284358 - DNA, 25 bp, Homo sapien
tgctaagcaaaggaaggatgttaac

SEQ ID NO: 5284359 - DNA, 25 bp, Homo sapien
caagcaagccgtatgcacagttgtc

SEQ ID NO: 5284360 - DNA, 25 bp, Homo sapien
tgagattggaatcctgggcctccct

SEQ ID NO: 5284361 - DNA, 25 bp, Homo sapien
tcccgttggtcagcaagaaaaatgg

SEQ ID NO: 5284362 - DNA, 25 bp, Homo sapien
tcatctgtgctacaatgcctggcag

SEQ ID NO: 5284363 - DNA, 25 bp, Homo sapien
tgtgagcaccagaacaacacctgga

SEQ ID NO: 5284364 - DNA, 25 bp, Homo sapien
aacacctggacgttgctatgaactg

SEQ ID NO: 5284365 - DNA, 25 bp, Homo sapien
aactgggacctgtgttgaggaactc

SEQ ID NO: 5284366 - DNA, 25 bp, Homo sapien
tccagtgccacacctgaaatgtgag

SEQ ID NO: 5284367 - DNA, 25 bp, Homo sapien
gaattcctatggcacttgtggtctg

SEQ ID NO: 5284368 - DNA, 25 bp, Homo sapien
gatgcctgaacaccgtttcaggtgg

SEQ ID NO: 5284369 - DNA, 25 bp, Homo sapien
gctttcagttcttgggtgcttgtta

SEQ ID NO: 5284370 - DNA, 25 bp, Homo sapien
tgttacaagaacatacaattcagcc

SEQ ID NO: 5284371 - DNA, 25 bp, Homo sapien
catgtgcaaggtttccatcttttgg

SEQ ID NO: 5284372 - DNA, 25 bp, Homo sapien
tcatctgtcaggaagctttagaatg

SEQ ID NO: 5284373 - DNA, 25 bp, Homo sapien
gtgtgttgttcattgtacagtgttc

SEQ ID NO: 5284374 - DNA, 25 bp, Homo sapien
gttctcagtaacgtgtcatctgtca

SEQ ID NO: 5284375 - DNA, 25 bp, Homo sapien
taatgggatacacagtgtttgccct

SEQ ID NO: 5284376 - DNA, 25 bp, Homo sapien
aacccgagtataccactaagctcca

SEQ ID NO: 5284377 - DNA, 25 bp, Homo sapien
tctgaggatggtctattatcaccac

SEQ ID NO: 5284378 - DNA, 25 bp, Homo sapien
tctgggccaatggacctaaaggcaa

SEQ ID NO: 5284379 - DNA, 25 bp, Homo sapien
caattcggtgtaggactggtctcag

SEQ ID NO: 5284380 - DNA, 25 bp, Homo sapien
tcttccgaaggcacaatgagacggt

SEQ ID NO: 5284381 - DNA, 25 bp, Homo sapien
gattcagctctgcatagcatggtgg

SEQ ID NO: 5284382 - DNA, 25 bp, Homo sapien
gatggctcaattacatagctggctg

SEQ ID NO: 5284383 - DNA, 25 bp, Homo sapien
tccacacaaagtgatcgaaattggt

SEQ ID NO: 5284384 - DNA, 25 bp, Homo sapien
tagaggactgagctttagttccatt

SEQ ID NO: 5284385 - DNA, 25 bp, Homo sapien
aagtgatcgaaattggttaaacaga

SEQ ID NO: 5284386 - DNA, 25 bp, Homo sapien
catttgcccataggccatatttcca

SEQ ID NO: 5284387 - DNA, 25 bp, Homo sapien
tgattatgtgtaaggcgacctcctt

SEQ ID NO: 5284388 - DNA, 25 bp, Homo sapien
actgcatttagtgattatgtgtaag

SEQ ID NO: 5284389 - DNA, 25 bp, Homo sapien
attatgtgtaaggcgacctccttac

SEQ ID NO: 5284390 - DNA, 25 bp, Homo sapien
gattatgtgtaaggcgacctcctta

SEQ ID NO: 5284391 - DNA, 25 bp, Homo sapien
ttttcagccattggtttccaaagtg

SEQ ID NO: 5284392 - DNA, 25 bp, Homo sapien
gtccatcaggtttatctctctttcc

SEQ ID NO: 5284393 - DNA, 25 bp, Homo sapien
aaagcaaacttttcagccattggtt

SEQ ID NO: 5284394 - DNA, 25 bp, Homo sapien
gcaaacttttcagccattggtttcc

SEQ ID NO: 5284395 - DNA, 25 bp, Homo sapien
tggattcagggtagctttcactcat

SEQ ID NO: 5284396 - DNA, 25 bp, Homo sapien
ttggattcagggtagctttcactca

SEQ ID NO: 5284397 - DNA, 25 bp, Homo sapien
tctgagtctttggattcagggtagc

SEQ ID NO: 5284398 - DNA, 25 bp, Homo sapien
tccttatttctgagtctttggattc

SEQ ID NO: 5284399 - DNA, 25 bp, Homo sapien
tcgaggactttgacttttccgctcc

SEQ ID NO: 5284400 - DNA, 25 bp, Homo sapien
tgatgttccctcttcaatagggtca

SEQ ID NO: 5284401 - DNA, 25 bp, Homo sapien
ccattagtaggtaaacacggtatca

SEQ ID NO: 5284402 - DNA, 25 bp, Homo sapien
tttccgctccccaacatacgtgatg

SEQ ID NO: 5284403 - DNA, 25 bp, Homo sapien
atgagtttattccaacgaggctcct

SEQ ID NO: 5284404 - DNA, 25 bp, Homo sapien
attccaacgaggctccttcatccag

SEQ ID NO: 5284405 - DNA, 25 bp, Homo sapien
agtttattccaacgaggctccttca

SEQ ID NO: 5284406 - DNA, 25 bp, Homo sapien
ttccaacgaggctccttcatccagt

SEQ ID NO: 5284407 - DNA, 25 bp, Homo sapien
cactaagattcttggagccattaca

SEQ ID NO: 5284408 - DNA, 25 bp, Homo sapien
gggaaactgacatgtatgcacttca

SEQ ID NO: 5284409 - DNA, 25 bp, Homo sapien
taggtccactccaggtgtgtacttc

SEQ ID NO: 5284410 - DNA, 25 bp, Homo sapien
tgtacttccgtccatgtccactaag

SEQ ID NO: 5284411 - DNA, 25 bp, Homo sapien
gctcccagagctgtgcgtcacaaag

SEQ ID NO: 5284412 - DNA, 25 bp, Homo sapien
tgtctgtcccaatcgcccagagatg

SEQ ID NO: 5284413 - DNA, 25 bp, Homo sapien
tgaggcccctcccagtggtatctac

SEQ ID NO: 5284414 - DNA, 25 bp, Homo sapien
tataagtcggcatctgaagcaggag

SEQ ID NO: 5284415 - DNA, 25 bp, Homo sapien
tggttgagcccacataggttcctgt

SEQ ID NO: 5284416 - DNA, 25 bp, Homo sapien
cagctgctggttgagcccacatagg

SEQ ID NO: 5284417 - DNA, 25 bp, Homo sapien
tcctgtgcctggagtatgggtttgt

SEQ ID NO: 5284418 - DNA, 25 bp, Homo sapien
gcccacataggttcctgtgcctgga

SEQ ID NO: 5284419 - DNA, 25 bp, Homo sapien
tctctcatcatcagctaatgagaac

SEQ ID NO: 5284420 - DNA, 25 bp, Homo sapien
tttctctcatcatcagctaatgaga

SEQ ID NO: 5284421 - DNA, 25 bp, Homo sapien
atttctctcatcatcagctaatgag

SEQ ID NO: 5284422 - DNA, 25 bp, Homo sapien
tctcatcatcagctaatgagaacat

SEQ ID NO: 5284423 - DNA, 25 bp, Homo sapien
gagaactcattttgcttgcacttct

SEQ ID NO: 5284424 - DNA, 25 bp, Homo sapien
ttctcagagaactcattttgcttgc

SEQ ID NO: 5284425 - DNA, 25 bp, Homo sapien
tctctcctccgctcctcagtgttct

SEQ ID NO: 5284426 - DNA, 25 bp, Homo sapien
cagagaactcattttgcttgcactt

SEQ ID NO: 5284427 - DNA, 25 bp, Homo sapien
taatgaatctatcagaagggtctgg

SEQ ID NO: 5284428 - DNA, 25 bp, Homo sapien
ggcgatcaggatatgctggagaaac

SEQ ID NO: 5284429 - DNA, 25 bp, Homo sapien
ggaagatgataaggagacacggccc

SEQ ID NO: 5284430 - DNA, 25 bp, Homo sapien
accgtgcaagatgtacagggtgatg

SEQ ID NO: 5284431 - DNA, 25 bp, Homo sapien
cagtgtgatgttgagtcgcctccat

SEQ ID NO: 5284432 - DNA, 25 bp, Homo sapien
ggcagttggatcagtggattccaca

SEQ ID NO: 5284433 - DNA, 25 bp, Homo sapien
aggcagagcaaacagcttggtaggt

SEQ ID NO: 5284434 - DNA, 25 bp, Homo sapien
cagcttggtaggtgggggcatgggc

SEQ ID NO: 5284435 - DNA, 25 bp, Homo sapien
catgggcagttggatcagtggattc

SEQ ID NO: 5284436 - DNA, 25 bp, Homo sapien
tcaaggatgatctgagtctctggga

SEQ ID NO: 5284437 - DNA, 25 bp, Homo sapien
aggatgatctgagtctctgggaact

SEQ ID NO: 5284438 - DNA, 25 bp, Homo sapien
atgatctgagtctctgggaactctc

SEQ ID NO: 5284439 - DNA, 25 bp, Homo sapien
caaggatgatctgagtctctgggaa

SEQ ID NO: 5284440 - DNA, 25 bp, Homo sapien
ataaaggttttaggagccatcaaga

SEQ ID NO: 5284441 - DNA, 25 bp, Homo sapien
gccatcaagatgtatgtgttcatgg

SEQ ID NO: 5284442 - DNA, 25 bp, Homo sapien
tgtgttcatggattcctttctaagc

SEQ ID NO: 5284443 - DNA, 25 bp, Homo sapien
tgttcatggattcctttctaagcct

SEQ ID NO: 5284444 - DNA, 25 bp, Homo sapien
ggtgacatcaccaactttgtagatt

SEQ ID NO: 5284445 - DNA, 25 bp, Homo sapien
ccttccatagggacagaagggccct

SEQ ID NO: 5284446 - DNA, 25 bp, Homo sapien
tgtcatcactaagccatgtgccctc

SEQ ID NO: 5284447 - DNA, 25 bp, Homo sapien
ggtgaccactctacaggtgacatca

SEQ ID NO: 5284448 - DNA, 25 bp, Homo sapien
ttctgacactaatgtgtaatctgtc

SEQ ID NO: 5284449 - DNA, 25 bp, Homo sapien
cactaatgtgtaatctgtccatgga

SEQ ID NO: 5284450 - DNA, 25 bp, Homo sapien
ccccgcccgacttctgacactaatg

SEQ ID NO: 5284451 - DNA, 25 bp, Homo sapien
tgacactaatgtgtaatctgtccat

SEQ ID NO: 5284452 - DNA, 25 bp, Homo sapien
tcattaattagctgtgcttgactgt

SEQ ID NO: 5284453 - DNA, 25 bp, Homo sapien
taccaaaccaaggaagacactaatg

SEQ ID NO: 5284454 - DNA, 25 bp, Homo sapien
gcttgactgtttgtagagggcgtca

SEQ ID NO: 5284455 - DNA, 25 bp, Homo sapien
cacacagttggatgaacagtttgac

SEQ ID NO: 5284456 - DNA, 25 bp, Homo sapien
ttgttctcgaatgttctttcttttc

SEQ ID NO: 5284457 - DNA, 25 bp, Homo sapien
tgaaattttgttctcgaatgttctt

SEQ ID NO: 5284458 - DNA, 25 bp, Homo sapien
cctcttttctctactgtttcttttg

SEQ ID NO: 5284459 - DNA, 25 bp, Homo sapien
cttttctctactgtttcttttgaca

SEQ ID NO: 5284460 - DNA, 25 bp, Homo sapien
ccttcgtatggaatccactacacca

SEQ ID NO: 5284461 - DNA, 25 bp, Homo sapien
gaatgaaagaactggccttccttcg

SEQ ID NO: 5284462 - DNA, 25 bp, Homo sapien
tcgtatggaatccactacaccagcc

SEQ ID NO: 5284463 - DNA, 25 bp, Homo sapien
aaagaactggccttccttcgtatgg

SEQ ID NO: 5284464 - DNA, 25 bp, Homo sapien
caatctcctcgctctttagatcaag

SEQ ID NO: 5284465 - DNA, 25 bp, Homo sapien
tattcaacctttctcaacaccactg

SEQ ID NO: 5284466 - DNA, 25 bp, Homo sapien
tgacaccttctagccctatacatag

SEQ ID NO: 5284467 - DNA, 25 bp, Homo sapien
tatacatagggcctcaccaatctcc

SEQ ID NO: 5284468 - DNA, 25 bp, Homo sapien
ggcagatttcagactggtatgaatc

SEQ ID NO: 5284469 - DNA, 25 bp, Homo sapien
ctctaaggctagattcagtgatgtc

SEQ ID NO: 5284470 - DNA, 25 bp, Homo sapien
aatcagtaagtgtccatttaattct

SEQ ID NO: 5284471 - DNA, 25 bp, Homo sapien
tttaattctctaaggctagattcag

SEQ ID NO: 5284472 - DNA, 25 bp, Homo sapien
accgaaccctccttgcactcttctg

SEQ ID NO: 5284473 - DNA, 25 bp, Homo sapien
gaccgaaccctccttgcactcttct

SEQ ID NO: 5284474 - DNA, 25 bp, Homo sapien
atcacgaccgaaccctccttgcact

SEQ ID NO: 5284475 - DNA, 25 bp, Homo sapien
acgaccgaaccctccttgcactctt

SEQ ID NO: 5284476 - DNA, 25 bp, Homo sapien
tcagggagagttccgtactgtcact

SEQ ID NO: 5284477 - DNA, 25 bp, Homo sapien
gaaggaagctgtcctaggtccacac

SEQ ID NO: 5284478 - DNA, 25 bp, Homo sapien
tcttctactgccagaaaactgatga

SEQ ID NO: 5284479 - DNA, 25 bp, Homo sapien
ctagcctgtgttattctcaatatgt

SEQ ID NO: 5284480 - DNA, 25 bp, Homo sapien
aattagctatagtgccctgagagtc

SEQ ID NO: 5284481 - DNA, 25 bp, Homo sapien
tgcatggaccataacaattagctat

SEQ ID NO: 5284482 - DNA, 25 bp, Homo sapien
gaccataacaattagctatagtgcc

SEQ ID NO: 5284483 - DNA, 25 bp, Homo sapien
ctgaaacttgcttgcatggaccata

SEQ ID NO: 5284484 - DNA, 25 bp, Homo sapien
cattcctgccctgagagtaccttaa

SEQ ID NO: 5284485 - DNA, 25 bp, Homo sapien
cagtatgggccactacctctgtgca

SEQ ID NO: 5284486 - DNA, 25 bp, Homo sapien
gaggcttccaatagaccatcaggca

SEQ ID NO: 5284487 - DNA, 25 bp, Homo sapien
caaagtagattaatgtgcccctgtc

SEQ ID NO: 5284488 - DNA, 25 bp, Homo sapien
tacctttccatgacaggttgcccag

SEQ ID NO: 5284489 - DNA, 25 bp, Homo sapien
tcatgagagtaattctggacagctc

SEQ ID NO: 5284490 - DNA, 25 bp, Homo sapien
gcagtacctttccatgacaggttgc

SEQ ID NO: 5284491 - DNA, 25 bp, Homo sapien
tctggtcagctgtcacctcttctgc

SEQ ID NO: 5284492 - DNA, 25 bp, Homo sapien
cgccaatatcaaacatatgattgaa

SEQ ID NO: 5284493 - DNA, 25 bp, Homo sapien
cctgtctctctttttggaataggac

SEQ ID NO: 5284494 - DNA, 25 bp, Homo sapien
tgattgaaacgacagggcttgattt

SEQ ID NO: 5284495 - DNA, 25 bp, Homo sapien
acatatgattgaaacgacagggctt

SEQ ID NO: 5284496 - DNA, 25 bp, Homo sapien
atgtcttgaagtagaggtcaatttc

SEQ ID NO: 5284497 - DNA, 25 bp, Homo sapien
tcttgaagtagaggtcaatttcagg

SEQ ID NO: 5284498 - DNA, 25 bp, Homo sapien
cttgaagtagaggtcaatttcagga

SEQ ID NO: 5284499 - DNA, 25 bp, Homo sapien
tgtcttgaagtagaggtcaatttca

SEQ ID NO: 5284500 - DNA, 25 bp, Homo sapien
ggcctttcatcagtgagcaaaggta

SEQ ID NO: 5284501 - DNA, 25 bp, Homo sapien
gggcctttcatcagtgagcaaaggt

SEQ ID NO: 5284502 - DNA, 25 bp, Homo sapien
gatgttcccagaagcacaaacttga

SEQ ID NO: 5284503 - DNA, 25 bp, Homo sapien
ttcaaattccagtactaagcccgct

SEQ ID NO: 5284504 - DNA, 25 bp, Homo sapien
tccaaagtgtccagcccgagataaa

SEQ ID NO: 5284505 - DNA, 25 bp, Homo sapien
cccgctggcaggacgtttgatgaga

SEQ ID NO: 5284506 - DNA, 25 bp, Homo sapien
aagtagagtacagagaccatagccg

SEQ ID NO: 5284507 - DNA, 25 bp, Homo sapien
gctgggtccttcgtgaagaaaagat

SEQ ID NO: 5284508 - DNA, 25 bp, Homo sapien
gagaccatagccgaagtcttggtag

SEQ ID NO: 5284509 - DNA, 25 bp, Homo sapien
tcttggtagaatatggttggcttga

SEQ ID NO: 5284510 - DNA, 25 bp, Homo sapien
tatgattcttgctctgccattgagg

SEQ ID NO: 5284511 - DNA, 25 bp, Homo sapien
gaaatgcctggtctgtcttcagtga

SEQ ID NO: 5284512 - DNA, 25 bp, Homo sapien
ggatagtgatcacccgactacctgg

SEQ ID NO: 5284513 - DNA, 25 bp, Homo sapien
gactacctggtatgctgacaactct

SEQ ID NO: 5284514 - DNA, 25 bp, Homo sapien
taaagatggaaatctctctgcatcc

SEQ ID NO: 5284515 - DNA, 25 bp, Homo sapien
cttggtaaagatggaaatctctctg

SEQ ID NO: 5284516 - DNA, 25 bp, Homo sapien
aaagatggaaatctctctgcatccc

SEQ ID NO: 5284517 - DNA, 25 bp, Homo sapien
ggtaaagatggaaatctctctgcat

SEQ ID NO: 5284518 - DNA, 25 bp, Homo sapien
ttctgtgtgctgcttagcactacag

SEQ ID NO: 5284519 - DNA, 25 bp, Homo sapien
tagccactgcgaggtgagctgcaaa

SEQ ID NO: 5284520 - DNA, 25 bp, Homo sapien
ttagcactacagactatagccactg

SEQ ID NO: 5284521 - DNA, 25 bp, Homo sapien
cagactatagccactgcgaggtgag

SEQ ID NO: 5284522 - DNA, 25 bp, Homo sapien
aagggatattttctcggtcactcat

SEQ ID NO: 5284523 - DNA, 25 bp, Homo sapien
atgacatccccaccgatccgttcca

SEQ ID NO: 5284524 - DNA, 25 bp, Homo sapien
ccaccgatccgttccaatttcttct

SEQ ID NO: 5284525 - DNA, 25 bp, Homo sapien
ttttctcggtcactcatgacatccc

SEQ ID NO: 5284526 - DNA, 25 bp, Homo sapien
gaaacaggtagcatgaatattccaa

SEQ ID NO: 5284527 - DNA, 25 bp, Homo sapien
cagaaacaggtagcatgaatattcc

SEQ ID NO: 5284528 - DNA, 25 bp, Homo sapien
aacaggtagcatgaatattccaagt

SEQ ID NO: 5284529 - DNA, 25 bp, Homo sapien
ggggaaatcatcattatgcacagaa

SEQ ID NO: 5284530 - DNA, 25 bp, Homo sapien
tatggcatatgcttcagtgaaggag

SEQ ID NO: 5284531 - DNA, 25 bp, Homo sapien
ggagaattgctccatattgggacag

SEQ ID NO: 5284532 - DNA, 25 bp, Homo sapien
tatgttggtggatatagacctgaaa

SEQ ID NO: 5284533 - DNA, 25 bp, Homo sapien
cacactgaccgccaagtatggcata

SEQ ID NO: 5284534 - DNA, 25 bp, Homo sapien
aaacactgtcgggatgatcagcgtc

SEQ ID NO: 5284535 - DNA, 25 bp, Homo sapien
catttgacttaaggcaagtgatgca

SEQ ID NO: 5284536 - DNA, 25 bp, Homo sapien
caaggtaatcgtgggcagaaaggct

SEQ ID NO: 5284537 - DNA, 25 bp, Homo sapien
ttagatagatacatccctggtaagt

SEQ ID NO: 5284538 - DNA, 25 bp, Homo sapien
tgcccttgccctgttacttgacgca

SEQ ID NO: 5284539 - DNA, 25 bp, Homo sapien
gcccttgccctgttacttgacgcat

SEQ ID NO: 5284540 - DNA, 25 bp, Homo sapien
ataaggtaggaattcagaccacagg

SEQ ID NO: 5284541 - DNA, 25 bp, Homo sapien
aagcacactgatcttgttgtagaag

SEQ ID NO: 5284542 - DNA, 25 bp, Homo sapien
aaagtaaagcacactgatcttgttg

SEQ ID NO: 5284543 - DNA, 25 bp, Homo sapien
aaataaggtaggaattcagaccaca

SEQ ID NO: 5284544 - DNA, 25 bp, Homo sapien
ctgcaactgttgctaccacaataga

SEQ ID NO: 5284545 - DNA, 25 bp, Homo sapien
ttatccagttggttggttggtggct

SEQ ID NO: 5284546 - DNA, 25 bp, Homo sapien
tgttgctaccacaatagaacacgtt

SEQ ID NO: 5284547 - DNA, 25 bp, Homo sapien
cagcttcagtccttgatttatccag

SEQ ID NO: 5284548 - DNA, 25 bp, Homo sapien
aatgacatcacagttggaatagtag

SEQ ID NO: 5284549 - DNA, 25 bp, Homo sapien
aggagtggggcaatgacatcacagt

SEQ ID NO: 5284550 - DNA, 25 bp, Homo sapien
taggcagtaaatgtgtgaggagtgg

SEQ ID NO: 5284551 - DNA, 25 bp, Homo sapien
tctgcttcatggaggctaggcagta

SEQ ID NO: 5284552 - DNA, 25 bp, Homo sapien
cttattgctgtctcccgaactctcc

SEQ ID NO: 5284553 - DNA, 25 bp, Homo sapien
ctccttattgctgtctcccgaactc

SEQ ID NO: 5284554 - DNA, 25 bp, Homo sapien
ccttattgctgtctcccgaactctc

SEQ ID NO: 5284555 - DNA, 25 bp, Homo sapien
tccttattgctgtctcccgaactct

SEQ ID NO: 5284556 - DNA, 25 bp, Homo sapien
ttttgaaaggatatcactgattctg

SEQ ID NO: 5284557 - DNA, 25 bp, Homo sapien
agttttgaaaggatatcactgattc

SEQ ID NO: 5284558 - DNA, 25 bp, Homo sapien
catagttttgaaaggatatcactga

SEQ ID NO: 5284559 - DNA, 25 bp, Homo sapien
gaaaggatatcactgattctgaaca

SEQ ID NO: 5284560 - DNA, 25 bp, Homo sapien
agttttcagttcattgggtttagct

SEQ ID NO: 5284561 - DNA, 25 bp, Homo sapien
tgatgcttgtactcttcaacctagt

SEQ ID NO: 5284562 - DNA, 25 bp, Homo sapien
cagttcattgggtttagcttggtgt

SEQ ID NO: 5284563 - DNA, 25 bp, Homo sapien
gcttgtactcttcaacctagttttc

SEQ ID NO: 5284564 - DNA, 25 bp, Homo sapien
tcagtgataatgacttcagctacca

SEQ ID NO: 5284565 - DNA, 25 bp, Homo sapien
cagtgataatgacttcagctaccaa

SEQ ID NO: 5284566 - DNA, 25 bp, Homo sapien
gataatgacttcagctaccaactgt

SEQ ID NO: 5284567 - DNA, 25 bp, Homo sapien
gtgataatgacttcagctaccaact

SEQ ID NO: 5284568 - DNA, 25 bp, Homo sapien
tcagacactttcactgactccctgc

SEQ ID NO: 5284569 - DNA, 25 bp, Homo sapien
gacactttcactgactccctgctcc

SEQ ID NO: 5284570 - DNA, 25 bp, Homo sapien
ctccttcaaccgtgtgtctttcttc

SEQ ID NO: 5284571 - DNA, 25 bp, Homo sapien
tctttcttctgtgtagtaaaaagaa

SEQ ID NO: 5284572 - DNA, 25 bp, Homo sapien
ctgttttggagacatatctttatca

SEQ ID NO: 5284573 - DNA, 25 bp, Homo sapien
aaggaagagcaggataatgatgatg

SEQ ID NO: 5284574 - DNA, 25 bp, Homo sapien
tctatggtgcccaaggcccgtgagg

SEQ ID NO: 5284575 - DNA, 25 bp, Homo sapien
ttcatgctctctatggtgcccaagg

SEQ ID NO: 5284576 - DNA, 25 bp, Homo sapien
cacctgtttgtaaatgataaggacc

SEQ ID NO: 5284577 - DNA, 25 bp, Homo sapien
gagcagcagtttatgatcccaacca

SEQ ID NO: 5284578 - DNA, 25 bp, Homo sapien
aataattcggtcctttgcccaggag

SEQ ID NO: 5284579 - DNA, 25 bp, Homo sapien
caggtcctttagacagctgtaaact

SEQ ID NO: 5284580 - DNA, 25 bp, Homo sapien
catgagccgatcctccatttcaagc

SEQ ID NO: 5284581 - DNA, 25 bp, Homo sapien
cacatgagccgatcctccatttcaa

SEQ ID NO: 5284582 - DNA, 25 bp, Homo sapien
tccatttcaagccaacactcacttt

SEQ ID NO: 5284583 - DNA, 25 bp, Homo sapien
gagccgatcctccatttcaagccaa

SEQ ID NO: 5284584 - DNA, 25 bp, Homo sapien
caggctgtctgctagagaccgggct

SEQ ID NO: 5284585 - DNA, 25 bp, Homo sapien
tcccaatttaatacatggcttcctt

SEQ ID NO: 5284586 - DNA, 25 bp, Homo sapien
tgtgatgaaatgcaagggctcatcc

SEQ ID NO: 5284587 - DNA, 25 bp, Homo sapien
tgagaagcaggctgtctgctagaga

SEQ ID NO: 5284588 - DNA, 25 bp, Homo sapien
cttggttggtgtttgtagcctattt

SEQ ID NO: 5284589 - DNA, 25 bp, Homo sapien
ttgtagcctattttccagctttgaa

SEQ ID NO: 5284590 - DNA, 25 bp, Homo sapien
gttggtgtttgtagcctattttcca

SEQ ID NO: 5284591 - DNA, 25 bp, Homo sapien
ggtgtttgtagcctattttccagct

SEQ ID NO: 5284592 - DNA, 25 bp, Homo sapien
atagtaaagtaatgagagagatttt

SEQ ID NO: 5284593 - DNA, 25 bp, Homo sapien
taaagtaatgagagagattttccat

SEQ ID NO: 5284594 - DNA, 25 bp, Homo sapien
agtaaagtaatgagagagattttcc

SEQ ID NO: 5284595 - DNA, 25 bp, Homo sapien
gattcttatagtaaagtaatgagag

SEQ ID NO: 5284596 - DNA, 25 bp, Homo sapien
aacagcagtcccattgtctctgcac

SEQ ID NO: 5284597 - DNA, 25 bp, Homo sapien
acagcagtcccattgtctctgcact

SEQ ID NO: 5284598 - DNA, 25 bp, Homo sapien
caacagcagtcccattgtctctgca

SEQ ID NO: 5284599 - DNA, 25 bp, Homo sapien
aactcgctattatttcctgttggat

SEQ ID NO: 5284600 - DNA, 25 bp, Homo sapien
tctccgtcaaaactcgctattattt

SEQ ID NO: 5284601 - DNA, 25 bp, Homo sapien
cgtcaaaactcgctattatttcctg

SEQ ID NO: 5284602 - DNA, 25 bp, Homo sapien
tgctcttctccgtcaaaactcgcta

SEQ ID NO: 5284603 - DNA, 25 bp, Homo sapien
tagccaggcccaaattcgaggccat

SEQ ID NO: 5284604 - DNA, 25 bp, Homo sapien
atagccaggcccaaattcgaggcca

SEQ ID NO: 5284605 - DNA, 25 bp, Homo sapien
caaaaggaacctgatcactctggat

SEQ ID NO: 5284606 - DNA, 25 bp, Homo sapien
gctagtagtgaacaccagcgcatca

SEQ ID NO: 5284607 - DNA, 25 bp, Homo sapien
caccagcgcatcattgctttgggct

SEQ ID NO: 5284608 - DNA, 25 bp, Homo sapien
gacagtgaatgatgactgctagtag

SEQ ID NO: 5284609 - DNA, 25 bp, Homo sapien
cgaaggaaggcccttaaatatggtg

SEQ ID NO: 5284610 - DNA, 25 bp, Homo sapien
cagagatgggctcttcaattccatt

SEQ ID NO: 5284611 - DNA, 25 bp, Homo sapien
ttcctagttgactgagtgaatgtaa

SEQ ID NO: 5284612 - DNA, 25 bp, Homo sapien
tgttccataatactggaatttcttc

SEQ ID NO: 5284613 - DNA, 25 bp, Homo sapien
ttctgaatatgcattgataattctg

SEQ ID NO: 5284614 - DNA, 25 bp, Homo sapien
gggtgtagtattctgaatatgcatt

SEQ ID NO: 5284615 - DNA, 25 bp, Homo sapien
aaggatctggggtgtagtattctga

SEQ ID NO: 5284616 - DNA, 25 bp, Homo sapien
tagtattctgaatatgcattgataa

SEQ ID NO: 5284617 - DNA, 25 bp, Homo sapien
gcttcggttgggtccacatctgctt

SEQ ID NO: 5284618 - DNA, 25 bp, Homo sapien
ttaatgatgttacctgtacacttgc

SEQ ID NO: 5284619 - DNA, 25 bp, Homo sapien
gtgggctcttgaatctctgtgaatc

SEQ ID NO: 5284620 - DNA, 25 bp, Homo sapien
ttctgaacctcatgcttcggttggg

SEQ ID NO: 5284621 - DNA, 25 bp, Homo sapien
ctgtcttatcctgattggaatccca

SEQ ID NO: 5284622 - DNA, 25 bp, Homo sapien
cctgcctgtcttatcctgattggaa

SEQ ID NO: 5284623 - DNA, 25 bp, Homo sapien
gcctgtcttatcctgattggaatcc

SEQ ID NO: 5284624 - DNA, 25 bp, Homo sapien
ctgcctgtcttatcctgattggaat

SEQ ID NO: 5284625 - DNA, 25 bp, Homo sapien
ctctccttctctcggttttgggtgg

SEQ ID NO: 5284626 - DNA, 25 bp, Homo sapien
taatgttgtaattcctgaggctcac

SEQ ID NO: 5284627 - DNA, 25 bp, Homo sapien
ctctgaaaacagatactctccttct

SEQ ID NO: 5284628 - DNA, 25 bp, Homo sapien
tctgtagtttgcatgactctcttct

SEQ ID NO: 5284629 - DNA, 25 bp, Homo sapien
gattgaagaatgttgaattcattac

SEQ ID NO: 5284630 - DNA, 25 bp, Homo sapien
gaagaatgttgaattcattactgca

SEQ ID NO: 5284631 - DNA, 25 bp, Homo sapien
aatttgattgaagaatgttgaattc

SEQ ID NO: 5284632 - DNA, 25 bp, Homo sapien
tctttgaggttaagcctcaaactaa

SEQ ID NO: 5284633 - DNA, 25 bp, Homo sapien
ggaactataattggagctatttttc

SEQ ID NO: 5284634 - DNA, 25 bp, Homo sapien
aagtgaatacaaaggctcagcttca

SEQ ID NO: 5284635 - DNA, 25 bp, Homo sapien
ccattccagttgcacgatttctctt

SEQ ID NO: 5284636 - DNA, 25 bp, Homo sapien
ttctggaactataattggagctatt

SEQ ID NO: 5284637 - DNA, 25 bp, Homo sapien
tagcggactcactcataagcacatt

SEQ ID NO: 5284638 - DNA, 25 bp, Homo sapien
tttggtctaacatgtcaacaacttg

SEQ ID NO: 5284639 - DNA, 25 bp, Homo sapien
agaagtagatcaatgcagaaatggg

SEQ ID NO: 5284640 - DNA, 25 bp, Homo sapien
tgggactgacagtccaatagcggac

SEQ ID NO: 5284641 - DNA, 25 bp, Homo sapien
tccctcaggctgtcaattgaccacg

SEQ ID NO: 5284642 - DNA, 25 bp, Homo sapien
ttgaccacgtgtgagctgacatggc

SEQ ID NO: 5284643 - DNA, 25 bp, Homo sapien
taacccaatggaacatccctcaggc

SEQ ID NO: 5284644 - DNA, 25 bp, Homo sapien
tggcaagactctggaaacacctttc

SEQ ID NO: 5284645 - DNA, 25 bp, Homo sapien
tagataagatggtctgggtctcgcc

SEQ ID NO: 5284646 - DNA, 25 bp, Homo sapien
tttagaatcagaacggatttctctt

SEQ ID NO: 5284647 - DNA, 25 bp, Homo sapien
catttaaatagataagatggtctgg

SEQ ID NO: 5284648 - DNA, 25 bp, Homo sapien
gggtctcgccactttgatgcatatt

SEQ ID NO: 5284649 - DNA, 25 bp, Homo sapien
aaagtcagagcttcggggccaggct

SEQ ID NO: 5284650 - DNA, 25 bp, Homo sapien
taagaacacaattatgaattgtaaa

SEQ ID NO: 5284651 - DNA, 25 bp, Homo sapien
ctagacatttgtggattattgaatc

SEQ ID NO: 5284652 - DNA, 25 bp, Homo sapien
tgaatctaaaccgtctaaaacacca

SEQ ID NO: 5284653 - DNA, 25 bp, Homo sapien
tttgttccttgcaaggagcaaattg

SEQ ID NO: 5284654 - DNA, 25 bp, Homo sapien
catttgttccttgcaaggagcaaat

SEQ ID NO: 5284655 - DNA, 25 bp, Homo sapien
cccatttgttccttgcaaggagcaa

SEQ ID NO: 5284656 - DNA, 25 bp, Homo sapien
ccccatttgttccttgcaaggagca

SEQ ID NO: 5284657 - DNA, 25 bp, Homo sapien
aaacatctaaacctccagtggctgt

SEQ ID NO: 5284658 - DNA, 25 bp, Homo sapien
tggaacaacccacttctcgttctga

SEQ ID NO: 5284659 - DNA, 25 bp, Homo sapien
gaacaacccacttctcgttctgatt

SEQ ID NO: 5284660 - DNA, 25 bp, Homo sapien
tgaaacatctaaacctccagtggct

SEQ ID NO: 5284661 - DNA, 25 bp, Homo sapien
gcacacgaataggtccaaaggtaca

SEQ ID NO: 5284662 - DNA, 25 bp, Homo sapien
cacacgaataggtccaaaggtacaa

SEQ ID NO: 5284663 - DNA, 25 bp, Homo sapien
ggcacacgaataggtccaaaggtac

SEQ ID NO: 5284664 - DNA, 25 bp, Homo sapien
tgtctagaggcagcaatgatgagga

SEQ ID NO: 5284665 - DNA, 25 bp, Homo sapien
ggcagggcatgtgggtgtctagagg

SEQ ID NO: 5284666 - DNA, 25 bp, Homo sapien
cctgaaatcagtgctataatgaagt

SEQ ID NO: 5284667 - DNA, 25 bp, Homo sapien
gctataatgaagtgtggcagggcat

SEQ ID NO: 5284668 - DNA, 25 bp, Homo sapien
tggtgtccctagcttgctgggatca

SEQ ID NO: 5284669 - DNA, 25 bp, Homo sapien
gctgggatcatcagacatgaacacc

SEQ ID NO: 5284670 - DNA, 25 bp, Homo sapien
gacttggtgtccctagcttgctggg

SEQ ID NO: 5284671 - DNA, 25 bp, Homo sapien
gtccctagcttgctgggatcatcag

SEQ ID NO: 5284672 - DNA, 25 bp, Homo sapien
ctgttatcacaagttgcaagttggg

SEQ ID NO: 5284673 - DNA, 25 bp, Homo sapien
aactttctagcttctcgacctggtc

SEQ ID NO: 5284674 - DNA, 25 bp, Homo sapien
ggcaccttgttccacgataactttc

SEQ ID NO: 5284675 - DNA, 25 bp, Homo sapien
catctgcgtgggtgatctgttatca

SEQ ID NO: 5284676 - DNA, 25 bp, Homo sapien
cactgctgatcagtaagaaactccc

SEQ ID NO: 5284677 - DNA, 25 bp, Homo sapien
gtttttcaagcttgatctccaatct

SEQ ID NO: 5284678 - DNA, 25 bp, Homo sapien
aagcttgatctccaatctatctggc

SEQ ID NO: 5284679 - DNA, 25 bp, Homo sapien
gctgatcagtaagaaactcccttat

SEQ ID NO: 5284680 - DNA, 25 bp, Homo sapien
gactagaagagcaggaaagcgatca

SEQ ID NO: 5284681 - DNA, 25 bp, Homo sapien
gaaagcgatcatgtctgattatccg

SEQ ID NO: 5284682 - DNA, 25 bp, Homo sapien
tccgaaggagtaattcagagatcct

SEQ ID NO: 5284683 - DNA, 25 bp, Homo sapien
gctttccatagtgatatggaggaca

SEQ ID NO: 5284684 - DNA, 25 bp, Homo sapien
ttcctcatgctgtgttagaaggagc

SEQ ID NO: 5284685 - DNA, 25 bp, Homo sapien
gccaagagagtcagcattaataaca

SEQ ID NO: 5284686 - DNA, 25 bp, Homo sapien
cagcactgctaagcgttcctcatgc

SEQ ID NO: 5284687 - DNA, 25 bp, Homo sapien
gagagtcagcattaataacatctcc

SEQ ID NO: 5284688 - DNA, 25 bp, Homo sapien
ctatagatctctgctgctccggagg

SEQ ID NO: 5284689 - DNA, 25 bp, Homo sapien
gatacaaactttctttaatccactc

SEQ ID NO: 5284690 - DNA, 25 bp, Homo sapien
tctttaatccactctatactgctca

SEQ ID NO: 5284691 - DNA, 25 bp, Homo sapien
tgtccatagtggtgaatatagatac

SEQ ID NO: 5284692 - DNA, 25 bp, Homo sapien
tgagagagtgcttgtggatcaacac

SEQ ID NO: 5284693 - DNA, 25 bp, Homo sapien
gcttgtggatcaacactgaagtaaa

SEQ ID NO: 5284694 - DNA, 25 bp, Homo sapien
gagtgcttgtggatcaacactgaag

SEQ ID NO: 5284695 - DNA, 25 bp, Homo sapien
gctgagagagtgcttgtggatcaac

SEQ ID NO: 5284696 - DNA, 25 bp, Homo sapien
ctctctggggtacagtttgtgtgaa

SEQ ID NO: 5284697 - DNA, 25 bp, Homo sapien
aagcactgcttagattttctctctg

SEQ ID NO: 5284698 - DNA, 25 bp, Homo sapien
catcatgcacctgcctgaagcactg

SEQ ID NO: 5284699 - DNA, 25 bp, Homo sapien
tgtgtgaagcccattgagttgaaag

SEQ ID NO: 5284700 - DNA, 25 bp, Homo sapien
gctatgttgtaatcaagatcctttc

SEQ ID NO: 5284701 - DNA, 25 bp, Homo sapien
acaactaaggccactagagcctgga

SEQ ID NO: 5284702 - DNA, 25 bp, Homo sapien
tctttgtcctcatattacttgatcc

SEQ ID NO: 5284703 - DNA, 25 bp, Homo sapien
tacttgatccctcttgtagtgattt

SEQ ID NO: 5284704 - DNA, 25 bp, Homo sapien
tcttcactgagcaaccagcaatcat

SEQ ID NO: 5284705 - DNA, 25 bp, Homo sapien
acatgtcttcactgagcaaccagca

SEQ ID NO: 5284706 - DNA, 25 bp, Homo sapien
aacatgagctctataattacatgtc

SEQ ID NO: 5284707 - DNA, 25 bp, Homo sapien
tgtcttcactgagcaaccagcaatc

SEQ ID NO: 5284708 - DNA, 25 bp, Homo sapien
taatacaacatctttttgcagagag

SEQ ID NO: 5284709 - DNA, 25 bp, Homo sapien
ttctaatacaacatctttttgcaga

SEQ ID NO: 5284710 - DNA, 25 bp, Homo sapien
ctaatacaacatctttttgcagaga

SEQ ID NO: 5284711 - DNA, 25 bp, Homo sapien
tctaatacaacatctttttgcagag

SEQ ID NO: 5284712 - DNA, 25 bp, Homo sapien
ctgccccaacccacattgagctctg

SEQ ID NO: 5284713 - DNA, 25 bp, Homo sapien
ctggagaaggcactgccaacctttt

SEQ ID NO: 5284714 - DNA, 25 bp, Homo sapien
atttctgatcgccaagatgcagagc

SEQ ID NO: 5284715 - DNA, 25 bp, Homo sapien
ggcactgccaacctttttctctaag

SEQ ID NO: 5284716 - DNA, 25 bp, Homo sapien
tattcttgagccacaaattggcagt

SEQ ID NO: 5284717 - DNA, 25 bp, Homo sapien
tcttaaacttattcttgagccacaa

SEQ ID NO: 5284718 - DNA, 25 bp, Homo sapien
ggctgtcggttgcaattcttaaact

SEQ ID NO: 5284719 - DNA, 25 bp, Homo sapien
actcctgtggctgtcggttgcaatt

SEQ ID NO: 5284720 - DNA, 25 bp, Homo sapien
ctcatctgctcggtttctcctgtga

SEQ ID NO: 5284721 - DNA, 25 bp, Homo sapien
catctgctcggtttctcctgtgagc

SEQ ID NO: 5284722 - DNA, 25 bp, Homo sapien
tcatctgctcggtttctcctgtgag

SEQ ID NO: 5284723 - DNA, 25 bp, Homo sapien
gagagctcatttttagtattggccc

SEQ ID NO: 5284724 - DNA, 25 bp, Homo sapien
tggaggaatcactgcaaggcacagt

SEQ ID NO: 5284725 - DNA, 25 bp, Homo sapien
ttcccaaggctccataggtttcagc

SEQ ID NO: 5284726 - DNA, 25 bp, Homo sapien
aacactcctcgtgtactccggacag

SEQ ID NO: 5284727 - DNA, 25 bp, Homo sapien
tcaaattccttccaagccagagcca

SEQ ID NO: 5284728 - DNA, 25 bp, Homo sapien
cacagcaagtattgtaaatcattgt

SEQ ID NO: 5284729 - DNA, 25 bp, Homo sapien
acagcaagtattgtaaatcattgtt

SEQ ID NO: 5284730 - DNA, 25 bp, Homo sapien
ccacagcaagtattgtaaatcattg

SEQ ID NO: 5284731 - DNA, 25 bp, Homo sapien
tcttaagtgaaagcccaacagactc

SEQ ID NO: 5284732 - DNA, 25 bp, Homo sapien
gttttgagatagctcttcatctgct

SEQ ID NO: 5284733 - DNA, 25 bp, Homo sapien
caagctgtgcaaacatgtgtgggct

SEQ ID NO: 5284734 - DNA, 25 bp, Homo sapien
gtttttctgcagataggaccagtcc

SEQ ID NO: 5284735 - DNA, 25 bp, Homo sapien
cagatgatttcagaccacttgtttt

SEQ ID NO: 5284736 - DNA, 25 bp, Homo sapien
tctgaactggtgaatccatatgaca

SEQ ID NO: 5284737 - DNA, 25 bp, Homo sapien
gaactggtgaatccatatgacaagt

SEQ ID NO: 5284738 - DNA, 25 bp, Homo sapien
tggtgaatccatatgacaagtaggc

SEQ ID NO: 5284739 - DNA, 25 bp, Homo sapien
gttctgaactggtgaatccatatga

SEQ ID NO: 5284740 - DNA, 25 bp, Homo sapien
cacctcttgccaagtaactagtaga

SEQ ID NO: 5284741 - DNA, 25 bp, Homo sapien
gccaagtaactagtagagtcatggt

SEQ ID NO: 5284742 - DNA, 25 bp, Homo sapien
gctatggcataatctgaaaaggctt

SEQ ID NO: 5284743 - DNA, 25 bp, Homo sapien
gagtcatggtaaggaagaacattgt

SEQ ID NO: 5284744 - DNA, 25 bp, Homo sapien
atttctctgaagtgtgacctttctt

SEQ ID NO: 5284745 - DNA, 25 bp, Homo sapien
ttatttctctgaagtgtgacctttc

SEQ ID NO: 5284746 - DNA, 25 bp, Homo sapien
ttctctgaagtgtgacctttctttt

SEQ ID NO: 5284747 - DNA, 25 bp, Homo sapien
tatttctctgaagtgtgacctttct

SEQ ID NO: 5284748 - DNA, 25 bp, Homo sapien
tctcccatacaaaaactaaccagac

SEQ ID NO: 5284749 - DNA, 25 bp, Homo sapien
gctctcagttccttgggtgttttta

SEQ ID NO: 5284750 - DNA, 25 bp, Homo sapien
tcgtagctctcagttccttgggtgt

SEQ ID NO: 5284751 - DNA, 25 bp, Homo sapien
cactgttcgtagctctcagttcctt

SEQ ID NO: 5284752 - DNA, 25 bp, Homo sapien
tgttcgtagctctcagttccttggg

SEQ ID NO: 5284753 - DNA, 25 bp, Homo sapien
gcatttaactgcacatcgaatcaag

SEQ ID NO: 5284754 - DNA, 25 bp, Homo sapien
tgtttctagcatgtaaagatcgagg

SEQ ID NO: 5284755 - DNA, 25 bp, Homo sapien
cgaatcaagagtccagtaatagaaa

SEQ ID NO: 5284756 - DNA, 25 bp, Homo sapien
tgtaaagatcgaggatgcaattctt

SEQ ID NO: 5284757 - DNA, 25 bp, Homo sapien
tttcatgacacatgctgttcctttt

SEQ ID NO: 5284758 - DNA, 25 bp, Homo sapien
ctttcatgacacatgctgttccttt

SEQ ID NO: 5284759 - DNA, 25 bp, Homo sapien
cagagggccctgtgtatcctttctc

SEQ ID NO: 5284760 - DNA, 25 bp, Homo sapien
tatcctttctcaccttactttgtac

SEQ ID NO: 5284761 - DNA, 25 bp, Homo sapien
tgcagctttctgtagccagagggcc

SEQ ID NO: 5284762 - DNA, 25 bp, Homo sapien
cagctttctgtagccagagggccct

SEQ ID NO: 5284763 - DNA, 25 bp, Homo sapien
tgttcaacacaagcagcgcaacatc

SEQ ID NO: 5284764 - DNA, 25 bp, Homo sapien
tcaacacaagcagcgcaacatcttc

SEQ ID NO: 5284765 - DNA, 25 bp, Homo sapien
acacaagcagcgcaacatcttccag

SEQ ID NO: 5284766 - DNA, 25 bp, Homo sapien
cacaagcagcgcaacatcttccagg

SEQ ID NO: 5284767 - DNA, 25 bp, Homo sapien
agcggattgactacaagattgcagc

SEQ ID NO: 5284768 - DNA, 25 bp, Homo sapien
actccaaacgatgtcattcccaatg

SEQ ID NO: 5284769 - DNA, 25 bp, Homo sapien
gtgggtattaactgagcggattgac

SEQ ID NO: 5284770 - DNA, 25 bp, Homo sapien
taggctctaagtgcagtgggtatta

SEQ ID NO: 5284771 - DNA, 25 bp, Homo sapien
aaccatcttcaacccaaggccctgc

SEQ ID NO: 5284772 - DNA, 25 bp, Homo sapien
aaaccatcttcaacccaaggccctg

SEQ ID NO: 5284773 - DNA, 25 bp, Homo sapien
ggagacaagcctggcaatttctata

SEQ ID NO: 5284774 - DNA, 25 bp, Homo sapien
ctccttttaacctgaggagacaagc

SEQ ID NO: 5284775 - DNA, 25 bp, Homo sapien
tgttgaccaatctcctccactaaga

SEQ ID NO: 5284776 - DNA, 25 bp, Homo sapien
cacccatccagactgtagttttatc

SEQ ID NO: 5284777 - DNA, 25 bp, Homo sapien
ggtggtattatctctcgcccaagga

SEQ ID NO: 5284778 - DNA, 25 bp, Homo sapien
gccctcgtagcataagtactgcaag

SEQ ID NO: 5284779 - DNA, 25 bp, Homo sapien
aaggcggcttcccagtagatggaga

SEQ ID NO: 5284780 - DNA, 25 bp, Homo sapien
caaggaattttccactgtcctggag

SEQ ID NO: 5284781 - DNA, 25 bp, Homo sapien
gagtaaagtgatatttgctggtgag

SEQ ID NO: 5284782 - DNA, 25 bp, Homo sapien
tgagggaattatagacatcagtcat

SEQ ID NO: 5284783 - DNA, 25 bp, Homo sapien
ctgagtaaagtgatatttgctggtg

SEQ ID NO: 5284784 - DNA, 25 bp, Homo sapien
ttgctggtgagggaattatagacat

SEQ ID NO: 5284785 - DNA, 25 bp, Homo sapien
gggtagccaatctttcctgccaggg

SEQ ID NO: 5284786 - DNA, 25 bp, Homo sapien
gggccttattgtggaaatgctaacc

SEQ ID NO: 5284787 - DNA, 25 bp, Homo sapien
tctacatttggttcacctttgggcc

SEQ ID NO: 5284788 - DNA, 25 bp, Homo sapien
tttcaagaatcctgcaagcccgggt

SEQ ID NO: 5284789 - DNA, 25 bp, Homo sapien
ggactttctactgaaagaagctgac

SEQ ID NO: 5284790 - DNA, 25 bp, Homo sapien
actttctactgaaagaagctgacaa

SEQ ID NO: 5284791 - DNA, 25 bp, Homo sapien
tagttctgtgattgtcaactggctt

SEQ ID NO: 5284792 - DNA, 25 bp, Homo sapien
gcttccagtgcaggactttctactg

SEQ ID NO: 5284793 - DNA, 25 bp, Homo sapien
tcctcttcaatatcaccattttcct

SEQ ID NO: 5284794 - DNA, 25 bp, Homo sapien
ggtgaaatcagggttcttagcctac

SEQ ID NO: 5284795 - DNA, 25 bp, Homo sapien
actctccactccgaattcttttaca

SEQ ID NO: 5284796 - DNA, 25 bp, Homo sapien
gcctacaaatatgaagcccatgtag

SEQ ID NO: 5284797 - DNA, 25 bp, Homo sapien
aacttggccaaaatatggctgtttt

SEQ ID NO: 5284798 - DNA, 25 bp, Homo sapien
gctgtttttcattgatagttttcct

SEQ ID NO: 5284799 - DNA, 25 bp, Homo sapien
ttctgacatatcctggtgcagaagg

SEQ ID NO: 5284800 - DNA, 25 bp, Homo sapien
cttgtaaatgacatgattcttcctt

SEQ ID NO: 5284801 - DNA, 25 bp, Homo sapien
ctctctgcagtatgggaccccattg

SEQ ID NO: 5284802 - DNA, 25 bp, Homo sapien
tatttgctgttacaagctgtgaacc

SEQ ID NO: 5284803 - DNA, 25 bp, Homo sapien
tcactacagatgatatggtctttaa

SEQ ID NO: 5284804 - DNA, 25 bp, Homo sapien
taagaacgggtctcagaatcctctc

SEQ ID NO: 5284805 - DNA, 25 bp, Homo sapien
gatgtttttgaagacccactctgac

SEQ ID NO: 5284806 - DNA, 25 bp, Homo sapien
gagggctcggcacaagtttgagcat

SEQ ID NO: 5284807 - DNA, 25 bp, Homo sapien
tcactgcatctgaccctggagggct

SEQ ID NO: 5284808 - DNA, 25 bp, Homo sapien
tatgaatctgtgctccgactttgcc

SEQ ID NO: 5284809 - DNA, 25 bp, Homo sapien
tagggtactaaactattacagagcc

SEQ ID NO: 5284810 - DNA, 25 bp, Homo sapien
tcattttagcccatggtagcagcct

SEQ ID NO: 5284811 - DNA, 25 bp, Homo sapien
taagacattgtgatgcaagagcagt

SEQ ID NO: 5284812 - DNA, 25 bp, Homo sapien
ctgcaagacaataatgatagggtac

SEQ ID NO: 5284813 - DNA, 25 bp, Homo sapien
gagaatcatccctgacagccttctt

SEQ ID NO: 5284814 - DNA, 25 bp, Homo sapien
caatgcttcttgaagtgacaggagc

SEQ ID NO: 5284815 - DNA, 25 bp, Homo sapien
ctgtccatcaggagtagggtcagca

SEQ ID NO: 5284816 - DNA, 25 bp, Homo sapien
gggtcagcaagagaatcatccctga

SEQ ID NO: 5284817 - DNA, 25 bp, Homo sapien
tattctccattcgacagaaaggtgg

SEQ ID NO: 5284818 - DNA, 25 bp, Homo sapien
tttgtggagggtattctccattcga

SEQ ID NO: 5284819 - DNA, 25 bp, Homo sapien
ttctccattcgacagaaaggtggag

SEQ ID NO: 5284820 - DNA, 25 bp, Homo sapien
ggtttgtggagggtattctccattc

SEQ ID NO: 5284821 - DNA, 25 bp, Homo sapien
gagttcattagcagacccaacctta

SEQ ID NO: 5284822 - DNA, 25 bp, Homo sapien
gtttgcagagttcattagcagaccc

SEQ ID NO: 5284823 - DNA, 25 bp, Homo sapien
gaatgtgtttgcagagttcattagc

SEQ ID NO: 5284824 - DNA, 25 bp, Homo sapien
tgcagagttcattagcagacccaac

SEQ ID NO: 5284825 - DNA, 25 bp, Homo sapien
tgctaacctcctccagatcacaagt

SEQ ID NO: 5284826 - DNA, 25 bp, Homo sapien
actgctaacctcctccagatcacaa

SEQ ID NO: 5284827 - DNA, 25 bp, Homo sapien
taacctcctccagatcacaagtgtc

SEQ ID NO: 5284828 - DNA, 25 bp, Homo sapien
gctaacctcctccagatcacaagtg

SEQ ID NO: 5284829 - DNA, 25 bp, Homo sapien
ggcacaagaagagaccagacgcatc

SEQ ID NO: 5284830 - DNA, 25 bp, Homo sapien
ttaggcacaagaagagaccagacgc

SEQ ID NO: 5284831 - DNA, 25 bp, Homo sapien
cacaagaagagaccagacgcatctg

SEQ ID NO: 5284832 - DNA, 25 bp, Homo sapien
aagaagagaccagacgcatctgcac

SEQ ID NO: 5284833 - DNA, 25 bp, Homo sapien
ttcacacacgttggctttccttgcc

SEQ ID NO: 5284834 - DNA, 25 bp, Homo sapien
gcttcttcacacacgttggctttcc

SEQ ID NO: 5284835 - DNA, 25 bp, Homo sapien
ctttgcttcttcacacacgttggct

SEQ ID NO: 5284836 - DNA, 25 bp, Homo sapien
tcttcacacacgttggctttccttg

SEQ ID NO: 5284837 - DNA, 25 bp, Homo sapien
acatttgttaaacacctctgcacgt

SEQ ID NO: 5284838 - DNA, 25 bp, Homo sapien
catttgttaaacacctctgcacgtg

SEQ ID NO: 5284839 - DNA, 25 bp, Homo sapien
atttgttaaacacctctgcacgtgt

SEQ ID NO: 5284840 - DNA, 25 bp, Homo sapien
tggaagtatcctctacttgcatctt

SEQ ID NO: 5284841 - DNA, 25 bp, Homo sapien
atggtaagtcgatcgttaagccgtg

SEQ ID NO: 5284842 - DNA, 25 bp, Homo sapien
gcatcttcactagaatgttcccaca

SEQ ID NO: 5284843 - DNA, 25 bp, Homo sapien
tcttcactagaatgttcccacagaa

SEQ ID NO: 5284844 - DNA, 25 bp, Homo sapien
cacattcttgataaaactcaggaat

SEQ ID NO: 5284845 - DNA, 25 bp, Homo sapien
cttgataaaactcaggaattttcct

SEQ ID NO: 5284846 - DNA, 25 bp, Homo sapien
acattcttgataaaactcaggaatt

SEQ ID NO: 5284847 - DNA, 25 bp, Homo sapien
ccacattcttgataaaactcaggaa

SEQ ID NO: 5284848 - DNA, 25 bp, Homo sapien
ctggcagtctattgagcctgtggtt

SEQ ID NO: 5284849 - DNA, 25 bp, Homo sapien
caagagctatggaagcatatgggcc

SEQ ID NO: 5284850 - DNA, 25 bp, Homo sapien
ccctggagaggttagcaatatgagc

SEQ ID NO: 5284851 - DNA, 25 bp, Homo sapien
aagatactctgtggttttggcacaa

SEQ ID NO: 5284852 - DNA, 25 bp, Homo sapien
tcatgcggcaagcagatgtgctggc

SEQ ID NO: 5284853 - DNA, 25 bp, Homo sapien
catggctacagtctgctcttcactc

SEQ ID NO: 5284854 - DNA, 25 bp, Homo sapien
gtgaaccgggaagcagaactccaac

SEQ ID NO: 5284855 - DNA, 25 bp, Homo sapien
cagaactccaaccttcttctcactt

SEQ ID NO: 5284856 - DNA, 25 bp, Homo sapien
tagaactccgaccttctcctcactt

SEQ ID NO: 5284857 - DNA, 25 bp, Homo sapien
gaagtagaactccgaccttctcctc

SEQ ID NO: 5284858 - DNA, 25 bp, Homo sapien
agtagaactccgaccttctcctcac

SEQ ID NO: 5284859 - DNA, 25 bp, Homo sapien
ccaggaagtagaactccgaccttct

SEQ ID NO: 5284860 - DNA, 25 bp, Homo sapien
tccgagtagttgtcaccactctcct

SEQ ID NO: 5284861 - DNA, 25 bp, Homo sapien
gagtgaaattaacgccctccgagta

SEQ ID NO: 5284862 - DNA, 25 bp, Homo sapien
ggactgagtgaaattaacgccctcc

SEQ ID NO: 5284863 - DNA, 25 bp, Homo sapien
ttaacgccctccgagtagttgtcac

SEQ ID NO: 5284864 - DNA, 25 bp, Homo sapien
ctaagtttggtcatgcgagtatcac

SEQ ID NO: 5284865 - DNA, 25 bp, Homo sapien
taattactaagtgtgtctcctctac

SEQ ID NO: 5284866 - DNA, 25 bp, Homo sapien
gtcattaagataccccagatagtca

SEQ ID NO: 5284867 - DNA, 25 bp, Homo sapien
gataccccagatagtcattaattac

SEQ ID NO: 5284868 - DNA, 25 bp, Homo sapien
tctgcaccgaaagctctctgacaag

SEQ ID NO: 5284869 - DNA, 25 bp, Homo sapien
caaccagcaagagactagttattcc

SEQ ID NO: 5284870 - DNA, 25 bp, Homo sapien
gaatacacttgattttcaaccagca

SEQ ID NO: 5284871 - DNA, 25 bp, Homo sapien
tgatgacctaaaattacccttgcag

SEQ ID NO: 5284872 - DNA, 25 bp, Homo sapien
ggaattctgggctgatgctccatct

SEQ ID NO: 5284873 - DNA, 25 bp, Homo sapien
gactccaggtaatcacggggcattt

SEQ ID NO: 5284874 - DNA, 25 bp, Homo sapien
gaattctgggctgatgctccatctg

SEQ ID NO: 5284875 - DNA, 25 bp, Homo sapien
taatcacggggcatttctttcaaag

SEQ ID NO: 5284876 - DNA, 25 bp, Homo sapien
tctgatggggtgtccttctcttgcc

SEQ ID NO: 5284877 - DNA, 25 bp, Homo sapien
ttatcaaactcgcatcacagtctga

SEQ ID NO: 5284878 - DNA, 25 bp, Homo sapien
caaactcgcatcacagtctgatggg

SEQ ID NO: 5284879 - DNA, 25 bp, Homo sapien
tgcctcttatcaaactcgcatcaca

SEQ ID NO: 5284880 - DNA, 25 bp, Homo sapien
agttgggccgttgctggactttcca

SEQ ID NO: 5284881 - DNA, 25 bp, Homo sapien
ccctaaagtagttgataatataacg

SEQ ID NO: 5284882 - DNA, 25 bp, Homo sapien
taagtactacatgatgcctgtctcc

SEQ ID NO: 5284883 - DNA, 25 bp, Homo sapien
tgagaaattcagtataagttgggcc

SEQ ID NO: 5284884 - DNA, 25 bp, Homo sapien
tctttcttcctcttaacaattatgt

SEQ ID NO: 5284885 - DNA, 25 bp, Homo sapien
tcttcctcttaacaattatgtccag

SEQ ID NO: 5284886 - DNA, 25 bp, Homo sapien
tttcttcctcttaacaattatgtcc

SEQ ID NO: 5284887 - DNA, 25 bp, Homo sapien
ttcctcttaacaattatgtccagtc

SEQ ID NO: 5284888 - DNA, 25 bp, Homo sapien
tatgtagccaatacttgatcttctt

SEQ ID NO: 5284889 - DNA, 25 bp, Homo sapien
catgatctttgtctcatgagattgg

SEQ ID NO: 5284890 - DNA, 25 bp, Homo sapien
caaacatcggcattatgtagccaat

SEQ ID NO: 5284891 - DNA, 25 bp, Homo sapien
agctttgcaaacatcggcattatgt

SEQ ID NO: 5284892 - DNA, 25 bp, Homo sapien
ctgaatgctgcccttaatcttcaat

SEQ ID NO: 5284893 - DNA, 25 bp, Homo sapien
atcttcaattcataagccacaactt

SEQ ID NO: 5284894 - DNA, 25 bp, Homo sapien
tgaatgctgcccttaatcttcaatt

SEQ ID NO: 5284895 - DNA, 25 bp, Homo sapien
agccacaactttccagtaagcacct

SEQ ID NO: 5284896 - DNA, 25 bp, Homo sapien
ttcagagcacctacctattataggc

SEQ ID NO: 5284897 - DNA, 25 bp, Homo sapien
ttttcagagcacctacctattatag

SEQ ID NO: 5284898 - DNA, 25 bp, Homo sapien
cagagcacctacctattataggcac

SEQ ID NO: 5284899 - DNA, 25 bp, Homo sapien
aatattttcagagcacctacctatt

SEQ ID NO: 5284900 - DNA, 25 bp, Homo sapien
gatttatatggctcttcacaaggtg

SEQ ID NO: 5284901 - DNA, 25 bp, Homo sapien
tccaacatctgctggctaaataaag

SEQ ID NO: 5284902 - DNA, 25 bp, Homo sapien
gacagagatatttggcagcactgca

SEQ ID NO: 5284903 - DNA, 25 bp, Homo sapien
aaaatggttccataagagcaatgca

SEQ ID NO: 5284904 - DNA, 25 bp, Homo sapien
ttaaatcagctgcaggaagtaagaa

SEQ ID NO: 5284905 - DNA, 25 bp, Homo sapien
ccatatcatcatctgcataagaggg

SEQ ID NO: 5284906 - DNA, 25 bp, Homo sapien
ggaagattcctacatgaccaggtta

SEQ ID NO: 5284907 - DNA, 25 bp, Homo sapien
tcaaggtatggatgcttaaatcagc

SEQ ID NO: 5284908 - DNA, 25 bp, Homo sapien
gaaatgccatcacaaggtcactagc

SEQ ID NO: 5284909 - DNA, 25 bp, Homo sapien
tatgcaacctcaaaagacgttggcg

SEQ ID NO: 5284910 - DNA, 25 bp, Homo sapien
gattccatattccacgagatgaaga

SEQ ID NO: 5284911 - DNA, 25 bp, Homo sapien
gaaaaaccaacagtagtgccatgag

SEQ ID NO: 5284912 - DNA, 25 bp, Homo sapien
gagtttggctactcgtggcagctgc

SEQ ID NO: 5284913 - DNA, 25 bp, Homo sapien
caatgaaaatgtgtttccaaatggc

SEQ ID NO: 5284914 - DNA, 25 bp, Homo sapien
cagactgaattatcccacatgtagg

SEQ ID NO: 5284915 - DNA, 25 bp, Homo sapien
ttcttaagtgaatgcccaacttccc

SEQ ID NO: 5284916 - DNA, 25 bp, Homo sapien
gtgaggggtcttgagcatcattttg

SEQ ID NO: 5284917 - DNA, 25 bp, Homo sapien
cattttgggcaataaatccccggat

SEQ ID NO: 5284918 - DNA, 25 bp, Homo sapien
gggtcttgagcatcattttgggcaa

SEQ ID NO: 5284919 - DNA, 25 bp, Homo sapien
gagcatcattttgggcaataaatcc

SEQ ID NO: 5284920 - DNA, 25 bp, Homo sapien
aatatacagctgaatgctctcagca

SEQ ID NO: 5284921 - DNA, 25 bp, Homo sapien
gaatatacagctgaatgctctcagc

SEQ ID NO: 5284922 - DNA, 25 bp, Homo sapien
ctgaatatacagctgaatgctctca

SEQ ID NO: 5284923 - DNA, 25 bp, Homo sapien
agctgaatatacagctgaatgctct

SEQ ID NO: 5284924 - DNA, 25 bp, Homo sapien
tttaatttagtcaggagctgtatgg

SEQ ID NO: 5284925 - DNA, 25 bp, Homo sapien
taatttagtcaggagctgtatggcc

SEQ ID NO: 5284926 - DNA, 25 bp, Homo sapien
atttagtcaggagctgtatggccat

SEQ ID NO: 5284927 - DNA, 25 bp, Homo sapien
catttaatttagtcaggagctgtat

SEQ ID NO: 5284928 - DNA, 25 bp, Homo sapien
agcccgtagtgacctcacactcacc

SEQ ID NO: 5284929 - DNA, 25 bp, Homo sapien
gcccgtagtgacctcacactcacca

SEQ ID NO: 5284930 - DNA, 25 bp, Homo sapien
cccgtagtgacctcacactcaccat

SEQ ID NO: 5284931 - DNA, 25 bp, Homo sapien
caaggaagatttgatataagatgtc

SEQ ID NO: 5284932 - DNA, 25 bp, Homo sapien
tataagatgtcacatttaaaccaga

SEQ ID NO: 5284933 - DNA, 25 bp, Homo sapien
gggagtcaaggaagatttgatataa

SEQ ID NO: 5284934 - DNA, 25 bp, Homo sapien
gaagatttgatataagatgtcacat

SEQ ID NO: 5284935 - DNA, 25 bp, Homo sapien
cctgtccttcacaccgatttgtctg

SEQ ID NO: 5284936 - DNA, 25 bp, Homo sapien
atacagagtctgcttaagtcgtggt

SEQ ID NO: 5284937 - DNA, 25 bp, Homo sapien
tctgcttaagtcgtggtgcctgctg

SEQ ID NO: 5284938 - DNA, 25 bp, Homo sapien
ctccaggagggaagcggtaatgtcc

SEQ ID NO: 5284939 - DNA, 25 bp, Homo sapien
taactaagtgtttctgaacaggctc

SEQ ID NO: 5284940 - DNA, 25 bp, Homo sapien
gactctattgcagtttgaagccaga

SEQ ID NO: 5284941 - DNA, 25 bp, Homo sapien
gaacaggctccaaatctggtgtgaa

SEQ ID NO: 5284942 - DNA, 25 bp, Homo sapien
tctggtgtgaattacaaagactcta

SEQ ID NO: 5284943 - DNA, 25 bp, Homo sapien
gagtttgatgccctcgattggtgcc

SEQ ID NO: 5284944 - DNA, 25 bp, Homo sapien
gccctcgattggtgcccatttcata

SEQ ID NO: 5284945 - DNA, 25 bp, Homo sapien
catttcatatctatgtcaatgcaga

SEQ ID NO: 5284946 - DNA, 25 bp, Homo sapien
atgtcaatgcagaattgtctatttt

SEQ ID NO: 5284947 - DNA, 25 bp, Homo sapien
tcgttacccacttactgccattttc

SEQ ID NO: 5284948 - DNA, 25 bp, Homo sapien
cttcctgtagttgagtacaacatag

SEQ ID NO: 5284949 - DNA, 25 bp, Homo sapien
tctgtggtagttttgttatcgttac

SEQ ID NO: 5284950 - DNA, 25 bp, Homo sapien
agttgagtacaacataggcaatatc

SEQ ID NO: 5284951 - DNA, 25 bp, Homo sapien
tctggacatagatttctctccaaca

SEQ ID NO: 5284952 - DNA, 25 bp, Homo sapien
tccagcatctctggacatagatttc

SEQ ID NO: 5284953 - DNA, 25 bp, Homo sapien
gaacacatgtagctccactttttcc

SEQ ID NO: 5284954 - DNA, 25 bp, Homo sapien
tggtataagttgaacacatgtagct

SEQ ID NO: 5284955 - DNA, 25 bp, Homo sapien
ggcaataactgatctcaaggaaaat

SEQ ID NO: 5284956 - DNA, 25 bp, Homo sapien
ttctttaataaactggactcggcaa

SEQ ID NO: 5284957 - DNA, 25 bp, Homo sapien
gactcggcaataactgatctcaagg

SEQ ID NO: 5284958 - DNA, 25 bp, Homo sapien
aactggactcggcaataactgatct

SEQ ID NO: 5284959 - DNA, 25 bp, Homo sapien
ttcctttaacaaagcagcacccgtg

SEQ ID NO: 5284960 - DNA, 25 bp, Homo sapien
tttaaataaccattccagatagtag

SEQ ID NO: 5284961 - DNA, 25 bp, Homo sapien
gcacccgtgaagataacaaaaggta

SEQ ID NO: 5284962 - DNA, 25 bp, Homo sapien
taacaaaaggtagaccatacagcag

SEQ ID NO: 5284963 - DNA, 25 bp, Homo sapien
cagccactgtctgactaaggattgg

SEQ ID NO: 5284964 - DNA, 25 bp, Homo sapien
tagggacaagggctacccattgcca

SEQ ID NO: 5284965 - DNA, 25 bp, Homo sapien
gggctacccattgccacacagacag

SEQ ID NO: 5284966 - DNA, 25 bp, Homo sapien
gattgggaatccaagaccgtgatcc

SEQ ID NO: 5284967 - DNA, 25 bp, Homo sapien
ggtgaacccagtgcttttgaagatg

SEQ ID NO: 5284968 - DNA, 25 bp, Homo sapien
aggcagaaaaaggtgaacccagtgc

SEQ ID NO: 5284969 - DNA, 25 bp, Homo sapien
cagaaaaaggtgaacccagtgcttt

SEQ ID NO: 5284970 - DNA, 25 bp, Homo sapien
aaggtgaacccagtgcttttgaaga

SEQ ID NO: 5284971 - DNA, 25 bp, Homo sapien
gatatgtacatcactgtcactgaac

SEQ ID NO: 5284972 - DNA, 25 bp, Homo sapien
aaggaactgtccgagagtctctcca

SEQ ID NO: 5284973 - DNA, 25 bp, Homo sapien
catcagagatgcactgctaaccttc

SEQ ID NO: 5284974 - DNA, 25 bp, Homo sapien
tgaattcccctggcttggaaggaac

SEQ ID NO: 5284975 - DNA, 25 bp, Homo sapien
cctctgtggtttcaaacatttcatg

SEQ ID NO: 5284976 - DNA, 25 bp, Homo sapien
ctgtggtttcaaacatttcatgcat

SEQ ID NO: 5284977 - DNA, 25 bp, Homo sapien
ttcctctgtggtttcaaacatttca

SEQ ID NO: 5284978 - DNA, 25 bp, Homo sapien
ctatcttgtcaggcacttcctctgt

SEQ ID NO: 5284979 - DNA, 25 bp, Homo sapien
ctttgcactgattcattgtaaaatg

SEQ ID NO: 5284980 - DNA, 25 bp, Homo sapien
gcactgattcattgtaaaatggaaa

SEQ ID NO: 5284981 - DNA, 25 bp, Homo sapien
aattctcctaatgaagcagcattca

SEQ ID NO: 5284982 - DNA, 25 bp, Homo sapien
gcagcattcatcaatgcttgctcat

SEQ ID NO: 5284983 - DNA, 25 bp, Homo sapien
tgaattccatagactaccaacagtt

SEQ ID NO: 5284984 - DNA, 25 bp, Homo sapien
cacctctattgaagaacctggaatg

SEQ ID NO: 5284985 - DNA, 25 bp, Homo sapien
tataagcagatacatggaagcatac

SEQ ID NO: 5284986 - DNA, 25 bp, Homo sapien
gacattgctctgtgcttgaattcca

SEQ ID NO: 5284987 - DNA, 25 bp, Homo sapien
cctacttgcattagagcaaacccag

SEQ ID NO: 5284988 - DNA, 25 bp, Homo sapien
taatcctacttgcattagagcaaac

SEQ ID NO: 5284989 - DNA, 25 bp, Homo sapien
tgttaatcctacttgcattagagca

SEQ ID NO: 5284990 - DNA, 25 bp, Homo sapien
aagatgttaatcctacttgcattag

SEQ ID NO: 5284991 - DNA, 25 bp, Homo sapien
aagaaaggaaaagcatgattcatag

SEQ ID NO: 5284992 - DNA, 25 bp, Homo sapien
aattttccaagcagagccagaagaa

SEQ ID NO: 5284993 - DNA, 25 bp, Homo sapien
aaaggaaaagcatgattcatagcac

SEQ ID NO: 5284994 - DNA, 25 bp, Homo sapien
caattttccaagcagagccagaaga

SEQ ID NO: 5284995 - DNA, 25 bp, Homo sapien
tcctggacaagaagctatataatat

SEQ ID NO: 5284996 - DNA, 25 bp, Homo sapien
tcatgttgtctccatttcctggaca

SEQ ID NO: 5284997 - DNA, 25 bp, Homo sapien
atgttgtctccatttcctggacaag

SEQ ID NO: 5284998 - DNA, 25 bp, Homo sapien
ctatataatatttcacagccgccat

SEQ ID NO: 5284999 - DNA, 25 bp, Homo sapien
tagagttgatgcaattaattatcaa

SEQ ID NO: 5285000 - DNA, 25 bp, Homo sapien
agtagagttgatgcaattaattatc

SEQ ID NO: 5285001 - DNA, 25 bp, Homo sapien
gttgatgcaattaattatcaatacc

SEQ ID NO: 5285002 - DNA, 25 bp, Homo sapien
aagtagtagagttgatgcaattaat

SEQ ID NO: 5285003 - DNA, 25 bp, Homo sapien
ccttcacaaacagcataggtggcca

SEQ ID NO: 5285004 - DNA, 25 bp, Homo sapien
cttctagatggaattaaatgtgtca

SEQ ID NO: 5285005 - DNA, 25 bp, Homo sapien
aatgtgtcagaagtcccttcacaaa

SEQ ID NO: 5285006 - DNA, 25 bp, Homo sapien
tcattgttcccactatgtgagatac

SEQ ID NO: 5285007 - DNA, 25 bp, Homo sapien
acacagaatgcaattacggaaaggc

SEQ ID NO: 5285008 - DNA, 25 bp, Homo sapien
tgccagttaggcttagggaactaaa

SEQ ID NO: 5285009 - DNA, 25 bp, Homo sapien
tgtaatgaaatgctaggcctgccag

SEQ ID NO: 5285010 - DNA, 25 bp, Homo sapien
tatgatgccccaagcaatcagtcgc

SEQ ID NO: 5285011 - DNA, 25 bp, Homo sapien
tagcctgctcatcctggaacaacgc

SEQ ID NO: 5285012 - DNA, 25 bp, Homo sapien
cagcaggtttccttgtgctgaaaag

SEQ ID NO: 5285013 - DNA, 25 bp, Homo sapien
aaaaggcaggcacttgcagcgtaaa

SEQ ID NO: 5285014 - DNA, 25 bp, Homo sapien
caggcacttgcagcgtaaagcattc

SEQ ID NO: 5285015 - DNA, 25 bp, Homo sapien
tgatagcagagtaacccagcgatga

SEQ ID NO: 5285016 - DNA, 25 bp, Homo sapien
taagcttcagggtggaattcaagtc

SEQ ID NO: 5285017 - DNA, 25 bp, Homo sapien
aagtccagcagccttaactgttgag

SEQ ID NO: 5285018 - DNA, 25 bp, Homo sapien
ccagcgatgactttataagcttcag

SEQ ID NO: 5285019 - DNA, 25 bp, Homo sapien
tggacagttgacagggtcagaagga

SEQ ID NO: 5285020 - DNA, 25 bp, Homo sapien
acagttgacagggtcagaaggaaaa

SEQ ID NO: 5285021 - DNA, 25 bp, Homo sapien
ttgacagggtcagaaggaaaaacgc

SEQ ID NO: 5285022 - DNA, 25 bp, Homo sapien
cagggtcagaaggaaaaacgctcat

SEQ ID NO: 5285023 - DNA, 25 bp, Homo sapien
ctcatctttggcagttttgtacatt

SEQ ID NO: 5285024 - DNA, 25 bp, Homo sapien
catctttggcagttttgtacatttt

SEQ ID NO: 5285025 - DNA, 25 bp, Homo sapien
ggcagttttgtacattttctcctcc

SEQ ID NO: 5285026 - DNA, 25 bp, Homo sapien
cagttttgtacattttctcctccat

SEQ ID NO: 5285027 - DNA, 25 bp, Homo sapien
tgtacaagaaatagcccatgcatcg

SEQ ID NO: 5285028 - DNA, 25 bp, Homo sapien
taaagaggaatcacttctatgcaat

SEQ ID NO: 5285029 - DNA, 25 bp, Homo sapien
tcatcttaattactgctaaagcagg

SEQ ID NO: 5285030 - DNA, 25 bp, Homo sapien
aagcaggttcacagatgcagtctaa

SEQ ID NO: 5285031 - DNA, 25 bp, Homo sapien
tcaggtcctgctgttttgaaaacct

SEQ ID NO: 5285032 - DNA, 25 bp, Homo sapien
atattttggcaatcacagaggcccc

SEQ ID NO: 5285033 - DNA, 25 bp, Homo sapien
ttctcttctccgagcagcaggagac

SEQ ID NO: 5285034 - DNA, 25 bp, Homo sapien
aatgaaagccgccagaaggacagaa

SEQ ID NO: 5285035 - DNA, 25 bp, Homo sapien
taaatagcatcttttctgtggggag

SEQ ID NO: 5285036 - DNA, 25 bp, Homo sapien
aatagcatcttttctgtggggagag

SEQ ID NO: 5285037 - DNA, 25 bp, Homo sapien
atagcatcttttctgtggggagaga

SEQ ID NO: 5285038 - DNA, 25 bp, Homo sapien
ataaatagcatcttttctgtgggga

SEQ ID NO: 5285039 - DNA, 25 bp, Homo sapien
cagtctccttctctttgcagcatgt

SEQ ID NO: 5285040 - DNA, 25 bp, Homo sapien
ttctctttgcagcatgtgtgggagg

SEQ ID NO: 5285041 - DNA, 25 bp, Homo sapien
ttcgaggatagactcctcctgtgtc

SEQ ID NO: 5285042 - DNA, 25 bp, Homo sapien
gggctccttcgaggatagactcctc

SEQ ID NO: 5285043 - DNA, 25 bp, Homo sapien
cagtcagaacccgagaaaccaaggt

SEQ ID NO: 5285044 - DNA, 25 bp, Homo sapien
tggcagagcctcagcagtacaagac

SEQ ID NO: 5285045 - DNA, 25 bp, Homo sapien
tacaagacagaaaacccgcaaagat

SEQ ID NO: 5285046 - DNA, 25 bp, Homo sapien
gcctattcttggtgtaagacgtgaa

SEQ ID NO: 5285047 - DNA, 25 bp, Homo sapien
cacaccaagtaagaggaccaaggga

SEQ ID NO: 5285048 - DNA, 25 bp, Homo sapien
aaaacagataataaaatagatccat

SEQ ID NO: 5285049 - DNA, 25 bp, Homo sapien
cttccacaccaagtaagaggaccaa

SEQ ID NO: 5285050 - DNA, 25 bp, Homo sapien
tccacaccaagtaagaggaccaagg

SEQ ID NO: 5285051 - DNA, 25 bp, Homo sapien
taatgaaggacgtaatttgctgctg

SEQ ID NO: 5285052 - DNA, 25 bp, Homo sapien
tgaggatatcattaggatctccaat

SEQ ID NO: 5285053 - DNA, 25 bp, Homo sapien
taaggttgtcgttttcattaatgaa

SEQ ID NO: 5285054 - DNA, 25 bp, Homo sapien
gagtgctgtatgtacaccctgtgat

SEQ ID NO: 5285055 - DNA, 25 bp, Homo sapien
gttgctgctgagacagtcaaaaggg

SEQ ID NO: 5285056 - DNA, 25 bp, Homo sapien
tccatgctggacagttatcaagtca

SEQ ID NO: 5285057 - DNA, 25 bp, Homo sapien
ctttggcgatgagttgctgctgaga

SEQ ID NO: 5285058 - DNA, 25 bp, Homo sapien
gacagttatcaagtcaccaggcctc

SEQ ID NO: 5285059 - DNA, 25 bp, Homo sapien
cagggattcccttcattgtgagcaa

SEQ ID NO: 5285060 - DNA, 25 bp, Homo sapien
agggattcccttcattgtgagcaaa

SEQ ID NO: 5285061 - DNA, 25 bp, Homo sapien
acagggattcccttcattgtgagca

SEQ ID NO: 5285062 - DNA, 25 bp, Homo sapien
gggattcccttcattgtgagcaaac

SEQ ID NO: 5285063 - DNA, 25 bp, Homo sapien
caagtgtgcctcaattctttatcag

SEQ ID NO: 5285064 - DNA, 25 bp, Homo sapien
caggctcttcaacctttcttcctga

SEQ ID NO: 5285065 - DNA, 25 bp, Homo sapien
tcttcctgaactttcacactgtgcc

SEQ ID NO: 5285066 - DNA, 25 bp, Homo sapien
tctttatcaggctcttcaacctttc

SEQ ID NO: 5285067 - DNA, 25 bp, Homo sapien
gtctaccacacgcttaattatgaag

SEQ ID NO: 5285068 - DNA, 25 bp, Homo sapien
ggaaaacagagagccactaccatat

SEQ ID NO: 5285069 - DNA, 25 bp, Homo sapien
gagccactaccatattgtctaccac

SEQ ID NO: 5285070 - DNA, 25 bp, Homo sapien
cacgcttaattatgaagctctcatt

SEQ ID NO: 5285071 - DNA, 25 bp, Homo sapien
ccaacagcgcggtattgcggcagct

SEQ ID NO: 5285072 - DNA, 25 bp, Homo sapien
agccatcacaggtccattaggatgc

SEQ ID NO: 5285073 - DNA, 25 bp, Homo sapien
gagtcagtggagtggcacaagcctg

SEQ ID NO: 5285074 - DNA, 25 bp, Homo sapien
ggtccattaggatgctcatcactcg

SEQ ID NO: 5285075 - DNA, 25 bp, Homo sapien
aaccagagccatgatccccacaggg

SEQ ID NO: 5285076 - DNA, 25 bp, Homo sapien
agagccatgatccccacagggtgag

SEQ ID NO: 5285077 - DNA, 25 bp, Homo sapien
gagccatgatccccacagggtgagc

SEQ ID NO: 5285078 - DNA, 25 bp, Homo sapien
accagagccatgatccccacagggt

SEQ ID NO: 5285079 - DNA, 25 bp, Homo sapien
ttacagagaagcctcaagcatagga

SEQ ID NO: 5285080 - DNA, 25 bp, Homo sapien
gaagcctcaagcataggattggtgg

SEQ ID NO: 5285081 - DNA, 25 bp, Homo sapien
cataggattggtggttgtgttcctg

SEQ ID NO: 5285082 - DNA, 25 bp, Homo sapien
ctttcctatccggacattctgcatt

SEQ ID NO: 5285083 - DNA, 25 bp, Homo sapien
catgaccattactggcaaggacatc

SEQ ID NO: 5285084 - DNA, 25 bp, Homo sapien
taatcccctcgcttaggagaccatc

SEQ ID NO: 5285085 - DNA, 25 bp, Homo sapien
cattgagtggaaggcccattaccat

SEQ ID NO: 5285086 - DNA, 25 bp, Homo sapien
gcccattaccatgaccattactggc

SEQ ID NO: 5285087 - DNA, 25 bp, Homo sapien
tagcccggagtgattccagacacca

SEQ ID NO: 5285088 - DNA, 25 bp, Homo sapien
tgtcaaatatgtctcccgtggtcca

SEQ ID NO: 5285089 - DNA, 25 bp, Homo sapien
aagcataggtcaggatagcccggag

SEQ ID NO: 5285090 - DNA, 25 bp, Homo sapien
gagacagatctgcaccgaagcggat

SEQ ID NO: 5285091 - DNA, 25 bp, Homo sapien
ggtctctgagacgttatcctgtggc

SEQ ID NO: 5285092 - DNA, 25 bp, Homo sapien
ccctagtatcttggctgagctttga

SEQ ID NO: 5285093 - DNA, 25 bp, Homo sapien
gaaaaagctgtactcgctaaccaag

SEQ ID NO: 5285094 - DNA, 25 bp, Homo sapien
ccaagtcaggtggttaggtctctga

SEQ ID NO: 5285095 - DNA, 25 bp, Homo sapien
cattttacctgtatagaaactaaag

SEQ ID NO: 5285096 - DNA, 25 bp, Homo sapien
acttgtccatggcttaacgcggtgg

SEQ ID NO: 5285097 - DNA, 25 bp, Homo sapien
aacttgtccatggcttaacgcggtg

SEQ ID NO: 5285098 - DNA, 25 bp, Homo sapien
tgtccatggcttaacgcggtggctc

SEQ ID NO: 5285099 - DNA, 25 bp, Homo sapien
acatgcagttggcttgcctgtgccc

SEQ ID NO: 5285100 - DNA, 25 bp, Homo sapien
gtgccctttccaagcagctcacatt

SEQ ID NO: 5285101 - DNA, 25 bp, Homo sapien
tgtgccctttccaagcagctcacat

SEQ ID NO: 5285102 - DNA, 25 bp, Homo sapien
cctttcacatgcagttggcttgcct

SEQ ID NO: 5285103 - DNA, 25 bp, Homo sapien
taaggacagcccctctcgtgatggc

SEQ ID NO: 5285104 - DNA, 25 bp, Homo sapien
cagcccctctcgtgatggctgacag

SEQ ID NO: 5285105 - DNA, 25 bp, Homo sapien
ccctctcgtgatggctgacagtaaa

SEQ ID NO: 5285106 - DNA, 25 bp, Homo sapien
acactaaggacagcccctctcgtga

SEQ ID NO: 5285107 - DNA, 25 bp, Homo sapien
ccagcacccaaatatcccctctttc

SEQ ID NO: 5285108 - DNA, 25 bp, Homo sapien
ggtgtggcttcatcacgctgtatta

SEQ ID NO: 5285109 - DNA, 25 bp, Homo sapien
tcatggggatggtctggtgtggctt

SEQ ID NO: 5285110 - DNA, 25 bp, Homo sapien
gccctttctgtccttcactctggga

SEQ ID NO: 5285111 - DNA, 25 bp, Homo sapien
ttctctgctccacatacacgtagtc

SEQ ID NO: 5285112 - DNA, 25 bp, Homo sapien
tccacatacacgtagtcacaggaca

SEQ ID NO: 5285113 - DNA, 25 bp, Homo sapien
cacatacacgtagtcacaggacata

SEQ ID NO: 5285114 - DNA, 25 bp, Homo sapien
tgctccacatacacgtagtcacagg

SEQ ID NO: 5285115 - DNA, 25 bp, Homo sapien
gaatcttctgttttgaatgcctcca

SEQ ID NO: 5285116 - DNA, 25 bp, Homo sapien
ggatgaatgaatgaccagaccacaa

SEQ ID NO: 5285117 - DNA, 25 bp, Homo sapien
tttctagtccacagctcagctatgg

SEQ ID NO: 5285118 - DNA, 25 bp, Homo sapien
tctgggtgttctactatgtgaggca

SEQ ID NO: 5285119 - DNA, 25 bp, Homo sapien
acacagacacaactgctcttagaag

SEQ ID NO: 5285120 - DNA, 25 bp, Homo sapien
agagcccagcacgtatccatgctca

SEQ ID NO: 5285121 - DNA, 25 bp, Homo sapien
tcagagcctgattcattatggtatc

SEQ ID NO: 5285122 - DNA, 25 bp, Homo sapien
tatggtatcaacagataccacgatg

SEQ ID NO: 5285123 - DNA, 25 bp, Homo sapien
taccacgatggtatcatcagagccc

SEQ ID NO: 5285124 - DNA, 25 bp, Homo sapien
tgtgtagacagatactgaggtgtag

SEQ ID NO: 5285125 - DNA, 25 bp, Homo sapien
cagatgggttgtatataatcgagct

SEQ ID NO: 5285126 - DNA, 25 bp, Homo sapien
cctcaaggcctccatgaaatgtgta

SEQ ID NO: 5285127 - DNA, 25 bp, Homo sapien
ttcttggaattatgaagccctcaag

SEQ ID NO: 5285128 - DNA, 25 bp, Homo sapien
tctaagcagccacaaatcatcccag

SEQ ID NO: 5285129 - DNA, 25 bp, Homo sapien
accagagaacctgggcaaagaattg

SEQ ID NO: 5285130 - DNA, 25 bp, Homo sapien
gaccctgacaggcaagtcttctgtc

SEQ ID NO: 5285131 - DNA, 25 bp, Homo sapien
gcctctatgaaaagcccttccacag

SEQ ID NO: 5285132 - DNA, 25 bp, Homo sapien
gcatgtccatgtagcaaatagtaga

SEQ ID NO: 5285133 - DNA, 25 bp, Homo sapien
tcaggccctgaattgagtgatactg

SEQ ID NO: 5285134 - DNA, 25 bp, Homo sapien
ttggaacaccacacgtcaactctgc

SEQ ID NO: 5285135 - DNA, 25 bp, Homo sapien
tatatcaacactgagtagatgggac

SEQ ID NO: 5285136 - DNA, 25 bp, Homo sapien
taaattccagcctgttcagccagcc

SEQ ID NO: 5285137 - DNA, 25 bp, Homo sapien
cagccccaaagcaaggacctctaga

SEQ ID NO: 5285138 - DNA, 25 bp, Homo sapien
cagcccttctacactggccgtcaca

SEQ ID NO: 5285139 - DNA, 25 bp, Homo sapien
caaggacctctagagagcctgccta

SEQ ID NO: 5285140 - DNA, 25 bp, Homo sapien
caatgtcaagagcatccctaaagct

SEQ ID NO: 5285141 - DNA, 25 bp, Homo sapien
tttatgacacctgcccactcgcttt

SEQ ID NO: 5285142 - DNA, 25 bp, Homo sapien
gctttctcggctatctccactgctt

SEQ ID NO: 5285143 - DNA, 25 bp, Homo sapien
gagattgttcatgggggcaatatcc

SEQ ID NO: 5285144 - DNA, 25 bp, Homo sapien
cctctgcttctatagatggtttgtg

SEQ ID NO: 5285145 - DNA, 25 bp, Homo sapien
ctgtccaaatggaagaggctctgtg

SEQ ID NO: 5285146 - DNA, 25 bp, Homo sapien
ctgctgctggatgttttgctctctc

SEQ ID NO: 5285147 - DNA, 25 bp, Homo sapien
tgccccacagtcttgctgtccaaat

SEQ ID NO: 5285148 - DNA, 25 bp, Homo sapien
ttagcgagtattctccatgtctttg

SEQ ID NO: 5285149 - DNA, 25 bp, Homo sapien
gtattctccatgtctttggtaagtc

SEQ ID NO: 5285150 - DNA, 25 bp, Homo sapien
gagtattctccatgtctttggtaag

SEQ ID NO: 5285151 - DNA, 25 bp, Homo sapien
attctccatgtctttggtaagtcat

SEQ ID NO: 5285152 - DNA, 25 bp, Homo sapien
gagactaccaaagccccattcagtg

SEQ ID NO: 5285153 - DNA, 25 bp, Homo sapien
cacagcatgccagcgtcttggactg

SEQ ID NO: 5285154 - DNA, 25 bp, Homo sapien
tctggattgtgcagtcagcactggt

SEQ ID NO: 5285155 - DNA, 25 bp, Homo sapien
gatcagtgataggttgggaatacca

SEQ ID NO: 5285156 - DNA, 25 bp, Homo sapien
tgccctcttcagcagcagagagaag

SEQ ID NO: 5285157 - DNA, 25 bp, Homo sapien
atatagtctgagatgccctcttcag

SEQ ID NO: 5285158 - DNA, 25 bp, Homo sapien
aatatagtctgagatgccctcttca

SEQ ID NO: 5285159 - DNA, 25 bp, Homo sapien
cctcttcagcagcagagagaagcat

SEQ ID NO: 5285160 - DNA, 25 bp, Homo sapien
caatcacctggcagggtttgtctgc

SEQ ID NO: 5285161 - DNA, 25 bp, Homo sapien
ctgtgctgccagtgataatgaggca

SEQ ID NO: 5285162 - DNA, 25 bp, Homo sapien
gaggcatcggtcttcaaatggtttc

SEQ ID NO: 5285163 - DNA, 25 bp, Homo sapien
tccccatcgtaaataagtgcggcct

SEQ ID NO: 5285164 - DNA, 25 bp, Homo sapien
gaatggagtatttcttccaggaagt

SEQ ID NO: 5285165 - DNA, 25 bp, Homo sapien
aactgtggcccacgcaccttttcgt

SEQ ID NO: 5285166 - DNA, 25 bp, Homo sapien
gatttccctggatagaactgtggcc

SEQ ID NO: 5285167 - DNA, 25 bp, Homo sapien
gcaccttttcgtcaagggcctgtct

SEQ ID NO: 5285168 - DNA, 25 bp, Homo sapien
cctggatctcagagattcaggttct

SEQ ID NO: 5285169 - DNA, 25 bp, Homo sapien
ggaactagaggctgttcttcctgcc

SEQ ID NO: 5285170 - DNA, 25 bp, Homo sapien
tcttcctgcctggatctcagagatt

SEQ ID NO: 5285171 - DNA, 25 bp, Homo sapien
ttggaactagaggctgttcttcctg

SEQ ID NO: 5285172 - DNA, 25 bp, Homo sapien
acttttggtaacaacatgcaggaac

SEQ ID NO: 5285173 - DNA, 25 bp, Homo sapien
taacaacatgcaggaacgcatcaca

SEQ ID NO: 5285174 - DNA, 25 bp, Homo sapien
tcagggaaacgttgacctgtattac

SEQ ID NO: 5285175 - DNA, 25 bp, Homo sapien
caggaacgcatcacagttcagcagg

SEQ ID NO: 5285176 - DNA, 25 bp, Homo sapien
tggggacccttcagccttcttcttg

SEQ ID NO: 5285177 - DNA, 25 bp, Homo sapien
cagccttcttcttggccatgagcat

SEQ ID NO: 5285178 - DNA, 25 bp, Homo sapien
tctctggggacccttcagccttctt

SEQ ID NO: 5285179 - DNA, 25 bp, Homo sapien
ggacccttcagccttcttcttggcc

SEQ ID NO: 5285180 - DNA, 25 bp, Homo sapien
ttccaggtcagataaagaatacaaa

SEQ ID NO: 5285181 - DNA, 25 bp, Homo sapien
tttccaggtcagataaagaatacaa

SEQ ID NO: 5285182 - DNA, 25 bp, Homo sapien
cttttccaggtcagataaagaatac

SEQ ID NO: 5285183 - DNA, 25 bp, Homo sapien
tccaggtcagataaagaatacaaaa

SEQ ID NO: 5285184 - DNA, 25 bp, Homo sapien
gttattggtagattcagcaacttcc

SEQ ID NO: 5285185 - DNA, 25 bp, Homo sapien
gctttaagtcagtgttattggtaga

SEQ ID NO: 5285186 - DNA, 25 bp, Homo sapien
cacttgatacgacattttggaggat

SEQ ID NO: 5285187 - DNA, 25 bp, Homo sapien
tgagagtggtaaaagaactcacagg

SEQ ID NO: 5285188 - DNA, 25 bp, Homo sapien
aaaggacactgcatccactgacagg

SEQ ID NO: 5285189 - DNA, 25 bp, Homo sapien
catttgccgatatgcagtttgcata

SEQ ID NO: 5285190 - DNA, 25 bp, Homo sapien
ctggaaaggacactgcatccactga

SEQ ID NO: 5285191 - DNA, 25 bp, Homo sapien
ttactccatttgccgatatgcagtt

SEQ ID NO: 5285192 - DNA, 25 bp, Homo sapien
tgtgctgggacaaaacatgggcctt

SEQ ID NO: 5285193 - DNA, 25 bp, Homo sapien
gctttctcgaaaacactcttggcag

SEQ ID NO: 5285194 - DNA, 25 bp, Homo sapien
caaagtactgttggatggctttctc

SEQ ID NO: 5285195 - DNA, 25 bp, Homo sapien
gggccttcagccaagacgcatttct

SEQ ID NO: 5285196 - DNA, 25 bp, Homo sapien
gagaatgaatccacaggcctcacca

SEQ ID NO: 5285197 - DNA, 25 bp, Homo sapien
ttcaatataattaacttcctttgca

SEQ ID NO: 5285198 - DNA, 25 bp, Homo sapien
tcaatataattaacttcctttgcaa

SEQ ID NO: 5285199 - DNA, 25 bp, Homo sapien
gtgattctgagaatgaatccacagg

SEQ ID NO: 5285200 - DNA, 25 bp, Homo sapien
atgaggtacctgctgattccagacc

SEQ ID NO: 5285201 - DNA, 25 bp, Homo sapien
ctgaaaatacacctccagccatgag

SEQ ID NO: 5285202 - DNA, 25 bp, Homo sapien
gccatgaggtacctgctgattccag

SEQ ID NO: 5285203 - DNA, 25 bp, Homo sapien
gaaaatacacctccagccatgaggt

SEQ ID NO: 5285204 - DNA, 25 bp, Homo sapien
taactgggaccagtgatgtccagga

SEQ ID NO: 5285205 - DNA, 25 bp, Homo sapien
tggcaaagataagtgagtgattaac

SEQ ID NO: 5285206 - DNA, 25 bp, Homo sapien
gataagctcagttttgatgtatgaa

SEQ ID NO: 5285207 - DNA, 25 bp, Homo sapien
tcagggtagaggtgataagctcagt

SEQ ID NO: 5285208 - DNA, 25 bp, Homo sapien
gtgagaggtttgaacacggacatgt

SEQ ID NO: 5285209 - DNA, 25 bp, Homo sapien
tttgaacacggacatgtagcaggct

SEQ ID NO: 5285210 - DNA, 25 bp, Homo sapien
tgaagcccatactgctgtctaaagg

SEQ ID NO: 5285211 - DNA, 25 bp, Homo sapien
ctccatgaagcccatactgctgtct

SEQ ID NO: 5285212 - DNA, 25 bp, Homo sapien
gccactcctctatcgaaattctgca

SEQ ID NO: 5285213 - DNA, 25 bp, Homo sapien
ggttctggttccaaggcagccaagt

SEQ ID NO: 5285214 - DNA, 25 bp, Homo sapien
cgaaattctgcaactcctctgaggg

SEQ ID NO: 5285215 - DNA, 25 bp, Homo sapien
ttcagccagtacacctcctgccact

SEQ ID NO: 5285216 - DNA, 25 bp, Homo sapien
tgagaaattacaaggtagcctccta

SEQ ID NO: 5285217 - DNA, 25 bp, Homo sapien
ctgtcagtgagaaattacaaggtag

SEQ ID NO: 5285218 - DNA, 25 bp, Homo sapien
ccagccacacggacgaggagatgct

SEQ ID NO: 5285219 - DNA, 25 bp, Homo sapien
tagcctcctatcagaagaaaccagc

SEQ ID NO: 5285220 - DNA, 25 bp, Homo sapien
tccggcctctagtctcaatgatttc

SEQ ID NO: 5285221 - DNA, 25 bp, Homo sapien
catctccggcctctagtctcaatga

SEQ ID NO: 5285222 - DNA, 25 bp, Homo sapien
agaccaatcaagaatccgcttcaga

SEQ ID NO: 5285223 - DNA, 25 bp, Homo sapien
ccaatcaagaatccgcttcagatgg

SEQ ID NO: 5285224 - DNA, 25 bp, Homo sapien
cgagacccactcacattacgtaagg

SEQ ID NO: 5285225 - DNA, 25 bp, Homo sapien
cttcagttgattggacgagacccac

SEQ ID NO: 5285226 - DNA, 25 bp, Homo sapien
gcttgactctaaattctgcagggca

SEQ ID NO: 5285227 - DNA, 25 bp, Homo sapien
taaggtgatcagctttactcaaagt

SEQ ID NO: 5285228 - DNA, 25 bp, Homo sapien
tccacttctctgatggagtctccct

SEQ ID NO: 5285229 - DNA, 25 bp, Homo sapien
gaatgtccatagcctgcagccagac

SEQ ID NO: 5285230 - DNA, 25 bp, Homo sapien
tccagctccacttctctgatggagt

SEQ ID NO: 5285231 - DNA, 25 bp, Homo sapien
aatgtccatagcctgcagccagact

SEQ ID NO: 5285232 - DNA, 25 bp, Homo sapien
ctcctttttcctcctcttgtctcat

SEQ ID NO: 5285233 - DNA, 25 bp, Homo sapien
actcctttttcctcctcttgtctca

SEQ ID NO: 5285234 - DNA, 25 bp, Homo sapien
tgaattaagagattggtacacacac

SEQ ID NO: 5285235 - DNA, 25 bp, Homo sapien
ttctgaattaagagattggtacaca

SEQ ID NO: 5285236 - DNA, 25 bp, Homo sapien
ctgaattaagagattggtacacaca

SEQ ID NO: 5285237 - DNA, 25 bp, Homo sapien
tctgaattaagagattggtacacac

SEQ ID NO: 5285238 - DNA, 25 bp, Homo sapien
atgcaattacttgactggagaggat

SEQ ID NO: 5285239 - DNA, 25 bp, Homo sapien
attacttgactggagaggattttct

SEQ ID NO: 5285240 - DNA, 25 bp, Homo sapien
tgcaattacttgactggagaggatt

SEQ ID NO: 5285241 - DNA, 25 bp, Homo sapien
caattacttgactggagaggatttt

SEQ ID NO: 5285242 - DNA, 25 bp, Homo sapien
cctcttagtcttatcagggcttctc

SEQ ID NO: 5285243 - DNA, 25 bp, Homo sapien
caggttatcagcatccctcttagtc

SEQ ID NO: 5285244 - DNA, 25 bp, Homo sapien
aatgtccctccaggttatcagcatc

SEQ ID NO: 5285245 - DNA, 25 bp, Homo sapien
tccctcttagtcttatcagggcttc

SEQ ID NO: 5285246 - DNA, 25 bp, Homo sapien
ctgtcacactgcaatccttaagtgg

SEQ ID NO: 5285247 - DNA, 25 bp, Homo sapien
tggaatgtgctaaaacaatctagac

SEQ ID NO: 5285248 - DNA, 25 bp, Homo sapien
tccttaagtggaatgtgctaaaaca

SEQ ID NO: 5285249 - DNA, 25 bp, Homo sapien
tccctaaagagccacttcagcctgc

SEQ ID NO: 5285250 - DNA, 25 bp, Homo sapien
ttttcacttcctccgcaagcaagag

SEQ ID NO: 5285251 - DNA, 25 bp, Homo sapien
tcctccgcaagcaagagttcctaaa

SEQ ID NO: 5285252 - DNA, 25 bp, Homo sapien
gagttcctaaaacagctgctaagct

SEQ ID NO: 5285253 - DNA, 25 bp, Homo sapien
tccgcaagcaagagttcctaaaaca

SEQ ID NO: 5285254 - DNA, 25 bp, Homo sapien
ggctgtctcagggagaccaccagaa

SEQ ID NO: 5285255 - DNA, 25 bp, Homo sapien
gagtggggtgcaagcatggactctg

SEQ ID NO: 5285256 - DNA, 25 bp, Homo sapien
tctggcttaggagtggggtgcaagc

SEQ ID NO: 5285257 - DNA, 25 bp, Homo sapien
gtctcagggagaccaccagaaggtt

SEQ ID NO: 5285258 - DNA, 25 bp, Homo sapien
tgggagcacaacttggcaggcaaga

SEQ ID NO: 5285259 - DNA, 25 bp, Homo sapien
gcaagataggctttaaaatgcagaa

SEQ ID NO: 5285260 - DNA, 25 bp, Homo sapien
agcttcatcctaaagttattctggc

SEQ ID NO: 5285261 - DNA, 25 bp, Homo sapien
ctgcatgtggagcttagaggacttg

SEQ ID NO: 5285262 - DNA, 25 bp, Homo sapien
atgggggaaggctcggtttccacat

SEQ ID NO: 5285263 - DNA, 25 bp, Homo sapien
gaggggattccattccagctgcttg

SEQ ID NO: 5285264 - DNA, 25 bp, Homo sapien
aggctcggtttccacatgcactggg

SEQ ID NO: 5285265 - DNA, 25 bp, Homo sapien
ggacaggaggggattccattccagc

SEQ ID NO: 5285266 - DNA, 25 bp, Homo sapien
tctacaccccaggatgtttggagcc

SEQ ID NO: 5285267 - DNA, 25 bp, Homo sapien
gaagcgttgccgatgagtaaacaca

SEQ ID NO: 5285268 - DNA, 25 bp, Homo sapien
gagcctcttaaagtcccaagggtca

SEQ ID NO: 5285269 - DNA, 25 bp, Homo sapien
caaaactgaggcgtggctaaagggc

SEQ ID NO: 5285270 - DNA, 25 bp, Homo sapien
cagggaaggaatctctgctcttgcc

SEQ ID NO: 5285271 - DNA, 25 bp, Homo sapien
gctgcacaaatcctaactggggatg

SEQ ID NO: 5285272 - DNA, 25 bp, Homo sapien
tcctcatgcagggatctggcctccg

SEQ ID NO: 5285273 - DNA, 25 bp, Homo sapien
ctcctctatgttacacacagggaag

SEQ ID NO: 5285274 - DNA, 25 bp, Homo sapien
tcttgtaaccagcatcttctgcagg

SEQ ID NO: 5285275 - DNA, 25 bp, Homo sapien
gtgattaaatgactacagaagggtg

SEQ ID NO: 5285276 - DNA, 25 bp, Homo sapien
gggcatctacggacacatcttccag

SEQ ID NO: 5285277 - DNA, 25 bp, Homo sapien
gatttttctgcctagtagaacctct

SEQ ID NO: 5285278 - DNA, 25 bp, Homo sapien
aataagcgaggcctgccttcagtgc

SEQ ID NO: 5285279 - DNA, 25 bp, Homo sapien
acccaggaataagcgaggcctgcct

SEQ ID NO: 5285280 - DNA, 25 bp, Homo sapien
ctttcttcagcgagcagaaacacgg

SEQ ID NO: 5285281 - DNA, 25 bp, Homo sapien
cgagcagaaacacgggagggaccca

SEQ ID NO: 5285282 - DNA, 25 bp, Homo sapien
tccttgttgttcctacactgatgac

SEQ ID NO: 5285283 - DNA, 25 bp, Homo sapien
gctgccagatttgctgactcaaacc

SEQ ID NO: 5285284 - DNA, 25 bp, Homo sapien
atggcctgcatttgtcctttcctaa

SEQ ID NO: 5285285 - DNA, 25 bp, Homo sapien
gcatttcccagcagctaaatcatca

SEQ ID NO: 5285286 - DNA, 25 bp, Homo sapien
gatgcttgtcccaagattggtggca

SEQ ID NO: 5285287 - DNA, 25 bp, Homo sapien
tttagcaggatgactgggtccctgg

SEQ ID NO: 5285288 - DNA, 25 bp, Homo sapien
tgtcccaagattggtggcagcagag

SEQ ID NO: 5285289 - DNA, 25 bp, Homo sapien
gacactggagagtttagcaggatga

SEQ ID NO: 5285290 - DNA, 25 bp, Homo sapien
ccatgcctgaacaaacaatccaagg

SEQ ID NO: 5285291 - DNA, 25 bp, Homo sapien
gggagagggaccaccggcaggtgac

SEQ ID NO: 5285292 - DNA, 25 bp, Homo sapien
tgcccatgcctgaacaaacaatcca

SEQ ID NO: 5285293 - DNA, 25 bp, Homo sapien
gctgcccatgcctgaacaaacaatc

SEQ ID NO: 5285294 - DNA, 25 bp, Homo sapien
taaatgaattaaatgcaggggtgga

SEQ ID NO: 5285295 - DNA, 25 bp, Homo sapien
gatgatgaaaaagcttctccagcaa

SEQ ID NO: 5285296 - DNA, 25 bp, Homo sapien
gatttatcaacatctctagggcatt

SEQ ID NO: 5285297 - DNA, 25 bp, Homo sapien
tctctagggcattctgaaactctcc

SEQ ID NO: 5285298 - DNA, 25 bp, Homo sapien
ttttccttccttaatcctaatgctc

SEQ ID NO: 5285299 - DNA, 25 bp, Homo sapien
ttccttccttaatcctaatgctcat

SEQ ID NO: 5285300 - DNA, 25 bp, Homo sapien
tttccttccttaatcctaatgctca

SEQ ID NO: 5285301 - DNA, 25 bp, Homo sapien
tcatcgttggttctaataaggactg

SEQ ID NO: 5285302 - DNA, 25 bp, Homo sapien
gattcaataccaatgctgggctctg

SEQ ID NO: 5285303 - DNA, 25 bp, Homo sapien
gctgacctcactaggctccttccag

SEQ ID NO: 5285304 - DNA, 25 bp, Homo sapien
taaggactgaaatgccaatgatggg

SEQ ID NO: 5285305 - DNA, 25 bp, Homo sapien
gaactgtattattatcctgttgaaa

SEQ ID NO: 5285306 - DNA, 25 bp, Homo sapien
gcacacccacggcagagttgaccat

SEQ ID NO: 5285307 - DNA, 25 bp, Homo sapien
catccatgtgtccaagaactgtatt

SEQ ID NO: 5285308 - DNA, 25 bp, Homo sapien
taacatccatgtgtccaagaactgt

SEQ ID NO: 5285309 - DNA, 25 bp, Homo sapien
tgccaccctgagcatcatgagctgg

SEQ ID NO: 5285310 - DNA, 25 bp, Homo sapien
gctggcacaactcaggagcaactac

SEQ ID NO: 5285311 - DNA, 25 bp, Homo sapien
actaccatgaaaacaggcttcgttt

SEQ ID NO: 5285312 - DNA, 25 bp, Homo sapien
agccacttggagcaccatgcctgat

SEQ ID NO: 5285313 - DNA, 25 bp, Homo sapien
aatcatataggctcaatttctttat

SEQ ID NO: 5285314 - DNA, 25 bp, Homo sapien
tgaaatcatataggctcaatttctt

SEQ ID NO: 5285315 - DNA, 25 bp, Homo sapien
atcagcatcagaaggtgaagattga

SEQ ID NO: 5285316 - DNA, 25 bp, Homo sapien
cttggagtgaaaggtggcccctagc

SEQ ID NO: 5285317 - DNA, 25 bp, Homo sapien
tagaaggcacacgttttccacagcc

SEQ ID NO: 5285318 - DNA, 25 bp, Homo sapien
gggcctagttgatacgattttgctt

SEQ ID NO: 5285319 - DNA, 25 bp, Homo sapien
ttggatttagttagaaggcacacgt

SEQ ID NO: 5285320 - DNA, 25 bp, Homo sapien
cttgcctatgccccaaagataagtc

SEQ ID NO: 5285321 - DNA, 25 bp, Homo sapien
cacagtatgattcttgcctatgccc

SEQ ID NO: 5285322 - DNA, 25 bp, Homo sapien
caaagataagtcagccatactcact

SEQ ID NO: 5285323 - DNA, 25 bp, Homo sapien
gaaggccaaaccacagtatgattct

SEQ ID NO: 5285324 - DNA, 25 bp, Homo sapien
cttggtgctgcatctatcaggttcc

SEQ ID NO: 5285325 - DNA, 25 bp, Homo sapien
aaatcttggtgctgcatctatcagg

SEQ ID NO: 5285326 - DNA, 25 bp, Homo sapien
tgatgccaaatcttggtgctgcatc

SEQ ID NO: 5285327 - DNA, 25 bp, Homo sapien
tgcatctatcaggttccttggattg

SEQ ID NO: 5285328 - DNA, 25 bp, Homo sapien
ctgcagccaggtgtctctaaaatgc

SEQ ID NO: 5285329 - DNA, 25 bp, Homo sapien
aacttggagttagtccttctgggag

SEQ ID NO: 5285330 - DNA, 25 bp, Homo sapien
gagccactgcaaacggcccttagct

SEQ ID NO: 5285331 - DNA, 25 bp, Homo sapien
attcctcaaaatactagacactggg

SEQ ID NO: 5285332 - DNA, 25 bp, Homo sapien
cctcagagctagtcccaggtggcaa

SEQ ID NO: 5285333 - DNA, 25 bp, Homo sapien
tcaatagggtgagcttccagagcac

SEQ ID NO: 5285334 - DNA, 25 bp, Homo sapien
ctgctggtgggctggattctccaaa

SEQ ID NO: 5285335 - DNA, 25 bp, Homo sapien
tctccaaatatgagggcggcagcag

SEQ ID NO: 5285336 - DNA, 25 bp, Homo sapien
tggcaactccaactttctcaggtct

SEQ ID NO: 5285337 - DNA, 25 bp, Homo sapien
ttctctgctgtttggcaactccaac

SEQ ID NO: 5285338 - DNA, 25 bp, Homo sapien
ggaactgagccagtttcaaaggcct

SEQ ID NO: 5285339 - DNA, 25 bp, Homo sapien
tcaaaggcctccttgctgtagctgc

SEQ ID NO: 5285340 - DNA, 25 bp, Homo sapien
agattatcctcaaaacaggagggca

SEQ ID NO: 5285341 - DNA, 25 bp, Homo sapien
cacgaggggccattcaggatcaaga

SEQ ID NO: 5285342 - DNA, 25 bp, Homo sapien
gatcaagaccttggagtgacagagt

SEQ ID NO: 5285343 - DNA, 25 bp, Homo sapien
agtccccacaagtagaatcacagat

SEQ ID NO: 5285344 - DNA, 25 bp, Homo sapien
tctgttcccaactatggaaaaataa

SEQ ID NO: 5285345 - DNA, 25 bp, Homo sapien
cagcagacttgctgaaacctctcca

SEQ ID NO: 5285346 - DNA, 25 bp, Homo sapien
agattctgatgctcgctgctgagcc

SEQ ID NO: 5285347 - DNA, 25 bp, Homo sapien
ctccatgagattctgatgctcgctg

SEQ ID NO: 5285348 - DNA, 25 bp, Homo sapien
cttttcccagagtcagttttgttct

SEQ ID NO: 5285349 - DNA, 25 bp, Homo sapien
ctgtgtatcaatggattcaaaatac

SEQ ID NO: 5285350 - DNA, 25 bp, Homo sapien
tatcaatggattcaaaatactgaag

SEQ ID NO: 5285351 - DNA, 25 bp, Homo sapien
tcttttcccagagtcagttttgttc

SEQ ID NO: 5285352 - DNA, 25 bp, Homo sapien
acaggagccacaagcaggacttgac

SEQ ID NO: 5285353 - DNA, 25 bp, Homo sapien
gagaagttgtgcttgaaggttgaca

SEQ ID NO: 5285354 - DNA, 25 bp, Homo sapien
gagccacaagcaggacttgacccat

SEQ ID NO: 5285355 - DNA, 25 bp, Homo sapien
gcttgaaggttgacaggagccacaa

SEQ ID NO: 5285356 - DNA, 25 bp, Homo sapien
cagtcagcgctgcttgcttgttcaa

SEQ ID NO: 5285357 - DNA, 25 bp, Homo sapien
cacaaggccattttccaggcggctg

SEQ ID NO: 5285358 - DNA, 25 bp, Homo sapien
tgaatttgcagctcgtcagtcagct

SEQ ID NO: 5285359 - DNA, 25 bp, Homo sapien
gctttggctgtccagagcacaaagg

SEQ ID NO: 5285360 - DNA, 25 bp, Homo sapien
gagtggcctgcaaatatcccagcat

SEQ ID NO: 5285361 - DNA, 25 bp, Homo sapien
aagtcgggaccacggcagaaaagcg

SEQ ID NO: 5285362 - DNA, 25 bp, Homo sapien
tgtgaacgccgtaagtcgggaccac

SEQ ID NO: 5285363 - DNA, 25 bp, Homo sapien
tcccactgtgaacgccgtaagtcgg

SEQ ID NO: 5285364 - DNA, 25 bp, Homo sapien
cacgcaggcttgtctctggtcacac

SEQ ID NO: 5285365 - DNA, 25 bp, Homo sapien
cacactgtgttcacgctgccctctc

SEQ ID NO: 5285366 - DNA, 25 bp, Homo sapien
cagacacgcaggcttgtctctggtc

SEQ ID NO: 5285367 - DNA, 25 bp, Homo sapien
gcaggcttgtctctggtcacactgt

SEQ ID NO: 5285368 - DNA, 25 bp, Homo sapien
tcccttctcatatacacactgggag

SEQ ID NO: 5285369 - DNA, 25 bp, Homo sapien
ccttctcatatacacactgggaggg

SEQ ID NO: 5285370 - DNA, 25 bp, Homo sapien
tgtatgcgagtgctggcagttccct

SEQ ID NO: 5285371 - DNA, 25 bp, Homo sapien
tggcagcaaggctagtgctgtatgc

SEQ ID NO: 5285372 - DNA, 25 bp, Homo sapien
tcctcaatttcagccccagtgacca

SEQ ID NO: 5285373 - DNA, 25 bp, Homo sapien
catctctttgtcctcaatttcagcc

SEQ ID NO: 5285374 - DNA, 25 bp, Homo sapien
tcaatttcagccccagtgaccaatt

SEQ ID NO: 5285375 - DNA, 25 bp, Homo sapien
ttgtcctcaatttcagccccagtga

SEQ ID NO: 5285376 - DNA, 25 bp, Homo sapien
ggaagcaccagaagagctcctgtcc

SEQ ID NO: 5285377 - DNA, 25 bp, Homo sapien
tagatgtgggtccatatcagccttc

SEQ ID NO: 5285378 - DNA, 25 bp, Homo sapien
gcatgtggacacaccaagagatctc

SEQ ID NO: 5285379 - DNA, 25 bp, Homo sapien
taaagagtgaagatcaaagaccgac

SEQ ID NO: 5285380 - DNA, 25 bp, Homo sapien
caaacaaagctctacttgtgaagca

SEQ ID NO: 5285381 - DNA, 25 bp, Homo sapien
gtgtctccattgtattcaatctgac

SEQ ID NO: 5285382 - DNA, 25 bp, Homo sapien
gacttttgcactctgaaacttcttc

SEQ ID NO: 5285383 - DNA, 25 bp, Homo sapien
tgtgaagcaggaaacacggctgaca

SEQ ID NO: 5285384 - DNA, 25 bp, Homo sapien
cagagtggtacagcgcatgtctgac

SEQ ID NO: 5285385 - DNA, 25 bp, Homo sapien
agtggtacagcgcatgtctgacaag

SEQ ID NO: 5285386 - DNA, 25 bp, Homo sapien
ggtacagcgcatgtctgacaagcag

SEQ ID NO: 5285387 - DNA, 25 bp, Homo sapien
tcagagtggtacagcgcatgtctga

SEQ ID NO: 5285388 - DNA, 25 bp, Homo sapien
atcacttgaaggttgatgggccttt

SEQ ID NO: 5285389 - DNA, 25 bp, Homo sapien
aatgagaggatacagaatcctcacc

SEQ ID NO: 5285390 - DNA, 25 bp, Homo sapien
cacttgaaggttgatgggcctttcc

SEQ ID NO: 5285391 - DNA, 25 bp, Homo sapien
gatacagaatcctcaccctgcaggg

SEQ ID NO: 5285392 - DNA, 25 bp, Homo sapien
ggaagcggtcatgttttccagccac

SEQ ID NO: 5285393 - DNA, 25 bp, Homo sapien
gaggatgtgatgtgcttgccagctc

SEQ ID NO: 5285394 - DNA, 25 bp, Homo sapien
tgccagctccttttcgcactgggtt

SEQ ID NO: 5285395 - DNA, 25 bp, Homo sapien
tattcattaccaaacctagatgtgt

SEQ ID NO: 5285396 - DNA, 25 bp, Homo sapien
gtcacactgcatgggaccatccaca

SEQ ID NO: 5285397 - DNA, 25 bp, Homo sapien
ggtttctggacccagtaggtcacac

SEQ ID NO: 5285398 - DNA, 25 bp, Homo sapien
ctgcagagccgggtttctggaccca

SEQ ID NO: 5285399 - DNA, 25 bp, Homo sapien
cagtaggtcacactgcatgggacca

SEQ ID NO: 5285400 - DNA, 25 bp, Homo sapien
tcaggtaattaggtccagaggaaaa

SEQ ID NO: 5285401 - DNA, 25 bp, Homo sapien
tttcttctcaggtaattaggtccag

SEQ ID NO: 5285402 - DNA, 25 bp, Homo sapien
gcaggctgcttagatggcacttcag

SEQ ID NO: 5285403 - DNA, 25 bp, Homo sapien
ggcacttcagtggatttacagtgaa

SEQ ID NO: 5285404 - DNA, 25 bp, Homo sapien
tgaggccagttgtccacccagtacc

SEQ ID NO: 5285405 - DNA, 25 bp, Homo sapien
ccctgctgaggccagttgtccaccc

SEQ ID NO: 5285406 - DNA, 25 bp, Homo sapien
ctgctgaggccagttgtccacccag

SEQ ID NO: 5285407 - DNA, 25 bp, Homo sapien
gctgaggccagttgtccacccagta

SEQ ID NO: 5285408 - DNA, 25 bp, Homo sapien
ctctggacaggtgagattgcagaga

SEQ ID NO: 5285409 - DNA, 25 bp, Homo sapien
tctggacaggtgagattgcagagaa

SEQ ID NO: 5285410 - DNA, 25 bp, Homo sapien
ctggacaggtgagattgcagagaac

SEQ ID NO: 5285411 - DNA, 25 bp, Homo sapien
tggacaggtgagattgcagagaacc

SEQ ID NO: 5285412 - DNA, 25 bp, Homo sapien
cgaagacagattgtgatgttcatac

SEQ ID NO: 5285413 - DNA, 25 bp, Homo sapien
ccgtcattacgtaaggcccatagag

SEQ ID NO: 5285414 - DNA, 25 bp, Homo sapien
ttcatactgaaatggacaacgaggt

SEQ ID NO: 5285415 - DNA, 25 bp, Homo sapien
catctgctctaggtatgccgtcatt

SEQ ID NO: 5285416 - DNA, 25 bp, Homo sapien
tcagagagccatggtaaagactttg

SEQ ID NO: 5285417 - DNA, 25 bp, Homo sapien
aaggaaactcgtttagttctgcctg

SEQ ID NO: 5285418 - DNA, 25 bp, Homo sapien
ctgagtaggaactggtggcgttgga

SEQ ID NO: 5285419 - DNA, 25 bp, Homo sapien
aactcgtttagttctgcctgagtag

SEQ ID NO: 5285420 - DNA, 25 bp, Homo sapien
tctggcctccggaaggagcccgcat

SEQ ID NO: 5285421 - DNA, 25 bp, Homo sapien
ttaagaagctctggcctccggaagg

SEQ ID NO: 5285422 - DNA, 25 bp, Homo sapien
tacacttaagaagctctggcctccg

SEQ ID NO: 5285423 - DNA, 25 bp, Homo sapien
gaagctctggcctccggaaggagcc

SEQ ID NO: 5285424 - DNA, 25 bp, Homo sapien
cattagcacttctgcctgaaattga

SEQ ID NO: 5285425 - DNA, 25 bp, Homo sapien
cagcccttaccaccacagggtgaag

SEQ ID NO: 5285426 - DNA, 25 bp, Homo sapien
cacgaaatgatttagtggccccata

SEQ ID NO: 5285427 - DNA, 25 bp, Homo sapien
ttgaagacagtgctacccaggagga

SEQ ID NO: 5285428 - DNA, 25 bp, Homo sapien
aaagaatgcaaagtggcagacaggg

SEQ ID NO: 5285429 - DNA, 25 bp, Homo sapien
tggtgggccatactgcctgggtctc

SEQ ID NO: 5285430 - DNA, 25 bp, Homo sapien
agaggaaaatccgggaaagaatgca

SEQ ID NO: 5285431 - DNA, 25 bp, Homo sapien
tctgttggtgccagacatggtgcac

SEQ ID NO: 5285432 - DNA, 25 bp, Homo sapien
tctttcggcacatgctgagctggaa

SEQ ID NO: 5285433 - DNA, 25 bp, Homo sapien
gctggaatgtgtttggtctcttctg

SEQ ID NO: 5285434 - DNA, 25 bp, Homo sapien
caggcttgtataggtttctttcggc

SEQ ID NO: 5285435 - DNA, 25 bp, Homo sapien
cacaaagggtctccaggcttgtata

SEQ ID NO: 5285436 - DNA, 25 bp, Homo sapien
agcgttggctcttcactattctgca

SEQ ID NO: 5285437 - DNA, 25 bp, Homo sapien
tattctgcacctatgtgaaggctga

SEQ ID NO: 5285438 - DNA, 25 bp, Homo sapien
tgacagtcgtttcttggcagaatcg

SEQ ID NO: 5285439 - DNA, 25 bp, Homo sapien
cacactcctctaagtagcgttggct

SEQ ID NO: 5285440 - DNA, 25 bp, Homo sapien
ccgagtctgtagagttcccagggct

SEQ ID NO: 5285441 - DNA, 25 bp, Homo sapien
gatgacagagactggaatcctagga

SEQ ID NO: 5285442 - DNA, 25 bp, Homo sapien
gtttttccttctcaagctgggagct

SEQ ID NO: 5285443 - DNA, 25 bp, Homo sapien
cagtcacttccccatggtgatctct

SEQ ID NO: 5285444 - DNA, 25 bp, Homo sapien
ccatagactcatctgggaagacctg

SEQ ID NO: 5285445 - DNA, 25 bp, Homo sapien
catagactcatctgggaagacctgc

SEQ ID NO: 5285446 - DNA, 25 bp, Homo sapien
gctccagtccctccgtaccttcttc

SEQ ID NO: 5285447 - DNA, 25 bp, Homo sapien
tccatagactcatctgggaagacct

SEQ ID NO: 5285448 - DNA, 25 bp, Homo sapien
agacatcactgaagaccggatgggt

SEQ ID NO: 5285449 - DNA, 25 bp, Homo sapien
gtgtcagctgttgggccacatcgct

SEQ ID NO: 5285450 - DNA, 25 bp, Homo sapien
tgctccttggccattcaaatgcctc

SEQ ID NO: 5285451 - DNA, 25 bp, Homo sapien
tgaagaccggatgggtctttgtttc

SEQ ID NO: 5285452 - DNA, 25 bp, Homo sapien
catatatgtcaaggtaaagatgcag

SEQ ID NO: 5285453 - DNA, 25 bp, Homo sapien
ctaggattcagaaataatgaattcg

SEQ ID NO: 5285454 - DNA, 25 bp, Homo sapien
gaattcgttaatggttcttgctgcc

SEQ ID NO: 5285455 - DNA, 25 bp, Homo sapien
tttgcaaggagctaatctgttcata

SEQ ID NO: 5285456 - DNA, 25 bp, Homo sapien
accataacagatattctgtgtcatc

SEQ ID NO: 5285457 - DNA, 25 bp, Homo sapien
cataacagatattctgtgtcatcat

SEQ ID NO: 5285458 - DNA, 25 bp, Homo sapien
ccataacagatattctgtgtcatca

SEQ ID NO: 5285459 - DNA, 25 bp, Homo sapien
ttggatatctaatgcagctggttcc

SEQ ID NO: 5285460 - DNA, 25 bp, Homo sapien
ggatatctaatgcagctggttccag

SEQ ID NO: 5285461 - DNA, 25 bp, Homo sapien
atctaatgcagctggttccagataa

SEQ ID NO: 5285462 - DNA, 25 bp, Homo sapien
gatatctaatgcagctggttccaga

SEQ ID NO: 5285463 - DNA, 25 bp, Homo sapien
cagtccattagctatccacctgagc

SEQ ID NO: 5285464 - DNA, 25 bp, Homo sapien
tccagtccattagctatccacctga

SEQ ID NO: 5285465 - DNA, 25 bp, Homo sapien
tgtatcgcttcagttgagttgaaag

SEQ ID NO: 5285466 - DNA, 25 bp, Homo sapien
tttctctttatgtatcgcttcagtt

SEQ ID NO: 5285467 - DNA, 25 bp, Homo sapien
ccgactctcaccttcgctctccagt

SEQ ID NO: 5285468 - DNA, 25 bp, Homo sapien
gtagattcacctgaacaattagctt

SEQ ID NO: 5285469 - DNA, 25 bp, Homo sapien
tcaccttcgctctccagtagattca

SEQ ID NO: 5285470 - DNA, 25 bp, Homo sapien
cttcccatcccgactctcaccttcg

SEQ ID NO: 5285471 - DNA, 25 bp, Homo sapien
caaagcctttaatttgcgtggcagg

SEQ ID NO: 5285472 - DNA, 25 bp, Homo sapien
gcaggaagcttagtgtatttcacac

SEQ ID NO: 5285473 - DNA, 25 bp, Homo sapien
tgtggaaagccttgctccgaaacaa

SEQ ID NO: 5285474 - DNA, 25 bp, Homo sapien
tgcatgctgaatccgggcacagaga

SEQ ID NO: 5285475 - DNA, 25 bp, Homo sapien
tctcaggacccttatcattcttcat

SEQ ID NO: 5285476 - DNA, 25 bp, Homo sapien
tcagtcctttagagaagttagagaa

SEQ ID NO: 5285477 - DNA, 25 bp, Homo sapien
gaaattccaggaactaatgattgac

SEQ ID NO: 5285478 - DNA, 25 bp, Homo sapien
tgattgactcatgaatatccagcct

SEQ ID NO: 5285479 - DNA, 25 bp, Homo sapien
aaggcagaaaatacggagtcctcat

SEQ ID NO: 5285480 - DNA, 25 bp, Homo sapien
aagatctggaagctcgacaatcaaa

SEQ ID NO: 5285481 - DNA, 25 bp, Homo sapien
gaagctcgacaatcaaaggcagaaa

SEQ ID NO: 5285482 - DNA, 25 bp, Homo sapien
aaatacggagtcctcatctcagaga

SEQ ID NO: 5285483 - DNA, 25 bp, Homo sapien
aggtccttcccagaaccgctctgaa

SEQ ID NO: 5285484 - DNA, 25 bp, Homo sapien
taagttcgcccaatatctctcttgc

SEQ ID NO: 5285485 - DNA, 25 bp, Homo sapien
gaagcaggaactgccctatggtcag

SEQ ID NO: 5285486 - DNA, 25 bp, Homo sapien
taggccctgaaactccaaggtcgtg

SEQ ID NO: 5285487 - DNA, 25 bp, Homo sapien
gataagctgtaggtcacacagcgcc

SEQ ID NO: 5285488 - DNA, 25 bp, Homo sapien
cagttggagacagcgataagctgta

SEQ ID NO: 5285489 - DNA, 25 bp, Homo sapien
gtaaatgcagcctctgacccgccag

SEQ ID NO: 5285490 - DNA, 25 bp, Homo sapien
tgtaggtcacacagcgcctcagaac

SEQ ID NO: 5285491 - DNA, 25 bp, Homo sapien
tcacgtcccacttcagcacactgaa

SEQ ID NO: 5285492 - DNA, 25 bp, Homo sapien
gtcttcacgtcccacttcagcacac

SEQ ID NO: 5285493 - DNA, 25 bp, Homo sapien
tggctgactgaccgctggaagcact

SEQ ID NO: 5285494 - DNA, 25 bp, Homo sapien
ccttgcctgtcttcacgtcccactt

SEQ ID NO: 5285495 - DNA, 25 bp, Homo sapien
ccttggggtcgtctccattcggatg

SEQ ID NO: 5285496 - DNA, 25 bp, Homo sapien
gtccttggggtcgtctccattcgga

SEQ ID NO: 5285497 - DNA, 25 bp, Homo sapien
gaagtccttggggtcgtctccattc

SEQ ID NO: 5285498 - DNA, 25 bp, Homo sapien
cttggggtcgtctccattcggatgg

SEQ ID NO: 5285499 - DNA, 25 bp, Homo sapien
agggaggacctgcacgctctgccgt

SEQ ID NO: 5285500 - DNA, 25 bp, Homo sapien
cgtgcaatgcctagtcttccagagt

SEQ ID NO: 5285501 - DNA, 25 bp, Homo sapien
ttccagagtccccaaaaacaatctc

SEQ ID NO: 5285502 - DNA, 25 bp, Homo sapien
cttccccgatctgtctagcatgggt

SEQ ID NO: 5285503 - DNA, 25 bp, Homo sapien
cacttgaggcggtcctgtgaggcaa

SEQ ID NO: 5285504 - DNA, 25 bp, Homo sapien
tggttccccgggatgattgccccat

SEQ ID NO: 5285505 - DNA, 25 bp, Homo sapien
gagtcgagaaatcgcatccaggcac

SEQ ID NO: 5285506 - DNA, 25 bp, Homo sapien
ggccggtgaacatgctggttccccg

SEQ ID NO: 5285507 - DNA, 25 bp, Homo sapien
tgaactctacggcagggactgcaac

SEQ ID NO: 5285508 - DNA, 25 bp, Homo sapien
tgcaactctgaactccatggcaggt

SEQ ID NO: 5285509 - DNA, 25 bp, Homo sapien
cagggagtccggttaggcaaagcat

SEQ ID NO: 5285510 - DNA, 25 bp, Homo sapien
caaagattcaaccaggagaagctga

SEQ ID NO: 5285511 - DNA, 25 bp, Homo sapien
gaaaggaggctctgcttggggccaa

SEQ ID NO: 5285512 - DNA, 25 bp, Homo sapien
cgaaaggaggctctgcttggggcca

SEQ ID NO: 5285513 - DNA, 25 bp, Homo sapien
aaaggaggctctgcttggggccaac

SEQ ID NO: 5285514 - DNA, 25 bp, Homo sapien
ccgaaaggaggctctgcttggggcc

SEQ ID NO: 5285515 - DNA, 25 bp, Homo sapien
gtgtgtccatcaaataggaaggccc

SEQ ID NO: 5285516 - DNA, 25 bp, Homo sapien
tgtgtccatcaaataggaaggccca

SEQ ID NO: 5285517 - DNA, 25 bp, Homo sapien
caggcttgagggcaagtggaccacc

SEQ ID NO: 5285518 - DNA, 25 bp, Homo sapien
tgaaaattaccaaacgagaagtgaa

SEQ ID NO: 5285519 - DNA, 25 bp, Homo sapien
ggcttgagggcaagtggaccaccaa

SEQ ID NO: 5285520 - DNA, 25 bp, Homo sapien
aacgagaagtgaaccaggcttgagg

SEQ ID NO: 5285521 - DNA, 25 bp, Homo sapien
agagaagaagcacaggccacacctg

SEQ ID NO: 5285522 - DNA, 25 bp, Homo sapien
gaaggaagagaagaagcacaggcca

SEQ ID NO: 5285523 - DNA, 25 bp, Homo sapien
ggaagagaagaagcacaggccacac

SEQ ID NO: 5285524 - DNA, 25 bp, Homo sapien
aaggaagagaagaagcacaggccac

SEQ ID NO: 5285525 - DNA, 25 bp, Homo sapien
tgcacttggaagacgggctgaacag

SEQ ID NO: 5285526 - DNA, 25 bp, Homo sapien
cttgcacttggaagacgggctgaac

SEQ ID NO: 5285527 - DNA, 25 bp, Homo sapien
gacgggctgaacagccatttcagtg

SEQ ID NO: 5285528 - DNA, 25 bp, Homo sapien
tgaacagccatttcagtgactcctc

SEQ ID NO: 5285529 - DNA, 25 bp, Homo sapien
caattgtaacaaactgctggtgcca

SEQ ID NO: 5285530 - DNA, 25 bp, Homo sapien
cagaggtgcttaagtagctgctcac

SEQ ID NO: 5285531 - DNA, 25 bp, Homo sapien
tgtttgtttaaaagaccagccgaga

SEQ ID NO: 5285532 - DNA, 25 bp, Homo sapien
aatgaaactttgctgtgatctccca

SEQ ID NO: 5285533 - DNA, 25 bp, Homo sapien
gacatcctcgtgcagcgtgagcatc

SEQ ID NO: 5285534 - DNA, 25 bp, Homo sapien
aggacatcctcgtgcagcgtgagca

SEQ ID NO: 5285535 - DNA, 25 bp, Homo sapien
tgcaaggacatcctcgtgcagcgtg

SEQ ID NO: 5285536 - DNA, 25 bp, Homo sapien
caaggacatcctcgtgcagcgtgag

SEQ ID NO: 5285537 - DNA, 25 bp, Homo sapien
cccttgtcggggacagacagttcca

SEQ ID NO: 5285538 - DNA, 25 bp, Homo sapien
tcgtaaagctgatgtcttccagaac

SEQ ID NO: 5285539 - DNA, 25 bp, Homo sapien
ccagaacaggaatcacccttgtcgg

SEQ ID NO: 5285540 - DNA, 25 bp, Homo sapien
cagtcttcctcgtaaagctgatgtc

SEQ ID NO: 5285541 - DNA, 25 bp, Homo sapien
agaggaggtgggttttgtaaatgtg

SEQ ID NO: 5285542 - DNA, 25 bp, Homo sapien
aggtgggtcattagagaggaggtgg

SEQ ID NO: 5285543 - DNA, 25 bp, Homo sapien
tgaggtgggtcattagagaggaggt

SEQ ID NO: 5285544 - DNA, 25 bp, Homo sapien
ctgttgaggtgggtcattagagagg

SEQ ID NO: 5285545 - DNA, 25 bp, Homo sapien
tcttttcactcacgggtctgcaggt

SEQ ID NO: 5285546 - DNA, 25 bp, Homo sapien
gaactgcaactaccttatcttatgg

SEQ ID NO: 5285547 - DNA, 25 bp, Homo sapien
cagccctgagtattgaagttgttcc

SEQ ID NO: 5285548 - DNA, 25 bp, Homo sapien
gacacagtttgttccgtgggtctct

SEQ ID NO: 5285549 - DNA, 25 bp, Homo sapien
gagggcccgatgtcacttggatcct

SEQ ID NO: 5285550 - DNA, 25 bp, Homo sapien
gtgagggcccgatgtcacttggatc

SEQ ID NO: 5285551 - DNA, 25 bp, Homo sapien
attccctgtgcgtgtatctttgcag

SEQ ID NO: 5285552 - DNA, 25 bp, Homo sapien
agcagcgtcttcagcattccctgtg

SEQ ID NO: 5285553 - DNA, 25 bp, Homo sapien
cccagcctaggaggacgaggtctgt

SEQ ID NO: 5285554 - DNA, 25 bp, Homo sapien
ctggggtcttgtcgtgcccagccta

SEQ ID NO: 5285555 - DNA, 25 bp, Homo sapien
gccaatggccgggaacaggcaatgc

SEQ ID NO: 5285556 - DNA, 25 bp, Homo sapien
acagagggtccatgccaggaggcct

SEQ ID NO: 5285557 - DNA, 25 bp, Homo sapien
tcagcagactgtgactgtgccagga

SEQ ID NO: 5285558 - DNA, 25 bp, Homo sapien
tctctcttgccattaacacgggctg

SEQ ID NO: 5285559 - DNA, 25 bp, Homo sapien
gctgctgtgtaagtatgggcgataa

SEQ ID NO: 5285560 - DNA, 25 bp, Homo sapien
tcagcatgtcgtttgggaccacctg

SEQ ID NO: 5285561 - DNA, 25 bp, Homo sapien
tgcagagggcagtgtgggggcggca

SEQ ID NO: 5285562 - DNA, 25 bp, Homo sapien
cagagggcagtgtgggggcggcaca

SEQ ID NO: 5285563 - DNA, 25 bp, Homo sapien
ctgcagagggcagtgtgggggcggc

SEQ ID NO: 5285564 - DNA, 25 bp, Homo sapien
tgctgcagagggcagtgtgggggcg

SEQ ID NO: 5285565 - DNA, 25 bp, Homo sapien
gtgtgggggcggcacacctgctgca

SEQ ID NO: 5285566 - DNA, 25 bp, Homo sapien
gggggcggcacacctgctgcagagg

SEQ ID NO: 5285567 - DNA, 25 bp, Homo sapien
ggggggggcacacctgctgcagagg

SEQ ID NO: 5285568 - DNA, 25 bp, Homo sapien
cagtgtgggggcggcacacctgctg

SEQ ID NO: 5285569 - DNA, 25 bp, Homo sapien
gttcatgcagcaccgaagaggcagt

SEQ ID NO: 5285570 - DNA, 25 bp, Homo sapien
gagcatttgcacctgaagtacctgt

SEQ ID NO: 5285571 - DNA, 25 bp, Homo sapien
tgtccccttggagctcagatgaagc

SEQ ID NO: 5285572 - DNA, 25 bp, Homo sapien
tgactggcaaagcaggtgtcctgac

SEQ ID NO: 5285573 - DNA, 25 bp, Homo sapien
tgaaccccggcaggacaacgtctct

SEQ ID NO: 5285574 - DNA, 25 bp, Homo sapien
tggatgatgcttggatcagctgaac

SEQ ID NO: 5285575 - DNA, 25 bp, Homo sapien
gatgcttggatcagctgaaccccgg

SEQ ID NO: 5285576 - DNA, 25 bp, Homo sapien
aggacaacgtctctggtccaggcac

SEQ ID NO: 5285577 - DNA, 25 bp, Homo sapien
tgcagatggtgcaccgccggcttcc

SEQ ID NO: 5285578 - DNA, 25 bp, Homo sapien
ggtaaccatggtaatcggcagcatt

SEQ ID NO: 5285579 - DNA, 25 bp, Homo sapien
agcctccgggtaaccatggtaatcg

SEQ ID NO: 5285580 - DNA, 25 bp, Homo sapien
tcggcagcattaaccgcagcagtga

SEQ ID NO: 5285581 - DNA, 25 bp, Homo sapien
ccagaggttgcaaagggtggtctgt

SEQ ID NO: 5285582 - DNA, 25 bp, Homo sapien
ggcccagaggttgcaaagggtggtc

SEQ ID NO: 5285583 - DNA, 25 bp, Homo sapien
gttgcaaagggtggtctgttgccca

SEQ ID NO: 5285584 - DNA, 25 bp, Homo sapien
aggttgcaaagggtggtctgttgcc

SEQ ID NO: 5285585 - DNA, 25 bp, Homo sapien
gccagcctgatcgttcttattcctg

SEQ ID NO: 5285586 - DNA, 25 bp, Homo sapien
agcactgaacgaatcccagagctga

SEQ ID NO: 5285587 - DNA, 25 bp, Homo sapien
cttccctccttttaagcactgaacg

SEQ ID NO: 5285588 - DNA, 25 bp, Homo sapien
agcctgatcgttcttattcctgagt

SEQ ID NO: 5285589 - DNA, 25 bp, Homo sapien
ggggtctgtcctttgcagctctgag

SEQ ID NO: 5285590 - DNA, 25 bp, Homo sapien
gtctgtcctttgcagctctgagggc

SEQ ID NO: 5285591 - DNA, 25 bp, Homo sapien
tgcccagaacccaggggtctgtcct

SEQ ID NO: 5285592 - DNA, 25 bp, Homo sapien
ctgcccagaacccaggggtctgtcc

SEQ ID NO: 5285593 - DNA, 25 bp, Homo sapien
gacacccctgctaggattccatggt

SEQ ID NO: 5285594 - DNA, 25 bp, Homo sapien
ccgaaccgagctgtctacagacaaa

SEQ ID NO: 5285595 - DNA, 25 bp, Homo sapien
acaaatcacaggctcggagctgctt

SEQ ID NO: 5285596 - DNA, 25 bp, Homo sapien
tgcttcaccaagccgagcacagtct

SEQ ID NO: 5285597 - DNA, 25 bp, Homo sapien
ttctgctgtttgtgaacggggtgac

SEQ ID NO: 5285598 - DNA, 25 bp, Homo sapien
gaacggggtgacttggccttctctc

SEQ ID NO: 5285599 - DNA, 25 bp, Homo sapien
ctgtgatggggggagtgtgggctgc

SEQ ID NO: 5285600 - DNA, 25 bp, Homo sapien
ttgtgaacggggtgacttggccttc

SEQ ID NO: 5285601 - DNA, 25 bp, Homo sapien
tttctattgtaagtgggctgggccc

SEQ ID NO: 5285602 - DNA, 25 bp, Homo sapien
gcaaatttctattgtaagtgggctg

SEQ ID NO: 5285603 - DNA, 25 bp, Homo sapien
caacccagtctttggcaaatttcta

SEQ ID NO: 5285604 - DNA, 25 bp, Homo sapien
tggcaaatttctattgtaagtgggc

SEQ ID NO: 5285605 - DNA, 25 bp, Homo sapien
gagtccagctttgttgaaggaagac

SEQ ID NO: 5285606 - DNA, 25 bp, Homo sapien
acttagcagagtggcctgcaagggc

SEQ ID NO: 5285607 - DNA, 25 bp, Homo sapien
gcaccaactaagtgttcaatccaag

SEQ ID NO: 5285608 - DNA, 25 bp, Homo sapien
caactaagtgttcaatccaaggaga

SEQ ID NO: 5285609 - DNA, 25 bp, Homo sapien
atttcttctgcatatctcaaaccac

SEQ ID NO: 5285610 - DNA, 25 bp, Homo sapien
ctctggagtgttccggagggcagga

SEQ ID NO: 5285611 - DNA, 25 bp, Homo sapien
tctgcatatctcaaaccaccggcgt

SEQ ID NO: 5285612 - DNA, 25 bp, Homo sapien
tcttctgcatatctcaaaccaccgg

SEQ ID NO: 5285613 - DNA, 25 bp, Homo sapien
gattatcagcagaggctttacagct

SEQ ID NO: 5285614 - DNA, 25 bp, Homo sapien
tgaggatggataggatagccccact

SEQ ID NO: 5285615 - DNA, 25 bp, Homo sapien
tttacagcttcagaggcgagttctc

SEQ ID NO: 5285616 - DNA, 25 bp, Homo sapien
gagacttgagctcatttacggcagc

SEQ ID NO: 5285617 - DNA, 25 bp, Homo sapien
ttctagcataatggaaaagccctca

SEQ ID NO: 5285618 - DNA, 25 bp, Homo sapien
cagaggtgtggacaattcctgctcc

SEQ ID NO: 5285619 - DNA, 25 bp, Homo sapien
tagtcggtatagacatcaaaggctg

SEQ ID NO: 5285620 - DNA, 25 bp, Homo sapien
caggctgttaaacagagaaggcttc

SEQ ID NO: 5285621 - DNA, 25 bp, Homo sapien
actcgggcgcccgtgattggctccg

SEQ ID NO: 5285622 - DNA, 25 bp, Homo sapien
cccctggctgcgcgccgaagcccgc

SEQ ID NO: 5285623 - DNA, 25 bp, Homo sapien
ccgtgattggctccgcccgcccctg

SEQ ID NO: 5285624 - DNA, 25 bp, Homo sapien
cccgcccactcgggcgcccgtgatt

SEQ ID NO: 5285625 - DNA, 25 bp, Homo sapien
gccgccgcctcgatgagagccgcgc

SEQ ID NO: 5285626 - DNA, 25 bp, Homo sapien
cggagagcaggaacgcgaggaggag

SEQ ID NO: 5285627 - DNA, 25 bp, Homo sapien
gaaggcggagagcaggaacgcgagg

SEQ ID NO: 5285628 - DNA, 25 bp, Homo sapien
tcatagccgcacaggctgacaggca

SEQ ID NO: 5285629 - DNA, 25 bp, Homo sapien
tatcaaggcaagcattagcacgcta

SEQ ID NO: 5285630 - DNA, 25 bp, Homo sapien
gaaatccagcctttagttgtgctga

SEQ ID NO: 5285631 - DNA, 25 bp, Homo sapien
tctgtaatcagtcaactaagtgcct

SEQ ID NO: 5285632 - DNA, 25 bp, Homo sapien
tgtgctgaatgaggataaaccaagg

SEQ ID NO: 5285633 - DNA, 25 bp, Homo sapien
gagggtatctgcatgaaattcaagt

SEQ ID NO: 5285634 - DNA, 25 bp, Homo sapien
cattttctgtgcgagagggtatctg

SEQ ID NO: 5285635 - DNA, 25 bp, Homo sapien
gactgtgcagctgcaaatgatgact

SEQ ID NO: 5285636 - DNA, 25 bp, Homo sapien
caagtagttcagagactctcgactg

SEQ ID NO: 5285637 - DNA, 25 bp, Homo sapien
gggatctagcgtgcgcaaagacgac

SEQ ID NO: 5285638 - DNA, 25 bp, Homo sapien
ctagcgtgcgcaaagacgacagccg

SEQ ID NO: 5285639 - DNA, 25 bp, Homo sapien
ctggaacaagaacggcgagcatggt

SEQ ID NO: 5285640 - DNA, 25 bp, Homo sapien
aacggcgagcatggttgtaacggcc

SEQ ID NO: 5285641 - DNA, 25 bp, Homo sapien
gctgtgtagtcacatgttcatggtt

SEQ ID NO: 5285642 - DNA, 25 bp, Homo sapien
ccgtggctgtgtagtcacatgttca

SEQ ID NO: 5285643 - DNA, 25 bp, Homo sapien
actctggtaaaaatgtttgcctgga

SEQ ID NO: 5285644 - DNA, 25 bp, Homo sapien
tggtaaaaatgtttgcctggagaag

SEQ ID NO: 5285645 - DNA, 25 bp, Homo sapien
tctgtctggcgcttctgagcatccg

SEQ ID NO: 5285646 - DNA, 25 bp, Homo sapien
tgtagtagttcacaaaagcatcgtt

SEQ ID NO: 5285647 - DNA, 25 bp, Homo sapien
catcgttgcagtgacaacctgggtc

SEQ ID NO: 5285648 - DNA, 25 bp, Homo sapien
tctctcttggagcttcatcgttgca

SEQ ID NO: 5285649 - DNA, 25 bp, Homo sapien
ggtgtgaatagagcctggagcacac

SEQ ID NO: 5285650 - DNA, 25 bp, Homo sapien
tttttctcgagatgggtgtgaatag

SEQ ID NO: 5285651 - DNA, 25 bp, Homo sapien
ctcgagatgggtgtgaatagagcct

SEQ ID NO: 5285652 - DNA, 25 bp, Homo sapien
tgtgaatagagcctggagcacacac

SEQ ID NO: 5285653 - DNA, 25 bp, Homo sapien
cttcagacttaaatgtgctggcctc

SEQ ID NO: 5285654 - DNA, 25 bp, Homo sapien
tgatttcaagtaccttcagacttaa

SEQ ID NO: 5285655 - DNA, 25 bp, Homo sapien
tcaagtaccttcagacttaaatgtg

SEQ ID NO: 5285656 - DNA, 25 bp, Homo sapien
cagtatgatttcaagtaccttcaga

SEQ ID NO: 5285657 - DNA, 25 bp, Homo sapien
tccaggaatttcccgagaaattctg

SEQ ID NO: 5285658 - DNA, 25 bp, Homo sapien
caggaatttcccgagaaattctgtg

SEQ ID NO: 5285659 - DNA, 25 bp, Homo sapien
gagcagagagaaccaagttgtgaat

SEQ ID NO: 5285660 - DNA, 25 bp, Homo sapien
ggaatttcccgagaaattctgtgag

SEQ ID NO: 5285661 - DNA, 25 bp, Homo sapien
actgggttctgcctaaccacctaca

SEQ ID NO: 5285662 - DNA, 25 bp, Homo sapien
gctgctgctattgatttgtctctcc

SEQ ID NO: 5285663 - DNA, 25 bp, Homo sapien
tggccgctgctgctattgatttgtc

SEQ ID NO: 5285664 - DNA, 25 bp, Homo sapien
taaccacctacattggccgctgctg

SEQ ID NO: 5285665 - DNA, 25 bp, Homo sapien
acacctgggccaagtatagtctcct

SEQ ID NO: 5285666 - DNA, 25 bp, Homo sapien
ctggtataccttcccgaatgcctgg

SEQ ID NO: 5285667 - DNA, 25 bp, Homo sapien
tgatagctcaaatagacacctgggc

SEQ ID NO: 5285668 - DNA, 25 bp, Homo sapien
ggcttttcagagctacggccctgct

SEQ ID NO: 5285669 - DNA, 25 bp, Homo sapien
tggtgactcagcactagggacagga

SEQ ID NO: 5285670 - DNA, 25 bp, Homo sapien
cattagtctgggactgaagcaccac

SEQ ID NO: 5285671 - DNA, 25 bp, Homo sapien
catggtgaggcctaatgcagagcca

SEQ ID NO: 5285672 - DNA, 25 bp, Homo sapien
gcagatgtgatcagatacccaaggg

SEQ ID NO: 5285673 - DNA, 25 bp, Homo sapien
cgaggtaactgcttcagggctgcgt

SEQ ID NO: 5285674 - DNA, 25 bp, Homo sapien
tgccaggttcagatcctgcctgtcc

SEQ ID NO: 5285675 - DNA, 25 bp, Homo sapien
tctgaggattgcctgatgcaagttc

SEQ ID NO: 5285676 - DNA, 25 bp, Homo sapien
tgcagctttgtagggagcagtcccc

SEQ ID NO: 5285677 - DNA, 25 bp, Homo sapien
ggaataattctcaggattctcttcc

SEQ ID NO: 5285678 - DNA, 25 bp, Homo sapien
aaaggaataattctcaggattctct

SEQ ID NO: 5285679 - DNA, 25 bp, Homo sapien
taaaggaataattctcaggattctc

SEQ ID NO: 5285680 - DNA, 25 bp, Homo sapien
cttaaaggaataattctcaggattc

SEQ ID NO: 5285681 - DNA, 25 bp, Homo sapien
tgttcctcagccagaacgaaatgcg

SEQ ID NO: 5285682 - DNA, 25 bp, Homo sapien
gcctgccagaggctgtaagtgtaca

SEQ ID NO: 5285683 - DNA, 25 bp, Homo sapien
tacttctctgcagcggtggttccat

SEQ ID NO: 5285684 - DNA, 25 bp, Homo sapien
tagaaggctttacctctgatacaga

SEQ ID NO: 5285685 - DNA, 25 bp, Homo sapien
tttccccattggtgatccctgaagg

SEQ ID NO: 5285686 - DNA, 25 bp, Homo sapien
tcactttccccattggtgatccctg

SEQ ID NO: 5285687 - DNA, 25 bp, Homo sapien
tggtgatccctgaaggactttccat

SEQ ID NO: 5285688 - DNA, 25 bp, Homo sapien
gaaggactttccattcgcagcacaa

SEQ ID NO: 5285689 - DNA, 25 bp, Homo sapien
tccgttggacgaacaactcatcttt

SEQ ID NO: 5285690 - DNA, 25 bp, Homo sapien
cacagacggcttgtgaatgttctga

SEQ ID NO: 5285691 - DNA, 25 bp, Homo sapien
gatggtgtgcgtttcctccgttgga

SEQ ID NO: 5285692 - DNA, 25 bp, Homo sapien
gaaggaatatgttgccatcagcaat

SEQ ID NO: 5285693 - DNA, 25 bp, Homo sapien
tgttggtccgcagtcctcttcagac

SEQ ID NO: 5285694 - DNA, 25 bp, Homo sapien
caaagacagtacttcccaggtgtgg

SEQ ID NO: 5285695 - DNA, 25 bp, Homo sapien
tgtgacgacactctgacttccaaag

SEQ ID NO: 5285696 - DNA, 25 bp, Homo sapien
tgtggaggagggcattgcatttcct

SEQ ID NO: 5285697 - DNA, 25 bp, Homo sapien
agctctttctggaatactcagtcca

SEQ ID NO: 5285698 - DNA, 25 bp, Homo sapien
tttctggaatactcagtccagtgag

SEQ ID NO: 5285699 - DNA, 25 bp, Homo sapien
tactcagtccagtgagaagtgggca

SEQ ID NO: 5285700 - DNA, 25 bp, Homo sapien
atactcagtccagtgagaagtgggc

SEQ ID NO: 5285701 - DNA, 25 bp, Homo sapien
ggagagagcctgggaccgctggagc

SEQ ID NO: 5285702 - DNA, 25 bp, Homo sapien
gagagagcctgggaccgctggagct

SEQ ID NO: 5285703 - DNA, 25 bp, Homo sapien
agcctgggaccgctggagctgggga

SEQ ID NO: 5285704 - DNA, 25 bp, Homo sapien
agggagtggagattactgtggacaa

SEQ ID NO: 5285705 - DNA, 25 bp, Homo sapien
ggagtggagattactgtggacaaga

SEQ ID NO: 5285706 - DNA, 25 bp, Homo sapien
gaagcatcttggaaggtctttcaag

SEQ ID NO: 5285707 - DNA, 25 bp, Homo sapien
agagggagtggagattactgtggac

SEQ ID NO: 5285708 - DNA, 25 bp, Homo sapien
agataattcttcagcggagtcgtgc

SEQ ID NO: 5285709 - DNA, 25 bp, Homo sapien
gatctccatgctgaagccaaccatg

SEQ ID NO: 5285710 - DNA, 25 bp, Homo sapien
gcccacatgctgtgtgatccatttt

SEQ ID NO: 5285711 - DNA, 25 bp, Homo sapien
cactgagttagccagatgagctgat

SEQ ID NO: 5285712 - DNA, 25 bp, Homo sapien
tcccaatgcctctctaatgccaaaa

SEQ ID NO: 5285713 - DNA, 25 bp, Homo sapien
tgcctctctaatgccaaaatgagtc

SEQ ID NO: 5285714 - DNA, 25 bp, Homo sapien
ctaatgccaaaatgagtctccaccc

SEQ ID NO: 5285715 - DNA, 25 bp, Homo sapien
tctcccaatgcctctctaatgccaa

SEQ ID NO: 5285716 - DNA, 25 bp, Homo sapien
atcgatggccctgagtttgtcccta

SEQ ID NO: 5285717 - DNA, 25 bp, Homo sapien
gatggccctgagtttgtccctagct

SEQ ID NO: 5285718 - DNA, 25 bp, Homo sapien
caagcccggtgctctgaaggtggca

SEQ ID NO: 5285719 - DNA, 25 bp, Homo sapien
tctgaaggtggcatcgatggccctg

SEQ ID NO: 5285720 - DNA, 25 bp, Homo sapien
agtcatacccagatcaggccccaca

SEQ ID NO: 5285721 - DNA, 25 bp, Homo sapien
gtcatacccagatcaggccccacaa

SEQ ID NO: 5285722 - DNA, 25 bp, Homo sapien
gcgctctccccactcctatgggtca

SEQ ID NO: 5285723 - DNA, 25 bp, Homo sapien
cctatgggtcaccagtttctgatat

SEQ ID NO: 5285724 - DNA, 25 bp, Homo sapien
ttctgatataaagtgtgtgtcggtg

SEQ ID NO: 5285725 - DNA, 25 bp, Homo sapien
aatgctgcagttctgcgctctcccc

SEQ ID NO: 5285726 - DNA, 25 bp, Homo sapien
tgcaagacgggcttagcttccacag

SEQ ID NO: 5285727 - DNA, 25 bp, Homo sapien
gcttctataatgcaagacgggctta

SEQ ID NO: 5285728 - DNA, 25 bp, Homo sapien
tgtgtcttagcttcctagacacaag

SEQ ID NO: 5285729 - DNA, 25 bp, Homo sapien
caagggaggtaagtgaatttgccat

SEQ ID NO: 5285730 - DNA, 25 bp, Homo sapien
ctgttgctgacacaggaattttctt

SEQ ID NO: 5285731 - DNA, 25 bp, Homo sapien
ttttctttgttgattagatttagcc

SEQ ID NO: 5285732 - DNA, 25 bp, Homo sapien
cacggactgttgctgacacaggaat

SEQ ID NO: 5285733 - DNA, 25 bp, Homo sapien
cctccacggactgttgctgacacag

SEQ ID NO: 5285734 - DNA, 25 bp, Homo sapien
cagtgatggtaaccgggggcccagg

SEQ ID NO: 5285735 - DNA, 25 bp, Homo sapien
gcagtgatggtaaccgggggcccag

SEQ ID NO: 5285736 - DNA, 25 bp, Homo sapien
cagcagtgatggtaaccgggggccc

SEQ ID NO: 5285737 - DNA, 25 bp, Homo sapien
agcagtgatggtaaccgggggccca

SEQ ID NO: 5285738 - DNA, 25 bp, Homo sapien
tcagccatttcagagctgtctacag

SEQ ID NO: 5285739 - DNA, 25 bp, Homo sapien
tccaataagaacaatccctcagcca

SEQ ID NO: 5285740 - DNA, 25 bp, Homo sapien
gactccgcatcgtctatccaataag

SEQ ID NO: 5285741 - DNA, 25 bp, Homo sapien
gctgtctacagctggaactcgccca

SEQ ID NO: 5285742 - DNA, 25 bp, Homo sapien
cttgtggccgtccctcgaagccctg

SEQ ID NO: 5285743 - DNA, 25 bp, Homo sapien
cgaagccctgtttcctctccttcct

SEQ ID NO: 5285744 - DNA, 25 bp, Homo sapien
aagccctgtttcctctccttccttg

SEQ ID NO: 5285745 - DNA, 25 bp, Homo sapien
tgtggccgtccctcgaagccctgtt

SEQ ID NO: 5285746 - DNA, 25 bp, Homo sapien
gtccacaccgatcccgtcactgctt

SEQ ID NO: 5285747 - DNA, 25 bp, Homo sapien
ttctcactgcgtgcagcccgttgag

SEQ ID NO: 5285748 - DNA, 25 bp, Homo sapien
tcctgcctgaaattctcactgcgtg

SEQ ID NO: 5285749 - DNA, 25 bp, Homo sapien
gaaattctcactgcgtgcagcccgt

SEQ ID NO: 5285750 - DNA, 25 bp, Homo sapien
agctcctggtgccagggtgtctgca

SEQ ID NO: 5285751 - DNA, 25 bp, Homo sapien
ctcctggtgccagggtgtctgcaga

SEQ ID NO: 5285752 - DNA, 25 bp, Homo sapien
tgcagagtgcctgctggaccttgtg

SEQ ID NO: 5285753 - DNA, 25 bp, Homo sapien
tgctggccgcctttgggtctggggc

SEQ ID NO: 5285754 - DNA, 25 bp, Homo sapien
tcatttctgagaactggctgtcaca

SEQ ID NO: 5285755 - DNA, 25 bp, Homo sapien
tgagaactggctgtcacatgacttg

SEQ ID NO: 5285756 - DNA, 25 bp, Homo sapien
atgacttggcagaacaatagcagcc

SEQ ID NO: 5285757 - DNA, 25 bp, Homo sapien
tagcagccaggtggaattttgttcc

SEQ ID NO: 5285758 - DNA, 25 bp, Homo sapien
tagccatcagcatgcgtgaaaactc

SEQ ID NO: 5285759 - DNA, 25 bp, Homo sapien
gatggagcattgcaggctatcactg

SEQ ID NO: 5285760 - DNA, 25 bp, Homo sapien
tgggcggctcccgtttaatagagaa

SEQ ID NO: 5285761 - DNA, 25 bp, Homo sapien
taacaagcgtgccagagtctgtctc

SEQ ID NO: 5285762 - DNA, 25 bp, Homo sapien
tttggaccgtgtccgcagaaggcct

SEQ ID NO: 5285763 - DNA, 25 bp, Homo sapien
aggccttggagtgttgacgtgggca

SEQ ID NO: 5285764 - DNA, 25 bp, Homo sapien
agagaacagagtttggaccgtgtcc

SEQ ID NO: 5285765 - DNA, 25 bp, Homo sapien
gagtgttgacgtgggcaggtctagg

SEQ ID NO: 5285766 - DNA, 25 bp, Homo sapien
gagctgagtcactctgcggcaagtg

SEQ ID NO: 5285767 - DNA, 25 bp, Homo sapien
cccctgcatgtgaggcttgggacct

SEQ ID NO: 5285768 - DNA, 25 bp, Homo sapien
gaggcttgggacctgaaggcccatt

SEQ ID NO: 5285769 - DNA, 25 bp, Homo sapien
ccccagtgatgttgcgaggtaggtg

SEQ ID NO: 5285770 - DNA, 25 bp, Homo sapien
tatgtgctcctcagcgtgtaaacca

SEQ ID NO: 5285771 - DNA, 25 bp, Homo sapien
gagttgcttttgtgcagcccaggga

SEQ ID NO: 5285772 - DNA, 25 bp, Homo sapien
tctgtcactgatgagccagggcctc

SEQ ID NO: 5285773 - DNA, 25 bp, Homo sapien
cttggtgcccacatgtccctgggag

SEQ ID NO: 5285774 - DNA, 25 bp, Homo sapien
tccgccggcagccgcccctcagtag

SEQ ID NO: 5285775 - DNA, 25 bp, Homo sapien
ctccgccggcagccgcccctcagta

SEQ ID NO: 5285776 - DNA, 25 bp, Homo sapien
tcctgtgcttcaggagcagaatgac

SEQ ID NO: 5285777 - DNA, 25 bp, Homo sapien
tttctccctcaaaatatggtcttaa

SEQ ID NO: 5285778 - DNA, 25 bp, Homo sapien
gagttgcaaagccatctttgagagc

SEQ ID NO: 5285779 - DNA, 25 bp, Homo sapien
gtggtgatagccacagacaccgcct

SEQ ID NO: 5285780 - DNA, 25 bp, Homo sapien
caagatccagactctctgataatca

SEQ ID NO: 5285781 - DNA, 25 bp, Homo sapien
ctggcaagatccagactctctgata

SEQ ID NO: 5285782 - DNA, 25 bp, Homo sapien
catccagtgtagaaaaagctcctgg

SEQ ID NO: 5285783 - DNA, 25 bp, Homo sapien
aactggtttccatccagtgtagaaa

SEQ ID NO: 5285784 - DNA, 25 bp, Homo sapien
cttggtgtggtattgtggccttcca

SEQ ID NO: 5285785 - DNA, 25 bp, Homo sapien
tctatgagattgcaacttggtgtgg

SEQ ID NO: 5285786 - DNA, 25 bp, Homo sapien
aacttggtgtggtattgtggccttc

SEQ ID NO: 5285787 - DNA, 25 bp, Homo sapien
tggtttcttgatctatgagattgca

SEQ ID NO: 5285788 - DNA, 25 bp, Homo sapien
gtaggagccagtatcctccccattg

SEQ ID NO: 5285789 - DNA, 25 bp, Homo sapien
gattcctgtttgatggtaggagcca

SEQ ID NO: 5285790 - DNA, 25 bp, Homo sapien
agccagtatcctccccattgttgta

SEQ ID NO: 5285791 - DNA, 25 bp, Homo sapien
agattcctgtttgatggtaggagcc

SEQ ID NO: 5285792 - DNA, 25 bp, Homo sapien
tctggaatgactaaggcaggccttt

SEQ ID NO: 5285793 - DNA, 25 bp, Homo sapien
gatgtttgaccaatgctgaactcat

SEQ ID NO: 5285794 - DNA, 25 bp, Homo sapien
cctttcctgtgagaagtggtggctt

SEQ ID NO: 5285795 - DNA, 25 bp, Homo sapien
tgactggtgtaggatgatgtttgac

SEQ ID NO: 5285796 - DNA, 25 bp, Homo sapien
gattctgatccattaagtggttttg

SEQ ID NO: 5285797 - DNA, 25 bp, Homo sapien
ttgattctgatccattaagtggttt

SEQ ID NO: 5285798 - DNA, 25 bp, Homo sapien
ggtgtgagtgctactcctttggccc

SEQ ID NO: 5285799 - DNA, 25 bp, Homo sapien
ctgcggtgtgagtgctactcctttg

SEQ ID NO: 5285800 - DNA, 25 bp, Homo sapien
gattgtaacagcgtcccactggtgc

SEQ ID NO: 5285801 - DNA, 25 bp, Homo sapien
ttctgcttttaggagtgtcacaagg

SEQ ID NO: 5285802 - DNA, 25 bp, Homo sapien
ccactggtgctggatggccaacaat

SEQ ID NO: 5285803 - DNA, 25 bp, Homo sapien
ggaacaaggtccctgcagtcagatg

SEQ ID NO: 5285804 - DNA, 25 bp, Homo sapien
caggagcttcccgtgaagggagcat

SEQ ID NO: 5285805 - DNA, 25 bp, Homo sapien
gagcatcgtgcaaactcaggagctt

SEQ ID NO: 5285806 - DNA, 25 bp, Homo sapien
gaagggagcatcgtgcaaactcagg

SEQ ID NO: 5285807 - DNA, 25 bp, Homo sapien
gggagcatcgtgcaaactcaggagc

SEQ ID NO: 5285808 - DNA, 25 bp, Homo sapien
ccttcccctttttgagggcatccag

SEQ ID NO: 5285809 - DNA, 25 bp, Homo sapien
gggcctctctggatccttctttcct

SEQ ID NO: 5285810 - DNA, 25 bp, Homo sapien
gcctctctggatccttctttcctat

SEQ ID NO: 5285811 - DNA, 25 bp, Homo sapien
ccaggggcctctctggatccttctt

SEQ ID NO: 5285812 - DNA, 25 bp, Homo sapien
tgctgcacggccgacagatagtaga

SEQ ID NO: 5285813 - DNA, 25 bp, Homo sapien
gatgatcccattacgaacacatttg

SEQ ID NO: 5285814 - DNA, 25 bp, Homo sapien
tacgaacacatttgacacggcctct

SEQ ID NO: 5285815 - DNA, 25 bp, Homo sapien
tgcttgcagacagatcgcttaattt

SEQ ID NO: 5285816 - DNA, 25 bp, Homo sapien
tggaacagggaaagccgaaggcaac

SEQ ID NO: 5285817 - DNA, 25 bp, Homo sapien
tccagggctgatcaccaggcaaaag

SEQ ID NO: 5285818 - DNA, 25 bp, Homo sapien
gacttcagacaagaaactggaacag

SEQ ID NO: 5285819 - DNA, 25 bp, Homo sapien
tgcttacggcgtccagacttgaggt

SEQ ID NO: 5285820 - DNA, 25 bp, Homo sapien
ccagtgatgggcgaatctgtattaa

SEQ ID NO: 5285821 - DNA, 25 bp, Homo sapien
aaatgcaagggtcattccggttctg

SEQ ID NO: 5285822 - DNA, 25 bp, Homo sapien
cttgtggaaatgcaagggtcattcc

SEQ ID NO: 5285823 - DNA, 25 bp, Homo sapien
tccggttctgcttccagtgatgggc

SEQ ID NO: 5285824 - DNA, 25 bp, Homo sapien
ggggatatgtgccagcattgagtgg

SEQ ID NO: 5285825 - DNA, 25 bp, Homo sapien
gggatatgtgccagcattgagtggc

SEQ ID NO: 5285826 - DNA, 25 bp, Homo sapien
ctgagttgggtgagttcgagttcat

SEQ ID NO: 5285827 - DNA, 25 bp, Homo sapien
tctgcagacactgtctttctttgaa

SEQ ID NO: 5285828 - DNA, 25 bp, Homo sapien
cttctgcagacactgtctttctttg

SEQ ID NO: 5285829 - DNA, 25 bp, Homo sapien
ctctcaaatcggtcagcctggcttc

SEQ ID NO: 5285830 - DNA, 25 bp, Homo sapien
ttctgcagacactgtctttctttga

SEQ ID NO: 5285831 - DNA, 25 bp, Homo sapien
caaagatgtcgggaagcaggtgtgc

SEQ ID NO: 5285832 - DNA, 25 bp, Homo sapien
gcaggtgtgcttgccctggactttg

SEQ ID NO: 5285833 - DNA, 25 bp, Homo sapien
ggactttgagcaggtgatggcactt

SEQ ID NO: 5285834 - DNA, 25 bp, Homo sapien
gggtcggcaaagatgtcgggaagca

SEQ ID NO: 5285835 - DNA, 25 bp, Homo sapien
agtgccttgaacatactgcctgaca

SEQ ID NO: 5285836 - DNA, 25 bp, Homo sapien
ggtggtcctggaacataccagccat

SEQ ID NO: 5285837 - DNA, 25 bp, Homo sapien
aaatgtcctccactcacaagactgg

SEQ ID NO: 5285838 - DNA, 25 bp, Homo sapien
tgcctagaacacttagggccagatg

SEQ ID NO: 5285839 - DNA, 25 bp, Homo sapien
gattcccaggtaatgacagtcgtgc

SEQ ID NO: 5285840 - DNA, 25 bp, Homo sapien
gaaagactcgttgcgttgtcagagg

SEQ ID NO: 5285841 - DNA, 25 bp, Homo sapien
tcagcggccgctggaaaagcttagg

SEQ ID NO: 5285842 - DNA, 25 bp, Homo sapien
tcagagggaagctgaccataaggca

SEQ ID NO: 5285843 - DNA, 25 bp, Homo sapien
tcggagtactctgctacccacttcg

SEQ ID NO: 5285844 - DNA, 25 bp, Homo sapien
cacagcctgtgtgagataatccaca

SEQ ID NO: 5285845 - DNA, 25 bp, Homo sapien
tttgcatgtgctggcagagtttgtg

SEQ ID NO: 5285846 - DNA, 25 bp, Homo sapien
cagtatgcaactcagcatcagggat

SEQ ID NO: 5285847 - DNA, 25 bp, Homo sapien
tcctggggacgaatcctgagcttgc

SEQ ID NO: 5285848 - DNA, 25 bp, Homo sapien
gcggcgcaaggtaggtctctgctta

SEQ ID NO: 5285849 - DNA, 25 bp, Homo sapien
gctttgctaagtgttggcggccatc

SEQ ID NO: 5285850 - DNA, 25 bp, Homo sapien
gccatcgtggttttcgcatcctggg

SEQ ID NO: 5285851 - DNA, 25 bp, Homo sapien
ctgggtcttggctttccccaggagg

SEQ ID NO: 5285852 - DNA, 25 bp, Homo sapien
cttggctttccccaggaggttagat

SEQ ID NO: 5285853 - DNA, 25 bp, Homo sapien
tcttggctttccccaggaggttaga

SEQ ID NO: 5285854 - DNA, 25 bp, Homo sapien
tgctagcgatatcgccggcactggg

SEQ ID NO: 5285855 - DNA, 25 bp, Homo sapien
ggcgacagctgtccttgctagcgat

SEQ ID NO: 5285856 - DNA, 25 bp, Homo sapien
atggcaccactggtgggcgacagct

SEQ ID NO: 5285857 - DNA, 25 bp, Homo sapien
gttggaaaacaagacagcgcagcgt

SEQ ID NO: 5285858 - DNA, 25 bp, Homo sapien
ctcttgttcgtcctgagctctggca

SEQ ID NO: 5285859 - DNA, 25 bp, Homo sapien
tagtttggggtctaatcttccctgc

SEQ ID NO: 5285860 - DNA, 25 bp, Homo sapien
cttcaatgttgacccttagtttggg

SEQ ID NO: 5285861 - DNA, 25 bp, Homo sapien
cttgttctcttgttcgtcctgagct

SEQ ID NO: 5285862 - DNA, 25 bp, Homo sapien
gatggggagggactttgagggcagt

SEQ ID NO: 5285863 - DNA, 25 bp, Homo sapien
ctttaggatggggagggactttgag

SEQ ID NO: 5285864 - DNA, 25 bp, Homo sapien
atggggagggactttgagggcagtt

SEQ ID NO: 5285865 - DNA, 25 bp, Homo sapien
gaggactcagtttgcgcagagccca

SEQ ID NO: 5285866 - DNA, 25 bp, Homo sapien
tcttcggaggaggttgcaaatgtct

SEQ ID NO: 5285867 - DNA, 25 bp, Homo sapien
gaaatgccctagatgccgcctgtgt

SEQ ID NO: 5285868 - DNA, 25 bp, Homo sapien
tactgtctgtccaggccgtttgtcc

SEQ ID NO: 5285869 - DNA, 25 bp, Homo sapien
atcatttgggattctggtccgttcc

SEQ ID NO: 5285870 - DNA, 25 bp, Homo sapien
ttctggtccgttccctgcctggtgc

SEQ ID NO: 5285871 - DNA, 25 bp, Homo sapien
ctacacaggcatcatttgggattct

SEQ ID NO: 5285872 - DNA, 25 bp, Homo sapien
ttgggattctggtccgttccctgcc

SEQ ID NO: 5285873 - DNA, 25 bp, Homo sapien
cttgctcgtgtgagctgccgtcctc

SEQ ID NO: 5285874 - DNA, 25 bp, Homo sapien
catcttgctcgtgtgagctgccgtc

SEQ ID NO: 5285875 - DNA, 25 bp, Homo sapien
cccagcctgcgctgtccacctcggt

SEQ ID NO: 5285876 - DNA, 25 bp, Homo sapien
cagacccccagcctgcgctgtccac

SEQ ID NO: 5285877 - DNA, 25 bp, Homo sapien
cctggaccctgagctcactgaggac

SEQ ID NO: 5285878 - DNA, 25 bp, Homo sapien
ttccttcctggaccctgagctcact

SEQ ID NO: 5285879 - DNA, 25 bp, Homo sapien
cttccttcctggaccctgagctcac

SEQ ID NO: 5285880 - DNA, 25 bp, Homo sapien
cttcctggaccctgagctcactgag

SEQ ID NO: 5285881 - DNA, 25 bp, Homo sapien
aagcccggcacagggccctgttcat

SEQ ID NO: 5285882 - DNA, 25 bp, Homo sapien
cctcttttctctacaagcccggcac

SEQ ID NO: 5285883 - DNA, 25 bp, Homo sapien
tttctctacaagcccggcacagggc

SEQ ID NO: 5285884 - DNA, 25 bp, Homo sapien
tcttttctctacaagcccggcacag

SEQ ID NO: 5285885 - DNA, 25 bp, Homo sapien
agtggtgagtttgtgtcctccgtga

SEQ ID NO: 5285886 - DNA, 25 bp, Homo sapien
aacagtggtgagtttgtgtcctccg

SEQ ID NO: 5285887 - DNA, 25 bp, Homo sapien
gaacagtggtgagtttgtgtcctcc

SEQ ID NO: 5285888 - DNA, 25 bp, Homo sapien
aggaacagtggtgagtttgtgtcct

SEQ ID NO: 5285889 - DNA, 25 bp, Homo sapien
ccaccttggggcacttggtcccgct

SEQ ID NO: 5285890 - DNA, 25 bp, Homo sapien
ttggtcccgctgagcaagtcttcca

SEQ ID NO: 5285891 - DNA, 25 bp, Homo sapien
agcaagtcttccagaagcgcctctc

SEQ ID NO: 5285892 - DNA, 25 bp, Homo sapien
accttggggcacttggtcccgctga

SEQ ID NO: 5285893 - DNA, 25 bp, Homo sapien
tccctggcacccttgtagtacttgc

SEQ ID NO: 5285894 - DNA, 25 bp, Homo sapien
gtcactgtccagtatgcccaaggct

SEQ ID NO: 5285895 - DNA, 25 bp, Homo sapien
cttgctgcttcctggttccggtgtg

SEQ ID NO: 5285896 - DNA, 25 bp, Homo sapien
ggttccggtgtggtcctgtcactgt

SEQ ID NO: 5285897 - DNA, 25 bp, Homo sapien
tgtcagtcatcctgcagccttcgct

SEQ ID NO: 5285898 - DNA, 25 bp, Homo sapien
ttggcccaccagatcccagacagcc

SEQ ID NO: 5285899 - DNA, 25 bp, Homo sapien
gccttcgcttgctgaatgcatccag

SEQ ID NO: 5285900 - DNA, 25 bp, Homo sapien
catccagtcgtaggggatgtctgtc

SEQ ID NO: 5285901 - DNA, 25 bp, Homo sapien
ccgagagatgggataagctgccaat

SEQ ID NO: 5285902 - DNA, 25 bp, Homo sapien
gtaaataattcataacccgagagat

SEQ ID NO: 5285903 - DNA, 25 bp, Homo sapien
tcataacccgagagatgggataagc

SEQ ID NO: 5285904 - DNA, 25 bp, Homo sapien
gatgggataagctgccaataaacaa

SEQ ID NO: 5285905 - DNA, 25 bp, Homo sapien
tcacctgccatcaaggccagcagcc

SEQ ID NO: 5285906 - DNA, 25 bp, Homo sapien
catcacctgccatcaaggccagcag

SEQ ID NO: 5285907 - DNA, 25 bp, Homo sapien
gactgggttagctctgccaagagct

SEQ ID NO: 5285908 - DNA, 25 bp, Homo sapien
gccatcacctgccatcaaggccagc

SEQ ID NO: 5285909 - DNA, 25 bp, Homo sapien
gaaacctgcgctattgaatctgtcc

SEQ ID NO: 5285910 - DNA, 25 bp, Homo sapien
cttcgcattaatgcatgaaacaagg

SEQ ID NO: 5285911 - DNA, 25 bp, Homo sapien
tgaaacaaggctccactctgggatg

SEQ ID NO: 5285912 - DNA, 25 bp, Homo sapien
aagagaaccagcttcgcattaatgc

SEQ ID NO: 5285913 - DNA, 25 bp, Homo sapien
ctctgagacctcgtgccactgtgcc

SEQ ID NO: 5285914 - DNA, 25 bp, Homo sapien
cacccacgatcacactctgagacct

SEQ ID NO: 5285915 - DNA, 25 bp, Homo sapien
gatcacactctgagacctcgtgcca

SEQ ID NO: 5285916 - DNA, 25 bp, Homo sapien
tcctcccaaggctgaatcaaccatt

SEQ ID NO: 5285917 - DNA, 25 bp, Homo sapien
gcgtgcatcactgtacctggctgga

SEQ ID NO: 5285918 - DNA, 25 bp, Homo sapien
tcaagcaattttctcgaactcctgg

SEQ ID NO: 5285919 - DNA, 25 bp, Homo sapien
ctgtacctggctggaaaccccattt

SEQ ID NO: 5285920 - DNA, 25 bp, Homo sapien
gcatcactgtacctggctggaaacc

SEQ ID NO: 5285921 - DNA, 25 bp, Homo sapien
cctcctggcatcgtgtcagggccag

SEQ ID NO: 5285922 - DNA, 25 bp, Homo sapien
cagcgagagtgacggcccctcctgg

SEQ ID NO: 5285923 - DNA, 25 bp, Homo sapien
tgtacccacagctccagcgagagtg

SEQ ID NO: 5285924 - DNA, 25 bp, Homo sapien
gggttgacaccccagaacaggctcc

SEQ ID NO: 5285925 - DNA, 25 bp, Homo sapien
tgagaaacataagtcacagttatat

SEQ ID NO: 5285926 - DNA, 25 bp, Homo sapien
tatatttgttctgcaaccatataag

SEQ ID NO: 5285927 - DNA, 25 bp, Homo sapien
accatataagaatcacgagtttctc

SEQ ID NO: 5285928 - DNA, 25 bp, Homo sapien
ctgtaaattgagaaacataagtcac

SEQ ID NO: 5285929 - DNA, 25 bp, Homo sapien
tcactcagcccgatcatcgatgttc

SEQ ID NO: 5285930 - DNA, 25 bp, Homo sapien
tcagcccgatcatcgatgttcaggt

SEQ ID NO: 5285931 - DNA, 25 bp, Homo sapien
cccgatcatcgatgttcaggttgaa

SEQ ID NO: 5285932 - DNA, 25 bp, Homo sapien
agcccgatcatcgatgttcaggttg

SEQ ID NO: 5285933 - DNA, 25 bp, Homo sapien
tcggttgccccatctgagcgagagg

SEQ ID NO: 5285934 - DNA, 25 bp, Homo sapien
gaggcctactcatcggtctgcataa

SEQ ID NO: 5285935 - DNA, 25 bp, Homo sapien
tgacccgcatgaaataaaactcctg

SEQ ID NO: 5285936 - DNA, 25 bp, Homo sapien
ctttttccgggatcgcttgcatgca

SEQ ID NO: 5285937 - DNA, 25 bp, Homo sapien
tggttccagcccagatgaacccact

SEQ ID NO: 5285938 - DNA, 25 bp, Homo sapien
ctcctccactaggagcctctggttc

SEQ ID NO: 5285939 - DNA, 25 bp, Homo sapien
cacacattgccgtctttgtttaaag

SEQ ID NO: 5285940 - DNA, 25 bp, Homo sapien
caaatgatagaatgcttctgctgtg

SEQ ID NO: 5285941 - DNA, 25 bp, Homo sapien
tcttgagagcaatcccaggtcatca

SEQ ID NO: 5285942 - DNA, 25 bp, Homo sapien
tcagaggcctggagctttaggcaag

SEQ ID NO: 5285943 - DNA, 25 bp, Homo sapien
acgttccagaagtgtgctcaagcaa

SEQ ID NO: 5285944 - DNA, 25 bp, Homo sapien
tagcattccggagttttcagggtcg

SEQ ID NO: 5285945 - DNA, 25 bp, Homo sapien
atggttaagtcccagtgtttccagt

SEQ ID NO: 5285946 - DNA, 25 bp, Homo sapien
ttccatggttaagtcccagtgtttc

SEQ ID NO: 5285947 - DNA, 25 bp, Homo sapien
ccatggttaagtcccagtgtttcca

SEQ ID NO: 5285948 - DNA, 25 bp, Homo sapien
ctgggcagcaaaggcggctgtctgg

SEQ ID NO: 5285949 - DNA, 25 bp, Homo sapien
tggccgttgaatgtgcccaggcctc

SEQ ID NO: 5285950 - DNA, 25 bp, Homo sapien
gggtaggcactaactgggccagaaa

SEQ ID NO: 5285951 - DNA, 25 bp, Homo sapien
gctgggcttggattggactcagtaa

SEQ ID NO: 5285952 - DNA, 25 bp, Homo sapien
aagctggagcaaggttctagtgccg

SEQ ID NO: 5285953 - DNA, 25 bp, Homo sapien
gacctccgtggaggtgttctctcga

SEQ ID NO: 5285954 - DNA, 25 bp, Homo sapien
tgtcagaggagacaggccttgtcct

SEQ ID NO: 5285955 - DNA, 25 bp, Homo sapien
tctctcgaggcatgtgctcagaggc

SEQ ID NO: 5285956 - DNA, 25 bp, Homo sapien
gagccctgtgatgcagggtgtcaga

SEQ ID NO: 5285957 - DNA, 25 bp, Homo sapien
actggaaggaacatgctcaaaaggc

SEQ ID NO: 5285958 - DNA, 25 bp, Homo sapien
gatggaagctcctactagactgact

SEQ ID NO: 5285959 - DNA, 25 bp, Homo sapien
gcttccttgtccaggagggaagtcc

SEQ ID NO: 5285960 - DNA, 25 bp, Homo sapien
gagagccacctacagaaagttccag

SEQ ID NO: 5285961 - DNA, 25 bp, Homo sapien
ctgtaagcaccatcaacatccagat

SEQ ID NO: 5285962 - DNA, 25 bp, Homo sapien
tgtaagcaccatcaacatccagatc

SEQ ID NO: 5285963 - DNA, 25 bp, Homo sapien
agctgacttcttggcagacttcttg

SEQ ID NO: 5285964 - DNA, 25 bp, Homo sapien
agtggaccctcgagccggttggcca

SEQ ID NO: 5285965 - DNA, 25 bp, Homo sapien
ggaattcaagcagctcataggcaag

SEQ ID NO: 5285966 - DNA, 25 bp, Homo sapien
cctcgagccggttggccaatcagca

SEQ ID NO: 5285967 - DNA, 25 bp, Homo sapien
tcctatccccatatcatgaactggg

SEQ ID NO: 5285968 - DNA, 25 bp, Homo sapien
ctggtgtgggcgctgtagcactccc

SEQ ID NO: 5285969 - DNA, 25 bp, Homo sapien
gtgcttgctccccactgggcctggt

SEQ ID NO: 5285970 - DNA, 25 bp, Homo sapien
cacagtcactcctaggtctgagcca

SEQ ID NO: 5285971 - DNA, 25 bp, Homo sapien
gacaggcgcaggtgattatttatac

SEQ ID NO: 5285972 - DNA, 25 bp, Homo sapien
gtggactatttacgtactcccaaca

SEQ ID NO: 5285973 - DNA, 25 bp, Homo sapien
gcgcaggtgattatttatacaagtc

SEQ ID NO: 5285974 - DNA, 25 bp, Homo sapien
ctttcagtggactatttacgtactc

SEQ ID NO: 5285975 - DNA, 25 bp, Homo sapien
agtgccctgattgcgttccctgtgg

SEQ ID NO: 5285976 - DNA, 25 bp, Homo sapien
tgtgaggacctgcatggactcgact

SEQ ID NO: 5285977 - DNA, 25 bp, Homo sapien
ggactcgactttgtcagtgccctga

SEQ ID NO: 5285978 - DNA, 25 bp, Homo sapien
gagctgaccacgagagcaggtgtta

SEQ ID NO: 5285979 - DNA, 25 bp, Homo sapien
tttcgggagcttgcctaaacaccac

SEQ ID NO: 5285980 - DNA, 25 bp, Homo sapien
tgcgtctttcgggagcttgcctaaa

SEQ ID NO: 5285981 - DNA, 25 bp, Homo sapien
aagattccatgcgtctttcgggagc

SEQ ID NO: 5285982 - DNA, 25 bp, Homo sapien
agagaagattccatgcgtctttcgg

SEQ ID NO: 5285983 - DNA, 25 bp, Homo sapien
gagaggacacctctgattcgatctg

SEQ ID NO: 5285984 - DNA, 25 bp, Homo sapien
gaggaacatgcttgcgggcatctgt

SEQ ID NO: 5285985 - DNA, 25 bp, Homo sapien
ccagtgggctgggtgtcacatttca

SEQ ID NO: 5285986 - DNA, 25 bp, Homo sapien
catttcagcaacatgatctctgctc

SEQ ID NO: 5285987 - DNA, 25 bp, Homo sapien
tgcagtaagtagcaagttggaagcc

SEQ ID NO: 5285988 - DNA, 25 bp, Homo sapien
ccgcgcctcctgatgaatactagca

SEQ ID NO: 5285989 - DNA, 25 bp, Homo sapien
tgcacggtgaataaaggagccctcc

SEQ ID NO: 5285990 - DNA, 25 bp, Homo sapien
tgttagcgttttcctaccagcggcc

SEQ ID NO: 5285991 - DNA, 25 bp, Homo sapien
ggaggaaaaggtgtacacatacggc

SEQ ID NO: 5285992 - DNA, 25 bp, Homo sapien
cacgtaaagtggtttggagatattg

SEQ ID NO: 5285993 - DNA, 25 bp, Homo sapien
cagtttttcctgagcacgtaaagtg

SEQ ID NO: 5285994 - DNA, 25 bp, Homo sapien
gaaaaggtgtacacatacggcaggc

SEQ ID NO: 5285995 - DNA, 25 bp, Homo sapien
ccctaggtgtctctgttacgttcaa

SEQ ID NO: 5285996 - DNA, 25 bp, Homo sapien
tccacgcttagaaagcacggcagcc

SEQ ID NO: 5285997 - DNA, 25 bp, Homo sapien
ggatcgtactggttcacagccctag

SEQ ID NO: 5285998 - DNA, 25 bp, Homo sapien
aattttatatccacgcttagaaagc

SEQ ID NO: 5285999 - DNA, 25 bp, Homo sapien
ggctcaagtgacccctcttcctcag

SEQ ID NO: 5286000 - DNA, 25 bp, Homo sapien
ggtgcgcaccatcacaccagctgat

SEQ ID NO: 5286001 - DNA, 25 bp, Homo sapien
gtgcgcaccatcacaccagctgatt

SEQ ID NO: 5286002 - DNA, 25 bp, Homo sapien
caagtgacccctcttcctcagtctc

SEQ ID NO: 5286003 - DNA, 25 bp, Homo sapien
ttctgactccttcatacattgtatt

SEQ ID NO: 5286004 - DNA, 25 bp, Homo sapien
cttctgactccttcatacattgtat

SEQ ID NO: 5286005 - DNA, 25 bp, Homo sapien
tgttaagcaaccttcgtcccatcgt

SEQ ID NO: 5286006 - DNA, 25 bp, Homo sapien
aaagcttgtttctctaggctccaac

SEQ ID NO: 5286007 - DNA, 25 bp, Homo sapien
actccagtgactccaaaagcttgtt

SEQ ID NO: 5286008 - DNA, 25 bp, Homo sapien
agcgattatcccctaaactccagtg

SEQ ID NO: 5286009 - DNA, 25 bp, Homo sapien
ctggaccaactacaagttgctcagc

SEQ ID NO: 5286010 - DNA, 25 bp, Homo sapien
tcagccccggggagttgaacctgga

SEQ ID NO: 5286011 - DNA, 25 bp, Homo sapien
aagatgatctcatagcagccacctg

SEQ ID NO: 5286012 - DNA, 25 bp, Homo sapien
cacctgggcctttcaccagggacac

SEQ ID NO: 5286013 - DNA, 25 bp, Homo sapien
gaaaggcctcctcgggagcagttgt

SEQ ID NO: 5286014 - DNA, 25 bp, Homo sapien
tttctgggacggctggagcttcaaa

SEQ ID NO: 5286015 - DNA, 25 bp, Homo sapien
gagcctgctccatcggtttctggga

SEQ ID NO: 5286016 - DNA, 25 bp, Homo sapien
ggtatttccactgccgaaaggcctc

SEQ ID NO: 5286017 - DNA, 25 bp, Homo sapien
ccatggccgctggcaaaagcaaccg

SEQ ID NO: 5286018 - DNA, 25 bp, Homo sapien
gagacatttgtgcaactggcctgaa

SEQ ID NO: 5286019 - DNA, 25 bp, Homo sapien
tgtgcaactggcctgaactgcccct

SEQ ID NO: 5286020 - DNA, 25 bp, Homo sapien
ggagagtaggagacatttgtgcaac

SEQ ID NO: 5286021 - DNA, 25 bp, Homo sapien
ttcatagtgaaatttgccaggcact

SEQ ID NO: 5286022 - DNA, 25 bp, Homo sapien
caccacctcgtggtaagcgaaaggg

SEQ ID NO: 5286023 - DNA, 25 bp, Homo sapien
gcctgtttgcagctgggtaaggaag

SEQ ID NO: 5286024 - DNA, 25 bp, Homo sapien
tagcaggcatgctgtcggtgctccg

SEQ ID NO: 5286025 - DNA, 25 bp, Homo sapien
caggaagtgtccagatgcaaaaggc

SEQ ID NO: 5286026 - DNA, 25 bp, Homo sapien
aggaagtgtccagatgcaaaaggct

SEQ ID NO: 5286027 - DNA, 25 bp, Homo sapien
cccggggatatctggaacatgcagt

SEQ ID NO: 5286028 - DNA, 25 bp, Homo sapien
gatgcaaaaggctcccggggatatc

SEQ ID NO: 5286029 - DNA, 25 bp, Homo sapien
cagacttgagccatctgggaagacc

SEQ ID NO: 5286030 - DNA, 25 bp, Homo sapien
cagagttggtcatcaagggagagtt

SEQ ID NO: 5286031 - DNA, 25 bp, Homo sapien
agagttatggttgtgagtccagagt

SEQ ID NO: 5286032 - DNA, 25 bp, Homo sapien
tggcagtaggaccagagttggtcat

SEQ ID NO: 5286033 - DNA, 25 bp, Homo sapien
tgtgaaccatcagagccgcctgagg

SEQ ID NO: 5286034 - DNA, 25 bp, Homo sapien
gtgtgaaccatcagagccgcctgag

SEQ ID NO: 5286035 - DNA, 25 bp, Homo sapien
cggaggctgtctctgcccgtttaca

SEQ ID NO: 5286036 - DNA, 25 bp, Homo sapien
tcattacccgattccgagcctgggt

SEQ ID NO: 5286037 - DNA, 25 bp, Homo sapien
ggcaaaaccagagaagggcgatgct

SEQ ID NO: 5286038 - DNA, 25 bp, Homo sapien
cagttagtgagaaggaggcaaaacc

SEQ ID NO: 5286039 - DNA, 25 bp, Homo sapien
cactgaagtggctgtcggttttgca

SEQ ID NO: 5286040 - DNA, 25 bp, Homo sapien
cagccgtcaacccagatgctagtta

SEQ ID NO: 5286041 - DNA, 25 bp, Homo sapien
gctggtgaaaggttcgttccacaaa

SEQ ID NO: 5286042 - DNA, 25 bp, Homo sapien
ggttttgcattcactccggacaggg

SEQ ID NO: 5286043 - DNA, 25 bp, Homo sapien
gaagataatatcctgtcacaggcag

SEQ ID NO: 5286044 - DNA, 25 bp, Homo sapien
agtggtcgagtctctcccgaggaag

SEQ ID NO: 5286045 - DNA, 25 bp, Homo sapien
cagcttgggccactgatgaacacca

SEQ ID NO: 5286046 - DNA, 25 bp, Homo sapien
ccaggcaccgagtaggattcattca

SEQ ID NO: 5286047 - DNA, 25 bp, Homo sapien
ctgtttagtattttgctccagaaga

SEQ ID NO: 5286048 - DNA, 25 bp, Homo sapien
ctaacatccacgtcaagtcgtggcc

SEQ ID NO: 5286049 - DNA, 25 bp, Homo sapien
ttagtattttgctccagaagaaagg

SEQ ID NO: 5286050 - DNA, 25 bp, Homo sapien
acgtcaagtcgtggccaagccgcct

SEQ ID NO: 5286051 - DNA, 25 bp, Homo sapien
tgccttcctgtggattaatcatgcc

SEQ ID NO: 5286052 - DNA, 25 bp, Homo sapien
cctgtggattaatcatgccttcggg

SEQ ID NO: 5286053 - DNA, 25 bp, Homo sapien
tatctggagacagcgcgggtcccct

SEQ ID NO: 5286054 - DNA, 25 bp, Homo sapien
taatcatgccttcggggccctcaca

SEQ ID NO: 5286055 - DNA, 25 bp, Homo sapien
gctgccgatccgatctccagcaagt

SEQ ID NO: 5286056 - DNA, 25 bp, Homo sapien
ccagctggtgagcaattagaaacac

SEQ ID NO: 5286057 - DNA, 25 bp, Homo sapien
ttccttcctgcaatatcctcaggcc

SEQ ID NO: 5286058 - DNA, 25 bp, Homo sapien
cgtggcagggctgccgatccgatct

SEQ ID NO: 5286059 - DNA, 25 bp, Homo sapien
tttcctcatcccagtaaacctgccc

SEQ ID NO: 5286060 - DNA, 25 bp, Homo sapien
cctcatcccagtaaacctgcccagt

SEQ ID NO: 5286061 - DNA, 25 bp, Homo sapien
ctcatcccagtaaacctgcccagtt

SEQ ID NO: 5286062 - DNA, 25 bp, Homo sapien
tcctcatcccagtaaacctgcccag

SEQ ID NO: 5286063 - DNA, 25 bp, Homo sapien
caggtgctctggcaccccatgatgc

SEQ ID NO: 5286064 - DNA, 25 bp, Homo sapien
tgtgccaacaggaaaggaagtggcc

SEQ ID NO: 5286065 - DNA, 25 bp, Homo sapien
cattcattcccgaggaacgggcagc

SEQ ID NO: 5286066 - DNA, 25 bp, Homo sapien
gatgctgaccatgctgaagatttgg

SEQ ID NO: 5286067 - DNA, 25 bp, Homo sapien
tggattgcagcaggatcaatgaccg

SEQ ID NO: 5286068 - DNA, 25 bp, Homo sapien
gaacattccaagaagtgcttctgcc

SEQ ID NO: 5286069 - DNA, 25 bp, Homo sapien
ggagctcccagtgacgtgttccctc

SEQ ID NO: 5286070 - DNA, 25 bp, Homo sapien
tccggttctgtgaggaggtcttcca

SEQ ID NO: 5286071 - DNA, 25 bp, Homo sapien
gctctgtcccccttggtgaagggcc

SEQ ID NO: 5286072 - DNA, 25 bp, Homo sapien
cccctccatacaaagggatggctgc

SEQ ID NO: 5286073 - DNA, 25 bp, Homo sapien
ccaggttcgagtcctagtgtctttg

SEQ ID NO: 5286074 - DNA, 25 bp, Homo sapien
ggacatgaggcttcagaaaccataa

SEQ ID NO: 5286075 - DNA, 25 bp, Homo sapien
aaaagagcagcgtggacttggaccc

SEQ ID NO: 5286076 - DNA, 25 bp, Homo sapien
ggatgctagaaaagggagcccgccc

SEQ ID NO: 5286077 - DNA, 25 bp, Homo sapien
tctgggccaccacgaagagttggaa

SEQ ID NO: 5286078 - DNA, 25 bp, Homo sapien
tgcctggcagaggggatgatggcca

SEQ ID NO: 5286079 - DNA, 25 bp, Homo sapien
tgcaagtagaacatgggtaggaggc

SEQ ID NO: 5286080 - DNA, 25 bp, Homo sapien
tagaacatgggtaggaggctgcttg

SEQ ID NO: 5286081 - DNA, 25 bp, Homo sapien
gcacaggccagcatgcaagtagaac

SEQ ID NO: 5286082 - DNA, 25 bp, Homo sapien
gctgggcaggccttgaatatatcca

SEQ ID NO: 5286083 - DNA, 25 bp, Homo sapien
gaggtgttggcccagttccttcgca

SEQ ID NO: 5286084 - DNA, 25 bp, Homo sapien
gaagggcagtcacggccatcaggac

SEQ ID NO: 5286085 - DNA, 25 bp, Homo sapien
ttgctggtccctcggtcgttcttgg

SEQ ID NO: 5286086 - DNA, 25 bp, Homo sapien
cagagcagccacgatttgccactgt

SEQ ID NO: 5286087 - DNA, 25 bp, Homo sapien
gagcagccacgatttgccactgtct

SEQ ID NO: 5286088 - DNA, 25 bp, Homo sapien
gcagccacgatttgccactgtcttc

SEQ ID NO: 5286089 - DNA, 25 bp, Homo sapien
gcagcagaatcattggcaggatgtt

SEQ ID NO: 5286090 - DNA, 25 bp, Homo sapien
ggtaacctgatctgggtagacagcc

SEQ ID NO: 5286091 - DNA, 25 bp, Homo sapien
gtaacctgatctgggtagacagcct

SEQ ID NO: 5286092 - DNA, 25 bp, Homo sapien
aggtaacctgatctgggtagacagc

SEQ ID NO: 5286093 - DNA, 25 bp, Homo sapien
caggtaacctgatctgggtagacag

SEQ ID NO: 5286094 - DNA, 25 bp, Homo sapien
tgtggtggacaccagagccgtggag

SEQ ID NO: 5286095 - DNA, 25 bp, Homo sapien
cacagtgggcgggtcaggcccttaa

SEQ ID NO: 5286096 - DNA, 25 bp, Homo sapien
taagaaagagggttgtggtggacac

SEQ ID NO: 5286097 - DNA, 25 bp, Homo sapien
gaggagcgtttttgtggtccatttc

SEQ ID NO: 5286098 - DNA, 25 bp, Homo sapien
tggggccccattgatctgaccactc

SEQ ID NO: 5286099 - DNA, 25 bp, Homo sapien
ggggccccattgatctgaccactca

SEQ ID NO: 5286100 - DNA, 25 bp, Homo sapien
gatggggccccattgatctgaccac

SEQ ID NO: 5286101 - DNA, 25 bp, Homo sapien
gggccccattgatctgaccactcac

SEQ ID NO: 5286102 - DNA, 25 bp, Homo sapien
agaaattagtaaccgccgcgtccag

SEQ ID NO: 5286103 - DNA, 25 bp, Homo sapien
ttgagccttgatagacccgcggtca

SEQ ID NO: 5286104 - DNA, 25 bp, Homo sapien
ccgcggtcagatagtcagtcaggca

SEQ ID NO: 5286105 - DNA, 25 bp, Homo sapien
cagtcgctggaactctggtggcatc

SEQ ID NO: 5286106 - DNA, 25 bp, Homo sapien
gagccagggtgtccggccaccaccc

SEQ ID NO: 5286107 - DNA, 25 bp, Homo sapien
gtggaagagccagggtgtccggcca

SEQ ID NO: 5286108 - DNA, 25 bp, Homo sapien
tggtggaagagccagggtgtccggc

SEQ ID NO: 5286109 - DNA, 25 bp, Homo sapien
gaagagccagggtgtccggccacca

SEQ ID NO: 5286110 - DNA, 25 bp, Homo sapien
tttgtggcctcagataccacgccag

SEQ ID NO: 5286111 - DNA, 25 bp, Homo sapien
gagggtagtttgtcctccagccttc

SEQ ID NO: 5286112 - DNA, 25 bp, Homo sapien
cttgagggtagtttgtcctccagcc

SEQ ID NO: 5286113 - DNA, 25 bp, Homo sapien
gtggcctcagataccacgccagggt

SEQ ID NO: 5286114 - DNA, 25 bp, Homo sapien
ctgggcacagaggctggggcggagg

SEQ ID NO: 5286115 - DNA, 25 bp, Homo sapien
tgggcacagaggctggggcggaggg

SEQ ID NO: 5286116 - DNA, 25 bp, Homo sapien
tctgggcacagaggctggggcggag

SEQ ID NO: 5286117 - DNA, 25 bp, Homo sapien
cacagaggctggggcggaggggggc

SEQ ID NO: 5286118 - DNA, 25 bp, Homo sapien
gaatcctgacgcatgggcagggaaa

SEQ ID NO: 5286119 - DNA, 25 bp, Homo sapien
gaaagtgttttattgttatggacta

SEQ ID NO: 5286120 - DNA, 25 bp, Homo sapien
tctaaagtccgtgtggtccttctca

SEQ ID NO: 5286121 - DNA, 25 bp, Homo sapien
cctgctaagcggttccgtgtctggg

SEQ ID NO: 5286122 - DNA, 25 bp, Homo sapien
cagcccccggaagacaagtctcacc

SEQ ID NO: 5286123 - DNA, 25 bp, Homo sapien
cggaagacaagtctcacccagagct

SEQ ID NO: 5286124 - DNA, 25 bp, Homo sapien
cccggaagacaagtctcacccagag

SEQ ID NO: 5286125 - DNA, 25 bp, Homo sapien
gcccccggaagacaagtctcaccca

SEQ ID NO: 5286126 - DNA, 25 bp, Homo sapien
gaaacgtggcaaagtcatttgcagg

SEQ ID NO: 5286127 - DNA, 25 bp, Homo sapien
gagccaagttgagcggccttggccc

SEQ ID NO: 5286128 - DNA, 25 bp, Homo sapien
ctgtggagatgtgaaacgtggcaaa

SEQ ID NO: 5286129 - DNA, 25 bp, Homo sapien
tttgcaggttgccttttcagtggga

SEQ ID NO: 5286130 - DNA, 25 bp, Homo sapien
tgttttgtccatttcacgctccacc

SEQ ID NO: 5286131 - DNA, 25 bp, Homo sapien
ttctcgaaggccctcggtcgggcag

SEQ ID NO: 5286132 - DNA, 25 bp, Homo sapien
cctgccaaagtatgtgggttgacgt

SEQ ID NO: 5286133 - DNA, 25 bp, Homo sapien
cgtggaagacctgaacactctggga

SEQ ID NO: 5286134 - DNA, 25 bp, Homo sapien
cagaaacctggtcctaaccatctct

SEQ ID NO: 5286135 - DNA, 25 bp, Homo sapien
gctccccttaggactgccaaacagg

SEQ ID NO: 5286136 - DNA, 25 bp, Homo sapien
ttgccaagcccgtttagcctcagag

SEQ ID NO: 5286137 - DNA, 25 bp, Homo sapien
ccctgggagcggtgcacattctcat

SEQ ID NO: 5286138 - DNA, 25 bp, Homo sapien
tgctgtggaaattagagaccctctg

SEQ ID NO: 5286139 - DNA, 25 bp, Homo sapien
gctgtggaaattagagaccctctgg

SEQ ID NO: 5286140 - DNA, 25 bp, Homo sapien
agaagcccggccatcaggctggtga

SEQ ID NO: 5286141 - DNA, 25 bp, Homo sapien
gggcacaggagcacgtcagaagccc

SEQ ID NO: 5286142 - DNA, 25 bp, Homo sapien
cagcatagcctctggaatgcacggc

SEQ ID NO: 5286143 - DNA, 25 bp, Homo sapien
ttgctgccagcatagcctctggaat

SEQ ID NO: 5286144 - DNA, 25 bp, Homo sapien
caggaggacaccgttttgtggcatt

SEQ ID NO: 5286145 - DNA, 25 bp, Homo sapien
tcacactccccgtggtttgtcagga

SEQ ID NO: 5286146 - DNA, 25 bp, Homo sapien
cttggggttgccatggagaagctgg

SEQ ID NO: 5286147 - DNA, 25 bp, Homo sapien
gcttggggttgccatggagaagctg

SEQ ID NO: 5286148 - DNA, 25 bp, Homo sapien
tggggttgccatggagaagctgggt

SEQ ID NO: 5286149 - DNA, 25 bp, Homo sapien
ctgcttggggttgccatggagaagc

SEQ ID NO: 5286150 - DNA, 25 bp, Homo sapien
ctgagccgcatacaatagagcaccc

SEQ ID NO: 5286151 - DNA, 25 bp, Homo sapien
tgagccgcatacaatagagcaccct

SEQ ID NO: 5286152 - DNA, 25 bp, Homo sapien
agggttttcttgagttctcctccag

SEQ ID NO: 5286153 - DNA, 25 bp, Homo sapien
gaacagagtcactaggaggctcgct

SEQ ID NO: 5286154 - DNA, 25 bp, Homo sapien
tctctgtctccgagcagaggtcttg

SEQ ID NO: 5286155 - DNA, 25 bp, Homo sapien
ggaaggaacccgtttcataagcgca

SEQ ID NO: 5286156 - DNA, 25 bp, Homo sapien
gaggctgggccgctctgaagttcaa

SEQ ID NO: 5286157 - DNA, 25 bp, Homo sapien
gagatgcacaggatgcctctggagc

SEQ ID NO: 5286158 - DNA, 25 bp, Homo sapien
gaggcatccgaaagtcagtgagaga

SEQ ID NO: 5286159 - DNA, 25 bp, Homo sapien
tcccatccagggaacacttggttct

SEQ ID NO: 5286160 - DNA, 25 bp, Homo sapien
cacaaaaagaactgatcacccctct

SEQ ID NO: 5286161 - DNA, 25 bp, Homo sapien
agacttccaggctgctcatccagag

SEQ ID NO: 5286162 - DNA, 25 bp, Homo sapien
ctctccaaggactgatcacaagttc

SEQ ID NO: 5286163 - DNA, 25 bp, Homo sapien
agagaagacttccaggctgctcatc

SEQ ID NO: 5286164 - DNA, 25 bp, Homo sapien
caacctgggcactgggtgttcgcag

SEQ ID NO: 5286165 - DNA, 25 bp, Homo sapien
tcctccagcgtaatgagcacttcat

SEQ ID NO: 5286166 - DNA, 25 bp, Homo sapien
gcgactgtagctgcaaggccttggt

SEQ ID NO: 5286167 - DNA, 25 bp, Homo sapien
tgcttgaaagactcagcgactgtag

SEQ ID NO: 5286168 - DNA, 25 bp, Homo sapien
tagtggagggctcagttaatagctg

SEQ ID NO: 5286169 - DNA, 25 bp, Homo sapien
catgttgttattcatgccccagcct

SEQ ID NO: 5286170 - DNA, 25 bp, Homo sapien
tatcaggctgtgaaggacactcttg

SEQ ID NO: 5286171 - DNA, 25 bp, Homo sapien
ggtttccatcccacatccgagcatg

SEQ ID NO: 5286172 - DNA, 25 bp, Homo sapien
tggagacattctgtcctggtcggcc

SEQ ID NO: 5286173 - DNA, 25 bp, Homo sapien
tgcccgtcggcaagacatgacgtcg

SEQ ID NO: 5286174 - DNA, 25 bp, Homo sapien
gctggctctgagtcaacacgtccat

SEQ ID NO: 5286175 - DNA, 25 bp, Homo sapien
ccaaagcaggcgtattgtgttaccc

SEQ ID NO: 5286176 - DNA, 25 bp, Homo sapien
cagaggtagggcctcaatccagaaa

SEQ ID NO: 5286177 - DNA, 25 bp, Homo sapien
gaggtagggcctcaatccagaaacc

SEQ ID NO: 5286178 - DNA, 25 bp, Homo sapien
cagaaaccccgttcatcccacgtgg

SEQ ID NO: 5286179 - DNA, 25 bp, Homo sapien
gttcatcccacgtggctggatccca

SEQ ID NO: 5286180 - DNA, 25 bp, Homo sapien
accagcagtcaaggtgtttcctggg

SEQ ID NO: 5286181 - DNA, 25 bp, Homo sapien
caaccagcagtcaaggtgtttcctg

SEQ ID NO: 5286182 - DNA, 25 bp, Homo sapien
tccaaccagcagtcaaggtgtttcc

SEQ ID NO: 5286183 - DNA, 25 bp, Homo sapien
ctccaaccagcagtcaaggtgtttc

SEQ ID NO: 5286184 - DNA, 25 bp, Homo sapien
gaaggctacagcggcggcagtcagg

SEQ ID NO: 5286185 - DNA, 25 bp, Homo sapien
agatgaaggctacagcggcggcagt

SEQ ID NO: 5286186 - DNA, 25 bp, Homo sapien
aagatgaaggctacagcggcggcag

SEQ ID NO: 5286187 - DNA, 25 bp, Homo sapien
atgaaggctacagcggcggcagtca

SEQ ID NO: 5286188 - DNA, 25 bp, Homo sapien
gaaagccgtaaacactgtgagtcca

SEQ ID NO: 5286189 - DNA, 25 bp, Homo sapien
gccgtaaacactgtgagtccacatc

SEQ ID NO: 5286190 - DNA, 25 bp, Homo sapien
ctccaggccagtccagcattgtgtc

SEQ ID NO: 5286191 - DNA, 25 bp, Homo sapien
agtccagcattgtgtccagccctgg

SEQ ID NO: 5286192 - DNA, 25 bp, Homo sapien
cttctggttctgacactaccatgtc

SEQ ID NO: 5286193 - DNA, 25 bp, Homo sapien
ctgacactaccatgtcctgagagct

SEQ ID NO: 5286194 - DNA, 25 bp, Homo sapien
ctggttctgacactaccatgtcctg

SEQ ID NO: 5286195 - DNA, 25 bp, Homo sapien
ggttctgacactaccatgtcctgag

SEQ ID NO: 5286196 - DNA, 25 bp, Homo sapien
ttgctgcctgtcggcctgaggtccc

SEQ ID NO: 5286197 - DNA, 25 bp, Homo sapien
ccgtttgcagtacaagggccaggcc

SEQ ID NO: 5286198 - DNA, 25 bp, Homo sapien
agcagttgtcccctcagccgtttgc

SEQ ID NO: 5286199 - DNA, 25 bp, Homo sapien
ctcagccgtttgcagtacaagggcc

SEQ ID NO: 5286200 - DNA, 25 bp, Homo sapien
aactgcgcatggtgagggaccgtaa

SEQ ID NO: 5286201 - DNA, 25 bp, Homo sapien
gaaggaggcttcatagggcccagac

SEQ ID NO: 5286202 - DNA, 25 bp, Homo sapien
tgccccttatggagcgacttccacg

SEQ ID NO: 5286203 - DNA, 25 bp, Homo sapien
cggctcttgtatcacagctgaagga

SEQ ID NO: 5286204 - DNA, 25 bp, Homo sapien
ggacttatgtggcttctgactctga

SEQ ID NO: 5286205 - DNA, 25 bp, Homo sapien
tcagtcatgatcagcagattgcctc

SEQ ID NO: 5286206 - DNA, 25 bp, Homo sapien
cagggaatggctagtttaaagacgt

SEQ ID NO: 5286207 - DNA, 25 bp, Homo sapien
taagaggcttggtccggaatgagct

SEQ ID NO: 5286208 - DNA, 25 bp, Homo sapien
gacttgtcctttgcaaggcttggtc

SEQ ID NO: 5286209 - DNA, 25 bp, Homo sapien
cagacttgtcctttgcaaggcttgg

SEQ ID NO: 5286210 - DNA, 25 bp, Homo sapien
cactccagacttgtcctttgcaagg

SEQ ID NO: 5286211 - DNA, 25 bp, Homo sapien
tccagacttgtcctttgcaaggctt

SEQ ID NO: 5286212 - DNA, 25 bp, Homo sapien
gaccccacttccagaggaggttgct

SEQ ID NO: 5286213 - DNA, 25 bp, Homo sapien
accctgggaccatccaacctgggat

SEQ ID NO: 5286214 - DNA, 25 bp, Homo sapien
aacctgggatcctgagacaccctga

SEQ ID NO: 5286215 - DNA, 25 bp, Homo sapien
tttcactgaaccgggtgctgccagg

SEQ ID NO: 5286216 - DNA, 25 bp, Homo sapien
ttcctgcacgtcagcgtcgctgttc

SEQ ID NO: 5286217 - DNA, 25 bp, Homo sapien
ttgttcagctgcgccagccttcctg

SEQ ID NO: 5286218 - DNA, 25 bp, Homo sapien
ccagccttcctgcacgtcagcgtcg

SEQ ID NO: 5286219 - DNA, 25 bp, Homo sapien
gttcagctgcgccagccttcctgca

SEQ ID NO: 5286220 - DNA, 25 bp, Homo sapien
tttctggaaatgagcgaacgggttc

SEQ ID NO: 5286221 - DNA, 25 bp, Homo sapien
tgaattacagccgtgaccgccgtat

SEQ ID NO: 5286222 - DNA, 25 bp, Homo sapien
gacacagagcccctgaaaggtagct

SEQ ID NO: 5286223 - DNA, 25 bp, Homo sapien
gcccagcccggtttgagttgtaagc

SEQ ID NO: 5286224 - DNA, 25 bp, Homo sapien
gaagcgtcgagtgggcttgtgagca

SEQ ID NO: 5286225 - DNA, 25 bp, Homo sapien
agagcagaggccagtccgggacaca

SEQ ID NO: 5286226 - DNA, 25 bp, Homo sapien
ggacatccaagtggaagcgtcgagt

SEQ ID NO: 5286227 - DNA, 25 bp, Homo sapien
acacagagtgtgaagtgcaggcagg

SEQ ID NO: 5286228 - DNA, 25 bp, Homo sapien
ccgctgtctggggaacaatatgttt

SEQ ID NO: 5286229 - DNA, 25 bp, Homo sapien
gggagcgagctctgttttctccctc

SEQ ID NO: 5286230 - DNA, 25 bp, Homo sapien
tccctccatcatgtttgttgatgtt

SEQ ID NO: 5286231 - DNA, 25 bp, Homo sapien
ttacacgttagtggcaggaggacag

SEQ ID NO: 5286232 - DNA, 25 bp, Homo sapien
cagaatctaggctaccgtcctgaga

SEQ ID NO: 5286233 - DNA, 25 bp, Homo sapien
tcggtgcaccttgcgtctgaggagc

SEQ ID NO: 5286234 - DNA, 25 bp, Homo sapien
ggtgagtcttgaagtccccacaata

SEQ ID NO: 5286235 - DNA, 25 bp, Homo sapien
aaactgtagtagctccttcggtgca

SEQ ID NO: 5286236 - DNA, 25 bp, Homo sapien
cggcttagttaatcctagaatgccc

SEQ ID NO: 5286237 - DNA, 25 bp, Homo sapien
tcacaaagggagtcgcagataatgg

SEQ ID NO: 5286238 - DNA, 25 bp, Homo sapien
gttcctgcacacaggacggcttagt

SEQ ID NO: 5286239 - DNA, 25 bp, Homo sapien
tcagtcttggggttttttctggctc

SEQ ID NO: 5286240 - DNA, 25 bp, Homo sapien
gcccatagccctgtacaggggactt

SEQ ID NO: 5286241 - DNA, 25 bp, Homo sapien
gccctgtacaggggacttttcctca

SEQ ID NO: 5286242 - DNA, 25 bp, Homo sapien
catagccctgtacaggggacttttc

SEQ ID NO: 5286243 - DNA, 25 bp, Homo sapien
cggcccatagccctgtacaggggac

SEQ ID NO: 5286244 - DNA, 25 bp, Homo sapien
aataacaaaggctcccagaaatggg

SEQ ID NO: 5286245 - DNA, 25 bp, Homo sapien
gtgtgatgtgcgtctgcgagtctac

SEQ ID NO: 5286246 - DNA, 25 bp, Homo sapien
tgcgtctgcgagtctacagctgacc

SEQ ID NO: 5286247 - DNA, 25 bp, Homo sapien
aggctcccagaaatgggcgttgtgt

SEQ ID NO: 5286248 - DNA, 25 bp, Homo sapien
caatgccgcggtgaccagaaacagg

SEQ ID NO: 5286249 - DNA, 25 bp, Homo sapien
cccactctggcgacacgattggaga

SEQ ID NO: 5286250 - DNA, 25 bp, Homo sapien
ccgctacaaggaacgcggctgttgg

SEQ ID NO: 5286251 - DNA, 25 bp, Homo sapien
cgattggagagggtcaccgtgctca

SEQ ID NO: 5286252 - DNA, 25 bp, Homo sapien
agttgtaaggttctgccagatttat

SEQ ID NO: 5286253 - DNA, 25 bp, Homo sapien
gtaaggttctgccagatttatcatt

SEQ ID NO: 5286254 - DNA, 25 bp, Homo sapien
taaggttctgccagatttatcattt

SEQ ID NO: 5286255 - DNA, 25 bp, Homo sapien
ttgtaaggttctgccagatttatca

SEQ ID NO: 5286256 - DNA, 25 bp, Homo sapien
cacaggtggacctggcaccgtgaag

SEQ ID NO: 5286257 - DNA, 25 bp, Homo sapien
ccaacaccctggtctgaatatgttt

SEQ ID NO: 5286258 - DNA, 25 bp, Homo sapien
tctgaatatgtttgccaaaagctgg

SEQ ID NO: 5286259 - DNA, 25 bp, Homo sapien
accgtgaagacctcaagtgccctgc

SEQ ID NO: 5286260 - DNA, 25 bp, Homo sapien
cttcagatgaaggtccgggtacagg

SEQ ID NO: 5286261 - DNA, 25 bp, Homo sapien
tacagggagctttgtctggcgttgt

SEQ ID NO: 5286262 - DNA, 25 bp, Homo sapien
ggcttcagatgaaggtccgggtaca

SEQ ID NO: 5286263 - DNA, 25 bp, Homo sapien
gggagctttgtctggcgttgtccct

SEQ ID NO: 5286264 - DNA, 25 bp, Homo sapien
ctattaacagggatgggagcgagac

SEQ ID NO: 5286265 - DNA, 25 bp, Homo sapien
cattctgctggttgtaagttcctcc

SEQ ID NO: 5286266 - DNA, 25 bp, Homo sapien
ccccggaagtggactctgaagcctg

SEQ ID NO: 5286267 - DNA, 25 bp, Homo sapien
catggtacagagcatcgtggcctgc

SEQ ID NO: 5286268 - DNA, 25 bp, Homo sapien
gcaaagggcacaccccgtgtccagg

SEQ ID NO: 5286269 - DNA, 25 bp, Homo sapien
aactcgtcgtaggaggggcctctag

SEQ ID NO: 5286270 - DNA, 25 bp, Homo sapien
gggcctctagtcaggccgcgctgac

SEQ ID NO: 5286271 - DNA, 25 bp, Homo sapien
tgggtttactgagggcctggaactc

SEQ ID NO: 5286272 - DNA, 25 bp, Homo sapien
ggttgtagcccacttcgcctgctca

SEQ ID NO: 5286273 - DNA, 25 bp, Homo sapien
gagctgctttcttatacataagaaa

SEQ ID NO: 5286274 - DNA, 25 bp, Homo sapien
aacagcaggccggttgtagcccact

SEQ ID NO: 5286275 - DNA, 25 bp, Homo sapien
tgtagtattcatgaacgacacagcc

SEQ ID NO: 5286276 - DNA, 25 bp, Homo sapien
ggctggttggtcaccgggatgtatt

SEQ ID NO: 5286277 - DNA, 25 bp, Homo sapien
tatttgctgagccttccgggctcct

SEQ ID NO: 5286278 - DNA, 25 bp, Homo sapien
caccgggatgtatttgctgagcctt

SEQ ID NO: 5286279 - DNA, 25 bp, Homo sapien
gaccggcctcgcctaagaaggctgg

SEQ ID NO: 5286280 - DNA, 25 bp, Homo sapien
gagaaagctcaaaagctgccattga

SEQ ID NO: 5286281 - DNA, 25 bp, Homo sapien
tgtaatgcgggacatttttatgccc

SEQ ID NO: 5286282 - DNA, 25 bp, Homo sapien
tataacatcaatatgcgcttatgca

SEQ ID NO: 5286283 - DNA, 25 bp, Homo sapien
tgataatcctggttaaaacttggaa

SEQ ID NO: 5286284 - DNA, 25 bp, Homo sapien
agcttgaagggctggattgccacca

SEQ ID NO: 5286285 - DNA, 25 bp, Homo sapien
tgtgtatcctgacaccacatggcag

SEQ ID NO: 5286286 - DNA, 25 bp, Homo sapien
gggcccagagatttctatgcttgaa

SEQ ID NO: 5286287 - DNA, 25 bp, Homo sapien
ggcagatttctctccactggactgg

SEQ ID NO: 5286288 - DNA, 25 bp, Homo sapien
tgaggctgctcactcggccttttcc

SEQ ID NO: 5286289 - DNA, 25 bp, Homo sapien
aaagcacaccgttcctgtgggtctg

SEQ ID NO: 5286290 - DNA, 25 bp, Homo sapien
acttctggaacctagggctgcccac

SEQ ID NO: 5286291 - DNA, 25 bp, Homo sapien
tatggaggaataccatttcctcgtc

SEQ ID NO: 5286292 - DNA, 25 bp, Homo sapien
tttctgcttcgctgacagagctggg

SEQ ID NO: 5286293 - DNA, 25 bp, Homo sapien
cagagctgggtcctgtggttggcat

SEQ ID NO: 5286294 - DNA, 25 bp, Homo sapien
ctttctgcttcgctgacagagctgg

SEQ ID NO: 5286295 - DNA, 25 bp, Homo sapien
ctgtggttggcatcccaggccctga

SEQ ID NO: 5286296 - DNA, 25 bp, Homo sapien
gacttgagctccttggggacagaaa

SEQ ID NO: 5286297 - DNA, 25 bp, Homo sapien
cagctccaggtgtcggcccggtgtc

SEQ ID NO: 5286298 - DNA, 25 bp, Homo sapien
ccttgtgggcacctgatgatatgct

SEQ ID NO: 5286299 - DNA, 25 bp, Homo sapien
tgccttgtgggcacctgatgatatg

SEQ ID NO: 5286300 - DNA, 25 bp, Homo sapien
tcggcccggtgtcctgtgccttgtg

SEQ ID NO: 5286301 - DNA, 25 bp, Homo sapien
aattcagacgaggggtcagaaaggg

SEQ ID NO: 5286302 - DNA, 25 bp, Homo sapien
gggaaattcagacgaggggtcagaa

SEQ ID NO: 5286303 - DNA, 25 bp, Homo sapien
ctgggaaattcagacgaggggtcag

SEQ ID NO: 5286304 - DNA, 25 bp, Homo sapien
tgggaaattcagacgaggggtcaga

SEQ ID NO: 5286305 - DNA, 25 bp, Homo sapien
agacattggattcagttcagtttct

SEQ ID NO: 5286306 - DNA, 25 bp, Homo sapien
tggggccagactcgagtctctcttc

SEQ ID NO: 5286307 - DNA, 25 bp, Homo sapien
aaggcacctcaggacaccccactcc

SEQ ID NO: 5286308 - DNA, 25 bp, Homo sapien
tcagttcagtttctggggccagact

SEQ ID NO: 5286309 - DNA, 25 bp, Homo sapien
ttctcccaaggtctctcggccctgc

SEQ ID NO: 5286310 - DNA, 25 bp, Homo sapien
ctgtttctcacccaagtctcccaag

SEQ ID NO: 5286311 - DNA, 25 bp, Homo sapien
ctggatgtttaattccccacacaaa

SEQ ID NO: 5286312 - DNA, 25 bp, Homo sapien
attccccacacaaagtcctctccac

SEQ ID NO: 5286313 - DNA, 25 bp, Homo sapien
ctggagcaggatagtgcagggtgcc

SEQ ID NO: 5286314 - DNA, 25 bp, Homo sapien
atctcccacacctgagaataggcca

SEQ ID NO: 5286315 - DNA, 25 bp, Homo sapien
ctgcaaatctcccacacctgagaat

SEQ ID NO: 5286316 - DNA, 25 bp, Homo sapien
tggaagtccactctgaagacccagc

SEQ ID NO: 5286317 - DNA, 25 bp, Homo sapien
tgtgcaaccccaacagggtgactgg

SEQ ID NO: 5286318 - DNA, 25 bp, Homo sapien
aaagagagtgtgcaaccccaacagg

SEQ ID NO: 5286319 - DNA, 25 bp, Homo sapien
ggccctaacttttgccaatgaaaga

SEQ ID NO: 5286320 - DNA, 25 bp, Homo sapien
aggccctaacttttgccaatgaaag

SEQ ID NO: 5286321 - DNA, 25 bp, Homo sapien
ctaagccttggggtgggtctgggag

SEQ ID NO: 5286322 - DNA, 25 bp, Homo sapien
gccagccccaggtccaagacaccgg

SEQ ID NO: 5286323 - DNA, 25 bp, Homo sapien
cccaggtccaagacaccgggcacag

SEQ ID NO: 5286324 - DNA, 25 bp, Homo sapien
ggagaagcttctgacatccccaggt

SEQ ID NO: 5286325 - DNA, 25 bp, Homo sapien
agagggtgggtgtcctgagagactc

SEQ ID NO: 5286326 - DNA, 25 bp, Homo sapien
agggtgggtgtcctgagagactcaa

SEQ ID NO: 5286327 - DNA, 25 bp, Homo sapien
tgccccatgtcaaagccccaggaga

SEQ ID NO: 5286328 - DNA, 25 bp, Homo sapien
ccccatgtcaaagccccaggagagg

SEQ ID NO: 5286329 - DNA, 25 bp, Homo sapien
tccagctgtggtcgggtctgttcct

SEQ ID NO: 5286330 - DNA, 25 bp, Homo sapien
gtaggacgcttttgtgtcgcttttc

SEQ ID NO: 5286331 - DNA, 25 bp, Homo sapien
ttccttccagctgtggtcgggtctg

SEQ ID NO: 5286332 - DNA, 25 bp, Homo sapien
tcgggtctgttcctttgtaggacgc

SEQ ID NO: 5286333 - DNA, 25 bp, Homo sapien
tccctgctgtcggtggtgactaatg

SEQ ID NO: 5286334 - DNA, 25 bp, Homo sapien
aggatccccagtgccatcgtccctg

SEQ ID NO: 5286335 - DNA, 25 bp, Homo sapien
taatgccaggaaagcgcatcggcca

SEQ ID NO: 5286336 - DNA, 25 bp, Homo sapien
cggtggtgactaatgccaggaaagc

SEQ ID NO: 5286337 - DNA, 25 bp, Homo sapien
attttttaatttgtctgcttcatac

SEQ ID NO: 5286338 - DNA, 25 bp, Homo sapien
tttcctccattatgttgatttttta

SEQ ID NO: 5286339 - DNA, 25 bp, Homo sapien
gattttttaatttgtctgcttcata

SEQ ID NO: 5286340 - DNA, 25 bp, Homo sapien
gttgattttttaatttgtctgcttc

SEQ ID NO: 5286341 - DNA, 25 bp, Homo sapien
caatgccgtgtttggacttgccaac

SEQ ID NO: 5286342 - DNA, 25 bp, Homo sapien
caactaaccccggagtgactgtgtt

SEQ ID NO: 5286343 - DNA, 25 bp, Homo sapien
tccgtagtaagggagagcagccaag

SEQ ID NO: 5286344 - DNA, 25 bp, Homo sapien
cagcccagggtaacgctcacgtttc

SEQ ID NO: 5286345 - DNA, 25 bp, Homo sapien
tttgggacttcccatctcatggaca

SEQ ID NO: 5286346 - DNA, 25 bp, Homo sapien
aggtctcctgcccccggtgcttggg

SEQ ID NO: 5286347 - DNA, 25 bp, Homo sapien
gctctttgggacttcccatctcatg

SEQ ID NO: 5286348 - DNA, 25 bp, Homo sapien
caggctctttgggacttcccatctc

SEQ ID NO: 5286349 - DNA, 25 bp, Homo sapien
gggtgaagggacatgtctagtggcc

SEQ ID NO: 5286350 - DNA, 25 bp, Homo sapien
ggtctggggtgaagggacatgtcta

SEQ ID NO: 5286351 - DNA, 25 bp, Homo sapien
ccaagcacaggggttaggggcatgt

SEQ ID NO: 5286352 - DNA, 25 bp, Homo sapien
gaagggacatgtctagtggcctcac

SEQ ID NO: 5286353 - DNA, 25 bp, Homo sapien
gcccgcatcgggctgccggatcatg

SEQ ID NO: 5286354 - DNA, 25 bp, Homo sapien
tgagcgtcctagggtcttgggcctg

SEQ ID NO: 5286355 - DNA, 25 bp, Homo sapien
gccggatcatggatgagcgtcctag

SEQ ID NO: 5286356 - DNA, 25 bp, Homo sapien
gctgccggatcatggatgagcgtcc

SEQ ID NO: 5286357 - DNA, 25 bp, Homo sapien
taggatgtgtctcggtggccctcat

SEQ ID NO: 5286358 - DNA, 25 bp, Homo sapien
cggtggccctcatcagaaaggatgg

SEQ ID NO: 5286359 - DNA, 25 bp, Homo sapien
aacagtaggatgtgtctcggtggcc

SEQ ID NO: 5286360 - DNA, 25 bp, Homo sapien
atgtgtctcggtggccctcatcaga

SEQ ID NO: 5286361 - DNA, 25 bp, Homo sapien
ggccggattggcccagtgcagagcc

SEQ ID NO: 5286362 - DNA, 25 bp, Homo sapien
gtgcagtggccggattggcccagtg

SEQ ID NO: 5286363 - DNA, 25 bp, Homo sapien
gcagtggccggattggcccagtgca

SEQ ID NO: 5286364 - DNA, 25 bp, Homo sapien
agtggccggattggcccagtgcaga

SEQ ID NO: 5286365 - DNA, 25 bp, Homo sapien
acttccagccattccatactatggg

SEQ ID NO: 5286366 - DNA, 25 bp, Homo sapien
cagccattccatactatgggagcac

SEQ ID NO: 5286367 - DNA, 25 bp, Homo sapien
attccatactatgggagcaccttga

SEQ ID NO: 5286368 - DNA, 25 bp, Homo sapien
ccatactatgggagcaccttgactg

SEQ ID NO: 5286369 - DNA, 25 bp, Homo sapien
tgtcagcgagactcaacacagatga

SEQ ID NO: 5286370 - DNA, 25 bp, Homo sapien
tcctcatctatcacactggagcaaa

SEQ ID NO: 5286371 - DNA, 25 bp, Homo sapien
aatgttagcattggtgtgcgtctgc

SEQ ID NO: 5286372 - DNA, 25 bp, Homo sapien
caaaggaggttctagttgtcagcga

SEQ ID NO: 5286373 - DNA, 25 bp, Homo sapien
tttagagagcagtgaggcagacgcc

SEQ ID NO: 5286374 - DNA, 25 bp, Homo sapien
gagggactccaactgctcatgagga

SEQ ID NO: 5286375 - DNA, 25 bp, Homo sapien
ggtgaatccactctgagcatccatg

SEQ ID NO: 5286376 - DNA, 25 bp, Homo sapien
ggagccacagaagtattcacacctg

SEQ ID NO: 5286377 - DNA, 25 bp, Homo sapien
caatggagaagttagagaggttcac

SEQ ID NO: 5286378 - DNA, 25 bp, Homo sapien
gaagttagagaggttcactatcaag

SEQ ID NO: 5286379 - DNA, 25 bp, Homo sapien
aagcaatggagaagttagagaggtt

SEQ ID NO: 5286380 - DNA, 25 bp, Homo sapien
tggagaagttagagaggttcactat

SEQ ID NO: 5286381 - DNA, 25 bp, Homo sapien
ttttctaacttccagaggccgcgtg

SEQ ID NO: 5286382 - DNA, 25 bp, Homo sapien
ggccgcgtgtacttcctggctcctg

SEQ ID NO: 5286383 - DNA, 25 bp, Homo sapien
tcttcagatcacatcacgccaacct

SEQ ID NO: 5286384 - DNA, 25 bp, Homo sapien
tccacaataatctcccatcttaaga

SEQ ID NO: 5286385 - DNA, 25 bp, Homo sapien
ggatgtcttatgacgcaagtggtcc

SEQ ID NO: 5286386 - DNA, 25 bp, Homo sapien
ctgttaatcaaaatactaacttgaa

SEQ ID NO: 5286387 - DNA, 25 bp, Homo sapien
caaccagaattccagtaagaaggag

SEQ ID NO: 5286388 - DNA, 25 bp, Homo sapien
cttgaaaagattctaaacaaccaga

SEQ ID NO: 5286389 - DNA, 25 bp, Homo sapien
caccatggggttggtgctatcactg

SEQ ID NO: 5286390 - DNA, 25 bp, Homo sapien
tgtaatcattgcagtaaccaccatg

SEQ ID NO: 5286391 - DNA, 25 bp, Homo sapien
attcactcaaatatgtaatcattgc

SEQ ID NO: 5286392 - DNA, 25 bp, Homo sapien
caaatatgtaatcattgcagtaacc

SEQ ID NO: 5286393 - DNA, 25 bp, Homo sapien
taaggtaaatttgtgccttctatgt

SEQ ID NO: 5286394 - DNA, 25 bp, Homo sapien
gcatttgtagccaacagtgatcata

SEQ ID NO: 5286395 - DNA, 25 bp, Homo sapien
caaagtatactgataacaacccgat

SEQ ID NO: 5286396 - DNA, 25 bp, Homo sapien
ggtgcttaataaccagcaatatgcc

SEQ ID NO: 5286397 - DNA, 25 bp, Homo sapien
gctttcagctaaaaaatcgtgaggt

SEQ ID NO: 5286398 - DNA, 25 bp, Homo sapien
tacctactgaatagcaccatagctg

SEQ ID NO: 5286399 - DNA, 25 bp, Homo sapien
tacaaaagatgcaggtacaagccca

SEQ ID NO: 5286400 - DNA, 25 bp, Homo sapien
gccatcagtttcaaccctagtgcgg

SEQ ID NO: 5286401 - DNA, 25 bp, Homo sapien
caatggcattcagctacgggacctg

SEQ ID NO: 5286402 - DNA, 25 bp, Homo sapien
tattcaaggaccataccagagctcg

SEQ ID NO: 5286403 - DNA, 25 bp, Homo sapien
tgttggcaataccaaaacgtgtgca

SEQ ID NO: 5286404 - DNA, 25 bp, Homo sapien
tagcttcaggatgtaaacggtggca

SEQ ID NO: 5286405 - DNA, 25 bp, Homo sapien
taggctatggccaaagtatgctttc

SEQ ID NO: 5286406 - DNA, 25 bp, Homo sapien
gtggaaaatacaacatgtttctgaa

SEQ ID NO: 5286407 - DNA, 25 bp, Homo sapien
ggaaaatacaacatgtttctgaagt

SEQ ID NO: 5286408 - DNA, 25 bp, Homo sapien
tggaaaatacaacatgtttctgaag

SEQ ID NO: 5286409 - DNA, 25 bp, Homo sapien
gaaaatacaacatgtttctgaagtt

SEQ ID NO: 5286410 - DNA, 25 bp, Homo sapien
tcagaagactgctctgtgaggagca

SEQ ID NO: 5286411 - DNA, 25 bp, Homo sapien
gcactttacaccaaggctctgcaca

SEQ ID NO: 5286412 - DNA, 25 bp, Homo sapien
gcaatttgaaattgaatggctcaga

SEQ ID NO: 5286413 - DNA, 25 bp, Homo sapien
cagattggagaggataaaccactca

SEQ ID NO: 5286414 - DNA, 25 bp, Homo sapien
gtctcaaacatatgaactgttcttt

SEQ ID NO: 5286415 - DNA, 25 bp, Homo sapien
tgtctcaaacatatgaactgttctt

SEQ ID NO: 5286416 - DNA, 25 bp, Homo sapien
atgtctcaaacatatgaactgttct

SEQ ID NO: 5286417 - DNA, 25 bp, Homo sapien
aagtgttcctcattacggaagaatt

SEQ ID NO: 5286418 - DNA, 25 bp, Homo sapien
aaagtgttcctcattacggaagaat

SEQ ID NO: 5286419 - DNA, 25 bp, Homo sapien
aatttgacagctaacaggtggcagt

SEQ ID NO: 5286420 - DNA, 25 bp, Homo sapien
aagcagaatgcattgtgttcccact

SEQ ID NO: 5286421 - DNA, 25 bp, Homo sapien
ggatttgaatacaggcagcctcact

SEQ ID NO: 5286422 - DNA, 25 bp, Homo sapien
caaacgtattactatcaggtccatt

SEQ ID NO: 5286423 - DNA, 25 bp, Homo sapien
taacaggcaaatcaacaaagggagt

SEQ ID NO: 5286424 - DNA, 25 bp, Homo sapien
cactgagatgtttcactggtgagga

SEQ ID NO: 5286425 - DNA, 25 bp, Homo sapien
caacaagttcttccatgtggccaac

SEQ ID NO: 5286426 - DNA, 25 bp, Homo sapien
gattacatttgctcagatgacctga

SEQ ID NO: 5286427 - DNA, 25 bp, Homo sapien
ttaatggcaaataggtctcactacc

SEQ ID NO: 5286428 - DNA, 25 bp, Homo sapien
catgccaacgcctttatatcagcag

SEQ ID NO: 5286429 - DNA, 25 bp, Homo sapien
acgcctttatatcagcagtggctac

SEQ ID NO: 5286430 - DNA, 25 bp, Homo sapien
ataggtctcactacccatgccaacg

SEQ ID NO: 5286431 - DNA, 25 bp, Homo sapien
tattctacagataaactaaacactt

SEQ ID NO: 5286432 - DNA, 25 bp, Homo sapien
attctacagataaactaaacactta

SEQ ID NO: 5286433 - DNA, 25 bp, Homo sapien
ttctacagataaactaaacacttac

SEQ ID NO: 5286434 - DNA, 25 bp, Homo sapien
tctttacgatgacggtagatacact

SEQ ID NO: 5286435 - DNA, 25 bp, Homo sapien
ctctacaagttgtgatttgtcataa

SEQ ID NO: 5286436 - DNA, 25 bp, Homo sapien
ttgtcataatctttacgatgacggt

SEQ ID NO: 5286437 - DNA, 25 bp, Homo sapien
gacggtagatacactgactaagaag

SEQ ID NO: 5286438 - DNA, 25 bp, Homo sapien
gattgttgcttttatccaccaacaa

SEQ ID NO: 5286439 - DNA, 25 bp, Homo sapien
tatccaccaacaaatcaagcaattt

SEQ ID NO: 5286440 - DNA, 25 bp, Homo sapien
agatttgagggcttaaaatcattcc

SEQ ID NO: 5286441 - DNA, 25 bp, Homo sapien
aataaacaccataaagcgaggatgt

SEQ ID NO: 5286442 - DNA, 25 bp, Homo sapien
ccataaagcgaggatgtaacagtga

SEQ ID NO: 5286443 - DNA, 25 bp, Homo sapien
tttcactggtcaaactgaaattgta

SEQ ID NO: 5286444 - DNA, 25 bp, Homo sapien
agttccaggcttgtcgtttttgcct

SEQ ID NO: 5286445 - DNA, 25 bp, Homo sapien
atcaactataagaggaggcacaggc

SEQ ID NO: 5286446 - DNA, 25 bp, Homo sapien
tcaatctctcacgatcaactataag

SEQ ID NO: 5286447 - DNA, 25 bp, Homo sapien
ggcttgtcgtttttgcctgctctaa

SEQ ID NO: 5286448 - DNA, 25 bp, Homo sapien
cctggtccaagtccatgatgtcaca

SEQ ID NO: 5286449 - DNA, 25 bp, Homo sapien
tgctccgggtttaaggaactgctgc

SEQ ID NO: 5286450 - DNA, 25 bp, Homo sapien
catggcagtcagtgcttacctcaaa

SEQ ID NO: 5286451 - DNA, 25 bp, Homo sapien
aaactgtcagtggaagcctcaccat

SEQ ID NO: 5286452 - DNA, 25 bp, Homo sapien
tatttgcagagttgtgccacacatc

SEQ ID NO: 5286453 - DNA, 25 bp, Homo sapien
aatgcctcttcgactctagtttctg

SEQ ID NO: 5286454 - DNA, 25 bp, Homo sapien
tcttccgagctccagtactatgagg

SEQ ID NO: 5286455 - DNA, 25 bp, Homo sapien
ttctttgtttgtgccgaaatgcctc

SEQ ID NO: 5286456 - DNA, 25 bp, Homo sapien
tcactcaaccagtaatatggcagcc

SEQ ID NO: 5286457 - DNA, 25 bp, Homo sapien
ttttgttccccaacagctttactga

SEQ ID NO: 5286458 - DNA, 25 bp, Homo sapien
tccctgcggctacatctcacttata

SEQ ID NO: 5286459 - DNA, 25 bp, Homo sapien
tttagcccaaacatctctgatccag

SEQ ID NO: 5286460 - DNA, 25 bp, Homo sapien
gcaatgatagcatgtgcagtgtcct

SEQ ID NO: 5286461 - DNA, 25 bp, Homo sapien
gtccttcagggtacaagccctgtgc

SEQ ID NO: 5286462 - DNA, 25 bp, Homo sapien
aagtttattaaattctggatctaat

SEQ ID NO: 5286463 - DNA, 25 bp, Homo sapien
ttctggatctaattcagctgcaatg

SEQ ID NO: 5286464 - DNA, 25 bp, Homo sapien
tctaactctattgcggcccctgtgt

SEQ ID NO: 5286465 - DNA, 25 bp, Homo sapien
tgttggtttattagctctaactcta

SEQ ID NO: 5286466 - DNA, 25 bp, Homo sapien
catatgcactaaccagtacttagtt

SEQ ID NO: 5286467 - DNA, 25 bp, Homo sapien
aacactagggtaggacctcctggag

SEQ ID NO: 5286468 - DNA, 25 bp, Homo sapien
tgtttgtagcctatgcaataccaca

SEQ ID NO: 5286469 - DNA, 25 bp, Homo sapien
cactggctttctacctcggcttgaa

SEQ ID NO: 5286470 - DNA, 25 bp, Homo sapien
gaaaagaagaagtctcctggtgtct

SEQ ID NO: 5286471 - DNA, 25 bp, Homo sapien
caatccaaagtaggatgtgccttaa

SEQ ID NO: 5286472 - DNA, 25 bp, Homo sapien
catgatcatgccttatagcagcgtc

SEQ ID NO: 5286473 - DNA, 25 bp, Homo sapien
taaagtgtatcttctatcccaacac

SEQ ID NO: 5286474 - DNA, 25 bp, Homo sapien
gccccgagcagctattaataggacc

SEQ ID NO: 5286475 - DNA, 25 bp, Homo sapien
tcccactagtatggaagacaaggaa

SEQ ID NO: 5286476 - DNA, 25 bp, Homo sapien
tatcagccctgcaattgttgactaa

SEQ ID NO: 5286477 - DNA, 25 bp, Homo sapien
tgagaaaggctatcgctatgttgcc

SEQ ID NO: 5286478 - DNA, 25 bp, Homo sapien
taacgcaagtccaaatcctatatgg

SEQ ID NO: 5286479 - DNA, 25 bp, Homo sapien
gactatacacttgaatacaggatgg

SEQ ID NO: 5286480 - DNA, 25 bp, Homo sapien
gggtccttatctggattatactcta

SEQ ID NO: 5286481 - DNA, 25 bp, Homo sapien
tctggattatactctaaagcattgc

SEQ ID NO: 5286482 - DNA, 25 bp, Homo sapien
gcattgctacagatgaggtcaatat

SEQ ID NO: 5286483 - DNA, 25 bp, Homo sapien
gaggtcaatatctttcaggaaatcc

SEQ ID NO: 5286484 - DNA, 25 bp, Homo sapien
tccttgattacttcaagataatctg

SEQ ID NO: 5286485 - DNA, 25 bp, Homo sapien
catcatctcagttcataaaaacaca

SEQ ID NO: 5286486 - DNA, 25 bp, Homo sapien
tccagtttttcacatcatctcagtt

SEQ ID NO: 5286487 - DNA, 25 bp, Homo sapien
cagtttttcacatcatctcagttca

SEQ ID NO: 5286488 - DNA, 25 bp, Homo sapien
tcacatcatctcagttcataaaaac

SEQ ID NO: 5286489 - DNA, 25 bp, Homo sapien
gggatgacccagcaatataaactga

SEQ ID NO: 5286490 - DNA, 25 bp, Homo sapien
aattaggcatgtcctgttatcccag

SEQ ID NO: 5286491 - DNA, 25 bp, Homo sapien
tcccagtggaaagatataaagtagc

SEQ ID NO: 5286492 - DNA, 25 bp, Homo sapien
aactttcaagtcttggctatgtcac

SEQ ID NO: 5286493 - DNA, 25 bp, Homo sapien
gccagttcaacttcactgtttgcac

SEQ ID NO: 5286494 - DNA, 25 bp, Homo sapien
tagccagttcaacttcactgtttgc

SEQ ID NO: 5286495 - DNA, 25 bp, Homo sapien
ttagccagttcaacttcactgtttg

SEQ ID NO: 5286496 - DNA, 25 bp, Homo sapien
ccagttcaacttcactgtttgcaca

SEQ ID NO: 5286497 - DNA, 25 bp, Homo sapien
cggtttgctgaagatgttaaagcgt

SEQ ID NO: 5286498 - DNA, 25 bp, Homo sapien
ggccagcctcttggttacatccctg

SEQ ID NO: 5286499 - DNA, 25 bp, Homo sapien
gatgttaaagcgtttatctgtggcc

SEQ ID NO: 5286500 - DNA, 25 bp, Homo sapien
tgtggccagcctcttggttacatcc

SEQ ID NO: 5286501 - DNA, 25 bp, Homo sapien
ggtcctccattcgacttttttctga

SEQ ID NO: 5286502 - DNA, 25 bp, Homo sapien
ggtggagaaggtagtgcaagaggaa

SEQ ID NO: 5286503 - DNA, 25 bp, Homo sapien
gattctgataattgacgaggtggag

SEQ ID NO: 5286504 - DNA, 25 bp, Homo sapien
ggaagcacttccatagcacaaagag

SEQ ID NO: 5286505 - DNA, 25 bp, Homo sapien
caactgtagcacagtcgtatttctg

SEQ ID NO: 5286506 - DNA, 25 bp, Homo sapien
cagtattatacttttatgaggccac

SEQ ID NO: 5286507 - DNA, 25 bp, Homo sapien
gaacatcataagagtatacctgcac

SEQ ID NO: 5286508 - DNA, 25 bp, Homo sapien
taagagtatacctgcacaaacctag

SEQ ID NO: 5286509 - DNA, 25 bp, Homo sapien
ggagccattgatgcctgattgagaa

SEQ ID NO: 5286510 - DNA, 25 bp, Homo sapien
tgtttccttcgtggtggagccattg

SEQ ID NO: 5286511 - DNA, 25 bp, Homo sapien
caagacctcttcatactgtattcta

SEQ ID NO: 5286512 - DNA, 25 bp, Homo sapien
caataggcctttgaatatacaagac

SEQ ID NO: 5286513 - DNA, 25 bp, Homo sapien
ccagcagtatataaggactccagtt

SEQ ID NO: 5286514 - DNA, 25 bp, Homo sapien
gtgggttgcagtggtatttcattcc

SEQ ID NO: 5286515 - DNA, 25 bp, Homo sapien
cctttcaactatcaatggacactga

SEQ ID NO: 5286516 - DNA, 25 bp, Homo sapien
tcttgcccaacctatattttagtgg

SEQ ID NO: 5286517 - DNA, 25 bp, Homo sapien
gctatggcacctggccaaccttttt

SEQ ID NO: 5286518 - DNA, 25 bp, Homo sapien
ctatggcacctggccaacctttttg

SEQ ID NO: 5286519 - DNA, 25 bp, Homo sapien
gagctatggcacctggccaaccttt

SEQ ID NO: 5286520 - DNA, 25 bp, Homo sapien
catgagctatggcacctggccaacc

SEQ ID NO: 5286521 - DNA, 25 bp, Homo sapien
aaaataggatatcaacccattaaat

SEQ ID NO: 5286522 - DNA, 25 bp, Homo sapien
gctttgctcaaaacaaaataggata

SEQ ID NO: 5286523 - DNA, 25 bp, Homo sapien
caaaataggatatcaacccattaaa

SEQ ID NO: 5286524 - DNA, 25 bp, Homo sapien
tgctttgctcaaaacaaaataggat

SEQ ID NO: 5286525 - DNA, 25 bp, Homo sapien
tcttcagcccacaaatacgatatcc

SEQ ID NO: 5286526 - DNA, 25 bp, Homo sapien
tcaaaagagaattcccataatcttc

SEQ ID NO: 5286527 - DNA, 25 bp, Homo sapien
gaaattaaattgtaaggcttagctg

SEQ ID NO: 5286528 - DNA, 25 bp, Homo sapien
gagggaaaggagctgaaatttcaga

SEQ ID NO: 5286529 - DNA, 25 bp, Homo sapien
caggcagttcactgtacatggtttc

SEQ ID NO: 5286530 - DNA, 25 bp, Homo sapien
ggtatatcttgtagcaatgtcagaa

SEQ ID NO: 5286531 - DNA, 25 bp, Homo sapien
tactaggtactgttcttcgagcttc

SEQ ID NO: 5286532 - DNA, 25 bp, Homo sapien
caatccccaatgtgaggcatgtaaa

SEQ ID NO: 5286533 - DNA, 25 bp, Homo sapien
ttttctgcaaacacgtaccctccta

SEQ ID NO: 5286534 - DNA, 25 bp, Homo sapien
taccctcctatcctggatcttggaa

SEQ ID NO: 5286535 - DNA, 25 bp, Homo sapien
ccttcaggactctcaaattttgacc

SEQ ID NO: 5286536 - DNA, 25 bp, Homo sapien
ccaatccagaacagttgtacagtac

SEQ ID NO: 5286537 - DNA, 25 bp, Homo sapien
tgtgcaaggtgtagtagaaaacaga

SEQ ID NO: 5286538 - DNA, 25 bp, Homo sapien
gattggtggatgtgcaaggtgtagt

SEQ ID NO: 5286539 - DNA, 25 bp, Homo sapien
ctatagggtgtcttggattggtgga

SEQ ID NO: 5286540 - DNA, 25 bp, Homo sapien
tggatgtgcaaggtgtagtagaaaa

SEQ ID NO: 5286541 - DNA, 25 bp, Homo sapien
gttccactgcccatgtagagtttat

SEQ ID NO: 5286542 - DNA, 25 bp, Homo sapien
cttttatagttccactgcccatgta

SEQ ID NO: 5286543 - DNA, 25 bp, Homo sapien
agttccactgcccatgtagagttta

SEQ ID NO: 5286544 - DNA, 25 bp, Homo sapien
ttccagtacttttatagttccactg

SEQ ID NO: 5286545 - DNA, 25 bp, Homo sapien
tgcatacaacctgcagtaattttgt

SEQ ID NO: 5286546 - DNA, 25 bp, Homo sapien
ctgtgaaaccatctatgtttagtgg

SEQ ID NO: 5286547 - DNA, 25 bp, Homo sapien
ggtactgagtaattcttttacttgc

SEQ ID NO: 5286548 - DNA, 25 bp, Homo sapien
tattttaaatggtactgagtaattc

SEQ ID NO: 5286549 - DNA, 25 bp, Homo sapien
tgtcaaactgggagcaaaatactgg

SEQ ID NO: 5286550 - DNA, 25 bp, Homo sapien
tataaacagccccactagaactttg

SEQ ID NO: 5286551 - DNA, 25 bp, Homo sapien
caaaaatggcttagatatggtccct

SEQ ID NO: 5286552 - DNA, 25 bp, Homo sapien
cacccaggatgagttaaatgtgtca

SEQ ID NO: 5286553 - DNA, 25 bp, Homo sapien
ttctccagagagcaataagcgtggc

SEQ ID NO: 5286554 - DNA, 25 bp, Homo sapien
ggagatctagtctatgcacagagaa

SEQ ID NO: 5286555 - DNA, 25 bp, Homo sapien
gattcctcaggtgttttggcactaa

SEQ ID NO: 5286556 - DNA, 25 bp, Homo sapien
ctgaataaagtgctgggagatctag

SEQ ID NO: 5286557 - DNA, 25 bp, Homo sapien
cataattatttcaaaggcatacatt

SEQ ID NO: 5286558 - DNA, 25 bp, Homo sapien
tgtaatacatgtaagacataattat

SEQ ID NO: 5286559 - DNA, 25 bp, Homo sapien
ctgtaatacatgtaagacataatta

SEQ ID NO: 5286560 - DNA, 25 bp, Homo sapien
agacataattatttcaaaggcatac

SEQ ID NO: 5286561 - DNA, 25 bp, Homo sapien
caagaaagggttatcaatgcaaata

SEQ ID NO: 5286562 - DNA, 25 bp, Homo sapien
cttccccaagagcataaaagaaagg

SEQ ID NO: 5286563 - DNA, 25 bp, Homo sapien
cacaggctagccaggtgaaaagcaa

SEQ ID NO: 5286564 - DNA, 25 bp, Homo sapien
tggctttcccataactatcaataaa

SEQ ID NO: 5286565 - DNA, 25 bp, Homo sapien
cttcgggagtccaaagcgggaagag

SEQ ID NO: 5286566 - DNA, 25 bp, Homo sapien
aagagcacctgagattcgagaccag

SEQ ID NO: 5286567 - DNA, 25 bp, Homo sapien
ggaagagcacctgagattcgagacc

SEQ ID NO: 5286568 - DNA, 25 bp, Homo sapien
cgggagtccaaagcgggaagagcac

SEQ ID NO: 5286569 - DNA, 25 bp, Homo sapien
aatgaaggtagggtttatgtatagc

SEQ ID NO: 5286570 - DNA, 25 bp, Homo sapien
ggtgatcctgagtgacaattggtct

SEQ ID NO: 5286571 - DNA, 25 bp, Homo sapien
ttctttggtgatcctgagtgacaat

SEQ ID NO: 5286572 - DNA, 25 bp, Homo sapien
gggtttatgtatagcagcagatgat

SEQ ID NO: 5286573 - DNA, 25 bp, Homo sapien
gcacgttgggaagcaggcacgatat

SEQ ID NO: 5286574 - DNA, 25 bp, Homo sapien
gcacagggccttgatatcggctcca

SEQ ID NO: 5286575 - DNA, 25 bp, Homo sapien
tcttgggcactaagcactattgagg

SEQ ID NO: 5286576 - DNA, 25 bp, Homo sapien
tattgaggaaacatccagctgcagt

SEQ ID NO: 5286577 - DNA, 25 bp, Homo sapien
ccatgacagtgatctatctcacaaa

SEQ ID NO: 5286578 - DNA, 25 bp, Homo sapien
gaagactataagcagattacgcatt

SEQ ID NO: 5286579 - DNA, 25 bp, Homo sapien
gataaccaaatttaccactagtgtc

SEQ ID NO: 5286580 - DNA, 25 bp, Homo sapien
caaataattagccactagaaggcat

SEQ ID NO: 5286581 - DNA, 25 bp, Homo sapien
tgtgtttggcgcatgctctcttata

SEQ ID NO: 5286582 - DNA, 25 bp, Homo sapien
gcatgctctcttataccaggcaaag

SEQ ID NO: 5286583 - DNA, 25 bp, Homo sapien
gcaaagcttaaactgaagtagtgct

SEQ ID NO: 5286584 - DNA, 25 bp, Homo sapien
ggagagatttacgttttctcctcac

SEQ ID NO: 5286585 - DNA, 25 bp, Homo sapien
ttcaaaagctgagggatgctgcttc

SEQ ID NO: 5286586 - DNA, 25 bp, Homo sapien
agaagatgtcgaggtctttgtggtt

SEQ ID NO: 5286587 - DNA, 25 bp, Homo sapien
cagaagatgtcgaggtctttgtggt

SEQ ID NO: 5286588 - DNA, 25 bp, Homo sapien
tcaaaagctgagggatgctgcttcg

SEQ ID NO: 5286589 - DNA, 25 bp, Homo sapien
gaggttgagcagaacaaacaatgac

SEQ ID NO: 5286590 - DNA, 25 bp, Homo sapien
ggttgagcagaacaaacaatgacaa

SEQ ID NO: 5286591 - DNA, 25 bp, Homo sapien
tgagcagaacaaacaatgacaatca

SEQ ID NO: 5286592 - DNA, 25 bp, Homo sapien
gttgagcagaacaaacaatgacaat

SEQ ID NO: 5286593 - DNA, 25 bp, Homo sapien
acatttttcagccaattcacctaaa

SEQ ID NO: 5286594 - DNA, 25 bp, Homo sapien
catttttcagccaattcacctaaaa

SEQ ID NO: 5286595 - DNA, 25 bp, Homo sapien
tagtaagccatgagccacataatgc

SEQ ID NO: 5286596 - DNA, 25 bp, Homo sapien
caaaatgcacgctgctcgaagaaca

SEQ ID NO: 5286597 - DNA, 25 bp, Homo sapien
tggtaatctcatctagtctcgggac

SEQ ID NO: 5286598 - DNA, 25 bp, Homo sapien
tacggctagtgtctaccaaaatgca

SEQ ID NO: 5286599 - DNA, 25 bp, Homo sapien
tgcaggatctatagagtcaagtctg

SEQ ID NO: 5286600 - DNA, 25 bp, Homo sapien
ctcctgagtgcaggatctatagagt

SEQ ID NO: 5286601 - DNA, 25 bp, Homo sapien
aatttcacccctattatctaatcca

SEQ ID NO: 5286602 - DNA, 25 bp, Homo sapien
tgagtgcaggatctatagagtcaag

SEQ ID NO: 5286603 - DNA, 25 bp, Homo sapien
caggaaaacacaatccgtaatgaga

SEQ ID NO: 5286604 - DNA, 25 bp, Homo sapien
tttcggcaaactatgggacaacatc

SEQ ID NO: 5286605 - DNA, 25 bp, Homo sapien
acagtaacatagctagcactcaaca

SEQ ID NO: 5286606 - DNA, 25 bp, Homo sapien
gattagtgaactaaaactcacagca

SEQ ID NO: 5286607 - DNA, 25 bp, Homo sapien
aaaaaagcttcagaccagaattatt

SEQ ID NO: 5286608 - DNA, 25 bp, Homo sapien
ttatatttaccagtggagcttcctg

SEQ ID NO: 5286609 - DNA, 25 bp, Homo sapien
cagtttcaaatgttggaacatttca

SEQ ID NO: 5286610 - DNA, 25 bp, Homo sapien
agcaggttgagcattatcataatag

SEQ ID NO: 5286611 - DNA, 25 bp, Homo sapien
tgctagagcgaactggagctaatcc

SEQ ID NO: 5286612 - DNA, 25 bp, Homo sapien
ggatctgatcttgtctgctagagcg

SEQ ID NO: 5286613 - DNA, 25 bp, Homo sapien
ttatagaaggtctcatcaaatatgc

SEQ ID NO: 5286614 - DNA, 25 bp, Homo sapien
ggagctaatccatctatttcatcaa

SEQ ID NO: 5286615 - DNA, 25 bp, Homo sapien
gtacagtggtgtcataatcgctcac

SEQ ID NO: 5286616 - DNA, 25 bp, Homo sapien
tatcctgtgttgtctaaagcaccta

SEQ ID NO: 5286617 - DNA, 25 bp, Homo sapien
ggtattatatacctcgcagccacct

SEQ ID NO: 5286618 - DNA, 25 bp, Homo sapien
tatgcctgttgtagttccccaatgg

SEQ ID NO: 5286619 - DNA, 25 bp, Homo sapien
gattcaccaacccacttgctcaaac

SEQ ID NO: 5286620 - DNA, 25 bp, Homo sapien
atcaaaaagaagcctaagttgcctt

SEQ ID NO: 5286621 - DNA, 25 bp, Homo sapien
tctgctccttttcgcataaaaaaag

SEQ ID NO: 5286622 - DNA, 25 bp, Homo sapien
ctaatgctctggcaaccaaggtttt

SEQ ID NO: 5286623 - DNA, 25 bp, Homo sapien
catgaatatgatggctcaatccacc

SEQ ID NO: 5286624 - DNA, 25 bp, Homo sapien
caatccacctatgctatcaaaccgt

SEQ ID NO: 5286625 - DNA, 25 bp, Homo sapien
atataaaagtgggaatactaccatt

SEQ ID NO: 5286626 - DNA, 25 bp, Homo sapien
ccatttcctttagcgcatgaatatg

SEQ ID NO: 5286627 - DNA, 25 bp, Homo sapien
cccaaggtcaatgttacctgacaaa

SEQ ID NO: 5286628 - DNA, 25 bp, Homo sapien
gggggcaatattgtcctcacagagg

SEQ ID NO: 5286629 - DNA, 25 bp, Homo sapien
gtattctcagaagggggcaatattg

SEQ ID NO: 5286630 - DNA, 25 bp, Homo sapien
tctttatgggacaatgatgaaaaaa

SEQ ID NO: 5286631 - DNA, 25 bp, Homo sapien
catcagccaagcttgcacccacttt

SEQ ID NO: 5286632 - DNA, 25 bp, Homo sapien
gaataccgctagctaagtcctctgc

SEQ ID NO: 5286633 - DNA, 25 bp, Homo sapien
aatgttcattggatcaacatcagcc

SEQ ID NO: 5286634 - DNA, 25 bp, Homo sapien
cactttcactcgttctcggagaata

SEQ ID NO: 5286635 - DNA, 25 bp, Homo sapien
aaagcgttcctcatcagaagaagtt

SEQ ID NO: 5286636 - DNA, 25 bp, Homo sapien
agcgttcctcatcagaagaagttgt

SEQ ID NO: 5286637 - DNA, 25 bp, Homo sapien
aagcgttcctcatcagaagaagttg

SEQ ID NO: 5286638 - DNA, 25 bp, Homo sapien
gttgtgtcactactatgaatggcat

SEQ ID NO: 5286639 - DNA, 25 bp, Homo sapien
tccattacacttgctgaattccaac

SEQ ID NO: 5286640 - DNA, 25 bp, Homo sapien
tccacggctttacgcacagtctctt

SEQ ID NO: 5286641 - DNA, 25 bp, Homo sapien
cggctttacgcacagtctcttcatc

SEQ ID NO: 5286642 - DNA, 25 bp, Homo sapien
agcttccacggctttacgcacagtc

SEQ ID NO: 5286643 - DNA, 25 bp, Homo sapien
gcttccacggctttacgcacagtct

SEQ ID NO: 5286644 - DNA, 25 bp, Homo sapien
tccaaatgtttcacaatgccccaga

SEQ ID NO: 5286645 - DNA, 25 bp, Homo sapien
cagagagaccatccaaatgtttcac

SEQ ID NO: 5286646 - DNA, 25 bp, Homo sapien
ctgatggtcttcaagttcttgtcaa

SEQ ID NO: 5286647 - DNA, 25 bp, Homo sapien
aatgtttcacaatgccccagaggct

SEQ ID NO: 5286648 - DNA, 25 bp, Homo sapien
tcccctcttttaccaggtgagctat

SEQ ID NO: 5286649 - DNA, 25 bp, Homo sapien
ccctcttttaccaggtgagctattt

SEQ ID NO: 5286650 - DNA, 25 bp, Homo sapien
tgcaatcagcacccatttcccctct

SEQ ID NO: 5286651 - DNA, 25 bp, Homo sapien
gcaatcagcacccatttcccctctt

SEQ ID NO: 5286652 - DNA, 25 bp, Homo sapien
ctggctttgagagtccttcagactc

SEQ ID NO: 5286653 - DNA, 25 bp, Homo sapien
ggctttgagagtccttcagactctc

SEQ ID NO: 5286654 - DNA, 25 bp, Homo sapien
ctttgagagtccttcagactctcac

SEQ ID NO: 5286655 - DNA, 25 bp, Homo sapien
tggctttgagagtccttcagactct

SEQ ID NO: 5286656 - DNA, 25 bp, Homo sapien
cctccgtgaggtctgcatgcctgcg

SEQ ID NO: 5286657 - DNA, 25 bp, Homo sapien
gctgatcctccgtgaggtctgcatg

SEQ ID NO: 5286658 - DNA, 25 bp, Homo sapien
tgatcctccgtgaggtctgcatgcc

SEQ ID NO: 5286659 - DNA, 25 bp, Homo sapien
atcctccgtgaggtctgcatgcctg

SEQ ID NO: 5286660 - DNA, 25 bp, Homo sapien
taatgttgctgtagaaaggatggtc

SEQ ID NO: 5286661 - DNA, 25 bp, Homo sapien
gttgctgtagaaaggatggtcaggc

SEQ ID NO: 5286662 - DNA, 25 bp, Homo sapien
ctgtagaaaggatggtcaggctcca

SEQ ID NO: 5286663 - DNA, 25 bp, Homo sapien
tgctgtagaaaggatggtcaggctc

SEQ ID NO: 5286664 - DNA, 25 bp, Homo sapien
cactacaggcaaccacatctgatca

SEQ ID NO: 5286665 - DNA, 25 bp, Homo sapien
actacaggcaaccacatctgatcaa

SEQ ID NO: 5286666 - DNA, 25 bp, Homo sapien
tcactacaggcaaccacatctgatc

SEQ ID NO: 5286667 - DNA, 25 bp, Homo sapien
cctcactacaggcaaccacatctga

SEQ ID NO: 5286668 - DNA, 25 bp, Homo sapien
actcttcatctccttatggcccgcc

SEQ ID NO: 5286669 - DNA, 25 bp, Homo sapien
tcatctccttatggcccgccgggct

SEQ ID NO: 5286670 - DNA, 25 bp, Homo sapien
tcttcatctccttatggcccgccgg

SEQ ID NO: 5286671 - DNA, 25 bp, Homo sapien
cttcatctccttatggcccgccggg

SEQ ID NO: 5286672 - DNA, 25 bp, Homo sapien
ggccagatcaacaccagtttgtagg

SEQ ID NO: 5286673 - DNA, 25 bp, Homo sapien
agatcaacaccagtttgtaggtggc

SEQ ID NO: 5286674 - DNA, 25 bp, Homo sapien
tctcactgggccagatcaacaccag

SEQ ID NO: 5286675 - DNA, 25 bp, Homo sapien
actgggccagatcaacaccagtttg

SEQ ID NO: 5286676 - DNA, 25 bp, Homo sapien
gatctatgaatatcaaacagcgtgt

SEQ ID NO: 5286677 - DNA, 25 bp, Homo sapien
ggagatctatgaatatcaaacagcg

SEQ ID NO: 5286678 - DNA, 25 bp, Homo sapien
tctatgaatatcaaacagcgtgttt

SEQ ID NO: 5286679 - DNA, 25 bp, Homo sapien
gaatatcaaacagcgtgttttccct

SEQ ID NO: 5286680 - DNA, 25 bp, Homo sapien
gcttggtatcgatccactgtttttc

SEQ ID NO: 5286681 - DNA, 25 bp, Homo sapien
ctattggaggtgcttggtatcgatc

SEQ ID NO: 5286682 - DNA, 25 bp, Homo sapien
tctgtctcaaattatatggtctatc

SEQ ID NO: 5286683 - DNA, 25 bp, Homo sapien
ttctctgtctcaaattatatggtct

SEQ ID NO: 5286684 - DNA, 25 bp, Homo sapien
aaaggaagcaatttagaggttctag

SEQ ID NO: 5286685 - DNA, 25 bp, Homo sapien
gattttctccaaaggaagcaattta

SEQ ID NO: 5286686 - DNA, 25 bp, Homo sapien
ctccaaaggaagcaatttagaggtt

SEQ ID NO: 5286687 - DNA, 25 bp, Homo sapien
ccaaaggaagcaatttagaggttct

SEQ ID NO: 5286688 - DNA, 25 bp, Homo sapien
cttttcactcttgaatacatatcca

SEQ ID NO: 5286689 - DNA, 25 bp, Homo sapien
gtatcccataactatttcttcttag

SEQ ID NO: 5286690 - DNA, 25 bp, Homo sapien
ccctcagtagaaacttcatgatgat

SEQ ID NO: 5286691 - DNA, 25 bp, Homo sapien
tcttcaccctcagtagaaacttcat

SEQ ID NO: 5286692 - DNA, 25 bp, Homo sapien
aaagattgctacagctaatatactc

SEQ ID NO: 5286693 - DNA, 25 bp, Homo sapien
agattgctacagctaatatactcac

SEQ ID NO: 5286694 - DNA, 25 bp, Homo sapien
aagattgctacagctaatatactca

SEQ ID NO: 5286695 - DNA, 25 bp, Homo sapien
cgattctgtcggatgttaatgttgt

SEQ ID NO: 5286696 - DNA, 25 bp, Homo sapien
tgtccacattcgaagtcgttctact

SEQ ID NO: 5286697 - DNA, 25 bp, Homo sapien
tgttgtccatttcctgtagtacagc

SEQ ID NO: 5286698 - DNA, 25 bp, Homo sapien
gtcgttctacttctcctgatcgacg

SEQ ID NO: 5286699 - DNA, 25 bp, Homo sapien
atctgtttttcctggaacgacaact

SEQ ID NO: 5286700 - DNA, 25 bp, Homo sapien
tagttgatcaaataacaaactctgg

SEQ ID NO: 5286701 - DNA, 25 bp, Homo sapien
actctggttcacactttcaaatctg

SEQ ID NO: 5286702 - DNA, 25 bp, Homo sapien
tatacaagaaaggtccccatctccc

SEQ ID NO: 5286703 - DNA, 25 bp, Homo sapien
aagccactatgtccatttggtaatg

SEQ ID NO: 5286704 - DNA, 25 bp, Homo sapien
ccactatgtccatttggtaatgtag

SEQ ID NO: 5286705 - DNA, 25 bp, Homo sapien
agccactatgtccatttggtaatgt

SEQ ID NO: 5286706 - DNA, 25 bp, Homo sapien
gccactatgtccatttggtaatgta

SEQ ID NO: 5286707 - DNA, 25 bp, Homo sapien
tggcctgtccagttgataagttcca

SEQ ID NO: 5286708 - DNA, 25 bp, Homo sapien
gctgaccagtacttcgtgattttga

SEQ ID NO: 5286709 - DNA, 25 bp, Homo sapien
gctggaggagatacgtggctatcac

SEQ ID NO: 5286710 - DNA, 25 bp, Homo sapien
tgtctttgcaaacagaatcaggttg

SEQ ID NO: 5286711 - DNA, 25 bp, Homo sapien
tattcaagacgtagtcactggaccg

SEQ ID NO: 5286712 - DNA, 25 bp, Homo sapien
cagactcccaaggttaaagtgtgca

SEQ ID NO: 5286713 - DNA, 25 bp, Homo sapien
tgggaagggcctgtctcaatcggct

SEQ ID NO: 5286714 - DNA, 25 bp, Homo sapien
ggtctgtgaaccaacaacatgggca

SEQ ID NO: 5286715 - DNA, 25 bp, Homo sapien
gatttggctctatgacagagacctc

SEQ ID NO: 5286716 - DNA, 25 bp, Homo sapien
cttagtacacaaaagtctgaggacc

SEQ ID NO: 5286717 - DNA, 25 bp, Homo sapien
tgtcacgggagggtttcaatcttga

SEQ ID NO: 5286718 - DNA, 25 bp, Homo sapien
tctgaggacctctggcatataacat

SEQ ID NO: 5286719 - DNA, 25 bp, Homo sapien
tctgagttgaagtgagttaaggagc

SEQ ID NO: 5286720 - DNA, 25 bp, Homo sapien
tgagttaaggagcagagacagatat

SEQ ID NO: 5286721 - DNA, 25 bp, Homo sapien
taaggagcagagacagatatgaaac

SEQ ID NO: 5286722 - DNA, 25 bp, Homo sapien
aagtgagttaaggagcagagacaga

SEQ ID NO: 5286723 - DNA, 25 bp, Homo sapien
aagagatgagatattattgccaggc

SEQ ID NO: 5286724 - DNA, 25 bp, Homo sapien
gatgagatattattgccaggctgga

SEQ ID NO: 5286725 - DNA, 25 bp, Homo sapien
tttaagagatgagatattattgcca

SEQ ID NO: 5286726 - DNA, 25 bp, Homo sapien
gagatgagatattattgccaggctg

SEQ ID NO: 5286727 - DNA, 25 bp, Homo sapien
tgacagggtgagatcttatcccaaa

SEQ ID NO: 5286728 - DNA, 25 bp, Homo sapien
gatgacagggtgagatcttatccca

SEQ ID NO: 5286729 - DNA, 25 bp, Homo sapien
agggtgagatcttatcccaaaaaga

SEQ ID NO: 5286730 - DNA, 25 bp, Homo sapien
gacagggtgagatcttatcccaaaa

SEQ ID NO: 5286731 - DNA, 25 bp, Homo sapien
agcagggccggcacttccgagcctc

SEQ ID NO: 5286732 - DNA, 25 bp, Homo sapien
tcttcacacaaaagagccgggccag

SEQ ID NO: 5286733 - DNA, 25 bp, Homo sapien
aaggggccagcgtcgcggcccttct

SEQ ID NO: 5286734 - DNA, 25 bp, Homo sapien
cccgagcggtctccactgtaggctt

SEQ ID NO: 5286735 - DNA, 25 bp, Homo sapien
gaaatggctgctgcctccggtcgcc

SEQ ID NO: 5286736 - DNA, 25 bp, Homo sapien
gagagagctcttccgggtgttcacc

SEQ ID NO: 5286737 - DNA, 25 bp, Homo sapien
tggcctcatccagagtgacgccggc

SEQ ID NO: 5286738 - DNA, 25 bp, Homo sapien
accaggagacttggacccgagaagg

SEQ ID NO: 5286739 - DNA, 25 bp, Homo sapien
cagaggaagggaagtcggcgtgagc

SEQ ID NO: 5286740 - DNA, 25 bp, Homo sapien
cgggcaatgagagacgagccggccc

SEQ ID NO: 5286741 - DNA, 25 bp, Homo sapien
agcgcagacgagcacaagagagagc

SEQ ID NO: 5286742 - DNA, 25 bp, Homo sapien
cgttctcgctctcgagctccgtgcg

SEQ ID NO: 5286743 - DNA, 25 bp, Homo sapien
caacgagaccgcttccggccgcagc

SEQ ID NO: 5286744 - DNA, 25 bp, Homo sapien
ggccaacgagaccgcttccggccgc

SEQ ID NO: 5286745 - DNA, 25 bp, Homo sapien
gcagggccaacgagaccgcttccgg

SEQ ID NO: 5286746 - DNA, 25 bp, Homo sapien
cgcagggccaacgagaccgcttccg

SEQ ID NO: 5286747 - DNA, 25 bp, Homo sapien
gtgggaagatggcttgagttcaggc

SEQ ID NO: 5286748 - DNA, 25 bp, Homo sapien
aagatggcttgagttcaggcattca

SEQ ID NO: 5286749 - DNA, 25 bp, Homo sapien
ggaagatggcttgagttcaggcatt

SEQ ID NO: 5286750 - DNA, 25 bp, Homo sapien
tgggaagatggcttgagttcaggca

SEQ ID NO: 5286751 - DNA, 25 bp, Homo sapien
taccaattggtaaagaggatgcagg

SEQ ID NO: 5286752 - DNA, 25 bp, Homo sapien
aactggatggttggcagggctacca

SEQ ID NO: 5286753 - DNA, 25 bp, Homo sapien
cagggctaccaattggtaaagagga

SEQ ID NO: 5286754 - DNA, 25 bp, Homo sapien
ggttggcagggctaccaattggtaa

SEQ ID NO: 5286755 - DNA, 25 bp, Homo sapien
tcccctacccatgaaggcagctagc

SEQ ID NO: 5286756 - DNA, 25 bp, Homo sapien
gtacccaggtaagcacactctgggt

SEQ ID NO: 5286757 - DNA, 25 bp, Homo sapien
ggttctctggtgagcacacaccgag

SEQ ID NO: 5286758 - DNA, 25 bp, Homo sapien
tcagaatgcagggatgtctctccat

SEQ ID NO: 5286759 - DNA, 25 bp, Homo sapien
tcgcagtccagtgatacaaagtatg

SEQ ID NO: 5286760 - DNA, 25 bp, Homo sapien
aaaggcgaacgctgcacgatcgcag

SEQ ID NO: 5286761 - DNA, 25 bp, Homo sapien
tatgcctattagtgacttcacccga

SEQ ID NO: 5286762 - DNA, 25 bp, Homo sapien
cagcaatgatgaatgttcgtgtggc

SEQ ID NO: 5286763 - DNA, 25 bp, Homo sapien
tcctctgcttggtagactgacattc

SEQ ID NO: 5286764 - DNA, 25 bp, Homo sapien
tactgggcaatagctgactgattca

SEQ ID NO: 5286765 - DNA, 25 bp, Homo sapien
tctgcttgggacaacctgctctgtt

SEQ ID NO: 5286766 - DNA, 25 bp, Homo sapien
acttgaggactctatgccagtgacc

SEQ ID NO: 5286767 - DNA, 25 bp, Homo sapien
cgcccattgcctagattcatggctg

SEQ ID NO: 5286768 - DNA, 25 bp, Homo sapien
gaaaagattttcttcgcccattgcc

SEQ ID NO: 5286769 - DNA, 25 bp, Homo sapien
aaagttatataattgggtccagcag

SEQ ID NO: 5286770 - DNA, 25 bp, Homo sapien
tcatggctgagacccctttaacaaa

SEQ ID NO: 5286771 - DNA, 25 bp, Homo sapien
ttccaaagttactgcgagcacctga

SEQ ID NO: 5286772 - DNA, 25 bp, Homo sapien
gcgagcacctgattgccatagcaca

SEQ ID NO: 5286773 - DNA, 25 bp, Homo sapien
tggattggcagggctattcacaggt

SEQ ID NO: 5286774 - DNA, 25 bp, Homo sapien
agttactgcgagcacctgattgcca

SEQ ID NO: 5286775 - DNA, 25 bp, Homo sapien
taaaaccagaatgatcaacagagtg

SEQ ID NO: 5286776 - DNA, 25 bp, Homo sapien
aattgtgtagctcagtatagtatca

SEQ ID NO: 5286777 - DNA, 25 bp, Homo sapien
tgcctactcacatttctacacttta

SEQ ID NO: 5286778 - DNA, 25 bp, Homo sapien
gtatcaagattaatctgcctactca

SEQ ID NO: 5286779 - DNA, 25 bp, Homo sapien
cagggatccctcaggcacactttga

SEQ ID NO: 5286780 - DNA, 25 bp, Homo sapien
cagtgccctgaatgggtcttgggaa

SEQ ID NO: 5286781 - DNA, 25 bp, Homo sapien
gaaaacacctctgtatactggtgaa

SEQ ID NO: 5286782 - DNA, 25 bp, Homo sapien
cgatttagtgagaaaagtggccggt

SEQ ID NO: 5286783 - DNA, 25 bp, Homo sapien
ttagaaaatgtttgtccattctaaa

SEQ ID NO: 5286784 - DNA, 25 bp, Homo sapien
tacattctgtcactctctatttgcc

SEQ ID NO: 5286785 - DNA, 25 bp, Homo sapien
ttagcagtaactccctagcccagtc

SEQ ID NO: 5286786 - DNA, 25 bp, Homo sapien
cagtcccaagcaactacaaatgtac

SEQ ID NO: 5286787 - DNA, 25 bp, Homo sapien
gtccacgggctcatcgtgtccggcg

SEQ ID NO: 5286788 - DNA, 25 bp, Homo sapien
tggagatggcgggaacactgatggg

SEQ ID NO: 5286789 - DNA, 25 bp, Homo sapien
actgtccacgggctcatcgtgtccg

SEQ ID NO: 5286790 - DNA, 25 bp, Homo sapien
tgtggagatggcgggaacactgatg

SEQ ID NO: 5286791 - DNA, 25 bp, Homo sapien
cattagtgattttattgaagactta

SEQ ID NO: 5286792 - DNA, 25 bp, Homo sapien
accattagtgattttattgaagact

SEQ ID NO: 5286793 - DNA, 25 bp, Homo sapien
ccattagtgattttattgaagactt

SEQ ID NO: 5286794 - DNA, 25 bp, Homo sapien
aaccattagtgattttattgaagac

SEQ ID NO: 5286795 - DNA, 25 bp, Homo sapien
taactaagggagctgactactggga

SEQ ID NO: 5286796 - DNA, 25 bp, Homo sapien
tatgcgccgtgactgaaatctgtga

SEQ ID NO: 5286797 - DNA, 25 bp, Homo sapien
tttggacaagggacacaaagcctca

SEQ ID NO: 5286798 - DNA, 25 bp, Homo sapien
cagtaggacttacctgggctcgaca

SEQ ID NO: 5286799 - DNA, 25 bp, Homo sapien
tctgaagagctacacagcaaggaca

SEQ ID NO: 5286800 - DNA, 25 bp, Homo sapien
ttggcgagtgtccagtgtcaagcag

SEQ ID NO: 5286801 - DNA, 25 bp, Homo sapien
caagcgcttcgcctgagtgcagtgg

SEQ ID NO: 5286802 - DNA, 25 bp, Homo sapien
gcaggccttgtttgtaatggtctca

SEQ ID NO: 5286803 - DNA, 25 bp, Homo sapien
catctcttatgattatttcctgtgt

SEQ ID NO: 5286804 - DNA, 25 bp, Homo sapien
ctacatggttacaacagccagtggt

SEQ ID NO: 5286805 - DNA, 25 bp, Homo sapien
aagacatctgacctggacaggctgc

SEQ ID NO: 5286806 - DNA, 25 bp, Homo sapien
gcaaggcctgtaaagactttaagag

SEQ ID NO: 5286807 - DNA, 25 bp, Homo sapien
taacgggataaagccctcactgtca

SEQ ID NO: 5286808 - DNA, 25 bp, Homo sapien
ttaacgggataaagccctcactgtc

SEQ ID NO: 5286809 - DNA, 25 bp, Homo sapien
aacgggataaagccctcactgtcag

SEQ ID NO: 5286810 - DNA, 25 bp, Homo sapien
gagccttagtttaccatcacagaga

SEQ ID NO: 5286811 - DNA, 25 bp, Homo sapien
gcaccgctcttttttcaacaacagg

SEQ ID NO: 5286812 - DNA, 25 bp, Homo sapien
caacaacaggacctagataataagg

SEQ ID NO: 5286813 - DNA, 25 bp, Homo sapien
agtctgctgaactgtactgagcctt

SEQ ID NO: 5286814 - DNA, 25 bp, Homo sapien
tatagtggtagttcctcaaaggaga

SEQ ID NO: 5286815 - DNA, 25 bp, Homo sapien
caggagcttttatgtatagtggtag

SEQ ID NO: 5286816 - DNA, 25 bp, Homo sapien
tgcaggagcttttatgtatagtggt

SEQ ID NO: 5286817 - DNA, 25 bp, Homo sapien
tttatgtatagtggtagttcctcaa

SEQ ID NO: 5286818 - DNA, 25 bp, Homo sapien
tgggtaacaggctcagcatctagag

SEQ ID NO: 5286819 - DNA, 25 bp, Homo sapien
tttctttgaggcaaacgaggaggct

SEQ ID NO: 5286820 - DNA, 25 bp, Homo sapien
gagccatcacagatactagacagag

SEQ ID NO: 5286821 - DNA, 25 bp, Homo sapien
taagttcagaaagacaccgttgcat

SEQ ID NO: 5286822 - DNA, 25 bp, Homo sapien
ggctttcacctgatgttattgaagg

SEQ ID NO: 5286823 - DNA, 25 bp, Homo sapien
tagagtaggtagtctggctttcacc

SEQ ID NO: 5286824 - DNA, 25 bp, Homo sapien
caagctaatggcatactgatcagac

SEQ ID NO: 5286825 - DNA, 25 bp, Homo sapien
tttaacggagcactgaaagtagagt

SEQ ID NO: 5286826 - DNA, 25 bp, Homo sapien
ccagaatgcctggaatagtgacttt

SEQ ID NO: 5286827 - DNA, 25 bp, Homo sapien
ggccagttcctgtcaagtagtcctt

SEQ ID NO: 5286828 - DNA, 25 bp, Homo sapien
cactgccactacgtgggctttaaga

SEQ ID NO: 5286829 - DNA, 25 bp, Homo sapien
taaatgctatcagatcaggaaccag

SEQ ID NO: 5286830 - DNA, 25 bp, Homo sapien
aacatgcacagtgaatgcggccctg

SEQ ID NO: 5286831 - DNA, 25 bp, Homo sapien
agagtcttctgagcgctgtcccaaa

SEQ ID NO: 5286832 - DNA, 25 bp, Homo sapien
caataactggtaaagcatacggagt

SEQ ID NO: 5286833 - DNA, 25 bp, Homo sapien
tagctatagcaacctgtgagtccac

SEQ ID NO: 5286834 - DNA, 25 bp, Homo sapien
ttgcttgactccatagggctgggac

SEQ ID NO: 5286835 - DNA, 25 bp, Homo sapien
tgagcagtcaacacagtcagaatag

SEQ ID NO: 5286836 - DNA, 25 bp, Homo sapien
gaaaatggagacatcctgagcagtc

SEQ ID NO: 5286837 - DNA, 25 bp, Homo sapien
gaacaggtgtatcatctgcaacagg

SEQ ID NO: 5286838 - DNA, 25 bp, Homo sapien
cgcattcagtccagtcctgagtagt

SEQ ID NO: 5286839 - DNA, 25 bp, Homo sapien
caaggccatggatcggatgcactgc

SEQ ID NO: 5286840 - DNA, 25 bp, Homo sapien
gccgcaaatcagttaggacaacttg

SEQ ID NO: 5286841 - DNA, 25 bp, Homo sapien
gcactgcttgatgcaacgcattcag

SEQ ID NO: 5286842 - DNA, 25 bp, Homo sapien
gcctcacaaaaacaccaatctctct

SEQ ID NO: 5286843 - DNA, 25 bp, Homo sapien
aggtctcactgcctcacaaaaacac

SEQ ID NO: 5286844 - DNA, 25 bp, Homo sapien
aaaacaccaatctctctgtggccgc

SEQ ID NO: 5286845 - DNA, 25 bp, Homo sapien
caatctctctgtggccgcccaacat

SEQ ID NO: 5286846 - DNA, 25 bp, Homo sapien
catctttctttaacaacacagccag

SEQ ID NO: 5286847 - DNA, 25 bp, Homo sapien
tctggccgcagcctatggatttagt

SEQ ID NO: 5286848 - DNA, 25 bp, Homo sapien
tgaccctcacagtacagtcgacaat

SEQ ID NO: 5286849 - DNA, 25 bp, Homo sapien
agtgcgtcccttaggcttcttcaga

SEQ ID NO: 5286850 - DNA, 25 bp, Homo sapien
aggacctgctctcggatacccgctg

SEQ ID NO: 5286851 - DNA, 25 bp, Homo sapien
cctcggtcgcttccctgcgggccgg

SEQ ID NO: 5286852 - DNA, 25 bp, Homo sapien
tcggatacccgctgctcggggacct

SEQ ID NO: 5286853 - DNA, 25 bp, Homo sapien
ggcctcccctcggtcgcttccctgc

SEQ ID NO: 5286854 - DNA, 25 bp, Homo sapien
aagcaggtcattttgaacctcaaat

SEQ ID NO: 5286855 - DNA, 25 bp, Homo sapien
cataatgtattccaatatgtatcaa

SEQ ID NO: 5286856 - DNA, 25 bp, Homo sapien
aaaaaggtggtagttgtcattcgtg

SEQ ID NO: 5286857 - DNA, 25 bp, Homo sapien
tatgtatcaaagtttcaagcaggtc

SEQ ID NO: 5286858 - DNA, 25 bp, Homo sapien
ttattttggtggatctgtgttgatg

SEQ ID NO: 5286859 - DNA, 25 bp, Homo sapien
ttggtggatctgtgttgatgccata

SEQ ID NO: 5286860 - DNA, 25 bp, Homo sapien
tttggtggatctgtgttgatgccat

SEQ ID NO: 5286861 - DNA, 25 bp, Homo sapien
atgtggtaagcaccaaaattaaatt

SEQ ID NO: 5286862 - DNA, 25 bp, Homo sapien
ctggaaatgtggtaagcaccaaaat

SEQ ID NO: 5286863 - DNA, 25 bp, Homo sapien
gaaatgtggtaagcaccaaaattaa

SEQ ID NO: 5286864 - DNA, 25 bp, Homo sapien
tggaaatgtggtaagcaccaaaatt

SEQ ID NO: 5286865 - DNA, 25 bp, Homo sapien
gttacaaacattgaatcccgatagg

SEQ ID NO: 5286866 - DNA, 25 bp, Homo sapien
tcatagaccacataagctgttcctc

SEQ ID NO: 5286867 - DNA, 25 bp, Homo sapien
gaatcccgataggtgatcacatgca

SEQ ID NO: 5286868 - DNA, 25 bp, Homo sapien
tcctctagtttcaggtgtgttcccc

SEQ ID NO: 5286869 - DNA, 25 bp, Homo sapien
tgaggagcaacgcaacgctaaattg

SEQ ID NO: 5286870 - DNA, 25 bp, Homo sapien
gaagtttgaggagcaacgcaacgct

SEQ ID NO: 5286871 - DNA, 25 bp, Homo sapien
gtagagaagtttgaggagcaacgca

SEQ ID NO: 5286872 - DNA, 25 bp, Homo sapien
acgcaacgctaaattgcaggcagca

SEQ ID NO: 5286873 - DNA, 25 bp, Homo sapien
tcatgtatccagtgccatcaggctc

SEQ ID NO: 5286874 - DNA, 25 bp, Homo sapien
agcgtgtaacttagcctctgtgagc

SEQ ID NO: 5286875 - DNA, 25 bp, Homo sapien
tacatgccaggtagggtcaaaccaa

SEQ ID NO: 5286876 - DNA, 25 bp, Homo sapien
gaaggttggtcaccctagtgccagg

SEQ ID NO: 5286877 - DNA, 25 bp, Homo sapien
aagggttgtcgcactgcacacagca

SEQ ID NO: 5286878 - DNA, 25 bp, Homo sapien
ctcattgagctggatcattagggtc

SEQ ID NO: 5286879 - DNA, 25 bp, Homo sapien
agggtggcctcatcgtcagctataa

SEQ ID NO: 5286880 - DNA, 25 bp, Homo sapien
cattagggtctcagtaggttttctc

SEQ ID NO: 5286881 - DNA, 25 bp, Homo sapien
gacgaataggtccatatttcccaaa

SEQ ID NO: 5286882 - DNA, 25 bp, Homo sapien
tttgacgaataggtccatatttccc

SEQ ID NO: 5286883 - DNA, 25 bp, Homo sapien
tctgatttgacgaataggtccatat

SEQ ID NO: 5286884 - DNA, 25 bp, Homo sapien
actctgatttgacgaataggtccat

SEQ ID NO: 5286885 - DNA, 25 bp, Homo sapien
gattttgtatggcaaatttcttata

SEQ ID NO: 5286886 - DNA, 25 bp, Homo sapien
gcaaatttcttatatacaatatccg

SEQ ID NO: 5286887 - DNA, 25 bp, Homo sapien
ttcttatatacaatatccgatttac

SEQ ID NO: 5286888 - DNA, 25 bp, Homo sapien
tgtatggcaaatttcttatatacaa

SEQ ID NO: 5286889 - DNA, 25 bp, Homo sapien
aattcttaatgatacgtaataataa

SEQ ID NO: 5286890 - DNA, 25 bp, Homo sapien
taaaaagccaagaataagaggtata

SEQ ID NO: 5286891 - DNA, 25 bp, Homo sapien
tctgaaaatgggcagatctttgaaa

SEQ ID NO: 5286892 - DNA, 25 bp, Homo sapien
taaaatgagaaatacgtattgttat

SEQ ID NO: 5286893 - DNA, 25 bp, Homo sapien
gatgaccctgattcttgtttcttgg

SEQ ID NO: 5286894 - DNA, 25 bp, Homo sapien
tcatctatatccaactactttccct

SEQ ID NO: 5286895 - DNA, 25 bp, Homo sapien
tacgccaaccttcatctactcaaaa

SEQ ID NO: 5286896 - DNA, 25 bp, Homo sapien
taacacctgagttgggctgtaccct

SEQ ID NO: 5286897 - DNA, 25 bp, Homo sapien
aacactagaatgtaagcagaaggac

SEQ ID NO: 5286898 - DNA, 25 bp, Homo sapien
tcactcggcctaacttcatcttaca

SEQ ID NO: 5286899 - DNA, 25 bp, Homo sapien
aagtttccgtaacactgtactctca

SEQ ID NO: 5286900 - DNA, 25 bp, Homo sapien
cacctctaagcgttttactgttgac

SEQ ID NO: 5286901 - DNA, 25 bp, Homo sapien
gaattatgtcccacatggcaagcag

SEQ ID NO: 5286902 - DNA, 25 bp, Homo sapien
tccgaaaagcaccatgatctgaggg

SEQ ID NO: 5286903 - DNA, 25 bp, Homo sapien
ggagataatcctaacgccaggtcct

SEQ ID NO: 5286904 - DNA, 25 bp, Homo sapien
caggtccttaggtgcgggtcaagca

SEQ ID NO: 5286905 - DNA, 25 bp, Homo sapien
ctataggggtaacactatcactgac

SEQ ID NO: 5286906 - DNA, 25 bp, Homo sapien
caaggagcatatctctgaggatggg

SEQ ID NO: 5286907 - DNA, 25 bp, Homo sapien
ccggatagtgtcttcgctgacagga

SEQ ID NO: 5286908 - DNA, 25 bp, Homo sapien
gataggaattctggagttctccgct

SEQ ID NO: 5286909 - DNA, 25 bp, Homo sapien
tccacgccgctaagaaagtcaaacc

SEQ ID NO: 5286910 - DNA, 25 bp, Homo sapien
gccctcttggccgcttgcatcgcca

SEQ ID NO: 5286911 - DNA, 25 bp, Homo sapien
ccctcttggccgcttgcatcgccat

SEQ ID NO: 5286912 - DNA, 25 bp, Homo sapien
tcgccctcttggccgcttgcatcgc

SEQ ID NO: 5286913 - DNA, 25 bp, Homo sapien
gttcgccctcttggccgcttgcatc

SEQ ID NO: 5286914 - DNA, 25 bp, Homo sapien
gctgttacagcggaatagcgccgtc

SEQ ID NO: 5286915 - DNA, 25 bp, Homo sapien
tccaaaaggcgagatgttccggtcg

SEQ ID NO: 5286916 - DNA, 25 bp, Homo sapien
tacaccgcgttagatgcaggacatc

SEQ ID NO: 5286917 - DNA, 25 bp, Homo sapien
taaaaccgagcctgagcgagactcg

SEQ ID NO: 5286918 - DNA, 25 bp, Homo sapien
ctgagcagaggaacccgggtggaga

SEQ ID NO: 5286919 - DNA, 25 bp, Homo sapien
cagaggaacccgggtggagagggcg

SEQ ID NO: 5286920 - DNA, 25 bp, Homo sapien
gcagaggaacccgggtggagagggc

SEQ ID NO: 5286921 - DNA, 25 bp, Homo sapien
gagcagaggaacccgggtggagagg

SEQ ID NO: 5286922 - DNA, 25 bp, Homo sapien
tctggaggaagcaccgggtttcttg

SEQ ID NO: 5286923 - DNA, 25 bp, Homo sapien
agctttaaacggctctggaggaagc

SEQ ID NO: 5286924 - DNA, 25 bp, Homo sapien
tgtctattgtgaatcttctccaggt

SEQ ID NO: 5286925 - DNA, 25 bp, Homo sapien
caccgggtttcttggcctgtctatt

SEQ ID NO: 5286926 - DNA, 25 bp, Homo sapien
ctatgttcttgttggcctccatgta

SEQ ID NO: 5286927 - DNA, 25 bp, Homo sapien
ttcggtcactgggtagattctgtcc

SEQ ID NO: 5286928 - DNA, 25 bp, Homo sapien
tttgctccgtgaaagcattcaccag

SEQ ID NO: 5286929 - DNA, 25 bp, Homo sapien
gtccagaaccggcagcagacgttgg

SEQ ID NO: 5286930 - DNA, 25 bp, Homo sapien
ggcagaatttgctccgtgaaagcat

SEQ ID NO: 5286931 - DNA, 25 bp, Homo sapien
gatcatcagcctggggagagagcct

SEQ ID NO: 5286932 - DNA, 25 bp, Homo sapien
ctaagacaagggaaaggagatcatc

SEQ ID NO: 5286933 - DNA, 25 bp, Homo sapien
catcagcctggggagagagcctcac

SEQ ID NO: 5286934 - DNA, 25 bp, Homo sapien
agacaagggaaaggagatcatcagc

SEQ ID NO: 5286935 - DNA, 25 bp, Homo sapien
tcctcagccttcttgctctctctga

SEQ ID NO: 5286936 - DNA, 25 bp, Homo sapien
cttcttgctctctctgaagccacgt

SEQ ID NO: 5286937 - DNA, 25 bp, Homo sapien
agccttcttgctctctctgaagcca

SEQ ID NO: 5286938 - DNA, 25 bp, Homo sapien
tcttgctctctctgaagccacgtat

SEQ ID NO: 5286939 - DNA, 25 bp, Homo sapien
atattgttaattttgaggtgaaagc

SEQ ID NO: 5286940 - DNA, 25 bp, Homo sapien
tctcttcttgcatgtagcaagtcat

SEQ ID NO: 5286941 - DNA, 25 bp, Homo sapien
tctcagaatatgtccgataggtata

SEQ ID NO: 5286942 - DNA, 25 bp, Homo sapien
gcacacagggacacttaacccctca

SEQ ID NO: 5286943 - DNA, 25 bp, Homo sapien
caaactggtgatcagacttcctcgc

SEQ ID NO: 5286944 - DNA, 25 bp, Homo sapien
tgtccctagacctcagcaaactggt

SEQ ID NO: 5286945 - DNA, 25 bp, Homo sapien
tagagaacccatcgaccatcaagag

SEQ ID NO: 5286946 - DNA, 25 bp, Homo sapien
tcccagtaggatccgcctatgcagt

SEQ ID NO: 5286947 - DNA, 25 bp, Homo sapien
ctgaactgtagaagcagttgtttac

SEQ ID NO: 5286948 - DNA, 25 bp, Homo sapien
gggcttttatttaatcatctcttaa

SEQ ID NO: 5286949 - DNA, 25 bp, Homo sapien
cttaaattcctgctgaactgtagaa

SEQ ID NO: 5286950 - DNA, 25 bp, Homo sapien
gactggtggggcttttatttaatca

SEQ ID NO: 5286951 - DNA, 25 bp, Homo sapien
ccagccatccgggtgagttggatag

SEQ ID NO: 5286952 - DNA, 25 bp, Homo sapien
catccgggtgagttggatagcagct

SEQ ID NO: 5286953 - DNA, 25 bp, Homo sapien
ttggatagcagctgtgcccacacca

SEQ ID NO: 5286954 - DNA, 25 bp, Homo sapien
agaggaatagctccagccatccggg

SEQ ID NO: 5286955 - DNA, 25 bp, Homo sapien
tggattagcacatagtctccagcct

SEQ ID NO: 5286956 - DNA, 25 bp, Homo sapien
ctgcatggattagcacatagtctcc

SEQ ID NO: 5286957 - DNA, 25 bp, Homo sapien
catggattagcacatagtctccagc

SEQ ID NO: 5286958 - DNA, 25 bp, Homo sapien
gcatggattagcacatagtctccag

SEQ ID NO: 5286959 - DNA, 25 bp, Homo sapien
ggtcaatccctctgggataggcatg

SEQ ID NO: 5286960 - DNA, 25 bp, Homo sapien
tcaatccctctgggataggcatgag

SEQ ID NO: 5286961 - DNA, 25 bp, Homo sapien
gtcaatccctctgggataggcatga

SEQ ID NO: 5286962 - DNA, 25 bp, Homo sapien
cagctctgccacatgtccagatgcc

SEQ ID NO: 5286963 - DNA, 25 bp, Homo sapien
cccaaaatgttgctggctcctggag

SEQ ID NO: 5286964 - DNA, 25 bp, Homo sapien
gaggtgggtcatactggccttgtct

SEQ ID NO: 5286965 - DNA, 25 bp, Homo sapien
ctggaggtgggtcatactggccttg

SEQ ID NO: 5286966 - DNA, 25 bp, Homo sapien
ccggcttgtcaaagtgcacggctaa

SEQ ID NO: 5286967 - DNA, 25 bp, Homo sapien
taagtccgcccggttcagggcgctg

SEQ ID NO: 5286968 - DNA, 25 bp, Homo sapien
cggtcctcccggcttgtcaaagtgc

SEQ ID NO: 5286969 - DNA, 25 bp, Homo sapien
tgcattaagtccgcccggttcaggg

SEQ ID NO: 5286970 - DNA, 25 bp, Homo sapien
agagcaggacaacgccgaagaggat

SEQ ID NO: 5286971 - DNA, 25 bp, Homo sapien
ggccgctgtatcctcgcggagcagc

SEQ ID NO: 5286972 - DNA, 25 bp, Homo sapien
cgatcccacccggaacacagatggg

SEQ ID NO: 5286973 - DNA, 25 bp, Homo sapien
gatggcggtacagggctggatgcgg

SEQ ID NO: 5286974 - DNA, 25 bp, Homo sapien
ggctcctgcgggtcccggtgacaaa

SEQ ID NO: 5286975 - DNA, 25 bp, Homo sapien
ccaggcggcgccgagtggttctggc

SEQ ID NO: 5286976 - DNA, 25 bp, Homo sapien
cctccaccggaatggacggctggac

SEQ ID NO: 5286977 - DNA, 25 bp, Homo sapien
gcctctgcctccaccggaatggacg

SEQ ID NO: 5286978 - DNA, 25 bp, Homo sapien
gtagccggaggggtggggctaagca

SEQ ID NO: 5286979 - DNA, 25 bp, Homo sapien
gaggggtggggctaagcagaaccac

SEQ ID NO: 5286980 - DNA, 25 bp, Homo sapien
gccggaggggtggggctaagcagaa

SEQ ID NO: 5286981 - DNA, 25 bp, Homo sapien
gtggggctaagcagaaccaccctcc

SEQ ID NO: 5286982 - DNA, 25 bp, Homo sapien
agacccaacctcttggcgggcggat

SEQ ID NO: 5286983 - DNA, 25 bp, Homo sapien
ggcacatttatgtaacaggctggca

SEQ ID NO: 5286984 - DNA, 25 bp, Homo sapien
tctctctagggaacgagacccaacc

SEQ ID NO: 5286985 - DNA, 25 bp, Homo sapien
gcgattctagctctcacttcaagga

SEQ ID NO: 5286986 - DNA, 25 bp, Homo sapien
tagggcaaaaaacatgtctgaggat

SEQ ID NO: 5286987 - DNA, 25 bp, Homo sapien
tgtccaaaatcgaggaaaggtttga

SEQ ID NO: 5286988 - DNA, 25 bp, Homo sapien
gattcagagacacatcatccggata

SEQ ID NO: 5286989 - DNA, 25 bp, Homo sapien
catcatccggatacacatctgtcca

SEQ ID NO: 5286990 - DNA, 25 bp, Homo sapien
agggactggagattacacgctataa

SEQ ID NO: 5286991 - DNA, 25 bp, Homo sapien
ggagattacacgctataagaattct

SEQ ID NO: 5286992 - DNA, 25 bp, Homo sapien
ctggagattacacgctataagaatt

SEQ ID NO: 5286993 - DNA, 25 bp, Homo sapien
ggactggagattacacgctataaga

SEQ ID NO: 5286994 - DNA, 25 bp, Homo sapien
caaatctgtggtacttggccatcca

SEQ ID NO: 5286995 - DNA, 25 bp, Homo sapien
tagggtttgccacaaggagatgctg

SEQ ID NO: 5286996 - DNA, 25 bp, Homo sapien
ctctccaggtgctagggtctccgtg

SEQ ID NO: 5286997 - DNA, 25 bp, Homo sapien
tgaacggactagtggcaaggctacc

SEQ ID NO: 5286998 - DNA, 25 bp, Homo sapien
tacaagagcctcacagaaaggagcc

SEQ ID NO: 5286999 - DNA, 25 bp, Homo sapien
acctaaccctgagaaatgtcttgga

SEQ ID NO: 5287000 - DNA, 25 bp, Homo sapien
aaaggagcctcccaatagatatgct

SEQ ID NO: 5287001 - DNA, 25 bp, Homo sapien
caaggtgtgtaggagtacaagagcc

SEQ ID NO: 5287002 - DNA, 25 bp, Homo sapien
agatgggtcttcacgacaaccacac

SEQ ID NO: 5287003 - DNA, 25 bp, Homo sapien
tcttcacgacaaccacaccagtgtt

SEQ ID NO: 5287004 - DNA, 25 bp, Homo sapien
gttgctaccagaagatacagatggg

SEQ ID NO: 5287005 - DNA, 25 bp, Homo sapien
gctaggatacatgccctcagtgtaa

SEQ ID NO: 5287006 - DNA, 25 bp, Homo sapien
agagaatattcatctgcccggacac

SEQ ID NO: 5287007 - DNA, 25 bp, Homo sapien
ttcccttgaaatacagtccttctct

SEQ ID NO: 5287008 - DNA, 25 bp, Homo sapien
gtgttcggacatcactgggcgttac

SEQ ID NO: 5287009 - DNA, 25 bp, Homo sapien
tctcttcgggcttgcaaagggttct

SEQ ID NO: 5287010 - DNA, 25 bp, Homo sapien
atgaatagactgatgccctccctgc

SEQ ID NO: 5287011 - DNA, 25 bp, Homo sapien
taaaagtcatgtctgggctgggcac

SEQ ID NO: 5287012 - DNA, 25 bp, Homo sapien
gtgacagagactctacggccctgtg

SEQ ID NO: 5287013 - DNA, 25 bp, Homo sapien
tgcatcccaggctaagcaacaagag

SEQ ID NO: 5287014 - DNA, 25 bp, Homo sapien
agggctgcactgtccacatgcttgg

SEQ ID NO: 5287015 - DNA, 25 bp, Homo sapien
tgtccacatgcttggttcccaagag

SEQ ID NO: 5287016 - DNA, 25 bp, Homo sapien
ccaagagggtgtctaacaataagct

SEQ ID NO: 5287017 - DNA, 25 bp, Homo sapien
tggtgatgctacacacaagctccgc

SEQ ID NO: 5287018 - DNA, 25 bp, Homo sapien
tgaacgctgatcaacatcccaatgg

SEQ ID NO: 5287019 - DNA, 25 bp, Homo sapien
ggatggagagctaccctgctaagtt

SEQ ID NO: 5287020 - DNA, 25 bp, Homo sapien
tgacctgcatcagcgccagctatga

SEQ ID NO: 5287021 - DNA, 25 bp, Homo sapien
tacagggtgaaaacggtggtccatc

SEQ ID NO: 5287022 - DNA, 25 bp, Homo sapien
aacattcgcgcgttccgcagacgcg

SEQ ID NO: 5287023 - DNA, 25 bp, Homo sapien
tggtgagcggtgaattccctggcac

SEQ ID NO: 5287024 - DNA, 25 bp, Homo sapien
actcgctgtggaacccgcggcgcag

SEQ ID NO: 5287025 - DNA, 25 bp, Homo sapien
tccctggcaccgaggactcgaggga

SEQ ID NO: 5287026 - DNA, 25 bp, Homo sapien
gaaaagtgttgcaaatgggactccg

SEQ ID NO: 5287027 - DNA, 25 bp, Homo sapien
ggaggacttcgagccgctcagagct

SEQ ID NO: 5287028 - DNA, 25 bp, Homo sapien
ccactcgaggccaccaaagtcagaa

SEQ ID NO: 5287029 - DNA, 25 bp, Homo sapien
tcagagctcgaagactcgcgcagta

SEQ ID NO: 5287030 - DNA, 25 bp, Homo sapien
ggacgtgggaatccattccaaggga

SEQ ID NO: 5287031 - DNA, 25 bp, Homo sapien
cgtgggaatccattccaagggacgg

SEQ ID NO: 5287032 - DNA, 25 bp, Homo sapien
gacgtgggaatccattccaagggac

SEQ ID NO: 5287033 - DNA, 25 bp, Homo sapien
acgtgggaatccattccaagggacg

SEQ ID NO: 5287034 - DNA, 25 bp, Homo sapien
taagcatagctatcataactgtcct

SEQ ID NO: 5287035 - DNA, 25 bp, Homo sapien
cagccctcgactggccctgatgtgt

SEQ ID NO: 5287036 - DNA, 25 bp, Homo sapien
tgtcatctctaatctgctactaacc

SEQ ID NO: 5287037 - DNA, 25 bp, Homo sapien
tcaagttcactgactatttttatgt

SEQ ID NO: 5287038 - DNA, 25 bp, Homo sapien
cagcagatgaagtcacggtttagtc

SEQ ID NO: 5287039 - DNA, 25 bp, Homo sapien
catggagtctgccttatgcatatac

SEQ ID NO: 5287040 - DNA, 25 bp, Homo sapien
tgaatagcattcagtaacttcctgc

SEQ ID NO: 5287041 - DNA, 25 bp, Homo sapien
taattcctgaaccagttaggccgca

SEQ ID NO: 5287042 - DNA, 25 bp, Homo sapien
cagatagttcgtatatgtggaatcc

SEQ ID NO: 5287043 - DNA, 25 bp, Homo sapien
gatggatacttggatcgtttccacc

SEQ ID NO: 5287044 - DNA, 25 bp, Homo sapien
tgtattcaataagcagtgactcctc

SEQ ID NO: 5287045 - DNA, 25 bp, Homo sapien
ggtctgtttaaatttctgaggccca

SEQ ID NO: 5287046 - DNA, 25 bp, Homo sapien
tcagttccctgacttagctggtatt

SEQ ID NO: 5287047 - DNA, 25 bp, Homo sapien
ttccctgacttagctggtattgcag

SEQ ID NO: 5287048 - DNA, 25 bp, Homo sapien
tttatgtgtttctgtgtggcccaag

SEQ ID NO: 5287049 - DNA, 25 bp, Homo sapien
gcctcagttccctgacttagctggt

SEQ ID NO: 5287050 - DNA, 25 bp, Homo sapien
tccagcttgggcaacaagagcagaa

SEQ ID NO: 5287051 - DNA, 25 bp, Homo sapien
gcttgggcaacaagagcagaactct

SEQ ID NO: 5287052 - DNA, 25 bp, Homo sapien
cagcttgggcaacaagagcagaact

SEQ ID NO: 5287053 - DNA, 25 bp, Homo sapien
cttgggcaacaagagcagaactctg

SEQ ID NO: 5287054 - DNA, 25 bp, Homo sapien
tgtgtgtttagctccttttactgcc

SEQ ID NO: 5287055 - DNA, 25 bp, Homo sapien
gtgtgtttagctccttttactgcca

SEQ ID NO: 5287056 - DNA, 25 bp, Homo sapien
tgtgtttagctccttttactgccat

SEQ ID NO: 5287057 - DNA, 25 bp, Homo sapien
ttgtgtgtttagctccttttactgc

SEQ ID NO: 5287058 - DNA, 25 bp, Homo sapien
aaattttaacaagcgccaactctga

SEQ ID NO: 5287059 - DNA, 25 bp, Homo sapien
attttaacaagcgccaactctgagc

SEQ ID NO: 5287060 - DNA, 25 bp, Homo sapien
caaaattttaacaagcgccaactct

SEQ ID NO: 5287061 - DNA, 25 bp, Homo sapien
tttaacaagcgccaactctgagcca

SEQ ID NO: 5287062 - DNA, 25 bp, Homo sapien
ctattgcttggaatttctcaccgga

SEQ ID NO: 5287063 - DNA, 25 bp, Homo sapien
ggcacttccaagtgatcttcagaga

SEQ ID NO: 5287064 - DNA, 25 bp, Homo sapien
tatttcagtgtaaggcattctctgg

SEQ ID NO: 5287065 - DNA, 25 bp, Homo sapien
tctggctctaagcatctgatggaac

SEQ ID NO: 5287066 - DNA, 25 bp, Homo sapien
caggtgtgatggcacatacctgtaa

SEQ ID NO: 5287067 - DNA, 25 bp, Homo sapien
tggaggctgtagtgagccgagattg

SEQ ID NO: 5287068 - DNA, 25 bp, Homo sapien
atgagaattgcttgaaccctggagg

SEQ ID NO: 5287069 - DNA, 25 bp, Homo sapien
tcccagctacttgggaggctgaggc

SEQ ID NO: 5287070 - DNA, 25 bp, Homo sapien
caagtctctgttttggttagacgtc

SEQ ID NO: 5287071 - DNA, 25 bp, Homo sapien
aggaatggcaggaaccttgacagca

SEQ ID NO: 5287072 - DNA, 25 bp, Homo sapien
agcaggcatctcagacccttctagg

SEQ ID NO: 5287073 - DNA, 25 bp, Homo sapien
taggctgttgtcatgaacgtgactc

SEQ ID NO: 5287074 - DNA, 25 bp, Homo sapien
ttgactgtagctatgtcaaatcttg

SEQ ID NO: 5287075 - DNA, 25 bp, Homo sapien
caaatcttggttgtgataatgtacc

SEQ ID NO: 5287076 - DNA, 25 bp, Homo sapien
tacacctgatacaagataatatcct

SEQ ID NO: 5287077 - DNA, 25 bp, Homo sapien
agataatatcctgtatcttgactgt

SEQ ID NO: 5287078 - DNA, 25 bp, Homo sapien
gaagtcggtttcttcacatcagaat

SEQ ID NO: 5287079 - DNA, 25 bp, Homo sapien
taaaaccattcctcttacgttgtca

SEQ ID NO: 5287080 - DNA, 25 bp, Homo sapien
ttcgcattttcctgattggcccaaa

SEQ ID NO: 5287081 - DNA, 25 bp, Homo sapien
gagccggacgcgtcacttaaaacca

SEQ ID NO: 5287082 - DNA, 25 bp, Homo sapien
caccgcccgtttgctgtgaaatcaa

SEQ ID NO: 5287083 - DNA, 25 bp, Homo sapien
cgtattagtgtacatgcctcgataa

SEQ ID NO: 5287084 - DNA, 25 bp, Homo sapien
tgggcttcatcactgcgtttccgtt

SEQ ID NO: 5287085 - DNA, 25 bp, Homo sapien
tcgataaaagtccagaagggcggcg

SEQ ID NO: 5287086 - DNA, 25 bp, Homo sapien
gacattgatgaagcagtatgtgcaa

SEQ ID NO: 5287087 - DNA, 25 bp, Homo sapien
ggtaagagttggctccacgctgcat

SEQ ID NO: 5287088 - DNA, 25 bp, Homo sapien
gaaaattccattgtgaaggtaagag

SEQ ID NO: 5287089 - DNA, 25 bp, Homo sapien
taggtattagctagagaagacattg

SEQ ID NO: 5287090 - DNA, 25 bp, Homo sapien
cgtcctggtaccgaatagaaattct

SEQ ID NO: 5287091 - DNA, 25 bp, Homo sapien
tactacatgcatctgaggccatgcc

SEQ ID NO: 5287092 - DNA, 25 bp, Homo sapien
tcttgcaggatcactaaaaggtccc

SEQ ID NO: 5287093 - DNA, 25 bp, Homo sapien
tgcctctttctcatatgttcccaca

SEQ ID NO: 5287094 - DNA, 25 bp, Homo sapien
tagtgcgctttctactctaccagtt

SEQ ID NO: 5287095 - DNA, 25 bp, Homo sapien
tgatggtgaaggctagacacagagt

SEQ ID NO: 5287096 - DNA, 25 bp, Homo sapien
gaggtgtcaaagtctagtgcgcttt

SEQ ID NO: 5287097 - DNA, 25 bp, Homo sapien
tcctgatggtgaaggctagacacag

SEQ ID NO: 5287098 - DNA, 25 bp, Homo sapien
cgagtccctgagtcagtcctgtgga

SEQ ID NO: 5287099 - DNA, 25 bp, Homo sapien
tgagtgctggcaagtggaggcgccg

SEQ ID NO: 5287100 - DNA, 25 bp, Homo sapien
tgtcccaactacagccatagggatt

SEQ ID NO: 5287101 - DNA, 25 bp, Homo sapien
agtggaggcgccgttctgcctgact

SEQ ID NO: 5287102 - DNA, 25 bp, Homo sapien
gcctgactttctggtttgagcactc

SEQ ID NO: 5287103 - DNA, 25 bp, Homo sapien
tagacgctatttcagtatcaggccg

SEQ ID NO: 5287104 - DNA, 25 bp, Homo sapien
tgaacactaggacaaggcactgtac

SEQ ID NO: 5287105 - DNA, 25 bp, Homo sapien
tattcagtgcacgagtagacgctat

SEQ ID NO: 5287106 - DNA, 25 bp, Homo sapien
ggtggacacattcaaccgagcggta

SEQ ID NO: 5287107 - DNA, 25 bp, Homo sapien
gctgcaggtcaaaacggacccagac

SEQ ID NO: 5287108 - DNA, 25 bp, Homo sapien
aagctgcaggtcaaaacggacccag

SEQ ID NO: 5287109 - DNA, 25 bp, Homo sapien
tgcaggtcaaaacggacccagacct

SEQ ID NO: 5287110 - DNA, 25 bp, Homo sapien
aaagctgcaggtcaaaacggaccca

SEQ ID NO: 5287111 - DNA, 25 bp, Homo sapien
tcctgttctgttcgaatttttgcca

SEQ ID NO: 5287112 - DNA, 25 bp, Homo sapien
tgttctgttcgaatttttgccactg

SEQ ID NO: 5287113 - DNA, 25 bp, Homo sapien
ggtcatagggcctttgctttcctgt

SEQ ID NO: 5287114 - DNA, 25 bp, Homo sapien
agcagtcggcgggtcatagggcctt

SEQ ID NO: 5287115 - DNA, 25 bp, Homo sapien
taaagagctacatccggaagaagtg

SEQ ID NO: 5287116 - DNA, 25 bp, Homo sapien
caaggaacttcttttggctcatggc

SEQ ID NO: 5287117 - DNA, 25 bp, Homo sapien
ccaaagcgagatgacacaggcctgt

SEQ ID NO: 5287118 - DNA, 25 bp, Homo sapien
agctgaagcccctagatctggactc

SEQ ID NO: 5287119 - DNA, 25 bp, Homo sapien
cacttgggattgagtgtgtcctgga

SEQ ID NO: 5287120 - DNA, 25 bp, Homo sapien
tcaaacagggtgagacacagcacgt

SEQ ID NO: 5287121 - DNA, 25 bp, Homo sapien
ctgggagcccatgctgatttcacag

SEQ ID NO: 5287122 - DNA, 25 bp, Homo sapien
cacagcacgtcttggtagagatcct

SEQ ID NO: 5287123 - DNA, 25 bp, Homo sapien
tccgcacggaacaatcctgggtgag

SEQ ID NO: 5287124 - DNA, 25 bp, Homo sapien
catgtggtgcatgcaggtaaaacga

SEQ ID NO: 5287125 - DNA, 25 bp, Homo sapien
taaaacgaagcgactgacagtgccc

SEQ ID NO: 5287126 - DNA, 25 bp, Homo sapien
gtcactcgagaccatggcagcagga

SEQ ID NO: 5287127 - DNA, 25 bp, Homo sapien
aatgcctgaagtcttttgggagcgg

SEQ ID NO: 5287128 - DNA, 25 bp, Homo sapien
gcccaatgcctgaagtcttttggga

SEQ ID NO: 5287129 - DNA, 25 bp, Homo sapien
ccatcaggcgcccaatgcctgaagt

SEQ ID NO: 5287130 - DNA, 25 bp, Homo sapien
caggcgcccaatgcctgaagtcttt

SEQ ID NO: 5287131 - DNA, 25 bp, Homo sapien
aaccataacactaccggctccctgt

SEQ ID NO: 5287132 - DNA, 25 bp, Homo sapien
gtatccctcgcttatgagcagccca

SEQ ID NO: 5287133 - DNA, 25 bp, Homo sapien
tgctgggtctgaaatcgtgtgtaat

SEQ ID NO: 5287134 - DNA, 25 bp, Homo sapien
gaagcccctgcttgctctttctgcc

SEQ ID NO: 5287135 - DNA, 25 bp, Homo sapien
gaccacactactgtccacagagggt

SEQ ID NO: 5287136 - DNA, 25 bp, Homo sapien
ggaaaagccgatgtgtgatgtggga

SEQ ID NO: 5287137 - DNA, 25 bp, Homo sapien
ggccagggaccacactactgtccac

SEQ ID NO: 5287138 - DNA, 25 bp, Homo sapien
cttgggaaaagccgatgtgtgatgt

SEQ ID NO: 5287139 - DNA, 25 bp, Homo sapien
tcttcttctcggtgtcgatgtactg

SEQ ID NO: 5287140 - DNA, 25 bp, Homo sapien
atgtactgctcagacgccgccttga

SEQ ID NO: 5287141 - DNA, 25 bp, Homo sapien
ggtaagctttctcacgcttcttctt

SEQ ID NO: 5287142 - DNA, 25 bp, Homo sapien
tctcggtgtcgatgtactgctcaga

SEQ ID NO: 5287143 - DNA, 25 bp, Homo sapien
tggctgaccacaaaatgccaggcac

SEQ ID NO: 5287144 - DNA, 25 bp, Homo sapien
aaaatgccaggcactcgcaaggcgc

SEQ ID NO: 5287145 - DNA, 25 bp, Homo sapien
ccaggcactcgcaaggcgctgggac

SEQ ID NO: 5287146 - DNA, 25 bp, Homo sapien
cttggctgaccacaaaatgccaggc

SEQ ID NO: 5287147 - DNA, 25 bp, Homo sapien
ccacggatgatacctgtcacgaggg

SEQ ID NO: 5287148 - DNA, 25 bp, Homo sapien
cagatgatgcattggccccacggat

SEQ ID NO: 5287149 - DNA, 25 bp, Homo sapien
gggttctagcgcacacagaggagca

SEQ ID NO: 5287150 - DNA, 25 bp, Homo sapien
ctgcagggactgtagcagggcctca

SEQ ID NO: 5287151 - DNA, 25 bp, Homo sapien
tgcagtgaccaaggcctaccatggg

SEQ ID NO: 5287152 - DNA, 25 bp, Homo sapien
gcagagggagacgtccaggccttct

SEQ ID NO: 5287153 - DNA, 25 bp, Homo sapien
ttctcccagagttcaaggcaggcca

SEQ ID NO: 5287154 - DNA, 25 bp, Homo sapien
ttaagcacggctggagatgggttta

SEQ ID NO: 5287155 - DNA, 25 bp, Homo sapien
ctctcattaatgttgtctgttcgga

SEQ ID NO: 5287156 - DNA, 25 bp, Homo sapien
tgttcggagggtgtagacccgatca

SEQ ID NO: 5287157 - DNA, 25 bp, Homo sapien
ttgtctgttcggagggtgtagaccc

SEQ ID NO: 5287158 - DNA, 25 bp, Homo sapien
tagacccgatcaatgtgggaaatgt

SEQ ID NO: 5287159 - DNA, 25 bp, Homo sapien
cattgaagaggaatccgtgcagttc

SEQ ID NO: 5287160 - DNA, 25 bp, Homo sapien
ttgaattgagcattggacttcgagc

SEQ ID NO: 5287161 - DNA, 25 bp, Homo sapien
gaggaaacagcaaactgcttgacca

SEQ ID NO: 5287162 - DNA, 25 bp, Homo sapien
ccatgtaggtaagaagcaggaagtc

SEQ ID NO: 5287163 - DNA, 25 bp, Homo sapien
tccggggccccaggcagttggtgag

SEQ ID NO: 5287164 - DNA, 25 bp, Homo sapien
ccaggcagttggtgagagagttgaa

SEQ ID NO: 5287165 - DNA, 25 bp, Homo sapien
tggtgagagagttgaaaataagttg

SEQ ID NO: 5287166 - DNA, 25 bp, Homo sapien
cagttggtgagagagttgaaaataa

SEQ ID NO: 5287167 - DNA, 25 bp, Homo sapien
gcctgaggatactgtggtggagttt

SEQ ID NO: 5287168 - DNA, 25 bp, Homo sapien
ctgggcctgaggatactgtggtgga

SEQ ID NO: 5287169 - DNA, 25 bp, Homo sapien
tgggcctgaggatactgtggtggag

SEQ ID NO: 5287170 - DNA, 25 bp, Homo sapien
ggcctgaggatactgtggtggagtt

SEQ ID NO: 5287171 - DNA, 25 bp, Homo sapien
atgtggctagaatcattcactttgc

SEQ ID NO: 5287172 - DNA, 25 bp, Homo sapien
tcactttgcatgaaagatccttaaa

SEQ ID NO: 5287173 - DNA, 25 bp, Homo sapien
actggcccagtgaaaatcattactt

SEQ ID NO: 5287174 - DNA, 25 bp, Homo sapien
acagaacactgattctaccagctga

SEQ ID NO: 5287175 - DNA, 25 bp, Homo sapien
agcctccctggaggcgcacggctta

SEQ ID NO: 5287176 - DNA, 25 bp, Homo sapien
ggaggcgcacggcttaaccacacag

SEQ ID NO: 5287177 - DNA, 25 bp, Homo sapien
tccctggaggcgcacggcttaacca

SEQ ID NO: 5287178 - DNA, 25 bp, Homo sapien
gcacggcttaaccacacaggcctga

SEQ ID NO: 5287179 - DNA, 25 bp, Homo sapien
tctgcccgctcgagggccagcttta

SEQ ID NO: 5287180 - DNA, 25 bp, Homo sapien
tcccgaactccctcattcacttgag

SEQ ID NO: 5287181 - DNA, 25 bp, Homo sapien
tcattcacttgagagcacagctcct

SEQ ID NO: 5287182 - DNA, 25 bp, Homo sapien
agctttagggaggaatggtctgcat

SEQ ID NO: 5287183 - DNA, 25 bp, Homo sapien
tttacaccgcgggtcagatgccagc

SEQ ID NO: 5287184 - DNA, 25 bp, Homo sapien
acttctgatgagcagtgggtagcgg

SEQ ID NO: 5287185 - DNA, 25 bp, Homo sapien
ttctgatgagcagtgggtagcgggt

SEQ ID NO: 5287186 - DNA, 25 bp, Homo sapien
gcattcctttacaccgcgggtcaga

SEQ ID NO: 5287187 - DNA, 25 bp, Homo sapien
ggttcacagtaggaatatctcagct

SEQ ID NO: 5287188 - DNA, 25 bp, Homo sapien
ctcttctcggagctgattcacactt

SEQ ID NO: 5287189 - DNA, 25 bp, Homo sapien
gatgctcctcagctctttcccatga

SEQ ID NO: 5287190 - DNA, 25 bp, Homo sapien
catcgtgttgcagtgtctctattcc

SEQ ID NO: 5287191 - DNA, 25 bp, Homo sapien
ccgatttgtgaacgccaggcccagg

SEQ ID NO: 5287192 - DNA, 25 bp, Homo sapien
gctctaggatggcagcttttaatga

SEQ ID NO: 5287193 - DNA, 25 bp, Homo sapien
tagctctggtacactgcctgaagac

SEQ ID NO: 5287194 - DNA, 25 bp, Homo sapien
agggcccacatcctacttgcctcta

SEQ ID NO: 5287195 - DNA, 25 bp, Homo sapien
tatataggttgctgtcacaagcatc

SEQ ID NO: 5287196 - DNA, 25 bp, Homo sapien
tttgttttggccgtatctatatagg

SEQ ID NO: 5287197 - DNA, 25 bp, Homo sapien
agcatcttcgtgcttcttatttcca

SEQ ID NO: 5287198 - DNA, 25 bp, Homo sapien
ctgaaaagtacactcactgtaatcc

SEQ ID NO: 5287199 - DNA, 25 bp, Homo sapien
ggtcttcttccgcacccgcaaagcc

SEQ ID NO: 5287200 - DNA, 25 bp, Homo sapien
ccccaatcatctgcaccggcatctt

SEQ ID NO: 5287201 - DNA, 25 bp, Homo sapien
gtaacagagctgctccattaagctg

SEQ ID NO: 5287202 - DNA, 25 bp, Homo sapien
agaacctgatgtaagcctgcatgtg

SEQ ID NO: 5287203 - DNA, 25 bp, Homo sapien
cttggcaaagtttcttttgaaagat

SEQ ID NO: 5287204 - DNA, 25 bp, Homo sapien
ttgaaagattctaacttgttcttgg

SEQ ID NO: 5287205 - DNA, 25 bp, Homo sapien
cttgttcttggttgaaccaagaagg

SEQ ID NO: 5287206 - DNA, 25 bp, Homo sapien
tctaacttgttcttggttgaaccaa

SEQ ID NO: 5287207 - DNA, 25 bp, Homo sapien
gccatctccccttcagtgagaaagc

SEQ ID NO: 5287208 - DNA, 25 bp, Homo sapien
agcagctttgtgttggacatgatga

SEQ ID NO: 5287209 - DNA, 25 bp, Homo sapien
gacatgatgagctccttccagttaa

SEQ ID NO: 5287210 - DNA, 25 bp, Homo sapien
gatgagctccttccagttaacaaaa

SEQ ID NO: 5287211 - DNA, 25 bp, Homo sapien
caatctcaagcattatccggcaggc

SEQ ID NO: 5287212 - DNA, 25 bp, Homo sapien
gaagccatgcgaatgccctcttgtt

SEQ ID NO: 5287213 - DNA, 25 bp, Homo sapien
tgagagcttccgtcactatttgtga

SEQ ID NO: 5287214 - DNA, 25 bp, Homo sapien
tatccaaggaagctacggtctgcca

SEQ ID NO: 5287215 - DNA, 25 bp, Homo sapien
atgagagacagcagataccccgaga

SEQ ID NO: 5287216 - DNA, 25 bp, Homo sapien
gcagataccccgagagctagccagc

SEQ ID NO: 5287217 - DNA, 25 bp, Homo sapien
tcatgagagacagcagataccccga

SEQ ID NO: 5287218 - DNA, 25 bp, Homo sapien
cagcagataccccgagagctagcca

SEQ ID NO: 5287219 - DNA, 25 bp, Homo sapien
aatcagctcatgaatatagccctgt

SEQ ID NO: 5287220 - DNA, 25 bp, Homo sapien
ggctgcattgtgtccagggtttgca

SEQ ID NO: 5287221 - DNA, 25 bp, Homo sapien
ctcgacgacgagctgaaggtcagcc

SEQ ID NO: 5287222 - DNA, 25 bp, Homo sapien
tgtaccgctcttcggtctgaatcag

SEQ ID NO: 5287223 - DNA, 25 bp, Homo sapien
gagttggcattaatgagccggcact

SEQ ID NO: 5287224 - DNA, 25 bp, Homo sapien
tccaaagtggcaaatcagcaatgtc

SEQ ID NO: 5287225 - DNA, 25 bp, Homo sapien
tcttttcagaactgtgcagagcgtg

SEQ ID NO: 5287226 - DNA, 25 bp, Homo sapien
gcagagcgtgtgaagaatctcacca

SEQ ID NO: 5287227 - DNA, 25 bp, Homo sapien
ctgtagctaaggcaaccaagaaggg

SEQ ID NO: 5287228 - DNA, 25 bp, Homo sapien
cagcagagcgaaggcgcaccctgca

SEQ ID NO: 5287229 - DNA, 25 bp, Homo sapien
gctaaggcaaccaagaagggcagca

SEQ ID NO: 5287230 - DNA, 25 bp, Homo sapien
cttctgtagctaaggcaaccaagaa

SEQ ID NO: 5287231 - DNA, 25 bp, Homo sapien
cagggcgtgttgctctttccaattt

SEQ ID NO: 5287232 - DNA, 25 bp, Homo sapien
gggcgtgttgctctttccaatttcc

SEQ ID NO: 5287233 - DNA, 25 bp, Homo sapien
agcagggcgtgttgctctttccaat

SEQ ID NO: 5287234 - DNA, 25 bp, Homo sapien
ggcgtgttgctctttccaatttcct

SEQ ID NO: 5287235 - DNA, 25 bp, Homo sapien
cctgtgtgtccttcctgagttaggg

SEQ ID NO: 5287236 - DNA, 25 bp, Homo sapien
gtatcgatgaccttggcattgccaa

SEQ ID NO: 5287237 - DNA, 25 bp, Homo sapien
tctaaagccactgtctgtagtcagc

SEQ ID NO: 5287238 - DNA, 25 bp, Homo sapien
actgctctcgggaaggtatcgatga

SEQ ID NO: 5287239 - DNA, 25 bp, Homo sapien
caggctgtatatctcactcgcaggg

SEQ ID NO: 5287240 - DNA, 25 bp, Homo sapien
tgtcctgtgcggtcagatgaatcca

SEQ ID NO: 5287241 - DNA, 25 bp, Homo sapien
ccaaaataggctcctgatgctcctg

SEQ ID NO: 5287242 - DNA, 25 bp, Homo sapien
gcttttttggagacttgagtctgcc

SEQ ID NO: 5287243 - DNA, 25 bp, Homo sapien
gagcacagcgtgttggctacctgca

SEQ ID NO: 5287244 - DNA, 25 bp, Homo sapien
tatggataggatacacccctttgcc

SEQ ID NO: 5287245 - DNA, 25 bp, Homo sapien
ctctgactgcagaccagggactgtg

SEQ ID NO: 5287246 - DNA, 25 bp, Homo sapien
cattgtcaatagagtagcccttagc

SEQ ID NO: 5287247 - DNA, 25 bp, Homo sapien
tagaggctaacagcatggacttggg

SEQ ID NO: 5287248 - DNA, 25 bp, Homo sapien
ggtggcaatatcagcacactagtgt

SEQ ID NO: 5287249 - DNA, 25 bp, Homo sapien
taacagttgtagtgccgaagttcat

SEQ ID NO: 5287250 - DNA, 25 bp, Homo sapien
accgcttactagcaggttccacttg

SEQ ID NO: 5287251 - DNA, 25 bp, Homo sapien
gaatgtttcaaaagaaatacacaat

SEQ ID NO: 5287252 - DNA, 25 bp, Homo sapien
caaaagaaatacacaatacaactaa

SEQ ID NO: 5287253 - DNA, 25 bp, Homo sapien
tgtttcaaaagaaatacacaataca

SEQ ID NO: 5287254 - DNA, 25 bp, Homo sapien
ttcaaaagaaatacacaatacaact

SEQ ID NO: 5287255 - DNA, 25 bp, Homo sapien
aacacacttgcatagttatattaca

SEQ ID NO: 5287256 - DNA, 25 bp, Homo sapien
taaacacacttgcatagttatatta

SEQ ID NO: 5287257 - DNA, 25 bp, Homo sapien
cacacttgcatagttatattacaat

SEQ ID NO: 5287258 - DNA, 25 bp, Homo sapien
aaataaaaacagattatctcatgcc

SEQ ID NO: 5287259 - DNA, 25 bp, Homo sapien
gttgaattcacaaggacccagtctt

SEQ ID NO: 5287260 - DNA, 25 bp, Homo sapien
tgcctccacgctagagtgaaacttg

SEQ ID NO: 5287261 - DNA, 25 bp, Homo sapien
tagaaattgccaccctagggagcac

SEQ ID NO: 5287262 - DNA, 25 bp, Homo sapien
gaatgtcaaccagtgcccctttgta

SEQ ID NO: 5287263 - DNA, 25 bp, Homo sapien
cacaactggaagacaacattgggtc

SEQ ID NO: 5287264 - DNA, 25 bp, Homo sapien
tcacaactggaagacaacattgggt

SEQ ID NO: 5287265 - DNA, 25 bp, Homo sapien
aatttgactagtaacaacatgcaac

SEQ ID NO: 5287266 - DNA, 25 bp, Homo sapien
tgcaaattaggtgggtgagataaaa

SEQ ID NO: 5287267 - DNA, 25 bp, Homo sapien
ttaactagctttcattgactattac

SEQ ID NO: 5287268 - DNA, 25 bp, Homo sapien
gactattacaagaactacaaacagg

SEQ ID NO: 5287269 - DNA, 25 bp, Homo sapien
tgagtttctcagtcgtattagccac

SEQ ID NO: 5287270 - DNA, 25 bp, Homo sapien
tcaactacaggcagactaaggctct

SEQ ID NO: 5287271 - DNA, 25 bp, Homo sapien
taatcaaaagtgactagtggccgct

SEQ ID NO: 5287272 - DNA, 25 bp, Homo sapien
tatattgacgatcagtcttcctgcc

SEQ ID NO: 5287273 - DNA, 25 bp, Homo sapien
aaatgtactgacacaccggcatgcc

SEQ ID NO: 5287274 - DNA, 25 bp, Homo sapien
cagggatcactagccaaagatcttc

SEQ ID NO: 5287275 - DNA, 25 bp, Homo sapien
gaaagatgccacagctagttagata

SEQ ID NO: 5287276 - DNA, 25 bp, Homo sapien
tgatcatttattaggcaacccaagt

SEQ ID NO: 5287277 - DNA, 25 bp, Homo sapien
gaaaaaggtgactatctaaagaatc

SEQ ID NO: 5287278 - DNA, 25 bp, Homo sapien
tgagaaggttagaaatgtaatggct

SEQ ID NO: 5287279 - DNA, 25 bp, Homo sapien
tggaaaaaggtgactatctaaagaa

SEQ ID NO: 5287280 - DNA, 25 bp, Homo sapien
atgatatgtaaacagcgagaaataa

SEQ ID NO: 5287281 - DNA, 25 bp, Homo sapien
gatggcagtcataccaaagaactca

SEQ ID NO: 5287282 - DNA, 25 bp, Homo sapien
taagtctaatacgaaagtctggagc

SEQ ID NO: 5287283 - DNA, 25 bp, Homo sapien
cagccactagctactttttattaaa

SEQ ID NO: 5287284 - DNA, 25 bp, Homo sapien
gagtgctgagtttaagatctaatcc

SEQ ID NO: 5287285 - DNA, 25 bp, Homo sapien
ggatctgagtctgtcgtcatcttaa

SEQ ID NO: 5287286 - DNA, 25 bp, Homo sapien
tccttgccaccaatcaggatcatct

SEQ ID NO: 5287287 - DNA, 25 bp, Homo sapien
tgtcccttggagaaactgagctcat

SEQ ID NO: 5287288 - DNA, 25 bp, Homo sapien
gaaagagaccagtcaccccgttgat

SEQ ID NO: 5287289 - DNA, 25 bp, Homo sapien
ccatcctttctgtcgcttttttcct

SEQ ID NO: 5287290 - DNA, 25 bp, Homo sapien
catcctttctgtcgcttttttcctc

SEQ ID NO: 5287291 - DNA, 25 bp, Homo sapien
aggtgtggctctttcactacttgga

SEQ ID NO: 5287292 - DNA, 25 bp, Homo sapien
caggatgaaaggcaggtgtggctct

SEQ ID NO: 5287293 - DNA, 25 bp, Homo sapien
tatgctgaagttacctgagcaatct

SEQ ID NO: 5287294 - DNA, 25 bp, Homo sapien
gctaagttgttcagaaccagaagca

SEQ ID NO: 5287295 - DNA, 25 bp, Homo sapien
aacatatgctgaagttacctgagca

SEQ ID NO: 5287296 - DNA, 25 bp, Homo sapien
aggctaagttgttcagaaccagaag

SEQ ID NO: 5287297 - DNA, 25 bp, Homo sapien
tatttgatgctccagacttgctagc

SEQ ID NO: 5287298 - DNA, 25 bp, Homo sapien
gatgctccagacttgctagcactcc

SEQ ID NO: 5287299 - DNA, 25 bp, Homo sapien
tttgatgctccagacttgctagcac

SEQ ID NO: 5287300 - DNA, 25 bp, Homo sapien
tttatttgatgctccagacttgcta

SEQ ID NO: 5287301 - DNA, 25 bp, Homo sapien
ctttctgggtcaccaatatttcttc

SEQ ID NO: 5287302 - DNA, 25 bp, Homo sapien
ctccaatacttcctgtccaccactc

SEQ ID NO: 5287303 - DNA, 25 bp, Homo sapien
tatctccaatacttcctgtccacca

SEQ ID NO: 5287304 - DNA, 25 bp, Homo sapien
ggtttgacatagtttgatggaaaaa

SEQ ID NO: 5287305 - DNA, 25 bp, Homo sapien
ttgaatatggataaagtgcaatata

SEQ ID NO: 5287306 - DNA, 25 bp, Homo sapien
gaatatggataaagtgcaatatatt

SEQ ID NO: 5287307 - DNA, 25 bp, Homo sapien
tgaatatggataaagtgcaatatat

SEQ ID NO: 5287308 - DNA, 25 bp, Homo sapien
cttgaatatggataaagtgcaatat

SEQ ID NO: 5287309 - DNA, 25 bp, Homo sapien
agaagccaagctccatcctgatgac

SEQ ID NO: 5287310 - DNA, 25 bp, Homo sapien
tacgctgcaataaaagtcgggtcct

SEQ ID NO: 5287311 - DNA, 25 bp, Homo sapien
gattacaaggtttaggtacgctgca

SEQ ID NO: 5287312 - DNA, 25 bp, Homo sapien
taaacttgagacgatgagaaacacc

SEQ ID NO: 5287313 - DNA, 25 bp, Homo sapien
tgcaactatgtgaagaacagcaact

SEQ ID NO: 5287314 - DNA, 25 bp, Homo sapien
tggtcctccttaatgattcatatgg

SEQ ID NO: 5287315 - DNA, 25 bp, Homo sapien
tgctgaattttcatagcactgcctt

SEQ ID NO: 5287316 - DNA, 25 bp, Homo sapien
acagcaactatgtgaagtcaggtag

SEQ ID NO: 5287317 - DNA, 25 bp, Homo sapien
tttacagctgcatacaaagcttctg

SEQ ID NO: 5287318 - DNA, 25 bp, Homo sapien
cttctccaactgaataggctgccga

SEQ ID NO: 5287319 - DNA, 25 bp, Homo sapien
tacagctgcatacaaagcttctggt

SEQ ID NO: 5287320 - DNA, 25 bp, Homo sapien
gaggtaggtttcttatttacagctg

SEQ ID NO: 5287321 - DNA, 25 bp, Homo sapien
caattttcttgctgctccaagacag

SEQ ID NO: 5287322 - DNA, 25 bp, Homo sapien
gatttgggaaaccatcctcttcctc

SEQ ID NO: 5287323 - DNA, 25 bp, Homo sapien
cataagatttgggaaaccatcctct

SEQ ID NO: 5287324 - DNA, 25 bp, Homo sapien
tcccaggaatgatcttgacataaga

SEQ ID NO: 5287325 - DNA, 25 bp, Homo sapien
tttgataatcagtcactgatgctgg

SEQ ID NO: 5287326 - DNA, 25 bp, Homo sapien
catgaataggtgatacagatccagg

SEQ ID NO: 5287327 - DNA, 25 bp, Homo sapien
tgctggttgatttgaagaaagtggt

SEQ ID NO: 5287328 - DNA, 25 bp, Homo sapien
cgagtgaaggctgattttttctgcc

SEQ ID NO: 5287329 - DNA, 25 bp, Homo sapien
ttcacttgatggcattttttctaca

SEQ ID NO: 5287330 - DNA, 25 bp, Homo sapien
ccttctttggagatacagctttttc

SEQ ID NO: 5287331 - DNA, 25 bp, Homo sapien
cataattgcatggaaaccagccaaa

SEQ ID NO: 5287332 - DNA, 25 bp, Homo sapien
aagttgaggtagcagataaagaaac

SEQ ID NO: 5287333 - DNA, 25 bp, Homo sapien
tatggctaatgagggaaaacaatcc

SEQ ID NO: 5287334 - DNA, 25 bp, Homo sapien
tatgggaaatgaagattgacctctc

SEQ ID NO: 5287335 - DNA, 25 bp, Homo sapien
tccaactggtaaacatgtcaggtga

SEQ ID NO: 5287336 - DNA, 25 bp, Homo sapien
tatctcatggctccttatgccctga

SEQ ID NO: 5287337 - DNA, 25 bp, Homo sapien
tatcaaacactactcctgggatctt

SEQ ID NO: 5287338 - DNA, 25 bp, Homo sapien
ctctggctagatactctggttaaca

SEQ ID NO: 5287339 - DNA, 25 bp, Homo sapien
aatcacactaactggtgacagtgca

SEQ ID NO: 5287340 - DNA, 25 bp, Homo sapien
gaggcactggctagatactctggct

SEQ ID NO: 5287341 - DNA, 25 bp, Homo sapien
tctcatcatggttccttgcttcaaa

SEQ ID NO: 5287342 - DNA, 25 bp, Homo sapien
ttccttgcttcaaaggggtataatg

SEQ ID NO: 5287343 - DNA, 25 bp, Homo sapien
atctcatcatggttccttgcttcaa

SEQ ID NO: 5287344 - DNA, 25 bp, Homo sapien
ccttgcttcaaaggggtataatgct

SEQ ID NO: 5287345 - DNA, 25 bp, Homo sapien
tataattcaccaaaacactagctgt

SEQ ID NO: 5287346 - DNA, 25 bp, Homo sapien
ttcaccaaaacactagctgtctcac

SEQ ID NO: 5287347 - DNA, 25 bp, Homo sapien
taattcaccaaaacactagctgtct

SEQ ID NO: 5287348 - DNA, 25 bp, Homo sapien
aattcaccaaaacactagctgtctc

SEQ ID NO: 5287349 - DNA, 25 bp, Homo sapien
ctcctcagctttcaaagtatcctta

SEQ ID NO: 5287350 - DNA, 25 bp, Homo sapien
cctcagctttcaaagtatccttatc

SEQ ID NO: 5287351 - DNA, 25 bp, Homo sapien
gctttcaaagtatccttatccttac

SEQ ID NO: 5287352 - DNA, 25 bp, Homo sapien
tcagctttcaaagtatccttatcct

SEQ ID NO: 5287353 - DNA, 25 bp, Homo sapien
tgtttctcctcagctttccgttcct

SEQ ID NO: 5287354 - DNA, 25 bp, Homo sapien
cagctttccgttcctcttcttgaat

SEQ ID NO: 5287355 - DNA, 25 bp, Homo sapien
gttgtttctcctcagctttccgttc

SEQ ID NO: 5287356 - DNA, 25 bp, Homo sapien
ctggagtcgcttttgtttttcttct

SEQ ID NO: 5287357 - DNA, 25 bp, Homo sapien
cataagttttcttttccttgctttg

SEQ ID NO: 5287358 - DNA, 25 bp, Homo sapien
tgaggggtggtacttggctgagctc

SEQ ID NO: 5287359 - DNA, 25 bp, Homo sapien
ctcaacctgcaggaaatcatgccag

SEQ ID NO: 5287360 - DNA, 25 bp, Homo sapien
aaattaaacgcatataactagtata

SEQ ID NO: 5287361 - DNA, 25 bp, Homo sapien
taatgtgcaaggatgatgaatgaaa

SEQ ID NO: 5287362 - DNA, 25 bp, Homo sapien
ctaatgtgcaaggatgatgaatgaa

SEQ ID NO: 5287363 - DNA, 25 bp, Homo sapien
atgaaattaaacgcatataactagt

SEQ ID NO: 5287364 - DNA, 25 bp, Homo sapien
tctgcattagttctaatcttttcct

SEQ ID NO: 5287365 - DNA, 25 bp, Homo sapien
ttccttcaacttgtcacgtttgatc

SEQ ID NO: 5287366 - DNA, 25 bp, Homo sapien
caacttgtcacgtttgatcttataa

SEQ ID NO: 5287367 - DNA, 25 bp, Homo sapien
cacgtttgatcttataaagctgttc

SEQ ID NO: 5287368 - DNA, 25 bp, Homo sapien
tctcagcttctagggttttatttgt

SEQ ID NO: 5287369 - DNA, 25 bp, Homo sapien
ctggtcgtgaattgttgagctcagg

SEQ ID NO: 5287370 - DNA, 25 bp, Homo sapien
tggtcgtgaattgttgagctcaggc

SEQ ID NO: 5287371 - DNA, 25 bp, Homo sapien
aacaaagatactcagataaaggcaa

SEQ ID NO: 5287372 - DNA, 25 bp, Homo sapien
aaagatactcagataaaggcaaaga

SEQ ID NO: 5287373 - DNA, 25 bp, Homo sapien
caaagatactcagataaaggcaaag

SEQ ID NO: 5287374 - DNA, 25 bp, Homo sapien
tcaaacaaagatactcagataaagg

SEQ ID NO: 5287375 - DNA, 25 bp, Homo sapien
cagcttagcagagacaaaaggcact

SEQ ID NO: 5287376 - DNA, 25 bp, Homo sapien
gttgttgagacagcttagcagagac

SEQ ID NO: 5287377 - DNA, 25 bp, Homo sapien
ggcactgaagaacagagtcatccat

SEQ ID NO: 5287378 - DNA, 25 bp, Homo sapien
tgaagaacagagtcatccatattcc

SEQ ID NO: 5287379 - DNA, 25 bp, Homo sapien
gtaagataaggcagataaaaagcca

SEQ ID NO: 5287380 - DNA, 25 bp, Homo sapien
aggcagataaaaagccaattaaact

SEQ ID NO: 5287381 - DNA, 25 bp, Homo sapien
ctgtaagataaggcagataaaaagc

SEQ ID NO: 5287382 - DNA, 25 bp, Homo sapien
aagataaggcagataaaaagccaat

SEQ ID NO: 5287383 - DNA, 25 bp, Homo sapien
ttttatgaagtaaactgacccctga

SEQ ID NO: 5287384 - DNA, 25 bp, Homo sapien
agagcatctaactgttctttaagtc

SEQ ID NO: 5287385 - DNA, 25 bp, Homo sapien
gttctttaagtctttggcataattc

SEQ ID NO: 5287386 - DNA, 25 bp, Homo sapien
tttagttgattgttaaaagaatcca

SEQ ID NO: 5287387 - DNA, 25 bp, Homo sapien
acatcttgcaggttcatgttgtccc

SEQ ID NO: 5287388 - DNA, 25 bp, Homo sapien
aattagctaggctctctattctgta

SEQ ID NO: 5287389 - DNA, 25 bp, Homo sapien
tacttcacttaatgtaacatcttgc

SEQ ID NO: 5287390 - DNA, 25 bp, Homo sapien
taaatctatgtcttttgtaatcaac

SEQ ID NO: 5287391 - DNA, 25 bp, Homo sapien
caggaatctttcacgtctattagcg

SEQ ID NO: 5287392 - DNA, 25 bp, Homo sapien
gtgccactacccctactgatttttg

SEQ ID NO: 5287393 - DNA, 25 bp, Homo sapien
tctattagcgaagtgttatagctgc

SEQ ID NO: 5287394 - DNA, 25 bp, Homo sapien
aatgcatgttttaataccaaatttg

SEQ ID NO: 5287395 - DNA, 25 bp, Homo sapien
tgttcagaacttgcgcaaagaaggg

SEQ ID NO: 5287396 - DNA, 25 bp, Homo sapien
tatttcttccacgtgaagggccctg

SEQ ID NO: 5287397 - DNA, 25 bp, Homo sapien
tctagagacttaactgcccacagga

SEQ ID NO: 5287398 - DNA, 25 bp, Homo sapien
ttaaagacctaggaatgtacagcct

SEQ ID NO: 5287399 - DNA, 25 bp, Homo sapien
taacaccctagaatcccaggtgcgg

SEQ ID NO: 5287400 - DNA, 25 bp, Homo sapien
aatcagacaaaccttagagacttac

SEQ ID NO: 5287401 - DNA, 25 bp, Homo sapien
catgtagtcttgtgttagagccaaa

SEQ ID NO: 5287402 - DNA, 25 bp, Homo sapien
aagtaacaatgtgactgatacagtc

SEQ ID NO: 5287403 - DNA, 25 bp, Homo sapien
tgtgttactgaactgcatgttttta

SEQ ID NO: 5287404 - DNA, 25 bp, Homo sapien
aggtgtgttactgaactgcatgttt

SEQ ID NO: 5287405 - DNA, 25 bp, Homo sapien
taattgcttctcaggtaccagatag

SEQ ID NO: 5287406 - DNA, 25 bp, Homo sapien
ggtaccagatagataagcttattct

SEQ ID NO: 5287407 - DNA, 25 bp, Homo sapien
caagtcacactgcttatccagaact

SEQ ID NO: 5287408 - DNA, 25 bp, Homo sapien
ctgaagtctgcctgagatctgctga

SEQ ID NO: 5287409 - DNA, 25 bp, Homo sapien
agaacttccagctcagtcttttgag

SEQ ID NO: 5287410 - DNA, 25 bp, Homo sapien
agtttgctttttgagtcggacatcc

SEQ ID NO: 5287411 - DNA, 25 bp, Homo sapien
tcagaccatcttacagagaccaatc

SEQ ID NO: 5287412 - DNA, 25 bp, Homo sapien
tctctgttgtgaagcgtgggaagaa

SEQ ID NO: 5287413 - DNA, 25 bp, Homo sapien
cagtaaaccatattgtacagtctgt

SEQ ID NO: 5287414 - DNA, 25 bp, Homo sapien
tgtcttgcccaggagtacatggttc

SEQ ID NO: 5287415 - DNA, 25 bp, Homo sapien
agaagctcctgtcgccgaattctct

SEQ ID NO: 5287416 - DNA, 25 bp, Homo sapien
gcgacgttgtcgttcaagttcctgt

SEQ ID NO: 5287417 - DNA, 25 bp, Homo sapien
cttttgattgagaagctcctgtcgc

SEQ ID NO: 5287418 - DNA, 25 bp, Homo sapien
ttctctcccattctaagcgacgttg

SEQ ID NO: 5287419 - DNA, 25 bp, Homo sapien
catagttggctttccgtttgtcctc

SEQ ID NO: 5287420 - DNA, 25 bp, Homo sapien
tcgttgtctctccaattcccgttgc

SEQ ID NO: 5287421 - DNA, 25 bp, Homo sapien
tccatgttccctcgctcatagttgg

SEQ ID NO: 5287422 - DNA, 25 bp, Homo sapien
ccatcaaggcttggcgtcgcttttc

SEQ ID NO: 5287423 - DNA, 25 bp, Homo sapien
tatgaaggcagagttccattaatgg

SEQ ID NO: 5287424 - DNA, 25 bp, Homo sapien
gaaggcagagttccattaatggaat

SEQ ID NO: 5287425 - DNA, 25 bp, Homo sapien
ttctgatatgaaggcagagttccat

SEQ ID NO: 5287426 - DNA, 25 bp, Homo sapien
tgatatgaaggcagagttccattaa

SEQ ID NO: 5287427 - DNA, 25 bp, Homo sapien
tagccttgaacttctatgctccagt

SEQ ID NO: 5287428 - DNA, 25 bp, Homo sapien
tcacatctgccaagttatcaaaacc

SEQ ID NO: 5287429 - DNA, 25 bp, Homo sapien
ccttggctcccagtgttatgattac

SEQ ID NO: 5287430 - DNA, 25 bp, Homo sapien
tggcccacacctacttctaatatgt

SEQ ID NO: 5287431 - DNA, 25 bp, Homo sapien
cattgcaagaataaactcttctgct

SEQ ID NO: 5287432 - DNA, 25 bp, Homo sapien
catcaccatcaacgtcagccagagt

SEQ ID NO: 5287433 - DNA, 25 bp, Homo sapien
catgtcagtaaggtgcattgcaaga

SEQ ID NO: 5287434 - DNA, 25 bp, Homo sapien
agctgtccatcaccatcaacgtcag

SEQ ID NO: 5287435 - DNA, 25 bp, Homo sapien
agtttgagaaagatttgactgaaga

SEQ ID NO: 5287436 - DNA, 25 bp, Homo sapien
caaatagtagccagctgagtttgag

SEQ ID NO: 5287437 - DNA, 25 bp, Homo sapien
ctgagtttgagaaagatttgactga

SEQ ID NO: 5287438 - DNA, 25 bp, Homo sapien
tgagtttgagaaagatttgactgaa

SEQ ID NO: 5287439 - DNA, 25 bp, Homo sapien
gaaggtgggaactctacttgcctat

SEQ ID NO: 5287440 - DNA, 25 bp, Homo sapien
tgcataactacagaccctggactcc

SEQ ID NO: 5287441 - DNA, 25 bp, Homo sapien
tgcttccacaagaggtaaccactat

SEQ ID NO: 5287442 - DNA, 25 bp, Homo sapien
actaaatgccttgaatctatccgtg

SEQ ID NO: 5287443 - DNA, 25 bp, Homo sapien
tccactcatacttttgtcaagagta

SEQ ID NO: 5287444 - DNA, 25 bp, Homo sapien
cgatattttaatcttgtaggctgag

SEQ ID NO: 5287445 - DNA, 25 bp, Homo sapien
tttgccgatattttaatcttgtagg

SEQ ID NO: 5287446 - DNA, 25 bp, Homo sapien
catacttttgtcaagagtattaaat

SEQ ID NO: 5287447 - DNA, 25 bp, Homo sapien
ctgagagtgaagcagtcgaggaagt

SEQ ID NO: 5287448 - DNA, 25 bp, Homo sapien
tgagagtgaagcagtcgaggaagtt

SEQ ID NO: 5287449 - DNA, 25 bp, Homo sapien
gagtgaagcagtcgaggaagttgag

SEQ ID NO: 5287450 - DNA, 25 bp, Homo sapien
agagtgaagcagtcgaggaagttga

SEQ ID NO: 5287451 - DNA, 25 bp, Homo sapien
cagcggggctcggtgagtggcaggt

SEQ ID NO: 5287452 - DNA, 25 bp, Homo sapien
agcggggctcggtgagtggcaggtg

SEQ ID NO: 5287453 - DNA, 25 bp, Homo sapien
tggacagcggggctcggtgagtggc

SEQ ID NO: 5287454 - DNA, 25 bp, Homo sapien
gacagcggggctcggtgagtggcag

SEQ ID NO: 5287455 - DNA, 25 bp, Homo sapien
tgtatactagcacctccaaatcctc

SEQ ID NO: 5287456 - DNA, 25 bp, Homo sapien
taaatcaatcagagactgcgctttc

SEQ ID NO: 5287457 - DNA, 25 bp, Homo sapien
cagactataagatgacccatgaggc

SEQ ID NO: 5287458 - DNA, 25 bp, Homo sapien
aatcctcccatcatcagactataag

SEQ ID NO: 5287459 - DNA, 25 bp, Homo sapien
ggctgaatgagactggcggttccat

SEQ ID NO: 5287460 - DNA, 25 bp, Homo sapien
atgagactggcggttccatttggta

SEQ ID NO: 5287461 - DNA, 25 bp, Homo sapien
tggcggttccatttggtaatgatga

SEQ ID NO: 5287462 - DNA, 25 bp, Homo sapien
aataaggaatgggtaaaggctgaat

SEQ ID NO: 5287463 - DNA, 25 bp, Homo sapien
aggggagtgggcatcattaagggag

SEQ ID NO: 5287464 - DNA, 25 bp, Homo sapien
ctaggggagtgggcatcattaaggg

SEQ ID NO: 5287465 - DNA, 25 bp, Homo sapien
ggggagtgggcatcattaagggagg

SEQ ID NO: 5287466 - DNA, 25 bp, Homo sapien
taggggagtgggcatcattaaggga

SEQ ID NO: 5287467 - DNA, 25 bp, Homo sapien
ctgaagtcgcagaagacaatgatgt

SEQ ID NO: 5287468 - DNA, 25 bp, Homo sapien
tgaagtcgcagaagacaatgatgtt

SEQ ID NO: 5287469 - DNA, 25 bp, Homo sapien
gaagtcgcagaagacaatgatgtta

SEQ ID NO: 5287470 - DNA, 25 bp, Homo sapien
aggaatggacagattgggcatgctt

SEQ ID NO: 5287471 - DNA, 25 bp, Homo sapien
aatggacagattgggcatgcttccc

SEQ ID NO: 5287472 - DNA, 25 bp, Homo sapien
ggacagattgggcatgcttcccatt

SEQ ID NO: 5287473 - DNA, 25 bp, Homo sapien
tggctgaggaatggacagattgggc

SEQ ID NO: 5287474 - DNA, 25 bp, Homo sapien
gcttcataataggagggagaaccac

SEQ ID NO: 5287475 - DNA, 25 bp, Homo sapien
catagggggttgcttcataatagga

SEQ ID NO: 5287476 - DNA, 25 bp, Homo sapien
gctatggagaactcttgctgatcca

SEQ ID NO: 5287477 - DNA, 25 bp, Homo sapien
tttcatagctatggagaactcttgc

SEQ ID NO: 5287478 - DNA, 25 bp, Homo sapien
catccttgtttaggtctgataaagc

SEQ ID NO: 5287479 - DNA, 25 bp, Homo sapien
atccttgtttaggtctgataaagcc

SEQ ID NO: 5287480 - DNA, 25 bp, Homo sapien
cttcccatccttgtttaggtctgat

SEQ ID NO: 5287481 - DNA, 25 bp, Homo sapien
cccatccttgtttaggtctgataaa

SEQ ID NO: 5287482 - DNA, 25 bp, Homo sapien
aaaggagcatgaggtaggtagattg

SEQ ID NO: 5287483 - DNA, 25 bp, Homo sapien
taaaaggagcatgaggtaggtagat

SEQ ID NO: 5287484 - DNA, 25 bp, Homo sapien
ctaaaaggagcatgaggtaggtaga

SEQ ID NO: 5287485 - DNA, 25 bp, Homo sapien
aaaaggagcatgaggtaggtagatt

SEQ ID NO: 5287486 - DNA, 25 bp, Homo sapien
aaacaattttatgttaacactatat

SEQ ID NO: 5287487 - DNA, 25 bp, Homo sapien
aacaaaatactatcagaaaattagg

SEQ ID NO: 5287488 - DNA, 25 bp, Homo sapien
tatgttaacactatattacaaaaaa

SEQ ID NO: 5287489 - DNA, 25 bp, Homo sapien
atactatcagaaaattaggttcatc

SEQ ID NO: 5287490 - DNA, 25 bp, Homo sapien
attgtaggaaaaaattacgtgcttg

SEQ ID NO: 5287491 - DNA, 25 bp, Homo sapien
aggaaaaaattacgtgcttgatcac

SEQ ID NO: 5287492 - DNA, 25 bp, Homo sapien
ggccggcagacctgattgtaggaaa

SEQ ID NO: 5287493 - DNA, 25 bp, Homo sapien
cagctaaaacaggggccggcagacc

SEQ ID NO: 5287494 - DNA, 25 bp, Homo sapien
aaaagtcacatctgcacttctattg

SEQ ID NO: 5287495 - DNA, 25 bp, Homo sapien
taataatgggtatatgttaatgatt

SEQ ID NO: 5287496 - DNA, 25 bp, Homo sapien
gaataataatgggtatatgttaatg

SEQ ID NO: 5287497 - DNA, 25 bp, Homo sapien
tttacataactttaataagacagat

SEQ ID NO: 5287498 - DNA, 25 bp, Homo sapien
ctcctgaaggtttgaggttatcaaa

SEQ ID NO: 5287499 - DNA, 25 bp, Homo sapien
tcatgcttagtacgttcttcagagg

SEQ ID NO: 5287500 - DNA, 25 bp, Homo sapien
caaactgcctgtcatgcttagtacg

SEQ ID NO: 5287501 - DNA, 25 bp, Homo sapien
gttcttcagaggtaatagcccacat

SEQ ID NO: 5287502 - DNA, 25 bp, Homo sapien
aataatacatggctaaaggtggagg

SEQ ID NO: 5287503 - DNA, 25 bp, Homo sapien
tttagaaactcatcgaaccgtatac

SEQ ID NO: 5287504 - DNA, 25 bp, Homo sapien
catgcaacattatgactgaatcaca

SEQ ID NO: 5287505 - DNA, 25 bp, Homo sapien
tattcaacccaatcccagggaacaa

SEQ ID NO: 5287506 - DNA, 25 bp, Homo sapien
gccctatctcggtacactgcaacca

SEQ ID NO: 5287507 - DNA, 25 bp, Homo sapien
catgaccacactcggctagtttttg

SEQ ID NO: 5287508 - DNA, 25 bp, Homo sapien
agtgtagtggccctatctcggtaca

SEQ ID NO: 5287509 - DNA, 25 bp, Homo sapien
ggtgcccatgaccacactcggctag

SEQ ID NO: 5287510 - DNA, 25 bp, Homo sapien
tcatagctgtgggaaactgagccat

SEQ ID NO: 5287511 - DNA, 25 bp, Homo sapien
cattcatagctgtgggaaactgagc

SEQ ID NO: 5287512 - DNA, 25 bp, Homo sapien
attcatagctgtgggaaactgagcc

SEQ ID NO: 5287513 - DNA, 25 bp, Homo sapien
ttcatagctgtgggaaactgagcca

SEQ ID NO: 5287514 - DNA, 25 bp, Homo sapien
gtcctgagttttccttgctagctct

SEQ ID NO: 5287515 - DNA, 25 bp, Homo sapien
ggtcctgagttttccttgctagctc

SEQ ID NO: 5287516 - DNA, 25 bp, Homo sapien
tcctgccaccgttgccaccaccatg

SEQ ID NO: 5287517 - DNA, 25 bp, Homo sapien
gaaccacagagaagacccatgaggt

SEQ ID NO: 5287518 - DNA, 25 bp, Homo sapien
ctcctgccaccgttgccaccaccat

SEQ ID NO: 5287519 - DNA, 25 bp, Homo sapien
acagagaagacccatgaggttgtct

SEQ ID NO: 5287520 - DNA, 25 bp, Homo sapien
cctgttcacagcatcagatgaagac

SEQ ID NO: 5287521 - DNA, 25 bp, Homo sapien
aaactttccctgttcacagcatcag

SEQ ID NO: 5287522 - DNA, 25 bp, Homo sapien
tccctgttcacagcatcagatgaag

SEQ ID NO: 5287523 - DNA, 25 bp, Homo sapien
ctttccctgttcacagcatcagatg

SEQ ID NO: 5287524 - DNA, 25 bp, Homo sapien
catatgtcctaagtataccaatctt

SEQ ID NO: 5287525 - DNA, 25 bp, Homo sapien
tccttctttgattcccaattcaaat

SEQ ID NO: 5287526 - DNA, 25 bp, Homo sapien
tctcctctactccttcataaagagg

SEQ ID NO: 5287527 - DNA, 25 bp, Homo sapien
tccttcataaagaggtgctcccttt

SEQ ID NO: 5287528 - DNA, 25 bp, Homo sapien
aacctacttccattaaaccctgcag

SEQ ID NO: 5287529 - DNA, 25 bp, Homo sapien
agagttgtgcaacatggctctcctg

SEQ ID NO: 5287530 - DNA, 25 bp, Homo sapien
ttttttatcgagagtgaggaaggcg

SEQ ID NO: 5287531 - DNA, 25 bp, Homo sapien
gaggcaacgatgaactgaatataca

SEQ ID NO: 5287532 - DNA, 25 bp, Homo sapien
aacctgaggctggttcaggccgtga

SEQ ID NO: 5287533 - DNA, 25 bp, Homo sapien
gacatactcattaaaccctcactgg

SEQ ID NO: 5287534 - DNA, 25 bp, Homo sapien
ttagttcccaaggagatcaaggtca

SEQ ID NO: 5287535 - DNA, 25 bp, Homo sapien
gaagcatttacatctatcctctcag

SEQ ID NO: 5287536 - DNA, 25 bp, Homo sapien
tcagagattgggaatacttgtaatg

SEQ ID NO: 5287537 - DNA, 25 bp, Homo sapien
tgggaatacttgtaatgtcagtgaa

SEQ ID NO: 5287538 - DNA, 25 bp, Homo sapien
gttctagttagagacccacatttgg

SEQ ID NO: 5287539 - DNA, 25 bp, Homo sapien
catttggtagttatcagagattggg

SEQ ID NO: 5287540 - DNA, 25 bp, Homo sapien
tcactcacagtaccatctccaagat

SEQ ID NO: 5287541 - DNA, 25 bp, Homo sapien
taggatctttatatgtgagagctca

SEQ ID NO: 5287542 - DNA, 25 bp, Homo sapien
tattaaaggctactgtatgggatag

SEQ ID NO: 5287543 - DNA, 25 bp, Homo sapien
tatcagccactgaagtacattctca

SEQ ID NO: 5287544 - DNA, 25 bp, Homo sapien
aattgtttgcgctacccttctacca

SEQ ID NO: 5287545 - DNA, 25 bp, Homo sapien
tatgacctctaagactgtatcccag

SEQ ID NO: 5287546 - DNA, 25 bp, Homo sapien
tacgtagagtatagcacagaaagga

SEQ ID NO: 5287547 - DNA, 25 bp, Homo sapien
tgtatcccagcccacaaagatggaa

SEQ ID NO: 5287548 - DNA, 25 bp, Homo sapien
cgggatgcggctcacctgacattcg

SEQ ID NO: 5287549 - DNA, 25 bp, Homo sapien
gggatgcggctcacctgacattcgg

SEQ ID NO: 5287550 - DNA, 25 bp, Homo sapien
gctcacctgacattcggcaccaacc

SEQ ID NO: 5287551 - DNA, 25 bp, Homo sapien
atgcggctcacctgacattcggcac

SEQ ID NO: 5287552 - DNA, 25 bp, Homo sapien
gcagccccgctagcggcttcaccca

SEQ ID NO: 5287553 - DNA, 25 bp, Homo sapien
cagccccgctagcggcttcacccac

SEQ ID NO: 5287554 - DNA, 25 bp, Homo sapien
gcccgcgaacctgttgcgtagcctg

SEQ ID NO: 5287555 - DNA, 25 bp, Homo sapien
cagctggcttggtcgtcaggccgcc

SEQ ID NO: 5287556 - DNA, 25 bp, Homo sapien
cactgcagctggcttggtcgtcagg

SEQ ID NO: 5287557 - DNA, 25 bp, Homo sapien
tagcctgtcacagccgctcagggct

SEQ ID NO: 5287558 - DNA, 25 bp, Homo sapien
tagctcagcgaaagggaatccaatc

SEQ ID NO: 5287559 - DNA, 25 bp, Homo sapien
gcttgaggcctgatggtaccggaaa

SEQ ID NO: 5287560 - DNA, 25 bp, Homo sapien
tccagtctggcaggtgtagctcagc

SEQ ID NO: 5287561 - DNA, 25 bp, Homo sapien
caaggacttcgcaaggaatgagcac

SEQ ID NO: 5287562 - DNA, 25 bp, Homo sapien
gacaaattgctttccgatcgtattc

SEQ ID NO: 5287563 - DNA, 25 bp, Homo sapien
aatatttggctttgtcagaagcttt

SEQ ID NO: 5287564 - DNA, 25 bp, Homo sapien
ggctttgtcagaagcttttcttctc

SEQ ID NO: 5287565 - DNA, 25 bp, Homo sapien
gctttccgatcgtattcctctgttt

SEQ ID NO: 5287566 - DNA, 25 bp, Homo sapien
ttgtaccgaaggaacagtgcttcca

SEQ ID NO: 5287567 - DNA, 25 bp, Homo sapien
tgtaccgaaggaacagtgcttccat

SEQ ID NO: 5287568 - DNA, 25 bp, Homo sapien
cttgtaccgaaggaacagtgcttcc

SEQ ID NO: 5287569 - DNA, 25 bp, Homo sapien
gatactctctgttgggactcctgct

SEQ ID NO: 5287570 - DNA, 25 bp, Homo sapien
tttgcaaccatgactgagaacccag

SEQ ID NO: 5287571 - DNA, 25 bp, Homo sapien
gaacccaggatcaagagctttgcag

SEQ ID NO: 5287572 - DNA, 25 bp, Homo sapien
tctgagcgggaactatgctgatgcc

SEQ ID NO: 5287573 - DNA, 25 bp, Homo sapien
tgaaccttggtgtcatttagggctg

SEQ ID NO: 5287574 - DNA, 25 bp, Homo sapien
ggacacctcggtgtactgagcagag

SEQ ID NO: 5287575 - DNA, 25 bp, Homo sapien
ttagggctgaaccaagagcatctga

SEQ ID NO: 5287576 - DNA, 25 bp, Homo sapien
atctgaacgggtctggccgatccca

SEQ ID NO: 5287577 - DNA, 25 bp, Homo sapien
tgttcttgtgatgatcacaaagtcc

SEQ ID NO: 5287578 - DNA, 25 bp, Homo sapien
ttgtgatgatcacaaagtcccatgt

SEQ ID NO: 5287579 - DNA, 25 bp, Homo sapien
tcccatgttcagaacatcacagtct

SEQ ID NO: 5287580 - DNA, 25 bp, Homo sapien
gtgatgatcacaaagtcccatgttc

SEQ ID NO: 5287581 - DNA, 25 bp, Homo sapien
gttggaaccagtgatgcacatccca

SEQ ID NO: 5287582 - DNA, 25 bp, Homo sapien
aaccagtgatgcacatcccaaacgg

SEQ ID NO: 5287583 - DNA, 25 bp, Homo sapien
tggaaccagtgatgcacatcccaaa

SEQ ID NO: 5287584 - DNA, 25 bp, Homo sapien
ggttggaaccagtgatgcacatccc

SEQ ID NO: 5287585 - DNA, 25 bp, Homo sapien
ctgcccagcacctggttatttctgc

SEQ ID NO: 5287586 - DNA, 25 bp, Homo sapien
ctgtcattcgaaattgcttgtcctg

SEQ ID NO: 5287587 - DNA, 25 bp, Homo sapien
ggtggacatccaaggacattgatga

SEQ ID NO: 5287588 - DNA, 25 bp, Homo sapien
gatgaatgaagctccagtcaagggt

SEQ ID NO: 5287589 - DNA, 25 bp, Homo sapien
gacattgatgaatgaagctccagtc

SEQ ID NO: 5287590 - DNA, 25 bp, Homo sapien
ttgtgcacttcataggtggacatcc

SEQ ID NO: 5287591 - DNA, 25 bp, Homo sapien
gaaaagaagcaacatgtactgtgta

SEQ ID NO: 5287592 - DNA, 25 bp, Homo sapien
ataagtgatgtatagctataaattt

SEQ ID NO: 5287593 - DNA, 25 bp, Homo sapien
aaaagaagcaacatgtactgtgtac

SEQ ID NO: 5287594 - DNA, 25 bp, Homo sapien
tgaaaagaagcaacatgtactgtgt

SEQ ID NO: 5287595 - DNA, 25 bp, Homo sapien
ctttttgatgccaccaacaactctg

SEQ ID NO: 5287596 - DNA, 25 bp, Homo sapien
gatgccaccaacaactctggtattt

SEQ ID NO: 5287597 - DNA, 25 bp, Homo sapien
tttgatgccaccaacaactctggta

SEQ ID NO: 5287598 - DNA, 25 bp, Homo sapien
caccaacaactctggtattttacct

SEQ ID NO: 5287599 - DNA, 25 bp, Homo sapien
tatctaattgaatgccaacatcaac

SEQ ID NO: 5287600 - DNA, 25 bp, Homo sapien
atctaattgaatgccaacatcaacc

SEQ ID NO: 5287601 - DNA, 25 bp, Homo sapien
ttatctaattgaatgccaacatcaa

SEQ ID NO: 5287602 - DNA, 25 bp, Homo sapien
tttatctaattgaatgccaacatca

SEQ ID NO: 5287603 - DNA, 25 bp, Homo sapien
gctgccttgctagatcctgtttctc

SEQ ID NO: 5287604 - DNA, 25 bp, Homo sapien
tgtatcagctgccttgctagatcct

SEQ ID NO: 5287605 - DNA, 25 bp, Homo sapien
ccatgtatcagctgccttgctagat

SEQ ID NO: 5287606 - DNA, 25 bp, Homo sapien
tcagctgccttgctagatcctgttt

SEQ ID NO: 5287607 - DNA, 25 bp, Homo sapien
ataaggccatcgcagctcagagagg

SEQ ID NO: 5287608 - DNA, 25 bp, Homo sapien
ggtgacaagaacactctacttttgg

SEQ ID NO: 5287609 - DNA, 25 bp, Homo sapien
tgttcagccgctgttcgattcctct

SEQ ID NO: 5287610 - DNA, 25 bp, Homo sapien
aacgggtcaggcagatcttttcatc

SEQ ID NO: 5287611 - DNA, 25 bp, Homo sapien
tgagctctgtcctccgacggctgcc

SEQ ID NO: 5287612 - DNA, 25 bp, Homo sapien
cggagcctgcgtcaggttccctctg

SEQ ID NO: 5287613 - DNA, 25 bp, Homo sapien
cgggcgagcgggagtctgacgcgat

SEQ ID NO: 5287614 - DNA, 25 bp, Homo sapien
agtctgacgcgatttgctgagctct

SEQ ID NO: 5287615 - DNA, 25 bp, Homo sapien
tccccgccgggggaaatcgctgcag

SEQ ID NO: 5287616 - DNA, 25 bp, Homo sapien
cggaggtcgcagctgtcacgggcac

SEQ ID NO: 5287617 - DNA, 25 bp, Homo sapien
gcagcgacttctctccgcctctttt

SEQ ID NO: 5287618 - DNA, 25 bp, Homo sapien
tttccagttgccctagttagcgcgg

SEQ ID NO: 5287619 - DNA, 25 bp, Homo sapien
caaacatgttgacgaggcgattggg

SEQ ID NO: 5287620 - DNA, 25 bp, Homo sapien
tactggacatgttcctgtcgcggcc

SEQ ID NO: 5287621 - DNA, 25 bp, Homo sapien
gcagtgacagaattcgggccgctct

SEQ ID NO: 5287622 - DNA, 25 bp, Homo sapien
tcctgggattcagccgaaagggccg

SEQ ID NO: 5287623 - DNA, 25 bp, Homo sapien
ttcttgtagaggtgttgaacaggca

SEQ ID NO: 5287624 - DNA, 25 bp, Homo sapien
ttaagctggaggatctgttagcctc

SEQ ID NO: 5287625 - DNA, 25 bp, Homo sapien
gcttggccctcctcgtttcttgtag

SEQ ID NO: 5287626 - DNA, 25 bp, Homo sapien
tcggagacggtgagtttttaatgtc

SEQ ID NO: 5287627 - DNA, 25 bp, Homo sapien
ctaatccagtgagcggtcttcacta

SEQ ID NO: 5287628 - DNA, 25 bp, Homo sapien
cagtgagcggtcttcactaggacta

SEQ ID NO: 5287629 - DNA, 25 bp, Homo sapien
taaatgttgagtaagtgatgagggt

SEQ ID NO: 5287630 - DNA, 25 bp, Homo sapien
tcactaggactaaatgttgagtaag

SEQ ID NO: 5287631 - DNA, 25 bp, Homo sapien
cgctgataccaacatataagtccaa

SEQ ID NO: 5287632 - DNA, 25 bp, Homo sapien
tatttctgcaggatacatggctgaa

SEQ ID NO: 5287633 - DNA, 25 bp, Homo sapien
tggtgtcagaggtcataaaatggcc

SEQ ID NO: 5287634 - DNA, 25 bp, Homo sapien
ggctccttggagtgataggctttta

SEQ ID NO: 5287635 - DNA, 25 bp, Homo sapien
tgtataggaccttgtagcatatggt

SEQ ID NO: 5287636 - DNA, 25 bp, Homo sapien
taggaagggaactcaaagtcaaatg

SEQ ID NO: 5287637 - DNA, 25 bp, Homo sapien
ttttctccacgtctcggtaccagga

SEQ ID NO: 5287638 - DNA, 25 bp, Homo sapien
acttgtattacgtggtcatcatgac

SEQ ID NO: 5287639 - DNA, 25 bp, Homo sapien
tacaccctgtgaacggtctcaaatc

SEQ ID NO: 5287640 - DNA, 25 bp, Homo sapien
ccctgtgaacggtctcaaatccttt

SEQ ID NO: 5287641 - DNA, 25 bp, Homo sapien
cctgtgaacggtctcaaatcctttt

SEQ ID NO: 5287642 - DNA, 25 bp, Homo sapien
ctaatacaccctgtgaacggtctca

SEQ ID NO: 5287643 - DNA, 25 bp, Homo sapien
caggcttctgatactgtgtggctca

SEQ ID NO: 5287644 - DNA, 25 bp, Homo sapien
acttattctggtataaagccaccca

SEQ ID NO: 5287645 - DNA, 25 bp, Homo sapien
cataaggttctagatggttagcagc

SEQ ID NO: 5287646 - DNA, 25 bp, Homo sapien
aatttctccggccaactgtaggagg

SEQ ID NO: 5287647 - DNA, 25 bp, Homo sapien
aaaacatgttttgtatggcgttcct

SEQ ID NO: 5287648 - DNA, 25 bp, Homo sapien
ttactaaaggtgcatttaggaacaa

SEQ ID NO: 5287649 - DNA, 25 bp, Homo sapien
caaagttgtttaatctaatttagca

SEQ ID NO: 5287650 - DNA, 25 bp, Homo sapien
ctaatttagcattgagaaagaactt

SEQ ID NO: 5287651 - DNA, 25 bp, Homo sapien
taattggttttcattctagaatgga

SEQ ID NO: 5287652 - DNA, 25 bp, Homo sapien
aagtgtctttggactattgtctcga

SEQ ID NO: 5287653 - DNA, 25 bp, Homo sapien
gaaaatggtgtagtaacatgagcca

SEQ ID NO: 5287654 - DNA, 25 bp, Homo sapien
tttaatggctctattccacattttg

SEQ ID NO: 5287655 - DNA, 25 bp, Homo sapien
ttttgcagtaatatggttctgggtc

SEQ ID NO: 5287656 - DNA, 25 bp, Homo sapien
acacttttgcagtaatatggttctg

SEQ ID NO: 5287657 - DNA, 25 bp, Homo sapien
acttttgcagtaatatggttctggg

SEQ ID NO: 5287658 - DNA, 25 bp, Homo sapien
tgcagtaatatggttctgggtctgt

SEQ ID NO: 5287659 - DNA, 25 bp, Homo sapien
tgtctttcaggtaacttttgtattc

SEQ ID NO: 5287660 - DNA, 25 bp, Homo sapien
cttgtctttcaggtaacttttgtat

SEQ ID NO: 5287661 - DNA, 25 bp, Homo sapien
taacacccctttgggcagttggatg

SEQ ID NO: 5287662 - DNA, 25 bp, Homo sapien
tccctagtaagtcacacatccgagt

SEQ ID NO: 5287663 - DNA, 25 bp, Homo sapien
gagtctttaagaatggcaaccatgc

SEQ ID NO: 5287664 - DNA, 25 bp, Homo sapien
gatgctgaggtcagtccagaaacct

SEQ ID NO: 5287665 - DNA, 25 bp, Homo sapien
ccaggcccgactgtgctttgctttt

SEQ ID NO: 5287666 - DNA, 25 bp, Homo sapien
caggcccgactgtgctttgcttttg

SEQ ID NO: 5287667 - DNA, 25 bp, Homo sapien
aatgtggtctcacaaccaagtacta

SEQ ID NO: 5287668 - DNA, 25 bp, Homo sapien
tccaatgtggtctcacaaccaagta

SEQ ID NO: 5287669 - DNA, 25 bp, Homo sapien
gcactctcctaacagcttgtgggaa

SEQ ID NO: 5287670 - DNA, 25 bp, Homo sapien
taaattgcttcaagggtgtgaggtc

SEQ ID NO: 5287671 - DNA, 25 bp, Homo sapien
gttaggctagtccacaaattctggc

SEQ ID NO: 5287672 - DNA, 25 bp, Homo sapien
gggaactcctttgcatgtctccaag

SEQ ID NO: 5287673 - DNA, 25 bp, Homo sapien
tgtgcagttaactcagctgtggtca

SEQ ID NO: 5287674 - DNA, 25 bp, Homo sapien
ctgtgcagttaactcagctgtggtc

SEQ ID NO: 5287675 - DNA, 25 bp, Homo sapien
gtgcagttaactcagctgtggtcat

SEQ ID NO: 5287676 - DNA, 25 bp, Homo sapien
gagactttccttatgctgtctggct

SEQ ID NO: 5287677 - DNA, 25 bp, Homo sapien
ttggaattagatctctgtcctctca

SEQ ID NO: 5287678 - DNA, 25 bp, Homo sapien
ggacaggtttctcttaggctttcag

SEQ ID NO: 5287679 - DNA, 25 bp, Homo sapien
tgtgctgcctcagtagtgcagcttc

SEQ ID NO: 5287680 - DNA, 25 bp, Homo sapien
ggcgtgagcccagccgattaatcat

SEQ ID NO: 5287681 - DNA, 25 bp, Homo sapien
ccttctttagtctatcagtctcaga

SEQ ID NO: 5287682 - DNA, 25 bp, Homo sapien
gagccctgtagcttcacttttataa

SEQ ID NO: 5287683 - DNA, 25 bp, Homo sapien
gcctaagccttagtcctattatata

SEQ ID NO: 5287684 - DNA, 25 bp, Homo sapien
tcaaccacctggggtcaggggatcc

SEQ ID NO: 5287685 - DNA, 25 bp, Homo sapien
ttttttgctatggggtttcattctg

SEQ ID NO: 5287686 - DNA, 25 bp, Homo sapien
cacagctgactgcatgcagcctcaa

SEQ ID NO: 5287687 - DNA, 25 bp, Homo sapien
tgctatggggtttcattctgttatc

SEQ ID NO: 5287688 - DNA, 25 bp, Homo sapien
aatagattctctgcccctgttctcc

SEQ ID NO: 5287689 - DNA, 25 bp, Homo sapien
taaggcaaatagttctgtcataatc

SEQ ID NO: 5287690 - DNA, 25 bp, Homo sapien
gaactgatgatctatgggaaagaag

SEQ ID NO: 5287691 - DNA, 25 bp, Homo sapien
aactctggtccatttacttgttcaa

SEQ ID NO: 5287692 - DNA, 25 bp, Homo sapien
ctggaactcaagatttgaccatatc

SEQ ID NO: 5287693 - DNA, 25 bp, Homo sapien
cctctggaactcaagatttgaccat

SEQ ID NO: 5287694 - DNA, 25 bp, Homo sapien
ccatatctgttttgaggattcatta

SEQ ID NO: 5287695 - DNA, 25 bp, Homo sapien
gaactcaagatttgaccatatctgt

SEQ ID NO: 5287696 - DNA, 25 bp, Homo sapien
taccctgactgcgaaatacaaagcc

SEQ ID NO: 5287697 - DNA, 25 bp, Homo sapien
tactatcagcaaattatgggtgact

SEQ ID NO: 5287698 - DNA, 25 bp, Homo sapien
gaagcagttaataccagaatcatac

SEQ ID NO: 5287699 - DNA, 25 bp, Homo sapien
gatatagcagttgtgaatctccagc

SEQ ID NO: 5287700 - DNA, 25 bp, Homo sapien
tcaactcaagtacatgttaagtgcg

SEQ ID NO: 5287701 - DNA, 25 bp, Homo sapien
cagggtattgccagcattgtgcaca

SEQ ID NO: 5287702 - DNA, 25 bp, Homo sapien
tttagggagcttacaaatctggtca

SEQ ID NO: 5287703 - DNA, 25 bp, Homo sapien
gttaagtgcgtactcttcagccagc

SEQ ID NO: 5287704 - DNA, 25 bp, Homo sapien
aattgttgccaattatgagctctat

SEQ ID NO: 5287705 - DNA, 25 bp, Homo sapien
attgttgccaattatgagctctata

SEQ ID NO: 5287706 - DNA, 25 bp, Homo sapien
ttatgagctctatagcaactgatct

SEQ ID NO: 5287707 - DNA, 25 bp, Homo sapien
ttaattgttgccaattatgagctct

SEQ ID NO: 5287708 - DNA, 25 bp, Homo sapien
cagagaatgtaaccagctacttagg

SEQ ID NO: 5287709 - DNA, 25 bp, Homo sapien
ggagaattgtatttgtgtcagagaa

SEQ ID NO: 5287710 - DNA, 25 bp, Homo sapien
gaatacgagcgtctacagcatactg

SEQ ID NO: 5287711 - DNA, 25 bp, Homo sapien
cttaggttacaatcaggaggaatta

SEQ ID NO: 5287712 - DNA, 25 bp, Homo sapien
ttagatttgctagggagataagtat

SEQ ID NO: 5287713 - DNA, 25 bp, Homo sapien
tcaagaggcaacacgacgaaatagc

SEQ ID NO: 5287714 - DNA, 25 bp, Homo sapien
gctttttcaccatattcgcaagcac

SEQ ID NO: 5287715 - DNA, 25 bp, Homo sapien
tctgagtatctaattaagcagatgg

SEQ ID NO: 5287716 - DNA, 25 bp, Homo sapien
gcaggatgctaattcaccctccaga

SEQ ID NO: 5287717 - DNA, 25 bp, Homo sapien
aatcaattcaagaggatggagaagg

SEQ ID NO: 5287718 - DNA, 25 bp, Homo sapien
tccagatgagccagggaccgagaac

SEQ ID NO: 5287719 - DNA, 25 bp, Homo sapien
agaagcttgccagcgttatgaagta

SEQ ID NO: 5287720 - DNA, 25 bp, Homo sapien
cctccagctattacgggtgtagaat

SEQ ID NO: 5287721 - DNA, 25 bp, Homo sapien
ccagtcatgtctgatttgtattgca

SEQ ID NO: 5287722 - DNA, 25 bp, Homo sapien
tattgcacggcgattacctcggcct

SEQ ID NO: 5287723 - DNA, 25 bp, Homo sapien
tttatgaccaagcaagatactacag

SEQ ID NO: 5287724 - DNA, 25 bp, Homo sapien
ttgatactagttccctgagagctgc

SEQ ID NO: 5287725 - DNA, 25 bp, Homo sapien
gcttttttccaacctcagggcagag

SEQ ID NO: 5287726 - DNA, 25 bp, Homo sapien
cagagaaccatcttatgccagacag

SEQ ID NO: 5287727 - DNA, 25 bp, Homo sapien
gggaagatttagtgaggaagtgcat

SEQ ID NO: 5287728 - DNA, 25 bp, Homo sapien
gtttgacaatcattggtccatcaag

SEQ ID NO: 5287729 - DNA, 25 bp, Homo sapien
atttgcatttgcagttttcttgctg

SEQ ID NO: 5287730 - DNA, 25 bp, Homo sapien
aatcattggtccatcaagattggag

SEQ ID NO: 5287731 - DNA, 25 bp, Homo sapien
aatagtaataatgcttaagtttgac

SEQ ID NO: 5287732 - DNA, 25 bp, Homo sapien
tcatgggaattcatatcatcgacag

SEQ ID NO: 5287733 - DNA, 25 bp, Homo sapien
cagcccctcctatagattcatattg

SEQ ID NO: 5287734 - DNA, 25 bp, Homo sapien
aatgatgggacaatgcttagcgccc

SEQ ID NO: 5287735 - DNA, 25 bp, Homo sapien
gacatgcaacctttcatcatgggaa

SEQ ID NO: 5287736 - DNA, 25 bp, Homo sapien
tacggcatgctgatatagacacaag

SEQ ID NO: 5287737 - DNA, 25 bp, Homo sapien
gatgctcacccggaagtcagattgt

SEQ ID NO: 5287738 - DNA, 25 bp, Homo sapien
gccaaggaagtttcggatgctcacc

SEQ ID NO: 5287739 - DNA, 25 bp, Homo sapien
tctacaccggctcttacaggagggt

SEQ ID NO: 5287740 - DNA, 25 bp, Homo sapien
gaccagtttgatcagttactgccca

SEQ ID NO: 5287741 - DNA, 25 bp, Homo sapien
cagttgccaggcttatgtgagacag

SEQ ID NO: 5287742 - DNA, 25 bp, Homo sapien
gatggtgcggtcaccagtgtaacca

SEQ ID NO: 5287743 - DNA, 25 bp, Homo sapien
catcaaatcggagatcctgccagct

SEQ ID NO: 5287744 - DNA, 25 bp, Homo sapien
tggaagcaattgataaccaatttgg

SEQ ID NO: 5287745 - DNA, 25 bp, Homo sapien
ccatggacaaataatacagtgacag

SEQ ID NO: 5287746 - DNA, 25 bp, Homo sapien
taatacagtgacagctataaatcag

SEQ ID NO: 5287747 - DNA, 25 bp, Homo sapien
caatttggacaaccaggaacaggcg

SEQ ID NO: 5287748 - DNA, 25 bp, Homo sapien
tccttagtggcaaagatgaaactga

SEQ ID NO: 5287749 - DNA, 25 bp, Homo sapien
gctagctgaactagacagagctctg

SEQ ID NO: 5287750 - DNA, 25 bp, Homo sapien
gaacagctggtatccttccttagtg

SEQ ID NO: 5287751 - DNA, 25 bp, Homo sapien
tgtccacccacaacagtagaaggga

SEQ ID NO: 5287752 - DNA, 25 bp, Homo sapien
gcaacgccacctttgatcatggaag

SEQ ID NO: 5287753 - DNA, 25 bp, Homo sapien
tccaaggcatggtcaggcaaaaacc

SEQ ID NO: 5287754 - DNA, 25 bp, Homo sapien
ttcactggggacgatgcctgttcaa

SEQ ID NO: 5287755 - DNA, 25 bp, Homo sapien
tagatgtattatcagagagatttcc

SEQ ID NO: 5287756 - DNA, 25 bp, Homo sapien
tgattacaaataccgtaggcaaaca

SEQ ID NO: 5287757 - DNA, 25 bp, Homo sapien
gcaatccttggcatgccatgattac

SEQ ID NO: 5287758 - DNA, 25 bp, Homo sapien
cagggatgttatcaaggacccaggt

SEQ ID NO: 5287759 - DNA, 25 bp, Homo sapien
agattcagggatgttatcaaggacc

SEQ ID NO: 5287760 - DNA, 25 bp, Homo sapien
gtattgatggcaaccctataggagg

SEQ ID NO: 5287761 - DNA, 25 bp, Homo sapien
gaaccctgagcaaaatgagtgcagc

SEQ ID NO: 5287762 - DNA, 25 bp, Homo sapien
tgactacagactagaggaatgctct

SEQ ID NO: 5287763 - DNA, 25 bp, Homo sapien
gaaactgggcttctcccaatcttgg

SEQ ID NO: 5287764 - DNA, 25 bp, Homo sapien
gacccttctgtctaaacacatcttt

SEQ ID NO: 5287765 - DNA, 25 bp, Homo sapien
tttccacttcaagtagtacccactc

SEQ ID NO: 5287766 - DNA, 25 bp, Homo sapien
aagtagtacccactcataagccggg

SEQ ID NO: 5287767 - DNA, 25 bp, Homo sapien
acttcaagtagtacccactcataag

SEQ ID NO: 5287768 - DNA, 25 bp, Homo sapien
gggaactcaaaagcccacgtcagga

SEQ ID NO: 5287769 - DNA, 25 bp, Homo sapien
gcagccattcttcaggtcgtagcat

SEQ ID NO: 5287770 - DNA, 25 bp, Homo sapien
tgcccgtccaccaaaggctgtcatg

SEQ ID NO: 5287771 - DNA, 25 bp, Homo sapien
tcatgtgtctcgaaatcagcagccc

SEQ ID NO: 5287772 - DNA, 25 bp, Homo sapien
gcatggactcagacttcaaggaaga

SEQ ID NO: 5287773 - DNA, 25 bp, Homo sapien
ggcctctgagtcaagaacccagtga

SEQ ID NO: 5287774 - DNA, 25 bp, Homo sapien
tagttctagaagttccgctgcaagg

SEQ ID NO: 5287775 - DNA, 25 bp, Homo sapien
atccctgggcctgtgaatgatgaca

SEQ ID NO: 5287776 - DNA, 25 bp, Homo sapien
gtgatatttagacgcgcagacttca

SEQ ID NO: 5287777 - DNA, 25 bp, Homo sapien
tgtttgtgatatttagacgcgcaga

SEQ ID NO: 5287778 - DNA, 25 bp, Homo sapien
tttgtgatatttagacgcgcagact

SEQ ID NO: 5287779 - DNA, 25 bp, Homo sapien
attttgtttgtgatatttagacgcg

SEQ ID NO: 5287780 - DNA, 25 bp, Homo sapien
gaagggagtttccttgagccccaca

SEQ ID NO: 5287781 - DNA, 25 bp, Homo sapien
gcatgattagaactgactgtaacct

SEQ ID NO: 5287782 - DNA, 25 bp, Homo sapien
cacaggagagtctaaccaaatcttc

SEQ ID NO: 5287783 - DNA, 25 bp, Homo sapien
caaagtttcaaacccgagtgactgg

SEQ ID NO: 5287784 - DNA, 25 bp, Homo sapien
aatgggtggcctgcgtattcaaaca

SEQ ID NO: 5287785 - DNA, 25 bp, Homo sapien
tcacaactgaaagacgggagcaagc

SEQ ID NO: 5287786 - DNA, 25 bp, Homo sapien
tgaacatgtgcttaaccctcaagaa

SEQ ID NO: 5287787 - DNA, 25 bp, Homo sapien
cacatgatgctttggaatgggtggc

SEQ ID NO: 5287788 - DNA, 25 bp, Homo sapien
aatcggaacttcttcaaatactggc

SEQ ID NO: 5287789 - DNA, 25 bp, Homo sapien
ccggagagcaatacaagtggcgata

SEQ ID NO: 5287790 - DNA, 25 bp, Homo sapien
agctcctttagggtggtctcatctg

SEQ ID NO: 5287791 - DNA, 25 bp, Homo sapien
gctcaagccacagcatgtggtcaat

SEQ ID NO: 5287792 - DNA, 25 bp, Homo sapien
tttaataaattagagaatgccagta

SEQ ID NO: 5287793 - DNA, 25 bp, Homo sapien
gctactcagaggcttgttttaataa

SEQ ID NO: 5287794 - DNA, 25 bp, Homo sapien
gaaggcagaagccactaagctactc

SEQ ID NO: 5287795 - DNA, 25 bp, Homo sapien
cagtattgcgactcttaacctgctg

SEQ ID NO: 5287796 - DNA, 25 bp, Homo sapien
gcaaagctctttgggtgcatctgat

SEQ ID NO: 5287797 - DNA, 25 bp, Homo sapien
gggctcccatgaatatccttgtgca

SEQ ID NO: 5287798 - DNA, 25 bp, Homo sapien
tcttcccgaccactaaatatgcttc

SEQ ID NO: 5287799 - DNA, 25 bp, Homo sapien
tagttcagttagcttcgcatcatga

SEQ ID NO: 5287800 - DNA, 25 bp, Homo sapien
tgcaaacagaacctgactgctattt

SEQ ID NO: 5287801 - DNA, 25 bp, Homo sapien
gatttgtttggtcatctgcaaacag

SEQ ID NO: 5287802 - DNA, 25 bp, Homo sapien
taagggtgagatttgtttggtcatc

SEQ ID NO: 5287803 - DNA, 25 bp, Homo sapien
agcaggatagagagtcaaagggtaa

SEQ ID NO: 5287804 - DNA, 25 bp, Homo sapien
tagctgaagctaggttcaatttata

SEQ ID NO: 5287805 - DNA, 25 bp, Homo sapien
gctgaagctaggttcaatttatact

SEQ ID NO: 5287806 - DNA, 25 bp, Homo sapien
aagctaggttcaatttatactaacg

SEQ ID NO: 5287807 - DNA, 25 bp, Homo sapien
ggtctagctgaagctaggttcaatt

SEQ ID NO: 5287808 - DNA, 25 bp, Homo sapien
caggtaaatactcagtttgacttca

SEQ ID NO: 5287809 - DNA, 25 bp, Homo sapien
gctttaaaaagtcggccagtgcaca

SEQ ID NO: 5287810 - DNA, 25 bp, Homo sapien
taaatgttaacgatcaccccaactc

SEQ ID NO: 5287811 - DNA, 25 bp, Homo sapien
ttcactttgcactgtcccttcgggc

SEQ ID NO: 5287812 - DNA, 25 bp, Homo sapien
tattgtaccaggacctgcggctccg

SEQ ID NO: 5287813 - DNA, 25 bp, Homo sapien
ccaggagaacggagcttgtgataga

SEQ ID NO: 5287814 - DNA, 25 bp, Homo sapien
tgatagatcctttcgtaacaccaag

SEQ ID NO: 5287815 - DNA, 25 bp, Homo sapien
ccagctcttggaggtaagcggctgt

SEQ ID NO: 5287816 - DNA, 25 bp, Homo sapien
aggccggacctactccccggtgcat

SEQ ID NO: 5287817 - DNA, 25 bp, Homo sapien
ggttgcagagcagcgaatgttggtg

SEQ ID NO: 5287818 - DNA, 25 bp, Homo sapien
gaggttgcagagcagcgaatgttgg

SEQ ID NO: 5287819 - DNA, 25 bp, Homo sapien
acgtgggtctcacgccatggttttc

SEQ ID NO: 5287820 - DNA, 25 bp, Homo sapien
ttgcagagcagcgaatgttggtgaa

SEQ ID NO: 5287821 - DNA, 25 bp, Homo sapien
tgtctgttctcagacctccagctgc

SEQ ID NO: 5287822 - DNA, 25 bp, Homo sapien
gtctgttctcagacctccagctgcg

SEQ ID NO: 5287823 - DNA, 25 bp, Homo sapien
cagtctgtctgttctcagacctcca

SEQ ID NO: 5287824 - DNA, 25 bp, Homo sapien
tctgtctgttctcagacctccagct

SEQ ID NO: 5287825 - DNA, 25 bp, Homo sapien
taggcctagtgtgttcatcatgttg

SEQ ID NO: 5287826 - DNA, 25 bp, Homo sapien
tatcttacatccttagctgagtgtg

SEQ ID NO: 5287827 - DNA, 25 bp, Homo sapien
gcatttgttggctcttatattctac

SEQ ID NO: 5287828 - DNA, 25 bp, Homo sapien
cattcttattgatttacttgtctac

SEQ ID NO: 5287829 - DNA, 25 bp, Homo sapien
gctctggaaggactgttcagcccta

SEQ ID NO: 5287830 - DNA, 25 bp, Homo sapien
tttggactgttgcaggctcgaggcc

SEQ ID NO: 5287831 - DNA, 25 bp, Homo sapien
caaaggcgactgtagcaagagctca

SEQ ID NO: 5287832 - DNA, 25 bp, Homo sapien
gctcaaaaggcaaggcaatatcgga

SEQ ID NO: 5287833 - DNA, 25 bp, Homo sapien
gcttatcccgccccttcaagaagaa

SEQ ID NO: 5287834 - DNA, 25 bp, Homo sapien
ggaaggtggctagcttatcccgccc

SEQ ID NO: 5287835 - DNA, 25 bp, Homo sapien
aagcggaagccgtactctcggagga

SEQ ID NO: 5287836 - DNA, 25 bp, Homo sapien
gggcctcgcctcacaaagcggaagc

SEQ ID NO: 5287837 - DNA, 25 bp, Homo sapien
tctctcctaggatggccatggtcac

SEQ ID NO: 5287838 - DNA, 25 bp, Homo sapien
tggttggagccgagcactgatccat

SEQ ID NO: 5287839 - DNA, 25 bp, Homo sapien
cttccacccgtggcgagcagcgggt

SEQ ID NO: 5287840 - DNA, 25 bp, Homo sapien
caagcagtacgggacactccccaaa

SEQ ID NO: 5287841 - DNA, 25 bp, Homo sapien
ttgcccctttcgtggagcttttctg

SEQ ID NO: 5287842 - DNA, 25 bp, Homo sapien
gcccctttcgtggagcttttctgcc

SEQ ID NO: 5287843 - DNA, 25 bp, Homo sapien
tgcccctttcgtggagcttttctgc

SEQ ID NO: 5287844 - DNA, 25 bp, Homo sapien
ccctttcgtggagcttttctgccag

SEQ ID NO: 5287845 - DNA, 25 bp, Homo sapien
tacccaaaggtaggccatatgcatc

SEQ ID NO: 5287846 - DNA, 25 bp, Homo sapien
tctgcctctggacttactgttcagg

SEQ ID NO: 5287847 - DNA, 25 bp, Homo sapien
tgttctcatgccgagtctgagcacg

SEQ ID NO: 5287848 - DNA, 25 bp, Homo sapien
cctgtgctgaggctagctattgcag

SEQ ID NO: 5287849 - DNA, 25 bp, Homo sapien
agccagaaccccgcctttgttcatg

SEQ ID NO: 5287850 - DNA, 25 bp, Homo sapien
tacattgactgtattgccccagatg

SEQ ID NO: 5287851 - DNA, 25 bp, Homo sapien
tggtttccgggctccgatgacccca

SEQ ID NO: 5287852 - DNA, 25 bp, Homo sapien
ccccagatgtcgtagtgtggtttcc

SEQ ID NO: 5287853 - DNA, 25 bp, Homo sapien
tccttcatggccagcgcgaagtcgg

SEQ ID NO: 5287854 - DNA, 25 bp, Homo sapien
gttgatgttggtgagcgtatccttc

SEQ ID NO: 5287855 - DNA, 25 bp, Homo sapien
gcgcagcatgaagttattgaaggac

SEQ ID NO: 5287856 - DNA, 25 bp, Homo sapien
ccagcgcgaagtcggccaggtcagc

SEQ ID NO: 5287857 - DNA, 25 bp, Homo sapien
ccaggggaccgtggagaaagtgtca

SEQ ID NO: 5287858 - DNA, 25 bp, Homo sapien
gagtcgcagccacgctagctctgac

SEQ ID NO: 5287859 - DNA, 25 bp, Homo sapien
gtcgcagccacgctagctctgactt

SEQ ID NO: 5287860 - DNA, 25 bp, Homo sapien
tcgcagccacgctagctctgacttg

SEQ ID NO: 5287861 - DNA, 25 bp, Homo sapien
aggagtcgcagccacgctagctctg

SEQ ID NO: 5287862 - DNA, 25 bp, Homo sapien
gtgagtctgaccacgaggcggaccc

SEQ ID NO: 5287863 - DNA, 25 bp, Homo sapien
ctgaccacgaggcggaccccttcac

SEQ ID NO: 5287864 - DNA, 25 bp, Homo sapien
tgaccacgaggcggaccccttcacc

SEQ ID NO: 5287865 - DNA, 25 bp, Homo sapien
agtctgaccacgaggcggacccctt

SEQ ID NO: 5287866 - DNA, 25 bp, Homo sapien
gatgacccgccttggacgtgtttct

SEQ ID NO: 5287867 - DNA, 25 bp, Homo sapien
tcatccatataatagggccgtggga

SEQ ID NO: 5287868 - DNA, 25 bp, Homo sapien
gaacacaaccatcttaggcctgagc

SEQ ID NO: 5287869 - DNA, 25 bp, Homo sapien
gacaattgctctccagttcctatga

SEQ ID NO: 5287870 - DNA, 25 bp, Homo sapien
tgccgaactttctcaataaacccta

SEQ ID NO: 5287871 - DNA, 25 bp, Homo sapien
ctctctggctactggggttagctac

SEQ ID NO: 5287872 - DNA, 25 bp, Homo sapien
tgccaatctcttgccttgggggcag

SEQ ID NO: 5287873 - DNA, 25 bp, Homo sapien
tatttcccccatgctaggtctgggc

SEQ ID NO: 5287874 - DNA, 25 bp, Homo sapien
cagagcctcatctctctggctactg

SEQ ID NO: 5287875 - DNA, 25 bp, Homo sapien
caatggttttgatcttggtgatcac

SEQ ID NO: 5287876 - DNA, 25 bp, Homo sapien
tcttggtgatcacccggaacttggg

SEQ ID NO: 5287877 - DNA, 25 bp, Homo sapien
tcctgaagccgccatatacgtgctg

SEQ ID NO: 5287878 - DNA, 25 bp, Homo sapien
tatacgtgctgccaatggttttgat

SEQ ID NO: 5287879 - DNA, 25 bp, Homo sapien
tgctgaccggctctgaatttgagga

SEQ ID NO: 5287880 - DNA, 25 bp, Homo sapien
acataaaatcggcagtctcctaggg

SEQ ID NO: 5287881 - DNA, 25 bp, Homo sapien
tccgcgcgtgtgtaaaagcattctc

SEQ ID NO: 5287882 - DNA, 25 bp, Homo sapien
gaggtctcgagatgttgcttggcca

SEQ ID NO: 5287883 - DNA, 25 bp, Homo sapien
gaaggggcttatctgggaaaatgaa

SEQ ID NO: 5287884 - DNA, 25 bp, Homo sapien
ggcctctgcagcctattgtaggatg

SEQ ID NO: 5287885 - DNA, 25 bp, Homo sapien
tgtgatgtggaatgggccggcttca

SEQ ID NO: 5287886 - DNA, 25 bp, Homo sapien
aagtccatgtattgcggaaggggct

SEQ ID NO: 5287887 - DNA, 25 bp, Homo sapien
ggcagggaggcaaacatgactccaa

SEQ ID NO: 5287888 - DNA, 25 bp, Homo sapien
tgtgtagaagtcagcaaagttgggc

SEQ ID NO: 5287889 - DNA, 25 bp, Homo sapien
gatttcattgaggaaacgcagacac

SEQ ID NO: 5287890 - DNA, 25 bp, Homo sapien
tcatcatacgtctggctatacagct

SEQ ID NO: 5287891 - DNA, 25 bp, Homo sapien
ttggaccccaggaaatggcgtgcca

SEQ ID NO: 5287892 - DNA, 25 bp, Homo sapien
tagacacgttccttctggtcgtgga

SEQ ID NO: 5287893 - DNA, 25 bp, Homo sapien
caggcaacatgttggtgaccaaggc

SEQ ID NO: 5287894 - DNA, 25 bp, Homo sapien
cacaagaaaagtgtccgtgccagtt

SEQ ID NO: 5287895 - DNA, 25 bp, Homo sapien
cttcactcccatgcttccttcacca

SEQ ID NO: 5287896 - DNA, 25 bp, Homo sapien
ttcactcccatgcttccttcaccat

SEQ ID NO: 5287897 - DNA, 25 bp, Homo sapien
tcactcccatgcttccttcaccatc

SEQ ID NO: 5287898 - DNA, 25 bp, Homo sapien
agggaagccccattccttaggagct

SEQ ID NO: 5287899 - DNA, 25 bp, Homo sapien
gtcggacggaagaggtgaggaactg

SEQ ID NO: 5287900 - DNA, 25 bp, Homo sapien
cggtggcctgaccaggctcacgtgt

SEQ ID NO: 5287901 - DNA, 25 bp, Homo sapien
gaaggagcctgaatagagaaggcgg

SEQ ID NO: 5287902 - DNA, 25 bp, Homo sapien
tcatagagtacttggaaggcaccag

SEQ ID NO: 5287903 - DNA, 25 bp, Homo sapien
tggcgggagaagtagtagaagctga

SEQ ID NO: 5287904 - DNA, 25 bp, Homo sapien
agctgagcatcatgaggaacaccat

SEQ ID NO: 5287905 - DNA, 25 bp, Homo sapien
tgaggaacaccatcaccgtcataga

SEQ ID NO: 5287906 - DNA, 25 bp, Homo sapien
ctgctctaaggccaccataggtaag

SEQ ID NO: 5287907 - DNA, 25 bp, Homo sapien
tgagcccagggttgaatccttgcat

SEQ ID NO: 5287908 - DNA, 25 bp, Homo sapien
tcagtgccattgagcccagggttga

SEQ ID NO: 5287909 - DNA, 25 bp, Homo sapien
tctgctctaaggccaccataggtaa

SEQ ID NO: 5287910 - DNA, 25 bp, Homo sapien
tcgtgctcccgaaaacgcttgtggt

SEQ ID NO: 5287911 - DNA, 25 bp, Homo sapien
tcaaagacgggacgccaggcataga

SEQ ID NO: 5287912 - DNA, 25 bp, Homo sapien
acggcgcctgcgacgagcagcatga

SEQ ID NO: 5287913 - DNA, 25 bp, Homo sapien
tgtggtcgtattcatcaaagacggg

SEQ ID NO: 5287914 - DNA, 25 bp, Homo sapien
cgtttccatccctgccgttgcattg

SEQ ID NO: 5287915 - DNA, 25 bp, Homo sapien
cagcatgatggtggcgatgagggac

SEQ ID NO: 5287916 - DNA, 25 bp, Homo sapien
gacagcacggccacatagttgtaat

SEQ ID NO: 5287917 - DNA, 25 bp, Homo sapien
gcattgctgggtcccgtgtagtact

SEQ ID NO: 5287918 - DNA, 25 bp, Homo sapien
gcccggcaccgtgtgctccaattgt

SEQ ID NO: 5287919 - DNA, 25 bp, Homo sapien
ccgtgtgctccaattgttaaagtac

SEQ ID NO: 5287920 - DNA, 25 bp, Homo sapien
gcaccgtgtgctccaattgttaaag

SEQ ID NO: 5287921 - DNA, 25 bp, Homo sapien
tgttaaagtacaacaataacattat

SEQ ID NO: 5287922 - DNA, 25 bp, Homo sapien
catggaactgtgctctcggactctg

SEQ ID NO: 5287923 - DNA, 25 bp, Homo sapien
gagaaactgcttgtgtgacccaaac

SEQ ID NO: 5287924 - DNA, 25 bp, Homo sapien
tgtttgggaacctaagagccactcc

SEQ ID NO: 5287925 - DNA, 25 bp, Homo sapien
cagatactggtacaactgctcagga

SEQ ID NO: 5287926 - DNA, 25 bp, Homo sapien
aaggccacaagcttcttaggaaagg

SEQ ID NO: 5287927 - DNA, 25 bp, Homo sapien
catgtccacgacatttgccatcacc

SEQ ID NO: 5287928 - DNA, 25 bp, Homo sapien
cggtcaatccaagttgagaaggcca

SEQ ID NO: 5287929 - DNA, 25 bp, Homo sapien
tggcccagcgggtccggtcaatcca

SEQ ID NO: 5287930 - DNA, 25 bp, Homo sapien
tgacagcaactcaggctggtcccgt

SEQ ID NO: 5287931 - DNA, 25 bp, Homo sapien
tttctcctgcgacgtgactgacagc

SEQ ID NO: 5287932 - DNA, 25 bp, Homo sapien
acagaatttcaagggccatgagcct

SEQ ID NO: 5287933 - DNA, 25 bp, Homo sapien
gcctcaaaacggactctgcctggga

SEQ ID NO: 5287934 - DNA, 25 bp, Homo sapien
agttctgacgctgtgttggacctcc

SEQ ID NO: 5287935 - DNA, 25 bp, Homo sapien
gttctgacgctgtgttggacctcct

SEQ ID NO: 5287936 - DNA, 25 bp, Homo sapien
ggagttctgacgctgtgttggacct

SEQ ID NO: 5287937 - DNA, 25 bp, Homo sapien
gagttctgacgctgtgttggacctc

SEQ ID NO: 5287938 - DNA, 25 bp, Homo sapien
cagcagacgtggtgacgaggtgagg

SEQ ID NO: 5287939 - DNA, 25 bp, Homo sapien
tccacagcagacgtggtgacgaggt

SEQ ID NO: 5287940 - DNA, 25 bp, Homo sapien
agcagacgtggtgacgaggtgaggc

SEQ ID NO: 5287941 - DNA, 25 bp, Homo sapien
ctttccacagcagacgtggtgacga

SEQ ID NO: 5287942 - DNA, 25 bp, Homo sapien
ctcccccaccatgaaggtcacatag

SEQ ID NO: 5287943 - DNA, 25 bp, Homo sapien
tcccccaccatgaaggtcacatagt

SEQ ID NO: 5287944 - DNA, 25 bp, Homo sapien
atgagtatctcgaccagggccgtgc

SEQ ID NO: 5287945 - DNA, 25 bp, Homo sapien
tccatgaaccgcatggacaagagga

SEQ ID NO: 5287946 - DNA, 25 bp, Homo sapien
gtgcagagcaggacgacgcaggagc

SEQ ID NO: 5287947 - DNA, 25 bp, Homo sapien
ttctccaccgagtagcgggtttcca

SEQ ID NO: 5287948 - DNA, 25 bp, Homo sapien
gctcaagcagggcctcgttgagcag

SEQ ID NO: 5287949 - DNA, 25 bp, Homo sapien
ttcagaggcatccaccactcggtca

SEQ ID NO: 5287950 - DNA, 25 bp, Homo sapien
cagctggttgagctcgtgctcatct

SEQ ID NO: 5287951 - DNA, 25 bp, Homo sapien
caggcgcagcctccggcgtgggttg

SEQ ID NO: 5287952 - DNA, 25 bp, Homo sapien
tcccgttgggctccttggtctcaat

SEQ ID NO: 5287953 - DNA, 25 bp, Homo sapien
cactgctgtgggcactcccgttggg

SEQ ID NO: 5287954 - DNA, 25 bp, Homo sapien
tctccgacgtggacccactgctgtg

SEQ ID NO: 5287955 - DNA, 25 bp, Homo sapien
tgctcctcgggcttctccgacgtgg

SEQ ID NO: 5287956 - DNA, 25 bp, Homo sapien
attgaggccattctgggtggctgtt

SEQ ID NO: 5287957 - DNA, 25 bp, Homo sapien
ccctttcaggcagtccatggtgctc

SEQ ID NO: 5287958 - DNA, 25 bp, Homo sapien
taggtaatcacagcggctgccccca

SEQ ID NO: 5287959 - DNA, 25 bp, Homo sapien
tgatgaggtaggtttcaataccctt

SEQ ID NO: 5287960 - DNA, 25 bp, Homo sapien
cctcagtgttggagccacgacacag

SEQ ID NO: 5287961 - DNA, 25 bp, Homo sapien
tgttggagccacgacacaggagtac

SEQ ID NO: 5287962 - DNA, 25 bp, Homo sapien
gacacaggagtacaatctttcttca

SEQ ID NO: 5287963 - DNA, 25 bp, Homo sapien
gccacgacacaggagtacaatcttt

SEQ ID NO: 5287964 - DNA, 25 bp, Homo sapien
catcttgttggctacagtgacatca

SEQ ID NO: 5287965 - DNA, 25 bp, Homo sapien
gccggcctccatcttgttggctaca

SEQ ID NO: 5287966 - DNA, 25 bp, Homo sapien
tgacatcagtcgaccacacgtcgta

SEQ ID NO: 5287967 - DNA, 25 bp, Homo sapien
gcatgtccaccccagtcttggtctt

SEQ ID NO: 5287968 - DNA, 25 bp, Homo sapien
tggtcctcccggtagtcgggcaagc

SEQ ID NO: 5287969 - DNA, 25 bp, Homo sapien
gatcttaatccgcagctggtggtat

SEQ ID NO: 5287970 - DNA, 25 bp, Homo sapien
tcgggcaagccgcagatgcagtagt

SEQ ID NO: 5287971 - DNA, 25 bp, Homo sapien
tagcagtcgcccaggatcttaatcc

SEQ ID NO: 5287972 - DNA, 25 bp, Homo sapien
gggtaaagcccacgatgtcggcaaa

SEQ ID NO: 5287973 - DNA, 25 bp, Homo sapien
cagctgggtaaagcccacgatgtcg

SEQ ID NO: 5287974 - DNA, 25 bp, Homo sapien
taaagcccacgatgtcggcaaagag

SEQ ID NO: 5287975 - DNA, 25 bp, Homo sapien
cagaagacagctgggtaaagcccac

SEQ ID NO: 5287976 - DNA, 25 bp, Homo sapien
gtctttcagcatctcgtcagccacg

SEQ ID NO: 5287977 - DNA, 25 bp, Homo sapien
ctgacgttctcgtgacggtacatgt

SEQ ID NO: 5287978 - DNA, 25 bp, Homo sapien
tacatgtacatggtgttgaactgct

SEQ ID NO: 5287979 - DNA, 25 bp, Homo sapien
catctcgtcagccacgtgcttgggc

SEQ ID NO: 5287980 - DNA, 25 bp, Homo sapien
ccgtgtcgccatggggtcggctgct

SEQ ID NO: 5287981 - DNA, 25 bp, Homo sapien
gtggccaggcccgtgtcgccatggg

SEQ ID NO: 5287982 - DNA, 25 bp, Homo sapien
ttccgggtggccaggcccgtgtcgc

SEQ ID NO: 5287983 - DNA, 25 bp, Homo sapien
cagggtggagtgcttccgggtggcc

SEQ ID NO: 5287984 - DNA, 25 bp, Homo sapien
aggtcccaggcattaccaccctggg

SEQ ID NO: 5287985 - DNA, 25 bp, Homo sapien
gtgcaggtcccaggcattaccaccc

SEQ ID NO: 5287986 - DNA, 25 bp, Homo sapien
gctctgtgcctagggtgcaggtccc

SEQ ID NO: 5287987 - DNA, 25 bp, Homo sapien
caggagctctgtgcctagggtgcag

SEQ ID NO: 5287988 - DNA, 25 bp, Homo sapien
tgatctgcccgagatcctgacctca

SEQ ID NO: 5287989 - DNA, 25 bp, Homo sapien
tcgctattcaatgcccatcactgaa

SEQ ID NO: 5287990 - DNA, 25 bp, Homo sapien
accgtacccggccagtgagccttat

SEQ ID NO: 5287991 - DNA, 25 bp, Homo sapien
gcactgggcatttcatcgctattca

SEQ ID NO: 5287992 - DNA, 25 bp, Homo sapien
tagtctgtacctgagactcccaaac

SEQ ID NO: 5287993 - DNA, 25 bp, Homo sapien
aaatgtgtggctggcgtgtcactgg

SEQ ID NO: 5287994 - DNA, 25 bp, Homo sapien
actgggacaagtggctcgtggcttt

SEQ ID NO: 5287995 - DNA, 25 bp, Homo sapien
gagacacaatgtaccaatgttgcgg

SEQ ID NO: 5287996 - DNA, 25 bp, Homo sapien
gacttgctttggaggccccaagaga

SEQ ID NO: 5287997 - DNA, 25 bp, Homo sapien
gaaagctaatgaggaaaggctgctg

SEQ ID NO: 5287998 - DNA, 25 bp, Homo sapien
ccggtccagcttaaccaggctgtgt

SEQ ID NO: 5287999 - DNA, 25 bp, Homo sapien
ggaaagctgctatgtagaaaaggga

SEQ ID NO: 5288000 - DNA, 25 bp, Homo sapien
ggccaccgtgtaggccaaggtgact

SEQ ID NO: 5288001 - DNA, 25 bp, Homo sapien
gactgcagtctcaggagacagccca

SEQ ID NO: 5288002 - DNA, 25 bp, Homo sapien
tgtgggacttctggtcactggcctg

SEQ ID NO: 5288003 - DNA, 25 bp, Homo sapien
gggacaccgaacatgtgggacttct

SEQ ID NO: 5288004 - DNA, 25 bp, Homo sapien
ttgccaggataacagtggcatggtg

SEQ ID NO: 5288005 - DNA, 25 bp, Homo sapien
gttgccaggataacagtggcatggt

SEQ ID NO: 5288006 - DNA, 25 bp, Homo sapien
aggacgcttcgcatgccagggctgc

SEQ ID NO: 5288007 - DNA, 25 bp, Homo sapien
ttcggcagaggcaaagaggacgctt

SEQ ID NO: 5288008 - DNA, 25 bp, Homo sapien
tgcctgcgaagccagatatgtgttc

SEQ ID NO: 5288009 - DNA, 25 bp, Homo sapien
acagggaagcgccatggcactgcct

SEQ ID NO: 5288010 - DNA, 25 bp, Homo sapien
cctagaaatctatggagagcgcaac

SEQ ID NO: 5288011 - DNA, 25 bp, Homo sapien
tagtaggtgaaaagatctagtgcct

SEQ ID NO: 5288012 - DNA, 25 bp, Homo sapien
gaagttgtgagtcgaaattgtacca

SEQ ID NO: 5288013 - DNA, 25 bp, Homo sapien
taagaaggttgtggcaatgcaatac

SEQ ID NO: 5288014 - DNA, 25 bp, Homo sapien
cgtgacgtgaaggaatgcccgtgat

SEQ ID NO: 5288015 - DNA, 25 bp, Homo sapien
aaggaatgcccgtgatgcccctgac

SEQ ID NO: 5288016 - DNA, 25 bp, Homo sapien
tggaggcgtgacgtgaaggaatgcc

SEQ ID NO: 5288017 - DNA, 25 bp, Homo sapien
gatctgcggttggaccagcaagagt

SEQ ID NO: 5288018 - DNA, 25 bp, Homo sapien
ccagaagacaaagttcagaagcaaa

SEQ ID NO: 5288019 - DNA, 25 bp, Homo sapien
cccagaagacaaagttcagaagcaa

SEQ ID NO: 5288020 - DNA, 25 bp, Homo sapien
cagaagacaaagttcagaagcaaac

SEQ ID NO: 5288021 - DNA, 25 bp, Homo sapien
cttgcggtgcttgcggtcagccatg

SEQ ID NO: 5288022 - DNA, 25 bp, Homo sapien
atcttcacctccagcgactggcggg

SEQ ID NO: 5288023 - DNA, 25 bp, Homo sapien
gccatgtagtaggacatgatgccca

SEQ ID NO: 5288024 - DNA, 25 bp, Homo sapien
ggttcatcttcacctccagcgactg

SEQ ID NO: 5288025 - DNA, 25 bp, Homo sapien
agaaaaggccaggggtgaaggcacg

SEQ ID NO: 5288026 - DNA, 25 bp, Homo sapien
gagaaaaggccaggggtgaaggcac

SEQ ID NO: 5288027 - DNA, 25 bp, Homo sapien
cccgtggtcccctttagactgcaca

SEQ ID NO: 5288028 - DNA, 25 bp, Homo sapien
tcccctttagactgcacagcacgat

SEQ ID NO: 5288029 - DNA, 25 bp, Homo sapien
ttagactgcacagcacgatcaggct

SEQ ID NO: 5288030 - DNA, 25 bp, Homo sapien
aagtcacctcttcttgccccgtggt

SEQ ID NO: 5288031 - DNA, 25 bp, Homo sapien
acacattcaaagctccacccacggc

SEQ ID NO: 5288032 - DNA, 25 bp, Homo sapien
agcatgtctcccacacattcaaagc

SEQ ID NO: 5288033 - DNA, 25 bp, Homo sapien
cagcatgtctcccacacattcaaag

SEQ ID NO: 5288034 - DNA, 25 bp, Homo sapien
attcaaagctccacccacggcggtg

SEQ ID NO: 5288035 - DNA, 25 bp, Homo sapien
ctcctgcttcgccttgacacagaaa

SEQ ID NO: 5288036 - DNA, 25 bp, Homo sapien
cagggtcatgacaaccaggaatgaa

SEQ ID NO: 5288037 - DNA, 25 bp, Homo sapien
acaaccaggaatgaagggagaagac

SEQ ID NO: 5288038 - DNA, 25 bp, Homo sapien
ctgcttcgccttgacacagaaactc

SEQ ID NO: 5288039 - DNA, 25 bp, Homo sapien
tggttccgggcgatgcccacggact

SEQ ID NO: 5288040 - DNA, 25 bp, Homo sapien
ccccgagatgggtgtgagctgcgct

SEQ ID NO: 5288041 - DNA, 25 bp, Homo sapien
tcccagcagcgcaaaagctctactc

SEQ ID NO: 5288042 - DNA, 25 bp, Homo sapien
ctccttagaaactggagctggttcc

SEQ ID NO: 5288043 - DNA, 25 bp, Homo sapien
cacctgcgagctccacggctccttt

SEQ ID NO: 5288044 - DNA, 25 bp, Homo sapien
ccacctgcgagctccacggctcctt

SEQ ID NO: 5288045 - DNA, 25 bp, Homo sapien
acctgcgagctccacggctcctttc

SEQ ID NO: 5288046 - DNA, 25 bp, Homo sapien
ttccacctgcgagctccacggctcc

SEQ ID NO: 5288047 - DNA, 25 bp, Homo sapien
cggcatcatgcagcgatagccgtga

SEQ ID NO: 5288048 - DNA, 25 bp, Homo sapien
tgagggtgcctggttcccccggcat

SEQ ID NO: 5288049 - DNA, 25 bp, Homo sapien
cagcgatagccgtgatggctcctga

SEQ ID NO: 5288050 - DNA, 25 bp, Homo sapien
tcatgcagcgatagccgtgatggct

SEQ ID NO: 5288051 - DNA, 25 bp, Homo sapien
gactaccagcgcataccatcacccc

SEQ ID NO: 5288052 - DNA, 25 bp, Homo sapien
gctaagactaccagcgcataccatc

SEQ ID NO: 5288053 - DNA, 25 bp, Homo sapien
taagactaccagcgcataccatcac

SEQ ID NO: 5288054 - DNA, 25 bp, Homo sapien
agactaccagcgcataccatcaccc

SEQ ID NO: 5288055 - DNA, 25 bp, Homo sapien
ttcctccactacagccatgccagca

SEQ ID NO: 5288056 - DNA, 25 bp, Homo sapien
ctggcttcctccactacagccatgc

SEQ ID NO: 5288057 - DNA, 25 bp, Homo sapien
gcttcctccactacagccatgccag

SEQ ID NO: 5288058 - DNA, 25 bp, Homo sapien
ggcttcctccactacagccatgcca

SEQ ID NO: 5288059 - DNA, 25 bp, Homo sapien
tacaagcccaactacaggaggaatg

SEQ ID NO: 5288060 - DNA, 25 bp, Homo sapien
cctggagatgggcaatatgatatta

SEQ ID NO: 5288061 - DNA, 25 bp, Homo sapien
tatgatattaacaactacaagccca

SEQ ID NO: 5288062 - DNA, 25 bp, Homo sapien
aaagaaccaccctagattgggctct

SEQ ID NO: 5288063 - DNA, 25 bp, Homo sapien
attcaggtccaccaagatgatcccc

SEQ ID NO: 5288064 - DNA, 25 bp, Homo sapien
catgtcgacttcattcaggtccacc

SEQ ID NO: 5288065 - DNA, 25 bp, Homo sapien
caccatgtcgacttcattcaggtcc

SEQ ID NO: 5288066 - DNA, 25 bp, Homo sapien
agcctcctgcaccatgtcgacttca

SEQ ID NO: 5288067 - DNA, 25 bp, Homo sapien
gatgaggtgcatgcaacagctacct

SEQ ID NO: 5288068 - DNA, 25 bp, Homo sapien
gctacctgccgtctgcagacagggt

SEQ ID NO: 5288069 - DNA, 25 bp, Homo sapien
gaaatggagccagtaacatccagga

SEQ ID NO: 5288070 - DNA, 25 bp, Homo sapien
tcctgttataccttagggactgcca

SEQ ID NO: 5288071 - DNA, 25 bp, Homo sapien
tgcagaggaagaagacttttgacac

SEQ ID NO: 5288072 - DNA, 25 bp, Homo sapien
aagaagacttttgacactggcaatg

SEQ ID NO: 5288073 - DNA, 25 bp, Homo sapien
tccccacagagctgcgcatgggcat

SEQ ID NO: 5288074 - DNA, 25 bp, Homo sapien
aggaagaagacttttgacactggca

SEQ ID NO: 5288075 - DNA, 25 bp, Homo sapien
gctccaggagcctcaaaataagctc

SEQ ID NO: 5288076 - DNA, 25 bp, Homo sapien
tggaagctccaggagcctcaaaata

SEQ ID NO: 5288077 - DNA, 25 bp, Homo sapien
caggagcctcaaaataagctccttg

SEQ ID NO: 5288078 - DNA, 25 bp, Homo sapien
gcctcaaaataagctccttgtccac

SEQ ID NO: 5288079 - DNA, 25 bp, Homo sapien
cagcttgtcgctggagaagaccaca

SEQ ID NO: 5288080 - DNA, 25 bp, Homo sapien
gatctgggcggttatgagcagccac

SEQ ID NO: 5288081 - DNA, 25 bp, Homo sapien
tagaggttctccaaggactccggca

SEQ ID NO: 5288082 - DNA, 25 bp, Homo sapien
cacaggagaccacggagatgatcac

SEQ ID NO: 5288083 - DNA, 25 bp, Homo sapien
gttccggaccgagatttcatgggtc

SEQ ID NO: 5288084 - DNA, 25 bp, Homo sapien
gagatttcatgggtccggcccaccc

SEQ ID NO: 5288085 - DNA, 25 bp, Homo sapien
gcccgagttccggaccgagatttca

SEQ ID NO: 5288086 - DNA, 25 bp, Homo sapien
aggagcccgagttccggaccgagat

SEQ ID NO: 5288087 - DNA, 25 bp, Homo sapien
agtactcggctgagtactcggccga

SEQ ID NO: 5288088 - DNA, 25 bp, Homo sapien
ctgacggagtactcggctgagtact

SEQ ID NO: 5288089 - DNA, 25 bp, Homo sapien
gagtactcggccgagtattcgggct

SEQ ID NO: 5288090 - DNA, 25 bp, Homo sapien
ttcgggctcggagaagccctggttc

SEQ ID NO: 5288091 - DNA, 25 bp, Homo sapien
ctgctactggccctagagaagtgga

SEQ ID NO: 5288092 - DNA, 25 bp, Homo sapien
gagaagtggactgggaacggaggaa

SEQ ID NO: 5288093 - DNA, 25 bp, Homo sapien
caggaacgcagagcgggtttccaga

SEQ ID NO: 5288094 - DNA, 25 bp, Homo sapien
aacgcagagcgggtttccagagcac

SEQ ID NO: 5288095 - DNA, 25 bp, Homo sapien
cgctgtcttcccccccggaagcctg

SEQ ID NO: 5288096 - DNA, 25 bp, Homo sapien
ctgtgcgggaactcggccaccgcgt

SEQ ID NO: 5288097 - DNA, 25 bp, Homo sapien
gccaccgcgtgctccgggacggtcc

SEQ ID NO: 5288098 - DNA, 25 bp, Homo sapien
gcgtgctccgggacggtccccgcgc

SEQ ID NO: 5288099 - DNA, 25 bp, Homo sapien
tgtgcgggaactcggccaccgcgtg

SEQ ID NO: 5288100 - DNA, 25 bp, Homo sapien
caggcccgggatccgaccgggagag

SEQ ID NO: 5288101 - DNA, 25 bp, Homo sapien
cgatctcccgccgtcaggcccggga

SEQ ID NO: 5288102 - DNA, 25 bp, Homo sapien
ggagcgcgatctcccgccgtcaggc

SEQ ID NO: 5288103 - DNA, 25 bp, Homo sapien
cggccggagcgcgatctcccgccgt

SEQ ID NO: 5288104 - DNA, 25 bp, Homo sapien
gagcgcgggccgagcccggggaagc

SEQ ID NO: 5288105 - DNA, 25 bp, Homo sapien
gagcccggggaagcccgccagcatc

SEQ ID NO: 5288106 - DNA, 25 bp, Homo sapien
gccagcatcctctcgcccgcccgcg

SEQ ID NO: 5288107 - DNA, 25 bp, Homo sapien
ggggaagcccgccagcatcctctcg

SEQ ID NO: 5288108 - DNA, 25 bp, Homo sapien
gcctgaaaggcaggcgttccaggtg

SEQ ID NO: 5288109 - DNA, 25 bp, Homo sapien
ctgaaaggcaggcgttccaggtggc

SEQ ID NO: 5288110 - DNA, 25 bp, Homo sapien
ggcctgaaaggcaggcgttccaggt

SEQ ID NO: 5288111 - DNA, 25 bp, Homo sapien
tgaaaggcaggcgttccaggtggct

SEQ ID NO: 5288112 - DNA, 25 bp, Homo sapien
cagtgggacagcagtaggcccttgc

SEQ ID NO: 5288113 - DNA, 25 bp, Homo sapien
gggtgaatattcctgggcaagagag

SEQ ID NO: 5288114 - DNA, 25 bp, Homo sapien
ctgtggatatgggaaacgcagtggg

SEQ ID NO: 5288115 - DNA, 25 bp, Homo sapien
cagtaggcccttgcgaggactcccg

SEQ ID NO: 5288116 - DNA, 25 bp, Homo sapien
ctggcaaggtgctgctggggtgtgc

SEQ ID NO: 5288117 - DNA, 25 bp, Homo sapien
tccacacaggacgtgggctctgctg

SEQ ID NO: 5288118 - DNA, 25 bp, Homo sapien
gccctcgggtgctgtttctaggccc

SEQ ID NO: 5288119 - DNA, 25 bp, Homo sapien
ctctcctctcctcgatcggtgccat

SEQ ID NO: 5288120 - DNA, 25 bp, Homo sapien
ggctgccctcgggtgctgtttctag

SEQ ID NO: 5288121 - DNA, 25 bp, Homo sapien
gctgcaacaggccagatcccttgtt

SEQ ID NO: 5288122 - DNA, 25 bp, Homo sapien
ttccaagttaccctcagctgcaaca

SEQ ID NO: 5288123 - DNA, 25 bp, Homo sapien
gttaccctcagctgcaacaggccag

SEQ ID NO: 5288124 - DNA, 25 bp, Homo sapien
caacaggccagatcccttgttccag

SEQ ID NO: 5288125 - DNA, 25 bp, Homo sapien
cttggtcatttagggcaccctctcc

SEQ ID NO: 5288126 - DNA, 25 bp, Homo sapien
tcatttagggcaccctctccttgtt

SEQ ID NO: 5288127 - DNA, 25 bp, Homo sapien
ctctcagtgtccaggtctccccagt

SEQ ID NO: 5288128 - DNA, 25 bp, Homo sapien
cagtgtccaggtctccccagttctt

SEQ ID NO: 5288129 - DNA, 25 bp, Homo sapien
tttctatggcaagggaaaggcctca

SEQ ID NO: 5288130 - DNA, 25 bp, Homo sapien
gcaacttgtctgtaaggtcacacca

SEQ ID NO: 5288131 - DNA, 25 bp, Homo sapien
ccaactttgctgaggagtggccctg

SEQ ID NO: 5288132 - DNA, 25 bp, Homo sapien
gcaatacggctgaatgaggttccca

SEQ ID NO: 5288133 - DNA, 25 bp, Homo sapien
ggtgaagaagcacagcaagtttccg

SEQ ID NO: 5288134 - DNA, 25 bp, Homo sapien
tgccaggtgctacacatttgtcagg

SEQ ID NO: 5288135 - DNA, 25 bp, Homo sapien
ttcaggagggctgtccgagcattca

SEQ ID NO: 5288136 - DNA, 25 bp, Homo sapien
caagtttccgatacgctttattgac

SEQ ID NO: 5288137 - DNA, 25 bp, Homo sapien
gagaccaaagaagaaacacgacaga

SEQ ID NO: 5288138 - DNA, 25 bp, Homo sapien
ggttccgataaaccagcagcgctcc

SEQ ID NO: 5288139 - DNA, 25 bp, Homo sapien
gtgcttctccaatccggcggttccg

SEQ ID NO: 5288140 - DNA, 25 bp, Homo sapien
ccaaagaagaaacacgacagagatc

SEQ ID NO: 5288141 - DNA, 25 bp, Homo sapien
tgctattggtggtagggcgtttccc

SEQ ID NO: 5288142 - DNA, 25 bp, Homo sapien
tctttggtgaaactagcactgctat

SEQ ID NO: 5288143 - DNA, 25 bp, Homo sapien
gcatgtcccaactgtctttactatt

SEQ ID NO: 5288144 - DNA, 25 bp, Homo sapien
tcgaattctgcgaatggcatctgct

SEQ ID NO: 5288145 - DNA, 25 bp, Homo sapien
tttatccattagttctatccaagat

SEQ ID NO: 5288146 - DNA, 25 bp, Homo sapien
ttatccattagttctatccaagatg

SEQ ID NO: 5288147 - DNA, 25 bp, Homo sapien
tccattagttctatccaagatgtat

SEQ ID NO: 5288148 - DNA, 25 bp, Homo sapien
tatccattagttctatccaagatgt

SEQ ID NO: 5288149 - DNA, 25 bp, Homo sapien
gaatactggactagacttcctgcca

SEQ ID NO: 5288150 - DNA, 25 bp, Homo sapien
caagacggctccctgagagataagc

SEQ ID NO: 5288151 - DNA, 25 bp, Homo sapien
cataaaagggatcacagttcacgga

SEQ ID NO: 5288152 - DNA, 25 bp, Homo sapien
tggacaacagcaagtgcaagacggc

SEQ ID NO: 5288153 - DNA, 25 bp, Homo sapien
tcaggttgtgatgtgagcgcctccc

SEQ ID NO: 5288154 - DNA, 25 bp, Homo sapien
taaagtggccatctgttcaggttgt

SEQ ID NO: 5288155 - DNA, 25 bp, Homo sapien
ttcctgcttgattggcgaggcctta

SEQ ID NO: 5288156 - DNA, 25 bp, Homo sapien
gcttaattcagcctgtcagccaagg

SEQ ID NO: 5288157 - DNA, 25 bp, Homo sapien
ttcatctacacagcgatgtttggta

SEQ ID NO: 5288158 - DNA, 25 bp, Homo sapien
ttcagcccaaagacgtccttcactt

SEQ ID NO: 5288159 - DNA, 25 bp, Homo sapien
gaaccctttgctttcagcccaaaga

SEQ ID NO: 5288160 - DNA, 25 bp, Homo sapien
ctacacagcgatgtttggtacaatc

SEQ ID NO: 5288161 - DNA, 25 bp, Homo sapien
tccactctttccctagaaatctgaa

SEQ ID NO: 5288162 - DNA, 25 bp, Homo sapien
gctccactctttccctagaaatctg

SEQ ID NO: 5288163 - DNA, 25 bp, Homo sapien
caaagctccactctttccctagaaa

SEQ ID NO: 5288164 - DNA, 25 bp, Homo sapien
actctttccctagaaatctgaacac

SEQ ID NO: 5288165 - DNA, 25 bp, Homo sapien
tagaccagtatcacaccctgtgtgt

SEQ ID NO: 5288166 - DNA, 25 bp, Homo sapien
cttgttggcacaaactacaaatata

SEQ ID NO: 5288167 - DNA, 25 bp, Homo sapien
caagggcgtcaaaggagtctttctg

SEQ ID NO: 5288168 - DNA, 25 bp, Homo sapien
tgccagccacgcatcaagggcgtca

SEQ ID NO: 5288169 - DNA, 25 bp, Homo sapien
tagtgtttgctattgtatctgtttc

SEQ ID NO: 5288170 - DNA, 25 bp, Homo sapien
aaaggacagatacacaaaacgtagt

SEQ ID NO: 5288171 - DNA, 25 bp, Homo sapien
tgtgatgttataagaatgtatctca

SEQ ID NO: 5288172 - DNA, 25 bp, Homo sapien
cattaacctggcaaagtgtgttctt

SEQ ID NO: 5288173 - DNA, 25 bp, Homo sapien
gtcacttaacctctctgcgtctcag

SEQ ID NO: 5288174 - DNA, 25 bp, Homo sapien
caagtcacttaacctctctgcgtct

SEQ ID NO: 5288175 - DNA, 25 bp, Homo sapien
agtcacttaacctctctgcgtctca

SEQ ID NO: 5288176 - DNA, 25 bp, Homo sapien
cacttaacctctctgcgtctcagtt

SEQ ID NO: 5288177 - DNA, 25 bp, Homo sapien
ccaccaacaatactggatataggtt

SEQ ID NO: 5288178 - DNA, 25 bp, Homo sapien
tctattaactcaaggctctgaaggc

SEQ ID NO: 5288179 - DNA, 25 bp, Homo sapien
tgaaggcaagccacgatcaagctaa

SEQ ID NO: 5288180 - DNA, 25 bp, Homo sapien
gaggtaaaaagcaaaagtcctctga

SEQ ID NO: 5288181 - DNA, 25 bp, Homo sapien
atgtccagccatatcaaagatgtta

SEQ ID NO: 5288182 - DNA, 25 bp, Homo sapien
ctcacagtatcgctttataatacag

SEQ ID NO: 5288183 - DNA, 25 bp, Homo sapien
cacagtatcgctttataatacagct

SEQ ID NO: 5288184 - DNA, 25 bp, Homo sapien
gactccatagtcaattccaattgtt

SEQ ID NO: 5288185 - DNA, 25 bp, Homo sapien
tcaattccaattgttgccaggtatt

SEQ ID NO: 5288186 - DNA, 25 bp, Homo sapien
ctgtgaacgttgaaaaaccatcatc

SEQ ID NO: 5288187 - DNA, 25 bp, Homo sapien
aactgtgaacgttgaaaaaccatca

SEQ ID NO: 5288188 - DNA, 25 bp, Homo sapien
actgtgaacgttgaaaaaccatcat

SEQ ID NO: 5288189 - DNA, 25 bp, Homo sapien
tgtgaacgttgaaaaaccatcatca

SEQ ID NO: 5288190 - DNA, 25 bp, Homo sapien
ccacttcggcgttgcccatggagat

SEQ ID NO: 5288191 - DNA, 25 bp, Homo sapien
gttgcccatggagatgactttgatg

SEQ ID NO: 5288192 - DNA, 25 bp, Homo sapien
ttccgcttcggcatgttggcctcca

SEQ ID NO: 5288193 - DNA, 25 bp, Homo sapien
gactttgatgcggagagacctgccg

SEQ ID NO: 5288194 - DNA, 25 bp, Homo sapien
tcaggcctcctcgtccaatggcgga

SEQ ID NO: 5288195 - DNA, 25 bp, Homo sapien
ccgcctcggtctcttcttgtgcacc

SEQ ID NO: 5288196 - DNA, 25 bp, Homo sapien
aggcctcctcgtccaatggcggagc

SEQ ID NO: 5288197 - DNA, 25 bp, Homo sapien
cggtctcttcttgtgcaccgctggc

SEQ ID NO: 5288198 - DNA, 25 bp, Homo sapien
cgctgctcgccatccccgccgctgc

SEQ ID NO: 5288199 - DNA, 25 bp, Homo sapien
gcagcaggcgcgggcggttgggagc

SEQ ID NO: 5288200 - DNA, 25 bp, Homo sapien
tgttcgcttcgaacgtgacctcgac

SEQ ID NO: 5288201 - DNA, 25 bp, Homo sapien
ggagctgtggacgtcagtttcctca

SEQ ID NO: 5288202 - DNA, 25 bp, Homo sapien
gtgttaacgctaagccaggctggag

SEQ ID NO: 5288203 - DNA, 25 bp, Homo sapien
agaaaggcttggtctactgcaggtg

SEQ ID NO: 5288204 - DNA, 25 bp, Homo sapien
acagccgatgcacctccagaatttt

SEQ ID NO: 5288205 - DNA, 25 bp, Homo sapien
ggctgctggcacagccgatgcacct

SEQ ID NO: 5288206 - DNA, 25 bp, Homo sapien
tttgctgagaccaagggcaatgaca

SEQ ID NO: 5288207 - DNA, 25 bp, Homo sapien
gatgcaggatcagccttccctgggc

SEQ ID NO: 5288208 - DNA, 25 bp, Homo sapien
gaagtctgaaactagttgttatcaa

SEQ ID NO: 5288209 - DNA, 25 bp, Homo sapien
acaaagaagtctgaaactagttgtt

SEQ ID NO: 5288210 - DNA, 25 bp, Homo sapien
aagaagtctgaaactagttgttatc

SEQ ID NO: 5288211 - DNA, 25 bp, Homo sapien
gaaactagttgttatcaattaggtg

SEQ ID NO: 5288212 - DNA, 25 bp, Homo sapien
gatgtaaggctggcctgttacatca

SEQ ID NO: 5288213 - DNA, 25 bp, Homo sapien
atgtaaggctggcctgttacatcat

SEQ ID NO: 5288214 - DNA, 25 bp, Homo sapien
tgtaaggctggcctgttacatcatc

SEQ ID NO: 5288215 - DNA, 25 bp, Homo sapien
tgatgtaaggctggcctgttacatc

SEQ ID NO: 5288216 - DNA, 25 bp, Homo sapien
gggagtgggcatcctttaccagtga

SEQ ID NO: 5288217 - DNA, 25 bp, Homo sapien
ccatggtggccctattctggtggca

SEQ ID NO: 5288218 - DNA, 25 bp, Homo sapien
tggcaggaccttgatagaatttggc

SEQ ID NO: 5288219 - DNA, 25 bp, Homo sapien
tgtcctctagcaagagagcatgtga

SEQ ID NO: 5288220 - DNA, 25 bp, Homo sapien
cattgctgacgaagtccttgtcttg

SEQ ID NO: 5288221 - DNA, 25 bp, Homo sapien
ctgagaggtgacatggcacattgct

SEQ ID NO: 5288222 - DNA, 25 bp, Homo sapien
tgacgaagtccttgtcttgattcct

SEQ ID NO: 5288223 - DNA, 25 bp, Homo sapien
ggtgacatggcacattgctgacgaa

SEQ ID NO: 5288224 - DNA, 25 bp, Homo sapien
tgcatgttggcgtgtagacgtctga

SEQ ID NO: 5288225 - DNA, 25 bp, Homo sapien
cagacatcagatatagactcaaact

SEQ ID NO: 5288226 - DNA, 25 bp, Homo sapien
gcgtgtagacgtctgagcttctcca

SEQ ID NO: 5288227 - DNA, 25 bp, Homo sapien
aactcaactttgtctgccatgtgca

SEQ ID NO: 5288228 - DNA, 25 bp, Homo sapien
gagctttggggaccacaatgaggat

SEQ ID NO: 5288229 - DNA, 25 bp, Homo sapien
agaaagaaaggccccaggaagagct

SEQ ID NO: 5288230 - DNA, 25 bp, Homo sapien
ttggggaccacaatgaggataggtc

SEQ ID NO: 5288231 - DNA, 25 bp, Homo sapien
aggaagagctttggggaccacaatg

SEQ ID NO: 5288232 - DNA, 25 bp, Homo sapien
gattggttccgtggtcagtcagtgc

SEQ ID NO: 5288233 - DNA, 25 bp, Homo sapien
tggttccgtggtcagtcagtgcttg

SEQ ID NO: 5288234 - DNA, 25 bp, Homo sapien
gagattggttccgtggtcagtcagt

SEQ ID NO: 5288235 - DNA, 25 bp, Homo sapien
ttagagattggttccgtggtcagtc

SEQ ID NO: 5288236 - DNA, 25 bp, Homo sapien
aaggcctgccttttgggcactgcca

SEQ ID NO: 5288237 - DNA, 25 bp, Homo sapien
tggggggaggcccatacggcagggc

SEQ ID NO: 5288238 - DNA, 25 bp, Homo sapien
tacggcagggccatctgagtgtaag

SEQ ID NO: 5288239 - DNA, 25 bp, Homo sapien
gtgccgagtagcaagcagaggaagc

SEQ ID NO: 5288240 - DNA, 25 bp, Homo sapien
caggggaccttcaatgacaaaacaa

SEQ ID NO: 5288241 - DNA, 25 bp, Homo sapien
actctcaggggaccttcaatgacaa

SEQ ID NO: 5288242 - DNA, 25 bp, Homo sapien
ctaggcctccggcactgtctcagca

SEQ ID NO: 5288243 - DNA, 25 bp, Homo sapien
ctccggcactgtctcagcacaatca

SEQ ID NO: 5288244 - DNA, 25 bp, Homo sapien
gaatgcctcgacgtgccaagtagta

SEQ ID NO: 5288245 - DNA, 25 bp, Homo sapien
gaaatttctctttggcaccgtgacc

SEQ ID NO: 5288246 - DNA, 25 bp, Homo sapien
tggccctggctctacgtttcggagg

SEQ ID NO: 5288247 - DNA, 25 bp, Homo sapien
tgctgaccacaataggaaactgggc

SEQ ID NO: 5288248 - DNA, 25 bp, Homo sapien
atgtgcttgcttggctaagtccgct

SEQ ID NO: 5288249 - DNA, 25 bp, Homo sapien
gaacgttctagcagtttcctccaag

SEQ ID NO: 5288250 - DNA, 25 bp, Homo sapien
gtccgctgtttcagagagccttctg

SEQ ID NO: 5288251 - DNA, 25 bp, Homo sapien
ctccaagtcgtcacaagcaagaatt

SEQ ID NO: 5288252 - DNA, 25 bp, Homo sapien
ttcctcgaccatcagctgaaacctg

SEQ ID NO: 5288253 - DNA, 25 bp, Homo sapien
cccctagggtattttcgcttcagtg

SEQ ID NO: 5288254 - DNA, 25 bp, Homo sapien
tgcaaagtagtcttctcccctaggg

SEQ ID NO: 5288255 - DNA, 25 bp, Homo sapien
acaggttctttaattgcatcaggag

SEQ ID NO: 5288256 - DNA, 25 bp, Homo sapien
tggcaattgcataagcttcatctgg

SEQ ID NO: 5288257 - DNA, 25 bp, Homo sapien
ttggcaattgcataagcttcatctg

SEQ ID NO: 5288258 - DNA, 25 bp, Homo sapien
tttggcaattgcataagcttcatct

SEQ ID NO: 5288259 - DNA, 25 bp, Homo sapien
cagctggcatggatggaagggctca

SEQ ID NO: 5288260 - DNA, 25 bp, Homo sapien
taagatgtaccaagccagcattgac

SEQ ID NO: 5288261 - DNA, 25 bp, Homo sapien
ttaggcctttggatgtctaagggcc

SEQ ID NO: 5288262 - DNA, 25 bp, Homo sapien
aagcaagtggtcagtgggatagccc

SEQ ID NO: 5288263 - DNA, 25 bp, Homo sapien
catgaagccttgcaatggtctccca

SEQ ID NO: 5288264 - DNA, 25 bp, Homo sapien
atgggcacatgagtccaaactctga

SEQ ID NO: 5288265 - DNA, 25 bp, Homo sapien
cattacaagtagaaggatcaccatc

SEQ ID NO: 5288266 - DNA, 25 bp, Homo sapien
ggaggtacttttctattccacatga

SEQ ID NO: 5288267 - DNA, 25 bp, Homo sapien
cacagagaaattgaccaggtgcagt

SEQ ID NO: 5288268 - DNA, 25 bp, Homo sapien
cagaagcatacttggacatagaagc

SEQ ID NO: 5288269 - DNA, 25 bp, Homo sapien
tcacagaagcatacttggacataga

SEQ ID NO: 5288270 - DNA, 25 bp, Homo sapien
ttacatacacatactccaatttata

SEQ ID NO: 5288271 - DNA, 25 bp, Homo sapien
gaccgatatgctctgggttggaaac

SEQ ID NO: 5288272 - DNA, 25 bp, Homo sapien
taaaactcactcttgaaaggcctgg

SEQ ID NO: 5288273 - DNA, 25 bp, Homo sapien
atggcagcacggcacttcagcctag

SEQ ID NO: 5288274 - DNA, 25 bp, Homo sapien
gcgtcatagatacttcccttcggaa

SEQ ID NO: 5288275 - DNA, 25 bp, Homo sapien
aagtgactcagaagcgcaaggcgaa

SEQ ID NO: 5288276 - DNA, 25 bp, Homo sapien
caagagtcagcttagcccagaggta

SEQ ID NO: 5288277 - DNA, 25 bp, Homo sapien
caagaggtaagagaccctcgggaat

SEQ ID NO: 5288278 - DNA, 25 bp, Homo sapien
cctgggccaccagtatcagttcctt

SEQ ID NO: 5288279 - DNA, 25 bp, Homo sapien
ggtggagacatcacgaggggtcggg

SEQ ID NO: 5288280 - DNA, 25 bp, Homo sapien
gcccagcgggcgagtgtggtccctg

SEQ ID NO: 5288281 - DNA, 25 bp, Homo sapien
ctgctggacgtttttcagagttggg

SEQ ID NO: 5288282 - DNA, 25 bp, Homo sapien
tcataaggagcttgtgttggcctcc

SEQ ID NO: 5288283 - DNA, 25 bp, Homo sapien
gccatgtggtccaaaattgcccttt

SEQ ID NO: 5288284 - DNA, 25 bp, Homo sapien
ttccttctccgttagtcacatttcc

SEQ ID NO: 5288285 - DNA, 25 bp, Homo sapien
cagtgccatgtggtccaaaattgcc

SEQ ID NO: 5288286 - DNA, 25 bp, Homo sapien
tttccttctccgttagtcacatttc

SEQ ID NO: 5288287 - DNA, 25 bp, Homo sapien
tagccccacgtgtggtgtgcacgga

SEQ ID NO: 5288288 - DNA, 25 bp, Homo sapien
tttcaggcagtgtggcatggagtca

SEQ ID NO: 5288289 - DNA, 25 bp, Homo sapien
gagggactgaacacgagcatttccc

SEQ ID NO: 5288290 - DNA, 25 bp, Homo sapien
gaccctcattcccatagttttggca

SEQ ID NO: 5288291 - DNA, 25 bp, Homo sapien
taacattagggttccccgtggcagc

SEQ ID NO: 5288292 - DNA, 25 bp, Homo sapien
acctgagatccccagatgtttctgc

SEQ ID NO: 5288293 - DNA, 25 bp, Homo sapien
ctgagatccccagatgtttctgccc

SEQ ID NO: 5288294 - DNA, 25 bp, Homo sapien
tgggacttggcagtcgcctccctgg

SEQ ID NO: 5288295 - DNA, 25 bp, Homo sapien
ctcagtagagtgttgggttgtctgc

SEQ ID NO: 5288296 - DNA, 25 bp, Homo sapien
aacctggattctggccaaataggcc

SEQ ID NO: 5288297 - DNA, 25 bp, Homo sapien
caaataggccagaatcggaaaggtg

SEQ ID NO: 5288298 - DNA, 25 bp, Homo sapien
gtctgctgacatggagtagaacctg

SEQ ID NO: 5288299 - DNA, 25 bp, Homo sapien
tgaccagaaaatggcagctggccgg

SEQ ID NO: 5288300 - DNA, 25 bp, Homo sapien
tcttcatgaccagaaaatggcagct

SEQ ID NO: 5288301 - DNA, 25 bp, Homo sapien
gcagaagtgagtctatttttcccaa

SEQ ID NO: 5288302 - DNA, 25 bp, Homo sapien
tgcagaagtgagtctatttttccca

SEQ ID NO: 5288303 - DNA, 25 bp, Homo sapien
gcaggcgggtcgtgctgaaaccagg

SEQ ID NO: 5288304 - DNA, 25 bp, Homo sapien
ggcgggtcgtgctgaaaccaggcat

SEQ ID NO: 5288305 - DNA, 25 bp, Homo sapien
tggcaggcgggtcgtgctgaaacca

SEQ ID NO: 5288306 - DNA, 25 bp, Homo sapien
cttggcaggcgggtcgtgctgaaac

SEQ ID NO: 5288307 - DNA, 25 bp, Homo sapien
ccaaatctggcctaggtctgaagac

SEQ ID NO: 5288308 - DNA, 25 bp, Homo sapien
cccaaatctggcctaggtctgaaga

SEQ ID NO: 5288309 - DNA, 25 bp, Homo sapien
caaatctggcctaggtctgaagact

SEQ ID NO: 5288310 - DNA, 25 bp, Homo sapien
ttttactttattcacacagtttaca

SEQ ID NO: 5288311 - DNA, 25 bp, Homo sapien
tacgtatttttactttattcacaca

SEQ ID NO: 5288312 - DNA, 25 bp, Homo sapien
acacagtttacattcaaagtcagag

SEQ ID NO: 5288313 - DNA, 25 bp, Homo sapien
ttactttattcacacagtttacatt

SEQ ID NO: 5288314 - DNA, 25 bp, Homo sapien
gttttatttcctaactacaggcagc

SEQ ID NO: 5288315 - DNA, 25 bp, Homo sapien
tttatttcctaactacaggcagctt

SEQ ID NO: 5288316 - DNA, 25 bp, Homo sapien
ttttatttcctaactacaggcagct

SEQ ID NO: 5288317 - DNA, 25 bp, Homo sapien
tatttcctaactacaggcagcttta

SEQ ID NO: 5288318 - DNA, 25 bp, Homo sapien
attatctgccacgaccccccaggct

SEQ ID NO: 5288319 - DNA, 25 bp, Homo sapien
ctgattatctgccacgaccccccag

SEQ ID NO: 5288320 - DNA, 25 bp, Homo sapien
tatctgccacgaccccccaggctgg

SEQ ID NO: 5288321 - DNA, 25 bp, Homo sapien
aggctgattatctgccacgaccccc

SEQ ID NO: 5288322 - DNA, 25 bp, Homo sapien
gttagggtacaccttcactgggcgc

SEQ ID NO: 5288323 - DNA, 25 bp, Homo sapien
gaaaccgccgtagcgcttgtccttg

SEQ ID NO: 5288324 - DNA, 25 bp, Homo sapien
tcttctcggaggtcatgaaaccgcc

SEQ ID NO: 5288325 - DNA, 25 bp, Homo sapien
gcgtttttgaacagcgtcaccaggg

SEQ ID NO: 5288326 - DNA, 25 bp, Homo sapien
cgcccgctgagacgtcctcgcgctt

SEQ ID NO: 5288327 - DNA, 25 bp, Homo sapien
gggccgcagtcttcgcccgctgaga

SEQ ID NO: 5288328 - DNA, 25 bp, Homo sapien
agtcttcgcccgctgagacgtcctc

SEQ ID NO: 5288329 - DNA, 25 bp, Homo sapien
caggcagcgggccgcagtcttcgcc

SEQ ID NO: 5288330 - DNA, 25 bp, Homo sapien
gctgctgttgcggcggccgaatcgg

SEQ ID NO: 5288331 - DNA, 25 bp, Homo sapien
gttgcggcggccgaatcggtcccag

SEQ ID NO: 5288332 - DNA, 25 bp, Homo sapien
ctgttgcggcggccgaatcggtccc

SEQ ID NO: 5288333 - DNA, 25 bp, Homo sapien
cgaatcggtcccagcggaagtggcc

SEQ ID NO: 5288334 - DNA, 25 bp, Homo sapien
ggttctcggtcagaggctgctcgtc

SEQ ID NO: 5288335 - DNA, 25 bp, Homo sapien
gctgctcgtcgccatttcccgggaa

SEQ ID NO: 5288336 - DNA, 25 bp, Homo sapien
tctcggccgagaggtcgggcttgca

SEQ ID NO: 5288337 - DNA, 25 bp, Homo sapien
tcccgggaacatgggagtctcggcc

SEQ ID NO: 5288338 - DNA, 25 bp, Homo sapien
gcaccagccacgcacttccatggag

SEQ ID NO: 5288339 - DNA, 25 bp, Homo sapien
ggcaccagccacgcacttccatgga

SEQ ID NO: 5288340 - DNA, 25 bp, Homo sapien
cagcaggttgctttccgtggtgagg

SEQ ID NO: 5288341 - DNA, 25 bp, Homo sapien
gcaggttgctttccgtggtgaggtc

SEQ ID NO: 5288342 - DNA, 25 bp, Homo sapien
aagcagcaaggccagcaacagggcc

SEQ ID NO: 5288343 - DNA, 25 bp, Homo sapien
ccgagcggctgcagcacgatctcgg

SEQ ID NO: 5288344 - DNA, 25 bp, Homo sapien
aacagggcccccgagcggctgcagc

SEQ ID NO: 5288345 - DNA, 25 bp, Homo sapien
agcaaggccagcaacagggcccccg

SEQ ID NO: 5288346 - DNA, 25 bp, Homo sapien
tgcagaagcaaacaagattggtggg

SEQ ID NO: 5288347 - DNA, 25 bp, Homo sapien
gaagcaaacaagattggtgggaccc

SEQ ID NO: 5288348 - DNA, 25 bp, Homo sapien
ctgcagaagcaaacaagattggtgg

SEQ ID NO: 5288349 - DNA, 25 bp, Homo sapien
cagaagcaaacaagattggtgggac

SEQ ID NO: 5288350 - DNA, 25 bp, Homo sapien
cagatacttttggagaatccagcaa

SEQ ID NO: 5288351 - DNA, 25 bp, Homo sapien
gatacttttggagaatccagcaagt

SEQ ID NO: 5288352 - DNA, 25 bp, Homo sapien
tacttttggagaatccagcaagtgc

SEQ ID NO: 5288353 - DNA, 25 bp, Homo sapien
ctgcagatacttttggagaatccag

SEQ ID NO: 5288354 - DNA, 25 bp, Homo sapien
tcatagcgcggccacctcgggtgcg

SEQ ID NO: 5288355 - DNA, 25 bp, Homo sapien
tttgtcgagaactcgggaccgcgga

SEQ ID NO: 5288356 - DNA, 25 bp, Homo sapien
ctagcaagctctcggagcctccgga

SEQ ID NO: 5288357 - DNA, 25 bp, Homo sapien
cgcagtcggcgcagaaagtttgtcg

SEQ ID NO: 5288358 - DNA, 25 bp, Homo sapien
cagctcagctactggcggcttctca

SEQ ID NO: 5288359 - DNA, 25 bp, Homo sapien
gcgctcctctgtccttatatacttg

SEQ ID NO: 5288360 - DNA, 25 bp, Homo sapien
gcctctctcggtcgcggctcttctt

SEQ ID NO: 5288361 - DNA, 25 bp, Homo sapien
ttggtcccgcgctcctctgtcctta

SEQ ID NO: 5288362 - DNA, 25 bp, Homo sapien
gtccttatatacttgccgagctctc

SEQ ID NO: 5288363 - DNA, 25 bp, Homo sapien
gcgcgggactttgaccttcccggca

SEQ ID NO: 5288364 - DNA, 25 bp, Homo sapien
tggtgggcgcgggactttgaccttc

SEQ ID NO: 5288365 - DNA, 25 bp, Homo sapien
ctggtgggcgcgggactttgacctt

SEQ ID NO: 5288366 - DNA, 25 bp, Homo sapien
cgggactttgaccttcccggcagca

SEQ ID NO: 5288367 - DNA, 25 bp, Homo sapien
tcgcatttggcggtaaatatcaccg

SEQ ID NO: 5288368 - DNA, 25 bp, Homo sapien
ggcatctgcctggttcgcatttggc

SEQ ID NO: 5288369 - DNA, 25 bp, Homo sapien
gtaaatatcaccgtctgcacacggg

SEQ ID NO: 5288370 - DNA, 25 bp, Homo sapien
gaaactgtgatgtggaagtcgtggg

SEQ ID NO: 5288371 - DNA, 25 bp, Homo sapien
atcaagatgtagcccatccatcagc

SEQ ID NO: 5288372 - DNA, 25 bp, Homo sapien
tcaagatgtagcccatccatcagcc

SEQ ID NO: 5288373 - DNA, 25 bp, Homo sapien
tggccacttttcctaccaggggcat

SEQ ID NO: 5288374 - DNA, 25 bp, Homo sapien
cctctttggccacttttcctaccag

SEQ ID NO: 5288375 - DNA, 25 bp, Homo sapien
cctctgccttccacagaagtccatc

SEQ ID NO: 5288376 - DNA, 25 bp, Homo sapien
gaggcatgacctcctctgccttcca

SEQ ID NO: 5288377 - DNA, 25 bp, Homo sapien
tctgccttccacagaagtccatccc

SEQ ID NO: 5288378 - DNA, 25 bp, Homo sapien
tgccttccacagaagtccatcccca

SEQ ID NO: 5288379 - DNA, 25 bp, Homo sapien
tcactcatccacattgcaactgttc

SEQ ID NO: 5288380 - DNA, 25 bp, Homo sapien
tggattgtgagtgagagggccaaga

SEQ ID NO: 5288381 - DNA, 25 bp, Homo sapien
gattgtgagtgagagggccaagatg

SEQ ID NO: 5288382 - DNA, 25 bp, Homo sapien
cactcatccacattgcaactgttct

SEQ ID NO: 5288383 - DNA, 25 bp, Homo sapien
cgggctggagtaccgtggtgcaatt

SEQ ID NO: 5288384 - DNA, 25 bp, Homo sapien
ctggagtaccgtggtgcaattatag

SEQ ID NO: 5288385 - DNA, 25 bp, Homo sapien
ttcagtagagataaggtctcgcgat

SEQ ID NO: 5288386 - DNA, 25 bp, Homo sapien
tttttcagtagagataaggtctcgc

SEQ ID NO: 5288387 - DNA, 25 bp, Homo sapien
ctgtcttgccctcggggagttcagc

SEQ ID NO: 5288388 - DNA, 25 bp, Homo sapien
gtcttgccctcggggagttcagccc

SEQ ID NO: 5288389 - DNA, 25 bp, Homo sapien
gttgctgtcttgccctcggggagtt

SEQ ID NO: 5288390 - DNA, 25 bp, Homo sapien
tgctgtcttgccctcggggagttca

SEQ ID NO: 5288391 - DNA, 25 bp, Homo sapien
gggcggcaatcgcccgcgagccttg

SEQ ID NO: 5288392 - DNA, 25 bp, Homo sapien
gcgagccttggggcgcggcacccag

SEQ ID NO: 5288393 - DNA, 25 bp, Homo sapien
gcggcaatcgcccgcgagccttggg

SEQ ID NO: 5288394 - DNA, 25 bp, Homo sapien
gagccttggggcgcggcacccaggg

SEQ ID NO: 5288395 - DNA, 25 bp, Homo sapien
gccaccgcattaggccgaatccggt

SEQ ID NO: 5288396 - DNA, 25 bp, Homo sapien
cgaatccggtgccttctagaaatgg

SEQ ID NO: 5288397 - DNA, 25 bp, Homo sapien
cattaggccgaatccggtgccttct

SEQ ID NO: 5288398 - DNA, 25 bp, Homo sapien
ccttctagaaatggcctcctgcagc

SEQ ID NO: 5288399 - DNA, 25 bp, Homo sapien
tctgttttcaagaaagccgcgcgcc

SEQ ID NO: 5288400 - DNA, 25 bp, Homo sapien
ctctgttttcaagaaagccgcgcgc

SEQ ID NO: 5288401 - DNA, 25 bp, Homo sapien
actggctggttattcctcggttata

SEQ ID NO: 5288402 - DNA, 25 bp, Homo sapien
cggttataatagtaaagcacagatt

SEQ ID NO: 5288403 - DNA, 25 bp, Homo sapien
catgtccggcctgacagagggctca

SEQ ID NO: 5288404 - DNA, 25 bp, Homo sapien
cagctcctgactgtactggctggtt

SEQ ID NO: 5288405 - DNA, 25 bp, Homo sapien
gcaaatttagtaatatgggacccga

SEQ ID NO: 5288406 - DNA, 25 bp, Homo sapien
tcgacccgaaatacgcccgaggcat

SEQ ID NO: 5288407 - DNA, 25 bp, Homo sapien
ttctggggcaaatttagtaatatgg

SEQ ID NO: 5288408 - DNA, 25 bp, Homo sapien
agtaatatgggacccgagccctcga

SEQ ID NO: 5288409 - DNA, 25 bp, Homo sapien
taaacagctatgtcacgagcatcac

SEQ ID NO: 5288410 - DNA, 25 bp, Homo sapien
cctgaatgtcctagaaccagactgt

SEQ ID NO: 5288411 - DNA, 25 bp, Homo sapien
tcaagtgttctccagcacaagtaca

SEQ ID NO: 5288412 - DNA, 25 bp, Homo sapien
tgatgaaggcggaactgacagactt

SEQ ID NO: 5288413 - DNA, 25 bp, Homo sapien
caaaactctgctgcctcgggtcaga

SEQ ID NO: 5288414 - DNA, 25 bp, Homo sapien
caccttagctgggtctcggaaacac

SEQ ID NO: 5288415 - DNA, 25 bp, Homo sapien
tctagggctgtgcaaccaaatcggt

SEQ ID NO: 5288416 - DNA, 25 bp, Homo sapien
catgttctcaggcacagggttggag

SEQ ID NO: 5288417 - DNA, 25 bp, Homo sapien
gctccctggcaaacaggcaggactc

SEQ ID NO: 5288418 - DNA, 25 bp, Homo sapien
tgctccctggcaaacaggcaggact

SEQ ID NO: 5288419 - DNA, 25 bp, Homo sapien
tccctggcaaacaggcaggactccc

SEQ ID NO: 5288420 - DNA, 25 bp, Homo sapien
ctgctccctggcaaacaggcaggac

SEQ ID NO: 5288421 - DNA, 25 bp, Homo sapien
tacgcaatgacaaactcagattact

SEQ ID NO: 5288422 - DNA, 25 bp, Homo sapien
actgagagcaggcagcgtggagaat

SEQ ID NO: 5288423 - DNA, 25 bp, Homo sapien
tgacaaactcagattactcacctcc

SEQ ID NO: 5288424 - DNA, 25 bp, Homo sapien
gcgtggagaatacgcaatgacaaac

SEQ ID NO: 5288425 - DNA, 25 bp, Homo sapien
cctggtggccaattatcgggaagca

SEQ ID NO: 5288426 - DNA, 25 bp, Homo sapien
tccgcaccaagcagagtagcaacag

SEQ ID NO: 5288427 - DNA, 25 bp, Homo sapien
tgggccctgtgagacccctttggtg

SEQ ID NO: 5288428 - DNA, 25 bp, Homo sapien
gtgttcccatctaggcttccccaga

SEQ ID NO: 5288429 - DNA, 25 bp, Homo sapien
aagctaacaggtcccgggtgctctc

SEQ ID NO: 5288430 - DNA, 25 bp, Homo sapien
gatgttcaatagcaagaagtctctg

SEQ ID NO: 5288431 - DNA, 25 bp, Homo sapien
ggatgttcaatagcaagaagtctct

SEQ ID NO: 5288432 - DNA, 25 bp, Homo sapien
tcaaaagctaacaggtcccgggtgc

SEQ ID NO: 5288433 - DNA, 25 bp, Homo sapien
tctttggcatcatgcgccacctggc

SEQ ID NO: 5288434 - DNA, 25 bp, Homo sapien
aagttggcacaatcccaaagcccca

SEQ ID NO: 5288435 - DNA, 25 bp, Homo sapien
gaaactagcttcctgcttaggcagg

SEQ ID NO: 5288436 - DNA, 25 bp, Homo sapien
gattaagcatatctcagcttggcca

SEQ ID NO: 5288437 - DNA, 25 bp, Homo sapien
catctggtccattctagggcctggt

SEQ ID NO: 5288438 - DNA, 25 bp, Homo sapien
tctggtccattctagggcctggtca

SEQ ID NO: 5288439 - DNA, 25 bp, Homo sapien
atctggtccattctagggcctggtc

SEQ ID NO: 5288440 - DNA, 25 bp, Homo sapien
gcatctggtccattctagggcctgg

SEQ ID NO: 5288441 - DNA, 25 bp, Homo sapien
gaagaccttagcattggccagcggg

SEQ ID NO: 5288442 - DNA, 25 bp, Homo sapien
taaatagctgcacgggctgactcca

SEQ ID NO: 5288443 - DNA, 25 bp, Homo sapien
gagaccggccaccagctgtgtgaat

SEQ ID NO: 5288444 - DNA, 25 bp, Homo sapien
gccgcctgccttgtaggaagtagaa

SEQ ID NO: 5288445 - DNA, 25 bp, Homo sapien
catccttggtgaaaccctttgcgca

SEQ ID NO: 5288446 - DNA, 25 bp, Homo sapien
gaatggtgctggcacgacagctcag

SEQ ID NO: 5288447 - DNA, 25 bp, Homo sapien
cctttgcgcagaaggcaacgtggaa

SEQ ID NO: 5288448 - DNA, 25 bp, Homo sapien
gagatgatgtccaacccttttcgca

SEQ ID NO: 5288449 - DNA, 25 bp, Homo sapien
ctcttctgggtgctgatacttctct

SEQ ID NO: 5288450 - DNA, 25 bp, Homo sapien
tctctccatcctcatgttcttggtg

SEQ ID NO: 5288451 - DNA, 25 bp, Homo sapien
tctgggtgctgatacttctctccat

SEQ ID NO: 5288452 - DNA, 25 bp, Homo sapien
cttctgggtgctgatacttctctcc

SEQ ID NO: 5288453 - DNA, 25 bp, Homo sapien
tttaactttgtgtcgctacctcagt

SEQ ID NO: 5288454 - DNA, 25 bp, Homo sapien
ttgtgtcgctacctcagtttgcccc

SEQ ID NO: 5288455 - DNA, 25 bp, Homo sapien
ctttgtgtcgctacctcagtttgcc

SEQ ID NO: 5288456 - DNA, 25 bp, Homo sapien
aactttgtgtcgctacctcagtttg

SEQ ID NO: 5288457 - DNA, 25 bp, Homo sapien
tctgcctcgccaagcggctcatgtt

SEQ ID NO: 5288458 - DNA, 25 bp, Homo sapien
cgtcagtatagtggactgggaaacc

SEQ ID NO: 5288459 - DNA, 25 bp, Homo sapien
aaatactccttcagcggagcgaaga

SEQ ID NO: 5288460 - DNA, 25 bp, Homo sapien
gagcgaagaggtggcggatgactgg

SEQ ID NO: 5288461 - DNA, 25 bp, Homo sapien
ccagatgccagcacaacccgggtac

SEQ ID NO: 5288462 - DNA, 25 bp, Homo sapien
agccagatgccagcacaacccgggt

SEQ ID NO: 5288463 - DNA, 25 bp, Homo sapien
gccagatgccagcacaacccgggta

SEQ ID NO: 5288464 - DNA, 25 bp, Homo sapien
ccatttcagtgcaccataagatgtc

SEQ ID NO: 5288465 - DNA, 25 bp, Homo sapien
atttcagtgcaccataagatgtcct

SEQ ID NO: 5288466 - DNA, 25 bp, Homo sapien
ttccatttcagtgcaccataagatg

SEQ ID NO: 5288467 - DNA, 25 bp, Homo sapien
catttcagtgcaccataagatgtcc

SEQ ID NO: 5288468 - DNA, 25 bp, Homo sapien
tgcagctccagcttatcattcacag

SEQ ID NO: 5288469 - DNA, 25 bp, Homo sapien
gcagctccagcttatcattcacagt

SEQ ID NO: 5288470 - DNA, 25 bp, Homo sapien
ccaggatctcagtgtgggaaccacg

SEQ ID NO: 5288471 - DNA, 25 bp, Homo sapien
caggatctcagtgtgggaaccacgg

SEQ ID NO: 5288472 - DNA, 25 bp, Homo sapien
accccagaagtagcgggccctgtgt

SEQ ID NO: 5288473 - DNA, 25 bp, Homo sapien
acttctgcgatggtgggttgtcctc

SEQ ID NO: 5288474 - DNA, 25 bp, Homo sapien
gaacgttctagatcagcattgtcca

SEQ ID NO: 5288475 - DNA, 25 bp, Homo sapien
gcattgtccaaatgaacttctgcga

SEQ ID NO: 5288476 - DNA, 25 bp, Homo sapien
cacaagctgtcactggaacgttcta

SEQ ID NO: 5288477 - DNA, 25 bp, Homo sapien
gaggcggtagaactcaaagaagagc

SEQ ID NO: 5288478 - DNA, 25 bp, Homo sapien
ctcttgtcactaacgcccatggcca

SEQ ID NO: 5288479 - DNA, 25 bp, Homo sapien
gagaaatcgcgagatgtccctcttg

SEQ ID NO: 5288480 - DNA, 25 bp, Homo sapien
ccttgggccgcgcatcatgcaggag

SEQ ID NO: 5288481 - DNA, 25 bp, Homo sapien
agagaaagccatcagctggggctgt

SEQ ID NO: 5288482 - DNA, 25 bp, Homo sapien
gaagagaaagccatcagctggggct

SEQ ID NO: 5288483 - DNA, 25 bp, Homo sapien
cggaagagaaagccatcagctgggg

SEQ ID NO: 5288484 - DNA, 25 bp, Homo sapien
ctgagaggtcggaagagaaagccat

SEQ ID NO: 5288485 - DNA, 25 bp, Homo sapien
cgtagaggcccttgcgagcagggtt

SEQ ID NO: 5288486 - DNA, 25 bp, Homo sapien
atcaccagatcgaatgggccccact

SEQ ID NO: 5288487 - DNA, 25 bp, Homo sapien
cgagcagggttgacgatggagaggt

SEQ ID NO: 5288488 - DNA, 25 bp, Homo sapien
gcccccaatcaccagatcgaatggg

SEQ ID NO: 5288489 - DNA, 25 bp, Homo sapien
gggaggataaaggcaacgtgatggg

SEQ ID NO: 5288490 - DNA, 25 bp, Homo sapien
tgggaggataaaggcaacgtgatgg

SEQ ID NO: 5288491 - DNA, 25 bp, Homo sapien
ctgggaggataaaggcaacgtgatg

SEQ ID NO: 5288492 - DNA, 25 bp, Homo sapien
ggaggataaaggcaacgtgatgggc

SEQ ID NO: 5288493 - DNA, 25 bp, Homo sapien
ggggaagacgggctgcgccccacag

SEQ ID NO: 5288494 - DNA, 25 bp, Homo sapien
gctgcgccccacagcatggacatac

SEQ ID NO: 5288495 - DNA, 25 bp, Homo sapien
gggctgcgccccacagcatggacat

SEQ ID NO: 5288496 - DNA, 25 bp, Homo sapien
ggctgcgccccacagcatggacata

SEQ ID NO: 5288497 - DNA, 25 bp, Homo sapien
atgcttctgtgtgacgctgcggacg

SEQ ID NO: 5288498 - DNA, 25 bp, Homo sapien
acacctccgaggcaatgtagcggtc

SEQ ID NO: 5288499 - DNA, 25 bp, Homo sapien
accgtgatggagtcctcacacacct

SEQ ID NO: 5288500 - DNA, 25 bp, Homo sapien
gacgtccccgacgtacatgatcttc

SEQ ID NO: 5288501 - DNA, 25 bp, Homo sapien
cagacagcaccgttacttggagcca

SEQ ID NO: 5288502 - DNA, 25 bp, Homo sapien
cagcagacagcaccgttacttggag

SEQ ID NO: 5288503 - DNA, 25 bp, Homo sapien
tggcaccctggtctcggcaggtgag

SEQ ID NO: 5288504 - DNA, 25 bp, Homo sapien
agcaccgttacttggagccatctcc

SEQ ID NO: 5288505 - DNA, 25 bp, Homo sapien
catgcctcgtttggcctatctggaa

SEQ ID NO: 5288506 - DNA, 25 bp, Homo sapien
tatccatagtaaggacatcgaggct

SEQ ID NO: 5288507 - DNA, 25 bp, Homo sapien
ccggagagtacatggttccaggatc

SEQ ID NO: 5288508 - DNA, 25 bp, Homo sapien
gctgcagaaaactgaccggagagta

SEQ ID NO: 5288509 - DNA, 25 bp, Homo sapien
aagaatgtagctttggccgggtctg

SEQ ID NO: 5288510 - DNA, 25 bp, Homo sapien
gaatctgactaatgatcactcggcc

SEQ ID NO: 5288511 - DNA, 25 bp, Homo sapien
atttcgttttgccagagttgcccac

SEQ ID NO: 5288512 - DNA, 25 bp, Homo sapien
tccttactaaggaagcgcccagcag

SEQ ID NO: 5288513 - DNA, 25 bp, Homo sapien
gattccatcaaagagagacagcacc

SEQ ID NO: 5288514 - DNA, 25 bp, Homo sapien
ctgtagcgattccatcaaagagaga

SEQ ID NO: 5288515 - DNA, 25 bp, Homo sapien
agacagcacccggatgggcttcctc

SEQ ID NO: 5288516 - DNA, 25 bp, Homo sapien
gacagcacccggatgggcttcctct

SEQ ID NO: 5288517 - DNA, 25 bp, Homo sapien
tggttattagcgaagaacatctgga

SEQ ID NO: 5288518 - DNA, 25 bp, Homo sapien
aaattcctggtcgtggttattagcg

SEQ ID NO: 5288519 - DNA, 25 bp, Homo sapien
gtaggtacccttgtgcccgcacatg

SEQ ID NO: 5288520 - DNA, 25 bp, Homo sapien
cttgtgcccgcacatgtagcagttc

SEQ ID NO: 5288521 - DNA, 25 bp, Homo sapien
gttgtttccgcacatgagcacctca

SEQ ID NO: 5288522 - DNA, 25 bp, Homo sapien
ctgcagcagttgttgtttccgcaca

SEQ ID NO: 5288523 - DNA, 25 bp, Homo sapien
cagttgttgtttccgcacatgagca

SEQ ID NO: 5288524 - DNA, 25 bp, Homo sapien
tttccgcacatgagcacctcacggc

SEQ ID NO: 5288525 - DNA, 25 bp, Homo sapien
tcgtcgtactggtacgcacactcca

SEQ ID NO: 5288526 - DNA, 25 bp, Homo sapien
agtaggactggtagccgtcgtcgtc

SEQ ID NO: 5288527 - DNA, 25 bp, Homo sapien
ctggtacgcacactccagaaagcag

SEQ ID NO: 5288528 - DNA, 25 bp, Homo sapien
tagccgtcgtcgtcgtactggtacg

SEQ ID NO: 5288529 - DNA, 25 bp, Homo sapien
tggcacattcctccaacgaagaggg

SEQ ID NO: 5288530 - DNA, 25 bp, Homo sapien
tgcagttttggcacattcctccaac

SEQ ID NO: 5288531 - DNA, 25 bp, Homo sapien
gggtaacattgaggctcccacagga

SEQ ID NO: 5288532 - DNA, 25 bp, Homo sapien
ggtgttccagggtaacattgaggct

SEQ ID NO: 5288533 - DNA, 25 bp, Homo sapien
acttctgccgcacctcgtacaccag

SEQ ID NO: 5288534 - DNA, 25 bp, Homo sapien
tcaatgttccggcacttctgccgca

SEQ ID NO: 5288535 - DNA, 25 bp, Homo sapien
cctcaatgttccggcacttctgccg

SEQ ID NO: 5288536 - DNA, 25 bp, Homo sapien
tgccgcacctcgtacaccagccgct

SEQ ID NO: 5288537 - DNA, 25 bp, Homo sapien
gcctcaggttccacccacatgtccg

SEQ ID NO: 5288538 - DNA, 25 bp, Homo sapien
tacacttctttgtagggattcttct

SEQ ID NO: 5288539 - DNA, 25 bp, Homo sapien
tctccgctgtgctcttccggggctt

SEQ ID NO: 5288540 - DNA, 25 bp, Homo sapien
tggaggtggtgcgtaggcagctgcc

SEQ ID NO: 5288541 - DNA, 25 bp, Homo sapien
cgggaacagcttccccgcgcggctg

SEQ ID NO: 5288542 - DNA, 25 bp, Homo sapien
ttctgcacctccacggccttggcag

SEQ ID NO: 5288543 - DNA, 25 bp, Homo sapien
tgtcactctcatcgctgtcgtggca

SEQ ID NO: 5288544 - DNA, 25 bp, Homo sapien
cccagggcccattcaatcatgggct

SEQ ID NO: 5288545 - DNA, 25 bp, Homo sapien
ctcctagtgctctaggctcctcctc

SEQ ID NO: 5288546 - DNA, 25 bp, Homo sapien
caggcctcctagtgctctaggctcc

SEQ ID NO: 5288547 - DNA, 25 bp, Homo sapien
aggcctcctagtgctctaggctcct

SEQ ID NO: 5288548 - DNA, 25 bp, Homo sapien
tagtgctctaggctcctcctccgag

SEQ ID NO: 5288549 - DNA, 25 bp, Homo sapien
ggtggaacgcactgcaaaacgagct

SEQ ID NO: 5288550 - DNA, 25 bp, Homo sapien
acgcactgcaaaacgagctcagcgg

SEQ ID NO: 5288551 - DNA, 25 bp, Homo sapien
cctggtggaacgcactgcaaaacga

SEQ ID NO: 5288552 - DNA, 25 bp, Homo sapien
tacgtggcctggtggaacgcactgc

SEQ ID NO: 5288553 - DNA, 25 bp, Homo sapien
aaccacatgacccagcgggtgcctt

SEQ ID NO: 5288554 - DNA, 25 bp, Homo sapien
aatttgccgtctccgaaccacatga

SEQ ID NO: 5288555 - DNA, 25 bp, Homo sapien
gagaatttgccgtctccgaaccaca

SEQ ID NO: 5288556 - DNA, 25 bp, Homo sapien
cactgagaatttgccgtctccgaac

SEQ ID NO: 5288557 - DNA, 25 bp, Homo sapien
gcagaaatcattacacagtggtcac

SEQ ID NO: 5288558 - DNA, 25 bp, Homo sapien
cagaaatcattacacagtggtcacg

SEQ ID NO: 5288559 - DNA, 25 bp, Homo sapien
gaaatcattacacagtggtcacgag

SEQ ID NO: 5288560 - DNA, 25 bp, Homo sapien
aatcattacacagtggtcacgaggc

SEQ ID NO: 5288561 - DNA, 25 bp, Homo sapien
cccacgggctcaggcgtggtagcca

SEQ ID NO: 5288562 - DNA, 25 bp, Homo sapien
tcgtcatcgcctgctttggtggcat

SEQ ID NO: 5288563 - DNA, 25 bp, Homo sapien
ttcttgtccccagcatcggacccca

SEQ ID NO: 5288564 - DNA, 25 bp, Homo sapien
tcgtactctggctcgtcatcgcctg

SEQ ID NO: 5288565 - DNA, 25 bp, Homo sapien
aaccccagttattctcccattgcac

SEQ ID NO: 5288566 - DNA, 25 bp, Homo sapien
ccaaaccccagttattctcccattg

SEQ ID NO: 5288567 - DNA, 25 bp, Homo sapien
agccaaaccccagttattctcccat

SEQ ID NO: 5288568 - DNA, 25 bp, Homo sapien
aaaccccagttattctcccattgca

SEQ ID NO: 5288569 - DNA, 25 bp, Homo sapien
cgtatcacactcgtctttcaggcta

SEQ ID NO: 5288570 - DNA, 25 bp, Homo sapien
atccacgcgcccattccttctcaca

SEQ ID NO: 5288571 - DNA, 25 bp, Homo sapien
gtctttcaggctacgatccacgcgc

SEQ ID NO: 5288572 - DNA, 25 bp, Homo sapien
cactcgtctttcaggctacgatcca

SEQ ID NO: 5288573 - DNA, 25 bp, Homo sapien
tctgcagtcgcgctcaggtgtgagc

SEQ ID NO: 5288574 - DNA, 25 bp, Homo sapien
agcccctctgcagtcgcgctcaggt

SEQ ID NO: 5288575 - DNA, 25 bp, Homo sapien
tgagccgcggccctgaagctctgga

SEQ ID NO: 5288576 - DNA, 25 bp, Homo sapien
tctggaagtagctgcccgtcttggg

SEQ ID NO: 5288577 - DNA, 25 bp, Homo sapien
catctgcagatcgagaagacctgac

SEQ ID NO: 5288578 - DNA, 25 bp, Homo sapien
cacacagacggagagtgacagcagg

SEQ ID NO: 5288579 - DNA, 25 bp, Homo sapien
aaaagcttacagataggaggcccag

SEQ ID NO: 5288580 - DNA, 25 bp, Homo sapien
gagggcgctccttcagaaagttcag

SEQ ID NO: 5288581 - DNA, 25 bp, Homo sapien
ttctggttctggcttggtggccttt

SEQ ID NO: 5288582 - DNA, 25 bp, Homo sapien
attataatgcggctaaacaccttag

SEQ ID NO: 5288583 - DNA, 25 bp, Homo sapien
ggttctggcttggtggccttttgca

SEQ ID NO: 5288584 - DNA, 25 bp, Homo sapien
tgtctcatgtacgatacccgctctt

SEQ ID NO: 5288585 - DNA, 25 bp, Homo sapien
ctgaaaggtcagagcaattcactgg

SEQ ID NO: 5288586 - DNA, 25 bp, Homo sapien
cagagcaattcactggagagaagtg

SEQ ID NO: 5288587 - DNA, 25 bp, Homo sapien
gaaaggtcagagcaattcactggag

SEQ ID NO: 5288588 - DNA, 25 bp, Homo sapien
aggtcagagcaattcactggagaga

SEQ ID NO: 5288589 - DNA, 25 bp, Homo sapien
tctgatgctggactgtgatttcaaa

SEQ ID NO: 5288590 - DNA, 25 bp, Homo sapien
tcaagcacaacctgttgctgtctga

SEQ ID NO: 5288591 - DNA, 25 bp, Homo sapien
aagcctctgacaagctgccccctgt

SEQ ID NO: 5288592 - DNA, 25 bp, Homo sapien
ctgctccctgatcaagcacaacctg

SEQ ID NO: 5288593 - DNA, 25 bp, Homo sapien
acagcaattcaagggcaagggttca

SEQ ID NO: 5288594 - DNA, 25 bp, Homo sapien
catcaggatacccatgtggccgcaa

SEQ ID NO: 5288595 - DNA, 25 bp, Homo sapien
tcaggaccacatgagtagagcaggg

SEQ ID NO: 5288596 - DNA, 25 bp, Homo sapien
ggttagtcatttgggtacacaacag

SEQ ID NO: 5288597 - DNA, 25 bp, Homo sapien
ctgtgcctactccaaacatcatcat

SEQ ID NO: 5288598 - DNA, 25 bp, Homo sapien
agaacttgttcagccttgggtaaag

SEQ ID NO: 5288599 - DNA, 25 bp, Homo sapien
tctagaacttgttcagccttgggta

SEQ ID NO: 5288600 - DNA, 25 bp, Homo sapien
tcatgggagcctctagaacttgttc

SEQ ID NO: 5288601 - DNA, 25 bp, Homo sapien
ggtgagcctcggcatgggccgctga

SEQ ID NO: 5288602 - DNA, 25 bp, Homo sapien
cttttccagcgtgccagccactcgt

SEQ ID NO: 5288603 - DNA, 25 bp, Homo sapien
cccgcttgcgcttgctgatgtagta

SEQ ID NO: 5288604 - DNA, 25 bp, Homo sapien
gtgccagccactcgtcccgcttgcg

SEQ ID NO: 5288605 - DNA, 25 bp, Homo sapien
tgtccttcttctagaatcaggatcc

SEQ ID NO: 5288606 - DNA, 25 bp, Homo sapien
cattttcatggattcgatgttggtc

SEQ ID NO: 5288607 - DNA, 25 bp, Homo sapien
ccattttcatggattcgatgttggt

SEQ ID NO: 5288608 - DNA, 25 bp, Homo sapien
attttcatggattcgatgttggtct

SEQ ID NO: 5288609 - DNA, 25 bp, Homo sapien
gatccatgcaaaataagttacgcca

SEQ ID NO: 5288610 - DNA, 25 bp, Homo sapien
catcatacacgcttggaaggaagac

SEQ ID NO: 5288611 - DNA, 25 bp, Homo sapien
tgtgaagccctgtacaaatgctagt

SEQ ID NO: 5288612 - DNA, 25 bp, Homo sapien
aacatgtttacagctcggttggccc

SEQ ID NO: 5288613 - DNA, 25 bp, Homo sapien
tagccttggcaagcagacctttagc

SEQ ID NO: 5288614 - DNA, 25 bp, Homo sapien
aaaaagtccccagatgaagaggcct

SEQ ID NO: 5288615 - DNA, 25 bp, Homo sapien
gaaagcccgctgttgccagatctag

SEQ ID NO: 5288616 - DNA, 25 bp, Homo sapien
tatcccagtctagcaatcgttggcg

SEQ ID NO: 5288617 - DNA, 25 bp, Homo sapien
agggtatgctggtgggcccagaaga

SEQ ID NO: 5288618 - DNA, 25 bp, Homo sapien
aggctgcccctggtgctgaggactc

SEQ ID NO: 5288619 - DNA, 25 bp, Homo sapien
tcagggtatgctggtgggcccagaa

SEQ ID NO: 5288620 - DNA, 25 bp, Homo sapien
gctgcccctggtgctgaggactcac

SEQ ID NO: 5288621 - DNA, 25 bp, Homo sapien
ctcttgaggcttcaggcagggtctc

SEQ ID NO: 5288622 - DNA, 25 bp, Homo sapien
gcagccattttccactgctcttgag

SEQ ID NO: 5288623 - DNA, 25 bp, Homo sapien
cctccttgggggtgcagcagccatt

SEQ ID NO: 5288624 - DNA, 25 bp, Homo sapien
gcagggtctcagctgcaccctctcc

SEQ ID NO: 5288625 - DNA, 25 bp, Homo sapien
ggtcctttggcgtgtcaccgctttc

SEQ ID NO: 5288626 - DNA, 25 bp, Homo sapien
tccaagtccccattgggtaatagct

SEQ ID NO: 5288627 - DNA, 25 bp, Homo sapien
taatagctctgaggcgcctgagtcc

SEQ ID NO: 5288628 - DNA, 25 bp, Homo sapien
gggacttggagatcaccgcagggtc

SEQ ID NO: 5288629 - DNA, 25 bp, Homo sapien
aacagcaccagatgcgccattctcc

SEQ ID NO: 5288630 - DNA, 25 bp, Homo sapien
ctggctccgtagcatagagacctat

SEQ ID NO: 5288631 - DNA, 25 bp, Homo sapien
ccagtccttcatgcacaagagtaag

SEQ ID NO: 5288632 - DNA, 25 bp, Homo sapien
agagacctatgagggccggctctga

SEQ ID NO: 5288633 - DNA, 25 bp, Homo sapien
gttgcccattatctgggagagggct

SEQ ID NO: 5288634 - DNA, 25 bp, Homo sapien
tgccgaccattctagaaggcaccac

SEQ ID NO: 5288635 - DNA, 25 bp, Homo sapien
gttgggggtgccgaccattctagaa

SEQ ID NO: 5288636 - DNA, 25 bp, Homo sapien
actcatgttgcccattatctgggag

SEQ ID NO: 5288637 - DNA, 25 bp, Homo sapien
gggggtgggtagatgccattctccc

SEQ ID NO: 5288638 - DNA, 25 bp, Homo sapien
gctttactatagttatttacacaga

SEQ ID NO: 5288639 - DNA, 25 bp, Homo sapien
cacctgcagcgatcaccggggaagg

SEQ ID NO: 5288640 - DNA, 25 bp, Homo sapien
cccagcagatgcaggggcgacctca

SEQ ID NO: 5288641 - DNA, 25 bp, Homo sapien
tggtcacccagagggccgggcctgc

SEQ ID NO: 5288642 - DNA, 25 bp, Homo sapien
gtcacccagagggccgggcctgcca

SEQ ID NO: 5288643 - DNA, 25 bp, Homo sapien
tcacccagagggccgggcctgccat

SEQ ID NO: 5288644 - DNA, 25 bp, Homo sapien
cttggtcacccagagggccgggcct

SEQ ID NO: 5288645 - DNA, 25 bp, Homo sapien
ccgtcacgtgcacagacttgagaag

SEQ ID NO: 5288646 - DNA, 25 bp, Homo sapien
attccatgccaaccgggaaccctgg

SEQ ID NO: 5288647 - DNA, 25 bp, Homo sapien
gcctctgtgagatccattccatgcc

SEQ ID NO: 5288648 - DNA, 25 bp, Homo sapien
ggactcttcaccgtcacgtgcacag

SEQ ID NO: 5288649 - DNA, 25 bp, Homo sapien
catgtccacgtaagcagggcagctc

SEQ ID NO: 5288650 - DNA, 25 bp, Homo sapien
tcaccagagatctgatagcagctgg

SEQ ID NO: 5288651 - DNA, 25 bp, Homo sapien
tctgcccccgaagcattggcacggg

SEQ ID NO: 5288652 - DNA, 25 bp, Homo sapien
agctgcatgtccacgtaagcagggc

SEQ ID NO: 5288653 - DNA, 25 bp, Homo sapien
gagcccgggccctagaaaagctcat

SEQ ID NO: 5288654 - DNA, 25 bp, Homo sapien
aacaatgcaggtggagcccgggccc

SEQ ID NO: 5288655 - DNA, 25 bp, Homo sapien
caatgcaggtggagcccgggcccta

SEQ ID NO: 5288656 - DNA, 25 bp, Homo sapien
caacaggaggaacaatgcaggtgga

SEQ ID NO: 5288657 - DNA, 25 bp, Homo sapien
tcacaagcagtgtgtcggcctgtct

SEQ ID NO: 5288658 - DNA, 25 bp, Homo sapien
gtgtactgatgcaggctcgcaggaa

SEQ ID NO: 5288659 - DNA, 25 bp, Homo sapien
cagcagcgtgtactgatgcaggctc

SEQ ID NO: 5288660 - DNA, 25 bp, Homo sapien
caagcagtgtgtcggcctgtcttcc

SEQ ID NO: 5288661 - DNA, 25 bp, Homo sapien
gcagccttcggcacttacacacagg

SEQ ID NO: 5288662 - DNA, 25 bp, Homo sapien
cgattttaagcaggcgcacctcttt

SEQ ID NO: 5288663 - DNA, 25 bp, Homo sapien
gctgcagacaactaggccgttgccg

SEQ ID NO: 5288664 - DNA, 25 bp, Homo sapien
tcctgttgccggctctgactgcagc

SEQ ID NO: 5288665 - DNA, 25 bp, Homo sapien
ttctttgtatgctttttggaccagt

SEQ ID NO: 5288666 - DNA, 25 bp, Homo sapien
agcagccctgaattcacatattaac

SEQ ID NO: 5288667 - DNA, 25 bp, Homo sapien
cagcagccctgaattcacatattaa

SEQ ID NO: 5288668 - DNA, 25 bp, Homo sapien
tccagcagccctgaattcacatatt

SEQ ID NO: 5288669 - DNA, 25 bp, Homo sapien
tcccaggaagggccatgctggctgc

SEQ ID NO: 5288670 - DNA, 25 bp, Homo sapien
ctcccaggaagggccatgctggctg

SEQ ID NO: 5288671 - DNA, 25 bp, Homo sapien
gcttcacctttaccatgctcctcct

SEQ ID NO: 5288672 - DNA, 25 bp, Homo sapien
tcggttcctccaatgtgcaaggagt

SEQ ID NO: 5288673 - DNA, 25 bp, Homo sapien
aaggagttgctttcccaacagctga

SEQ ID NO: 5288674 - DNA, 25 bp, Homo sapien
ctttctcggttcctccaatgtgcaa

SEQ ID NO: 5288675 - DNA, 25 bp, Homo sapien
acggcaggtgtaacctaggacttgg

SEQ ID NO: 5288676 - DNA, 25 bp, Homo sapien
gcgacggcaggtgtaacctaggact

SEQ ID NO: 5288677 - DNA, 25 bp, Homo sapien
ccaggcgacggcaggtgtaacctag

SEQ ID NO: 5288678 - DNA, 25 bp, Homo sapien
gccaggcgacggcaggtgtaaccta

SEQ ID NO: 5288679 - DNA, 25 bp, Homo sapien
gacagggcaggttttactggcagcc

SEQ ID NO: 5288680 - DNA, 25 bp, Homo sapien
acatgctgggaagcattaaatcaag

SEQ ID NO: 5288681 - DNA, 25 bp, Homo sapien
ttttcccaatgaggaagcagcccag

SEQ ID NO: 5288682 - DNA, 25 bp, Homo sapien
gaagcattaaatcaaggtgctgctc

SEQ ID NO: 5288683 - DNA, 25 bp, Homo sapien
cttgctccaagtttaccattctcag

SEQ ID NO: 5288684 - DNA, 25 bp, Homo sapien
cttcttgctccaagtttaccattct

SEQ ID NO: 5288685 - DNA, 25 bp, Homo sapien
tcttgctccaagtttaccattctca

SEQ ID NO: 5288686 - DNA, 25 bp, Homo sapien
ttcttgctccaagtttaccattctc

SEQ ID NO: 5288687 - DNA, 25 bp, Homo sapien
tgctgggctcttggcgctcctcctt

SEQ ID NO: 5288688 - DNA, 25 bp, Homo sapien
cccaccttccgtgccgtggtgctgg

SEQ ID NO: 5288689 - DNA, 25 bp, Homo sapien
gctcctccttgccacgcggctcctc

SEQ ID NO: 5288690 - DNA, 25 bp, Homo sapien
ccgccccaccttccgtgccgtggtg

SEQ ID NO: 5288691 - DNA, 25 bp, Homo sapien
ggtcttagcataggtggtggccaca

SEQ ID NO: 5288692 - DNA, 25 bp, Homo sapien
gaccatcatggctcaagttctggga

SEQ ID NO: 5288693 - DNA, 25 bp, Homo sapien
taagaccagcgggaagagcatccct

SEQ ID NO: 5288694 - DNA, 25 bp, Homo sapien
ggaggcctccaaagacatgcacatg

SEQ ID NO: 5288695 - DNA, 25 bp, Homo sapien
cagcagcggcgtgggagtacagtcc

SEQ ID NO: 5288696 - DNA, 25 bp, Homo sapien
ccagtaacaggaggagtttgtccca

SEQ ID NO: 5288697 - DNA, 25 bp, Homo sapien
tgctcccgtccattggtggtggcct

SEQ ID NO: 5288698 - DNA, 25 bp, Homo sapien
cattgatggggagctgcgtcagcaa

SEQ ID NO: 5288699 - DNA, 25 bp, Homo sapien
tccgcagcagagctgctggtgtccc

SEQ ID NO: 5288700 - DNA, 25 bp, Homo sapien
tttcggtcctcctcccgctccgcag

SEQ ID NO: 5288701 - DNA, 25 bp, Homo sapien
cctcccgctccgcagcagagctgct

SEQ ID NO: 5288702 - DNA, 25 bp, Homo sapien
gctccgcagcagagctgctggtgtc

SEQ ID NO: 5288703 - DNA, 25 bp, Homo sapien
aattatcgtggtctttggaggcgag

SEQ ID NO: 5288704 - DNA, 25 bp, Homo sapien
aacttaaacatagatcccggtgttg

SEQ ID NO: 5288705 - DNA, 25 bp, Homo sapien
gtgaacggtgcctctgtcagcctgt

SEQ ID NO: 5288706 - DNA, 25 bp, Homo sapien
tgttgagccctctggtgaacggtgc

SEQ ID NO: 5288707 - DNA, 25 bp, Homo sapien
ccaggaccgggagaaagcacaggct

SEQ ID NO: 5288708 - DNA, 25 bp, Homo sapien
tctcctacaggcctagcccctttct

SEQ ID NO: 5288709 - DNA, 25 bp, Homo sapien
agaaaggcttgaagcggacctgccc

SEQ ID NO: 5288710 - DNA, 25 bp, Homo sapien
gctccatcaggtcaacccagaaagg

SEQ ID NO: 5288711 - DNA, 25 bp, Homo sapien
tcttcagacatatgaggcctcacgc

SEQ ID NO: 5288712 - DNA, 25 bp, Homo sapien
tacgcataagatccagtacaggaga

SEQ ID NO: 5288713 - DNA, 25 bp, Homo sapien
gaagatgtcctctaatacgcataag

SEQ ID NO: 5288714 - DNA, 25 bp, Homo sapien
tgctgggccctagtaaagacatctt

SEQ ID NO: 5288715 - DNA, 25 bp, Homo sapien
tgagccaagcatgaggaggacacga

SEQ ID NO: 5288716 - DNA, 25 bp, Homo sapien
gtgtgtcctggaagatgtgctctaa

SEQ ID NO: 5288717 - DNA, 25 bp, Homo sapien
cagaaaacagagattccaaccggaa

SEQ ID NO: 5288718 - DNA, 25 bp, Homo sapien
gagcatcagctacaatgtgcctaga

SEQ ID NO: 5288719 - DNA, 25 bp, Homo sapien
tcacaccactctcgaggccatggca

SEQ ID NO: 5288720 - DNA, 25 bp, Homo sapien
caccactctcgaggccatggcacca

SEQ ID NO: 5288721 - DNA, 25 bp, Homo sapien
cttatgatcacaccaaacctgctgc

SEQ ID NO: 5288722 - DNA, 25 bp, Homo sapien
caccagcaggagcacttatgatcac

SEQ ID NO: 5288723 - DNA, 25 bp, Homo sapien
cttccgtaaggcagcaccgatttcc

SEQ ID NO: 5288724 - DNA, 25 bp, Homo sapien
cgatttccaagtgctgcaagccagg

SEQ ID NO: 5288725 - DNA, 25 bp, Homo sapien
cctaaaatagatgctgttaaggagc

SEQ ID NO: 5288726 - DNA, 25 bp, Homo sapien
gaagttgttctcaggagccaaaatg

SEQ ID NO: 5288727 - DNA, 25 bp, Homo sapien
ctttgagaagttattgtagccaggg

SEQ ID NO: 5288728 - DNA, 25 bp, Homo sapien
actatcttgataggtagacatccag

SEQ ID NO: 5288729 - DNA, 25 bp, Homo sapien
cagtgagactgtgactgactttgag

SEQ ID NO: 5288730 - DNA, 25 bp, Homo sapien
tatcagtttattcgcccatcattgc

SEQ ID NO: 5288731 - DNA, 25 bp, Homo sapien
gcactctgtggcaaccctagaggta

SEQ ID NO: 5288732 - DNA, 25 bp, Homo sapien
gaggtaggggctgttctcatatcta

SEQ ID NO: 5288733 - DNA, 25 bp, Homo sapien
ggatctcaaccctgcggggcctctt

SEQ ID NO: 5288734 - DNA, 25 bp, Homo sapien
ctctccatcaaggtgtggatctcaa

SEQ ID NO: 5288735 - DNA, 25 bp, Homo sapien
ctccaggccctttgtacctcttgtg

SEQ ID NO: 5288736 - DNA, 25 bp, Homo sapien
tgtgtctgtggcacaataacctggt

SEQ ID NO: 5288737 - DNA, 25 bp, Homo sapien
ggccctttgtacctcttgtgtctgt

SEQ ID NO: 5288738 - DNA, 25 bp, Homo sapien
ataacctggtagatgccctggagcg

SEQ ID NO: 5288739 - DNA, 25 bp, Homo sapien
gcatttatttatcacttcgggaacc

SEQ ID NO: 5288740 - DNA, 25 bp, Homo sapien
gaacagactcgcctaccaccttgtt

SEQ ID NO: 5288741 - DNA, 25 bp, Homo sapien
tatacaagtaatcgtgcaggccttc

SEQ ID NO: 5288742 - DNA, 25 bp, Homo sapien
cagaccatggccgttcccaagtatt

SEQ ID NO: 5288743 - DNA, 25 bp, Homo sapien
gccgcgtcccggctcgtcctctgct

SEQ ID NO: 5288744 - DNA, 25 bp, Homo sapien
gcgcgccctggtgccgcggcgccgc

SEQ ID NO: 5288745 - DNA, 25 bp, Homo sapien
cggctgcgcgccctggtgccgcggc

SEQ ID NO: 5288746 - DNA, 25 bp, Homo sapien
gcgtcccggctcgtcctctgctctc

SEQ ID NO: 5288747 - DNA, 25 bp, Homo sapien
tggccgcagggacagcggcccctcc

SEQ ID NO: 5288748 - DNA, 25 bp, Homo sapien
tggcgctgcttctgcgctgggtccc

SEQ ID NO: 5288749 - DNA, 25 bp, Homo sapien
tccccgggccggtgtcaagtgcctc

SEQ ID NO: 5288750 - DNA, 25 bp, Homo sapien
tgcagttctcccgacctccgccaga

SEQ ID NO: 5288751 - DNA, 25 bp, Homo sapien
caagatctctgagtaatgtgcatgc

SEQ ID NO: 5288752 - DNA, 25 bp, Homo sapien
tagatgatccacaatgaagactggc

SEQ ID NO: 5288753 - DNA, 25 bp, Homo sapien
cgtggccagctctaagaccaagatc

SEQ ID NO: 5288754 - DNA, 25 bp, Homo sapien
aaagataatccaagtcgtggccagc

SEQ ID NO: 5288755 - DNA, 25 bp, Homo sapien
tgtggagaccagaggttcgggggta

SEQ ID NO: 5288756 - DNA, 25 bp, Homo sapien
gaagggatgggctctccggggagtg

SEQ ID NO: 5288757 - DNA, 25 bp, Homo sapien
tcacactgcagccatgaagggatgg

SEQ ID NO: 5288758 - DNA, 25 bp, Homo sapien
tctccggggagtgtggagaccagag

SEQ ID NO: 5288759 - DNA, 25 bp, Homo sapien
tgaaatctcttgagtggagaccttt

SEQ ID NO: 5288760 - DNA, 25 bp, Homo sapien
tcttgaaatctcttgagtggagacc

SEQ ID NO: 5288761 - DNA, 25 bp, Homo sapien
cttaatgaatttcaggagctgaatg

SEQ ID NO: 5288762 - DNA, 25 bp, Homo sapien
gggtcatttggaaaacctgcctgtc

SEQ ID NO: 5288763 - DNA, 25 bp, Homo sapien
caaaccatcttgaagttgctagagc

SEQ ID NO: 5288764 - DNA, 25 bp, Homo sapien
ccctccttgaccaggcaaaccatct

SEQ ID NO: 5288765 - DNA, 25 bp, Homo sapien
gaccaggcaaaccatcttgaagttg

SEQ ID NO: 5288766 - DNA, 25 bp, Homo sapien
ttgctagagcaagattcttccttat

SEQ ID NO: 5288767 - DNA, 25 bp, Homo sapien
ggcggctccgctccgaataacccca

SEQ ID NO: 5288768 - DNA, 25 bp, Homo sapien
gattcaaaagcgctcgacagcccct

SEQ ID NO: 5288769 - DNA, 25 bp, Homo sapien
agattcaaaagcgctcgacagcccc

SEQ ID NO: 5288770 - DNA, 25 bp, Homo sapien
tcgacagcccctcggcggctccgct

SEQ ID NO: 5288771 - DNA, 25 bp, Homo sapien
gtcagcaggtttcggagcggagtcc

SEQ ID NO: 5288772 - DNA, 25 bp, Homo sapien
cgcggtcagcaggtttcggagcgga

SEQ ID NO: 5288773 - DNA, 25 bp, Homo sapien
gtccgggtctccatcggctgcaaaa

SEQ ID NO: 5288774 - DNA, 25 bp, Homo sapien
cgaggacccagtgcagtcgccgcat

SEQ ID NO: 5288775 - DNA, 25 bp, Homo sapien
ggcgggcaggagcagtcttagccat

SEQ ID NO: 5288776 - DNA, 25 bp, Homo sapien
aggcgggcaggagcagtcttagcca

SEQ ID NO: 5288777 - DNA, 25 bp, Homo sapien
tggcctagtcctgggcccgaggtgg

SEQ ID NO: 5288778 - DNA, 25 bp, Homo sapien
tcctcctcaactggcctagtcctgg

SEQ ID NO: 5288779 - DNA, 25 bp, Homo sapien
taagagcttacaagagtagggaaca

SEQ ID NO: 5288780 - DNA, 25 bp, Homo sapien
caagtgaatggacgtcatgagacag

SEQ ID NO: 5288781 - DNA, 25 bp, Homo sapien
aaactctgaaagcagccttggatag

SEQ ID NO: 5288782 - DNA, 25 bp, Homo sapien
ggcctccagactgaaagggacctca

SEQ ID NO: 5288783 - DNA, 25 bp, Homo sapien
tgaaaaggccctgcacaaagctgtt

SEQ ID NO: 5288784 - DNA, 25 bp, Homo sapien
caggccaaaagcatcgtcgtcagta

SEQ ID NO: 5288785 - DNA, 25 bp, Homo sapien
taatatgactctaagcagcaggacc

SEQ ID NO: 5288786 - DNA, 25 bp, Homo sapien
gactctggctggcataacgttatga

SEQ ID NO: 5288787 - DNA, 25 bp, Homo sapien
ttcctctcgactcaacagtgatggc

SEQ ID NO: 5288788 - DNA, 25 bp, Homo sapien
cttgagcactgtagaccgggctggg

SEQ ID NO: 5288789 - DNA, 25 bp, Homo sapien
tccatcacccgccttgagcactgta

SEQ ID NO: 5288790 - DNA, 25 bp, Homo sapien
gaagataagctggactccttgaagc

SEQ ID NO: 5288791 - DNA, 25 bp, Homo sapien
cgcctgcctcctcgctgcgtggcct

SEQ ID NO: 5288792 - DNA, 25 bp, Homo sapien
tgggccagagcgattcctgggccgc

SEQ ID NO: 5288793 - DNA, 25 bp, Homo sapien
gcccttgggccagagcgattcctgg

SEQ ID NO: 5288794 - DNA, 25 bp, Homo sapien
agagcgattcctgggccgcctgcct

SEQ ID NO: 5288795 - DNA, 25 bp, Homo sapien
gcaggcccagggcatattccttttt

SEQ ID NO: 5288796 - DNA, 25 bp, Homo sapien
tctggctgggaagcagaggacctgc

SEQ ID NO: 5288797 - DNA, 25 bp, Homo sapien
gaagcagaggacctgctgcttcttg

SEQ ID NO: 5288798 - DNA, 25 bp, Homo sapien
cctgctgcttcttgtcggcacccat

SEQ ID NO: 5288799 - DNA, 25 bp, Homo sapien
aggacctgctgcttcttgtcggcac

SEQ ID NO: 5288800 - DNA, 25 bp, Homo sapien
ggccaataggttttgtggaggagga

SEQ ID NO: 5288801 - DNA, 25 bp, Homo sapien
aggaaggaggagccacggggcctcg

SEQ ID NO: 5288802 - DNA, 25 bp, Homo sapien
caataggttttgtggaggaggaagg

SEQ ID NO: 5288803 - DNA, 25 bp, Homo sapien
gaggaaggaggagccacggggcctc

SEQ ID NO: 5288804 - DNA, 25 bp, Homo sapien
gaataaacaacagtcccacctctag

SEQ ID NO: 5288805 - DNA, 25 bp, Homo sapien
ggtgcccgtgaagcatctgcctgaa

SEQ ID NO: 5288806 - DNA, 25 bp, Homo sapien
tatacagtttcgaacccagaccaga

SEQ ID NO: 5288807 - DNA, 25 bp, Homo sapien
tctgacgtgttcatagggcagcccg

SEQ ID NO: 5288808 - DNA, 25 bp, Homo sapien
ccaccttcatgtctgggagagtctt

SEQ ID NO: 5288809 - DNA, 25 bp, Homo sapien
tgcccaccttcatgtctgggagagt

SEQ ID NO: 5288810 - DNA, 25 bp, Homo sapien
cccaccttcatgtctgggagagtct

SEQ ID NO: 5288811 - DNA, 25 bp, Homo sapien
ctgcccaccttcatgtctgggagag

SEQ ID NO: 5288812 - DNA, 25 bp, Homo sapien
caggaattcagatggctgtaggcat

SEQ ID NO: 5288813 - DNA, 25 bp, Homo sapien
cagcaggaattcagatggctgtagg

SEQ ID NO: 5288814 - DNA, 25 bp, Homo sapien
gatggctgtaggcattgccatagca

SEQ ID NO: 5288815 - DNA, 25 bp, Homo sapien
aaggtgcagcaggaattcagatggc

SEQ ID NO: 5288816 - DNA, 25 bp, Homo sapien
tccgaagcgcttatgggctgcagga

SEQ ID NO: 5288817 - DNA, 25 bp, Homo sapien
gcagcccgaagaggagcacgtctgc

SEQ ID NO: 5288818 - DNA, 25 bp, Homo sapien
gcacgtctgccagtggttgaagcct

SEQ ID NO: 5288819 - DNA, 25 bp, Homo sapien
ctgcaggagcacagtaagcagcccg

SEQ ID NO: 5288820 - DNA, 25 bp, Homo sapien
cgcaactccgtggaaagctcgtggg

SEQ ID NO: 5288821 - DNA, 25 bp, Homo sapien
ggacacagtgccaaccaatgggaag

SEQ ID NO: 5288822 - DNA, 25 bp, Homo sapien
cacggtgagcgcaactccgtggaaa

SEQ ID NO: 5288823 - DNA, 25 bp, Homo sapien
aaaacacagagagtcagcaggggct

SEQ ID NO: 5288824 - DNA, 25 bp, Homo sapien
gcctgggactccatccgtgtgcggc

SEQ ID NO: 5288825 - DNA, 25 bp, Homo sapien
gttgatcccaccgtctctgcacaga

SEQ ID NO: 5288826 - DNA, 25 bp, Homo sapien
tccgtgtgcggccaggagttgatcc

SEQ ID NO: 5288827 - DNA, 25 bp, Homo sapien
ttttaccctgactgggccttggcag

SEQ ID NO: 5288828 - DNA, 25 bp, Homo sapien
tcatcaggtcacaaacacacaagag

SEQ ID NO: 5288829 - DNA, 25 bp, Homo sapien
ggccagacgccaggaagtgtttcat

SEQ ID NO: 5288830 - DNA, 25 bp, Homo sapien
acgttcaggagcaccccacgtgctg

SEQ ID NO: 5288831 - DNA, 25 bp, Homo sapien
ccaggtgaattcctgatgcggagat

SEQ ID NO: 5288832 - DNA, 25 bp, Homo sapien
ggaagaccttgccttcgccatgtcg

SEQ ID NO: 5288833 - DNA, 25 bp, Homo sapien
cgggtggagtgacgtctggcagcct

SEQ ID NO: 5288834 - DNA, 25 bp, Homo sapien
tctccctggcgggtggagtgacgtc

SEQ ID NO: 5288835 - DNA, 25 bp, Homo sapien
atgtcggcgccagcttgctcctcgt

SEQ ID NO: 5288836 - DNA, 25 bp, Homo sapien
ctaacatctactgtgaacaggaggc

SEQ ID NO: 5288837 - DNA, 25 bp, Homo sapien
tagtcacgggcactgttgagggttc

SEQ ID NO: 5288838 - DNA, 25 bp, Homo sapien
ctgttgagggttcaggacaaaagct

SEQ ID NO: 5288839 - DNA, 25 bp, Homo sapien
ggacaaaagctgctaacatctactg

SEQ ID NO: 5288840 - DNA, 25 bp, Homo sapien
gatgctgggcgcctttcaagcgttg

SEQ ID NO: 5288841 - DNA, 25 bp, Homo sapien
cctttcaagcgttgggctgaagggt

SEQ ID NO: 5288842 - DNA, 25 bp, Homo sapien
gctgctaggatgctgggcgcctttc

SEQ ID NO: 5288843 - DNA, 25 bp, Homo sapien
ggcgcctttcaagcgttgggctgaa

SEQ ID NO: 5288844 - DNA, 25 bp, Homo sapien
gaagtgagaaggtgcagcttggccg

SEQ ID NO: 5288845 - DNA, 25 bp, Homo sapien
ggtcagccctgtagtcagtgtgatc

SEQ ID NO: 5288846 - DNA, 25 bp, Homo sapien
aaggtgcagcttggccgggcaccat

SEQ ID NO: 5288847 - DNA, 25 bp, Homo sapien
catgggaagcggcttggtcagccct

SEQ ID NO: 5288848 - DNA, 25 bp, Homo sapien
gagcttcctctgtgtccggctcctc

SEQ ID NO: 5288849 - DNA, 25 bp, Homo sapien
gcttcctctgtgtccggctcctctg

SEQ ID NO: 5288850 - DNA, 25 bp, Homo sapien
ctgagcttcctctgtgtccggctcc

SEQ ID NO: 5288851 - DNA, 25 bp, Homo sapien
tgagcttcctctgtgtccggctcct

SEQ ID NO: 5288852 - DNA, 25 bp, Homo sapien
tcatgccccagactatctcaaaggg

SEQ ID NO: 5288853 - DNA, 25 bp, Homo sapien
tgacttttcccacccaggtatgaca

SEQ ID NO: 5288854 - DNA, 25 bp, Homo sapien
aacaacacactgaggtcacggccag

SEQ ID NO: 5288855 - DNA, 25 bp, Homo sapien
gcttctcccgttactcgtttgttga

SEQ ID NO: 5288856 - DNA, 25 bp, Homo sapien
caccagggctctttatggatgcaaa

SEQ ID NO: 5288857 - DNA, 25 bp, Homo sapien
ggctctttatggatgcaaactggat

SEQ ID NO: 5288858 - DNA, 25 bp, Homo sapien
ggatgcaaactggatttacagcccc

SEQ ID NO: 5288859 - DNA, 25 bp, Homo sapien
ccagccttgcaccagggctctttat

SEQ ID NO: 5288860 - DNA, 25 bp, Homo sapien
ttccttgccccgtgagactccaaag

SEQ ID NO: 5288861 - DNA, 25 bp, Homo sapien
acaaattccttgccccgtgagactc

SEQ ID NO: 5288862 - DNA, 25 bp, Homo sapien
gggtccttgctgacaaattccttgc

SEQ ID NO: 5288863 - DNA, 25 bp, Homo sapien
tccaaagacgaccctgtcttagcca

SEQ ID NO: 5288864 - DNA, 25 bp, Homo sapien
cctggcctggtcttgctttattaac

SEQ ID NO: 5288865 - DNA, 25 bp, Homo sapien
tgagctcgggctccccatttaaacg

SEQ ID NO: 5288866 - DNA, 25 bp, Homo sapien
gatcgactgaccttgtcacctggaa

SEQ ID NO: 5288867 - DNA, 25 bp, Homo sapien
gaaggtaaaacctgactgtcagatg

SEQ ID NO: 5288868 - DNA, 25 bp, Homo sapien
tcttcttcttcctctgcaccttcct

SEQ ID NO: 5288869 - DNA, 25 bp, Homo sapien
ctctgtctttcccattctgcatctt

SEQ ID NO: 5288870 - DNA, 25 bp, Homo sapien
cttctcttcttcttcctctgcacct

SEQ ID NO: 5288871 - DNA, 25 bp, Homo sapien
tctcttcttcttcctctgcaccttc

SEQ ID NO: 5288872 - DNA, 25 bp, Homo sapien
ctgtgaaaacaagtccaaggaggcc

SEQ ID NO: 5288873 - DNA, 25 bp, Homo sapien
aacaagtccaaggaggccagtgacc

SEQ ID NO: 5288874 - DNA, 25 bp, Homo sapien
tgaaaacaagtccaaggaggccagt

SEQ ID NO: 5288875 - DNA, 25 bp, Homo sapien
gaaaacaagtccaaggaggccagtg

SEQ ID NO: 5288876 - DNA, 25 bp, Homo sapien
ttgggaggaaactctagctaacagc

SEQ ID NO: 5288877 - DNA, 25 bp, Homo sapien
tcggcacaggacaagtacagaagga

SEQ ID NO: 5288878 - DNA, 25 bp, Homo sapien
cagcactgctgaataggagcccgta

SEQ ID NO: 5288879 - DNA, 25 bp, Homo sapien
acatcgctcactttcctgaccaggg

SEQ ID NO: 5288880 - DNA, 25 bp, Homo sapien
ctgcatcccaggttcaagcgattct

SEQ ID NO: 5288881 - DNA, 25 bp, Homo sapien
tcactgcaatctctgcatcccaggt

SEQ ID NO: 5288882 - DNA, 25 bp, Homo sapien
aggctggactacagcggcgcgatct

SEQ ID NO: 5288883 - DNA, 25 bp, Homo sapien
tggactacagcggcgcgatcttggc

SEQ ID NO: 5288884 - DNA, 25 bp, Homo sapien
ctgactggaaagacgaagctgggct

SEQ ID NO: 5288885 - DNA, 25 bp, Homo sapien
cttaactgactggaaagacgaagct

SEQ ID NO: 5288886 - DNA, 25 bp, Homo sapien
gaaagacgaagctgggctatacact

SEQ ID NO: 5288887 - DNA, 25 bp, Homo sapien
gacgaagctgggctatacactcact

SEQ ID NO: 5288888 - DNA, 25 bp, Homo sapien
gaccccaccgctgtgaaatcgttag

SEQ ID NO: 5288889 - DNA, 25 bp, Homo sapien
aaatcgttagtgactctctggcccc

SEQ ID NO: 5288890 - DNA, 25 bp, Homo sapien
ctacagcgcttagggagggaaacca

SEQ ID NO: 5288891 - DNA, 25 bp, Homo sapien
gagagccatcagtgtgagtgaccta

SEQ ID NO: 5288892 - DNA, 25 bp, Homo sapien
gtaactggtagagtcatggggattc

SEQ ID NO: 5288893 - DNA, 25 bp, Homo sapien
aaatgccacgaggtaaaggtctttg

SEQ ID NO: 5288894 - DNA, 25 bp, Homo sapien
aatgccacgaggtaaaggtctttgg

SEQ ID NO: 5288895 - DNA, 25 bp, Homo sapien
atgccacgaggtaaaggtctttggg

SEQ ID NO: 5288896 - DNA, 25 bp, Homo sapien
tgaaatgccacgaggtaaaggtctt

SEQ ID NO: 5288897 - DNA, 25 bp, Homo sapien
aggaagtgagaagggcgcgggcaag

SEQ ID NO: 5288898 - DNA, 25 bp, Homo sapien
tgagaagggcgcgggcaaggcaggg

SEQ ID NO: 5288899 - DNA, 25 bp, Homo sapien
agtgagaagggcgcgggcaaggcag

SEQ ID NO: 5288900 - DNA, 25 bp, Homo sapien
gaagtgagaagggcgcgggcaaggc

SEQ ID NO: 5288901 - DNA, 25 bp, Homo sapien
ccttcaccagggatgacatggtgtt

SEQ ID NO: 5288902 - DNA, 25 bp, Homo sapien
tcattgcggaggtttctcctcgtac

SEQ ID NO: 5288903 - DNA, 25 bp, Homo sapien
accagcaggtcattgcggaggtttc

SEQ ID NO: 5288904 - DNA, 25 bp, Homo sapien
tgttggtgatggagtcagctgccac

SEQ ID NO: 5288905 - DNA, 25 bp, Homo sapien
ctcctgcacgtctcccccgactccg

SEQ ID NO: 5288906 - DNA, 25 bp, Homo sapien
aggcctcctgcacgtctcccccgac

SEQ ID NO: 5288907 - DNA, 25 bp, Homo sapien
gcgaaggcctcctgcacgtctcccc

SEQ ID NO: 5288908 - DNA, 25 bp, Homo sapien
gccggcagacgtggagcgcactggc

SEQ ID NO: 5288909 - DNA, 25 bp, Homo sapien
gagccggcagacgtggagcgcactg

SEQ ID NO: 5288910 - DNA, 25 bp, Homo sapien
ccggcagacgtggagcgcactggca

SEQ ID NO: 5288911 - DNA, 25 bp, Homo sapien
ccatgggtgggcgatgtatgtggtg

SEQ ID NO: 5288912 - DNA, 25 bp, Homo sapien
tgggtgggcgatgtatgtggtgacc

SEQ ID NO: 5288913 - DNA, 25 bp, Homo sapien
catgggtgggcgatgtatgtggtga

SEQ ID NO: 5288914 - DNA, 25 bp, Homo sapien
tccatgggtgggcgatgtatgtggt

SEQ ID NO: 5288915 - DNA, 25 bp, Homo sapien
acagaaaatacgttatctcaagtac

SEQ ID NO: 5288916 - DNA, 25 bp, Homo sapien
gacagaaaatacgttatctcaagta

SEQ ID NO: 5288917 - DNA, 25 bp, Homo sapien
ttcctgcagggcatgctctgagcat

SEQ ID NO: 5288918 - DNA, 25 bp, Homo sapien
tatccctgatgcacaaatcctcaaa

SEQ ID NO: 5288919 - DNA, 25 bp, Homo sapien
gaaacgaaacgagagctactactac

SEQ ID NO: 5288920 - DNA, 25 bp, Homo sapien
ggaatcctgcgtaaatcattctacg

SEQ ID NO: 5288921 - DNA, 25 bp, Homo sapien
aatcctactgacactattgcaaaag

SEQ ID NO: 5288922 - DNA, 25 bp, Homo sapien
aagtggagtccgtaccacagctgct

SEQ ID NO: 5288923 - DNA, 25 bp, Homo sapien
ggcatattctgcttctaactttcct

SEQ ID NO: 5288924 - DNA, 25 bp, Homo sapien
tcctttctcacaagtggagtccgta

SEQ ID NO: 5288925 - DNA, 25 bp, Homo sapien
gccacgtaggccttgtacagatgat

SEQ ID NO: 5288926 - DNA, 25 bp, Homo sapien
ctgatgaggaggtgtagggagcagg

SEQ ID NO: 5288927 - DNA, 25 bp, Homo sapien
atgaggaggtgtagggagcaggata

SEQ ID NO: 5288928 - DNA, 25 bp, Homo sapien
gaggaggtgtagggagcaggatact

SEQ ID NO: 5288929 - DNA, 25 bp, Homo sapien
tgatgaggaggtgtagggagcagga

SEQ ID NO: 5288930 - DNA, 25 bp, Homo sapien
aataataatactaatcagcttggtg

SEQ ID NO: 5288931 - DNA, 25 bp, Homo sapien
ttctttagctagaaataacaacatt

SEQ ID NO: 5288932 - DNA, 25 bp, Homo sapien
ataataatactaatcagcttggtgt

SEQ ID NO: 5288933 - DNA, 25 bp, Homo sapien
ctttcttgggaaatcagacaccttt

SEQ ID NO: 5288934 - DNA, 25 bp, Homo sapien
ctactgtatggcaggctgggctaca

SEQ ID NO: 5288935 - DNA, 25 bp, Homo sapien
aatggtcctttaattgccgtctgat

SEQ ID NO: 5288936 - DNA, 25 bp, Homo sapien
ggtcctttaattgccgtctgatgat

SEQ ID NO: 5288937 - DNA, 25 bp, Homo sapien
agtatctactgtatggcaggctggg

SEQ ID NO: 5288938 - DNA, 25 bp, Homo sapien
ttataggcctaagtgacccgcgctc

SEQ ID NO: 5288939 - DNA, 25 bp, Homo sapien
gatgcgacctaattcctgagcctgt

SEQ ID NO: 5288940 - DNA, 25 bp, Homo sapien
gaaatagccaggcagtttgcccctc

SEQ ID NO: 5288941 - DNA, 25 bp, Homo sapien
taaactgcagggtaaatcatgggct

SEQ ID NO: 5288942 - DNA, 25 bp, Homo sapien
tatatatttggtctccattccaggt

SEQ ID NO: 5288943 - DNA, 25 bp, Homo sapien
caggttcctggcataagagcttctt

SEQ ID NO: 5288944 - DNA, 25 bp, Homo sapien
ggtactgatgccacgcaaagcacca

SEQ ID NO: 5288945 - DNA, 25 bp, Homo sapien
ggcagaatcacagcacccaagcttt

SEQ ID NO: 5288946 - DNA, 25 bp, Homo sapien
taaaacccgtggaatctccagagtg

SEQ ID NO: 5288947 - DNA, 25 bp, Homo sapien
tacctactgatgcagaaacgccaga

SEQ ID NO: 5288948 - DNA, 25 bp, Homo sapien
tatgccaggaggtggtatatacccc

SEQ ID NO: 5288949 - DNA, 25 bp, Homo sapien
tcagagctgaacttacatgggtcca

SEQ ID NO: 5288950 - DNA, 25 bp, Homo sapien
tcagaaaaacccgagctccgtctgg

SEQ ID NO: 5288951 - DNA, 25 bp, Homo sapien
tctgaacaggaaatcattgcaagtg

SEQ ID NO: 5288952 - DNA, 25 bp, Homo sapien
ggtaaacgaaaactcagcttcagct

SEQ ID NO: 5288953 - DNA, 25 bp, Homo sapien
tcagtgtctcagtcgtcgtcagtaa

SEQ ID NO: 5288954 - DNA, 25 bp, Homo sapien
agaacgtgcaaaggagcgagagtcc

SEQ ID NO: 5288955 - DNA, 25 bp, Homo sapien
gaaaatgcaatggtagcctggctaa

SEQ ID NO: 5288956 - DNA, 25 bp, Homo sapien
taagaacatgctctactgggtaaac

SEQ ID NO: 5288957 - DNA, 25 bp, Homo sapien
cacttcaatgcgcacaacagatggg

SEQ ID NO: 5288958 - DNA, 25 bp, Homo sapien
gctattagctgactgcccaaatgaa

SEQ ID NO: 5288959 - DNA, 25 bp, Homo sapien
cttatggtgatggaacacagagcag

SEQ ID NO: 5288960 - DNA, 25 bp, Homo sapien
ctggccggtctctgtcttttagaac

SEQ ID NO: 5288961 - DNA, 25 bp, Homo sapien
ccaaatgaatgcactatcagacact

SEQ ID NO: 5288962 - DNA, 25 bp, Homo sapien
cagtaaacaggtcagatcccaggtc

SEQ ID NO: 5288963 - DNA, 25 bp, Homo sapien
ctgatgacaagggatagagccaacg

SEQ ID NO: 5288964 - DNA, 25 bp, Homo sapien
caaggtggccaaagcaatgacatag

SEQ ID NO: 5288965 - DNA, 25 bp, Homo sapien
agggcagcgcttccaggacttacag

SEQ ID NO: 5288966 - DNA, 25 bp, Homo sapien
tgacaagaactgagcgtgggccacg

SEQ ID NO: 5288967 - DNA, 25 bp, Homo sapien
ctaaagtcaagcctttggcctcatc

SEQ ID NO: 5288968 - DNA, 25 bp, Homo sapien
tgaaaactgattctaggctaaagtc

SEQ ID NO: 5288969 - DNA, 25 bp, Homo sapien
gcctcatcctattctgacatcacag

SEQ ID NO: 5288970 - DNA, 25 bp, Homo sapien
agggccgacatcctctgctccagtt

SEQ ID NO: 5288971 - DNA, 25 bp, Homo sapien
tggaccatcagctcccgcctgctct

SEQ ID NO: 5288972 - DNA, 25 bp, Homo sapien
tcagcaacttcatcagctcttccag

SEQ ID NO: 5288973 - DNA, 25 bp, Homo sapien
cttccagctggaccatcagctcccg

SEQ ID NO: 5288974 - DNA, 25 bp, Homo sapien
gagaccctcaaagatggatctaagg

SEQ ID NO: 5288975 - DNA, 25 bp, Homo sapien
gaaaccatattaaactgctcagaga

SEQ ID NO: 5288976 - DNA, 25 bp, Homo sapien
ccagttatgagacgctgagcaagtc

SEQ ID NO: 5288977 - DNA, 25 bp, Homo sapien
ggatctaaggccaggtgaaatggat

SEQ ID NO: 5288978 - DNA, 25 bp, Homo sapien
gagtatcagcaccagtatttaccaa

SEQ ID NO: 5288979 - DNA, 25 bp, Homo sapien
caaatatgcaaccttagacaagtca

SEQ ID NO: 5288980 - DNA, 25 bp, Homo sapien
gaactttaaactgccgctcaaaaca

SEQ ID NO: 5288981 - DNA, 25 bp, Homo sapien
gggactagtaacagcaacaatattc

SEQ ID NO: 5288982 - DNA, 25 bp, Homo sapien
taggcatagaaaactgtcccagcac

SEQ ID NO: 5288983 - DNA, 25 bp, Homo sapien
gacaacaggtgcatcttacgccaac

SEQ ID NO: 5288984 - DNA, 25 bp, Homo sapien
ttgcagcagtaaaccacagagccac

SEQ ID NO: 5288985 - DNA, 25 bp, Homo sapien
tactaacaccacagacttgcagcag

SEQ ID NO: 5288986 - DNA, 25 bp, Homo sapien
tgttccaggcggagacgctgaatct

SEQ ID NO: 5288987 - DNA, 25 bp, Homo sapien
ctgggaggcctgctcgtgttccagg

SEQ ID NO: 5288988 - DNA, 25 bp, Homo sapien
gcctgctcgtgttccaggcggagac

SEQ ID NO: 5288989 - DNA, 25 bp, Homo sapien
gagacgctgaatctcctgcaggatc

SEQ ID NO: 5288990 - DNA, 25 bp, Homo sapien
gcatcaaagttaaagctcaagtcag

SEQ ID NO: 5288991 - DNA, 25 bp, Homo sapien
catcaaagttaaagctcaagtcagt

SEQ ID NO: 5288992 - DNA, 25 bp, Homo sapien
ggcatcaaagttaaagctcaagtca

SEQ ID NO: 5288993 - DNA, 25 bp, Homo sapien
atcaaagttaaagctcaagtcagtg

SEQ ID NO: 5288994 - DNA, 25 bp, Homo sapien
gatgaatcttactgtgacctctctg

SEQ ID NO: 5288995 - DNA, 25 bp, Homo sapien
tgacagttcatctagttccttttgg

SEQ ID NO: 5288996 - DNA, 25 bp, Homo sapien
tttggtatactattcaaccgtctgt

SEQ ID NO: 5288997 - DNA, 25 bp, Homo sapien
agcttagtttcctcaacaagaacgt

SEQ ID NO: 5288998 - DNA, 25 bp, Homo sapien
aagtattccattgacgggcgcggtg

SEQ ID NO: 5288999 - DNA, 25 bp, Homo sapien
tcaatcaaacccttattcaacattc

SEQ ID NO: 5289000 - DNA, 25 bp, Homo sapien
agccacttcctatttcaatcaaacc

SEQ ID NO: 5289001 - DNA, 25 bp, Homo sapien
tgagatataatacttagatcttaag

SEQ ID NO: 5289002 - DNA, 25 bp, Homo sapien
aagcctgttgagatttgaattggta

SEQ ID NO: 5289003 - DNA, 25 bp, Homo sapien
aaaaagcctgttgagatttgaattg

SEQ ID NO: 5289004 - DNA, 25 bp, Homo sapien
aaaagcctgttgagatttgaattgg

SEQ ID NO: 5289005 - DNA, 25 bp, Homo sapien
aaagcctgttgagatttgaattggt

SEQ ID NO: 5289006 - DNA, 25 bp, Homo sapien
gccagccgggcagcatagcgagcta

SEQ ID NO: 5289007 - DNA, 25 bp, Homo sapien
cagtcggctaggactgtccagaaca

SEQ ID NO: 5289008 - DNA, 25 bp, Homo sapien
gtgttcctcatccagtcggctagga

SEQ ID NO: 5289009 - DNA, 25 bp, Homo sapien
catagcgagctataagacggtgttc

SEQ ID NO: 5289010 - DNA, 25 bp, Homo sapien
cataggaggctatcagcgcatgctc

SEQ ID NO: 5289011 - DNA, 25 bp, Homo sapien
agcgcatgctcatcggccaagtgac

SEQ ID NO: 5289012 - DNA, 25 bp, Homo sapien
tgggtatatcctggctatactgtaa

SEQ ID NO: 5289013 - DNA, 25 bp, Homo sapien
tgcagacgggccacataggaggcta

SEQ ID NO: 5289014 - DNA, 25 bp, Homo sapien
tccaaagcagagtcaatagtttaca

SEQ ID NO: 5289015 - DNA, 25 bp, Homo sapien
gacttctattcagaaccagtattgt

SEQ ID NO: 5289016 - DNA, 25 bp, Homo sapien
gatcactgcagaggctcactacaac

SEQ ID NO: 5289017 - DNA, 25 bp, Homo sapien
caggcctggcctataggaagacttc

SEQ ID NO: 5289018 - DNA, 25 bp, Homo sapien
cagttacagtgtgtttgtgaccagg

SEQ ID NO: 5289019 - DNA, 25 bp, Homo sapien
tctctgccacaccaagcttaaagtg

SEQ ID NO: 5289020 - DNA, 25 bp, Homo sapien
tgaccagggagttgatccacatttg

SEQ ID NO: 5289021 - DNA, 25 bp, Homo sapien
caccaagtgccgtgttagagaacgc

SEQ ID NO: 5289022 - DNA, 25 bp, Homo sapien
gactacaggcgggtaacatcaggcc

SEQ ID NO: 5289023 - DNA, 25 bp, Homo sapien
caacatgctgacttataaagtacct

SEQ ID NO: 5289024 - DNA, 25 bp, Homo sapien
gagtccagtaatggaccacaacatg

SEQ ID NO: 5289025 - DNA, 25 bp, Homo sapien
aaaattgtatatagagctgcatctc

SEQ ID NO: 5289026 - DNA, 25 bp, Homo sapien
gaattgcatgacacagagtggccaa

SEQ ID NO: 5289027 - DNA, 25 bp, Homo sapien
caagttaaatcagggtcaagtgcaa

SEQ ID NO: 5289028 - DNA, 25 bp, Homo sapien
tacatcagtactggaactacggtga

SEQ ID NO: 5289029 - DNA, 25 bp, Homo sapien
tcttggtcaatgacagggtccctaa

SEQ ID NO: 5289030 - DNA, 25 bp, Homo sapien
taacgggcatggtccctcacataca

SEQ ID NO: 5289031 - DNA, 25 bp, Homo sapien
gatggacagcaacgcaatccaggac

SEQ ID NO: 5289032 - DNA, 25 bp, Homo sapien
gcaaccatcggcagcttgggagcag

SEQ ID NO: 5289033 - DNA, 25 bp, Homo sapien
gctctgatgccataggtctaacggg

SEQ ID NO: 5289034 - DNA, 25 bp, Homo sapien
gctgaggagtcattaaggaaacaag

SEQ ID NO: 5289035 - DNA, 25 bp, Homo sapien
tgttcctatggagccgctactcaag

SEQ ID NO: 5289036 - DNA, 25 bp, Homo sapien
cacacaggtctgtccacattcagag

SEQ ID NO: 5289037 - DNA, 25 bp, Homo sapien
gggctcctggcttccgttagactct

SEQ ID NO: 5289038 - DNA, 25 bp, Homo sapien
ccctctggctgcctttggtctgctg

SEQ ID NO: 5289039 - DNA, 25 bp, Homo sapien
taaagcctgcaggtgtaacacagca

SEQ ID NO: 5289040 - DNA, 25 bp, Homo sapien
tactcgggtgacttagcgtgacaga

SEQ ID NO: 5289041 - DNA, 25 bp, Homo sapien
agtccaaggacagcaagggttatcg

SEQ ID NO: 5289042 - DNA, 25 bp, Homo sapien
tgtggtcgccctcatgtactcgggt

SEQ ID NO: 5289043 - DNA, 25 bp, Homo sapien
agagggcattgctggtaaattattc

SEQ ID NO: 5289044 - DNA, 25 bp, Homo sapien
agggcattgctggtaaattattctg

SEQ ID NO: 5289045 - DNA, 25 bp, Homo sapien
gagggcattgctggtaaattattct

SEQ ID NO: 5289046 - DNA, 25 bp, Homo sapien
tgagagggcattgctggtaaattat

SEQ ID NO: 5289047 - DNA, 25 bp, Homo sapien
gattccaactcagaaagagtctggc

SEQ ID NO: 5289048 - DNA, 25 bp, Homo sapien
ctggaaagtgccctagcaaggctaa

SEQ ID NO: 5289049 - DNA, 25 bp, Homo sapien
cagattccaactcagaaagagtctg

SEQ ID NO: 5289050 - DNA, 25 bp, Homo sapien
tagcaaggctaaaggcaagtactct

SEQ ID NO: 5289051 - DNA, 25 bp, Homo sapien
caaagcaatcggtacatatggcaca

SEQ ID NO: 5289052 - DNA, 25 bp, Homo sapien
tttaatggccatgcccttgagggag

SEQ ID NO: 5289053 - DNA, 25 bp, Homo sapien
catgcgggtaatgtgttatcaggcc

SEQ ID NO: 5289054 - DNA, 25 bp, Homo sapien
aacactgacgtaggagttttagcca

SEQ ID NO: 5289055 - DNA, 25 bp, Homo sapien
tcgcaaatcagtagcagaggccaac

SEQ ID NO: 5289056 - DNA, 25 bp, Homo sapien
tctgccctgtggaacaacctgcttt

SEQ ID NO: 5289057 - DNA, 25 bp, Homo sapien
gagagagactcaggctttccaactt

SEQ ID NO: 5289058 - DNA, 25 bp, Homo sapien
tgaaacgtgcctaatctgctctgac

SEQ ID NO: 5289059 - DNA, 25 bp, Homo sapien
cttggtgggagtgggcactccagag

SEQ ID NO: 5289060 - DNA, 25 bp, Homo sapien
ttggtgggagtgggcactccagagg

SEQ ID NO: 5289061 - DNA, 25 bp, Homo sapien
ggtgggagtgggcactccagaggac

SEQ ID NO: 5289062 - DNA, 25 bp, Homo sapien
gtgtcattcatattagtcagagggc

SEQ ID NO: 5289063 - DNA, 25 bp, Homo sapien
cattcatattagtcagagggcgagg

SEQ ID NO: 5289064 - DNA, 25 bp, Homo sapien
tcattcatattagtcagagggcgag

SEQ ID NO: 5289065 - DNA, 25 bp, Homo sapien
ttcatattagtcagagggcgaggag

SEQ ID NO: 5289066 - DNA, 25 bp, Homo sapien
tccgatgaggactttaaggagcact

SEQ ID NO: 5289067 - DNA, 25 bp, Homo sapien
gtcttgctgcaaatccatagcctaa

SEQ ID NO: 5289068 - DNA, 25 bp, Homo sapien
catagcctaatgaacccggtcagca

SEQ ID NO: 5289069 - DNA, 25 bp, Homo sapien
cagtctaggtaggtagctatcagga

SEQ ID NO: 5289070 - DNA, 25 bp, Homo sapien
caggatcatagctgccactgcaacc

SEQ ID NO: 5289071 - DNA, 25 bp, Homo sapien
ccaggctaggatgcagtagtcagat

SEQ ID NO: 5289072 - DNA, 25 bp, Homo sapien
taatttttgttgggtttcagacaga

SEQ ID NO: 5289073 - DNA, 25 bp, Homo sapien
tctcagctttccaactagccgggac

SEQ ID NO: 5289074 - DNA, 25 bp, Homo sapien
tgggtttgtcatacaggtaaacatg

SEQ ID NO: 5289075 - DNA, 25 bp, Homo sapien
tgacttgatcaccgcacattctatg

SEQ ID NO: 5289076 - DNA, 25 bp, Homo sapien
gggtttgtcatacaggtaaacatgt

SEQ ID NO: 5289077 - DNA, 25 bp, Homo sapien
tccaggatatagaaaacctgtaaat

SEQ ID NO: 5289078 - DNA, 25 bp, Homo sapien
tggactccaggatatagaaaacctg

SEQ ID NO: 5289079 - DNA, 25 bp, Homo sapien
aactggactccaggatatagaaaac

SEQ ID NO: 5289080 - DNA, 25 bp, Homo sapien
atttaaactggactccaggatatag

SEQ ID NO: 5289081 - DNA, 25 bp, Homo sapien
catttccttggactgtcacgtcggc

SEQ ID NO: 5289082 - DNA, 25 bp, Homo sapien
gctcaacctgcatatttacctgtca

SEQ ID NO: 5289083 - DNA, 25 bp, Homo sapien
tatttaccctggttgaccatgcgaa

SEQ ID NO: 5289084 - DNA, 25 bp, Homo sapien
cactctgtcttatggtgctgaccct

SEQ ID NO: 5289085 - DNA, 25 bp, Homo sapien
tcagattcacctagaggtctaagaa

SEQ ID NO: 5289086 - DNA, 25 bp, Homo sapien
tctgtaacacccgataattggagaa

SEQ ID NO: 5289087 - DNA, 25 bp, Homo sapien
gacagtgtttcaacccagactaact

SEQ ID NO: 5289088 - DNA, 25 bp, Homo sapien
caagcaattggaacatcagattcac

SEQ ID NO: 5289089 - DNA, 25 bp, Homo sapien
taattgcatggctcagcttctttgc

SEQ ID NO: 5289090 - DNA, 25 bp, Homo sapien
aagtggtttctctggttgctcagga

SEQ ID NO: 5289091 - DNA, 25 bp, Homo sapien
atgtgcaaggtcaagtggtttctct

SEQ ID NO: 5289092 - DNA, 25 bp, Homo sapien
gttctctcgtgggtacacaccccaa

SEQ ID NO: 5289093 - DNA, 25 bp, Homo sapien
tgtcaaagcagaaaatagtaaggaa

SEQ ID NO: 5289094 - DNA, 25 bp, Homo sapien
tgtgtcaaagcagaaaatagtaagg

SEQ ID NO: 5289095 - DNA, 25 bp, Homo sapien
tcaaagcagaaaatagtaaggaatt

SEQ ID NO: 5289096 - DNA, 25 bp, Homo sapien
ctgtgtcaaagcagaaaatagtaag

SEQ ID NO: 5289097 - DNA, 25 bp, Homo sapien
caggcgactcactgcaatggtttca

SEQ ID NO: 5289098 - DNA, 25 bp, Homo sapien
gaaagaaccgctggcaactaggagg

SEQ ID NO: 5289099 - DNA, 25 bp, Homo sapien
taaggctcatataaccaggtctgtc

SEQ ID NO: 5289100 - DNA, 25 bp, Homo sapien
cagccacggcagtgaggcattctat

SEQ ID NO: 5289101 - DNA, 25 bp, Homo sapien
gatgaaggttatgctggcctagtaa

SEQ ID NO: 5289102 - DNA, 25 bp, Homo sapien
aatatgcacctgtatccttatggga

SEQ ID NO: 5289103 - DNA, 25 bp, Homo sapien
ggttggatacattccaattttgtac

SEQ ID NO: 5289104 - DNA, 25 bp, Homo sapien
tgtactctggaatggtatatatcaa

SEQ ID NO: 5289105 - DNA, 25 bp, Homo sapien
taacgctgccatgatactctatgat

SEQ ID NO: 5289106 - DNA, 25 bp, Homo sapien
gatactctcctacaaaaatcctagt

SEQ ID NO: 5289107 - DNA, 25 bp, Homo sapien
aactgttaggtcaaaggttacatgc

SEQ ID NO: 5289108 - DNA, 25 bp, Homo sapien
ctgtacacccttgccaaaactgaat

SEQ ID NO: 5289109 - DNA, 25 bp, Homo sapien
gataagcaattcacactactgggtc

SEQ ID NO: 5289110 - DNA, 25 bp, Homo sapien
tcagaaagcatgaggtattcaggca

SEQ ID NO: 5289111 - DNA, 25 bp, Homo sapien
gaaagagttcaaccctaaatctgta

SEQ ID NO: 5289112 - DNA, 25 bp, Homo sapien
taaatctgtacctgtagatctcaga

SEQ ID NO: 5289113 - DNA, 25 bp, Homo sapien
agcagaagatgcactctccagtgca

SEQ ID NO: 5289114 - DNA, 25 bp, Homo sapien
aagcagaagatgcactctccagtgc

SEQ ID NO: 5289115 - DNA, 25 bp, Homo sapien
cacagtgccatgatctgcctatctg

SEQ ID NO: 5289116 - DNA, 25 bp, Homo sapien
gagccctgcatgttcctggcaacca

SEQ ID NO: 5289117 - DNA, 25 bp, Homo sapien
ggttaattccagcacgacctttata

SEQ ID NO: 5289118 - DNA, 25 bp, Homo sapien
ataagaaatccaagactctcacctg

SEQ ID NO: 5289119 - DNA, 25 bp, Homo sapien
aatcccagcacaggaaggtagaggt

SEQ ID NO: 5289120 - DNA, 25 bp, Homo sapien
tgggcaaaactagcaaaacactgtc

SEQ ID NO: 5289121 - DNA, 25 bp, Homo sapien
atcccagcacaggaaggtagaggtg

SEQ ID NO: 5289122 - DNA, 25 bp, Homo sapien
tccccagatctctgctggtaaactt

SEQ ID NO: 5289123 - DNA, 25 bp, Homo sapien
ggcctatatgacttccctattcaac

SEQ ID NO: 5289124 - DNA, 25 bp, Homo sapien
tgctcatgttagagtcccatgcagg

SEQ ID NO: 5289125 - DNA, 25 bp, Homo sapien
ggcagaagggctgtgctccatccat

SEQ ID NO: 5289126 - DNA, 25 bp, Homo sapien
tctttaacagattttcagagatgaa

SEQ ID NO: 5289127 - DNA, 25 bp, Homo sapien
aacacaacaagacccaggataggat

SEQ ID NO: 5289128 - DNA, 25 bp, Homo sapien
ttataacagaaacctatctaggaaa

SEQ ID NO: 5289129 - DNA, 25 bp, Homo sapien
tgaaggccaataggataaccaggct

SEQ ID NO: 5289130 - DNA, 25 bp, Homo sapien
tcacacccttatttggtaggcatcc

SEQ ID NO: 5289131 - DNA, 25 bp, Homo sapien
taagtcttacttagagctcaaaaga

SEQ ID NO: 5289132 - DNA, 25 bp, Homo sapien
ttttgctttgaaaagagagcactgc

SEQ ID NO: 5289133 - DNA, 25 bp, Homo sapien
gcacaacatttttgcaatcctggca

SEQ ID NO: 5289134 - DNA, 25 bp, Homo sapien
tcagggacacagatgaaacacaaag

SEQ ID NO: 5289135 - DNA, 25 bp, Homo sapien
ttaacactcagggacacagatgaaa

SEQ ID NO: 5289136 - DNA, 25 bp, Homo sapien
cactcagggacacagatgaaacaca

SEQ ID NO: 5289137 - DNA, 25 bp, Homo sapien
agggacacagatgaaacacaaagca

SEQ ID NO: 5289138 - DNA, 25 bp, Homo sapien
agctgatagttgtggcactgctggc

SEQ ID NO: 5289139 - DNA, 25 bp, Homo sapien
cactgctggcatcggtaccggaaac

SEQ ID NO: 5289140 - DNA, 25 bp, Homo sapien
tctcacatcggcagtaggagcactc

SEQ ID NO: 5289141 - DNA, 25 bp, Homo sapien
catggccacgccaaaagcaattctg

SEQ ID NO: 5289142 - DNA, 25 bp, Homo sapien
gcaagcctgtgcatgagaggtagcc

SEQ ID NO: 5289143 - DNA, 25 bp, Homo sapien
aagcctgtgcatgagaggtagccag

SEQ ID NO: 5289144 - DNA, 25 bp, Homo sapien
catgggcaagcctgtgcatgagagg

SEQ ID NO: 5289145 - DNA, 25 bp, Homo sapien
gcctgtgcatgagaggtagccagac

SEQ ID NO: 5289146 - DNA, 25 bp, Homo sapien
aaaacatatttagcattatctttct

SEQ ID NO: 5289147 - DNA, 25 bp, Homo sapien
tgtgtctaaaaacatatttagcatt

SEQ ID NO: 5289148 - DNA, 25 bp, Homo sapien
tctaaaaacatatttagcattatct

SEQ ID NO: 5289149 - DNA, 25 bp, Homo sapien
taaaaacatatttagcattatcttt

SEQ ID NO: 5289150 - DNA, 25 bp, Homo sapien
tcagctgcagcttcatcatcacagc

SEQ ID NO: 5289151 - DNA, 25 bp, Homo sapien
actcagctgcagcttcatcatcaca

SEQ ID NO: 5289152 - DNA, 25 bp, Homo sapien
tcactcagctgcagcttcatcatca

SEQ ID NO: 5289153 - DNA, 25 bp, Homo sapien
cagctgcagcttcatcatcacagca

SEQ ID NO: 5289154 - DNA, 25 bp, Homo sapien
tcttggcaggagttaccggagaagt

SEQ ID NO: 5289155 - DNA, 25 bp, Homo sapien
ataacgtccgttatagcaacagaaa

SEQ ID NO: 5289156 - DNA, 25 bp, Homo sapien
gagattcaggttatgctttcttggc

SEQ ID NO: 5289157 - DNA, 25 bp, Homo sapien
aaatcctggcttgtgagttcattca

SEQ ID NO: 5289158 - DNA, 25 bp, Homo sapien
gactgagtgctctgtgtaaccaaaa

SEQ ID NO: 5289159 - DNA, 25 bp, Homo sapien
cattggaatctgacatctgggagaa

SEQ ID NO: 5289160 - DNA, 25 bp, Homo sapien
gaaactggtcaaacttgctaaatat

SEQ ID NO: 5289161 - DNA, 25 bp, Homo sapien
aaaacaggtgcggactgagtgctct

SEQ ID NO: 5289162 - DNA, 25 bp, Homo sapien
caaataaagtcaagctataaggaaa

SEQ ID NO: 5289163 - DNA, 25 bp, Homo sapien
accaaataaagtcaagctataagga

SEQ ID NO: 5289164 - DNA, 25 bp, Homo sapien
ccaaataaagtcaagctataaggaa

SEQ ID NO: 5289165 - DNA, 25 bp, Homo sapien
aaataaagtcaagctataaggaaat

SEQ ID NO: 5289166 - DNA, 25 bp, Homo sapien
ttcgtgttcctccaaaaagttcaga

SEQ ID NO: 5289167 - DNA, 25 bp, Homo sapien
aaccgagaactagaatttgcgcctt

SEQ ID NO: 5289168 - DNA, 25 bp, Homo sapien
cgtgggcttttgcaccacttcaatc

SEQ ID NO: 5289169 - DNA, 25 bp, Homo sapien
cacttcaatcttggtcacttcgtgt

SEQ ID NO: 5289170 - DNA, 25 bp, Homo sapien
ctactgtgagccagctgctgcagcg

SEQ ID NO: 5289171 - DNA, 25 bp, Homo sapien
agccagctgctgcagcgtgagtgac

SEQ ID NO: 5289172 - DNA, 25 bp, Homo sapien
actgtgagccagctgctgcagcgtg

SEQ ID NO: 5289173 - DNA, 25 bp, Homo sapien
ccagctgctgcagcgtgagtgacat

SEQ ID NO: 5289174 - DNA, 25 bp, Homo sapien
taacatagctttaactgaaaatacc

SEQ ID NO: 5289175 - DNA, 25 bp, Homo sapien
tagctttaactgaaaataccgtcaa

SEQ ID NO: 5289176 - DNA, 25 bp, Homo sapien
gaaaataccgtcaacttgcctcggc

SEQ ID NO: 5289177 - DNA, 25 bp, Homo sapien
taactgaaaataccgtcaacttgcc

SEQ ID NO: 5289178 - DNA, 25 bp, Homo sapien
gctatgtagcagaggtcaaatggat

SEQ ID NO: 5289179 - DNA, 25 bp, Homo sapien
taccacgtgtttattctaagaagct

SEQ ID NO: 5289180 - DNA, 25 bp, Homo sapien
gttacatactaaacaacagggtgca

SEQ ID NO: 5289181 - DNA, 25 bp, Homo sapien
gggccacctggtttgaatataattc

SEQ ID NO: 5289182 - DNA, 25 bp, Homo sapien
atctttacaccaaaggaatctttcg

SEQ ID NO: 5289183 - DNA, 25 bp, Homo sapien
tatataagtatctttacaccaaagg

SEQ ID NO: 5289184 - DNA, 25 bp, Homo sapien
aattatataagtatctttacaccaa

SEQ ID NO: 5289185 - DNA, 25 bp, Homo sapien
taagtatctttacaccaaaggaatc

SEQ ID NO: 5289186 - DNA, 25 bp, Homo sapien
aacattgtaccggagaaactgagag

SEQ ID NO: 5289187 - DNA, 25 bp, Homo sapien
cacccaggtgttttgtgaatattgg

SEQ ID NO: 5289188 - DNA, 25 bp, Homo sapien
ttcactaagattctacacccaggtg

SEQ ID NO: 5289189 - DNA, 25 bp, Homo sapien
tatttgttcctgaccgttgttgtag

SEQ ID NO: 5289190 - DNA, 25 bp, Homo sapien
aatcagatggccaagagtatagcag

SEQ ID NO: 5289191 - DNA, 25 bp, Homo sapien
tcaaatcagatggccaagagtatag

SEQ ID NO: 5289192 - DNA, 25 bp, Homo sapien
tcagatggccaagagtatagcagaa

SEQ ID NO: 5289193 - DNA, 25 bp, Homo sapien
agatggccaagagtatagcagaaac

SEQ ID NO: 5289194 - DNA, 25 bp, Homo sapien
ctacgaatataagtgcagcaaatca

SEQ ID NO: 5289195 - DNA, 25 bp, Homo sapien
gacatactctaggacagtaagtcac

SEQ ID NO: 5289196 - DNA, 25 bp, Homo sapien
ttagaagtcaaatagaaagccccat

SEQ ID NO: 5289197 - DNA, 25 bp, Homo sapien
gagtaaagattagccttctgaacaa

SEQ ID NO: 5289198 - DNA, 25 bp, Homo sapien
aaatgaagtaagcgtgtaaggtaag

SEQ ID NO: 5289199 - DNA, 25 bp, Homo sapien
aatgaagtaagcgtgtaaggtaagg

SEQ ID NO: 5289200 - DNA, 25 bp, Homo sapien
atgaagtaagcgtgtaaggtaaggt

SEQ ID NO: 5289201 - DNA, 25 bp, Homo sapien
tcagagacaggtgttcttaaaatga

SEQ ID NO: 5289202 - DNA, 25 bp, Homo sapien
gcaatcataaagttgaggaggaggc

SEQ ID NO: 5289203 - DNA, 25 bp, Homo sapien
aggaggaggctgatagattgttcca

SEQ ID NO: 5289204 - DNA, 25 bp, Homo sapien
ctgtcatatgcagcaatcataaagt

SEQ ID NO: 5289205 - DNA, 25 bp, Homo sapien
aggaggctgatagattgttccacac

SEQ ID NO: 5289206 - DNA, 25 bp, Homo sapien
atgacagtttcgaggcgggacacac

SEQ ID NO: 5289207 - DNA, 25 bp, Homo sapien
tgttcaactgatagtagatggagga

SEQ ID NO: 5289208 - DNA, 25 bp, Homo sapien
agaaggaaggcgcttgttcaactga

SEQ ID NO: 5289209 - DNA, 25 bp, Homo sapien
agatgacagtttcgaggcgggacac

SEQ ID NO: 5289210 - DNA, 25 bp, Homo sapien
tgatctcggtggtatggtccagtgt

SEQ ID NO: 5289211 - DNA, 25 bp, Homo sapien
catgttccagatatcaacaagatga

SEQ ID NO: 5289212 - DNA, 25 bp, Homo sapien
tgtattaaggccattgtctcggaag

SEQ ID NO: 5289213 - DNA, 25 bp, Homo sapien
cattgtctcggaaggcttcaatcat

SEQ ID NO: 5289214 - DNA, 25 bp, Homo sapien
tggagaacatagtggaatcccatct

SEQ ID NO: 5289215 - DNA, 25 bp, Homo sapien
tcagaggcttggtgcagcggctcat

SEQ ID NO: 5289216 - DNA, 25 bp, Homo sapien
agaaagatacaggaactttatattt

SEQ ID NO: 5289217 - DNA, 25 bp, Homo sapien
atatcagaggcttggtgcagcggct

SEQ ID NO: 5289218 - DNA, 25 bp, Homo sapien
caggctgttctgtaagttgatagtc

SEQ ID NO: 5289219 - DNA, 25 bp, Homo sapien
tgtacaaatcgtaatttgcaggctg

SEQ ID NO: 5289220 - DNA, 25 bp, Homo sapien
tcgtatgacatcaaaattctgagca

SEQ ID NO: 5289221 - DNA, 25 bp, Homo sapien
ggttgcatcgtttttgtacaaatcg

SEQ ID NO: 5289222 - DNA, 25 bp, Homo sapien
aactcccgagctcaatggatttgcc

SEQ ID NO: 5289223 - DNA, 25 bp, Homo sapien
actcccgagctcaatggatttgcct

SEQ ID NO: 5289224 - DNA, 25 bp, Homo sapien
cagtattgtgcaaaggcggaaaggc

SEQ ID NO: 5289225 - DNA, 25 bp, Homo sapien
tgaaaccacatgatctgcaggaaag

SEQ ID NO: 5289226 - DNA, 25 bp, Homo sapien
cagtattgctgggaagtaacacgca

SEQ ID NO: 5289227 - DNA, 25 bp, Homo sapien
tgcgtattacttaaggcaccccagc

SEQ ID NO: 5289228 - DNA, 25 bp, Homo sapien
catggtcttccgcttgttcccactt

SEQ ID NO: 5289229 - DNA, 25 bp, Homo sapien
tctctgccatggtcttccgcttgtt

SEQ ID NO: 5289230 - DNA, 25 bp, Homo sapien
tggtcttccgcttgttcccactttc

SEQ ID NO: 5289231 - DNA, 25 bp, Homo sapien
tgccatggtcttccgcttgttccca

SEQ ID NO: 5289232 - DNA, 25 bp, Homo sapien
caggaatctttgtgagccatctgtc

SEQ ID NO: 5289233 - DNA, 25 bp, Homo sapien
taaggtactggattatgactgacaa

SEQ ID NO: 5289234 - DNA, 25 bp, Homo sapien
cccagcagaggtgaactaaaacatg

SEQ ID NO: 5289235 - DNA, 25 bp, Homo sapien
tgaaagaccactaaacccagcagag

SEQ ID NO: 5289236 - DNA, 25 bp, Homo sapien
ccaaatttctcccataggcttcttt

SEQ ID NO: 5289237 - DNA, 25 bp, Homo sapien
tgacctttctgctttatccccaaaa

SEQ ID NO: 5289238 - DNA, 25 bp, Homo sapien
gcaatttatggctccaatttcccaa

SEQ ID NO: 5289239 - DNA, 25 bp, Homo sapien
atccccaaaaccacgcaatttatgg

SEQ ID NO: 5289240 - DNA, 25 bp, Homo sapien
tccatactatttcgtggccccagtg

SEQ ID NO: 5289241 - DNA, 25 bp, Homo sapien
tgctgactacgggtctctacctacg

SEQ ID NO: 5289242 - DNA, 25 bp, Homo sapien
acctcaataacatgacggtgttcca

SEQ ID NO: 5289243 - DNA, 25 bp, Homo sapien
tctacctacggtagctggaaggtct

SEQ ID NO: 5289244 - DNA, 25 bp, Homo sapien
gctcacttccccgccggagcagggg

SEQ ID NO: 5289245 - DNA, 25 bp, Homo sapien
cgccggagcaggggtcgtcgggaag

SEQ ID NO: 5289246 - DNA, 25 bp, Homo sapien
cacttccccgccggagcaggggtcg

SEQ ID NO: 5289247 - DNA, 25 bp, Homo sapien
gagcaggggtcgtcgggaaggtctc

SEQ ID NO: 5289248 - DNA, 25 bp, Homo sapien
aggcagcggcagcgcctactcaggc

SEQ ID NO: 5289249 - DNA, 25 bp, Homo sapien
ggcgaacgttcgcagcgcccggctc

SEQ ID NO: 5289250 - DNA, 25 bp, Homo sapien
tcactcctccgcacgctccggccca

SEQ ID NO: 5289251 - DNA, 25 bp, Homo sapien
ttctccgcccggcacgcgcagcgcc

SEQ ID NO: 5289252 - DNA, 25 bp, Homo sapien
gggtgcacataggtaaatgacaatt

SEQ ID NO: 5289253 - DNA, 25 bp, Homo sapien
gaggatgatactcccactccatgag

SEQ ID NO: 5289254 - DNA, 25 bp, Homo sapien
gaataagactgggtgaatataaacc

SEQ ID NO: 5289255 - DNA, 25 bp, Homo sapien
taaaaatctgcgctagaatctgttc

SEQ ID NO: 5289256 - DNA, 25 bp, Homo sapien
aagatggcacagaagaccagctcgt

SEQ ID NO: 5289257 - DNA, 25 bp, Homo sapien
ggctgacacatgagtcctccgtctt

SEQ ID NO: 5289258 - DNA, 25 bp, Homo sapien
tgctggacggtggtgttggtcttta

SEQ ID NO: 5289259 - DNA, 25 bp, Homo sapien
tgtccaaatgtggaatgaagatggc

SEQ ID NO: 5289260 - DNA, 25 bp, Homo sapien
gggcaaagggcactggagacaagct

SEQ ID NO: 5289261 - DNA, 25 bp, Homo sapien
caagctgggatagaagcaaagacca

SEQ ID NO: 5289262 - DNA, 25 bp, Homo sapien
gcactggagacaagctgggatagaa

SEQ ID NO: 5289263 - DNA, 25 bp, Homo sapien
ctggagacaagctgggatagaagca

SEQ ID NO: 5289264 - DNA, 25 bp, Homo sapien
ccttcaatatctgtccgtaacccat

SEQ ID NO: 5289265 - DNA, 25 bp, Homo sapien
tagagcacctattgtctccttcaat

SEQ ID NO: 5289266 - DNA, 25 bp, Homo sapien
tagacaccatttccacctagagcac

SEQ ID NO: 5289267 - DNA, 25 bp, Homo sapien
catttccacctagagcacctattgt

SEQ ID NO: 5289268 - DNA, 25 bp, Homo sapien
agctgagataactagctgcctttgg

SEQ ID NO: 5289269 - DNA, 25 bp, Homo sapien
tgaacaatcagctgagataactagc

SEQ ID NO: 5289270 - DNA, 25 bp, Homo sapien
ggaaagagttcaacaaagacttcga

SEQ ID NO: 5289271 - DNA, 25 bp, Homo sapien
gacttcgatccgtgactgactgtga

SEQ ID NO: 5289272 - DNA, 25 bp, Homo sapien
gagagtttgattgggctcggatttc

SEQ ID NO: 5289273 - DNA, 25 bp, Homo sapien
tgatgagagtttgattgggctcgga

SEQ ID NO: 5289274 - DNA, 25 bp, Homo sapien
tttgattgggctcggatttcagcag

SEQ ID NO: 5289275 - DNA, 25 bp, Homo sapien
agtttgattgggctcggatttcagc

SEQ ID NO: 5289276 - DNA, 25 bp, Homo sapien
gccttctagtggtgaaacaggctca

SEQ ID NO: 5289277 - DNA, 25 bp, Homo sapien
tttgccttctagtggtgaaacaggc

SEQ ID NO: 5289278 - DNA, 25 bp, Homo sapien
tgccttctagtggtgaaacaggctc

SEQ ID NO: 5289279 - DNA, 25 bp, Homo sapien
ctttgccttctagtggtgaaacagg

SEQ ID NO: 5289280 - DNA, 25 bp, Homo sapien
ccagtggcccggcagaataatgacg

SEQ ID NO: 5289281 - DNA, 25 bp, Homo sapien
gtatcatggaggtctctgagccggc

SEQ ID NO: 5289282 - DNA, 25 bp, Homo sapien
taatgacggcttctgtggcaaggct

SEQ ID NO: 5289283 - DNA, 25 bp, Homo sapien
gctgtgtcccacattcgagcagatg

SEQ ID NO: 5289284 - DNA, 25 bp, Homo sapien
tcctcaatattatacaccacaacca

SEQ ID NO: 5289285 - DNA, 25 bp, Homo sapien
tattatacaccacaaccaagtagga

SEQ ID NO: 5289286 - DNA, 25 bp, Homo sapien
tatacaccacaaccaagtaggattt

SEQ ID NO: 5289287 - DNA, 25 bp, Homo sapien
gcttctctcctcaatattatacacc

SEQ ID NO: 5289288 - DNA, 25 bp, Homo sapien
caacaaccaggttggtgaccacaca

SEQ ID NO: 5289289 - DNA, 25 bp, Homo sapien
accaacaaccaggttggtgaccaca

SEQ ID NO: 5289290 - DNA, 25 bp, Homo sapien
aacaaccaggttggtgaccacacaa

SEQ ID NO: 5289291 - DNA, 25 bp, Homo sapien
ccaacaaccaggttggtgaccacac

SEQ ID NO: 5289292 - DNA, 25 bp, Homo sapien
taagctgcaaagacttaacatagcc

SEQ ID NO: 5289293 - DNA, 25 bp, Homo sapien
gacaatgtggtgatggttcaaagat

SEQ ID NO: 5289294 - DNA, 25 bp, Homo sapien
tatacaaatatggacggtgtggtgg

SEQ ID NO: 5289295 - DNA, 25 bp, Homo sapien
aattgtccccaattgatgtattgtg

SEQ ID NO: 5289296 - DNA, 25 bp, Homo sapien
ttatagtgacagagagatcaatggc

SEQ ID NO: 5289297 - DNA, 25 bp, Homo sapien
aaatggagtgttgctctcgtcaccc

SEQ ID NO: 5289298 - DNA, 25 bp, Homo sapien
gatgaacgactagaaataactcgtg

SEQ ID NO: 5289299 - DNA, 25 bp, Homo sapien
gaaccattcatacatgtgacaacac

SEQ ID NO: 5289300 - DNA, 25 bp, Homo sapien
gaactgctgacttcgggtcaaagcc

SEQ ID NO: 5289301 - DNA, 25 bp, Homo sapien
caatagtgaggagctaaaaggcaga

SEQ ID NO: 5289302 - DNA, 25 bp, Homo sapien
tccaagctctaggtatctgaagaca

SEQ ID NO: 5289303 - DNA, 25 bp, Homo sapien
gctaaggcctatgcgcacaaagatt

SEQ ID NO: 5289304 - DNA, 25 bp, Homo sapien
ctttaaaaagcgctagagtcctgct

SEQ ID NO: 5289305 - DNA, 25 bp, Homo sapien
gttcctggacagagactacgttaca

SEQ ID NO: 5289306 - DNA, 25 bp, Homo sapien
acttaacagatggaggtgcacagcc

SEQ ID NO: 5289307 - DNA, 25 bp, Homo sapien
ggaaaacccactatttagccacagc

SEQ ID NO: 5289308 - DNA, 25 bp, Homo sapien
gtaaccacagctgggcaattatggg

SEQ ID NO: 5289309 - DNA, 25 bp, Homo sapien
tatgaagatgctaatgtcccctgag

SEQ ID NO: 5289310 - DNA, 25 bp, Homo sapien
tctcttggaaggctgaattatctcc

SEQ ID NO: 5289311 - DNA, 25 bp, Homo sapien
tctccaacgtcttgggacaacccag

SEQ ID NO: 5289312 - DNA, 25 bp, Homo sapien
gacccagaggagttcaaaattcaag

SEQ ID NO: 5289313 - DNA, 25 bp, Homo sapien
tgacctctccagattagacgggcag

SEQ ID NO: 5289314 - DNA, 25 bp, Homo sapien
gaaactcacttctgagagaactggg

SEQ ID NO: 5289315 - DNA, 25 bp, Homo sapien
taaagaggctgcaccgcatttcttc

SEQ ID NO: 5289316 - DNA, 25 bp, Homo sapien
ataaaatgaaaaataagaatatagg

SEQ ID NO: 5289317 - DNA, 25 bp, Homo sapien
taatgatcttttacttaataataaa

SEQ ID NO: 5289318 - DNA, 25 bp, Homo sapien
ttcacttttaatgatcttttactta

SEQ ID NO: 5289319 - DNA, 25 bp, Homo sapien
taaaatgaaaaataagaatatagga

SEQ ID NO: 5289320 - DNA, 25 bp, Homo sapien
tattaatcctatattggccttgggc

SEQ ID NO: 5289321 - DNA, 25 bp, Homo sapien
gagctgaaaactacccttggccaag

SEQ ID NO: 5289322 - DNA, 25 bp, Homo sapien
tcacctggaaggcaatgaggtcttc

SEQ ID NO: 5289323 - DNA, 25 bp, Homo sapien
cacgggaggcgtatgcatcaggcat

SEQ ID NO: 5289324 - DNA, 25 bp, Homo sapien
taatctatgaataacctgcggccag

SEQ ID NO: 5289325 - DNA, 25 bp, Homo sapien
tagttaccacgaatgactaagtgcg

SEQ ID NO: 5289326 - DNA, 25 bp, Homo sapien
tcagacagcagtaatccaaacaagg

SEQ ID NO: 5289327 - DNA, 25 bp, Homo sapien
tctagcactaggttaacaggttggg

SEQ ID NO: 5289328 - DNA, 25 bp, Homo sapien
gaaacctacttgtttatttctgtga

SEQ ID NO: 5289329 - DNA, 25 bp, Homo sapien
tacagtgtatctctttctagtctca

SEQ ID NO: 5289330 - DNA, 25 bp, Homo sapien
ctgtgattccaaaaggacgcaaaaa

SEQ ID NO: 5289331 - DNA, 25 bp, Homo sapien
ctttacagtgtatctctttctagtc

SEQ ID NO: 5289332 - DNA, 25 bp, Homo sapien
tctcttcggagaacgcctgaacagg

SEQ ID NO: 5289333 - DNA, 25 bp, Homo sapien
cagtaacatttcgaaggcgtgccct

SEQ ID NO: 5289334 - DNA, 25 bp, Homo sapien
cattgctagatacctggctacctgg

SEQ ID NO: 5289335 - DNA, 25 bp, Homo sapien
tatagcttggccctatctgggtggg

SEQ ID NO: 5289336 - DNA, 25 bp, Homo sapien
aaagctcggggctgctacggattgc

SEQ ID NO: 5289337 - DNA, 25 bp, Homo sapien
tcggggctgctacggattgccttac

SEQ ID NO: 5289338 - DNA, 25 bp, Homo sapien
gaacagtagaactgaaaagctcggg

SEQ ID NO: 5289339 - DNA, 25 bp, Homo sapien
agaggaagaacagtagaactgaaaa

SEQ ID NO: 5289340 - DNA, 25 bp, Homo sapien
tgtgctgcctgaattaaatctctgg

SEQ ID NO: 5289341 - DNA, 25 bp, Homo sapien
tctggctagggtcttttcatcaaat

SEQ ID NO: 5289342 - DNA, 25 bp, Homo sapien
catcaaatgtttggcctctagtgaa

SEQ ID NO: 5289343 - DNA, 25 bp, Homo sapien
tctccttacttaaagtggtttgctc

SEQ ID NO: 5289344 - DNA, 25 bp, Homo sapien
tccctgctgtgaggtcctgaacttg

SEQ ID NO: 5289345 - DNA, 25 bp, Homo sapien
cctgaacttgtgtcacccttgccag

SEQ ID NO: 5289346 - DNA, 25 bp, Homo sapien
ctaagcaatcactggtagatagagt

SEQ ID NO: 5289347 - DNA, 25 bp, Homo sapien
cactggtagatagagtttccctgct

SEQ ID NO: 5289348 - DNA, 25 bp, Homo sapien
gcttagacaaaaacgatcttcaggg

SEQ ID NO: 5289349 - DNA, 25 bp, Homo sapien
aatattcagtaagtagtgccctgcc

SEQ ID NO: 5289350 - DNA, 25 bp, Homo sapien
ccggccgtaggtagaaatattcagt

SEQ ID NO: 5289351 - DNA, 25 bp, Homo sapien
tacagaatgggtcctcctaaagctc

SEQ ID NO: 5289352 - DNA, 25 bp, Homo sapien
tgcgtagctggatgggactgtctct

SEQ ID NO: 5289353 - DNA, 25 bp, Homo sapien
tgtgttggtagctatgagcgctccc

SEQ ID NO: 5289354 - DNA, 25 bp, Homo sapien
tgtgtgtcaatgctggagtccctca

SEQ ID NO: 5289355 - DNA, 25 bp, Homo sapien
tgcctccgaaccctctgaatgagag

SEQ ID NO: 5289356 - DNA, 25 bp, Homo sapien
gccactggcacactagcatctgtct

SEQ ID NO: 5289357 - DNA, 25 bp, Homo sapien
gctttgagctcaactgtgccatcag

SEQ ID NO: 5289358 - DNA, 25 bp, Homo sapien
tattcttactaggacctgctttgag

SEQ ID NO: 5289359 - DNA, 25 bp, Homo sapien
gaggcacctgagattagagcaggac

SEQ ID NO: 5289360 - DNA, 25 bp, Homo sapien
tctgcaactactgggcccttgtgga

SEQ ID NO: 5289361 - DNA, 25 bp, Homo sapien
aggccactgtggctgttgctctggt

SEQ ID NO: 5289362 - DNA, 25 bp, Homo sapien
gctctggtggggttcagtttttcat

SEQ ID NO: 5289363 - DNA, 25 bp, Homo sapien
agaaggtgctttctcctgtctgcaa

SEQ ID NO: 5289364 - DNA, 25 bp, Homo sapien
catgctccactgacggcaggtgttg

SEQ ID NO: 5289365 - DNA, 25 bp, Homo sapien
ctgggggggtttgctgtagttgtgc

SEQ ID NO: 5289366 - DNA, 25 bp, Homo sapien
gatgggacacttgtgcatgctccac

SEQ ID NO: 5289367 - DNA, 25 bp, Homo sapien
actgacggcaggtgttggaggcact

SEQ ID NO: 5289368 - DNA, 25 bp, Homo sapien
cctggcttggggtggtcttggtctc

SEQ ID NO: 5289369 - DNA, 25 bp, Homo sapien
ggtcttggtctcagactggggctga

SEQ ID NO: 5289370 - DNA, 25 bp, Homo sapien
tggaccacagggtaaaagctctctc

SEQ ID NO: 5289371 - DNA, 25 bp, Homo sapien
ccacagggtaaaagctctctcgtac

SEQ ID NO: 5289372 - DNA, 25 bp, Homo sapien
cctgttctgttaggactagtgatgg

SEQ ID NO: 5289373 - DNA, 25 bp, Homo sapien
gctgccctctgtgctttgaccagtt

SEQ ID NO: 5289374 - DNA, 25 bp, Homo sapien
gtcctggaatggtccctccaactga

SEQ ID NO: 5289375 - DNA, 25 bp, Homo sapien
tttcactgactctgtctgagcctgg

SEQ ID NO: 5289376 - DNA, 25 bp, Homo sapien
ctggaaaacgagccctgggagagac

SEQ ID NO: 5289377 - DNA, 25 bp, Homo sapien
gctcttggtacaaagataggatcct

SEQ ID NO: 5289378 - DNA, 25 bp, Homo sapien
ggaagcatgcattacagactacctg

SEQ ID NO: 5289379 - DNA, 25 bp, Homo sapien
aaaatctaagaggtcctgaggagac

SEQ ID NO: 5289380 - DNA, 25 bp, Homo sapien
tgcaatatctgcgtgaaccctggcc

SEQ ID NO: 5289381 - DNA, 25 bp, Homo sapien
ttttcgcacctggattctgtcccct

SEQ ID NO: 5289382 - DNA, 25 bp, Homo sapien
tgctggcgattctcagtgacacgtg

SEQ ID NO: 5289383 - DNA, 25 bp, Homo sapien
tgtggtgagacctgaaatggctgct

SEQ ID NO: 5289384 - DNA, 25 bp, Homo sapien
cttgagaggtggtacttttcgcacc

SEQ ID NO: 5289385 - DNA, 25 bp, Homo sapien
gaggcctctgacacaggcatggatt

SEQ ID NO: 5289386 - DNA, 25 bp, Homo sapien
tttgggatcactgggagaagctgtc

SEQ ID NO: 5289387 - DNA, 25 bp, Homo sapien
catattagtctcctgtggacccgct

SEQ ID NO: 5289388 - DNA, 25 bp, Homo sapien
tacactctgactgggagactactgg

SEQ ID NO: 5289389 - DNA, 25 bp, Homo sapien
ctctgcccatagtagctttcaaaga

SEQ ID NO: 5289390 - DNA, 25 bp, Homo sapien
cacctgcatctcaggtgtaaactca

SEQ ID NO: 5289391 - DNA, 25 bp, Homo sapien
tctcttgtcgaattctcacctgcat

SEQ ID NO: 5289392 - DNA, 25 bp, Homo sapien
ctccttctcaatctcttgtcgaatt

SEQ ID NO: 5289393 - DNA, 25 bp, Homo sapien
gaagaattcattgttaagggctgag

SEQ ID NO: 5289394 - DNA, 25 bp, Homo sapien
agggctgagccatttaacttcatta

SEQ ID NO: 5289395 - DNA, 25 bp, Homo sapien
gaattcattgttaagggctgagcca

SEQ ID NO: 5289396 - DNA, 25 bp, Homo sapien
gttaagggctgagccatttaacttc

SEQ ID NO: 5289397 - DNA, 25 bp, Homo sapien
atttcccactccactgaagcactgg

SEQ ID NO: 5289398 - DNA, 25 bp, Homo sapien
tcctgttgatactggaccaagacaa

SEQ ID NO: 5289399 - DNA, 25 bp, Homo sapien
tatctggacccatgtttttggctta

SEQ ID NO: 5289400 - DNA, 25 bp, Homo sapien
tttttggcttattcctgacatttcc

SEQ ID NO: 5289401 - DNA, 25 bp, Homo sapien
ggagtccggtgtctcaacgtcaatg

SEQ ID NO: 5289402 - DNA, 25 bp, Homo sapien
cgttgctggcaatctccaggaagga

SEQ ID NO: 5289403 - DNA, 25 bp, Homo sapien
tgtattaaccagaatggagtccggt

SEQ ID NO: 5289404 - DNA, 25 bp, Homo sapien
gcttgttgatcagtgctcgcagatt

SEQ ID NO: 5289405 - DNA, 25 bp, Homo sapien
taataaatcaagcaaaccagaagga

SEQ ID NO: 5289406 - DNA, 25 bp, Homo sapien
ttaataaatcaagcaaaccagaagg

SEQ ID NO: 5289407 - DNA, 25 bp, Homo sapien
tcaacacatctctctccattattaa

SEQ ID NO: 5289408 - DNA, 25 bp, Homo sapien
ttcaacacatctctctccattatta

SEQ ID NO: 5289409 - DNA, 25 bp, Homo sapien
actgatgataaaggtaggtggctac

SEQ ID NO: 5289410 - DNA, 25 bp, Homo sapien
gagaagaactgttgtgggccacaca

SEQ ID NO: 5289411 - DNA, 25 bp, Homo sapien
cagtgtctaagaggtaaatgttgtc

SEQ ID NO: 5289412 - DNA, 25 bp, Homo sapien
gcaaacttgctatataccatgatga

SEQ ID NO: 5289413 - DNA, 25 bp, Homo sapien
caaagtggtcagtttaagtcctcta

SEQ ID NO: 5289414 - DNA, 25 bp, Homo sapien
tgtgttccctgaagatacttttgtg

SEQ ID NO: 5289415 - DNA, 25 bp, Homo sapien
tgcacatcgcagtcaaacttcagtt

SEQ ID NO: 5289416 - DNA, 25 bp, Homo sapien
tgataccaatgtcagctagaaagta

SEQ ID NO: 5289417 - DNA, 25 bp, Homo sapien
tggtatggagtctctcagatctctg

SEQ ID NO: 5289418 - DNA, 25 bp, Homo sapien
gatctctggaatgacttcttcccca

SEQ ID NO: 5289419 - DNA, 25 bp, Homo sapien
gaatgacttcttccccaagcctagt

SEQ ID NO: 5289420 - DNA, 25 bp, Homo sapien
caagcctagtaaagtattttccact

SEQ ID NO: 5289421 - DNA, 25 bp, Homo sapien
tttgagttttgagggctgcctgtct

SEQ ID NO: 5289422 - DNA, 25 bp, Homo sapien
gtttgagttttgagggctgcctgtc

SEQ ID NO: 5289423 - DNA, 25 bp, Homo sapien
agtttgagttttgagggctgcctgt

SEQ ID NO: 5289424 - DNA, 25 bp, Homo sapien
cctgtctgtccatcagattgctttc

SEQ ID NO: 5289425 - DNA, 25 bp, Homo sapien
caggtttggcaggtacagagtcact

SEQ ID NO: 5289426 - DNA, 25 bp, Homo sapien
aggtttggcaggtacagagtcactg

SEQ ID NO: 5289427 - DNA, 25 bp, Homo sapien
tttggcaggtacagagtcactggct

SEQ ID NO: 5289428 - DNA, 25 bp, Homo sapien
gtttggcaggtacagagtcactggc

SEQ ID NO: 5289429 - DNA, 25 bp, Homo sapien
ggatatgcttggcctgcattgctgc

SEQ ID NO: 5289430 - DNA, 25 bp, Homo sapien
atggatatgcttggcctgcattgct

SEQ ID NO: 5289431 - DNA, 25 bp, Homo sapien
tggatatgcttggcctgcattgctg

SEQ ID NO: 5289432 - DNA, 25 bp, Homo sapien
gcttctgtgatggagaaatgacttt

SEQ ID NO: 5289433 - DNA, 25 bp, Homo sapien
ctgtgcttctgtgatggagaaatga

SEQ ID NO: 5289434 - DNA, 25 bp, Homo sapien
tgtgcttctgtgatggagaaatgac

SEQ ID NO: 5289435 - DNA, 25 bp, Homo sapien
ctgctttagtgccttcttgctgtgc

SEQ ID NO: 5289436 - DNA, 25 bp, Homo sapien
gaatggtgggtgatgggcagcctga

SEQ ID NO: 5289437 - DNA, 25 bp, Homo sapien
tggttctaagatgtggtacccagaa

SEQ ID NO: 5289438 - DNA, 25 bp, Homo sapien
gaaaattattgggtggaagcccaga

SEQ ID NO: 5289439 - DNA, 25 bp, Homo sapien
tcatgactacatcttaaccagtggt

SEQ ID NO: 5289440 - DNA, 25 bp, Homo sapien
cagatactctgaagtgaggcccagg

SEQ ID NO: 5289441 - DNA, 25 bp, Homo sapien
tgttgttaccgcaaatatattcttt

SEQ ID NO: 5289442 - DNA, 25 bp, Homo sapien
gttgatgttgttaccgcaaatatat

SEQ ID NO: 5289443 - DNA, 25 bp, Homo sapien
gttgttgatgttgttaccgcaaata

SEQ ID NO: 5289444 - DNA, 25 bp, Homo sapien
gggaggtcgcaggaggagaatcgtt

SEQ ID NO: 5289445 - DNA, 25 bp, Homo sapien
cctgggttcaagtgattctcttgcc

SEQ ID NO: 5289446 - DNA, 25 bp, Homo sapien
actgcagcctccgaggcctcctggg

SEQ ID NO: 5289447 - DNA, 25 bp, Homo sapien
cctcctgggttcaagtgattctctt

SEQ ID NO: 5289448 - DNA, 25 bp, Homo sapien
ctgcagcctccgaggcctcctgggt

SEQ ID NO: 5289449 - DNA, 25 bp, Homo sapien
tctgtctcaaaaaataaataaaata

SEQ ID NO: 5289450 - DNA, 25 bp, Homo sapien
tctgagatcatgccactgcactcca

SEQ ID NO: 5289451 - DNA, 25 bp, Homo sapien
gcctgggtgacagagcaagtttctg

SEQ ID NO: 5289452 - DNA, 25 bp, Homo sapien
gaggcgaggttgcagtgatctgaga

SEQ ID NO: 5289453 - DNA, 25 bp, Homo sapien
tgcttctgggtagtctaactatcca

SEQ ID NO: 5289454 - DNA, 25 bp, Homo sapien
tatccaaagccctaacagtgtagcc

SEQ ID NO: 5289455 - DNA, 25 bp, Homo sapien
tagccatctttaacacaacacagtg

SEQ ID NO: 5289456 - DNA, 25 bp, Homo sapien
tactccaaactaggcaggcggtgtt

SEQ ID NO: 5289457 - DNA, 25 bp, Homo sapien
ggtgctccacaacatatgtcattag

SEQ ID NO: 5289458 - DNA, 25 bp, Homo sapien
taaccacactaaatgctgacgagga

SEQ ID NO: 5289459 - DNA, 25 bp, Homo sapien
gacgaggacatgaagcaacaggaac

SEQ ID NO: 5289460 - DNA, 25 bp, Homo sapien
cactttggtagactggaagtttcta

SEQ ID NO: 5289461 - DNA, 25 bp, Homo sapien
actttattgaaggatcaggtggatt

SEQ ID NO: 5289462 - DNA, 25 bp, Homo sapien
ctttattgaaggatcaggtggattt

SEQ ID NO: 5289463 - DNA, 25 bp, Homo sapien
tactttattgaaggatcaggtggat

SEQ ID NO: 5289464 - DNA, 25 bp, Homo sapien
tgacagctctttcaccccatccggc

SEQ ID NO: 5289465 - DNA, 25 bp, Homo sapien
tctgacagctctttcaccccatccg

SEQ ID NO: 5289466 - DNA, 25 bp, Homo sapien
acagctctttcaccccatccggcac

SEQ ID NO: 5289467 - DNA, 25 bp, Homo sapien
gctctttcaccccatccggcacatc

SEQ ID NO: 5289468 - DNA, 25 bp, Homo sapien
gtatggctaaacacactagtgagtg

SEQ ID NO: 5289469 - DNA, 25 bp, Homo sapien
cacgcccaacataagaggtcaaaaa

SEQ ID NO: 5289470 - DNA, 25 bp, Homo sapien
aaatgcttagaatcacgcccaacat

SEQ ID NO: 5289471 - DNA, 25 bp, Homo sapien
aaatatcagctactatgtgtttaca

SEQ ID NO: 5289472 - DNA, 25 bp, Homo sapien
aaatgcaggacagcttttatagagt

SEQ ID NO: 5289473 - DNA, 25 bp, Homo sapien
tgcaggacagcttttatagagttag

SEQ ID NO: 5289474 - DNA, 25 bp, Homo sapien
agttagttgtcagccagacatcttg

SEQ ID NO: 5289475 - DNA, 25 bp, Homo sapien
gacatcttgtcatataggttcaaca

SEQ ID NO: 5289476 - DNA, 25 bp, Homo sapien
tctacctggaaccttatagaagatg

SEQ ID NO: 5289477 - DNA, 25 bp, Homo sapien
ctacctggaaccttatagaagatgc

SEQ ID NO: 5289478 - DNA, 25 bp, Homo sapien
cattcaggcatgcaagaggagaagt

SEQ ID NO: 5289479 - DNA, 25 bp, Homo sapien
gcattcaggcatgcaagaggagaag

SEQ ID NO: 5289480 - DNA, 25 bp, Homo sapien
ttcaggcatgcaagaggagaagtcc

SEQ ID NO: 5289481 - DNA, 25 bp, Homo sapien
caggcatgcaagaggagaagtccca

SEQ ID NO: 5289482 - DNA, 25 bp, Homo sapien
tctcggcaatgggacactgccagct

SEQ ID NO: 5289483 - DNA, 25 bp, Homo sapien
tctctcggcaatgggacactgccag

SEQ ID NO: 5289484 - DNA, 25 bp, Homo sapien
tccatctctcggcaatgggacactg

SEQ ID NO: 5289485 - DNA, 25 bp, Homo sapien
catctctcggcaatgggacactgcc

SEQ ID NO: 5289486 - DNA, 25 bp, Homo sapien
tgtgagttccaagtctctttcaatg

SEQ ID NO: 5289487 - DNA, 25 bp, Homo sapien
tttcaatgaccaccaacttacgagc

SEQ ID NO: 5289488 - DNA, 25 bp, Homo sapien
tctttcaatgaccaccaacttacga

SEQ ID NO: 5289489 - DNA, 25 bp, Homo sapien
gttccaagtctctttcaatgaccac

SEQ ID NO: 5289490 - DNA, 25 bp, Homo sapien
gatttcctggaattccatcttttaa

SEQ ID NO: 5289491 - DNA, 25 bp, Homo sapien
tggaattccatcttttaaggtccag

SEQ ID NO: 5289492 - DNA, 25 bp, Homo sapien
tttgagttggatttcctggaattcc

SEQ ID NO: 5289493 - DNA, 25 bp, Homo sapien
ttctttgagttggatttcctggaat

SEQ ID NO: 5289494 - DNA, 25 bp, Homo sapien
tttgcagggcagtggccacgtgctc

SEQ ID NO: 5289495 - DNA, 25 bp, Homo sapien
cagtggccacgtgctcctgagcaca

SEQ ID NO: 5289496 - DNA, 25 bp, Homo sapien
tgatcagtagctttttccgcttctt

SEQ ID NO: 5289497 - DNA, 25 bp, Homo sapien
tctgatcagtagctttttccgcttc

SEQ ID NO: 5289498 - DNA, 25 bp, Homo sapien
gtgcttcactgcctcaatagtggtg

SEQ ID NO: 5289499 - DNA, 25 bp, Homo sapien
tgcttcactgcctcaatagtggtga

SEQ ID NO: 5289500 - DNA, 25 bp, Homo sapien
ggtgatgattcacaagacagcgatg

SEQ ID NO: 5289501 - DNA, 25 bp, Homo sapien
tctgagatgatgaacaacatgggtg

SEQ ID NO: 5289502 - DNA, 25 bp, Homo sapien
tcaattggcttagtgtggacttcag

SEQ ID NO: 5289503 - DNA, 25 bp, Homo sapien
tgaagaggatgcagattgaccagaa

SEQ ID NO: 5289504 - DNA, 25 bp, Homo sapien
tgacccttaggtgtttttacatctc

SEQ ID NO: 5289505 - DNA, 25 bp, Homo sapien
gtgttgtcctcctctaaaatatata

SEQ ID NO: 5289506 - DNA, 25 bp, Homo sapien
tttcagcttataccagggcttaaaa

SEQ ID NO: 5289507 - DNA, 25 bp, Homo sapien
cacggaagatgaagaaagctgtaca

SEQ ID NO: 5289508 - DNA, 25 bp, Homo sapien
gtgacctagaccatttacctacagg

SEQ ID NO: 5289509 - DNA, 25 bp, Homo sapien
gatatcggttgacaagggagctcca

SEQ ID NO: 5289510 - DNA, 25 bp, Homo sapien
cgtctaaggtatctaaacaggtaat

SEQ ID NO: 5289511 - DNA, 25 bp, Homo sapien
gggcgggcactatgtcctcaagcat

SEQ ID NO: 5289512 - DNA, 25 bp, Homo sapien
cattcacatgatatccacttagaca

SEQ ID NO: 5289513 - DNA, 25 bp, Homo sapien
cgcttcaccacccaaagtgattaca

SEQ ID NO: 5289514 - DNA, 25 bp, Homo sapien
aacacagaacaaaactgacctcaac

SEQ ID NO: 5289515 - DNA, 25 bp, Homo sapien
tcaacagcacacttacattggaaat

SEQ ID NO: 5289516 - DNA, 25 bp, Homo sapien
gatgtagccatttatattgagattc

SEQ ID NO: 5289517 - DNA, 25 bp, Homo sapien
tttaccaattcctggcatttcccaa

SEQ ID NO: 5289518 - DNA, 25 bp, Homo sapien
tgaagtagttggttgacccattaat

SEQ ID NO: 5289519 - DNA, 25 bp, Homo sapien
cagtcctgatgtagccatttatatt

SEQ ID NO: 5289520 - DNA, 25 bp, Homo sapien
ggtctcgctatcttgttcacgctgg

SEQ ID NO: 5289521 - DNA, 25 bp, Homo sapien
tgaatctttcgcagctaggagccaa

SEQ ID NO: 5289522 - DNA, 25 bp, Homo sapien
tggttgcggtaaaacccacataaca

SEQ ID NO: 5289523 - DNA, 25 bp, Homo sapien
tactccagtctgtggtaacctctat

SEQ ID NO: 5289524 - DNA, 25 bp, Homo sapien
cttctctctggataacttgaagaat

SEQ ID NO: 5289525 - DNA, 25 bp, Homo sapien
catgggtgtattggggtatttttct

SEQ ID NO: 5289526 - DNA, 25 bp, Homo sapien
gaagaatttctttatgactcatggg

SEQ ID NO: 5289527 - DNA, 25 bp, Homo sapien
ctctctggataacttgaagaatttc

SEQ ID NO: 5289528 - DNA, 25 bp, Homo sapien
ttcagactacttaaagctatagttt

SEQ ID NO: 5289529 - DNA, 25 bp, Homo sapien
cagactacttaaagctatagttttg

SEQ ID NO: 5289530 - DNA, 25 bp, Homo sapien
attttttcagactacttaaagctat

SEQ ID NO: 5289531 - DNA, 25 bp, Homo sapien
tttttcagactacttaaagctatag

SEQ ID NO: 5289532 - DNA, 25 bp, Homo sapien
tgttttagcagccaccgatgatcac

SEQ ID NO: 5289533 - DNA, 25 bp, Homo sapien
gcatttggctaacacatgtcttgaa

SEQ ID NO: 5289534 - DNA, 25 bp, Homo sapien
ccactatctatttggttacccgagg

SEQ ID NO: 5289535 - DNA, 25 bp, Homo sapien
tgctaatcgtatggtcctctgtccc

SEQ ID NO: 5289536 - DNA, 25 bp, Homo sapien
cattacattatcttccacaagcgga

SEQ ID NO: 5289537 - DNA, 25 bp, Homo sapien
tagcttacgttaaccacaggagggc

SEQ ID NO: 5289538 - DNA, 25 bp, Homo sapien
tcttggccacatatattactgagca

SEQ ID NO: 5289539 - DNA, 25 bp, Homo sapien
cacaagcggaaatgactacagtagt

SEQ ID NO: 5289540 - DNA, 25 bp, Homo sapien
tgggtctgtccagtggagtcctgga

SEQ ID NO: 5289541 - DNA, 25 bp, Homo sapien
tacggaacttgtatccagcaaagac

SEQ ID NO: 5289542 - DNA, 25 bp, Homo sapien
gaacttgtatccagcaaagacagcc

SEQ ID NO: 5289543 - DNA, 25 bp, Homo sapien
ttgtatccagcaaagacagccttgt

SEQ ID NO: 5289544 - DNA, 25 bp, Homo sapien
cttgtatccagcaaagacagccttg

SEQ ID NO: 5289545 - DNA, 25 bp, Homo sapien
ttcgccagacgctccaaggggtagg

SEQ ID NO: 5289546 - DNA, 25 bp, Homo sapien
tatttcgccagacgctccaaggggt

SEQ ID NO: 5289547 - DNA, 25 bp, Homo sapien
ctcaatcctcaaatgagttggttgt

SEQ ID NO: 5289548 - DNA, 25 bp, Homo sapien
tgtatttcgccagacgctccaaggg

SEQ ID NO: 5289549 - DNA, 25 bp, Homo sapien
aatgaaaatgtcctcagtctcccca

SEQ ID NO: 5289550 - DNA, 25 bp, Homo sapien
cacaaggtcagcaatgaaaatgtcc

SEQ ID NO: 5289551 - DNA, 25 bp, Homo sapien
tctccccagagtggtggctcaccat

SEQ ID NO: 5289552 - DNA, 25 bp, Homo sapien
tcagtctccccagagtggtggctca

SEQ ID NO: 5289553 - DNA, 25 bp, Homo sapien
cctcagccgttagagtgagccagtt

SEQ ID NO: 5289554 - DNA, 25 bp, Homo sapien
caaccctcagccgttagagtgagcc

SEQ ID NO: 5289555 - DNA, 25 bp, Homo sapien
ccgttagagtgagccagtttgcata

SEQ ID NO: 5289556 - DNA, 25 bp, Homo sapien
tcagccgttagagtgagccagtttg

SEQ ID NO: 5289557 - DNA, 25 bp, Homo sapien
tggttgaccttcagcagcagacagc

SEQ ID NO: 5289558 - DNA, 25 bp, Homo sapien
caaaggactgggcaatcctcttggg

SEQ ID NO: 5289559 - DNA, 25 bp, Homo sapien
gtgactgtcaggtcatcccccacaa

SEQ ID NO: 5289560 - DNA, 25 bp, Homo sapien
gctgcagaccttcttctcaaaggac

SEQ ID NO: 5289561 - DNA, 25 bp, Homo sapien
aggaacgaggtccaagtggcccagt

SEQ ID NO: 5289562 - DNA, 25 bp, Homo sapien
ctgagaggaacgaggtccaagtggc

SEQ ID NO: 5289563 - DNA, 25 bp, Homo sapien
agaggaacgaggtccaagtggccca

SEQ ID NO: 5289564 - DNA, 25 bp, Homo sapien
acgaggtccaagtggcccagtcatt

SEQ ID NO: 5289565 - DNA, 25 bp, Homo sapien
caaaggggtcctcgatggagacgag

SEQ ID NO: 5289566 - DNA, 25 bp, Homo sapien
gggtcctcgatggagacgagtctag

SEQ ID NO: 5289567 - DNA, 25 bp, Homo sapien
aaggggtcctcgatggagacgagtc

SEQ ID NO: 5289568 - DNA, 25 bp, Homo sapien
tcctcgatggagacgagtctaggtg

SEQ ID NO: 5289569 - DNA, 25 bp, Homo sapien
tttaatactacataggctacaagtt

SEQ ID NO: 5289570 - DNA, 25 bp, Homo sapien
ttttaatactacataggctacaagt

SEQ ID NO: 5289571 - DNA, 25 bp, Homo sapien
tcaggattgtgggtacaggttagct

SEQ ID NO: 5289572 - DNA, 25 bp, Homo sapien
gctgtgaacgccatgaaagtccatt

SEQ ID NO: 5289573 - DNA, 25 bp, Homo sapien
aaagatggatcagcttactcagagg

SEQ ID NO: 5289574 - DNA, 25 bp, Homo sapien
tcaaatcagacaggaaactagtcac

SEQ ID NO: 5289575 - DNA, 25 bp, Homo sapien
attagcataaattagggtccaggtc

SEQ ID NO: 5289576 - DNA, 25 bp, Homo sapien
attaattagcataaattagggtcca

SEQ ID NO: 5289577 - DNA, 25 bp, Homo sapien
aattagggtccaggtctgcttacct

SEQ ID NO: 5289578 - DNA, 25 bp, Homo sapien
taattagcataaattagggtccagg

SEQ ID NO: 5289579 - DNA, 25 bp, Homo sapien
ttgctgccttgttcagagtaggtct

SEQ ID NO: 5289580 - DNA, 25 bp, Homo sapien
gcattgctgccttgttcagagtagg

SEQ ID NO: 5289581 - DNA, 25 bp, Homo sapien
catgcattgctgccttgttcagagt

SEQ ID NO: 5289582 - DNA, 25 bp, Homo sapien
tgcattgctgccttgttcagagtag

SEQ ID NO: 5289583 - DNA, 25 bp, Homo sapien
caggtcctgcccttcttcctacgtc

SEQ ID NO: 5289584 - DNA, 25 bp, Homo sapien
ccaggtcctgcccttcttcctacgt

SEQ ID NO: 5289585 - DNA, 25 bp, Homo sapien
cgtcttggcggcctccgcccaggtc

SEQ ID NO: 5289586 - DNA, 25 bp, Homo sapien
cggcctccgcccaggtcctgccctt

SEQ ID NO: 5289587 - DNA, 25 bp, Homo sapien
tgcgctgcttttcccgcggtgccgg

SEQ ID NO: 5289588 - DNA, 25 bp, Homo sapien
catattgggttcttactgtacaggc

SEQ ID NO: 5289589 - DNA, 25 bp, Homo sapien
ctcttgctgccgttgccactgctac

SEQ ID NO: 5289590 - DNA, 25 bp, Homo sapien
aggctgccgctacggtcatgtgacc

SEQ ID NO: 5289591 - DNA, 25 bp, Homo sapien
tagtaacaactgctgatctcccaaa

SEQ ID NO: 5289592 - DNA, 25 bp, Homo sapien
tctacaccttgataccttgcaaagt

SEQ ID NO: 5289593 - DNA, 25 bp, Homo sapien
gtagtatccgtaacagctttctgaa

SEQ ID NO: 5289594 - DNA, 25 bp, Homo sapien
aaataggactgaggattggattgcc

SEQ ID NO: 5289595 - DNA, 25 bp, Homo sapien
atcttcgatgacccctcggcggctg

SEQ ID NO: 5289596 - DNA, 25 bp, Homo sapien
ggatcttcgatgacccctcggcggc

SEQ ID NO: 5289597 - DNA, 25 bp, Homo sapien
gatcttcgatgacccctcggcggct

SEQ ID NO: 5289598 - DNA, 25 bp, Homo sapien
tcccggcacagacttccgactagtg

SEQ ID NO: 5289599 - DNA, 25 bp, Homo sapien
agctgctgccatagtcccggcacag

SEQ ID NO: 5289600 - DNA, 25 bp, Homo sapien
cacagacttccgactagtgcctggg

SEQ ID NO: 5289601 - DNA, 25 bp, Homo sapien
tccgactagtgcctgggacctgctc

SEQ ID NO: 5289602 - DNA, 25 bp, Homo sapien
tcaactgcattgattggaacagggc

SEQ ID NO: 5289603 - DNA, 25 bp, Homo sapien
tgtcccctgtggaggtaaacacgca

SEQ ID NO: 5289604 - DNA, 25 bp, Homo sapien
tgttcccagcagatcttacactgag

SEQ ID NO: 5289605 - DNA, 25 bp, Homo sapien
tttcagctcaacagaaaggcctcca

SEQ ID NO: 5289606 - DNA, 25 bp, Homo sapien
ccagccctcggactgggggggctga

SEQ ID NO: 5289607 - DNA, 25 bp, Homo sapien
gactgggggggctgatttgggtata

SEQ ID NO: 5289608 - DNA, 25 bp, Homo sapien
ctgggggggctgatttgggtatatt

SEQ ID NO: 5289609 - DNA, 25 bp, Homo sapien
cctcggactgggggggctgatttgg

SEQ ID NO: 5289610 - DNA, 25 bp, Homo sapien
gaggtgatacgtgctgctttgtcca

SEQ ID NO: 5289611 - DNA, 25 bp, Homo sapien
caatgcaaaggcgatgtgtccaagt

SEQ ID NO: 5289612 - DNA, 25 bp, Homo sapien
tgtccacaaacgagaaagaggtcag

SEQ ID NO: 5289613 - DNA, 25 bp, Homo sapien
gccacagtcgaacctctgatctgaa

SEQ ID NO: 5289614 - DNA, 25 bp, Homo sapien
tgagagcctgtcgaccaaaatgact

SEQ ID NO: 5289615 - DNA, 25 bp, Homo sapien
cagtggagggacttccgttgatgac

SEQ ID NO: 5289616 - DNA, 25 bp, Homo sapien
caaatggcaagtgggtggctcaacc

SEQ ID NO: 5289617 - DNA, 25 bp, Homo sapien
cagggagaaatgatcgaagcaggca

SEQ ID NO: 5289618 - DNA, 25 bp, Homo sapien
cacagttcccatccaaggtgggcag

SEQ ID NO: 5289619 - DNA, 25 bp, Homo sapien
ggcgatggtaattgcttggtccaca

SEQ ID NO: 5289620 - DNA, 25 bp, Homo sapien
ttcctgcaggttccaaggcgatggt

SEQ ID NO: 5289621 - DNA, 25 bp, Homo sapien
tgcttggtccacagttcccatccaa

SEQ ID NO: 5289622 - DNA, 25 bp, Homo sapien
ctcccagtcccagaaagtgctcagg

SEQ ID NO: 5289623 - DNA, 25 bp, Homo sapien
gaaaaagaggctacgcagtgaccac

SEQ ID NO: 5289624 - DNA, 25 bp, Homo sapien
gaaaagggactgtcttctcaggcac

SEQ ID NO: 5289625 - DNA, 25 bp, Homo sapien
gcactggctaccttcccttctggag

SEQ ID NO: 5289626 - DNA, 25 bp, Homo sapien
tcactcatggtccgccactgttgca

SEQ ID NO: 5289627 - DNA, 25 bp, Homo sapien
tcatggtccgccactgttgcagggc

SEQ ID NO: 5289628 - DNA, 25 bp, Homo sapien
tccgccactgttgcagggcgcagag

SEQ ID NO: 5289629 - DNA, 25 bp, Homo sapien
tggtccgccactgttgcagggcgca

SEQ ID NO: 5289630 - DNA, 25 bp, Homo sapien
tctttagcatcacccagcgcctgca

SEQ ID NO: 5289631 - DNA, 25 bp, Homo sapien
aaaccctctttagcatcacccagcg

SEQ ID NO: 5289632 - DNA, 25 bp, Homo sapien
gcaaaaccctctttagcatcaccca

SEQ ID NO: 5289633 - DNA, 25 bp, Homo sapien
cccagcgcctgcagttcccctgcct

SEQ ID NO: 5289634 - DNA, 25 bp, Homo sapien
tcttggtcgtgagagaattccatct

SEQ ID NO: 5289635 - DNA, 25 bp, Homo sapien
gaaagctgtccaatcgcatgagcct

SEQ ID NO: 5289636 - DNA, 25 bp, Homo sapien
gagcctctccatgtgtagcgcacga

SEQ ID NO: 5289637 - DNA, 25 bp, Homo sapien
tagcgcacgagggtcttgttcttgg

SEQ ID NO: 5289638 - DNA, 25 bp, Homo sapien
gaggggacacatccaactccagaaa

SEQ ID NO: 5289639 - DNA, 25 bp, Homo sapien
ggaggggacacatccaactccagaa

SEQ ID NO: 5289640 - DNA, 25 bp, Homo sapien
aggggacacatccaactccagaaac

SEQ ID NO: 5289641 - DNA, 25 bp, Homo sapien
ggtgggaatatcatgccaggcttga

SEQ ID NO: 5289642 - DNA, 25 bp, Homo sapien
gtgcccagtcactgtgccttctagg

SEQ ID NO: 5289643 - DNA, 25 bp, Homo sapien
ctgtggtgggaatatcatgccaggc

SEQ ID NO: 5289644 - DNA, 25 bp, Homo sapien
ctcagccagtcttgggtgtagcagg

SEQ ID NO: 5289645 - DNA, 25 bp, Homo sapien
ttgccatggcaacccgagcatactg

SEQ ID NO: 5289646 - DNA, 25 bp, Homo sapien
cgagcatactggctgataggcctct

SEQ ID NO: 5289647 - DNA, 25 bp, Homo sapien
tggctgataggcctcttgtagccca

SEQ ID NO: 5289648 - DNA, 25 bp, Homo sapien
cactgcagatgttggccgcttcttc

SEQ ID NO: 5289649 - DNA, 25 bp, Homo sapien
cccagccttcattgtgtgttgtttc

SEQ ID NO: 5289650 - DNA, 25 bp, Homo sapien
ctgtcacccagccttcattgtgtgt

SEQ ID NO: 5289651 - DNA, 25 bp, Homo sapien
cactgtcacccagccttcattgtgt

SEQ ID NO: 5289652 - DNA, 25 bp, Homo sapien
gtcacccagccttcattgtgtgttg

SEQ ID NO: 5289653 - DNA, 25 bp, Homo sapien
gaactcagtcgcaacggactacata

SEQ ID NO: 5289654 - DNA, 25 bp, Homo sapien
atgagtgttccaacatggacgaacc

SEQ ID NO: 5289655 - DNA, 25 bp, Homo sapien
tcgcaacggactacatattgtgtga

SEQ ID NO: 5289656 - DNA, 25 bp, Homo sapien
tggaagaactcagtcgcaacggact

SEQ ID NO: 5289657 - DNA, 25 bp, Homo sapien
aggatgccgggaggcgtgcccgtga

SEQ ID NO: 5289658 - DNA, 25 bp, Homo sapien
gaggcgtgcccgtgaggagaggcag

SEQ ID NO: 5289659 - DNA, 25 bp, Homo sapien
ggaggcgtgcccgtgaggagaggca

SEQ ID NO: 5289660 - DNA, 25 bp, Homo sapien
gccgggaggcgtgcccgtgaggaga

SEQ ID NO: 5289661 - DNA, 25 bp, Homo sapien
cctgcttgtctgaactctcagcctt

SEQ ID NO: 5289662 - DNA, 25 bp, Homo sapien
gacccgcctgggaagctgcaactgc

SEQ ID NO: 5289663 - DNA, 25 bp, Homo sapien
atgctgtccccgacccgcctgggaa

SEQ ID NO: 5289664 - DNA, 25 bp, Homo sapien
tgcttgtctgaactctcagccttcc

SEQ ID NO: 5289665 - DNA, 25 bp, Homo sapien
ctcctccggcgggatgaagttctcg

SEQ ID NO: 5289666 - DNA, 25 bp, Homo sapien
agtccaggaaaagccggttcatgat

SEQ ID NO: 5289667 - DNA, 25 bp, Homo sapien
caggaaaagccggttcatgatcttg

SEQ ID NO: 5289668 - DNA, 25 bp, Homo sapien
gatgaagttctcgatgattaggtac

SEQ ID NO: 5289669 - DNA, 25 bp, Homo sapien
gatgaggccttaggggaggagaggc

SEQ ID NO: 5289670 - DNA, 25 bp, Homo sapien
ggatgaaaagagctgcgggccctac

SEQ ID NO: 5289671 - DNA, 25 bp, Homo sapien
cctgagtaatgatggctggctgtgg

SEQ ID NO: 5289672 - DNA, 25 bp, Homo sapien
tcctaaaggactcatgggagaggag

SEQ ID NO: 5289673 - DNA, 25 bp, Homo sapien
gccgcacgcggatatactcatcatg

SEQ ID NO: 5289674 - DNA, 25 bp, Homo sapien
tcgcgggtctgctcgttctgcgcct

SEQ ID NO: 5289675 - DNA, 25 bp, Homo sapien
ttgagcttgagttcgcgggtctgct

SEQ ID NO: 5289676 - DNA, 25 bp, Homo sapien
ctgccgcacgcggatatactcatca

SEQ ID NO: 5289677 - DNA, 25 bp, Homo sapien
aggtgccccggagctccatagtctc

SEQ ID NO: 5289678 - DNA, 25 bp, Homo sapien
tagtctcctcgtcccggagcatcat

SEQ ID NO: 5289679 - DNA, 25 bp, Homo sapien
tgcagggatgtgtaggtgccccgga

SEQ ID NO: 5289680 - DNA, 25 bp, Homo sapien
gctgcatctcccgctcacgacgttt

SEQ ID NO: 5289681 - DNA, 25 bp, Homo sapien
tggtgtgatccatgatgttcctgcc

SEQ ID NO: 5289682 - DNA, 25 bp, Homo sapien
gttcctgcccccgatgaggagcttg

SEQ ID NO: 5289683 - DNA, 25 bp, Homo sapien
tgcccccgatgaggagcttgctctc

SEQ ID NO: 5289684 - DNA, 25 bp, Homo sapien
ttctgctgttcgttggtgtgatcca

SEQ ID NO: 5289685 - DNA, 25 bp, Homo sapien
gggatctcaaagcagggggtgctgt

SEQ ID NO: 5289686 - DNA, 25 bp, Homo sapien
agggatctcaaagcagggggtgctg

SEQ ID NO: 5289687 - DNA, 25 bp, Homo sapien
gatctcaaagcagggggtgctgtca

SEQ ID NO: 5289688 - DNA, 25 bp, Homo sapien
ggatctcaaagcagggggtgctgtc

SEQ ID NO: 5289689 - DNA, 25 bp, Homo sapien
tcatggggcccgatcatctggggaa

SEQ ID NO: 5289690 - DNA, 25 bp, Homo sapien
gtcatggggcccgatcatctgggga

SEQ ID NO: 5289691 - DNA, 25 bp, Homo sapien
tgtcatggggcccgatcatctgggg

SEQ ID NO: 5289692 - DNA, 25 bp, Homo sapien
catggggcccgatcatctggggaac

SEQ ID NO: 5289693 - DNA, 25 bp, Homo sapien
aaacagtgcaatcagcagtaggata

SEQ ID NO: 5289694 - DNA, 25 bp, Homo sapien
cagtgcaatcagcagtaggataggg

SEQ ID NO: 5289695 - DNA, 25 bp, Homo sapien
cagcaacaatccaggacacaaaaac

SEQ ID NO: 5289696 - DNA, 25 bp, Homo sapien
agcaacaatccaggacacaaaaaca

SEQ ID NO: 5289697 - DNA, 25 bp, Homo sapien
tccttgccgggatcccctgcgggga

SEQ ID NO: 5289698 - DNA, 25 bp, Homo sapien
aagagcctccttgccgggatcccct

SEQ ID NO: 5289699 - DNA, 25 bp, Homo sapien
tcccctgcggggacatctcgagtgc

SEQ ID NO: 5289700 - DNA, 25 bp, Homo sapien
tgcggggacatctcgagtgcccagc

SEQ ID NO: 5289701 - DNA, 25 bp, Homo sapien
tcatcgtagctgtgagaagctggcc

SEQ ID NO: 5289702 - DNA, 25 bp, Homo sapien
tcctcttggaattcccgcagcagtg

SEQ ID NO: 5289703 - DNA, 25 bp, Homo sapien
tacttggccgcaagcagctctgtgg

SEQ ID NO: 5289704 - DNA, 25 bp, Homo sapien
tcttggctcggttggcaaagcgcaa

SEQ ID NO: 5289705 - DNA, 25 bp, Homo sapien
cgggtcagcttggagtcccggtagg

SEQ ID NO: 5289706 - DNA, 25 bp, Homo sapien
cagggcagcaatcacgttgcccagg

SEQ ID NO: 5289707 - DNA, 25 bp, Homo sapien
cccgccagggcagcaatcacgttgc

SEQ ID NO: 5289708 - DNA, 25 bp, Homo sapien
ggtcagcttggagtcccggtaggga

SEQ ID NO: 5289709 - DNA, 25 bp, Homo sapien
ccaccgccacccgaggatggtgtgg

SEQ ID NO: 5289710 - DNA, 25 bp, Homo sapien
ccgccacccgaggatggtgtggctg

SEQ ID NO: 5289711 - DNA, 25 bp, Homo sapien
caccgccacccgaggatggtgtggc

SEQ ID NO: 5289712 - DNA, 25 bp, Homo sapien
accgccacccgaggatggtgtggct

SEQ ID NO: 5289713 - DNA, 25 bp, Homo sapien
gttcgctgcactccacagtgatgat

SEQ ID NO: 5289714 - DNA, 25 bp, Homo sapien
gccacgttcgctgcactccacagtg

SEQ ID NO: 5289715 - DNA, 25 bp, Homo sapien
ggccatcagagccacgttcgctgca

SEQ ID NO: 5289716 - DNA, 25 bp, Homo sapien
cacgttcgctgcactccacagtgat

SEQ ID NO: 5289717 - DNA, 25 bp, Homo sapien
ggtccttgatgtagacgccagtctc

SEQ ID NO: 5289718 - DNA, 25 bp, Homo sapien
aaacaccgtgccattgaaaccctgg

SEQ ID NO: 5289719 - DNA, 25 bp, Homo sapien
tgctcaaaggcattcgggatgaccc

SEQ ID NO: 5289720 - DNA, 25 bp, Homo sapien
cccctgcatggtataggtcttgcca

SEQ ID NO: 5289721 - DNA, 25 bp, Homo sapien
atcatacacggcgtcaaaggtgaag

SEQ ID NO: 5289722 - DNA, 25 bp, Homo sapien
gcttggagctggcatcatacacggc

SEQ ID NO: 5289723 - DNA, 25 bp, Homo sapien
ggtcaggatctgctcgtgaccagca

SEQ ID NO: 5289724 - DNA, 25 bp, Homo sapien
tcgctggccttggtcttactggcca

SEQ ID NO: 5289725 - DNA, 25 bp, Homo sapien
tctagggatccatagcgtgggctgc

SEQ ID NO: 5289726 - DNA, 25 bp, Homo sapien
cagcttcggcaacaatgagataaag

SEQ ID NO: 5289727 - DNA, 25 bp, Homo sapien
tcctgctcgctaggtcgggatcagc

SEQ ID NO: 5289728 - DNA, 25 bp, Homo sapien
ggagcgctgccgtaaacagcttcgg

SEQ ID NO: 5289729 - DNA, 25 bp, Homo sapien
tgttgaatccagaaccgtagccaga

SEQ ID NO: 5289730 - DNA, 25 bp, Homo sapien
gaaccgtagccagacataggactgg

SEQ ID NO: 5289731 - DNA, 25 bp, Homo sapien
ttaggtgccgcagttgctgctcgtg

SEQ ID NO: 5289732 - DNA, 25 bp, Homo sapien
ggacgagcgaaagatgctgaccgag

SEQ ID NO: 5289733 - DNA, 25 bp, Homo sapien
tttgactttttgcatgcaacggacc

SEQ ID NO: 5289734 - DNA, 25 bp, Homo sapien
catgcaacggaccattgcgtggccc

SEQ ID NO: 5289735 - DNA, 25 bp, Homo sapien
tgcgtggcccacaaactctttaaca

SEQ ID NO: 5289736 - DNA, 25 bp, Homo sapien
tgcacggaggagctctttgactttt

SEQ ID NO: 5289737 - DNA, 25 bp, Homo sapien
ctcactgctatggagaagtgaatcc

SEQ ID NO: 5289738 - DNA, 25 bp, Homo sapien
acccaaagaccatgctcactgctat

SEQ ID NO: 5289739 - DNA, 25 bp, Homo sapien
tgaatccccctaaaggagatcctgt

SEQ ID NO: 5289740 - DNA, 25 bp, Homo sapien
cactggcaaaggctcaagtgtcctc

SEQ ID NO: 5289741 - DNA, 25 bp, Homo sapien
ctccccgacagttcccactgtccca

SEQ ID NO: 5289742 - DNA, 25 bp, Homo sapien
tccccgacagttcccactgtcccac

SEQ ID NO: 5289743 - DNA, 25 bp, Homo sapien
cacatctgactccagggtctctctt

SEQ ID NO: 5289744 - DNA, 25 bp, Homo sapien
tcagcccaagctctcatctcagcac

SEQ ID NO: 5289745 - DNA, 25 bp, Homo sapien
ttcttcagcccaagctctcatctca

SEQ ID NO: 5289746 - DNA, 25 bp, Homo sapien
tcctttccacatctgactccagggt

SEQ ID NO: 5289747 - DNA, 25 bp, Homo sapien
aattcggaaacggtatatgtcaaca

SEQ ID NO: 5289748 - DNA, 25 bp, Homo sapien
tcggaaacggtatatgtcaacaaaa

SEQ ID NO: 5289749 - DNA, 25 bp, Homo sapien
agaattcggaaacggtatatgtcaa

SEQ ID NO: 5289750 - DNA, 25 bp, Homo sapien
gcagaattcggaaacggtatatgtc

SEQ ID NO: 5289751 - DNA, 25 bp, Homo sapien
tacgtccagattccgggcactgcag

SEQ ID NO: 5289752 - DNA, 25 bp, Homo sapien
gggaacatacgtccagattccgggc

SEQ ID NO: 5289753 - DNA, 25 bp, Homo sapien
acatacgtccagattccgggcactg

SEQ ID NO: 5289754 - DNA, 25 bp, Homo sapien
gatggggaacatacgtccagattcc

SEQ ID NO: 5289755 - DNA, 25 bp, Homo sapien
caggtggtgcatggtcctcagaaac

SEQ ID NO: 5289756 - DNA, 25 bp, Homo sapien
tgcatggtcctcagaaactcttcat

SEQ ID NO: 5289757 - DNA, 25 bp, Homo sapien
tggtgcatggtcctcagaaactctt

SEQ ID NO: 5289758 - DNA, 25 bp, Homo sapien
cagcaggtggtgcatggtcctcaga

SEQ ID NO: 5289759 - DNA, 25 bp, Homo sapien
taggcatctggatcaggcgcaagct

SEQ ID NO: 5289760 - DNA, 25 bp, Homo sapien
ctttaggcatctggatcaggcgcaa

SEQ ID NO: 5289761 - DNA, 25 bp, Homo sapien
ctggatcaggcgcaagctatcggcc

SEQ ID NO: 5289762 - DNA, 25 bp, Homo sapien
atcaggcgcaagctatcggccgcct

SEQ ID NO: 5289763 - DNA, 25 bp, Homo sapien
cacgtatgatgccacataaattggg

SEQ ID NO: 5289764 - DNA, 25 bp, Homo sapien
caccttaggtatcatatgtaccacg

SEQ ID NO: 5289765 - DNA, 25 bp, Homo sapien
ccacgtatgatacgtgccacgtatg

SEQ ID NO: 5289766 - DNA, 25 bp, Homo sapien
catatgtaccacgtatgatacgtgc

SEQ ID NO: 5289767 - DNA, 25 bp, Homo sapien
gctgttcgtaggtcgcccgcgccgt

SEQ ID NO: 5289768 - DNA, 25 bp, Homo sapien
gcccgcgccgtctcgagcctttttc

SEQ ID NO: 5289769 - DNA, 25 bp, Homo sapien
tcaaagctgttcgtaggtcgcccgc

SEQ ID NO: 5289770 - DNA, 25 bp, Homo sapien
gcgccgtctcgagcctttttcccac

SEQ ID NO: 5289771 - DNA, 25 bp, Homo sapien
cggtcctccggcctgagaacgcccg

SEQ ID NO: 5289772 - DNA, 25 bp, Homo sapien
cgtagtgagagggaccgatcccttg

SEQ ID NO: 5289773 - DNA, 25 bp, Homo sapien
tggccgtagtgagagggaccgatcc

SEQ ID NO: 5289774 - DNA, 25 bp, Homo sapien
gagaacgcccgagtgaggagttggc

SEQ ID NO: 5289775 - DNA, 25 bp, Homo sapien
atactacctttatttccaccatagg

SEQ ID NO: 5289776 - DNA, 25 bp, Homo sapien
tcccaatggcgaagaagacgtacga

SEQ ID NO: 5289777 - DNA, 25 bp, Homo sapien
tcggatgatgccttcaatactacct

SEQ ID NO: 5289778 - DNA, 25 bp, Homo sapien
agacgtacgacctgcttttcaagct

SEQ ID NO: 5289779 - DNA, 25 bp, Homo sapien
tccggtcttttgctttcgagtctcc

SEQ ID NO: 5289780 - DNA, 25 bp, Homo sapien
gagtctcccactatgctcagtgcct

SEQ ID NO: 5289781 - DNA, 25 bp, Homo sapien
gatttccatccggtcttttgctttc

SEQ ID NO: 5289782 - DNA, 25 bp, Homo sapien
ttcgagtctcccactatgctcagtg

SEQ ID NO: 5289783 - DNA, 25 bp, Homo sapien
ctttctccaccacaggcttactcat

SEQ ID NO: 5289784 - DNA, 25 bp, Homo sapien
tcattaatcctttctccaccacagg

SEQ ID NO: 5289785 - DNA, 25 bp, Homo sapien
cttttggtgtcattaatcctttctc

SEQ ID NO: 5289786 - DNA, 25 bp, Homo sapien
gtcattaatcctttctccaccacag

SEQ ID NO: 5289787 - DNA, 25 bp, Homo sapien
aagctgctaggaatattttgtgtac

SEQ ID NO: 5289788 - DNA, 25 bp, Homo sapien
gactgtttccagaatggctatacca

SEQ ID NO: 5289789 - DNA, 25 bp, Homo sapien
caaaactgcaattgttgggtcacat

SEQ ID NO: 5289790 - DNA, 25 bp, Homo sapien
tgaccgacatctgggctgattctag

SEQ ID NO: 5289791 - DNA, 25 bp, Homo sapien
ccttcactggtatctcacattagca

SEQ ID NO: 5289792 - DNA, 25 bp, Homo sapien
ggatttacatgcaggcgcaaccaca

SEQ ID NO: 5289793 - DNA, 25 bp, Homo sapien
attatctccgctgctaccagcctgg

SEQ ID NO: 5289794 - DNA, 25 bp, Homo sapien
tgaactgtagtacagagcctggacc

SEQ ID NO: 5289795 - DNA, 25 bp, Homo sapien
tcctgggtcctacccggactctgat

SEQ ID NO: 5289796 - DNA, 25 bp, Homo sapien
gacctagctccttgattttaaagta

SEQ ID NO: 5289797 - DNA, 25 bp, Homo sapien
aacatgactgtatctaccccgcaga

SEQ ID NO: 5289798 - DNA, 25 bp, Homo sapien
ccccaccagttgttaaggcaatcaa

SEQ ID NO: 5289799 - DNA, 25 bp, Homo sapien
tgcctagggtagcagtgtagctcct

SEQ ID NO: 5289800 - DNA, 25 bp, Homo sapien
gatgagatagctataggtcttgaag

SEQ ID NO: 5289801 - DNA, 25 bp, Homo sapien
cttctagggactgggatgaggccac

SEQ ID NO: 5289802 - DNA, 25 bp, Homo sapien
cctgatagggagactcattgaacgt

SEQ ID NO: 5289803 - DNA, 25 bp, Homo sapien
ccagcataggtctctttttgcatgg

SEQ ID NO: 5289804 - DNA, 25 bp, Homo sapien
ggccagcataggtctctttttgcat

SEQ ID NO: 5289805 - DNA, 25 bp, Homo sapien
agcataggtctctttttgcatgggc

SEQ ID NO: 5289806 - DNA, 25 bp, Homo sapien
cataggtctctttttgcatgggcat

SEQ ID NO: 5289807 - DNA, 25 bp, Homo sapien
ccccgtgctcagcctattgttgttt

SEQ ID NO: 5289808 - DNA, 25 bp, Homo sapien
tctttctgaactcaagctttgcatc

SEQ ID NO: 5289809 - DNA, 25 bp, Homo sapien
atctttctgaactcaagctttgcat

SEQ ID NO: 5289810 - DNA, 25 bp, Homo sapien
agcccccgtgctcagcctattgttg

SEQ ID NO: 5289811 - DNA, 25 bp, Homo sapien
tttggcaactcctctagcagcttgg

SEQ ID NO: 5289812 - DNA, 25 bp, Homo sapien
gaagagttaactgcatgcactagtg

SEQ ID NO: 5289813 - DNA, 25 bp, Homo sapien
gatgtaacttgctaggtaaacggaa

SEQ ID NO: 5289814 - DNA, 25 bp, Homo sapien
cctaaaatgtgtcccagatgccttc

SEQ ID NO: 5289815 - DNA, 25 bp, Homo sapien
gatttttggataacagactgacagt

SEQ ID NO: 5289816 - DNA, 25 bp, Homo sapien
ttgcttaatattagggctttgcccc

SEQ ID NO: 5289817 - DNA, 25 bp, Homo sapien
ccatgacttaaggttggagagctaa

SEQ ID NO: 5289818 - DNA, 25 bp, Homo sapien
tctctggtactagctacaaattcgg

SEQ ID NO: 5289819 - DNA, 25 bp, Homo sapien
attcggcttcctcagttatcaggta

SEQ ID NO: 5289820 - DNA, 25 bp, Homo sapien
ttcggcttcctcagttatcaggtac

SEQ ID NO: 5289821 - DNA, 25 bp, Homo sapien
ctattcggcttcctcagttatcagg

SEQ ID NO: 5289822 - DNA, 25 bp, Homo sapien
tattcggcttcctcagttatcaggt

SEQ ID NO: 5289823 - DNA, 25 bp, Homo sapien
ccacccacgccaggatgtaggagta

SEQ ID NO: 5289824 - DNA, 25 bp, Homo sapien
tgctgatgaaggtgaaggcgaaggc

SEQ ID NO: 5289825 - DNA, 25 bp, Homo sapien
aaggcgaaggccacccacgccagga

SEQ ID NO: 5289826 - DNA, 25 bp, Homo sapien
gatgtaggagtagccatagctgcct

SEQ ID NO: 5289827 - DNA, 25 bp, Homo sapien
atagaaatccgttgtttcatcgcgc

SEQ ID NO: 5289828 - DNA, 25 bp, Homo sapien
ctttggtcaggtaatagaaatccgt

SEQ ID NO: 5289829 - DNA, 25 bp, Homo sapien
caggtaatagaaatccgttgtttca

SEQ ID NO: 5289830 - DNA, 25 bp, Homo sapien
tggtcaggtaatagaaatccgttgt

SEQ ID NO: 5289831 - DNA, 25 bp, Homo sapien
tggtggcgatgaacagcaaggccgc

SEQ ID NO: 5289832 - DNA, 25 bp, Homo sapien
cggtgaaagtaagaagcaccaacat

SEQ ID NO: 5289833 - DNA, 25 bp, Homo sapien
gatgtggaaggcgacggtgaaagta

SEQ ID NO: 5289834 - DNA, 25 bp, Homo sapien
caggcattgtcgatggtggcgatga

SEQ ID NO: 5289835 - DNA, 25 bp, Homo sapien
ctggccgctacgcaggctgctggac

SEQ ID NO: 5289836 - DNA, 25 bp, Homo sapien
ctacgcaggctgctggaccgatgga

SEQ ID NO: 5289837 - DNA, 25 bp, Homo sapien
ccgctacgcaggctgctggaccgat

SEQ ID NO: 5289838 - DNA, 25 bp, Homo sapien
acgcaggctgctggaccgatggacc

SEQ ID NO: 5289839 - DNA, 25 bp, Homo sapien
ttctcttctaaatcccgagaagaat

SEQ ID NO: 5289840 - DNA, 25 bp, Homo sapien
tgagcagagcagttgcctttctctt

SEQ ID NO: 5289841 - DNA, 25 bp, Homo sapien
tctgagcagagcagttgcctttctc

SEQ ID NO: 5289842 - DNA, 25 bp, Homo sapien
cttctaaatcccgagaagaatacat

SEQ ID NO: 5289843 - DNA, 25 bp, Homo sapien
ggatgacctgagaaaccagtgtgca

SEQ ID NO: 5289844 - DNA, 25 bp, Homo sapien
cagcctcctgtctcaaagtgttaaa

SEQ ID NO: 5289845 - DNA, 25 bp, Homo sapien
tctgagttacctggagttacccacg

SEQ ID NO: 5289846 - DNA, 25 bp, Homo sapien
gaatctgtacggatctgcggcaacc

SEQ ID NO: 5289847 - DNA, 25 bp, Homo sapien
tccctggagacttgacaacagttaa

SEQ ID NO: 5289848 - DNA, 25 bp, Homo sapien
ccctggagacttgacaacagttaag

SEQ ID NO: 5289849 - DNA, 25 bp, Homo sapien
ctggagacttgacaacagttaagaa

SEQ ID NO: 5289850 - DNA, 25 bp, Homo sapien
cctggagacttgacaacagttaaga

SEQ ID NO: 5289851 - DNA, 25 bp, Homo sapien
gcagagggcgccgcagacacagaga

SEQ ID NO: 5289852 - DNA, 25 bp, Homo sapien
tgcagagggcgccgcagacacagag

SEQ ID NO: 5289853 - DNA, 25 bp, Homo sapien
taatgaatcctcaaggactaatgaa

SEQ ID NO: 5289854 - DNA, 25 bp, Homo sapien
ggacccatgggcacagtgtatatgc

SEQ ID NO: 5289855 - DNA, 25 bp, Homo sapien
tgaaaacaaggccatggggacccat

SEQ ID NO: 5289856 - DNA, 25 bp, Homo sapien
actgctgaagatgagtacaagtggc

SEQ ID NO: 5289857 - DNA, 25 bp, Homo sapien
gaaaccggttaatggctttggtgca

SEQ ID NO: 5289858 - DNA, 25 bp, Homo sapien
cattggcagaatgccggcttcaggc

SEQ ID NO: 5289859 - DNA, 25 bp, Homo sapien
tggcttcctagtgaccaagcagagc

SEQ ID NO: 5289860 - DNA, 25 bp, Homo sapien
tttgaagtacaactggagcagaggc

SEQ ID NO: 5289861 - DNA, 25 bp, Homo sapien
gatgggactggaattacgattccgc

SEQ ID NO: 5289862 - DNA, 25 bp, Homo sapien
tcagcgtggatccttctgccagacc

SEQ ID NO: 5289863 - DNA, 25 bp, Homo sapien
ttagccccagtgctgtttacccaga

SEQ ID NO: 5289864 - DNA, 25 bp, Homo sapien
cccagactgggcactgcttctgtag

SEQ ID NO: 5289865 - DNA, 25 bp, Homo sapien
ctatgcaggatctccgaacatcaag

SEQ ID NO: 5289866 - DNA, 25 bp, Homo sapien
aatgggtaagatcacacaatgagga

SEQ ID NO: 5289867 - DNA, 25 bp, Homo sapien
atgggtaagatcacacaatgaggaa

SEQ ID NO: 5289868 - DNA, 25 bp, Homo sapien
tgggtaagatcacacaatgaggaaa

SEQ ID NO: 5289869 - DNA, 25 bp, Homo sapien
agtccctccctaaggtgctgcctag

SEQ ID NO: 5289870 - DNA, 25 bp, Homo sapien
gaagcctgggcaaagcatctgcaca

SEQ ID NO: 5289871 - DNA, 25 bp, Homo sapien
taatatcccggtacaccgtggtgag

SEQ ID NO: 5289872 - DNA, 25 bp, Homo sapien
gctgcctagaattctgcacacacat

SEQ ID NO: 5289873 - DNA, 25 bp, Homo sapien
tggctgggtgcagaactgccctcac

SEQ ID NO: 5289874 - DNA, 25 bp, Homo sapien
attgttatgtgtttggctgggtgca

SEQ ID NO: 5289875 - DNA, 25 bp, Homo sapien
ttggctgggtgcagaactgccctca

SEQ ID NO: 5289876 - DNA, 25 bp, Homo sapien
gtttttattgttatgtgtttggctg

SEQ ID NO: 5289877 - DNA, 25 bp, Homo sapien
gcaaactaattcgaagtcacacttc

SEQ ID NO: 5289878 - DNA, 25 bp, Homo sapien
cttatacaatgagcagtgggctcta

SEQ ID NO: 5289879 - DNA, 25 bp, Homo sapien
tccaacaggaagtgcaaactaattc

SEQ ID NO: 5289880 - DNA, 25 bp, Homo sapien
tgggctctaccttccaacaggaagt

SEQ ID NO: 5289881 - DNA, 25 bp, Homo sapien
ttcatatttcttgagccggtccact

SEQ ID NO: 5289882 - DNA, 25 bp, Homo sapien
tcactggtagaacttcttgttaggg

SEQ ID NO: 5289883 - DNA, 25 bp, Homo sapien
ggtccactatcttctgggcgccata

SEQ ID NO: 5289884 - DNA, 25 bp, Homo sapien
ttagcatggtcagctagcagctggc

SEQ ID NO: 5289885 - DNA, 25 bp, Homo sapien
ttgaaggagacgcaacacgggctcc

SEQ ID NO: 5289886 - DNA, 25 bp, Homo sapien
ctccaggctaaagtgagcttccttc

SEQ ID NO: 5289887 - DNA, 25 bp, Homo sapien
caggctaaagtgagcttccttccca

SEQ ID NO: 5289888 - DNA, 25 bp, Homo sapien
gacttcgttgaaggagacgcaacac

SEQ ID NO: 5289889 - DNA, 25 bp, Homo sapien
acaaggcgggaagccaagcccaaag

SEQ ID NO: 5289890 - DNA, 25 bp, Homo sapien
ggcattagccactcaaacggactta

SEQ ID NO: 5289891 - DNA, 25 bp, Homo sapien
gatgctgcctgggtgaaccaaactt

SEQ ID NO: 5289892 - DNA, 25 bp, Homo sapien
gggcctggtgccgagaagataatca

SEQ ID NO: 5289893 - DNA, 25 bp, Homo sapien
cagcggctctctgggaacttgccag

SEQ ID NO: 5289894 - DNA, 25 bp, Homo sapien
cttcagactcgctaaaatactatcc

SEQ ID NO: 5289895 - DNA, 25 bp, Homo sapien
cagcttcagactcgctaaaatacta

SEQ ID NO: 5289896 - DNA, 25 bp, Homo sapien
gcttcagactcgctaaaatactatc

SEQ ID NO: 5289897 - DNA, 25 bp, Homo sapien
gcagcttcagactcgctaaaatact

SEQ ID NO: 5289898 - DNA, 25 bp, Homo sapien
gttactatttgttctcagggaggga

SEQ ID NO: 5289899 - DNA, 25 bp, Homo sapien
gtgttactatttgttctcagggagg

SEQ ID NO: 5289900 - DNA, 25 bp, Homo sapien
gagtgttactatttgttctcaggga

SEQ ID NO: 5289901 - DNA, 25 bp, Homo sapien
gggagtgttactatttgttctcagg

SEQ ID NO: 5289902 - DNA, 25 bp, Homo sapien
acatgtttcgctacatccacaccaa

SEQ ID NO: 5289903 - DNA, 25 bp, Homo sapien
agccaaagcttgtggtcagggaatc

SEQ ID NO: 5289904 - DNA, 25 bp, Homo sapien
aaagactttgcccagatcttccgcc

SEQ ID NO: 5289905 - DNA, 25 bp, Homo sapien
aagcccttggacaccatctgtgtca

SEQ ID NO: 5289906 - DNA, 25 bp, Homo sapien
tggaggattcggatgacttcagaca

SEQ ID NO: 5289907 - DNA, 25 bp, Homo sapien
catgggcgcaagacacctggtagta

SEQ ID NO: 5289908 - DNA, 25 bp, Homo sapien
acttcagacatcatgggcgcaagac

SEQ ID NO: 5289909 - DNA, 25 bp, Homo sapien
tggtagtatagaagccaggtccatc

SEQ ID NO: 5289910 - DNA, 25 bp, Homo sapien
acaatgatgaccttcccctgcttga

SEQ ID NO: 5289911 - DNA, 25 bp, Homo sapien
gcattccttctctgctaggaaaaca

SEQ ID NO: 5289912 - DNA, 25 bp, Homo sapien
agcattccttctctgctaggaaaac

SEQ ID NO: 5289913 - DNA, 25 bp, Homo sapien
aatgcgggtgaggaacctgagagca

SEQ ID NO: 5289914 - DNA, 25 bp, Homo sapien
caaaagccaacagatcggagaatgc

SEQ ID NO: 5289915 - DNA, 25 bp, Homo sapien
tgcacagatcttgaagtgttcacat

SEQ ID NO: 5289916 - DNA, 25 bp, Homo sapien
ttgctcccgggcaaaccaagatggt

SEQ ID NO: 5289917 - DNA, 25 bp, Homo sapien
tcagaaagttgtgccaaagatgacc

SEQ ID NO: 5289918 - DNA, 25 bp, Homo sapien
cactgagggtcctgtatcccttgct

SEQ ID NO: 5289919 - DNA, 25 bp, Homo sapien
gcagcgatttcactgattgggagag

SEQ ID NO: 5289920 - DNA, 25 bp, Homo sapien
gcaaagatacagtgatctggaatca

SEQ ID NO: 5289921 - DNA, 25 bp, Homo sapien
ttgggagagcagatgtgttactggc

SEQ ID NO: 5289922 - DNA, 25 bp, Homo sapien
tgacagcagcgatttcactgattgg

SEQ ID NO: 5289923 - DNA, 25 bp, Homo sapien
caaaaccttggtaatcaagctgccc

SEQ ID NO: 5289924 - DNA, 25 bp, Homo sapien
tcaatcaccatgtcggccttttcaa

SEQ ID NO: 5289925 - DNA, 25 bp, Homo sapien
tcaaaaccttggtaatcaagctgcc

SEQ ID NO: 5289926 - DNA, 25 bp, Homo sapien
caaagaaggtcttaagggctgggca

SEQ ID NO: 5289927 - DNA, 25 bp, Homo sapien
cattacctagtagcacattgcactg

SEQ ID NO: 5289928 - DNA, 25 bp, Homo sapien
caggttctcttagattccgtctgac

SEQ ID NO: 5289929 - DNA, 25 bp, Homo sapien
cgtcgccaagggaaacaggttctct

SEQ ID NO: 5289930 - DNA, 25 bp, Homo sapien
aaaggaatccgtgatggcaagaaca

SEQ ID NO: 5289931 - DNA, 25 bp, Homo sapien
tccgcaggcctgatacgaaagtgta

SEQ ID NO: 5289932 - DNA, 25 bp, Homo sapien
ggcttcactacggagtatctagaac

SEQ ID NO: 5289933 - DNA, 25 bp, Homo sapien
caaactatatcaaaatccgcaggcc

SEQ ID NO: 5289934 - DNA, 25 bp, Homo sapien
ctagcgcagtgagggtggcatcttt

SEQ ID NO: 5289935 - DNA, 25 bp, Homo sapien
cttgttgctgtcctcggtctagcgc

SEQ ID NO: 5289936 - DNA, 25 bp, Homo sapien
tgctgtcctcggtctagcgcagtga

SEQ ID NO: 5289937 - DNA, 25 bp, Homo sapien
tctagcgcagtgagggtggcatctt

SEQ ID NO: 5289938 - DNA, 25 bp, Homo sapien
tagtgattttgactatctgccagtc

SEQ ID NO: 5289939 - DNA, 25 bp, Homo sapien
tttcagtcaaagtggaagattgcct

SEQ ID NO: 5289940 - DNA, 25 bp, Homo sapien
tctaaaagaactggtctacccaaga

SEQ ID NO: 5289941 - DNA, 25 bp, Homo sapien
caataaaccaactaatgcaggcaca

SEQ ID NO: 5289942 - DNA, 25 bp, Homo sapien
gacttctaggcaacatcaatatgtg

SEQ ID NO: 5289943 - DNA, 25 bp, Homo sapien
cagtaaaattcacaagggcttccta

SEQ ID NO: 5289944 - DNA, 25 bp, Homo sapien
tgagggcaagactgaattaagatac

SEQ ID NO: 5289945 - DNA, 25 bp, Homo sapien
aagggctcaaatgtgctcaggaaag

SEQ ID NO: 5289946 - DNA, 25 bp, Homo sapien
taacatccttctgtggagctccaaa

SEQ ID NO: 5289947 - DNA, 25 bp, Homo sapien
tctttggtcattacaagctctccaa

SEQ ID NO: 5289948 - DNA, 25 bp, Homo sapien
accatggtagagtcccatcaaggcc

SEQ ID NO: 5289949 - DNA, 25 bp, Homo sapien
ggacctgaccatggtagagtcccat

SEQ ID NO: 5289950 - DNA, 25 bp, Homo sapien
tgttcctgcccttcgtagagacaac

SEQ ID NO: 5289951 - DNA, 25 bp, Homo sapien
cccattagggtattcttagcatcca

SEQ ID NO: 5289952 - DNA, 25 bp, Homo sapien
tcagctttatacagaggattggatc

SEQ ID NO: 5289953 - DNA, 25 bp, Homo sapien
tcaataaaacctgcccaagtgcgga

SEQ ID NO: 5289954 - DNA, 25 bp, Homo sapien
acagagataaccggcatcactccct

SEQ ID NO: 5289955 - DNA, 25 bp, Homo sapien
tcacagagataaccggcatcactcc

SEQ ID NO: 5289956 - DNA, 25 bp, Homo sapien
attcacagagataaccggcatcact

SEQ ID NO: 5289957 - DNA, 25 bp, Homo sapien
cagagataaccggcatcactccctt

SEQ ID NO: 5289958 - DNA, 25 bp, Homo sapien
ctgttgcctgacaaatggaatagtc

SEQ ID NO: 5289959 - DNA, 25 bp, Homo sapien
ttgcctgacaaatggaatagtcatg

SEQ ID NO: 5289960 - DNA, 25 bp, Homo sapien
tgttgcctgacaaatggaatagtca

SEQ ID NO: 5289961 - DNA, 25 bp, Homo sapien
tgcctgacaaatggaatagtcatgg

SEQ ID NO: 5289962 - DNA, 25 bp, Homo sapien
gatcttcttatcagctagtcctttg

SEQ ID NO: 5289963 - DNA, 25 bp, Homo sapien
atcttcttatcagctagtcctttgg

SEQ ID NO: 5289964 - DNA, 25 bp, Homo sapien
agatcttcttatcagctagtccttt

SEQ ID NO: 5289965 - DNA, 25 bp, Homo sapien
tgctctaggtagaaaacgcggtctt

SEQ ID NO: 5289966 - DNA, 25 bp, Homo sapien
gcattatgtctactgcaacctgcat

SEQ ID NO: 5289967 - DNA, 25 bp, Homo sapien
gaaacaatatgctctaggtagaaaa

SEQ ID NO: 5289968 - DNA, 25 bp, Homo sapien
aatcacaatgaatagaggagaaaca

SEQ ID NO: 5289969 - DNA, 25 bp, Homo sapien
tactcttttaaggttctgacaccac

SEQ ID NO: 5289970 - DNA, 25 bp, Homo sapien
gacaccacaggaaaatattatcaat

SEQ ID NO: 5289971 - DNA, 25 bp, Homo sapien
ttatcaattgaaaaccggccaggtg

SEQ ID NO: 5289972 - DNA, 25 bp, Homo sapien
aaataaatgcatactcttttaaggt

SEQ ID NO: 5289973 - DNA, 25 bp, Homo sapien
aaatcaatttgtgaggtgaggccca

SEQ ID NO: 5289974 - DNA, 25 bp, Homo sapien
tgggaactgctaccatcaactggga

SEQ ID NO: 5289975 - DNA, 25 bp, Homo sapien
gagtcatggccccttaagcaattcc

SEQ ID NO: 5289976 - DNA, 25 bp, Homo sapien
caggtctgtctcagtgggcctagca

SEQ ID NO: 5289977 - DNA, 25 bp, Homo sapien
gcacgaatgcttctaccagtcagca

SEQ ID NO: 5289978 - DNA, 25 bp, Homo sapien
tctgcacgaatgcttctaccagtca

SEQ ID NO: 5289979 - DNA, 25 bp, Homo sapien
cgaatgcttctaccagtcagcatca

SEQ ID NO: 5289980 - DNA, 25 bp, Homo sapien
cctgtctgcacgaatgcttctacca

SEQ ID NO: 5289981 - DNA, 25 bp, Homo sapien
ggcagcctttgtgtgcctcctgctc

SEQ ID NO: 5289982 - DNA, 25 bp, Homo sapien
tttgggcagcctttgtgtgcctcct

SEQ ID NO: 5289983 - DNA, 25 bp, Homo sapien
gggcagcctttgtgtgcctcctgct

SEQ ID NO: 5289984 - DNA, 25 bp, Homo sapien
cattttgggcagcctttgtgtgcct

SEQ ID NO: 5289985 - DNA, 25 bp, Homo sapien
cagcaaaacttcaggggtacctaat

SEQ ID NO: 5289986 - DNA, 25 bp, Homo sapien
ttctgtcttttgttgctattctgta

SEQ ID NO: 5289987 - DNA, 25 bp, Homo sapien
tggtaaggcccccagcaaaacttca

SEQ ID NO: 5289988 - DNA, 25 bp, Homo sapien
gttgctattctgtattggcatgaaa

SEQ ID NO: 5289989 - DNA, 25 bp, Homo sapien
ccacaataggctttgtggacttttc

SEQ ID NO: 5289990 - DNA, 25 bp, Homo sapien
gccacaataggctttgtggactttt

SEQ ID NO: 5289991 - DNA, 25 bp, Homo sapien
agccacaataggctttgtggacttt

SEQ ID NO: 5289992 - DNA, 25 bp, Homo sapien
cgtggtgctgcattcctgtagtcct

SEQ ID NO: 5289993 - DNA, 25 bp, Homo sapien
tgggcgtggtgctgcattcctgtag

SEQ ID NO: 5289994 - DNA, 25 bp, Homo sapien
gtgctgcattcctgtagtcctggct

SEQ ID NO: 5289995 - DNA, 25 bp, Homo sapien
tggtgctgcattcctgtagtcctgg

SEQ ID NO: 5289996 - DNA, 25 bp, Homo sapien
taacttctgagaactctgaatgtag

SEQ ID NO: 5289997 - DNA, 25 bp, Homo sapien
aacttctgagaactctgaatgtagc

SEQ ID NO: 5289998 - DNA, 25 bp, Homo sapien
ttgaagcactggatgtacgtaccac

SEQ ID NO: 5289999 - DNA, 25 bp, Homo sapien
gatgtacgtaccaccatcaaatgct

SEQ ID NO: 5290000 - DNA, 25 bp, Homo sapien
catcaaatgctattttgattataag

SEQ ID NO: 5290001 - DNA, 25 bp, Homo sapien
agggtttaaatttgaagcactggat

SEQ ID NO: 5290002 - DNA, 25 bp, Homo sapien
tcaggactagattcataatgcggtt

SEQ ID NO: 5290003 - DNA, 25 bp, Homo sapien
tggtggcacctaaggtcaacaagag

SEQ ID NO: 5290004 - DNA, 25 bp, Homo sapien
tacgcaagaacctctgctttagaaa

SEQ ID NO: 5290005 - DNA, 25 bp, Homo sapien
tcaacaagaggaattcttacgcaag

SEQ ID NO: 5290006 - DNA, 25 bp, Homo sapien
gagagttaattcgaacaactgccac

SEQ ID NO: 5290007 - DNA, 25 bp, Homo sapien
ggagagttaattcgaacaactgcca

SEQ ID NO: 5290008 - DNA, 25 bp, Homo sapien
gggagagttaattcgaacaactgcc

SEQ ID NO: 5290009 - DNA, 25 bp, Homo sapien
tgggagagttaattcgaacaactgc

SEQ ID NO: 5290010 - DNA, 25 bp, Homo sapien
gaagaccctgtaaaattgcggcata

SEQ ID NO: 5290011 - DNA, 25 bp, Homo sapien
aagcagaagaccctgtaaaattgcg

SEQ ID NO: 5290012 - DNA, 25 bp, Homo sapien
cagaagaccctgtaaaattgcggca

SEQ ID NO: 5290013 - DNA, 25 bp, Homo sapien
gaccctgtaaaattgcggcatatat

SEQ ID NO: 5290014 - DNA, 25 bp, Homo sapien
aagcggctgaggatgccaatcgccc

SEQ ID NO: 5290015 - DNA, 25 bp, Homo sapien
agcggctgaggatgccaatcgcccg

SEQ ID NO: 5290016 - DNA, 25 bp, Homo sapien
cctctaacgggtgcggccgagcgga

SEQ ID NO: 5290017 - DNA, 25 bp, Homo sapien
gagcgcctctaacgggtgcggccga

SEQ ID NO: 5290018 - DNA, 25 bp, Homo sapien
tggagagcgcctctaacgggtgcgg

SEQ ID NO: 5290019 - DNA, 25 bp, Homo sapien
tgcggccgagcggaggacttttctc

SEQ ID NO: 5290020 - DNA, 25 bp, Homo sapien
ggtgaatggcatacaaatgctcttg

SEQ ID NO: 5290021 - DNA, 25 bp, Homo sapien
gctcttgagacctgctatggaacca

SEQ ID NO: 5290022 - DNA, 25 bp, Homo sapien
gagctgccccaggtacagtaatttg

SEQ ID NO: 5290023 - DNA, 25 bp, Homo sapien
tatcctcttgctgtccgtcctggag

SEQ ID NO: 5290024 - DNA, 25 bp, Homo sapien
taccctgtagttcagggacagattg

SEQ ID NO: 5290025 - DNA, 25 bp, Homo sapien
tactaaaataacatggatgcgagtg

SEQ ID NO: 5290026 - DNA, 25 bp, Homo sapien
gcttaggtctatgaaagttactggg

SEQ ID NO: 5290027 - DNA, 25 bp, Homo sapien
catttgtgtgactgttgcttaggtc

SEQ ID NO: 5290028 - DNA, 25 bp, Homo sapien
aaaatatccatgaattgcataatta

SEQ ID NO: 5290029 - DNA, 25 bp, Homo sapien
taacaaagaccgattcatcagactt

SEQ ID NO: 5290030 - DNA, 25 bp, Homo sapien
taattcagccagatagatatcttgg

SEQ ID NO: 5290031 - DNA, 25 bp, Homo sapien
tcttgtgaattccataagttaattc

SEQ ID NO: 5290032 - DNA, 25 bp, Homo sapien
tataacctattcttacaacgtgctc

SEQ ID NO: 5290033 - DNA, 25 bp, Homo sapien
gacaaaccaaattctgcccttcatc

SEQ ID NO: 5290034 - DNA, 25 bp, Homo sapien
gaggttcctgtcaagtaagtcatcc

SEQ ID NO: 5290035 - DNA, 25 bp, Homo sapien
caatcaatgcctctatacatggata

SEQ ID NO: 5290036 - DNA, 25 bp, Homo sapien
tgtcactaagggaaatataagcctg

SEQ ID NO: 5290037 - DNA, 25 bp, Homo sapien
cagaaatcgctgaataggtcaatta

SEQ ID NO: 5290038 - DNA, 25 bp, Homo sapien
tctgtcgattatttctggagcaaag

SEQ ID NO: 5290039 - DNA, 25 bp, Homo sapien
caaaggcaggcttattcattaggtg

SEQ ID NO: 5290040 - DNA, 25 bp, Homo sapien
actcccttgcaggaacatgggtccg

SEQ ID NO: 5290041 - DNA, 25 bp, Homo sapien
cagggctcatctggtgggttcaagc

SEQ ID NO: 5290042 - DNA, 25 bp, Homo sapien
cccttgcaggaacatgggtccgtgt

SEQ ID NO: 5290043 - DNA, 25 bp, Homo sapien
gaggcgggaagagttcagagcattg

SEQ ID NO: 5290044 - DNA, 25 bp, Homo sapien
ccctctggataccaagcccacccat

SEQ ID NO: 5290045 - DNA, 25 bp, Homo sapien
gagcttgcggctggtgagtggatac

SEQ ID NO: 5290046 - DNA, 25 bp, Homo sapien
gctggtgagtggatactgagcccaa

SEQ ID NO: 5290047 - DNA, 25 bp, Homo sapien
agtggatactgagcccaacttctgc

SEQ ID NO: 5290048 - DNA, 25 bp, Homo sapien
ctggcagtgtcgcttcctcctttgc

SEQ ID NO: 5290049 - DNA, 25 bp, Homo sapien
tccaggtgataatcaggaacccagg

SEQ ID NO: 5290050 - DNA, 25 bp, Homo sapien
tgataatcaggaacccaggaccctg

SEQ ID NO: 5290051 - DNA, 25 bp, Homo sapien
agagtcagcaggagtccaggtgata

SEQ ID NO: 5290052 - DNA, 25 bp, Homo sapien
caggagtccaggtgataatcaggaa

SEQ ID NO: 5290053 - DNA, 25 bp, Homo sapien
cagcttctggctgtgcccatgtcct

SEQ ID NO: 5290054 - DNA, 25 bp, Homo sapien
tcagcttctggctgtgcccatgtcc

SEQ ID NO: 5290055 - DNA, 25 bp, Homo sapien
atggaatgccttctgacatgctctt

SEQ ID NO: 5290056 - DNA, 25 bp, Homo sapien
catggaatgccttctgacatgctct

SEQ ID NO: 5290057 - DNA, 25 bp, Homo sapien
tggaatgccttctgacatgctcttg

SEQ ID NO: 5290058 - DNA, 25 bp, Homo sapien
gcagaagcgtttgcgcaaagcttct

SEQ ID NO: 5290059 - DNA, 25 bp, Homo sapien
gcttgggcgcggcagaagcgtttgc

SEQ ID NO: 5290060 - DNA, 25 bp, Homo sapien
cggcagaagcgtttgcgcaaagctt

SEQ ID NO: 5290061 - DNA, 25 bp, Homo sapien
cgcggcagaagcgtttgcgcaaagc

SEQ ID NO: 5290062 - DNA, 25 bp, Homo sapien
ccatgaggcaaccaaacaataggat

SEQ ID NO: 5290063 - DNA, 25 bp, Homo sapien
gtccatgaggcaaccaaacaatagg

SEQ ID NO: 5290064 - DNA, 25 bp, Homo sapien
ctgtccatgaggcaaccaaacaata

SEQ ID NO: 5290065 - DNA, 25 bp, Homo sapien
ttcctgtccatgaggcaaccaaaca

SEQ ID NO: 5290066 - DNA, 25 bp, Homo sapien
tattgcccttgaggtaggtagagcc

SEQ ID NO: 5290067 - DNA, 25 bp, Homo sapien
gaaggtggtccagttttcgcagcac

SEQ ID NO: 5290068 - DNA, 25 bp, Homo sapien
gaatgagcagggctttgatcacccc

SEQ ID NO: 5290069 - DNA, 25 bp, Homo sapien
ccctgccctggaagagactgtgatc

SEQ ID NO: 5290070 - DNA, 25 bp, Homo sapien
tccatatctaggaccttgtctgtgg

SEQ ID NO: 5290071 - DNA, 25 bp, Homo sapien
cagcaggagagtcgagcctgcccag

SEQ ID NO: 5290072 - DNA, 25 bp, Homo sapien
cacattgggtaagctgaaggcgaag

SEQ ID NO: 5290073 - DNA, 25 bp, Homo sapien
acagagacctggtgtccatatctag

SEQ ID NO: 5290074 - DNA, 25 bp, Homo sapien
gagggtgaacttgcctctgccgcct

SEQ ID NO: 5290075 - DNA, 25 bp, Homo sapien
gctcagcagggtcagtaagtcggag

SEQ ID NO: 5290076 - DNA, 25 bp, Homo sapien
ggccacgtatttcatggtgctcagc

SEQ ID NO: 5290077 - DNA, 25 bp, Homo sapien
accaccttggccacgtatttcatgg

SEQ ID NO: 5290078 - DNA, 25 bp, Homo sapien
ggccaggagcctcgcatctgtgcag

SEQ ID NO: 5290079 - DNA, 25 bp, Homo sapien
caggagcctcgcatctgtgcagctg

SEQ ID NO: 5290080 - DNA, 25 bp, Homo sapien
ccaggagcctcgcatctgtgcagct

SEQ ID NO: 5290081 - DNA, 25 bp, Homo sapien
gccaggagcctcgcatctgtgcagc

SEQ ID NO: 5290082 - DNA, 25 bp, Homo sapien
cgtcagccccacagagcctcctcac

SEQ ID NO: 5290083 - DNA, 25 bp, Homo sapien
tccgtcagccccacagagcctcctc

SEQ ID NO: 5290084 - DNA, 25 bp, Homo sapien
actccgtcagccccacagagcctcc

SEQ ID NO: 5290085 - DNA, 25 bp, Homo sapien
ccagactccgtcagccccacagagc

SEQ ID NO: 5290086 - DNA, 25 bp, Homo sapien
caggtgagcaccgaggcgtcctcag

SEQ ID NO: 5290087 - DNA, 25 bp, Homo sapien
ttccaggtgagcaccgaggcgtcct

SEQ ID NO: 5290088 - DNA, 25 bp, Homo sapien
gcccctcttgctctcaggacatggg

SEQ ID NO: 5290089 - DNA, 25 bp, Homo sapien
gacattccaggtgagcaccgaggcg

SEQ ID NO: 5290090 - DNA, 25 bp, Homo sapien
cttgggcagaaccctatgcgggccc

SEQ ID NO: 5290091 - DNA, 25 bp, Homo sapien
gcagaaccctatgcgggccccgaag

SEQ ID NO: 5290092 - DNA, 25 bp, Homo sapien
ttgggcagaaccctatgcgggcccc

SEQ ID NO: 5290093 - DNA, 25 bp, Homo sapien
gggcagaaccctatgcgggccccga

SEQ ID NO: 5290094 - DNA, 25 bp, Homo sapien
tcagccatcgggcagcgctgaacag

SEQ ID NO: 5290095 - DNA, 25 bp, Homo sapien
gctctgcaggtcacaagcgtacgtg

SEQ ID NO: 5290096 - DNA, 25 bp, Homo sapien
caagcgtacgtggtgtcagccatcg

SEQ ID NO: 5290097 - DNA, 25 bp, Homo sapien
cactgagagcctgactcgttgaagg

SEQ ID NO: 5290098 - DNA, 25 bp, Homo sapien
aggccgcggtgtaggccaggtttgt

SEQ ID NO: 5290099 - DNA, 25 bp, Homo sapien
cgcggtgtaggccaggtttgtgctg

SEQ ID NO: 5290100 - DNA, 25 bp, Homo sapien
ggctccaggccgcggtgtaggccag

SEQ ID NO: 5290101 - DNA, 25 bp, Homo sapien
cggtgtaggccaggtttgtgctggg

SEQ ID NO: 5290102 - DNA, 25 bp, Homo sapien
gagccacatctgtcgccttcaaggg

SEQ ID NO: 5290103 - DNA, 25 bp, Homo sapien
ctggtatggaagtcgagccacatct

SEQ ID NO: 5290104 - DNA, 25 bp, Homo sapien
ggcaccctcaccacctcatacaggt

SEQ ID NO: 5290105 - DNA, 25 bp, Homo sapien
ggcctcgaagcagctcatgtactca

SEQ ID NO: 5290106 - DNA, 25 bp, Homo sapien
agtgcttaaccccagcaagcaaggt

SEQ ID NO: 5290107 - DNA, 25 bp, Homo sapien
ctgcagaaacgtgtgtgcggcgcta

SEQ ID NO: 5290108 - DNA, 25 bp, Homo sapien
tggcccctttggtggacattccctg

SEQ ID NO: 5290109 - DNA, 25 bp, Homo sapien
cattccctgtccccaagaaggattt

SEQ ID NO: 5290110 - DNA, 25 bp, Homo sapien
agctgggagttcaggttgaggatcc

SEQ ID NO: 5290111 - DNA, 25 bp, Homo sapien
tgggagttcaggttgaggatcccgg

SEQ ID NO: 5290112 - DNA, 25 bp, Homo sapien
tcaggctcagcgtgtcaccaggcat

SEQ ID NO: 5290113 - DNA, 25 bp, Homo sapien
ggagagtcaggctcagcgtgtcacc

SEQ ID NO: 5290114 - DNA, 25 bp, Homo sapien
gcagggaggcaggtgacaggggacc

SEQ ID NO: 5290115 - DNA, 25 bp, Homo sapien
tgcagggaggcaggtgacaggggac

SEQ ID NO: 5290116 - DNA, 25 bp, Homo sapien
ctgcagggaggcaggtgacagggga

SEQ ID NO: 5290117 - DNA, 25 bp, Homo sapien
cacttaaggccattggtttccaagt

SEQ ID NO: 5290118 - DNA, 25 bp, Homo sapien
tagaaattccccttgtggttgacat

SEQ ID NO: 5290119 - DNA, 25 bp, Homo sapien
agcaactggcagtacccgggttcgg

SEQ ID NO: 5290120 - DNA, 25 bp, Homo sapien
caaggcagccacaaggctggtggtt

SEQ ID NO: 5290121 - DNA, 25 bp, Homo sapien
ccgggttcgggatggctgaagacaa

SEQ ID NO: 5290122 - DNA, 25 bp, Homo sapien
tacatagacggagaccagcgctgat

SEQ ID NO: 5290123 - DNA, 25 bp, Homo sapien
ggccaggtcttatctggaaagtcca

SEQ ID NO: 5290124 - DNA, 25 bp, Homo sapien
tctgaggccagtgagaagaggcctt

SEQ ID NO: 5290125 - DNA, 25 bp, Homo sapien
tggaaagtccagatgtacatagacg

SEQ ID NO: 5290126 - DNA, 25 bp, Homo sapien
ctacaggagcagaggggacagctgg

SEQ ID NO: 5290127 - DNA, 25 bp, Homo sapien
aggagctgcccagatccagattccc

SEQ ID NO: 5290128 - DNA, 25 bp, Homo sapien
caggagctgcccagatccagattcc

SEQ ID NO: 5290129 - DNA, 25 bp, Homo sapien
gagctgcccagatccagattcccct

SEQ ID NO: 5290130 - DNA, 25 bp, Homo sapien
agctgcccagatccagattcccctc

SEQ ID NO: 5290131 - DNA, 25 bp, Homo sapien
attgtctggcccttgggccatcggc

SEQ ID NO: 5290132 - DNA, 25 bp, Homo sapien
ttgtctggcccttgggccatcggcc

SEQ ID NO: 5290133 - DNA, 25 bp, Homo sapien
tagaagatagggggatggggcaggc

SEQ ID NO: 5290134 - DNA, 25 bp, Homo sapien
ctagaagatagggggatggggcagg

SEQ ID NO: 5290135 - DNA, 25 bp, Homo sapien
gggatggggcaggcagggaagggtc

SEQ ID NO: 5290136 - DNA, 25 bp, Homo sapien
atggggcaggcagggaagggtctgt

SEQ ID NO: 5290137 - DNA, 25 bp, Homo sapien
ggggtccccattgtcgcctctgcag

SEQ ID NO: 5290138 - DNA, 25 bp, Homo sapien
tccccattgtcgcctctgcagacct

SEQ ID NO: 5290139 - DNA, 25 bp, Homo sapien
cccattgtcgcctctgcagaccttc

SEQ ID NO: 5290140 - DNA, 25 bp, Homo sapien
catgctttgtctctcccaatcaggg

SEQ ID NO: 5290141 - DNA, 25 bp, Homo sapien
ggttgggatgcttgggcaactggtg

SEQ ID NO: 5290142 - DNA, 25 bp, Homo sapien
gttgggatgcttgggcaactggtga

SEQ ID NO: 5290143 - DNA, 25 bp, Homo sapien
aggttgggatgcttgggcaactggt

SEQ ID NO: 5290144 - DNA, 25 bp, Homo sapien
ttgggatgcttgggcaactggtgac

SEQ ID NO: 5290145 - DNA, 25 bp, Homo sapien
agcagtggggcagccgaacagacca

SEQ ID NO: 5290146 - DNA, 25 bp, Homo sapien
cccagcaggggaagagttgtggcca

SEQ ID NO: 5290147 - DNA, 25 bp, Homo sapien
caggggaagagttgtggccaggagc

SEQ ID NO: 5290148 - DNA, 25 bp, Homo sapien
gcagcagtggggcagccgaacagac

SEQ ID NO: 5290149 - DNA, 25 bp, Homo sapien
aaaccgaatgaccattgatccaata

SEQ ID NO: 5290150 - DNA, 25 bp, Homo sapien
tctcctagtgactttctctttcacc

SEQ ID NO: 5290151 - DNA, 25 bp, Homo sapien
gaaggtgaaaataatcctcattcaa

SEQ ID NO: 5290152 - DNA, 25 bp, Homo sapien
gatccaataatctcaaagtttcatg

SEQ ID NO: 5290153 - DNA, 25 bp, Homo sapien
gagcacagatgggaataacaaggcc

SEQ ID NO: 5290154 - DNA, 25 bp, Homo sapien
caaggccaatctaaagcagtccggg

SEQ ID NO: 5290155 - DNA, 25 bp, Homo sapien
gaaaggtgacttagttccaaaggca

SEQ ID NO: 5290156 - DNA, 25 bp, Homo sapien
cgtgaccatgcctgccgggtttagg

SEQ ID NO: 5290157 - DNA, 25 bp, Homo sapien
tactaaatttctacggcacgcagcg

SEQ ID NO: 5290158 - DNA, 25 bp, Homo sapien
gaggcggtccaaggttcctaagcaa

SEQ ID NO: 5290159 - DNA, 25 bp, Homo sapien
cactgcttttatctggtcgggagac

SEQ ID NO: 5290160 - DNA, 25 bp, Homo sapien
tcgctgcagcgggagaactaagtcc

SEQ ID NO: 5290161 - DNA, 25 bp, Homo sapien
cccagatcaccacgcaagtgcggat

SEQ ID NO: 5290162 - DNA, 25 bp, Homo sapien
cactgctgaactggttcgcaagcag

SEQ ID NO: 5290163 - DNA, 25 bp, Homo sapien
tgaactggttcgcaagcagtcactc

SEQ ID NO: 5290164 - DNA, 25 bp, Homo sapien
gactaaaacggtataccccagatca

SEQ ID NO: 5290165 - DNA, 25 bp, Homo sapien
ccgattggacaacagcagtgtcggg

SEQ ID NO: 5290166 - DNA, 25 bp, Homo sapien
ttagtgttgcctgatccacgccgat

SEQ ID NO: 5290167 - DNA, 25 bp, Homo sapien
acgggccgctcgagcgggctagcaa

SEQ ID NO: 5290168 - DNA, 25 bp, Homo sapien
agaagcgtgggctgcgcttgcgcac

SEQ ID NO: 5290169 - DNA, 25 bp, Homo sapien
gcggtgggcggagcgcggctctcct

SEQ ID NO: 5290170 - DNA, 25 bp, Homo sapien
gcgcggtgggcggagcgcggctctc

SEQ ID NO: 5290171 - DNA, 25 bp, Homo sapien
gcgtgcgcggtgggcggagcgcggc

SEQ ID NO: 5290172 - DNA, 25 bp, Homo sapien
tgcgcggtgggcggagcgcggctct

SEQ ID NO: 5290173 - DNA, 25 bp, Homo sapien
tcgctgccgagtgggcgctcagttt

SEQ ID NO: 5290174 - DNA, 25 bp, Homo sapien
gtcacagccttgtagccgggagtcg

SEQ ID NO: 5290175 - DNA, 25 bp, Homo sapien
tgggcgctcagttttcgggtcgtca

SEQ ID NO: 5290176 - DNA, 25 bp, Homo sapien
gtgtggtgcttgtgtgtcacagcct

SEQ ID NO: 5290177 - DNA, 25 bp, Homo sapien
ctacgaatacgtgagcccggagcag

SEQ ID NO: 5290178 - DNA, 25 bp, Homo sapien
tgataagtacaaggtaccgcgggcc

SEQ ID NO: 5290179 - DNA, 25 bp, Homo sapien
ctggctttgataagtacaaggtacc

SEQ ID NO: 5290180 - DNA, 25 bp, Homo sapien
ctttgataagtacaaggtaccgcgg

SEQ ID NO: 5290181 - DNA, 25 bp, Homo sapien
gctggcgggcgttcctccggaggtc

SEQ ID NO: 5290182 - DNA, 25 bp, Homo sapien
cttgtgccgcgtggctccgggcggg

SEQ ID NO: 5290183 - DNA, 25 bp, Homo sapien
gggagcgtgggagcatcctaagccc

SEQ ID NO: 5290184 - DNA, 25 bp, Homo sapien
gcgtgggagcatcctaagcccgccg

SEQ ID NO: 5290185 - DNA, 25 bp, Homo sapien
ccttctgttgtgtcaatcgccttca

SEQ ID NO: 5290186 - DNA, 25 bp, Homo sapien
gcgacttgccgatgccatcctgctg

SEQ ID NO: 5290187 - DNA, 25 bp, Homo sapien
tgcatacaacttcggaggaggagat

SEQ ID NO: 5290188 - DNA, 25 bp, Homo sapien
atgatcgtttggcagatgaggcccg

SEQ ID NO: 5290189 - DNA, 25 bp, Homo sapien
ggcattttctgaacatgcattgtgc

SEQ ID NO: 5290190 - DNA, 25 bp, Homo sapien
tactaattagtgtccctctctccag

SEQ ID NO: 5290191 - DNA, 25 bp, Homo sapien
tgctagtctctagtcaaactaaggt

SEQ ID NO: 5290192 - DNA, 25 bp, Homo sapien
ctgtcattcataccgtcaggtgcct

SEQ ID NO: 5290193 - DNA, 25 bp, Homo sapien
tgagctctgattgtaggaatgcatg

SEQ ID NO: 5290194 - DNA, 25 bp, Homo sapien
acagtcccagtcctatggtaatgac

SEQ ID NO: 5290195 - DNA, 25 bp, Homo sapien
cccattgggatggttcattgtttaa

SEQ ID NO: 5290196 - DNA, 25 bp, Homo sapien
ggtaatgacttaggaggaatgcaga

SEQ ID NO: 5290197 - DNA, 25 bp, Homo sapien
tgaaacaagaggacgattccattcc

SEQ ID NO: 5290198 - DNA, 25 bp, Homo sapien
tcagtcctcgagaaaggccctttaa

SEQ ID NO: 5290199 - DNA, 25 bp, Homo sapien
gataacttgcctccctagaggagca

SEQ ID NO: 5290200 - DNA, 25 bp, Homo sapien
gaaacaacaccgcttgagcaactgg

SEQ ID NO: 5290201 - DNA, 25 bp, Homo sapien
ctttgagtagcacttctggagaaat

SEQ ID NO: 5290202 - DNA, 25 bp, Homo sapien
ccccagagcacagtgctgtctttga

SEQ ID NO: 5290203 - DNA, 25 bp, Homo sapien
ttatgtcaggtatagctaacttagc

SEQ ID NO: 5290204 - DNA, 25 bp, Homo sapien
ggcttttatgtcaggtatagctaac

SEQ ID NO: 5290205 - DNA, 25 bp, Homo sapien
gagcacctaggagcccggatttaga

SEQ ID NO: 5290206 - DNA, 25 bp, Homo sapien
taccgaggcaggaacgttgacaata

SEQ ID NO: 5290207 - DNA, 25 bp, Homo sapien
tatgccctcacgaaggtaccggtgg

SEQ ID NO: 5290208 - DNA, 25 bp, Homo sapien
tacacagccttggagaagtaccagt

SEQ ID NO: 5290209 - DNA, 25 bp, Homo sapien
gacagggcggaaacaatgctcctca

SEQ ID NO: 5290210 - DNA, 25 bp, Homo sapien
gagtttgcaactcgtccagagcctg

SEQ ID NO: 5290211 - DNA, 25 bp, Homo sapien
tccaggacagctcaggtgtgacagt

SEQ ID NO: 5290212 - DNA, 25 bp, Homo sapien
gtggcaccttgagacaactactggc

SEQ ID NO: 5290213 - DNA, 25 bp, Homo sapien
aggctcggcccaaggcatgaagagt

SEQ ID NO: 5290214 - DNA, 25 bp, Homo sapien
tcaaagaccggtgctatctgcaggg

SEQ ID NO: 5290215 - DNA, 25 bp, Homo sapien
gcactgacccatggtccttggttaa

SEQ ID NO: 5290216 - DNA, 25 bp, Homo sapien
taaagcttcaatcctgtacttggaa

SEQ ID NO: 5290217 - DNA, 25 bp, Homo sapien
ttgaggaaccagacgaaggccgtgt

SEQ ID NO: 5290218 - DNA, 25 bp, Homo sapien
ctttttgaccatgtagccagggagg

SEQ ID NO: 5290219 - DNA, 25 bp, Homo sapien
tgatgagccacttgtaccgggtgca

SEQ ID NO: 5290220 - DNA, 25 bp, Homo sapien
cagatgaggtacttgatggacttga

SEQ ID NO: 5290221 - DNA, 25 bp, Homo sapien
ttgcagcatggggcagccttggccc

SEQ ID NO: 5290222 - DNA, 25 bp, Homo sapien
gcagccttggccctgcaggcagttc

SEQ ID NO: 5290223 - DNA, 25 bp, Homo sapien
gccttggccctgcaggcagttctca

SEQ ID NO: 5290224 - DNA, 25 bp, Homo sapien
ccttggccctgcaggcagttctcat

SEQ ID NO: 5290225 - DNA, 25 bp, Homo sapien
agccaggcacagagtagaggaacag

SEQ ID NO: 5290226 - DNA, 25 bp, Homo sapien
ggtagccaggcacagagtagaggaa

SEQ ID NO: 5290227 - DNA, 25 bp, Homo sapien
gtagccaggcacagagtagaggaac

SEQ ID NO: 5290228 - DNA, 25 bp, Homo sapien
tagccaggcacagagtagaggaaca

SEQ ID NO: 5290229 - DNA, 25 bp, Homo sapien
gccgacttgagagggttcaggaacc

SEQ ID NO: 5290230 - DNA, 25 bp, Homo sapien
aggaaccagatgaagctcgtgtcgg

SEQ ID NO: 5290231 - DNA, 25 bp, Homo sapien
gtgtgccacaagaagtagcgagccg

SEQ ID NO: 5290232 - DNA, 25 bp, Homo sapien
aaccagatgaagctcgtgtcgggcc

SEQ ID NO: 5290233 - DNA, 25 bp, Homo sapien
ggtcaggttcattgcgggccaggcc

SEQ ID NO: 5290234 - DNA, 25 bp, Homo sapien
ctgctgtcagtaaatgcagctcagc

SEQ ID NO: 5290235 - DNA, 25 bp, Homo sapien
gtcaggttcattgcgggccaggccc

SEQ ID NO: 5290236 - DNA, 25 bp, Homo sapien
ctgtcagtaaatgcagctcagcctc

SEQ ID NO: 5290237 - DNA, 25 bp, Homo sapien
catctccatggtgcactgcttggct

SEQ ID NO: 5290238 - DNA, 25 bp, Homo sapien
ttggctgtctttgcgccccgcggga

SEQ ID NO: 5290239 - DNA, 25 bp, Homo sapien
cctttgacgcgcttttgcttgaaga

SEQ ID NO: 5290240 - DNA, 25 bp, Homo sapien
tcatcgttctcattgcgggccagga

SEQ ID NO: 5290241 - DNA, 25 bp, Homo sapien
agtggtccgcatcccagatctgcag

SEQ ID NO: 5290242 - DNA, 25 bp, Homo sapien
tgtactcggtctcgtcccaggagaa

SEQ ID NO: 5290243 - DNA, 25 bp, Homo sapien
gagatgacgatcttctcctccgccg

SEQ ID NO: 5290244 - DNA, 25 bp, Homo sapien
cagtgagggagtggtagtggacgtc

SEQ ID NO: 5290245 - DNA, 25 bp, Homo sapien
ccctcacgaagatgtcactggactt

SEQ ID NO: 5290246 - DNA, 25 bp, Homo sapien
cctcacgaagatgtcactggacttc

SEQ ID NO: 5290247 - DNA, 25 bp, Homo sapien
cccctcacgaagatgtcactggact

SEQ ID NO: 5290248 - DNA, 25 bp, Homo sapien
gagatgtccagaggcgtcccagggg

SEQ ID NO: 5290249 - DNA, 25 bp, Homo sapien
ggcttccgaggtgagatgtccagag

SEQ ID NO: 5290250 - DNA, 25 bp, Homo sapien
gggcttccgaggtgagatgtccaga

SEQ ID NO: 5290251 - DNA, 25 bp, Homo sapien
gtgcctcagggccaacagcgccaca

SEQ ID NO: 5290252 - DNA, 25 bp, Homo sapien
ttgagcagcggcctcgtctccacat

SEQ ID NO: 5290253 - DNA, 25 bp, Homo sapien
cctgcgcgggggatgtcctcccagt

SEQ ID NO: 5290254 - DNA, 25 bp, Homo sapien
cacatgctcgtctgtgggcttcctc

SEQ ID NO: 5290255 - DNA, 25 bp, Homo sapien
gttctcgtcctcaatctcagagggc

SEQ ID NO: 5290256 - DNA, 25 bp, Homo sapien
tcagagggcccagtgaagacgcggt

SEQ ID NO: 5290257 - DNA, 25 bp, Homo sapien
gtgaagacgcggttggccaccttca

SEQ ID NO: 5290258 - DNA, 25 bp, Homo sapien
cgtcctcaatctcagagggcccagt

SEQ ID NO: 5290259 - DNA, 25 bp, Homo sapien
gtcccgccagatattgtagccatgt

SEQ ID NO: 5290260 - DNA, 25 bp, Homo sapien
ggccgtccactttgccgtctttgca

SEQ ID NO: 5290261 - DNA, 25 bp, Homo sapien
gggcttcatggggtcccgccagata

SEQ ID NO: 5290262 - DNA, 25 bp, Homo sapien
gccgtccactttgccgtctttgcag

SEQ ID NO: 5290263 - DNA, 25 bp, Homo sapien
gaaggaggcctcgatgtcaaaggac

SEQ ID NO: 5290264 - DNA, 25 bp, Homo sapien
gtggagtaggtctgggcgatgccgc

SEQ ID NO: 5290265 - DNA, 25 bp, Homo sapien
gccaccgtcagcatggattccatgg

SEQ ID NO: 5290266 - DNA, 25 bp, Homo sapien
ggtttccccaatgaggtcatcagtg

SEQ ID NO: 5290267 - DNA, 25 bp, Homo sapien
ttcccaaagacagggttgagctgct

SEQ ID NO: 5290268 - DNA, 25 bp, Homo sapien
cttgcctagccggatggcgatgtag

SEQ ID NO: 5290269 - DNA, 25 bp, Homo sapien
tccttgtcgcggatgtcagtcttgc

SEQ ID NO: 5290270 - DNA, 25 bp, Homo sapien
ttgccgttgatgtcagcagggtgca

SEQ ID NO: 5290271 - DNA, 25 bp, Homo sapien
agaaaagataaagactagaccaaat

SEQ ID NO: 5290272 - DNA, 25 bp, Homo sapien
gataaagactagaccaaatgatctc

SEQ ID NO: 5290273 - DNA, 25 bp, Homo sapien
ctgagggtcctatgacagtgaaggg

SEQ ID NO: 5290274 - DNA, 25 bp, Homo sapien
ggtcctatgacagtgaagggcaggg

SEQ ID NO: 5290275 - DNA, 25 bp, Homo sapien
tagactcggaccagcacattgatgg

SEQ ID NO: 5290276 - DNA, 25 bp, Homo sapien
gtcattgctcgggatgccctggaac

SEQ ID NO: 5290277 - DNA, 25 bp, Homo sapien
gcactttgtacacgcagagggagcc

SEQ ID NO: 5290278 - DNA, 25 bp, Homo sapien
gtaggtggagtcgtagccggcttcc

SEQ ID NO: 5290279 - DNA, 25 bp, Homo sapien
caagttgaaagtgtgcagccagtcc

SEQ ID NO: 5290280 - DNA, 25 bp, Homo sapien
cggtcttgccccgaagcaagttgaa

SEQ ID NO: 5290281 - DNA, 25 bp, Homo sapien
ttgaagcgtcccacaatgcgctcct

SEQ ID NO: 5290282 - DNA, 25 bp, Homo sapien
aagttatcaaactcggactccagct

SEQ ID NO: 5290283 - DNA, 25 bp, Homo sapien
ccttgcccttcattgaccccttcag

SEQ ID NO: 5290284 - DNA, 25 bp, Homo sapien
ctccttgcccttcattgaccccttc

SEQ ID NO: 5290285 - DNA, 25 bp, Homo sapien
tccttgcccttcattgaccccttca

SEQ ID NO: 5290286 - DNA, 25 bp, Homo sapien
tcctccaagtcaattccagagggct

SEQ ID NO: 5290287 - DNA, 25 bp, Homo sapien
cttctcctccaagtcaattccagag

SEQ ID NO: 5290288 - DNA, 25 bp, Homo sapien
cagagggctcttgttgtcgaagttg

SEQ ID NO: 5290289 - DNA, 25 bp, Homo sapien
caagtcaattccagagggctcttgt

SEQ ID NO: 5290290 - DNA, 25 bp, Homo sapien
ctccttcatggtgtcaatggaggca

SEQ ID NO: 5290291 - DNA, 25 bp, Homo sapien
tacttggaccaccagtccagcatgc

SEQ ID NO: 5290292 - DNA, 25 bp, Homo sapien
ttggaccaccagtccagcatgctct

SEQ ID NO: 5290293 - DNA, 25 bp, Homo sapien
tccttcatggtgtcaatggaggcaa

SEQ ID NO: 5290294 - DNA, 25 bp, Homo sapien
ctccgcagtgcccttcttcttcttc

SEQ ID NO: 5290295 - DNA, 25 bp, Homo sapien
tcttcttctccttctcctcctcagc

SEQ ID NO: 5290296 - DNA, 25 bp, Homo sapien
ccgcagtgcccttcttcttcttctt

SEQ ID NO: 5290297 - DNA, 25 bp, Homo sapien
tccgcagtgcccttcttcttcttct

SEQ ID NO: 5290298 - DNA, 25 bp, Homo sapien
ccaccttgacaacagcttcagaagt

SEQ ID NO: 5290299 - DNA, 25 bp, Homo sapien
cacatccaccttgacaacagcttca

SEQ ID NO: 5290300 - DNA, 25 bp, Homo sapien
tccaccttgacaacagcttcagaag

SEQ ID NO: 5290301 - DNA, 25 bp, Homo sapien
catccaccttgacaacagcttcaga

SEQ ID NO: 5290302 - DNA, 25 bp, Homo sapien
ctgcagaggaaccaaggagacaggg

SEQ ID NO: 5290303 - DNA, 25 bp, Homo sapien
aggagacaggggcagaatcagccac

SEQ ID NO: 5290304 - DNA, 25 bp, Homo sapien
agacaggggcagaatcagccactgg

SEQ ID NO: 5290305 - DNA, 25 bp, Homo sapien
caggggcagaatcagccactggggc

SEQ ID NO: 5290306 - DNA, 25 bp, Homo sapien
acgcacgcgtgtgcattccaggata

SEQ ID NO: 5290307 - DNA, 25 bp, Homo sapien
acgcgtgtgcattccaggatagtat

SEQ ID NO: 5290308 - DNA, 25 bp, Homo sapien
cacgcgtgtgcattccaggatagta

SEQ ID NO: 5290309 - DNA, 25 bp, Homo sapien
gcacgcgtgtgcattccaggatagt

SEQ ID NO: 5290310 - DNA, 25 bp, Homo sapien
cacgaagttgcatgttcccagccag

SEQ ID NO: 5290311 - DNA, 25 bp, Homo sapien
ccgacagtcacatgccaaaggaggc

SEQ ID NO: 5290312 - DNA, 25 bp, Homo sapien
tctcggggcagatagtctggttcac

SEQ ID NO: 5290313 - DNA, 25 bp, Homo sapien
ggttcacaggatgtgtcacacgaag

SEQ ID NO: 5290314 - DNA, 25 bp, Homo sapien
tttcttgatgggtacctctggctcc

SEQ ID NO: 5290315 - DNA, 25 bp, Homo sapien
tccagtttcttgatgggtacctctg

SEQ ID NO: 5290316 - DNA, 25 bp, Homo sapien
tgatgggtacctctggctccatagt

SEQ ID NO: 5290317 - DNA, 25 bp, Homo sapien
cagtttcttgatgggtacctctggc

SEQ ID NO: 5290318 - DNA, 25 bp, Homo sapien
agaggaggagcccccattgcacagc

SEQ ID NO: 5290319 - DNA, 25 bp, Homo sapien
cacagcacacggcagcgccggagaa

SEQ ID NO: 5290320 - DNA, 25 bp, Homo sapien
attgcacagcacacggcagcgccgg

SEQ ID NO: 5290321 - DNA, 25 bp, Homo sapien
cagcacacggcagcgccggagaagc

SEQ ID NO: 5290322 - DNA, 25 bp, Homo sapien
caagaggaacagtgagattggcggg

SEQ ID NO: 5290323 - DNA, 25 bp, Homo sapien
caggaaggtgcggagaactaaagct

SEQ ID NO: 5290324 - DNA, 25 bp, Homo sapien
gaaggtgcggagaactaaagctgat

SEQ ID NO: 5290325 - DNA, 25 bp, Homo sapien
ggagaactaaagctgattctggaac

SEQ ID NO: 5290326 - DNA, 25 bp, Homo sapien
accacacggatgttcaagggcgggt

SEQ ID NO: 5290327 - DNA, 25 bp, Homo sapien
ccaccagtgtgtagcgaccgaaggc

SEQ ID NO: 5290328 - DNA, 25 bp, Homo sapien
tgacggcatgggagcccaccagtgt

SEQ ID NO: 5290329 - DNA, 25 bp, Homo sapien
tagatgaagcgtcgcagggagctga

SEQ ID NO: 5290330 - DNA, 25 bp, Homo sapien
acactggccacaggatgtcctccgc

SEQ ID NO: 5290331 - DNA, 25 bp, Homo sapien
tggccacaggatgtcctccgccagg

SEQ ID NO: 5290332 - DNA, 25 bp, Homo sapien
gcctgagcctccaagaaggggcaga

SEQ ID NO: 5290333 - DNA, 25 bp, Homo sapien
ggggtgttggcgacaggagcctgag

SEQ ID NO: 5290334 - DNA, 25 bp, Homo sapien
ctgcacactcgatgtccacccgtgg

SEQ ID NO: 5290335 - DNA, 25 bp, Homo sapien
ctgggccaggttcacccgctttagg

SEQ ID NO: 5290336 - DNA, 25 bp, Homo sapien
taattgtggatcagggacgactgca

SEQ ID NO: 5290337 - DNA, 25 bp, Homo sapien
cttcaaaccacttgacgagggtgtt

SEQ ID NO: 5290338 - DNA, 25 bp, Homo sapien
tccactcggtacttgctgagcacgg

SEQ ID NO: 5290339 - DNA, 25 bp, Homo sapien
ggtccacgtccaccgggccattgat

SEQ ID NO: 5290340 - DNA, 25 bp, Homo sapien
gatgcccatgggcacgggcatgatg

SEQ ID NO: 5290341 - DNA, 25 bp, Homo sapien
tgatgggacctcggtccacgtccac

SEQ ID NO: 5290342 - DNA, 25 bp, Homo sapien
aggtccggcccatgaagtcagcttt

SEQ ID NO: 5290343 - DNA, 25 bp, Homo sapien
tgggcagtacgcctcgtctgccatc

SEQ ID NO: 5290344 - DNA, 25 bp, Homo sapien
gcgttgccacggtagatctggtagt

SEQ ID NO: 5290345 - DNA, 25 bp, Homo sapien
atctggtagtactcgagctgaggtg

SEQ ID NO: 5290346 - DNA, 25 bp, Homo sapien
tgacaatgatgggcggatcgtccct

SEQ ID NO: 5290347 - DNA, 25 bp, Homo sapien
acaatgatgggcggatcgtccctca

SEQ ID NO: 5290348 - DNA, 25 bp, Homo sapien
ccatagagctccaggttgtcgaaca

SEQ ID NO: 5290349 - DNA, 25 bp, Homo sapien
tagagctccaggttgtcgaacacca

SEQ ID NO: 5290350 - DNA, 25 bp, Homo sapien
gggtctgagagtccgctgctgtcgg

SEQ ID NO: 5290351 - DNA, 25 bp, Homo sapien
agagtccgctgctgtcggcggcaaa

SEQ ID NO: 5290352 - DNA, 25 bp, Homo sapien
tgcactgactctgattgatgaagaa

SEQ ID NO: 5290353 - DNA, 25 bp, Homo sapien
gcctggtacatgtgcgctcggagct

SEQ ID NO: 5290354 - DNA, 25 bp, Homo sapien
tccttgcgctgtttgctgaggccca

SEQ ID NO: 5290355 - DNA, 25 bp, Homo sapien
tgtagaccaggctgacgggtgggaa

SEQ ID NO: 5290356 - DNA, 25 bp, Homo sapien
tggtgtagaccaggctgacgggtgg

SEQ ID NO: 5290357 - DNA, 25 bp, Homo sapien
acaggaactccttgcgctgtttgct

SEQ ID NO: 5290358 - DNA, 25 bp, Homo sapien
ggtcaccaggagcctgacggctgcc

SEQ ID NO: 5290359 - DNA, 25 bp, Homo sapien
ggggtcaccaggagcctgacggctg

SEQ ID NO: 5290360 - DNA, 25 bp, Homo sapien
gggtcaccaggagcctgacggctgc

SEQ ID NO: 5290361 - DNA, 25 bp, Homo sapien
agcacctgctgcttgaaggccccac

SEQ ID NO: 5290362 - DNA, 25 bp, Homo sapien
gagcacctgctgcttgaaggcccca

SEQ ID NO: 5290363 - DNA, 25 bp, Homo sapien
tgctgctcccctgaaaggacccagg

SEQ ID NO: 5290364 - DNA, 25 bp, Homo sapien
gggctgctgctcccctgaaaggacc

SEQ ID NO: 5290365 - DNA, 25 bp, Homo sapien
actcaggcttccagccccaggtggg

SEQ ID NO: 5290366 - DNA, 25 bp, Homo sapien
gctgctgctcccctgaaaggaccca

SEQ ID NO: 5290367 - DNA, 25 bp, Homo sapien
gcacacgggcataggcgacacgctt

SEQ ID NO: 5290368 - DNA, 25 bp, Homo sapien
cgcttgttgttgctcatcatccaga

SEQ ID NO: 5290369 - DNA, 25 bp, Homo sapien
atccagatgaagatgtcgggaatgc

SEQ ID NO: 5290370 - DNA, 25 bp, Homo sapien
gagcgtcttgaccttggcgcagtcc

SEQ ID NO: 5290371 - DNA, 25 bp, Homo sapien
ggcccgcagcatcctggcctgctgc

SEQ ID NO: 5290372 - DNA, 25 bp, Homo sapien
tgcaggaagttctggcacagcctca

SEQ ID NO: 5290373 - DNA, 25 bp, Homo sapien
caccgtgtgccgcttcacctgggcc

SEQ ID NO: 5290374 - DNA, 25 bp, Homo sapien
gcctcagcttgtcccgcaccgtgtg

SEQ ID NO: 5290375 - DNA, 25 bp, Homo sapien
ccagcccccgccgtccagttgcgtc

SEQ ID NO: 5290376 - DNA, 25 bp, Homo sapien
gcccccgccgtccagttgcgtcctc

SEQ ID NO: 5290377 - DNA, 25 bp, Homo sapien
cccccgccgtccagttgcgtcctca

SEQ ID NO: 5290378 - DNA, 25 bp, Homo sapien
ccccgccgtccagttgcgtcctcac

SEQ ID NO: 5290379 - DNA, 25 bp, Homo sapien
ctcatgcaggacttgaggcgctccc

SEQ ID NO: 5290380 - DNA, 25 bp, Homo sapien
agcctggtgcgggatgagtggccct

SEQ ID NO: 5290381 - DNA, 25 bp, Homo sapien
agtggccctggtccttgtcagcgag

SEQ ID NO: 5290382 - DNA, 25 bp, Homo sapien
aggcgctcccggtcaagcctggtgc

SEQ ID NO: 5290383 - DNA, 25 bp, Homo sapien
ccccgcaggcgacgctcagggtagg

SEQ ID NO: 5290384 - DNA, 25 bp, Homo sapien
caggcgacgctcagggtaggacttc

SEQ ID NO: 5290385 - DNA, 25 bp, Homo sapien
gacgctcagggtaggacttctccgt

SEQ ID NO: 5290386 - DNA, 25 bp, Homo sapien
ctcagggtaggacttctccgttttg

SEQ ID NO: 5290387 - DNA, 25 bp, Homo sapien
ctcctgtatgtcgttcaggccttct

SEQ ID NO: 5290388 - DNA, 25 bp, Homo sapien
atgcctcctccctgttgatcagggg

SEQ ID NO: 5290389 - DNA, 25 bp, Homo sapien
cctcctccctgttgatcaggggagt

SEQ ID NO: 5290390 - DNA, 25 bp, Homo sapien
ccctgttgatcaggggagtgaggga

SEQ ID NO: 5290391 - DNA, 25 bp, Homo sapien
cctgttgatcaggggagtgagggac

SEQ ID NO: 5290392 - DNA, 25 bp, Homo sapien
gagctctcgctagggccatcctgag

SEQ ID NO: 5290393 - DNA, 25 bp, Homo sapien
tcatgatctgggagctctcgctagg

SEQ ID NO: 5290394 - DNA, 25 bp, Homo sapien
tgatctgggagctctcgctagggcc

SEQ ID NO: 5290395 - DNA, 25 bp, Homo sapien
ggccatcctgagtatcggtcatcat

SEQ ID NO: 5290396 - DNA, 25 bp, Homo sapien
atcaatttcccaggttctgttctca

SEQ ID NO: 5290397 - DNA, 25 bp, Homo sapien
atttcccaggttctgttctcagaac

SEQ ID NO: 5290398 - DNA, 25 bp, Homo sapien
gaggaagtcatcaatttcccaggtt

SEQ ID NO: 5290399 - DNA, 25 bp, Homo sapien
caatttcccaggttctgttctcaga

SEQ ID NO: 5290400 - DNA, 25 bp, Homo sapien
cagggcctgggcagaactcacggct

SEQ ID NO: 5290401 - DNA, 25 bp, Homo sapien
agggaaaccctaggactggatgtgc

SEQ ID NO: 5290402 - DNA, 25 bp, Homo sapien
tgttcatgggggttcttcagttcct

SEQ ID NO: 5290403 - DNA, 25 bp, Homo sapien
aactcacggctacggggctcagggc

SEQ ID NO: 5290404 - DNA, 25 bp, Homo sapien
cctgctggcccctggcctggccctg

SEQ ID NO: 5290405 - DNA, 25 bp, Homo sapien
ccctgctggcccctggcctggccct

SEQ ID NO: 5290406 - DNA, 25 bp, Homo sapien
tgctggcccctggcctggccctgac

SEQ ID NO: 5290407 - DNA, 25 bp, Homo sapien
ctgctggcccctggcctggccctga

SEQ ID NO: 5290408 - DNA, 25 bp, Homo sapien
cttgtcggcaatgtggtccatgatg

SEQ ID NO: 5290409 - DNA, 25 bp, Homo sapien
cagctcttgatgtagatgcagggct

SEQ ID NO: 5290410 - DNA, 25 bp, Homo sapien
cagggctttcgctccaggtagggca

SEQ ID NO: 5290411 - DNA, 25 bp, Homo sapien
gatgtagatgcagggctttcgctcc

SEQ ID NO: 5290412 - DNA, 25 bp, Homo sapien
gtcatcacttgcgttctgaatcagg

SEQ ID NO: 5290413 - DNA, 25 bp, Homo sapien
tgcgttctgaatcaggtctacttct

SEQ ID NO: 5290414 - DNA, 25 bp, Homo sapien
cggcctcgtcatcacttgcgttctg

SEQ ID NO: 5290415 - DNA, 25 bp, Homo sapien
ccgcattggtggagtggaggagact

SEQ ID NO: 5290416 - DNA, 25 bp, Homo sapien
cgtttctccggtcgatcattgaggc

SEQ ID NO: 5290417 - DNA, 25 bp, Homo sapien
gatgggcttgtctccgtttctccgg

SEQ ID NO: 5290418 - DNA, 25 bp, Homo sapien
ggtcgatcattgaggcctccaggaa

SEQ ID NO: 5290419 - DNA, 25 bp, Homo sapien
tatggtgacctcaaaggtgatgggc

SEQ ID NO: 5290420 - DNA, 25 bp, Homo sapien
gaggtgtctacgatctccacagcca

SEQ ID NO: 5290421 - DNA, 25 bp, Homo sapien
cgtgtagttacgtgtggagccgtac

SEQ ID NO: 5290422 - DNA, 25 bp, Homo sapien
cgttcaggtcctgatgctcatccag

SEQ ID NO: 5290423 - DNA, 25 bp, Homo sapien
tggagccgtacatgttcacccaggc

SEQ ID NO: 5290424 - DNA, 25 bp, Homo sapien
cgtcattagaaatcttgcgcaggtc

SEQ ID NO: 5290425 - DNA, 25 bp, Homo sapien
taaagacgacctgctcattccacag

SEQ ID NO: 5290426 - DNA, 25 bp, Homo sapien
cgagtctcggatctgcaccttcatg

SEQ ID NO: 5290427 - DNA, 25 bp, Homo sapien
tcaatgaagtgggtgccgatggcca

SEQ ID NO: 5290428 - DNA, 25 bp, Homo sapien
tccacgaggtccttgttttcaccga

SEQ ID NO: 5290429 - DNA, 25 bp, Homo sapien
ttttcacatagaaccgggcccactg

SEQ ID NO: 5290430 - DNA, 25 bp, Homo sapien
gggcagcccctctgctcggtaaatt

SEQ ID NO: 5290431 - DNA, 25 bp, Homo sapien
cagcaaagaagacttgcacgtaggg

SEQ ID NO: 5290432 - DNA, 25 bp, Homo sapien
agggccatggtcaccaggtccaggt

SEQ ID NO: 5290433 - DNA, 25 bp, Homo sapien
ctgccagcacatacagccagggcca

SEQ ID NO: 5290434 - DNA, 25 bp, Homo sapien
gccagcacatacagccagggccatg

SEQ ID NO: 5290435 - DNA, 25 bp, Homo sapien
gccagggccatggtcaccaggtcca

SEQ ID NO: 5290436 - DNA, 25 bp, Homo sapien
tcagcaaaccctcaccgggggctcc

SEQ ID NO: 5290437 - DNA, 25 bp, Homo sapien
cacggcaacgtcacacttcacgtag

SEQ ID NO: 5290438 - DNA, 25 bp, Homo sapien
ttcagccccgaggagatgtcatcgg

SEQ ID NO: 5290439 - DNA, 25 bp, Homo sapien
ctcaatgtcatcttcgtcggtctca

SEQ ID NO: 5290440 - DNA, 25 bp, Homo sapien
gatggcccacttgtgatggaactgg

SEQ ID NO: 5290441 - DNA, 25 bp, Homo sapien
ctggctgcgagtacacggttcccac

SEQ ID NO: 5290442 - DNA, 25 bp, Homo sapien
ggctgcgagtacacggttcccacgt

SEQ ID NO: 5290443 - DNA, 25 bp, Homo sapien
cgagtacacggttcccacgtccatt

SEQ ID NO: 5290444 - DNA, 25 bp, Homo sapien
cacggttcccacgtccattttgaag

SEQ ID NO: 5290445 - DNA, 25 bp, Homo sapien
acatgacatccggagagacatggaa

SEQ ID NO: 5290446 - DNA, 25 bp, Homo sapien
tgacatccggagagacatggaagtc

SEQ ID NO: 5290447 - DNA, 25 bp, Homo sapien
gagacatggaagtcgaagacgaagt

SEQ ID NO: 5290448 - DNA, 25 bp, Homo sapien
ccggagagacatggaagtcgaagac

SEQ ID NO: 5290449 - DNA, 25 bp, Homo sapien
gactccttcatggatgtgtacttct

SEQ ID NO: 5290450 - DNA, 25 bp, Homo sapien
acagggtccatgttcaagcccacca

SEQ ID NO: 5290451 - DNA, 25 bp, Homo sapien
cgggcctcgatcaccgtgatgctga

SEQ ID NO: 5290452 - DNA, 25 bp, Homo sapien
gtaataggggcagttagtggactcc

SEQ ID NO: 5290453 - DNA, 25 bp, Homo sapien
ctggtaatccatgggccgcccagca

SEQ ID NO: 5290454 - DNA, 25 bp, Homo sapien
ggtaatccatgggccgcccagcact

SEQ ID NO: 5290455 - DNA, 25 bp, Homo sapien
tggtaatccatgggccgcccagcac

SEQ ID NO: 5290456 - DNA, 25 bp, Homo sapien
tccagtccatctcctagccgaatgg

SEQ ID NO: 5290457 - DNA, 25 bp, Homo sapien
aatggccagatggtcaaggtcttcc

SEQ ID NO: 5290458 - DNA, 25 bp, Homo sapien
tagagacaccgagtcgggatccagt

SEQ ID NO: 5290459 - DNA, 25 bp, Homo sapien
gacattagtggtgagagctgtgact

SEQ ID NO: 5290460 - DNA, 25 bp, Homo sapien
tcctccttgtgagaccggtttttgc

SEQ ID NO: 5290461 - DNA, 25 bp, Homo sapien
gagaccggtttttgccgagcttcat

SEQ ID NO: 5290462 - DNA, 25 bp, Homo sapien
tggggctcctccttgtgagaccggt

SEQ ID NO: 5290463 - DNA, 25 bp, Homo sapien
tgtgagaccggtttttgccgagctt

SEQ ID NO: 5290464 - DNA, 25 bp, Homo sapien
ggcggagaacacgctcctcccggct

SEQ ID NO: 5290465 - DNA, 25 bp, Homo sapien
ttcctctggcttgctgcgaccttgt

SEQ ID NO: 5290466 - DNA, 25 bp, Homo sapien
tgctgcgaccttgtgcccccaggtg

SEQ ID NO: 5290467 - DNA, 25 bp, Homo sapien
ctctggcttgctgcgaccttgtgcc

SEQ ID NO: 5290468 - DNA, 25 bp, Homo sapien
ttgctgcgaccttgtgcccccaggt

SEQ ID NO: 5290469 - DNA, 25 bp, Homo sapien
gtcctcactgtccttcagtgatgtc

SEQ ID NO: 5290470 - DNA, 25 bp, Homo sapien
gatgtccctgcagccgagcctgtgg

SEQ ID NO: 5290471 - DNA, 25 bp, Homo sapien
gcaggggtcctcactgtccttcagt

SEQ ID NO: 5290472 - DNA, 25 bp, Homo sapien
ggggcaggggtcctcactgtccttc

SEQ ID NO: 5290473 - DNA, 25 bp, Homo sapien
gagctcgcttacagcagagtccacc

SEQ ID NO: 5290474 - DNA, 25 bp, Homo sapien
tggagccaggtgtaggctccaacct

SEQ ID NO: 5290475 - DNA, 25 bp, Homo sapien
gcagagtccaccctttttgggtcac

SEQ ID NO: 5290476 - DNA, 25 bp, Homo sapien
gctccaacctggagctcgcttacag

SEQ ID NO: 5290477 - DNA, 25 bp, Homo sapien
caagcaggtcagtctgtaattcaaa

SEQ ID NO: 5290478 - DNA, 25 bp, Homo sapien
ggcaagcaggtcagtctgtaattca

SEQ ID NO: 5290479 - DNA, 25 bp, Homo sapien
gggcaagcaggtcagtctgtaattc

SEQ ID NO: 5290480 - DNA, 25 bp, Homo sapien
agcaggtcagtctgtaattcaaagg

SEQ ID NO: 5290481 - DNA, 25 bp, Homo sapien
gcttctgcagagcccttggtatagg

SEQ ID NO: 5290482 - DNA, 25 bp, Homo sapien
tctgcagagcccttggtatagggtg

SEQ ID NO: 5290483 - DNA, 25 bp, Homo sapien
cagcacctgaacaagagggtcaggt

SEQ ID NO: 5290484 - DNA, 25 bp, Homo sapien
gacagcacctgaacaagagggtcag

SEQ ID NO: 5290485 - DNA, 25 bp, Homo sapien
cggcagaaatcagggcttcgtggca

SEQ ID NO: 5290486 - DNA, 25 bp, Homo sapien
gggcattgtgcaaaaagccggcaga

SEQ ID NO: 5290487 - DNA, 25 bp, Homo sapien
cattgtgcaaaaagccggcagaaat

SEQ ID NO: 5290488 - DNA, 25 bp, Homo sapien
tcagggcttcgtggcaggaactaga

SEQ ID NO: 5290489 - DNA, 25 bp, Homo sapien
taacggtcaagatggccggtgagac

SEQ ID NO: 5290490 - DNA, 25 bp, Homo sapien
tgccagcaacgggattttcctcttg

SEQ ID NO: 5290491 - DNA, 25 bp, Homo sapien
actgctgcttgccagcaacgggatt

SEQ ID NO: 5290492 - DNA, 25 bp, Homo sapien
gccggtgagacactgctgcttgcca

SEQ ID NO: 5290493 - DNA, 25 bp, Homo sapien
agtggcctgataccggacctccacg

SEQ ID NO: 5290494 - DNA, 25 bp, Homo sapien
cctgggagcagtccatccgtctctt

SEQ ID NO: 5290495 - DNA, 25 bp, Homo sapien
ccgggagcctgggagcagtccatcc

SEQ ID NO: 5290496 - DNA, 25 bp, Homo sapien
ggagcccactgtgccgtcagtggcc

SEQ ID NO: 5290497 - DNA, 25 bp, Homo sapien
tcaatcagcgtgtcagtcacctcca

SEQ ID NO: 5290498 - DNA, 25 bp, Homo sapien
gtgtcagtcacctccacatggctct

SEQ ID NO: 5290499 - DNA, 25 bp, Homo sapien
ttctgcagcaccatgcggaaggtcc

SEQ ID NO: 5290500 - DNA, 25 bp, Homo sapien
gcattgttgtcatcaatcagcgtgt

SEQ ID NO: 5290501 - DNA, 25 bp, Homo sapien
ggggcgatcaggcacatctttctcc

SEQ ID NO: 5290502 - DNA, 25 bp, Homo sapien
ggcgatcaggcacatctttctccag

SEQ ID NO: 5290503 - DNA, 25 bp, Homo sapien
gggcgatcaggcacatctttctcca

SEQ ID NO: 5290504 - DNA, 25 bp, Homo sapien
tggggcgatcaggcacatctttctc

SEQ ID NO: 5290505 - DNA, 25 bp, Homo sapien
ggtgaggagactgctcatgtgaaat

SEQ ID NO: 5290506 - DNA, 25 bp, Homo sapien
cgacttccaccggacagtggtgagg

SEQ ID NO: 5290507 - DNA, 25 bp, Homo sapien
tggcagcagtgtggttttggctcct

SEQ ID NO: 5290508 - DNA, 25 bp, Homo sapien
tgtgaaattcctctaccaacaccgg

SEQ ID NO: 5290509 - DNA, 25 bp, Homo sapien
ttgttgctgaagactttgctgtagt

SEQ ID NO: 5290510 - DNA, 25 bp, Homo sapien
gactttgctgtagttgaaaacctga

SEQ ID NO: 5290511 - DNA, 25 bp, Homo sapien
gctgtagttgaaaacctgaatctcc

SEQ ID NO: 5290512 - DNA, 25 bp, Homo sapien
gaatctccagcatctcatttctgtc

SEQ ID NO: 5290513 - DNA, 25 bp, Homo sapien
tgctggccaccggccaccgaaatgt

SEQ ID NO: 5290514 - DNA, 25 bp, Homo sapien
ctgctggccaccggccaccgaaatg

SEQ ID NO: 5290515 - DNA, 25 bp, Homo sapien
aggggcagcatggcatgcaaatccc

SEQ ID NO: 5290516 - DNA, 25 bp, Homo sapien
ggggcagcatggcatgcaaatcccc

SEQ ID NO: 5290517 - DNA, 25 bp, Homo sapien
tgatctggattatgtccagcttggc

SEQ ID NO: 5290518 - DNA, 25 bp, Homo sapien
aatgatctggattatgtccagcttg

SEQ ID NO: 5290519 - DNA, 25 bp, Homo sapien
gatctggattatgtccagcttggcc

SEQ ID NO: 5290520 - DNA, 25 bp, Homo sapien
tgtccagcttggccgctgagtgggc

SEQ ID NO: 5290521 - DNA, 25 bp, Homo sapien
gtcgtggcaactgcgccctgaagtg

SEQ ID NO: 5290522 - DNA, 25 bp, Homo sapien
ctgtgcctaagcctgagtgaggagc

SEQ ID NO: 5290523 - DNA, 25 bp, Homo sapien
agtgaggagcgaggttttgctccct

SEQ ID NO: 5290524 - DNA, 25 bp, Homo sapien
gctctgggtcgatggacacagccac

SEQ ID NO: 5290525 - DNA, 25 bp, Homo sapien
acagggaataacaggcccagaccca

SEQ ID NO: 5290526 - DNA, 25 bp, Homo sapien
gggaataacaggcccagacccagca

SEQ ID NO: 5290527 - DNA, 25 bp, Homo sapien
tgggcgaggctgctgttccccgtgt

SEQ ID NO: 5290528 - DNA, 25 bp, Homo sapien
gggcgaggctgctgttccccgtgtc

SEQ ID NO: 5290529 - DNA, 25 bp, Homo sapien
tccaggacccgagagtagaaggatt

SEQ ID NO: 5290530 - DNA, 25 bp, Homo sapien
agacgatgagcatggggtcagacct

SEQ ID NO: 5290531 - DNA, 25 bp, Homo sapien
aaattctagggtcagagctgtccag

SEQ ID NO: 5290532 - DNA, 25 bp, Homo sapien
tcagagctgtccagacgatgagcat

SEQ ID NO: 5290533 - DNA, 25 bp, Homo sapien
tagggtcagagctgtccagacgatg

SEQ ID NO: 5290534 - DNA, 25 bp, Homo sapien
tcggaaagtcactttggcgatccgg

SEQ ID NO: 5290535 - DNA, 25 bp, Homo sapien
gaaagtcactttggcgatccggtcg

SEQ ID NO: 5290536 - DNA, 25 bp, Homo sapien
tccgagactgtcttgaggtggatga

SEQ ID NO: 5290537 - DNA, 25 bp, Homo sapien
gcagctccgagactgtcttgaggtg

SEQ ID NO: 5290538 - DNA, 25 bp, Homo sapien
gcagcgggaaggagctagccggtgg

SEQ ID NO: 5290539 - DNA, 25 bp, Homo sapien
cgggaaggagctagccggtggagca

SEQ ID NO: 5290540 - DNA, 25 bp, Homo sapien
ctagccggtggagcacggctcacac

SEQ ID NO: 5290541 - DNA, 25 bp, Homo sapien
ggagctagccggtggagcacggctc

SEQ ID NO: 5290542 - DNA, 25 bp, Homo sapien
tccctgcggaatgctgtgggtatct

SEQ ID NO: 5290543 - DNA, 25 bp, Homo sapien
gcaggattttgtcgctgaacatgac

SEQ ID NO: 5290544 - DNA, 25 bp, Homo sapien
tgtccatctaacacctaaggcttgg

SEQ ID NO: 5290545 - DNA, 25 bp, Homo sapien
ggtggctttgtacccctgtgaccgc

SEQ ID NO: 5290546 - DNA, 25 bp, Homo sapien
gtgtttgccgctacatcagcatccc

SEQ ID NO: 5290547 - DNA, 25 bp, Homo sapien
ggctgccatgtcaggtgtttgccgc

SEQ ID NO: 5290548 - DNA, 25 bp, Homo sapien
gtggtctccctcgaggctgccatgt

SEQ ID NO: 5290549 - DNA, 25 bp, Homo sapien
ctgtggtctccctcgaggctgccat

SEQ ID NO: 5290550 - DNA, 25 bp, Homo sapien
gcatgttgtcattgtccagatccga

SEQ ID NO: 5290551 - DNA, 25 bp, Homo sapien
aaggacagcatgttgtcattgtcca

SEQ ID NO: 5290552 - DNA, 25 bp, Homo sapien
gttgtcattgtccagatccgactca

SEQ ID NO: 5290553 - DNA, 25 bp, Homo sapien
ttgtccagatccgactcactcagga

SEQ ID NO: 5290554 - DNA, 25 bp, Homo sapien
cagtcgcaggatgatcctctgcaga

SEQ ID NO: 5290555 - DNA, 25 bp, Homo sapien
tgtcatcactgttcagcagtcgcag

SEQ ID NO: 5290556 - DNA, 25 bp, Homo sapien
ttcgtgaggtccatcaggaggtcct

SEQ ID NO: 5290557 - DNA, 25 bp, Homo sapien
caggaggtcctcagacatgtcatca

SEQ ID NO: 5290558 - DNA, 25 bp, Homo sapien
gggaggggctagagccttcttcttg

SEQ ID NO: 5290559 - DNA, 25 bp, Homo sapien
aggggctagagccttcttcttgctg

SEQ ID NO: 5290560 - DNA, 25 bp, Homo sapien
ctcagaccacttgggaggggctaga

SEQ ID NO: 5290561 - DNA, 25 bp, Homo sapien
ggggctagagccttcttcttgctgt

SEQ ID NO: 5290562 - DNA, 25 bp, Homo sapien
cactctgcagatacggtctctgaaa

SEQ ID NO: 5290563 - DNA, 25 bp, Homo sapien
catactcaatcttcaggcttgggca

SEQ ID NO: 5290564 - DNA, 25 bp, Homo sapien
caaaggagaacatgcctttgtggga

SEQ ID NO: 5290565 - DNA, 25 bp, Homo sapien
catagatgcgaaaggcatactcaat

SEQ ID NO: 5290566 - DNA, 25 bp, Homo sapien
agcaccctctcacccagaaaggcac

SEQ ID NO: 5290567 - DNA, 25 bp, Homo sapien
gaagcaccctctcacccagaaaggc

SEQ ID NO: 5290568 - DNA, 25 bp, Homo sapien
aagcaccctctcacccagaaaggca

SEQ ID NO: 5290569 - DNA, 25 bp, Homo sapien
cagtctgggcagtttagcaagaccc

SEQ ID NO: 5290570 - DNA, 25 bp, Homo sapien
agaagaaaaatcagagctggacatg

SEQ ID NO: 5290571 - DNA, 25 bp, Homo sapien
gtggttcatgcctggaatcccaaca

SEQ ID NO: 5290572 - DNA, 25 bp, Homo sapien
aaagcagtaataagaagaaaaatca

SEQ ID NO: 5290573 - DNA, 25 bp, Homo sapien
caggggagtggacgccctttcaggg

SEQ ID NO: 5290574 - DNA, 25 bp, Homo sapien
ctgcgaacaggggagtggacgccct

SEQ ID NO: 5290575 - DNA, 25 bp, Homo sapien
gaacaggggagtggacgccctttca

SEQ ID NO: 5290576 - DNA, 25 bp, Homo sapien
tgcgaacaggggagtggacgccctt

SEQ ID NO: 5290577 - DNA, 25 bp, Homo sapien
cagaggccgctgacaccggcaggca

SEQ ID NO: 5290578 - DNA, 25 bp, Homo sapien
ctgtgaagagcagaggccgctgaca

SEQ ID NO: 5290579 - DNA, 25 bp, Homo sapien
acactagccattcgggctgctggga

SEQ ID NO: 5290580 - DNA, 25 bp, Homo sapien
aatgtgtccccgcatctcagctgtc

SEQ ID NO: 5290581 - DNA, 25 bp, Homo sapien
taggaactagttctaagcaggactc

SEQ ID NO: 5290582 - DNA, 25 bp, Homo sapien
tgcaagctgttctaagcagatagga

SEQ ID NO: 5290583 - DNA, 25 bp, Homo sapien
ctttgggagatacatagaaaccgag

SEQ ID NO: 5290584 - DNA, 25 bp, Homo sapien
ttcatcgctttcagccttgggagtg

SEQ ID NO: 5290585 - DNA, 25 bp, Homo sapien
tcagagcccagttcgttccaaacag

SEQ ID NO: 5290586 - DNA, 25 bp, Homo sapien
gcctcttccaagtggtggccacagt

SEQ ID NO: 5290587 - DNA, 25 bp, Homo sapien
ttgaacaatgacaaactgaagtcat

SEQ ID NO: 5290588 - DNA, 25 bp, Homo sapien
gaagatgggctctcattgaacaatg

SEQ ID NO: 5290589 - DNA, 25 bp, Homo sapien
cagggataaaggctcagataattgt

SEQ ID NO: 5290590 - DNA, 25 bp, Homo sapien
tcataacagggataaaggctcagat

SEQ ID NO: 5290591 - DNA, 25 bp, Homo sapien
gggataaaggctcagataattgtcc

SEQ ID NO: 5290592 - DNA, 25 bp, Homo sapien
taacagggataaaggctcagataat

SEQ ID NO: 5290593 - DNA, 25 bp, Homo sapien
gctgacctggtccatggtgagcgtt

SEQ ID NO: 5290594 - DNA, 25 bp, Homo sapien
ggtccatggtgagcgttgcctcctt

SEQ ID NO: 5290595 - DNA, 25 bp, Homo sapien
gagcgttgcctccttgtagtacttc

SEQ ID NO: 5290596 - DNA, 25 bp, Homo sapien
tgcctccttgtagtacttcccagga

SEQ ID NO: 5290597 - DNA, 25 bp, Homo sapien
ggttagcagcctaaagcctggtgtc

SEQ ID NO: 5290598 - DNA, 25 bp, Homo sapien
accagcgtgaggctgtattagggca

SEQ ID NO: 5290599 - DNA, 25 bp, Homo sapien
tagggcaagaatccagctcagaggg

SEQ ID NO: 5290600 - DNA, 25 bp, Homo sapien
tggatcccagtaaaaggttagcagc

SEQ ID NO: 5290601 - DNA, 25 bp, Homo sapien
tttcatttctggtcaggaaggtcag

SEQ ID NO: 5290602 - DNA, 25 bp, Homo sapien
aatttcatttctggtcaggaaggtc

SEQ ID NO: 5290603 - DNA, 25 bp, Homo sapien
cagaatttcatttctggtcaggaag

SEQ ID NO: 5290604 - DNA, 25 bp, Homo sapien
gaatttcatttctggtcaggaaggt

SEQ ID NO: 5290605 - DNA, 25 bp, Homo sapien
caaatcacagagaagcgacgtgtcc

SEQ ID NO: 5290606 - DNA, 25 bp, Homo sapien
gagaagcgacgtgtccactccattc

SEQ ID NO: 5290607 - DNA, 25 bp, Homo sapien
tcacagagaagcgacgtgtccactc

SEQ ID NO: 5290608 - DNA, 25 bp, Homo sapien
ctgcaacaaatcacagagaagcgac

SEQ ID NO: 5290609 - DNA, 25 bp, Homo sapien
tctgatacctcaagcattgccccat

SEQ ID NO: 5290610 - DNA, 25 bp, Homo sapien
cccagtgcatctgatacctcaagca

SEQ ID NO: 5290611 - DNA, 25 bp, Homo sapien
gtgcatctgatacctcaagcattgc

SEQ ID NO: 5290612 - DNA, 25 bp, Homo sapien
ctcccagtgcatctgatacctcaag

SEQ ID NO: 5290613 - DNA, 25 bp, Homo sapien
ctggaagcaccaccccagccccact

SEQ ID NO: 5290614 - DNA, 25 bp, Homo sapien
gaagcaccaccccagccccactctc

SEQ ID NO: 5290615 - DNA, 25 bp, Homo sapien
ccccactctctcctctttctgtgat

SEQ ID NO: 5290616 - DNA, 25 bp, Homo sapien
cactctctcctctttctgtgatctc

SEQ ID NO: 5290617 - DNA, 25 bp, Homo sapien
tgagacagatgatgtcctgccctca

SEQ ID NO: 5290618 - DNA, 25 bp, Homo sapien
tattcattgagcgaggtagtgcaga

SEQ ID NO: 5290619 - DNA, 25 bp, Homo sapien
aatgagacagatgatgtcctgccct

SEQ ID NO: 5290620 - DNA, 25 bp, Homo sapien
cattgagcgaggtagtgcagacaga

SEQ ID NO: 5290621 - DNA, 25 bp, Homo sapien
gtcatggaagcaccggagcagagac

SEQ ID NO: 5290622 - DNA, 25 bp, Homo sapien
cagccatacgtgctgcggaagaagg

SEQ ID NO: 5290623 - DNA, 25 bp, Homo sapien
gatccagacgcgcatatgtgcaccc

SEQ ID NO: 5290624 - DNA, 25 bp, Homo sapien
cacatcccttagacagccatacgtg

SEQ ID NO: 5290625 - DNA, 25 bp, Homo sapien
attacatcccttaaactcctcttca

SEQ ID NO: 5290626 - DNA, 25 bp, Homo sapien
tctggggaagggcagttctacatcc

SEQ ID NO: 5290627 - DNA, 25 bp, Homo sapien
tccagcccattacatcccttaaact

SEQ ID NO: 5290628 - DNA, 25 bp, Homo sapien
aagggcagttctacatccttctcct

SEQ ID NO: 5290629 - DNA, 25 bp, Homo sapien
caggtacatttcctagggtcaaacg

SEQ ID NO: 5290630 - DNA, 25 bp, Homo sapien
tggactcccacagcagtgtggagaa

SEQ ID NO: 5290631 - DNA, 25 bp, Homo sapien
tgtggagaaggtggcaacaatatct

SEQ ID NO: 5290632 - DNA, 25 bp, Homo sapien
gggtcaaacgggatgccatggactc

SEQ ID NO: 5290633 - DNA, 25 bp, Homo sapien
aagtgatcagcaagaagaagagcag

SEQ ID NO: 5290634 - DNA, 25 bp, Homo sapien
caagtgatcagcaagaagaagagca

SEQ ID NO: 5290635 - DNA, 25 bp, Homo sapien
ttttagtatttgttgatcattcttg

SEQ ID NO: 5290636 - DNA, 25 bp, Homo sapien
ttttttagtatttgttgatcattct

SEQ ID NO: 5290637 - DNA, 25 bp, Homo sapien
tttagtatttgttgatcattcttgg

SEQ ID NO: 5290638 - DNA, 25 bp, Homo sapien
gcagcaggcactttgcaaagggcag

SEQ ID NO: 5290639 - DNA, 25 bp, Homo sapien
ccccacaccggcgaacctcagtggg

SEQ ID NO: 5290640 - DNA, 25 bp, Homo sapien
cacaccggcgaacctcagtgggtgc

SEQ ID NO: 5290641 - DNA, 25 bp, Homo sapien
attcatcacccccacaccggcgaac

SEQ ID NO: 5290642 - DNA, 25 bp, Homo sapien
tcctcccagattcatcacccccaca

SEQ ID NO: 5290643 - DNA, 25 bp, Homo sapien
gaaggctccggaagcccaggattag

SEQ ID NO: 5290644 - DNA, 25 bp, Homo sapien
gacattaaacaagtgctgggtggca

SEQ ID NO: 5290645 - DNA, 25 bp, Homo sapien
cctgagatctagtcgggaaggcaga

SEQ ID NO: 5290646 - DNA, 25 bp, Homo sapien
gaaagcaggcatagtgacctgccct

SEQ ID NO: 5290647 - DNA, 25 bp, Homo sapien
caggtggggattggggtccaggtga

SEQ ID NO: 5290648 - DNA, 25 bp, Homo sapien
tcaggtggggattggggtccaggtg

SEQ ID NO: 5290649 - DNA, 25 bp, Homo sapien
ctcaggtggggattggggtccaggt

SEQ ID NO: 5290650 - DNA, 25 bp, Homo sapien
tgtcaggccatcgtcagacacccat

SEQ ID NO: 5290651 - DNA, 25 bp, Homo sapien
tactttccatggatcgctggagggc

SEQ ID NO: 5290652 - DNA, 25 bp, Homo sapien
caagttacagctcattcctttggcc

SEQ ID NO: 5290653 - DNA, 25 bp, Homo sapien
tccttttggatccagcaagttacag

SEQ ID NO: 5290654 - DNA, 25 bp, Homo sapien
ggtgccctggagacacggatcttct

SEQ ID NO: 5290655 - DNA, 25 bp, Homo sapien
cctttgcgagctcaagtcacttggc

SEQ ID NO: 5290656 - DNA, 25 bp, Homo sapien
caaagcacacacttgggagtcagag

SEQ ID NO: 5290657 - DNA, 25 bp, Homo sapien
catgggtcactagcacattcactgg

SEQ ID NO: 5290658 - DNA, 25 bp, Homo sapien
gcttcactggaagcttcggtttcct

SEQ ID NO: 5290659 - DNA, 25 bp, Homo sapien
catatatgtacgtggtgtgatgtgt

SEQ ID NO: 5290660 - DNA, 25 bp, Homo sapien
tggttgggagcactaagtgcattca

SEQ ID NO: 5290661 - DNA, 25 bp, Homo sapien
ccattgctaaggtggttgggagcac

SEQ ID NO: 5290662 - DNA, 25 bp, Homo sapien
ttttgggggaacacacatttcataa

SEQ ID NO: 5290663 - DNA, 25 bp, Homo sapien
tctaaagccactaaatcatggtcca

SEQ ID NO: 5290664 - DNA, 25 bp, Homo sapien
ccaacttcctcgacgaatctgggac

SEQ ID NO: 5290665 - DNA, 25 bp, Homo sapien
tcatggtccaaaatatcatagctgt

SEQ ID NO: 5290666 - DNA, 25 bp, Homo sapien
cagcccctgccccaagtgtgggaag

SEQ ID NO: 5290667 - DNA, 25 bp, Homo sapien
agcccctgccccaagtgtgggaagg

SEQ ID NO: 5290668 - DNA, 25 bp, Homo sapien
agtaatggctgggtctgtcccagcc

SEQ ID NO: 5290669 - DNA, 25 bp, Homo sapien
ttcctgaaaccccagtaatggctgg

SEQ ID NO: 5290670 - DNA, 25 bp, Homo sapien
cgcggtcttcgacgcgctggagtcg

SEQ ID NO: 5290671 - DNA, 25 bp, Homo sapien
tcggagcccgagctgatcgagcggc

SEQ ID NO: 5290672 - DNA, 25 bp, Homo sapien
gggcgccgcggtcttcgacgcgctg

SEQ ID NO: 5290673 - DNA, 25 bp, Homo sapien
gcccgagctgatcgagcggcagcgg

SEQ ID NO: 5290674 - DNA, 25 bp, Homo sapien
gatctttgctcatcctcgagccaaa

SEQ ID NO: 5290675 - DNA, 25 bp, Homo sapien
agatctttgctcatcctcgagccaa

SEQ ID NO: 5290676 - DNA, 25 bp, Homo sapien
tctttgctcatcctcgagccaaagc

SEQ ID NO: 5290677 - DNA, 25 bp, Homo sapien
tttgctcatcctcgagccaaagctc

SEQ ID NO: 5290678 - DNA, 25 bp, Homo sapien
tccaagaacgccagaagaacttgtg

SEQ ID NO: 5290679 - DNA, 25 bp, Homo sapien
ttcctgttccaagaacgccagaaga

SEQ ID NO: 5290680 - DNA, 25 bp, Homo sapien
ctgtacttcctgttccaagaacgcc

SEQ ID NO: 5290681 - DNA, 25 bp, Homo sapien
ctgttccaagaacgccagaagaact

SEQ ID NO: 5290682 - DNA, 25 bp, Homo sapien
taagaagctcccagtcctcagagac

SEQ ID NO: 5290683 - DNA, 25 bp, Homo sapien
cactggaggttcaagctaactggcc

SEQ ID NO: 5290684 - DNA, 25 bp, Homo sapien
ggagccctgcaaattccgagaaatg

SEQ ID NO: 5290685 - DNA, 25 bp, Homo sapien
aaagccagggtgtctatgtccaagt

SEQ ID NO: 5290686 - DNA, 25 bp, Homo sapien
ggactccaaaggtcgtggctgccac

SEQ ID NO: 5290687 - DNA, 25 bp, Homo sapien
gaaggccagtgttgcttccccctca

SEQ ID NO: 5290688 - DNA, 25 bp, Homo sapien
tgcaatatgtgtgggtgaccatgcc

SEQ ID NO: 5290689 - DNA, 25 bp, Homo sapien
tgcttccccaatgccttatgcctgg

SEQ ID NO: 5290690 - DNA, 25 bp, Homo sapien
tttgatcatcagaacaacactgtgg

SEQ ID NO: 5290691 - DNA, 25 bp, Homo sapien
tcagaacaacactgtggggctgggt

SEQ ID NO: 5290692 - DNA, 25 bp, Homo sapien
gtggctcacacctataatcccagca

SEQ ID NO: 5290693 - DNA, 25 bp, Homo sapien
gaacaacactgtggggctgggtgcg

SEQ ID NO: 5290694 - DNA, 25 bp, Homo sapien
tagagtgtgactcttcgtcaacacc

SEQ ID NO: 5290695 - DNA, 25 bp, Homo sapien
cggaaggcacggatttttggagact

SEQ ID NO: 5290696 - DNA, 25 bp, Homo sapien
caccagcaggttcttaagcaaatca

SEQ ID NO: 5290697 - DNA, 25 bp, Homo sapien
tggagaacccaagcgcaaatcccta

SEQ ID NO: 5290698 - DNA, 25 bp, Homo sapien
ggactcactgggcttgacaagctgg

SEQ ID NO: 5290699 - DNA, 25 bp, Homo sapien
tgtgggaatggccacagctaatctg

SEQ ID NO: 5290700 - DNA, 25 bp, Homo sapien
aatggccacagctaatctgcccaag

SEQ ID NO: 5290701 - DNA, 25 bp, Homo sapien
ctcaccattgtcacctcaggagcca

SEQ ID NO: 5290702 - DNA, 25 bp, Homo sapien
catcatggcccagatcatcgttgcc

SEQ ID NO: 5290703 - DNA, 25 bp, Homo sapien
tcgttgccatccagatggtgctaga

SEQ ID NO: 5290704 - DNA, 25 bp, Homo sapien
agttcgtctacaaacacaatgtgca

SEQ ID NO: 5290705 - DNA, 25 bp, Homo sapien
tgtgcacccactgcgggcagttggc

SEQ ID NO: 5290706 - DNA, 25 bp, Homo sapien
cacattacccagttgctctgggcct

SEQ ID NO: 5290707 - DNA, 25 bp, Homo sapien
gatcttgaccaacctgagaaaacag

SEQ ID NO: 5290708 - DNA, 25 bp, Homo sapien
tgctgtggccttagtgccttctggc

SEQ ID NO: 5290709 - DNA, 25 bp, Homo sapien
tccctaaacccgtctggagacatgg

SEQ ID NO: 5290710 - DNA, 25 bp, Homo sapien
gatgaagaaaccatgccccagagaa

SEQ ID NO: 5290711 - DNA, 25 bp, Homo sapien
ggtttgcctgataccagacctgtgg

SEQ ID NO: 5290712 - DNA, 25 bp, Homo sapien
tatcctgggcgttgcgttaagttgc

SEQ ID NO: 5290713 - DNA, 25 bp, Homo sapien
gctgttgacaagtgaagccctcagg

SEQ ID NO: 5290714 - DNA, 25 bp, Homo sapien
aacacatttcgcagagcatatcccc

SEQ ID NO: 5290715 - DNA, 25 bp, Homo sapien
aatcgtctaacaacacatttcgcag

SEQ ID NO: 5290716 - DNA, 25 bp, Homo sapien
ctaggttacatatgttagatacaca

SEQ ID NO: 5290717 - DNA, 25 bp, Homo sapien
ccaaggtgtgtgatacactatacca

SEQ ID NO: 5290718 - DNA, 25 bp, Homo sapien
cagagtagcctcaccattagtggca

SEQ ID NO: 5290719 - DNA, 25 bp, Homo sapien
ggcatttccatcatatagacctctg

SEQ ID NO: 5290720 - DNA, 25 bp, Homo sapien
cactttgagcagttgcctggaaggc

SEQ ID NO: 5290721 - DNA, 25 bp, Homo sapien
catcatgtaactgagtggactgtgc

SEQ ID NO: 5290722 - DNA, 25 bp, Homo sapien
caatgaccttttctaccattactgg

SEQ ID NO: 5290723 - DNA, 25 bp, Homo sapien
ctttgataggagagtggtcccaatg

SEQ ID NO: 5290724 - DNA, 25 bp, Homo sapien
aacaatcaagactctcatttgcaag

SEQ ID NO: 5290725 - DNA, 25 bp, Homo sapien
gatattcccatactcatcattactt

SEQ ID NO: 5290726 - DNA, 25 bp, Homo sapien
tcaaaacacatggtccttgatggca

SEQ ID NO: 5290727 - DNA, 25 bp, Homo sapien
tgatggcacaggatacaaggcagcc

SEQ ID NO: 5290728 - DNA, 25 bp, Homo sapien
accaatacctgtgtgtccatggacg

SEQ ID NO: 5290729 - DNA, 25 bp, Homo sapien
gcagccagcaaaagggattgttata

SEQ ID NO: 5290730 - DNA, 25 bp, Homo sapien
ctaaggtggtgcatttggagacccc

SEQ ID NO: 5290731 - DNA, 25 bp, Homo sapien
taaggtggtgcatttggagacccca

SEQ ID NO: 5290732 - DNA, 25 bp, Homo sapien
atttctggctgcacagggaatgccc

SEQ ID NO: 5290733 - DNA, 25 bp, Homo sapien
cagggagcccgggcctatttcaggg

SEQ ID NO: 5290734 - DNA, 25 bp, Homo sapien
tcacagggagcccgggcctatttca

SEQ ID NO: 5290735 - DNA, 25 bp, Homo sapien
acagggagcccgggcctatttcagg

SEQ ID NO: 5290736 - DNA, 25 bp, Homo sapien
cacagggagcccgggcctatttcag

SEQ ID NO: 5290737 - DNA, 25 bp, Homo sapien
catgcatgtcccgagcttcttcctt

SEQ ID NO: 5290738 - DNA, 25 bp, Homo sapien
cacccatgcatgtcccgagcttctt

SEQ ID NO: 5290739 - DNA, 25 bp, Homo sapien
ctccacccatgcatgtcccgagctt

SEQ ID NO: 5290740 - DNA, 25 bp, Homo sapien
gcatgtcccgagcttcttccttcat

SEQ ID NO: 5290741 - DNA, 25 bp, Homo sapien
cttctgacaaggatgctggaattct

SEQ ID NO: 5290742 - DNA, 25 bp, Homo sapien
tgacaaggatgctggaattctcagg

SEQ ID NO: 5290743 - DNA, 25 bp, Homo sapien
gacttctgacaaggatgctggaatt

SEQ ID NO: 5290744 - DNA, 25 bp, Homo sapien
tctgacaaggatgctggaattctca

SEQ ID NO: 5290745 - DNA, 25 bp, Homo sapien
gctctgccgtaggtctgagcttctg

SEQ ID NO: 5290746 - DNA, 25 bp, Homo sapien
ctgccgtaggtctgagcttctgcca

SEQ ID NO: 5290747 - DNA, 25 bp, Homo sapien
cagctctgccgtaggtctgagcttc

SEQ ID NO: 5290748 - DNA, 25 bp, Homo sapien
tccagctctgccgtaggtctgagct

SEQ ID NO: 5290749 - DNA, 25 bp, Homo sapien
ttgtggcaagtcttccacttccatc

SEQ ID NO: 5290750 - DNA, 25 bp, Homo sapien
cattcccatcaccttgtctaaaagg

SEQ ID NO: 5290751 - DNA, 25 bp, Homo sapien
ttccatcccatcagccattcccatc

SEQ ID NO: 5290752 - DNA, 25 bp, Homo sapien
ggtagtaaattgtggcaagtcttcc

SEQ ID NO: 5290753 - DNA, 25 bp, Homo sapien
ccaggaagaggtggttggcccagac

SEQ ID NO: 5290754 - DNA, 25 bp, Homo sapien
cagcccaggaagaggtggttggccc

SEQ ID NO: 5290755 - DNA, 25 bp, Homo sapien
ttattgtaactgcagcccaggaaga

SEQ ID NO: 5290756 - DNA, 25 bp, Homo sapien
tattgtaactgcagcccaggaagag

SEQ ID NO: 5290757 - DNA, 25 bp, Homo sapien
cttccattgcttctcgctctctgag

SEQ ID NO: 5290758 - DNA, 25 bp, Homo sapien
tctcgctctctgagtaggagcggaa

SEQ ID NO: 5290759 - DNA, 25 bp, Homo sapien
tctctgagtaggagcggaactgctc

SEQ ID NO: 5290760 - DNA, 25 bp, Homo sapien
cattgcttctcgctctctgagtagg

SEQ ID NO: 5290761 - DNA, 25 bp, Homo sapien
ccattctcgttccaagagaagacaa

SEQ ID NO: 5290762 - DNA, 25 bp, Homo sapien
tgtggccattctcgttccaagagaa

SEQ ID NO: 5290763 - DNA, 25 bp, Homo sapien
tagatttctgctacaaggctggggc

SEQ ID NO: 5290764 - DNA, 25 bp, Homo sapien
ctggtttgtggccattctcgttcca

SEQ ID NO: 5290765 - DNA, 25 bp, Homo sapien
acgcccccggagtagtgaacaccat

SEQ ID NO: 5290766 - DNA, 25 bp, Homo sapien
tcctgcgcccgggtagattttgctg

SEQ ID NO: 5290767 - DNA, 25 bp, Homo sapien
ggagtagtgaacaccattttgtttg

SEQ ID NO: 5290768 - DNA, 25 bp, Homo sapien
gaaccccgccttggcgggctctgcg

SEQ ID NO: 5290769 - DNA, 25 bp, Homo sapien
tcttctcagtggagagaacgcactc

SEQ ID NO: 5290770 - DNA, 25 bp, Homo sapien
gagagaacgcactccgggttcgaga

SEQ ID NO: 5290771 - DNA, 25 bp, Homo sapien
cgctgggcaaaatcttctcagtgga

SEQ ID NO: 5290772 - DNA, 25 bp, Homo sapien
ccgcgtggcgctgggcaaaatcttc

SEQ ID NO: 5290773 - DNA, 25 bp, Homo sapien
ctccccgggtgcagatgcgaactgc

SEQ ID NO: 5290774 - DNA, 25 bp, Homo sapien
gtgcagatgcgaactgcggtggccc

SEQ ID NO: 5290775 - DNA, 25 bp, Homo sapien
gggtgcagatgcgaactgcggtggc

SEQ ID NO: 5290776 - DNA, 25 bp, Homo sapien
tggccccaagtggccgtccactttg

SEQ ID NO: 5290777 - DNA, 25 bp, Homo sapien
tcttggcgcgaaccaggcggcctcg

SEQ ID NO: 5290778 - DNA, 25 bp, Homo sapien
ccgcgggcgtcggagcgggtcttgg

SEQ ID NO: 5290779 - DNA, 25 bp, Homo sapien
ttgcatcccgcaatcccgcgggcgt

SEQ ID NO: 5290780 - DNA, 25 bp, Homo sapien
ggccctttgcatcccgcaatcccgc

SEQ ID NO: 5290781 - DNA, 25 bp, Homo sapien
aggcggccgcggcattgtttcagcc

SEQ ID NO: 5290782 - DNA, 25 bp, Homo sapien
ggcggccgcggcattgtttcagccc

SEQ ID NO: 5290783 - DNA, 25 bp, Homo sapien
gcggccgcggcattgtttcagcccc

SEQ ID NO: 5290784 - DNA, 25 bp, Homo sapien
tggactcccgcgctgggcgcgctga

SEQ ID NO: 5290785 - DNA, 25 bp, Homo sapien
tctggactcccgcgctgggcgcgct

SEQ ID NO: 5290786 - DNA, 25 bp, Homo sapien
tgggcgcgctgaggcggcccccgag

SEQ ID NO: 5290787 - DNA, 25 bp, Homo sapien
gactcccgcgctgggcgcgctgagg

SEQ ID NO: 5290788 - DNA, 25 bp, Homo sapien
gacggagacggaccgagccacgggc

SEQ ID NO: 5290789 - DNA, 25 bp, Homo sapien
gagacggagacggaccgagccacgg

SEQ ID NO: 5290790 - DNA, 25 bp, Homo sapien
tccggcgccgcggcgagacggagac

SEQ ID NO: 5290791 - DNA, 25 bp, Homo sapien
ccggcgccgcggcgagacggagacg

SEQ ID NO: 5290792 - DNA, 25 bp, Homo sapien
gtcctctttgtacgcccgcgaagcg

SEQ ID NO: 5290793 - DNA, 25 bp, Homo sapien
gtttcgcgcctagcacgcagtgggc

SEQ ID NO: 5290794 - DNA, 25 bp, Homo sapien
taagcgtttaatgcgtgctcgcggg

SEQ ID NO: 5290795 - DNA, 25 bp, Homo sapien
cagtgggccgctttcctagccgggc

SEQ ID NO: 5290796 - DNA, 25 bp, Homo sapien
taattcacaggaatcctgtagaaca

SEQ ID NO: 5290797 - DNA, 25 bp, Homo sapien
attcacaggaatcctgtagaacaag

SEQ ID NO: 5290798 - DNA, 25 bp, Homo sapien
cacaggaatcctgtagaacaagata

SEQ ID NO: 5290799 - DNA, 25 bp, Homo sapien
caggaatcctgtagaacaagatatc

SEQ ID NO: 5290800 - DNA, 25 bp, Homo sapien
cctttgttgatttcaaatccgccat

SEQ ID NO: 5290801 - DNA, 25 bp, Homo sapien
atctttgtgtcactccagtgtccat

SEQ ID NO: 5290802 - DNA, 25 bp, Homo sapien
tccatttctaagctgcccctttgtt

SEQ ID NO: 5290803 - DNA, 25 bp, Homo sapien
gcccctttgttgatttcaaatccgc

SEQ ID NO: 5290804 - DNA, 25 bp, Homo sapien
ttcagcctgtcgcatctcatgttca

SEQ ID NO: 5290805 - DNA, 25 bp, Homo sapien
cagcctgtcgcatctcatgttcatg

SEQ ID NO: 5290806 - DNA, 25 bp, Homo sapien
tctcatgttcatggccagtatcgtc

SEQ ID NO: 5290807 - DNA, 25 bp, Homo sapien
ggccagtatcgtcatgtggcccagg

SEQ ID NO: 5290808 - DNA, 25 bp, Homo sapien
gggtgttctgctcccattttgtagc

SEQ ID NO: 5290809 - DNA, 25 bp, Homo sapien
taggccaggttacagagggtgttct

SEQ ID NO: 5290810 - DNA, 25 bp, Homo sapien
caaaggaaggtagcagccaagtagg

SEQ ID NO: 5290811 - DNA, 25 bp, Homo sapien
ccatttgagaagatgctgccttgtc

SEQ ID NO: 5290812 - DNA, 25 bp, Homo sapien
caacccttggagcagctagtgttta

SEQ ID NO: 5290813 - DNA, 25 bp, Homo sapien
tgctagcgcctcatgttttacattt

SEQ ID NO: 5290814 - DNA, 25 bp, Homo sapien
gaaggtattccatgaataacatcaa

SEQ ID NO: 5290815 - DNA, 25 bp, Homo sapien
tcctgctagcgcctcatgttttaca

SEQ ID NO: 5290816 - DNA, 25 bp, Homo sapien
atgcaagctgctttctcaccgccat

SEQ ID NO: 5290817 - DNA, 25 bp, Homo sapien
ctcagagtccgttcctgtggctgac

SEQ ID NO: 5290818 - DNA, 25 bp, Homo sapien
cagagtccgttcctgtggctgacgc

SEQ ID NO: 5290819 - DNA, 25 bp, Homo sapien
tggctgacgctgtaaatgcaagctg

SEQ ID NO: 5290820 - DNA, 25 bp, Homo sapien
ggacgacttctaccatgggaccaag

SEQ ID NO: 5290821 - DNA, 25 bp, Homo sapien
gaccttcatgaatgccacgtgcgtg

SEQ ID NO: 5290822 - DNA, 25 bp, Homo sapien
gggatttccggcttaacgtcacaga

SEQ ID NO: 5290823 - DNA, 25 bp, Homo sapien
gctgctccagactagactcatgtga

SEQ ID NO: 5290824 - DNA, 25 bp, Homo sapien
gggagcaggaactcaggactcccag

SEQ ID NO: 5290825 - DNA, 25 bp, Homo sapien
agcaggaactcaggactcccaggga

SEQ ID NO: 5290826 - DNA, 25 bp, Homo sapien
actcaggactcccagggagggcctg

SEQ ID NO: 5290827 - DNA, 25 bp, Homo sapien
ctacggggagcaggaactcaggact

SEQ ID NO: 5290828 - DNA, 25 bp, Homo sapien
tgcctccgctggctttgggaaagcc

SEQ ID NO: 5290829 - DNA, 25 bp, Homo sapien
tggctgactggccagttgcccagag

SEQ ID NO: 5290830 - DNA, 25 bp, Homo sapien
gagcactttagcagatgtggtttca

SEQ ID NO: 5290831 - DNA, 25 bp, Homo sapien
agcccaatgcatagagccctggcca

SEQ ID NO: 5290832 - DNA, 25 bp, Homo sapien
gacttactttcctggtaggcagcct

SEQ ID NO: 5290833 - DNA, 25 bp, Homo sapien
tgtctgtgatgaccctcccaacctt

SEQ ID NO: 5290834 - DNA, 25 bp, Homo sapien
tctattgtagatcccacctgagagt

SEQ ID NO: 5290835 - DNA, 25 bp, Homo sapien
aaaagtcagcccctgcacatctctg

SEQ ID NO: 5290836 - DNA, 25 bp, Homo sapien
gctttggccaccgtttgaggcaaaa

SEQ ID NO: 5290837 - DNA, 25 bp, Homo sapien
ccaagacgacacatggtcctgtgct

SEQ ID NO: 5290838 - DNA, 25 bp, Homo sapien
aacagcccgacacgttgtgttctgg

SEQ ID NO: 5290839 - DNA, 25 bp, Homo sapien
taagactgtgtcaaccccaagacga

SEQ ID NO: 5290840 - DNA, 25 bp, Homo sapien
gtctctcctattgggtggcagctca

SEQ ID NO: 5290841 - DNA, 25 bp, Homo sapien
ggctgggcaaggcttcagttgctaa

SEQ ID NO: 5290842 - DNA, 25 bp, Homo sapien
ctacttctcacttggactctgttgt

SEQ ID NO: 5290843 - DNA, 25 bp, Homo sapien
ggagtttggcagagatctcttctac

SEQ ID NO: 5290844 - DNA, 25 bp, Homo sapien
acctgagcagctgatgaactcagca

SEQ ID NO: 5290845 - DNA, 25 bp, Homo sapien
ttgataacctgagcagctgatgaac

SEQ ID NO: 5290846 - DNA, 25 bp, Homo sapien
tagctcttgataacctgagcagctg

SEQ ID NO: 5290847 - DNA, 25 bp, Homo sapien
agcagctgatgaactcagcatgtgc

SEQ ID NO: 5290848 - DNA, 25 bp, Homo sapien
cctccgtagcgcgttacatccagga

SEQ ID NO: 5290849 - DNA, 25 bp, Homo sapien
ggcaccttccctccgtagcgcgtta

SEQ ID NO: 5290850 - DNA, 25 bp, Homo sapien
tccgtagcgcgttacatccaggaca

SEQ ID NO: 5290851 - DNA, 25 bp, Homo sapien
gtagcgcgttacatccaggacagtc

SEQ ID NO: 5290852 - DNA, 25 bp, Homo sapien
agagcaaggcgtttcgggggctgtg

SEQ ID NO: 5290853 - DNA, 25 bp, Homo sapien
gtgaccgacgcaggccctcgctgag

SEQ ID NO: 5290854 - DNA, 25 bp, Homo sapien
ttaggtgaccgacgcaggccctcgc

SEQ ID NO: 5290855 - DNA, 25 bp, Homo sapien
ctgttaggtgaccgacgcaggccct

SEQ ID NO: 5290856 - DNA, 25 bp, Homo sapien
ctgagctgacagagatgctgagaat

SEQ ID NO: 5290857 - DNA, 25 bp, Homo sapien
gagctgacagagatgctgagaatct

SEQ ID NO: 5290858 - DNA, 25 bp, Homo sapien
cttctgctgctccgaaaggattggg

SEQ ID NO: 5290859 - DNA, 25 bp, Homo sapien
ttctgctgctccgaaaggattgggg

SEQ ID NO: 5290860 - DNA, 25 bp, Homo sapien
ccccgctcggactgacagcggcggc

SEQ ID NO: 5290861 - DNA, 25 bp, Homo sapien
tcagttgccttggagacggcgggtg

SEQ ID NO: 5290862 - DNA, 25 bp, Homo sapien
cccgctcggactgacagcggcggcc

SEQ ID NO: 5290863 - DNA, 25 bp, Homo sapien
ttgccttggagacggcgggtgccct

SEQ ID NO: 5290864 - DNA, 25 bp, Homo sapien
tgggactctgatttggtccttgatt

SEQ ID NO: 5290865 - DNA, 25 bp, Homo sapien
ctgggactctgatttggtccttgat

SEQ ID NO: 5290866 - DNA, 25 bp, Homo sapien
ctgggtgtgcaggttgatgtggaga

SEQ ID NO: 5290867 - DNA, 25 bp, Homo sapien
caccctgagcctgtgagaaccagaa

SEQ ID NO: 5290868 - DNA, 25 bp, Homo sapien
aaccagaaagacttcagagatgaag

SEQ ID NO: 5290869 - DNA, 25 bp, Homo sapien
caggttgatgtggagactcatcaga

SEQ ID NO: 5290870 - DNA, 25 bp, Homo sapien
ggcatggctctttctacccctgact

SEQ ID NO: 5290871 - DNA, 25 bp, Homo sapien
ggagttatccaaagaaaatagtaca

SEQ ID NO: 5290872 - DNA, 25 bp, Homo sapien
aaagtttggtattgacgaagaatca

SEQ ID NO: 5290873 - DNA, 25 bp, Homo sapien
cgttcttcatggtgatctaaccaac

SEQ ID NO: 5290874 - DNA, 25 bp, Homo sapien
cagtagtcatatcaagttccagtgt

SEQ ID NO: 5290875 - DNA, 25 bp, Homo sapien
tcccattgccccaggtaacattagt

SEQ ID NO: 5290876 - DNA, 25 bp, Homo sapien
tgtccccagtagcactatttccaag

SEQ ID NO: 5290877 - DNA, 25 bp, Homo sapien
tgaactcacccctaggagatgcttt

SEQ ID NO: 5290878 - DNA, 25 bp, Homo sapien
gttctctcaggcagaaaacatggaa

SEQ ID NO: 5290879 - DNA, 25 bp, Homo sapien
ggcagaaaacatggaaagctacgtc

SEQ ID NO: 5290880 - DNA, 25 bp, Homo sapien
ctctcaggcagaaaacatggaaagc

SEQ ID NO: 5290881 - DNA, 25 bp, Homo sapien
cagaaaacatggaaagctacgtcag

SEQ ID NO: 5290882 - DNA, 25 bp, Homo sapien
gcagactaagctggatgggcctttg

SEQ ID NO: 5290883 - DNA, 25 bp, Homo sapien
ccagtaagggtattccgtgcagcca

SEQ ID NO: 5290884 - DNA, 25 bp, Homo sapien
tggtccttctcaggcagactaagct

SEQ ID NO: 5290885 - DNA, 25 bp, Homo sapien
ttgggccagtaagggtattccgtgc

SEQ ID NO: 5290886 - DNA, 25 bp, Homo sapien
cactggtgcctgtggagacaccggc

SEQ ID NO: 5290887 - DNA, 25 bp, Homo sapien
actggtgcctgtggagacaccggcc

SEQ ID NO: 5290888 - DNA, 25 bp, Homo sapien
ctggtgcctgtggagacaccggcca

SEQ ID NO: 5290889 - DNA, 25 bp, Homo sapien
catgttatggttgcatgtgtcttcc

SEQ ID NO: 5290890 - DNA, 25 bp, Homo sapien
tatacatacctggtaacaggaaact

SEQ ID NO: 5290891 - DNA, 25 bp, Homo sapien
gaaaggtctgaggaatatacatacc

SEQ ID NO: 5290892 - DNA, 25 bp, Homo sapien
aattacagggaagaatcaactgctg

SEQ ID NO: 5290893 - DNA, 25 bp, Homo sapien
gatgggatgtgtcaacaagactcaa

SEQ ID NO: 5290894 - DNA, 25 bp, Homo sapien
gaatgatgggatgtgtcaacaagac

SEQ ID NO: 5290895 - DNA, 25 bp, Homo sapien
tcaagagccagctgtaaggggctcc

SEQ ID NO: 5290896 - DNA, 25 bp, Homo sapien
gatgtgtcaacaagactcaagagcc

SEQ ID NO: 5290897 - DNA, 25 bp, Homo sapien
gaaagtatctagtgaagaaacggct

SEQ ID NO: 5290898 - DNA, 25 bp, Homo sapien
aagaaacggctctcactttccaggg

SEQ ID NO: 5290899 - DNA, 25 bp, Homo sapien
gaagaaacggctctcactttccagg

SEQ ID NO: 5290900 - DNA, 25 bp, Homo sapien
ggagggaaagtatctagtgaagaaa

SEQ ID NO: 5290901 - DNA, 25 bp, Homo sapien
gcccttctcatccagtgaggagtca

SEQ ID NO: 5290902 - DNA, 25 bp, Homo sapien
ttctcatccagtgaggagtcagcca

SEQ ID NO: 5290903 - DNA, 25 bp, Homo sapien
ccttctcatccagtgaggagtcagc

SEQ ID NO: 5290904 - DNA, 25 bp, Homo sapien
tctcatccagtgaggagtcagccat

SEQ ID NO: 5290905 - DNA, 25 bp, Homo sapien
aaccagggaggtataggttgcagtg

SEQ ID NO: 5290906 - DNA, 25 bp, Homo sapien
cttgaaccagggaggtataggttgc

SEQ ID NO: 5290907 - DNA, 25 bp, Homo sapien
ttgcttgaaccagggaggtataggt

SEQ ID NO: 5290908 - DNA, 25 bp, Homo sapien
ggattgcttgaaccagggaggtata

SEQ ID NO: 5290909 - DNA, 25 bp, Homo sapien
aatcgtccttcctgcaccagtgtgg

SEQ ID NO: 5290910 - DNA, 25 bp, Homo sapien
gaatttcgggcactatggtagggca

SEQ ID NO: 5290911 - DNA, 25 bp, Homo sapien
aagtcatcctgctctagagctgtga

SEQ ID NO: 5290912 - DNA, 25 bp, Homo sapien
gatgctgtaatccacaagagtggca

SEQ ID NO: 5290913 - DNA, 25 bp, Homo sapien
tgactgtctccacgtggggttagtc

SEQ ID NO: 5290914 - DNA, 25 bp, Homo sapien
ctatctgcaggccttctggaagctc

SEQ ID NO: 5290915 - DNA, 25 bp, Homo sapien
tgggggctgactgtctccacgtggg

SEQ ID NO: 5290916 - DNA, 25 bp, Homo sapien
gctctccagtgcatgtccccactgg

SEQ ID NO: 5290917 - DNA, 25 bp, Homo sapien
catggcttgttatgtgtccccagag

SEQ ID NO: 5290918 - DNA, 25 bp, Homo sapien
gtaggctaaacaattcacaggatgc

SEQ ID NO: 5290919 - DNA, 25 bp, Homo sapien
cagacatttcagagaagggtgacac

SEQ ID NO: 5290920 - DNA, 25 bp, Homo sapien
tatcctgaggctagccacagatggg

SEQ ID NO: 5290921 - DNA, 25 bp, Homo sapien
tcccaaggcttcgtgctgcatctgt

SEQ ID NO: 5290922 - DNA, 25 bp, Homo sapien
tgtagccagggagtgcagctagcat

SEQ ID NO: 5290923 - DNA, 25 bp, Homo sapien
tccagcagcaccatgttatatgcat

SEQ ID NO: 5290924 - DNA, 25 bp, Homo sapien
ctgcatctgtttgcgtgtagccagg

SEQ ID NO: 5290925 - DNA, 25 bp, Homo sapien
tctcctctccttgcttctccatgta

SEQ ID NO: 5290926 - DNA, 25 bp, Homo sapien
tctccttgcttctccatgtagccag

SEQ ID NO: 5290927 - DNA, 25 bp, Homo sapien
tcctctccttgcttctccatgtagc

SEQ ID NO: 5290928 - DNA, 25 bp, Homo sapien
ctctccttgcttctccatgtagcca

SEQ ID NO: 5290929 - DNA, 25 bp, Homo sapien
agcgtgatggtgaacctttggctcc

SEQ ID NO: 5290930 - DNA, 25 bp, Homo sapien
cctatcagtaaaggttgctcagccc

SEQ ID NO: 5290931 - DNA, 25 bp, Homo sapien
aaagcagcgtgatggtgaacctttg

SEQ ID NO: 5290932 - DNA, 25 bp, Homo sapien
ctatcagtaaaggttgctcagcccc

SEQ ID NO: 5290933 - DNA, 25 bp, Homo sapien
ggatatcttcgcctacttgcttgtg

SEQ ID NO: 5290934 - DNA, 25 bp, Homo sapien
gcctgtagccaagtcacactgtctg

SEQ ID NO: 5290935 - DNA, 25 bp, Homo sapien
cttgcttgtgtctcacaggcagcga

SEQ ID NO: 5290936 - DNA, 25 bp, Homo sapien
gcagcgaatggcaaagcctgtagcc

SEQ ID NO: 5290937 - DNA, 25 bp, Homo sapien
aacccacagccgtccagatccctgt

SEQ ID NO: 5290938 - DNA, 25 bp, Homo sapien
ccaggccaaccctgcaaatactcca

SEQ ID NO: 5290939 - DNA, 25 bp, Homo sapien
tgcaaatactccacttgccccgtct

SEQ ID NO: 5290940 - DNA, 25 bp, Homo sapien
tgggagggggcgcatgctgggctcc

SEQ ID NO: 5290941 - DNA, 25 bp, Homo sapien
ttatcacggagttcggatgacgccg

SEQ ID NO: 5290942 - DNA, 25 bp, Homo sapien
caaattggtctaagaggagagccac

SEQ ID NO: 5290943 - DNA, 25 bp, Homo sapien
ggtgagagagctccacaaattggtc

SEQ ID NO: 5290944 - DNA, 25 bp, Homo sapien
aggattacaaccctctgctggcgcg

SEQ ID NO: 5290945 - DNA, 25 bp, Homo sapien
ccgggtgctttgtgtcagtgctgca

SEQ ID NO: 5290946 - DNA, 25 bp, Homo sapien
gtgtcgcccaacacttcccagggtg

SEQ ID NO: 5290947 - DNA, 25 bp, Homo sapien
gccagcagctgtgtatttgacaaag

SEQ ID NO: 5290948 - DNA, 25 bp, Homo sapien
tgctggcccagttggtgggacccct

SEQ ID NO: 5290949 - DNA, 25 bp, Homo sapien
tcccatcaagcactgtcccattgaa

SEQ ID NO: 5290950 - DNA, 25 bp, Homo sapien
agcactgtcccattgaactgcttcc

SEQ ID NO: 5290951 - DNA, 25 bp, Homo sapien
tcatcacctccaaagtcccatcaag

SEQ ID NO: 5290952 - DNA, 25 bp, Homo sapien
aaactatatcaaacctcatcacctc

SEQ ID NO: 5290953 - DNA, 25 bp, Homo sapien
tggctttgcctacaggacattacag

SEQ ID NO: 5290954 - DNA, 25 bp, Homo sapien
gctttcttggactgggcacttgccc

SEQ ID NO: 5290955 - DNA, 25 bp, Homo sapien
ttgccctgatatcccagcagtaggc

SEQ ID NO: 5290956 - DNA, 25 bp, Homo sapien
gaggctgtccactggacctggcttt

SEQ ID NO: 5290957 - DNA, 25 bp, Homo sapien
gaaatgcctctcacttcaaaatgcc

SEQ ID NO: 5290958 - DNA, 25 bp, Homo sapien
tatagcaccgcattgggaaacagca

SEQ ID NO: 5290959 - DNA, 25 bp, Homo sapien
tctaaaaagatagaactcccagcag

SEQ ID NO: 5290960 - DNA, 25 bp, Homo sapien
gagtctttttaacttggtgcctgag

SEQ ID NO: 5290961 - DNA, 25 bp, Homo sapien
tacgatgcctcccaccaaagagaaa

SEQ ID NO: 5290962 - DNA, 25 bp, Homo sapien
ccacttcctattagtagagaccagg

SEQ ID NO: 5290963 - DNA, 25 bp, Homo sapien
catattttaagttacgatgcctccc

SEQ ID NO: 5290964 - DNA, 25 bp, Homo sapien
gccaccacttcctattagtagagac

SEQ ID NO: 5290965 - DNA, 25 bp, Homo sapien
gaacccaagatttccgagagtaagc

SEQ ID NO: 5290966 - DNA, 25 bp, Homo sapien
cgagagtaagcggacctgtgcaaag

SEQ ID NO: 5290967 - DNA, 25 bp, Homo sapien
aaagacaggcgaaggtgtgagctgg

SEQ ID NO: 5290968 - DNA, 25 bp, Homo sapien
cggacctgtgcaaagacccacaagg

SEQ ID NO: 5290969 - DNA, 25 bp, Homo sapien
cgcgcgccgcccaccatcccaggtc

SEQ ID NO: 5290970 - DNA, 25 bp, Homo sapien
tgcagggacctacccggccgcgcgc

SEQ ID NO: 5290971 - DNA, 25 bp, Homo sapien
gcagggacctacccggccgcgcgcc

SEQ ID NO: 5290972 - DNA, 25 bp, Homo sapien
cgataatgcgccgcgccgaagcctg

SEQ ID NO: 5290973 - DNA, 25 bp, Homo sapien
gggttcggcacagcccgataatgcg

SEQ ID NO: 5290974 - DNA, 25 bp, Homo sapien
gggggttcggcacagcccgataatg

SEQ ID NO: 5290975 - DNA, 25 bp, Homo sapien
ataatgcgccgcgccgaagcctgca

SEQ ID NO: 5290976 - DNA, 25 bp, Homo sapien
gccagctgcagccacggccaatagg

SEQ ID NO: 5290977 - DNA, 25 bp, Homo sapien
tgcggcctcgctagcgggagaggga

SEQ ID NO: 5290978 - DNA, 25 bp, Homo sapien
ggccaataggcgagagacttcttgt

SEQ ID NO: 5290979 - DNA, 25 bp, Homo sapien
caatggtagcgagctttactgggcg

SEQ ID NO: 5290980 - DNA, 25 bp, Homo sapien
tgttcatcgtttcgtggagggccgt

SEQ ID NO: 5290981 - DNA, 25 bp, Homo sapien
tcaggaagcctagaaggagccactt

SEQ ID NO: 5290982 - DNA, 25 bp, Homo sapien
tgccaggaactgctaaaccagctag

SEQ ID NO: 5290983 - DNA, 25 bp, Homo sapien
tatgaagcaggtgggacaacaggtt

SEQ ID NO: 5290984 - DNA, 25 bp, Homo sapien
ctaaagaaaacaccgtagctgggtg

SEQ ID NO: 5290985 - DNA, 25 bp, Homo sapien
tctccttgaattcagcccacttcga

SEQ ID NO: 5290986 - DNA, 25 bp, Homo sapien
gaagcggccgtgttgcaatctacaa

SEQ ID NO: 5290987 - DNA, 25 bp, Homo sapien
gaagaatatgtatgcccgagaccgt

SEQ ID NO: 5290988 - DNA, 25 bp, Homo sapien
gaagatatactgttggcccaggacc

SEQ ID NO: 5290989 - DNA, 25 bp, Homo sapien
gggagcccctgcaacatgtgttcgg

SEQ ID NO: 5290990 - DNA, 25 bp, Homo sapien
gcttcagtgcatgctaggagccagg

SEQ ID NO: 5290991 - DNA, 25 bp, Homo sapien
gaaaacaccttgagtcgggcacgaa

SEQ ID NO: 5290992 - DNA, 25 bp, Homo sapien
gcaagaagttgggaaccaaatgaat

SEQ ID NO: 5290993 - DNA, 25 bp, Homo sapien
ttcaggaagtgtctcctaacacatc

SEQ ID NO: 5290994 - DNA, 25 bp, Homo sapien
cacatctacttatgcccttagcatc

SEQ ID NO: 5290995 - DNA, 25 bp, Homo sapien
aaatgaatgcttgtctcggccgggc

SEQ ID NO: 5290996 - DNA, 25 bp, Homo sapien
tttttgactcttgaccaccgtctta

SEQ ID NO: 5290997 - DNA, 25 bp, Homo sapien
tgaccaccgtcttaacctataattg

SEQ ID NO: 5290998 - DNA, 25 bp, Homo sapien
aattggtacccagcatatctcctca

SEQ ID NO: 5290999 - DNA, 25 bp, Homo sapien
tcttaacctataattggtacccagc

SEQ ID NO: 5291000 - DNA, 25 bp, Homo sapien
gactggaactatagtgggcaaggct

SEQ ID NO: 5291001 - DNA, 25 bp, Homo sapien
gcctgtaatggtcaagtaagcttca

SEQ ID NO: 5291002 - DNA, 25 bp, Homo sapien
gagggtatgaaggatcaaatcagca

SEQ ID NO: 5291003 - DNA, 25 bp, Homo sapien
gaactactagccacacaaacaaagg

SEQ ID NO: 5291004 - DNA, 25 bp, Homo sapien
caaggtttctagcagttgggttttg

SEQ ID NO: 5291005 - DNA, 25 bp, Homo sapien
gaaagctgtgttagccaagctcagt

SEQ ID NO: 5291006 - DNA, 25 bp, Homo sapien
aatctccagtggacaattagagctg

SEQ ID NO: 5291007 - DNA, 25 bp, Homo sapien
tacacaaatgcaaatctaagagagg

SEQ ID NO: 5291008 - DNA, 25 bp, Homo sapien
gaaaactggcatcttttgaccacgg

SEQ ID NO: 5291009 - DNA, 25 bp, Homo sapien
tctgatgacaagcttgaaaactggc

SEQ ID NO: 5291010 - DNA, 25 bp, Homo sapien
gtgaaggctgcctcatagtgcccca

SEQ ID NO: 5291011 - DNA, 25 bp, Homo sapien
aacataccaggtctgtacccactgc

SEQ ID NO: 5291012 - DNA, 25 bp, Homo sapien
caggagttaagcttgggtgcgttcc

SEQ ID NO: 5291013 - DNA, 25 bp, Homo sapien
ttggaccaccagactagagcctcaa

SEQ ID NO: 5291014 - DNA, 25 bp, Homo sapien
tgggcaacactagacaaaacaggag

SEQ ID NO: 5291015 - DNA, 25 bp, Homo sapien
ggtgcgttccgattctagcctggag

SEQ ID NO: 5291016 - DNA, 25 bp, Homo sapien
tctccccgggtctgataatgccttt

SEQ ID NO: 5291017 - DNA, 25 bp, Homo sapien
tccaggccgctgattccatgtgaca

SEQ ID NO: 5291018 - DNA, 25 bp, Homo sapien
gaaatatgctagttcccctccaggc

SEQ ID NO: 5291019 - DNA, 25 bp, Homo sapien
caagcccaggatatagccccaagat

SEQ ID NO: 5291020 - DNA, 25 bp, Homo sapien
gctttgtatgttgtgatgggtagaa

SEQ ID NO: 5291021 - DNA, 25 bp, Homo sapien
aagtgaagtgtgaaggcccctcata

SEQ ID NO: 5291022 - DNA, 25 bp, Homo sapien
tgggtagaagggatgaagtgaagtg

SEQ ID NO: 5291023 - DNA, 25 bp, Homo sapien
gaaaaatccaggtgtagttgctttg

SEQ ID NO: 5291024 - DNA, 25 bp, Homo sapien
gaagtaacgcccatccatgttccct

SEQ ID NO: 5291025 - DNA, 25 bp, Homo sapien
ttctctatagtttgggtcagcagcc

SEQ ID NO: 5291026 - DNA, 25 bp, Homo sapien
ccctggcctcagaacatggaaacag

SEQ ID NO: 5291027 - DNA, 25 bp, Homo sapien
ttgtgacccacacttaaggctggct

SEQ ID NO: 5291028 - DNA, 25 bp, Homo sapien
gacacgcccagcatgttggcgaaga

SEQ ID NO: 5291029 - DNA, 25 bp, Homo sapien
cggccacgtagtgatagagaacgac

SEQ ID NO: 5291030 - DNA, 25 bp, Homo sapien
gcttcttgggattgttgacggccac

SEQ ID NO: 5291031 - DNA, 25 bp, Homo sapien
agatggcgagctgcacgtccgtgat

SEQ ID NO: 5291032 - DNA, 25 bp, Homo sapien
tggcgcactcctcgccctcgcaaga

SEQ ID NO: 5291033 - DNA, 25 bp, Homo sapien
ctgagctgcgggctggcgcactcct

SEQ ID NO: 5291034 - DNA, 25 bp, Homo sapien
gggacggcccctgcgtgcctctgac

SEQ ID NO: 5291035 - DNA, 25 bp, Homo sapien
tcgccctcgcaagaacccgtcctcg

SEQ ID NO: 5291036 - DNA, 25 bp, Homo sapien
accggaacttcgtagcgccagctca

SEQ ID NO: 5291037 - DNA, 25 bp, Homo sapien
tcagagacctggaccggaacttcgt

SEQ ID NO: 5291038 - DNA, 25 bp, Homo sapien
accagcgaacaagcccgaagtcaga

SEQ ID NO: 5291039 - DNA, 25 bp, Homo sapien
ggcgcggtcgggacggcctctctag

SEQ ID NO: 5291040 - DNA, 25 bp, Homo sapien
cttggagaggttgtaaaatagatca

SEQ ID NO: 5291041 - DNA, 25 bp, Homo sapien
ttggagaggttgtaaaatagatcat

SEQ ID NO: 5291042 - DNA, 25 bp, Homo sapien
gagttattgaagaacagagccatgg

SEQ ID NO: 5291043 - DNA, 25 bp, Homo sapien
agagcctgaccaaggagctgcaagg

SEQ ID NO: 5291044 - DNA, 25 bp, Homo sapien
catggttcatatttggcctagaggc

SEQ ID NO: 5291045 - DNA, 25 bp, Homo sapien
cagcctatatgatgggaagagttca

SEQ ID NO: 5291046 - DNA, 25 bp, Homo sapien
tccagtgaggtgaaaagacccagag

SEQ ID NO: 5291047 - DNA, 25 bp, Homo sapien
cagagtcctgctcaatgatggaggc

SEQ ID NO: 5291048 - DNA, 25 bp, Homo sapien
ctgggaatgcatagtgaacaaagcc

SEQ ID NO: 5291049 - DNA, 25 bp, Homo sapien
tgctctgagtttgccccggtctgaa

SEQ ID NO: 5291050 - DNA, 25 bp, Homo sapien
gacccagagcttgaacacgcgtaga

SEQ ID NO: 5291051 - DNA, 25 bp, Homo sapien
gctacttgctgagcgcggtgctgac

SEQ ID NO: 5291052 - DNA, 25 bp, Homo sapien
catgcagacttttggcctggcgcga

SEQ ID NO: 5291053 - DNA, 25 bp, Homo sapien
tctacgtcggctgaagagacagcgg

SEQ ID NO: 5291054 - DNA, 25 bp, Homo sapien
agggcaccccagcagactgtaacag

SEQ ID NO: 5291055 - DNA, 25 bp, Homo sapien
ccacagctgccagttagagatcctg

SEQ ID NO: 5291056 - DNA, 25 bp, Homo sapien
gaaggttgatctgacccagttcaag

SEQ ID NO: 5291057 - DNA, 25 bp, Homo sapien
tggatccacattgaggtaagccctg

SEQ ID NO: 5291058 - DNA, 25 bp, Homo sapien
agaatgagggcacacaactgttctc

SEQ ID NO: 5291059 - DNA, 25 bp, Homo sapien
ccaactcaggggtgtctggcaggtt

SEQ ID NO: 5291060 - DNA, 25 bp, Homo sapien
ttcttccaactcaggggtgtctggc

SEQ ID NO: 5291061 - DNA, 25 bp, Homo sapien
gaatgagggcacacaactgttctct

SEQ ID NO: 5291062 - DNA, 25 bp, Homo sapien
tcattcaagattgcaagaccctgtc

SEQ ID NO: 5291063 - DNA, 25 bp, Homo sapien
gtcattcaagattgcaagaccctgt

SEQ ID NO: 5291064 - DNA, 25 bp, Homo sapien
cattcaagattgcaagaccctgtct

SEQ ID NO: 5291065 - DNA, 25 bp, Homo sapien
cgttcccgtgggacagtgagatgct

SEQ ID NO: 5291066 - DNA, 25 bp, Homo sapien
ccagctgagtggagccgtcttgcag

SEQ ID NO: 5291067 - DNA, 25 bp, Homo sapien
gaatgacgagttagaagtgaccacc

SEQ ID NO: 5291068 - DNA, 25 bp, Homo sapien
cgctaggctgctgttggtgaatgac

SEQ ID NO: 5291069 - DNA, 25 bp, Homo sapien
ccatggagactaccattgcggctgc

SEQ ID NO: 5291070 - DNA, 25 bp, Homo sapien
aggaagcactgagattcgggtgcca

SEQ ID NO: 5291071 - DNA, 25 bp, Homo sapien
ctttgatggcatcgtgtgagagcag

SEQ ID NO: 5291072 - DNA, 25 bp, Homo sapien
caaacacctggctgacctagctact

SEQ ID NO: 5291073 - DNA, 25 bp, Homo sapien
tgtgacccaggatacagagtgttgc

SEQ ID NO: 5291074 - DNA, 25 bp, Homo sapien
ttggaattaagggcgtgcctcagcc

SEQ ID NO: 5291075 - DNA, 25 bp, Homo sapien
tcctcagggaggtccgatctggaac

SEQ ID NO: 5291076 - DNA, 25 bp, Homo sapien
tgcctcagccacaaatgtgacccag

SEQ ID NO: 5291077 - DNA, 25 bp, Homo sapien
tagggtacagcacttaacgcaatct

SEQ ID NO: 5291078 - DNA, 25 bp, Homo sapien
cagggatagactgagctttcctcac

SEQ ID NO: 5291079 - DNA, 25 bp, Homo sapien
ggaaccaattctgcttggctacaga

SEQ ID NO: 5291080 - DNA, 25 bp, Homo sapien
tgtgtacaaggctctcaaaaagttc

SEQ ID NO: 5291081 - DNA, 25 bp, Homo sapien
cattcagttctttattggtaatctg

SEQ ID NO: 5291082 - DNA, 25 bp, Homo sapien
ccacttcagggcttatgttctggca

SEQ ID NO: 5291083 - DNA, 25 bp, Homo sapien
tgttctggcactgagacttcgtggg

SEQ ID NO: 5291084 - DNA, 25 bp, Homo sapien
aaagacctgatacctactgggacca

SEQ ID NO: 5291085 - DNA, 25 bp, Homo sapien
tgaacaatgtgcacctcaaagtcat

SEQ ID NO: 5291086 - DNA, 25 bp, Homo sapien
cattctccacttgaacaatgtgcac

SEQ ID NO: 5291087 - DNA, 25 bp, Homo sapien
cattttgggtgttcttagactccag

SEQ ID NO: 5291088 - DNA, 25 bp, Homo sapien
gtcattttgggtgttcttagactcc

SEQ ID NO: 5291089 - DNA, 25 bp, Homo sapien
tctgggcccgggggcatctccttca

SEQ ID NO: 5291090 - DNA, 25 bp, Homo sapien
tcccctctgggcccgggggcatctc

SEQ ID NO: 5291091 - DNA, 25 bp, Homo sapien
ccctctgggcccgggggcatctcct

SEQ ID NO: 5291092 - DNA, 25 bp, Homo sapien
tggcccccagcttcccctctgggcc

SEQ ID NO: 5291093 - DNA, 25 bp, Homo sapien
tggaacatctccatcagcctctgcc

SEQ ID NO: 5291094 - DNA, 25 bp, Homo sapien
ggatccaaagactcccttctggcct

SEQ ID NO: 5291095 - DNA, 25 bp, Homo sapien
ggctcctggacaggatccaaagact

SEQ ID NO: 5291096 - DNA, 25 bp, Homo sapien
cccaggctcctggacaggatccaaa

SEQ ID NO: 5291097 - DNA, 25 bp, Homo sapien
ttcaggtcctgggtctcgagcactt

SEQ ID NO: 5291098 - DNA, 25 bp, Homo sapien
ttttagctaatagggactgccttcc

SEQ ID NO: 5291099 - DNA, 25 bp, Homo sapien
tcgagcactttgtccactatcaaga

SEQ ID NO: 5291100 - DNA, 25 bp, Homo sapien
gctactcccgggaagttgatgagct

SEQ ID NO: 5291101 - DNA, 25 bp, Homo sapien
cagggacagagatgttcccaggagt

SEQ ID NO: 5291102 - DNA, 25 bp, Homo sapien
aagtgctgggtctcctttatgcggg

SEQ ID NO: 5291103 - DNA, 25 bp, Homo sapien
gggatctccatccagcagagcttac

SEQ ID NO: 5291104 - DNA, 25 bp, Homo sapien
aaagagttatgatgagaaagaccaa

SEQ ID NO: 5291105 - DNA, 25 bp, Homo sapien
ttatgcggggatctccatccagcag

SEQ ID NO: 5291106 - DNA, 25 bp, Homo sapien
catggagggcaaagaggtagaggag

SEQ ID NO: 5291107 - DNA, 25 bp, Homo sapien
gggccagagcagctgtcaacatgga

SEQ ID NO: 5291108 - DNA, 25 bp, Homo sapien
cactctggtcatagtcatggagggc

SEQ ID NO: 5291109 - DNA, 25 bp, Homo sapien
cgggttggtggtaggagagttggca

SEQ ID NO: 5291110 - DNA, 25 bp, Homo sapien
gaagctggattagaagaggtgccgg

SEQ ID NO: 5291111 - DNA, 25 bp, Homo sapien
cgaggtcagtcccagatctggctgc

SEQ ID NO: 5291112 - DNA, 25 bp, Homo sapien
gcaggagtcaatggggcagccgagg

SEQ ID NO: 5291113 - DNA, 25 bp, Homo sapien
ggcagccgaggtcagtcccagatct

SEQ ID NO: 5291114 - DNA, 25 bp, Homo sapien
tccctttaggtagctctgcagaagt

SEQ ID NO: 5291115 - DNA, 25 bp, Homo sapien
gtccctttaggtagctctgcagaag

SEQ ID NO: 5291116 - DNA, 25 bp, Homo sapien
tctccctgaaagcacccccggccca

SEQ ID NO: 5291117 - DNA, 25 bp, Homo sapien
tgtcagaaaagtggagaatcagccc

SEQ ID NO: 5291118 - DNA, 25 bp, Homo sapien
ccgggagaggtgagtctgcagccct

SEQ ID NO: 5291119 - DNA, 25 bp, Homo sapien
cctgggcctggtcttctccctgaaa

SEQ ID NO: 5291120 - DNA, 25 bp, Homo sapien
gagctgatgctgcacttcagagtct

SEQ ID NO: 5291121 - DNA, 25 bp, Homo sapien
caggagctgatgctgcacttcagag

SEQ ID NO: 5291122 - DNA, 25 bp, Homo sapien
gggcaggagctgatgctgcacttca

SEQ ID NO: 5291123 - DNA, 25 bp, Homo sapien
ctgatgctgcacttcagagtctggc

SEQ ID NO: 5291124 - DNA, 25 bp, Homo sapien
tgtgactccatcctttggggcagcc

SEQ ID NO: 5291125 - DNA, 25 bp, Homo sapien
cttgtgactccatcctttggggcag

SEQ ID NO: 5291126 - DNA, 25 bp, Homo sapien
tgactccatcctttggggcagcctg

SEQ ID NO: 5291127 - DNA, 25 bp, Homo sapien
actccatcctttggggcagcctgac

SEQ ID NO: 5291128 - DNA, 25 bp, Homo sapien
gcagcagcaggattaacactgtcat

SEQ ID NO: 5291129 - DNA, 25 bp, Homo sapien
agcagcagcaggattaacactgtca

SEQ ID NO: 5291130 - DNA, 25 bp, Homo sapien
gaaagaggcgtctgccaccgtgtca

SEQ ID NO: 5291131 - DNA, 25 bp, Homo sapien
cacagatgggctgggttagacacaa

SEQ ID NO: 5291132 - DNA, 25 bp, Homo sapien
ggtcgggggaaagaggcgtctgcca

SEQ ID NO: 5291133 - DNA, 25 bp, Homo sapien
tcacagatgggctgggttagacaca

SEQ ID NO: 5291134 - DNA, 25 bp, Homo sapien
taagactgacatggcttaggcccat

SEQ ID NO: 5291135 - DNA, 25 bp, Homo sapien
gagatcaggaacatccccatctggc

SEQ ID NO: 5291136 - DNA, 25 bp, Homo sapien
tagaatggaccaatcaaacagagcc

SEQ ID NO: 5291137 - DNA, 25 bp, Homo sapien
taaatcagggtcagaccaacagtgg

SEQ ID NO: 5291138 - DNA, 25 bp, Homo sapien
ttgttttgtttgagagagggtctcg

SEQ ID NO: 5291139 - DNA, 25 bp, Homo sapien
cccgagttccagcaattcccctgcc

SEQ ID NO: 5291140 - DNA, 25 bp, Homo sapien
tgttttgtttgagagagggtctcgc

SEQ ID NO: 5291141 - DNA, 25 bp, Homo sapien
gcctcccgagttccagcaattcccc

SEQ ID NO: 5291142 - DNA, 25 bp, Homo sapien
atttcaattaggaacaaagagagcc

SEQ ID NO: 5291143 - DNA, 25 bp, Homo sapien
ttcaattaggaacaaagagagccag

SEQ ID NO: 5291144 - DNA, 25 bp, Homo sapien
taggaacaaagagagccaggtgttg

SEQ ID NO: 5291145 - DNA, 25 bp, Homo sapien
caattaggaacaaagagagccaggt

SEQ ID NO: 5291146 - DNA, 25 bp, Homo sapien
ctgtaatcccagtgtgtccggaatt

SEQ ID NO: 5291147 - DNA, 25 bp, Homo sapien
tcgcggttgagtgttacagttccta

SEQ ID NO: 5291148 - DNA, 25 bp, Homo sapien
atgcagctgcggaccttcgcagtga

SEQ ID NO: 5291149 - DNA, 25 bp, Homo sapien
aggaatgcagctgcggaccttcgca

SEQ ID NO: 5291150 - DNA, 25 bp, Homo sapien
tgcaagcggacgacagcctcgggcc

SEQ ID NO: 5291151 - DNA, 25 bp, Homo sapien
tcggccacctgcaagcggacgacag

SEQ ID NO: 5291152 - DNA, 25 bp, Homo sapien
cacctgcaagcggacgacagcctcg

SEQ ID NO: 5291153 - DNA, 25 bp, Homo sapien
ctgcaagcggacgacagcctcgggc

SEQ ID NO: 5291154 - DNA, 25 bp, Homo sapien
ctccacgtcgccctcccggctggag

SEQ ID NO: 5291155 - DNA, 25 bp, Homo sapien
cgctccacgtggccgctccacgtcg

SEQ ID NO: 5291156 - DNA, 25 bp, Homo sapien
gccctggccgggcagagtccggagc

SEQ ID NO: 5291157 - DNA, 25 bp, Homo sapien
agctccgtgggcgctcctggctgct

SEQ ID NO: 5291158 - DNA, 25 bp, Homo sapien
ttcaccgtcagagttcctcagggcc

SEQ ID NO: 5291159 - DNA, 25 bp, Homo sapien
tccattttcttcaccgtcagagttc

SEQ ID NO: 5291160 - DNA, 25 bp, Homo sapien
ttcctcagggccctctcctcacttt

SEQ ID NO: 5291161 - DNA, 25 bp, Homo sapien
ttttcttcaccgtcagagttcctca

SEQ ID NO: 5291162 - DNA, 25 bp, Homo sapien
gattccgatctgcagtcaaggttga

SEQ ID NO: 5291163 - DNA, 25 bp, Homo sapien
tctgctagaacaccctcgcgtgaag

SEQ ID NO: 5291164 - DNA, 25 bp, Homo sapien
ttgtgtggaccatgttaagccctga

SEQ ID NO: 5291165 - DNA, 25 bp, Homo sapien
gaccagtaccaatttgcagcccagg

SEQ ID NO: 5291166 - DNA, 25 bp, Homo sapien
tggcagtagccaggatacatacgtc

SEQ ID NO: 5291167 - DNA, 25 bp, Homo sapien
caagctctgagggatggctaccagt

SEQ ID NO: 5291168 - DNA, 25 bp, Homo sapien
tccaaacaccagatggaggccagct

SEQ ID NO: 5291169 - DNA, 25 bp, Homo sapien
tatataattgcacggccaccaggtc

SEQ ID NO: 5291170 - DNA, 25 bp, Homo sapien
gctaagatgtacctgtgtgtgccac

SEQ ID NO: 5291171 - DNA, 25 bp, Homo sapien
cacagggctgtcgtgtttaacaacc

SEQ ID NO: 5291172 - DNA, 25 bp, Homo sapien
ggagaagtcaatccggacactgata

SEQ ID NO: 5291173 - DNA, 25 bp, Homo sapien
caattccacaggatactggtgctga

SEQ ID NO: 5291174 - DNA, 25 bp, Homo sapien
tacaatccgccagtttgatgagcgc

SEQ ID NO: 5291175 - DNA, 25 bp, Homo sapien
gatagatgccatccggatccctgtg

SEQ ID NO: 5291176 - DNA, 25 bp, Homo sapien
gatcagatccaggtgtcaagccaaa

SEQ ID NO: 5291177 - DNA, 25 bp, Homo sapien
tatcctatggtaagacctgcaggcc

SEQ ID NO: 5291178 - DNA, 25 bp, Homo sapien
cctaacagcaagtaccaggccagtc

SEQ ID NO: 5291179 - DNA, 25 bp, Homo sapien
ccttttcactagaagggcaggcagt

SEQ ID NO: 5291180 - DNA, 25 bp, Homo sapien
tattgcatctttaggccagctggct

SEQ ID NO: 5291181 - DNA, 25 bp, Homo sapien
ccacagatgacgaaggcaaggttcc

SEQ ID NO: 5291182 - DNA, 25 bp, Homo sapien
cgaatggagtgagcaaagggagtcc

SEQ ID NO: 5291183 - DNA, 25 bp, Homo sapien
gatggcagtgtccaggctcctgatt

SEQ ID NO: 5291184 - DNA, 25 bp, Homo sapien
aggcctccactctgctctagagatg

SEQ ID NO: 5291185 - DNA, 25 bp, Homo sapien
gtggacccgaatggagtgagcaaag

SEQ ID NO: 5291186 - DNA, 25 bp, Homo sapien
tcacaataataagcccgacacacag

SEQ ID NO: 5291187 - DNA, 25 bp, Homo sapien
tggtcacaataataagcccgacaca

SEQ ID NO: 5291188 - DNA, 25 bp, Homo sapien
agcaggatggtcacaataataagcc

SEQ ID NO: 5291189 - DNA, 25 bp, Homo sapien
aggatggtcacaataataagcccga

SEQ ID NO: 5291190 - DNA, 25 bp, Homo sapien
catgggcctccctcacgtagtagag

SEQ ID NO: 5291191 - DNA, 25 bp, Homo sapien
agggcaacagatgcagctggcaacg

SEQ ID NO: 5291192 - DNA, 25 bp, Homo sapien
gcagtttcatgggacccaaggagct

SEQ ID NO: 5291193 - DNA, 25 bp, Homo sapien
aggagctctggaccacgacccttct

SEQ ID NO: 5291194 - DNA, 25 bp, Homo sapien
ggcagaaggaataccagtgaggaaa

SEQ ID NO: 5291195 - DNA, 25 bp, Homo sapien
tttctggaaagcatgttccccaccc

SEQ ID NO: 5291196 - DNA, 25 bp, Homo sapien
ggaaaggcctagctgggaactctct

SEQ ID NO: 5291197 - DNA, 25 bp, Homo sapien
caggatttccctcgataggatgggc

SEQ ID NO: 5291198 - DNA, 25 bp, Homo sapien
caggcctaggaaggtgccggattca

SEQ ID NO: 5291199 - DNA, 25 bp, Homo sapien
gccagtgactgtgcccaggcctagg

SEQ ID NO: 5291200 - DNA, 25 bp, Homo sapien
gagagaaagctatgtagatggcaac

SEQ ID NO: 5291201 - DNA, 25 bp, Homo sapien
tagatggcaacagagccagtgactg

SEQ ID NO: 5291202 - DNA, 25 bp, Homo sapien
gggcaagaagttggagccatcccag

SEQ ID NO: 5291203 - DNA, 25 bp, Homo sapien
tcccaggctgtgaggtagcagggag

SEQ ID NO: 5291204 - DNA, 25 bp, Homo sapien
cacaggacttggtccgaaggggcaa

SEQ ID NO: 5291205 - DNA, 25 bp, Homo sapien
ctgacatcgaggcaggagacgactt

SEQ ID NO: 5291206 - DNA, 25 bp, Homo sapien
cactgtgaagagtcgcaggccagca

SEQ ID NO: 5291207 - DNA, 25 bp, Homo sapien
tttgcactgtgaagagtcgcaggcc

SEQ ID NO: 5291208 - DNA, 25 bp, Homo sapien
gggaatttgcactgtgaagagtcgc

SEQ ID NO: 5291209 - DNA, 25 bp, Homo sapien
aatttgcactgtgaagagtcgcagg

SEQ ID NO: 5291210 - DNA, 25 bp, Homo sapien
tgctggaaaaggtgggtccattttc

SEQ ID NO: 5291211 - DNA, 25 bp, Homo sapien
gtgtgctggaaaaggtgggtccatt

SEQ ID NO: 5291212 - DNA, 25 bp, Homo sapien
cctggtagcggtaaggtgtgctgga

SEQ ID NO: 5291213 - DNA, 25 bp, Homo sapien
ctgcaggcctggtagcggtaaggtg

SEQ ID NO: 5291214 - DNA, 25 bp, Homo sapien
ccccttcgtgggctttgaactccag

SEQ ID NO: 5291215 - DNA, 25 bp, Homo sapien
ttcaatctccccttcgtgggctttg

SEQ ID NO: 5291216 - DNA, 25 bp, Homo sapien
ctaaagccaggtcttcaatctcccc

SEQ ID NO: 5291217 - DNA, 25 bp, Homo sapien
tcgtgggctttgaactccagaacct

SEQ ID NO: 5291218 - DNA, 25 bp, Homo sapien
gatcggagctaaagtctgtctgcac

SEQ ID NO: 5291219 - DNA, 25 bp, Homo sapien
acaactttctgcagtggatcggagc

SEQ ID NO: 5291220 - DNA, 25 bp, Homo sapien
tgttcctccagtggcaagcagggta

SEQ ID NO: 5291221 - DNA, 25 bp, Homo sapien
gagttctagcccctcgtgctgggtt

SEQ ID NO: 5291222 - DNA, 25 bp, Homo sapien
gacaccaagagtgaccttactcgtt

SEQ ID NO: 5291223 - DNA, 25 bp, Homo sapien
gcttctacagtaaggagtactggcc

SEQ ID NO: 5291224 - DNA, 25 bp, Homo sapien
tggcaggtgcccatacaacttctag

SEQ ID NO: 5291225 - DNA, 25 bp, Homo sapien
gacccacttctttagagacaccaag

SEQ ID NO: 5291226 - DNA, 25 bp, Homo sapien
atgtgcctggaagcgcaggagctga

SEQ ID NO: 5291227 - DNA, 25 bp, Homo sapien
ttgatgtgcctggaagcgcaggagc

SEQ ID NO: 5291228 - DNA, 25 bp, Homo sapien
tgatgtgcctggaagcgcaggagct

SEQ ID NO: 5291229 - DNA, 25 bp, Homo sapien
tgttgatgtgcctggaagcgcagga

SEQ ID NO: 5291230 - DNA, 25 bp, Homo sapien
ggaggcactcaagcgcccattaatc

SEQ ID NO: 5291231 - DNA, 25 bp, Homo sapien
actcaagcgcccattaatcagctct

SEQ ID NO: 5291232 - DNA, 25 bp, Homo sapien
cgcccattaatcagctctagctgca

SEQ ID NO: 5291233 - DNA, 25 bp, Homo sapien
aggaggcactcaagcgcccattaat

SEQ ID NO: 5291234 - DNA, 25 bp, Homo sapien
tctgcacgttctagttcacaagggt

SEQ ID NO: 5291235 - DNA, 25 bp, Homo sapien
ggcaagcgggtcttcccaacagaag

SEQ ID NO: 5291236 - DNA, 25 bp, Homo sapien
tcgactgaaattcgcccctgggcgt

SEQ ID NO: 5291237 - DNA, 25 bp, Homo sapien
ttacagaacagggtgaagctcagga

SEQ ID NO: 5291238 - DNA, 25 bp, Homo sapien
ctttatgcctgtcttggcggcgcct

SEQ ID NO: 5291239 - DNA, 25 bp, Homo sapien
tatgcctgtcttggcggcgcctcct

SEQ ID NO: 5291240 - DNA, 25 bp, Homo sapien
ttatgcctgtcttggcggcgcctcc

SEQ ID NO: 5291241 - DNA, 25 bp, Homo sapien
tttatgcctgtcttggcggcgcctc

SEQ ID NO: 5291242 - DNA, 25 bp, Homo sapien
gaagcgcgtacaacgggaacggagc

SEQ ID NO: 5291243 - DNA, 25 bp, Homo sapien
tgaagcgcgtacaacgggaacggag

SEQ ID NO: 5291244 - DNA, 25 bp, Homo sapien
ctgaagcgcgtacaacgggaacgga

SEQ ID NO: 5291245 - DNA, 25 bp, Homo sapien
gcacccaggacatgccgcgccgggc

SEQ ID NO: 5291246 - DNA, 25 bp, Homo sapien
gcggcacccaggacatgccgcgccg

SEQ ID NO: 5291247 - DNA, 25 bp, Homo sapien
cccgcaccgcggcacccaggacatg

SEQ ID NO: 5291248 - DNA, 25 bp, Homo sapien
caccgcggcacccaggacatgccgc

SEQ ID NO: 5291249 - DNA, 25 bp, Homo sapien
gtcgccgccgggagcactccctacc

SEQ ID NO: 5291250 - DNA, 25 bp, Homo sapien
gcggctggtgaactcggccccgtcg

SEQ ID NO: 5291251 - DNA, 25 bp, Homo sapien
ttcgactactgccccggcggctggt

SEQ ID NO: 5291252 - DNA, 25 bp, Homo sapien
tgccccggcggctggtgaactcggc

SEQ ID NO: 5291253 - DNA, 25 bp, Homo sapien
agctcggctccgtccaagtcggtct

SEQ ID NO: 5291254 - DNA, 25 bp, Homo sapien
tgaccatcagcaggaagccgagcct

SEQ ID NO: 5291255 - DNA, 25 bp, Homo sapien
actgcgcatgcgcacctgtctcgcg

SEQ ID NO: 5291256 - DNA, 25 bp, Homo sapien
ggagttgccaaaaccctgaccatca

SEQ ID NO: 5291257 - DNA, 25 bp, Homo sapien
agtcgcccagcaccgacttcgccat

SEQ ID NO: 5291258 - DNA, 25 bp, Homo sapien
cggaggcagagtcgcccagcaccga

SEQ ID NO: 5291259 - DNA, 25 bp, Homo sapien
ctggcgcggaggcagagtcgcccag

SEQ ID NO: 5291260 - DNA, 25 bp, Homo sapien
gcagagtcgcccagcaccgacttcg

SEQ ID NO: 5291261 - DNA, 25 bp, Homo sapien
tttattagatacacggagggctgaa

SEQ ID NO: 5291262 - DNA, 25 bp, Homo sapien
ctttattagatacacggagggctga

SEQ ID NO: 5291263 - DNA, 25 bp, Homo sapien
gactttattagatacacggagggct

SEQ ID NO: 5291264 - DNA, 25 bp, Homo sapien
tattagatacacggagggctgaatg

SEQ ID NO: 5291265 - DNA, 25 bp, Homo sapien
ggagacagcagactccacaaggggc

SEQ ID NO: 5291266 - DNA, 25 bp, Homo sapien
ctccacaaggggctcccagggttca

SEQ ID NO: 5291267 - DNA, 25 bp, Homo sapien
acaaggggctcccagggttcagagc

SEQ ID NO: 5291268 - DNA, 25 bp, Homo sapien
gagacagcagactccacaaggggct

SEQ ID NO: 5291269 - DNA, 25 bp, Homo sapien
gactccccgagatctggggcctggt

SEQ ID NO: 5291270 - DNA, 25 bp, Homo sapien
ggtgtctcggggactccccgagatc

SEQ ID NO: 5291271 - DNA, 25 bp, Homo sapien
ggccagccagcccttcagggtgtct

SEQ ID NO: 5291272 - DNA, 25 bp, Homo sapien
agccagcccttcagggtgtctcggg

SEQ ID NO: 5291273 - DNA, 25 bp, Homo sapien
ttggagaatgagctccagagaaact

SEQ ID NO: 5291274 - DNA, 25 bp, Homo sapien
gcttcagggaggtagtgacctgttt

SEQ ID NO: 5291275 - DNA, 25 bp, Homo sapien
gacctgttttggtgcccgaggtgga

SEQ ID NO: 5291276 - DNA, 25 bp, Homo sapien
gactgatgacttttggagaatgagc

SEQ ID NO: 5291277 - DNA, 25 bp, Homo sapien
gcctatccggagtggcccagattcc

SEQ ID NO: 5291278 - DNA, 25 bp, Homo sapien
ttcggccttttctcgggcagcagat

SEQ ID NO: 5291279 - DNA, 25 bp, Homo sapien
gatgctggcaattgatgcccacagg

SEQ ID NO: 5291280 - DNA, 25 bp, Homo sapien
cacacagggcagtagttgagggaaa

SEQ ID NO: 5291281 - DNA, 25 bp, Homo sapien
gcaggaggggctgcggggccggagg

SEQ ID NO: 5291282 - DNA, 25 bp, Homo sapien
aggggctgcggggccggaggcacac

SEQ ID NO: 5291283 - DNA, 25 bp, Homo sapien
aggaggggctgcggggccggaggca

SEQ ID NO: 5291284 - DNA, 25 bp, Homo sapien
gggcaggaggggctgcggggccgga

SEQ ID NO: 5291285 - DNA, 25 bp, Homo sapien
tgcaaaagcagtagccgcaggtcgt

SEQ ID NO: 5291286 - DNA, 25 bp, Homo sapien
cctggccggttctgcctagccacag

SEQ ID NO: 5291287 - DNA, 25 bp, Homo sapien
gcatataggatactccacgactggg

SEQ ID NO: 5291288 - DNA, 25 bp, Homo sapien
aggtcgtgtgcgatgcggcggtgcc

SEQ ID NO: 5291289 - DNA, 25 bp, Homo sapien
tgcaggatccttctcgcttggcacg

SEQ ID NO: 5291290 - DNA, 25 bp, Homo sapien
caggatccttctcgcttggcacgca

SEQ ID NO: 5291291 - DNA, 25 bp, Homo sapien
gatccttctcgcttggcacgcatct

SEQ ID NO: 5291292 - DNA, 25 bp, Homo sapien
ggatccttctcgcttggcacgcatc

SEQ ID NO: 5291293 - DNA, 25 bp, Homo sapien
agtgtggagctatgcagttcctcgg

SEQ ID NO: 5291294 - DNA, 25 bp, Homo sapien
tccacaagttgtgagaagccccaag

SEQ ID NO: 5291295 - DNA, 25 bp, Homo sapien
aatagggatgtggagcaaagtcaga

SEQ ID NO: 5291296 - DNA, 25 bp, Homo sapien
tcacaagagccgaattggaagccag

SEQ ID NO: 5291297 - DNA, 25 bp, Homo sapien
tagggataagagacctggcagagtc

SEQ ID NO: 5291298 - DNA, 25 bp, Homo sapien
aaatcaaggccaccttctgtgcgca

SEQ ID NO: 5291299 - DNA, 25 bp, Homo sapien
catgagcatgaatctaagcttggct

SEQ ID NO: 5291300 - DNA, 25 bp, Homo sapien
tggcagagtcaggaccagtatctct

SEQ ID NO: 5291301 - DNA, 25 bp, Homo sapien
aactcctctgggctgtgtttcacag

SEQ ID NO: 5291302 - DNA, 25 bp, Homo sapien
cacaggcacttcagcgttgagagga

SEQ ID NO: 5291303 - DNA, 25 bp, Homo sapien
gtgtttcacaggcacttcagcgttg

SEQ ID NO: 5291304 - DNA, 25 bp, Homo sapien
tctgggctgtgtttcacaggcactt

SEQ ID NO: 5291305 - DNA, 25 bp, Homo sapien
gactttgtctaaggggtggcaccag

SEQ ID NO: 5291306 - DNA, 25 bp, Homo sapien
gcctctgggagactgggactttgtc

SEQ ID NO: 5291307 - DNA, 25 bp, Homo sapien
gttcgccgaccccaatgggagctgg

SEQ ID NO: 5291308 - DNA, 25 bp, Homo sapien
aatggggccagctggtaaaagcctc

SEQ ID NO: 5291309 - DNA, 25 bp, Homo sapien
tcaaatttagcagtggggtgttgta

SEQ ID NO: 5291310 - DNA, 25 bp, Homo sapien
aatttagcagtggggtgttgtatac

SEQ ID NO: 5291311 - DNA, 25 bp, Homo sapien
aaatttagcagtggggtgttgtata

SEQ ID NO: 5291312 - DNA, 25 bp, Homo sapien
caaatttagcagtggggtgttgtat

SEQ ID NO: 5291313 - DNA, 25 bp, Homo sapien
ccaatttgacatagttctgggcgat

SEQ ID NO: 5291314 - DNA, 25 bp, Homo sapien
ctataggtgtttccccagagacagt

SEQ ID NO: 5291315 - DNA, 25 bp, Homo sapien
gatggtcgcatcacctaatgcaata

SEQ ID NO: 5291316 - DNA, 25 bp, Homo sapien
tgtgctcagttatggcaaccatgaa

SEQ ID NO: 5291317 - DNA, 25 bp, Homo sapien
ttctctctggaagtagtgctcagca

SEQ ID NO: 5291318 - DNA, 25 bp, Homo sapien
tcctatccggcgttgcaggtgagtt

SEQ ID NO: 5291319 - DNA, 25 bp, Homo sapien
tctgcacaaatccactgtgtcctct

SEQ ID NO: 5291320 - DNA, 25 bp, Homo sapien
tcttttgactctctcagaatgaagg

SEQ ID NO: 5291321 - DNA, 25 bp, Homo sapien
aggggctgccccaccactcgctgta

SEQ ID NO: 5291322 - DNA, 25 bp, Homo sapien
gctgccccaccactcgctgtatctt

SEQ ID NO: 5291323 - DNA, 25 bp, Homo sapien
ccccaccactcgctgtatcttggga

SEQ ID NO: 5291324 - DNA, 25 bp, Homo sapien
tgccccaccactcgctgtatcttgg

SEQ ID NO: 5291325 - DNA, 25 bp, Homo sapien
gacatgcgtcatgtttcttgcctca

SEQ ID NO: 5291326 - DNA, 25 bp, Homo sapien
ggatgtgccacaaggtattagccaa

SEQ ID NO: 5291327 - DNA, 25 bp, Homo sapien
cattggccaaatcttggagattctc

SEQ ID NO: 5291328 - DNA, 25 bp, Homo sapien
aaaactatctcattctgttcaaggg

SEQ ID NO: 5291329 - DNA, 25 bp, Homo sapien
tccagttgcacctttgccagtctcc

SEQ ID NO: 5291330 - DNA, 25 bp, Homo sapien
tcctttgaagctccccggatctgtc

SEQ ID NO: 5291331 - DNA, 25 bp, Homo sapien
ctccagtctcctttgaagctccccg

SEQ ID NO: 5291332 - DNA, 25 bp, Homo sapien
cagtctcctttgaagctccccggat

SEQ ID NO: 5291333 - DNA, 25 bp, Homo sapien
caagctatagctttgagagcagtag

SEQ ID NO: 5291334 - DNA, 25 bp, Homo sapien
catccattttgctggcaagggtgca

SEQ ID NO: 5291335 - DNA, 25 bp, Homo sapien
cagaagggacattggtggcaccagc

SEQ ID NO: 5291336 - DNA, 25 bp, Homo sapien
tggcaagggtgcaccacaagctata

SEQ ID NO: 5291337 - DNA, 25 bp, Homo sapien
cagagcacggatgacagaaatgaca

SEQ ID NO: 5291338 - DNA, 25 bp, Homo sapien
cagtgaggtggaaaacgtgcttgct

SEQ ID NO: 5291339 - DNA, 25 bp, Homo sapien
ccgtctcttaagtgtccatctcaga

SEQ ID NO: 5291340 - DNA, 25 bp, Homo sapien
tggacccggtcatggccctggtttc

SEQ ID NO: 5291341 - DNA, 25 bp, Homo sapien
ccctcttcagaatggaggtagacag

SEQ ID NO: 5291342 - DNA, 25 bp, Homo sapien
caaatggatcttctattcccagagg

SEQ ID NO: 5291343 - DNA, 25 bp, Homo sapien
tggagagtcagtcctgaatcaggcc

SEQ ID NO: 5291344 - DNA, 25 bp, Homo sapien
gggcaattataaccagagtgctgtt

SEQ ID NO: 5291345 - DNA, 25 bp, Homo sapien
gcttctcctgcaggcaagaacctct

SEQ ID NO: 5291346 - DNA, 25 bp, Homo sapien
aggtcctttggtatgagctagatca

SEQ ID NO: 5291347 - DNA, 25 bp, Homo sapien
tatttctggcatgatcctgctccct

SEQ ID NO: 5291348 - DNA, 25 bp, Homo sapien
gaaaaacggtgcctcacatgcttga

SEQ ID NO: 5291349 - DNA, 25 bp, Homo sapien
tggagctgctcccctgataggctgt

SEQ ID NO: 5291350 - DNA, 25 bp, Homo sapien
ggaaacaggccagtgtcgaggtggt

SEQ ID NO: 5291351 - DNA, 25 bp, Homo sapien
ggacagcctaggcttagctgatcct

SEQ ID NO: 5291352 - DNA, 25 bp, Homo sapien
ggcttagctgatcctgagagaggca

SEQ ID NO: 5291353 - DNA, 25 bp, Homo sapien
cagtgcagtcctgtgggtagaacct

SEQ ID NO: 5291354 - DNA, 25 bp, Homo sapien
gaacctgaagagtcagtggcatctg

SEQ ID NO: 5291355 - DNA, 25 bp, Homo sapien
cttctgacaggacaacggaaggagg

SEQ ID NO: 5291356 - DNA, 25 bp, Homo sapien
gccgcttctgacaggacaacggaag

SEQ ID NO: 5291357 - DNA, 25 bp, Homo sapien
gctcctgcagtggagccgcttctga

SEQ ID NO: 5291358 - DNA, 25 bp, Homo sapien
cagtggagccgcttctgacaggaca

SEQ ID NO: 5291359 - DNA, 25 bp, Homo sapien
tggttgcagggttcagggaccggcc

SEQ ID NO: 5291360 - DNA, 25 bp, Homo sapien
ttgcagggttcagggaccggcctcg

SEQ ID NO: 5291361 - DNA, 25 bp, Homo sapien
agggttcagggaccggcctcgcatt

SEQ ID NO: 5291362 - DNA, 25 bp, Homo sapien
aatggttgcagggttcagggaccgg

SEQ ID NO: 5291363 - DNA, 25 bp, Homo sapien
gaatggaaatgtgcttctgagtctc

SEQ ID NO: 5291364 - DNA, 25 bp, Homo sapien
gttaacccctcggtgctcatctgca

SEQ ID NO: 5291365 - DNA, 25 bp, Homo sapien
gagcctttctccctagagtccctta

SEQ ID NO: 5291366 - DNA, 25 bp, Homo sapien
gacagctacggacacccaagagctc

SEQ ID NO: 5291367 - DNA, 25 bp, Homo sapien
tgtgagcactgtaccataagtaaga

SEQ ID NO: 5291368 - DNA, 25 bp, Homo sapien
atagaaccgctgcagccctgtgggc

SEQ ID NO: 5291369 - DNA, 25 bp, Homo sapien
tcactgtggtggagttgtgagcact

SEQ ID NO: 5291370 - DNA, 25 bp, Homo sapien
taagacaaggaatagaaccgctgca

SEQ ID NO: 5291371 - DNA, 25 bp, Homo sapien
tcccttagcaagacccctgtgaaag

SEQ ID NO: 5291372 - DNA, 25 bp, Homo sapien
caattcgttggcagggcattccttg

SEQ ID NO: 5291373 - DNA, 25 bp, Homo sapien
agccctcaaaggagggctttgagaa

SEQ ID NO: 5291374 - DNA, 25 bp, Homo sapien
tccttgggcaccaatctctacttgc

SEQ ID NO: 5291375 - DNA, 25 bp, Homo sapien
tcacagtggcaacggttagattggt

SEQ ID NO: 5291376 - DNA, 25 bp, Homo sapien
gagaagctggacccattagagggag

SEQ ID NO: 5291377 - DNA, 25 bp, Homo sapien
tggtcacgatgctcccgatgccaat

SEQ ID NO: 5291378 - DNA, 25 bp, Homo sapien
agaaggccatgacgagcccagccaa

SEQ ID NO: 5291379 - DNA, 25 bp, Homo sapien
agacacagtgcaggcctgtcacaag

SEQ ID NO: 5291380 - DNA, 25 bp, Homo sapien
tgccagccctcacggcagtcctcag

SEQ ID NO: 5291381 - DNA, 25 bp, Homo sapien
cgagacacagtgcaggcctgtcaca

SEQ ID NO: 5291382 - DNA, 25 bp, Homo sapien
ctgccgagacacagtgcaggcctgt

SEQ ID NO: 5291383 - DNA, 25 bp, Homo sapien
catgactgtggatccagatgcatca

SEQ ID NO: 5291384 - DNA, 25 bp, Homo sapien
gactgtggatccagatgcatcactc

SEQ ID NO: 5291385 - DNA, 25 bp, Homo sapien
tacacatgactgtggatccagatgc

SEQ ID NO: 5291386 - DNA, 25 bp, Homo sapien
tcctgctacacatgactgtggatcc

SEQ ID NO: 5291387 - DNA, 25 bp, Homo sapien
gagggttagcacatggaaagaacat

SEQ ID NO: 5291388 - DNA, 25 bp, Homo sapien
ggttagcacatggaaagaacattcc

SEQ ID NO: 5291389 - DNA, 25 bp, Homo sapien
aggagggttagcacatggaaagaac

SEQ ID NO: 5291390 - DNA, 25 bp, Homo sapien
gggttagcacatggaaagaacattc

SEQ ID NO: 5291391 - DNA, 25 bp, Homo sapien
gttctctgaggctgatccttagctc

SEQ ID NO: 5291392 - DNA, 25 bp, Homo sapien
tctgtgggaacaatcagaactccag

SEQ ID NO: 5291393 - DNA, 25 bp, Homo sapien
tgcccagactcaccataaagcatag

SEQ ID NO: 5291394 - DNA, 25 bp, Homo sapien
caacatcccaggaatgaccctgcgt

SEQ ID NO: 5291395 - DNA, 25 bp, Homo sapien
aaatataggccattcctagacaaag

SEQ ID NO: 5291396 - DNA, 25 bp, Homo sapien
tctgggaggaaatataggccattcc

SEQ ID NO: 5291397 - DNA, 25 bp, Homo sapien
ccatctgggaggaaatataggccat

SEQ ID NO: 5291398 - DNA, 25 bp, Homo sapien
ggaggaaatataggccattcctaga

SEQ ID NO: 5291399 - DNA, 25 bp, Homo sapien
gaaacaaccatgcatgcagggaagg

SEQ ID NO: 5291400 - DNA, 25 bp, Homo sapien
aaaggcatattacatcacgccccag

SEQ ID NO: 5291401 - DNA, 25 bp, Homo sapien
ggcaagtgctgagccccggataaag

SEQ ID NO: 5291402 - DNA, 25 bp, Homo sapien
tatgtgactcagagacctccctagg

SEQ ID NO: 5291403 - DNA, 25 bp, Homo sapien
agcttagaaagacccagactgaaga

SEQ ID NO: 5291404 - DNA, 25 bp, Homo sapien
tcaggatgaagcttagaaagaccca

SEQ ID NO: 5291405 - DNA, 25 bp, Homo sapien
ggatgaagcttagaaagacccagac

SEQ ID NO: 5291406 - DNA, 25 bp, Homo sapien
tgaagcttagaaagacccagactga

SEQ ID NO: 5291407 - DNA, 25 bp, Homo sapien
caaggtcgaatcaggtcttccatcg

SEQ ID NO: 5291408 - DNA, 25 bp, Homo sapien
ggtcttccatcgtaacagttgccaa

SEQ ID NO: 5291409 - DNA, 25 bp, Homo sapien
ggaaagcatgatggcccgggcttca

SEQ ID NO: 5291410 - DNA, 25 bp, Homo sapien
tcagggaaccaaggtcgaatcaggt

SEQ ID NO: 5291411 - DNA, 25 bp, Homo sapien
tgagagagccgctgaagaggcaggc

SEQ ID NO: 5291412 - DNA, 25 bp, Homo sapien
ctgagagagccgctgaagaggcagg

SEQ ID NO: 5291413 - DNA, 25 bp, Homo sapien
gcctgctgaatgctcatgggatact

SEQ ID NO: 5291414 - DNA, 25 bp, Homo sapien
aggccaatgaggcagcccacgcaga

SEQ ID NO: 5291415 - DNA, 25 bp, Homo sapien
tacgcgaacatgaccaggccaatga

SEQ ID NO: 5291416 - DNA, 25 bp, Homo sapien
catgggatactcctggtaatacgcg

SEQ ID NO: 5291417 - DNA, 25 bp, Homo sapien
gagccggcgttaacagacaccctca

SEQ ID NO: 5291418 - DNA, 25 bp, Homo sapien
gagagccggcgttaacagacaccct

SEQ ID NO: 5291419 - DNA, 25 bp, Homo sapien
gccggcgttaacagacaccctcagg

SEQ ID NO: 5291420 - DNA, 25 bp, Homo sapien
gaggagagccggcgttaacagacac

SEQ ID NO: 5291421 - DNA, 25 bp, Homo sapien
aaggccaaggtccagaaggtgtgcc

SEQ ID NO: 5291422 - DNA, 25 bp, Homo sapien
gcagccttctccgtgcgggaactga

SEQ ID NO: 5291423 - DNA, 25 bp, Homo sapien
ggaactgaggtaccgctgcacctga

SEQ ID NO: 5291424 - DNA, 25 bp, Homo sapien
ctggttcaccccgtataaggagagc

SEQ ID NO: 5291425 - DNA, 25 bp, Homo sapien
gtcattgtgcaaagcctgagagaca

SEQ ID NO: 5291426 - DNA, 25 bp, Homo sapien
aaaggagagacaccactgctagggc

SEQ ID NO: 5291427 - DNA, 25 bp, Homo sapien
cctcttggcaacaggagtcagtgga

SEQ ID NO: 5291428 - DNA, 25 bp, Homo sapien
gagacaccactgctagggccaaggg

SEQ ID NO: 5291429 - DNA, 25 bp, Homo sapien
aacccagagatgcggccgtgctggg

SEQ ID NO: 5291430 - DNA, 25 bp, Homo sapien
agccacggcccacacacgccccaag

SEQ ID NO: 5291431 - DNA, 25 bp, Homo sapien
gatgcggccgtgctgggaagccacg

SEQ ID NO: 5291432 - DNA, 25 bp, Homo sapien
tgaccccacaatgataactgccagc

SEQ ID NO: 5291433 - DNA, 25 bp, Homo sapien
cagagctgtatagacggtacagaca

SEQ ID NO: 5291434 - DNA, 25 bp, Homo sapien
tgtatagacggtacagacaatgccc

SEQ ID NO: 5291435 - DNA, 25 bp, Homo sapien
gctgtatagacggtacagacaatgc

SEQ ID NO: 5291436 - DNA, 25 bp, Homo sapien
atagacggtacagacaatgcccagg

SEQ ID NO: 5291437 - DNA, 25 bp, Homo sapien
gaagccacattcttatccctggaaa

SEQ ID NO: 5291438 - DNA, 25 bp, Homo sapien
gaaagccaggggctgtgtgactcct

SEQ ID NO: 5291439 - DNA, 25 bp, Homo sapien
aagccaggggctgtgtgactcctca

SEQ ID NO: 5291440 - DNA, 25 bp, Homo sapien
cacggctgaaagccaggggctgtgt

SEQ ID NO: 5291441 - DNA, 25 bp, Homo sapien
ggctgaaagccaggggctgtgtgac

SEQ ID NO: 5291442 - DNA, 25 bp, Homo sapien
gagcatagagcacaactcccatgta

SEQ ID NO: 5291443 - DNA, 25 bp, Homo sapien
tagagcacaactcccatgtagatca

SEQ ID NO: 5291444 - DNA, 25 bp, Homo sapien
tgcattgagagccaatgacggagca

SEQ ID NO: 5291445 - DNA, 25 bp, Homo sapien
caatgacggagcatagagcacaact

SEQ ID NO: 5291446 - DNA, 25 bp, Homo sapien
cactcgcacagttttattgaatcga

SEQ ID NO: 5291447 - DNA, 25 bp, Homo sapien
gttttattgaatcgaagctccaggt

SEQ ID NO: 5291448 - DNA, 25 bp, Homo sapien
aaggtcacagttccacacactcgca

SEQ ID NO: 5291449 - DNA, 25 bp, Homo sapien
cagttccacacactcgcacagtttt

SEQ ID NO: 5291450 - DNA, 25 bp, Homo sapien
cagcagctcaccaacagtatgccgg

SEQ ID NO: 5291451 - DNA, 25 bp, Homo sapien
aatcggtagatctctgacggcacac

SEQ ID NO: 5291452 - DNA, 25 bp, Homo sapien
cacgacaagcatggtagagcccaat

SEQ ID NO: 5291453 - DNA, 25 bp, Homo sapien
agtgccaccggaaggcagcccattt

SEQ ID NO: 5291454 - DNA, 25 bp, Homo sapien
cgcttgtgcccgaggttggggaaag

SEQ ID NO: 5291455 - DNA, 25 bp, Homo sapien
gcccacgcttgtgcccgaggttggg

SEQ ID NO: 5291456 - DNA, 25 bp, Homo sapien
cacgcttgtgcccgaggttggggaa

SEQ ID NO: 5291457 - DNA, 25 bp, Homo sapien
gcttgtgcccgaggttggggaaaga

SEQ ID NO: 5291458 - DNA, 25 bp, Homo sapien
tgatctgcagccagttgctgctcca

SEQ ID NO: 5291459 - DNA, 25 bp, Homo sapien
tcctccacggagtgatactgtccag

SEQ ID NO: 5291460 - DNA, 25 bp, Homo sapien
cacagtcttcctccacggagtgata

SEQ ID NO: 5291461 - DNA, 25 bp, Homo sapien
cagccacagtctcacagtcttcctc

SEQ ID NO: 5291462 - DNA, 25 bp, Homo sapien
agagcggctggattcaaaagtgaga

SEQ ID NO: 5291463 - DNA, 25 bp, Homo sapien
agggtttcagaatgacgattctcca

SEQ ID NO: 5291464 - DNA, 25 bp, Homo sapien
gaagagcggctggattcaaaagtga

SEQ ID NO: 5291465 - DNA, 25 bp, Homo sapien
gagaggggaaaggtgagagggcacc

SEQ ID NO: 5291466 - DNA, 25 bp, Homo sapien
agagctgaggatctggctctatgag

SEQ ID NO: 5291467 - DNA, 25 bp, Homo sapien
ggccctaaccaacactgtcgcgccg

SEQ ID NO: 5291468 - DNA, 25 bp, Homo sapien
aaccaacactgtcgcgccgggagca

SEQ ID NO: 5291469 - DNA, 25 bp, Homo sapien
gatcccctggcgcccttcagtcagg

SEQ ID NO: 5291470 - DNA, 25 bp, Homo sapien
ctggggcagcaacgcactcccttac

SEQ ID NO: 5291471 - DNA, 25 bp, Homo sapien
gtgcttcctgagatcaacatcgctc

SEQ ID NO: 5291472 - DNA, 25 bp, Homo sapien
cctgagatcaacatcgctccctttt

SEQ ID NO: 5291473 - DNA, 25 bp, Homo sapien
gagctaggaaggtccctttgtgctt

SEQ ID NO: 5291474 - DNA, 25 bp, Homo sapien
agctaggaaggtccctttgtgcttc

SEQ ID NO: 5291475 - DNA, 25 bp, Homo sapien
gttagggaagcgtctatcccgctcc

SEQ ID NO: 5291476 - DNA, 25 bp, Homo sapien
gagttagggaagcgtctatcccgct

SEQ ID NO: 5291477 - DNA, 25 bp, Homo sapien
agggaagcgtctatcccgctcctac

SEQ ID NO: 5291478 - DNA, 25 bp, Homo sapien
tagggaagcgtctatcccgctccta

SEQ ID NO: 5291479 - DNA, 25 bp, Homo sapien
ttcccgcttccctctacgcggcgga

SEQ ID NO: 5291480 - DNA, 25 bp, Homo sapien
tcccgcttccctctacgcggcggag

SEQ ID NO: 5291481 - DNA, 25 bp, Homo sapien
cgcttccctctacgcggcggagacc

SEQ ID NO: 5291482 - DNA, 25 bp, Homo sapien
ccgcttccctctacgcggcggagac

SEQ ID NO: 5291483 - DNA, 25 bp, Homo sapien
cccggtctccacacgtgggtagcca

SEQ ID NO: 5291484 - DNA, 25 bp, Homo sapien
gcccggtctccacacgtgggtagcc

SEQ ID NO: 5291485 - DNA, 25 bp, Homo sapien
tgcccggtctccacacgtgggtagc

SEQ ID NO: 5291486 - DNA, 25 bp, Homo sapien
ctgcccggtctccacacgtgggtag

SEQ ID NO: 5291487 - DNA, 25 bp, Homo sapien
ggcccgagtttctgcgaagccgcga

SEQ ID NO: 5291488 - DNA, 25 bp, Homo sapien
tatccccgaaagagggctagggcgc

SEQ ID NO: 5291489 - DNA, 25 bp, Homo sapien
gcagagctccacgagcaggaaaagc

SEQ ID NO: 5291490 - DNA, 25 bp, Homo sapien
gctagggcgcatgaagaccagcgca

SEQ ID NO: 5291491 - DNA, 25 bp, Homo sapien
gaagcaagtttgaggtcgggctgaa

SEQ ID NO: 5291492 - DNA, 25 bp, Homo sapien
tgatttcgtccctgacgcttcccga

SEQ ID NO: 5291493 - DNA, 25 bp, Homo sapien
tcgggctgaagcagggtcgctggcc

SEQ ID NO: 5291494 - DNA, 25 bp, Homo sapien
ggaaagggctctggcgctacccgag

SEQ ID NO: 5291495 - DNA, 25 bp, Homo sapien
tactgaaagtgtcgggagctgattc

SEQ ID NO: 5291496 - DNA, 25 bp, Homo sapien
tagggctgtcagattgagaagtctc

SEQ ID NO: 5291497 - DNA, 25 bp, Homo sapien
tgcggtcgttttacaccgcgccaaa

SEQ ID NO: 5291498 - DNA, 25 bp, Homo sapien
aggaccttccctgtgcgatatctgg

SEQ ID NO: 5291499 - DNA, 25 bp, Homo sapien
gcgtgcaaaatttgtcaaaagtggc

SEQ ID NO: 5291500 - DNA, 25 bp, Homo sapien
ttttattgtaaaacgacacgagagc

SEQ ID NO: 5291501 - DNA, 25 bp, Homo sapien
gagctaatgctgcatgcccgttgct

SEQ ID NO: 5291502 - DNA, 25 bp, Homo sapien
tatgcacccaatgtccagggagcgt

SEQ ID NO: 5291503 - DNA, 25 bp, Homo sapien
tctctggaggaccctggtccaaact

SEQ ID NO: 5291504 - DNA, 25 bp, Homo sapien
ctctggaggaccctggtccaaactt

SEQ ID NO: 5291505 - DNA, 25 bp, Homo sapien
tggaggaccctggtccaaactttca

SEQ ID NO: 5291506 - DNA, 25 bp, Homo sapien
aacaccttccgtggctttactcagc

SEQ ID NO: 5291507 - DNA, 25 bp, Homo sapien
cgtggctttactcagctccagactc

SEQ ID NO: 5291508 - DNA, 25 bp, Homo sapien
aggtgacttggccaacaccttccgt

SEQ ID NO: 5291509 - DNA, 25 bp, Homo sapien
agcaaaccccctcaaaggtgacttg

SEQ ID NO: 5291510 - DNA, 25 bp, Homo sapien
tatcacctcttatatagacaaccaa

SEQ ID NO: 5291511 - DNA, 25 bp, Homo sapien
gcctggaatactatcacctcttata

SEQ ID NO: 5291512 - DNA, 25 bp, Homo sapien
cctttgcaataacactggggaccca

SEQ ID NO: 5291513 - DNA, 25 bp, Homo sapien
caaccaaatctgtcaagggcaaaag

SEQ ID NO: 5291514 - DNA, 25 bp, Homo sapien
agaatggatcttgtgtacctgatgg

SEQ ID NO: 5291515 - DNA, 25 bp, Homo sapien
tccatggatacaagtgtatgcgcca

SEQ ID NO: 5291516 - DNA, 25 bp, Homo sapien
tttccatggatacaagtgtatgcgc

SEQ ID NO: 5291517 - DNA, 25 bp, Homo sapien
ccatggatacaagtgtatgcgccag

SEQ ID NO: 5291518 - DNA, 25 bp, Homo sapien
ttcttcgggattctgggagccacca

SEQ ID NO: 5291519 - DNA, 25 bp, Homo sapien
tttcgccagtggattcgcctcaagg

SEQ ID NO: 5291520 - DNA, 25 bp, Homo sapien
gatgaaaaattgcactcccttggtg

SEQ ID NO: 5291521 - DNA, 25 bp, Homo sapien
tctccattctgctttgggcgaccca

SEQ ID NO: 5291522 - DNA, 25 bp, Homo sapien
tcacctgttcaatgtggcacacaca

SEQ ID NO: 5291523 - DNA, 25 bp, Homo sapien
gcagaaggagcggagcctcgacatc

SEQ ID NO: 5291524 - DNA, 25 bp, Homo sapien
tgtggcacacacactgcgtatgatg

SEQ ID NO: 5291525 - DNA, 25 bp, Homo sapien
cactgcgtatgatggtgcagaagga

SEQ ID NO: 5291526 - DNA, 25 bp, Homo sapien
gacaccttagatggcctgagaacca

SEQ ID NO: 5291527 - DNA, 25 bp, Homo sapien
ggtgttcacagcctaaacctggact

SEQ ID NO: 5291528 - DNA, 25 bp, Homo sapien
agccaaggacccaggcatgctgtga

SEQ ID NO: 5291529 - DNA, 25 bp, Homo sapien
tctgagaacgactgactcccaggga

SEQ ID NO: 5291530 - DNA, 25 bp, Homo sapien
gacacacggacaaagtgcgggcttt

SEQ ID NO: 5291531 - DNA, 25 bp, Homo sapien
tgcatagacagagcgagggccatgt

SEQ ID NO: 5291532 - DNA, 25 bp, Homo sapien
tctttcagggatagccaagggcaca

SEQ ID NO: 5291533 - DNA, 25 bp, Homo sapien
caagtttattggtggagctgcagcg

SEQ ID NO: 5291534 - DNA, 25 bp, Homo sapien
gcttcagccaggacggcttcagggt

SEQ ID NO: 5291535 - DNA, 25 bp, Homo sapien
gccatctccggctgatactgctcga

SEQ ID NO: 5291536 - DNA, 25 bp, Homo sapien
ggagaatccaaaccgggagtagagc

SEQ ID NO: 5291537 - DNA, 25 bp, Homo sapien
tactgctcgacctgcagggtgcagc

SEQ ID NO: 5291538 - DNA, 25 bp, Homo sapien
tgtgccccatcactagacctgtagg

SEQ ID NO: 5291539 - DNA, 25 bp, Homo sapien
ttaaagccaggcgtgaatggaagcc

SEQ ID NO: 5291540 - DNA, 25 bp, Homo sapien
tggttccctgtgctacttcaaagag

SEQ ID NO: 5291541 - DNA, 25 bp, Homo sapien
tcaaatgttggagagactcacccca

SEQ ID NO: 5291542 - DNA, 25 bp, Homo sapien
tgcagctcatgggttgcccggactc

SEQ ID NO: 5291543 - DNA, 25 bp, Homo sapien
gacaacagcgtatcccgcacaggtt

SEQ ID NO: 5291544 - DNA, 25 bp, Homo sapien
cacaggttcgaaccccacattgcgg

SEQ ID NO: 5291545 - DNA, 25 bp, Homo sapien
acatggtaagtgagcgtaagggccc

SEQ ID NO: 5291546 - DNA, 25 bp, Homo sapien
cggtggatccaagggcacagatgga

SEQ ID NO: 5291547 - DNA, 25 bp, Homo sapien
cttccatgaggattcgaagaacgtc

SEQ ID NO: 5291548 - DNA, 25 bp, Homo sapien
ctcggagggtgggagcggtggatcc

SEQ ID NO: 5291549 - DNA, 25 bp, Homo sapien
tgaggattcgaagaacgtctcggag

SEQ ID NO: 5291550 - DNA, 25 bp, Homo sapien
gcccctcctccagcggtgcatactc

SEQ ID NO: 5291551 - DNA, 25 bp, Homo sapien
cggacgctggtgttccccaggggca

SEQ ID NO: 5291552 - DNA, 25 bp, Homo sapien
tgctcccctagacccgtggctgtgg

SEQ ID NO: 5291553 - DNA, 25 bp, Homo sapien
agcacgtgcacaaatgccgcccgga

SEQ ID NO: 5291554 - DNA, 25 bp, Homo sapien
agagagataaacaatgcagcctggg

SEQ ID NO: 5291555 - DNA, 25 bp, Homo sapien
gaaagaataccagacttggtgccac

SEQ ID NO: 5291556 - DNA, 25 bp, Homo sapien
cacctgttgggattgactgcattaa

SEQ ID NO: 5291557 - DNA, 25 bp, Homo sapien
gccacacatgtggattcggaagctg

SEQ ID NO: 5291558 - DNA, 25 bp, Homo sapien
ggacgaaggccaggtacaggaggat

SEQ ID NO: 5291559 - DNA, 25 bp, Homo sapien
tcgatgtggtagtcgctgtgcagca

SEQ ID NO: 5291560 - DNA, 25 bp, Homo sapien
aacaggttggcacagactgcgatgc

SEQ ID NO: 5291561 - DNA, 25 bp, Homo sapien
gcacagactgcgatgctggcggtca

SEQ ID NO: 5291562 - DNA, 25 bp, Homo sapien
gattggagagtcactgggccatgca

SEQ ID NO: 5291563 - DNA, 25 bp, Homo sapien
ggagacaagctgtcagagacctgct

SEQ ID NO: 5291564 - DNA, 25 bp, Homo sapien
ccctctggcaagattggagagtcac

SEQ ID NO: 5291565 - DNA, 25 bp, Homo sapien
ttgggaccctgacgggtgccctctg

SEQ ID NO: 5291566 - DNA, 25 bp, Homo sapien
atgctgcccacatccgccagcaagt

SEQ ID NO: 5291567 - DNA, 25 bp, Homo sapien
ccacatccgccagcaagtgggctgc

SEQ ID NO: 5291568 - DNA, 25 bp, Homo sapien
tcatggtgcgggtggctggacgggt

SEQ ID NO: 5291569 - DNA, 25 bp, Homo sapien
caaaggtcatggtgcgggtggctgg

SEQ ID NO: 5291570 - DNA, 25 bp, Homo sapien
ggccaggctgtgtgccagatacccg

SEQ ID NO: 5291571 - DNA, 25 bp, Homo sapien
gccaggctgtgtgccagatacccgc

SEQ ID NO: 5291572 - DNA, 25 bp, Homo sapien
tggccaggctgtgtgccagataccc

SEQ ID NO: 5291573 - DNA, 25 bp, Homo sapien
gatggccaggctgtgtgccagatac

SEQ ID NO: 5291574 - DNA, 25 bp, Homo sapien
agtcagccctgacctactggccccg

SEQ ID NO: 5291575 - DNA, 25 bp, Homo sapien
gttttctcaggtgatgggactacag

SEQ ID NO: 5291576 - DNA, 25 bp, Homo sapien
ggactacaggtataattaactactg

SEQ ID NO: 5291577 - DNA, 25 bp, Homo sapien
catgtagtgtgtataggcatggaaa

SEQ ID NO: 5291578 - DNA, 25 bp, Homo sapien
cacaggcagcatatagctgcctccg

SEQ ID NO: 5291579 - DNA, 25 bp, Homo sapien
atagctgcctccgtgcatgcagcct

SEQ ID NO: 5291580 - DNA, 25 bp, Homo sapien
agacaaagcaaacggcacaggcagc

SEQ ID NO: 5291581 - DNA, 25 bp, Homo sapien
caaagcaaacggcacaggcagcata

SEQ ID NO: 5291582 - DNA, 25 bp, Homo sapien
tccacaggtttggactcctcaggga

SEQ ID NO: 5291583 - DNA, 25 bp, Homo sapien
ctccacaggtttggactcctcaggg

SEQ ID NO: 5291584 - DNA, 25 bp, Homo sapien
acaggtttggactcctcagggaggg

SEQ ID NO: 5291585 - DNA, 25 bp, Homo sapien
cactccacgtccttagtccccagtg

SEQ ID NO: 5291586 - DNA, 25 bp, Homo sapien
gcctgctcactccacgtccttagtc

SEQ ID NO: 5291587 - DNA, 25 bp, Homo sapien
caggctggcctgctcactccacgtc

SEQ ID NO: 5291588 - DNA, 25 bp, Homo sapien
gctggcctgctcactccacgtcctt

SEQ ID NO: 5291589 - DNA, 25 bp, Homo sapien
ttcagtccgactataagcacccagc

SEQ ID NO: 5291590 - DNA, 25 bp, Homo sapien
caaaaagtctgattccgggcacaga

SEQ ID NO: 5291591 - DNA, 25 bp, Homo sapien
gagtgctaagtccattctggtccaa

SEQ ID NO: 5291592 - DNA, 25 bp, Homo sapien
cctttaagagacgagcgggacattg

SEQ ID NO: 5291593 - DNA, 25 bp, Homo sapien
cggcccgaccgagcggcagctgctc

SEQ ID NO: 5291594 - DNA, 25 bp, Homo sapien
gctccggcccgaccgagcggcagct

SEQ ID NO: 5291595 - DNA, 25 bp, Homo sapien
tccggcccgaccgagcggcagctgc

SEQ ID NO: 5291596 - DNA, 25 bp, Homo sapien
gggctccggcccgaccgagcggcag

SEQ ID NO: 5291597 - DNA, 25 bp, Homo sapien
ctcttcaaacgcaggctgcctccgg

SEQ ID NO: 5291598 - DNA, 25 bp, Homo sapien
aggcgagtggtctccaagcccccag

SEQ ID NO: 5291599 - DNA, 25 bp, Homo sapien
gcgccaccgcggtcccgggggctca

SEQ ID NO: 5291600 - DNA, 25 bp, Homo sapien
ggctcaccaggcgagtggtctccaa

SEQ ID NO: 5291601 - DNA, 25 bp, Homo sapien
cgcgcggagtccgaactgcagatcc

SEQ ID NO: 5291602 - DNA, 25 bp, Homo sapien
gggcgagctccccaagctccgcctc

SEQ ID NO: 5291603 - DNA, 25 bp, Homo sapien
cagagtggagcgaactgcagcgact

SEQ ID NO: 5291604 - DNA, 25 bp, Homo sapien
gcgccaagtccgagcagcccgccga

SEQ ID NO: 5291605 - DNA, 25 bp, Homo sapien
cgcacctgccgccactgtagaatgg

SEQ ID NO: 5291606 - DNA, 25 bp, Homo sapien
agcaaagtcggtggccgagcctcaa

SEQ ID NO: 5291607 - DNA, 25 bp, Homo sapien
cctgccgccactgtagaatgggagg

SEQ ID NO: 5291608 - DNA, 25 bp, Homo sapien
aagtcgaagcttcaaatgctcaatg

SEQ ID NO: 5291609 - DNA, 25 bp, Homo sapien
tttcctggagtgagttgggccatca

SEQ ID NO: 5291610 - DNA, 25 bp, Homo sapien
ggccatcaagatgggtggtgccctc

SEQ ID NO: 5291611 - DNA, 25 bp, Homo sapien
atccgccacggtcagcaaacccatt

SEQ ID NO: 5291612 - DNA, 25 bp, Homo sapien
ggtcagcaaacccattgtgtttcct

SEQ ID NO: 5291613 - DNA, 25 bp, Homo sapien
cagacccaggtgaggagtcggcaca

SEQ ID NO: 5291614 - DNA, 25 bp, Homo sapien
gcttaagagaacgactcccaggtaa

SEQ ID NO: 5291615 - DNA, 25 bp, Homo sapien
gggttccgctgccttttccttgcca

SEQ ID NO: 5291616 - DNA, 25 bp, Homo sapien
gctccttgccttgctcggttctcct

SEQ ID NO: 5291617 - DNA, 25 bp, Homo sapien
aaaggcagcatttcgcagaggacca

SEQ ID NO: 5291618 - DNA, 25 bp, Homo sapien
tgagctagagagaccagactattcc

SEQ ID NO: 5291619 - DNA, 25 bp, Homo sapien
aaagcagaaccctgagtggcaagca

SEQ ID NO: 5291620 - DNA, 25 bp, Homo sapien
tgcagctaagattccagagacccgg

SEQ ID NO: 5291621 - DNA, 25 bp, Homo sapien
gacagcaatcagtgaagctacttta

SEQ ID NO: 5291622 - DNA, 25 bp, Homo sapien
gttctctgtgagtaccctgtgcttt

SEQ ID NO: 5291623 - DNA, 25 bp, Homo sapien
ccagggctagggatatagacagcaa

SEQ ID NO: 5291624 - DNA, 25 bp, Homo sapien
taactcacagtgtcactacggatgg

SEQ ID NO: 5291625 - DNA, 25 bp, Homo sapien
aatggcgctgtatctccaggtgggc

SEQ ID NO: 5291626 - DNA, 25 bp, Homo sapien
gtcagtatggcgaccacctggaggc

SEQ ID NO: 5291627 - DNA, 25 bp, Homo sapien
tcttttaggacaatagccggaggca

SEQ ID NO: 5291628 - DNA, 25 bp, Homo sapien
catggaagagccacaaatggcgctg

SEQ ID NO: 5291629 - DNA, 25 bp, Homo sapien
tatgagagcatggagcaattcaccg

SEQ ID NO: 5291630 - DNA, 25 bp, Homo sapien
aatgctgcggaccatcgacttccag

SEQ ID NO: 5291631 - DNA, 25 bp, Homo sapien
caattcaccgtaagggtggagcacg

SEQ ID NO: 5291632 - DNA, 25 bp, Homo sapien
caataagtgagtaggcatagcggga

SEQ ID NO: 5291633 - DNA, 25 bp, Homo sapien
cctcccccagtgattgccctccctg

SEQ ID NO: 5291634 - DNA, 25 bp, Homo sapien
cacaaaggcgcgccccctagggcgg

SEQ ID NO: 5291635 - DNA, 25 bp, Homo sapien
ccggagccacaaaggcgcgccccct

SEQ ID NO: 5291636 - DNA, 25 bp, Homo sapien
cggagccacaaaggcgcgcccccta

SEQ ID NO: 5291637 - DNA, 25 bp, Homo sapien
agccacaaaggcgcgccccctaggg

SEQ ID NO: 5291638 - DNA, 25 bp, Homo sapien
cccgcatcccaactctggggtgggg

SEQ ID NO: 5291639 - DNA, 25 bp, Homo sapien
ctggtggctctgccccgcatcccaa

SEQ ID NO: 5291640 - DNA, 25 bp, Homo sapien
ttattaaaaaatagtcacgcagaca

SEQ ID NO: 5291641 - DNA, 25 bp, Homo sapien
cacgcagacagtgccctggtggctc

SEQ ID NO: 5291642 - DNA, 25 bp, Homo sapien
acagagaagggttgtcccgccgcgg

SEQ ID NO: 5291643 - DNA, 25 bp, Homo sapien
caggtgaaaggtgaggtcaatggac

SEQ ID NO: 5291644 - DNA, 25 bp, Homo sapien
caccgagtcgaatatgatgcggttc

SEQ ID NO: 5291645 - DNA, 25 bp, Homo sapien
ttgcccaccgagtcgaatatgatgc

SEQ ID NO: 5291646 - DNA, 25 bp, Homo sapien
tgccgtcccgagtcccaatcggccg

SEQ ID NO: 5291647 - DNA, 25 bp, Homo sapien
ctgccgtcccgagtcccaatcggcc

SEQ ID NO: 5291648 - DNA, 25 bp, Homo sapien
tggttccgtgccccggggctccagc

SEQ ID NO: 5291649 - DNA, 25 bp, Homo sapien
ttccgtgccccggggctccagcgca

SEQ ID NO: 5291650 - DNA, 25 bp, Homo sapien
ccgtgccccggggctccagcgcaga

SEQ ID NO: 5291651 - DNA, 25 bp, Homo sapien
ctggttccgtgccccggggctccag

SEQ ID NO: 5291652 - DNA, 25 bp, Homo sapien
cgcggccagcagcgctgcgcgtccc

SEQ ID NO: 5291653 - DNA, 25 bp, Homo sapien
agcgctgcgcgtcccgcctgcctca

SEQ ID NO: 5291654 - DNA, 25 bp, Homo sapien
tcccagggcacagctgtaccaggag

SEQ ID NO: 5291655 - DNA, 25 bp, Homo sapien
gctcccagggcacagctgtaccagg

SEQ ID NO: 5291656 - DNA, 25 bp, Homo sapien
ctccccggaggagcgtggtggctga

SEQ ID NO: 5291657 - DNA, 25 bp, Homo sapien
ctgagctgagcggagtcctggtgca

SEQ ID NO: 5291658 - DNA, 25 bp, Homo sapien
gctgggcggacgctctgagccactc

SEQ ID NO: 5291659 - DNA, 25 bp, Homo sapien
tgggcggacgctctgagccactcac

SEQ ID NO: 5291660 - DNA, 25 bp, Homo sapien
tgtcgccagccttatatagtgccag

SEQ ID NO: 5291661 - DNA, 25 bp, Homo sapien
ccagaaatgtgagaacgctgtgccg

SEQ ID NO: 5291662 - DNA, 25 bp, Homo sapien
tctgtacggtccaagattgagctcc

SEQ ID NO: 5291663 - DNA, 25 bp, Homo sapien
gcgtaaagactgctctgggacccac

SEQ ID NO: 5291664 - DNA, 25 bp, Homo sapien
catataaagggttccgggagtctct

SEQ ID NO: 5291665 - DNA, 25 bp, Homo sapien
gcattgcagggtgctagtcctctta

SEQ ID NO: 5291666 - DNA, 25 bp, Homo sapien
ggaaactggtatgcccactttgagg

SEQ ID NO: 5291667 - DNA, 25 bp, Homo sapien
gctacaagaagcctaggcagggtta

SEQ ID NO: 5291668 - DNA, 25 bp, Homo sapien
agcaacacattggacaacggccaac

SEQ ID NO: 5291669 - DNA, 25 bp, Homo sapien
gataacagcaacacattggacaacg

SEQ ID NO: 5291670 - DNA, 25 bp, Homo sapien
ttagagccgatgtgccttccaggac

SEQ ID NO: 5291671 - DNA, 25 bp, Homo sapien
gccgatgtgccttccaggacaggta

SEQ ID NO: 5291672 - DNA, 25 bp, Homo sapien
tcagcaactgtctttattgtgagtg

SEQ ID NO: 5291673 - DNA, 25 bp, Homo sapien
gccttctggtctacctctctgtcta

SEQ ID NO: 5291674 - DNA, 25 bp, Homo sapien
tctctgtctaacctaggctgcagca

SEQ ID NO: 5291675 - DNA, 25 bp, Homo sapien
tgtctgaccaggctcctacttggcc

SEQ ID NO: 5291676 - DNA, 25 bp, Homo sapien
ctccaactgttggtaacgtgggtct

SEQ ID NO: 5291677 - DNA, 25 bp, Homo sapien
tctccaactgttggtaacgtgggtc

SEQ ID NO: 5291678 - DNA, 25 bp, Homo sapien
ctgttggtaacgtgggtcttccttg

SEQ ID NO: 5291679 - DNA, 25 bp, Homo sapien
tgttggtaacgtgggtcttccttga

SEQ ID NO: 5291680 - DNA, 25 bp, Homo sapien
gaagttggctaactgcacagcaggc

SEQ ID NO: 5291681 - DNA, 25 bp, Homo sapien
ggaccaggtagaagttggctaactg

SEQ ID NO: 5291682 - DNA, 25 bp, Homo sapien
tagaagttggctaactgcacagcag

SEQ ID NO: 5291683 - DNA, 25 bp, Homo sapien
caggtagaagttggctaactgcaca

SEQ ID NO: 5291684 - DNA, 25 bp, Homo sapien
aatgtaaaggttggatggctgcccc

SEQ ID NO: 5291685 - DNA, 25 bp, Homo sapien
ccaacggaagggtttcccatgtcag

SEQ ID NO: 5291686 - DNA, 25 bp, Homo sapien
catcctgggaatgaaagagtaatcc

SEQ ID NO: 5291687 - DNA, 25 bp, Homo sapien
gaacaagcagttgaggtgtcagctc

SEQ ID NO: 5291688 - DNA, 25 bp, Homo sapien
tagttggtgataagggcatcaggat

SEQ ID NO: 5291689 - DNA, 25 bp, Homo sapien
tggtgataagggcatcaggataatc

SEQ ID NO: 5291690 - DNA, 25 bp, Homo sapien
tagtagttggtgataagggcatcag

SEQ ID NO: 5291691 - DNA, 25 bp, Homo sapien
atagtagttggtgataagggcatca

SEQ ID NO: 5291692 - DNA, 25 bp, Homo sapien
aaattaacacttgcgcctccaagca

SEQ ID NO: 5291693 - DNA, 25 bp, Homo sapien
tgcaccataaccctcagctcctctc

SEQ ID NO: 5291694 - DNA, 25 bp, Homo sapien
aagagcacattcctgcaccataacc

SEQ ID NO: 5291695 - DNA, 25 bp, Homo sapien
aggaacaaattaacacttgcgcctc

SEQ ID NO: 5291696 - DNA, 25 bp, Homo sapien
cagccagagacattctccacacctg

SEQ ID NO: 5291697 - DNA, 25 bp, Homo sapien
tatccctgtaaaacctgtcttcttc

SEQ ID NO: 5291698 - DNA, 25 bp, Homo sapien
ccgccagccagagacattctccaca

SEQ ID NO: 5291699 - DNA, 25 bp, Homo sapien
cccctggctgtcagcccgccagcca

SEQ ID NO: 5291700 - DNA, 25 bp, Homo sapien
ccgctgtagtttggcccagttgtcc

SEQ ID NO: 5291701 - DNA, 25 bp, Homo sapien
agtccattaagtgcccctaccagtg

SEQ ID NO: 5291702 - DNA, 25 bp, Homo sapien
tgtcctgggctgacagtccattaag

SEQ ID NO: 5291703 - DNA, 25 bp, Homo sapien
gagaaagcagcctagaaaacacggg

SEQ ID NO: 5291704 - DNA, 25 bp, Homo sapien
cagggatgaaccgatccaaaacctt

SEQ ID NO: 5291705 - DNA, 25 bp, Homo sapien
gatgaaccgatccaaaaccttgtac

SEQ ID NO: 5291706 - DNA, 25 bp, Homo sapien
gtgccagggatgaaccgatccaaaa

SEQ ID NO: 5291707 - DNA, 25 bp, Homo sapien
ttgtaccagcctcctaccacagggc

SEQ ID NO: 5291708 - DNA, 25 bp, Homo sapien
ggaagtaaaccccagatagcagcag

SEQ ID NO: 5291709 - DNA, 25 bp, Homo sapien
cactaagaaaaaagagggcggcagg

SEQ ID NO: 5291710 - DNA, 25 bp, Homo sapien
tccctgccccaagtatcagaatagg

SEQ ID NO: 5291711 - DNA, 25 bp, Homo sapien
gcagtgagggagccctaggcctcta

SEQ ID NO: 5291712 - DNA, 25 bp, Homo sapien
cagggacaccatggtcagagtccgg

SEQ ID NO: 5291713 - DNA, 25 bp, Homo sapien
ggacaccatggtcagagtccggcct

SEQ ID NO: 5291714 - DNA, 25 bp, Homo sapien
catggtcagagtccggcctctctgg

SEQ ID NO: 5291715 - DNA, 25 bp, Homo sapien
accatggtcagagtccggcctctct

SEQ ID NO: 5291716 - DNA, 25 bp, Homo sapien
gagataatgtcacccaggcccatca

SEQ ID NO: 5291717 - DNA, 25 bp, Homo sapien
taatgtcacccaggcccatcaggga

SEQ ID NO: 5291718 - DNA, 25 bp, Homo sapien
gtgagataatgtcacccaggcccat

SEQ ID NO: 5291719 - DNA, 25 bp, Homo sapien
ctgtgagataatgtcacccaggccc

SEQ ID NO: 5291720 - DNA, 25 bp, Homo sapien
tatgcagggtacacaggtgttgtca

SEQ ID NO: 5291721 - DNA, 25 bp, Homo sapien
ctatgcagggtacacaggtgttgtc

SEQ ID NO: 5291722 - DNA, 25 bp, Homo sapien
gaaacaaatgactagtcccttcctg

SEQ ID NO: 5291723 - DNA, 25 bp, Homo sapien
tcagaaactgggatgagcagaccca

SEQ ID NO: 5291724 - DNA, 25 bp, Homo sapien
cacataaccagtaagtgcagggcca

SEQ ID NO: 5291725 - DNA, 25 bp, Homo sapien
ccaggaactttgcattgagcagtaa

SEQ ID NO: 5291726 - DNA, 25 bp, Homo sapien
cctagactaatgcacttcctctctg

SEQ ID NO: 5291727 - DNA, 25 bp, Homo sapien
ccagggtattcctggcatgggctga

SEQ ID NO: 5291728 - DNA, 25 bp, Homo sapien
gagtgcagttggaactgaacccagg

SEQ ID NO: 5291729 - DNA, 25 bp, Homo sapien
taatgatgagtctttgagagatgag

SEQ ID NO: 5291730 - DNA, 25 bp, Homo sapien
gtggggatggcagacagcaatattc

SEQ ID NO: 5291731 - DNA, 25 bp, Homo sapien
cgtggggatggcagacagcaatatt

SEQ ID NO: 5291732 - DNA, 25 bp, Homo sapien
tcgtggggatggcagacagcaatat

SEQ ID NO: 5291733 - DNA, 25 bp, Homo sapien
ctcgtggggatggcagacagcaata

SEQ ID NO: 5291734 - DNA, 25 bp, Homo sapien
ttttgagtttcatgcgcagaaggca

SEQ ID NO: 5291735 - DNA, 25 bp, Homo sapien
tgaggagcaggaagcgtgtccttca

SEQ ID NO: 5291736 - DNA, 25 bp, Homo sapien
agcaggaagcgtgtccttcagtcca

SEQ ID NO: 5291737 - DNA, 25 bp, Homo sapien
aagcgtgtccttcagtccaggaggc

SEQ ID NO: 5291738 - DNA, 25 bp, Homo sapien
tcggcaggtatagctactggcatgg

SEQ ID NO: 5291739 - DNA, 25 bp, Homo sapien
ctgggtcggcaggtatagctactgg

SEQ ID NO: 5291740 - DNA, 25 bp, Homo sapien
ggtcggcaggtatagctactggcat

SEQ ID NO: 5291741 - DNA, 25 bp, Homo sapien
gggtcggcaggtatagctactggca

SEQ ID NO: 5291742 - DNA, 25 bp, Homo sapien
aaagacagccaacccttcaagagag

SEQ ID NO: 5291743 - DNA, 25 bp, Homo sapien
gtggggcaagcctctggcttccaaa

SEQ ID NO: 5291744 - DNA, 25 bp, Homo sapien
tcaagagagccgaatagaaacagga

SEQ ID NO: 5291745 - DNA, 25 bp, Homo sapien
tggtcccactcaagtcctagaggga

SEQ ID NO: 5291746 - DNA, 25 bp, Homo sapien
gctgtcaggacctgtactttccacg

SEQ ID NO: 5291747 - DNA, 25 bp, Homo sapien
ggacctgtactttccacgggtgagc

SEQ ID NO: 5291748 - DNA, 25 bp, Homo sapien
gcccgctggtatgcccgccagagtg

SEQ ID NO: 5291749 - DNA, 25 bp, Homo sapien
agggcccgctggtatgcccgccaga

SEQ ID NO: 5291750 - DNA, 25 bp, Homo sapien
tcaagccaagaggagagggggtcac

SEQ ID NO: 5291751 - DNA, 25 bp, Homo sapien
tgtcaagccaagaggagagggggtc

SEQ ID NO: 5291752 - DNA, 25 bp, Homo sapien
ctgtcaagccaagaggagagggggt

SEQ ID NO: 5291753 - DNA, 25 bp, Homo sapien
caagccaagaggagagggggtcacc

SEQ ID NO: 5291754 - DNA, 25 bp, Homo sapien
gccgagcctccctcccacgtgacag

SEQ ID NO: 5291755 - DNA, 25 bp, Homo sapien
ctgagcgccgagcctccctcccacg

SEQ ID NO: 5291756 - DNA, 25 bp, Homo sapien
tgagcgccgagcctccctcccacgt

SEQ ID NO: 5291757 - DNA, 25 bp, Homo sapien
agcgccgagcctccctcccacgtga

SEQ ID NO: 5291758 - DNA, 25 bp, Homo sapien
gacagcttaccctctccaactcttt

SEQ ID NO: 5291759 - DNA, 25 bp, Homo sapien
agttatatgaccttgaccttttaca

SEQ ID NO: 5291760 - DNA, 25 bp, Homo sapien
gttatatgaccttgaccttttacag

SEQ ID NO: 5291761 - DNA, 25 bp, Homo sapien
tttacagacagcttaccctctccaa

SEQ ID NO: 5291762 - DNA, 25 bp, Homo sapien
gggctgccctgtagaattgagtaaa

SEQ ID NO: 5291763 - DNA, 25 bp, Homo sapien
tacaagtgacacatgcgaagtgcct

SEQ ID NO: 5291764 - DNA, 25 bp, Homo sapien
caaggtcaagactagggctgagact

SEQ ID NO: 5291765 - DNA, 25 bp, Homo sapien
cagaaggcacttgcgtaacagctca

SEQ ID NO: 5291766 - DNA, 25 bp, Homo sapien
actgaagatatttaatctagagaag

SEQ ID NO: 5291767 - DNA, 25 bp, Homo sapien
ctgaagatatttaatctagagaaga

SEQ ID NO: 5291768 - DNA, 25 bp, Homo sapien
ggaatacttcgtaagcaggagcaag

SEQ ID NO: 5291769 - DNA, 25 bp, Homo sapien
tctgagccactgttctatcggtagg

SEQ ID NO: 5291770 - DNA, 25 bp, Homo sapien
cgaattactatcaccctcgtgggca

SEQ ID NO: 5291771 - DNA, 25 bp, Homo sapien
aaatacttaacagggcaatcacagg

SEQ ID NO: 5291772 - DNA, 25 bp, Homo sapien
gacaggagccttcatgcagataccc

SEQ ID NO: 5291773 - DNA, 25 bp, Homo sapien
gccatagtcttaggctgaggagcct

SEQ ID NO: 5291774 - DNA, 25 bp, Homo sapien
tgaccgacttcactccaaggatctg

SEQ ID NO: 5291775 - DNA, 25 bp, Homo sapien
gagcagtttgactcccaagcctagg

SEQ ID NO: 5291776 - DNA, 25 bp, Homo sapien
agaaggcgatggctggttggagaga

SEQ ID NO: 5291777 - DNA, 25 bp, Homo sapien
tgggcagaaggcgatggctggttgg

SEQ ID NO: 5291778 - DNA, 25 bp, Homo sapien
gcagaaggcgatggctggttggaga

SEQ ID NO: 5291779 - DNA, 25 bp, Homo sapien
gagtgggcagaaggcgatggctggt

SEQ ID NO: 5291780 - DNA, 25 bp, Homo sapien
gttggaacatagcattgaagtgggc

SEQ ID NO: 5291781 - DNA, 25 bp, Homo sapien
tagcattgaagtgggctcggctttc

SEQ ID NO: 5291782 - DNA, 25 bp, Homo sapien
gtgggctcggctttcaagctgcata

SEQ ID NO: 5291783 - DNA, 25 bp, Homo sapien
gaggatggttggaacatagcattga

SEQ ID NO: 5291784 - DNA, 25 bp, Homo sapien
gagtccacggacaaaatggattcga

SEQ ID NO: 5291785 - DNA, 25 bp, Homo sapien
gaggcgagtccacggacaaaatgga

SEQ ID NO: 5291786 - DNA, 25 bp, Homo sapien
aatggattcgaaccagccctgactg

SEQ ID NO: 5291787 - DNA, 25 bp, Homo sapien
gacaaaatggattcgaaccagccct

SEQ ID NO: 5291788 - DNA, 25 bp, Homo sapien
agtgaatgaggtacgtctgtcatgc

SEQ ID NO: 5291789 - DNA, 25 bp, Homo sapien
gtgaatgaggtacgtctgtcatgct

SEQ ID NO: 5291790 - DNA, 25 bp, Homo sapien
tgacagaggtaagaatgaaaagcca

SEQ ID NO: 5291791 - DNA, 25 bp, Homo sapien
tccctcctgcatgcgcagcattggt

SEQ ID NO: 5291792 - DNA, 25 bp, Homo sapien
cgcagcattggttctctacggagca

SEQ ID NO: 5291793 - DNA, 25 bp, Homo sapien
ggttctctacggagcagatcatgga

SEQ ID NO: 5291794 - DNA, 25 bp, Homo sapien
tacggagcagatcatggaatgaacc

SEQ ID NO: 5291795 - DNA, 25 bp, Homo sapien
tggccgaggctccttagttttacat

SEQ ID NO: 5291796 - DNA, 25 bp, Homo sapien
tgcccgcctaatccccccaaactgc

SEQ ID NO: 5291797 - DNA, 25 bp, Homo sapien
ctgcacctggccgaggctccttagt

SEQ ID NO: 5291798 - DNA, 25 bp, Homo sapien
gcacctggccgaggctccttagttt

SEQ ID NO: 5291799 - DNA, 25 bp, Homo sapien
tgtgtcttgaaagagcaagtagtga

SEQ ID NO: 5291800 - DNA, 25 bp, Homo sapien
tcaggactgtcctgatacggtatca

SEQ ID NO: 5291801 - DNA, 25 bp, Homo sapien
caagtagtgatggttgacagtttca

SEQ ID NO: 5291802 - DNA, 25 bp, Homo sapien
gacagtttcagtgtaagttcgagcc

SEQ ID NO: 5291803 - DNA, 25 bp, Homo sapien
gccgggagacctgacactagtttgt

SEQ ID NO: 5291804 - DNA, 25 bp, Homo sapien
tatgctcagatgcagtacggtaggg

SEQ ID NO: 5291805 - DNA, 25 bp, Homo sapien
tacggtagggaagattatatacaac

SEQ ID NO: 5291806 - DNA, 25 bp, Homo sapien
caactctgtgctaagattttctggg

SEQ ID NO: 5291807 - DNA, 25 bp, Homo sapien
cagctgctgttagatgttcgtatac

SEQ ID NO: 5291808 - DNA, 25 bp, Homo sapien
agggcatgtgggttaggatccaaca

SEQ ID NO: 5291809 - DNA, 25 bp, Homo sapien
ggttaggatccaacagctgctgtta

SEQ ID NO: 5291810 - DNA, 25 bp, Homo sapien
tgctgttagatgttcgtatacgtac

SEQ ID NO: 5291811 - DNA, 25 bp, Homo sapien
aatatagcagcaatgagctccccgg

SEQ ID NO: 5291812 - DNA, 25 bp, Homo sapien
tattggattcagtgccatatctggt

SEQ ID NO: 5291813 - DNA, 25 bp, Homo sapien
aaatcttcgctctacaggtcgcttg

SEQ ID NO: 5291814 - DNA, 25 bp, Homo sapien
cagctattgtcccaagccagtcgga

SEQ ID NO: 5291815 - DNA, 25 bp, Homo sapien
cttgaaaccaaggtaaccagcgtca

SEQ ID NO: 5291816 - DNA, 25 bp, Homo sapien
tgaagtaggccttgaaaccaaggta

SEQ ID NO: 5291817 - DNA, 25 bp, Homo sapien
ggagcagtgaagtaggccttgaaac

SEQ ID NO: 5291818 - DNA, 25 bp, Homo sapien
ggtaaccagcgtcaatataatgaat

SEQ ID NO: 5291819 - DNA, 25 bp, Homo sapien
caacaatctggcatgctttgcattc

SEQ ID NO: 5291820 - DNA, 25 bp, Homo sapien
taaaccacctcagtgaaccaactct

SEQ ID NO: 5291821 - DNA, 25 bp, Homo sapien
tagggcctgtccctagaggtcctat

SEQ ID NO: 5291822 - DNA, 25 bp, Homo sapien
tttgcattccaacccttagggcctg

SEQ ID NO: 5291823 - DNA, 25 bp, Homo sapien
cacagtgacaccattgtagggaagc

SEQ ID NO: 5291824 - DNA, 25 bp, Homo sapien
gtcactccccgcagagacaaggaaa

SEQ ID NO: 5291825 - DNA, 25 bp, Homo sapien
tcgtaaggacgtcgaaggtcccaga

SEQ ID NO: 5291826 - DNA, 25 bp, Homo sapien
ccaggccagttctgtactcaagaag

SEQ ID NO: 5291827 - DNA, 25 bp, Homo sapien
ctgttagctttgcaccattgaaggg

SEQ ID NO: 5291828 - DNA, 25 bp, Homo sapien
atcagagagccgtatccgctgcagg

SEQ ID NO: 5291829 - DNA, 25 bp, Homo sapien
cattgaagggtacgcacagcctggt

SEQ ID NO: 5291830 - DNA, 25 bp, Homo sapien
tcatgggctaggaaacactggaagg

SEQ ID NO: 5291831 - DNA, 25 bp, Homo sapien
ctctcaataggatgggattataggc

SEQ ID NO: 5291832 - DNA, 25 bp, Homo sapien
atccaggccaggctaaggcactgac

SEQ ID NO: 5291833 - DNA, 25 bp, Homo sapien
atatccagcagctaggtgttggtgg

SEQ ID NO: 5291834 - DNA, 25 bp, Homo sapien
gcatccaggccaggctaaggcactg

SEQ ID NO: 5291835 - DNA, 25 bp, Homo sapien
taatatccagcagctaggtgttggt

SEQ ID NO: 5291836 - DNA, 25 bp, Homo sapien
cacctgcagagttgccacacattgt

SEQ ID NO: 5291837 - DNA, 25 bp, Homo sapien
agcttgcatagaccccacctgcaga

SEQ ID NO: 5291838 - DNA, 25 bp, Homo sapien
gggtctgtagcttgcatagacccca

SEQ ID NO: 5291839 - DNA, 25 bp, Homo sapien
cactcagaggggtctgtagcttgca

SEQ ID NO: 5291840 - DNA, 25 bp, Homo sapien
ctaaggtagcaggttcctcactcac

SEQ ID NO: 5291841 - DNA, 25 bp, Homo sapien
gctaaggtagcaggttcctcactca

SEQ ID NO: 5291842 - DNA, 25 bp, Homo sapien
cttatatatggcaggcttcactgca

SEQ ID NO: 5291843 - DNA, 25 bp, Homo sapien
gacacaggccttctcttaaatcagc

SEQ ID NO: 5291844 - DNA, 25 bp, Homo sapien
gagcaggaactaactctatggatcc

SEQ ID NO: 5291845 - DNA, 25 bp, Homo sapien
tatggatcccaaggactcagcaggt

SEQ ID NO: 5291846 - DNA, 25 bp, Homo sapien
catattgctatgtgaacatgcccta

SEQ ID NO: 5291847 - DNA, 25 bp, Homo sapien
ctcactaagccgcccaggctacagt

SEQ ID NO: 5291848 - DNA, 25 bp, Homo sapien
ttgtcgagacgacatctcattatat

SEQ ID NO: 5291849 - DNA, 25 bp, Homo sapien
tttgtcgagacgacatctcattata

SEQ ID NO: 5291850 - DNA, 25 bp, Homo sapien
tactggaattaaggcatggaccacc

SEQ ID NO: 5291851 - DNA, 25 bp, Homo sapien
ataaattcaacatataggagctgcc

SEQ ID NO: 5291852 - DNA, 25 bp, Homo sapien
acatatgggacttcccagggctcca

SEQ ID NO: 5291853 - DNA, 25 bp, Homo sapien
tctttaaatactcagtactaatgaa

SEQ ID NO: 5291854 - DNA, 25 bp, Homo sapien
tccaccagaccaccacatatgggac

SEQ ID NO: 5291855 - DNA, 25 bp, Homo sapien
gatgggccctatctatcagcccaag

SEQ ID NO: 5291856 - DNA, 25 bp, Homo sapien
caggagaggctaagaacaggattgg

SEQ ID NO: 5291857 - DNA, 25 bp, Homo sapien
tcagcagctctttacacagccagtt

SEQ ID NO: 5291858 - DNA, 25 bp, Homo sapien
gggcaggagaggctaagaacaggat

SEQ ID NO: 5291859 - DNA, 25 bp, Homo sapien
atgtgctgaaagagtacagctgtaa

SEQ ID NO: 5291860 - DNA, 25 bp, Homo sapien
tgtgctgaaagagtacagctgtaag

SEQ ID NO: 5291861 - DNA, 25 bp, Homo sapien
gggctcaagaacaaacctgagtcac

SEQ ID NO: 5291862 - DNA, 25 bp, Homo sapien
taagagagactggcccagaggagtt

SEQ ID NO: 5291863 - DNA, 25 bp, Homo sapien
gagagagggctcaagaacaaacctg

SEQ ID NO: 5291864 - DNA, 25 bp, Homo sapien
tgtggctgagtaaggctttgtgcta

SEQ ID NO: 5291865 - DNA, 25 bp, Homo sapien
gggcctccggatggggtagactgaa

SEQ ID NO: 5291866 - DNA, 25 bp, Homo sapien
gggtagactgaatagcagtactttc

SEQ ID NO: 5291867 - DNA, 25 bp, Homo sapien
gtagactgaatagcagtactttccc

SEQ ID NO: 5291868 - DNA, 25 bp, Homo sapien
agactgaatagcagtactttcccgt

SEQ ID NO: 5291869 - DNA, 25 bp, Homo sapien
aggccagagccaagagacccaaccg

SEQ ID NO: 5291870 - DNA, 25 bp, Homo sapien
agagccaagagacccaaccggggca

SEQ ID NO: 5291871 - DNA, 25 bp, Homo sapien
gccagagccaagagacccaaccggg

SEQ ID NO: 5291872 - DNA, 25 bp, Homo sapien
agcaggccagagccaagagacccaa

SEQ ID NO: 5291873 - DNA, 25 bp, Homo sapien
ctttgagtcctagggccatcccaca

SEQ ID NO: 5291874 - DNA, 25 bp, Homo sapien
ttcaactctaagaattcccagggcc

SEQ ID NO: 5291875 - DNA, 25 bp, Homo sapien
cttcgttccttcaactctaagaatt

SEQ ID NO: 5291876 - DNA, 25 bp, Homo sapien
ccatcccacagttgactgggaagta

SEQ ID NO: 5291877 - DNA, 25 bp, Homo sapien
tcccagatgcagccgttgtcacaag

SEQ ID NO: 5291878 - DNA, 25 bp, Homo sapien
cagatgcagccgttgtcacaagcaa

SEQ ID NO: 5291879 - DNA, 25 bp, Homo sapien
caatcccatagacaaagtgggccct

SEQ ID NO: 5291880 - DNA, 25 bp, Homo sapien
gtcacaagcaatcccatagacaaag

SEQ ID NO: 5291881 - DNA, 25 bp, Homo sapien
acgcagggctgccagaggtaagctc

SEQ ID NO: 5291882 - DNA, 25 bp, Homo sapien
catggcagtgtccaaccccacctca

SEQ ID NO: 5291883 - DNA, 25 bp, Homo sapien
ttgtctcagcccaatccaagccctt

SEQ ID NO: 5291884 - DNA, 25 bp, Homo sapien
tggtgggtaggaagaagggacgcag

SEQ ID NO: 5291885 - DNA, 25 bp, Homo sapien
agctttcttgctgcaaggtcccaag

SEQ ID NO: 5291886 - DNA, 25 bp, Homo sapien
atattgcgaggctcctgccccctct

SEQ ID NO: 5291887 - DNA, 25 bp, Homo sapien
tgaagaaggacacatcccagcgctc

SEQ ID NO: 5291888 - DNA, 25 bp, Homo sapien
ctggatgtgctgtgatcgagctaaa

SEQ ID NO: 5291889 - DNA, 25 bp, Homo sapien
cagagcggtccccccgtgaagaagg

SEQ ID NO: 5291890 - DNA, 25 bp, Homo sapien
tatgaactggctcaagcaagagcct

SEQ ID NO: 5291891 - DNA, 25 bp, Homo sapien
taatgaggactgaatgggcgctcca

SEQ ID NO: 5291892 - DNA, 25 bp, Homo sapien
gtccttggcttccacttgtatcttc

SEQ ID NO: 5291893 - DNA, 25 bp, Homo sapien
acaagtgagaacagagtccttggct

SEQ ID NO: 5291894 - DNA, 25 bp, Homo sapien
ctgtttattcggtagagggtgccat

SEQ ID NO: 5291895 - DNA, 25 bp, Homo sapien
tcaggtagcccttcacgttgtacag

SEQ ID NO: 5291896 - DNA, 25 bp, Homo sapien
ttcggtagagggtgccatcttcagg

SEQ ID NO: 5291897 - DNA, 25 bp, Homo sapien
ttattcggtagagggtgccatcttc

SEQ ID NO: 5291898 - DNA, 25 bp, Homo sapien
ctggggcaggtagggagcggcctca

SEQ ID NO: 5291899 - DNA, 25 bp, Homo sapien
gctaaaggaatccactcagcaaact

SEQ ID NO: 5291900 - DNA, 25 bp, Homo sapien
ctcagcaaactcccagtatgaatgt

SEQ ID NO: 5291901 - DNA, 25 bp, Homo sapien
ggctaaaggaatccactcagcaaac

SEQ ID NO: 5291902 - DNA, 25 bp, Homo sapien
ctaaaggaatccactcagcaaactc

SEQ ID NO: 5291903 - DNA, 25 bp, Homo sapien
cgcccttgcactcctctaccacccc

SEQ ID NO: 5291904 - DNA, 25 bp, Homo sapien
cggccccacttcaataccgcccttg

SEQ ID NO: 5291905 - DNA, 25 bp, Homo sapien
cccacttcaataccgcccttgcact

SEQ ID NO: 5291906 - DNA, 25 bp, Homo sapien
cacggccccacttcaataccgccct

SEQ ID NO: 5291907 - DNA, 25 bp, Homo sapien
cacttccaaacaggagccatgatat

SEQ ID NO: 5291908 - DNA, 25 bp, Homo sapien
gcacttccaaacaggagccatgata

SEQ ID NO: 5291909 - DNA, 25 bp, Homo sapien
gtccttggtgagatggaggcacttc

SEQ ID NO: 5291910 - DNA, 25 bp, Homo sapien
ggcacttccaaacaggagccatgat

SEQ ID NO: 5291911 - DNA, 25 bp, Homo sapien
tcctccatcgaaaatgcaaaatctg

SEQ ID NO: 5291912 - DNA, 25 bp, Homo sapien
ctctttgaaactcccgccctatgga

SEQ ID NO: 5291913 - DNA, 25 bp, Homo sapien
caaattctacaggttggacaaagtc

SEQ ID NO: 5291914 - DNA, 25 bp, Homo sapien
catctccatggtatttgattcacag

SEQ ID NO: 5291915 - DNA, 25 bp, Homo sapien
tacaactttactccaggctctatgc

SEQ ID NO: 5291916 - DNA, 25 bp, Homo sapien
tccagtttaatctcgcctacaactt

SEQ ID NO: 5291917 - DNA, 25 bp, Homo sapien
ggtagtgctgattgcactgtgaact

SEQ ID NO: 5291918 - DNA, 25 bp, Homo sapien
gctccagccataatcaatttatggg

SEQ ID NO: 5291919 - DNA, 25 bp, Homo sapien
cctttctcagtaccttgctggtccc

SEQ ID NO: 5291920 - DNA, 25 bp, Homo sapien
tatgtccccattcactttcttgtcc

SEQ ID NO: 5291921 - DNA, 25 bp, Homo sapien
ccattcactttcttgtccattgagg

SEQ ID NO: 5291922 - DNA, 25 bp, Homo sapien
tcactttcttgtccattgaggttac

SEQ ID NO: 5291923 - DNA, 25 bp, Homo sapien
cattcactttcttgtccattgaggt

SEQ ID NO: 5291924 - DNA, 25 bp, Homo sapien
cctgaagtagatcctcgtggggtgc

SEQ ID NO: 5291925 - DNA, 25 bp, Homo sapien
actacaggctcaggttcagatgagc

SEQ ID NO: 5291926 - DNA, 25 bp, Homo sapien
ttcggggcactacaggctcaggttc

SEQ ID NO: 5291927 - DNA, 25 bp, Homo sapien
ggtgcttcggggcactacaggctca

SEQ ID NO: 5291928 - DNA, 25 bp, Homo sapien
tgccggatcttcttcggtttggtgg

SEQ ID NO: 5291929 - DNA, 25 bp, Homo sapien
tgctggctgccggatcttcttcggt

SEQ ID NO: 5291930 - DNA, 25 bp, Homo sapien
aaaagtcttcatcccgtggagcacc

SEQ ID NO: 5291931 - DNA, 25 bp, Homo sapien
cagttcctgaagatacagaagtgcc

SEQ ID NO: 5291932 - DNA, 25 bp, Homo sapien
tgccttggactttcgacctcgtttc

SEQ ID NO: 5291933 - DNA, 25 bp, Homo sapien
ttcgacctcgtttcttaggcatggg

SEQ ID NO: 5291934 - DNA, 25 bp, Homo sapien
tctaggtcttttgacaacttcagca

SEQ ID NO: 5291935 - DNA, 25 bp, Homo sapien
gggcctctttggagattgagattct

SEQ ID NO: 5291936 - DNA, 25 bp, Homo sapien
ggctgatggaggattaggctgttgg

SEQ ID NO: 5291937 - DNA, 25 bp, Homo sapien
tgatggaggattaggctgttggggc

SEQ ID NO: 5291938 - DNA, 25 bp, Homo sapien
ctgatggaggattaggctgttgggg

SEQ ID NO: 5291939 - DNA, 25 bp, Homo sapien
gctgatggaggattaggctgttggg

SEQ ID NO: 5291940 - DNA, 25 bp, Homo sapien
tcctaccacctctcttccggccagg

SEQ ID NO: 5291941 - DNA, 25 bp, Homo sapien
gccttttcgtgtcctaccacctctc

SEQ ID NO: 5291942 - DNA, 25 bp, Homo sapien
accacctctcttccggccaggcttt

SEQ ID NO: 5291943 - DNA, 25 bp, Homo sapien
tcgtgtcctaccacctctcttccgg

SEQ ID NO: 5291944 - DNA, 25 bp, Homo sapien
tgtccaggagagtctaccacagtca

SEQ ID NO: 5291945 - DNA, 25 bp, Homo sapien
gggagcctcctctgatcaggagaat

SEQ ID NO: 5291946 - DNA, 25 bp, Homo sapien
taggtaatgacatctctacggaagc

SEQ ID NO: 5291947 - DNA, 25 bp, Homo sapien
gagaatcctcaaatccaggcaaagg

SEQ ID NO: 5291948 - DNA, 25 bp, Homo sapien
ccccagggcaacatagccgaccccg

SEQ ID NO: 5291949 - DNA, 25 bp, Homo sapien
ggcaacatagccgaccccgcaggta

SEQ ID NO: 5291950 - DNA, 25 bp, Homo sapien
tcccccagggcaacatagccgaccc

SEQ ID NO: 5291951 - DNA, 25 bp, Homo sapien
catagccgaccccgcaggtatccat

SEQ ID NO: 5291952 - DNA, 25 bp, Homo sapien
tattaaatgctaactatgtgccaag

SEQ ID NO: 5291953 - DNA, 25 bp, Homo sapien
catgaatctaggaaagggacaccaa

SEQ ID NO: 5291954 - DNA, 25 bp, Homo sapien
gaaaaatttgtctagcatgaatcta

SEQ ID NO: 5291955 - DNA, 25 bp, Homo sapien
gagctgccagatactacaaaattta

SEQ ID NO: 5291956 - DNA, 25 bp, Homo sapien
ccttgtcctccagagctcaagcaat

SEQ ID NO: 5291957 - DNA, 25 bp, Homo sapien
gcagccttgtcctccagagctcaag

SEQ ID NO: 5291958 - DNA, 25 bp, Homo sapien
agccttgtcctccagagctcaagca

SEQ ID NO: 5291959 - DNA, 25 bp, Homo sapien
tgcagccttgtcctccagagctcaa

SEQ ID NO: 5291960 - DNA, 25 bp, Homo sapien
caatacgcccagatacgtttttaat

SEQ ID NO: 5291961 - DNA, 25 bp, Homo sapien
aagcaattctctcaacttcgtctcc

SEQ ID NO: 5291962 - DNA, 25 bp, Homo sapien
tagccaagacttcaaatgtgcacca

SEQ ID NO: 5291963 - DNA, 25 bp, Homo sapien
tctctcaacttcgtctcccaaaatg

SEQ ID NO: 5291964 - DNA, 25 bp, Homo sapien
gcagaaaggaattcactacacggta

SEQ ID NO: 5291965 - DNA, 25 bp, Homo sapien
tctccaatcagttcaagcagaaagg

SEQ ID NO: 5291966 - DNA, 25 bp, Homo sapien
ttaaacagttcatatcagaggttca

SEQ ID NO: 5291967 - DNA, 25 bp, Homo sapien
ttcacaaagtgtggccccagaaact

SEQ ID NO: 5291968 - DNA, 25 bp, Homo sapien
agctcttcaggggattctgacgcac

SEQ ID NO: 5291969 - DNA, 25 bp, Homo sapien
aatcagcaattctggatggggccag

SEQ ID NO: 5291970 - DNA, 25 bp, Homo sapien
gcaattctggatggggccagcacct

SEQ ID NO: 5291971 - DNA, 25 bp, Homo sapien
tcttcaggggattctgacgcacact

SEQ ID NO: 5291972 - DNA, 25 bp, Homo sapien
gggaaggtgctcttatttacagctg

SEQ ID NO: 5291973 - DNA, 25 bp, Homo sapien
gaacaagtgcttatcaaactgggaa

SEQ ID NO: 5291974 - DNA, 25 bp, Homo sapien
aaaacagttggtaggaacaagtgct

SEQ ID NO: 5291975 - DNA, 25 bp, Homo sapien
cataaataaatgatcacgatgaggg

SEQ ID NO: 5291976 - DNA, 25 bp, Homo sapien
gacacagctgaaagagattgaccca

SEQ ID NO: 5291977 - DNA, 25 bp, Homo sapien
cttgccacgggacaaaaggactaga

SEQ ID NO: 5291978 - DNA, 25 bp, Homo sapien
aacaaagtgagttgcctccgacgga

SEQ ID NO: 5291979 - DNA, 25 bp, Homo sapien
gactactgtaggttcgccgagttcg

SEQ ID NO: 5291980 - DNA, 25 bp, Homo sapien
ggaaggtgcggagcatgatggtgct

SEQ ID NO: 5291981 - DNA, 25 bp, Homo sapien
acggtggccacagtagggaaggtgc

SEQ ID NO: 5291982 - DNA, 25 bp, Homo sapien
ggcaagacccgaggcttgcagagat

SEQ ID NO: 5291983 - DNA, 25 bp, Homo sapien
tgctctgtaggagcgcagacgctga

SEQ ID NO: 5291984 - DNA, 25 bp, Homo sapien
agcggagccaggagtttgttcccaa

SEQ ID NO: 5291985 - DNA, 25 bp, Homo sapien
gagcggagccaggagtttgttccca

SEQ ID NO: 5291986 - DNA, 25 bp, Homo sapien
gcggagccaggagtttgttcccaat

SEQ ID NO: 5291987 - DNA, 25 bp, Homo sapien
gccccccacacacccgctgcggcga

SEQ ID NO: 5291988 - DNA, 25 bp, Homo sapien
tgttagctgctcttcactgacgccc

SEQ ID NO: 5291989 - DNA, 25 bp, Homo sapien
aagtctaagttcgaagatggcgccg

SEQ ID NO: 5291990 - DNA, 25 bp, Homo sapien
taaacacgtgtgcttggtccggagt

SEQ ID NO: 5291991 - DNA, 25 bp, Homo sapien
tgtattccataatgcagcgcggcca

SEQ ID NO: 5291992 - DNA, 25 bp, Homo sapien
cgccggccgctggaggattctgcca

SEQ ID NO: 5291993 - DNA, 25 bp, Homo sapien
ggcgtccgagcccaaggcggagtct

SEQ ID NO: 5291994 - DNA, 25 bp, Homo sapien
cccaaggcggagtctgggagacaaa

SEQ ID NO: 5291995 - DNA, 25 bp, Homo sapien
tctgccagtagtgaagtcagggatg

SEQ ID NO: 5291996 - DNA, 25 bp, Homo sapien
agaggacaaggaagggaaggagtag

SEQ ID NO: 5291997 - DNA, 25 bp, Homo sapien
gggaaggagtaggagtagaaaagca

SEQ ID NO: 5291998 - DNA, 25 bp, Homo sapien
ggaaggagtaggagtagaaaagcat

SEQ ID NO: 5291999 - DNA, 25 bp, Homo sapien
caaggaagggaaggagtaggagtag

SEQ ID NO: 5292000 - DNA, 25 bp, Homo sapien
tcacactgctataagtaaccttgca

SEQ ID NO: 5292001 - DNA, 25 bp, Homo sapien
ggtggatgtggtataactagtgcct

SEQ ID NO: 5292002 - DNA, 25 bp, Homo sapien
cccttgctattataaatcacactgc

SEQ ID NO: 5292003 - DNA, 25 bp, Homo sapien
gcctctaatttctactaggtgtttg

SEQ ID NO: 5292004 - DNA, 25 bp, Homo sapien
ggagtatggcatttattaaccctgt

SEQ ID NO: 5292005 - DNA, 25 bp, Homo sapien
gagtatggcatttattaaccctgtg

SEQ ID NO: 5292006 - DNA, 25 bp, Homo sapien
agggagtatggcatttattaaccct

SEQ ID NO: 5292007 - DNA, 25 bp, Homo sapien
agtatggcatttattaaccctgtgt

SEQ ID NO: 5292008 - DNA, 25 bp, Homo sapien
tggttctgccagttagccagcgcaa

SEQ ID NO: 5292009 - DNA, 25 bp, Homo sapien
tgctcttgactcgtagaacaacagg

SEQ ID NO: 5292010 - DNA, 25 bp, Homo sapien
tagactagattcaacaaccgtaggg

SEQ ID NO: 5292011 - DNA, 25 bp, Homo sapien
gcttacattgcagatcatcagggtc

SEQ ID NO: 5292012 - DNA, 25 bp, Homo sapien
cccgttggccaagagtgcatgagct

SEQ ID NO: 5292013 - DNA, 25 bp, Homo sapien
tgcatgagctcccaatagcaccttg

SEQ ID NO: 5292014 - DNA, 25 bp, Homo sapien
ctcattagagacaaaggcatcagtc

SEQ ID NO: 5292015 - DNA, 25 bp, Homo sapien
ggctcgagccaccagggctaactgt

SEQ ID NO: 5292016 - DNA, 25 bp, Homo sapien
gcaacattaagacaagtaataaatc

SEQ ID NO: 5292017 - DNA, 25 bp, Homo sapien
ataaggtcccctacttacaggacag

SEQ ID NO: 5292018 - DNA, 25 bp, Homo sapien
cttacaggacagcaacattaagaca

SEQ ID NO: 5292019 - DNA, 25 bp, Homo sapien
caaaaacagacaacaagtaataaat

SEQ ID NO: 5292020 - DNA, 25 bp, Homo sapien
tgacctcgtgaactgccctcctcgg

SEQ ID NO: 5292021 - DNA, 25 bp, Homo sapien
gaactgccctcctcggcctcccaaa

SEQ ID NO: 5292022 - DNA, 25 bp, Homo sapien
tgttagccaggatgattgtgaactc

SEQ ID NO: 5292023 - DNA, 25 bp, Homo sapien
gttagccaggatgattgtgaactcc

SEQ ID NO: 5292024 - DNA, 25 bp, Homo sapien
ctgctgtaatatactgtcagtgttt

SEQ ID NO: 5292025 - DNA, 25 bp, Homo sapien
gtaatgtttttgcaatagctagact

SEQ ID NO: 5292026 - DNA, 25 bp, Homo sapien
ccaccaaatctcccacaggaaaagt

SEQ ID NO: 5292027 - DNA, 25 bp, Homo sapien
cttcctggttgctagtttaatgtaa

SEQ ID NO: 5292028 - DNA, 25 bp, Homo sapien
ggcaatgtagcgatatcccatctct

SEQ ID NO: 5292029 - DNA, 25 bp, Homo sapien
gaaggtgagattatgtctatactac

SEQ ID NO: 5292030 - DNA, 25 bp, Homo sapien
caagccagggctatataattctaat

SEQ ID NO: 5292031 - DNA, 25 bp, Homo sapien
caggcattgagccatggcaccaagc

SEQ ID NO: 5292032 - DNA, 25 bp, Homo sapien
cctctgtccaagcctcctgaagaat

SEQ ID NO: 5292033 - DNA, 25 bp, Homo sapien
cagcatggactagagaacgtagtgt

SEQ ID NO: 5292034 - DNA, 25 bp, Homo sapien
ttccttccagccatggccggctgtc

SEQ ID NO: 5292035 - DNA, 25 bp, Homo sapien
gaggctgcaggaatcagcaggtagg

SEQ ID NO: 5292036 - DNA, 25 bp, Homo sapien
cattccaactcccaatctgctcagt

SEQ ID NO: 5292037 - DNA, 25 bp, Homo sapien
tgaatgaagaggaggattcagttat

SEQ ID NO: 5292038 - DNA, 25 bp, Homo sapien
cagttataaatgtcagtaactgatg

SEQ ID NO: 5292039 - DNA, 25 bp, Homo sapien
tattcccaaaggcaagtgggtagtc

SEQ ID NO: 5292040 - DNA, 25 bp, Homo sapien
tctggtaagcaaagcgtgaaattgc

SEQ ID NO: 5292041 - DNA, 25 bp, Homo sapien
caggatcacatctccattactgatc

SEQ ID NO: 5292042 - DNA, 25 bp, Homo sapien
gatcttctggtaagcaaagcgtgaa

SEQ ID NO: 5292043 - DNA, 25 bp, Homo sapien
aagcaaagcgtgaaattgcctgagc

SEQ ID NO: 5292044 - DNA, 25 bp, Homo sapien
tggctgctcgaagttctgacttggc

SEQ ID NO: 5292045 - DNA, 25 bp, Homo sapien
aatggctgctcgaagttctgacttg

SEQ ID NO: 5292046 - DNA, 25 bp, Homo sapien
tcaatggctgctcgaagttctgact

SEQ ID NO: 5292047 - DNA, 25 bp, Homo sapien
cgatcaatggctgctcgaagttctg

SEQ ID NO: 5292048 - DNA, 25 bp, Homo sapien
cagagatggcacaagtcagaatggc

SEQ ID NO: 5292049 - DNA, 25 bp, Homo sapien
tgaatatgtgtatgatgacaagcct

SEQ ID NO: 5292050 - DNA, 25 bp, Homo sapien
cattccttaacccttgactagggca

SEQ ID NO: 5292051 - DNA, 25 bp, Homo sapien
gacaagcctatagagggctcagaga

SEQ ID NO: 5292052 - DNA, 25 bp, Homo sapien
atgccttccttatttctcatactca

SEQ ID NO: 5292053 - DNA, 25 bp, Homo sapien
catgccttccttatttctcatactc

SEQ ID NO: 5292054 - DNA, 25 bp, Homo sapien
acaggtgcatgccttccttatttct

SEQ ID NO: 5292055 - DNA, 25 bp, Homo sapien
ggtgcatgccttccttatttctcat

SEQ ID NO: 5292056 - DNA, 25 bp, Homo sapien
acttgatggcgttgtgcatgctcgc

SEQ ID NO: 5292057 - DNA, 25 bp, Homo sapien
tgttaaggaacttgatggcgttgtg

SEQ ID NO: 5292058 - DNA, 25 bp, Homo sapien
tcctcttcccgcttggaactgccca

SEQ ID NO: 5292059 - DNA, 25 bp, Homo sapien
atggcgttgtgcatgctcgctgaca

SEQ ID NO: 5292060 - DNA, 25 bp, Homo sapien
caagacaaagattgggcgagctggg

SEQ ID NO: 5292061 - DNA, 25 bp, Homo sapien
tcttcacaacttacaaagccttcac

SEQ ID NO: 5292062 - DNA, 25 bp, Homo sapien
ctgggagtggacttatagtgttgtc

SEQ ID NO: 5292063 - DNA, 25 bp, Homo sapien
caacagcaataccttatatctgcgc

SEQ ID NO: 5292064 - DNA, 25 bp, Homo sapien
ggcggtgttgtgtaatcctgaatca

SEQ ID NO: 5292065 - DNA, 25 bp, Homo sapien
gagttcttcattaggcggtgttgtg

SEQ ID NO: 5292066 - DNA, 25 bp, Homo sapien
ttcattaggcggtgttgtgtaatcc

SEQ ID NO: 5292067 - DNA, 25 bp, Homo sapien
agatccctggagagttcttcattag

SEQ ID NO: 5292068 - DNA, 25 bp, Homo sapien
ccccttaataaagatctctgaacgg

SEQ ID NO: 5292069 - DNA, 25 bp, Homo sapien
taagagagaacaggatgggacatac

SEQ ID NO: 5292070 - DNA, 25 bp, Homo sapien
tgttctgagggtaggagtattccct

SEQ ID NO: 5292071 - DNA, 25 bp, Homo sapien
tatagggtacacaaggtgatctgca

SEQ ID NO: 5292072 - DNA, 25 bp, Homo sapien
caccgggcattggagccactgacca

SEQ ID NO: 5292073 - DNA, 25 bp, Homo sapien
gcagggcaatacaccgggcattgga

SEQ ID NO: 5292074 - DNA, 25 bp, Homo sapien
aaggcacgaagcagggcaatacacc

SEQ ID NO: 5292075 - DNA, 25 bp, Homo sapien
tgctgcaaggcacgaagcagggcaa

SEQ ID NO: 5292076 - DNA, 25 bp, Homo sapien
tgggtggatcacagaggatgggatg

SEQ ID NO: 5292077 - DNA, 25 bp, Homo sapien
ctgggtggatcacagaggatgggat

SEQ ID NO: 5292078 - DNA, 25 bp, Homo sapien
gatgggatggcggtgtcacatactt

SEQ ID NO: 5292079 - DNA, 25 bp, Homo sapien
ctgatgggatggcggtgtcacatac

SEQ ID NO: 5292080 - DNA, 25 bp, Homo sapien
atgggatggcggtgtcacatacttt

SEQ ID NO: 5292081 - DNA, 25 bp, Homo sapien
tgggatggcggtgtcacatactttg

SEQ ID NO: 5292082 - DNA, 25 bp, Homo sapien
acagttctgccttgggttcatactt

SEQ ID NO: 5292083 - DNA, 25 bp, Homo sapien
ctacagttctgccttgggttcatac

SEQ ID NO: 5292084 - DNA, 25 bp, Homo sapien
tttccccactcctctacagttctgc

SEQ ID NO: 5292085 - DNA, 25 bp, Homo sapien
ttccccactcctctacagttctgcc

SEQ ID NO: 5292086 - DNA, 25 bp, Homo sapien
actcctcagactcaaaagttatgac

SEQ ID NO: 5292087 - DNA, 25 bp, Homo sapien
cctcagactcaaaagttatgacaat

SEQ ID NO: 5292088 - DNA, 25 bp, Homo sapien
aaactcctcagactcaaaagttatg

SEQ ID NO: 5292089 - DNA, 25 bp, Homo sapien
ctcctcagactcaaaagttatgaca

SEQ ID NO: 5292090 - DNA, 25 bp, Homo sapien
agaagagactgactttggatccata

SEQ ID NO: 5292091 - DNA, 25 bp, Homo sapien
tgagagaagagactgactttggatc

SEQ ID NO: 5292092 - DNA, 25 bp, Homo sapien
gagaagagactgactttggatccat

SEQ ID NO: 5292093 - DNA, 25 bp, Homo sapien
gagagaagagactgactttggatcc

SEQ ID NO: 5292094 - DNA, 25 bp, Homo sapien
gggaacaggaccaatggcccagagt

SEQ ID NO: 5292095 - DNA, 25 bp, Homo sapien
ggaacaggaccaatggcccagagtt

SEQ ID NO: 5292096 - DNA, 25 bp, Homo sapien
caagggaacaggaccaatggcccag

SEQ ID NO: 5292097 - DNA, 25 bp, Homo sapien
aagggaacaggaccaatggcccaga

SEQ ID NO: 5292098 - DNA, 25 bp, Homo sapien
atttccctaggctctttctagccag

SEQ ID NO: 5292099 - DNA, 25 bp, Homo sapien
tccctaggctctttctagccaggca

SEQ ID NO: 5292100 - DNA, 25 bp, Homo sapien
cagtaagactactctgacccaagca

SEQ ID NO: 5292101 - DNA, 25 bp, Homo sapien
taagactactctgacccaagcacct

SEQ ID NO: 5292102 - DNA, 25 bp, Homo sapien
taggtcatcaacctgagggtactca

SEQ ID NO: 5292103 - DNA, 25 bp, Homo sapien
gggtactcagggagacgcttcactc

SEQ ID NO: 5292104 - DNA, 25 bp, Homo sapien
caacctgagggtactcagggagacg

SEQ ID NO: 5292105 - DNA, 25 bp, Homo sapien
gccttctcagaagtaggtcatcaac

SEQ ID NO: 5292106 - DNA, 25 bp, Homo sapien
caggaacaattcagaactctgggtc

SEQ ID NO: 5292107 - DNA, 25 bp, Homo sapien
gggagagctgttttactattgggca

SEQ ID NO: 5292108 - DNA, 25 bp, Homo sapien
gcagcctgagctggcgttataatta

SEQ ID NO: 5292109 - DNA, 25 bp, Homo sapien
caggacactgtaggtcttgaaatgt

SEQ ID NO: 5292110 - DNA, 25 bp, Homo sapien
gggctggccttaggaggtggtcctc

SEQ ID NO: 5292111 - DNA, 25 bp, Homo sapien
ctggggctggccttaggaggtggtc

SEQ ID NO: 5292112 - DNA, 25 bp, Homo sapien
ctggccttaggaggtggtcctcctt

SEQ ID NO: 5292113 - DNA, 25 bp, Homo sapien
ctgagggggtttctccagctgtgct

SEQ ID NO: 5292114 - DNA, 25 bp, Homo sapien
tgcttggctcgacgctcagcccgaa

SEQ ID NO: 5292115 - DNA, 25 bp, Homo sapien
cctcctgcttggctcgacgctcagc

SEQ ID NO: 5292116 - DNA, 25 bp, Homo sapien
cgaagttcggccttactccgaccag

SEQ ID NO: 5292117 - DNA, 25 bp, Homo sapien
gctcgacgctcagcccgaagttcgg

SEQ ID NO: 5292118 - DNA, 25 bp, Homo sapien
gattctggcagttctctggttgggc

SEQ ID NO: 5292119 - DNA, 25 bp, Homo sapien
tgcccaactgaatgcccgattctgg

SEQ ID NO: 5292120 - DNA, 25 bp, Homo sapien
ccgaggagtgcccaactgaatgccc

SEQ ID NO: 5292121 - DNA, 25 bp, Homo sapien
ctggaactttctcccgaggagtgcc

SEQ ID NO: 5292122 - DNA, 25 bp, Homo sapien
cttccgaagctgcagcttttcttct

SEQ ID NO: 5292123 - DNA, 25 bp, Homo sapien
ttttccttccgaagctgcagctttt

SEQ ID NO: 5292124 - DNA, 25 bp, Homo sapien
cattgggctgcagatacagcagagc

SEQ ID NO: 5292125 - DNA, 25 bp, Homo sapien
cttgacattgggctgcagatacagc

SEQ ID NO: 5292126 - DNA, 25 bp, Homo sapien
ccagggggaagctccgccttcatcc

SEQ ID NO: 5292127 - DNA, 25 bp, Homo sapien
cagggggaagctccgccttcatccc

SEQ ID NO: 5292128 - DNA, 25 bp, Homo sapien
cccagggggaagctccgccttcatc

SEQ ID NO: 5292129 - DNA, 25 bp, Homo sapien
agggggaagctccgccttcatcccg

SEQ ID NO: 5292130 - DNA, 25 bp, Homo sapien
ccagagagactccgggagggtttgg

SEQ ID NO: 5292131 - DNA, 25 bp, Homo sapien
tgggggcacgagtactcggcgcagc

SEQ ID NO: 5292132 - DNA, 25 bp, Homo sapien
tcggcgcagccggctgctgggttgg

SEQ ID NO: 5292133 - DNA, 25 bp, Homo sapien
cagaaaacagggcacaaagtgagcc

SEQ ID NO: 5292134 - DNA, 25 bp, Homo sapien
cggatccgccggcaggcgcgaggcg

SEQ ID NO: 5292135 - DNA, 25 bp, Homo sapien
actgcgcggcggatcaaaggaatgg

SEQ ID NO: 5292136 - DNA, 25 bp, Homo sapien
cgaggcgagccagggatccgcgtgg

SEQ ID NO: 5292137 - DNA, 25 bp, Homo sapien
gatccgcgtggggacgcactgcgcg

SEQ ID NO: 5292138 - DNA, 25 bp, Homo sapien
gtcggctccgcgtaccagtaggcag

SEQ ID NO: 5292139 - DNA, 25 bp, Homo sapien
gactgcgctcgagactgtgtagacc

SEQ ID NO: 5292140 - DNA, 25 bp, Homo sapien
actagctgtccggagctcgtcggct

SEQ ID NO: 5292141 - DNA, 25 bp, Homo sapien
aaaggcgctcaaggcccggcactag

SEQ ID NO: 5292142 - DNA, 25 bp, Homo sapien
tcgcgaacagccacggccacagcag

SEQ ID NO: 5292143 - DNA, 25 bp, Homo sapien
gcgaacagccacggccacagcagcc

SEQ ID NO: 5292144 - DNA, 25 bp, Homo sapien
cctcgcgaacagccacggccacagc

SEQ ID NO: 5292145 - DNA, 25 bp, Homo sapien
gaacagccacggccacagcagccat

SEQ ID NO: 5292146 - DNA, 25 bp, Homo sapien
ctgagccgcagaagcgaagcgcgca

SEQ ID NO: 5292147 - DNA, 25 bp, Homo sapien
gaggctgagccgcagaagcgaagcg

SEQ ID NO: 5292148 - DNA, 25 bp, Homo sapien
tcagtcctaggctccgcccgccgtg

SEQ ID NO: 5292149 - DNA, 25 bp, Homo sapien
tggaggctgagccgcagaagcgaag

SEQ ID NO: 5292150 - DNA, 25 bp, Homo sapien
tcaaggcaagggacaaggcagtgct

SEQ ID NO: 5292151 - DNA, 25 bp, Homo sapien
gaataaagacacacaagggacctag

SEQ ID NO: 5292152 - DNA, 25 bp, Homo sapien
tagagttgggcataggtcaaggcaa

SEQ ID NO: 5292153 - DNA, 25 bp, Homo sapien
cagaaagttctggtcaacgtgctaa

SEQ ID NO: 5292154 - DNA, 25 bp, Homo sapien
tattttgcacaaagtctaagggacc

SEQ ID NO: 5292155 - DNA, 25 bp, Homo sapien
gatgtctgccctctaccccagagga

SEQ ID NO: 5292156 - DNA, 25 bp, Homo sapien
ggaggaaccatatctccctctgggc

SEQ ID NO: 5292157 - DNA, 25 bp, Homo sapien
ggtctggcccagttccccatcatta

SEQ ID NO: 5292158 - DNA, 25 bp, Homo sapien
gcccttctcactgagctcgtgaagt

SEQ ID NO: 5292159 - DNA, 25 bp, Homo sapien
tgggctggtccttatagtgcctacg

SEQ ID NO: 5292160 - DNA, 25 bp, Homo sapien
ggaggtgaatacagggcccttctca

SEQ ID NO: 5292161 - DNA, 25 bp, Homo sapien
ctcagtcaaggcaaggtcccctggt

SEQ ID NO: 5292162 - DNA, 25 bp, Homo sapien
tgtataaaacatggggaagaaggac

SEQ ID NO: 5292163 - DNA, 25 bp, Homo sapien
ctgtataaaacatggggaagaagga

SEQ ID NO: 5292164 - DNA, 25 bp, Homo sapien
caaaacagagggtgggctatgaggt

SEQ ID NO: 5292165 - DNA, 25 bp, Homo sapien
tggtgggccccgagagctcaaaaca

SEQ ID NO: 5292166 - DNA, 25 bp, Homo sapien
tcaggatgagtctgtgtggacagcc

SEQ ID NO: 5292167 - DNA, 25 bp, Homo sapien
atgagtctgtgtggacagcccggct

SEQ ID NO: 5292168 - DNA, 25 bp, Homo sapien
tcaggttatccagatgagcagaggc

SEQ ID NO: 5292169 - DNA, 25 bp, Homo sapien
tgtgccgcagcatgtgacgtttgag

SEQ ID NO: 5292170 - DNA, 25 bp, Homo sapien
gagtggatgcgaccatgacgcttga

SEQ ID NO: 5292171 - DNA, 25 bp, Homo sapien
gacgcttgaggttggccagattgcc

SEQ ID NO: 5292172 - DNA, 25 bp, Homo sapien
gccgggccaggtggttgggatagtg

SEQ ID NO: 5292173 - DNA, 25 bp, Homo sapien
caggtggttgggatagtgagtggca

SEQ ID NO: 5292174 - DNA, 25 bp, Homo sapien
ggccaggtggttgggatagtgagtg

SEQ ID NO: 5292175 - DNA, 25 bp, Homo sapien
tggttgggatagtgagtggcaaagg

SEQ ID NO: 5292176 - DNA, 25 bp, Homo sapien
cacctggtggcacatggaggctcaa

SEQ ID NO: 5292177 - DNA, 25 bp, Homo sapien
gctctggcagtggttctgatccagt

SEQ ID NO: 5292178 - DNA, 25 bp, Homo sapien
gcaggtccaagggaatagcagctct

SEQ ID NO: 5292179 - DNA, 25 bp, Homo sapien
tggttctgatccagtcccgcagagg

SEQ ID NO: 5292180 - DNA, 25 bp, Homo sapien
cattcctagggtcagccacccatgt

SEQ ID NO: 5292181 - DNA, 25 bp, Homo sapien
tagggtcagccacccatgtcccaag

SEQ ID NO: 5292182 - DNA, 25 bp, Homo sapien
tccaagcattcctagggtcagccac

SEQ ID NO: 5292183 - DNA, 25 bp, Homo sapien
ccaatccaagcattcctagggtcag

SEQ ID NO: 5292184 - DNA, 25 bp, Homo sapien
ccctgcgtgggtacgctgatgccgc

SEQ ID NO: 5292185 - DNA, 25 bp, Homo sapien
tggagtacagcagcggaagccacag

SEQ ID NO: 5292186 - DNA, 25 bp, Homo sapien
cgtgggtacgctgatgccgcctcag

SEQ ID NO: 5292187 - DNA, 25 bp, Homo sapien
gccgggctggtcgtggagtacagca

SEQ ID NO: 5292188 - DNA, 25 bp, Homo sapien
tgcgggtatgtcgtgtcaggttgac

SEQ ID NO: 5292189 - DNA, 25 bp, Homo sapien
tatgtcgtgtcaggttgacgagctg

SEQ ID NO: 5292190 - DNA, 25 bp, Homo sapien
gtgtgggtgcgggtatgtcgtgtca

SEQ ID NO: 5292191 - DNA, 25 bp, Homo sapien
tgtcaggttgacgagctgggctgag

SEQ ID NO: 5292192 - DNA, 25 bp, Homo sapien
tgggacacgaaggtgcagaggcggc

SEQ ID NO: 5292193 - DNA, 25 bp, Homo sapien
agaggcggcatgagtacagtagccg

SEQ ID NO: 5292194 - DNA, 25 bp, Homo sapien
gcggcatgagtacagtagccgtggg

SEQ ID NO: 5292195 - DNA, 25 bp, Homo sapien
agtgggacacgaaggtgcagaggcg

SEQ ID NO: 5292196 - DNA, 25 bp, Homo sapien
ctgtcggccccccacacagctggca

SEQ ID NO: 5292197 - DNA, 25 bp, Homo sapien
gctggcaggctgggcctggcctctc

SEQ ID NO: 5292198 - DNA, 25 bp, Homo sapien
tggcaggctgggcctggcctctcac

SEQ ID NO: 5292199 - DNA, 25 bp, Homo sapien
tcggccccccacacagctggcaggc

SEQ ID NO: 5292200 - DNA, 25 bp, Homo sapien
cagactcatcgtcgctcagcccata

SEQ ID NO: 5292201 - DNA, 25 bp, Homo sapien
tctccgcacttagtgcccggccgcc

SEQ ID NO: 5292202 - DNA, 25 bp, Homo sapien
tggctggctcctcaacttcactctc

SEQ ID NO: 5292203 - DNA, 25 bp, Homo sapien
tcagcccatagggaagcccaggcct

SEQ ID NO: 5292204 - DNA, 25 bp, Homo sapien
cttccgagtctctctcgaagcccat

SEQ ID NO: 5292205 - DNA, 25 bp, Homo sapien
gtccttcgtcgagggagtcttcagt

SEQ ID NO: 5292206 - DNA, 25 bp, Homo sapien
cagatcctggcctagtagcaaatca

SEQ ID NO: 5292207 - DNA, 25 bp, Homo sapien
gagctggtcactgttgccgtcgcct

SEQ ID NO: 5292208 - DNA, 25 bp, Homo sapien
gcaaatcactctccaataccagggc

SEQ ID NO: 5292209 - DNA, 25 bp, Homo sapien
cgtactcgctgacccactctgattc

SEQ ID NO: 5292210 - DNA, 25 bp, Homo sapien
gggcttgtggattctccctcaggaa

SEQ ID NO: 5292211 - DNA, 25 bp, Homo sapien
cccttagtgcctcggtgggaagcta

SEQ ID NO: 5292212 - DNA, 25 bp, Homo sapien
gtggaccacacttcccgtactcgct

SEQ ID NO: 5292213 - DNA, 25 bp, Homo sapien
cccctcgcatttcacgggctgcggg

SEQ ID NO: 5292214 - DNA, 25 bp, Homo sapien
gcatttcacgggctgcgggtggctt

SEQ ID NO: 5292215 - DNA, 25 bp, Homo sapien
ttgaccccctcgcatttcacgggct

SEQ ID NO: 5292216 - DNA, 25 bp, Homo sapien
cctcgcatttcacgggctgcgggtg

SEQ ID NO: 5292217 - DNA, 25 bp, Homo sapien
gccgccgccgcttccattcatggag

SEQ ID NO: 5292218 - DNA, 25 bp, Homo sapien
tcctatctcggcccgcctgtctgcc

SEQ ID NO: 5292219 - DNA, 25 bp, Homo sapien
cctcctatctcggcccgcctgtctg

SEQ ID NO: 5292220 - DNA, 25 bp, Homo sapien
ggctccagcccgacgcgcctccggc

SEQ ID NO: 5292221 - DNA, 25 bp, Homo sapien
catgctacagatgggaccaagtcgg

SEQ ID NO: 5292222 - DNA, 25 bp, Homo sapien
tgggctctcctatacacgcgcagga

SEQ ID NO: 5292223 - DNA, 25 bp, Homo sapien
aaactcagtctcaggtccggagggc

SEQ ID NO: 5292224 - DNA, 25 bp, Homo sapien
tgtacaacagagagcgggtgcaagc

SEQ ID NO: 5292225 - DNA, 25 bp, Homo sapien
ttcttcttcttgtcgctgttgccat

SEQ ID NO: 5292226 - DNA, 25 bp, Homo sapien
ttcttgtcgctgttgccattttctt

SEQ ID NO: 5292227 - DNA, 25 bp, Homo sapien
ctagttttcgcttgccactctctgg

SEQ ID NO: 5292228 - DNA, 25 bp, Homo sapien
agcacctcctctagttttcgcttgc

SEQ ID NO: 5292229 - DNA, 25 bp, Homo sapien
acaccctgtaccatccccagaagtg

SEQ ID NO: 5292230 - DNA, 25 bp, Homo sapien
tcatgttgtcacaccctgtaccatc

SEQ ID NO: 5292231 - DNA, 25 bp, Homo sapien
cccagaagtgtctggtgccaggcac

SEQ ID NO: 5292232 - DNA, 25 bp, Homo sapien
ccccagaagtgtctggtgccaggca

SEQ ID NO: 5292233 - DNA, 25 bp, Homo sapien
caatggatgacaataaccgaagctc

SEQ ID NO: 5292234 - DNA, 25 bp, Homo sapien
tggatgacaataaccgaagctcccc

SEQ ID NO: 5292235 - DNA, 25 bp, Homo sapien
ttccacaatggatgacaataaccga

SEQ ID NO: 5292236 - DNA, 25 bp, Homo sapien
tgacaataaccgaagctccccattt

SEQ ID NO: 5292237 - DNA, 25 bp, Homo sapien
tgattgaatgaaatctacaacttcc

SEQ ID NO: 5292238 - DNA, 25 bp, Homo sapien
ttgattgaatgaaatctacaacttc

SEQ ID NO: 5292239 - DNA, 25 bp, Homo sapien
gcaatgaccatgaattcatggtcgt

SEQ ID NO: 5292240 - DNA, 25 bp, Homo sapien
ttgtttctcttatagaagtggtccc

SEQ ID NO: 5292241 - DNA, 25 bp, Homo sapien
gtcgtcagtgagagtcagcaccttg

SEQ ID NO: 5292242 - DNA, 25 bp, Homo sapien
ctcaggtggcaggttcttgtttctc

SEQ ID NO: 5292243 - DNA, 25 bp, Homo sapien
ttgatgagcagtttggatacttccc

SEQ ID NO: 5292244 - DNA, 25 bp, Homo sapien
tttacaaagttccataatctagtgg

SEQ ID NO: 5292245 - DNA, 25 bp, Homo sapien
ttctagtttcaaccctgccaccaga

SEQ ID NO: 5292246 - DNA, 25 bp, Homo sapien
ctgagtcctaagtcctagtttttct

SEQ ID NO: 5292247 - DNA, 25 bp, Homo sapien
cactaggaagattaaagtttgctac

SEQ ID NO: 5292248 - DNA, 25 bp, Homo sapien
tgatacctatgtataatgatacctc

SEQ ID NO: 5292249 - DNA, 25 bp, Homo sapien
taatgatacctctacccatcttagt

SEQ ID NO: 5292250 - DNA, 25 bp, Homo sapien
tactaggtagtctgggacagagaga

SEQ ID NO: 5292251 - DNA, 25 bp, Homo sapien
cataggacatgtctaaagctttgcc

SEQ ID NO: 5292252 - DNA, 25 bp, Homo sapien
cattcttgatgcgtgctagttctac

SEQ ID NO: 5292253 - DNA, 25 bp, Homo sapien
gctgttgtaccactgtcagagccag

SEQ ID NO: 5292254 - DNA, 25 bp, Homo sapien
cgagagtctcctgcgttggctacaa

SEQ ID NO: 5292255 - DNA, 25 bp, Homo sapien
caaaagagctttaacaaacaggaga

SEQ ID NO: 5292256 - DNA, 25 bp, Homo sapien
gaacatgcgttcctcactgatgtgc

SEQ ID NO: 5292257 - DNA, 25 bp, Homo sapien
gctcctgatcgttcacctatgcttg

SEQ ID NO: 5292258 - DNA, 25 bp, Homo sapien
tccccttgcagaataaatccccatg

SEQ ID NO: 5292259 - DNA, 25 bp, Homo sapien
ttcagcctcctcggtgtcatcctca

SEQ ID NO: 5292260 - DNA, 25 bp, Homo sapien
cttcagcctcctcggtgtcatcctc

SEQ ID NO: 5292261 - DNA, 25 bp, Homo sapien
cccacagctcatactcagaatcaag

SEQ ID NO: 5292262 - DNA, 25 bp, Homo sapien
ctgagactgggatgatcccctccct

SEQ ID NO: 5292263 - DNA, 25 bp, Homo sapien
tactcagaatcaagaggtcctgact

SEQ ID NO: 5292264 - DNA, 25 bp, Homo sapien
tgagactgggatgatcccctccctc

SEQ ID NO: 5292265 - DNA, 25 bp, Homo sapien
tccgcctcatctgactcatcctcac

SEQ ID NO: 5292266 - DNA, 25 bp, Homo sapien
ttggacttagcaactcgaggcagct

SEQ ID NO: 5292267 - DNA, 25 bp, Homo sapien
aacttggacttagcaactcgaggca

SEQ ID NO: 5292268 - DNA, 25 bp, Homo sapien
tcctccgcctcatctgactcatcct

SEQ ID NO: 5292269 - DNA, 25 bp, Homo sapien
tgaagagcaggaaggcccagcctca

SEQ ID NO: 5292270 - DNA, 25 bp, Homo sapien
gaagagcaggaaggcccagcctcac

SEQ ID NO: 5292271 - DNA, 25 bp, Homo sapien
ctgaagagcaggaaggcccagcctc

SEQ ID NO: 5292272 - DNA, 25 bp, Homo sapien
tttccctagttgagtcctcaggtcc

SEQ ID NO: 5292273 - DNA, 25 bp, Homo sapien
cagtcccacgttccgagttggagga

SEQ ID NO: 5292274 - DNA, 25 bp, Homo sapien
gtgaaggagtttccctagttgagtc

SEQ ID NO: 5292275 - DNA, 25 bp, Homo sapien
tcctgcctccccattgaggccctgg

SEQ ID NO: 5292276 - DNA, 25 bp, Homo sapien
catggtagcctcttcatgcagcagt

SEQ ID NO: 5292277 - DNA, 25 bp, Homo sapien
ttgtgacagttctgcccgtagcgtg

SEQ ID NO: 5292278 - DNA, 25 bp, Homo sapien
gcagctcttcaatagtcatggtagc

SEQ ID NO: 5292279 - DNA, 25 bp, Homo sapien
tgcccgtagcgtgtcagcagctctt

SEQ ID NO: 5292280 - DNA, 25 bp, Homo sapien
ggcgtcaatagccaagaaggcatct

SEQ ID NO: 5292281 - DNA, 25 bp, Homo sapien
cttcttcagtggtcaatttggcgtc

SEQ ID NO: 5292282 - DNA, 25 bp, Homo sapien
tctgtgccagctctttaatgacttc

SEQ ID NO: 5292283 - DNA, 25 bp, Homo sapien
cagtgggtcgccctgcaatctgtgc

SEQ ID NO: 5292284 - DNA, 25 bp, Homo sapien
cttctgtagcttgccttccttgtag

SEQ ID NO: 5292285 - DNA, 25 bp, Homo sapien
gatgatatcaggaagatatttggca

SEQ ID NO: 5292286 - DNA, 25 bp, Homo sapien
tccttgtaggccttctgatctttga

SEQ ID NO: 5292287 - DNA, 25 bp, Homo sapien
tgtaggccttctgatctttgatgat

SEQ ID NO: 5292288 - DNA, 25 bp, Homo sapien
ggaaatgataatgagggccagaccc

SEQ ID NO: 5292289 - DNA, 25 bp, Homo sapien
tcttgccctggaacgtctggaattg

SEQ ID NO: 5292290 - DNA, 25 bp, Homo sapien
aaaacagcaccacgcaggaaatgat

SEQ ID NO: 5292291 - DNA, 25 bp, Homo sapien
aacaaagggacctgttcttgccctg

SEQ ID NO: 5292292 - DNA, 25 bp, Homo sapien
ccatgtccatcgtagacagaaaaca

SEQ ID NO: 5292293 - DNA, 25 bp, Homo sapien
tgtccatcgtagacagaaaacatgg

SEQ ID NO: 5292294 - DNA, 25 bp, Homo sapien
cactgtccagctcaggaatacagtt

SEQ ID NO: 5292295 - DNA, 25 bp, Homo sapien
actgtccagctcaggaatacagttg

SEQ ID NO: 5292296 - DNA, 25 bp, Homo sapien
tcaaggtcttactacacagagaatg

SEQ ID NO: 5292297 - DNA, 25 bp, Homo sapien
cagagaatgtaataaccttaacagc

SEQ ID NO: 5292298 - DNA, 25 bp, Homo sapien
ggccaaacacagaaattatcctctc

SEQ ID NO: 5292299 - DNA, 25 bp, Homo sapien
ccttaacagcaatccaaatagccgt

SEQ ID NO: 5292300 - DNA, 25 bp, Homo sapien
cccactctcactgcgtgagaacacg

SEQ ID NO: 5292301 - DNA, 25 bp, Homo sapien
cccaggtgctgggtatagtatcaaa

SEQ ID NO: 5292302 - DNA, 25 bp, Homo sapien
accacctctagtagacccatgtcta

SEQ ID NO: 5292303 - DNA, 25 bp, Homo sapien
agtagacccatgtctattgttgcca

SEQ ID NO: 5292304 - DNA, 25 bp, Homo sapien
ccagccatcagattgctgggtctaa

SEQ ID NO: 5292305 - DNA, 25 bp, Homo sapien
actgtgcctacgctaaattaattta

SEQ ID NO: 5292306 - DNA, 25 bp, Homo sapien
gaaatctccaaactgactgtgccta

SEQ ID NO: 5292307 - DNA, 25 bp, Homo sapien
tttcctttggccgtatatccagcca

SEQ ID NO: 5292308 - DNA, 25 bp, Homo sapien
ttgtgggccacatgtacgtcttttg

SEQ ID NO: 5292309 - DNA, 25 bp, Homo sapien
cacttttcttgaaagatctcttgga

SEQ ID NO: 5292310 - DNA, 25 bp, Homo sapien
tttgtctgatgattagaaatgggcg

SEQ ID NO: 5292311 - DNA, 25 bp, Homo sapien
tctgatgattagaaatgggcgtttt

SEQ ID NO: 5292312 - DNA, 25 bp, Homo sapien
catgcgctgccttggtgacaaggta

SEQ ID NO: 5292313 - DNA, 25 bp, Homo sapien
caaggtaagtcaccctatggctatg

SEQ ID NO: 5292314 - DNA, 25 bp, Homo sapien
acatacatgcgctgccttggtgaca

SEQ ID NO: 5292315 - DNA, 25 bp, Homo sapien
tggtgacaaggtaagtcaccctatg

SEQ ID NO: 5292316 - DNA, 25 bp, Homo sapien
ctttgatggccttcacttgttcatt

SEQ ID NO: 5292317 - DNA, 25 bp, Homo sapien
catttttgtcagtggccagtttgtg

SEQ ID NO: 5292318 - DNA, 25 bp, Homo sapien
gggtcatttttgtcagtggccagtt

SEQ ID NO: 5292319 - DNA, 25 bp, Homo sapien
ccagtttgtgcagttccagtagtga

SEQ ID NO: 5292320 - DNA, 25 bp, Homo sapien
tttgtcagtggccagtttgtgcagt

SEQ ID NO: 5292321 - DNA, 25 bp, Homo sapien
tccaaatgtaatccatcgcattcag

SEQ ID NO: 5292322 - DNA, 25 bp, Homo sapien
ttccaaatgtaatccatcgcattca

SEQ ID NO: 5292323 - DNA, 25 bp, Homo sapien
cttcatcaatttctcagcatgttcc

SEQ ID NO: 5292324 - DNA, 25 bp, Homo sapien
agcatgttccctctcctcatgagat

SEQ ID NO: 5292325 - DNA, 25 bp, Homo sapien
gtgaagaaagtatttggcaaagttc

SEQ ID NO: 5292326 - DNA, 25 bp, Homo sapien
ttggtgaagaaagtatttggcaaag

SEQ ID NO: 5292327 - DNA, 25 bp, Homo sapien
taagccacgcacaggtaaatggagg

SEQ ID NO: 5292328 - DNA, 25 bp, Homo sapien
aagccacgcacaggtaaatggagga

SEQ ID NO: 5292329 - DNA, 25 bp, Homo sapien
agccacgcacaggtaaatggaggag

SEQ ID NO: 5292330 - DNA, 25 bp, Homo sapien
gtaagccacgcacaggtaaatggag

SEQ ID NO: 5292331 - DNA, 25 bp, Homo sapien
cagcggcagtggtggctacgcggcg

SEQ ID NO: 5292332 - DNA, 25 bp, Homo sapien
cagtggtggctacgcggcgctggag

SEQ ID NO: 5292333 - DNA, 25 bp, Homo sapien
gcagtggtggctacgcggcgctgga

SEQ ID NO: 5292334 - DNA, 25 bp, Homo sapien
cggcagtggtggctacgcggcgctg

SEQ ID NO: 5292335 - DNA, 25 bp, Homo sapien
tatactatagatattgacactgcct

SEQ ID NO: 5292336 - DNA, 25 bp, Homo sapien
agatgaccccttgaccactaataag

SEQ ID NO: 5292337 - DNA, 25 bp, Homo sapien
tttctgctcaatactatctttatag

SEQ ID NO: 5292338 - DNA, 25 bp, Homo sapien
tttatagtcaattctagatgacccc

SEQ ID NO: 5292339 - DNA, 25 bp, Homo sapien
tgcatggcggagaagccgtagggca

SEQ ID NO: 5292340 - DNA, 25 bp, Homo sapien
gtccccggagcacttcaccgtgttg

SEQ ID NO: 5292341 - DNA, 25 bp, Homo sapien
atggagacgcgccagccttgcatgg

SEQ ID NO: 5292342 - DNA, 25 bp, Homo sapien
aagccgtagggcagcggcaggcgcg

SEQ ID NO: 5292343 - DNA, 25 bp, Homo sapien
gcaggaaagctgggcgcgacccgtg

SEQ ID NO: 5292344 - DNA, 25 bp, Homo sapien
cggcggctggccggcggcctcaggt

SEQ ID NO: 5292345 - DNA, 25 bp, Homo sapien
ggcgcgacccgtgccggagccgaag

SEQ ID NO: 5292346 - DNA, 25 bp, Homo sapien
gctggccggcggcctcaggtgcagg

SEQ ID NO: 5292347 - DNA, 25 bp, Homo sapien
caaggtgccggtgaaaggcgcgagg

SEQ ID NO: 5292348 - DNA, 25 bp, Homo sapien
cgcaaggtgccggtgaaaggcgcga

SEQ ID NO: 5292349 - DNA, 25 bp, Homo sapien
cgaccgacgcaaggtgccggtgaaa

SEQ ID NO: 5292350 - DNA, 25 bp, Homo sapien
gcggcgcgaccgacgcaaggtgccg

SEQ ID NO: 5292351 - DNA, 25 bp, Homo sapien
cggaagcggaaacggcgccgctcca

SEQ ID NO: 5292352 - DNA, 25 bp, Homo sapien
agcggaagcggaaacggcgccgctc

SEQ ID NO: 5292353 - DNA, 25 bp, Homo sapien
gaagcggaaacggcgccgctccaga

SEQ ID NO: 5292354 - DNA, 25 bp, Homo sapien
gcggaagcggaaacggcgccgctcc

SEQ ID NO: 5292355 - DNA, 25 bp, Homo sapien
aagtcactacagtatatttccagtg

SEQ ID NO: 5292356 - DNA, 25 bp, Homo sapien
aaaagtaacgcactgggagagcaat

SEQ ID NO: 5292357 - DNA, 25 bp, Homo sapien
gagagcaataatgttacagagaggg

SEQ ID NO: 5292358 - DNA, 25 bp, Homo sapien
ttccagtgacgtaaaggtttcatgc

SEQ ID NO: 5292359 - DNA, 25 bp, Homo sapien
tccatgatcacttcagcattcggga

SEQ ID NO: 5292360 - DNA, 25 bp, Homo sapien
gttaatttcatcctctcgctactgg

SEQ ID NO: 5292361 - DNA, 25 bp, Homo sapien
ctggcccaagtaacatcaatctttt

SEQ ID NO: 5292362 - DNA, 25 bp, Homo sapien
aacgtacccaaagttatatccattg

SEQ ID NO: 5292363 - DNA, 25 bp, Homo sapien
ggtagtagagtcgcctgaacctggg

SEQ ID NO: 5292364 - DNA, 25 bp, Homo sapien
aggtagtagagtcgcctgaacctgg

SEQ ID NO: 5292365 - DNA, 25 bp, Homo sapien
gaggtagtagagtcgcctgaacctg

SEQ ID NO: 5292366 - DNA, 25 bp, Homo sapien
tgaggtagtagagtcgcctgaacct

SEQ ID NO: 5292367 - DNA, 25 bp, Homo sapien
tttccggagaattggcgtcctgcac

SEQ ID NO: 5292368 - DNA, 25 bp, Homo sapien
tagaactgtcatggcgccttcaaga

SEQ ID NO: 5292369 - DNA, 25 bp, Homo sapien
cagtctcgttccaaaataatgcagg

SEQ ID NO: 5292370 - DNA, 25 bp, Homo sapien
ccttcaagaagaggtaggaggccct

SEQ ID NO: 5292371 - DNA, 25 bp, Homo sapien
ccaatggaaacctgccggcggtgcg

SEQ ID NO: 5292372 - DNA, 25 bp, Homo sapien
cgcccatcgttggtccgggcgccgc

SEQ ID NO: 5292373 - DNA, 25 bp, Homo sapien
ttcggttgcgctgcggagcgcagct

SEQ ID NO: 5292374 - DNA, 25 bp, Homo sapien
cggtgcggcaccgcccatcgttggt

SEQ ID NO: 5292375 - DNA, 25 bp, Homo sapien
cttcggccccgcagtcgctgcttag

SEQ ID NO: 5292376 - DNA, 25 bp, Homo sapien
ttcgcgagaggacggaaggatcggc

SEQ ID NO: 5292377 - DNA, 25 bp, Homo sapien
agtcgctgcttagccctccctggcg

SEQ ID NO: 5292378 - DNA, 25 bp, Homo sapien
tgggacccgccagtcgggtgctgaa

SEQ ID NO: 5292379 - DNA, 25 bp, Homo sapien
cagtctgagcctgctcgcagaccaa

SEQ ID NO: 5292380 - DNA, 25 bp, Homo sapien
gaatagtcttccaatctggagccct

SEQ ID NO: 5292381 - DNA, 25 bp, Homo sapien
acgtgagtcgtcttggccctatggg

SEQ ID NO: 5292382 - DNA, 25 bp, Homo sapien
cattgtttgaagtgccctcgctcaa

SEQ ID NO: 5292383 - DNA, 25 bp, Homo sapien
gagaacgctctagaggagatcacca

SEQ ID NO: 5292384 - DNA, 25 bp, Homo sapien
gcaggaccaggaagagaaccagttc

SEQ ID NO: 5292385 - DNA, 25 bp, Homo sapien
tggtcacgaccactcttgaggctct

SEQ ID NO: 5292386 - DNA, 25 bp, Homo sapien
tagtgccgtactggctgaaatccct

SEQ ID NO: 5292387 - DNA, 25 bp, Homo sapien
tatcctaaggcgttcacagagccca

SEQ ID NO: 5292388 - DNA, 25 bp, Homo sapien
gccctatgggctcgaaagacgtcta

SEQ ID NO: 5292389 - DNA, 25 bp, Homo sapien
ccctaggtggtgctgatgcagtgca

SEQ ID NO: 5292390 - DNA, 25 bp, Homo sapien
ttggaggacaaactgaaccggcacc

SEQ ID NO: 5292391 - DNA, 25 bp, Homo sapien
tcctttattattcaggagggctggg

SEQ ID NO: 5292392 - DNA, 25 bp, Homo sapien
tacttgttttgcacagacgtgggcc

SEQ ID NO: 5292393 - DNA, 25 bp, Homo sapien
aatatccccgagttggcggctgagc

SEQ ID NO: 5292394 - DNA, 25 bp, Homo sapien
gtcagtattaccctgtgaagcccct

SEQ ID NO: 5292395 - DNA, 25 bp, Homo sapien
tctacaatcccgctggggcggccgg

SEQ ID NO: 5292396 - DNA, 25 bp, Homo sapien
attctacaatcccgctggggcggcc

SEQ ID NO: 5292397 - DNA, 25 bp, Homo sapien
gaattctacaatcccgctggggcgg

SEQ ID NO: 5292398 - DNA, 25 bp, Homo sapien
ccgaattctacaatcccgctggggc

SEQ ID NO: 5292399 - DNA, 25 bp, Homo sapien
tgtgtggtgttgggaatgactttga

SEQ ID NO: 5292400 - DNA, 25 bp, Homo sapien
actgtgtggtgttgggaatgacttt

SEQ ID NO: 5292401 - DNA, 25 bp, Homo sapien
cactgtgtggtgttgggaatgactt

SEQ ID NO: 5292402 - DNA, 25 bp, Homo sapien
gcactgtgtggtgttgggaatgact

SEQ ID NO: 5292403 - DNA, 25 bp, Homo sapien
ggagaggccctaactcttcctcagc

SEQ ID NO: 5292404 - DNA, 25 bp, Homo sapien
gagggagaggccctaactcttcctc

SEQ ID NO: 5292405 - DNA, 25 bp, Homo sapien
gggagaggccctaactcttcctcag

SEQ ID NO: 5292406 - DNA, 25 bp, Homo sapien
gagaggccctaactcttcctcagct

SEQ ID NO: 5292407 - DNA, 25 bp, Homo sapien
acaccactgactgatgaatttcagc

SEQ ID NO: 5292408 - DNA, 25 bp, Homo sapien
tctttttttagtgctgccctctctg

SEQ ID NO: 5292409 - DNA, 25 bp, Homo sapien
ttctttttttagtgctgccctctct

SEQ ID NO: 5292410 - DNA, 25 bp, Homo sapien
ccctctctgccttcattctccaagt

SEQ ID NO: 5292411 - DNA, 25 bp, Homo sapien
cattctccaagtcctcctctctaac

SEQ ID NO: 5292412 - DNA, 25 bp, Homo sapien
ttgttagcagccttccctggccgct

SEQ ID NO: 5292413 - DNA, 25 bp, Homo sapien
cttgatggccataaggaatttattc

SEQ ID NO: 5292414 - DNA, 25 bp, Homo sapien
tattccagttgtccttgttagcagc

SEQ ID NO: 5292415 - DNA, 25 bp, Homo sapien
cttccctggccgcttaaattcaatt

SEQ ID NO: 5292416 - DNA, 25 bp, Homo sapien
aattaagtttattgatcctgctgct

SEQ ID NO: 5292417 - DNA, 25 bp, Homo sapien
ttgtaccctttactgaatcctagta

SEQ ID NO: 5292418 - DNA, 25 bp, Homo sapien
tgtaccctttactgaatcctagtaa

SEQ ID NO: 5292419 - DNA, 25 bp, Homo sapien
gaactggggtttgagagagattgag

SEQ ID NO: 5292420 - DNA, 25 bp, Homo sapien
gatctggggtgctgtaggcttctat

SEQ ID NO: 5292421 - DNA, 25 bp, Homo sapien
caggatctggggtgctgtaggcttc

SEQ ID NO: 5292422 - DNA, 25 bp, Homo sapien
cacaggatctggggtgctgtaggct

SEQ ID NO: 5292423 - DNA, 25 bp, Homo sapien
tctggggtgctgtaggcttctatac

SEQ ID NO: 5292424 - DNA, 25 bp, Homo sapien
agggctcgaacaccagtgctcgctg

SEQ ID NO: 5292425 - DNA, 25 bp, Homo sapien
gtgctcgctgccactagggaggcct

SEQ ID NO: 5292426 - DNA, 25 bp, Homo sapien
gtccatggagactgtaagcacccag

SEQ ID NO: 5292427 - DNA, 25 bp, Homo sapien
gtaagcacccagtctcgaacctctt

SEQ ID NO: 5292428 - DNA, 25 bp, Homo sapien
caagaagggagtggtagcttcacac

SEQ ID NO: 5292429 - DNA, 25 bp, Homo sapien
tggaaaggacaagaagggagtggta

SEQ ID NO: 5292430 - DNA, 25 bp, Homo sapien
aaaggacaagaagggagtggtagct

SEQ ID NO: 5292431 - DNA, 25 bp, Homo sapien
gacaagaagggagtggtagcttcac

SEQ ID NO: 5292432 - DNA, 25 bp, Homo sapien
gattgggggatgcagtcacagcctt

SEQ ID NO: 5292433 - DNA, 25 bp, Homo sapien
ctccttggattgggggatgcagtca

SEQ ID NO: 5292434 - DNA, 25 bp, Homo sapien
ttgggggatgcagtcacagcctttt

SEQ ID NO: 5292435 - DNA, 25 bp, Homo sapien
tctttctattttgcttctactttca

SEQ ID NO: 5292436 - DNA, 25 bp, Homo sapien
aaaatcagagtggtcaaggccatct

SEQ ID NO: 5292437 - DNA, 25 bp, Homo sapien
ggagtggcacctcaaagggaatgtc

SEQ ID NO: 5292438 - DNA, 25 bp, Homo sapien
catctagagtcccttcctcgattgc

SEQ ID NO: 5292439 - DNA, 25 bp, Homo sapien
gggaatgtctgtatcctgaaaatca

SEQ ID NO: 5292440 - DNA, 25 bp, Homo sapien
gattgaggaagatgaatgccatgtt

SEQ ID NO: 5292441 - DNA, 25 bp, Homo sapien
gaatgccatgttatcccagccaact

SEQ ID NO: 5292442 - DNA, 25 bp, Homo sapien
tccaaaaagcgattgaggaagatga

SEQ ID NO: 5292443 - DNA, 25 bp, Homo sapien
aatgccatgttatcccagccaactg

SEQ ID NO: 5292444 - DNA, 25 bp, Homo sapien
ggactacatcctccgtaacatcagc

SEQ ID NO: 5292445 - DNA, 25 bp, Homo sapien
cagagcagaagggatattctatttt

SEQ ID NO: 5292446 - DNA, 25 bp, Homo sapien
ataggaggactacatcctccgtaac

SEQ ID NO: 5292447 - DNA, 25 bp, Homo sapien
ggaggactacatcctccgtaacatc

SEQ ID NO: 5292448 - DNA, 25 bp, Homo sapien
cttcatagaaggctttgtctacagg

SEQ ID NO: 5292449 - DNA, 25 bp, Homo sapien
gcctgcttcatagaaggctttgtct

SEQ ID NO: 5292450 - DNA, 25 bp, Homo sapien
agaaggctttgtctacaggtagtag

SEQ ID NO: 5292451 - DNA, 25 bp, Homo sapien
atgcctgcttcatagaaggctttgt

SEQ ID NO: 5292452 - DNA, 25 bp, Homo sapien
gggtgtgacgcaagagtgaaacaga

SEQ ID NO: 5292453 - DNA, 25 bp, Homo sapien
tgggtgtgacgcaagagtgaaacag

SEQ ID NO: 5292454 - DNA, 25 bp, Homo sapien
ctgggtgtgacgcaagagtgaaaca

SEQ ID NO: 5292455 - DNA, 25 bp, Homo sapien
accgcgcccggccaacctggctaat

SEQ ID NO: 5292456 - DNA, 25 bp, Homo sapien
ccgcgcccggccaacctggctaatt

SEQ ID NO: 5292457 - DNA, 25 bp, Homo sapien
gcccaagctgaagaatccagaacgt

SEQ ID NO: 5292458 - DNA, 25 bp, Homo sapien
ggcacagagccctaaaaaggtcgga

SEQ ID NO: 5292459 - DNA, 25 bp, Homo sapien
gaaaacctcagcaagggctaaagat

SEQ ID NO: 5292460 - DNA, 25 bp, Homo sapien
tgtttaaacataatgaggctgaggc

SEQ ID NO: 5292461 - DNA, 25 bp, Homo sapien
tgagcgatcagcagcatcgtcttga

SEQ ID NO: 5292462 - DNA, 25 bp, Homo sapien
gtttgcctcactggacttcaccagg

SEQ ID NO: 5292463 - DNA, 25 bp, Homo sapien
gcctcactggacttcaccaggtttt

SEQ ID NO: 5292464 - DNA, 25 bp, Homo sapien
cagagcgcgtggcatagtaatgagc

SEQ ID NO: 5292465 - DNA, 25 bp, Homo sapien
tcagcccagctatgataggcctcgg

SEQ ID NO: 5292466 - DNA, 25 bp, Homo sapien
tgaagaggacatctcgaagatcagc

SEQ ID NO: 5292467 - DNA, 25 bp, Homo sapien
cctcggcacagttggttccaggaga

SEQ ID NO: 5292468 - DNA, 25 bp, Homo sapien
caggagagctcaccatgtcagtgaa

SEQ ID NO: 5292469 - DNA, 25 bp, Homo sapien
gcaggggctccgtgctgtacataca

SEQ ID NO: 5292470 - DNA, 25 bp, Homo sapien
ggctccgtgctgtacatacagggcc

SEQ ID NO: 5292471 - DNA, 25 bp, Homo sapien
tgggcagagctaccctcccggatca

SEQ ID NO: 5292472 - DNA, 25 bp, Homo sapien
cccggatcaagtgagttgcatacaa

SEQ ID NO: 5292473 - DNA, 25 bp, Homo sapien
gtccaaagcagctatcacatccaca

SEQ ID NO: 5292474 - DNA, 25 bp, Homo sapien
ggtccaaagcagctatcacatccac

SEQ ID NO: 5292475 - DNA, 25 bp, Homo sapien
ctgcttggtagctgtttcaatgcac

SEQ ID NO: 5292476 - DNA, 25 bp, Homo sapien
gtttcaatgcacttgtcccactggc

SEQ ID NO: 5292477 - DNA, 25 bp, Homo sapien
ttgccctgattcttgaggaactctt

SEQ ID NO: 5292478 - DNA, 25 bp, Homo sapien
tcctcaccctcgatgaaagcatcga

SEQ ID NO: 5292479 - DNA, 25 bp, Homo sapien
gatgaaagcatcgattgcttccttg

SEQ ID NO: 5292480 - DNA, 25 bp, Homo sapien
tagctacacgcttcgccttgttcca

SEQ ID NO: 5292481 - DNA, 25 bp, Homo sapien
tgggatctaactccttagctacacg

SEQ ID NO: 5292482 - DNA, 25 bp, Homo sapien
gaggcagaaacttgatggagagttc

SEQ ID NO: 5292483 - DNA, 25 bp, Homo sapien
tcagctggggtcctacagccagaac

SEQ ID NO: 5292484 - DNA, 25 bp, Homo sapien
agaacgacttccatattacgttggg

SEQ ID NO: 5292485 - DNA, 25 bp, Homo sapien
gctttccaattccaatcagctgggg

SEQ ID NO: 5292486 - DNA, 25 bp, Homo sapien
caggcgtgggatcacctcaagggat

SEQ ID NO: 5292487 - DNA, 25 bp, Homo sapien
tgtaagcatcatagcacaaacctag

SEQ ID NO: 5292488 - DNA, 25 bp, Homo sapien
tctgtactgactacctataggcaac

SEQ ID NO: 5292489 - DNA, 25 bp, Homo sapien
tactatacacctaggtagaggttgc

SEQ ID NO: 5292490 - DNA, 25 bp, Homo sapien
tggctctatcatccagcaggcactc

SEQ ID NO: 5292491 - DNA, 25 bp, Homo sapien
caggcactccatagattcctgctac

SEQ ID NO: 5292492 - DNA, 25 bp, Homo sapien
agcaggcactccatagattcctgct

SEQ ID NO: 5292493 - DNA, 25 bp, Homo sapien
ttctggctctatcatccagcaggca

SEQ ID NO: 5292494 - DNA, 25 bp, Homo sapien
gtactctccagcctgctcccagtgt

SEQ ID NO: 5292495 - DNA, 25 bp, Homo sapien
cactttgaggtagcagtccacggca

SEQ ID NO: 5292496 - DNA, 25 bp, Homo sapien
agcctgctcccagtgtcgagcttgt

SEQ ID NO: 5292497 - DNA, 25 bp, Homo sapien
gcagtccacggcacggctgtactct

SEQ ID NO: 5292498 - DNA, 25 bp, Homo sapien
gatgcgcagagcgtcactccataat

SEQ ID NO: 5292499 - DNA, 25 bp, Homo sapien
tagtccttgcagatgcgcagagcgt

SEQ ID NO: 5292500 - DNA, 25 bp, Homo sapien
ctgggcacatagtccttgcagatgc

SEQ ID NO: 5292501 - DNA, 25 bp, Homo sapien
agagcgtcactccataatccagcct

SEQ ID NO: 5292502 - DNA, 25 bp, Homo sapien
ccccgggcctgtcccacaagcacct

SEQ ID NO: 5292503 - DNA, 25 bp, Homo sapien
ctgtcccacaagcacctcggcgaca

SEQ ID NO: 5292504 - DNA, 25 bp, Homo sapien
gggcctgtcccacaagcacctcggc

SEQ ID NO: 5292505 - DNA, 25 bp, Homo sapien
gcctgtcccacaagcacctcggcga

SEQ ID NO: 5292506 - DNA, 25 bp, Homo sapien
ctgtcagggtcgtgagcctcagcca

SEQ ID NO: 5292507 - DNA, 25 bp, Homo sapien
ctcccaatcctggttatggacaaac

SEQ ID NO: 5292508 - DNA, 25 bp, Homo sapien
tgagctgcctcccaatcctggttat

SEQ ID NO: 5292509 - DNA, 25 bp, Homo sapien
gtcagggtcgtgagcctcagccaca

SEQ ID NO: 5292510 - DNA, 25 bp, Homo sapien
atgaggactgcctccttgggtttac

SEQ ID NO: 5292511 - DNA, 25 bp, Homo sapien
ctgatgaattcagcttcagcctctt

SEQ ID NO: 5292512 - DNA, 25 bp, Homo sapien
ggttttgtgcttgagggccagccga

SEQ ID NO: 5292513 - DNA, 25 bp, Homo sapien
ccgagagagttcaaacgcaaattca

SEQ ID NO: 5292514 - DNA, 25 bp, Homo sapien
cctccaggaacatagcatatttgag

SEQ ID NO: 5292515 - DNA, 25 bp, Homo sapien
tagcatatttgagatgaacctcggg

SEQ ID NO: 5292516 - DNA, 25 bp, Homo sapien
acagaaagtgcagataaagttttct

SEQ ID NO: 5292517 - DNA, 25 bp, Homo sapien
gaaacagaaagtgcagataaagttt

SEQ ID NO: 5292518 - DNA, 25 bp, Homo sapien
aacagaaagtgcagataaagttttc

SEQ ID NO: 5292519 - DNA, 25 bp, Homo sapien
aaacagaaagtgcagataaagtttt

SEQ ID NO: 5292520 - DNA, 25 bp, Homo sapien
cagataggccacgtgtttgtgggca

SEQ ID NO: 5292521 - DNA, 25 bp, Homo sapien
tctttgcccacagataggccacgtg

SEQ ID NO: 5292522 - DNA, 25 bp, Homo sapien
ttagcccctccttgagttctggcca

SEQ ID NO: 5292523 - DNA, 25 bp, Homo sapien
ccacgtgtttgtgggcattagcccc

SEQ ID NO: 5292524 - DNA, 25 bp, Homo sapien
tcgaggtagtggtactcagcctcct

SEQ ID NO: 5292525 - DNA, 25 bp, Homo sapien
cactggcccggtacatgttcactgt

SEQ ID NO: 5292526 - DNA, 25 bp, Homo sapien
cagcctcctgtagtcggccttcagc

SEQ ID NO: 5292527 - DNA, 25 bp, Homo sapien
ccattcctgggcctcgaggtagtgg

SEQ ID NO: 5292528 - DNA, 25 bp, Homo sapien
tgcccagatgtaggtgtgtatcact

SEQ ID NO: 5292529 - DNA, 25 bp, Homo sapien
gatggtgcttccctaccaggcggat

SEQ ID NO: 5292530 - DNA, 25 bp, Homo sapien
tgtacatggtgatggcaagatcagg

SEQ ID NO: 5292531 - DNA, 25 bp, Homo sapien
caggcggatcatgtcatcatacaac

SEQ ID NO: 5292532 - DNA, 25 bp, Homo sapien
ctttcagcctcacggtacttgccct

SEQ ID NO: 5292533 - DNA, 25 bp, Homo sapien
ttcagcctcacggtacttgccctgc

SEQ ID NO: 5292534 - DNA, 25 bp, Homo sapien
gcctgagtgatgtatagcactgaca

SEQ ID NO: 5292535 - DNA, 25 bp, Homo sapien
gagtgatgtatagcactgacacatc

SEQ ID NO: 5292536 - DNA, 25 bp, Homo sapien
cccttagtatagagctcctcagcaa

SEQ ID NO: 5292537 - DNA, 25 bp, Homo sapien
tgtccgatctcccttagtatagagc

SEQ ID NO: 5292538 - DNA, 25 bp, Homo sapien
accagcctgggtgtacatgtctatg

SEQ ID NO: 5292539 - DNA, 25 bp, Homo sapien
catgtctatggcatcttttgtccga

SEQ ID NO: 5292540 - DNA, 25 bp, Homo sapien
ggagagcctgcgatacaaccttgta

SEQ ID NO: 5292541 - DNA, 25 bp, Homo sapien
ggtagatacaaaaggtcagagcaac

SEQ ID NO: 5292542 - DNA, 25 bp, Homo sapien
gaaagaacaaaccttggctgggatg

SEQ ID NO: 5292543 - DNA, 25 bp, Homo sapien
tcagagcaacagacttaaagcagct

SEQ ID NO: 5292544 - DNA, 25 bp, Homo sapien
cagtgttccggtcctgtagatctaa

SEQ ID NO: 5292545 - DNA, 25 bp, Homo sapien
cagggcggcctcaattgccttaatg

SEQ ID NO: 5292546 - DNA, 25 bp, Homo sapien
tgttgggccacgagaggatagtatt

SEQ ID NO: 5292547 - DNA, 25 bp, Homo sapien
tagatctaatatataaattgccttc

SEQ ID NO: 5292548 - DNA, 25 bp, Homo sapien
aaggccaatcgagccagctctaccg

SEQ ID NO: 5292549 - DNA, 25 bp, Homo sapien
ctggcttcgatgtagtgattaatgg

SEQ ID NO: 5292550 - DNA, 25 bp, Homo sapien
cttcgatgtagtgattaatggctgc

SEQ ID NO: 5292551 - DNA, 25 bp, Homo sapien
cctccactgggaaggccaatcgagc

SEQ ID NO: 5292552 - DNA, 25 bp, Homo sapien
tgcctttacggtagcactccagggc

SEQ ID NO: 5292553 - DNA, 25 bp, Homo sapien
gcgttgcctttacggtagcactcca

SEQ ID NO: 5292554 - DNA, 25 bp, Homo sapien
tttcatgaatgcgttgcctttacgg

SEQ ID NO: 5292555 - DNA, 25 bp, Homo sapien
gaatgcgttgcctttacggtagcac

SEQ ID NO: 5292556 - DNA, 25 bp, Homo sapien
aactacgacgtagcttctccagggc

SEQ ID NO: 5292557 - DNA, 25 bp, Homo sapien
gtgatgtgttctaccagctctgtgt

SEQ ID NO: 5292558 - DNA, 25 bp, Homo sapien
catcagccactggtagtaactacga

SEQ ID NO: 5292559 - DNA, 25 bp, Homo sapien
tgttggctagcagttcctctcgggt

SEQ ID NO: 5292560 - DNA, 25 bp, Homo sapien
tgaacaactgtggagaagataaaac

SEQ ID NO: 5292561 - DNA, 25 bp, Homo sapien
tatggcctccttgacaaaaggaggt

SEQ ID NO: 5292562 - DNA, 25 bp, Homo sapien
tctggtttctatggcctccttgaca

SEQ ID NO: 5292563 - DNA, 25 bp, Homo sapien
gaaattggcagaaccaaattctgaa

SEQ ID NO: 5292564 - DNA, 25 bp, Homo sapien
cggtgtagctcctggtacatgccca

SEQ ID NO: 5292565 - DNA, 25 bp, Homo sapien
tacactcatcccaacggtgtagctc

SEQ ID NO: 5292566 - DNA, 25 bp, Homo sapien
acagcgatacactcatcccaacggt

SEQ ID NO: 5292567 - DNA, 25 bp, Homo sapien
tagctcctggtacatgcccatggcc

SEQ ID NO: 5292568 - DNA, 25 bp, Homo sapien
gctaagatgccagcccatgaggacc

SEQ ID NO: 5292569 - DNA, 25 bp, Homo sapien
agagagctcctcaaattgtataagc

SEQ ID NO: 5292570 - DNA, 25 bp, Homo sapien
tggatctacccctatgcacaagaat

SEQ ID NO: 5292571 - DNA, 25 bp, Homo sapien
agtagtaatcaaaggccaaagaagg

SEQ ID NO: 5292572 - DNA, 25 bp, Homo sapien
cagcacgctttcctcccttgagttt

SEQ ID NO: 5292573 - DNA, 25 bp, Homo sapien
gcacgctttcctcccttgagtttgt

SEQ ID NO: 5292574 - DNA, 25 bp, Homo sapien
cacgctttcctcccttgagtttgta

SEQ ID NO: 5292575 - DNA, 25 bp, Homo sapien
agcacgctttcctcccttgagtttg

SEQ ID NO: 5292576 - DNA, 25 bp, Homo sapien
cagcatggctagacgtgctcggacc

SEQ ID NO: 5292577 - DNA, 25 bp, Homo sapien
tagacgtgctcggacctgataaaag

SEQ ID NO: 5292578 - DNA, 25 bp, Homo sapien
tggctagacgtgctcggacctgata

SEQ ID NO: 5292579 - DNA, 25 bp, Homo sapien
tcttttccagcatggctagacgtgc

SEQ ID NO: 5292580 - DNA, 25 bp, Homo sapien
gaatcgagcttttgctacttggccc

SEQ ID NO: 5292581 - DNA, 25 bp, Homo sapien
ttgatctgcaatctcattggtctca

SEQ ID NO: 5292582 - DNA, 25 bp, Homo sapien
gcaggaatcgagcttttgctacttg

SEQ ID NO: 5292583 - DNA, 25 bp, Homo sapien
cattggtctcatgcaggaatcgagc

SEQ ID NO: 5292584 - DNA, 25 bp, Homo sapien
gcagaggccaaaaaacttcagggct

SEQ ID NO: 5292585 - DNA, 25 bp, Homo sapien
gcgaacagctagtgttaaggctcta

SEQ ID NO: 5292586 - DNA, 25 bp, Homo sapien
tatagcaggtatgagcttggcacac

SEQ ID NO: 5292587 - DNA, 25 bp, Homo sapien
aagttattcctggagagcgaacagc

SEQ ID NO: 5292588 - DNA, 25 bp, Homo sapien
gaagggctctatgctatttgctggc

SEQ ID NO: 5292589 - DNA, 25 bp, Homo sapien
tgtgattatccctcctagctgcgtg

SEQ ID NO: 5292590 - DNA, 25 bp, Homo sapien
taacaccggattggagtagcccaca

SEQ ID NO: 5292591 - DNA, 25 bp, Homo sapien
tggcacctctgttctacatgtctac

SEQ ID NO: 5292592 - DNA, 25 bp, Homo sapien
tagttgccttgcctctagtgccagt

SEQ ID NO: 5292593 - DNA, 25 bp, Homo sapien
gtgccagtttactcaaggttttcca

SEQ ID NO: 5292594 - DNA, 25 bp, Homo sapien
ctctccgcaatgtgtagttgccttg

SEQ ID NO: 5292595 - DNA, 25 bp, Homo sapien
atttccagagtctctaagaaggctg

SEQ ID NO: 5292596 - DNA, 25 bp, Homo sapien
ggatgtagttgccatcatcaatggc

SEQ ID NO: 5292597 - DNA, 25 bp, Homo sapien
aggccctcatccaatgtgtaggcaa

SEQ ID NO: 5292598 - DNA, 25 bp, Homo sapien
aatggctgttccaaactcgatgagg

SEQ ID NO: 5292599 - DNA, 25 bp, Homo sapien
tgtaggcaacagtagtcacaccttc

SEQ ID NO: 5292600 - DNA, 25 bp, Homo sapien
tgcttccagcagtaccataagagta

SEQ ID NO: 5292601 - DNA, 25 bp, Homo sapien
acccagtcagtggtcaagagagtca

SEQ ID NO: 5292602 - DNA, 25 bp, Homo sapien
gaaaagtacagttgtcctgaaagca

SEQ ID NO: 5292603 - DNA, 25 bp, Homo sapien
aagagagtcacagcggccctgattt

SEQ ID NO: 5292604 - DNA, 25 bp, Homo sapien
tgagggcccctagtgtccaacatac

SEQ ID NO: 5292605 - DNA, 25 bp, Homo sapien
gaaaaccaagtagccttcagagtct

SEQ ID NO: 5292606 - DNA, 25 bp, Homo sapien
gagtctcctcatggctctaattaat

SEQ ID NO: 5292607 - DNA, 25 bp, Homo sapien
aattctatcacagagattaagggtg

SEQ ID NO: 5292608 - DNA, 25 bp, Homo sapien
tagtgaacatggtgactctctcagg

SEQ ID NO: 5292609 - DNA, 25 bp, Homo sapien
tctcaggtgcctcaatgttgtacca

SEQ ID NO: 5292610 - DNA, 25 bp, Homo sapien
ttgaggatcattgtcttagagcagc

SEQ ID NO: 5292611 - DNA, 25 bp, Homo sapien
catataggagcagaagttgaggatc

SEQ ID NO: 5292612 - DNA, 25 bp, Homo sapien
ggtgagctaacccaccactcaggtt

SEQ ID NO: 5292613 - DNA, 25 bp, Homo sapien
gatgtggtgagctaacccaccactc

SEQ ID NO: 5292614 - DNA, 25 bp, Homo sapien
tcaggttcatgctgcatttcaaagc

SEQ ID NO: 5292615 - DNA, 25 bp, Homo sapien
gcaggtaacacaattacaaggggat

SEQ ID NO: 5292616 - DNA, 25 bp, Homo sapien
gggccagagttaccagcttggatta

SEQ ID NO: 5292617 - DNA, 25 bp, Homo sapien
tccttcttgaaataactctgggcca

SEQ ID NO: 5292618 - DNA, 25 bp, Homo sapien
attgctgggcgcatggctcaacacc

SEQ ID NO: 5292619 - DNA, 25 bp, Homo sapien
gaggttgaagactctggtgctacca

SEQ ID NO: 5292620 - DNA, 25 bp, Homo sapien
atgcctaaggccttagtagctcttc

SEQ ID NO: 5292621 - DNA, 25 bp, Homo sapien
tgtgggccagccaatgcctaaggcc

SEQ ID NO: 5292622 - DNA, 25 bp, Homo sapien
cctctgtgggccagccaatgcctaa

SEQ ID NO: 5292623 - DNA, 25 bp, Homo sapien
gccagccaatgcctaaggccttagt

SEQ ID NO: 5292624 - DNA, 25 bp, Homo sapien
agtctcattaagttccagccaatcc

SEQ ID NO: 5292625 - DNA, 25 bp, Homo sapien
cggctctcatggctgacggtgccaa

SEQ ID NO: 5292626 - DNA, 25 bp, Homo sapien
gacggtgccaatgttgtagccacca

SEQ ID NO: 5292627 - DNA, 25 bp, Homo sapien
ctgaagaggagcttgtgtccagtct

SEQ ID NO: 5292628 - DNA, 25 bp, Homo sapien
gaagttgaagacacagctcctctat

SEQ ID NO: 5292629 - DNA, 25 bp, Homo sapien
caggatttgacagaactgggtatgg

SEQ ID NO: 5292630 - DNA, 25 bp, Homo sapien
aatagaaactctaactgctggtggg

SEQ ID NO: 5292631 - DNA, 25 bp, Homo sapien
tctaggcatggaactaactgaatca

SEQ ID NO: 5292632 - DNA, 25 bp, Homo sapien
taaagtggaaagcttcataaatttg

SEQ ID NO: 5292633 - DNA, 25 bp, Homo sapien
aatatatgtactgccaaagcaagaa

SEQ ID NO: 5292634 - DNA, 25 bp, Homo sapien
ctaatcttctctttatcattccaat

SEQ ID NO: 5292635 - DNA, 25 bp, Homo sapien
tgtgtcatccttgcacggggccatg

SEQ ID NO: 5292636 - DNA, 25 bp, Homo sapien
tgagatggtttgactctagagtccc

SEQ ID NO: 5292637 - DNA, 25 bp, Homo sapien
cacacaggtagagaattgagatggt

SEQ ID NO: 5292638 - DNA, 25 bp, Homo sapien
gtaccagggataagtgtatttcata

SEQ ID NO: 5292639 - DNA, 25 bp, Homo sapien
gaaattgagatatagaaagatgaag

SEQ ID NO: 5292640 - DNA, 25 bp, Homo sapien
ctgacacctctcattaatacgaaca

SEQ ID NO: 5292641 - DNA, 25 bp, Homo sapien
tagtcttaatatcaataagataagc

SEQ ID NO: 5292642 - DNA, 25 bp, Homo sapien
gctgacacctctcattaatacgaac

SEQ ID NO: 5292643 - DNA, 25 bp, Homo sapien
cttaatatcaataagataagccaat

SEQ ID NO: 5292644 - DNA, 25 bp, Homo sapien
gaacccagggtgtcattattcccat

SEQ ID NO: 5292645 - DNA, 25 bp, Homo sapien
tagctctccggcattgaagatcatg

SEQ ID NO: 5292646 - DNA, 25 bp, Homo sapien
tcccatattccaccagggttagctc

SEQ ID NO: 5292647 - DNA, 25 bp, Homo sapien
aattcagtgcgtacagaacccaggg

SEQ ID NO: 5292648 - DNA, 25 bp, Homo sapien
attgccaccagatccttgccaggct

SEQ ID NO: 5292649 - DNA, 25 bp, Homo sapien
ttctcattgccaccagatccttgcc

SEQ ID NO: 5292650 - DNA, 25 bp, Homo sapien
tcattgccaccagatccttgccagg

SEQ ID NO: 5292651 - DNA, 25 bp, Homo sapien
tgccaccagatccttgccaggctat

SEQ ID NO: 5292652 - DNA, 25 bp, Homo sapien
caccactcgggttcctgatgacagg

SEQ ID NO: 5292653 - DNA, 25 bp, Homo sapien
taagccgattagtgttcaggtcccc

SEQ ID NO: 5292654 - DNA, 25 bp, Homo sapien
tgtgagccaccaagtaacgttcctt

SEQ ID NO: 5292655 - DNA, 25 bp, Homo sapien
tagccatagtgtgacttgagcacca

SEQ ID NO: 5292656 - DNA, 25 bp, Homo sapien
gaggcagcagtcaaactgttccacc

SEQ ID NO: 5292657 - DNA, 25 bp, Homo sapien
taggtcccacatacgtcaactcaaa

SEQ ID NO: 5292658 - DNA, 25 bp, Homo sapien
ttgtaaatactccttcggaggcagc

SEQ ID NO: 5292659 - DNA, 25 bp, Homo sapien
ctggctaggtcccacatacgtcaac

SEQ ID NO: 5292660 - DNA, 25 bp, Homo sapien
gccaaggcagtgatggtgtataaat

SEQ ID NO: 5292661 - DNA, 25 bp, Homo sapien
gatgcttcttcgagggatccagttg

SEQ ID NO: 5292662 - DNA, 25 bp, Homo sapien
gagggatccagttgaacacccgaag

SEQ ID NO: 5292663 - DNA, 25 bp, Homo sapien
cttcccagatgcttcttcgagggat

SEQ ID NO: 5292664 - DNA, 25 bp, Homo sapien
cgctcctgagggtcacggctataat

SEQ ID NO: 5292665 - DNA, 25 bp, Homo sapien
tgatacagctgtggtgaactcccgc

SEQ ID NO: 5292666 - DNA, 25 bp, Homo sapien
taacttcctagcacaacagactggc

SEQ ID NO: 5292667 - DNA, 25 bp, Homo sapien
acaattttccgatcacagcctgcag

SEQ ID NO: 5292668 - DNA, 25 bp, Homo sapien
caatccaaatgccttagaagtccaa

SEQ ID NO: 5292669 - DNA, 25 bp, Homo sapien
taattcatcccttcttataagcagt

SEQ ID NO: 5292670 - DNA, 25 bp, Homo sapien
tctcagtggccacatccaacttttt

SEQ ID NO: 5292671 - DNA, 25 bp, Homo sapien
caaggtccctttcacctaattcatc

SEQ ID NO: 5292672 - DNA, 25 bp, Homo sapien
gaaatacctaacgatggtaccatct

SEQ ID NO: 5292673 - DNA, 25 bp, Homo sapien
tacctaacgatggtaccatctgcat

SEQ ID NO: 5292674 - DNA, 25 bp, Homo sapien
tcaaagaaatacctaacgatggtac

SEQ ID NO: 5292675 - DNA, 25 bp, Homo sapien
taacgatggtaccatctgcatgacc

SEQ ID NO: 5292676 - DNA, 25 bp, Homo sapien
cacttccagactctagtgatactac

SEQ ID NO: 5292677 - DNA, 25 bp, Homo sapien
aaccttgtctgtgcttcctgctacc

SEQ ID NO: 5292678 - DNA, 25 bp, Homo sapien
gagactattttatctcaccaagaaa

SEQ ID NO: 5292679 - DNA, 25 bp, Homo sapien
tctcctgcctttcatactatggtct

SEQ ID NO: 5292680 - DNA, 25 bp, Homo sapien
actctgtcccatagatggtagatga

SEQ ID NO: 5292681 - DNA, 25 bp, Homo sapien
gacaccacgtaagactctgtcccat

SEQ ID NO: 5292682 - DNA, 25 bp, Homo sapien
ttgttgtcagggacaccacgtaaga

SEQ ID NO: 5292683 - DNA, 25 bp, Homo sapien
cccatagatggtagatgatttatta

SEQ ID NO: 5292684 - DNA, 25 bp, Homo sapien
aattgatacaagtatggttaggcta

SEQ ID NO: 5292685 - DNA, 25 bp, Homo sapien
aaattgatacaagtatggttaggct

SEQ ID NO: 5292686 - DNA, 25 bp, Homo sapien
tgatacaagtatggttaggctattt

SEQ ID NO: 5292687 - DNA, 25 bp, Homo sapien
ttgatacaagtatggttaggctatt

SEQ ID NO: 5292688 - DNA, 25 bp, Homo sapien
gccattgcagacaagtgacagcact

SEQ ID NO: 5292689 - DNA, 25 bp, Homo sapien
ggccattgcagacaagtgacagcac

SEQ ID NO: 5292690 - DNA, 25 bp, Homo sapien
aagacaatgatgtattctgccggcc

SEQ ID NO: 5292691 - DNA, 25 bp, Homo sapien
caatgatgtattctgccggccattg

SEQ ID NO: 5292692 - DNA, 25 bp, Homo sapien
aactcctggctgtatttataagtag

SEQ ID NO: 5292693 - DNA, 25 bp, Homo sapien
caatctcctatagggaaggacacag

SEQ ID NO: 5292694 - DNA, 25 bp, Homo sapien
ccatccttgcagtaggaaaagtcac

SEQ ID NO: 5292695 - DNA, 25 bp, Homo sapien
gacagcagatgaccatgaacagcca

SEQ ID NO: 5292696 - DNA, 25 bp, Homo sapien
tggatgaacttgttgcagatgactt

SEQ ID NO: 5292697 - DNA, 25 bp, Homo sapien
tgaacttgttgcagatgactttctt

SEQ ID NO: 5292698 - DNA, 25 bp, Homo sapien
gatgaacttgttgcagatgactttc

SEQ ID NO: 5292699 - DNA, 25 bp, Homo sapien
ctggatgaacttgttgcagatgact

SEQ ID NO: 5292700 - DNA, 25 bp, Homo sapien
agtctgtcctatggcaattttagtg

SEQ ID NO: 5292701 - DNA, 25 bp, Homo sapien
catgcccttcaccatatagctcttc

SEQ ID NO: 5292702 - DNA, 25 bp, Homo sapien
atgttgtcagtctgtcctatggcaa

SEQ ID NO: 5292703 - DNA, 25 bp, Homo sapien
atcttctccaatcttgtagacatag

SEQ ID NO: 5292704 - DNA, 25 bp, Homo sapien
tcatacagcaagaccactcggtcca

SEQ ID NO: 5292705 - DNA, 25 bp, Homo sapien
caagaccactcggtccactgtgcag

SEQ ID NO: 5292706 - DNA, 25 bp, Homo sapien
accactcggtccactgtgcagacag

SEQ ID NO: 5292707 - DNA, 25 bp, Homo sapien
tgtgcagacagcaaatttggcattg

SEQ ID NO: 5292708 - DNA, 25 bp, Homo sapien
tgagggctcagcagggtcctcaggt

SEQ ID NO: 5292709 - DNA, 25 bp, Homo sapien
cagggtcctcaggtgcttcaagtgc

SEQ ID NO: 5292710 - DNA, 25 bp, Homo sapien
gggtcctcaggtgcttcaagtgcat

SEQ ID NO: 5292711 - DNA, 25 bp, Homo sapien
agcagggtcctcaggtgcttcaagt

SEQ ID NO: 5292712 - DNA, 25 bp, Homo sapien
acacgcgtcgcaaggtcacacgtaa

SEQ ID NO: 5292713 - DNA, 25 bp, Homo sapien
tgacgcttatgcgaccggagcgcaa

SEQ ID NO: 5292714 - DNA, 25 bp, Homo sapien
gacaactcccgtggttacctggaca

SEQ ID NO: 5292715 - DNA, 25 bp, Homo sapien
cgcagcgacaggcactgacgcttat

SEQ ID NO: 5292716 - DNA, 25 bp, Homo sapien
gcaatgctcctgtcaagtaggtgat

SEQ ID NO: 5292717 - DNA, 25 bp, Homo sapien
ttttctgaccattagcccagggttg

SEQ ID NO: 5292718 - DNA, 25 bp, Homo sapien
gaacagacacaggaacacataggat

SEQ ID NO: 5292719 - DNA, 25 bp, Homo sapien
ctgtgctgtcgatgcaagcagtgaa

SEQ ID NO: 5292720 - DNA, 25 bp, Homo sapien
caagtgatatcactagcagctgaag

SEQ ID NO: 5292721 - DNA, 25 bp, Homo sapien
cctgaggctccatggaagacattgg

SEQ ID NO: 5292722 - DNA, 25 bp, Homo sapien
gagtagtgcagtgcagcatctgcct

SEQ ID NO: 5292723 - DNA, 25 bp, Homo sapien
ccatggaagacattggagtagtgca

SEQ ID NO: 5292724 - DNA, 25 bp, Homo sapien
ggcattaccctctgggagtctcggg

SEQ ID NO: 5292725 - DNA, 25 bp, Homo sapien
gtaagaggagtacccacagaaacac

SEQ ID NO: 5292726 - DNA, 25 bp, Homo sapien
tcacagtggaaagaggatgggtacc

SEQ ID NO: 5292727 - DNA, 25 bp, Homo sapien
ggtacaactagtgactctcccctgg

SEQ ID NO: 5292728 - DNA, 25 bp, Homo sapien
aacgtcgatggtgttgatagatggt

SEQ ID NO: 5292729 - DNA, 25 bp, Homo sapien
cgatggtgttgatagatggtgactt

SEQ ID NO: 5292730 - DNA, 25 bp, Homo sapien
tcgatggtgttgatagatggtgact

SEQ ID NO: 5292731 - DNA, 25 bp, Homo sapien
tcaaacgtcgatggtgttgatagat

SEQ ID NO: 5292732 - DNA, 25 bp, Homo sapien
ctcaggggcagaatcaccctttccg

SEQ ID NO: 5292733 - DNA, 25 bp, Homo sapien
tttctgcccctctttgaccttcttc

SEQ ID NO: 5292734 - DNA, 25 bp, Homo sapien
gggcagaatcaccctttccgccctc

SEQ ID NO: 5292735 - DNA, 25 bp, Homo sapien
gaatcaccctttccgccctcactgg

SEQ ID NO: 5292736 - DNA, 25 bp, Homo sapien
ctccttgggattgttgttggagtca

SEQ ID NO: 5292737 - DNA, 25 bp, Homo sapien
catactgacggcagaacagcccaat

SEQ ID NO: 5292738 - DNA, 25 bp, Homo sapien
gttgttggagtcattgtccttgatg

SEQ ID NO: 5292739 - DNA, 25 bp, Homo sapien
ctgaggactctgttccggccccttt

SEQ ID NO: 5292740 - DNA, 25 bp, Homo sapien
accaccacaatgatgaccacttccc

SEQ ID NO: 5292741 - DNA, 25 bp, Homo sapien
cacaatgatgaccacttccccagtc

SEQ ID NO: 5292742 - DNA, 25 bp, Homo sapien
ccagtctgcagtggccgctctccat

SEQ ID NO: 5292743 - DNA, 25 bp, Homo sapien
tgcagtggccgctctccatccagac

SEQ ID NO: 5292744 - DNA, 25 bp, Homo sapien
cgaaggccgatgctcctgacctgca

SEQ ID NO: 5292745 - DNA, 25 bp, Homo sapien
cttgagagttcggaagtgcacccgg

SEQ ID NO: 5292746 - DNA, 25 bp, Homo sapien
tgaactgtttgaaggtagccggtca

SEQ ID NO: 5292747 - DNA, 25 bp, Homo sapien
tagccggtcagaacccttgagagtt

SEQ ID NO: 5292748 - DNA, 25 bp, Homo sapien
ccccacttaagtgaagaaatgtgcc

SEQ ID NO: 5292749 - DNA, 25 bp, Homo sapien
aaccagagactcttcaacatccaag

SEQ ID NO: 5292750 - DNA, 25 bp, Homo sapien
tgccgaaatccaaggacacaggttg

SEQ ID NO: 5292751 - DNA, 25 bp, Homo sapien
gccaggatacgccagcttccagatc

SEQ ID NO: 5292752 - DNA, 25 bp, Homo sapien
gctgggaaatggagtagccaatgac

SEQ ID NO: 5292753 - DNA, 25 bp, Homo sapien
tgctgggaaatggagtagccaatga

SEQ ID NO: 5292754 - DNA, 25 bp, Homo sapien
ttgctgggaaatggagtagccaatg

SEQ ID NO: 5292755 - DNA, 25 bp, Homo sapien
aggtgagtgaccgtcacattcacag

SEQ ID NO: 5292756 - DNA, 25 bp, Homo sapien
agtgaccgtcacattcacaggagag

SEQ ID NO: 5292757 - DNA, 25 bp, Homo sapien
tggccgagttggctctgaggtgagt

SEQ ID NO: 5292758 - DNA, 25 bp, Homo sapien
ccgagttggctctgaggtgagtgac

SEQ ID NO: 5292759 - DNA, 25 bp, Homo sapien
gaccgtggggcttagatatggggaa

SEQ ID NO: 5292760 - DNA, 25 bp, Homo sapien
gcaggaggaccgtggggcttagata

SEQ ID NO: 5292761 - DNA, 25 bp, Homo sapien
gggcaccagcgaagccatgtcccca

SEQ ID NO: 5292762 - DNA, 25 bp, Homo sapien
cagctgaccagcaggaggaccgtgg

SEQ ID NO: 5292763 - DNA, 25 bp, Homo sapien
tggggggggaactgtggcatccgct

SEQ ID NO: 5292764 - DNA, 25 bp, Homo sapien
ggggggaactgtggcatccgcttgg

SEQ ID NO: 5292765 - DNA, 25 bp, Homo sapien
ctggggggggaactgtggcatccgc

SEQ ID NO: 5292766 - DNA, 25 bp, Homo sapien
gggaactgtggcatccgcttggcat

SEQ ID NO: 5292767 - DNA, 25 bp, Homo sapien
tcaaggactgcccagaacgcacgga

SEQ ID NO: 5292768 - DNA, 25 bp, Homo sapien
gggtcaaggactgcccagaacgcac

SEQ ID NO: 5292769 - DNA, 25 bp, Homo sapien
ttgtggggggtcaaggactgcccag

SEQ ID NO: 5292770 - DNA, 25 bp, Homo sapien
gactgcccagaacgcacggaggtcg

SEQ ID NO: 5292771 - DNA, 25 bp, Homo sapien
tcggtgcccagagggcggcccatcg

SEQ ID NO: 5292772 - DNA, 25 bp, Homo sapien
catcgcccgactcggtggcgctgcc

SEQ ID NO: 5292773 - DNA, 25 bp, Homo sapien
tccgccggtcctcgcggttggtcag

SEQ ID NO: 5292774 - DNA, 25 bp, Homo sapien
cggtcctcgcggttggtcaggcctc

SEQ ID NO: 5292775 - DNA, 25 bp, Homo sapien
tccccggtgcgggaggcagtgcggc

SEQ ID NO: 5292776 - DNA, 25 bp, Homo sapien
ccttctgcagcgctggccccgctcg

SEQ ID NO: 5292777 - DNA, 25 bp, Homo sapien
ggatgtgaccgtcccggagagccag

SEQ ID NO: 5292778 - DNA, 25 bp, Homo sapien
ctcgagcgggccacggagtctgtcc

SEQ ID NO: 5292779 - DNA, 25 bp, Homo sapien
gaatagacggtccagagaagagaat

SEQ ID NO: 5292780 - DNA, 25 bp, Homo sapien
caaacttggccctagtccactgact

SEQ ID NO: 5292781 - DNA, 25 bp, Homo sapien
atgaggctttggcttagcatgggca

SEQ ID NO: 5292782 - DNA, 25 bp, Homo sapien
gaatatgggtcagaagtcatgaggc

SEQ ID NO: 5292783 - DNA, 25 bp, Homo sapien
ggaggacttcctgacttccatcctt

SEQ ID NO: 5292784 - DNA, 25 bp, Homo sapien
gcccaaggggacttgtgccagcaga

SEQ ID NO: 5292785 - DNA, 25 bp, Homo sapien
gaacccatgtttctgggtgggtgaa

SEQ ID NO: 5292786 - DNA, 25 bp, Homo sapien
gagttcttgctctcgacctagtggt

SEQ ID NO: 5292787 - DNA, 25 bp, Homo sapien
gcccagggtagggagaaatattctc

SEQ ID NO: 5292788 - DNA, 25 bp, Homo sapien
ataagtaacaagctggtcatggtgg

SEQ ID NO: 5292789 - DNA, 25 bp, Homo sapien
cctccacaaggatgacaatatgtca

SEQ ID NO: 5292790 - DNA, 25 bp, Homo sapien
tatatctaggtgatgcaaaatgctc

SEQ ID NO: 5292791 - DNA, 25 bp, Homo sapien
tatgtcaaagggatacaagagccaa

SEQ ID NO: 5292792 - DNA, 25 bp, Homo sapien
tgtgcctggcggatgcttttcatat

SEQ ID NO: 5292793 - DNA, 25 bp, Homo sapien
ggttatccctgcctcctaacatagg

SEQ ID NO: 5292794 - DNA, 25 bp, Homo sapien
tcacctcgttatatgagagacaccc

SEQ ID NO: 5292795 - DNA, 25 bp, Homo sapien
gatgttttatgctaggcacctggga

SEQ ID NO: 5292796 - DNA, 25 bp, Homo sapien
tatccacacagacccggcaaccatc

SEQ ID NO: 5292797 - DNA, 25 bp, Homo sapien
gtctacttctatccacacagacccg

SEQ ID NO: 5292798 - DNA, 25 bp, Homo sapien
acttctatccacacagacccggcaa

SEQ ID NO: 5292799 - DNA, 25 bp, Homo sapien
ttctatccacacagacccggcaacc

SEQ ID NO: 5292800 - DNA, 25 bp, Homo sapien
cctttgaggaaatcatgggcaatgc

SEQ ID NO: 5292801 - DNA, 25 bp, Homo sapien
gctttgcggcaacaaacagcacctt

SEQ ID NO: 5292802 - DNA, 25 bp, Homo sapien
aattctgtttccaaggagagaccac

SEQ ID NO: 5292803 - DNA, 25 bp, Homo sapien
cacgacttccaaggtgggctacatt

SEQ ID NO: 5292804 - DNA, 25 bp, Homo sapien
ccttaaggatatggacacgtggctc

SEQ ID NO: 5292805 - DNA, 25 bp, Homo sapien
caagaagtcattcaacatatgcctg

SEQ ID NO: 5292806 - DNA, 25 bp, Homo sapien
gaagacaaactcaacgttcaatggt

SEQ ID NO: 5292807 - DNA, 25 bp, Homo sapien
taatacagcaatactctgggactag

SEQ ID NO: 5292808 - DNA, 25 bp, Homo sapien
ctcagaggagccatcgtggtccctc

SEQ ID NO: 5292809 - DNA, 25 bp, Homo sapien
aggagccgtcacagtctcttggaga

SEQ ID NO: 5292810 - DNA, 25 bp, Homo sapien
gaggagccatcgtaggatttctgag

SEQ ID NO: 5292811 - DNA, 25 bp, Homo sapien
ctcacaggtcctttgagaggagcca

SEQ ID NO: 5292812 - DNA, 25 bp, Homo sapien
gaagacgtcacagtcccttggagag

SEQ ID NO: 5292813 - DNA, 25 bp, Homo sapien
ggaaagaagccgttgcagtccctct

SEQ ID NO: 5292814 - DNA, 25 bp, Homo sapien
tggaggcctgaagctactcgatgag

SEQ ID NO: 5292815 - DNA, 25 bp, Homo sapien
gactcaagtacagtttccctggaga

SEQ ID NO: 5292816 - DNA, 25 bp, Homo sapien
tctcctcgggaccacacataaaaat

SEQ ID NO: 5292817 - DNA, 25 bp, Homo sapien
caagaatcaaacaactctcctcggg

SEQ ID NO: 5292818 - DNA, 25 bp, Homo sapien
ccccagcgtggaaaggcttccattt

SEQ ID NO: 5292819 - DNA, 25 bp, Homo sapien
ctgagaccactgggcgggtggatgg

SEQ ID NO: 5292820 - DNA, 25 bp, Homo sapien
ggcgggtgagaatgggtctgtaatt

SEQ ID NO: 5292821 - DNA, 25 bp, Homo sapien
tgcgcccccagcgtggaaaggcttc

SEQ ID NO: 5292822 - DNA, 25 bp, Homo sapien
aggagttgtgcaaagattcggaatg

SEQ ID NO: 5292823 - DNA, 25 bp, Homo sapien
tgtgcaaagattcggaatgagagcc

SEQ ID NO: 5292824 - DNA, 25 bp, Homo sapien
gagttgtgcaaagattcggaatgag

SEQ ID NO: 5292825 - DNA, 25 bp, Homo sapien
caaagattcggaatgagagccaggg

SEQ ID NO: 5292826 - DNA, 25 bp, Homo sapien
cgcttttgtcccatgctgagttggt

SEQ ID NO: 5292827 - DNA, 25 bp, Homo sapien
gctgtacccgccgtgagtttcttgg

SEQ ID NO: 5292828 - DNA, 25 bp, Homo sapien
gatgtcttccagactcggtgctgta

SEQ ID NO: 5292829 - DNA, 25 bp, Homo sapien
gctttagaggtagcgctgtcgagcc

SEQ ID NO: 5292830 - DNA, 25 bp, Homo sapien
aaggtgcgcattccttctccctgga

SEQ ID NO: 5292831 - DNA, 25 bp, Homo sapien
tacttgttagtctacgccccactgt

SEQ ID NO: 5292832 - DNA, 25 bp, Homo sapien
caagggagcactgaaacctgaattg

SEQ ID NO: 5292833 - DNA, 25 bp, Homo sapien
tgtgaagaccactttcaaacaaggg

SEQ ID NO: 5292834 - DNA, 25 bp, Homo sapien
tgtgttacattggaacagtaataaa

SEQ ID NO: 5292835 - DNA, 25 bp, Homo sapien
aatgtgttacattggaacagtaata

SEQ ID NO: 5292836 - DNA, 25 bp, Homo sapien
atgtgttacattggaacagtaataa

SEQ ID NO: 5292837 - DNA, 25 bp, Homo sapien
aggagctacctggtcactggcacaa

SEQ ID NO: 5292838 - DNA, 25 bp, Homo sapien
gaatccaacagcctttctaaccagg

SEQ ID NO: 5292839 - DNA, 25 bp, Homo sapien
ggtcactctgcctagcacttactgg

SEQ ID NO: 5292840 - DNA, 25 bp, Homo sapien
taaactggcagaacgctattcaaag

SEQ ID NO: 5292841 - DNA, 25 bp, Homo sapien
tctgggcttgctcaattagctgcag

SEQ ID NO: 5292842 - DNA, 25 bp, Homo sapien
taacttttctcggtgtagctccctg

SEQ ID NO: 5292843 - DNA, 25 bp, Homo sapien
aaccgctttgctgccaacttcaagg

SEQ ID NO: 5292844 - DNA, 25 bp, Homo sapien
gattaaggactccagataccactgt

SEQ ID NO: 5292845 - DNA, 25 bp, Homo sapien
tatgatacggtggaaggagccttct

SEQ ID NO: 5292846 - DNA, 25 bp, Homo sapien
gcttctctggcttgacaaaattatt

SEQ ID NO: 5292847 - DNA, 25 bp, Homo sapien
tatttattagactatgatacggtgg

SEQ ID NO: 5292848 - DNA, 25 bp, Homo sapien
tagcttctctggcttgacaaaatta

SEQ ID NO: 5292849 - DNA, 25 bp, Homo sapien
ttcagccttcctctcgcttgctcag

SEQ ID NO: 5292850 - DNA, 25 bp, Homo sapien
atctcttctggccttcctccgggag

SEQ ID NO: 5292851 - DNA, 25 bp, Homo sapien
acttcctcgccactgtcactagttg

SEQ ID NO: 5292852 - DNA, 25 bp, Homo sapien
gagatcagcgcccttttcctagctc

SEQ ID NO: 5292853 - DNA, 25 bp, Homo sapien
tcctttctgacgctgtggtggtttt

SEQ ID NO: 5292854 - DNA, 25 bp, Homo sapien
gacgctgtggtggttttcgttcgca

SEQ ID NO: 5292855 - DNA, 25 bp, Homo sapien
cagcccagaacattgcggaagtttc

SEQ ID NO: 5292856 - DNA, 25 bp, Homo sapien
ggtggttttcgttcgcagcccagaa

SEQ ID NO: 5292857 - DNA, 25 bp, Homo sapien
gagcaggggatccaccctggactga

SEQ ID NO: 5292858 - DNA, 25 bp, Homo sapien
ggctggggatgaataaagagtaatg

SEQ ID NO: 5292859 - DNA, 25 bp, Homo sapien
aagagtaatgctttctatgtaggca

SEQ ID NO: 5292860 - DNA, 25 bp, Homo sapien
aggggatccaccctggactgaactc

SEQ ID NO: 5292861 - DNA, 25 bp, Homo sapien
gcctggccggttacacttatttcta

SEQ ID NO: 5292862 - DNA, 25 bp, Homo sapien
tgtgcctggccggttacacttattt

SEQ ID NO: 5292863 - DNA, 25 bp, Homo sapien
ggccggttacacttatttctatcag

SEQ ID NO: 5292864 - DNA, 25 bp, Homo sapien
tacacttatttctatcagcaggatt

SEQ ID NO: 5292865 - DNA, 25 bp, Homo sapien
cacattgggaggcacgtgatgttga

SEQ ID NO: 5292866 - DNA, 25 bp, Homo sapien
tccccatgatagcaggagaaaatct

SEQ ID NO: 5292867 - DNA, 25 bp, Homo sapien
ctggaacagtgccttagtctgactt

SEQ ID NO: 5292868 - DNA, 25 bp, Homo sapien
tgccttatactcctttagaatctgg

SEQ ID NO: 5292869 - DNA, 25 bp, Homo sapien
gaagtcaatgttaaaactactgctg

SEQ ID NO: 5292870 - DNA, 25 bp, Homo sapien
ttagaatcacttctgaatatgtgaa

SEQ ID NO: 5292871 - DNA, 25 bp, Homo sapien
cacttctgaatatgtgaagtcaatg

SEQ ID NO: 5292872 - DNA, 25 bp, Homo sapien
aaaactactgctgcaaagggtctgc

SEQ ID NO: 5292873 - DNA, 25 bp, Homo sapien
cccagtggactgatatttgggtaga

SEQ ID NO: 5292874 - DNA, 25 bp, Homo sapien
catcctgaacacctagtgcctggca

SEQ ID NO: 5292875 - DNA, 25 bp, Homo sapien
acagttgaaatgtagagcacttccc

SEQ ID NO: 5292876 - DNA, 25 bp, Homo sapien
cagtatttagccttttgcatttgac

SEQ ID NO: 5292877 - DNA, 25 bp, Homo sapien
gaatcgatggcacaatactggaaga

SEQ ID NO: 5292878 - DNA, 25 bp, Homo sapien
tggacctccacgtgaaagaactgtt

SEQ ID NO: 5292879 - DNA, 25 bp, Homo sapien
gaatcaaaagaacgtagtctcctgg

SEQ ID NO: 5292880 - DNA, 25 bp, Homo sapien
aacatgagcttatccagaacggtgg

SEQ ID NO: 5292881 - DNA, 25 bp, Homo sapien
ggtgattttcgcaaagtccgtggat

SEQ ID NO: 5292882 - DNA, 25 bp, Homo sapien
ccgtggatttgggtcagaggcacat

SEQ ID NO: 5292883 - DNA, 25 bp, Homo sapien
tcctgttcaacagaggcttaaggcc

SEQ ID NO: 5292884 - DNA, 25 bp, Homo sapien
ccagaccaggtgaatctcaagatac

SEQ ID NO: 5292885 - DNA, 25 bp, Homo sapien
gaaagtatgtgagtccgagcagaaa

SEQ ID NO: 5292886 - DNA, 25 bp, Homo sapien
taaccacagtgatgttgttcaggac

SEQ ID NO: 5292887 - DNA, 25 bp, Homo sapien
caaatgaaatatgcacaaggctgtc

SEQ ID NO: 5292888 - DNA, 25 bp, Homo sapien
taatgggttcccaatgacctgagcc

SEQ ID NO: 5292889 - DNA, 25 bp, Homo sapien
gtttggtgacgtccagttcctctgg

SEQ ID NO: 5292890 - DNA, 25 bp, Homo sapien
aatggctgtataacatgtctagtca

SEQ ID NO: 5292891 - DNA, 25 bp, Homo sapien
tctcagttgtacaagataaatggct

SEQ ID NO: 5292892 - DNA, 25 bp, Homo sapien
ctctacaaggtaggtcaaagtatga

SEQ ID NO: 5292893 - DNA, 25 bp, Homo sapien
cttttctgttgggtctagtaggtct

SEQ ID NO: 5292894 - DNA, 25 bp, Homo sapien
tagtaggtctggacaaaacatctcc

SEQ ID NO: 5292895 - DNA, 25 bp, Homo sapien
ggtctggacaaaacatctccctctt

SEQ ID NO: 5292896 - DNA, 25 bp, Homo sapien
tgggtctagtaggtctggacaaaac

SEQ ID NO: 5292897 - DNA, 25 bp, Homo sapien
tcttgcagcgctggttgaaaacagg

SEQ ID NO: 5292898 - DNA, 25 bp, Homo sapien
cataggctcctcgaagacatcactg

SEQ ID NO: 5292899 - DNA, 25 bp, Homo sapien
cagcttcactcatgcctgacatagg

SEQ ID NO: 5292900 - DNA, 25 bp, Homo sapien
ttcttcactttcttgaggctccatt

SEQ ID NO: 5292901 - DNA, 25 bp, Homo sapien
tcccataggcagtgactggtctcca

SEQ ID NO: 5292902 - DNA, 25 bp, Homo sapien
gcctgtggtgaagcttcaacctcca

SEQ ID NO: 5292903 - DNA, 25 bp, Homo sapien
ggaagcgttcgctctgagccccaag

SEQ ID NO: 5292904 - DNA, 25 bp, Homo sapien
tcaacctccaggttagatgggaagc

SEQ ID NO: 5292905 - DNA, 25 bp, Homo sapien
tggccttctcaggattgacaatcct

SEQ ID NO: 5292906 - DNA, 25 bp, Homo sapien
tgatcttcacaggtttagcgtcctc

SEQ ID NO: 5292907 - DNA, 25 bp, Homo sapien
gctcacaggttcctccttgatcttc

SEQ ID NO: 5292908 - DNA, 25 bp, Homo sapien
ggaaaagtgatgtcgctcacaggtt

SEQ ID NO: 5292909 - DNA, 25 bp, Homo sapien
tatttggccaggaacatcgctaggg

SEQ ID NO: 5292910 - DNA, 25 bp, Homo sapien
tagaccaagtgttgtgggatcctgc

SEQ ID NO: 5292911 - DNA, 25 bp, Homo sapien
gaacactccgagattgcacagacat

SEQ ID NO: 5292912 - DNA, 25 bp, Homo sapien
taaaggagacccatggtatttggcc

SEQ ID NO: 5292913 - DNA, 25 bp, Homo sapien
ctgcctggtagaggagctgccgaca

SEQ ID NO: 5292914 - DNA, 25 bp, Homo sapien
tcattagcacagtcaaagcccgcgt

SEQ ID NO: 5292915 - DNA, 25 bp, Homo sapien
tgccacatcagttagggtctccagg

SEQ ID NO: 5292916 - DNA, 25 bp, Homo sapien
gatagtccttgatgcggtgctgcca

SEQ ID NO: 5292917 - DNA, 25 bp, Homo sapien
tagacttgcggattcctaaaaatac

SEQ ID NO: 5292918 - DNA, 25 bp, Homo sapien
ttgtgtagacttgcggattcctaaa

SEQ ID NO: 5292919 - DNA, 25 bp, Homo sapien
tgtagacttgcggattcctaaaaat

SEQ ID NO: 5292920 - DNA, 25 bp, Homo sapien
tcttgtgtagacttgcggattccta

SEQ ID NO: 5292921 - DNA, 25 bp, Homo sapien
gtaagatacagcaaagccttgcctt

SEQ ID NO: 5292922 - DNA, 25 bp, Homo sapien
aagatacagcaaagccttgccttac

SEQ ID NO: 5292923 - DNA, 25 bp, Homo sapien
taagatacagcaaagccttgcctta

SEQ ID NO: 5292924 - DNA, 25 bp, Homo sapien
agtaagatacagcaaagccttgcct

SEQ ID NO: 5292925 - DNA, 25 bp, Homo sapien
gcacgagggaagaggttcactctct

SEQ ID NO: 5292926 - DNA, 25 bp, Homo sapien
tcttacaatctaaaggcaggaggtc

SEQ ID NO: 5292927 - DNA, 25 bp, Homo sapien
ccggatctggaatggtgcattggga

SEQ ID NO: 5292928 - DNA, 25 bp, Homo sapien
tctgggtcactgtgccggatctgga

SEQ ID NO: 5292929 - DNA, 25 bp, Homo sapien
accagacggaactcccgtgggagca

SEQ ID NO: 5292930 - DNA, 25 bp, Homo sapien
tatggatggtgagactacatggctc

SEQ ID NO: 5292931 - DNA, 25 bp, Homo sapien
tggcaataaggttgcgaagacgtcg

SEQ ID NO: 5292932 - DNA, 25 bp, Homo sapien
cgtgggagcaaatcgaaggaacttc

SEQ ID NO: 5292933 - DNA, 25 bp, Homo sapien
gaggtctcaggataaatgtagacaa

SEQ ID NO: 5292934 - DNA, 25 bp, Homo sapien
aagaggtctcaggataaatgtagac

SEQ ID NO: 5292935 - DNA, 25 bp, Homo sapien
aggtctcaggataaatgtagacaat

SEQ ID NO: 5292936 - DNA, 25 bp, Homo sapien
gaagaggtctcaggataaatgtaga

SEQ ID NO: 5292937 - DNA, 25 bp, Homo sapien
taaaaagtaggctatttgtgaccac

SEQ ID NO: 5292938 - DNA, 25 bp, Homo sapien
taggcttctgtagtgaaaaatacga

SEQ ID NO: 5292939 - DNA, 25 bp, Homo sapien
atcctggcaactttagattataggc

SEQ ID NO: 5292940 - DNA, 25 bp, Homo sapien
acgaggtctagccagttatttatgt

SEQ ID NO: 5292941 - DNA, 25 bp, Homo sapien
catctgtgctggatcaataggagaa

SEQ ID NO: 5292942 - DNA, 25 bp, Homo sapien
tgaaccacagggtagaatttgggtc

SEQ ID NO: 5292943 - DNA, 25 bp, Homo sapien
tagaacgtgagagatttctgctgcc

SEQ ID NO: 5292944 - DNA, 25 bp, Homo sapien
cccattgcctattggaaaaagtcag

SEQ ID NO: 5292945 - DNA, 25 bp, Homo sapien
ccaggcattctgtgtcggtcaaaga

SEQ ID NO: 5292946 - DNA, 25 bp, Homo sapien
aatgccaggcattctgtgtcggtca

SEQ ID NO: 5292947 - DNA, 25 bp, Homo sapien
tctgtgtcggtcaaagactgataat

SEQ ID NO: 5292948 - DNA, 25 bp, Homo sapien
cattctgtgtcggtcaaagactgat

SEQ ID NO: 5292949 - DNA, 25 bp, Homo sapien
gcgtcagaccccgaaagctggtttg

SEQ ID NO: 5292950 - DNA, 25 bp, Homo sapien
ttagtgatctaagaccgccggaagc

SEQ ID NO: 5292951 - DNA, 25 bp, Homo sapien
ggaggtaccacactattcactgctg

SEQ ID NO: 5292952 - DNA, 25 bp, Homo sapien
tctggacctgaaccgagacaaggag

SEQ ID NO: 5292953 - DNA, 25 bp, Homo sapien
cagggtctcactctgttgcccagag

SEQ ID NO: 5292954 - DNA, 25 bp, Homo sapien
ctcccaaagcactggaacctcattt

SEQ ID NO: 5292955 - DNA, 25 bp, Homo sapien
acagggtctcactctgttgcccaga

SEQ ID NO: 5292956 - DNA, 25 bp, Homo sapien
ccaaagcactggaacctcatttttt

SEQ ID NO: 5292957 - DNA, 25 bp, Homo sapien
tagaaacatgctgaagcccggaaca

SEQ ID NO: 5292958 - DNA, 25 bp, Homo sapien
tggtatgccacaaggcagaaagcct

SEQ ID NO: 5292959 - DNA, 25 bp, Homo sapien
tgtaaccctgattaaactgctgacc

SEQ ID NO: 5292960 - DNA, 25 bp, Homo sapien
gaacacaccgtgcaaatagcccgtg

SEQ ID NO: 5292961 - DNA, 25 bp, Homo sapien
gagaaatcgaggcaggaaatcccac

SEQ ID NO: 5292962 - DNA, 25 bp, Homo sapien
ttgaatggattcttagcctggcccc

SEQ ID NO: 5292963 - DNA, 25 bp, Homo sapien
gacagaagcttcattgaccccaggg

SEQ ID NO: 5292964 - DNA, 25 bp, Homo sapien
cccagggtcagagagtgtaatcgtc

SEQ ID NO: 5292965 - DNA, 25 bp, Homo sapien
cacagcaggaaataatgtgctgcct

SEQ ID NO: 5292966 - DNA, 25 bp, Homo sapien
cctaaaatagaagcatcaactggga

SEQ ID NO: 5292967 - DNA, 25 bp, Homo sapien
tcagagcccaaattagaaggctgaa

SEQ ID NO: 5292968 - DNA, 25 bp, Homo sapien
aaatcacagcaggaaataatgtgct

SEQ ID NO: 5292969 - DNA, 25 bp, Homo sapien
ctattggatggaggcctctggggct

SEQ ID NO: 5292970 - DNA, 25 bp, Homo sapien
gcttgtccatgtagtgggcactgag

SEQ ID NO: 5292971 - DNA, 25 bp, Homo sapien
ttgtgcgggagcttcgttcacgccc

SEQ ID NO: 5292972 - DNA, 25 bp, Homo sapien
gaggtccagtcgtgtagctgcccag

SEQ ID NO: 5292973 - DNA, 25 bp, Homo sapien
ccaagatgcaagctgggatcacgca

SEQ ID NO: 5292974 - DNA, 25 bp, Homo sapien
ggctgttcgttgttcattcgttcat

SEQ ID NO: 5292975 - DNA, 25 bp, Homo sapien
cggtggttgggctgttcgttgttca

SEQ ID NO: 5292976 - DNA, 25 bp, Homo sapien
ggttgggctgttcgttgttcattcg

SEQ ID NO: 5292977 - DNA, 25 bp, Homo sapien
ttcattttgtggctgcaggtatctg

SEQ ID NO: 5292978 - DNA, 25 bp, Homo sapien
cacccgacatgctccggccgccagc

SEQ ID NO: 5292979 - DNA, 25 bp, Homo sapien
ctccggccgccagctctggtctgac

SEQ ID NO: 5292980 - DNA, 25 bp, Homo sapien
acccgacatgctccggccgccagct

SEQ ID NO: 5292981 - DNA, 25 bp, Homo sapien
atgctccggccgccagctctggtct

SEQ ID NO: 5292982 - DNA, 25 bp, Homo sapien
caagcagccccctattcgtactgtt

SEQ ID NO: 5292983 - DNA, 25 bp, Homo sapien
cagtgaactcccagggatcacctgc

SEQ ID NO: 5292984 - DNA, 25 bp, Homo sapien
tgtgacgaatgtggtcagttttgtt

SEQ ID NO: 5292985 - DNA, 25 bp, Homo sapien
atgaagaactccaagcagcccccta

SEQ ID NO: 5292986 - DNA, 25 bp, Homo sapien
gctgcatgccatattgtgttaaaac

SEQ ID NO: 5292987 - DNA, 25 bp, Homo sapien
tgtcaccctgaggatagcactgctg

SEQ ID NO: 5292988 - DNA, 25 bp, Homo sapien
ccagattgttcaggaggctgccatc

SEQ ID NO: 5292989 - DNA, 25 bp, Homo sapien
ggaccctatggagggtgtcaccctg

SEQ ID NO: 5292990 - DNA, 25 bp, Homo sapien
ggaagctgcagctgcgtacttttcc

SEQ ID NO: 5292991 - DNA, 25 bp, Homo sapien
tgcgtacttttccaggccttcagga

SEQ ID NO: 5292992 - DNA, 25 bp, Homo sapien
ggaaggatgtgcgaacaggacggga

SEQ ID NO: 5292993 - DNA, 25 bp, Homo sapien
aggccttcaggaccacagcgtccgg

SEQ ID NO: 5292994 - DNA, 25 bp, Homo sapien
ggagaatgatacagtgcccaccctg

SEQ ID NO: 5292995 - DNA, 25 bp, Homo sapien
ttgatgagtcttagggcttgtggcc

SEQ ID NO: 5292996 - DNA, 25 bp, Homo sapien
ctctctggcagtggaattagaggca

SEQ ID NO: 5292997 - DNA, 25 bp, Homo sapien
gttcccggttgaaaaggatctgctc

SEQ ID NO: 5292998 - DNA, 25 bp, Homo sapien
ttgaggatgacttcgtaaaagaact

SEQ ID NO: 5292999 - DNA, 25 bp, Homo sapien
gttgtggaatctttaattctggttg

SEQ ID NO: 5293000 - DNA, 25 bp, Homo sapien
gaatcatcgttataaataaattgaa

SEQ ID NO: 5293001 - DNA, 25 bp, Homo sapien
aaataaattgaagcttgaggatgac

SEQ ID NO: 5293002 - DNA, 25 bp, Homo sapien
gtatatttattttgggactaatagc

SEQ ID NO: 5293003 - DNA, 25 bp, Homo sapien
tatatttattttgggactaatagca

SEQ ID NO: 5293004 - DNA, 25 bp, Homo sapien
atatttattttgggactaatagcaa

SEQ ID NO: 5293005 - DNA, 25 bp, Homo sapien
caggtatatttattttgggactaat

SEQ ID NO: 5293006 - DNA, 25 bp, Homo sapien
cactgactgctgcaatgaaattgga

SEQ ID NO: 5293007 - DNA, 25 bp, Homo sapien
gatctgttgagcatgtcttccaagg

SEQ ID NO: 5293008 - DNA, 25 bp, Homo sapien
caaaacagagtaagcggaaggtctt

SEQ ID NO: 5293009 - DNA, 25 bp, Homo sapien
caaggacagatttggatagtaagcc

SEQ ID NO: 5293010 - DNA, 25 bp, Homo sapien
taaagctgaaagtaccaatggttgg

SEQ ID NO: 5293011 - DNA, 25 bp, Homo sapien
gagatttgaacagaagcttcatcaa

SEQ ID NO: 5293012 - DNA, 25 bp, Homo sapien
gagatggcattatatacctagtaca

SEQ ID NO: 5293013 - DNA, 25 bp, Homo sapien
tgtaaatgtggagatacgagaagtc

SEQ ID NO: 5293014 - DNA, 25 bp, Homo sapien
tagttctcattgatacaacatgatg

SEQ ID NO: 5293015 - DNA, 25 bp, Homo sapien
tgaaatagttctcattgatacaaca

SEQ ID NO: 5293016 - DNA, 25 bp, Homo sapien
tctcattgatacaacatgatggttt

SEQ ID NO: 5293017 - DNA, 25 bp, Homo sapien
tttttgtgccaaaaggggtgatggc

SEQ ID NO: 5293018 - DNA, 25 bp, Homo sapien
cagatgaacagtcggagagtctgac

SEQ ID NO: 5293019 - DNA, 25 bp, Homo sapien
tcagatgaacagtcggagagtctga

SEQ ID NO: 5293020 - DNA, 25 bp, Homo sapien
gatctggccccactattgttgacaa

SEQ ID NO: 5293021 - DNA, 25 bp, Homo sapien
tacctcacaggttggtgccatggac

SEQ ID NO: 5293022 - DNA, 25 bp, Homo sapien
cattagttcatattgacagaggcca

SEQ ID NO: 5293023 - DNA, 25 bp, Homo sapien
tcagccatctcagtcttcacacagg

SEQ ID NO: 5293024 - DNA, 25 bp, Homo sapien
catttttgctcgagctgttaggcca

SEQ ID NO: 5293025 - DNA, 25 bp, Homo sapien
cagagctaccagattattaaacagc

SEQ ID NO: 5293026 - DNA, 25 bp, Homo sapien
caggttccacttctgctgatgcaca

SEQ ID NO: 5293027 - DNA, 25 bp, Homo sapien
tcataatattagcaccaaccacagg

SEQ ID NO: 5293028 - DNA, 25 bp, Homo sapien
tgctgcttcactcttgggtcttgag

SEQ ID NO: 5293029 - DNA, 25 bp, Homo sapien
tgcttgcctgttacacagatcattc

SEQ ID NO: 5293030 - DNA, 25 bp, Homo sapien
tttaaatgaaggattgatttctgct

SEQ ID NO: 5293031 - DNA, 25 bp, Homo sapien
cttgcctgttacacagatcattcat

SEQ ID NO: 5293032 - DNA, 25 bp, Homo sapien
tctgctccaaatgcttgcctgttac

SEQ ID NO: 5293033 - DNA, 25 bp, Homo sapien
gacatttctggtaagcagttacaat

SEQ ID NO: 5293034 - DNA, 25 bp, Homo sapien
cagttacaattagatttctagagcc

SEQ ID NO: 5293035 - DNA, 25 bp, Homo sapien
tggccctggttcaattcctcaaagt

SEQ ID NO: 5293036 - DNA, 25 bp, Homo sapien
gatttctagagccctgggtattcaa

SEQ ID NO: 5293037 - DNA, 25 bp, Homo sapien
gtcctttccttacagtcagtgaaca

SEQ ID NO: 5293038 - DNA, 25 bp, Homo sapien
accagagtgtgcagagttttactaa

SEQ ID NO: 5293039 - DNA, 25 bp, Homo sapien
ttaagagggctgtttcggaacctca

SEQ ID NO: 5293040 - DNA, 25 bp, Homo sapien
tccttacagtcagtgaacaactttt

SEQ ID NO: 5293041 - DNA, 25 bp, Homo sapien
atcctctgataagagtgatttgtat

SEQ ID NO: 5293042 - DNA, 25 bp, Homo sapien
tatcctctgataagagtgatttgta

SEQ ID NO: 5293043 - DNA, 25 bp, Homo sapien
ctatcctctgataagagtgatttgt

SEQ ID NO: 5293044 - DNA, 25 bp, Homo sapien
gctgcccaccgtgaggccagttaaa

SEQ ID NO: 5293045 - DNA, 25 bp, Homo sapien
cccctaaggtaatgattaccacctg

SEQ ID NO: 5293046 - DNA, 25 bp, Homo sapien
aagagcactaatgcagcctccccag

SEQ ID NO: 5293047 - DNA, 25 bp, Homo sapien
tggcagccccttttcaagagcacta

SEQ ID NO: 5293048 - DNA, 25 bp, Homo sapien
tctgagagggtgtagaactggggat

SEQ ID NO: 5293049 - DNA, 25 bp, Homo sapien
tccaggtcagcaatggcaggggctg

SEQ ID NO: 5293050 - DNA, 25 bp, Homo sapien
gggatccaggtcagcaatggcaggg

SEQ ID NO: 5293051 - DNA, 25 bp, Homo sapien
catctgagagggtgtagaactgggg

SEQ ID NO: 5293052 - DNA, 25 bp, Homo sapien
gcatttgagcacagattagagcaaa

SEQ ID NO: 5293053 - DNA, 25 bp, Homo sapien
agcatttgagcacagattagagcaa

SEQ ID NO: 5293054 - DNA, 25 bp, Homo sapien
catttgagcacagattagagcaaag

SEQ ID NO: 5293055 - DNA, 25 bp, Homo sapien
gagtaacttggagttgcagaggtga

SEQ ID NO: 5293056 - DNA, 25 bp, Homo sapien
tggagtaacttggagttgcagaggt

SEQ ID NO: 5293057 - DNA, 25 bp, Homo sapien
ggagtaacttggagttgcagaggtg

SEQ ID NO: 5293058 - DNA, 25 bp, Homo sapien
catggagtaacttggagttgcagag

SEQ ID NO: 5293059 - DNA, 25 bp, Homo sapien
ctggatggccagataagaagttttg

SEQ ID NO: 5293060 - DNA, 25 bp, Homo sapien
aacactcaaagcttgggctatgtgc

SEQ ID NO: 5293061 - DNA, 25 bp, Homo sapien
tgtgacttgagcagcaaaaacactc

SEQ ID NO: 5293062 - DNA, 25 bp, Homo sapien
tatgtgctggacaatgtcattgtga

SEQ ID NO: 5293063 - DNA, 25 bp, Homo sapien
tttatcatcgttcttgaagacggaa

SEQ ID NO: 5293064 - DNA, 25 bp, Homo sapien
aagacggaataatgctgttcagcac

SEQ ID NO: 5293065 - DNA, 25 bp, Homo sapien
ctgtaagcagtaaagataatggaac

SEQ ID NO: 5293066 - DNA, 25 bp, Homo sapien
tgtgataagaaaacccatagatgat

SEQ ID NO: 5293067 - DNA, 25 bp, Homo sapien
gaccatgactttggctctgctaatg

SEQ ID NO: 5293068 - DNA, 25 bp, Homo sapien
tcctgcgggccattgttagggcttc

SEQ ID NO: 5293069 - DNA, 25 bp, Homo sapien
tggagttatttcgagctggcagacc

SEQ ID NO: 5293070 - DNA, 25 bp, Homo sapien
tcagatcctccgtattcaaaagtaa

SEQ ID NO: 5293071 - DNA, 25 bp, Homo sapien
gaagcagttcctgtagcagcatctt

SEQ ID NO: 5293072 - DNA, 25 bp, Homo sapien
gcagcatctttagtctgatatgtaa

SEQ ID NO: 5293073 - DNA, 25 bp, Homo sapien
attatagaagcagttcctgtagcag

SEQ ID NO: 5293074 - DNA, 25 bp, Homo sapien
gcagttcctgtagcagcatctttag

SEQ ID NO: 5293075 - DNA, 25 bp, Homo sapien
cattgccaaaagaatctttgccaac

SEQ ID NO: 5293076 - DNA, 25 bp, Homo sapien
aatcattgccaaaagaatctttgcc

SEQ ID NO: 5293077 - DNA, 25 bp, Homo sapien
atcattgccaaaagaatctttgcca

SEQ ID NO: 5293078 - DNA, 25 bp, Homo sapien
ataatcattgccaaaagaatctttg

SEQ ID NO: 5293079 - DNA, 25 bp, Homo sapien
tccttggctaagcccctcagggcag

SEQ ID NO: 5293080 - DNA, 25 bp, Homo sapien
tgcttaaaatgctcttaagaaggta

SEQ ID NO: 5293081 - DNA, 25 bp, Homo sapien
tcagtgtaataaacatccatcacct

SEQ ID NO: 5293082 - DNA, 25 bp, Homo sapien
attgtatgcttaaaatgctcttaag

SEQ ID NO: 5293083 - DNA, 25 bp, Homo sapien
ccaagccgagcagcttggacacact

SEQ ID NO: 5293084 - DNA, 25 bp, Homo sapien
taaaaaacttatgtccatggatggt

SEQ ID NO: 5293085 - DNA, 25 bp, Homo sapien
cagtttttggcaaacgagaagtaag

SEQ ID NO: 5293086 - DNA, 25 bp, Homo sapien
tatgtccatggatggtttctccagt

SEQ ID NO: 5293087 - DNA, 25 bp, Homo sapien
taactagaagtcatatattccttca

SEQ ID NO: 5293088 - DNA, 25 bp, Homo sapien
ccagtatcagcagcattcctcttcc

SEQ ID NO: 5293089 - DNA, 25 bp, Homo sapien
tcatcactgtgtcctgatgtatctc

SEQ ID NO: 5293090 - DNA, 25 bp, Homo sapien
agcaagaactgtaactagaagtcat

SEQ ID NO: 5293091 - DNA, 25 bp, Homo sapien
gacatatatggtaggctgttccaca

SEQ ID NO: 5293092 - DNA, 25 bp, Homo sapien
ttttcaaacgcttttagtgcctctc

SEQ ID NO: 5293093 - DNA, 25 bp, Homo sapien
tcactctgctattaggctcatccag

SEQ ID NO: 5293094 - DNA, 25 bp, Homo sapien
tcctgctggatgttcattgtttgca

SEQ ID NO: 5293095 - DNA, 25 bp, Homo sapien
gaaatctccggagtggctcttgtaa

SEQ ID NO: 5293096 - DNA, 25 bp, Homo sapien
aatatgtcacacaaggaagccaggt

SEQ ID NO: 5293097 - DNA, 25 bp, Homo sapien
ccttgacttcaatccggactgtgtg

SEQ ID NO: 5293098 - DNA, 25 bp, Homo sapien
catttgcgatctcaagcagttggtc

SEQ ID NO: 5293099 - DNA, 25 bp, Homo sapien
tgtattaagcacgtctcaaagcaag

SEQ ID NO: 5293100 - DNA, 25 bp, Homo sapien
gcttagatgcttgggtgaacacgag

SEQ ID NO: 5293101 - DNA, 25 bp, Homo sapien
ggaggtcagaccctcagtgatctca

SEQ ID NO: 5293102 - DNA, 25 bp, Homo sapien
aaatgttgtagtgccctaggaggtc

SEQ ID NO: 5293103 - DNA, 25 bp, Homo sapien
ttgtttagttccacgttctctatta

SEQ ID NO: 5293104 - DNA, 25 bp, Homo sapien
tgtttagttccacgttctctattac

SEQ ID NO: 5293105 - DNA, 25 bp, Homo sapien
agtaatgccgacaatcaacatggtg

SEQ ID NO: 5293106 - DNA, 25 bp, Homo sapien
gagctttcactaaaccctggcctat

SEQ ID NO: 5293107 - DNA, 25 bp, Homo sapien
cgcaagtctttggagggcaggtctt

SEQ ID NO: 5293108 - DNA, 25 bp, Homo sapien
tgaggtaggcacattctcggaggta

SEQ ID NO: 5293109 - DNA, 25 bp, Homo sapien
tttcatgccaggaaggtaggctgaa

SEQ ID NO: 5293110 - DNA, 25 bp, Homo sapien
ccccgagccgcagactgagtaactg

SEQ ID NO: 5293111 - DNA, 25 bp, Homo sapien
ggctgaaggcttcgaaaacctgcag

SEQ ID NO: 5293112 - DNA, 25 bp, Homo sapien
aaagctagcactgtctatccctgga

SEQ ID NO: 5293113 - DNA, 25 bp, Homo sapien
gaccaggtcggtcatgcaggagccc

SEQ ID NO: 5293114 - DNA, 25 bp, Homo sapien
accaggtcggtcatgcaggagccca

SEQ ID NO: 5293115 - DNA, 25 bp, Homo sapien
ccaggtcggtcatgcaggagcccac

SEQ ID NO: 5293116 - DNA, 25 bp, Homo sapien
tgctgtccaacctggacggtgacct

SEQ ID NO: 5293117 - DNA, 25 bp, Homo sapien
gcaggcgctgaggaaggaactgtca

SEQ ID NO: 5293118 - DNA, 25 bp, Homo sapien
tcctgatatggcgagactccgcgct

SEQ ID NO: 5293119 - DNA, 25 bp, Homo sapien
tcctggaatagtctcggtgcacagc

SEQ ID NO: 5293120 - DNA, 25 bp, Homo sapien
gcggcgcgcgcgcaggtcggtgcgt

SEQ ID NO: 5293121 - DNA, 25 bp, Homo sapien
ggcgcgcgcgcaggtcggtgcgtct

SEQ ID NO: 5293122 - DNA, 25 bp, Homo sapien
cgcgcgcgcaggtcggtgcgtctgt

SEQ ID NO: 5293123 - DNA, 25 bp, Homo sapien
cgcgcaggtcggtgcgtctgtcggg

SEQ ID NO: 5293124 - DNA, 25 bp, Homo sapien
ttggatcccgagtcgcacaggtggc

SEQ ID NO: 5293125 - DNA, 25 bp, Homo sapien
tagtcgccggttaccgatcggacta

SEQ ID NO: 5293126 - DNA, 25 bp, Homo sapien
cccaaggccagaggcgtctctttct

SEQ ID NO: 5293127 - DNA, 25 bp, Homo sapien
gatcggactaagttccaggtacctg

SEQ ID NO: 5293128 - DNA, 25 bp, Homo sapien
tctcgaatgttgccccttgggggaa

SEQ ID NO: 5293129 - DNA, 25 bp, Homo sapien
tatgacgtcgacgtgacgcagcagg

SEQ ID NO: 5293130 - DNA, 25 bp, Homo sapien
tgcgctgtatgacgtcgacgtgacg

SEQ ID NO: 5293131 - DNA, 25 bp, Homo sapien
gtcgacgtgacgcagcaggatgcca

SEQ ID NO: 5293132 - DNA, 25 bp, Homo sapien
ttccctcgtgcgctgtatgacgtcg

SEQ ID NO: 5293133 - DNA, 25 bp, Homo sapien
caactgggtccacattgctcagctg

SEQ ID NO: 5293134 - DNA, 25 bp, Homo sapien
taggtctcattatctattgtgtcca

SEQ ID NO: 5293135 - DNA, 25 bp, Homo sapien
gcttgtgcccaactgggtccacatt

SEQ ID NO: 5293136 - DNA, 25 bp, Homo sapien
tcttgtcatagaggatgcacaccat

SEQ ID NO: 5293137 - DNA, 25 bp, Homo sapien
gccttttatgtagtacttgtctgaa

SEQ ID NO: 5293138 - DNA, 25 bp, Homo sapien
cagggaagttctttagaagttcatt

SEQ ID NO: 5293139 - DNA, 25 bp, Homo sapien
tgtctgaaagattcagggaagttct

SEQ ID NO: 5293140 - DNA, 25 bp, Homo sapien
aatccttccatcagccgaagtgtga

SEQ ID NO: 5293141 - DNA, 25 bp, Homo sapien
caggttcaggggtgtatcacagttg

SEQ ID NO: 5293142 - DNA, 25 bp, Homo sapien
ttcaggggtgtatcacagttgtctc

SEQ ID NO: 5293143 - DNA, 25 bp, Homo sapien
ggttcaggggtgtatcacagttgtc

SEQ ID NO: 5293144 - DNA, 25 bp, Homo sapien
tccaggttcaggggtgtatcacagt

SEQ ID NO: 5293145 - DNA, 25 bp, Homo sapien
tccaaaggatagactgccacagatt

SEQ ID NO: 5293146 - DNA, 25 bp, Homo sapien
gaagttccaaaggatagactgccac

SEQ ID NO: 5293147 - DNA, 25 bp, Homo sapien
ctttagaagttccaaaggatagact

SEQ ID NO: 5293148 - DNA, 25 bp, Homo sapien
gatagactgccacagattatgccag

SEQ ID NO: 5293149 - DNA, 25 bp, Homo sapien
gctgtgtaacatgagaggcatgatg

SEQ ID NO: 5293150 - DNA, 25 bp, Homo sapien
ggcatgatgggctccattagatttg

SEQ ID NO: 5293151 - DNA, 25 bp, Homo sapien
tagatttgctttaggacactggaaa

SEQ ID NO: 5293152 - DNA, 25 bp, Homo sapien
tattttactgctctgattaagtctt

SEQ ID NO: 5293153 - DNA, 25 bp, Homo sapien
tcttgaacctattcttgtggtgaac

SEQ ID NO: 5293154 - DNA, 25 bp, Homo sapien
cctattcttgtggtgaacagcctat

SEQ ID NO: 5293155 - DNA, 25 bp, Homo sapien
gaacctattcttgtggtgaacagcc

SEQ ID NO: 5293156 - DNA, 25 bp, Homo sapien
ttctctcttgaacctattcttgtgg

SEQ ID NO: 5293157 - DNA, 25 bp, Homo sapien
ctgtgcgaagactctcaggggaagc

SEQ ID NO: 5293158 - DNA, 25 bp, Homo sapien
cagcctgctgctgtgcgaagactct

SEQ ID NO: 5293159 - DNA, 25 bp, Homo sapien
tgtgcgaagactctcaggggaagcc

SEQ ID NO: 5293160 - DNA, 25 bp, Homo sapien
tgctgctgtgcgaagactctcaggg

SEQ ID NO: 5293161 - DNA, 25 bp, Homo sapien
tcatattgtcgaagacagggcatcc

SEQ ID NO: 5293162 - DNA, 25 bp, Homo sapien
tcgaagacagggcatccagtgaatt

SEQ ID NO: 5293163 - DNA, 25 bp, Homo sapien
ttgtcgaagacagggcatccagtga

SEQ ID NO: 5293164 - DNA, 25 bp, Homo sapien
gacagggcatccagtgaattcactg

SEQ ID NO: 5293165 - DNA, 25 bp, Homo sapien
gggagaatttgcacacagtatacac

SEQ ID NO: 5293166 - DNA, 25 bp, Homo sapien
agtgtgagtggtctgccttccttgg

SEQ ID NO: 5293167 - DNA, 25 bp, Homo sapien
ggtagaaggtctacaaaggcctggc

SEQ ID NO: 5293168 - DNA, 25 bp, Homo sapien
caaatactcttgtgaggaaagacag

SEQ ID NO: 5293169 - DNA, 25 bp, Homo sapien
aacagtagtttcatgacaggataac

SEQ ID NO: 5293170 - DNA, 25 bp, Homo sapien
tttaaatatggtcctaagagcctag

SEQ ID NO: 5293171 - DNA, 25 bp, Homo sapien
cctaggaatcctgcaagttttagac

SEQ ID NO: 5293172 - DNA, 25 bp, Homo sapien
tagaatttgctcctaggttatcagg

SEQ ID NO: 5293173 - DNA, 25 bp, Homo sapien
ttctgagatgttgtgacttgtgttt

SEQ ID NO: 5293174 - DNA, 25 bp, Homo sapien
ccaaattgttcttgctagagcctcc

SEQ ID NO: 5293175 - DNA, 25 bp, Homo sapien
tttagccaaggcttgagttaatgcc

SEQ ID NO: 5293176 - DNA, 25 bp, Homo sapien
gaatgtcaagggacaatagatccta

SEQ ID NO: 5293177 - DNA, 25 bp, Homo sapien
cccatcaccagagtagtgtagactg

SEQ ID NO: 5293178 - DNA, 25 bp, Homo sapien
cctccactagttgggcgatgtccaa

SEQ ID NO: 5293179 - DNA, 25 bp, Homo sapien
tgggcgatgtccaaatagttctgaa

SEQ ID NO: 5293180 - DNA, 25 bp, Homo sapien
tagttgggcgatgtccaaatagttc

SEQ ID NO: 5293181 - DNA, 25 bp, Homo sapien
cgatgtccaaatagttctgaaggtt

SEQ ID NO: 5293182 - DNA, 25 bp, Homo sapien
gcaaactgggataatgagtcatcct

SEQ ID NO: 5293183 - DNA, 25 bp, Homo sapien
gcagctttccaggactagaaaatac

SEQ ID NO: 5293184 - DNA, 25 bp, Homo sapien
cactggattggcagcttcaggagag

SEQ ID NO: 5293185 - DNA, 25 bp, Homo sapien
tggtatgttcatctccctcaaagga

SEQ ID NO: 5293186 - DNA, 25 bp, Homo sapien
tgctgttgtgaatattgctactgtg

SEQ ID NO: 5293187 - DNA, 25 bp, Homo sapien
tgtcttggttaatgcacatgtatcc

SEQ ID NO: 5293188 - DNA, 25 bp, Homo sapien
attctactattgattgacacttagg

SEQ ID NO: 5293189 - DNA, 25 bp, Homo sapien
tttggttgttgttcatgctcattgc

SEQ ID NO: 5293190 - DNA, 25 bp, Homo sapien
tgggctacgccagaattcatcaaag

SEQ ID NO: 5293191 - DNA, 25 bp, Homo sapien
gatggtcactttaatccagtcaggg

SEQ ID NO: 5293192 - DNA, 25 bp, Homo sapien
tttacttgggagattggagtggcca

SEQ ID NO: 5293193 - DNA, 25 bp, Homo sapien
cctctgatagggacataggctgatg

SEQ ID NO: 5293194 - DNA, 25 bp, Homo sapien
ccattgtctttggttggtcgtctct

SEQ ID NO: 5293195 - DNA, 25 bp, Homo sapien
ttggtcgtctctcgtcatccatccg

SEQ ID NO: 5293196 - DNA, 25 bp, Homo sapien
tccgctctttgtcgcctcctcttct

SEQ ID NO: 5293197 - DNA, 25 bp, Homo sapien
ctttggttggtcgtctctcgtcatc

SEQ ID NO: 5293198 - DNA, 25 bp, Homo sapien
catccctggatgatattcgagcaac

SEQ ID NO: 5293199 - DNA, 25 bp, Homo sapien
cacatccctggatgatattcgagca

SEQ ID NO: 5293200 - DNA, 25 bp, Homo sapien
aaatcacatccctggatgatattcg

SEQ ID NO: 5293201 - DNA, 25 bp, Homo sapien
atcacatccctggatgatattcgag

SEQ ID NO: 5293202 - DNA, 25 bp, Homo sapien
aaaattgtgaggataaagacaacac

SEQ ID NO: 5293203 - DNA, 25 bp, Homo sapien
ttaaaattgtgaggataaagacaac

SEQ ID NO: 5293204 - DNA, 25 bp, Homo sapien
taaaattgtgaggataaagacaaca

SEQ ID NO: 5293205 - DNA, 25 bp, Homo sapien
tcagtttctgacatggacctttcag

SEQ ID NO: 5293206 - DNA, 25 bp, Homo sapien
ttaaattatccttactgtctgattc

SEQ ID NO: 5293207 - DNA, 25 bp, Homo sapien
tccatatactctgattctgacaagg

SEQ ID NO: 5293208 - DNA, 25 bp, Homo sapien
ttctgagtcctttaatgtccttttc

SEQ ID NO: 5293209 - DNA, 25 bp, Homo sapien
tgtctttttttggatgagctctcac

SEQ ID NO: 5293210 - DNA, 25 bp, Homo sapien
ttctctgtctttttttggatgagct

SEQ ID NO: 5293211 - DNA, 25 bp, Homo sapien
tctctgtctttttttggatgagctc

SEQ ID NO: 5293212 - DNA, 25 bp, Homo sapien
tctgtctttttttggatgagctctc

SEQ ID NO: 5293213 - DNA, 25 bp, Homo sapien
ttgcacttaacaatttccccctgtg

SEQ ID NO: 5293214 - DNA, 25 bp, Homo sapien
tgcacttaacaatttccccctgtgt

SEQ ID NO: 5293215 - DNA, 25 bp, Homo sapien
acattcaaccaaactcttggagcct

SEQ ID NO: 5293216 - DNA, 25 bp, Homo sapien
tttcttcacattcaaccaaactctt

SEQ ID NO: 5293217 - DNA, 25 bp, Homo sapien
ttcacattcaaccaaactcttggag

SEQ ID NO: 5293218 - DNA, 25 bp, Homo sapien
tcaaccaaactcttggagcctttct

SEQ ID NO: 5293219 - DNA, 25 bp, Homo sapien
ggagagatggccgaagcgggcccgc

SEQ ID NO: 5293220 - DNA, 25 bp, Homo sapien
tgggccggagagatggccgaagcgg

SEQ ID NO: 5293221 - DNA, 25 bp, Homo sapien
gaaactgggccggagagatggccga

SEQ ID NO: 5293222 - DNA, 25 bp, Homo sapien
agagatggccgaagcgggcccgccg

SEQ ID NO: 5293223 - DNA, 25 bp, Homo sapien
tgttggatgctgcttctagagccca

SEQ ID NO: 5293224 - DNA, 25 bp, Homo sapien
ttgttggatgctgcttctagagccc

SEQ ID NO: 5293225 - DNA, 25 bp, Homo sapien
gttggatgctgcttctagagcccat

SEQ ID NO: 5293226 - DNA, 25 bp, Homo sapien
ctgattcccaatttgtacgtaagac

SEQ ID NO: 5293227 - DNA, 25 bp, Homo sapien
aatttgtacgtaagaccaggcaagg

SEQ ID NO: 5293228 - DNA, 25 bp, Homo sapien
tacttggtacagaaaatgttgcttt

SEQ ID NO: 5293229 - DNA, 25 bp, Homo sapien
tgtgaatcaaattacttggtacaga

SEQ ID NO: 5293230 - DNA, 25 bp, Homo sapien
ctttttgctgcaccttgtacttcat

SEQ ID NO: 5293231 - DNA, 25 bp, Homo sapien
gttggtccatgaggcgtaacactga

SEQ ID NO: 5293232 - DNA, 25 bp, Homo sapien
ttgtgcctgcagaagcataacgact

SEQ ID NO: 5293233 - DNA, 25 bp, Homo sapien
caaagtcaagggcatgtatgtgggc

SEQ ID NO: 5293234 - DNA, 25 bp, Homo sapien
cagctgttgtggaggtactcattca

SEQ ID NO: 5293235 - DNA, 25 bp, Homo sapien
tctttttcaactctaagctgccctt

SEQ ID NO: 5293236 - DNA, 25 bp, Homo sapien
cttcccatagacagttccagaggga

SEQ ID NO: 5293237 - DNA, 25 bp, Homo sapien
tcaactctaagctgccctttaggtt

SEQ ID NO: 5293238 - DNA, 25 bp, Homo sapien
gacagttccagagggatatggctcc

SEQ ID NO: 5293239 - DNA, 25 bp, Homo sapien
tgagctcaaaatgtcgcttttggaa

SEQ ID NO: 5293240 - DNA, 25 bp, Homo sapien
tattctgtattgtgacatctagtag

SEQ ID NO: 5293241 - DNA, 25 bp, Homo sapien
gacatctagtagtaatgagctcaaa

SEQ ID NO: 5293242 - DNA, 25 bp, Homo sapien
tcaaaatgtcgcttttggaagacat

SEQ ID NO: 5293243 - DNA, 25 bp, Homo sapien
tgtgtggacccagtatcacgcagga

SEQ ID NO: 5293244 - DNA, 25 bp, Homo sapien
tacaagtccatataccaggagggcc

SEQ ID NO: 5293245 - DNA, 25 bp, Homo sapien
gagctcatgcaaaccagacactgta

SEQ ID NO: 5293246 - DNA, 25 bp, Homo sapien
tctttgcaagctagatagggccggc

SEQ ID NO: 5293247 - DNA, 25 bp, Homo sapien
tttgctgactcaagatgatttttgg

SEQ ID NO: 5293248 - DNA, 25 bp, Homo sapien
gactcaagatgatttttggtacctg

SEQ ID NO: 5293249 - DNA, 25 bp, Homo sapien
cctgttttatgcctacatgctccag

SEQ ID NO: 5293250 - DNA, 25 bp, Homo sapien
ttatgcctacatgctccagccagac

SEQ ID NO: 5293251 - DNA, 25 bp, Homo sapien
tctcccaacaaagaagtttaggaca

SEQ ID NO: 5293252 - DNA, 25 bp, Homo sapien
aaactgaagaggaagcaattcccct

SEQ ID NO: 5293253 - DNA, 25 bp, Homo sapien
tatactaatacactggaaaacctag

SEQ ID NO: 5293254 - DNA, 25 bp, Homo sapien
aatgaactacaagattgaatccgta

SEQ ID NO: 5293255 - DNA, 25 bp, Homo sapien
agcaagaagaccagaaatacttgaa

SEQ ID NO: 5293256 - DNA, 25 bp, Homo sapien
ctctgagcttaaatgcaatgggatt

SEQ ID NO: 5293257 - DNA, 25 bp, Homo sapien
tctgcagtccacaagaatactatta

SEQ ID NO: 5293258 - DNA, 25 bp, Homo sapien
gaccagaaatacttgaatagagagg

SEQ ID NO: 5293259 - DNA, 25 bp, Homo sapien
ccagtctaggtgttacatggtgccc

SEQ ID NO: 5293260 - DNA, 25 bp, Homo sapien
taccatatggctaatgtggacccaa

SEQ ID NO: 5293261 - DNA, 25 bp, Homo sapien
gaagtcagtgcacagtcaaagagga

SEQ ID NO: 5293262 - DNA, 25 bp, Homo sapien
ttcaagtgggatgccaagagagacg

SEQ ID NO: 5293263 - DNA, 25 bp, Homo sapien
aagattctttatatgcctgcagcag

SEQ ID NO: 5293264 - DNA, 25 bp, Homo sapien
gtcctacctaactacgaacgctgtg

SEQ ID NO: 5293265 - DNA, 25 bp, Homo sapien
tctgtttgtcgcctatcttccaggg

SEQ ID NO: 5293266 - DNA, 25 bp, Homo sapien
ggcagcactaggatttgaccccagt

SEQ ID NO: 5293267 - DNA, 25 bp, Homo sapien
cgttagctcctggtactgctttcta

SEQ ID NO: 5293268 - DNA, 25 bp, Homo sapien
ggaagatactttcaggcaggtcgtt

SEQ ID NO: 5293269 - DNA, 25 bp, Homo sapien
gttaatgcaggtgcaggacagcctg

SEQ ID NO: 5293270 - DNA, 25 bp, Homo sapien
tactttcaggcaggtcgttagctcc

SEQ ID NO: 5293271 - DNA, 25 bp, Homo sapien
caggcacccgggcttggcacctgag

SEQ ID NO: 5293272 - DNA, 25 bp, Homo sapien
caccgccttgacttgatcgtactct

SEQ ID NO: 5293273 - DNA, 25 bp, Homo sapien
gacttgatcgtactctctgcttatt

SEQ ID NO: 5293274 - DNA, 25 bp, Homo sapien
gatcgtactctctgcttattgggca

SEQ ID NO: 5293275 - DNA, 25 bp, Homo sapien
attgttcaccgccttgacttgatcg

SEQ ID NO: 5293276 - DNA, 25 bp, Homo sapien
gacaatgcaagctctcacaaaactg

SEQ ID NO: 5293277 - DNA, 25 bp, Homo sapien
gaatggtgctcaagacactgctgtg

SEQ ID NO: 5293278 - DNA, 25 bp, Homo sapien
ctttagaagcgtgcctgaatggtgc

SEQ ID NO: 5293279 - DNA, 25 bp, Homo sapien
ggatgcttcgtacttcagtttgcgg

SEQ ID NO: 5293280 - DNA, 25 bp, Homo sapien
ggtgctatcccactgaactggtgag

SEQ ID NO: 5293281 - DNA, 25 bp, Homo sapien
taagcatggcacattgtaacctcca

SEQ ID NO: 5293282 - DNA, 25 bp, Homo sapien
tgagaaagttgagtagaaccaaaga

SEQ ID NO: 5293283 - DNA, 25 bp, Homo sapien
actgtgcctggtcaggtgtctttga

SEQ ID NO: 5293284 - DNA, 25 bp, Homo sapien
cccaactcatccctcttatgagatt

SEQ ID NO: 5293285 - DNA, 25 bp, Homo sapien
aaagcaagtccccaactcatccctc

SEQ ID NO: 5293286 - DNA, 25 bp, Homo sapien
ccacgtacccaaaatcatcgtgcat

SEQ ID NO: 5293287 - DNA, 25 bp, Homo sapien
ctccagtccaccacgtacccaaaat

SEQ ID NO: 5293288 - DNA, 25 bp, Homo sapien
atccttctcggaccgactgctcagt

SEQ ID NO: 5293289 - DNA, 25 bp, Homo sapien
ccttctcggaccgactgctcagttt

SEQ ID NO: 5293290 - DNA, 25 bp, Homo sapien
ttctcggaccgactgctcagtttca

SEQ ID NO: 5293291 - DNA, 25 bp, Homo sapien
catccttctcggaccgactgctcag

SEQ ID NO: 5293292 - DNA, 25 bp, Homo sapien
cacagtagccatggggtgaaccagg

SEQ ID NO: 5293293 - DNA, 25 bp, Homo sapien
aggcaggcatcaccggcacattttg

SEQ ID NO: 5293294 - DNA, 25 bp, Homo sapien
tgaaattgcggtaagttcagtaacc

SEQ ID NO: 5293295 - DNA, 25 bp, Homo sapien
tcagtaacccaatggaagtcgcgcc

SEQ ID NO: 5293296 - DNA, 25 bp, Homo sapien
tgagctccgttagggatataatgag

SEQ ID NO: 5293297 - DNA, 25 bp, Homo sapien
gagttggagatgttgagctccgtta

SEQ ID NO: 5293298 - DNA, 25 bp, Homo sapien
gagcctgtggacatccagttaaaga

SEQ ID NO: 5293299 - DNA, 25 bp, Homo sapien
aaatgagagaacattcacatagaac

SEQ ID NO: 5293300 - DNA, 25 bp, Homo sapien
tttcctcccaaagaggtgatccaaa

SEQ ID NO: 5293301 - DNA, 25 bp, Homo sapien
tccagtcacatgtcacactggacag

SEQ ID NO: 5293302 - DNA, 25 bp, Homo sapien
gaactcgaaaccttgttgatacact

SEQ ID NO: 5293303 - DNA, 25 bp, Homo sapien
tggctgaactcttttgtccagtcac

SEQ ID NO: 5293304 - DNA, 25 bp, Homo sapien
agaggctttgggcagtaacttctaa

SEQ ID NO: 5293305 - DNA, 25 bp, Homo sapien
agaatgacttgtggctaaacttgaa

SEQ ID NO: 5293306 - DNA, 25 bp, Homo sapien
ctaggatgtactgaaagaggctttg

SEQ ID NO: 5293307 - DNA, 25 bp, Homo sapien
tgagaatgacttgtggctaaacttg

SEQ ID NO: 5293308 - DNA, 25 bp, Homo sapien
tacccattttcctcgagtgccataa

SEQ ID NO: 5293309 - DNA, 25 bp, Homo sapien
cctcgagtgccataaaatagtacca

SEQ ID NO: 5293310 - DNA, 25 bp, Homo sapien
cttacccattttcctcgagtgccat

SEQ ID NO: 5293311 - DNA, 25 bp, Homo sapien
ctcttcagtccttgggggagccgca

SEQ ID NO: 5293312 - DNA, 25 bp, Homo sapien
gtcttctggaatgccgtggaacttt

SEQ ID NO: 5293313 - DNA, 25 bp, Homo sapien
ggaatgccgtggaactttcttactc

SEQ ID NO: 5293314 - DNA, 25 bp, Homo sapien
cagtcttctggaatgccgtggaact

SEQ ID NO: 5293315 - DNA, 25 bp, Homo sapien
tctggaatgccgtggaactttctta

SEQ ID NO: 5293316 - DNA, 25 bp, Homo sapien
ttgcgtagatgaagttatttttaga

SEQ ID NO: 5293317 - DNA, 25 bp, Homo sapien
tgcgtagatgaagttatttttagag

SEQ ID NO: 5293318 - DNA, 25 bp, Homo sapien
tcagccggaaacctccaggcagttc

SEQ ID NO: 5293319 - DNA, 25 bp, Homo sapien
cgtcagccggaaacctccaggcagt

SEQ ID NO: 5293320 - DNA, 25 bp, Homo sapien
ctgaggtttcgtcagccggaaacct

SEQ ID NO: 5293321 - DNA, 25 bp, Homo sapien
tttcgtcagccggaaacctccaggc

SEQ ID NO: 5293322 - DNA, 25 bp, Homo sapien
tatctttgcacccatactgcatggt

SEQ ID NO: 5293323 - DNA, 25 bp, Homo sapien
agcccttcgatggagtatctttgca

SEQ ID NO: 5293324 - DNA, 25 bp, Homo sapien
tgttataaccttcgtcctcgtctcc

SEQ ID NO: 5293325 - DNA, 25 bp, Homo sapien
tcaaagcagtctcatctaataagcc

SEQ ID NO: 5293326 - DNA, 25 bp, Homo sapien
acagtgagttgagggcatgctgaca

SEQ ID NO: 5293327 - DNA, 25 bp, Homo sapien
gaacagtgagttgagggcatgctga

SEQ ID NO: 5293328 - DNA, 25 bp, Homo sapien
aacagtgagttgagggcatgctgac

SEQ ID NO: 5293329 - DNA, 25 bp, Homo sapien
agaacagtgagttgagggcatgctg

SEQ ID NO: 5293330 - DNA, 25 bp, Homo sapien
tttatcagtgcattcggctttcccc

SEQ ID NO: 5293331 - DNA, 25 bp, Homo sapien
agtttatcagtgcattcggctttcc

SEQ ID NO: 5293332 - DNA, 25 bp, Homo sapien
ggcagcatagtttatcagtgcattc

SEQ ID NO: 5293333 - DNA, 25 bp, Homo sapien
catagtttatcagtgcattcggctt

SEQ ID NO: 5293334 - DNA, 25 bp, Homo sapien
ttctagtttgttgctggtatacagg

SEQ ID NO: 5293335 - DNA, 25 bp, Homo sapien
attacaggcatgacgggatttcacc

SEQ ID NO: 5293336 - DNA, 25 bp, Homo sapien
ggcatcctgtgacattgctaaattc

SEQ ID NO: 5293337 - DNA, 25 bp, Homo sapien
tcacttattactactaaaatctaat

SEQ ID NO: 5293338 - DNA, 25 bp, Homo sapien
gcccttcaagggttataatgcagaa

SEQ ID NO: 5293339 - DNA, 25 bp, Homo sapien
tccaaataagccatcagagtgacca

SEQ ID NO: 5293340 - DNA, 25 bp, Homo sapien
ttaattgactttgccgagggcacac

SEQ ID NO: 5293341 - DNA, 25 bp, Homo sapien
catatccagcctataggcagaggac

SEQ ID NO: 5293342 - DNA, 25 bp, Homo sapien
aaacaagcttgaccaataattcatc

SEQ ID NO: 5293343 - DNA, 25 bp, Homo sapien
gaaatatgcttggaagagcactccc

SEQ ID NO: 5293344 - DNA, 25 bp, Homo sapien
aacaagcttgaccaataattcatca

SEQ ID NO: 5293345 - DNA, 25 bp, Homo sapien
aacaacacaacttgtgtccattgtg

SEQ ID NO: 5293346 - DNA, 25 bp, Homo sapien
gttaccttgccgctgtcaactggag

SEQ ID NO: 5293347 - DNA, 25 bp, Homo sapien
agccagtagtggtgcgtcagatccc

SEQ ID NO: 5293348 - DNA, 25 bp, Homo sapien
tctgcctactacgtgggataatgtc

SEQ ID NO: 5293349 - DNA, 25 bp, Homo sapien
tgcgtgcgtcctctgccatgtggtc

SEQ ID NO: 5293350 - DNA, 25 bp, Homo sapien
gcaccaggcacggagtgtttacagc

SEQ ID NO: 5293351 - DNA, 25 bp, Homo sapien
caccaggcacggagtgtttacagcc

SEQ ID NO: 5293352 - DNA, 25 bp, Homo sapien
ggagggccaagccgcttgtttctat

SEQ ID NO: 5293353 - DNA, 25 bp, Homo sapien
ttgtttctatcacttctcattaagg

SEQ ID NO: 5293354 - DNA, 25 bp, Homo sapien
gccgcttgtttctatcacttctcat

SEQ ID NO: 5293355 - DNA, 25 bp, Homo sapien
ggccaagccgcttgtttctatcact

SEQ ID NO: 5293356 - DNA, 25 bp, Homo sapien
gcgctgtcgcacactctgagaaggg

SEQ ID NO: 5293357 - DNA, 25 bp, Homo sapien
tcattactactccacgttgccaggc

SEQ ID NO: 5293358 - DNA, 25 bp, Homo sapien
agaaagaaacccgactgctggcaga

SEQ ID NO: 5293359 - DNA, 25 bp, Homo sapien
tgcatgtcagcgctgtcgcacactc

SEQ ID NO: 5293360 - DNA, 25 bp, Homo sapien
gtgatgtcctcacatttagctgcag

SEQ ID NO: 5293361 - DNA, 25 bp, Homo sapien
tgatgtcctcacatttagctgcagc

SEQ ID NO: 5293362 - DNA, 25 bp, Homo sapien
ggtgatgtcctcacatttagctgca

SEQ ID NO: 5293363 - DNA, 25 bp, Homo sapien
aatatccccacatacctctgagcag

SEQ ID NO: 5293364 - DNA, 25 bp, Homo sapien
gcttagctgactgccagacttgcaa

SEQ ID NO: 5293365 - DNA, 25 bp, Homo sapien
tctggcctgctggataatatcccca

SEQ ID NO: 5293366 - DNA, 25 bp, Homo sapien
caatagcagtaagaagcggcaggcc

SEQ ID NO: 5293367 - DNA, 25 bp, Homo sapien
ctgctttgattttcagaccacaatc

SEQ ID NO: 5293368 - DNA, 25 bp, Homo sapien
atgactgattaaaaacatgtgccag

SEQ ID NO: 5293369 - DNA, 25 bp, Homo sapien
gattaaaaacatgtgccagttgaag

SEQ ID NO: 5293370 - DNA, 25 bp, Homo sapien
ccacaatcggttttcatatgactga

SEQ ID NO: 5293371 - DNA, 25 bp, Homo sapien
ggaatgtcttcacggcagcgttttg

SEQ ID NO: 5293372 - DNA, 25 bp, Homo sapien
gactgcctgtccacatgcgtgtcag

SEQ ID NO: 5293373 - DNA, 25 bp, Homo sapien
ctggtggtccctggatcctagagcc

SEQ ID NO: 5293374 - DNA, 25 bp, Homo sapien
tagagcccttcacttcgggttactc

SEQ ID NO: 5293375 - DNA, 25 bp, Homo sapien
catgcgtgacagtccaggccctgtt

SEQ ID NO: 5293376 - DNA, 25 bp, Homo sapien
tttgctccaaaacggaacgctgcag

SEQ ID NO: 5293377 - DNA, 25 bp, Homo sapien
tctgacccttcagagaactaggaga

SEQ ID NO: 5293378 - DNA, 25 bp, Homo sapien
tgtctgcgcaggtgccagtagagca

SEQ ID NO: 5293379 - DNA, 25 bp, Homo sapien
ccgaagcaatgtatcagggcaaatc

SEQ ID NO: 5293380 - DNA, 25 bp, Homo sapien
caggcagccgaagcaatgtatcagg

SEQ ID NO: 5293381 - DNA, 25 bp, Homo sapien
cagccgaagcaatgtatcagggcaa

SEQ ID NO: 5293382 - DNA, 25 bp, Homo sapien
gcaggcagccgaagcaatgtatcag

SEQ ID NO: 5293383 - DNA, 25 bp, Homo sapien
gagccaaaaggccttgaccaagatg

SEQ ID NO: 5293384 - DNA, 25 bp, Homo sapien
caggaagaggtgttgggtcatcctg

SEQ ID NO: 5293385 - DNA, 25 bp, Homo sapien
gctggagagggtattgtcttctgtg

SEQ ID NO: 5293386 - DNA, 25 bp, Homo sapien
gggctggagagggtattgtcttctg

SEQ ID NO: 5293387 - DNA, 25 bp, Homo sapien
ggtttctggcgaactctcccatggg

SEQ ID NO: 5293388 - DNA, 25 bp, Homo sapien
gatccacactgctggcgttcagctg

SEQ ID NO: 5293389 - DNA, 25 bp, Homo sapien
ggtaagccacataacagagctgcag

SEQ ID NO: 5293390 - DNA, 25 bp, Homo sapien
tcattgtggtggttcggtttctggc

SEQ ID NO: 5293391 - DNA, 25 bp, Homo sapien
cgctgatgccatgagctgtggacat

SEQ ID NO: 5293392 - DNA, 25 bp, Homo sapien
cttcctcgctgatgccatgagctgt

SEQ ID NO: 5293393 - DNA, 25 bp, Homo sapien
tcgctgatgccatgagctgtggaca

SEQ ID NO: 5293394 - DNA, 25 bp, Homo sapien
cctcgctgatgccatgagctgtgga

SEQ ID NO: 5293395 - DNA, 25 bp, Homo sapien
acgcaggtgggccttcagagtgtcc

SEQ ID NO: 5293396 - DNA, 25 bp, Homo sapien
acaccggtgagggtgatgtcagccc

SEQ ID NO: 5293397 - DNA, 25 bp, Homo sapien
gctgtgtggtttgccgatgtggtac

SEQ ID NO: 5293398 - DNA, 25 bp, Homo sapien
gcagggccgccctgttaggctgtgt

SEQ ID NO: 5293399 - DNA, 25 bp, Homo sapien
gagcacctagcagccacttcactga

SEQ ID NO: 5293400 - DNA, 25 bp, Homo sapien
tggagcacctagcagccacttcact

SEQ ID NO: 5293401 - DNA, 25 bp, Homo sapien
actctggagcacctagcagccactt

SEQ ID NO: 5293402 - DNA, 25 bp, Homo sapien
ttcactctggagcacctagcagcca

SEQ ID NO: 5293403 - DNA, 25 bp, Homo sapien
agctgagcagtaaagtctcttctgg

SEQ ID NO: 5293404 - DNA, 25 bp, Homo sapien
aaccttccacgagtcagggcaggca

SEQ ID NO: 5293405 - DNA, 25 bp, Homo sapien
cctgaaccttccacgagtcagggca

SEQ ID NO: 5293406 - DNA, 25 bp, Homo sapien
ggaccagctgagcagtaaagtctct

SEQ ID NO: 5293407 - DNA, 25 bp, Homo sapien
gctgattcccggaggaccacttaca

SEQ ID NO: 5293408 - DNA, 25 bp, Homo sapien
gcccaatcaacgcttcacacctttg

SEQ ID NO: 5293409 - DNA, 25 bp, Homo sapien
cactgtgagctgatcgatggcagag

SEQ ID NO: 5293410 - DNA, 25 bp, Homo sapien
tcgatggcagagtctctccagctca

SEQ ID NO: 5293411 - DNA, 25 bp, Homo sapien
ttgaaaagcttaggtgctcgggccg

SEQ ID NO: 5293412 - DNA, 25 bp, Homo sapien
ctttgcattaaccagagaacccggg

SEQ ID NO: 5293413 - DNA, 25 bp, Homo sapien
tcaagagctcaagggtagggtcacc

SEQ ID NO: 5293414 - DNA, 25 bp, Homo sapien
tcttctgcagtagtcccaagtctgg

SEQ ID NO: 5293415 - DNA, 25 bp, Homo sapien
cggtggcgccgcaccgaaccgcccg

SEQ ID NO: 5293416 - DNA, 25 bp, Homo sapien
gctcccggcctcccggtggcgccgc

SEQ ID NO: 5293417 - DNA, 25 bp, Homo sapien
gggcgcccgctgcactcggcggcgc

SEQ ID NO: 5293418 - DNA, 25 bp, Homo sapien
ggagggcgcctacgaccgcgcgcag

SEQ ID NO: 5293419 - DNA, 25 bp, Homo sapien
gacgctgttcctgaggtgtcgccgc

SEQ ID NO: 5293420 - DNA, 25 bp, Homo sapien
aaagaagtgctgtaagggacgctcg

SEQ ID NO: 5293421 - DNA, 25 bp, Homo sapien
gagacgcgccgactttttagaggga

SEQ ID NO: 5293422 - DNA, 25 bp, Homo sapien
agaaacccaggagcgaagcccagag

SEQ ID NO: 5293423 - DNA, 25 bp, Homo sapien
acgccgagtcctactccagcggcgg

SEQ ID NO: 5293424 - DNA, 25 bp, Homo sapien
atcatgtaccaggattatcccggga

SEQ ID NO: 5293425 - DNA, 25 bp, Homo sapien
caggattatcccgggaactttgaca

SEQ ID NO: 5293426 - DNA, 25 bp, Homo sapien
agcggctctcctgcgcacgccgagt

SEQ ID NO: 5293427 - DNA, 25 bp, Homo sapien
ctggagcaaggagaccggcagaggg

SEQ ID NO: 5293428 - DNA, 25 bp, Homo sapien
tctggaagcagaaaacaacttgttt

SEQ ID NO: 5293429 - DNA, 25 bp, Homo sapien
ggaagagacatcacgcaggctcctg

SEQ ID NO: 5293430 - DNA, 25 bp, Homo sapien
caacttgtttctaaagcagccggac

SEQ ID NO: 5293431 - DNA, 25 bp, Homo sapien
atccccaccatcaacgccatcacga

SEQ ID NO: 5293432 - DNA, 25 bp, Homo sapien
atgtccaacccataccctcgctcgc

SEQ ID NO: 5293433 - DNA, 25 bp, Homo sapien
tccgggtagatatgcctggctcagg

SEQ ID NO: 5293434 - DNA, 25 bp, Homo sapien
ggctcaggcagtgcattcatcccca

SEQ ID NO: 5293435 - DNA, 25 bp, Homo sapien
gttcatgttggtggctcacggccca

SEQ ID NO: 5293436 - DNA, 25 bp, Homo sapien
tcacctatcctagcgtcctggagca

SEQ ID NO: 5293437 - DNA, 25 bp, Homo sapien
gctgtagtggtgaaacaggagcccc

SEQ ID NO: 5293438 - DNA, 25 bp, Homo sapien
tcatcaagcccatcagcattgctgg

SEQ ID NO: 5293439 - DNA, 25 bp, Homo sapien
tgtgcagcaaagatccccgtgcagg

SEQ ID NO: 5293440 - DNA, 25 bp, Homo sapien
cttaggaaattgctggagccggctc

SEQ ID NO: 5293441 - DNA, 25 bp, Homo sapien
gactctgagctacgtgccctgtgaa

SEQ ID NO: 5293442 - DNA, 25 bp, Homo sapien
cctaagtcgtgagcatatcctgagt

SEQ ID NO: 5293443 - DNA, 25 bp, Homo sapien
aagaatacacctacgatgtgccagg

SEQ ID NO: 5293444 - DNA, 25 bp, Homo sapien
cactatttattgacaggttgggctg

SEQ ID NO: 5293445 - DNA, 25 bp, Homo sapien
caggcactgtgttaggcgcttttat

SEQ ID NO: 5293446 - DNA, 25 bp, Homo sapien
ttcaagatccaaggtaagattgcct

SEQ ID NO: 5293447 - DNA, 25 bp, Homo sapien
gaaatggtcccattggagagtctcc

SEQ ID NO: 5293448 - DNA, 25 bp, Homo sapien
gacagtggtcgccaagacatctaca

SEQ ID NO: 5293449 - DNA, 25 bp, Homo sapien
taaatagaccttccaggcagaaccg

SEQ ID NO: 5293450 - DNA, 25 bp, Homo sapien
gactctggaggcaaacaagttgtat

SEQ ID NO: 5293451 - DNA, 25 bp, Homo sapien
tgccaggggcttattagatggagtc

SEQ ID NO: 5293452 - DNA, 25 bp, Homo sapien
gcttattagatggagtcagaagctt

SEQ ID NO: 5293453 - DNA, 25 bp, Homo sapien
tcttcacctatagggcaattagaga

SEQ ID NO: 5293454 - DNA, 25 bp, Homo sapien
cacctcttcacctatagggcaatta

SEQ ID NO: 5293455 - DNA, 25 bp, Homo sapien
tcagtattatataggtgacatatct

SEQ ID NO: 5293456 - DNA, 25 bp, Homo sapien
cagtgactctattttctgaactaaa

SEQ ID NO: 5293457 - DNA, 25 bp, Homo sapien
ttgtggtggaattcatatagaagaa

SEQ ID NO: 5293458 - DNA, 25 bp, Homo sapien
tgtataatacaactaccacctctgt

SEQ ID NO: 5293459 - DNA, 25 bp, Homo sapien
caccctcgatatgggcattggtgag

SEQ ID NO: 5293460 - DNA, 25 bp, Homo sapien
tcacagcctacttcttgctgcggca

SEQ ID NO: 5293461 - DNA, 25 bp, Homo sapien
tccatggccaccctcgatatgggca

SEQ ID NO: 5293462 - DNA, 25 bp, Homo sapien
acagcctacttcttgctgcggcagg

SEQ ID NO: 5293463 - DNA, 25 bp, Homo sapien
tttccagtagaacaccaatagcagg

SEQ ID NO: 5293464 - DNA, 25 bp, Homo sapien
tagttgccaggaactaccctgagtg

SEQ ID NO: 5293465 - DNA, 25 bp, Homo sapien
tgtttctaaaacgtacatctgcgca

SEQ ID NO: 5293466 - DNA, 25 bp, Homo sapien
aatgacgttctgtctgctgggagcc

SEQ ID NO: 5293467 - DNA, 25 bp, Homo sapien
accaacgttgttgctgctcgggcca

SEQ ID NO: 5293468 - DNA, 25 bp, Homo sapien
tatcggaaaatgtattgctagcaag

SEQ ID NO: 5293469 - DNA, 25 bp, Homo sapien
cctggtgaaggcttgagtgaccaac

SEQ ID NO: 5293470 - DNA, 25 bp, Homo sapien
ggcctgatgagatgggctttccttc

SEQ ID NO: 5293471 - DNA, 25 bp, Homo sapien
gagaattccagggttgagggtgcct

SEQ ID NO: 5293472 - DNA, 25 bp, Homo sapien
gaattccagggttgagggtgcctcc

SEQ ID NO: 5293473 - DNA, 25 bp, Homo sapien
aaagagaattccagggttgagggtg

SEQ ID NO: 5293474 - DNA, 25 bp, Homo sapien
attccagggttgagggtgcctcctg

SEQ ID NO: 5293475 - DNA, 25 bp, Homo sapien
cctgggctcagtcacaggtagctct

SEQ ID NO: 5293476 - DNA, 25 bp, Homo sapien
ggcctgggctcagtcacaggtagct

SEQ ID NO: 5293477 - DNA, 25 bp, Homo sapien
gcctgggctcagtcacaggtagctc

SEQ ID NO: 5293478 - DNA, 25 bp, Homo sapien
gaaaggatgccggtatgttttgccc

SEQ ID NO: 5293479 - DNA, 25 bp, Homo sapien
ggatgccggtatgttttgcccttgg

SEQ ID NO: 5293480 - DNA, 25 bp, Homo sapien
ggctcccagcgcaaaggttccattt

SEQ ID NO: 5293481 - DNA, 25 bp, Homo sapien
catagaatctgatctgaagtaggtg

SEQ ID NO: 5293482 - DNA, 25 bp, Homo sapien
atattgttctgttgctcgctagttg

SEQ ID NO: 5293483 - DNA, 25 bp, Homo sapien
attgttctgttgctcgctagttgcc

SEQ ID NO: 5293484 - DNA, 25 bp, Homo sapien
ctgttgctcgctagttgccatctcc

SEQ ID NO: 5293485 - DNA, 25 bp, Homo sapien
ttgctcgctagttgccatctccaca

SEQ ID NO: 5293486 - DNA, 25 bp, Homo sapien
tcagcttgtgagggtgagctttgcc

SEQ ID NO: 5293487 - DNA, 25 bp, Homo sapien
gcttgtgagggtgagctttgccacc

SEQ ID NO: 5293488 - DNA, 25 bp, Homo sapien
aaagggataaatcctcgcagcattc

SEQ ID NO: 5293489 - DNA, 25 bp, Homo sapien
agggataaatcctcgcagcattcct

SEQ ID NO: 5293490 - DNA, 25 bp, Homo sapien
cgccttgagtgggttctctttgctt

SEQ ID NO: 5293491 - DNA, 25 bp, Homo sapien
gccttgagtgggttctctttgcttt

SEQ ID NO: 5293492 - DNA, 25 bp, Homo sapien
ctttgctttgagttgtgtggacttc

SEQ ID NO: 5293493 - DNA, 25 bp, Homo sapien
tggccaccacagtgttctcagggat

SEQ ID NO: 5293494 - DNA, 25 bp, Homo sapien
tcatgccagcgaagagagcaagagg

SEQ ID NO: 5293495 - DNA, 25 bp, Homo sapien
tgtcccaggctgaaggtccagctgg

SEQ ID NO: 5293496 - DNA, 25 bp, Homo sapien
gaactgcctagaaaggcttgtccca

SEQ ID NO: 5293497 - DNA, 25 bp, Homo sapien
attctttgatatcccctacagccca

SEQ ID NO: 5293498 - DNA, 25 bp, Homo sapien
gtgggtcggtcaatccgttcctgtg

SEQ ID NO: 5293499 - DNA, 25 bp, Homo sapien
cccctacagcccattgatcacttcc

SEQ ID NO: 5293500 - DNA, 25 bp, Homo sapien
ggtcaatccgttcctgtgttcctca

SEQ ID NO: 5293501 - DNA, 25 bp, Homo sapien
atattagtataggaggagtcagggc

SEQ ID NO: 5293502 - DNA, 25 bp, Homo sapien
tggctgaggtgaagctagagctgct

SEQ ID NO: 5293503 - DNA, 25 bp, Homo sapien
gagctgctgctgattgtggaagata

SEQ ID NO: 5293504 - DNA, 25 bp, Homo sapien
ggtggctgaggtgaagctagagctg

SEQ ID NO: 5293505 - DNA, 25 bp, Homo sapien
taggttccctcttactggcaggagg

SEQ ID NO: 5293506 - DNA, 25 bp, Homo sapien
gaagcaagactggtaactatcctga

SEQ ID NO: 5293507 - DNA, 25 bp, Homo sapien
gacaggcagcttgcggtctaactag

SEQ ID NO: 5293508 - DNA, 25 bp, Homo sapien
cccctggctgggtgttaacattgag

SEQ ID NO: 5293509 - DNA, 25 bp, Homo sapien
gcattcataactgtcacaaggaaca

SEQ ID NO: 5293510 - DNA, 25 bp, Homo sapien
tacacataaagttgaccatcttaat

SEQ ID NO: 5293511 - DNA, 25 bp, Homo sapien
cataatgttgtacatatgacatgca

SEQ ID NO: 5293512 - DNA, 25 bp, Homo sapien
cacataaagttgaccatcttaatca

SEQ ID NO: 5293513 - DNA, 25 bp, Homo sapien
gtgcgttgttcccctccacctagga

SEQ ID NO: 5293514 - DNA, 25 bp, Homo sapien
cctatgagttatgtttcctgatcct

SEQ ID NO: 5293515 - DNA, 25 bp, Homo sapien
cactgtctgataggcccccgtgtgc

SEQ ID NO: 5293516 - DNA, 25 bp, Homo sapien
tgtgtttccattttggcatgaacat

SEQ ID NO: 5293517 - DNA, 25 bp, Homo sapien
tctgcaagaagggaagtcagccagc

SEQ ID NO: 5293518 - DNA, 25 bp, Homo sapien
catatgttgacacagggagcagcat

SEQ ID NO: 5293519 - DNA, 25 bp, Homo sapien
tgcccagtaagtagcagcccagaga

SEQ ID NO: 5293520 - DNA, 25 bp, Homo sapien
gaacttggagactcacaccacactg

SEQ ID NO: 5293521 - DNA, 25 bp, Homo sapien
tttggacatggtgcaaactgccttc

SEQ ID NO: 5293522 - DNA, 25 bp, Homo sapien
gacatccacatagaggtatcaggat

SEQ ID NO: 5293523 - DNA, 25 bp, Homo sapien
tacagaagtttggaactcacagagg

SEQ ID NO: 5293524 - DNA, 25 bp, Homo sapien
taagaaactgggtggatgattgagc

SEQ ID NO: 5293525 - DNA, 25 bp, Homo sapien
gaggcacttaacctccagatcaagg

SEQ ID NO: 5293526 - DNA, 25 bp, Homo sapien
tcagatggagccattagttcttcct

SEQ ID NO: 5293527 - DNA, 25 bp, Homo sapien
ctgcacacctgtccccgggtagaaa

SEQ ID NO: 5293528 - DNA, 25 bp, Homo sapien
gaaaggagaggcacttaacctccag

SEQ ID NO: 5293529 - DNA, 25 bp, Homo sapien
catggccataaaccagccggggttg

SEQ ID NO: 5293530 - DNA, 25 bp, Homo sapien
tctctggatgagatcagcaccgtgc

SEQ ID NO: 5293531 - DNA, 25 bp, Homo sapien
tcagtggctgcttcggcacagaagc

SEQ ID NO: 5293532 - DNA, 25 bp, Homo sapien
tgcccagggaggcttgagttccctc

SEQ ID NO: 5293533 - DNA, 25 bp, Homo sapien
agcactggacattcatcatgacacc

SEQ ID NO: 5293534 - DNA, 25 bp, Homo sapien
tggacattcatcatgacaccttccc

SEQ ID NO: 5293535 - DNA, 25 bp, Homo sapien
ccagagcactggacattcatcatga

SEQ ID NO: 5293536 - DNA, 25 bp, Homo sapien
gatgcccagagcactggacattcat

SEQ ID NO: 5293537 - DNA, 25 bp, Homo sapien
ctcgttgaatagcagggcacagaaa

SEQ ID NO: 5293538 - DNA, 25 bp, Homo sapien
tcgttgaatagcagggcacagaaag

SEQ ID NO: 5293539 - DNA, 25 bp, Homo sapien
tttcttctcaggaatcaggatgctg

SEQ ID NO: 5293540 - DNA, 25 bp, Homo sapien
gccatgggcttcacagagtcacgtc

SEQ ID NO: 5293541 - DNA, 25 bp, Homo sapien
ccacagccatttcaaggtcacttga

SEQ ID NO: 5293542 - DNA, 25 bp, Homo sapien
gaaatgagcataagttggaagagga

SEQ ID NO: 5293543 - DNA, 25 bp, Homo sapien
tatttgatcttaaagggagaggcct

SEQ ID NO: 5293544 - DNA, 25 bp, Homo sapien
cggctgtacggattcaacgaggtga

SEQ ID NO: 5293545 - DNA, 25 bp, Homo sapien
cacggtgagtgtcccatgagcgtta

SEQ ID NO: 5293546 - DNA, 25 bp, Homo sapien
cccaaaatacggctgtacggattca

SEQ ID NO: 5293547 - DNA, 25 bp, Homo sapien
tgaagtgcatgcaagggcttggcac

SEQ ID NO: 5293548 - DNA, 25 bp, Homo sapien
acacagccccatcacaagtcaagga

SEQ ID NO: 5293549 - DNA, 25 bp, Homo sapien
tataagttgaaccaccataagtcgg

SEQ ID NO: 5293550 - DNA, 25 bp, Homo sapien
cagatatcttccacttctgatggat

SEQ ID NO: 5293551 - DNA, 25 bp, Homo sapien
gatggatttagtgggacacagcccc

SEQ ID NO: 5293552 - DNA, 25 bp, Homo sapien
aaagcctatggctgtgatcctgctg

SEQ ID NO: 5293553 - DNA, 25 bp, Homo sapien
aattactgctaagtggtagacccgg

SEQ ID NO: 5293554 - DNA, 25 bp, Homo sapien
gctgctagaaaatgccagagctggg

SEQ ID NO: 5293555 - DNA, 25 bp, Homo sapien
tctaaggacctggactagtaaccac

SEQ ID NO: 5293556 - DNA, 25 bp, Homo sapien
aacggactgctcttgagatgccagc

SEQ ID NO: 5293557 - DNA, 25 bp, Homo sapien
taagctcacaaagtaaacactgtcc

SEQ ID NO: 5293558 - DNA, 25 bp, Homo sapien
aaaagcctgagttagcagtcaccta

SEQ ID NO: 5293559 - DNA, 25 bp, Homo sapien
attgctccaccagtgccggccttaa

SEQ ID NO: 5293560 - DNA, 25 bp, Homo sapien
tgtgggcaggattcagaattatgtt

SEQ ID NO: 5293561 - DNA, 25 bp, Homo sapien
ggctcccaaggcgctggcctttcat

SEQ ID NO: 5293562 - DNA, 25 bp, Homo sapien
tcatccaaaaccaccgaaggctgtg

SEQ ID NO: 5293563 - DNA, 25 bp, Homo sapien
accagctggtccaggccgcagtttg

SEQ ID NO: 5293564 - DNA, 25 bp, Homo sapien
ggcagaggggcgaggactagggaga

SEQ ID NO: 5293565 - DNA, 25 bp, Homo sapien
gaggggcgaggactagggagaagag

SEQ ID NO: 5293566 - DNA, 25 bp, Homo sapien
cagatagacaaggggcagaggggcg

SEQ ID NO: 5293567 - DNA, 25 bp, Homo sapien
gggcgaggactagggagaagagcat

SEQ ID NO: 5293568 - DNA, 25 bp, Homo sapien
tgtcaggcgcccgtaattccagtga

SEQ ID NO: 5293569 - DNA, 25 bp, Homo sapien
cctctaaacatgtgcaataataact

SEQ ID NO: 5293570 - DNA, 25 bp, Homo sapien
gaaaatgtcattagctcctctaaac

SEQ ID NO: 5293571 - DNA, 25 bp, Homo sapien
cattattactatcaattgaacacaa

SEQ ID NO: 5293572 - DNA, 25 bp, Homo sapien
gtcaagattgaagtatagagcacat

SEQ ID NO: 5293573 - DNA, 25 bp, Homo sapien
gatgttatggatttgtcaagattga

SEQ ID NO: 5293574 - DNA, 25 bp, Homo sapien
tttaatgatgttatggatttgtcaa

SEQ ID NO: 5293575 - DNA, 25 bp, Homo sapien
gatttgtcaagattgaagtatagag

SEQ ID NO: 5293576 - DNA, 25 bp, Homo sapien
tctgggcagtctggcaaatacttac

SEQ ID NO: 5293577 - DNA, 25 bp, Homo sapien
agaatatggtctgcagtccaggagc

SEQ ID NO: 5293578 - DNA, 25 bp, Homo sapien
tgctatgctagaggcacgcacaagg

SEQ ID NO: 5293579 - DNA, 25 bp, Homo sapien
taatttcgccctaccatgctctgag

SEQ ID NO: 5293580 - DNA, 25 bp, Homo sapien
ggtgagccttcacatcagcagacca

SEQ ID NO: 5293581 - DNA, 25 bp, Homo sapien
gatacatttgccacagagacctgag

SEQ ID NO: 5293582 - DNA, 25 bp, Homo sapien
tgctgacccatggactagagtatcc

SEQ ID NO: 5293583 - DNA, 25 bp, Homo sapien
taaatgcaaccagctaacaggtgag

SEQ ID NO: 5293584 - DNA, 25 bp, Homo sapien
aaatgtgcctcccagcttagtgatg

SEQ ID NO: 5293585 - DNA, 25 bp, Homo sapien
ctcccagcttagtgatgtgggtata

SEQ ID NO: 5293586 - DNA, 25 bp, Homo sapien
gcctcccagcttagtgatgtgggta

SEQ ID NO: 5293587 - DNA, 25 bp, Homo sapien
tgtgcctcccagcttagtgatgtgg

SEQ ID NO: 5293588 - DNA, 25 bp, Homo sapien
cacatgctcttcctggtaggaaaaa

SEQ ID NO: 5293589 - DNA, 25 bp, Homo sapien
aagagaaaacgcaggtataccctgg

SEQ ID NO: 5293590 - DNA, 25 bp, Homo sapien
tcagagtttagctgctcagagttcc

SEQ ID NO: 5293591 - DNA, 25 bp, Homo sapien
tcccaataaactgagagcccacagt

SEQ ID NO: 5293592 - DNA, 25 bp, Homo sapien
caggtataccctgggattagtcaga

SEQ ID NO: 5293593 - DNA, 25 bp, Homo sapien
tataagactatccaattactccaga

SEQ ID NO: 5293594 - DNA, 25 bp, Homo sapien
tgttctcgtactaatatcacactgt

SEQ ID NO: 5293595 - DNA, 25 bp, Homo sapien
ttcacatatggtatgaaaaaaggcc

SEQ ID NO: 5293596 - DNA, 25 bp, Homo sapien
aaatctgatagtataatccaccaac

SEQ ID NO: 5293597 - DNA, 25 bp, Homo sapien
tgcgtttactaaccggagtcaccag

SEQ ID NO: 5293598 - DNA, 25 bp, Homo sapien
ttaagacccctaaatcatgatgccc

SEQ ID NO: 5293599 - DNA, 25 bp, Homo sapien
ggctactggctaatactgacaggca

SEQ ID NO: 5293600 - DNA, 25 bp, Homo sapien
tactgtgttccgaaatgccttctct

SEQ ID NO: 5293601 - DNA, 25 bp, Homo sapien
taaagctctttcttacagtggccca

SEQ ID NO: 5293602 - DNA, 25 bp, Homo sapien
cacagaaaagttggctgaggcccta

SEQ ID NO: 5293603 - DNA, 25 bp, Homo sapien
atcagcaggcaagtactcggaacca

SEQ ID NO: 5293604 - DNA, 25 bp, Homo sapien
tacttgggattatggtgagctgccc

SEQ ID NO: 5293605 - DNA, 25 bp, Homo sapien
ccgcgcctgaccttgatatgatatt

SEQ ID NO: 5293606 - DNA, 25 bp, Homo sapien
cctgcaggtccaagcgattattctg

SEQ ID NO: 5293607 - DNA, 25 bp, Homo sapien
taaatcgcagatcagctatacacac

SEQ ID NO: 5293608 - DNA, 25 bp, Homo sapien
ggacggtgcatattctttcggtatg

SEQ ID NO: 5293609 - DNA, 25 bp, Homo sapien
gggtcaagtgaacgttccacctcaa

SEQ ID NO: 5293610 - DNA, 25 bp, Homo sapien
taaagcctcttattgacctgacaaa

SEQ ID NO: 5293611 - DNA, 25 bp, Homo sapien
tcagggatagtcttataaactagca

SEQ ID NO: 5293612 - DNA, 25 bp, Homo sapien
gttgcccagggcgatcttgcgctcc

SEQ ID NO: 5293613 - DNA, 25 bp, Homo sapien
ccccaggaagttgtgactgcagtaa

SEQ ID NO: 5293614 - DNA, 25 bp, Homo sapien
ggaagttgtgactgcagtaagccaa

SEQ ID NO: 5293615 - DNA, 25 bp, Homo sapien
tgtctccacacaagcacatacacag

SEQ ID NO: 5293616 - DNA, 25 bp, Homo sapien
accctgtctccacacaagcacatac

SEQ ID NO: 5293617 - DNA, 25 bp, Homo sapien
taggttttcattcgcacggaacacc

SEQ ID NO: 5293618 - DNA, 25 bp, Homo sapien
aatacgcacattgtccaatccagtg

SEQ ID NO: 5293619 - DNA, 25 bp, Homo sapien
gacactgatttggatttgtgcactc

SEQ ID NO: 5293620 - DNA, 25 bp, Homo sapien
taatcatacagtttgactgggcaaa

SEQ ID NO: 5293621 - DNA, 25 bp, Homo sapien
tatttagagcctagccagctaccca

SEQ ID NO: 5293622 - DNA, 25 bp, Homo sapien
caactatgggtattgggtgcttaac

SEQ ID NO: 5293623 - DNA, 25 bp, Homo sapien
cctgattggagtgtgtaagctgagc

SEQ ID NO: 5293624 - DNA, 25 bp, Homo sapien
taaatgaatgctggtcagtgggaca

SEQ ID NO: 5293625 - DNA, 25 bp, Homo sapien
cattggttgacttagaccgtaagct

SEQ ID NO: 5293626 - DNA, 25 bp, Homo sapien
taccttctcatgcagattgctgatg

SEQ ID NO: 5293627 - DNA, 25 bp, Homo sapien
cagaatttctaaataaatcccctgg

SEQ ID NO: 5293628 - DNA, 25 bp, Homo sapien
attgtaatttaccttctcatgcaga

SEQ ID NO: 5293629 - DNA, 25 bp, Homo sapien
ctcgtacttgtaggtgaatttgtca

SEQ ID NO: 5293630 - DNA, 25 bp, Homo sapien
cctcgtacttgtaggtgaatttgtc

SEQ ID NO: 5293631 - DNA, 25 bp, Homo sapien
tcaagggcatgtgtaaggaaaaata

SEQ ID NO: 5293632 - DNA, 25 bp, Homo sapien
tcctcgtacttgtaggtgaatttgt

SEQ ID NO: 5293633 - DNA, 25 bp, Homo sapien
aggaattaactcgttcttcagaact

SEQ ID NO: 5293634 - DNA, 25 bp, Homo sapien
ttcagaactgctgattgaggagcta

SEQ ID NO: 5293635 - DNA, 25 bp, Homo sapien
gaactgctgattgaggagctatttg

SEQ ID NO: 5293636 - DNA, 25 bp, Homo sapien
gaattaactcgttcttcagaactgc

SEQ ID NO: 5293637 - DNA, 25 bp, Homo sapien
tgagtaaccagggtaaccacgctgt

SEQ ID NO: 5293638 - DNA, 25 bp, Homo sapien
gaagccaccgtattcacacgttgtg

SEQ ID NO: 5293639 - DNA, 25 bp, Homo sapien
tcacagttacaatagaatggcccct

SEQ ID NO: 5293640 - DNA, 25 bp, Homo sapien
catgtattaagcacccacgtagtca

SEQ ID NO: 5293641 - DNA, 25 bp, Homo sapien
ctcggccgtctgctcggagggaggg

SEQ ID NO: 5293642 - DNA, 25 bp, Homo sapien
tcccgtctccacgtgtgcctgccgc

SEQ ID NO: 5293643 - DNA, 25 bp, Homo sapien
ccgaagctcggccgtctgctcggag

SEQ ID NO: 5293644 - DNA, 25 bp, Homo sapien
tgggcaggcgctcccgtctccacgt

SEQ ID NO: 5293645 - DNA, 25 bp, Homo sapien
tttttgtccccaagatcgtctgccc

SEQ ID NO: 5293646 - DNA, 25 bp, Homo sapien
attttgagatctgagctgctgtgtc

SEQ ID NO: 5293647 - DNA, 25 bp, Homo sapien
ccagaattttgagatctgagctgct

SEQ ID NO: 5293648 - DNA, 25 bp, Homo sapien
ccttatgtcccattaaacacctctt

SEQ ID NO: 5293649 - DNA, 25 bp, Homo sapien
ccagcctgggtgacaaagtgagacc

SEQ ID NO: 5293650 - DNA, 25 bp, Homo sapien
gaggatctcaaacccaggaggttga

SEQ ID NO: 5293651 - DNA, 25 bp, Homo sapien
ggttgaggctacagttgagccaaga

SEQ ID NO: 5293652 - DNA, 25 bp, Homo sapien
ctccagcctgggtgacaaagtgaga

SEQ ID NO: 5293653 - DNA, 25 bp, Homo sapien
tgtctgccctattcagattacagtg

SEQ ID NO: 5293654 - DNA, 25 bp, Homo sapien
cagctgttactccttcaaatgtctt

SEQ ID NO: 5293655 - DNA, 25 bp, Homo sapien
tgttattgatactggccttcagagt

SEQ ID NO: 5293656 - DNA, 25 bp, Homo sapien
ttccgcctgtttcttgaagtcccac

SEQ ID NO: 5293657 - DNA, 25 bp, Homo sapien
gaagcctgtcacaaaggacgacata

SEQ ID NO: 5293658 - DNA, 25 bp, Homo sapien
gaagtacctggttcaagctacaacg

SEQ ID NO: 5293659 - DNA, 25 bp, Homo sapien
gatccagcaagtctagtcctggcta

SEQ ID NO: 5293660 - DNA, 25 bp, Homo sapien
tctggcaattcctcacaaggttaac

SEQ ID NO: 5293661 - DNA, 25 bp, Homo sapien
tactccagtggcagatagagaagct

SEQ ID NO: 5293662 - DNA, 25 bp, Homo sapien
ggcatactgccaaacgaaacatttc

SEQ ID NO: 5293663 - DNA, 25 bp, Homo sapien
cagtgccctgggagtttattgtaaa

SEQ ID NO: 5293664 - DNA, 25 bp, Homo sapien
tttgttactgaaagcctggcatact

SEQ ID NO: 5293665 - DNA, 25 bp, Homo sapien
cagaaaaacagagggccaagtatca

SEQ ID NO: 5293666 - DNA, 25 bp, Homo sapien
gagaagtccgtttcatagaatcaca

SEQ ID NO: 5293667 - DNA, 25 bp, Homo sapien
ttttaggaacactgacccaaggcac

SEQ ID NO: 5293668 - DNA, 25 bp, Homo sapien
cacagacaggtagagtatatacaca

SEQ ID NO: 5293669 - DNA, 25 bp, Homo sapien
ccggggacctagtgccacaccagta

SEQ ID NO: 5293670 - DNA, 25 bp, Homo sapien
gacctagtgccacaccagtagattg

SEQ ID NO: 5293671 - DNA, 25 bp, Homo sapien
tagtgccacaccagtagattgttca

SEQ ID NO: 5293672 - DNA, 25 bp, Homo sapien
gtgccacaccagtagattgttcact

SEQ ID NO: 5293673 - DNA, 25 bp, Homo sapien
tagaaaagaaccttattagctgaaa

SEQ ID NO: 5293674 - DNA, 25 bp, Homo sapien
tacaactgcaccataatttcactca

SEQ ID NO: 5293675 - DNA, 25 bp, Homo sapien
ttaattctgacatggtataagtacc

SEQ ID NO: 5293676 - DNA, 25 bp, Homo sapien
gaaatgtctagaaatagtactagaa

SEQ ID NO: 5293677 - DNA, 25 bp, Homo sapien
gagctggagtgacatgtgaaccccg

SEQ ID NO: 5293678 - DNA, 25 bp, Homo sapien
cagtgaaaataagctgccacggaag

SEQ ID NO: 5293679 - DNA, 25 bp, Homo sapien
taagtccctgatgaaaggctacatg

SEQ ID NO: 5293680 - DNA, 25 bp, Homo sapien
ggaagccttctagcagactactaag

SEQ ID NO: 5293681 - DNA, 25 bp, Homo sapien
cccatgagattttagagtgaagcca

SEQ ID NO: 5293682 - DNA, 25 bp, Homo sapien
aaaatatgccaagctttagccctgg

SEQ ID NO: 5293683 - DNA, 25 bp, Homo sapien
taagctttatgacgcctgggctggt

SEQ ID NO: 5293684 - DNA, 25 bp, Homo sapien
ctgggctggtccatgtgaaacatag

SEQ ID NO: 5293685 - DNA, 25 bp, Homo sapien
cctgtagcctaatgtaagcgttctg

SEQ ID NO: 5293686 - DNA, 25 bp, Homo sapien
ggttagctgtattaaacgcatcttt

SEQ ID NO: 5293687 - DNA, 25 bp, Homo sapien
taagcgttctgagcacactaaggta

SEQ ID NO: 5293688 - DNA, 25 bp, Homo sapien
taagctgtgatgttcggtggttagc

SEQ ID NO: 5293689 - DNA, 25 bp, Homo sapien
gaagtgaagaatgagatggcccaac

SEQ ID NO: 5293690 - DNA, 25 bp, Homo sapien
taaaaatgccaatctatggaagcag

SEQ ID NO: 5293691 - DNA, 25 bp, Homo sapien
tcaaactaactgcaagacaagtgtc

SEQ ID NO: 5293692 - DNA, 25 bp, Homo sapien
caaatctatggagtggtttacagga

SEQ ID NO: 5293693 - DNA, 25 bp, Homo sapien
tcagttaagttgtggtttgaccttc

SEQ ID NO: 5293694 - DNA, 25 bp, Homo sapien
atgaccaggttgccagtgtactggt

SEQ ID NO: 5293695 - DNA, 25 bp, Homo sapien
ctgtatgaccaggttgccagtgtac

SEQ ID NO: 5293696 - DNA, 25 bp, Homo sapien
tatgaccaggttgccagtgtactgg

SEQ ID NO: 5293697 - DNA, 25 bp, Homo sapien
gtatgaccaggttgccagtgtactg

SEQ ID NO: 5293698 - DNA, 25 bp, Homo sapien
atagggaaatgatccatatggaaaa

SEQ ID NO: 5293699 - DNA, 25 bp, Homo sapien
gaaatgatccatatggaaaatcaga

SEQ ID NO: 5293700 - DNA, 25 bp, Homo sapien
tagggaaatgatccatatggaaaat

SEQ ID NO: 5293701 - DNA, 25 bp, Homo sapien
gggaaatgatccatatggaaaatca

SEQ ID NO: 5293702 - DNA, 25 bp, Homo sapien
tatcaggtcccattaataatcagtg

SEQ ID NO: 5293703 - DNA, 25 bp, Homo sapien
tattagctatttgcctatcaggtcc

SEQ ID NO: 5293704 - DNA, 25 bp, Homo sapien
tccttgcatatgttttagagctact

SEQ ID NO: 5293705 - DNA, 25 bp, Homo sapien
aaccaagctccttgtgacaagtaaa

SEQ ID NO: 5293706 - DNA, 25 bp, Homo sapien
tccattcattactgcatgcataaag

SEQ ID NO: 5293707 - DNA, 25 bp, Homo sapien
ctccattcattactgcatgcataaa

SEQ ID NO: 5293708 - DNA, 25 bp, Homo sapien
atggtcatcctcttgaaacagctca

SEQ ID NO: 5293709 - DNA, 25 bp, Homo sapien
tggtcatcctcttgaaacagctcac

SEQ ID NO: 5293710 - DNA, 25 bp, Homo sapien
catggtcatcctcttgaaacagctc

SEQ ID NO: 5293711 - DNA, 25 bp, Homo sapien
tacatctgtgttgattttagattct

SEQ ID NO: 5293712 - DNA, 25 bp, Homo sapien
gcaagttcacaggtgcgaattccat

SEQ ID NO: 5293713 - DNA, 25 bp, Homo sapien
tctcttgagaatctagttgtacatc

SEQ ID NO: 5293714 - DNA, 25 bp, Homo sapien
tctctgacaatgacctcgcttatct

SEQ ID NO: 5293715 - DNA, 25 bp, Homo sapien
taaaagttcaataacctgtgtgatg

SEQ ID NO: 5293716 - DNA, 25 bp, Homo sapien
ctaaaagttcaataacctgtgtgat

SEQ ID NO: 5293717 - DNA, 25 bp, Homo sapien
tactgttcacattatacttttaaaa

SEQ ID NO: 5293718 - DNA, 25 bp, Homo sapien
cattactgttcacattatactttta

SEQ ID NO: 5293719 - DNA, 25 bp, Homo sapien
ttactgttcacattatacttttaaa

SEQ ID NO: 5293720 - DNA, 25 bp, Homo sapien
attactgttcacattatacttttaa

SEQ ID NO: 5293721 - DNA, 25 bp, Homo sapien
caccaccatgcttaagatgtgggta

SEQ ID NO: 5293722 - DNA, 25 bp, Homo sapien
caccatgcttaagatgtgggtaaaa

SEQ ID NO: 5293723 - DNA, 25 bp, Homo sapien
catatacagcacatacaccaccatg

SEQ ID NO: 5293724 - DNA, 25 bp, Homo sapien
tacatatacagcacatacaccacca

SEQ ID NO: 5293725 - DNA, 25 bp, Homo sapien
caaggttacactggcgattatggag

SEQ ID NO: 5293726 - DNA, 25 bp, Homo sapien
atggagcccggcagtggaccaatct

SEQ ID NO: 5293727 - DNA, 25 bp, Homo sapien
ccgaggcatggaaagattaagtgac

SEQ ID NO: 5293728 - DNA, 25 bp, Homo sapien
gtttaatacatgaggtaaccgaggc

SEQ ID NO: 5293729 - DNA, 25 bp, Homo sapien
tacttctacaacatatgtatatagc

SEQ ID NO: 5293730 - DNA, 25 bp, Homo sapien
gagtcattgtcctgaagttggtaac

SEQ ID NO: 5293731 - DNA, 25 bp, Homo sapien
gtatatagctacaaacaatacatgt

SEQ ID NO: 5293732 - DNA, 25 bp, Homo sapien
catgtaggcggtcatttcacatatt

SEQ ID NO: 5293733 - DNA, 25 bp, Homo sapien
gatctggccaccagaagtctttgaa

SEQ ID NO: 5293734 - DNA, 25 bp, Homo sapien
agagaaaggaaggttcagatcagat

SEQ ID NO: 5293735 - DNA, 25 bp, Homo sapien
ttgaatgaaaagctccgggtcaggt

SEQ ID NO: 5293736 - DNA, 25 bp, Homo sapien
gaatgaaaagctccgggtcaggtgc

SEQ ID NO: 5293737 - DNA, 25 bp, Homo sapien
agcaggtttctacaaagcttcaatg

SEQ ID NO: 5293738 - DNA, 25 bp, Homo sapien
catctggcactattattcaagagag

SEQ ID NO: 5293739 - DNA, 25 bp, Homo sapien
ggaatggttcagcaggtttctacaa

SEQ ID NO: 5293740 - DNA, 25 bp, Homo sapien
tgttgtgtttcatgctcatcaagca

SEQ ID NO: 5293741 - DNA, 25 bp, Homo sapien
gaataaaatccacattgtctggcca

SEQ ID NO: 5293742 - DNA, 25 bp, Homo sapien
tctggccactcttctacatgactta

SEQ ID NO: 5293743 - DNA, 25 bp, Homo sapien
ttaatttccatgaatcacgccagtg

SEQ ID NO: 5293744 - DNA, 25 bp, Homo sapien
gattttatgtcttcggttgctcctg

SEQ ID NO: 5293745 - DNA, 25 bp, Homo sapien
ggtgtcaacttatatgccaaccagc

SEQ ID NO: 5293746 - DNA, 25 bp, Homo sapien
gataaagtcctaaaaatggaattgc

SEQ ID NO: 5293747 - DNA, 25 bp, Homo sapien
tatcaagccagtatatctctacagg

SEQ ID NO: 5293748 - DNA, 25 bp, Homo sapien
gaatacctgtatctcaggccggtcg

SEQ ID NO: 5293749 - DNA, 25 bp, Homo sapien
aggtatttgtggccggatacagtgg

SEQ ID NO: 5293750 - DNA, 25 bp, Homo sapien
aaggtatttgtggccggatacagtg

SEQ ID NO: 5293751 - DNA, 25 bp, Homo sapien
cggatacagtggctcgccacagtaa

SEQ ID NO: 5293752 - DNA, 25 bp, Homo sapien
atacagtggctcgccacagtaatcc

SEQ ID NO: 5293753 - DNA, 25 bp, Homo sapien
ttgatatccatcattgagagaatca

SEQ ID NO: 5293754 - DNA, 25 bp, Homo sapien
acagtatcacctgggttgatatcca

SEQ ID NO: 5293755 - DNA, 25 bp, Homo sapien
tccatcattgagagaatcatattaa

SEQ ID NO: 5293756 - DNA, 25 bp, Homo sapien
agagcctgagccagcttccaaaaca

SEQ ID NO: 5293757 - DNA, 25 bp, Homo sapien
gcaggatggcctagtttaaagacaa

SEQ ID NO: 5293758 - DNA, 25 bp, Homo sapien
aaacagtatgggtgactcagcgacc

SEQ ID NO: 5293759 - DNA, 25 bp, Homo sapien
tctggcagaagaatacaggatctac

SEQ ID NO: 5293760 - DNA, 25 bp, Homo sapien
taagttcatagagtagcaggatggc

SEQ ID NO: 5293761 - DNA, 25 bp, Homo sapien
aaatccaaacgttctgagatgtctt

SEQ ID NO: 5293762 - DNA, 25 bp, Homo sapien
tttgaatacattaatcaggactgag

SEQ ID NO: 5293763 - DNA, 25 bp, Homo sapien
taaaaaatccaaacgttctgagatg

SEQ ID NO: 5293764 - DNA, 25 bp, Homo sapien
actgcatctgtctttgcccctcctg

SEQ ID NO: 5293765 - DNA, 25 bp, Homo sapien
actacatagtcttccaaggctggcc

SEQ ID NO: 5293766 - DNA, 25 bp, Homo sapien
ggaatgttatggcagtccctctttt

SEQ ID NO: 5293767 - DNA, 25 bp, Homo sapien
tttcatcaatactacatagtcttcc

SEQ ID NO: 5293768 - DNA, 25 bp, Homo sapien
ctttgggaatgttatggcagtccct

SEQ ID NO: 5293769 - DNA, 25 bp, Homo sapien
gaatgaattggttccgagcccctgc

SEQ ID NO: 5293770 - DNA, 25 bp, Homo sapien
acgtgacgctcttcgacctcggtag

SEQ ID NO: 5293771 - DNA, 25 bp, Homo sapien
gaaggaactcctcagtatctggccg

SEQ ID NO: 5293772 - DNA, 25 bp, Homo sapien
ccaatgtccgagatgctcagaggga

SEQ ID NO: 5293773 - DNA, 25 bp, Homo sapien
agtgtttcgcgaaggcgccgtcgca

SEQ ID NO: 5293774 - DNA, 25 bp, Homo sapien
atggcgcagcagcccgatggctctg

SEQ ID NO: 5293775 - DNA, 25 bp, Homo sapien
ttctttcccagtcgcgcgcatggcg

SEQ ID NO: 5293776 - DNA, 25 bp, Homo sapien
cgccgtcgcagacgagtgacgcaag

SEQ ID NO: 5293777 - DNA, 25 bp, Homo sapien
gacctccaggttcgctcttggacag

SEQ ID NO: 5293778 - DNA, 25 bp, Homo sapien
tgggacgcgccacttgctgattggc

SEQ ID NO: 5293779 - DNA, 25 bp, Homo sapien
ccagatgcatttgacagacggcgtg

SEQ ID NO: 5293780 - DNA, 25 bp, Homo sapien
gaagtcacctagtcacccacaagat

SEQ ID NO: 5293781 - DNA, 25 bp, Homo sapien
ccttctcaaacatgtgtacaggcat

SEQ ID NO: 5293782 - DNA, 25 bp, Homo sapien
ctagaaactgcaaatccaaattcag

SEQ ID NO: 5293783 - DNA, 25 bp, Homo sapien
ctgtgttactagaaactgcaaatcc

SEQ ID NO: 5293784 - DNA, 25 bp, Homo sapien
cagttgctgctaaacttgaatctgg

SEQ ID NO: 5293785 - DNA, 25 bp, Homo sapien
taatttctaaaggtgcacaaaggtc

SEQ ID NO: 5293786 - DNA, 25 bp, Homo sapien
tagtgcggactcagacaaggattcc

SEQ ID NO: 5293787 - DNA, 25 bp, Homo sapien
ggtgtgctagctaccactggaatga

SEQ ID NO: 5293788 - DNA, 25 bp, Homo sapien
tgatagcagtctacatagtgcggac

SEQ ID NO: 5293789 - DNA, 25 bp, Homo sapien
ttttatcacagtagtatgtccaggg

SEQ ID NO: 5293790 - DNA, 25 bp, Homo sapien
gagaatctttatcccatgcctgcca

SEQ ID NO: 5293791 - DNA, 25 bp, Homo sapien
gaatgtaattgtcacaggacctgag

SEQ ID NO: 5293792 - DNA, 25 bp, Homo sapien
ggtcacaggatgtacaactacccat

SEQ ID NO: 5293793 - DNA, 25 bp, Homo sapien
tctgataaccaactactgtcaggcc

SEQ ID NO: 5293794 - DNA, 25 bp, Homo sapien
gataaccaactactgtcaggccagt

SEQ ID NO: 5293795 - DNA, 25 bp, Homo sapien
aagttctgataaccaactactgtca

SEQ ID NO: 5293796 - DNA, 25 bp, Homo sapien
gttctgataaccaactactgtcagg

SEQ ID NO: 5293797 - DNA, 25 bp, Homo sapien
cactgtgccggcctatttttgcttt

SEQ ID NO: 5293798 - DNA, 25 bp, Homo sapien
ccaacagagtctacactgtatttag

SEQ ID NO: 5293799 - DNA, 25 bp, Homo sapien
tctttaaaacaagattccaacagag

SEQ ID NO: 5293800 - DNA, 25 bp, Homo sapien
caagattccaacagagtctacactg

SEQ ID NO: 5293801 - DNA, 25 bp, Homo sapien
gactgtattaaggatgcccctgcat

SEQ ID NO: 5293802 - DNA, 25 bp, Homo sapien
cctaatgccatgagttaaatggaaa

SEQ ID NO: 5293803 - DNA, 25 bp, Homo sapien
actattattccgttgttacaagagg

SEQ ID NO: 5293804 - DNA, 25 bp, Homo sapien
caagaggtaactgactgcttttttc

SEQ ID NO: 5293805 - DNA, 25 bp, Homo sapien
gagccagagccatataagcatcttg

SEQ ID NO: 5293806 - DNA, 25 bp, Homo sapien
cacctctaagaaagggctgggcaga

SEQ ID NO: 5293807 - DNA, 25 bp, Homo sapien
aaccagctgctggtgtaatgtacag

SEQ ID NO: 5293808 - DNA, 25 bp, Homo sapien
caaaaccattatctttgagggagtt

SEQ ID NO: 5293809 - DNA, 25 bp, Homo sapien
tacatatttactcgtgattctggtt

SEQ ID NO: 5293810 - DNA, 25 bp, Homo sapien
gacggatcctccatgtttttgagat

SEQ ID NO: 5293811 - DNA, 25 bp, Homo sapien
tgcccagcctacatatttactcgtg

SEQ ID NO: 5293812 - DNA, 25 bp, Homo sapien
ttttgagattgattgatgttgcatg

SEQ ID NO: 5293813 - DNA, 25 bp, Homo sapien
gaaagaggaggacgagttttatgtg

SEQ ID NO: 5293814 - DNA, 25 bp, Homo sapien
aactgactctgttataatggagata

SEQ ID NO: 5293815 - DNA, 25 bp, Homo sapien
gataactcatcaccttcagacgcag

SEQ ID NO: 5293816 - DNA, 25 bp, Homo sapien
gttttatgtgtaactgactctgtta

SEQ ID NO: 5293817 - DNA, 25 bp, Homo sapien
tcaagatgtccactcagcgtctctg

SEQ ID NO: 5293818 - DNA, 25 bp, Homo sapien
tctgatgactttgttggaccctgga

SEQ ID NO: 5293819 - DNA, 25 bp, Homo sapien
tcctccttgtagtctgtgcttggca

SEQ ID NO: 5293820 - DNA, 25 bp, Homo sapien
tgggcagacgaccttccctatgatt

SEQ ID NO: 5293821 - DNA, 25 bp, Homo sapien
gcaacctcagagtggcatggaccgt

SEQ ID NO: 5293822 - DNA, 25 bp, Homo sapien
gttggcaacctcagagtggcatgga

SEQ ID NO: 5293823 - DNA, 25 bp, Homo sapien
tagaaaggccatgttggcaacctca

SEQ ID NO: 5293824 - DNA, 25 bp, Homo sapien
tcagagtggcatggaccgtgtagat

SEQ ID NO: 5293825 - DNA, 25 bp, Homo sapien
ccactggacagatactggcaccctt

SEQ ID NO: 5293826 - DNA, 25 bp, Homo sapien
tgccggggttcctggcttcagccac

SEQ ID NO: 5293827 - DNA, 25 bp, Homo sapien
tggcttcagccactggacagatact

SEQ ID NO: 5293828 - DNA, 25 bp, Homo sapien
gccacggggtagatgtgggctgaag

SEQ ID NO: 5293829 - DNA, 25 bp, Homo sapien
ttttctgtgaggttcgcacagggtg

SEQ ID NO: 5293830 - DNA, 25 bp, Homo sapien
cggaggagcctgagcggtggtgggt

SEQ ID NO: 5293831 - DNA, 25 bp, Homo sapien
gggttttctgtgaggttcgcacagg

SEQ ID NO: 5293832 - DNA, 25 bp, Homo sapien
ctgagcggtggtgggttttctgtga

SEQ ID NO: 5293833 - DNA, 25 bp, Homo sapien
gggcgtgctggtttcgccatattcc

SEQ ID NO: 5293834 - DNA, 25 bp, Homo sapien
atattccgtcccctggtgtttcagt

SEQ ID NO: 5293835 - DNA, 25 bp, Homo sapien
taattacctcgctgtgagttgacag

SEQ ID NO: 5293836 - DNA, 25 bp, Homo sapien
agctggctgtaacatttgaaggctt

SEQ ID NO: 5293837 - DNA, 25 bp, Homo sapien
gaaagcaccgttgttcattccggac

SEQ ID NO: 5293838 - DNA, 25 bp, Homo sapien
catttgctacatgcttaggccgaga

SEQ ID NO: 5293839 - DNA, 25 bp, Homo sapien
tgtgagctagacctcaaaggccgct

SEQ ID NO: 5293840 - DNA, 25 bp, Homo sapien
actccgtcgagaagcatgtaatgcg

SEQ ID NO: 5293841 - DNA, 25 bp, Homo sapien
cctggatgtggccggtccgaggctc

SEQ ID NO: 5293842 - DNA, 25 bp, Homo sapien
gggggagatgcacgcctggtgccgc

SEQ ID NO: 5293843 - DNA, 25 bp, Homo sapien
gatgtggccggtccgaggctccggt

SEQ ID NO: 5293844 - DNA, 25 bp, Homo sapien
tctgggggagatgcacgcctggtgc

SEQ ID NO: 5293845 - DNA, 25 bp, Homo sapien
tgtgtccttcttagggctctcctcg

SEQ ID NO: 5293846 - DNA, 25 bp, Homo sapien
tctgtgtccttcttagggctctcct

SEQ ID NO: 5293847 - DNA, 25 bp, Homo sapien
gtgtccttcttagggctctcctcgc

SEQ ID NO: 5293848 - DNA, 25 bp, Homo sapien
gctctgtgtccttcttagggctctc

SEQ ID NO: 5293849 - DNA, 25 bp, Homo sapien
ccgccattgccgtgtgcctgcaggg

SEQ ID NO: 5293850 - DNA, 25 bp, Homo sapien
gctggtgccgccattgccgtgtgcc

SEQ ID NO: 5293851 - DNA, 25 bp, Homo sapien
ttgccaggctggtgccgccattgcc

SEQ ID NO: 5293852 - DNA, 25 bp, Homo sapien
aggcttgccaggctggtgccgccat

SEQ ID NO: 5293853 - DNA, 25 bp, Homo sapien
ggagccaatctcatctgtgttggcc

SEQ ID NO: 5293854 - DNA, 25 bp, Homo sapien
tgccatggagccaatctcatctgtg

SEQ ID NO: 5293855 - DNA, 25 bp, Homo sapien
atctcatctgtgttggcctccggcc

SEQ ID NO: 5293856 - DNA, 25 bp, Homo sapien
caatctcatctgtgttggcctccgg

SEQ ID NO: 5293857 - DNA, 25 bp, Homo sapien
agtgtccagtaatggctacactttg

SEQ ID NO: 5293858 - DNA, 25 bp, Homo sapien
gtccagtaatggctacactttgact

SEQ ID NO: 5293859 - DNA, 25 bp, Homo sapien
ccagtaatggctacactttgactca

SEQ ID NO: 5293860 - DNA, 25 bp, Homo sapien
cagtaatggctacactttgactcac

SEQ ID NO: 5293861 - DNA, 25 bp, Homo sapien
accaatgacatgcacgtccattgcc

SEQ ID NO: 5293862 - DNA, 25 bp, Homo sapien
gccccattgcggctgcatgcctggg

SEQ ID NO: 5293863 - DNA, 25 bp, Homo sapien
cacggctggaccaatgacatgcacg

SEQ ID NO: 5293864 - DNA, 25 bp, Homo sapien
ctgggcctgtctgcacggctggacc

SEQ ID NO: 5293865 - DNA, 25 bp, Homo sapien
tgagaaaggcacacttggaactcag

SEQ ID NO: 5293866 - DNA, 25 bp, Homo sapien
ctgatgagaaaggcacacttggaac

SEQ ID NO: 5293867 - DNA, 25 bp, Homo sapien
gatgagaaaggcacacttggaactc

SEQ ID NO: 5293868 - DNA, 25 bp, Homo sapien
gagaaaggcacacttggaactcagc

SEQ ID NO: 5293869 - DNA, 25 bp, Homo sapien
tatggaatgtgtgttcccagacact

SEQ ID NO: 5293870 - DNA, 25 bp, Homo sapien
gagagtggcggtttagcttcaaaca

SEQ ID NO: 5293871 - DNA, 25 bp, Homo sapien
tgttctggccgagctgggattcata

SEQ ID NO: 5293872 - DNA, 25 bp, Homo sapien
gctggcggtcagaagctgtcctcct

SEQ ID NO: 5293873 - DNA, 25 bp, Homo sapien
tgagaaggggacattgggggtgatg

SEQ ID NO: 5293874 - DNA, 25 bp, Homo sapien
ctgagaaggggacattgggggtgat

SEQ ID NO: 5293875 - DNA, 25 bp, Homo sapien
atcgagaaaggggggcttgcttctg

SEQ ID NO: 5293876 - DNA, 25 bp, Homo sapien
gaatcgagaaaggggggcttgcttc

SEQ ID NO: 5293877 - DNA, 25 bp, Homo sapien
tcctcgtgggagaggcctttctgcc

SEQ ID NO: 5293878 - DNA, 25 bp, Homo sapien
gctccggcgcctcttgtctgcttga

SEQ ID NO: 5293879 - DNA, 25 bp, Homo sapien
gaggtcctgttttgtccagatggag

SEQ ID NO: 5293880 - DNA, 25 bp, Homo sapien
gaagttcgccgctttgtggtgggtg

SEQ ID NO: 5293881 - DNA, 25 bp, Homo sapien
gggaggtgctcgaggttcccctcca

SEQ ID NO: 5293882 - DNA, 25 bp, Homo sapien
tgaggcttggtcaggctggcggtgc

SEQ ID NO: 5293883 - DNA, 25 bp, Homo sapien
gggactccagagaagcgaatgattt

SEQ ID NO: 5293884 - DNA, 25 bp, Homo sapien
atcagaacttccataggcggtggag

SEQ ID NO: 5293885 - DNA, 25 bp, Homo sapien
cagactctccgtgggactgaaagtt

SEQ ID NO: 5293886 - DNA, 25 bp, Homo sapien
cagcctatgcccattttgagagatt

SEQ ID NO: 5293887 - DNA, 25 bp, Homo sapien
aagtttcaataagcttcttgacgga

SEQ ID NO: 5293888 - DNA, 25 bp, Homo sapien
gaaagataggtgctaagggcttcca

SEQ ID NO: 5293889 - DNA, 25 bp, Homo sapien
cagcctcactgacctctcctgatgg

SEQ ID NO: 5293890 - DNA, 25 bp, Homo sapien
catttctgcaagatgctcttgtcct

SEQ ID NO: 5293891 - DNA, 25 bp, Homo sapien
caggatggggattgcatttctgcaa

SEQ ID NO: 5293892 - DNA, 25 bp, Homo sapien
tcttgtcctgactaggcaaaatact

SEQ ID NO: 5293893 - DNA, 25 bp, Homo sapien
gacacgactctgactgggacctcgt

SEQ ID NO: 5293894 - DNA, 25 bp, Homo sapien
gccattgggccacacggcggctgct

SEQ ID NO: 5293895 - DNA, 25 bp, Homo sapien
tggacccttcgcagctcctgaaagg

SEQ ID NO: 5293896 - DNA, 25 bp, Homo sapien
ggtcctccacgtgactctggagaca

SEQ ID NO: 5293897 - DNA, 25 bp, Homo sapien
gatcctttcgctgattgactccttc

SEQ ID NO: 5293898 - DNA, 25 bp, Homo sapien
caaacttgatcctttcgctgattga

SEQ ID NO: 5293899 - DNA, 25 bp, Homo sapien
tcgctgattgactccttcatcttca

SEQ ID NO: 5293900 - DNA, 25 bp, Homo sapien
agggcacagggacaaacttgatcct

SEQ ID NO: 5293901 - DNA, 25 bp, Homo sapien
aggctcctaagcctcctggtgcggg

SEQ ID NO: 5293902 - DNA, 25 bp, Homo sapien
ctggaggctcctaagcctcctggtg

SEQ ID NO: 5293903 - DNA, 25 bp, Homo sapien
ggctcctaagcctcctggtgcgggc

SEQ ID NO: 5293904 - DNA, 25 bp, Homo sapien
ggaggctcctaagcctcctggtgcg

SEQ ID NO: 5293905 - DNA, 25 bp, Homo sapien
gagatgaagcgtccatcggcctgga

SEQ ID NO: 5293906 - DNA, 25 bp, Homo sapien
gaacctttgccataggagcccctga

SEQ ID NO: 5293907 - DNA, 25 bp, Homo sapien
gaaatgggctttcccggtcagcagg

SEQ ID NO: 5293908 - DNA, 25 bp, Homo sapien
tcgtcctgtgctcgtggctgaacct

SEQ ID NO: 5293909 - DNA, 25 bp, Homo sapien
ccaggtgtgtcctgactgcctggcc

SEQ ID NO: 5293910 - DNA, 25 bp, Homo sapien
ggtgtgtcctgactgcctggcctct

SEQ ID NO: 5293911 - DNA, 25 bp, Homo sapien
tggcctctgtgtggggtgaagtcac

SEQ ID NO: 5293912 - DNA, 25 bp, Homo sapien
cctggcctctgtgtggggtgaagtc

SEQ ID NO: 5293913 - DNA, 25 bp, Homo sapien
agcaagaagctgaccatgggctgca

SEQ ID NO: 5293914 - DNA, 25 bp, Homo sapien
tccaccgactgcacggactcattgt

SEQ ID NO: 5293915 - DNA, 25 bp, Homo sapien
caggagcacttctccatccttggag

SEQ ID NO: 5293916 - DNA, 25 bp, Homo sapien
tgagcgaggccactgtgccattgag

SEQ ID NO: 5293917 - DNA, 25 bp, Homo sapien
ggctctgtgtgcttgacgtgtgaca

SEQ ID NO: 5293918 - DNA, 25 bp, Homo sapien
cccatgagctgacaaagacctttag

SEQ ID NO: 5293919 - DNA, 25 bp, Homo sapien
gaaccctgtgtcttgaacggaatat

SEQ ID NO: 5293920 - DNA, 25 bp, Homo sapien
ccttgtgatccatgggaaccctgtg

SEQ ID NO: 5293921 - DNA, 25 bp, Homo sapien
tcctggccgaattgctttgggcttt

SEQ ID NO: 5293922 - DNA, 25 bp, Homo sapien
tctttgcaacgctgtttacaaggtc

SEQ ID NO: 5293923 - DNA, 25 bp, Homo sapien
actgaatgccactctttgcaacgct

SEQ ID NO: 5293924 - DNA, 25 bp, Homo sapien
atcctggccgaattgctttgggctt

SEQ ID NO: 5293925 - DNA, 25 bp, Homo sapien
gtttggaaccctctgctgttagtga

SEQ ID NO: 5293926 - DNA, 25 bp, Homo sapien
gagtggtacctgtcgtcctgttgtt

SEQ ID NO: 5293927 - DNA, 25 bp, Homo sapien
gcaatcttactagtccatccaggca

SEQ ID NO: 5293928 - DNA, 25 bp, Homo sapien
catccaggcaattttcaggccagaa

SEQ ID NO: 5293929 - DNA, 25 bp, Homo sapien
tagaagcaataatgttcaaacagaa

SEQ ID NO: 5293930 - DNA, 25 bp, Homo sapien
tattggccagatgctacaacatgag

SEQ ID NO: 5293931 - DNA, 25 bp, Homo sapien
gaaacagtccatatgttcaccagct

SEQ ID NO: 5293932 - DNA, 25 bp, Homo sapien
tggacacaacaggtcacatgttgtg

SEQ ID NO: 5293933 - DNA, 25 bp, Homo sapien
ggcctggcactggacagcagttctt

SEQ ID NO: 5293934 - DNA, 25 bp, Homo sapien
ctttccttgggtgtgaagcgatggc

SEQ ID NO: 5293935 - DNA, 25 bp, Homo sapien
tgggcctggcactggacagcagttc

SEQ ID NO: 5293936 - DNA, 25 bp, Homo sapien
tccttgggtgtgaagcgatggctga

SEQ ID NO: 5293937 - DNA, 25 bp, Homo sapien
gactccacgacatcagtgaagcttg

SEQ ID NO: 5293938 - DNA, 25 bp, Homo sapien
gacccaggtccttgacgacttgaca

SEQ ID NO: 5293939 - DNA, 25 bp, Homo sapien
gaaaactgatatagaaggagcccca

SEQ ID NO: 5293940 - DNA, 25 bp, Homo sapien
tggaaacagccttttcttggcccac

SEQ ID NO: 5293941 - DNA, 25 bp, Homo sapien
ttaaatctggtctccatagcacctc

SEQ ID NO: 5293942 - DNA, 25 bp, Homo sapien
aatagtgttcggccttttaaatctg

SEQ ID NO: 5293943 - DNA, 25 bp, Homo sapien
gaggtaggtgaagggtcataattaa

SEQ ID NO: 5293944 - DNA, 25 bp, Homo sapien
gccattattgtgttcgtgctgcctg

SEQ ID NO: 5293945 - DNA, 25 bp, Homo sapien
taagggagcacattaaagcaaatcc

SEQ ID NO: 5293946 - DNA, 25 bp, Homo sapien
ttatgtctctcctggtctataacca

SEQ ID NO: 5293947 - DNA, 25 bp, Homo sapien
cacattttggcgttggatgattgca

SEQ ID NO: 5293948 - DNA, 25 bp, Homo sapien
taatttaatatccagtctaggctaa

SEQ ID NO: 5293949 - DNA, 25 bp, Homo sapien
catttataggtgcttgaagccaacc

SEQ ID NO: 5293950 - DNA, 25 bp, Homo sapien
tttaaccagctaaagagatgggtgg

SEQ ID NO: 5293951 - DNA, 25 bp, Homo sapien
gccttgtcacctactaatagtggta

SEQ ID NO: 5293952 - DNA, 25 bp, Homo sapien
tctgtggttcaatgacaattggcct

SEQ ID NO: 5293953 - DNA, 25 bp, Homo sapien
tatctctgagagcactcgcagatgc

SEQ ID NO: 5293954 - DNA, 25 bp, Homo sapien
ttatctctgagagcactcgcagatg

SEQ ID NO: 5293955 - DNA, 25 bp, Homo sapien
tctctgagagcactcgcagatgctg

SEQ ID NO: 5293956 - DNA, 25 bp, Homo sapien
ctctgagagcactcgcagatgctga

SEQ ID NO: 5293957 - DNA, 25 bp, Homo sapien
caaagccgcaggagatatgaactaa

SEQ ID NO: 5293958 - DNA, 25 bp, Homo sapien
ttaggccttttacagcaagcgctgc

SEQ ID NO: 5293959 - DNA, 25 bp, Homo sapien
ggatgtactcttgaccacgctcggc

SEQ ID NO: 5293960 - DNA, 25 bp, Homo sapien
taattgctcaacgtgggtgtagcac

SEQ ID NO: 5293961 - DNA, 25 bp, Homo sapien
tcgtggcggccgctgacggacggcc

SEQ ID NO: 5293962 - DNA, 25 bp, Homo sapien
tgggctctgggccacgaccgccagc

SEQ ID NO: 5293963 - DNA, 25 bp, Homo sapien
agtggctttccaacgcggcctcttc

SEQ ID NO: 5293964 - DNA, 25 bp, Homo sapien
gccgctgacggacggcccaacttta

SEQ ID NO: 5293965 - DNA, 25 bp, Homo sapien
taattctgaaccatccgcacctggg

SEQ ID NO: 5293966 - DNA, 25 bp, Homo sapien
aattgtcgagaaacctttggccagt

SEQ ID NO: 5293967 - DNA, 25 bp, Homo sapien
tccccttgcgcattaaattgtcgag

SEQ ID NO: 5293968 - DNA, 25 bp, Homo sapien
ccttggctacctgagatcccttaat

SEQ ID NO: 5293969 - DNA, 25 bp, Homo sapien
tctattattcccctgattatgggtc

SEQ ID NO: 5293970 - DNA, 25 bp, Homo sapien
tatagactgcttgaagttgtcccat

SEQ ID NO: 5293971 - DNA, 25 bp, Homo sapien
tatccatgtcaactctaggtctatt

SEQ ID NO: 5293972 - DNA, 25 bp, Homo sapien
gataatctttaattggctgccagac

SEQ ID NO: 5293973 - DNA, 25 bp, Homo sapien
caatacttcagttagcctgagtaac

SEQ ID NO: 5293974 - DNA, 25 bp, Homo sapien
cagttacatgtcgagatttgagaaa

SEQ ID NO: 5293975 - DNA, 25 bp, Homo sapien
tgagaaaagtcctatcaatacttca

SEQ ID NO: 5293976 - DNA, 25 bp, Homo sapien
aactgagtaatagaggccgcccata

SEQ ID NO: 5293977 - DNA, 25 bp, Homo sapien
tttttcatggcaatatcctcacagg

SEQ ID NO: 5293978 - DNA, 25 bp, Homo sapien
gatttattggcctagcattcgaaga

SEQ ID NO: 5293979 - DNA, 25 bp, Homo sapien
tcaaacacagaatgaagtccagatt

SEQ ID NO: 5293980 - DNA, 25 bp, Homo sapien
cattcgaagacctacacgattggct

SEQ ID NO: 5293981 - DNA, 25 bp, Homo sapien
taactgagctaagaatagactgtgg

SEQ ID NO: 5293982 - DNA, 25 bp, Homo sapien
cactaactggttggttaactgagct

SEQ ID NO: 5293983 - DNA, 25 bp, Homo sapien
tccaatgagtgagtagtagctagat

SEQ ID NO: 5293984 - DNA, 25 bp, Homo sapien
tgcttgactgcttcatctggatgaa

SEQ ID NO: 5293985 - DNA, 25 bp, Homo sapien
tgaagtttatgtcctgtctgtgtaa

SEQ ID NO: 5293986 - DNA, 25 bp, Homo sapien
tttgcattgtggttaggtattgaag

SEQ ID NO: 5293987 - DNA, 25 bp, Homo sapien
aatctaaattctgtcacttcgctgc

SEQ ID NO: 5293988 - DNA, 25 bp, Homo sapien
ttagactttaccacagaaatattgg

SEQ ID NO: 5293989 - DNA, 25 bp, Homo sapien
cacatcaaccaatggctagaagcct

SEQ ID NO: 5293990 - DNA, 25 bp, Homo sapien
tttagtatcccttggtacacaggcc

SEQ ID NO: 5293991 - DNA, 25 bp, Homo sapien
tgaggctccctttttagaatgtgtg

SEQ ID NO: 5293992 - DNA, 25 bp, Homo sapien
tagccacattgcaagccaatagaag

SEQ ID NO: 5293993 - DNA, 25 bp, Homo sapien
ccaaggtgtaagagggggcgcctgt

SEQ ID NO: 5293994 - DNA, 25 bp, Homo sapien
agagggggcgcctgtgctttcacat

SEQ ID NO: 5293995 - DNA, 25 bp, Homo sapien
gagggggcgcctgtgctttcacata

SEQ ID NO: 5293996 - DNA, 25 bp, Homo sapien
gggctgccaaggtgtaagagggggc

SEQ ID NO: 5293997 - DNA, 25 bp, Homo sapien
ggcatgaaccagaattttaccgata

SEQ ID NO: 5293998 - DNA, 25 bp, Homo sapien
ccaataaggacgattagagagatca

SEQ ID NO: 5293999 - DNA, 25 bp, Homo sapien
tttaaccagatagcttactcccagc

SEQ ID NO: 5294000 - DNA, 25 bp, Homo sapien
tctcgagccccttcagatggtctgt

SEQ ID NO: 5294001 - DNA, 25 bp, Homo sapien
ggcaaggaaacatctatgaccccaa

SEQ ID NO: 5294002 - DNA, 25 bp, Homo sapien
ggatgaacccatgctcaaaaccttt

SEQ ID NO: 5294003 - DNA, 25 bp, Homo sapien
tctttcgaaagaataggatgaaccc

SEQ ID NO: 5294004 - DNA, 25 bp, Homo sapien
gactacattgaagcagagcacacac

SEQ ID NO: 5294005 - DNA, 25 bp, Homo sapien
tattggcagtcagcgaagagggctc

SEQ ID NO: 5294006 - DNA, 25 bp, Homo sapien
gaggtacctccttcatattggcagt

SEQ ID NO: 5294007 - DNA, 25 bp, Homo sapien
gctggtagccgtaattgacattccc

SEQ ID NO: 5294008 - DNA, 25 bp, Homo sapien
gtatcctcgtaatgaccagctccag

SEQ ID NO: 5294009 - DNA, 25 bp, Homo sapien
agttgcaacgttaggtgggacagta

SEQ ID NO: 5294010 - DNA, 25 bp, Homo sapien
cccaggttacccctgtcgtgtggct

SEQ ID NO: 5294011 - DNA, 25 bp, Homo sapien
gcaacgttaggtgggacagtacagc

SEQ ID NO: 5294012 - DNA, 25 bp, Homo sapien
cccctgtcgtgtggctccttctttg

SEQ ID NO: 5294013 - DNA, 25 bp, Homo sapien
tccgtggaccttgtgcaactccgaa

SEQ ID NO: 5294014 - DNA, 25 bp, Homo sapien
caggagccgtacgttgggttccaca

SEQ ID NO: 5294015 - DNA, 25 bp, Homo sapien
gggcttgtttctggatccgtggacc

SEQ ID NO: 5294016 - DNA, 25 bp, Homo sapien
gagaatgccatattcacgtgtcccc

SEQ ID NO: 5294017 - DNA, 25 bp, Homo sapien
tagggactcgaacagagatctctgc

SEQ ID NO: 5294018 - DNA, 25 bp, Homo sapien
agggactcgaacagagatctctgca

SEQ ID NO: 5294019 - DNA, 25 bp, Homo sapien
tctagggactcgaacagagatctct

SEQ ID NO: 5294020 - DNA, 25 bp, Homo sapien
ctctagggactcgaacagagatctc

SEQ ID NO: 5294021 - DNA, 25 bp, Homo sapien
accaggagaggaggaaccccctcag

SEQ ID NO: 5294022 - DNA, 25 bp, Homo sapien
ttgagagaccaggagaggaggaacc

SEQ ID NO: 5294023 - DNA, 25 bp, Homo sapien
ccaggagaggaggaaccccctcagg

SEQ ID NO: 5294024 - DNA, 25 bp, Homo sapien
ctgttgagagaccaggagaggagga

SEQ ID NO: 5294025 - DNA, 25 bp, Homo sapien
aagcggtgttgattacatccgggtc

SEQ ID NO: 5294026 - DNA, 25 bp, Homo sapien
tcttccacaagtggaccatattcta

SEQ ID NO: 5294027 - DNA, 25 bp, Homo sapien
ggaccatattctatcggcaaagcgg

SEQ ID NO: 5294028 - DNA, 25 bp, Homo sapien
tcggcaaagcggtgttgattacatc

SEQ ID NO: 5294029 - DNA, 25 bp, Homo sapien
gtcttcaggctgatgttgccagcac

SEQ ID NO: 5294030 - DNA, 25 bp, Homo sapien
cctctccaaaatgatggcaaagttg

SEQ ID NO: 5294031 - DNA, 25 bp, Homo sapien
ttcaggctgatgttgccagcactga

SEQ ID NO: 5294032 - DNA, 25 bp, Homo sapien
gatggcaaagttgggcctgtcttca

SEQ ID NO: 5294033 - DNA, 25 bp, Homo sapien
cactggtgacaaactccagaacttc

SEQ ID NO: 5294034 - DNA, 25 bp, Homo sapien
ggggtatggcatatatccaagagaa

SEQ ID NO: 5294035 - DNA, 25 bp, Homo sapien
tcctggttgcttttgctggggtatg

SEQ ID NO: 5294036 - DNA, 25 bp, Homo sapien
tccactggtgacaaactccagaact

SEQ ID NO: 5294037 - DNA, 25 bp, Homo sapien
tgttaatgtgtggtcccagccagca

SEQ ID NO: 5294038 - DNA, 25 bp, Homo sapien
attaggacctgataccctcgggcgg

SEQ ID NO: 5294039 - DNA, 25 bp, Homo sapien
tctgaaggccggacatctgaaactg

SEQ ID NO: 5294040 - DNA, 25 bp, Homo sapien
ggcaacaattctgggcccctgggat

SEQ ID NO: 5294041 - DNA, 25 bp, Homo sapien
ggcatccacttaactggcagcatgg

SEQ ID NO: 5294042 - DNA, 25 bp, Homo sapien
ggggcatccacttaactggcagcat

SEQ ID NO: 5294043 - DNA, 25 bp, Homo sapien
tagaagtgaatattccttccatgaa

SEQ ID NO: 5294044 - DNA, 25 bp, Homo sapien
agaagtgaatattccttccatgaag

SEQ ID NO: 5294045 - DNA, 25 bp, Homo sapien
taaagctgagcaatgagccaggccc

SEQ ID NO: 5294046 - DNA, 25 bp, Homo sapien
taacagagggctcgaggagtcatgc

SEQ ID NO: 5294047 - DNA, 25 bp, Homo sapien
taaggctgcgctaagtactgatggg

SEQ ID NO: 5294048 - DNA, 25 bp, Homo sapien
cagatgcctgcggtgttagaagcca

SEQ ID NO: 5294049 - DNA, 25 bp, Homo sapien
gatttaggccttcgggcatggtcac

SEQ ID NO: 5294050 - DNA, 25 bp, Homo sapien
tcccatagcctgaaaaggaacttag

SEQ ID NO: 5294051 - DNA, 25 bp, Homo sapien
tagaaagttgacagggtaccaggag

SEQ ID NO: 5294052 - DNA, 25 bp, Homo sapien
gcatggtcactaattaaggtttccc

SEQ ID NO: 5294053 - DNA, 25 bp, Homo sapien
gacaggtcaagaggcagtttctggc

SEQ ID NO: 5294054 - DNA, 25 bp, Homo sapien
gccactcttccagggcctggacagg

SEQ ID NO: 5294055 - DNA, 25 bp, Homo sapien
gatgtctcgggccatcccgaagtct

SEQ ID NO: 5294056 - DNA, 25 bp, Homo sapien
gtagatgtctcgggccatcccgaag

SEQ ID NO: 5294057 - DNA, 25 bp, Homo sapien
tcccgagccacgtgcagaaggtcca

SEQ ID NO: 5294058 - DNA, 25 bp, Homo sapien
gagccacgtgcagaaggtccagcat

SEQ ID NO: 5294059 - DNA, 25 bp, Homo sapien
cacaggcaatgtcccgagccacgtg

SEQ ID NO: 5294060 - DNA, 25 bp, Homo sapien
ccacgtgcagaaggtccagcatggc

SEQ ID NO: 5294061 - DNA, 25 bp, Homo sapien
gggccttgctgcaggtgctccccat

SEQ ID NO: 5294062 - DNA, 25 bp, Homo sapien
catggccatggtcgtgggccttgct

SEQ ID NO: 5294063 - DNA, 25 bp, Homo sapien
ccagctgttcttctcatggccatgg

SEQ ID NO: 5294064 - DNA, 25 bp, Homo sapien
cttctcatggccatggtcgtgggcc

SEQ ID NO: 5294065 - DNA, 25 bp, Homo sapien
ttttgtggccccgagaatccatgca

SEQ ID NO: 5294066 - DNA, 25 bp, Homo sapien
gatattagtcctgtctgtctgctgg

SEQ ID NO: 5294067 - DNA, 25 bp, Homo sapien
tcctgtgtaggatttactgatatta

SEQ ID NO: 5294068 - DNA, 25 bp, Homo sapien
atcacattcctttctcacagtccac

SEQ ID NO: 5294069 - DNA, 25 bp, Homo sapien
ctcctgttctgactctccgagggtg

SEQ ID NO: 5294070 - DNA, 25 bp, Homo sapien
caggctcctgttctgactctccgag

SEQ ID NO: 5294071 - DNA, 25 bp, Homo sapien
cctgctgttagagggtagaacttgg

SEQ ID NO: 5294072 - DNA, 25 bp, Homo sapien
ggacaggctcctgttctgactctcc

SEQ ID NO: 5294073 - DNA, 25 bp, Homo sapien
gttcctggtatccggggcctgctga

SEQ ID NO: 5294074 - DNA, 25 bp, Homo sapien
agttcctggtatccggggcctgctg

SEQ ID NO: 5294075 - DNA, 25 bp, Homo sapien
ccagttcctggtatccggggcctgc

SEQ ID NO: 5294076 - DNA, 25 bp, Homo sapien
cagttcctggtatccggggcctgct

SEQ ID NO: 5294077 - DNA, 25 bp, Homo sapien
tccagcaggatgaaccggggcaggg

SEQ ID NO: 5294078 - DNA, 25 bp, Homo sapien
ctcaccccaatgcagcgaacaatgt

SEQ ID NO: 5294079 - DNA, 25 bp, Homo sapien
cgagggcgggtctctcggaggaagg

SEQ ID NO: 5294080 - DNA, 25 bp, Homo sapien
aatgcagcgaacaatgttctggtgg

SEQ ID NO: 5294081 - DNA, 25 bp, Homo sapien
tgcgtggactgggtgctagaattca

SEQ ID NO: 5294082 - DNA, 25 bp, Homo sapien
gttacattttcagcagctacaatgt

SEQ ID NO: 5294083 - DNA, 25 bp, Homo sapien
tgtaaacatgggcagcaggggtccc

SEQ ID NO: 5294084 - DNA, 25 bp, Homo sapien
ctttctcagatactggtgcgtggac

SEQ ID NO: 5294085 - DNA, 25 bp, Homo sapien
catgaggaaatccagttcgtcctgt

SEQ ID NO: 5294086 - DNA, 25 bp, Homo sapien
tcgtcctgttcagagcacacttcag

SEQ ID NO: 5294087 - DNA, 25 bp, Homo sapien
aatccagttcgtcctgttcagagca

SEQ ID NO: 5294088 - DNA, 25 bp, Homo sapien
gttcagagcacacttcaggcagcgt

SEQ ID NO: 5294089 - DNA, 25 bp, Homo sapien
ggcttgggtcgttgggcattccgga

SEQ ID NO: 5294090 - DNA, 25 bp, Homo sapien
ttcacagccacttgcagggggcttg

SEQ ID NO: 5294091 - DNA, 25 bp, Homo sapien
gtcgttgggcattccggacacctgg

SEQ ID NO: 5294092 - DNA, 25 bp, Homo sapien
attccggacacctggccttcataca

SEQ ID NO: 5294093 - DNA, 25 bp, Homo sapien
ggttgtagtcggtcatgatggtcga

SEQ ID NO: 5294094 - DNA, 25 bp, Homo sapien
tccttcaggtcactgatggaggagg

SEQ ID NO: 5294095 - DNA, 25 bp, Homo sapien
atgagggtgatgtttttccgcggca

SEQ ID NO: 5294096 - DNA, 25 bp, Homo sapien
tcgaggtgcggagcttgctcagctt

SEQ ID NO: 5294097 - DNA, 25 bp, Homo sapien
ggcggccacgagggcagaggtcacc

SEQ ID NO: 5294098 - DNA, 25 bp, Homo sapien
atcatgatgccggagaaagccagga

SEQ ID NO: 5294099 - DNA, 25 bp, Homo sapien
gaggatcagcgagagtggcaggtgt

SEQ ID NO: 5294100 - DNA, 25 bp, Homo sapien
cagagaggatcagcgagagtggcag

SEQ ID NO: 5294101 - DNA, 25 bp, Homo sapien
cagagcactcgagctgtggcaggta

SEQ ID NO: 5294102 - DNA, 25 bp, Homo sapien
tcagagcactcgagctgtggcaggt

SEQ ID NO: 5294103 - DNA, 25 bp, Homo sapien
acagtggtcagagcactcgagctgt

SEQ ID NO: 5294104 - DNA, 25 bp, Homo sapien
tggtcagagcactcgagctgtggca

SEQ ID NO: 5294105 - DNA, 25 bp, Homo sapien
cacagtgactgcagtttagataatg

SEQ ID NO: 5294106 - DNA, 25 bp, Homo sapien
gacattcgtctacctcacagtgact

SEQ ID NO: 5294107 - DNA, 25 bp, Homo sapien
ttgtggctttcagggtccatgtgac

SEQ ID NO: 5294108 - DNA, 25 bp, Homo sapien
cagtgactgcagtttagataatgct

SEQ ID NO: 5294109 - DNA, 25 bp, Homo sapien
caggatgcccagtggactgatgaag

SEQ ID NO: 5294110 - DNA, 25 bp, Homo sapien
ttccccatccatttcggggtcattg

SEQ ID NO: 5294111 - DNA, 25 bp, Homo sapien
ccatttcggggtcattgtttgaggc

SEQ ID NO: 5294112 - DNA, 25 bp, Homo sapien
taaagctggggtgtacaggatgccc

SEQ ID NO: 5294113 - DNA, 25 bp, Homo sapien
tcgggaatagctcccatcagcaggc

SEQ ID NO: 5294114 - DNA, 25 bp, Homo sapien
gttgccctcgggaatagctcccatc

SEQ ID NO: 5294115 - DNA, 25 bp, Homo sapien
aggcacagcggcgcctttcaggaag

SEQ ID NO: 5294116 - DNA, 25 bp, Homo sapien
agcctgcctgcagttgccctcggga

SEQ ID NO: 5294117 - DNA, 25 bp, Homo sapien
ggcccagagcaaggaagtgttatca

SEQ ID NO: 5294118 - DNA, 25 bp, Homo sapien
agtgttatcattccagccacctcca

SEQ ID NO: 5294119 - DNA, 25 bp, Homo sapien
tgcaaagattttccggcccagagca

SEQ ID NO: 5294120 - DNA, 25 bp, Homo sapien
tccggtggcaccctcctgcaaagat

SEQ ID NO: 5294121 - DNA, 25 bp, Homo sapien
ctgcggctccggaattgccgtttag

SEQ ID NO: 5294122 - DNA, 25 bp, Homo sapien
gccctagaaccgaggagttattctc

SEQ ID NO: 5294123 - DNA, 25 bp, Homo sapien
tccggaattgccgtttagccctaga

SEQ ID NO: 5294124 - DNA, 25 bp, Homo sapien
tgccgtttagccctagaaccgagga

SEQ ID NO: 5294125 - DNA, 25 bp, Homo sapien
gtctgtcttggccccgtaggccctg

SEQ ID NO: 5294126 - DNA, 25 bp, Homo sapien
ccacctccggctgcaatgatcaggg

SEQ ID NO: 5294127 - DNA, 25 bp, Homo sapien
caccacctccggctgcaatgatcag

SEQ ID NO: 5294128 - DNA, 25 bp, Homo sapien
atgatcaggggcaccggcactccat

SEQ ID NO: 5294129 - DNA, 25 bp, Homo sapien
cagactttctggattaactggtttg

SEQ ID NO: 5294130 - DNA, 25 bp, Homo sapien
actcatgcacgcttctgttcacacg

SEQ ID NO: 5294131 - DNA, 25 bp, Homo sapien
tcctgcccactcatgcacgcttctg

SEQ ID NO: 5294132 - DNA, 25 bp, Homo sapien
catgcacgcttctgttcacacggat

SEQ ID NO: 5294133 - DNA, 25 bp, Homo sapien
cctcgatctctgatcttccagtgtg

SEQ ID NO: 5294134 - DNA, 25 bp, Homo sapien
ggaaactgtgacaggggccctcgat

SEQ ID NO: 5294135 - DNA, 25 bp, Homo sapien
tgacaggggccctcgatctctgatc

SEQ ID NO: 5294136 - DNA, 25 bp, Homo sapien
ctgggaaactgtgacaggggccctc

SEQ ID NO: 5294137 - DNA, 25 bp, Homo sapien
gccagcagctccgtagcccgagatg

SEQ ID NO: 5294138 - DNA, 25 bp, Homo sapien
gccgtgggaccgcatcatggtgttc

SEQ ID NO: 5294139 - DNA, 25 bp, Homo sapien
ttctccaggttgaagatgcccagca

SEQ ID NO: 5294140 - DNA, 25 bp, Homo sapien
caaccaggatgtacagcatgtcatc

SEQ ID NO: 5294141 - DNA, 25 bp, Homo sapien
caaagaacgttggctcccgctgtgg

SEQ ID NO: 5294142 - DNA, 25 bp, Homo sapien
tccagtgggctaagcacatcgccat

SEQ ID NO: 5294143 - DNA, 25 bp, Homo sapien
ccgctgtggtatgaagactgtcccc

SEQ ID NO: 5294144 - DNA, 25 bp, Homo sapien
gcagcttccagtgggctaagcacat

SEQ ID NO: 5294145 - DNA, 25 bp, Homo sapien
cagtaggagtgttatggctcagtgc

SEQ ID NO: 5294146 - DNA, 25 bp, Homo sapien
gagtgttatggctcagtgcctgaca

SEQ ID NO: 5294147 - DNA, 25 bp, Homo sapien
ggcacacagtaggagtgttatggct

SEQ ID NO: 5294148 - DNA, 25 bp, Homo sapien
cacacagtaggagtgttatggctca

SEQ ID NO: 5294149 - DNA, 25 bp, Homo sapien
ggctgtatggctcactgccctgcac

SEQ ID NO: 5294150 - DNA, 25 bp, Homo sapien
cacagttggggctgtatggctcact

SEQ ID NO: 5294151 - DNA, 25 bp, Homo sapien
tgcacacagttggagcggtatggct

SEQ ID NO: 5294152 - DNA, 25 bp, Homo sapien
ggactccatgggacagtgcccttca

SEQ ID NO: 5294153 - DNA, 25 bp, Homo sapien
tggctcagtgccctgcacgtagtag

SEQ ID NO: 5294154 - DNA, 25 bp, Homo sapien
ctgggccccacggaggcttggctca

SEQ ID NO: 5294155 - DNA, 25 bp, Homo sapien
cagggccaggggtggtccggtgtct

SEQ ID NO: 5294156 - DNA, 25 bp, Homo sapien
tgtgggtccttagcaagcattcctc

SEQ ID NO: 5294157 - DNA, 25 bp, Homo sapien
gcttgcttggtgtagcagggccagg

SEQ ID NO: 5294158 - DNA, 25 bp, Homo sapien
ccttccagatctggatgcctttcag

SEQ ID NO: 5294159 - DNA, 25 bp, Homo sapien
gttctggtaggcgttgttgcactgt

SEQ ID NO: 5294160 - DNA, 25 bp, Homo sapien
ccacgctcaggttggagttctggta

SEQ ID NO: 5294161 - DNA, 25 bp, Homo sapien
ccacatgtggtgaacagccaatgaa

SEQ ID NO: 5294162 - DNA, 25 bp, Homo sapien
ctcaggctgagggtagtggtacaat

SEQ ID NO: 5294163 - DNA, 25 bp, Homo sapien
ggactacagacctaccccaccaagc

SEQ ID NO: 5294164 - DNA, 25 bp, Homo sapien
tggcttcctgcagcctcgaatttct

SEQ ID NO: 5294165 - DNA, 25 bp, Homo sapien
cgaatttctgggctgaaacaatctt

SEQ ID NO: 5294166 - DNA, 25 bp, Homo sapien
agatttcacctcagggacatctcca

SEQ ID NO: 5294167 - DNA, 25 bp, Homo sapien
cctcagggacatctccaatgaccat

SEQ ID NO: 5294168 - DNA, 25 bp, Homo sapien
ctgggctgcaggtttgttttttcag

SEQ ID NO: 5294169 - DNA, 25 bp, Homo sapien
gttttttcagatttcacctcaggga

SEQ ID NO: 5294170 - DNA, 25 bp, Homo sapien
ttggtggtttaaataccagctctgc

SEQ ID NO: 5294171 - DNA, 25 bp, Homo sapien
catctgcaggttacgcataatggat

SEQ ID NO: 5294172 - DNA, 25 bp, Homo sapien
gactcagccatctgcaggttacgca

SEQ ID NO: 5294173 - DNA, 25 bp, Homo sapien
cagctctgccacactcaagcccaaa

SEQ ID NO: 5294174 - DNA, 25 bp, Homo sapien
tgcggcctcctgttgtaaggttcac

SEQ ID NO: 5294175 - DNA, 25 bp, Homo sapien
gacttgcggcctcctgttgtaaggt

SEQ ID NO: 5294176 - DNA, 25 bp, Homo sapien
ttaggacttgcggcctcctgttgta

SEQ ID NO: 5294177 - DNA, 25 bp, Homo sapien
cggcctcctgttgtaaggttcacta

SEQ ID NO: 5294178 - DNA, 25 bp, Homo sapien
cagagctttgggtgttgcaaggatg

SEQ ID NO: 5294179 - DNA, 25 bp, Homo sapien
gttgcaaggatgttgtggaaggcct

SEQ ID NO: 5294180 - DNA, 25 bp, Homo sapien
ccttgaagatttccctaggccacac

SEQ ID NO: 5294181 - DNA, 25 bp, Homo sapien
tgtggaaggccttgaagatttccct

SEQ ID NO: 5294182 - DNA, 25 bp, Homo sapien
ggtcccaagagccttgttaaggctg

SEQ ID NO: 5294183 - DNA, 25 bp, Homo sapien
cattctaattgggagggcgccgaac

SEQ ID NO: 5294184 - DNA, 25 bp, Homo sapien
cactagtgtgcttgctataaatagg

SEQ ID NO: 5294185 - DNA, 25 bp, Homo sapien
gttaaggctggtacttcctgcgtca

SEQ ID NO: 5294186 - DNA, 25 bp, Homo sapien
tatcgagtggaaagacagggtctga

SEQ ID NO: 5294187 - DNA, 25 bp, Homo sapien
cataatggctctagctacaaattct

SEQ ID NO: 5294188 - DNA, 25 bp, Homo sapien
caaggatgccgtcatccccagaagg

SEQ ID NO: 5294189 - DNA, 25 bp, Homo sapien
ccagaagggcgtacttggaacataa

SEQ ID NO: 5294190 - DNA, 25 bp, Homo sapien
tttgggtgctgtattctgcaggatc

SEQ ID NO: 5294191 - DNA, 25 bp, Homo sapien
gatttgggtgctgtattctgcagga

SEQ ID NO: 5294192 - DNA, 25 bp, Homo sapien
ggtgctgtattctgcaggatcttgt

SEQ ID NO: 5294193 - DNA, 25 bp, Homo sapien
tagggtcaaagatgggggtctgtct

SEQ ID NO: 5294194 - DNA, 25 bp, Homo sapien
tggagatattgtcaaaagccacgat

SEQ ID NO: 5294195 - DNA, 25 bp, Homo sapien
gatattgtcaaaagccacgatggct

SEQ ID NO: 5294196 - DNA, 25 bp, Homo sapien
gagatattgtcaaaagccacgatgg

SEQ ID NO: 5294197 - DNA, 25 bp, Homo sapien
ttgtccccaccatgcgaccatctgc

SEQ ID NO: 5294198 - DNA, 25 bp, Homo sapien
aactggaaaggcctgctgcaaggat

SEQ ID NO: 5294199 - DNA, 25 bp, Homo sapien
ctgctgcaaggatgttccaccacag

SEQ ID NO: 5294200 - DNA, 25 bp, Homo sapien
tctttcattctcgaaatctgtgtag

SEQ ID NO: 5294201 - DNA, 25 bp, Homo sapien
agtgtatgttgagctctgctgggcc

SEQ ID NO: 5294202 - DNA, 25 bp, Homo sapien
ttagaggcggagcagttacagatga

SEQ ID NO: 5294203 - DNA, 25 bp, Homo sapien
gctcctcctcataggcatccctttt

SEQ ID NO: 5294204 - DNA, 25 bp, Homo sapien
ctgaggtggagttagaggcggagca

SEQ ID NO: 5294205 - DNA, 25 bp, Homo sapien
tcagtaggcgagtgatgtctgctcc

SEQ ID NO: 5294206 - DNA, 25 bp, Homo sapien
tttccactcactgaaatctactatt

SEQ ID NO: 5294207 - DNA, 25 bp, Homo sapien
tccactcactgaaatctactatttc

SEQ ID NO: 5294208 - DNA, 25 bp, Homo sapien
cggaaatctctggatttccactcac

SEQ ID NO: 5294209 - DNA, 25 bp, Homo sapien
gaaatctctggatttccactcactg

SEQ ID NO: 5294210 - DNA, 25 bp, Homo sapien
ttttcctccagacactgggggtagc

SEQ ID NO: 5294211 - DNA, 25 bp, Homo sapien
cagtggtcccgagacaagtgttcag

SEQ ID NO: 5294212 - DNA, 25 bp, Homo sapien
aggccataccagtggtcccgagaca

SEQ ID NO: 5294213 - DNA, 25 bp, Homo sapien
gggtagccaaccaggccataccagt

SEQ ID NO: 5294214 - DNA, 25 bp, Homo sapien
caaggacacgtttcccctcaagact

SEQ ID NO: 5294215 - DNA, 25 bp, Homo sapien
ttcccggttttgttctccactagca

SEQ ID NO: 5294216 - DNA, 25 bp, Homo sapien
tcaagccttcataggcggcgacatg

SEQ ID NO: 5294217 - DNA, 25 bp, Homo sapien
acacatcgaggagaggcaacaccat

SEQ ID NO: 5294218 - DNA, 25 bp, Homo sapien
tcctgtatgtaaagccggaacggca

SEQ ID NO: 5294219 - DNA, 25 bp, Homo sapien
tgcatacctcgtggcagcttcagga

SEQ ID NO: 5294220 - DNA, 25 bp, Homo sapien
aatatgccccatgtttgctatgcat

SEQ ID NO: 5294221 - DNA, 25 bp, Homo sapien
cggaacggcattgtggctaggccta

SEQ ID NO: 5294222 - DNA, 25 bp, Homo sapien
gatggtcatccgttctatgcagaag

SEQ ID NO: 5294223 - DNA, 25 bp, Homo sapien
catccgttctatgcagaaggtaaac

SEQ ID NO: 5294224 - DNA, 25 bp, Homo sapien
tctatgcagaaggtaaactggctcc

SEQ ID NO: 5294225 - DNA, 25 bp, Homo sapien
tgcagaaggtaaactggctccagga

SEQ ID NO: 5294226 - DNA, 25 bp, Homo sapien
gatagtgtacgatgactttaacttc

SEQ ID NO: 5294227 - DNA, 25 bp, Homo sapien
ctgatgattgtggtgtcttgagata

SEQ ID NO: 5294228 - DNA, 25 bp, Homo sapien
tgtcttgagatagtgtacgatgact

SEQ ID NO: 5294229 - DNA, 25 bp, Homo sapien
tctgggaatccactgatgattgtgg

SEQ ID NO: 5294230 - DNA, 25 bp, Homo sapien
gcaggaaacgtagcactggtcactg

SEQ ID NO: 5294231 - DNA, 25 bp, Homo sapien
tagcactggtcactgtagcactttc

SEQ ID NO: 5294232 - DNA, 25 bp, Homo sapien
gagagctcttgatcggtgcaggaaa

SEQ ID NO: 5294233 - DNA, 25 bp, Homo sapien
tcactgtagcactttcagaagcggg

SEQ ID NO: 5294234 - DNA, 25 bp, Homo sapien
gctggctatctcttggctgcgtgga

SEQ ID NO: 5294235 - DNA, 25 bp, Homo sapien
gaggggctggctatctcttggctgc

SEQ ID NO: 5294236 - DNA, 25 bp, Homo sapien
gggctggctatctcttggctgcgtg

SEQ ID NO: 5294237 - DNA, 25 bp, Homo sapien
aggggctggctatctcttggctgcg

SEQ ID NO: 5294238 - DNA, 25 bp, Homo sapien
tggtcctggaaccgggcatccttta

SEQ ID NO: 5294239 - DNA, 25 bp, Homo sapien
tggtggtcctggaaccgggcatcct

SEQ ID NO: 5294240 - DNA, 25 bp, Homo sapien
cttggtggtcctggaaccgggcatc

SEQ ID NO: 5294241 - DNA, 25 bp, Homo sapien
ttggtggtcctggaaccgggcatcc

SEQ ID NO: 5294242 - DNA, 25 bp, Homo sapien
tcaaagttgcagtaaaaacccacag

SEQ ID NO: 5294243 - DNA, 25 bp, Homo sapien
acagaagccatcttcaaagttgcag

SEQ ID NO: 5294244 - DNA, 25 bp, Homo sapien
caaagttgcagtaaaaacccacagg

SEQ ID NO: 5294245 - DNA, 25 bp, Homo sapien
tgtcccattccaacaagtgaaggag

SEQ ID NO: 5294246 - DNA, 25 bp, Homo sapien
ttccaacaagtgaaggagctctgca

SEQ ID NO: 5294247 - DNA, 25 bp, Homo sapien
aagctggaggactgtcccattccaa

SEQ ID NO: 5294248 - DNA, 25 bp, Homo sapien
ggaggactgtcccattccaacaagt

SEQ ID NO: 5294249 - DNA, 25 bp, Homo sapien
gcttgtgcacaatcccatcatcttc

SEQ ID NO: 5294250 - DNA, 25 bp, Homo sapien
aacctgcctccagaacgcttgtgca

SEQ ID NO: 5294251 - DNA, 25 bp, Homo sapien
gagcttggcgttcaccccaggccta

SEQ ID NO: 5294252 - DNA, 25 bp, Homo sapien
ttgtgtgagcttggcgttcacccca

SEQ ID NO: 5294253 - DNA, 25 bp, Homo sapien
tgcacacactggtgctggtcccacg

SEQ ID NO: 5294254 - DNA, 25 bp, Homo sapien
atgtcctcttggaagctagaaggta

SEQ ID NO: 5294255 - DNA, 25 bp, Homo sapien
aggtaaaacgcctttctgcacacac

SEQ ID NO: 5294256 - DNA, 25 bp, Homo sapien
tggtcccacggaaggtgtggtctcc

SEQ ID NO: 5294257 - DNA, 25 bp, Homo sapien
gattttgtccccaggacctgtcttc

SEQ ID NO: 5294258 - DNA, 25 bp, Homo sapien
tgttgatctcaaatcctgcctcgaa

SEQ ID NO: 5294259 - DNA, 25 bp, Homo sapien
gatctcaaatcctgcctcgaaggtc

SEQ ID NO: 5294260 - DNA, 25 bp, Homo sapien
ctgggcagtagctgttggtggttgc

SEQ ID NO: 5294261 - DNA, 25 bp, Homo sapien
tgatctcaaatcctgcctcgaaggt

SEQ ID NO: 5294262 - DNA, 25 bp, Homo sapien
gtagcattcagtccaaatcccagct

SEQ ID NO: 5294263 - DNA, 25 bp, Homo sapien
ttctgtagcattcagtccaaatccc

SEQ ID NO: 5294264 - DNA, 25 bp, Homo sapien
tgtagcattcagtccaaatcccagc

SEQ ID NO: 5294265 - DNA, 25 bp, Homo sapien
tctgtagcattcagtccaaatccca

SEQ ID NO: 5294266 - DNA, 25 bp, Homo sapien
cctgcaatgggtcatggactgggaa

SEQ ID NO: 5294267 - DNA, 25 bp, Homo sapien
tgcccactcatacctgcaatgggtc

SEQ ID NO: 5294268 - DNA, 25 bp, Homo sapien
aagctgatgaaactgcaactggcat

SEQ ID NO: 5294269 - DNA, 25 bp, Homo sapien
gatgaaactgcaactggcatgggct

SEQ ID NO: 5294270 - DNA, 25 bp, Homo sapien
tgggagccaccatacatggaggaga

SEQ ID NO: 5294271 - DNA, 25 bp, Homo sapien
gccaccatacatggaggagagtgat

SEQ ID NO: 5294272 - DNA, 25 bp, Homo sapien
caccatacatggaggagagtgatgg

SEQ ID NO: 5294273 - DNA, 25 bp, Homo sapien
ggagccaccatacatggaggagagt

SEQ ID NO: 5294274 - DNA, 25 bp, Homo sapien
gggccaccaagctgttggcatctct

SEQ ID NO: 5294275 - DNA, 25 bp, Homo sapien
ctgggccaccaagctgttggcatct

SEQ ID NO: 5294276 - DNA, 25 bp, Homo sapien
gcctgggccaccaagctgttggcat

SEQ ID NO: 5294277 - DNA, 25 bp, Homo sapien
aggcctgggccaccaagctgttggc

SEQ ID NO: 5294278 - DNA, 25 bp, Homo sapien
gctggggcgaggtttctgaatcaca

SEQ ID NO: 5294279 - DNA, 25 bp, Homo sapien
tggggcgaggtttctgaatcacact

SEQ ID NO: 5294280 - DNA, 25 bp, Homo sapien
caggctggggcgaggtttctgaatc

SEQ ID NO: 5294281 - DNA, 25 bp, Homo sapien
ggctggggcgaggtttctgaatcac

SEQ ID NO: 5294282 - DNA, 25 bp, Homo sapien
gagcatttagctacttcacagttga

SEQ ID NO: 5294283 - DNA, 25 bp, Homo sapien
ctttgtgacaagaatggatacctga

SEQ ID NO: 5294284 - DNA, 25 bp, Homo sapien
tcacagttgagtagagattaacctc

SEQ ID NO: 5294285 - DNA, 25 bp, Homo sapien
ggatacctgataccttccctagcaa

SEQ ID NO: 5294286 - DNA, 25 bp, Homo sapien
gagtgcgaagattcaaccaggccat

SEQ ID NO: 5294287 - DNA, 25 bp, Homo sapien
cccatccaactgagtgcgaagattc

SEQ ID NO: 5294288 - DNA, 25 bp, Homo sapien
aggtagtttgtgagtaaaccacagg

SEQ ID NO: 5294289 - DNA, 25 bp, Homo sapien
tagtttgtgagtaaaccacaggctt

SEQ ID NO: 5294290 - DNA, 25 bp, Homo sapien
caccatgcagcttgttcccgggctg

SEQ ID NO: 5294291 - DNA, 25 bp, Homo sapien
taagcagcacggccctttggtggtg

SEQ ID NO: 5294292 - DNA, 25 bp, Homo sapien
tggtggtgcctaagactttttgggc

SEQ ID NO: 5294293 - DNA, 25 bp, Homo sapien
agcaccatgcagcttgttcccgggc

SEQ ID NO: 5294294 - DNA, 25 bp, Homo sapien
cccagtgtagggtccttgctaagcg

SEQ ID NO: 5294295 - DNA, 25 bp, Homo sapien
ccagtgtagggtccttgctaagcgt

SEQ ID NO: 5294296 - DNA, 25 bp, Homo sapien
agtgtagggtccttgctaagcgttt

SEQ ID NO: 5294297 - DNA, 25 bp, Homo sapien
gcccagtgtagggtccttgctaagc

SEQ ID NO: 5294298 - DNA, 25 bp, Homo sapien
gatgacctgtgtgccccaagttagc

SEQ ID NO: 5294299 - DNA, 25 bp, Homo sapien
caagttagcactggaccgctttggt

SEQ ID NO: 5294300 - DNA, 25 bp, Homo sapien
agggagcttgggaaccagatgacct

SEQ ID NO: 5294301 - DNA, 25 bp, Homo sapien
cactggaccgctttggtagtcaggg

SEQ ID NO: 5294302 - DNA, 25 bp, Homo sapien
gagagctttgagggtctcagtgtcg

SEQ ID NO: 5294303 - DNA, 25 bp, Homo sapien
gagctttgagggtctcagtgtcgcc

SEQ ID NO: 5294304 - DNA, 25 bp, Homo sapien
agagctttgagggtctcagtgtcgc

SEQ ID NO: 5294305 - DNA, 25 bp, Homo sapien
ccagaggtggtcgagagggtgtggg

SEQ ID NO: 5294306 - DNA, 25 bp, Homo sapien
gggcccagaggtggtcgagagggtg

SEQ ID NO: 5294307 - DNA, 25 bp, Homo sapien
ggcccagaggtggtcgagagggtgt

SEQ ID NO: 5294308 - DNA, 25 bp, Homo sapien
tggacacatggatcagacaggcaat

SEQ ID NO: 5294309 - DNA, 25 bp, Homo sapien
cactgatgacggagctggacacatg

SEQ ID NO: 5294310 - DNA, 25 bp, Homo sapien
agcaggcttcactgatgacggagct

SEQ ID NO: 5294311 - DNA, 25 bp, Homo sapien
tgtccatggatatacagcctcaggc

SEQ ID NO: 5294312 - DNA, 25 bp, Homo sapien
ccctgtgagctcaggaggatccagg

SEQ ID NO: 5294313 - DNA, 25 bp, Homo sapien
tcatattgactagtggcagtggtcc

SEQ ID NO: 5294314 - DNA, 25 bp, Homo sapien
ttgtcttcatattgactagtggcag

SEQ ID NO: 5294315 - DNA, 25 bp, Homo sapien
tttttcatgggggagctcctttgca

SEQ ID NO: 5294316 - DNA, 25 bp, Homo sapien
tcatgggggagctcctttgcagctc

SEQ ID NO: 5294317 - DNA, 25 bp, Homo sapien
aagctgcggtttccactggagatgt

SEQ ID NO: 5294318 - DNA, 25 bp, Homo sapien
tccagggccactcgaaatgggttgt

SEQ ID NO: 5294319 - DNA, 25 bp, Homo sapien
gggttgtctggacgcccgattcttc

SEQ ID NO: 5294320 - DNA, 25 bp, Homo sapien
cagggcaaagaagtccactgcagac

SEQ ID NO: 5294321 - DNA, 25 bp, Homo sapien
gggactgtatggacagcttgtcaca

SEQ ID NO: 5294322 - DNA, 25 bp, Homo sapien
cgtacagctggttccatgtgttggg

SEQ ID NO: 5294323 - DNA, 25 bp, Homo sapien
gactgtcttatcactggtgcttcca

SEQ ID NO: 5294324 - DNA, 25 bp, Homo sapien
gcctcctggagacaaacgtacagct

SEQ ID NO: 5294325 - DNA, 25 bp, Homo sapien
tctgtgtcttctaacctacaatatg

SEQ ID NO: 5294326 - DNA, 25 bp, Homo sapien
gttttcaatacaacagcagctgtct

SEQ ID NO: 5294327 - DNA, 25 bp, Homo sapien
aatatgcctttggtggaaactcaga

SEQ ID NO: 5294328 - DNA, 25 bp, Homo sapien
catttgaacctttcatatctgttcc

SEQ ID NO: 5294329 - DNA, 25 bp, Homo sapien
tacaatgccatgtacccagaggagc

SEQ ID NO: 5294330 - DNA, 25 bp, Homo sapien
aataattgcagagccgacaaggccc

SEQ ID NO: 5294331 - DNA, 25 bp, Homo sapien
ccagaggagctcaaaggccattaat

SEQ ID NO: 5294332 - DNA, 25 bp, Homo sapien
aatgatgcctgggttggtccacttc

SEQ ID NO: 5294333 - DNA, 25 bp, Homo sapien
tctacctcatctctgggtgagtgtg

SEQ ID NO: 5294334 - DNA, 25 bp, Homo sapien
ctggtagactcctccacctttttct

SEQ ID NO: 5294335 - DNA, 25 bp, Homo sapien
cacctttttctacctcatctctggg

SEQ ID NO: 5294336 - DNA, 25 bp, Homo sapien
tggtagactcctccacctttttcta

SEQ ID NO: 5294337 - DNA, 25 bp, Homo sapien
cacgggaccattggcactgtttcct

SEQ ID NO: 5294338 - DNA, 25 bp, Homo sapien
ttctccttctactgtctctgcagag

SEQ ID NO: 5294339 - DNA, 25 bp, Homo sapien
caggctcacgggaccattggcactg

SEQ ID NO: 5294340 - DNA, 25 bp, Homo sapien
tgtttcctgccactcggaaccattt

SEQ ID NO: 5294341 - DNA, 25 bp, Homo sapien
gagaatacctgagcaccttgaggca

SEQ ID NO: 5294342 - DNA, 25 bp, Homo sapien
ccaactcctgttatgtagggactaa

SEQ ID NO: 5294343 - DNA, 25 bp, Homo sapien
aaggtagggaccacaactgcaagct

SEQ ID NO: 5294344 - DNA, 25 bp, Homo sapien
tgaggaacgcattctggttgaggac

SEQ ID NO: 5294345 - DNA, 25 bp, Homo sapien
gcagaacctactctagatctgtcta

SEQ ID NO: 5294346 - DNA, 25 bp, Homo sapien
aacactgtaagaggtagtgctggca

SEQ ID NO: 5294347 - DNA, 25 bp, Homo sapien
gagccaacaagaatacagcacatct

SEQ ID NO: 5294348 - DNA, 25 bp, Homo sapien
agatctgtctatgtcaacttcagag

SEQ ID NO: 5294349 - DNA, 25 bp, Homo sapien
ttcccaaggtggtggcgttgatctt

SEQ ID NO: 5294350 - DNA, 25 bp, Homo sapien
ttgatcttggacattgagggctgca

SEQ ID NO: 5294351 - DNA, 25 bp, Homo sapien
gcttggcaaattcatcactaggaga

SEQ ID NO: 5294352 - DNA, 25 bp, Homo sapien
gaaagcacgttcattgcctagtggg

SEQ ID NO: 5294353 - DNA, 25 bp, Homo sapien
gccaagatagaagcacaaaagcctg

SEQ ID NO: 5294354 - DNA, 25 bp, Homo sapien
caggctgattttctagtgcgatata

SEQ ID NO: 5294355 - DNA, 25 bp, Homo sapien
gaacaaattatctactgcgaggcct

SEQ ID NO: 5294356 - DNA, 25 bp, Homo sapien
tagggaaccccttgaagtttctgca

SEQ ID NO: 5294357 - DNA, 25 bp, Homo sapien
tagtcctgataagtctgaaaacatc

SEQ ID NO: 5294358 - DNA, 25 bp, Homo sapien
taacactactttaaatgactgcaaa

SEQ ID NO: 5294359 - DNA, 25 bp, Homo sapien
tatgttgacaactcctttttgtcag

SEQ ID NO: 5294360 - DNA, 25 bp, Homo sapien
tgttgttgctaatgacaggttggat

SEQ ID NO: 5294361 - DNA, 25 bp, Homo sapien
tagcccaagtttgatgacttcagtt

SEQ ID NO: 5294362 - DNA, 25 bp, Homo sapien
ggtgtttagcccaagtttgatgact

SEQ ID NO: 5294363 - DNA, 25 bp, Homo sapien
cagtaggtgtttagcccaagtttga

SEQ ID NO: 5294364 - DNA, 25 bp, Homo sapien
tcagtaggtgtttagcccaagtttg

SEQ ID NO: 5294365 - DNA, 25 bp, Homo sapien
cagtatttattctatgctctcccaa

SEQ ID NO: 5294366 - DNA, 25 bp, Homo sapien
tattccttccagatgagatggcatt

SEQ ID NO: 5294367 - DNA, 25 bp, Homo sapien
catttcagtaagtgcacatgggagc

SEQ ID NO: 5294368 - DNA, 25 bp, Homo sapien
gactgtgggtgatatgattaatgcc

SEQ ID NO: 5294369 - DNA, 25 bp, Homo sapien
cttgtcatccaggaacttcatggac

SEQ ID NO: 5294370 - DNA, 25 bp, Homo sapien
ttccttgtcatccaggaacttcatg

SEQ ID NO: 5294371 - DNA, 25 bp, Homo sapien
ctttccttgtcatccaggaacttca

SEQ ID NO: 5294372 - DNA, 25 bp, Homo sapien
ccttgtcatccaggaacttcatgga

SEQ ID NO: 5294373 - DNA, 25 bp, Homo sapien
gctgttccatctggtacatgtcggg

SEQ ID NO: 5294374 - DNA, 25 bp, Homo sapien
tccactgggtaggtggtggagatgc

SEQ ID NO: 5294375 - DNA, 25 bp, Homo sapien
gggagatggtctcttctcacgggta

SEQ ID NO: 5294376 - DNA, 25 bp, Homo sapien
ctcttctcacgggtacttttccctg

SEQ ID NO: 5294377 - DNA, 25 bp, Homo sapien
gccaccacctcctggaaccctggag

SEQ ID NO: 5294378 - DNA, 25 bp, Homo sapien
ctgctgccaccacctcctggaaccc

SEQ ID NO: 5294379 - DNA, 25 bp, Homo sapien
ctgccaccacctcctggaaccctgg

SEQ ID NO: 5294380 - DNA, 25 bp, Homo sapien
tgctgccaccacctcctggaaccct

SEQ ID NO: 5294381 - DNA, 25 bp, Homo sapien
gacagtttccttatggctcaaagag

SEQ ID NO: 5294382 - DNA, 25 bp, Homo sapien
tccatctcctcaatgcagacttggt

SEQ ID NO: 5294383 - DNA, 25 bp, Homo sapien
agctccagttgcctggacagtttcc

SEQ ID NO: 5294384 - DNA, 25 bp, Homo sapien
gagctggcaattccatcacccgatt

SEQ ID NO: 5294385 - DNA, 25 bp, Homo sapien
gccaggaaaggaattgtcctttgta

SEQ ID NO: 5294386 - DNA, 25 bp, Homo sapien
gtcctttgtacttcatgacaacctt

SEQ ID NO: 5294387 - DNA, 25 bp, Homo sapien
ctgccaggaaaggaattgtcctttg

SEQ ID NO: 5294388 - DNA, 25 bp, Homo sapien
tgacaaccttcacagttgaggtgca

SEQ ID NO: 5294389 - DNA, 25 bp, Homo sapien
gccccagggagggttgcacatttat

SEQ ID NO: 5294390 - DNA, 25 bp, Homo sapien
cccagggagggttgcacatttattc

SEQ ID NO: 5294391 - DNA, 25 bp, Homo sapien
tgagccccagggagggttgcacatt

SEQ ID NO: 5294392 - DNA, 25 bp, Homo sapien
gagccccagggagggttgcacattt

SEQ ID NO: 5294393 - DNA, 25 bp, Homo sapien
ggccaggccacacaagaagtgctga

SEQ ID NO: 5294394 - DNA, 25 bp, Homo sapien
caccacaatggactgatgcctgagg

SEQ ID NO: 5294395 - DNA, 25 bp, Homo sapien
tggcaccttttctcacactcatggg

SEQ ID NO: 5294396 - DNA, 25 bp, Homo sapien
gactatgctacacagggaaacaggc

SEQ ID NO: 5294397 - DNA, 25 bp, Homo sapien
ctcaggatggtgtgcttggagtcag

SEQ ID NO: 5294398 - DNA, 25 bp, Homo sapien
agacggccagtgtgcagtgctcact

SEQ ID NO: 5294399 - DNA, 25 bp, Homo sapien
gatctctcttgcagcctcgttgtgg

SEQ ID NO: 5294400 - DNA, 25 bp, Homo sapien
tcctcatccacggactcaggatggt

SEQ ID NO: 5294401 - DNA, 25 bp, Homo sapien
tgaggtgttgagaaggagaaaggag

SEQ ID NO: 5294402 - DNA, 25 bp, Homo sapien
ctgaggtgttgagaaggagaaagga

SEQ ID NO: 5294403 - DNA, 25 bp, Homo sapien
gaggtgttgagaaggagaaaggagc

SEQ ID NO: 5294404 - DNA, 25 bp, Homo sapien
catgggagccacacaaaatatgaga

SEQ ID NO: 5294405 - DNA, 25 bp, Homo sapien
gaaatgaacagaggcttggagctcc

SEQ ID NO: 5294406 - DNA, 25 bp, Homo sapien
gaccagaggacagaagtttttatac

SEQ ID NO: 5294407 - DNA, 25 bp, Homo sapien
tagcttctgttagttatctgattta

SEQ ID NO: 5294408 - DNA, 25 bp, Homo sapien
atgtattgcttttctgcaccttcat

SEQ ID NO: 5294409 - DNA, 25 bp, Homo sapien
attgcttttctgcaccttcattcgg

SEQ ID NO: 5294410 - DNA, 25 bp, Homo sapien
gcttttctgcaccttcattcggaag

SEQ ID NO: 5294411 - DNA, 25 bp, Homo sapien
ttttctgcaccttcattcggaagca

SEQ ID NO: 5294412 - DNA, 25 bp, Homo sapien
tttttcggaagagtcaatgcacatg

SEQ ID NO: 5294413 - DNA, 25 bp, Homo sapien
tttcggaagagtcaatgcacatgca

SEQ ID NO: 5294414 - DNA, 25 bp, Homo sapien
ttcatttttcggaagagtcaatgca

SEQ ID NO: 5294415 - DNA, 25 bp, Homo sapien
catttttcggaagagtcaatgcaca

SEQ ID NO: 5294416 - DNA, 25 bp, Homo sapien
cagttgattgaacagagtgcctttc

SEQ ID NO: 5294417 - DNA, 25 bp, Homo sapien
gcagtgactgacaaaggcactataa

SEQ ID NO: 5294418 - DNA, 25 bp, Homo sapien
ttttgcagtgactgacaaaggcact

SEQ ID NO: 5294419 - DNA, 25 bp, Homo sapien
tgattgaacagagtgcctttcctct

SEQ ID NO: 5294420 - DNA, 25 bp, Homo sapien
tcggcttgagatcccttgttgccaa

SEQ ID NO: 5294421 - DNA, 25 bp, Homo sapien
tattgtcactggagaaccagctccc

SEQ ID NO: 5294422 - DNA, 25 bp, Homo sapien
tctatctcaggtacaaagtcaaggc

SEQ ID NO: 5294423 - DNA, 25 bp, Homo sapien
caaggctacccacattgaaggctgg

SEQ ID NO: 5294424 - DNA, 25 bp, Homo sapien
ccattaatcttggtggaagcatcaa

SEQ ID NO: 5294425 - DNA, 25 bp, Homo sapien
ggtggaagcatcaagagtaccagtg

SEQ ID NO: 5294426 - DNA, 25 bp, Homo sapien
agagtaccagtggattttttcttca

SEQ ID NO: 5294427 - DNA, 25 bp, Homo sapien
ggctccattaatcttggtggaagca

SEQ ID NO: 5294428 - DNA, 25 bp, Homo sapien
catagagtgaagtgagccgtgggaa

SEQ ID NO: 5294429 - DNA, 25 bp, Homo sapien
aggacagggcagaattatggtgctc

SEQ ID NO: 5294430 - DNA, 25 bp, Homo sapien
gcagaattatggtgctcactcagct

SEQ ID NO: 5294431 - DNA, 25 bp, Homo sapien
tgaagtgagccgtgggaagagttct

SEQ ID NO: 5294432 - DNA, 25 bp, Homo sapien
ctccttgacgggcgtggtaataaca

SEQ ID NO: 5294433 - DNA, 25 bp, Homo sapien
tgacgggcgtggtaataacagaagt

SEQ ID NO: 5294434 - DNA, 25 bp, Homo sapien
agaggcgagtagtgctttcctcctt

SEQ ID NO: 5294435 - DNA, 25 bp, Homo sapien
ccttgacgggcgtggtaataacaga

SEQ ID NO: 5294436 - DNA, 25 bp, Homo sapien
cctttcattcgaatcccatgtttat

SEQ ID NO: 5294437 - DNA, 25 bp, Homo sapien
aaatctgaaattccactcacaccag

SEQ ID NO: 5294438 - DNA, 25 bp, Homo sapien
ccaagcagcggcagataggagaact

SEQ ID NO: 5294439 - DNA, 25 bp, Homo sapien
cacggctggcctgataaatctgaaa

SEQ ID NO: 5294440 - DNA, 25 bp, Homo sapien
cagtgaggggcatcgagctagggct

SEQ ID NO: 5294441 - DNA, 25 bp, Homo sapien
atcgagctagggctgcccaactcta

SEQ ID NO: 5294442 - DNA, 25 bp, Homo sapien
cgagctagggctgcccaactctagc

SEQ ID NO: 5294443 - DNA, 25 bp, Homo sapien
gggcatcgagctagggctgcccaac

SEQ ID NO: 5294444 - DNA, 25 bp, Homo sapien
tctgcattagatggctggtagccca

SEQ ID NO: 5294445 - DNA, 25 bp, Homo sapien
tctccccaacataaggctcactgtt

SEQ ID NO: 5294446 - DNA, 25 bp, Homo sapien
tgccgcaaatttctgcattagatgg

SEQ ID NO: 5294447 - DNA, 25 bp, Homo sapien
ggctcactgttgatgccgcaaattt

SEQ ID NO: 5294448 - DNA, 25 bp, Homo sapien
tgtggacaaggcttataaactccag

SEQ ID NO: 5294449 - DNA, 25 bp, Homo sapien
acaaggcttataaactccagcatca

SEQ ID NO: 5294450 - DNA, 25 bp, Homo sapien
tcttgtggacaaggcttataaactc

SEQ ID NO: 5294451 - DNA, 25 bp, Homo sapien
tattcttgtggacaaggcttataaa

SEQ ID NO: 5294452 - DNA, 25 bp, Homo sapien
agccaggacagcttcgagtgtcagg

SEQ ID NO: 5294453 - DNA, 25 bp, Homo sapien
ccaggacagcttcgagtgtcaggga

SEQ ID NO: 5294454 - DNA, 25 bp, Homo sapien
aggacagcttcgagtgtcagggaac

SEQ ID NO: 5294455 - DNA, 25 bp, Homo sapien
caggacagcttcgagtgtcagggaa

SEQ ID NO: 5294456 - DNA, 25 bp, Homo sapien
ctccgtaagctgttccagagggttc

SEQ ID NO: 5294457 - DNA, 25 bp, Homo sapien
tagcttcggcaggagatcaggaaca

SEQ ID NO: 5294458 - DNA, 25 bp, Homo sapien
tctgggtcacctgagggtagcttcg

SEQ ID NO: 5294459 - DNA, 25 bp, Homo sapien
tcctcttctagaaaccctgctgtgt

SEQ ID NO: 5294460 - DNA, 25 bp, Homo sapien
gcaattcggttgtcctttatcagca

SEQ ID NO: 5294461 - DNA, 25 bp, Homo sapien
ctcagagaaaagaagccgaatcagc

SEQ ID NO: 5294462 - DNA, 25 bp, Homo sapien
aaatcaagtcctgaattgtgctggc

SEQ ID NO: 5294463 - DNA, 25 bp, Homo sapien
ctcagtggctgagctttgaatgcaa

SEQ ID NO: 5294464 - DNA, 25 bp, Homo sapien
taattatggagaatgcagagtctgc

SEQ ID NO: 5294465 - DNA, 25 bp, Homo sapien
tgctctccagatgcaccaaacgaat

SEQ ID NO: 5294466 - DNA, 25 bp, Homo sapien
ggtaacaattagctcttgaagctgc

SEQ ID NO: 5294467 - DNA, 25 bp, Homo sapien
gctagtcgccgcacggtgacttgga

SEQ ID NO: 5294468 - DNA, 25 bp, Homo sapien
tggagactccgtgatggctgtcatg

SEQ ID NO: 5294469 - DNA, 25 bp, Homo sapien
agactccgtgatggctgtcatgctc

SEQ ID NO: 5294470 - DNA, 25 bp, Homo sapien
cttggagactccgtgatggctgtca

SEQ ID NO: 5294471 - DNA, 25 bp, Homo sapien
atcttggagactccgtgatggctgt

SEQ ID NO: 5294472 - DNA, 25 bp, Homo sapien
gctgaagaccagatattggtttcca

SEQ ID NO: 5294473 - DNA, 25 bp, Homo sapien
cagatattggtttccaggaatataa

SEQ ID NO: 5294474 - DNA, 25 bp, Homo sapien
aagaccagatattggtttccaggaa

SEQ ID NO: 5294475 - DNA, 25 bp, Homo sapien
ctgctgaagaccagatattggtttc

SEQ ID NO: 5294476 - DNA, 25 bp, Homo sapien
cagccccttaatgaaaaactctttg

SEQ ID NO: 5294477 - DNA, 25 bp, Homo sapien
agcattcagccccttaatgaaaaac

SEQ ID NO: 5294478 - DNA, 25 bp, Homo sapien
ggctgtaactaatgaggttattctg

SEQ ID NO: 5294479 - DNA, 25 bp, Homo sapien
gatggggctgtaactaatgaggtta

SEQ ID NO: 5294480 - DNA, 25 bp, Homo sapien
tttctgattagtacagctttcccag

SEQ ID NO: 5294481 - DNA, 25 bp, Homo sapien
ctctttctgattagtacagctttcc

SEQ ID NO: 5294482 - DNA, 25 bp, Homo sapien
tctgattagtacagctttcccagtt

SEQ ID NO: 5294483 - DNA, 25 bp, Homo sapien
tgattagtacagctttcccagttct

SEQ ID NO: 5294484 - DNA, 25 bp, Homo sapien
ttgaggttgaaagggggcctatgca

SEQ ID NO: 5294485 - DNA, 25 bp, Homo sapien
gcctatgcaggataggacacagtga

SEQ ID NO: 5294486 - DNA, 25 bp, Homo sapien
ttggtgggctcccaggtgttgaggt

SEQ ID NO: 5294487 - DNA, 25 bp, Homo sapien
ggtgggctcccaggtgttgaggttg

SEQ ID NO: 5294488 - DNA, 25 bp, Homo sapien
ctaacccttgacctgaaattccctg

SEQ ID NO: 5294489 - DNA, 25 bp, Homo sapien
atagaactaacccttgacctgaaat

SEQ ID NO: 5294490 - DNA, 25 bp, Homo sapien
taacccttgacctgaaattccctgc

SEQ ID NO: 5294491 - DNA, 25 bp, Homo sapien
cagctcagaactccggggtttaagc

SEQ ID NO: 5294492 - DNA, 25 bp, Homo sapien
tgacctgctttgtttacgacatgtc

SEQ ID NO: 5294493 - DNA, 25 bp, Homo sapien
ttgtttacgacatgtccagttcatc

SEQ ID NO: 5294494 - DNA, 25 bp, Homo sapien
cagaactccggggtttaagcattct

SEQ ID NO: 5294495 - DNA, 25 bp, Homo sapien
taatcgattccacttcctcacatgg

SEQ ID NO: 5294496 - DNA, 25 bp, Homo sapien
tagctggtggcagtaatcgattcca

SEQ ID NO: 5294497 - DNA, 25 bp, Homo sapien
gggcagggaaactataaacagctta

SEQ ID NO: 5294498 - DNA, 25 bp, Homo sapien
ctggtaagttttaggctgtggctgc

SEQ ID NO: 5294499 - DNA, 25 bp, Homo sapien
tctgggcatctccttagaacgctct

SEQ ID NO: 5294500 - DNA, 25 bp, Homo sapien
ctggttcctgaggtcatgcagtgga

SEQ ID NO: 5294501 - DNA, 25 bp, Homo sapien
tccttagaacgctctgccccaggcc

SEQ ID NO: 5294502 - DNA, 25 bp, Homo sapien
aggggatgcggcgccaggaccagct

SEQ ID NO: 5294503 - DNA, 25 bp, Homo sapien
aacagtccacaagggagctgctttt

SEQ ID NO: 5294504 - DNA, 25 bp, Homo sapien
cagaacttgggcagtaactgccaat

SEQ ID NO: 5294505 - DNA, 25 bp, Homo sapien
cagtaactgccaatggtttgggtcc

SEQ ID NO: 5294506 - DNA, 25 bp, Homo sapien
actgccaatggtttgggtcctctac

SEQ ID NO: 5294507 - DNA, 25 bp, Homo sapien
tgggcagtaactgccaatggtttgg

SEQ ID NO: 5294508 - DNA, 25 bp, Homo sapien
tatcggctgcgatgagacaggaaag

SEQ ID NO: 5294509 - DNA, 25 bp, Homo sapien
catatcggctgcgatgagacaggaa

SEQ ID NO: 5294510 - DNA, 25 bp, Homo sapien
aagggaaggagtctttcattatcca

SEQ ID NO: 5294511 - DNA, 25 bp, Homo sapien
tgagattccatgtaaaataatcagg

SEQ ID NO: 5294512 - DNA, 25 bp, Homo sapien
gttggtgattccaaggagctatgac

SEQ ID NO: 5294513 - DNA, 25 bp, Homo sapien
ttgttggtgattccaaggagctatg

SEQ ID NO: 5294514 - DNA, 25 bp, Homo sapien
gtttgttggtgattccaaggagcta

SEQ ID NO: 5294515 - DNA, 25 bp, Homo sapien
tgttggtgattccaaggagctatga

SEQ ID NO: 5294516 - DNA, 25 bp, Homo sapien
tctgaaccattcagtttgggaatga

SEQ ID NO: 5294517 - DNA, 25 bp, Homo sapien
cttcttcctggatgtgaggaaccaa

SEQ ID NO: 5294518 - DNA, 25 bp, Homo sapien
taacttcttcctggatgtgaggaac

SEQ ID NO: 5294519 - DNA, 25 bp, Homo sapien
tgggaatgatattaacttcttcctg

SEQ ID NO: 5294520 - DNA, 25 bp, Homo sapien
tagatccctttgggtcaaccaggaa

SEQ ID NO: 5294521 - DNA, 25 bp, Homo sapien
agatccctttgggtcaaccaggaag

SEQ ID NO: 5294522 - DNA, 25 bp, Homo sapien
ttgaatctgccccaggaactcttct

SEQ ID NO: 5294523 - DNA, 25 bp, Homo sapien
tctggaaaagtgaagggttgaatct

SEQ ID NO: 5294524 - DNA, 25 bp, Homo sapien
ggaactcttcttgcagccatctggg

SEQ ID NO: 5294525 - DNA, 25 bp, Homo sapien
cacggataagccctggcttgctctc

SEQ ID NO: 5294526 - DNA, 25 bp, Homo sapien
catctgtcatcatacaagcgtctta

SEQ ID NO: 5294527 - DNA, 25 bp, Homo sapien
tgtccccttcaatcatggtggcaga

SEQ ID NO: 5294528 - DNA, 25 bp, Homo sapien
caaggtttgagcataaactcggaga

SEQ ID NO: 5294529 - DNA, 25 bp, Homo sapien
tccaggagcggctttcaagataatg

SEQ ID NO: 5294530 - DNA, 25 bp, Homo sapien
ggccatgggacattggacctgctga

SEQ ID NO: 5294531 - DNA, 25 bp, Homo sapien
gttggaggagctgtcttggaaaaaa

SEQ ID NO: 5294532 - DNA, 25 bp, Homo sapien
tagatggcctgaacttggagttgct

SEQ ID NO: 5294533 - DNA, 25 bp, Homo sapien
cctgtggcctgtagatcctggcaga

SEQ ID NO: 5294534 - DNA, 25 bp, Homo sapien
tgcgagccagcaaagcatacatcag

SEQ ID NO: 5294535 - DNA, 25 bp, Homo sapien
ctgcgagccagcaaagcatacatca

SEQ ID NO: 5294536 - DNA, 25 bp, Homo sapien
gcgagccagcaaagcatacatcagt

SEQ ID NO: 5294537 - DNA, 25 bp, Homo sapien
ctgcagcttcagagggaccctagtg

SEQ ID NO: 5294538 - DNA, 25 bp, Homo sapien
gcaagttgaaggtgccacatagata

SEQ ID NO: 5294539 - DNA, 25 bp, Homo sapien
taaaggctggcagttacgtgactgg

SEQ ID NO: 5294540 - DNA, 25 bp, Homo sapien
tagactctgacatgggatccaagct

SEQ ID NO: 5294541 - DNA, 25 bp, Homo sapien
gagtatgatgttcgacttggaaacc

SEQ ID NO: 5294542 - DNA, 25 bp, Homo sapien
catttagagtatgatgttcgacttg

SEQ ID NO: 5294543 - DNA, 25 bp, Homo sapien
cctctgtttcatttagagtatgatg

SEQ ID NO: 5294544 - DNA, 25 bp, Homo sapien
gacttggaaacctggaagccagccc

SEQ ID NO: 5294545 - DNA, 25 bp, Homo sapien
cctgttaatcacatcctggacaagc

SEQ ID NO: 5294546 - DNA, 25 bp, Homo sapien
catgggatgtatcagagatgaacag

SEQ ID NO: 5294547 - DNA, 25 bp, Homo sapien
tgtagaccaagttcccttggcctac

SEQ ID NO: 5294548 - DNA, 25 bp, Homo sapien
tgaacaggatttgtaccttgtagac

SEQ ID NO: 5294549 - DNA, 25 bp, Homo sapien
actttctggatctcatccctttctg

SEQ ID NO: 5294550 - DNA, 25 bp, Homo sapien
tagccatacgtagatgaccccatct

SEQ ID NO: 5294551 - DNA, 25 bp, Homo sapien
tgtcctctgtgaacaagagtcacct

SEQ ID NO: 5294552 - DNA, 25 bp, Homo sapien
tgtgggctccacatagccatacgta

SEQ ID NO: 5294553 - DNA, 25 bp, Homo sapien
tcagtgtccacccattaaagaggct

SEQ ID NO: 5294554 - DNA, 25 bp, Homo sapien
gctgtgtgacattggtcgagttgta

SEQ ID NO: 5294555 - DNA, 25 bp, Homo sapien
ggtatgggtcttgtgccaccacttt

SEQ ID NO: 5294556 - DNA, 25 bp, Homo sapien
catggtatcagtatagaatgaggcc

SEQ ID NO: 5294557 - DNA, 25 bp, Homo sapien
gaatgaggcccgtaggtagacacct

SEQ ID NO: 5294558 - DNA, 25 bp, Homo sapien
ggagatcactatctccaagacacag

SEQ ID NO: 5294559 - DNA, 25 bp, Homo sapien
tctttgaaactccctctcgtaacac

SEQ ID NO: 5294560 - DNA, 25 bp, Homo sapien
caaccctaacccattgttaccagtg

SEQ ID NO: 5294561 - DNA, 25 bp, Homo sapien
tctcgtaacaccctgtttattctgc

SEQ ID NO: 5294562 - DNA, 25 bp, Homo sapien
tatcggctggagtatcccaagaggc

SEQ ID NO: 5294563 - DNA, 25 bp, Homo sapien
tcaaatgaaggtggatatcggctgg

SEQ ID NO: 5294564 - DNA, 25 bp, Homo sapien
catggcttagagatctgatgacagc

SEQ ID NO: 5294565 - DNA, 25 bp, Homo sapien
tccgggtgacagttggtgcctagaa

SEQ ID NO: 5294566 - DNA, 25 bp, Homo sapien
agcacatagtgatcttcccctgctg

SEQ ID NO: 5294567 - DNA, 25 bp, Homo sapien
gcacatagtgatcttcccctgctga

SEQ ID NO: 5294568 - DNA, 25 bp, Homo sapien
tgagaaatcctatgtagaaacagag

SEQ ID NO: 5294569 - DNA, 25 bp, Homo sapien
tacttgttgctaccaggatagagga

SEQ ID NO: 5294570 - DNA, 25 bp, Homo sapien
gacactggcactgatgaccgcaaag

SEQ ID NO: 5294571 - DNA, 25 bp, Homo sapien
gaccgcaaagggcaaaactcattag

SEQ ID NO: 5294572 - DNA, 25 bp, Homo sapien
tctagaaggacaagaatccactgtg

SEQ ID NO: 5294573 - DNA, 25 bp, Homo sapien
tctggttcccacatacccacatcgt

SEQ ID NO: 5294574 - DNA, 25 bp, Homo sapien
gacaagaatccactgtggggttgaa

SEQ ID NO: 5294575 - DNA, 25 bp, Homo sapien
ggttcccacatacccacatcgtaat

SEQ ID NO: 5294576 - DNA, 25 bp, Homo sapien
cacagcacaaggcttaattatattc

SEQ ID NO: 5294577 - DNA, 25 bp, Homo sapien
ttgctgaatcagacataatgttgat

SEQ ID NO: 5294578 - DNA, 25 bp, Homo sapien
gaatcagacataatgttgatcacct

SEQ ID NO: 5294579 - DNA, 25 bp, Homo sapien
cacaaggcttaattatattcagacc

SEQ ID NO: 5294580 - DNA, 25 bp, Homo sapien
ccaagacatattttagacagtgaca

SEQ ID NO: 5294581 - DNA, 25 bp, Homo sapien
tctaaaatggcttgaactgttatgc

SEQ ID NO: 5294582 - DNA, 25 bp, Homo sapien
cagggagttactcattctcaatgag

SEQ ID NO: 5294583 - DNA, 25 bp, Homo sapien
ttttggcttaggtacagttctctgt

SEQ ID NO: 5294584 - DNA, 25 bp, Homo sapien
gtccactctcacgcttggggtattc

SEQ ID NO: 5294585 - DNA, 25 bp, Homo sapien
ccactctcacgcttggggtattctt

SEQ ID NO: 5294586 - DNA, 25 bp, Homo sapien
tccactctcacgcttggggtattct

SEQ ID NO: 5294587 - DNA, 25 bp, Homo sapien
agtccactctcacgcttggggtatt

SEQ ID NO: 5294588 - DNA, 25 bp, Homo sapien
tccattgccttccattgtctgcgtt

SEQ ID NO: 5294589 - DNA, 25 bp, Homo sapien
tctgcgttgggtttaaggtgatacc

SEQ ID NO: 5294590 - DNA, 25 bp, Homo sapien
tgtgactcccactctacctccattg

SEQ ID NO: 5294591 - DNA, 25 bp, Homo sapien
ccttccattgtctgcgttgggttta

SEQ ID NO: 5294592 - DNA, 25 bp, Homo sapien
tcaggcctgtgctagaatactaacg

SEQ ID NO: 5294593 - DNA, 25 bp, Homo sapien
taacgctgtatttcctctcgccatc

SEQ ID NO: 5294594 - DNA, 25 bp, Homo sapien
tttcctctcgccatccagtgtttct

SEQ ID NO: 5294595 - DNA, 25 bp, Homo sapien
taccctcttggctcgccaaactcca

SEQ ID NO: 5294596 - DNA, 25 bp, Homo sapien
ctggagcctcaatctgcagcgcctg

SEQ ID NO: 5294597 - DNA, 25 bp, Homo sapien
gaacagcgcgcaggttttccacgct

SEQ ID NO: 5294598 - DNA, 25 bp, Homo sapien
tcaaacttttctgtccaccgtgcct

SEQ ID NO: 5294599 - DNA, 25 bp, Homo sapien
tccagcagcgcagtagcagatatag

SEQ ID NO: 5294600 - DNA, 25 bp, Homo sapien
caggtgttttcaccgctgactgcat

SEQ ID NO: 5294601 - DNA, 25 bp, Homo sapien
ccaggtgttttcaccgctgactgca

SEQ ID NO: 5294602 - DNA, 25 bp, Homo sapien
aaggttttgctctccattctgggca

SEQ ID NO: 5294603 - DNA, 25 bp, Homo sapien
gagccactggctgccgagaagttta

SEQ ID NO: 5294604 - DNA, 25 bp, Homo sapien
tcagcctctgggtgaacatttgaga

SEQ ID NO: 5294605 - DNA, 25 bp, Homo sapien
ttaacgttgacttggctctggcttg

SEQ ID NO: 5294606 - DNA, 25 bp, Homo sapien
tctctggggttaggtccatagctgt

SEQ ID NO: 5294607 - DNA, 25 bp, Homo sapien
ttacttgaatctccatttgtgcttt

SEQ ID NO: 5294608 - DNA, 25 bp, Homo sapien
taggtccatagctgttattagattc

SEQ ID NO: 5294609 - DNA, 25 bp, Homo sapien
tacttgaatctccatttgtgctttt

SEQ ID NO: 5294610 - DNA, 25 bp, Homo sapien
tagggacgtgttgacccaggacctc

SEQ ID NO: 5294611 - DNA, 25 bp, Homo sapien
tcctatctgcactggagatgaaact

SEQ ID NO: 5294612 - DNA, 25 bp, Homo sapien
acagttggcaaaagtactatcagga

SEQ ID NO: 5294613 - DNA, 25 bp, Homo sapien
tactatcaggaaagtcggggaatag

SEQ ID NO: 5294614 - DNA, 25 bp, Homo sapien
catgcacaccaggagcgtcctcgag

SEQ ID NO: 5294615 - DNA, 25 bp, Homo sapien
tccatgcacaccaggagcgtcctcg

SEQ ID NO: 5294616 - DNA, 25 bp, Homo sapien
tctccatgcacaccaggagcgtcct

SEQ ID NO: 5294617 - DNA, 25 bp, Homo sapien
tgcacaccaggagcgtcctcgagct

SEQ ID NO: 5294618 - DNA, 25 bp, Homo sapien
gatgtgaggtgactgcctgattaat

SEQ ID NO: 5294619 - DNA, 25 bp, Homo sapien
tgcatattctgtgtactgatacgtt

SEQ ID NO: 5294620 - DNA, 25 bp, Homo sapien
tatgatgccttgcagatgaaatatg

SEQ ID NO: 5294621 - DNA, 25 bp, Homo sapien
ctgatacgttgtctcttcttaagaa

SEQ ID NO: 5294622 - DNA, 25 bp, Homo sapien
tgccagcttgtccagacacaacagg

SEQ ID NO: 5294623 - DNA, 25 bp, Homo sapien
ctcctgcgtgggctttaaactcttt

SEQ ID NO: 5294624 - DNA, 25 bp, Homo sapien
ggtggcattgtcaggcatggcaaac

SEQ ID NO: 5294625 - DNA, 25 bp, Homo sapien
gatggggcttaattgttctgacttt

SEQ ID NO: 5294626 - DNA, 25 bp, Homo sapien
tcatgcatgtgtagtaccctggccc

SEQ ID NO: 5294627 - DNA, 25 bp, Homo sapien
actgtgtaaagggtcaactgtgcag

SEQ ID NO: 5294628 - DNA, 25 bp, Homo sapien
gccctatacctatctatttgcctgt

SEQ ID NO: 5294629 - DNA, 25 bp, Homo sapien
tatgcaaagtatgtgttaactgact

SEQ ID NO: 5294630 - DNA, 25 bp, Homo sapien
tctttgttagcccttttataagaga

SEQ ID NO: 5294631 - DNA, 25 bp, Homo sapien
catctttgttagcccttttataaga

SEQ ID NO: 5294632 - DNA, 25 bp, Homo sapien
tcatctttgttagcccttttataag

SEQ ID NO: 5294633 - DNA, 25 bp, Homo sapien
cttcatctttgttagcccttttata

SEQ ID NO: 5294634 - DNA, 25 bp, Homo sapien
ttgtcaggactgtggtcaagtgcat

SEQ ID NO: 5294635 - DNA, 25 bp, Homo sapien
taactcaaaactcaggcctatggcc

SEQ ID NO: 5294636 - DNA, 25 bp, Homo sapien
taacactaccttgtcaggactgtgg

SEQ ID NO: 5294637 - DNA, 25 bp, Homo sapien
ggaagattgcccttagctaacacta

SEQ ID NO: 5294638 - DNA, 25 bp, Homo sapien
tgattttttcggtgaacccattctg

SEQ ID NO: 5294639 - DNA, 25 bp, Homo sapien
ttttcggtgaacccattctgaattc

SEQ ID NO: 5294640 - DNA, 25 bp, Homo sapien
ttcggtgaacccattctgaattctt

SEQ ID NO: 5294641 - DNA, 25 bp, Homo sapien
gattttttcggtgaacccattctga

SEQ ID NO: 5294642 - DNA, 25 bp, Homo sapien
gggccaagcactgcagtggctgctt

SEQ ID NO: 5294643 - DNA, 25 bp, Homo sapien
gtggctgcttcgtgggcttcatcat

SEQ ID NO: 5294644 - DNA, 25 bp, Homo sapien
tgggccaagcactgcagtggctgct

SEQ ID NO: 5294645 - DNA, 25 bp, Homo sapien
ccaagcactgcagtggctgcttcgt

SEQ ID NO: 5294646 - DNA, 25 bp, Homo sapien
tcaggcctctccatagtacatgtaa

SEQ ID NO: 5294647 - DNA, 25 bp, Homo sapien
caggcctctccatagtacatgtaaa

SEQ ID NO: 5294648 - DNA, 25 bp, Homo sapien
aggcctctccatagtacatgtaaaa

SEQ ID NO: 5294649 - DNA, 25 bp, Homo sapien
taatgatacatgttgtctgaaacac

SEQ ID NO: 5294650 - DNA, 25 bp, Homo sapien
agggaaaatgaacggaaccataatg

SEQ ID NO: 5294651 - DNA, 25 bp, Homo sapien
cagaacatggtatagcaaggtgtat

SEQ ID NO: 5294652 - DNA, 25 bp, Homo sapien
gaaccataatgatacatgttgtctg

SEQ ID NO: 5294653 - DNA, 25 bp, Homo sapien
tggggatgtctgcaatggagactgt

SEQ ID NO: 5294654 - DNA, 25 bp, Homo sapien
ggatgtctgcaatggagactgtatc

SEQ ID NO: 5294655 - DNA, 25 bp, Homo sapien
ctactccatggggatgtctgcaatg

SEQ ID NO: 5294656 - DNA, 25 bp, Homo sapien
tactccatggggatgtctgcaatgg

SEQ ID NO: 5294657 - DNA, 25 bp, Homo sapien
ctgagattgaactggagcagcccca

SEQ ID NO: 5294658 - DNA, 25 bp, Homo sapien
gagggcaccacgaagtcaactgcca

SEQ ID NO: 5294659 - DNA, 25 bp, Homo sapien
cttcttctcgggcatcaggcggatc

SEQ ID NO: 5294660 - DNA, 25 bp, Homo sapien
aactgcttggcacgccggagcttgc

SEQ ID NO: 5294661 - DNA, 25 bp, Homo sapien
tgctgaacttctgggcgtgaatccc

SEQ ID NO: 5294662 - DNA, 25 bp, Homo sapien
tgatctccagaggactgtgcgtgcg

SEQ ID NO: 5294663 - DNA, 25 bp, Homo sapien
tctgaacagtccttggtacccagcg

SEQ ID NO: 5294664 - DNA, 25 bp, Homo sapien
tcaagctatctctccgctgcgggaa

SEQ ID NO: 5294665 - DNA, 25 bp, Homo sapien
gacatagatactggaatccccaagg

SEQ ID NO: 5294666 - DNA, 25 bp, Homo sapien
aagtggcagacatagattctgacat

SEQ ID NO: 5294667 - DNA, 25 bp, Homo sapien
gtgagttgaccatgtaccaagagag

SEQ ID NO: 5294668 - DNA, 25 bp, Homo sapien
caattaggtgggctgctctgtgtca

SEQ ID NO: 5294669 - DNA, 25 bp, Homo sapien
agtccaaccgtcatcagagagcaca

SEQ ID NO: 5294670 - DNA, 25 bp, Homo sapien
gagcacaatctctcctcgatatgct

SEQ ID NO: 5294671 - DNA, 25 bp, Homo sapien
gggagtccaaccgtcatcagagagc

SEQ ID NO: 5294672 - DNA, 25 bp, Homo sapien
cagtctgtgaatatatcatcgtgga

SEQ ID NO: 5294673 - DNA, 25 bp, Homo sapien
catccattttccctttcttgtgatt

SEQ ID NO: 5294674 - DNA, 25 bp, Homo sapien
tccattttccctttcttgtgattaa

SEQ ID NO: 5294675 - DNA, 25 bp, Homo sapien
cattttccctttcttgtgattaagc

SEQ ID NO: 5294676 - DNA, 25 bp, Homo sapien
ctctcatccattttccctttcttgt

SEQ ID NO: 5294677 - DNA, 25 bp, Homo sapien
gcatccctggcgatgaacaatcata

SEQ ID NO: 5294678 - DNA, 25 bp, Homo sapien
aaactgtctactgctcacacgcaca

SEQ ID NO: 5294679 - DNA, 25 bp, Homo sapien
ttacggccactggtaagaacaagca

SEQ ID NO: 5294680 - DNA, 25 bp, Homo sapien
acttcgaatggtggccttaggatgc

SEQ ID NO: 5294681 - DNA, 25 bp, Homo sapien
caatgaaacggactccctctgagat

SEQ ID NO: 5294682 - DNA, 25 bp, Homo sapien
tccccacaagatagtaagatcccag

SEQ ID NO: 5294683 - DNA, 25 bp, Homo sapien
gctcccggccagaactttctaacaa

SEQ ID NO: 5294684 - DNA, 25 bp, Homo sapien
ttctaacaatgaaacggactccctc

SEQ ID NO: 5294685 - DNA, 25 bp, Homo sapien
ttgcagctcagcacattcccctctg

SEQ ID NO: 5294686 - DNA, 25 bp, Homo sapien
agccaggagaaccattgtcttctga

SEQ ID NO: 5294687 - DNA, 25 bp, Homo sapien
aagccaggagaaccattgtcttctg

SEQ ID NO: 5294688 - DNA, 25 bp, Homo sapien
tgcagctcagcacattcccctctgg

SEQ ID NO: 5294689 - DNA, 25 bp, Homo sapien
aaaaggccctttgtaggctactgat

SEQ ID NO: 5294690 - DNA, 25 bp, Homo sapien
ttgtcatggcctcacagcaatccgg

SEQ ID NO: 5294691 - DNA, 25 bp, Homo sapien
taaagcaagtgataccaactgtgag

SEQ ID NO: 5294692 - DNA, 25 bp, Homo sapien
caatccggaccgtacaaggcagagt

SEQ ID NO: 5294693 - DNA, 25 bp, Homo sapien
ccaatgttaaacttcagggaactag

SEQ ID NO: 5294694 - DNA, 25 bp, Homo sapien
ccatctgagtactgcttttggaaga

SEQ ID NO: 5294695 - DNA, 25 bp, Homo sapien
tgaatgcgcaaacgaacgagtatgg

SEQ ID NO: 5294696 - DNA, 25 bp, Homo sapien
gaattatggagtgacccatctgagt

SEQ ID NO: 5294697 - DNA, 25 bp, Homo sapien
gagctccagcaagctgcccggatat

SEQ ID NO: 5294698 - DNA, 25 bp, Homo sapien
tgcgtcaaggagctccagcaagctg

SEQ ID NO: 5294699 - DNA, 25 bp, Homo sapien
agacggaagcctgcgtcaaggagct

SEQ ID NO: 5294700 - DNA, 25 bp, Homo sapien
tgcccggatatgagcctgtcactgg

SEQ ID NO: 5294701 - DNA, 25 bp, Homo sapien
tcttgaaaagtcgtctaggaccata

SEQ ID NO: 5294702 - DNA, 25 bp, Homo sapien
gaaaagtcgtctaggaccatagcaa

SEQ ID NO: 5294703 - DNA, 25 bp, Homo sapien
aaagtcgtctaggaccatagcaaac

SEQ ID NO: 5294704 - DNA, 25 bp, Homo sapien
tgttcttgaaaagtcgtctaggacc

SEQ ID NO: 5294705 - DNA, 25 bp, Homo sapien
catctttgttccatcctgggccatt

SEQ ID NO: 5294706 - DNA, 25 bp, Homo sapien
gccattccctggtgaacacagcatg

SEQ ID NO: 5294707 - DNA, 25 bp, Homo sapien
cattccctggtgaacacagcatggc

SEQ ID NO: 5294708 - DNA, 25 bp, Homo sapien
acttagaatcttgatccatctttgt

SEQ ID NO: 5294709 - DNA, 25 bp, Homo sapien
tgctcattagccactgggagaatca

SEQ ID NO: 5294710 - DNA, 25 bp, Homo sapien
caaaggaagtccttcattagcattc

SEQ ID NO: 5294711 - DNA, 25 bp, Homo sapien
catccaagctgtcaaatgcacccaa

SEQ ID NO: 5294712 - DNA, 25 bp, Homo sapien
tccttcattagcattcctgagctgc

SEQ ID NO: 5294713 - DNA, 25 bp, Homo sapien
attggccaagcagccgggcccttgg

SEQ ID NO: 5294714 - DNA, 25 bp, Homo sapien
ttcacattggccaagcagccgggcc

SEQ ID NO: 5294715 - DNA, 25 bp, Homo sapien
gcccttggagcaaataccaccagca

SEQ ID NO: 5294716 - DNA, 25 bp, Homo sapien
ctggcattcacattggccaagcagc

SEQ ID NO: 5294717 - DNA, 25 bp, Homo sapien
cagacctggtagttcccaagcacag

SEQ ID NO: 5294718 - DNA, 25 bp, Homo sapien
gtctccaatcatacacagaacaggg

SEQ ID NO: 5294719 - DNA, 25 bp, Homo sapien
aaatgcttgaatggccagtctccaa

SEQ ID NO: 5294720 - DNA, 25 bp, Homo sapien
gtgaccacacgagcaagccaggatt

SEQ ID NO: 5294721 - DNA, 25 bp, Homo sapien
tagtcagaaatcaacgtgctgcact

SEQ ID NO: 5294722 - DNA, 25 bp, Homo sapien
caacatgaggcaagaagtggtccac

SEQ ID NO: 5294723 - DNA, 25 bp, Homo sapien
ttaagagttgtctcccaccagccag

SEQ ID NO: 5294724 - DNA, 25 bp, Homo sapien
gaaagcagggcacttccttcaacac

SEQ ID NO: 5294725 - DNA, 25 bp, Homo sapien
cacctctgtcttgttagtagtgagg

SEQ ID NO: 5294726 - DNA, 25 bp, Homo sapien
atcatgctattcactatgaatttgg

SEQ ID NO: 5294727 - DNA, 25 bp, Homo sapien
tggaagtggcattggaaaagtacgc

SEQ ID NO: 5294728 - DNA, 25 bp, Homo sapien
tgtgaaaacctcctaatcatgctat

SEQ ID NO: 5294729 - DNA, 25 bp, Homo sapien
aaccaactccctaaatcctgcaggg

SEQ ID NO: 5294730 - DNA, 25 bp, Homo sapien
tcagaaccaactccctaaatcctgc

SEQ ID NO: 5294731 - DNA, 25 bp, Homo sapien
gaaccaactccctaaatcctgcagg

SEQ ID NO: 5294732 - DNA, 25 bp, Homo sapien
agaaccaactccctaaatcctgcag

SEQ ID NO: 5294733 - DNA, 25 bp, Homo sapien
gttctgatccttctggacaccagag

SEQ ID NO: 5294734 - DNA, 25 bp, Homo sapien
tcccacgttctgatccttctggaca

SEQ ID NO: 5294735 - DNA, 25 bp, Homo sapien
tgatccttctggacaccagagtcag

SEQ ID NO: 5294736 - DNA, 25 bp, Homo sapien
actaggacttcccacgttctgatcc

SEQ ID NO: 5294737 - DNA, 25 bp, Homo sapien
taatccacagaagcacaatcctata

SEQ ID NO: 5294738 - DNA, 25 bp, Homo sapien
taagggaggactgctgtgtcttgtt

SEQ ID NO: 5294739 - DNA, 25 bp, Homo sapien
taagactgtgtgatgcccaggtccc

SEQ ID NO: 5294740 - DNA, 25 bp, Homo sapien
agacttcagaggtgtcaaggacccc

SEQ ID NO: 5294741 - DNA, 25 bp, Homo sapien
aagtgccaccgcagaagtaccacag

SEQ ID NO: 5294742 - DNA, 25 bp, Homo sapien
gcttctcacttgtgtaagaagtgcc

SEQ ID NO: 5294743 - DNA, 25 bp, Homo sapien
cgctgcttctcacttgtgtaagaag

SEQ ID NO: 5294744 - DNA, 25 bp, Homo sapien
tgtaagaagtgccaccgcagaagta

SEQ ID NO: 5294745 - DNA, 25 bp, Homo sapien
gcaatgggtggagcctcttttacta

SEQ ID NO: 5294746 - DNA, 25 bp, Homo sapien
ggcaatgggtggagcctcttttact

SEQ ID NO: 5294747 - DNA, 25 bp, Homo sapien
tgggcaatgggtggagcctctttta

SEQ ID NO: 5294748 - DNA, 25 bp, Homo sapien
gggcaatgggtggagcctcttttac

SEQ ID NO: 5294749 - DNA, 25 bp, Homo sapien
atggcgtttctatccagtctggatc

SEQ ID NO: 5294750 - DNA, 25 bp, Homo sapien
tcagctggtgccctatcagacttac

SEQ ID NO: 5294751 - DNA, 25 bp, Homo sapien
gtctggatcattcctgccagccctg

SEQ ID NO: 5294752 - DNA, 25 bp, Homo sapien
agctggtgccctatcagacttacac

SEQ ID NO: 5294753 - DNA, 25 bp, Homo sapien
tgaaagggagttcagtagcataact

SEQ ID NO: 5294754 - DNA, 25 bp, Homo sapien
ccaccattctctgggttgatgagta

SEQ ID NO: 5294755 - DNA, 25 bp, Homo sapien
gtttgaaaagcctccgggtcactga

SEQ ID NO: 5294756 - DNA, 25 bp, Homo sapien
gctagctctccccagcagtttgaaa

SEQ ID NO: 5294757 - DNA, 25 bp, Homo sapien
ctgcgaacaggacaaatgcagccac

SEQ ID NO: 5294758 - DNA, 25 bp, Homo sapien
tcttatagccaacagggaagccagc

SEQ ID NO: 5294759 - DNA, 25 bp, Homo sapien
cagccactgtcctccgggtcttata

SEQ ID NO: 5294760 - DNA, 25 bp, Homo sapien
gtcctccgggtcttatagccaacag

SEQ ID NO: 5294761 - DNA, 25 bp, Homo sapien
gtggtggtcaatacacagaatattc

SEQ ID NO: 5294762 - DNA, 25 bp, Homo sapien
atttcagtcctacatggactttttc

SEQ ID NO: 5294763 - DNA, 25 bp, Homo sapien
tttcagtcctacatggactttttct

SEQ ID NO: 5294764 - DNA, 25 bp, Homo sapien
acagtaagtaagaagtcctcttctc

SEQ ID NO: 5294765 - DNA, 25 bp, Homo sapien
tcacagtaagtaagaagtcctcttc

SEQ ID NO: 5294766 - DNA, 25 bp, Homo sapien
cacagtaagtaagaagtcctcttct

SEQ ID NO: 5294767 - DNA, 25 bp, Homo sapien
ctcacagtaagtaagaagtcctctt

SEQ ID NO: 5294768 - DNA, 25 bp, Homo sapien
cagcatgcaggagacgaagcgagca

SEQ ID NO: 5294769 - DNA, 25 bp, Homo sapien
tcaagctggtggtatcgcaggcaga

SEQ ID NO: 5294770 - DNA, 25 bp, Homo sapien
ccaaagcgagcttagcggaagaagt

SEQ ID NO: 5294771 - DNA, 25 bp, Homo sapien
gagagagttctgtcgtgggcatact

SEQ ID NO: 5294772 - DNA, 25 bp, Homo sapien
tactatactgccatgtagcgtcgcc

SEQ ID NO: 5294773 - DNA, 25 bp, Homo sapien
tagcgtcgccaaaagccactgcttg

SEQ ID NO: 5294774 - DNA, 25 bp, Homo sapien
aacacaatgatatagcactgctctg

SEQ ID NO: 5294775 - DNA, 25 bp, Homo sapien
gaaattcagatagccagtccacaaa

SEQ ID NO: 5294776 - DNA, 25 bp, Homo sapien
taagactttccagtcaggaacccac

SEQ ID NO: 5294777 - DNA, 25 bp, Homo sapien
tccagtcaggaacccacaaggacgt

SEQ ID NO: 5294778 - DNA, 25 bp, Homo sapien
caaggacgtaaacatggagtacaag

SEQ ID NO: 5294779 - DNA, 25 bp, Homo sapien
gaacccacaaggacgtaaacatgga

SEQ ID NO: 5294780 - DNA, 25 bp, Homo sapien
aatctcctactgctgactgataccg

SEQ ID NO: 5294781 - DNA, 25 bp, Homo sapien
ttgtatcaattctctgtaacagccg

SEQ ID NO: 5294782 - DNA, 25 bp, Homo sapien
tgataccggtagttctgcagaagat

SEQ ID NO: 5294783 - DNA, 25 bp, Homo sapien
tcaattctctgtaacagccgaggac

SEQ ID NO: 5294784 - DNA, 25 bp, Homo sapien
ttgaactcagcttcataatcaagaa

SEQ ID NO: 5294785 - DNA, 25 bp, Homo sapien
taatcaagaatcacggatatcacaa

SEQ ID NO: 5294786 - DNA, 25 bp, Homo sapien
tcacaataagaaccaacacagcagc

SEQ ID NO: 5294787 - DNA, 25 bp, Homo sapien
gaatcacggatatcacaataagaac

SEQ ID NO: 5294788 - DNA, 25 bp, Homo sapien
caaggagtccaaagttacatacagt

SEQ ID NO: 5294789 - DNA, 25 bp, Homo sapien
tgagccaaggagtccaaagttacat

SEQ ID NO: 5294790 - DNA, 25 bp, Homo sapien
gagtccaaagttacatacagtgagc

SEQ ID NO: 5294791 - DNA, 25 bp, Homo sapien
gccaaggagtccaaagttacataca

SEQ ID NO: 5294792 - DNA, 25 bp, Homo sapien
ccgcgccgcgccgcggctgccccgc

SEQ ID NO: 5294793 - DNA, 25 bp, Homo sapien
ccgccgcgccgcgccgcggctgccc

SEQ ID NO: 5294794 - DNA, 25 bp, Homo sapien
cgccgcgccgcgccgcggctgcccc

SEQ ID NO: 5294795 - DNA, 25 bp, Homo sapien
gcgccgcgccgcggctgccccgccc

SEQ ID NO: 5294796 - DNA, 25 bp, Homo sapien
gtcgcatagtcgggggcgcgcccgg

SEQ ID NO: 5294797 - DNA, 25 bp, Homo sapien
ccgtcgcatagtcgggggcgcgccc

SEQ ID NO: 5294798 - DNA, 25 bp, Homo sapien
cgtcgcatagtcgggggcgcgcccg

SEQ ID NO: 5294799 - DNA, 25 bp, Homo sapien
tcgcatagtcgggggcgcgcccggt

SEQ ID NO: 5294800 - DNA, 25 bp, Homo sapien
gaatccaagtcggaacttgaccgag

SEQ ID NO: 5294801 - DNA, 25 bp, Homo sapien
gcacggcgtgaaccgtcctgagcag

SEQ ID NO: 5294802 - DNA, 25 bp, Homo sapien
accgagttgtttgggccgcgatgac

SEQ ID NO: 5294803 - DNA, 25 bp, Homo sapien
gcgatgaccgcacggcgtgaaccgt

SEQ ID NO: 5294804 - DNA, 25 bp, Homo sapien
aagagatccgaatctgtgcccagcg

SEQ ID NO: 5294805 - DNA, 25 bp, Homo sapien
cgatataaggaaggccgcgtgatcc

SEQ ID NO: 5294806 - DNA, 25 bp, Homo sapien
gaaagcatactgttgaaacccgcag

SEQ ID NO: 5294807 - DNA, 25 bp, Homo sapien
tgtcaccttagcatcagagtcggat

SEQ ID NO: 5294808 - DNA, 25 bp, Homo sapien
gcgcccagttgcatcctgaattaaa

SEQ ID NO: 5294809 - DNA, 25 bp, Homo sapien
ctatatctgtaccacgtgggtggct

SEQ ID NO: 5294810 - DNA, 25 bp, Homo sapien
ctttgaagtcaaagggcagcgccca

SEQ ID NO: 5294811 - DNA, 25 bp, Homo sapien
gaattaaaatcatccccctggatgg

SEQ ID NO: 5294812 - DNA, 25 bp, Homo sapien
cacacgcctgactgttgatgctgac

SEQ ID NO: 5294813 - DNA, 25 bp, Homo sapien
tgatgctgactacaggctgaaggcc

SEQ ID NO: 5294814 - DNA, 25 bp, Homo sapien
cttgggagtcacagagtatcatttc

SEQ ID NO: 5294815 - DNA, 25 bp, Homo sapien
gggctggcattatctgaagactcat

SEQ ID NO: 5294816 - DNA, 25 bp, Homo sapien
cttgtttgacaagcgatcggcggga

SEQ ID NO: 5294817 - DNA, 25 bp, Homo sapien
agcagatctgtgtggcaatgtcacc

SEQ ID NO: 5294818 - DNA, 25 bp, Homo sapien
tccttgacatggaagagcatgaact

SEQ ID NO: 5294819 - DNA, 25 bp, Homo sapien
cgcttgttggcatgaacaggaacca

SEQ ID NO: 5294820 - DNA, 25 bp, Homo sapien
tctcccataggaatgtggccaagct

SEQ ID NO: 5294821 - DNA, 25 bp, Homo sapien
tacacaagtgtacagcagggttgga

SEQ ID NO: 5294822 - DNA, 25 bp, Homo sapien
caaatgatgcaagtgtgtgctggtg

SEQ ID NO: 5294823 - DNA, 25 bp, Homo sapien
gcctttagggctagcagcaaatgat

SEQ ID NO: 5294824 - DNA, 25 bp, Homo sapien
gctctgttccttcgtaaaggtctcc

SEQ ID NO: 5294825 - DNA, 25 bp, Homo sapien
gtgcaaagtgccctacatccaggtg

SEQ ID NO: 5294826 - DNA, 25 bp, Homo sapien
gtctccagcgagcagaagggttcca

SEQ ID NO: 5294827 - DNA, 25 bp, Homo sapien
agaagggttccatgagccttactcc

SEQ ID NO: 5294828 - DNA, 25 bp, Homo sapien
catggcttccaggttcctttttagg

SEQ ID NO: 5294829 - DNA, 25 bp, Homo sapien
gcaaggcccacagggaataaaaggc

SEQ ID NO: 5294830 - DNA, 25 bp, Homo sapien
cagggaataaaaggcccagcaggag

SEQ ID NO: 5294831 - DNA, 25 bp, Homo sapien
ctgcaaggcccacagggaataaaag

SEQ ID NO: 5294832 - DNA, 25 bp, Homo sapien
tcctgctcgcgctccccaccatatg

SEQ ID NO: 5294833 - DNA, 25 bp, Homo sapien
gcgctccccaccatatgggtcactg

SEQ ID NO: 5294834 - DNA, 25 bp, Homo sapien
gctcgcgctccccaccatatgggtc

SEQ ID NO: 5294835 - DNA, 25 bp, Homo sapien
tcgcgctccccaccatatgggtcac

SEQ ID NO: 5294836 - DNA, 25 bp, Homo sapien
ccggctccgcgtctctgccaccttc

SEQ ID NO: 5294837 - DNA, 25 bp, Homo sapien
tgcagaccagcccttcgcaagccaa

SEQ ID NO: 5294838 - DNA, 25 bp, Homo sapien
tcggtcccccggctccgcgtctctg

SEQ ID NO: 5294839 - DNA, 25 bp, Homo sapien
caacgcgccccgtgggcactcggtc

SEQ ID NO: 5294840 - DNA, 25 bp, Homo sapien
ctcttgtttcccctcgctgatcgca

SEQ ID NO: 5294841 - DNA, 25 bp, Homo sapien
ttaaccatgctcttgtttcccctcg

SEQ ID NO: 5294842 - DNA, 25 bp, Homo sapien
catgctcttgtttcccctcgctgat

SEQ ID NO: 5294843 - DNA, 25 bp, Homo sapien
cttgtttcccctcgctgatcgcaag

SEQ ID NO: 5294844 - DNA, 25 bp, Homo sapien
gagaggcctagtatggggaacaaac

SEQ ID NO: 5294845 - DNA, 25 bp, Homo sapien
cgggcgaggattccagagagaggcc

SEQ ID NO: 5294846 - DNA, 25 bp, Homo sapien
ctgcgggcgaggattccagagagag

SEQ ID NO: 5294847 - DNA, 25 bp, Homo sapien
caaacgcttcagaggggtccgaggt

SEQ ID NO: 5294848 - DNA, 25 bp, Homo sapien
agcgaaccacggccccgggagcaga

SEQ ID NO: 5294849 - DNA, 25 bp, Homo sapien
gagtccgggccggtgcgagtgagcg

SEQ ID NO: 5294850 - DNA, 25 bp, Homo sapien
cggtgcgagtgagcgcgtgtgcgcg

SEQ ID NO: 5294851 - DNA, 25 bp, Homo sapien
agctgcgagcgctgaagccattcat

SEQ ID NO: 5294852 - DNA, 25 bp, Homo sapien
agatctatcgagagtgaagctttcc

SEQ ID NO: 5294853 - DNA, 25 bp, Homo sapien
cagctgtgacgtttcttttaatgcc

SEQ ID NO: 5294854 - DNA, 25 bp, Homo sapien
cgcttcgaggatacgggtcctgttt

SEQ ID NO: 5294855 - DNA, 25 bp, Homo sapien
ttttgtacttgccaatgatgccgct

SEQ ID NO: 5294856 - DNA, 25 bp, Homo sapien
ttgaaggcaagggaggacttatctt

SEQ ID NO: 5294857 - DNA, 25 bp, Homo sapien
aggcaagggaggacttatcttcatc

SEQ ID NO: 5294858 - DNA, 25 bp, Homo sapien
cttatcttcatctttgtaccctgcc

SEQ ID NO: 5294859 - DNA, 25 bp, Homo sapien
gggaggacttatcttcatctttgta

SEQ ID NO: 5294860 - DNA, 25 bp, Homo sapien
gatgttgatgtccctgatggcagca

SEQ ID NO: 5294861 - DNA, 25 bp, Homo sapien
atgttgatgtccctgatggcagcag

SEQ ID NO: 5294862 - DNA, 25 bp, Homo sapien
ggatgttgatgtccctgatggcagc

SEQ ID NO: 5294863 - DNA, 25 bp, Homo sapien
caggatgttgatgtccctgatggca

SEQ ID NO: 5294864 - DNA, 25 bp, Homo sapien
ccctttgataaacagagctgagagc

SEQ ID NO: 5294865 - DNA, 25 bp, Homo sapien
ccacacattccctttgataaacaga

SEQ ID NO: 5294866 - DNA, 25 bp, Homo sapien
tgtgcaccacacattccctttgata

SEQ ID NO: 5294867 - DNA, 25 bp, Homo sapien
cacagtgcttgtgtgcaccacacat

SEQ ID NO: 5294868 - DNA, 25 bp, Homo sapien
gaagcagcaactcatctctcaaaga

SEQ ID NO: 5294869 - DNA, 25 bp, Homo sapien
gcccttcccactccttgtcagaagc

SEQ ID NO: 5294870 - DNA, 25 bp, Homo sapien
agaagcagcaactcatctctcaaag

SEQ ID NO: 5294871 - DNA, 25 bp, Homo sapien
gggcataacgcatccactctatccg

SEQ ID NO: 5294872 - DNA, 25 bp, Homo sapien
ggccattctgggcataacgcatcca

SEQ ID NO: 5294873 - DNA, 25 bp, Homo sapien
ttctgggcataacgcatccactcta

SEQ ID NO: 5294874 - DNA, 25 bp, Homo sapien
gaggccattctgggcataacgcatc

SEQ ID NO: 5294875 - DNA, 25 bp, Homo sapien
ccagctgtagttccccacatgtcct

SEQ ID NO: 5294876 - DNA, 25 bp, Homo sapien
tgtagttccccacatgtcctcaaga

SEQ ID NO: 5294877 - DNA, 25 bp, Homo sapien
ttccccacatgtcctcaagagtttg

SEQ ID NO: 5294878 - DNA, 25 bp, Homo sapien
ccacatgtcctcaagagtttgggag

SEQ ID NO: 5294879 - DNA, 25 bp, Homo sapien
tcagatcttcccagacccgtcagat

SEQ ID NO: 5294880 - DNA, 25 bp, Homo sapien
gtctgccctccatagtggtggaacc

SEQ ID NO: 5294881 - DNA, 25 bp, Homo sapien
tgctgcaaactgaaggaccgtctgc

SEQ ID NO: 5294882 - DNA, 25 bp, Homo sapien
gtcagattttgaccgctgctgcaaa

SEQ ID NO: 5294883 - DNA, 25 bp, Homo sapien
tctgacaatttgcaaggccctctga

SEQ ID NO: 5294884 - DNA, 25 bp, Homo sapien
agaactgcagccaggatgcgctcag

SEQ ID NO: 5294885 - DNA, 25 bp, Homo sapien
gagatcattatctgaactcaggcag

SEQ ID NO: 5294886 - DNA, 25 bp, Homo sapien
ggagcgagtgctgtttttgagatca

SEQ ID NO: 5294887 - DNA, 25 bp, Homo sapien
taaaggatgtcatgagatccctggc

SEQ ID NO: 5294888 - DNA, 25 bp, Homo sapien
gctgtcgtggcaaccttgggatcga

SEQ ID NO: 5294889 - DNA, 25 bp, Homo sapien
gacaaatgcttcagtccgccgagag

SEQ ID NO: 5294890 - DNA, 25 bp, Homo sapien
caggttgaccctcagttctggacgt

SEQ ID NO: 5294891 - DNA, 25 bp, Homo sapien
ccaactcctcgcagaagtgggagag

SEQ ID NO: 5294892 - DNA, 25 bp, Homo sapien
cagtccgcggaattccgttctggga

SEQ ID NO: 5294893 - DNA, 25 bp, Homo sapien
ttctgggaagccaatggtcgccggc

SEQ ID NO: 5294894 - DNA, 25 bp, Homo sapien
cacatcaatggcaataacttcttcc

SEQ ID NO: 5294895 - DNA, 25 bp, Homo sapien
gaggctcagggagaaactagcattt

SEQ ID NO: 5294896 - DNA, 25 bp, Homo sapien
tatgaccgtttgcagtctgagcagg

SEQ ID NO: 5294897 - DNA, 25 bp, Homo sapien
gctaatgtcaggaccctcagcggtg

SEQ ID NO: 5294898 - DNA, 25 bp, Homo sapien
ggacccagctgctcttggacaagtg

SEQ ID NO: 5294899 - DNA, 25 bp, Homo sapien
taaggaactaactctgccttctctc

SEQ ID NO: 5294900 - DNA, 25 bp, Homo sapien
agtgaagacaagattcaactccttc

SEQ ID NO: 5294901 - DNA, 25 bp, Homo sapien
cttcaaagtgaagacaagattcaac

SEQ ID NO: 5294902 - DNA, 25 bp, Homo sapien
caccagatacaaaggtagcttcaaa

SEQ ID NO: 5294903 - DNA, 25 bp, Homo sapien
gctctgggtagccttcaaatcgctg

SEQ ID NO: 5294904 - DNA, 25 bp, Homo sapien
gtagccttcaaatcgctgccgagcc

SEQ ID NO: 5294905 - DNA, 25 bp, Homo sapien
caaggccaggattaggctctgggta

SEQ ID NO: 5294906 - DNA, 25 bp, Homo sapien
cctccaaggccaggattaggctctg

SEQ ID NO: 5294907 - DNA, 25 bp, Homo sapien
tcaggcactcttggggtacttgccc

SEQ ID NO: 5294908 - DNA, 25 bp, Homo sapien
caggcactcttggggtacttgccca

SEQ ID NO: 5294909 - DNA, 25 bp, Homo sapien
ggcactcttggggtacttgcccagg

SEQ ID NO: 5294910 - DNA, 25 bp, Homo sapien
cactcttggggtacttgcccagggg

SEQ ID NO: 5294911 - DNA, 25 bp, Homo sapien
ttgacacaaaagtcgctggcagcca

SEQ ID NO: 5294912 - DNA, 25 bp, Homo sapien
tgacacaaaagtcgctggcagccat

SEQ ID NO: 5294913 - DNA, 25 bp, Homo sapien
cttgacacaaaagtcgctggcagcc

SEQ ID NO: 5294914 - DNA, 25 bp, Homo sapien
aatgatcctaaataccaaaacatgc

SEQ ID NO: 5294915 - DNA, 25 bp, Homo sapien
tacaacataaccaacctcaaaacat

SEQ ID NO: 5294916 - DNA, 25 bp, Homo sapien
ttacaacataaccaacctcaaaaca

SEQ ID NO: 5294917 - DNA, 25 bp, Homo sapien
tcctaaataccaaaacatgcccagg

SEQ ID NO: 5294918 - DNA, 25 bp, Homo sapien
tagcaacgatgggaaaggaaacaca

SEQ ID NO: 5294919 - DNA, 25 bp, Homo sapien
actgaaatagcaactgtcttagata

SEQ ID NO: 5294920 - DNA, 25 bp, Homo sapien
gagggcccttgacagcttaatggga

SEQ ID NO: 5294921 - DNA, 25 bp, Homo sapien
cttgccgattagcaacgatgggaaa

SEQ ID NO: 5294922 - DNA, 25 bp, Homo sapien
ggatacgccagaagagctagccctt

SEQ ID NO: 5294923 - DNA, 25 bp, Homo sapien
gaatactcgggtatgggatacgcca

SEQ ID NO: 5294924 - DNA, 25 bp, Homo sapien
tgagatgggaccacatagggccaac

SEQ ID NO: 5294925 - DNA, 25 bp, Homo sapien
tgtgaagaaccctagagaatactcg

SEQ ID NO: 5294926 - DNA, 25 bp, Homo sapien
ggttcacatcctggtctgttctctt

SEQ ID NO: 5294927 - DNA, 25 bp, Homo sapien
cagaggatgctgtcattgttcctat

SEQ ID NO: 5294928 - DNA, 25 bp, Homo sapien
tctttgcagctcctacagaggatgc

SEQ ID NO: 5294929 - DNA, 25 bp, Homo sapien
agtttcttctagactccggccctca

SEQ ID NO: 5294930 - DNA, 25 bp, Homo sapien
agccaagagtctttgtgtggcctct

SEQ ID NO: 5294931 - DNA, 25 bp, Homo sapien
ttggatagagccaagagtctttgtg

SEQ ID NO: 5294932 - DNA, 25 bp, Homo sapien
ccgccaccaacaataaccttggata

SEQ ID NO: 5294933 - DNA, 25 bp, Homo sapien
ccaacaataaccttggatagagcca

SEQ ID NO: 5294934 - DNA, 25 bp, Homo sapien
ggtatagcaccgtcaaacacagcaa

SEQ ID NO: 5294935 - DNA, 25 bp, Homo sapien
ctgagaggtatagcaccgtcaaaca

SEQ ID NO: 5294936 - DNA, 25 bp, Homo sapien
tagcaccgtcaaacacagcaaagat

SEQ ID NO: 5294937 - DNA, 25 bp, Homo sapien
cacagcaaagatagcccttgccaaa

SEQ ID NO: 5294938 - DNA, 25 bp, Homo sapien
ccccactggaactggacatggcttc

SEQ ID NO: 5294939 - DNA, 25 bp, Homo sapien
acatcaacaatgacagacatcatgg

SEQ ID NO: 5294940 - DNA, 25 bp, Homo sapien
catcaacaatgacagacatcatggt

SEQ ID NO: 5294941 - DNA, 25 bp, Homo sapien
tcaacaatgacagacatcatggtca

SEQ ID NO: 5294942 - DNA, 25 bp, Homo sapien
agcacacactttgatcttgagcccc

SEQ ID NO: 5294943 - DNA, 25 bp, Homo sapien
agagcacacactttgatcttgagcc

SEQ ID NO: 5294944 - DNA, 25 bp, Homo sapien
agcagagcacacactttgatcttga

SEQ ID NO: 5294945 - DNA, 25 bp, Homo sapien
gcagagcacacactttgatcttgag

SEQ ID NO: 5294946 - DNA, 25 bp, Homo sapien
ggccaggcttcatcaagccttccat

SEQ ID NO: 5294947 - DNA, 25 bp, Homo sapien
ggcgccttccctgtcaggggcctca

SEQ ID NO: 5294948 - DNA, 25 bp, Homo sapien
tgtcaggggcctcagtggctccaga

SEQ ID NO: 5294949 - DNA, 25 bp, Homo sapien
aggggcctcagtggctccagagccc

SEQ ID NO: 5294950 - DNA, 25 bp, Homo sapien
gccttccctgtcaggggcctcagtg

SEQ ID NO: 5294951 - DNA, 25 bp, Homo sapien
acaaaggcagcataacggcttcttt

SEQ ID NO: 5294952 - DNA, 25 bp, Homo sapien
aaaggcagcataacggcttctttgg

SEQ ID NO: 5294953 - DNA, 25 bp, Homo sapien
aacaaaggcagcataacggcttctt

SEQ ID NO: 5294954 - DNA, 25 bp, Homo sapien
gaacaaaggcagcataacggcttct

SEQ ID NO: 5294955 - DNA, 25 bp, Homo sapien
gcgctcagatctcttttcagttggc

SEQ ID NO: 5294956 - DNA, 25 bp, Homo sapien
agatctcttttcagttggcttcttt

SEQ ID NO: 5294957 - DNA, 25 bp, Homo sapien
cgctcagatctcttttcagttggct

SEQ ID NO: 5294958 - DNA, 25 bp, Homo sapien
ctcagatctcttttcagttggcttc

SEQ ID NO: 5294959 - DNA, 25 bp, Homo sapien
aaggatgacatagctcttcgggaca

SEQ ID NO: 5294960 - DNA, 25 bp, Homo sapien
agtgaagccatcaaatccaaggatg

SEQ ID NO: 5294961 - DNA, 25 bp, Homo sapien
tgacatagctcttcgggacaatgaa

SEQ ID NO: 5294962 - DNA, 25 bp, Homo sapien
aataaaaaggagtacacagtgaagc

SEQ ID NO: 5294963 - DNA, 25 bp, Homo sapien
gctgatgagctctgagccacagtta

SEQ ID NO: 5294964 - DNA, 25 bp, Homo sapien
gatgagctctgagccacagttacaa

SEQ ID NO: 5294965 - DNA, 25 bp, Homo sapien
tgatgagctctgagccacagttaca

SEQ ID NO: 5294966 - DNA, 25 bp, Homo sapien
aggctgatgagctctgagccacagt

SEQ ID NO: 5294967 - DNA, 25 bp, Homo sapien
ttctctccttgcaacatcccagatg

SEQ ID NO: 5294968 - DNA, 25 bp, Homo sapien
cagatgagaagagaatgagccatgt

SEQ ID NO: 5294969 - DNA, 25 bp, Homo sapien
agaagagaatgagccatgtgtttcc

SEQ ID NO: 5294970 - DNA, 25 bp, Homo sapien
cttgcaacatcccagatgagaagag

SEQ ID NO: 5294971 - DNA, 25 bp, Homo sapien
cggagaatctgcaagagccggtaaa

SEQ ID NO: 5294972 - DNA, 25 bp, Homo sapien
gaagcttggccgtccattcctggaa

SEQ ID NO: 5294973 - DNA, 25 bp, Homo sapien
agagccggtaaacccagaagcttgg

SEQ ID NO: 5294974 - DNA, 25 bp, Homo sapien
gaagcagacattgtgtcttcgtcca

SEQ ID NO: 5294975 - DNA, 25 bp, Homo sapien
gtctcttgcataggcccatgacatg

SEQ ID NO: 5294976 - DNA, 25 bp, Homo sapien
cttgcataggcccatgacatgggtc

SEQ ID NO: 5294977 - DNA, 25 bp, Homo sapien
aatggtctcttgcataggcccatga

SEQ ID NO: 5294978 - DNA, 25 bp, Homo sapien
tgcataggcccatgacatgggtcat

SEQ ID NO: 5294979 - DNA, 25 bp, Homo sapien
gcctctgcaaccagacagagagagg

SEQ ID NO: 5294980 - DNA, 25 bp, Homo sapien
agcctctgcaaccagacagagagag

SEQ ID NO: 5294981 - DNA, 25 bp, Homo sapien
gagaggtaaggggtgaggatgtgat

SEQ ID NO: 5294982 - DNA, 25 bp, Homo sapien
gggtgaggatgtgattgatttccat

SEQ ID NO: 5294983 - DNA, 25 bp, Homo sapien
tcaggtttgccaaggtcaaggaaca

SEQ ID NO: 5294984 - DNA, 25 bp, Homo sapien
tagaactatgtctgccagtccagtc

SEQ ID NO: 5294985 - DNA, 25 bp, Homo sapien
tcatttctgcccatgacggtccagc

SEQ ID NO: 5294986 - DNA, 25 bp, Homo sapien
tcaaggaacaagttccctggctcca

SEQ ID NO: 5294987 - DNA, 25 bp, Homo sapien
gccagtggtcccaactcagtgaggt

SEQ ID NO: 5294988 - DNA, 25 bp, Homo sapien
tcctttcagcatggcctgcggggag

SEQ ID NO: 5294989 - DNA, 25 bp, Homo sapien
cttcctttcagcatggcctgcgggg

SEQ ID NO: 5294990 - DNA, 25 bp, Homo sapien
ccagcagacagagactttctgccat

SEQ ID NO: 5294991 - DNA, 25 bp, Homo sapien
ggccatgcagagtcacatgaggaag

SEQ ID NO: 5294992 - DNA, 25 bp, Homo sapien
gaagcagcagcattggtcagaaggc

SEQ ID NO: 5294993 - DNA, 25 bp, Homo sapien
gcagcagcattggtcagaaggcaaa

SEQ ID NO: 5294994 - DNA, 25 bp, Homo sapien
catggacaagagctttattgtagct

SEQ ID NO: 5294995 - DNA, 25 bp, Homo sapien
cagtggactgaagggatgttaggtg

SEQ ID NO: 5294996 - DNA, 25 bp, Homo sapien
agtggactgaagggatgttaggtgg

SEQ ID NO: 5294997 - DNA, 25 bp, Homo sapien
tgccatcatcaccctgcacgcacag

SEQ ID NO: 5294998 - DNA, 25 bp, Homo sapien
gccatcatcaccctgcacgcacagc

SEQ ID NO: 5294999 - DNA, 25 bp, Homo sapien
ggtacaagtcactgttctatgagtg

SEQ ID NO: 5295000 - DNA, 25 bp, Homo sapien
actgttctatgagtgccttttcccc

SEQ ID NO: 5295001 - DNA, 25 bp, Homo sapien
gtcactgttctatgagtgccttttc

SEQ ID NO: 5295002 - DNA, 25 bp, Homo sapien
caagtcactgttctatgagtgcctt

SEQ ID NO: 5295003 - DNA, 25 bp, Homo sapien
tcagaacagggctatttggatgtca

SEQ ID NO: 5295004 - DNA, 25 bp, Homo sapien
cagaacagggctatttggatgtcat

SEQ ID NO: 5295005 - DNA, 25 bp, Homo sapien
ggaaaggacattgctcaggtggtca

SEQ ID NO: 5295006 - DNA, 25 bp, Homo sapien
cacttgctcagcagtcagagatgtc

SEQ ID NO: 5295007 - DNA, 25 bp, Homo sapien
cagcagtcagagatgtcatgaggga

SEQ ID NO: 5295008 - DNA, 25 bp, Homo sapien
gctcaggtggtcaaaggacctgctg

SEQ ID NO: 5295009 - DNA, 25 bp, Homo sapien
ttcttcatcaatgaccggcacctgc

SEQ ID NO: 5295010 - DNA, 25 bp, Homo sapien
tatggtcacgacaagatctggcgag

SEQ ID NO: 5295011 - DNA, 25 bp, Homo sapien
gatctggcgagccaatgcctccttc

SEQ ID NO: 5295012 - DNA, 25 bp, Homo sapien
aatgaccggcacctgcagggtgtga

SEQ ID NO: 5295013 - DNA, 25 bp, Homo sapien
ctaggtaggaaagccatggttcatc

SEQ ID NO: 5295014 - DNA, 25 bp, Homo sapien
gccatggttcatcatacacaggcct

SEQ ID NO: 5295015 - DNA, 25 bp, Homo sapien
tcatcatacacaggcctccagcaaa

SEQ ID NO: 5295016 - DNA, 25 bp, Homo sapien
gttcatcatacacaggcctccagca

SEQ ID NO: 5295017 - DNA, 25 bp, Homo sapien
ggactctcatttctgaccccagtga

SEQ ID NO: 5295018 - DNA, 25 bp, Homo sapien
ttcagggagggccaatgcctggact

SEQ ID NO: 5295019 - DNA, 25 bp, Homo sapien
ctgaccccagtgacagaagccggtg

SEQ ID NO: 5295020 - DNA, 25 bp, Homo sapien
gacagaagccggtgccttctggtca

SEQ ID NO: 5295021 - DNA, 25 bp, Homo sapien
tcccgtcggtgtttacgctaggagc

SEQ ID NO: 5295022 - DNA, 25 bp, Homo sapien
taaatcccatgcactaaaacgtctc

SEQ ID NO: 5295023 - DNA, 25 bp, Homo sapien
tcctgcgacctcagcgggtctggga

SEQ ID NO: 5295024 - DNA, 25 bp, Homo sapien
gaggtctgaccctgttaaatcccat

SEQ ID NO: 5295025 - DNA, 25 bp, Homo sapien
cttcttttttctttaaagcatccat

SEQ ID NO: 5295026 - DNA, 25 bp, Homo sapien
cccatctctacagtcagtccaataa

SEQ ID NO: 5295027 - DNA, 25 bp, Homo sapien
aactccttgtgctatccctttactg

SEQ ID NO: 5295028 - DNA, 25 bp, Homo sapien
tgaaagttcttagtacatagaggca

SEQ ID NO: 5295029 - DNA, 25 bp, Homo sapien
aatagttttgactgggcgaagtggc

SEQ ID NO: 5295030 - DNA, 25 bp, Homo sapien
ggccactgatttcggatgatattct

SEQ ID NO: 5295031 - DNA, 25 bp, Homo sapien
tgatttcggatgatattctttaaca

SEQ ID NO: 5295032 - DNA, 25 bp, Homo sapien
gttgggccactgatttcggatgata

SEQ ID NO: 5295033 - DNA, 25 bp, Homo sapien
ttagttgggccactgatttcggatg

SEQ ID NO: 5295034 - DNA, 25 bp, Homo sapien
atttctctttttcctttggcattca

SEQ ID NO: 5295035 - DNA, 25 bp, Homo sapien
tttctctttttcctttggcattcat

SEQ ID NO: 5295036 - DNA, 25 bp, Homo sapien
catgcactctctgtttggatccaga

SEQ ID NO: 5295037 - DNA, 25 bp, Homo sapien
gataccagcgtctgtcagtcctggg

SEQ ID NO: 5295038 - DNA, 25 bp, Homo sapien
taatgtggttgtgatcctctggctg

SEQ ID NO: 5295039 - DNA, 25 bp, Homo sapien
cagagcaggctcttaacaaaatcaa

SEQ ID NO: 5295040 - DNA, 25 bp, Homo sapien
aatagttattaatctctcaccacgc

SEQ ID NO: 5295041 - DNA, 25 bp, Homo sapien
gagtttgtgttagataacaccttag

SEQ ID NO: 5295042 - DNA, 25 bp, Homo sapien
tttggaggtcagatatttgctctgt

SEQ ID NO: 5295043 - DNA, 25 bp, Homo sapien
tatctgtgattcaggcatctactgg

SEQ ID NO: 5295044 - DNA, 25 bp, Homo sapien
catgttatatgagatgttcctggac

SEQ ID NO: 5295045 - DNA, 25 bp, Homo sapien
tctggtagaatgctggatgtcaagg

SEQ ID NO: 5295046 - DNA, 25 bp, Homo sapien
gagatcttggctgcccaaaggttat

SEQ ID NO: 5295047 - DNA, 25 bp, Homo sapien
taaggttgactggatatgtctcatc

SEQ ID NO: 5295048 - DNA, 25 bp, Homo sapien
taaagagcttagctcagtaccgaga

SEQ ID NO: 5295049 - DNA, 25 bp, Homo sapien
tgcttcgggattactgtcaggaaca

SEQ ID NO: 5295050 - DNA, 25 bp, Homo sapien
agtaccgagaccaccctagtagtgt

SEQ ID NO: 5295051 - DNA, 25 bp, Homo sapien
tagccaagactagatatcacagatg

SEQ ID NO: 5295052 - DNA, 25 bp, Homo sapien
ttaatattcatagaccaaactgggc

SEQ ID NO: 5295053 - DNA, 25 bp, Homo sapien
taatattcatagaccaaactgggca

SEQ ID NO: 5295054 - DNA, 25 bp, Homo sapien
cttaatattcatagaccaaactggg

SEQ ID NO: 5295055 - DNA, 25 bp, Homo sapien
acttaatattcatagaccaaactgg

SEQ ID NO: 5295056 - DNA, 25 bp, Homo sapien
ggaaaggcattctagcatgtggaac

SEQ ID NO: 5295057 - DNA, 25 bp, Homo sapien
gaaagagagtgccatgaaagcaaaa

SEQ ID NO: 5295058 - DNA, 25 bp, Homo sapien
tgtatggtaggaccctgagtcagta

SEQ ID NO: 5295059 - DNA, 25 bp, Homo sapien
tatacactcacactttcagttgagg

SEQ ID NO: 5295060 - DNA, 25 bp, Homo sapien
gaaagaaggtaccttggagtcagga

SEQ ID NO: 5295061 - DNA, 25 bp, Homo sapien
aagtcaggctgagattcttaactgg

SEQ ID NO: 5295062 - DNA, 25 bp, Homo sapien
tgagggataacaggccaagtcaggc

SEQ ID NO: 5295063 - DNA, 25 bp, Homo sapien
agattcttaactggtctgggctctg

SEQ ID NO: 5295064 - DNA, 25 bp, Homo sapien
tgaaccgcttagcagaccacttgaa

SEQ ID NO: 5295065 - DNA, 25 bp, Homo sapien
tcatctgggtcagctgagggaagtg

SEQ ID NO: 5295066 - DNA, 25 bp, Homo sapien
gttcatgaaccgcttagcagaccac

SEQ ID NO: 5295067 - DNA, 25 bp, Homo sapien
catgaaccgcttagcagaccacttg

SEQ ID NO: 5295068 - DNA, 25 bp, Homo sapien
ttttttcaagctggtgggactccca

SEQ ID NO: 5295069 - DNA, 25 bp, Homo sapien
tttttcaagctggtgggactcccat

SEQ ID NO: 5295070 - DNA, 25 bp, Homo sapien
gagccgtgtctgcactgatggaaat

SEQ ID NO: 5295071 - DNA, 25 bp, Homo sapien
ttttcaagctggtgggactcccatg

SEQ ID NO: 5295072 - DNA, 25 bp, Homo sapien
tattgattgcaagacacattgtcac

SEQ ID NO: 5295073 - DNA, 25 bp, Homo sapien
aaatgtcagcttgcacttaaagtga

SEQ ID NO: 5295074 - DNA, 25 bp, Homo sapien
tttgtttgatacacctaagccctgc

SEQ ID NO: 5295075 - DNA, 25 bp, Homo sapien
ttttacaggaggaattgaagggtgc

SEQ ID NO: 5295076 - DNA, 25 bp, Homo sapien
gctccagaccaccagatctgctttc

SEQ ID NO: 5295077 - DNA, 25 bp, Homo sapien
ctcaccctggcattagtcagtaaac

SEQ ID NO: 5295078 - DNA, 25 bp, Homo sapien
gtaaacctctataaggtatctgcat

SEQ ID NO: 5295079 - DNA, 25 bp, Homo sapien
cattagtcagtaaacctctataagg

SEQ ID NO: 5295080 - DNA, 25 bp, Homo sapien
ttaaattgtcttgccactaggtaag

SEQ ID NO: 5295081 - DNA, 25 bp, Homo sapien
tcttcgcttttagaggctgacccct

SEQ ID NO: 5295082 - DNA, 25 bp, Homo sapien
ccaggccagctacaacagataattt

SEQ ID NO: 5295083 - DNA, 25 bp, Homo sapien
gatgtcacctaagtctcattatccg

SEQ ID NO: 5295084 - DNA, 25 bp, Homo sapien
gacagtgacctacccaataattgca

SEQ ID NO: 5295085 - DNA, 25 bp, Homo sapien
gaaagcactggttgaggctgaacac

SEQ ID NO: 5295086 - DNA, 25 bp, Homo sapien
tgttggtaatggagccggtctgccc

SEQ ID NO: 5295087 - DNA, 25 bp, Homo sapien
gctgtttctgatcctgctgggagca

SEQ ID NO: 5295088 - DNA, 25 bp, Homo sapien
taagatcattatgtgcaaaacacca

SEQ ID NO: 5295089 - DNA, 25 bp, Homo sapien
gaaaatggttttgctacctgataag

SEQ ID NO: 5295090 - DNA, 25 bp, Homo sapien
aaaataactcacagaatggccttag

SEQ ID NO: 5295091 - DNA, 25 bp, Homo sapien
gccctaaagttatcctgtacctgca

SEQ ID NO: 5295092 - DNA, 25 bp, Homo sapien
gaggaatagggagtagctgcaaaca

SEQ ID NO: 5295093 - DNA, 25 bp, Homo sapien
cagatggttttagccataaaccggg

SEQ ID NO: 5295094 - DNA, 25 bp, Homo sapien
aggaatagggagtagctgcaaacac

SEQ ID NO: 5295095 - DNA, 25 bp, Homo sapien
ctttcacacagatggttttagccat

SEQ ID NO: 5295096 - DNA, 25 bp, Homo sapien
tcttgggtgctgtatcaatttcttg

SEQ ID NO: 5295097 - DNA, 25 bp, Homo sapien
cttgggtgctgtatcaatttcttga

SEQ ID NO: 5295098 - DNA, 25 bp, Homo sapien
ttgggtgctgtatcaatttcttgag

SEQ ID NO: 5295099 - DNA, 25 bp, Homo sapien
ctcttgggtgctgtatcaatttctt

SEQ ID NO: 5295100 - DNA, 25 bp, Homo sapien
tcatttggttctggccagtgctggt

SEQ ID NO: 5295101 - DNA, 25 bp, Homo sapien
gagggcagctgtgtctacctttagc

SEQ ID NO: 5295102 - DNA, 25 bp, Homo sapien
catagatggtgcacaaggttttctg

SEQ ID NO: 5295103 - DNA, 25 bp, Homo sapien
gatgaggtggtcttctctgcataga

SEQ ID NO: 5295104 - DNA, 25 bp, Homo sapien
tccgtgtatagcaacgcattttgca

SEQ ID NO: 5295105 - DNA, 25 bp, Homo sapien
tcggcacattctggccgtagcacct

SEQ ID NO: 5295106 - DNA, 25 bp, Homo sapien
taaacttgtccgtttgaatcaccat

SEQ ID NO: 5295107 - DNA, 25 bp, Homo sapien
ttcactttcttctccgtgtatagca

SEQ ID NO: 5295108 - DNA, 25 bp, Homo sapien
aggtgtatgccaccaggcccggcaa

SEQ ID NO: 5295109 - DNA, 25 bp, Homo sapien
tgtatgccaccaggcccggcaaaat

SEQ ID NO: 5295110 - DNA, 25 bp, Homo sapien
gtgtatgccaccaggcccggcaaaa

SEQ ID NO: 5295111 - DNA, 25 bp, Homo sapien
tatgccaccaggcccggcaaaattt

SEQ ID NO: 5295112 - DNA, 25 bp, Homo sapien
tccacattccccacgtcggaactgt

SEQ ID NO: 5295113 - DNA, 25 bp, Homo sapien
gttggcttcagcagcggcccattcc

SEQ ID NO: 5295114 - DNA, 25 bp, Homo sapien
tcccaggttggcttcagcagcggcc

SEQ ID NO: 5295115 - DNA, 25 bp, Homo sapien
cagcatgtccaaggacataaattcc

SEQ ID NO: 5295116 - DNA, 25 bp, Homo sapien
tctgcgtgggaatcctgcttcaggg

SEQ ID NO: 5295117 - DNA, 25 bp, Homo sapien
agctctgcgtgggaatcctgcttca

SEQ ID NO: 5295118 - DNA, 25 bp, Homo sapien
gcgtgggaatcctgcttcagggcca

SEQ ID NO: 5295119 - DNA, 25 bp, Homo sapien
ggaatcctgcttcagggccagcggc

SEQ ID NO: 5295120 - DNA, 25 bp, Homo sapien
gaggagaaagatgtcggtcacattc

SEQ ID NO: 5295121 - DNA, 25 bp, Homo sapien
cacactcaggtaaccgtctctggga

SEQ ID NO: 5295122 - DNA, 25 bp, Homo sapien
gacgtaatctcacagtgcagctgga

SEQ ID NO: 5295123 - DNA, 25 bp, Homo sapien
ttgtgtatctgacacacaagctgcc

SEQ ID NO: 5295124 - DNA, 25 bp, Homo sapien
cagtcagaattgttgagggacaggg

SEQ ID NO: 5295125 - DNA, 25 bp, Homo sapien
cagaattgttgagggacagggagtc

SEQ ID NO: 5295126 - DNA, 25 bp, Homo sapien
gaattgttgagggacagggagtccc

SEQ ID NO: 5295127 - DNA, 25 bp, Homo sapien
tcagaattgttgagggacagggagt

SEQ ID NO: 5295128 - DNA, 25 bp, Homo sapien
aggctccagcgcagtgggcaggtgc

SEQ ID NO: 5295129 - DNA, 25 bp, Homo sapien
gctccactcccactagtggctcctc

SEQ ID NO: 5295130 - DNA, 25 bp, Homo sapien
ggtagtggagactggctttgattcc

SEQ ID NO: 5295131 - DNA, 25 bp, Homo sapien
caggtgagatgctggaacccactcg

SEQ ID NO: 5295132 - DNA, 25 bp, Homo sapien
tatacgatgtggataactgtttcct

SEQ ID NO: 5295133 - DNA, 25 bp, Homo sapien
ctttcatccatatacgatgtggata

SEQ ID NO: 5295134 - DNA, 25 bp, Homo sapien
tcatccatatacgatgtggataact

SEQ ID NO: 5295135 - DNA, 25 bp, Homo sapien
tccatatacgatgtggataactgtt

SEQ ID NO: 5295136 - DNA, 25 bp, Homo sapien
tctgagaagatctgtcggctctgag

SEQ ID NO: 5295137 - DNA, 25 bp, Homo sapien
tgagagccggggcatagcccagcca

SEQ ID NO: 5295138 - DNA, 25 bp, Homo sapien
cctggtgagatcattgtggagcaga

SEQ ID NO: 5295139 - DNA, 25 bp, Homo sapien
tgtgcctggtgagatcattgtggag

SEQ ID NO: 5295140 - DNA, 25 bp, Homo sapien
tagaaaccatgcagtacggacagat

SEQ ID NO: 5295141 - DNA, 25 bp, Homo sapien
catattggaaggcaccaaggtcttc

SEQ ID NO: 5295142 - DNA, 25 bp, Homo sapien
caggattcaagtggcagaaagccca

SEQ ID NO: 5295143 - DNA, 25 bp, Homo sapien
tttgagggctcgcagagtgtgacca

SEQ ID NO: 5295144 - DNA, 25 bp, Homo sapien
gcagctgaaatggaggcagcccttg

SEQ ID NO: 5295145 - DNA, 25 bp, Homo sapien
gaggcagcccttggctgtaacatcc

SEQ ID NO: 5295146 - DNA, 25 bp, Homo sapien
cttggcagctgaaatggaggcagcc

SEQ ID NO: 5295147 - DNA, 25 bp, Homo sapien
ggcagcccttggctgtaacatccat

SEQ ID NO: 5295148 - DNA, 25 bp, Homo sapien
gctgttaattgctgcccctcgctga

SEQ ID NO: 5295149 - DNA, 25 bp, Homo sapien
ctgttaattgctgcccctcgctgat

SEQ ID NO: 5295150 - DNA, 25 bp, Homo sapien
ggctgttaattgctgcccctcgctg

SEQ ID NO: 5295151 - DNA, 25 bp, Homo sapien
ctcgctgatgattgcggagtagaat

SEQ ID NO: 5295152 - DNA, 25 bp, Homo sapien
agctgcaacaattctgaccatcggg

SEQ ID NO: 5295153 - DNA, 25 bp, Homo sapien
cacattccacttggtcaaagagcct

SEQ ID NO: 5295154 - DNA, 25 bp, Homo sapien
tttggaccttggaggatttgaagct

SEQ ID NO: 5295155 - DNA, 25 bp, Homo sapien
ttgaatgggcaggaatctttggacc

SEQ ID NO: 5295156 - DNA, 25 bp, Homo sapien
cactgctgtactcattattgaccat

SEQ ID NO: 5295157 - DNA, 25 bp, Homo sapien
gccactgctgtactcattattgacc

SEQ ID NO: 5295158 - DNA, 25 bp, Homo sapien
ccactgctgtactcattattgacca

SEQ ID NO: 5295159 - DNA, 25 bp, Homo sapien
tattctgcaaacacccagtggacag

SEQ ID NO: 5295160 - DNA, 25 bp, Homo sapien
gatttatcacaaccaccatactggg

SEQ ID NO: 5295161 - DNA, 25 bp, Homo sapien
ccttttccagggcaacgtaggctga

SEQ ID NO: 5295162 - DNA, 25 bp, Homo sapien
cacccgagggtggtcaaagtggctc

SEQ ID NO: 5295163 - DNA, 25 bp, Homo sapien
tggggccccattccaaagatgctgt

SEQ ID NO: 5295164 - DNA, 25 bp, Homo sapien
ctccttcctttgagtgaccatggaa

SEQ ID NO: 5295165 - DNA, 25 bp, Homo sapien
tctggatcatcccacagtaaaggaa

SEQ ID NO: 5295166 - DNA, 25 bp, Homo sapien
tggccccttaatggatgaccctacc

SEQ ID NO: 5295167 - DNA, 25 bp, Homo sapien
gttcatatcatagcccattttagca

SEQ ID NO: 5295168 - DNA, 25 bp, Homo sapien
agttcatatcatagcccattttagc

SEQ ID NO: 5295169 - DNA, 25 bp, Homo sapien
aagcttgagttcatatcatagccca

SEQ ID NO: 5295170 - DNA, 25 bp, Homo sapien
ccaggtgtatgcttgccaatggtgt

SEQ ID NO: 5295171 - DNA, 25 bp, Homo sapien
cccttggagtgtacatgtcggtttc

SEQ ID NO: 5295172 - DNA, 25 bp, Homo sapien
tgctgcatagcgctggtccttggac

SEQ ID NO: 5295173 - DNA, 25 bp, Homo sapien
tctctgtctagtgttggatcttctg

SEQ ID NO: 5295174 - DNA, 25 bp, Homo sapien
actttattgcagattacatgacttt

SEQ ID NO: 5295175 - DNA, 25 bp, Homo sapien
taatttttattgctgtacactagca

SEQ ID NO: 5295176 - DNA, 25 bp, Homo sapien
atatataaaattctaaggaagccct

SEQ ID NO: 5295177 - DNA, 25 bp, Homo sapien
gctgtacactagcaatgaaaatctg

SEQ ID NO: 5295178 - DNA, 25 bp, Homo sapien
gaaaaatgaagagacgcatggaaca

SEQ ID NO: 5295179 - DNA, 25 bp, Homo sapien
gatttctcagctataccaccaaaaa

SEQ ID NO: 5295180 - DNA, 25 bp, Homo sapien
caatcaacaaagtgtgatactggca

SEQ ID NO: 5295181 - DNA, 25 bp, Homo sapien
gcaactggtgctgggacaaatgaat

SEQ ID NO: 5295182 - DNA, 25 bp, Homo sapien
agaatttccgtatgatccagcagtt

SEQ ID NO: 5295183 - DNA, 25 bp, Homo sapien
taactatacacccaattgaaataaa

SEQ ID NO: 5295184 - DNA, 25 bp, Homo sapien
ccagcagttccactcataactatac

SEQ ID NO: 5295185 - DNA, 25 bp, Homo sapien
agcagttccactcataactatacac

SEQ ID NO: 5295186 - DNA, 25 bp, Homo sapien
gaatcgcgaccctgtacggagaaaa

SEQ ID NO: 5295187 - DNA, 25 bp, Homo sapien
aaaaggtagtaagagagaatccagt

SEQ ID NO: 5295188 - DNA, 25 bp, Homo sapien
gaagcgctcctgtggctgatgatag

SEQ ID NO: 5295189 - DNA, 25 bp, Homo sapien
gatgataggcattagtgaaagaaac

SEQ ID NO: 5295190 - DNA, 25 bp, Homo sapien
tattggcacatagagaatggtcacc

SEQ ID NO: 5295191 - DNA, 25 bp, Homo sapien
tagaaagcatcaagcgttcatcagg

SEQ ID NO: 5295192 - DNA, 25 bp, Homo sapien
tcggctgcgtgaagaactgtatact

SEQ ID NO: 5295193 - DNA, 25 bp, Homo sapien
gatattgatcacaggtcggctgcgt

SEQ ID NO: 5295194 - DNA, 25 bp, Homo sapien
gccatgggtctgctttcctctttgc

SEQ ID NO: 5295195 - DNA, 25 bp, Homo sapien
ctgagccatgggtctgctttcctct

SEQ ID NO: 5295196 - DNA, 25 bp, Homo sapien
gagccatgggtctgctttcctcttt

SEQ ID NO: 5295197 - DNA, 25 bp, Homo sapien
ccatgggtctgctttcctctttgct

SEQ ID NO: 5295198 - DNA, 25 bp, Homo sapien
cagttgtacatgaccaggctcatcc

SEQ ID NO: 5295199 - DNA, 25 bp, Homo sapien
agttgtacatgaccaggctcatcca

SEQ ID NO: 5295200 - DNA, 25 bp, Homo sapien
tcagttgtacatgaccaggctcatc

SEQ ID NO: 5295201 - DNA, 25 bp, Homo sapien
tacaacaattctttacacttgttag

SEQ ID NO: 5295202 - DNA, 25 bp, Homo sapien
tcattacaacaattctttacacttg

SEQ ID NO: 5295203 - DNA, 25 bp, Homo sapien
cattacaacaattctttacacttgt

SEQ ID NO: 5295204 - DNA, 25 bp, Homo sapien
aaataagcatcatcattacaacaat

SEQ ID NO: 5295205 - DNA, 25 bp, Homo sapien
tttctgtcaggtagagtccttttcc

SEQ ID NO: 5295206 - DNA, 25 bp, Homo sapien
gtcaggtagagtccttttccatcct

SEQ ID NO: 5295207 - DNA, 25 bp, Homo sapien
ttccatccttagagaggttgcggaa

SEQ ID NO: 5295208 - DNA, 25 bp, Homo sapien
tctgtcaggtagagtccttttccat

SEQ ID NO: 5295209 - DNA, 25 bp, Homo sapien
gaagctgaccctgccgacgctgtcg

SEQ ID NO: 5295210 - DNA, 25 bp, Homo sapien
gggaagctgaccctgccgacgctgt

SEQ ID NO: 5295211 - DNA, 25 bp, Homo sapien
ttgccatggcttcaagccgcatcag

SEQ ID NO: 5295212 - DNA, 25 bp, Homo sapien
cttcaagccgcatcaggaagcagac

SEQ ID NO: 5295213 - DNA, 25 bp, Homo sapien
agctcacggctgatgaagatccctc

SEQ ID NO: 5295214 - DNA, 25 bp, Homo sapien
tcacggctgatgaagatccctctga

SEQ ID NO: 5295215 - DNA, 25 bp, Homo sapien
gctcacggctgatgaagatccctct

SEQ ID NO: 5295216 - DNA, 25 bp, Homo sapien
gcagctcacggctgatgaagatccc

SEQ ID NO: 5295217 - DNA, 25 bp, Homo sapien
aggaggactccagggcttgtctgaa

SEQ ID NO: 5295218 - DNA, 25 bp, Homo sapien
gccttccacaagtccgagctcagga

SEQ ID NO: 5295219 - DNA, 25 bp, Homo sapien
gcgcaaactcctcttggtctagccg

SEQ ID NO: 5295220 - DNA, 25 bp, Homo sapien
tggtctagccgcccattcactttca

SEQ ID NO: 5295221 - DNA, 25 bp, Homo sapien
aaggcgcttccacagtcgcgcaaac

SEQ ID NO: 5295222 - DNA, 25 bp, Homo sapien
ctggtagtgaacaaggcgcttccac

SEQ ID NO: 5295223 - DNA, 25 bp, Homo sapien
gagtgaaccagccagcgtgcaaggt

SEQ ID NO: 5295224 - DNA, 25 bp, Homo sapien
accagccagcgtgcaaggtgcagag

SEQ ID NO: 5295225 - DNA, 25 bp, Homo sapien
aggagttaagagtgaaccagccagc

SEQ ID NO: 5295226 - DNA, 25 bp, Homo sapien
gttaagagtgaaccagccagcgtgc

SEQ ID NO: 5295227 - DNA, 25 bp, Homo sapien
tcttgtttcacaatggccggcttca

SEQ ID NO: 5295228 - DNA, 25 bp, Homo sapien
cagccttgtcaacggtgcaggagcg

SEQ ID NO: 5295229 - DNA, 25 bp, Homo sapien
cgggcctggagtgagtctctgaact

SEQ ID NO: 5295230 - DNA, 25 bp, Homo sapien
tcctacacttgtagccacgggcctg

SEQ ID NO: 5295231 - DNA, 25 bp, Homo sapien
accaagctgcggcactcatctaagg

SEQ ID NO: 5295232 - DNA, 25 bp, Homo sapien
aagctgcggcactcatctaaggaga

SEQ ID NO: 5295233 - DNA, 25 bp, Homo sapien
caagctgcggcactcatctaaggag

SEQ ID NO: 5295234 - DNA, 25 bp, Homo sapien
ctgcggcactcatctaaggagaaca

SEQ ID NO: 5295235 - DNA, 25 bp, Homo sapien
gctgggtggcatcaatgtccagcct

SEQ ID NO: 5295236 - DNA, 25 bp, Homo sapien
ttggtctcaggcatcctaatccggc

SEQ ID NO: 5295237 - DNA, 25 bp, Homo sapien
ccgtgcccggcaaccattgtattag

SEQ ID NO: 5295238 - DNA, 25 bp, Homo sapien
ccctctatgaggaggaacttggctg

SEQ ID NO: 5295239 - DNA, 25 bp, Homo sapien
tgtatctggcagaatgccacactgg

SEQ ID NO: 5295240 - DNA, 25 bp, Homo sapien
ggcccctgggtgctaggtaccatac

SEQ ID NO: 5295241 - DNA, 25 bp, Homo sapien
acgtctctaccgagcttggcagcca

SEQ ID NO: 5295242 - DNA, 25 bp, Homo sapien
ttctgaagctggctagctcccggga

SEQ ID NO: 5295243 - DNA, 25 bp, Homo sapien
ccacagcagttctggagacgatcca

SEQ ID NO: 5295244 - DNA, 25 bp, Homo sapien
tgctttgttgggagccatgttctga

SEQ ID NO: 5295245 - DNA, 25 bp, Homo sapien
gagcatatctgttgaaaatgctttg

SEQ ID NO: 5295246 - DNA, 25 bp, Homo sapien
tttgttgggagccatgttctgaagg

SEQ ID NO: 5295247 - DNA, 25 bp, Homo sapien
tgagcatatctgttgaaaatgcttt

SEQ ID NO: 5295248 - DNA, 25 bp, Homo sapien
ctggatcaaagggaaaatagtcaat

SEQ ID NO: 5295249 - DNA, 25 bp, Homo sapien
ggaaaatagtcaatgttagacttct

SEQ ID NO: 5295250 - DNA, 25 bp, Homo sapien
caaagggaaaatagtcaatgttaga

SEQ ID NO: 5295251 - DNA, 25 bp, Homo sapien
tcaatgttagacttctggggaagga

SEQ ID NO: 5295252 - DNA, 25 bp, Homo sapien
acaacccctgccaagatctgagaaa

SEQ ID NO: 5295253 - DNA, 25 bp, Homo sapien
cccctgccaagatctgagaaagagt

SEQ ID NO: 5295254 - DNA, 25 bp, Homo sapien
aacccctgccaagatctgagaaaga

SEQ ID NO: 5295255 - DNA, 25 bp, Homo sapien
cctgccaagatctgagaaagagtct

SEQ ID NO: 5295256 - DNA, 25 bp, Homo sapien
tctgaggttgaaatggctgctcagg

SEQ ID NO: 5295257 - DNA, 25 bp, Homo sapien
gaggttgaaatggctgctcaggtgc

SEQ ID NO: 5295258 - DNA, 25 bp, Homo sapien
ctgaggttgaaatggctgctcaggt

SEQ ID NO: 5295259 - DNA, 25 bp, Homo sapien
tgaggttgaaatggctgctcaggtg

SEQ ID NO: 5295260 - DNA, 25 bp, Homo sapien
tctccaagcagccctgtgcacagcc

SEQ ID NO: 5295261 - DNA, 25 bp, Homo sapien
caagcagccctgtgcacagccactt

SEQ ID NO: 5295262 - DNA, 25 bp, Homo sapien
tccaagcagccctgtgcacagccac

SEQ ID NO: 5295263 - DNA, 25 bp, Homo sapien
tgcacagccacttccctcccgccat

SEQ ID NO: 5295264 - DNA, 25 bp, Homo sapien
ggagcaagaactccgctgattttct

SEQ ID NO: 5295265 - DNA, 25 bp, Homo sapien
tttcaggaagattcggagcaagaac

SEQ ID NO: 5295266 - DNA, 25 bp, Homo sapien
gtcactgtctggcattttcaggaag

SEQ ID NO: 5295267 - DNA, 25 bp, Homo sapien
ccagggctcagatggtaagtcatgg

SEQ ID NO: 5295268 - DNA, 25 bp, Homo sapien
taaaacaggagataggccactgccc

SEQ ID NO: 5295269 - DNA, 25 bp, Homo sapien
gctatgccttgcagggaaaacggga

SEQ ID NO: 5295270 - DNA, 25 bp, Homo sapien
catttcgaatggttatgcagcagga

SEQ ID NO: 5295271 - DNA, 25 bp, Homo sapien
gagggtggcatctccaacgcgattc

SEQ ID NO: 5295272 - DNA, 25 bp, Homo sapien
caaacgttacttatatctgtgataa

SEQ ID NO: 5295273 - DNA, 25 bp, Homo sapien
tacaaacgttacttatatctgtgat

SEQ ID NO: 5295274 - DNA, 25 bp, Homo sapien
aacgttacttatatctgtgataaca

SEQ ID NO: 5295275 - DNA, 25 bp, Homo sapien
attttacaaacgttacttatatctg

SEQ ID NO: 5295276 - DNA, 25 bp, Homo sapien
gctgggtgtcaagatttcctctgat

SEQ ID NO: 5295277 - DNA, 25 bp, Homo sapien
ccatgcttgtggatagatttggtga

SEQ ID NO: 5295278 - DNA, 25 bp, Homo sapien
catgcttgtggatagatttggtgat

SEQ ID NO: 5295279 - DNA, 25 bp, Homo sapien
tgatctgctgggtgtcaagatttcc

SEQ ID NO: 5295280 - DNA, 25 bp, Homo sapien
gaaaggtgtggttactcttcacagc

SEQ ID NO: 5295281 - DNA, 25 bp, Homo sapien
cagaacctggcgcaaatgtaagctc

SEQ ID NO: 5295282 - DNA, 25 bp, Homo sapien
caatgatgatcgcactgaaaggaag

SEQ ID NO: 5295283 - DNA, 25 bp, Homo sapien
gaggtattctttggtcagccctgaa

SEQ ID NO: 5295284 - DNA, 25 bp, Homo sapien
tggcctcagggtagccaagcagaag

SEQ ID NO: 5295285 - DNA, 25 bp, Homo sapien
atgccagccaccagacgatgactcg

SEQ ID NO: 5295286 - DNA, 25 bp, Homo sapien
caagcagaagtttgcatgccagcca

SEQ ID NO: 5295287 - DNA, 25 bp, Homo sapien
agacactgggatctacttgagtggg

SEQ ID NO: 5295288 - DNA, 25 bp, Homo sapien
ggaaatcgagtggaaattttgcatc

SEQ ID NO: 5295289 - DNA, 25 bp, Homo sapien
aatcgagtggaaattttgcatcttc

SEQ ID NO: 5295290 - DNA, 25 bp, Homo sapien
cagaatcacttggaaatcgagtgga

SEQ ID NO: 5295291 - DNA, 25 bp, Homo sapien
tcacttggaaatcgagtggaaattt

SEQ ID NO: 5295292 - DNA, 25 bp, Homo sapien
tgtgacgcacacgacaacattggtg

SEQ ID NO: 5295293 - DNA, 25 bp, Homo sapien
cacgacaacattggtgccttccatt

SEQ ID NO: 5295294 - DNA, 25 bp, Homo sapien
tcttgcacagagaagttgaattgag

SEQ ID NO: 5295295 - DNA, 25 bp, Homo sapien
gaattgagcatcattccgaggtcct

SEQ ID NO: 5295296 - DNA, 25 bp, Homo sapien
gaatttcgctacatataaacatggc

SEQ ID NO: 5295297 - DNA, 25 bp, Homo sapien
cattatttgggaccatccttcgtgg

SEQ ID NO: 5295298 - DNA, 25 bp, Homo sapien
ctgttggaaatcttgacacgacatc

SEQ ID NO: 5295299 - DNA, 25 bp, Homo sapien
tgtttccatggtccagggtaattgg

SEQ ID NO: 5295300 - DNA, 25 bp, Homo sapien
cagcagctttatcatttactgccat

SEQ ID NO: 5295301 - DNA, 25 bp, Homo sapien
gcagcagctttatcatttactgcca

SEQ ID NO: 5295302 - DNA, 25 bp, Homo sapien
tggcagcagctttatcatttactgc

SEQ ID NO: 5295303 - DNA, 25 bp, Homo sapien
ctggcagcagctttatcatttactg

SEQ ID NO: 5295304 - DNA, 25 bp, Homo sapien
tttccgcggatcacaggtttcctcc

SEQ ID NO: 5295305 - DNA, 25 bp, Homo sapien
tcttcccgtttcttatgtagctggc

SEQ ID NO: 5295306 - DNA, 25 bp, Homo sapien
actcgccatcttcccgtttcttatg

SEQ ID NO: 5295307 - DNA, 25 bp, Homo sapien
tgtagctggcttttccgcggatcac

SEQ ID NO: 5295308 - DNA, 25 bp, Homo sapien
accatccggtgctctccatccatct

SEQ ID NO: 5295309 - DNA, 25 bp, Homo sapien
ttagaccatccggtgctctccatcc

SEQ ID NO: 5295310 - DNA, 25 bp, Homo sapien
ccatccggtgctctccatccatctc

SEQ ID NO: 5295311 - DNA, 25 bp, Homo sapien
agaccatccggtgctctccatccat

SEQ ID NO: 5295312 - DNA, 25 bp, Homo sapien
ggttccacagggagataatttcttc

SEQ ID NO: 5295313 - DNA, 25 bp, Homo sapien
ccacagggagataatttcttcccag

SEQ ID NO: 5295314 - DNA, 25 bp, Homo sapien
gccctctccattcggcctcgcccca

SEQ ID NO: 5295315 - DNA, 25 bp, Homo sapien
cagccccaggggttccacagggaga

SEQ ID NO: 5295316 - DNA, 25 bp, Homo sapien
tgtgggaaagtgacaacaacacagc

SEQ ID NO: 5295317 - DNA, 25 bp, Homo sapien
agctgtagctgtgatatcaatctgt

SEQ ID NO: 5295318 - DNA, 25 bp, Homo sapien
gctgtgatatcaatctgtgctaatg

SEQ ID NO: 5295319 - DNA, 25 bp, Homo sapien
ccggcagccctcagcatggcgagag

SEQ ID NO: 5295320 - DNA, 25 bp, Homo sapien
tatgcccaggggaatcgccgactga

SEQ ID NO: 5295321 - DNA, 25 bp, Homo sapien
aatgccgatttcatttatcttcctg

SEQ ID NO: 5295322 - DNA, 25 bp, Homo sapien
aatcgccgactgagctaggtgcata

SEQ ID NO: 5295323 - DNA, 25 bp, Homo sapien
aaaatgccgatttcatttatcttcc

SEQ ID NO: 5295324 - DNA, 25 bp, Homo sapien
ctattggcgctcgcatgggccttgg

SEQ ID NO: 5295325 - DNA, 25 bp, Homo sapien
tattggcgctcgcatgggccttggt

SEQ ID NO: 5295326 - DNA, 25 bp, Homo sapien
ccagtcacagtgtaggcatggagac

SEQ ID NO: 5295327 - DNA, 25 bp, Homo sapien
cagccccagtcacagtgtaggcatg

SEQ ID NO: 5295328 - DNA, 25 bp, Homo sapien
gtgtaggcatggagactcaccagcc

SEQ ID NO: 5295329 - DNA, 25 bp, Homo sapien
tcacagtgtaggcatggagactcac

SEQ ID NO: 5295330 - DNA, 25 bp, Homo sapien
ggaagccatagtgcagatcggaata

SEQ ID NO: 5295331 - DNA, 25 bp, Homo sapien
cagatcggaataggatccgagcagc

SEQ ID NO: 5295332 - DNA, 25 bp, Homo sapien
gcagatggatgttggtgatcacgcc

SEQ ID NO: 5295333 - DNA, 25 bp, Homo sapien
cacttggagtggcacaggttatcag

SEQ ID NO: 5295334 - DNA, 25 bp, Homo sapien
tcctgtccccggtgagcaggcagag

SEQ ID NO: 5295335 - DNA, 25 bp, Homo sapien
gccagggacctacacgttcctgtcc

SEQ ID NO: 5295336 - DNA, 25 bp, Homo sapien
acacgttcctgtccccggtgagcag

SEQ ID NO: 5295337 - DNA, 25 bp, Homo sapien
cctacacgttcctgtccccggtgag

SEQ ID NO: 5295338 - DNA, 25 bp, Homo sapien
tgctttctaaacatgagctcacgga

SEQ ID NO: 5295339 - DNA, 25 bp, Homo sapien
tacgtatccacaacgcccatgaaac

SEQ ID NO: 5295340 - DNA, 25 bp, Homo sapien
ggaacatggcaactattcttagccc

SEQ ID NO: 5295341 - DNA, 25 bp, Homo sapien
tttgacaaggagctatctttctgct

SEQ ID NO: 5295342 - DNA, 25 bp, Homo sapien
aacaaccttggctgttatctgggct

SEQ ID NO: 5295343 - DNA, 25 bp, Homo sapien
cttcattctcaaatgctaatgagca

SEQ ID NO: 5295344 - DNA, 25 bp, Homo sapien
cattctcaaatgctaatgagcagct

SEQ ID NO: 5295345 - DNA, 25 bp, Homo sapien
caaacatgtggattggttcaacaac

SEQ ID NO: 5295346 - DNA, 25 bp, Homo sapien
tggtgctatcaccacctctagggcc

SEQ ID NO: 5295347 - DNA, 25 bp, Homo sapien
ttggactgtgacttccagaaggaca

SEQ ID NO: 5295348 - DNA, 25 bp, Homo sapien
tctagggcccaggactgcactcggc

SEQ ID NO: 5295349 - DNA, 25 bp, Homo sapien
tccagaaggacaggggtggactgtg

SEQ ID NO: 5295350 - DNA, 25 bp, Homo sapien
ccaggcttgaccaataagactccaa

SEQ ID NO: 5295351 - DNA, 25 bp, Homo sapien
gggaatcgggtggaaagcagcagaa

SEQ ID NO: 5295352 - DNA, 25 bp, Homo sapien
aactctctggattggaatcaggtac

SEQ ID NO: 5295353 - DNA, 25 bp, Homo sapien
gacagaggcacaaggccagttggcc

SEQ ID NO: 5295354 - DNA, 25 bp, Homo sapien
acgcacaaagaggcatttatctccc

SEQ ID NO: 5295355 - DNA, 25 bp, Homo sapien
ggttttggtggcgaggacgcacaaa

SEQ ID NO: 5295356 - DNA, 25 bp, Homo sapien
cctggacaggtaggcggtcatcaat

SEQ ID NO: 5295357 - DNA, 25 bp, Homo sapien
tggtggcgaggacgcacaaagaggc

SEQ ID NO: 5295358 - DNA, 25 bp, Homo sapien
gactcagcaactaaaagattatccc

SEQ ID NO: 5295359 - DNA, 25 bp, Homo sapien
tatcccttgcaaaacttaatcactt

SEQ ID NO: 5295360 - DNA, 25 bp, Homo sapien
acctatggatacacacctcagagga

SEQ ID NO: 5295361 - DNA, 25 bp, Homo sapien
aaacttaatcacttgaaaatcagat

SEQ ID NO: 5295362 - DNA, 25 bp, Homo sapien
caaaaactcgatgttagttacaggg

SEQ ID NO: 5295363 - DNA, 25 bp, Homo sapien
tacagggttctcgatcagtgactct

SEQ ID NO: 5295364 - DNA, 25 bp, Homo sapien
gggagggtaactaacacaactgtca

SEQ ID NO: 5295365 - DNA, 25 bp, Homo sapien
tcaaaatagcacgatatggcacagg

SEQ ID NO: 5295366 - DNA, 25 bp, Homo sapien
aaaatgccagcatactggtgtgaaa

SEQ ID NO: 5295367 - DNA, 25 bp, Homo sapien
tgtgaaaagctttggaccatcagga

SEQ ID NO: 5295368 - DNA, 25 bp, Homo sapien
ctggtgtgaaaagctttggaccatc

SEQ ID NO: 5295369 - DNA, 25 bp, Homo sapien
gaaaatgccagcatactggtgtgaa

SEQ ID NO: 5295370 - DNA, 25 bp, Homo sapien
agtacaggacctatcatcggcaagc

SEQ ID NO: 5295371 - DNA, 25 bp, Homo sapien
gacttggtccaaggcacggtgattt

SEQ ID NO: 5295372 - DNA, 25 bp, Homo sapien
gacactgggttcagtacagaagcca

SEQ ID NO: 5295373 - DNA, 25 bp, Homo sapien
caggcaggctctattgacttggtcc

SEQ ID NO: 5295374 - DNA, 25 bp, Homo sapien
cctgctcattgcaggctgcaggact

SEQ ID NO: 5295375 - DNA, 25 bp, Homo sapien
agcagtttgtccacggcagcaccaa

SEQ ID NO: 5295376 - DNA, 25 bp, Homo sapien
acggcagcaccaagggaactggcct

SEQ ID NO: 5295377 - DNA, 25 bp, Homo sapien
gcaggactgggcgtgagcagtttgt

SEQ ID NO: 5295378 - DNA, 25 bp, Homo sapien
aagtgaggaggaccccctggtagat

SEQ ID NO: 5295379 - DNA, 25 bp, Homo sapien
tccttgttggatgtcaaatctgctt

SEQ ID NO: 5295380 - DNA, 25 bp, Homo sapien
gatgtcaaatctgcttatatcatcc

SEQ ID NO: 5295381 - DNA, 25 bp, Homo sapien
atgaagtgaggaggaccccctggta

SEQ ID NO: 5295382 - DNA, 25 bp, Homo sapien
tccttaacttctaacacacatagtg

SEQ ID NO: 5295383 - DNA, 25 bp, Homo sapien
gccgcagtccccttgtgtgaggagc

SEQ ID NO: 5295384 - DNA, 25 bp, Homo sapien
cttctaacacacatagtgcctgcca

SEQ ID NO: 5295385 - DNA, 25 bp, Homo sapien
tctggaaggccgcagtccccttgtg

SEQ ID NO: 5295386 - DNA, 25 bp, Homo sapien
agccagccctctagacttggccagg

SEQ ID NO: 5295387 - DNA, 25 bp, Homo sapien
cagccagccctctagacttggccag

SEQ ID NO: 5295388 - DNA, 25 bp, Homo sapien
gccagccctctagacttggccagga

SEQ ID NO: 5295389 - DNA, 25 bp, Homo sapien
ccaggatgacctcggcctcctctct

SEQ ID NO: 5295390 - DNA, 25 bp, Homo sapien
ctggctgcaaggtagaggtagtggc

SEQ ID NO: 5295391 - DNA, 25 bp, Homo sapien
aaaattctcttacaggtggtcgagc

SEQ ID NO: 5295392 - DNA, 25 bp, Homo sapien
tgcaaggtagaggtagtggccatct

SEQ ID NO: 5295393 - DNA, 25 bp, Homo sapien
ttctcttacaggtggtcgagcctct

SEQ ID NO: 5295394 - DNA, 25 bp, Homo sapien
tgtggccgcttccatatcacattgg

SEQ ID NO: 5295395 - DNA, 25 bp, Homo sapien
gatcccgcaaggtggtaaagtcctg

SEQ ID NO: 5295396 - DNA, 25 bp, Homo sapien
actgaaggctcctggtaatacgcca

SEQ ID NO: 5295397 - DNA, 25 bp, Homo sapien
ctggagcagcttctggcctatggaa

SEQ ID NO: 5295398 - DNA, 25 bp, Homo sapien
tctccttagaagacttccgaggtcc

SEQ ID NO: 5295399 - DNA, 25 bp, Homo sapien
gactctccttagaagacttccgagg

SEQ ID NO: 5295400 - DNA, 25 bp, Homo sapien
ctccttagaagacttccgaggtcct

SEQ ID NO: 5295401 - DNA, 25 bp, Homo sapien
ctctccttagaagacttccgaggtc

SEQ ID NO: 5295402 - DNA, 25 bp, Homo sapien
caaaccctgcacgaggagcaatcta

SEQ ID NO: 5295403 - DNA, 25 bp, Homo sapien
tgtaatgtagcagaacacgacaggg

SEQ ID NO: 5295404 - DNA, 25 bp, Homo sapien
catttgaaatggtgcccaaaccctg

SEQ ID NO: 5295405 - DNA, 25 bp, Homo sapien
tatttcccacaacagtgttccagca

SEQ ID NO: 5295406 - DNA, 25 bp, Homo sapien
agacacacgatgaaggtccccagga

SEQ ID NO: 5295407 - DNA, 25 bp, Homo sapien
ggtcaaccttcttgttctggagcaa

SEQ ID NO: 5295408 - DNA, 25 bp, Homo sapien
gcacgttgactaagggagccattcc

SEQ ID NO: 5295409 - DNA, 25 bp, Homo sapien
tccagtagtaccagtggccaagcac

SEQ ID NO: 5295410 - DNA, 25 bp, Homo sapien
gcatctggtataaacttttgcagca

SEQ ID NO: 5295411 - DNA, 25 bp, Homo sapien
tttgcagcaagtcactcaccggtcc

SEQ ID NO: 5295412 - DNA, 25 bp, Homo sapien
aacttttgcagcaagtcactcaccg

SEQ ID NO: 5295413 - DNA, 25 bp, Homo sapien
ctctgtcatttgcatctggtataaa

SEQ ID NO: 5295414 - DNA, 25 bp, Homo sapien
ctgtttcctaggcaggtgtgtctga

SEQ ID NO: 5295415 - DNA, 25 bp, Homo sapien
ccacaggctctcaggttagagagtg

SEQ ID NO: 5295416 - DNA, 25 bp, Homo sapien
aggggagacgggcaggttccacagg

SEQ ID NO: 5295417 - DNA, 25 bp, Homo sapien
aggaggagagcatggccggccgtct

SEQ ID NO: 5295418 - DNA, 25 bp, Homo sapien
tccttatatgggtgtaccaggtaaa

SEQ ID NO: 5295419 - DNA, 25 bp, Homo sapien
acagtgacttcagcattgggcagtg

SEQ ID NO: 5295420 - DNA, 25 bp, Homo sapien
aggcaggctccaccttcgttaaaca

SEQ ID NO: 5295421 - DNA, 25 bp, Homo sapien
ccttcgttaaacagtgacttcagca

SEQ ID NO: 5295422 - DNA, 25 bp, Homo sapien
ccaactgtgggtgtaggaaatgccg

SEQ ID NO: 5295423 - DNA, 25 bp, Homo sapien
gggctgttcttcgagtgccaactgt

SEQ ID NO: 5295424 - DNA, 25 bp, Homo sapien
ctgctatggctgtccaagcctggcc

SEQ ID NO: 5295425 - DNA, 25 bp, Homo sapien
ggtgtaggaaatgccgtcattgcca

SEQ ID NO: 5295426 - DNA, 25 bp, Homo sapien
tgtgctgtggccatacctgcacttc

SEQ ID NO: 5295427 - DNA, 25 bp, Homo sapien
gctgtggccatacctgcacttcctc

SEQ ID NO: 5295428 - DNA, 25 bp, Homo sapien
tgctgtggccatacctgcacttcct

SEQ ID NO: 5295429 - DNA, 25 bp, Homo sapien
tgtggccatacctgcacttcctctg

SEQ ID NO: 5295430 - DNA, 25 bp, Homo sapien
gggcatcagtcatttgacctctaga

SEQ ID NO: 5295431 - DNA, 25 bp, Homo sapien
gggagtcctcagactagaatctgga

SEQ ID NO: 5295432 - DNA, 25 bp, Homo sapien
tcttgccatgctcctagattcagag

SEQ ID NO: 5295433 - DNA, 25 bp, Homo sapien
tttcaatcaaactgtcctggtccca

SEQ ID NO: 5295434 - DNA, 25 bp, Homo sapien
cgtggggtggattccccagccctca

SEQ ID NO: 5295435 - DNA, 25 bp, Homo sapien
agggctgcccgctgcgtggggtgga

SEQ ID NO: 5295436 - DNA, 25 bp, Homo sapien
tgcccgctgcgtggggtggattccc

SEQ ID NO: 5295437 - DNA, 25 bp, Homo sapien
agaggacaacatttgtagttctgca

SEQ ID NO: 5295438 - DNA, 25 bp, Homo sapien
aagcttgcgcattgcatctgtagtt

SEQ ID NO: 5295439 - DNA, 25 bp, Homo sapien
tgtagttcacaaaacagtgaggggc

SEQ ID NO: 5295440 - DNA, 25 bp, Homo sapien
tgaggggctcctggattagaactac

SEQ ID NO: 5295441 - DNA, 25 bp, Homo sapien
ttaagcttgcgcattgcatctgtag

SEQ ID NO: 5295442 - DNA, 25 bp, Homo sapien
tgttgacacattgccaaacacagtg

SEQ ID NO: 5295443 - DNA, 25 bp, Homo sapien
tggctggcaaaatgccgtaccacaa

SEQ ID NO: 5295444 - DNA, 25 bp, Homo sapien
gaaattccaatctgttgacacattg

SEQ ID NO: 5295445 - DNA, 25 bp, Homo sapien
ttggctggcaaaatgccgtaccaca

SEQ ID NO: 5295446 - DNA, 25 bp, Homo sapien
tctcttactactgatactttgcctt

SEQ ID NO: 5295447 - DNA, 25 bp, Homo sapien
tcttactactgatactttgcctttc

SEQ ID NO: 5295448 - DNA, 25 bp, Homo sapien
cttactactgatactttgcctttct

SEQ ID NO: 5295449 - DNA, 25 bp, Homo sapien
tttctcttactactgatactttgcc

SEQ ID NO: 5295450 - DNA, 25 bp, Homo sapien
tctgagttctcccagaacttcatat

SEQ ID NO: 5295451 - DNA, 25 bp, Homo sapien
cactgtctagggcttctgagttctc

SEQ ID NO: 5295452 - DNA, 25 bp, Homo sapien
tcactgtctagggcttctgagttct

SEQ ID NO: 5295453 - DNA, 25 bp, Homo sapien
gagttctcccagaacttcatatact

SEQ ID NO: 5295454 - DNA, 25 bp, Homo sapien
tgccagcaagaaccacccacataat

SEQ ID NO: 5295455 - DNA, 25 bp, Homo sapien
aaccacccacataatatacattcag

SEQ ID NO: 5295456 - DNA, 25 bp, Homo sapien
gcacagtgctgccagcaagaaccac

SEQ ID NO: 5295457 - DNA, 25 bp, Homo sapien
gtgcacagtgctgccagcaagaacc

SEQ ID NO: 5295458 - DNA, 25 bp, Homo sapien
taacctccttggatagctccagttg

SEQ ID NO: 5295459 - DNA, 25 bp, Homo sapien
taagcattctggagcagtctccgag

SEQ ID NO: 5295460 - DNA, 25 bp, Homo sapien
tcctcctgccgcctaaatgctggga

SEQ ID NO: 5295461 - DNA, 25 bp, Homo sapien
tcagatggcacctactttacccagc

SEQ ID NO: 5295462 - DNA, 25 bp, Homo sapien
aattagtacaactgattgcaaattg

SEQ ID NO: 5295463 - DNA, 25 bp, Homo sapien
tagattaattagtacaactgattgc

SEQ ID NO: 5295464 - DNA, 25 bp, Homo sapien
ttagtacaactgattgcaaattgtt

SEQ ID NO: 5295465 - DNA, 25 bp, Homo sapien
gattaattagtacaactgattgcaa

SEQ ID NO: 5295466 - DNA, 25 bp, Homo sapien
gataataccttttgacgcacataag

SEQ ID NO: 5295467 - DNA, 25 bp, Homo sapien
tagggttttctaacttactcatgac

SEQ ID NO: 5295468 - DNA, 25 bp, Homo sapien
gagatacgatttgcaatatctgtgg

SEQ ID NO: 5295469 - DNA, 25 bp, Homo sapien
catcctagtgcatggtatctcatgg

SEQ ID NO: 5295470 - DNA, 25 bp, Homo sapien
caccagacggtatgtgctgcctaat

SEQ ID NO: 5295471 - DNA, 25 bp, Homo sapien
tatgtccagaaagtcaagcctggca

SEQ ID NO: 5295472 - DNA, 25 bp, Homo sapien
ttgcgatcccaccaatgaaaaggcc

SEQ ID NO: 5295473 - DNA, 25 bp, Homo sapien
ggagaaaccaagagcgaacacctac

SEQ ID NO: 5295474 - DNA, 25 bp, Homo sapien
aatctgtagctaagtgggttccagc

SEQ ID NO: 5295475 - DNA, 25 bp, Homo sapien
caaactggccaaagtattgtcatct

SEQ ID NO: 5295476 - DNA, 25 bp, Homo sapien
tgtggatcaggataacaccaccttc

SEQ ID NO: 5295477 - DNA, 25 bp, Homo sapien
tgcaactttctaggcgaaaaggaaa

SEQ ID NO: 5295478 - DNA, 25 bp, Homo sapien
tctgacattgtagcttctggctctg

SEQ ID NO: 5295479 - DNA, 25 bp, Homo sapien
tattaccctgaagctgccttggtct

SEQ ID NO: 5295480 - DNA, 25 bp, Homo sapien
tggttggaacacatctgcctgtggc

SEQ ID NO: 5295481 - DNA, 25 bp, Homo sapien
aaagctgaactacttccggtggttg

SEQ ID NO: 5295482 - DNA, 25 bp, Homo sapien
cacgtcaattgggaggcatggccac

SEQ ID NO: 5295483 - DNA, 25 bp, Homo sapien
catagcattggcatgtaatagcagc

SEQ ID NO: 5295484 - DNA, 25 bp, Homo sapien
ccagttgtgagtgatgtagaactac

SEQ ID NO: 5295485 - DNA, 25 bp, Homo sapien
taacaaatgacccatgatgaatgac

SEQ ID NO: 5295486 - DNA, 25 bp, Homo sapien
ttagcatctggctgtcaggtcacac

SEQ ID NO: 5295487 - DNA, 25 bp, Homo sapien
tcaccatacccttatgtgccagatg

SEQ ID NO: 5295488 - DNA, 25 bp, Homo sapien
tagctctggatgatgcgggaaaaga

SEQ ID NO: 5295489 - DNA, 25 bp, Homo sapien
ccatctgccacgtggggcgtcgcag

SEQ ID NO: 5295490 - DNA, 25 bp, Homo sapien
gcgtcgcagaggtcacgtctgcaca

SEQ ID NO: 5295491 - DNA, 25 bp, Homo sapien
tctcaatgtagtcctggcctagtga

SEQ ID NO: 5295492 - DNA, 25 bp, Homo sapien
tcaatgtagtcctggcctagtgaaa

SEQ ID NO: 5295493 - DNA, 25 bp, Homo sapien
tctctcaatgtagtcctggcctagt

SEQ ID NO: 5295494 - DNA, 25 bp, Homo sapien
tcatctctcaatgtagtcctggcct

SEQ ID NO: 5295495 - DNA, 25 bp, Homo sapien
tggtccagggaagcaccaccccatg

SEQ ID NO: 5295496 - DNA, 25 bp, Homo sapien
caatcagggaatgactggccaggac

SEQ ID NO: 5295497 - DNA, 25 bp, Homo sapien
gaacttaacggccttgagaacatgt

SEQ ID NO: 5295498 - DNA, 25 bp, Homo sapien
gtttccagtctgttctggtccaggg

SEQ ID NO: 5295499 - DNA, 25 bp, Homo sapien
gtgctggctcatgagtgaggactca

SEQ ID NO: 5295500 - DNA, 25 bp, Homo sapien
agtgctggctcatgagtgaggactc

SEQ ID NO: 5295501 - DNA, 25 bp, Homo sapien
catatctgtatcgaggcagaggtgg

SEQ ID NO: 5295502 - DNA, 25 bp, Homo sapien
ggtgccatcaccgaacatatctgta

SEQ ID NO: 5295503 - DNA, 25 bp, Homo sapien
tgggttgacgacgatttccttgccg

SEQ ID NO: 5295504 - DNA, 25 bp, Homo sapien
gatgctatgtgctcgatgtgggaac

SEQ ID NO: 5295505 - DNA, 25 bp, Homo sapien
caaaggacaagaaccactggggcgc

SEQ ID NO: 5295506 - DNA, 25 bp, Homo sapien
ggaggatctgctgggtgtatgtgaa

SEQ ID NO: 5295507 - DNA, 25 bp, Homo sapien
gctgggtgtatgtgaaggcccatac

SEQ ID NO: 5295508 - DNA, 25 bp, Homo sapien
cgccagggaacaaggtgatgactga

SEQ ID NO: 5295509 - DNA, 25 bp, Homo sapien
tggttcggaggaaccactcccacag

SEQ ID NO: 5295510 - DNA, 25 bp, Homo sapien
caccttgagtcaacctgacttgctg

SEQ ID NO: 5295511 - DNA, 25 bp, Homo sapien
tgtcctgaatacgtccaccttgagt

SEQ ID NO: 5295512 - DNA, 25 bp, Homo sapien
tgacttgctgtacaatgacgcctgg

SEQ ID NO: 5295513 - DNA, 25 bp, Homo sapien
tccaggttgtagacattaaaaccaa

SEQ ID NO: 5295514 - DNA, 25 bp, Homo sapien
gagtggcaagagattcttcttcttg

SEQ ID NO: 5295515 - DNA, 25 bp, Homo sapien
aggggagagtggcaagagattcttc

SEQ ID NO: 5295516 - DNA, 25 bp, Homo sapien
caggttgtagacattaaaaccaaag

SEQ ID NO: 5295517 - DNA, 25 bp, Homo sapien
tgaaaagatgaacaaaggttgtacc

SEQ ID NO: 5295518 - DNA, 25 bp, Homo sapien
ttatgaaaagatgaacaaaggttgt

SEQ ID NO: 5295519 - DNA, 25 bp, Homo sapien
tatgaaaagatgaacaaaggttgta

SEQ ID NO: 5295520 - DNA, 25 bp, Homo sapien
ctttatgaaaagatgaacaaaggtt

SEQ ID NO: 5295521 - DNA, 25 bp, Homo sapien
acaaaagcttatatgtaacaaaagc

SEQ ID NO: 5295522 - DNA, 25 bp, Homo sapien
tggattcgctgagtgctgggccctc

SEQ ID NO: 5295523 - DNA, 25 bp, Homo sapien
cctggcaaaagcctagcccatgatg

SEQ ID NO: 5295524 - DNA, 25 bp, Homo sapien
gcccaccaagagtttgtctaggctt

SEQ ID NO: 5295525 - DNA, 25 bp, Homo sapien
tgccagtccagattagggggagact

SEQ ID NO: 5295526 - DNA, 25 bp, Homo sapien
agtgccagtccagattagggggaga

SEQ ID NO: 5295527 - DNA, 25 bp, Homo sapien
ctcgaggcaccagtgccagtccaga

SEQ ID NO: 5295528 - DNA, 25 bp, Homo sapien
tagggggagactttatcttcacctg

SEQ ID NO: 5295529 - DNA, 25 bp, Homo sapien
cttgcatgctccacagccagtagcc

SEQ ID NO: 5295530 - DNA, 25 bp, Homo sapien
ttgcatgctccacagccagtagccc

SEQ ID NO: 5295531 - DNA, 25 bp, Homo sapien
gcatgctccacagccagtagcccac

SEQ ID NO: 5295532 - DNA, 25 bp, Homo sapien
tgctccacagccagtagcccacaca

SEQ ID NO: 5295533 - DNA, 25 bp, Homo sapien
gcctttgagcgtgtcctctgagggt

SEQ ID NO: 5295534 - DNA, 25 bp, Homo sapien
tgcggctttgcttcttcgcctttga

SEQ ID NO: 5295535 - DNA, 25 bp, Homo sapien
ctgcggctttgcttcttcgcctttg

SEQ ID NO: 5295536 - DNA, 25 bp, Homo sapien
ttcttcgcctttgagcgtgtcctct

SEQ ID NO: 5295537 - DNA, 25 bp, Homo sapien
gtgacccagcttggatatgcagcca

SEQ ID NO: 5295538 - DNA, 25 bp, Homo sapien
tagttgggagtgacccagcttggat

SEQ ID NO: 5295539 - DNA, 25 bp, Homo sapien
tgggagtgacccagcttggatatgc

SEQ ID NO: 5295540 - DNA, 25 bp, Homo sapien
ggaccatttagttgggagtgaccca

SEQ ID NO: 5295541 - DNA, 25 bp, Homo sapien
gtccctgggccgtggtacagtctgt

SEQ ID NO: 5295542 - DNA, 25 bp, Homo sapien
atcaggccaccttgcatcccagcag

SEQ ID NO: 5295543 - DNA, 25 bp, Homo sapien
gcatcccagcaggaatggtccctgg

SEQ ID NO: 5295544 - DNA, 25 bp, Homo sapien
cgtggtacagtctgtgaagtggact

SEQ ID NO: 5295545 - DNA, 25 bp, Homo sapien
tgtcaggtaccagaaaagtcccctg

SEQ ID NO: 5295546 - DNA, 25 bp, Homo sapien
gggccagagcattgcagggcccctc

SEQ ID NO: 5295547 - DNA, 25 bp, Homo sapien
cttctttatgcagccaaaggtgtca

SEQ ID NO: 5295548 - DNA, 25 bp, Homo sapien
aataaaggcctgacaactctcctca

SEQ ID NO: 5295549 - DNA, 25 bp, Homo sapien
gggggaagacaacactctggctgct

SEQ ID NO: 5295550 - DNA, 25 bp, Homo sapien
gggaagacaacactctggctgctgc

SEQ ID NO: 5295551 - DNA, 25 bp, Homo sapien
gaagacaacactctggctgctgccc

SEQ ID NO: 5295552 - DNA, 25 bp, Homo sapien
gaaagggggaagacaacactctggc

SEQ ID NO: 5295553 - DNA, 25 bp, Homo sapien
cacaggggctcaactttaggtttgg

SEQ ID NO: 5295554 - DNA, 25 bp, Homo sapien
tcggatattgcccttctggatggag

SEQ ID NO: 5295555 - DNA, 25 bp, Homo sapien
tgggactttgcatcttcgcctttga

SEQ ID NO: 5295556 - DNA, 25 bp, Homo sapien
tcttcgcctttgaccttggcacagg

SEQ ID NO: 5295557 - DNA, 25 bp, Homo sapien
ctggaggagagtcacagggagagag

SEQ ID NO: 5295558 - DNA, 25 bp, Homo sapien
agtcacagggagagaggagagtcca

SEQ ID NO: 5295559 - DNA, 25 bp, Homo sapien
aggagagtcacagggagagaggaga

SEQ ID NO: 5295560 - DNA, 25 bp, Homo sapien
tggaggagagtcacagggagagagg

SEQ ID NO: 5295561 - DNA, 25 bp, Homo sapien
ttctccagaccaagccagctgaggg

SEQ ID NO: 5295562 - DNA, 25 bp, Homo sapien
ggcctctgctttcagccagccaaag

SEQ ID NO: 5295563 - DNA, 25 bp, Homo sapien
tgctttcagccagccaaagctccaa

SEQ ID NO: 5295564 - DNA, 25 bp, Homo sapien
tatacataaaagccctcatccagtt

SEQ ID NO: 5295565 - DNA, 25 bp, Homo sapien
gaagctctggcagcgcagattcttc

SEQ ID NO: 5295566 - DNA, 25 bp, Homo sapien
accacttgaagctctggcagcgcag

SEQ ID NO: 5295567 - DNA, 25 bp, Homo sapien
cacttgaagctctggcagcgcagat

SEQ ID NO: 5295568 - DNA, 25 bp, Homo sapien
gctctggcagcgcagattcttcctc

SEQ ID NO: 5295569 - DNA, 25 bp, Homo sapien
tatgcagactagtttgggaatctcc

SEQ ID NO: 5295570 - DNA, 25 bp, Homo sapien
gcagtcagtttgaaactccccaggg

SEQ ID NO: 5295571 - DNA, 25 bp, Homo sapien
gggaatctccttggtagaaccttgc

SEQ ID NO: 5295572 - DNA, 25 bp, Homo sapien
aacttgtccccatgttagaatcacc

SEQ ID NO: 5295573 - DNA, 25 bp, Homo sapien
cagattcatccaaggttgaacctgg

SEQ ID NO: 5295574 - DNA, 25 bp, Homo sapien
ggacagggtgcaaagtcagattcat

SEQ ID NO: 5295575 - DNA, 25 bp, Homo sapien
gaggacagggtgcaaagtcagattc

SEQ ID NO: 5295576 - DNA, 25 bp, Homo sapien
aaggttgaacctggatgaactgtgg

SEQ ID NO: 5295577 - DNA, 25 bp, Homo sapien
gccgggcagcgtaatagtattgctt

SEQ ID NO: 5295578 - DNA, 25 bp, Homo sapien
cctctccagggcgaatggccgggca

SEQ ID NO: 5295579 - DNA, 25 bp, Homo sapien
catccacacttcagctgtccgcttg

SEQ ID NO: 5295580 - DNA, 25 bp, Homo sapien
cgaatggccgggcagcgtaatagta

SEQ ID NO: 5295581 - DNA, 25 bp, Homo sapien
ccatcagggaaaacgtaggggtgct

SEQ ID NO: 5295582 - DNA, 25 bp, Homo sapien
tgcttcttccggaagacgtgcccca

SEQ ID NO: 5295583 - DNA, 25 bp, Homo sapien
tacgtgttggcatttccatcaggga

SEQ ID NO: 5295584 - DNA, 25 bp, Homo sapien
gcacatccacactcggaaggagatt

SEQ ID NO: 5295585 - DNA, 25 bp, Homo sapien
tgcccccttttaatttcttagatga

SEQ ID NO: 5295586 - DNA, 25 bp, Homo sapien
tgcacttcacatttgagatttcgac

SEQ ID NO: 5295587 - DNA, 25 bp, Homo sapien
cttcacatttgagatttcgactctc

SEQ ID NO: 5295588 - DNA, 25 bp, Homo sapien
gcacttcacatttgagatttcgact

SEQ ID NO: 5295589 - DNA, 25 bp, Homo sapien
cacttcacatttgagatttcgactc

SEQ ID NO: 5295590 - DNA, 25 bp, Homo sapien
ttcaaggaaatgatgtgtatcctct

SEQ ID NO: 5295591 - DNA, 25 bp, Homo sapien
gaaatgatgtgtatcctctcaggat

SEQ ID NO: 5295592 - DNA, 25 bp, Homo sapien
caggcctggtggttcgtagatatct

SEQ ID NO: 5295593 - DNA, 25 bp, Homo sapien
gtggttcgtagatatctgctgagac

SEQ ID NO: 5295594 - DNA, 25 bp, Homo sapien
gggcttggacaagtgctatcagaag

SEQ ID NO: 5295595 - DNA, 25 bp, Homo sapien
ccaggtacagattagggcctctgat

SEQ ID NO: 5295596 - DNA, 25 bp, Homo sapien
tctgatcttcgaggctgcagcacct

SEQ ID NO: 5295597 - DNA, 25 bp, Homo sapien
cagaagtgctgtagattcacgtgtg

SEQ ID NO: 5295598 - DNA, 25 bp, Homo sapien
cgactattcatatgccactgcttgg

SEQ ID NO: 5295599 - DNA, 25 bp, Homo sapien
cccatggatggtgggcaggaattca

SEQ ID NO: 5295600 - DNA, 25 bp, Homo sapien
gaagcaaaccacgactattcatatg

SEQ ID NO: 5295601 - DNA, 25 bp, Homo sapien
ctccaggaagcaaaccacgactatt

SEQ ID NO: 5295602 - DNA, 25 bp, Homo sapien
ctgctgtgctttggaaatcccccat

SEQ ID NO: 5295603 - DNA, 25 bp, Homo sapien
ccttttgtgcctgctgtgctttgga

SEQ ID NO: 5295604 - DNA, 25 bp, Homo sapien
tctctcttctcggcagccttttgtg

SEQ ID NO: 5295605 - DNA, 25 bp, Homo sapien
cttctcggcagccttttgtgcctgc

SEQ ID NO: 5295606 - DNA, 25 bp, Homo sapien
aattcaggaatcccatattcaccct

SEQ ID NO: 5295607 - DNA, 25 bp, Homo sapien
caggaatcccatattcacccttcat

SEQ ID NO: 5295608 - DNA, 25 bp, Homo sapien
tttaaattcaggaatcccatattca

SEQ ID NO: 5295609 - DNA, 25 bp, Homo sapien
ttcaggaatcccatattcacccttc

SEQ ID NO: 5295610 - DNA, 25 bp, Homo sapien
ccttgttatccccacccgcagatgt

SEQ ID NO: 5295611 - DNA, 25 bp, Homo sapien
cacgcactcaggtgccttgttatcc

SEQ ID NO: 5295612 - DNA, 25 bp, Homo sapien
tcctccttcacgcactcaggtgcct

SEQ ID NO: 5295613 - DNA, 25 bp, Homo sapien
gtgacactgtccacgtgacacagcc

SEQ ID NO: 5295614 - DNA, 25 bp, Homo sapien
ctgagggagaaagccataaaacacc

SEQ ID NO: 5295615 - DNA, 25 bp, Homo sapien
tgactgagggagaaagccataaaac

SEQ ID NO: 5295616 - DNA, 25 bp, Homo sapien
tagtgactgagggagaaagccataa

SEQ ID NO: 5295617 - DNA, 25 bp, Homo sapien
ttagtgactgagggagaaagccata

SEQ ID NO: 5295618 - DNA, 25 bp, Homo sapien
cgccccaatccccagggtgtataga

SEQ ID NO: 5295619 - DNA, 25 bp, Homo sapien
gtatagaacagcataggtcaggatg

SEQ ID NO: 5295620 - DNA, 25 bp, Homo sapien
catccaaagcacgtgtcactctctg

SEQ ID NO: 5295621 - DNA, 25 bp, Homo sapien
tggtgttggatccaaaaccacagag

SEQ ID NO: 5295622 - DNA, 25 bp, Homo sapien
aaaccaagctttgtcgatcacgaag

SEQ ID NO: 5295623 - DNA, 25 bp, Homo sapien
gagccctccagctatgataggagtc

SEQ ID NO: 5295624 - DNA, 25 bp, Homo sapien
ggtaatcaaaccaagctttgtcgat

SEQ ID NO: 5295625 - DNA, 25 bp, Homo sapien
gaagagccctccagctatgatagga

SEQ ID NO: 5295626 - DNA, 25 bp, Homo sapien
tcaggactcctgctattccgatgac

SEQ ID NO: 5295627 - DNA, 25 bp, Homo sapien
gactcctgctattccgatgacccag

SEQ ID NO: 5295628 - DNA, 25 bp, Homo sapien
ggactcctgctattccgatgaccca

SEQ ID NO: 5295629 - DNA, 25 bp, Homo sapien
caggactcctgctattccgatgacc

SEQ ID NO: 5295630 - DNA, 25 bp, Homo sapien
tgggtaccaactggctccaattttc

SEQ ID NO: 5295631 - DNA, 25 bp, Homo sapien
caccatgcactgcccctggtgagga

SEQ ID NO: 5295632 - DNA, 25 bp, Homo sapien
tcctgggtaccaactggctccaatt

SEQ ID NO: 5295633 - DNA, 25 bp, Homo sapien
catgcactgcccctggtgaggagct

SEQ ID NO: 5295634 - DNA, 25 bp, Homo sapien
gatgggctccgtggggtccaggcgc

SEQ ID NO: 5295635 - DNA, 25 bp, Homo sapien
ctgatgggctccgtggggtccaggc

SEQ ID NO: 5295636 - DNA, 25 bp, Homo sapien
ggtccaggcgccgagccttctgctc

SEQ ID NO: 5295637 - DNA, 25 bp, Homo sapien
ggggtccaggcgccgagccttctgc

SEQ ID NO: 5295638 - DNA, 25 bp, Homo sapien
actcgatgtaggtgaaggtgtccag

SEQ ID NO: 5295639 - DNA, 25 bp, Homo sapien
tccgaggcagactcgatgtaggtga

SEQ ID NO: 5295640 - DNA, 25 bp, Homo sapien
ggtgtccaggttaatgatatcgatc

SEQ ID NO: 5295641 - DNA, 25 bp, Homo sapien
acagggcacaccacccgcgtgtagt

SEQ ID NO: 5295642 - DNA, 25 bp, Homo sapien
tcagagagggtttctgagatgaact

SEQ ID NO: 5295643 - DNA, 25 bp, Homo sapien
catggatgtagaaaggagagcactt

SEQ ID NO: 5295644 - DNA, 25 bp, Homo sapien
ccgaccagcaggtaaggctggccat

SEQ ID NO: 5295645 - DNA, 25 bp, Homo sapien
gatgaaggctttgcccgaccagcag

SEQ ID NO: 5295646 - DNA, 25 bp, Homo sapien
ttcagttccagggtgcatggtcagc

SEQ ID NO: 5295647 - DNA, 25 bp, Homo sapien
cagggtgcatggtcagcaaactgag

SEQ ID NO: 5295648 - DNA, 25 bp, Homo sapien
ctagcagcccccaatatccaaagag

SEQ ID NO: 5295649 - DNA, 25 bp, Homo sapien
ccaggaacttcagttccagggtgca

SEQ ID NO: 5295650 - DNA, 25 bp, Homo sapien
caggaaacgtctgttgattcattta

SEQ ID NO: 5295651 - DNA, 25 bp, Homo sapien
tcaggaaacgtctgttgattcattt

SEQ ID NO: 5295652 - DNA, 25 bp, Homo sapien
aggaaacgtctgttgattcatttac

SEQ ID NO: 5295653 - DNA, 25 bp, Homo sapien
ttttctcctcttccaaccataacac

SEQ ID NO: 5295654 - DNA, 25 bp, Homo sapien
gtaggaagcaagcttgattttctcc

SEQ ID NO: 5295655 - DNA, 25 bp, Homo sapien
cggtaggaagcaagcttgattttct

SEQ ID NO: 5295656 - DNA, 25 bp, Homo sapien
ggaagcaagcttgattttctcctct

SEQ ID NO: 5295657 - DNA, 25 bp, Homo sapien
tggccacaaggagtcattggtgccc

SEQ ID NO: 5295658 - DNA, 25 bp, Homo sapien
catggcatccggttttttattatca

SEQ ID NO: 5295659 - DNA, 25 bp, Homo sapien
tactctatgacaggcagggtggcca

SEQ ID NO: 5295660 - DNA, 25 bp, Homo sapien
ttggtgcccccactggatttgtaag

SEQ ID NO: 5295661 - DNA, 25 bp, Homo sapien
ctgagcagacgacatagcttgattc

SEQ ID NO: 5295662 - DNA, 25 bp, Homo sapien
tatctcattggaatgaacaatgttg

SEQ ID NO: 5295663 - DNA, 25 bp, Homo sapien
tgaggttatctcattggaatgaaca

SEQ ID NO: 5295664 - DNA, 25 bp, Homo sapien
tctttagtcctcttaacaatgtcat

SEQ ID NO: 5295665 - DNA, 25 bp, Homo sapien
gaaagtcagagtggtgccctgggcg

SEQ ID NO: 5295666 - DNA, 25 bp, Homo sapien
tcacagtggctgtcgaggaaagtca

SEQ ID NO: 5295667 - DNA, 25 bp, Homo sapien
ctctttgaccctgtgcaacagaggc

SEQ ID NO: 5295668 - DNA, 25 bp, Homo sapien
agaggctggagccagtccctgttca

SEQ ID NO: 5295669 - DNA, 25 bp, Homo sapien
ccccgacactcacactggaggctcc

SEQ ID NO: 5295670 - DNA, 25 bp, Homo sapien
aggctcccgcacaacagctcagacc

SEQ ID NO: 5295671 - DNA, 25 bp, Homo sapien
gctcccgcacaacagctcagaccta

SEQ ID NO: 5295672 - DNA, 25 bp, Homo sapien
ttcgaccccccgacactcacactgg

SEQ ID NO: 5295673 - DNA, 25 bp, Homo sapien
cttgccgttcattattgcgcaagca

SEQ ID NO: 5295674 - DNA, 25 bp, Homo sapien
aagcatttcaccttgggcaacttga

SEQ ID NO: 5295675 - DNA, 25 bp, Homo sapien
tattgcgcaagcatttcaccttggg

SEQ ID NO: 5295676 - DNA, 25 bp, Homo sapien
caacttgatgagctgtttacagtca

SEQ ID NO: 5295677 - DNA, 25 bp, Homo sapien
gatttcccggatcagatgcgtaggg

SEQ ID NO: 5295678 - DNA, 25 bp, Homo sapien
atgcgtaggggtgcggtttaataca

SEQ ID NO: 5295679 - DNA, 25 bp, Homo sapien
cactaatatgatttcccggatcaga

SEQ ID NO: 5295680 - DNA, 25 bp, Homo sapien
aagtcatccactaatatgatttccc

SEQ ID NO: 5295681 - DNA, 25 bp, Homo sapien
tcttaggtctgactgagatgactgg

SEQ ID NO: 5295682 - DNA, 25 bp, Homo sapien
ggtatagcagctacttactacaagc

SEQ ID NO: 5295683 - DNA, 25 bp, Homo sapien
gggccacaccagctatcacgggatt

SEQ ID NO: 5295684 - DNA, 25 bp, Homo sapien
cgtgactactcagaaacatggctgg

SEQ ID NO: 5295685 - DNA, 25 bp, Homo sapien
aacaattggagcgatggcggagtcc

SEQ ID NO: 5295686 - DNA, 25 bp, Homo sapien
ggtcaagtccagtccaagggaccta

SEQ ID NO: 5295687 - DNA, 25 bp, Homo sapien
cggctctgcactggttgaactgaga

SEQ ID NO: 5295688 - DNA, 25 bp, Homo sapien
tcaaaaggtaaatcgcgtgcggctc

SEQ ID NO: 5295689 - DNA, 25 bp, Homo sapien
ctgtggcatcggcaccagctgatgt

SEQ ID NO: 5295690 - DNA, 25 bp, Homo sapien
ttgctgtgtttcgtgtgctctctga

SEQ ID NO: 5295691 - DNA, 25 bp, Homo sapien
ttttttctctgtggcatcggcacca

SEQ ID NO: 5295692 - DNA, 25 bp, Homo sapien
ctgtgtttcgtgtgctctctgaccc

SEQ ID NO: 5295693 - DNA, 25 bp, Homo sapien
agtgagggcggctgctgtcattgcc

SEQ ID NO: 5295694 - DNA, 25 bp, Homo sapien
ctgagaggtagatactgctggtggc

SEQ ID NO: 5295695 - DNA, 25 bp, Homo sapien
cacagaatatgtgcgcagaggagct

SEQ ID NO: 5295696 - DNA, 25 bp, Homo sapien
agctgaggtgcacagaatatgtgcg

SEQ ID NO: 5295697 - DNA, 25 bp, Homo sapien
tgcaggccgttctgatttgcatggc

SEQ ID NO: 5295698 - DNA, 25 bp, Homo sapien
caagccttagtgattgctgcaggcc

SEQ ID NO: 5295699 - DNA, 25 bp, Homo sapien
gcaagaacacgacccagaggatgag

SEQ ID NO: 5295700 - DNA, 25 bp, Homo sapien
catagcaggatacacctattagagc

SEQ ID NO: 5295701 - DNA, 25 bp, Homo sapien
cgtgcaatacaccagcagtgtgcat

SEQ ID NO: 5295702 - DNA, 25 bp, Homo sapien
cgtggagcgggcctcgttgtggaag

SEQ ID NO: 5295703 - DNA, 25 bp, Homo sapien
gtggaaggtccgtgcaatacaccag

SEQ ID NO: 5295704 - DNA, 25 bp, Homo sapien
tgatgctagtgggtggaaggtccgt

SEQ ID NO: 5295705 - DNA, 25 bp, Homo sapien
ggagggcattgctcgtaggtagttg

SEQ ID NO: 5295706 - DNA, 25 bp, Homo sapien
ctcgtaggtagttgaggtggaacca

SEQ ID NO: 5295707 - DNA, 25 bp, Homo sapien
gagggagggcattgctcgtaggtag

SEQ ID NO: 5295708 - DNA, 25 bp, Homo sapien
gagagggagggcattgctcgtaggt

SEQ ID NO: 5295709 - DNA, 25 bp, Homo sapien
ctgtgagagcatggaggggcttgga

SEQ ID NO: 5295710 - DNA, 25 bp, Homo sapien
tgtgagagcatggaggggcttggag

SEQ ID NO: 5295711 - DNA, 25 bp, Homo sapien
cccaagaggaacaagtggatgtcag

SEQ ID NO: 5295712 - DNA, 25 bp, Homo sapien
aagaggaacaagtggatgtcaggga

SEQ ID NO: 5295713 - DNA, 25 bp, Homo sapien
tccaaggaccaagggatgagcatgg

SEQ ID NO: 5295714 - DNA, 25 bp, Homo sapien
gtccaaggaccaagggatgagcatg

SEQ ID NO: 5295715 - DNA, 25 bp, Homo sapien
gataggcagcaacaaggttgagagt

SEQ ID NO: 5295716 - DNA, 25 bp, Homo sapien
ggggataggcagcaacaaggttgag

SEQ ID NO: 5295717 - DNA, 25 bp, Homo sapien
tactgagctctggaaaccagcaggt

SEQ ID NO: 5295718 - DNA, 25 bp, Homo sapien
tggaaaccagcaggtacagcgacct

SEQ ID NO: 5295719 - DNA, 25 bp, Homo sapien
ccgaagaggcggtttctactgagct

SEQ ID NO: 5295720 - DNA, 25 bp, Homo sapien
tgccacgggtacatcctaaacaggg

SEQ ID NO: 5295721 - DNA, 25 bp, Homo sapien
tgccaagctatgggtgacaccctca

SEQ ID NO: 5295722 - DNA, 25 bp, Homo sapien
ttgccaagctatgggtgacaccctc

SEQ ID NO: 5295723 - DNA, 25 bp, Homo sapien
tttgccaagctatgggtgacaccct

SEQ ID NO: 5295724 - DNA, 25 bp, Homo sapien
tcactgttgtgcagtttcgctgaaa

SEQ ID NO: 5295725 - DNA, 25 bp, Homo sapien
agtttcgctgaaatcacttcctcca

SEQ ID NO: 5295726 - DNA, 25 bp, Homo sapien
tgttgtgcagtttcgctgaaatcac

SEQ ID NO: 5295727 - DNA, 25 bp, Homo sapien
aactgtcactgttgtgcagtttcgc

SEQ ID NO: 5295728 - DNA, 25 bp, Homo sapien
acattcatccatgtcacccgtttct

SEQ ID NO: 5295729 - DNA, 25 bp, Homo sapien
ggccctgttacctgtctgccctgcc

SEQ ID NO: 5295730 - DNA, 25 bp, Homo sapien
ctctacattcatccatgtcacccgt

SEQ ID NO: 5295731 - DNA, 25 bp, Homo sapien
tacattcatccatgtcacccgtttc

SEQ ID NO: 5295732 - DNA, 25 bp, Homo sapien
caggggcaaagactgtatcaatatg

SEQ ID NO: 5295733 - DNA, 25 bp, Homo sapien
caaagactgtatcaatatgattggg

SEQ ID NO: 5295734 - DNA, 25 bp, Homo sapien
actgtatcaatatgattgggtgtcc

SEQ ID NO: 5295735 - DNA, 25 bp, Homo sapien
gggcaaagactgtatcaatatgatt

SEQ ID NO: 5295736 - DNA, 25 bp, Homo sapien
gggccaggagtgaccccacagtagg

SEQ ID NO: 5295737 - DNA, 25 bp, Homo sapien
ttctcggtagaggtgatgccaattg

SEQ ID NO: 5295738 - DNA, 25 bp, Homo sapien
gtaggagcttctcggtagaggtgat

SEQ ID NO: 5295739 - DNA, 25 bp, Homo sapien
gaagtccagagtgggccaatggcga

SEQ ID NO: 5295740 - DNA, 25 bp, Homo sapien
gcaggacatggagcctgtgaatgaa

SEQ ID NO: 5295741 - DNA, 25 bp, Homo sapien
ctaggaggatggcaggacatggagc

SEQ ID NO: 5295742 - DNA, 25 bp, Homo sapien
ggacatggagcctgtgaatgaagaa

SEQ ID NO: 5295743 - DNA, 25 bp, Homo sapien
gaggatggcaggacatggagcctgt

SEQ ID NO: 5295744 - DNA, 25 bp, Homo sapien
tcccaaagggagtctaaattctgtc

SEQ ID NO: 5295745 - DNA, 25 bp, Homo sapien
tgccctgaggcagacatatggctga

SEQ ID NO: 5295746 - DNA, 25 bp, Homo sapien
tgtagaaactagtcctgctcagggt

SEQ ID NO: 5295747 - DNA, 25 bp, Homo sapien
cagacggaacacactgggctaggtg

SEQ ID NO: 5295748 - DNA, 25 bp, Homo sapien
aactttctacgtagctccaggcctg

SEQ ID NO: 5295749 - DNA, 25 bp, Homo sapien
cttaccagggagcataagggctgct

SEQ ID NO: 5295750 - DNA, 25 bp, Homo sapien
tgccaaggagtaggacaagtgccca

SEQ ID NO: 5295751 - DNA, 25 bp, Homo sapien
tctataaagggtcggtcgtgaggca

SEQ ID NO: 5295752 - DNA, 25 bp, Homo sapien
cagcctcgggtgtgggaatctgcca

SEQ ID NO: 5295753 - DNA, 25 bp, Homo sapien
gtgtttttggtgctctatgggttcg

SEQ ID NO: 5295754 - DNA, 25 bp, Homo sapien
ggaaaaacaggccttggctgtagtg

SEQ ID NO: 5295755 - DNA, 25 bp, Homo sapien
tctatgggttcgtgtcaaatgatcc

SEQ ID NO: 5295756 - DNA, 25 bp, Homo sapien
ttaaagtgaaagaggccacccctgc

SEQ ID NO: 5295757 - DNA, 25 bp, Homo sapien
ggtttgggattgctctcagcagtaa

SEQ ID NO: 5295758 - DNA, 25 bp, Homo sapien
tctcagcagtaagcagtaggcaaca

SEQ ID NO: 5295759 - DNA, 25 bp, Homo sapien
ggtcaatcaccaaatccgaatccct

SEQ ID NO: 5295760 - DNA, 25 bp, Homo sapien
caactggcagcagatggtccagccc

SEQ ID NO: 5295761 - DNA, 25 bp, Homo sapien
aggccccagatcaagcctgctgttg

SEQ ID NO: 5295762 - DNA, 25 bp, Homo sapien
ttagcactggtgctgcatacagcag

SEQ ID NO: 5295763 - DNA, 25 bp, Homo sapien
agcagatggtccagcccggttctta

SEQ ID NO: 5295764 - DNA, 25 bp, Homo sapien
acagagtgggagaaggaggaagtac

SEQ ID NO: 5295765 - DNA, 25 bp, Homo sapien
ctgcgggggtaacagagtgggagaa

SEQ ID NO: 5295766 - DNA, 25 bp, Homo sapien
gtaacagagtgggagaaggaggaag

SEQ ID NO: 5295767 - DNA, 25 bp, Homo sapien
tgcgggggtaacagagtgggagaag

SEQ ID NO: 5295768 - DNA, 25 bp, Homo sapien
agataccgccgctcatcaaactggt

SEQ ID NO: 5295769 - DNA, 25 bp, Homo sapien
gatggcccgattgctggagatccgc

SEQ ID NO: 5295770 - DNA, 25 bp, Homo sapien
aacgcgccactttttggcattcaga

SEQ ID NO: 5295771 - DNA, 25 bp, Homo sapien
tctcccgctggttgaaagcatacag

SEQ ID NO: 5295772 - DNA, 25 bp, Homo sapien
cactcgggaaacctgaccagggtgg

SEQ ID NO: 5295773 - DNA, 25 bp, Homo sapien
tggcccacgtggcaggttaagaggg

SEQ ID NO: 5295774 - DNA, 25 bp, Homo sapien
gggcttggcccacgtggcaggttaa

SEQ ID NO: 5295775 - DNA, 25 bp, Homo sapien
tcctgcactcgggaaacctgaccag

SEQ ID NO: 5295776 - DNA, 25 bp, Homo sapien
tgcttggaacatcaccccacggtaa

SEQ ID NO: 5295777 - DNA, 25 bp, Homo sapien
gcttggaacatcaccccacggtaac

SEQ ID NO: 5295778 - DNA, 25 bp, Homo sapien
catcaccccacggtaaccttgaaat

SEQ ID NO: 5295779 - DNA, 25 bp, Homo sapien
gaacatcaccccacggtaaccttga

SEQ ID NO: 5295780 - DNA, 25 bp, Homo sapien
ggagcaccatgtgctgtgagctctc

SEQ ID NO: 5295781 - DNA, 25 bp, Homo sapien
tcacaccagatagaggcatgggccc

SEQ ID NO: 5295782 - DNA, 25 bp, Homo sapien
ttcacaccagatagaggcatgggcc

SEQ ID NO: 5295783 - DNA, 25 bp, Homo sapien
tgctgtgagctctccagaattttgg

SEQ ID NO: 5295784 - DNA, 25 bp, Homo sapien
ctcccaaagggctccactcagaact

SEQ ID NO: 5295785 - DNA, 25 bp, Homo sapien
gtacaggaagtgatacgtcccggga

SEQ ID NO: 5295786 - DNA, 25 bp, Homo sapien
tacaggaagtgatacgtcccgggaa

SEQ ID NO: 5295787 - DNA, 25 bp, Homo sapien
caagaacaaatacccaggagctccc

SEQ ID NO: 5295788 - DNA, 25 bp, Homo sapien
tcagagaccagagcggcaagctggt

SEQ ID NO: 5295789 - DNA, 25 bp, Homo sapien
cagctctggtacccagggagcaggt

SEQ ID NO: 5295790 - DNA, 25 bp, Homo sapien
ctttgtgttcagagaccagagcggc

SEQ ID NO: 5295791 - DNA, 25 bp, Homo sapien
agaccagagcggcaagctggtcact

SEQ ID NO: 5295792 - DNA, 25 bp, Homo sapien
aatctccctctaggttcttgccagg

SEQ ID NO: 5295793 - DNA, 25 bp, Homo sapien
ggtccaacagtcacactcacgagga

SEQ ID NO: 5295794 - DNA, 25 bp, Homo sapien
tcgtctgaacttagtcccgaaggga

SEQ ID NO: 5295795 - DNA, 25 bp, Homo sapien
gaacctggacttcagagcttcctgc

SEQ ID NO: 5295796 - DNA, 25 bp, Homo sapien
ggacatttccctgacctcgggaagc

SEQ ID NO: 5295797 - DNA, 25 bp, Homo sapien
cacgcgtgtcaccaatcattcttgt

SEQ ID NO: 5295798 - DNA, 25 bp, Homo sapien
tgacctcgggaagcataagtaattg

SEQ ID NO: 5295799 - DNA, 25 bp, Homo sapien
tgctccccaaatgacacgcgtgtca

SEQ ID NO: 5295800 - DNA, 25 bp, Homo sapien
tgagtggtgggaggatgcggtgcat

SEQ ID NO: 5295801 - DNA, 25 bp, Homo sapien
cttcttctcgcctgcctccaaaatc

SEQ ID NO: 5295802 - DNA, 25 bp, Homo sapien
agcatgagtggtgggaggatgcggt

SEQ ID NO: 5295803 - DNA, 25 bp, Homo sapien
tccaaaatcaaggctggaagagagg

SEQ ID NO: 5295804 - DNA, 25 bp, Homo sapien
ggcttctccctggtggattctttat

SEQ ID NO: 5295805 - DNA, 25 bp, Homo sapien
agaaatgtttgtaggcttccagccc

SEQ ID NO: 5295806 - DNA, 25 bp, Homo sapien
gattctttatagtgaggaagtctga

SEQ ID NO: 5295807 - DNA, 25 bp, Homo sapien
tggattctttatagtgaggaagtct

SEQ ID NO: 5295808 - DNA, 25 bp, Homo sapien
cagggcttgggatcccatgctacgg

SEQ ID NO: 5295809 - DNA, 25 bp, Homo sapien
tcagagaggtacatgcattggtcgt

SEQ ID NO: 5295810 - DNA, 25 bp, Homo sapien
catgctacggcattcatattgtgaa

SEQ ID NO: 5295811 - DNA, 25 bp, Homo sapien
catggctgtccctcatggtacatga

SEQ ID NO: 5295812 - DNA, 25 bp, Homo sapien
aagcaagtaatgttttcctcttggg

SEQ ID NO: 5295813 - DNA, 25 bp, Homo sapien
tcctcttgggattctcgattattat

SEQ ID NO: 5295814 - DNA, 25 bp, Homo sapien
tattatcatttactgacaccaccac

SEQ ID NO: 5295815 - DNA, 25 bp, Homo sapien
ctgaggttcacattcaaagcaagta

SEQ ID NO: 5295816 - DNA, 25 bp, Homo sapien
ccagggccacagattcccatttgga

SEQ ID NO: 5295817 - DNA, 25 bp, Homo sapien
cacagattcccatttggagctactc

SEQ ID NO: 5295818 - DNA, 25 bp, Homo sapien
gggccacagattcccatttggagct

SEQ ID NO: 5295819 - DNA, 25 bp, Homo sapien
gattcccatttggagctactctctg

SEQ ID NO: 5295820 - DNA, 25 bp, Homo sapien
ctgggagatgatggacactacaagc

SEQ ID NO: 5295821 - DNA, 25 bp, Homo sapien
tgggagatgatggacactacaagca

SEQ ID NO: 5295822 - DNA, 25 bp, Homo sapien
ggagatgatggacactacaagcaac

SEQ ID NO: 5295823 - DNA, 25 bp, Homo sapien
agatgatggacactacaagcaacat

SEQ ID NO: 5295824 - DNA, 25 bp, Homo sapien
gcccgtcactggccaaatgccccct

SEQ ID NO: 5295825 - DNA, 25 bp, Homo sapien
ccgtcactggccaaatgccccctcc

SEQ ID NO: 5295826 - DNA, 25 bp, Homo sapien
ccctccaaccttcagttccacctct

SEQ ID NO: 5295827 - DNA, 25 bp, Homo sapien
ggtgcccgtcactggccaaatgccc

SEQ ID NO: 5295828 - DNA, 25 bp, Homo sapien
gtgcccctgctaccgagtgtctgtg

SEQ ID NO: 5295829 - DNA, 25 bp, Homo sapien
ctaccgagtgtctgtgccactgatc

SEQ ID NO: 5295830 - DNA, 25 bp, Homo sapien
tctggtgtgcccctgctaccgagtg

SEQ ID NO: 5295831 - DNA, 25 bp, Homo sapien
cctgctaccgagtgtctgtgccact

SEQ ID NO: 5295832 - DNA, 25 bp, Homo sapien
ggcactgggtcctggaaggagcccc

SEQ ID NO: 5295833 - DNA, 25 bp, Homo sapien
tagggcactgggtcctggaaggagc

SEQ ID NO: 5295834 - DNA, 25 bp, Homo sapien
ctagggcactgggtcctggaaggag

SEQ ID NO: 5295835 - DNA, 25 bp, Homo sapien
agggcactgggtcctggaaggagcc

SEQ ID NO: 5295836 - DNA, 25 bp, Homo sapien
ctgttataaggagagggctttgagc

SEQ ID NO: 5295837 - DNA, 25 bp, Homo sapien
tgttataaggagagggctttgagca

SEQ ID NO: 5295838 - DNA, 25 bp, Homo sapien
tatcagttccggtgcttggggccca

SEQ ID NO: 5295839 - DNA, 25 bp, Homo sapien
aacagctctatcagttccggtgctt

SEQ ID NO: 5295840 - DNA, 25 bp, Homo sapien
cagttccggtgcttggggcccagca

SEQ ID NO: 5295841 - DNA, 25 bp, Homo sapien
agctctatcagttccggtgcttggg

SEQ ID NO: 5295842 - DNA, 25 bp, Homo sapien
cccgaagacagccaattctgcagaa

SEQ ID NO: 5295843 - DNA, 25 bp, Homo sapien
ggcccgaagacagccaattctgcag

SEQ ID NO: 5295844 - DNA, 25 bp, Homo sapien
gggcccgaagacagccaattctgca

SEQ ID NO: 5295845 - DNA, 25 bp, Homo sapien
gcccgaagacagccaattctgcaga

SEQ ID NO: 5295846 - DNA, 25 bp, Homo sapien
gattggcacactttcttcctaggag

SEQ ID NO: 5295847 - DNA, 25 bp, Homo sapien
cagaaggcaggacttcctctagttc

SEQ ID NO: 5295848 - DNA, 25 bp, Homo sapien
ctaggaggctttgaacagaaggcag

SEQ ID NO: 5295849 - DNA, 25 bp, Homo sapien
tatggccacaggactgacggaggct

SEQ ID NO: 5295850 - DNA, 25 bp, Homo sapien
aatggctctgctctcaataaatcca

SEQ ID NO: 5295851 - DNA, 25 bp, Homo sapien
ctgacattgcttctcggaaatggct

SEQ ID NO: 5295852 - DNA, 25 bp, Homo sapien
tctgctctcaataaatccaataggg

SEQ ID NO: 5295853 - DNA, 25 bp, Homo sapien
attgcttctcggaaatggctctgct

SEQ ID NO: 5295854 - DNA, 25 bp, Homo sapien
ccggagactccagcagctgcgaaag

SEQ ID NO: 5295855 - DNA, 25 bp, Homo sapien
caccggagactccagcagctgcgaa

SEQ ID NO: 5295856 - DNA, 25 bp, Homo sapien
ccacaccaccggagactccagcagc

SEQ ID NO: 5295857 - DNA, 25 bp, Homo sapien
gactccagcagctgcgaaagggtgc

SEQ ID NO: 5295858 - DNA, 25 bp, Homo sapien
gtctcctccatctcgatggggtgat

SEQ ID NO: 5295859 - DNA, 25 bp, Homo sapien
ctccatctcgatggggtgatgaact

SEQ ID NO: 5295860 - DNA, 25 bp, Homo sapien
cgatggggtgatgaactgtcttgct

SEQ ID NO: 5295861 - DNA, 25 bp, Homo sapien
tgtcttgctcagtgagaagcaggca

SEQ ID NO: 5295862 - DNA, 25 bp, Homo sapien
ccccaccctccgagtcccatggagc

SEQ ID NO: 5295863 - DNA, 25 bp, Homo sapien
cgagtcccatggagcatcctccaag

SEQ ID NO: 5295864 - DNA, 25 bp, Homo sapien
tccgagtcccatggagcatcctcca

SEQ ID NO: 5295865 - DNA, 25 bp, Homo sapien
ccctccgagtcccatggagcatcct

SEQ ID NO: 5295866 - DNA, 25 bp, Homo sapien
cataagagatcagttttggtgttag

SEQ ID NO: 5295867 - DNA, 25 bp, Homo sapien
ataaacataagagatcagttttggt

SEQ ID NO: 5295868 - DNA, 25 bp, Homo sapien
aaacataagagatcagttttggtgt

SEQ ID NO: 5295869 - DNA, 25 bp, Homo sapien
taagagatcagttttggtgttagaa

SEQ ID NO: 5295870 - DNA, 25 bp, Homo sapien
cagacccaacagtgggtttctgggc

SEQ ID NO: 5295871 - DNA, 25 bp, Homo sapien
cccggtttctaaggtgctctgcagc

SEQ ID NO: 5295872 - DNA, 25 bp, Homo sapien
tccttctcgtctgagcctcccttcc

SEQ ID NO: 5295873 - DNA, 25 bp, Homo sapien
tctgttccttcagacccaacagtgg

SEQ ID NO: 5295874 - DNA, 25 bp, Homo sapien
ctgggatagtacgtaagggcttcca

SEQ ID NO: 5295875 - DNA, 25 bp, Homo sapien
aaccagctgcgtgatcttgagcgag

SEQ ID NO: 5295876 - DNA, 25 bp, Homo sapien
tatgtaggatcagtgctccagggtc

SEQ ID NO: 5295877 - DNA, 25 bp, Homo sapien
taagggcttccaatctggactcaaa

SEQ ID NO: 5295878 - DNA, 25 bp, Homo sapien
cgtgctcacgggatgatttactcca

SEQ ID NO: 5295879 - DNA, 25 bp, Homo sapien
tacaagagctattagggaccactgc

SEQ ID NO: 5295880 - DNA, 25 bp, Homo sapien
cagaaacaatctctgcgtcctggag

SEQ ID NO: 5295881 - DNA, 25 bp, Homo sapien
ccagctctgagagtgacagcgtgtt

SEQ ID NO: 5295882 - DNA, 25 bp, Homo sapien
tggacacgactcatcttgggccatg

SEQ ID NO: 5295883 - DNA, 25 bp, Homo sapien
ctcatcttgggccatggctgttcca

SEQ ID NO: 5295884 - DNA, 25 bp, Homo sapien
acgactcatcttgggccatggctgt

SEQ ID NO: 5295885 - DNA, 25 bp, Homo sapien
gacacgactcatcttgggccatggc

SEQ ID NO: 5295886 - DNA, 25 bp, Homo sapien
cctgaagcttggtccgttttcttca

SEQ ID NO: 5295887 - DNA, 25 bp, Homo sapien
tctgacaggtaatgctagggagccc

SEQ ID NO: 5295888 - DNA, 25 bp, Homo sapien
tgccgtggacatactgacatctttc

SEQ ID NO: 5295889 - DNA, 25 bp, Homo sapien
taatgccattgcttagagggctttc

SEQ ID NO: 5295890 - DNA, 25 bp, Homo sapien
caagcagctggcgtgctagttccaa

SEQ ID NO: 5295891 - DNA, 25 bp, Homo sapien
gcagaccttgtttatacctgaaaga

SEQ ID NO: 5295892 - DNA, 25 bp, Homo sapien
tagttccaaagctaccatgcagacc

SEQ ID NO: 5295893 - DNA, 25 bp, Homo sapien
caaactggctgaatggaccttagag

SEQ ID NO: 5295894 - DNA, 25 bp, Homo sapien
cttagtgtcagtcaacctgattgga

SEQ ID NO: 5295895 - DNA, 25 bp, Homo sapien
agttctggaacctgaaaagtcctag

SEQ ID NO: 5295896 - DNA, 25 bp, Homo sapien
gaaaagtcctagatcaaagcaccag

SEQ ID NO: 5295897 - DNA, 25 bp, Homo sapien
catcttctcgctgttgcctaacagg

SEQ ID NO: 5295898 - DNA, 25 bp, Homo sapien
gaaaaacagtcatgagcctctagct

SEQ ID NO: 5295899 - DNA, 25 bp, Homo sapien
tatatgaggaagatggtaaccacca

SEQ ID NO: 5295900 - DNA, 25 bp, Homo sapien
taatcgcgtcccattaaaagtgcct

SEQ ID NO: 5295901 - DNA, 25 bp, Homo sapien
cagtggtctcaaggcaatcctgctt

SEQ ID NO: 5295902 - DNA, 25 bp, Homo sapien
gctattcctatatagctttgagttt

SEQ ID NO: 5295903 - DNA, 25 bp, Homo sapien
gttgattaggcctttgtcatgtgtc

SEQ ID NO: 5295904 - DNA, 25 bp, Homo sapien
tgagttttgatgaggtaatgttaag

SEQ ID NO: 5295905 - DNA, 25 bp, Homo sapien
gtgcattgcccgtttatatcctttg

SEQ ID NO: 5295906 - DNA, 25 bp, Homo sapien
tctgggctgctgaaaagattctgta

SEQ ID NO: 5295907 - DNA, 25 bp, Homo sapien
ggtaattttcgtggctcttgctgac

SEQ ID NO: 5295908 - DNA, 25 bp, Homo sapien
ctttgtggaggagagctaatgacta

SEQ ID NO: 5295909 - DNA, 25 bp, Homo sapien
ttctgtaccttgatctgaatagtgg

SEQ ID NO: 5295910 - DNA, 25 bp, Homo sapien
cctcacaaggtccaaatgggatact

SEQ ID NO: 5295911 - DNA, 25 bp, Homo sapien
tacttagcgcgccaggacaagatga

SEQ ID NO: 5295912 - DNA, 25 bp, Homo sapien
ggatactcagggcttcttccaccca

SEQ ID NO: 5295913 - DNA, 25 bp, Homo sapien
cacaaggtccaaatgggatactcag

SEQ ID NO: 5295914 - DNA, 25 bp, Homo sapien
gactgtggccatatcctggcacagc

SEQ ID NO: 5295915 - DNA, 25 bp, Homo sapien
tggccatatcctggcacagcagcca

SEQ ID NO: 5295916 - DNA, 25 bp, Homo sapien
gaagactgtggccatatcctggcac

SEQ ID NO: 5295917 - DNA, 25 bp, Homo sapien
tgtggccatatcctggcacagcagc

SEQ ID NO: 5295918 - DNA, 25 bp, Homo sapien
ggaaatgacatacagcaaggtgtcc

SEQ ID NO: 5295919 - DNA, 25 bp, Homo sapien
gggaaatgacatacagcaaggtgtc

SEQ ID NO: 5295920 - DNA, 25 bp, Homo sapien
ctgagcttcttgcaagagacatggg

SEQ ID NO: 5295921 - DNA, 25 bp, Homo sapien
tgggaaatgacatacagcaaggtgt

SEQ ID NO: 5295922 - DNA, 25 bp, Homo sapien
gatgccctctttggtagggaggagt

SEQ ID NO: 5295923 - DNA, 25 bp, Homo sapien
atacaggcacctgaggcgcccaagg

SEQ ID NO: 5295924 - DNA, 25 bp, Homo sapien
tgaggcgcccaagggctcatcccag

SEQ ID NO: 5295925 - DNA, 25 bp, Homo sapien
gagtgggtgatacaggcacctgagg

SEQ ID NO: 5295926 - DNA, 25 bp, Homo sapien
gaaagcacccaacacttactacagg

SEQ ID NO: 5295927 - DNA, 25 bp, Homo sapien
aaccaacctaagaatgccggccgtg

SEQ ID NO: 5295928 - DNA, 25 bp, Homo sapien
cagacctggtttggaatctagatcc

SEQ ID NO: 5295929 - DNA, 25 bp, Homo sapien
taagccttggtgttcgtcacatgaa

SEQ ID NO: 5295930 - DNA, 25 bp, Homo sapien
gagcagcctaggaatgaacagcaca

SEQ ID NO: 5295931 - DNA, 25 bp, Homo sapien
agcagtggtcccgtggactggccct

SEQ ID NO: 5295932 - DNA, 25 bp, Homo sapien
tcttgcaccaccgagtctgccgtta

SEQ ID NO: 5295933 - DNA, 25 bp, Homo sapien
tgactggcccaagcatgggttaaac

SEQ ID NO: 5295934 - DNA, 25 bp, Homo sapien
tattaatagccaattatctgggtgc

SEQ ID NO: 5295935 - DNA, 25 bp, Homo sapien
ttaattaatccacagaccacgtggc

SEQ ID NO: 5295936 - DNA, 25 bp, Homo sapien
tcacaaagtcgcagtaaggatcaaa

SEQ ID NO: 5295937 - DNA, 25 bp, Homo sapien
agctggcagccatcaattggccatc

SEQ ID NO: 5295938 - DNA, 25 bp, Homo sapien
tatctcctgccgcttgtgtgcagca

SEQ ID NO: 5295939 - DNA, 25 bp, Homo sapien
actcggggagtaaaacacacttgat

SEQ ID NO: 5295940 - DNA, 25 bp, Homo sapien
tgtgcagcatgagtctctgaggacc

SEQ ID NO: 5295941 - DNA, 25 bp, Homo sapien
tgatcttgacatgatgggagctaga

SEQ ID NO: 5295942 - DNA, 25 bp, Homo sapien
gcctgcagccagtggtagagggcac

SEQ ID NO: 5295943 - DNA, 25 bp, Homo sapien
ggctgcactaactttgggaagaacc

SEQ ID NO: 5295944 - DNA, 25 bp, Homo sapien
cttccaagctgtctttgttcaatcc

SEQ ID NO: 5295945 - DNA, 25 bp, Homo sapien
gctgtctttgttcaatcctgggtgt

SEQ ID NO: 5295946 - DNA, 25 bp, Homo sapien
tcaatcctgggtgtaggctgcacta

SEQ ID NO: 5295947 - DNA, 25 bp, Homo sapien
aggctctttcgtggtgttctgggca

SEQ ID NO: 5295948 - DNA, 25 bp, Homo sapien
caggctctttcgtggtgttctgggc

SEQ ID NO: 5295949 - DNA, 25 bp, Homo sapien
acaggctctttcgtggtgttctggg

SEQ ID NO: 5295950 - DNA, 25 bp, Homo sapien
actggcagaaccagccgacgagtca

SEQ ID NO: 5295951 - DNA, 25 bp, Homo sapien
cagagcaccccgaagactggcagaa

SEQ ID NO: 5295952 - DNA, 25 bp, Homo sapien
ttcctcttggttacccagaagaaca

SEQ ID NO: 5295953 - DNA, 25 bp, Homo sapien
agcaccgtgatccagagcaccccga

SEQ ID NO: 5295954 - DNA, 25 bp, Homo sapien
cttcccgcttcgaagagaagcgagc

SEQ ID NO: 5295955 - DNA, 25 bp, Homo sapien
tctagacccaggatccggttggagg

SEQ ID NO: 5295956 - DNA, 25 bp, Homo sapien
gagctctagacccaggatccggttg

SEQ ID NO: 5295957 - DNA, 25 bp, Homo sapien
tgcaaggcgcccttcccgcttcgaa

SEQ ID NO: 5295958 - DNA, 25 bp, Homo sapien
cgctccagcgggagaagcgcggtgg

SEQ ID NO: 5295959 - DNA, 25 bp, Homo sapien
aagctggacgcccgctccagcggga

SEQ ID NO: 5295960 - DNA, 25 bp, Homo sapien
cgaaacgtggcagggaaggaccgag

SEQ ID NO: 5295961 - DNA, 25 bp, Homo sapien
ggtgcagggcgacccgaaacgtggc

SEQ ID NO: 5295962 - DNA, 25 bp, Homo sapien
gctgccgccgatagggaaactgact

SEQ ID NO: 5295963 - DNA, 25 bp, Homo sapien
gcgcagctcccagaccatcgtgggt

SEQ ID NO: 5295964 - DNA, 25 bp, Homo sapien
gaccgaaacgctcggtgctgttgcg

SEQ ID NO: 5295965 - DNA, 25 bp, Homo sapien
aaactgactcgagcagcgagaggga

SEQ ID NO: 5295966 - DNA, 25 bp, Homo sapien
ctctgaacactgaaaggtgggagta

SEQ ID NO: 5295967 - DNA, 25 bp, Homo sapien
ggcccaggtagatgatcatcatggg

SEQ ID NO: 5295968 - DNA, 25 bp, Homo sapien
agtaggctccccagccaatgctttg

SEQ ID NO: 5295969 - DNA, 25 bp, Homo sapien
gcccaggtagatgatcatcatggga

SEQ ID NO: 5295970 - DNA, 25 bp, Homo sapien
tcccaagcaccttggacctctttca

SEQ ID NO: 5295971 - DNA, 25 bp, Homo sapien
cccaagcaccttggacctctttcag

SEQ ID NO: 5295972 - DNA, 25 bp, Homo sapien
ccaagcaccttggacctctttcagg

SEQ ID NO: 5295973 - DNA, 25 bp, Homo sapien
cgggcctgcaaagcgttctgctgca

SEQ ID NO: 5295974 - DNA, 25 bp, Homo sapien
attgctcagcgctttgtaatgccgc

SEQ ID NO: 5295975 - DNA, 25 bp, Homo sapien
cgggacctgcagtttcgggcctgca

SEQ ID NO: 5295976 - DNA, 25 bp, Homo sapien
tgcagcacaggagtccattgctcag

SEQ ID NO: 5295977 - DNA, 25 bp, Homo sapien
acagatggcagacagttacacaaga

SEQ ID NO: 5295978 - DNA, 25 bp, Homo sapien
taacagatggcagacagttacacaa

SEQ ID NO: 5295979 - DNA, 25 bp, Homo sapien
tacacaagaacaccgccaagctttt

SEQ ID NO: 5295980 - DNA, 25 bp, Homo sapien
caagcttttgagatggtgcagcacc

SEQ ID NO: 5295981 - DNA, 25 bp, Homo sapien
tttggcatatggggaaactgaggcc

SEQ ID NO: 5295982 - DNA, 25 bp, Homo sapien
tgtttggcatatggggaaactgagg

SEQ ID NO: 5295983 - DNA, 25 bp, Homo sapien
ctgtttggcatatggggaaactgag

SEQ ID NO: 5295984 - DNA, 25 bp, Homo sapien
gtttggcatatggggaaactgaggc

SEQ ID NO: 5295985 - DNA, 25 bp, Homo sapien
tttaccactcctgttgttggcgagt

SEQ ID NO: 5295986 - DNA, 25 bp, Homo sapien
tcacagccgaagacattagagagca

SEQ ID NO: 5295987 - DNA, 25 bp, Homo sapien
gagttctgtgtaagctgttctctcc

SEQ ID NO: 5295988 - DNA, 25 bp, Homo sapien
tcctggatcaggaccttctttacca

SEQ ID NO: 5295989 - DNA, 25 bp, Homo sapien
taagcagtagcagggcagattgcag

SEQ ID NO: 5295990 - DNA, 25 bp, Homo sapien
cagtgagaagatgagtcgcacacat

SEQ ID NO: 5295991 - DNA, 25 bp, Homo sapien
acagtgagaagatgagtcgcacaca

SEQ ID NO: 5295992 - DNA, 25 bp, Homo sapien
aaaggtaagcagtagcagggcagat

SEQ ID NO: 5295993 - DNA, 25 bp, Homo sapien
aaagaataaagccagctggattttc

SEQ ID NO: 5295994 - DNA, 25 bp, Homo sapien
taaagccagctggattttcctctca

SEQ ID NO: 5295995 - DNA, 25 bp, Homo sapien
tcatctttctgccacatcagtgaat

SEQ ID NO: 5295996 - DNA, 25 bp, Homo sapien
tctgccacatcagtgaatctttgtc

SEQ ID NO: 5295997 - DNA, 25 bp, Homo sapien
gatgttttacccactttgcagctca

SEQ ID NO: 5295998 - DNA, 25 bp, Homo sapien
cactgtctctttgaagggcaaggga

SEQ ID NO: 5295999 - DNA, 25 bp, Homo sapien
ggcaagggattcctgacaccagact

SEQ ID NO: 5296000 - DNA, 25 bp, Homo sapien
ggttgcgcatatcagtcaatgacag

SEQ ID NO: 5296001 - DNA, 25 bp, Homo sapien
gatgacatctctggttaattaaagg

SEQ ID NO: 5296002 - DNA, 25 bp, Homo sapien
atgacatctctggttaattaaaggt

SEQ ID NO: 5296003 - DNA, 25 bp, Homo sapien
tgatgacatctctggttaattaaag

SEQ ID NO: 5296004 - DNA, 25 bp, Homo sapien
cttgatgacatctctggttaattaa

SEQ ID NO: 5296005 - DNA, 25 bp, Homo sapien
tttccaggtagctaacagtggcggc

SEQ ID NO: 5296006 - DNA, 25 bp, Homo sapien
taatggaagcaacactaggctggga

SEQ ID NO: 5296007 - DNA, 25 bp, Homo sapien
gctgggagtctgaaaccggaattct

SEQ ID NO: 5296008 - DNA, 25 bp, Homo sapien
tattgcagaggaaaagcggctccaa

SEQ ID NO: 5296009 - DNA, 25 bp, Homo sapien
ccatcaccagctgactgtctttgtc

SEQ ID NO: 5296010 - DNA, 25 bp, Homo sapien
ttaggaagttcaccatcaccagctg

SEQ ID NO: 5296011 - DNA, 25 bp, Homo sapien
tcttttctcattaggaagttcacca

SEQ ID NO: 5296012 - DNA, 25 bp, Homo sapien
cattgaacaggttctttcttcaaaa

SEQ ID NO: 5296013 - DNA, 25 bp, Homo sapien
ggtcttaaaaagtgagcatcgcctt

SEQ ID NO: 5296014 - DNA, 25 bp, Homo sapien
taaaaagtgagcatcgccttctact

SEQ ID NO: 5296015 - DNA, 25 bp, Homo sapien
gtgagcatcgccttctactttggca

SEQ ID NO: 5296016 - DNA, 25 bp, Homo sapien
taaggtcttaaaaagtgagcatcgc

SEQ ID NO: 5296017 - DNA, 25 bp, Homo sapien
tctgggtttagaaatggaatctgtt

SEQ ID NO: 5296018 - DNA, 25 bp, Homo sapien
cttctgggtttagaaatggaatctg

SEQ ID NO: 5296019 - DNA, 25 bp, Homo sapien
ctgggtttagaaatggaatctgtta

SEQ ID NO: 5296020 - DNA, 25 bp, Homo sapien
tgggtttagaaatggaatctgttag

SEQ ID NO: 5296021 - DNA, 25 bp, Homo sapien
ctccaaaggcagcattccaatattt

SEQ ID NO: 5296022 - DNA, 25 bp, Homo sapien
ggcagcattccaatatttagctgtt

SEQ ID NO: 5296023 - DNA, 25 bp, Homo sapien
tggtcttctggttgattatgagatg

SEQ ID NO: 5296024 - DNA, 25 bp, Homo sapien
gttgattatgagatgaactattttc

SEQ ID NO: 5296025 - DNA, 25 bp, Homo sapien
ctgctacagaaatgggctcccaggg

SEQ ID NO: 5296026 - DNA, 25 bp, Homo sapien
acatcggaaggcgtttagagctggt

SEQ ID NO: 5296027 - DNA, 25 bp, Homo sapien
catgtaggccagtgatgtgggtgct

SEQ ID NO: 5296028 - DNA, 25 bp, Homo sapien
gcagccttgaacatcggaaggcgtt

SEQ ID NO: 5296029 - DNA, 25 bp, Homo sapien
aggcacagggcccaagctgctgttc

SEQ ID NO: 5296030 - DNA, 25 bp, Homo sapien
ctcgtttctgctcccataacttcag

SEQ ID NO: 5296031 - DNA, 25 bp, Homo sapien
gcttgccttagagccaattctggcc

SEQ ID NO: 5296032 - DNA, 25 bp, Homo sapien
tctgctcccataacttcagcttggg

SEQ ID NO: 5296033 - DNA, 25 bp, Homo sapien
ttcagcttgggcttgccttagagcc

SEQ ID NO: 5296034 - DNA, 25 bp, Homo sapien
agcaccccaggtgtattcctcacac

SEQ ID NO: 5296035 - DNA, 25 bp, Homo sapien
tgaggttgatctgagcaccccaggt

SEQ ID NO: 5296036 - DNA, 25 bp, Homo sapien
gagcaccccaggtgtattcctcaca

SEQ ID NO: 5296037 - DNA, 25 bp, Homo sapien
gaggttgatctgagcaccccaggtg

SEQ ID NO: 5296038 - DNA, 25 bp, Homo sapien
gctcagcgttctctctcagggatgg

SEQ ID NO: 5296039 - DNA, 25 bp, Homo sapien
tcgtaggcattgctcagcgttctct

SEQ ID NO: 5296040 - DNA, 25 bp, Homo sapien
cattgctcagcgttctctctcaggg

SEQ ID NO: 5296041 - DNA, 25 bp, Homo sapien
ggcatgtggtcgtaggcattgctca

SEQ ID NO: 5296042 - DNA, 25 bp, Homo sapien
cattaaaccccatgctaagggcact

SEQ ID NO: 5296043 - DNA, 25 bp, Homo sapien
gaatgttctgtatgagtcaaccagc

SEQ ID NO: 5296044 - DNA, 25 bp, Homo sapien
taagggcactctaacaatctctgag

SEQ ID NO: 5296045 - DNA, 25 bp, Homo sapien
gaacccaaagccacttgaaagagga

SEQ ID NO: 5296046 - DNA, 25 bp, Homo sapien
caacggtgtgtgatactaagggtga

SEQ ID NO: 5296047 - DNA, 25 bp, Homo sapien
cagggcctgacgtgggcccacttct

SEQ ID NO: 5296048 - DNA, 25 bp, Homo sapien
gggcccacttctccaacggtgtgtg

SEQ ID NO: 5296049 - DNA, 25 bp, Homo sapien
ccaatgacccaaggggtctcgatag

SEQ ID NO: 5296050 - DNA, 25 bp, Homo sapien
cacttggtgaggctccccctcaggt

SEQ ID NO: 5296051 - DNA, 25 bp, Homo sapien
ggatgacaggaacatcacacttggt

SEQ ID NO: 5296052 - DNA, 25 bp, Homo sapien
ctggatgacaggaacatcacacttg

SEQ ID NO: 5296053 - DNA, 25 bp, Homo sapien
ggctccccctcaggtgagacttcat

SEQ ID NO: 5296054 - DNA, 25 bp, Homo sapien
gagaaaccatgcaagcccaggctta

SEQ ID NO: 5296055 - DNA, 25 bp, Homo sapien
ctgcaagtgggagaaaccatgcaag

SEQ ID NO: 5296056 - DNA, 25 bp, Homo sapien
ctgtcttgagctatgcggcttctgg

SEQ ID NO: 5296057 - DNA, 25 bp, Homo sapien
gagctatgcggcttctggcataatt

SEQ ID NO: 5296058 - DNA, 25 bp, Homo sapien
caagtgccctatgctggccagtcaa

SEQ ID NO: 5296059 - DNA, 25 bp, Homo sapien
ggttgtgctagatgcctctcccgtg

SEQ ID NO: 5296060 - DNA, 25 bp, Homo sapien
caagtctagtggagaaaggttgcgc

SEQ ID NO: 5296061 - DNA, 25 bp, Homo sapien
tgacccattgcaggagcttgataaa

SEQ ID NO: 5296062 - DNA, 25 bp, Homo sapien
ggttgcttggtctatggtcccgaaa

SEQ ID NO: 5296063 - DNA, 25 bp, Homo sapien
cacttctaggtcacaacctaattcc

SEQ ID NO: 5296064 - DNA, 25 bp, Homo sapien
ggaacaactgcaggtcagtactcag

SEQ ID NO: 5296065 - DNA, 25 bp, Homo sapien
aaaacccctagctggcaacctggag

SEQ ID NO: 5296066 - DNA, 25 bp, Homo sapien
tcaaggaagtagtttgatacattca

SEQ ID NO: 5296067 - DNA, 25 bp, Homo sapien
ggacagagctttaataacgagatgg

SEQ ID NO: 5296068 - DNA, 25 bp, Homo sapien
gtttgatacattcagaaagaggatg

SEQ ID NO: 5296069 - DNA, 25 bp, Homo sapien
tgttggatttggtagcctctctgtc

SEQ ID NO: 5296070 - DNA, 25 bp, Homo sapien
tttgatatgctttccctgcgtgggc

SEQ ID NO: 5296071 - DNA, 25 bp, Homo sapien
tgctgatggtcaactctcagccctt

SEQ ID NO: 5296072 - DNA, 25 bp, Homo sapien
tggacttgacaacccaacctctgga

SEQ ID NO: 5296073 - DNA, 25 bp, Homo sapien
gctttcgatattccagaactgctga

SEQ ID NO: 5296074 - DNA, 25 bp, Homo sapien
ctgagtgatgtaggaccactcaaac

SEQ ID NO: 5296075 - DNA, 25 bp, Homo sapien
ggctctcaggcttaatcaatgtgga

SEQ ID NO: 5296076 - DNA, 25 bp, Homo sapien
tgatgtaggaccactcaaaccaccc

SEQ ID NO: 5296077 - DNA, 25 bp, Homo sapien
gggctctcaggcttaatcaatgtgg

SEQ ID NO: 5296078 - DNA, 25 bp, Homo sapien
agtcacttgagtttgcagccacaga

SEQ ID NO: 5296079 - DNA, 25 bp, Homo sapien
tgtatggaggctaaccacaccagct

SEQ ID NO: 5296080 - DNA, 25 bp, Homo sapien
ccttctcaggagtacagtgccatca

SEQ ID NO: 5296081 - DNA, 25 bp, Homo sapien
gaagactaccccatgacctcagatg

SEQ ID NO: 5296082 - DNA, 25 bp, Homo sapien
tgccatcttgggttaagttttggaa

SEQ ID NO: 5296083 - DNA, 25 bp, Homo sapien
ctggaggtatatccctttgccatct

SEQ ID NO: 5296084 - DNA, 25 bp, Homo sapien
tctggaggtatatccctttgccatc

SEQ ID NO: 5296085 - DNA, 25 bp, Homo sapien
gcttctggaggtatatccctttgcc

SEQ ID NO: 5296086 - DNA, 25 bp, Homo sapien
cagctgacagacgtcatcactgagc

SEQ ID NO: 5296087 - DNA, 25 bp, Homo sapien
ctgacaaagtccatctggaggcggg

SEQ ID NO: 5296088 - DNA, 25 bp, Homo sapien
gccgccgtagcggatgagcatcagc

SEQ ID NO: 5296089 - DNA, 25 bp, Homo sapien
gttctctacacgcagcatcaagtgg

SEQ ID NO: 5296090 - DNA, 25 bp, Homo sapien
tcaggtatcctgacccacggtcttg

SEQ ID NO: 5296091 - DNA, 25 bp, Homo sapien
gtatcctgacccacggtcttgcttg

SEQ ID NO: 5296092 - DNA, 25 bp, Homo sapien
ccagttcaggtatcctgacccacgg

SEQ ID NO: 5296093 - DNA, 25 bp, Homo sapien
gctcccagttcaggtatcctgaccc

SEQ ID NO: 5296094 - DNA, 25 bp, Homo sapien
cctggatgctcatagtacctgatgc

SEQ ID NO: 5296095 - DNA, 25 bp, Homo sapien
tgctcatagtacctgatgcattaag

SEQ ID NO: 5296096 - DNA, 25 bp, Homo sapien
agctgcttccacaggtccctgaatt

SEQ ID NO: 5296097 - DNA, 25 bp, Homo sapien
ctgaattcctggatgctcatagtac

SEQ ID NO: 5296098 - DNA, 25 bp, Homo sapien
ttcttcttaacatcctttattgagt

SEQ ID NO: 5296099 - DNA, 25 bp, Homo sapien
tttcttcttaacatcctttattgag

SEQ ID NO: 5296100 - DNA, 25 bp, Homo sapien
ttttcttcttaacatcctttattga

SEQ ID NO: 5296101 - DNA, 25 bp, Homo sapien
gatcccctggcaggcttccaggcta

SEQ ID NO: 5296102 - DNA, 25 bp, Homo sapien
caggcttccaggctaaagaagggct

SEQ ID NO: 5296103 - DNA, 25 bp, Homo sapien
gcttccaggctaaagaagggctgtc

SEQ ID NO: 5296104 - DNA, 25 bp, Homo sapien
tccaggctaaagaagggctgtctgc

SEQ ID NO: 5296105 - DNA, 25 bp, Homo sapien
ctgtgaaggagcgaaagagtccaca

SEQ ID NO: 5296106 - DNA, 25 bp, Homo sapien
aaagagtccacatgggggctggccc

SEQ ID NO: 5296107 - DNA, 25 bp, Homo sapien
gatgaccaccatgtatgtacgtggg

SEQ ID NO: 5296108 - DNA, 25 bp, Homo sapien
gccagctgatgaccaccatgtatgt

SEQ ID NO: 5296109 - DNA, 25 bp, Homo sapien
tctgaagttgaactgcattaatctc

SEQ ID NO: 5296110 - DNA, 25 bp, Homo sapien
gaagttgaactgcattaatctctgg

SEQ ID NO: 5296111 - DNA, 25 bp, Homo sapien
tgaccaggtcatctggttcaggagg

SEQ ID NO: 5296112 - DNA, 25 bp, Homo sapien
ttgaccaggtcatctggttcaggag

SEQ ID NO: 5296113 - DNA, 25 bp, Homo sapien
tggtgaagaattcatcctgcctttc

SEQ ID NO: 5296114 - DNA, 25 bp, Homo sapien
gaagaattcatcctgcctttcattt

SEQ ID NO: 5296115 - DNA, 25 bp, Homo sapien
aattcatcctgcctttcattttggt

SEQ ID NO: 5296116 - DNA, 25 bp, Homo sapien
ttcatcctgcctttcattttggtct

SEQ ID NO: 5296117 - DNA, 25 bp, Homo sapien
tacaacgggtaatgtttgccataga

SEQ ID NO: 5296118 - DNA, 25 bp, Homo sapien
gaacagggtctgtaaggatccgcat

SEQ ID NO: 5296119 - DNA, 25 bp, Homo sapien
gcccaggtactgttaggatacaacg

SEQ ID NO: 5296120 - DNA, 25 bp, Homo sapien
aacaccctggcttggaaagcagtcc

SEQ ID NO: 5296121 - DNA, 25 bp, Homo sapien
tttgagaagacgacaccagaattgc

SEQ ID NO: 5296122 - DNA, 25 bp, Homo sapien
ttgagaagacgacaccagaattgct

SEQ ID NO: 5296123 - DNA, 25 bp, Homo sapien
ctttgagaagacgacaccagaattg

SEQ ID NO: 5296124 - DNA, 25 bp, Homo sapien
gaagaccctgaggacgaactctgac

SEQ ID NO: 5296125 - DNA, 25 bp, Homo sapien
gcctccaatatgcagggcacgatga

SEQ ID NO: 5296126 - DNA, 25 bp, Homo sapien
tctgacttctggtgggcctccaata

SEQ ID NO: 5296127 - DNA, 25 bp, Homo sapien
cgatgaggtacgtccctggttccag

SEQ ID NO: 5296128 - DNA, 25 bp, Homo sapien
gcagtctcctctggtcatcatggta

SEQ ID NO: 5296129 - DNA, 25 bp, Homo sapien
tctccttgagaaacctatcaggctg

SEQ ID NO: 5296130 - DNA, 25 bp, Homo sapien
ggctggctcagaggagtgtttctct

SEQ ID NO: 5296131 - DNA, 25 bp, Homo sapien
ggctcagaggagtgtttctctggaa

SEQ ID NO: 5296132 - DNA, 25 bp, Homo sapien
aatggcgaggagaggcttccgcttg

SEQ ID NO: 5296133 - DNA, 25 bp, Homo sapien
cgaggagaggcttccgcttgcggca

SEQ ID NO: 5296134 - DNA, 25 bp, Homo sapien
ggcgaggagaggcttccgcttgcgg

SEQ ID NO: 5296135 - DNA, 25 bp, Homo sapien
gaggagaggcttccgcttgcggcac

SEQ ID NO: 5296136 - DNA, 25 bp, Homo sapien
cagacagcaggaactgcgggttctt

SEQ ID NO: 5296137 - DNA, 25 bp, Homo sapien
ctcgggcctccagacagacagcagg

SEQ ID NO: 5296138 - DNA, 25 bp, Homo sapien
cctcctcgggcctccagacagacag

SEQ ID NO: 5296139 - DNA, 25 bp, Homo sapien
gacagacagcaggaactgcgggttc

SEQ ID NO: 5296140 - DNA, 25 bp, Homo sapien
tgttataccccacaagcatgtgcta

SEQ ID NO: 5296141 - DNA, 25 bp, Homo sapien
cacactgactggagttgttcccacc

SEQ ID NO: 5296142 - DNA, 25 bp, Homo sapien
actgactggagttgttcccaccact

SEQ ID NO: 5296143 - DNA, 25 bp, Homo sapien
ctggcccaggtgttataccccacaa

SEQ ID NO: 5296144 - DNA, 25 bp, Homo sapien
ctgagtaagcaattgtattaactcc

SEQ ID NO: 5296145 - DNA, 25 bp, Homo sapien
cctgagagccctgctcctgtgcaca

SEQ ID NO: 5296146 - DNA, 25 bp, Homo sapien
tgagagccctgctcctgtgcacatg

SEQ ID NO: 5296147 - DNA, 25 bp, Homo sapien
gccctgctcctgtgcacatgctcac

SEQ ID NO: 5296148 - DNA, 25 bp, Homo sapien
agagccctgctcctgtgcacatgct

SEQ ID NO: 5296149 - DNA, 25 bp, Homo sapien
tcccctcccgcatggtgtacgtcca

SEQ ID NO: 5296150 - DNA, 25 bp, Homo sapien
cgcatggtgtacgtccacttctggg

SEQ ID NO: 5296151 - DNA, 25 bp, Homo sapien
ccaggagcacgaaatgtgttttaaa

SEQ ID NO: 5296152 - DNA, 25 bp, Homo sapien
gataaccaggagcacgaaatgtgtt

SEQ ID NO: 5296153 - DNA, 25 bp, Homo sapien
aattctccgtcattgtctttcctca

SEQ ID NO: 5296154 - DNA, 25 bp, Homo sapien
gaattctccgtcattgtctttcctc

SEQ ID NO: 5296155 - DNA, 25 bp, Homo sapien
cagaattctccgtcattgtctttcc

SEQ ID NO: 5296156 - DNA, 25 bp, Homo sapien
agaattctccgtcattgtctttcct

SEQ ID NO: 5296157 - DNA, 25 bp, Homo sapien
cgtagcttgacgagatattcaggtc

SEQ ID NO: 5296158 - DNA, 25 bp, Homo sapien
gggttccgtagcttgacgagatatt

SEQ ID NO: 5296159 - DNA, 25 bp, Homo sapien
gcttgacgagatattcaggtctatg

SEQ ID NO: 5296160 - DNA, 25 bp, Homo sapien
cccaggggttccgtagcttgacgag

SEQ ID NO: 5296161 - DNA, 25 bp, Homo sapien
gattcctgtgagagtataggcatgg

SEQ ID NO: 5296162 - DNA, 25 bp, Homo sapien
tcctgtgagagtataggcatggcct

SEQ ID NO: 5296163 - DNA, 25 bp, Homo sapien
tcctgattcctgtgagagtataggc

SEQ ID NO: 5296164 - DNA, 25 bp, Homo sapien
ctgtgagagtataggcatggccttc

SEQ ID NO: 5296165 - DNA, 25 bp, Homo sapien
ggcttctgccaggttgatggtcatt

SEQ ID NO: 5296166 - DNA, 25 bp, Homo sapien
caagggcttcagacacctgtcctga

SEQ ID NO: 5296167 - DNA, 25 bp, Homo sapien
taggtggcttcgatgaggatgtccc

SEQ ID NO: 5296168 - DNA, 25 bp, Homo sapien
cctgtcctgactgcaagtcttcata

SEQ ID NO: 5296169 - DNA, 25 bp, Homo sapien
ttttccagaagtgctccccagaaca

SEQ ID NO: 5296170 - DNA, 25 bp, Homo sapien
caagttcttataggtggaggagaca

SEQ ID NO: 5296171 - DNA, 25 bp, Homo sapien
tcattcacaggcagacggtcatcga

SEQ ID NO: 5296172 - DNA, 25 bp, Homo sapien
gaacccagttcccatagtgccagaa

SEQ ID NO: 5296173 - DNA, 25 bp, Homo sapien
ccccgggtgaatgaggactgctgca

SEQ ID NO: 5296174 - DNA, 25 bp, Homo sapien
gagtggccccgggtgaatgaggact

SEQ ID NO: 5296175 - DNA, 25 bp, Homo sapien
gcagatggtgatcagcccagaaggt

SEQ ID NO: 5296176 - DNA, 25 bp, Homo sapien
aaggtgaagacatggtcctccagga

SEQ ID NO: 5296177 - DNA, 25 bp, Homo sapien
tcaggggaacaacccggctcaggat

SEQ ID NO: 5296178 - DNA, 25 bp, Homo sapien
aactctgattcaggggaacaacccg

SEQ ID NO: 5296179 - DNA, 25 bp, Homo sapien
gatgccagcatacttctcagtgaaa

SEQ ID NO: 5296180 - DNA, 25 bp, Homo sapien
gaagatgccagcatacttctcagtg

SEQ ID NO: 5296181 - DNA, 25 bp, Homo sapien
catgaatctactggggactttatga

SEQ ID NO: 5296182 - DNA, 25 bp, Homo sapien
tctgcatgaatctactggggacttt

SEQ ID NO: 5296183 - DNA, 25 bp, Homo sapien
tgcatgaatctactggggactttat

SEQ ID NO: 5296184 - DNA, 25 bp, Homo sapien
ctgcatgaatctactggggacttta

SEQ ID NO: 5296185 - DNA, 25 bp, Homo sapien
agaaaatgcccggtcccaatggcca

SEQ ID NO: 5296186 - DNA, 25 bp, Homo sapien
gcccggtcccaatggccaccctctc

SEQ ID NO: 5296187 - DNA, 25 bp, Homo sapien
ctgcagaaaatgcccggtcccaatg

SEQ ID NO: 5296188 - DNA, 25 bp, Homo sapien
cccggtcccaatggccaccctctct

SEQ ID NO: 5296189 - DNA, 25 bp, Homo sapien
cctggcacagatccagccttttggc

SEQ ID NO: 5296190 - DNA, 25 bp, Homo sapien
tcccctggcacagatccagcctttt

SEQ ID NO: 5296191 - DNA, 25 bp, Homo sapien
ccctggcacagatccagccttttgg

SEQ ID NO: 5296192 - DNA, 25 bp, Homo sapien
cccctggcacagatccagccttttg

SEQ ID NO: 5296193 - DNA, 25 bp, Homo sapien
cagggagccactgccgatggagctc

SEQ ID NO: 5296194 - DNA, 25 bp, Homo sapien
attcctcaggcactctgccagcagg

SEQ ID NO: 5296195 - DNA, 25 bp, Homo sapien
tggccgggaagctggtgtcttcaaa

SEQ ID NO: 5296196 - DNA, 25 bp, Homo sapien
tcttcaaagaggcagccattcctca

SEQ ID NO: 5296197 - DNA, 25 bp, Homo sapien
ctgtggagacgccctcctagagtac

SEQ ID NO: 5296198 - DNA, 25 bp, Homo sapien
ggtacagtccagtgagtcttcctga

SEQ ID NO: 5296199 - DNA, 25 bp, Homo sapien
aggtggtgggtacagtccagtgagt

SEQ ID NO: 5296200 - DNA, 25 bp, Homo sapien
tgggtacagtccagtgagtcttcct

SEQ ID NO: 5296201 - DNA, 25 bp, Homo sapien
tggtgggtacagtccagtgagtctt

SEQ ID NO: 5296202 - DNA, 25 bp, Homo sapien
tcccagagagtgtgggtccttgagc

SEQ ID NO: 5296203 - DNA, 25 bp, Homo sapien
caggtggttcgattttgtcccagag

SEQ ID NO: 5296204 - DNA, 25 bp, Homo sapien
gagagaatgggagcggagaagtcag

SEQ ID NO: 5296205 - DNA, 25 bp, Homo sapien
aatggagagaggacggtcagtttcc

SEQ ID NO: 5296206 - DNA, 25 bp, Homo sapien
tcttcccaggaagtttcttctacca

SEQ ID NO: 5296207 - DNA, 25 bp, Homo sapien
agaatataggcccagatgaaaccag

SEQ ID NO: 5296208 - DNA, 25 bp, Homo sapien
tataggcccagatgaaaccagttgg

SEQ ID NO: 5296209 - DNA, 25 bp, Homo sapien
gatgaaaccagttggcggttcttgc

SEQ ID NO: 5296210 - DNA, 25 bp, Homo sapien
agggagaatataggcccagatgaaa

SEQ ID NO: 5296211 - DNA, 25 bp, Homo sapien
tttgcttctttaagcgcctgggcaa

SEQ ID NO: 5296212 - DNA, 25 bp, Homo sapien
gagattttgcttctttaagcgcctg

SEQ ID NO: 5296213 - DNA, 25 bp, Homo sapien
gattttgcttctttaagcgcctggg

SEQ ID NO: 5296214 - DNA, 25 bp, Homo sapien
ttttgcttctttaagcgcctgggca

SEQ ID NO: 5296215 - DNA, 25 bp, Homo sapien
tgagtgggatggtgcaatcaagatc

SEQ ID NO: 5296216 - DNA, 25 bp, Homo sapien
ttacccaagcgaggctgttgagtgg

SEQ ID NO: 5296217 - DNA, 25 bp, Homo sapien
tgtttcccttacccaagcgaggctg

SEQ ID NO: 5296218 - DNA, 25 bp, Homo sapien
cctggggtccttcagcatggatttt

SEQ ID NO: 5296219 - DNA, 25 bp, Homo sapien
cctgagagggcgctgttcccaaatc

SEQ ID NO: 5296220 - DNA, 25 bp, Homo sapien
gaataggtcaactctgtcctcgcag

SEQ ID NO: 5296221 - DNA, 25 bp, Homo sapien
aggcggagactgagacaccggcact

SEQ ID NO: 5296222 - DNA, 25 bp, Homo sapien
caactgaaggagaggcgattcaaag

SEQ ID NO: 5296223 - DNA, 25 bp, Homo sapien
gcggccgcaggtctagagctgagcg

SEQ ID NO: 5296224 - DNA, 25 bp, Homo sapien
cgcgcggccgcaggtctagagctga

SEQ ID NO: 5296225 - DNA, 25 bp, Homo sapien
gacaacaagcccatggttctgctgg

SEQ ID NO: 5296226 - DNA, 25 bp, Homo sapien
ggaagagcattaccgcttccacgag

SEQ ID NO: 5296227 - DNA, 25 bp, Homo sapien
tgtgcaggcgtcaaaatcttacccc

SEQ ID NO: 5296228 - DNA, 25 bp, Homo sapien
ccgaggttttccagacggtgagtga

SEQ ID NO: 5296229 - DNA, 25 bp, Homo sapien
gctgagttctgatgggtgcgggcct

SEQ ID NO: 5296230 - DNA, 25 bp, Homo sapien
ctcttatttgatcttaatggcttaa

SEQ ID NO: 5296231 - DNA, 25 bp, Homo sapien
ttttagcaacacatcattcacgggc

SEQ ID NO: 5296232 - DNA, 25 bp, Homo sapien
gtcttacgtcttcactttttagcaa

SEQ ID NO: 5296233 - DNA, 25 bp, Homo sapien
tccgagagggtgagttgacactgca

SEQ ID NO: 5296234 - DNA, 25 bp, Homo sapien
tctggagggttgcacggaccttcta

SEQ ID NO: 5296235 - DNA, 25 bp, Homo sapien
tccccattgcgagtaaggctgctct

SEQ ID NO: 5296236 - DNA, 25 bp, Homo sapien
taagtgcgtccatgcctaggtctca

SEQ ID NO: 5296237 - DNA, 25 bp, Homo sapien
gccgacagggcaagtattatcatcc

SEQ ID NO: 5296238 - DNA, 25 bp, Homo sapien
gactcatgcctcaacttggccgtgg

SEQ ID NO: 5296239 - DNA, 25 bp, Homo sapien
cagggaacacggagctgactcatgc

SEQ ID NO: 5296240 - DNA, 25 bp, Homo sapien
ctgagggtgctttcgacagggccaa

SEQ ID NO: 5296241 - DNA, 25 bp, Homo sapien
cgtgttgatctttgcgcagaacgcc

SEQ ID NO: 5296242 - DNA, 25 bp, Homo sapien
gcaggcatttctcccggccatgaga

SEQ ID NO: 5296243 - DNA, 25 bp, Homo sapien
catgagatcttgctgcggtggccct

SEQ ID NO: 5296244 - DNA, 25 bp, Homo sapien
catgcctttgtgtgggtacttcagc

SEQ ID NO: 5296245 - DNA, 25 bp, Homo sapien
cgggctctgagcaaatggaaaagac

SEQ ID NO: 5296246 - DNA, 25 bp, Homo sapien
tcttctagagacattggcccaggag

SEQ ID NO: 5296247 - DNA, 25 bp, Homo sapien
taccagacctgaggcaattcacttg

SEQ ID NO: 5296248 - DNA, 25 bp, Homo sapien
caagttctcgggattagaaggacaa

SEQ ID NO: 5296249 - DNA, 25 bp, Homo sapien
ctgtagcaggatgggcactggaact

SEQ ID NO: 5296250 - DNA, 25 bp, Homo sapien
aaagcctgtagcaggatgggcactg

SEQ ID NO: 5296251 - DNA, 25 bp, Homo sapien
ctgagaaaccgtctggggccaacct

SEQ ID NO: 5296252 - DNA, 25 bp, Homo sapien
agaaagcctgtagcaggatgggcac

SEQ ID NO: 5296253 - DNA, 25 bp, Homo sapien
caggtgcatgggcatctggtgacct

SEQ ID NO: 5296254 - DNA, 25 bp, Homo sapien
agagtctggcgggagcaggtgcatg

SEQ ID NO: 5296255 - DNA, 25 bp, Homo sapien
caactccacagagagagtctggcgg

SEQ ID NO: 5296256 - DNA, 25 bp, Homo sapien
cagggcgcatcactgaagtgtagtg

SEQ ID NO: 5296257 - DNA, 25 bp, Homo sapien
tggagaaaacaccatcgccagtgac

SEQ ID NO: 5296258 - DNA, 25 bp, Homo sapien
caaagtgtcggggtaccaggtatga

SEQ ID NO: 5296259 - DNA, 25 bp, Homo sapien
accagccatagaggaggcttgacaa

SEQ ID NO: 5296260 - DNA, 25 bp, Homo sapien
gaggaggcttgacaatggagaaaac

SEQ ID NO: 5296261 - DNA, 25 bp, Homo sapien
gtggagacaggtccttcagtcaccc

SEQ ID NO: 5296262 - DNA, 25 bp, Homo sapien
gagctgactcctccttttggctctt

SEQ ID NO: 5296263 - DNA, 25 bp, Homo sapien
cagagctgactcctccttttggctc

SEQ ID NO: 5296264 - DNA, 25 bp, Homo sapien
ccgtccagtggagacaggtccttca

SEQ ID NO: 5296265 - DNA, 25 bp, Homo sapien
tgttctctcaacaatgcccaatgtc

SEQ ID NO: 5296266 - DNA, 25 bp, Homo sapien
tcttccaacctccacatggaaactg

SEQ ID NO: 5296267 - DNA, 25 bp, Homo sapien
gccttcagagaagagatgatcttca

SEQ ID NO: 5296268 - DNA, 25 bp, Homo sapien
tgtcaccccagtgactgtagatgaa

SEQ ID NO: 5296269 - DNA, 25 bp, Homo sapien
tctacacaatgctcaagtagacacg

SEQ ID NO: 5296270 - DNA, 25 bp, Homo sapien
gctcaagtagacacggtggccataa

SEQ ID NO: 5296271 - DNA, 25 bp, Homo sapien
gcgcgataatctcatgggcaggcac

SEQ ID NO: 5296272 - DNA, 25 bp, Homo sapien
aaagtcttcttctgcgcgataatct

SEQ ID NO: 5296273 - DNA, 25 bp, Homo sapien
gacaggcctgccattaggagctttc

SEQ ID NO: 5296274 - DNA, 25 bp, Homo sapien
gcaccctgcaaaaacatcccgaagg

SEQ ID NO: 5296275 - DNA, 25 bp, Homo sapien
tgtgcccagactggtaagcaccctg

SEQ ID NO: 5296276 - DNA, 25 bp, Homo sapien
ccaacagcaggattactggcacagc

SEQ ID NO: 5296277 - DNA, 25 bp, Homo sapien
tttgttgggtgatcccacgtggccg

SEQ ID NO: 5296278 - DNA, 25 bp, Homo sapien
tgtggtggcgtctctgtctctcaga

SEQ ID NO: 5296279 - DNA, 25 bp, Homo sapien
gcatagatgtgccacaagagacatt

SEQ ID NO: 5296280 - DNA, 25 bp, Homo sapien
tgtagccccgggcttagcagtttcc

SEQ ID NO: 5296281 - DNA, 25 bp, Homo sapien
tgcttgagaggctctgccaccacgt

SEQ ID NO: 5296282 - DNA, 25 bp, Homo sapien
tagaagccagtgcttgagaggctct

SEQ ID NO: 5296283 - DNA, 25 bp, Homo sapien
cctctggaaggtgtcccgggtacag

SEQ ID NO: 5296284 - DNA, 25 bp, Homo sapien
caccacgtccccctcttctttgcac

SEQ ID NO: 5296285 - DNA, 25 bp, Homo sapien
agctcagagacaggaggagcagcct

SEQ ID NO: 5296286 - DNA, 25 bp, Homo sapien
ggagcagcctctcagaagagaaagc

SEQ ID NO: 5296287 - DNA, 25 bp, Homo sapien
ccacagctcagagacaggaggagca

SEQ ID NO: 5296288 - DNA, 25 bp, Homo sapien
acaggaggagcagcctctcagaaga

SEQ ID NO: 5296289 - DNA, 25 bp, Homo sapien
tgctaattgtttcgtttaacgaggc

SEQ ID NO: 5296290 - DNA, 25 bp, Homo sapien
ctaggtgataatcttgttgtaatga

SEQ ID NO: 5296291 - DNA, 25 bp, Homo sapien
taatcttgttgtaatgaatttccca

SEQ ID NO: 5296292 - DNA, 25 bp, Homo sapien
cttgactttaggtaacgtgatgacc

SEQ ID NO: 5296293 - DNA, 25 bp, Homo sapien
agggaaagaaggacattgtcaaact

SEQ ID NO: 5296294 - DNA, 25 bp, Homo sapien
gagggaaagaaggacattgtcaaac

SEQ ID NO: 5296295 - DNA, 25 bp, Homo sapien
gggaaagaaggacattgtcaaactg

SEQ ID NO: 5296296 - DNA, 25 bp, Homo sapien
ggaaagaaggacattgtcaaactgc

SEQ ID NO: 5296297 - DNA, 25 bp, Homo sapien
cactgacaaagcatttttcatgcac

SEQ ID NO: 5296298 - DNA, 25 bp, Homo sapien
ctaggtgtgaaccactgacaaagca

SEQ ID NO: 5296299 - DNA, 25 bp, Homo sapien
ggtgtgaaccactgacaaagcattt

SEQ ID NO: 5296300 - DNA, 25 bp, Homo sapien
ccactgacaaagcatttttcatgca

SEQ ID NO: 5296301 - DNA, 25 bp, Homo sapien
tgtggcccacatctacataggctcc

SEQ ID NO: 5296302 - DNA, 25 bp, Homo sapien
cataggctccaactactgccagcag

SEQ ID NO: 5296303 - DNA, 25 bp, Homo sapien
cttgctttggtggtgatgtggccca

SEQ ID NO: 5296304 - DNA, 25 bp, Homo sapien
cagcagctggtggaatgacttaagg

SEQ ID NO: 5296305 - DNA, 25 bp, Homo sapien
gtgaactcgcttaattgttcccaga

SEQ ID NO: 5296306 - DNA, 25 bp, Homo sapien
ttcctgtgaactcgcttaattgttc

SEQ ID NO: 5296307 - DNA, 25 bp, Homo sapien
ccagattactaggtcaccaggagga

SEQ ID NO: 5296308 - DNA, 25 bp, Homo sapien
aattgttcccagattactaggtcac

SEQ ID NO: 5296309 - DNA, 25 bp, Homo sapien
tggtttggaactaggacatacttaa

SEQ ID NO: 5296310 - DNA, 25 bp, Homo sapien
gcatagctcttaagtgaaccattca

SEQ ID NO: 5296311 - DNA, 25 bp, Homo sapien
ggtttagctaagaggccaggatgaa

SEQ ID NO: 5296312 - DNA, 25 bp, Homo sapien
cattcaatgagctctcgggtgcagc

SEQ ID NO: 5296313 - DNA, 25 bp, Homo sapien
cctcacacagctgtaccaccccaag

SEQ ID NO: 5296314 - DNA, 25 bp, Homo sapien
ctcacacagctgtaccaccccaagt

SEQ ID NO: 5296315 - DNA, 25 bp, Homo sapien
cacacagctgtaccaccccaagttc

SEQ ID NO: 5296316 - DNA, 25 bp, Homo sapien
tcacacagctgtaccaccccaagtt

SEQ ID NO: 5296317 - DNA, 25 bp, Homo sapien
taaataaactacagtgccatccata

SEQ ID NO: 5296318 - DNA, 25 bp, Homo sapien
tgggagtaagccaaatgtccattaa

SEQ ID NO: 5296319 - DNA, 25 bp, Homo sapien
gccatgtttatgagagcaaaaccac

SEQ ID NO: 5296320 - DNA, 25 bp, Homo sapien
caactcttgttatgctatctcagcc

SEQ ID NO: 5296321 - DNA, 25 bp, Homo sapien
aaaccaagccttagatagctgcaga

SEQ ID NO: 5296322 - DNA, 25 bp, Homo sapien
gaagacgtgagacaaccctttactg

SEQ ID NO: 5296323 - DNA, 25 bp, Homo sapien
ttaccaaccgcagaaacttgaggtg

SEQ ID NO: 5296324 - DNA, 25 bp, Homo sapien
tgtccacccagcaccatgtagggat

SEQ ID NO: 5296325 - DNA, 25 bp, Homo sapien
aacttgaggttatacaggctgtcca

SEQ ID NO: 5296326 - DNA, 25 bp, Homo sapien
catggaagcccaaaggcagcacaag

SEQ ID NO: 5296327 - DNA, 25 bp, Homo sapien
gctttcacaggaaggcacacgattt

SEQ ID NO: 5296328 - DNA, 25 bp, Homo sapien
ggacagacaccatcagaacttgagg

SEQ ID NO: 5296329 - DNA, 25 bp, Homo sapien
ttagaccctcacagaccagggtttg

SEQ ID NO: 5296330 - DNA, 25 bp, Homo sapien
gaccctcacagaccagggtttgcag

SEQ ID NO: 5296331 - DNA, 25 bp, Homo sapien
cacagaccagggtttgcagttttct

SEQ ID NO: 5296332 - DNA, 25 bp, Homo sapien
cctcacagaccagggtttgcagttt

SEQ ID NO: 5296333 - DNA, 25 bp, Homo sapien
tgcaaatccatggcaagaattttta

SEQ ID NO: 5296334 - DNA, 25 bp, Homo sapien
gttgtaacatagaaacggatctttg

SEQ ID NO: 5296335 - DNA, 25 bp, Homo sapien
ttttaaatcgctggtatgttgtaac

SEQ ID NO: 5296336 - DNA, 25 bp, Homo sapien
gagagcttacgaaaatgactgagtt

SEQ ID NO: 5296337 - DNA, 25 bp, Homo sapien
tggcaaagagctcgccttgcaaact

SEQ ID NO: 5296338 - DNA, 25 bp, Homo sapien
gagctcgccttgcaaactgtggcag

SEQ ID NO: 5296339 - DNA, 25 bp, Homo sapien
tgttggcaaagagctcgccttgcaa

SEQ ID NO: 5296340 - DNA, 25 bp, Homo sapien
aaagagctcgccttgcaaactgtgg

SEQ ID NO: 5296341 - DNA, 25 bp, Homo sapien
cacccactgtgttgaggtctgcgga

SEQ ID NO: 5296342 - DNA, 25 bp, Homo sapien
tgattgtcagcattgggagccatag

SEQ ID NO: 5296343 - DNA, 25 bp, Homo sapien
tctttactgcctgggagtgccacac

SEQ ID NO: 5296344 - DNA, 25 bp, Homo sapien
tgcggatggtggatttgtctgcccc

SEQ ID NO: 5296345 - DNA, 25 bp, Homo sapien
ctgctaactccacacaggttgcagt

SEQ ID NO: 5296346 - DNA, 25 bp, Homo sapien
agccactgtacagagcccacttcag

SEQ ID NO: 5296347 - DNA, 25 bp, Homo sapien
cagtcctgctaactccacacaggtt

SEQ ID NO: 5296348 - DNA, 25 bp, Homo sapien
ttgcaaaggcaattaaagccactgt

SEQ ID NO: 5296349 - DNA, 25 bp, Homo sapien
cacgttattacctgtgtgctgagct

SEQ ID NO: 5296350 - DNA, 25 bp, Homo sapien
gcaggcattgcggatcttctccggg

SEQ ID NO: 5296351 - DNA, 25 bp, Homo sapien
ctgagctcgagctgcacggatggca

SEQ ID NO: 5296352 - DNA, 25 bp, Homo sapien
cagggctgtctagccggaagagttc

SEQ ID NO: 5296353 - DNA, 25 bp, Homo sapien
cccccagggcagatcagaagagaca

SEQ ID NO: 5296354 - DNA, 25 bp, Homo sapien
cagcacagagccagagcaatggtac

SEQ ID NO: 5296355 - DNA, 25 bp, Homo sapien
cttcgatgcatagatggccttcttg

SEQ ID NO: 5296356 - DNA, 25 bp, Homo sapien
ggatgctgccaaatgccgggatctt

SEQ ID NO: 5296357 - DNA, 25 bp, Homo sapien
ttgtaggtgctagggccacgggtgt

SEQ ID NO: 5296358 - DNA, 25 bp, Homo sapien
gcagggacaccctgaactcaatggg

SEQ ID NO: 5296359 - DNA, 25 bp, Homo sapien
cagggtttagactggagccaacatc

SEQ ID NO: 5296360 - DNA, 25 bp, Homo sapien
ccatgacaatatctgtgcggaggtt

SEQ ID NO: 5296361 - DNA, 25 bp, Homo sapien
tggcagggtttagactggagccaac

SEQ ID NO: 5296362 - DNA, 25 bp, Homo sapien
tcaatggcagggtttagactggagc

SEQ ID NO: 5296363 - DNA, 25 bp, Homo sapien
ttatgatctcctgttaggcagtcga

SEQ ID NO: 5296364 - DNA, 25 bp, Homo sapien
tcgatttctacttcagagcaagcca

SEQ ID NO: 5296365 - DNA, 25 bp, Homo sapien
gcaagccaccccatagctgaagtag

SEQ ID NO: 5296366 - DNA, 25 bp, Homo sapien
gagttagtctcaaagctgtagccca

SEQ ID NO: 5296367 - DNA, 25 bp, Homo sapien
ataaaacccagtggcagacaagctc

SEQ ID NO: 5296368 - DNA, 25 bp, Homo sapien
aaacccagtggcagacaagctcact

SEQ ID NO: 5296369 - DNA, 25 bp, Homo sapien
ctataaaacccagtggcagacaagc

SEQ ID NO: 5296370 - DNA, 25 bp, Homo sapien
aaaacccagtggcagacaagctcac

SEQ ID NO: 5296371 - DNA, 25 bp, Homo sapien
cggaggccctgctgtcaatttccct

SEQ ID NO: 5296372 - DNA, 25 bp, Homo sapien
tcctttgcaaacgtgacttggatca

SEQ ID NO: 5296373 - DNA, 25 bp, Homo sapien
tttgcaaacgtgacttggatcagct

SEQ ID NO: 5296374 - DNA, 25 bp, Homo sapien
tgcaaacgtgacttggatcagctca

SEQ ID NO: 5296375 - DNA, 25 bp, Homo sapien
ttcttgtagggttccagccttttca

SEQ ID NO: 5296376 - DNA, 25 bp, Homo sapien
caggagccactgggattcttcttct

SEQ ID NO: 5296377 - DNA, 25 bp, Homo sapien
gccttttcaagatggtctgacaagc

SEQ ID NO: 5296378 - DNA, 25 bp, Homo sapien
tccagccttttcaagatggtctgac

SEQ ID NO: 5296379 - DNA, 25 bp, Homo sapien
cccagacacatcagtcctctgcatt

SEQ ID NO: 5296380 - DNA, 25 bp, Homo sapien
ccacaccccagacacatcagtcctc

SEQ ID NO: 5296381 - DNA, 25 bp, Homo sapien
caccccagacacatcagtcctctgc

SEQ ID NO: 5296382 - DNA, 25 bp, Homo sapien
cacaccccagacacatcagtcctct

SEQ ID NO: 5296383 - DNA, 25 bp, Homo sapien
tgtagcccaggcaaaacccgagggc

SEQ ID NO: 5296384 - DNA, 25 bp, Homo sapien
ccagcaaggctacctccaagcaatg

SEQ ID NO: 5296385 - DNA, 25 bp, Homo sapien
gccccagcaaggctacctccaagca

SEQ ID NO: 5296386 - DNA, 25 bp, Homo sapien
ctgtagcccaggcaaaacccgaggg

SEQ ID NO: 5296387 - DNA, 25 bp, Homo sapien
tctgcgggatcccatgggctcctta

SEQ ID NO: 5296388 - DNA, 25 bp, Homo sapien
tctgctctgcgggatcccatgggct

SEQ ID NO: 5296389 - DNA, 25 bp, Homo sapien
ggccctctgctctgcgggatcccat

SEQ ID NO: 5296390 - DNA, 25 bp, Homo sapien
gctctgcgggatcccatgggctcct

SEQ ID NO: 5296391 - DNA, 25 bp, Homo sapien
gcttgtctcgctgatataaatctta

SEQ ID NO: 5296392 - DNA, 25 bp, Homo sapien
tgttgggcacagtgttagtgcttgt

SEQ ID NO: 5296393 - DNA, 25 bp, Homo sapien
gcctgtccattgaggtcagcgctga

SEQ ID NO: 5296394 - DNA, 25 bp, Homo sapien
cgctgatataaatcttagaggtggg

SEQ ID NO: 5296395 - DNA, 25 bp, Homo sapien
cagagccatctgtgtacacatgaag

SEQ ID NO: 5296396 - DNA, 25 bp, Homo sapien
tgaaggccttggcccatctcagtcc

SEQ ID NO: 5296397 - DNA, 25 bp, Homo sapien
tgtacacatgaagtagggctcctgc

SEQ ID NO: 5296398 - DNA, 25 bp, Homo sapien
ggaccattttggtatgaaggccttg

SEQ ID NO: 5296399 - DNA, 25 bp, Homo sapien
acttggtgggaattatgcacaatcc

SEQ ID NO: 5296400 - DNA, 25 bp, Homo sapien
tccaaacttggtgggaattatgcac

SEQ ID NO: 5296401 - DNA, 25 bp, Homo sapien
tgggaattatgcacaatcctctctt

SEQ ID NO: 5296402 - DNA, 25 bp, Homo sapien
ttatgcacaatcctctctttttcca

SEQ ID NO: 5296403 - DNA, 25 bp, Homo sapien
tgggcaaggtgaaaccctcaagctt

SEQ ID NO: 5296404 - DNA, 25 bp, Homo sapien
gaagtgtgtcaggtccccttctttg

SEQ ID NO: 5296405 - DNA, 25 bp, Homo sapien
gctaggcattcttcccagcatctgg

SEQ ID NO: 5296406 - DNA, 25 bp, Homo sapien
tccgagcatgatactgagagcttgc

SEQ ID NO: 5296407 - DNA, 25 bp, Homo sapien
gcaggcatcccacaggtcactgcaa

SEQ ID NO: 5296408 - DNA, 25 bp, Homo sapien
aaggttggttttgcacagccgccca

SEQ ID NO: 5296409 - DNA, 25 bp, Homo sapien
agcactcggcaatgagcatcccctg

SEQ ID NO: 5296410 - DNA, 25 bp, Homo sapien
tgtccatgtggaataaagctcgttc

SEQ ID NO: 5296411 - DNA, 25 bp, Homo sapien
acctcaagagccacaactgtcccag

SEQ ID NO: 5296412 - DNA, 25 bp, Homo sapien
ggtgttccccacattgctgaagtgg

SEQ ID NO: 5296413 - DNA, 25 bp, Homo sapien
tgttccccacattgctgaagtggtc

SEQ ID NO: 5296414 - DNA, 25 bp, Homo sapien
tccccacattgctgaagtggtccac

SEQ ID NO: 5296415 - DNA, 25 bp, Homo sapien
ggatgtctgccaccagttatcagca

SEQ ID NO: 5296416 - DNA, 25 bp, Homo sapien
gcatgtcctcatcacggtccagcat

SEQ ID NO: 5296417 - DNA, 25 bp, Homo sapien
ggtccagcatgcatcgcacagggcg

SEQ ID NO: 5296418 - DNA, 25 bp, Homo sapien
tctgccaccagttatcagcatgtcc

SEQ ID NO: 5296419 - DNA, 25 bp, Homo sapien
tcgaaccacaatccggtttgctgga

SEQ ID NO: 5296420 - DNA, 25 bp, Homo sapien
ggccactgccgtggacaccacagtg

SEQ ID NO: 5296421 - DNA, 25 bp, Homo sapien
agggccactgccgtggacaccacag

SEQ ID NO: 5296422 - DNA, 25 bp, Homo sapien
tcttcactcgaaccacaatccggtt

SEQ ID NO: 5296423 - DNA, 25 bp, Homo sapien
cagtgagtctccaggtagaagtgct

SEQ ID NO: 5296424 - DNA, 25 bp, Homo sapien
gccttttggaacagcaatggtgcag

SEQ ID NO: 5296425 - DNA, 25 bp, Homo sapien
cctgcctcgccttttggaacagcaa

SEQ ID NO: 5296426 - DNA, 25 bp, Homo sapien
tcttggccaccgatgtatatctccc

SEQ ID NO: 5296427 - DNA, 25 bp, Homo sapien
ctcaggtccataaaaggagttgttc

SEQ ID NO: 5296428 - DNA, 25 bp, Homo sapien
gctcaggtccataaaaggagttgtt

SEQ ID NO: 5296429 - DNA, 25 bp, Homo sapien
cattatctgcttcggaaaacccctt

SEQ ID NO: 5296430 - DNA, 25 bp, Homo sapien
ctgacacaacattatctgcttcgga

SEQ ID NO: 5296431 - DNA, 25 bp, Homo sapien
acttgaagtaagctctactatagcc

SEQ ID NO: 5296432 - DNA, 25 bp, Homo sapien
tactatagcccagagaatcatattc

SEQ ID NO: 5296433 - DNA, 25 bp, Homo sapien
aagtaagctctactatagcccagag

SEQ ID NO: 5296434 - DNA, 25 bp, Homo sapien
taagctctactatagcccagagaat

SEQ ID NO: 5296435 - DNA, 25 bp, Homo sapien
ctcaattgtgataatggctggtagt

SEQ ID NO: 5296436 - DNA, 25 bp, Homo sapien
tgttccggggtgtcagcaaccacag

SEQ ID NO: 5296437 - DNA, 25 bp, Homo sapien
ataggtgattttcaccccttgggca

SEQ ID NO: 5296438 - DNA, 25 bp, Homo sapien
ttgtgataatggctggtagttcttc

SEQ ID NO: 5296439 - DNA, 25 bp, Homo sapien
tatgttactcccaggaacatcatca

SEQ ID NO: 5296440 - DNA, 25 bp, Homo sapien
cttagcttctgatgtatctatggac

SEQ ID NO: 5296441 - DNA, 25 bp, Homo sapien
atcatcagcggaaatgaaacaaaca

SEQ ID NO: 5296442 - DNA, 25 bp, Homo sapien
tcattacaaattccagttatgttac

SEQ ID NO: 5296443 - DNA, 25 bp, Homo sapien
aggcctgcatgtccgctgccaggtg

SEQ ID NO: 5296444 - DNA, 25 bp, Homo sapien
gctcattctcgtagcgaggaatgtc

SEQ ID NO: 5296445 - DNA, 25 bp, Homo sapien
tgctggtgaccagccggagagacag

SEQ ID NO: 5296446 - DNA, 25 bp, Homo sapien
ggaatgtcgtcacagtacacggcct

SEQ ID NO: 5296447 - DNA, 25 bp, Homo sapien
cagtaaagttgcactggcgaaagtg

SEQ ID NO: 5296448 - DNA, 25 bp, Homo sapien
ttctgaaacagtaaagttgcactgg

SEQ ID NO: 5296449 - DNA, 25 bp, Homo sapien
cactggcgaaagtggggtccagttt

SEQ ID NO: 5296450 - DNA, 25 bp, Homo sapien
gctggggggtctttctgaaacagta

SEQ ID NO: 5296451 - DNA, 25 bp, Homo sapien
gtgagggtgcaccggaagtccacca

SEQ ID NO: 5296452 - DNA, 25 bp, Homo sapien
agggtgcaccggaagtccaccatgc

SEQ ID NO: 5296453 - DNA, 25 bp, Homo sapien
gggtgagggtgcaccggaagtccac

SEQ ID NO: 5296454 - DNA, 25 bp, Homo sapien
gagggtgagggtgcaccggaagtcc

SEQ ID NO: 5296455 - DNA, 25 bp, Homo sapien
ctgcagcagctcctccttccagagc

SEQ ID NO: 5296456 - DNA, 25 bp, Homo sapien
gttctgttggccattccaccatagc

SEQ ID NO: 5296457 - DNA, 25 bp, Homo sapien
tggttctgttggccattccaccata

SEQ ID NO: 5296458 - DNA, 25 bp, Homo sapien
ggttctgttggccattccaccatag

SEQ ID NO: 5296459 - DNA, 25 bp, Homo sapien
taaaactctcatgccactggttacc

SEQ ID NO: 5296460 - DNA, 25 bp, Homo sapien
aatgtcatcttctctccgggaggcc

SEQ ID NO: 5296461 - DNA, 25 bp, Homo sapien
aataaaactctcatgccactggtta

SEQ ID NO: 5296462 - DNA, 25 bp, Homo sapien
tcttctctccgggaggcctgcttga

SEQ ID NO: 5296463 - DNA, 25 bp, Homo sapien
caaaattagcaggtttagggagagg

SEQ ID NO: 5296464 - DNA, 25 bp, Homo sapien
cacaaattctgatgaacaccaaaat

SEQ ID NO: 5296465 - DNA, 25 bp, Homo sapien
ccaaaattagcaggtttagggagag

SEQ ID NO: 5296466 - DNA, 25 bp, Homo sapien
tctggcaccacaaattctgatgaac

SEQ ID NO: 5296467 - DNA, 25 bp, Homo sapien
caaaattaccaagggcaaaacatgc

SEQ ID NO: 5296468 - DNA, 25 bp, Homo sapien
gcaaaacatgccttagaacactcac

SEQ ID NO: 5296469 - DNA, 25 bp, Homo sapien
ttctcattaaggaggtcaaaattac

SEQ ID NO: 5296470 - DNA, 25 bp, Homo sapien
ctcattaaggaggtcaaaattacca

SEQ ID NO: 5296471 - DNA, 25 bp, Homo sapien
gcccttttggatgtgttctgagctg

SEQ ID NO: 5296472 - DNA, 25 bp, Homo sapien
gcctctcccagatgccttttctgac

SEQ ID NO: 5296473 - DNA, 25 bp, Homo sapien
acaggcccttttggatgtgttctga

SEQ ID NO: 5296474 - DNA, 25 bp, Homo sapien
cttttggatgtgttctgagctggta

SEQ ID NO: 5296475 - DNA, 25 bp, Homo sapien
gcaccaatccacagcgaggtcagtg

SEQ ID NO: 5296476 - DNA, 25 bp, Homo sapien
cactcatgaagcaggaatccatccg

SEQ ID NO: 5296477 - DNA, 25 bp, Homo sapien
ggtcagtgaagcaacacctcgtcaa

SEQ ID NO: 5296478 - DNA, 25 bp, Homo sapien
gaggaaagacccacaccaggtcaag

SEQ ID NO: 5296479 - DNA, 25 bp, Homo sapien
tggtccatctggacagttctcctgg

SEQ ID NO: 5296480 - DNA, 25 bp, Homo sapien
gctcagcagggtctttctgtagcca

SEQ ID NO: 5296481 - DNA, 25 bp, Homo sapien
gggatctctatggagagcagtatct

SEQ ID NO: 5296482 - DNA, 25 bp, Homo sapien
gagagcagtatctcctccgggctca

SEQ ID NO: 5296483 - DNA, 25 bp, Homo sapien
gggtcactgaactttgagctctgtt

SEQ ID NO: 5296484 - DNA, 25 bp, Homo sapien
tgggtcactgaactttgagctctgt

SEQ ID NO: 5296485 - DNA, 25 bp, Homo sapien
ggtcactgaactttgagctctgttt

SEQ ID NO: 5296486 - DNA, 25 bp, Homo sapien
gtcactgaactttgagctctgtttc

SEQ ID NO: 5296487 - DNA, 25 bp, Homo sapien
ctatctggtgagacttttctccccc

SEQ ID NO: 5296488 - DNA, 25 bp, Homo sapien
ctggacctctgcttcaggcagctca

SEQ ID NO: 5296489 - DNA, 25 bp, Homo sapien
tggacctctgcttcaggcagctcac

SEQ ID NO: 5296490 - DNA, 25 bp, Homo sapien
tggtgagacttttctcccccaagtc

SEQ ID NO: 5296491 - DNA, 25 bp, Homo sapien
tctggacacaagtgtcagcttggcc

SEQ ID NO: 5296492 - DNA, 25 bp, Homo sapien
aagtgtcagcttggccccactggcc

SEQ ID NO: 5296493 - DNA, 25 bp, Homo sapien
gaacacggggttgaggtcggagatg

SEQ ID NO: 5296494 - DNA, 25 bp, Homo sapien
gacacaagtgtcagcttggccccac

SEQ ID NO: 5296495 - DNA, 25 bp, Homo sapien
ccacaatgctcagggggcaagcagc

SEQ ID NO: 5296496 - DNA, 25 bp, Homo sapien
tctgaacacctctgtcttttgggca

SEQ ID NO: 5296497 - DNA, 25 bp, Homo sapien
acttgacttgcttcccagcaaacca

SEQ ID NO: 5296498 - DNA, 25 bp, Homo sapien
ttagcaacagcatccaccagggttt

SEQ ID NO: 5296499 - DNA, 25 bp, Homo sapien
cacagcccctccataagcttggagt

SEQ ID NO: 5296500 - DNA, 25 bp, Homo sapien
aagcttggagtgaacctcctcttac

SEQ ID NO: 5296501 - DNA, 25 bp, Homo sapien
cctccataagcttggagtgaacctc

SEQ ID NO: 5296502 - DNA, 25 bp, Homo sapien
cataagcttggagtgaacctcctct

SEQ ID NO: 5296503 - DNA, 25 bp, Homo sapien
atgttctaccgaattcagctcaggg

SEQ ID NO: 5296504 - DNA, 25 bp, Homo sapien
tgggcagacaatcataggaaacagc

SEQ ID NO: 5296505 - DNA, 25 bp, Homo sapien
tcgggtccatgttctaccgaattca

SEQ ID NO: 5296506 - DNA, 25 bp, Homo sapien
ggaaacagcatattcttgaacttca

SEQ ID NO: 5296507 - DNA, 25 bp, Homo sapien
ttgaggcctgtatccacgtcacacg

SEQ ID NO: 5296508 - DNA, 25 bp, Homo sapien
tcaaatcgcagctgcttccgaggag

SEQ ID NO: 5296509 - DNA, 25 bp, Homo sapien
gcttccgaggagtgtctttcagcct

SEQ ID NO: 5296510 - DNA, 25 bp, Homo sapien
cacgaccagcttggcgtcagggtgc

SEQ ID NO: 5296511 - DNA, 25 bp, Homo sapien
tgaataaagatggcgagaggctgac

SEQ ID NO: 5296512 - DNA, 25 bp, Homo sapien
ttgaataaagatggcgagaggctga

SEQ ID NO: 5296513 - DNA, 25 bp, Homo sapien
gagagtctcagttacaggacccggg

SEQ ID NO: 5296514 - DNA, 25 bp, Homo sapien
caagaggagcaggtaatccctggga

SEQ ID NO: 5296515 - DNA, 25 bp, Homo sapien
tcctttcaaacacccaagaggacca

SEQ ID NO: 5296516 - DNA, 25 bp, Homo sapien
aaacacccaagaggaccaattcagc

SEQ ID NO: 5296517 - DNA, 25 bp, Homo sapien
agggacatggagctcgtgcactgac

SEQ ID NO: 5296518 - DNA, 25 bp, Homo sapien
ggagctcgtgcactgactcctctaa

SEQ ID NO: 5296519 - DNA, 25 bp, Homo sapien
taagtctcagattacccccaggctt

SEQ ID NO: 5296520 - DNA, 25 bp, Homo sapien
ctctaagtctcagattacccccagg

SEQ ID NO: 5296521 - DNA, 25 bp, Homo sapien
gagtggtctttcttctggttcatgc

SEQ ID NO: 5296522 - DNA, 25 bp, Homo sapien
tcatgcagcaatttggattattccc

SEQ ID NO: 5296523 - DNA, 25 bp, Homo sapien
tgagtggtctttcttctggttcatg

SEQ ID NO: 5296524 - DNA, 25 bp, Homo sapien
agagtggaggcctccgctacattcc

SEQ ID NO: 5296525 - DNA, 25 bp, Homo sapien
tatttgcagaagctaaggaatctag

SEQ ID NO: 5296526 - DNA, 25 bp, Homo sapien
gatgatgaacatctgcacaagggta

SEQ ID NO: 5296527 - DNA, 25 bp, Homo sapien
tttctccataaaagctaggtcctac

SEQ ID NO: 5296528 - DNA, 25 bp, Homo sapien
agaagcgccttttccagacaaagtg

SEQ ID NO: 5296529 - DNA, 25 bp, Homo sapien
gcgccttttccagacaaagtgccag

SEQ ID NO: 5296530 - DNA, 25 bp, Homo sapien
gacatatttcacagaagcgcctttt

SEQ ID NO: 5296531 - DNA, 25 bp, Homo sapien
tatttcacagaagcgccttttccag

SEQ ID NO: 5296532 - DNA, 25 bp, Homo sapien
gtgcaagtgctgagcaaggccacgt

SEQ ID NO: 5296533 - DNA, 25 bp, Homo sapien
caagtgctgagcaaggccacgttgt

SEQ ID NO: 5296534 - DNA, 25 bp, Homo sapien
ccaacagagtgccagccacagaaag

SEQ ID NO: 5296535 - DNA, 25 bp, Homo sapien
tcataagcccaacagagtgccagcc

SEQ ID NO: 5296536 - DNA, 25 bp, Homo sapien
ccatgggctgagcctgccagtctcc

SEQ ID NO: 5296537 - DNA, 25 bp, Homo sapien
gtgccatgggctgagcctgccagtc

SEQ ID NO: 5296538 - DNA, 25 bp, Homo sapien
tgccatgggctgagcctgccagtct

SEQ ID NO: 5296539 - DNA, 25 bp, Homo sapien
gccatgggctgagcctgccagtctc

SEQ ID NO: 5296540 - DNA, 25 bp, Homo sapien
agaaagtcccatgctattcataaga

SEQ ID NO: 5296541 - DNA, 25 bp, Homo sapien
aagccggtctccagaccatcactgg

SEQ ID NO: 5296542 - DNA, 25 bp, Homo sapien
caggaagccggtctccagaccatca

SEQ ID NO: 5296543 - DNA, 25 bp, Homo sapien
aagctcaaaggcactctcaggcggt

SEQ ID NO: 5296544 - DNA, 25 bp, Homo sapien
caaaggtccggaagccctggaggat

SEQ ID NO: 5296545 - DNA, 25 bp, Homo sapien
gtagcctgtgcagcggcacagattt

SEQ ID NO: 5296546 - DNA, 25 bp, Homo sapien
cctggaggatgggtctgtagcctgt

SEQ ID NO: 5296547 - DNA, 25 bp, Homo sapien
cctggcaaaggtccggaagccctgg

SEQ ID NO: 5296548 - DNA, 25 bp, Homo sapien
aaggaaaaaactgcaatgtcagtgc

SEQ ID NO: 5296549 - DNA, 25 bp, Homo sapien
aaaaaactgcaatgtcagtgcaggg

SEQ ID NO: 5296550 - DNA, 25 bp, Homo sapien
ggaaaaaactgcaatgtcagtgcag

SEQ ID NO: 5296551 - DNA, 25 bp, Homo sapien
ctgtgggccaaggaaaaaactgcaa

SEQ ID NO: 5296552 - DNA, 25 bp, Homo sapien
ctctgcagggcctcgtttgccattc

SEQ ID NO: 5296553 - DNA, 25 bp, Homo sapien
agggcctcgtttgccattccacctc

SEQ ID NO: 5296554 - DNA, 25 bp, Homo sapien
tgcagggcctcgtttgccattccac

SEQ ID NO: 5296555 - DNA, 25 bp, Homo sapien
tctgcagggcctcgtttgccattcc

SEQ ID NO: 5296556 - DNA, 25 bp, Homo sapien
ggagcagtgtgtacatactcatgac

SEQ ID NO: 5296557 - DNA, 25 bp, Homo sapien
ggctgattccggagcagtgtgtaca

SEQ ID NO: 5296558 - DNA, 25 bp, Homo sapien
ctccatggtgggctcgggctgattc

SEQ ID NO: 5296559 - DNA, 25 bp, Homo sapien
gtacatactcatgacgatgccaggg

SEQ ID NO: 5296560 - DNA, 25 bp, Homo sapien
caggtggtctgataccatcaaggag

SEQ ID NO: 5296561 - DNA, 25 bp, Homo sapien
taccattgcagggagtaagtgggct

SEQ ID NO: 5296562 - DNA, 25 bp, Homo sapien
catttgtactatctgcgggtgggag

SEQ ID NO: 5296563 - DNA, 25 bp, Homo sapien
ggagaaagccttgctcaggcactaa

SEQ ID NO: 5296564 - DNA, 25 bp, Homo sapien
atgcagcctcgtcttggtgcttcct

SEQ ID NO: 5296565 - DNA, 25 bp, Homo sapien
acaggatgcagcctcgtcttggtgc

SEQ ID NO: 5296566 - DNA, 25 bp, Homo sapien
ggtgcttcctattccttccacagtt

SEQ ID NO: 5296567 - DNA, 25 bp, Homo sapien
tgcacaggatgcagcctcgtcttgg

SEQ ID NO: 5296568 - DNA, 25 bp, Homo sapien
ccaggcaggcattggcagaaaagtg

SEQ ID NO: 5296569 - DNA, 25 bp, Homo sapien
ctgcaacatggtgcaaggagcagat

SEQ ID NO: 5296570 - DNA, 25 bp, Homo sapien
catggtgcaaggagcagatgggggc

SEQ ID NO: 5296571 - DNA, 25 bp, Homo sapien
tggtgcaaggagcagatgggggcca

SEQ ID NO: 5296572 - DNA, 25 bp, Homo sapien
cgatcttgttctgcagacgatcata

SEQ ID NO: 5296573 - DNA, 25 bp, Homo sapien
tggagagcatcactgtgcaagcccc

SEQ ID NO: 5296574 - DNA, 25 bp, Homo sapien
gcagacgatcatacttggagagcat

SEQ ID NO: 5296575 - DNA, 25 bp, Homo sapien
cacagccgagcttggttccactcag

SEQ ID NO: 5296576 - DNA, 25 bp, Homo sapien
agctcccttcatcacgctccttcct

SEQ ID NO: 5296577 - DNA, 25 bp, Homo sapien
gccccatcacagccatcggactcca

SEQ ID NO: 5296578 - DNA, 25 bp, Homo sapien
gctcccttcatcacgctccttcctc

SEQ ID NO: 5296579 - DNA, 25 bp, Homo sapien
catcacagccatcggactccagact

SEQ ID NO: 5296580 - DNA, 25 bp, Homo sapien
gtgtcctagtcaggatatatgcagc

SEQ ID NO: 5296581 - DNA, 25 bp, Homo sapien
gctctcagcaggtcaaacaactttg

SEQ ID NO: 5296582 - DNA, 25 bp, Homo sapien
ggcacctgaagacgaatggtggcac

SEQ ID NO: 5296583 - DNA, 25 bp, Homo sapien
caactttgggggcacctgaagacga

SEQ ID NO: 5296584 - DNA, 25 bp, Homo sapien
ctgtctgataggaggggagcaaacc

SEQ ID NO: 5296585 - DNA, 25 bp, Homo sapien
ccagagtgaaagcatgggctccagt

SEQ ID NO: 5296586 - DNA, 25 bp, Homo sapien
agagtgaaagcatgggctccagtct

SEQ ID NO: 5296587 - DNA, 25 bp, Homo sapien
actgtctgataggaggggagcaaac

SEQ ID NO: 5296588 - DNA, 25 bp, Homo sapien
tatgtcactggaaagacccactaga

SEQ ID NO: 5296589 - DNA, 25 bp, Homo sapien
caaatatgtcactggaaagacccac

SEQ ID NO: 5296590 - DNA, 25 bp, Homo sapien
cccaaatatgtcactggaaagaccc

SEQ ID NO: 5296591 - DNA, 25 bp, Homo sapien
tcactggaaagacccactagacacc

SEQ ID NO: 5296592 - DNA, 25 bp, Homo sapien
tcactcccactccaaagtcaggata

SEQ ID NO: 5296593 - DNA, 25 bp, Homo sapien
cactcccactccaaagtcaggatac

SEQ ID NO: 5296594 - DNA, 25 bp, Homo sapien
ctcaggtaggccaaaagggttgtct

SEQ ID NO: 5296595 - DNA, 25 bp, Homo sapien
tctcaggtaggccaaaagggttgtc

SEQ ID NO: 5296596 - DNA, 25 bp, Homo sapien
cttctcaggtaggccaaaagggttg

SEQ ID NO: 5296597 - DNA, 25 bp, Homo sapien
cttgggacccaccacagaacatgca

SEQ ID NO: 5296598 - DNA, 25 bp, Homo sapien
acgctggctcgaccaaggccaaatc

SEQ ID NO: 5296599 - DNA, 25 bp, Homo sapien
ggacccaccacagaacatgcaggca

SEQ ID NO: 5296600 - DNA, 25 bp, Homo sapien
ttgcaccttccacgctggctcgacc

SEQ ID NO: 5296601 - DNA, 25 bp, Homo sapien
tgcctctttgagtatacaatctcag

SEQ ID NO: 5296602 - DNA, 25 bp, Homo sapien
cctgcatgtgactgtggaaggccat

SEQ ID NO: 5296603 - DNA, 25 bp, Homo sapien
catggcatgcagatctcggactttg

SEQ ID NO: 5296604 - DNA, 25 bp, Homo sapien
tacaatctcagatcctgcatgtgac

SEQ ID NO: 5296605 - DNA, 25 bp, Homo sapien
cccgagaaggtcttcttccctaatg

SEQ ID NO: 5296606 - DNA, 25 bp, Homo sapien
tcttgtctgtgctctagccccgaga

SEQ ID NO: 5296607 - DNA, 25 bp, Homo sapien
gctctagccccgagaaggtcttctt

SEQ ID NO: 5296608 - DNA, 25 bp, Homo sapien
tctttggcctctgagtatcttgtct

SEQ ID NO: 5296609 - DNA, 25 bp, Homo sapien
tctgccattcacaaagaaaaccaat

SEQ ID NO: 5296610 - DNA, 25 bp, Homo sapien
tgccattcacaaagaaaaccaattt

SEQ ID NO: 5296611 - DNA, 25 bp, Homo sapien
agaaaaccaatttgtctgctgtcat

SEQ ID NO: 5296612 - DNA, 25 bp, Homo sapien
ctttctgccattcacaaagaaaacc

SEQ ID NO: 5296613 - DNA, 25 bp, Homo sapien
tccccgaactccaggtacctcactc

SEQ ID NO: 5296614 - DNA, 25 bp, Homo sapien
caggtagttatcactgctctgtgac

SEQ ID NO: 5296615 - DNA, 25 bp, Homo sapien
tcctaagagacactggcaggtagtt

SEQ ID NO: 5296616 - DNA, 25 bp, Homo sapien
gagacactggcaggtagttatcact

SEQ ID NO: 5296617 - DNA, 25 bp, Homo sapien
atatgtcacgtctgtggatctgagc

SEQ ID NO: 5296618 - DNA, 25 bp, Homo sapien
ggaaggttttgaccctccatatgtc

SEQ ID NO: 5296619 - DNA, 25 bp, Homo sapien
ggcttctggaaatcagtggtccctg

SEQ ID NO: 5296620 - DNA, 25 bp, Homo sapien
gatctgagcagaggaatcgatagac

SEQ ID NO: 5296621 - DNA, 25 bp, Homo sapien
gaagagaaagtcgtcttgtgcttat

SEQ ID NO: 5296622 - DNA, 25 bp, Homo sapien
ccggaagagaaagtcgtcttgtgct

SEQ ID NO: 5296623 - DNA, 25 bp, Homo sapien
gaaagtcgtcttgtgcttattctcc

SEQ ID NO: 5296624 - DNA, 25 bp, Homo sapien
tcgtcttgtgcttattctcctcatc

SEQ ID NO: 5296625 - DNA, 25 bp, Homo sapien
cacagaacccgccttctccctcaat

SEQ ID NO: 5296626 - DNA, 25 bp, Homo sapien
cttctccctcaattagggcctggag

SEQ ID NO: 5296627 - DNA, 25 bp, Homo sapien
ttcacgtgcacagaacccgccttct

SEQ ID NO: 5296628 - DNA, 25 bp, Homo sapien
ctccctcaattagggcctggagatc

SEQ ID NO: 5296629 - DNA, 25 bp, Homo sapien
gtgggcaccaggcaagaagctacgt

SEQ ID NO: 5296630 - DNA, 25 bp, Homo sapien
tttctaattggaagaagatattctc

SEQ ID NO: 5296631 - DNA, 25 bp, Homo sapien
cgtgacttaaccttaagaatctgtt

SEQ ID NO: 5296632 - DNA, 25 bp, Homo sapien
caggcaagaagctacgtgacttaac

SEQ ID NO: 5296633 - DNA, 25 bp, Homo sapien
tcctgtcaagggtaggtggtgtgct

SEQ ID NO: 5296634 - DNA, 25 bp, Homo sapien
tttcctgtcaagggtaggtggtgtg

SEQ ID NO: 5296635 - DNA, 25 bp, Homo sapien
tgtcaagggtaggtggtgtgcttcc

SEQ ID NO: 5296636 - DNA, 25 bp, Homo sapien
ctgtcaagggtaggtggtgtgcttc

SEQ ID NO: 5296637 - DNA, 25 bp, Homo sapien
ttctctgttctccatatctgcaccc

SEQ ID NO: 5296638 - DNA, 25 bp, Homo sapien
gttctccatatctgcaccctttctt

SEQ ID NO: 5296639 - DNA, 25 bp, Homo sapien
tgttctccatatctgcaccctttct

SEQ ID NO: 5296640 - DNA, 25 bp, Homo sapien
tctgttctccatatctgcacccttt

SEQ ID NO: 5296641 - DNA, 25 bp, Homo sapien
agactgtgctggtctgagttccatc

SEQ ID NO: 5296642 - DNA, 25 bp, Homo sapien
gactgtgctggtctgagttccatct

SEQ ID NO: 5296643 - DNA, 25 bp, Homo sapien
ggagtcaagaaccatcgatgtgctg

SEQ ID NO: 5296644 - DNA, 25 bp, Homo sapien
aaggagtcaagaaccatcgatgtgc

SEQ ID NO: 5296645 - DNA, 25 bp, Homo sapien
gataaggagtcaagaaccatcgatg

SEQ ID NO: 5296646 - DNA, 25 bp, Homo sapien
tggataaggagtcaagaaccatcga

SEQ ID NO: 5296647 - DNA, 25 bp, Homo sapien
gtctcccaaaaagagtgccagggta

SEQ ID NO: 5296648 - DNA, 25 bp, Homo sapien
tcccaaaaagagtgccagggtagga

SEQ ID NO: 5296649 - DNA, 25 bp, Homo sapien
aagagtgccagggtaggaacttttg

SEQ ID NO: 5296650 - DNA, 25 bp, Homo sapien
gagtgccagggtaggaacttttgac

SEQ ID NO: 5296651 - DNA, 25 bp, Homo sapien
ccttttagaatacagtggagccact

SEQ ID NO: 5296652 - DNA, 25 bp, Homo sapien
tgaaaggtccacgatcaggcaacag

SEQ ID NO: 5296653 - DNA, 25 bp, Homo sapien
tagagaaccaaaaggccaagcggga

SEQ ID NO: 5296654 - DNA, 25 bp, Homo sapien
tatttcatctcaaggaccggcctgg

SEQ ID NO: 5296655 - DNA, 25 bp, Homo sapien
ctgaagatttacttcaccaagtgtg

SEQ ID NO: 5296656 - DNA, 25 bp, Homo sapien
caagtgtgttcattccccctgtgta

SEQ ID NO: 5296657 - DNA, 25 bp, Homo sapien
caccaggagtggcatctaacctcat

SEQ ID NO: 5296658 - DNA, 25 bp, Homo sapien
ttacttcaccaagtgtgttcattcc

SEQ ID NO: 5296659 - DNA, 25 bp, Homo sapien
tccagaagtcccaggatattttaat

SEQ ID NO: 5296660 - DNA, 25 bp, Homo sapien
cagaagtcccaggatattttaattc

SEQ ID NO: 5296661 - DNA, 25 bp, Homo sapien
gaagtcccaggatattttaattcaa

SEQ ID NO: 5296662 - DNA, 25 bp, Homo sapien
gtcccaggatattttaattcaaaca

SEQ ID NO: 5296663 - DNA, 25 bp, Homo sapien
tgcattccgcaaacataggcctgag

SEQ ID NO: 5296664 - DNA, 25 bp, Homo sapien
agaatagccataccagttttccggg

SEQ ID NO: 5296665 - DNA, 25 bp, Homo sapien
gattgcccggtgaaagacataggag

SEQ ID NO: 5296666 - DNA, 25 bp, Homo sapien
tattccaattacaagcgttcggccc

SEQ ID NO: 5296667 - DNA, 25 bp, Homo sapien
gatgaatggaataagggctttccga

SEQ ID NO: 5296668 - DNA, 25 bp, Homo sapien
gcctgactatttcgatggtcactta

SEQ ID NO: 5296669 - DNA, 25 bp, Homo sapien
gatggtcacttatgattcttatttc

SEQ ID NO: 5296670 - DNA, 25 bp, Homo sapien
tctttgttacaagtcaacctacagt

SEQ ID NO: 5296671 - DNA, 25 bp, Homo sapien
caacctacagttattttgggcctga

SEQ ID NO: 5296672 - DNA, 25 bp, Homo sapien
gagaagaagaaagctacgtgaatgc

SEQ ID NO: 5296673 - DNA, 25 bp, Homo sapien
cctctgcgggttaaaagcctgtttg

SEQ ID NO: 5296674 - DNA, 25 bp, Homo sapien
taaatatcttcggtttctcaatctt

SEQ ID NO: 5296675 - DNA, 25 bp, Homo sapien
gaatgctgccgcttttattgaaaaa

SEQ ID NO: 5296676 - DNA, 25 bp, Homo sapien
caaatgcaagtgctgggagggacca

SEQ ID NO: 5296677 - DNA, 25 bp, Homo sapien
gggcatagccgatccattcaatgat

SEQ ID NO: 5296678 - DNA, 25 bp, Homo sapien
ctatggtggtgaaaagctcgcagcc

SEQ ID NO: 5296679 - DNA, 25 bp, Homo sapien
tgaaaagctcgcagcccaaggaaac

SEQ ID NO: 5296680 - DNA, 25 bp, Homo sapien
aattggctccagaaacatacgtaaa

SEQ ID NO: 5296681 - DNA, 25 bp, Homo sapien
ttggctccagaaacatacgtaaaca

SEQ ID NO: 5296682 - DNA, 25 bp, Homo sapien
ggctccagaaacatacgtaaacaag

SEQ ID NO: 5296683 - DNA, 25 bp, Homo sapien
ccagaaacatacgtaaacaagccac

SEQ ID NO: 5296684 - DNA, 25 bp, Homo sapien
ttagaaatgcagaggtactgtgatg

SEQ ID NO: 5296685 - DNA, 25 bp, Homo sapien
gaaatgcagaggtactgtgatggga

SEQ ID NO: 5296686 - DNA, 25 bp, Homo sapien
agattagaaatgcagaggtactgtg

SEQ ID NO: 5296687 - DNA, 25 bp, Homo sapien
gattagaaatgcagaggtactgtga

SEQ ID NO: 5296688 - DNA, 25 bp, Homo sapien
gagctggcgcaatatatagtcacta

SEQ ID NO: 5296689 - DNA, 25 bp, Homo sapien
gctggcgcaatatatagtcactatg

SEQ ID NO: 5296690 - DNA, 25 bp, Homo sapien
tggcgcaatatatagtcactatgaa

SEQ ID NO: 5296691 - DNA, 25 bp, Homo sapien
tgagctggcgcaatatatagtcact

SEQ ID NO: 5296692 - DNA, 25 bp, Homo sapien
tgagtatagctggataaggcctccc

SEQ ID NO: 5296693 - DNA, 25 bp, Homo sapien
ccaagctaaaccgtatgtctgtgta

SEQ ID NO: 5296694 - DNA, 25 bp, Homo sapien
taaatcagatagtagccttgaagga

SEQ ID NO: 5296695 - DNA, 25 bp, Homo sapien
tatgtctgtgtaccacccatcaggg

SEQ ID NO: 5296696 - DNA, 25 bp, Homo sapien
cagaaggtacaaaaaccaggctctg

SEQ ID NO: 5296697 - DNA, 25 bp, Homo sapien
gaaggtacaaaaaccaggctctgcc

SEQ ID NO: 5296698 - DNA, 25 bp, Homo sapien
agaaggtacaaaaaccaggctctgc

SEQ ID NO: 5296699 - DNA, 25 bp, Homo sapien
aggtacaaaaaccaggctctgccat

SEQ ID NO: 5296700 - DNA, 25 bp, Homo sapien
caggaggatgtatatcacaggccaa

SEQ ID NO: 5296701 - DNA, 25 bp, Homo sapien
ccaatacaaattatcttctccagga

SEQ ID NO: 5296702 - DNA, 25 bp, Homo sapien
tctccaggaggatgtatatcacagg

SEQ ID NO: 5296703 - DNA, 25 bp, Homo sapien
tcgccttaacccaatacaaattatc

SEQ ID NO: 5296704 - DNA, 25 bp, Homo sapien
aagattgaagataaacactaactcc

SEQ ID NO: 5296705 - DNA, 25 bp, Homo sapien
gaagattgaagataaacactaactc

SEQ ID NO: 5296706 - DNA, 25 bp, Homo sapien
aagactttgttactcggtgtctcca

SEQ ID NO: 5296707 - DNA, 25 bp, Homo sapien
caagactttgttactcggtgtctcc

SEQ ID NO: 5296708 - DNA, 25 bp, Homo sapien
gactttgttactcggtgtctccaca

SEQ ID NO: 5296709 - DNA, 25 bp, Homo sapien
ttcaagactttgttactcggtgtct

SEQ ID NO: 5296710 - DNA, 25 bp, Homo sapien
atgggtcaatctgggagcaggacct

SEQ ID NO: 5296711 - DNA, 25 bp, Homo sapien
tcattagagcatcactgcaagccct

SEQ ID NO: 5296712 - DNA, 25 bp, Homo sapien
cagaacaggtaccactgtgagaggc

SEQ ID NO: 5296713 - DNA, 25 bp, Homo sapien
caggacctgccaaaggatgcgtaca

SEQ ID NO: 5296714 - DNA, 25 bp, Homo sapien
atccaaacagccacaacaatagatt

SEQ ID NO: 5296715 - DNA, 25 bp, Homo sapien
atttccatgtggctaaagaatccaa

SEQ ID NO: 5296716 - DNA, 25 bp, Homo sapien
agaatccaaacagccacaacaatag

SEQ ID NO: 5296717 - DNA, 25 bp, Homo sapien
gtcatttccatgtggctaaagaatc

SEQ ID NO: 5296718 - DNA, 25 bp, Homo sapien
gactctcccaagatcccagaactaa

SEQ ID NO: 5296719 - DNA, 25 bp, Homo sapien
gatgccaaacgcgtaagactctccc

SEQ ID NO: 5296720 - DNA, 25 bp, Homo sapien
agatcccagaactaatctgtcccca

SEQ ID NO: 5296721 - DNA, 25 bp, Homo sapien
ctgagctgagtttccctcgggagat

SEQ ID NO: 5296722 - DNA, 25 bp, Homo sapien
ctgctgagagcggatgaggtcctgg

SEQ ID NO: 5296723 - DNA, 25 bp, Homo sapien
ctgagctttccaggtcgcctcccgc

SEQ ID NO: 5296724 - DNA, 25 bp, Homo sapien
ggacctctttctctcgagcagccag

SEQ ID NO: 5296725 - DNA, 25 bp, Homo sapien
tgtgccgcagccgcttgtcaactct

SEQ ID NO: 5296726 - DNA, 25 bp, Homo sapien
gggctgccgggcgaggatccccgcg

SEQ ID NO: 5296727 - DNA, 25 bp, Homo sapien
gaagaggcccagaagtaccgtccca

SEQ ID NO: 5296728 - DNA, 25 bp, Homo sapien
ggcaccgcgaaggaaggcagctcct

SEQ ID NO: 5296729 - DNA, 25 bp, Homo sapien
ccaggtggcccgaagagggagaggg

SEQ ID NO: 5296730 - DNA, 25 bp, Homo sapien
tccgtgtgcttcccgtagccggagg

SEQ ID NO: 5296731 - DNA, 25 bp, Homo sapien
ctccgtgtgcttcccgtagccggag

SEQ ID NO: 5296732 - DNA, 25 bp, Homo sapien
gtacaaggccagtgccccaagggcg

SEQ ID NO: 5296733 - DNA, 25 bp, Homo sapien
caagggcgaccaaagtggcgctgcc

SEQ ID NO: 5296734 - DNA, 25 bp, Homo sapien
cttcgcgacgtacaaggccagtgcc

SEQ ID NO: 5296735 - DNA, 25 bp, Homo sapien
ccagtgccccaagggcgaccaaagt

SEQ ID NO: 5296736 - DNA, 25 bp, Homo sapien
gcatcgcgccgtgttcctcgccggt

SEQ ID NO: 5296737 - DNA, 25 bp, Homo sapien
atcgcgccgtgttcctcgccggtgg

SEQ ID NO: 5296738 - DNA, 25 bp, Homo sapien
ctgcatcgcgccgtgttcctcgccg

SEQ ID NO: 5296739 - DNA, 25 bp, Homo sapien
tcgcgccgtgttcctcgccggtggc

SEQ ID NO: 5296740 - DNA, 25 bp, Homo sapien
tcggccttggctcccgcccctccat

SEQ ID NO: 5296741 - DNA, 25 bp, Homo sapien
aacccctttatggagcgccagacgc

SEQ ID NO: 5296742 - DNA, 25 bp, Homo sapien
cccgcaacccctttatggagcgcca

SEQ ID NO: 5296743 - DNA, 25 bp, Homo sapien
gcaacccctttatggagcgccagac

SEQ ID NO: 5296744 - DNA, 25 bp, Homo sapien
ctattagcgtctgatgcgcatactt

SEQ ID NO: 5296745 - DNA, 25 bp, Homo sapien
tcctcaactattagcgtctgatgcg

SEQ ID NO: 5296746 - DNA, 25 bp, Homo sapien
ttgttcctcaactattagcgtctga

SEQ ID NO: 5296747 - DNA, 25 bp, Homo sapien
tcaactattagcgtctgatgcgcat

SEQ ID NO: 5296748 - DNA, 25 bp, Homo sapien
gaacacccaagccaaggtctttcca

SEQ ID NO: 5296749 - DNA, 25 bp, Homo sapien
tctttccatctcctccggttcctca

SEQ ID NO: 5296750 - DNA, 25 bp, Homo sapien
gcagtcccaccctcgaacacccaag

SEQ ID NO: 5296751 - DNA, 25 bp, Homo sapien
tctgtgccgtcggtcaccacgcagt

SEQ ID NO: 5296752 - DNA, 25 bp, Homo sapien
tggaaaagccaggtcttagccatca

SEQ ID NO: 5296753 - DNA, 25 bp, Homo sapien
ggaaaagccaggtcttagccatcat

SEQ ID NO: 5296754 - DNA, 25 bp, Homo sapien
ttttcatggaaaagccaggtcttag

SEQ ID NO: 5296755 - DNA, 25 bp, Homo sapien
tcatggaaaagccaggtcttagcca

SEQ ID NO: 5296756 - DNA, 25 bp, Homo sapien
tagtccctgactcctagacaacatc

SEQ ID NO: 5296757 - DNA, 25 bp, Homo sapien
cctgactcctagacaacatctctgg

SEQ ID NO: 5296758 - DNA, 25 bp, Homo sapien
agtccctgactcctagacaacatct

SEQ ID NO: 5296759 - DNA, 25 bp, Homo sapien
gactcctagacaacatctctggacc

SEQ ID NO: 5296760 - DNA, 25 bp, Homo sapien
tagcttcaggtgtctcagaactgac

SEQ ID NO: 5296761 - DNA, 25 bp, Homo sapien
tcaggtgtctcagaactgacagagg

SEQ ID NO: 5296762 - DNA, 25 bp, Homo sapien
ggtgtctcagaactgacagagggac

SEQ ID NO: 5296763 - DNA, 25 bp, Homo sapien
ctagcttcaggtgtctcagaactga

SEQ ID NO: 5296764 - DNA, 25 bp, Homo sapien
gtagcacattttcttgattcactca

SEQ ID NO: 5296765 - DNA, 25 bp, Homo sapien
catttctacgggtacagtttagtgg

SEQ ID NO: 5296766 - DNA, 25 bp, Homo sapien
tagcacattttcttgattcactcat

SEQ ID NO: 5296767 - DNA, 25 bp, Homo sapien
tatctttaccatttctacgggtaca

SEQ ID NO: 5296768 - DNA, 25 bp, Homo sapien
tcttctgagcactggtcatgaccct

SEQ ID NO: 5296769 - DNA, 25 bp, Homo sapien
tatcaggataactccagcctcagaa

SEQ ID NO: 5296770 - DNA, 25 bp, Homo sapien
acaggttgtagcaaagaagccagac

SEQ ID NO: 5296771 - DNA, 25 bp, Homo sapien
gaagccagacaaaaacaggtaggac

SEQ ID NO: 5296772 - DNA, 25 bp, Homo sapien
tacagccttccattttcccaaggag

SEQ ID NO: 5296773 - DNA, 25 bp, Homo sapien
tgacaagcagttagctcgacctgaa

SEQ ID NO: 5296774 - DNA, 25 bp, Homo sapien
ctgtagagataacccatccactggc

SEQ ID NO: 5296775 - DNA, 25 bp, Homo sapien
gacttgcaagcaattgacacccaac

SEQ ID NO: 5296776 - DNA, 25 bp, Homo sapien
tgaacattgtgtttgtacgatgaac

SEQ ID NO: 5296777 - DNA, 25 bp, Homo sapien
caggatggacagcacagtaacccca

SEQ ID NO: 5296778 - DNA, 25 bp, Homo sapien
ccagcagccaaggaattgctgaaca

SEQ ID NO: 5296779 - DNA, 25 bp, Homo sapien
aatcatggccatggttcataacctc

SEQ ID NO: 5296780 - DNA, 25 bp, Homo sapien
gacagctccataccccagctattaa

SEQ ID NO: 5296781 - DNA, 25 bp, Homo sapien
gatctgattggagtttacgtgtcac

SEQ ID NO: 5296782 - DNA, 25 bp, Homo sapien
tattaatgtcatagggaggaaagtt

SEQ ID NO: 5296783 - DNA, 25 bp, Homo sapien
tacgtgtcactctgacagctccata

SEQ ID NO: 5296784 - DNA, 25 bp, Homo sapien
ccttgctttgcaccgtagcacggga

SEQ ID NO: 5296785 - DNA, 25 bp, Homo sapien
tagcacgggaccctaaaagtgactg

SEQ ID NO: 5296786 - DNA, 25 bp, Homo sapien
aaagtgtcctgcagctgaggttgcc

SEQ ID NO: 5296787 - DNA, 25 bp, Homo sapien
aaagtgactgtgcatgctgaaaccc

SEQ ID NO: 5296788 - DNA, 25 bp, Homo sapien
gagagatgggtgcagtttcaataac

SEQ ID NO: 5296789 - DNA, 25 bp, Homo sapien
tgactacgacatatcctgcctaacg

SEQ ID NO: 5296790 - DNA, 25 bp, Homo sapien
cagttagttgagtgcttgtgcctgg

SEQ ID NO: 5296791 - DNA, 25 bp, Homo sapien
gcccattagctgtaaagaagtgcct

SEQ ID NO: 5296792 - DNA, 25 bp, Homo sapien
tgcattatgaaaagcttggctactc

SEQ ID NO: 5296793 - DNA, 25 bp, Homo sapien
catgtgcttcctagaatttgtccag

SEQ ID NO: 5296794 - DNA, 25 bp, Homo sapien
cttgctagccagctcagtgcatttg

SEQ ID NO: 5296795 - DNA, 25 bp, Homo sapien
tgcatttgggaattgacattgcggc

SEQ ID NO: 5296796 - DNA, 25 bp, Homo sapien
ttgcctgtccagtgttcttcccaag

SEQ ID NO: 5296797 - DNA, 25 bp, Homo sapien
cccagattttgcctgtccagtgttc

SEQ ID NO: 5296798 - DNA, 25 bp, Homo sapien
tcctccacaaagacagcatacagca

SEQ ID NO: 5296799 - DNA, 25 bp, Homo sapien
gcctgtccagtgttcttcccaagtg

SEQ ID NO: 5296800 - DNA, 25 bp, Homo sapien
ctgagcactattctgggtgctgggc

SEQ ID NO: 5296801 - DNA, 25 bp, Homo sapien
gtgtggcagtccaatcctgagtctg

SEQ ID NO: 5296802 - DNA, 25 bp, Homo sapien
tgagcactattctgggtgctgggct

SEQ ID NO: 5296803 - DNA, 25 bp, Homo sapien
tctgtgtggcagtccaatcctgagt

SEQ ID NO: 5296804 - DNA, 25 bp, Homo sapien
taggctcaaaataaagggataaaga

SEQ ID NO: 5296805 - DNA, 25 bp, Homo sapien
tattaacctcaaatgtaaatgggct

SEQ ID NO: 5296806 - DNA, 25 bp, Homo sapien
caaattggatagagtcaagacccat

SEQ ID NO: 5296807 - DNA, 25 bp, Homo sapien
cagtgtgctgtattcaggagaccca

SEQ ID NO: 5296808 - DNA, 25 bp, Homo sapien
aaatgccccaattaaaagatacaga

SEQ ID NO: 5296809 - DNA, 25 bp, Homo sapien
taaatgtgttttaatactcggatga

SEQ ID NO: 5296810 - DNA, 25 bp, Homo sapien
gtgttttaatactcggatgatgaac

SEQ ID NO: 5296811 - DNA, 25 bp, Homo sapien
ttaatactcggatgatgaacaagat

SEQ ID NO: 5296812 - DNA, 25 bp, Homo sapien
ttttaatactcggatgatgaacaag

SEQ ID NO: 5296813 - DNA, 25 bp, Homo sapien
tatctgccttatgctattgtgaaaa

SEQ ID NO: 5296814 - DNA, 25 bp, Homo sapien
gaagagatacctgttgcttacccct

SEQ ID NO: 5296815 - DNA, 25 bp, Homo sapien
cagagttcagacataggtttgcatc

SEQ ID NO: 5296816 - DNA, 25 bp, Homo sapien
gcttacccctgtgatgacaacttat

SEQ ID NO: 5296817 - DNA, 25 bp, Homo sapien
ttagtaacagggtgaattgtgagtt

SEQ ID NO: 5296818 - DNA, 25 bp, Homo sapien
atcgagtgatgcattagtaacaggg

SEQ ID NO: 5296819 - DNA, 25 bp, Homo sapien
cttatcgagtgatgcattagtaaca

SEQ ID NO: 5296820 - DNA, 25 bp, Homo sapien
tgcattagtaacagggtgaattgtg

SEQ ID NO: 5296821 - DNA, 25 bp, Homo sapien
aaaatcttgaatctgacactgatct

SEQ ID NO: 5296822 - DNA, 25 bp, Homo sapien
taaaatcttgaatctgacactgatc

SEQ ID NO: 5296823 - DNA, 25 bp, Homo sapien
tcttttcccagtctacacccttctg

SEQ ID NO: 5296824 - DNA, 25 bp, Homo sapien
caagcaggatggtcccgtttctttt

SEQ ID NO: 5296825 - DNA, 25 bp, Homo sapien
tcccagtctacacccttctgaccaa

SEQ ID NO: 5296826 - DNA, 25 bp, Homo sapien
tcaagcaggatggtcccgtttcttt

SEQ ID NO: 5296827 - DNA, 25 bp, Homo sapien
tctcctctaagtgatggttcagtct

SEQ ID NO: 5296828 - DNA, 25 bp, Homo sapien
tgaggggtaagcagctctcctctaa

SEQ ID NO: 5296829 - DNA, 25 bp, Homo sapien
tttattgttcatgccacaacccagt

SEQ ID NO: 5296830 - DNA, 25 bp, Homo sapien
agctctcctctaagtgatggttcag

SEQ ID NO: 5296831 - DNA, 25 bp, Homo sapien
tctgaatctgtctaggtccccgttg

SEQ ID NO: 5296832 - DNA, 25 bp, Homo sapien
tctatccagcaatccaattccaggg

SEQ ID NO: 5296833 - DNA, 25 bp, Homo sapien
aaattaacacagtgagtctatccag

SEQ ID NO: 5296834 - DNA, 25 bp, Homo sapien
tctaggtccccgttgcagtttggca

SEQ ID NO: 5296835 - DNA, 25 bp, Homo sapien
gattctaatgtaacatcactttcgt

SEQ ID NO: 5296836 - DNA, 25 bp, Homo sapien
cgtcatggacttttgctatattttg

SEQ ID NO: 5296837 - DNA, 25 bp, Homo sapien
catcactttcgttattgagagtcat

SEQ ID NO: 5296838 - DNA, 25 bp, Homo sapien
gaaaatgtgacccacttgattctaa

SEQ ID NO: 5296839 - DNA, 25 bp, Homo sapien
aaaaaggcagaggttgcaatcctag

SEQ ID NO: 5296840 - DNA, 25 bp, Homo sapien
aagatctaccaagaaaatggagaac

SEQ ID NO: 5296841 - DNA, 25 bp, Homo sapien
gatctaccaagaaaatggagaacaa

SEQ ID NO: 5296842 - DNA, 25 bp, Homo sapien
ggaagatctaccaagaaaatggaga

SEQ ID NO: 5296843 - DNA, 25 bp, Homo sapien
ctgatacaactatccctctccctgt

SEQ ID NO: 5296844 - DNA, 25 bp, Homo sapien
ttctgatacaactatccctctccct

SEQ ID NO: 5296845 - DNA, 25 bp, Homo sapien
tgatacaactatccctctccctgtt

SEQ ID NO: 5296846 - DNA, 25 bp, Homo sapien
tctgatacaactatccctctccctg

SEQ ID NO: 5296847 - DNA, 25 bp, Homo sapien
atgaaaatagtaaacatatgctcac

SEQ ID NO: 5296848 - DNA, 25 bp, Homo sapien
gaaaatagtaaacatatgctcactg

SEQ ID NO: 5296849 - DNA, 25 bp, Homo sapien
aaaatagtaaacatatgctcactgc

SEQ ID NO: 5296850 - DNA, 25 bp, Homo sapien
tagttgaccctcccatacccaaaga

SEQ ID NO: 5296851 - DNA, 25 bp, Homo sapien
ttaatgcctcagaattttggtgtca

SEQ ID NO: 5296852 - DNA, 25 bp, Homo sapien
gcctcagaattttggtgtcattggt

SEQ ID NO: 5296853 - DNA, 25 bp, Homo sapien
taatgcctcagaattttggtgtcat

SEQ ID NO: 5296854 - DNA, 25 bp, Homo sapien
atgcctcagaattttggtgtcattg

SEQ ID NO: 5296855 - DNA, 25 bp, Homo sapien
acaccactttgccatccactatctg

SEQ ID NO: 5296856 - DNA, 25 bp, Homo sapien
agacaccactttgccatccactatc

SEQ ID NO: 5296857 - DNA, 25 bp, Homo sapien
cagacaccactttgccatccactat

SEQ ID NO: 5296858 - DNA, 25 bp, Homo sapien
tcagacaccactttgccatccacta

SEQ ID NO: 5296859 - DNA, 25 bp, Homo sapien
caggcggcggtaggtggcgatcgca

SEQ ID NO: 5296860 - DNA, 25 bp, Homo sapien
gcggcggtaggtggcgatcgcagcc

SEQ ID NO: 5296861 - DNA, 25 bp, Homo sapien
gttgctgcagtccagggtatcacca

SEQ ID NO: 5296862 - DNA, 25 bp, Homo sapien
ggagttgctgcagtccagggtatca

SEQ ID NO: 5296863 - DNA, 25 bp, Homo sapien
tgcagggcatagcgggccactacct

SEQ ID NO: 5296864 - DNA, 25 bp, Homo sapien
agggcatagcgggccactacctccc

SEQ ID NO: 5296865 - DNA, 25 bp, Homo sapien
tctgcagggcatagcgggccactac

SEQ ID NO: 5296866 - DNA, 25 bp, Homo sapien
catagcgggccactacctccctcag

SEQ ID NO: 5296867 - DNA, 25 bp, Homo sapien
gagacctgttattgtccagctcctc

SEQ ID NO: 5296868 - DNA, 25 bp, Homo sapien
ctgctgagacctgttattgtccagc

SEQ ID NO: 5296869 - DNA, 25 bp, Homo sapien
gctgagacctgttattgtccagctc

SEQ ID NO: 5296870 - DNA, 25 bp, Homo sapien
gagcatcgccttagcagctccaacc

SEQ ID NO: 5296871 - DNA, 25 bp, Homo sapien
atggatgtcgttctctactggctgg

SEQ ID NO: 5296872 - DNA, 25 bp, Homo sapien
tgtctcacagttgactctaaaatca

SEQ ID NO: 5296873 - DNA, 25 bp, Homo sapien
catcagcagagagtctgggatgctg

SEQ ID NO: 5296874 - DNA, 25 bp, Homo sapien
tcgttctctactggctggcacatgg

SEQ ID NO: 5296875 - DNA, 25 bp, Homo sapien
ttctcaatgagctccactaccattt

SEQ ID NO: 5296876 - DNA, 25 bp, Homo sapien
gcctgtccccagtagccgaatggca

SEQ ID NO: 5296877 - DNA, 25 bp, Homo sapien
agcctgtccccagtagccgaatggc

SEQ ID NO: 5296878 - DNA, 25 bp, Homo sapien
cagcctgtccccagtagccgaatgg

SEQ ID NO: 5296879 - DNA, 25 bp, Homo sapien
tcagcctgtccccagtagccgaatg

SEQ ID NO: 5296880 - DNA, 25 bp, Homo sapien
gaagggcaagctgcatgaagcctta

SEQ ID NO: 5296881 - DNA, 25 bp, Homo sapien
ggtaacttggcatccctgaatatct

SEQ ID NO: 5296882 - DNA, 25 bp, Homo sapien
caagttcccacatggctgaagatgg

SEQ ID NO: 5296883 - DNA, 25 bp, Homo sapien
taatcccattgagggaggcgttccc

SEQ ID NO: 5296884 - DNA, 25 bp, Homo sapien
tcagttgcttaatgcctagtgccaa

SEQ ID NO: 5296885 - DNA, 25 bp, Homo sapien
tgttgagttcactccccaagtgggc

SEQ ID NO: 5296886 - DNA, 25 bp, Homo sapien
gatcccctgatagtatctccactgt

SEQ ID NO: 5296887 - DNA, 25 bp, Homo sapien
gacaaaacgcatggcatatagtggg

SEQ ID NO: 5296888 - DNA, 25 bp, Homo sapien
taatattctagacctttatggtaat

SEQ ID NO: 5296889 - DNA, 25 bp, Homo sapien
tcttcatactgttttgtgctatagt

SEQ ID NO: 5296890 - DNA, 25 bp, Homo sapien
gttttgtgctatagtttcctactta

SEQ ID NO: 5296891 - DNA, 25 bp, Homo sapien
tataactccaccatacttgttaaca

SEQ ID NO: 5296892 - DNA, 25 bp, Homo sapien
tacctgtggcacctagtaactacta

SEQ ID NO: 5296893 - DNA, 25 bp, Homo sapien
gaataaaattcataagttgggagga

SEQ ID NO: 5296894 - DNA, 25 bp, Homo sapien
actagccagcttgcccgggtatttg

SEQ ID NO: 5296895 - DNA, 25 bp, Homo sapien
aacactgcgggattttaggtgctcc

SEQ ID NO: 5296896 - DNA, 25 bp, Homo sapien
tatctgcaggatgtgaggtactccc

SEQ ID NO: 5296897 - DNA, 25 bp, Homo sapien
ttgtgctgaatatctgcaggatgtg

SEQ ID NO: 5296898 - DNA, 25 bp, Homo sapien
tgaatatctgcaggatgtgaggtac

SEQ ID NO: 5296899 - DNA, 25 bp, Homo sapien
tgctgaatatctgcaggatgtgagg

SEQ ID NO: 5296900 - DNA, 25 bp, Homo sapien
gattgaccccatgtctatccttgtg

SEQ ID NO: 5296901 - DNA, 25 bp, Homo sapien
aattgccttggtacatttattgaaa

SEQ ID NO: 5296902 - DNA, 25 bp, Homo sapien
gaaatgtataggtctttttctagac

SEQ ID NO: 5296903 - DNA, 25 bp, Homo sapien
tgtggtaataccacagtgtcgacta

SEQ ID NO: 5296904 - DNA, 25 bp, Homo sapien
gcattgaatctatcataaatgtggg

SEQ ID NO: 5296905 - DNA, 25 bp, Homo sapien
cagagtgggcgcctgtttccaaaaa

SEQ ID NO: 5296906 - DNA, 25 bp, Homo sapien
aacctgttaggatattgagaatgca

SEQ ID NO: 5296907 - DNA, 25 bp, Homo sapien
accgctgcgtaccaacctgggtgac

SEQ ID NO: 5296908 - DNA, 25 bp, Homo sapien
catagttgatctcatgaactttgtt

SEQ ID NO: 5296909 - DNA, 25 bp, Homo sapien
ttcatagttgatctcatgaactttg

SEQ ID NO: 5296910 - DNA, 25 bp, Homo sapien
tgcttcatagttgatctcatgaact

SEQ ID NO: 5296911 - DNA, 25 bp, Homo sapien
tagttgatctcatgaactttgttct

SEQ ID NO: 5296912 - DNA, 25 bp, Homo sapien
ggctatgagtgtctccacaagtata

SEQ ID NO: 5296913 - DNA, 25 bp, Homo sapien
tgctagcaagaagtgacatacccac

SEQ ID NO: 5296914 - DNA, 25 bp, Homo sapien
gggaaggcattacaaaacgtcataa

SEQ ID NO: 5296915 - DNA, 25 bp, Homo sapien
cagtttgtcatgtggcaggtactca

SEQ ID NO: 5296916 - DNA, 25 bp, Homo sapien
ccatgactgtgtgatgttatgttcc

SEQ ID NO: 5296917 - DNA, 25 bp, Homo sapien
ggatgaacggtcatctccccttttc

SEQ ID NO: 5296918 - DNA, 25 bp, Homo sapien
tagctaaacaattccggatgaacgg

SEQ ID NO: 5296919 - DNA, 25 bp, Homo sapien
taaagatcacataatctctgaagag

SEQ ID NO: 5296920 - DNA, 25 bp, Homo sapien
taagtgctacttgagaatatgaagg

SEQ ID NO: 5296921 - DNA, 25 bp, Homo sapien
gaaacccagcacttttatataaatg

SEQ ID NO: 5296922 - DNA, 25 bp, Homo sapien
aaattcaatactcttacaggctacc

SEQ ID NO: 5296923 - DNA, 25 bp, Homo sapien
tcaaacatgggactgctaggtcaga

SEQ ID NO: 5296924 - DNA, 25 bp, Homo sapien
taaacgtattttggctattcatatt

SEQ ID NO: 5296925 - DNA, 25 bp, Homo sapien
taatactactattgaaatatctgtg

SEQ ID NO: 5296926 - DNA, 25 bp, Homo sapien
gagagacaggcaagatgtatctttg

SEQ ID NO: 5296927 - DNA, 25 bp, Homo sapien
tatctgtgtcaattaacttaaaacc

SEQ ID NO: 5296928 - DNA, 25 bp, Homo sapien
tagagacggtggtagcaatgttacc

SEQ ID NO: 5296929 - DNA, 25 bp, Homo sapien
ccattttgtcacgtgagttgggcac

SEQ ID NO: 5296930 - DNA, 25 bp, Homo sapien
gctaaagattctaactgacaagctt

SEQ ID NO: 5296931 - DNA, 25 bp, Homo sapien
atgttaccactaaaaacaagcgtcg

SEQ ID NO: 5296932 - DNA, 25 bp, Homo sapien
gaaacatgatatcctgtagacactg

SEQ ID NO: 5296933 - DNA, 25 bp, Homo sapien
tagctctactgtaaatacctgagtg

SEQ ID NO: 5296934 - DNA, 25 bp, Homo sapien
catatcagggactagattaccgcaa

SEQ ID NO: 5296935 - DNA, 25 bp, Homo sapien
cctatagcaattatggaggtctgct

SEQ ID NO: 5296936 - DNA, 25 bp, Homo sapien
tatagaggtattgtataagtggcct

SEQ ID NO: 5296937 - DNA, 25 bp, Homo sapien
tggcctgtggtgatgaaatatttgt

SEQ ID NO: 5296938 - DNA, 25 bp, Homo sapien
ttaatacatagattcagcttccagc

SEQ ID NO: 5296939 - DNA, 25 bp, Homo sapien
tcatgcttgtctgtaatcccctgcc

SEQ ID NO: 5296940 - DNA, 25 bp, Homo sapien
tgcatgcccaatgaattcaatcctg

SEQ ID NO: 5296941 - DNA, 25 bp, Homo sapien
taaaaactcgcaaaacttagtatga

SEQ ID NO: 5296942 - DNA, 25 bp, Homo sapien
taaaatgtgctttcgctgcatgccc

SEQ ID NO: 5296943 - DNA, 25 bp, Homo sapien
tcagaagtttacaaagaccaattta

SEQ ID NO: 5296944 - DNA, 25 bp, Homo sapien
gtttaattgagtcattcattcaaag

SEQ ID NO: 5296945 - DNA, 25 bp, Homo sapien
aaagcagctctgtttaattgagtca

SEQ ID NO: 5296946 - DNA, 25 bp, Homo sapien
tttaggaaatggtagaactctgccc

SEQ ID NO: 5296947 - DNA, 25 bp, Homo sapien
cagctctgtttaattgagtcattca

SEQ ID NO: 5296948 - DNA, 25 bp, Homo sapien
ggttcatctgatctagcttctgcta

SEQ ID NO: 5296949 - DNA, 25 bp, Homo sapien
gaatttgcaacaaccaatcacaagc

SEQ ID NO: 5296950 - DNA, 25 bp, Homo sapien
ggtctagtgtcctaaaatactcagg

SEQ ID NO: 5296951 - DNA, 25 bp, Homo sapien
gctatcatctaggtagccaagcact

SEQ ID NO: 5296952 - DNA, 25 bp, Homo sapien
gacagactatatggcctgtgaagcc

SEQ ID NO: 5296953 - DNA, 25 bp, Homo sapien
tatgaagatttgttgcccacccaag

SEQ ID NO: 5296954 - DNA, 25 bp, Homo sapien
tagaaagcacttaagagatcccctc

SEQ ID NO: 5296955 - DNA, 25 bp, Homo sapien
gaatccatgaatatgctgctctgtg

SEQ ID NO: 5296956 - DNA, 25 bp, Homo sapien
actatatggtcagtataatctcaag

SEQ ID NO: 5296957 - DNA, 25 bp, Homo sapien
aatctcaagtttgttattacacaca

SEQ ID NO: 5296958 - DNA, 25 bp, Homo sapien
ctgggtagtgagattgcagataatt

SEQ ID NO: 5296959 - DNA, 25 bp, Homo sapien
aaaaaacagggtacataactatatg

SEQ ID NO: 5296960 - DNA, 25 bp, Homo sapien
cataggtgggcgactttgaatctaa

SEQ ID NO: 5296961 - DNA, 25 bp, Homo sapien
aaagcacagcagtgtaaggtctgca

SEQ ID NO: 5296962 - DNA, 25 bp, Homo sapien
cattattttagttggaagagccgca

SEQ ID NO: 5296963 - DNA, 25 bp, Homo sapien
gctactctggcataacactggagat

SEQ ID NO: 5296964 - DNA, 25 bp, Homo sapien
agttgtgtagccctttattagcaac

SEQ ID NO: 5296965 - DNA, 25 bp, Homo sapien
caacatgggtagtaattgactataa

SEQ ID NO: 5296966 - DNA, 25 bp, Homo sapien
tagtaattgactataactggagatt

SEQ ID NO: 5296967 - DNA, 25 bp, Homo sapien
tgttgtacaacatgggtagtaattg

SEQ ID NO: 5296968 - DNA, 25 bp, Homo sapien
taaggaaggactacacctactagaa

SEQ ID NO: 5296969 - DNA, 25 bp, Homo sapien
tctgaaagcggaatatatgtgcaca

SEQ ID NO: 5296970 - DNA, 25 bp, Homo sapien
tatgtgcacaagtctgcaaagagtg

SEQ ID NO: 5296971 - DNA, 25 bp, Homo sapien
ccagtatcgtggtaaaggctaggct

SEQ ID NO: 5296972 - DNA, 25 bp, Homo sapien
agtggaccgtgagtgctccagctgc

SEQ ID NO: 5296973 - DNA, 25 bp, Homo sapien
tcagtggaccgtgagtgctccagct

SEQ ID NO: 5296974 - DNA, 25 bp, Homo sapien
tgcctctccaaataagcccattgtt

SEQ ID NO: 5296975 - DNA, 25 bp, Homo sapien
aaatccagctaaccgaaacttctga

SEQ ID NO: 5296976 - DNA, 25 bp, Homo sapien
gagtctagaccagtaaataaaacca

SEQ ID NO: 5296977 - DNA, 25 bp, Homo sapien
catatctcttaagaggtcactttgg

SEQ ID NO: 5296978 - DNA, 25 bp, Homo sapien
ggtatttcttcaagtaattgctaaa

SEQ ID NO: 5296979 - DNA, 25 bp, Homo sapien
aataacaccccaatgggatgtcttc

SEQ ID NO: 5296980 - DNA, 25 bp, Homo sapien
ttaataacaccccaatgggatgtct

SEQ ID NO: 5296981 - DNA, 25 bp, Homo sapien
cttccacatatagtattatggtatt

SEQ ID NO: 5296982 - DNA, 25 bp, Homo sapien
gagcaactttaactcaccaagtcgg

SEQ ID NO: 5296983 - DNA, 25 bp, Homo sapien
taaactggattcatactctgtggga

SEQ ID NO: 5296984 - DNA, 25 bp, Homo sapien
ggcctacaacacaggtctcttatga

SEQ ID NO: 5296985 - DNA, 25 bp, Homo sapien
taaaggcaggcttaagcaacacaga

SEQ ID NO: 5296986 - DNA, 25 bp, Homo sapien
gttcaatgctgttggcaaaagtcca

SEQ ID NO: 5296987 - DNA, 25 bp, Homo sapien
cattcagcgctaagatataaggcag

SEQ ID NO: 5296988 - DNA, 25 bp, Homo sapien
gggtcactatactacccattcagcg

SEQ ID NO: 5296989 - DNA, 25 bp, Homo sapien
gcttcctaaggcctagtatagtgaa

SEQ ID NO: 5296990 - DNA, 25 bp, Homo sapien
tgaacttctgccaatggcccattgt

SEQ ID NO: 5296991 - DNA, 25 bp, Homo sapien
tatttctgaaaagatctgacctcca

SEQ ID NO: 5296992 - DNA, 25 bp, Homo sapien
tagtccaattgaaagccttcctgag

SEQ ID NO: 5296993 - DNA, 25 bp, Homo sapien
tagtcaacccattagcaaagtcctt

SEQ ID NO: 5296994 - DNA, 25 bp, Homo sapien
gttcaatggatctataaatctcccc

SEQ ID NO: 5296995 - DNA, 25 bp, Homo sapien
cctgggattcatcatagtaactgta

SEQ ID NO: 5296996 - DNA, 25 bp, Homo sapien
gatctataaatctccccctgggatt

SEQ ID NO: 5296997 - DNA, 25 bp, Homo sapien
ttcatcatagtaactgtaacggaac

SEQ ID NO: 5296998 - DNA, 25 bp, Homo sapien
ggcaaagcacagcttaagcctctga

SEQ ID NO: 5296999 - DNA, 25 bp, Homo sapien
gcaagcgcttaccaaataatttcag

SEQ ID NO: 5297000 - DNA, 25 bp, Homo sapien
tcccaagagcccttgtacataaaaa

SEQ ID NO: 5297001 - DNA, 25 bp, Homo sapien
gcttaagcctctgagagaatcattc

SEQ ID NO: 5297002 - DNA, 25 bp, Homo sapien
gaaacaaatgaacaccttagacaag

SEQ ID NO: 5297003 - DNA, 25 bp, Homo sapien
gacaaagctgtccaaaatctttctg

SEQ ID NO: 5297004 - DNA, 25 bp, Homo sapien
tctttgaacctgaactgctttaggt

SEQ ID NO: 5297005 - DNA, 25 bp, Homo sapien
ggaaatcaaggtagtatacacctca

SEQ ID NO: 5297006 - DNA, 25 bp, Homo sapien
tactggatcggcatgggatttaatg

SEQ ID NO: 5297007 - DNA, 25 bp, Homo sapien
gcaacagctcaaatcgtctcatggt

SEQ ID NO: 5297008 - DNA, 25 bp, Homo sapien
ggtcaatatacatacagaaggcatc

SEQ ID NO: 5297009 - DNA, 25 bp, Homo sapien
caaatggctgaagttggtcaaccca

SEQ ID NO: 5297010 - DNA, 25 bp, Homo sapien
tgtgaatccattccagagcacgctt

SEQ ID NO: 5297011 - DNA, 25 bp, Homo sapien
tgactggtgattaatgagtggattc

SEQ ID NO: 5297012 - DNA, 25 bp, Homo sapien
cagagcacgctttctgagaaaaaga

SEQ ID NO: 5297013 - DNA, 25 bp, Homo sapien
ggtgattaatgagtggattcacaga

SEQ ID NO: 5297014 - DNA, 25 bp, Homo sapien
caatgaaccatttaagacctctgca

SEQ ID NO: 5297015 - DNA, 25 bp, Homo sapien
taatttaggaaagatacccatcgcc

SEQ ID NO: 5297016 - DNA, 25 bp, Homo sapien
tagatagcttaacccataactggtc

SEQ ID NO: 5297017 - DNA, 25 bp, Homo sapien
cctctgcatgcatgaggaactgaat

SEQ ID NO: 5297018 - DNA, 25 bp, Homo sapien
tgacgtgtccttgctcttacaataa

SEQ ID NO: 5297019 - DNA, 25 bp, Homo sapien
gatgaccacagtgcttaatagccaa

SEQ ID NO: 5297020 - DNA, 25 bp, Homo sapien
caattgtgagtaaaaactaagcacc

SEQ ID NO: 5297021 - DNA, 25 bp, Homo sapien
gaaaaggactggcacagcacacagt

SEQ ID NO: 5297022 - DNA, 25 bp, Homo sapien
ggaataatggtaaactcatccttat

SEQ ID NO: 5297023 - DNA, 25 bp, Homo sapien
aggaataatggtaaactcatcctta

SEQ ID NO: 5297024 - DNA, 25 bp, Homo sapien
gaataatggtaaactcatccttatg

SEQ ID NO: 5297025 - DNA, 25 bp, Homo sapien
aataatggtaaactcatccttatgg

SEQ ID NO: 5297026 - DNA, 25 bp, Homo sapien
ttgcgaaataaacagatcatacaga

SEQ ID NO: 5297027 - DNA, 25 bp, Homo sapien
gatcatacagatctccagtccctct

SEQ ID NO: 5297028 - DNA, 25 bp, Homo sapien
cctgtcaattgcgaaataaacagat

SEQ ID NO: 5297029 - DNA, 25 bp, Homo sapien
agatcatacagatctccagtccctc

SEQ ID NO: 5297030 - DNA, 25 bp, Homo sapien
tatctgtttcgttaatcttttgaaa

SEQ ID NO: 5297031 - DNA, 25 bp, Homo sapien
ctatctgtttcgttaatcttttgaa

SEQ ID NO: 5297032 - DNA, 25 bp, Homo sapien
tctatctgtttcgttaatcttttga

SEQ ID NO: 5297033 - DNA, 25 bp, Homo sapien
cctttgctaagaacttttattagct

SEQ ID NO: 5297034 - DNA, 25 bp, Homo sapien
tttgctaagaacttttattagctct

SEQ ID NO: 5297035 - DNA, 25 bp, Homo sapien
ctttgctaagaacttttattagctc

SEQ ID NO: 5297036 - DNA, 25 bp, Homo sapien
tagccttatgatgcggtttgaccag

SEQ ID NO: 5297037 - DNA, 25 bp, Homo sapien
taatccgtcaactatttaaccacag

SEQ ID NO: 5297038 - DNA, 25 bp, Homo sapien
ggtcaagactagttgctccaggcag

SEQ ID NO: 5297039 - DNA, 25 bp, Homo sapien
tatgcatagcagatacggtcaagac

SEQ ID NO: 5297040 - DNA, 25 bp, Homo sapien
ttttacactgcatgaccgtatcaaa

SEQ ID NO: 5297041 - DNA, 25 bp, Homo sapien
aatgcttgaagtgattaatatccca

SEQ ID NO: 5297042 - DNA, 25 bp, Homo sapien
actggattgtctggaacactaaaga

SEQ ID NO: 5297043 - DNA, 25 bp, Homo sapien
aagcaactgaattcacagacgtgga

SEQ ID NO: 5297044 - DNA, 25 bp, Homo sapien
tctgcagagacatgcgttcaaacat

SEQ ID NO: 5297045 - DNA, 25 bp, Homo sapien
tgtctgcagagacatgcgttcaaac

SEQ ID NO: 5297046 - DNA, 25 bp, Homo sapien
gcagagacatgcgttcaaacattcc

SEQ ID NO: 5297047 - DNA, 25 bp, Homo sapien
agagacatgcgttcaaacattcctg

SEQ ID NO: 5297048 - DNA, 25 bp, Homo sapien
tgcacatcgagagaggggcacatga

SEQ ID NO: 5297049 - DNA, 25 bp, Homo sapien
agtgcacatcgagagaggggcacat

SEQ ID NO: 5297050 - DNA, 25 bp, Homo sapien
aagtgcacatcgagagaggggcaca

SEQ ID NO: 5297051 - DNA, 25 bp, Homo sapien
cacatcgagagaggggcacatgatg

SEQ ID NO: 5297052 - DNA, 25 bp, Homo sapien
gataaagctgtggatattaagttgt

SEQ ID NO: 5297053 - DNA, 25 bp, Homo sapien
gaggagataaagctgtggatattaa

SEQ ID NO: 5297054 - DNA, 25 bp, Homo sapien
taaattgcagggaggagataaagct

SEQ ID NO: 5297055 - DNA, 25 bp, Homo sapien
atatgttacttcataaattgcaggg

SEQ ID NO: 5297056 - DNA, 25 bp, Homo sapien
cccacagtacgtatatcctgcatgg

SEQ ID NO: 5297057 - DNA, 25 bp, Homo sapien
gtaatagacggatccacttgtttat

SEQ ID NO: 5297058 - DNA, 25 bp, Homo sapien
aatagacggatccacttgtttataa

SEQ ID NO: 5297059 - DNA, 25 bp, Homo sapien
gcacaagacccacagtacgtatatc

SEQ ID NO: 5297060 - DNA, 25 bp, Homo sapien
gccaaccttctagctgtgcattcag

SEQ ID NO: 5297061 - DNA, 25 bp, Homo sapien
gcaataatggctctagcaggtcttt

SEQ ID NO: 5297062 - DNA, 25 bp, Homo sapien
tacttgtgaaagccaaccttctagc

SEQ ID NO: 5297063 - DNA, 25 bp, Homo sapien
aatggctctagcaggtctttttgta

SEQ ID NO: 5297064 - DNA, 25 bp, Homo sapien
taaacagcggttcctggatctctga

SEQ ID NO: 5297065 - DNA, 25 bp, Homo sapien
gcacaataaactcaatcccacatgg

SEQ ID NO: 5297066 - DNA, 25 bp, Homo sapien
gccgttggcacccagtatttcatta

SEQ ID NO: 5297067 - DNA, 25 bp, Homo sapien
tgggtataaggtaacaagaagcaac

SEQ ID NO: 5297068 - DNA, 25 bp, Homo sapien
tatgtatctgatagggctcctcaca

SEQ ID NO: 5297069 - DNA, 25 bp, Homo sapien
tcgcactgtgaaaaacaccgactgt

SEQ ID NO: 5297070 - DNA, 25 bp, Homo sapien
cagaaaatagcatgcccttggtaca

SEQ ID NO: 5297071 - DNA, 25 bp, Homo sapien
ccttagggagtgcaagaactgtcac

SEQ ID NO: 5297072 - DNA, 25 bp, Homo sapien
ttttctgtccgttcatatatagtct

SEQ ID NO: 5297073 - DNA, 25 bp, Homo sapien
cttttctgtccgttcatatatagtc

SEQ ID NO: 5297074 - DNA, 25 bp, Homo sapien
tacttttctgtccgttcatatatag

SEQ ID NO: 5297075 - DNA, 25 bp, Homo sapien
tttctgtccgttcatatatagtctc

SEQ ID NO: 5297076 - DNA, 25 bp, Homo sapien
cataaaaagcaaccacctcaagtga

SEQ ID NO: 5297077 - DNA, 25 bp, Homo sapien
gctcggccatccacgtttatttcaa

SEQ ID NO: 5297078 - DNA, 25 bp, Homo sapien
aaacaccatgtttaccgtctgacaa

SEQ ID NO: 5297079 - DNA, 25 bp, Homo sapien
aaaagggtccagtactctagtgagg

SEQ ID NO: 5297080 - DNA, 25 bp, Homo sapien
agcctggtcaacgaaagcgaaactc

SEQ ID NO: 5297081 - DNA, 25 bp, Homo sapien
cggtgaaatgaaatcgtgccattgc

SEQ ID NO: 5297082 - DNA, 25 bp, Homo sapien
actccagcctggtcaacgaaagcga

SEQ ID NO: 5297083 - DNA, 25 bp, Homo sapien
ctggtcaacgaaagcgaaactccgt

SEQ ID NO: 5297084 - DNA, 25 bp, Homo sapien
tgttgaacctaagataatagctaca

SEQ ID NO: 5297085 - DNA, 25 bp, Homo sapien
tgatgctgtgggatatgtctactga

SEQ ID NO: 5297086 - DNA, 25 bp, Homo sapien
tctactgatgtggaaaaaggcctct

SEQ ID NO: 5297087 - DNA, 25 bp, Homo sapien
tatggtgcaatcatataacagaata

SEQ ID NO: 5297088 - DNA, 25 bp, Homo sapien
caaagttagactagaactgtgtgcc

SEQ ID NO: 5297089 - DNA, 25 bp, Homo sapien
gccttaagtgcaggaaaagggatca

SEQ ID NO: 5297090 - DNA, 25 bp, Homo sapien
gagacaacaaggcaaccagctgaat

SEQ ID NO: 5297091 - DNA, 25 bp, Homo sapien
tcccattagtaagagtgtgagcctt

SEQ ID NO: 5297092 - DNA, 25 bp, Homo sapien
ttctgaagcaagtgaaacaaagctg

SEQ ID NO: 5297093 - DNA, 25 bp, Homo sapien
tctgaagcaagtgaaacaaagctgg

SEQ ID NO: 5297094 - DNA, 25 bp, Homo sapien
cttctgaagcaagtgaaacaaagct

SEQ ID NO: 5297095 - DNA, 25 bp, Homo sapien
tattttacactatgaaacttcacaa

SEQ ID NO: 5297096 - DNA, 25 bp, Homo sapien
catgcccagcatacccttactttta

SEQ ID NO: 5297097 - DNA, 25 bp, Homo sapien
atttctgcattttttgttagaggtg

SEQ ID NO: 5297098 - DNA, 25 bp, Homo sapien
taaaatatgtagtatgagttaaatt

SEQ ID NO: 5297099 - DNA, 25 bp, Homo sapien
tcagccatacattccctctaaaagg

SEQ ID NO: 5297100 - DNA, 25 bp, Homo sapien
tcccactgagaacgtcacggcgttt

SEQ ID NO: 5297101 - DNA, 25 bp, Homo sapien
ttgttgaccacagccaaatgcagag

SEQ ID NO: 5297102 - DNA, 25 bp, Homo sapien
aatgcagaggcaagtagtaccaagc

SEQ ID NO: 5297103 - DNA, 25 bp, Homo sapien
tcactactgcctattgtttttaaat

SEQ ID NO: 5297104 - DNA, 25 bp, Homo sapien
ctcactactgcctattgtttttaaa

SEQ ID NO: 5297105 - DNA, 25 bp, Homo sapien
tctcactactgcctattgtttttaa

SEQ ID NO: 5297106 - DNA, 25 bp, Homo sapien
cttctcactactgcctattgttttt

SEQ ID NO: 5297107 - DNA, 25 bp, Homo sapien
cttaatgaatgtgtcatatcttcct

SEQ ID NO: 5297108 - DNA, 25 bp, Homo sapien
ttcactccctgcaagacagcggagc

SEQ ID NO: 5297109 - DNA, 25 bp, Homo sapien
cccttcactccctgcaagacagcgg

SEQ ID NO: 5297110 - DNA, 25 bp, Homo sapien
ctacccttcactccctgcaagacag

SEQ ID NO: 5297111 - DNA, 25 bp, Homo sapien
actccctgcaagacagcggagcccc

SEQ ID NO: 5297112 - DNA, 25 bp, Homo sapien
taaaggtgcggggaaacgctgcctc

SEQ ID NO: 5297113 - DNA, 25 bp, Homo sapien
tgcggggaaacgctgcctccttctc

SEQ ID NO: 5297114 - DNA, 25 bp, Homo sapien
cagcaccagaggcacggggcgagaa

SEQ ID NO: 5297115 - DNA, 25 bp, Homo sapien
ggcacggggcgagaagacttcctct

SEQ ID NO: 5297116 - DNA, 25 bp, Homo sapien
agaactccctctgggcgagggcact

SEQ ID NO: 5297117 - DNA, 25 bp, Homo sapien
gggtccctggctcggcaagagggcg

SEQ ID NO: 5297118 - DNA, 25 bp, Homo sapien
gcactccccggaccgccagcgggga

SEQ ID NO: 5297119 - DNA, 25 bp, Homo sapien
ccctggctcggcaagagggcggagg

SEQ ID NO: 5297120 - DNA, 25 bp, Homo sapien
ggagaagcggggctcggcgccgggc

SEQ ID NO: 5297121 - DNA, 25 bp, Homo sapien
agaagcggggctcggcgccgggcac

SEQ ID NO: 5297122 - DNA, 25 bp, Homo sapien
gcgtggagaagcggggctcggcgcc

SEQ ID NO: 5297123 - DNA, 25 bp, Homo sapien
cggcgtggagaagcggggctcggcg

SEQ ID NO: 5297124 - DNA, 25 bp, Homo sapien
gggtggcagcggccggccgcacgct

SEQ ID NO: 5297125 - DNA, 25 bp, Homo sapien
gtggcagcggccggccgcacgcttc

SEQ ID NO: 5297126 - DNA, 25 bp, Homo sapien
gggggtggcagcggccggccgcacg

SEQ ID NO: 5297127 - DNA, 25 bp, Homo sapien
ccgggggtggcagcggccggccgca

SEQ ID NO: 5297128 - DNA, 25 bp, Homo sapien
agcacgttccttcctcgagcctggt

SEQ ID NO: 5297129 - DNA, 25 bp, Homo sapien
gggagcacgttccttcctcgagcct

SEQ ID NO: 5297130 - DNA, 25 bp, Homo sapien
cagaggcggcgacaagtcggctggg

SEQ ID NO: 5297131 - DNA, 25 bp, Homo sapien
gtccgggagcacgttccttcctcga

SEQ ID NO: 5297132 - DNA, 25 bp, Homo sapien
agctcccggcgtgactggcttctcg

SEQ ID NO: 5297133 - DNA, 25 bp, Homo sapien
gtgactggcttctcggcagaccact

SEQ ID NO: 5297134 - DNA, 25 bp, Homo sapien
gaggctgtgtaccagctcccggcgt

SEQ ID NO: 5297135 - DNA, 25 bp, Homo sapien
cttctcggcagaccactcggttgga

SEQ ID NO: 5297136 - DNA, 25 bp, Homo sapien
agcggctccgcgaggggacgagaca

SEQ ID NO: 5297137 - DNA, 25 bp, Homo sapien
ctatggtgcacgaggatgaatgagg

SEQ ID NO: 5297138 - DNA, 25 bp, Homo sapien
gcgaggggacgagacaccgcgggcc

SEQ ID NO: 5297139 - DNA, 25 bp, Homo sapien
tatggtgcacgaggatgaatgagga

SEQ ID NO: 5297140 - DNA, 25 bp, Homo sapien
aaactccggcgaccgccggaagatg

SEQ ID NO: 5297141 - DNA, 25 bp, Homo sapien
aacaatcaccacaaactccggcgac

SEQ ID NO: 5297142 - DNA, 25 bp, Homo sapien
gcggcctcaccgaagcccggaaagc

SEQ ID NO: 5297143 - DNA, 25 bp, Homo sapien
agccggggctggttccgccgagccg

SEQ ID NO: 5297144 - DNA, 25 bp, Homo sapien
tccagcccggccgcccgccgccggc

SEQ ID NO: 5297145 - DNA, 25 bp, Homo sapien
cctccagcccggccgcccgccgccg

SEQ ID NO: 5297146 - DNA, 25 bp, Homo sapien
ggcagggccctccagcccggccgcc

SEQ ID NO: 5297147 - DNA, 25 bp, Homo sapien
cggcagggccctccagcccggccgc

SEQ ID NO: 5297148 - DNA, 25 bp, Homo sapien
ggaatctcaacgtgcacgctccgct

SEQ ID NO: 5297149 - DNA, 25 bp, Homo sapien
ctacccgccgaggaatctcaacgtg

SEQ ID NO: 5297150 - DNA, 25 bp, Homo sapien
ctctccggggtttagcggcagcaga

SEQ ID NO: 5297151 - DNA, 25 bp, Homo sapien
tcgccactctaacgggtcctgccca

SEQ ID NO: 5297152 - DNA, 25 bp, Homo sapien
atgtttgtaactgcatgggcatggt

SEQ ID NO: 5297153 - DNA, 25 bp, Homo sapien
aactgcatgggcatggtacctcctg

SEQ ID NO: 5297154 - DNA, 25 bp, Homo sapien
attgttacaaagtacaccattgcaa

SEQ ID NO: 5297155 - DNA, 25 bp, Homo sapien
cattgcaaaagtaggaatagaggaa

SEQ ID NO: 5297156 - DNA, 25 bp, Homo sapien
tagaagcaccctaacactgaaagcc

SEQ ID NO: 5297157 - DNA, 25 bp, Homo sapien
tagtgttctaacctagtgtcagtca

SEQ ID NO: 5297158 - DNA, 25 bp, Homo sapien
tgtatctgaacactagactaagtac

SEQ ID NO: 5297159 - DNA, 25 bp, Homo sapien
agagtttaacacagagagggtcttt

SEQ ID NO: 5297160 - DNA, 25 bp, Homo sapien
gcctccaattggtaatgccattttg

SEQ ID NO: 5297161 - DNA, 25 bp, Homo sapien
tccaattggtaatgccattttggaa

SEQ ID NO: 5297162 - DNA, 25 bp, Homo sapien
cctccaattggtaatgccattttgg

SEQ ID NO: 5297163 - DNA, 25 bp, Homo sapien
aggcctccaattggtaatgccattt

SEQ ID NO: 5297164 - DNA, 25 bp, Homo sapien
tacaaaaaaagcaaattagccagac

SEQ ID NO: 5297165 - DNA, 25 bp, Homo sapien
caaaaaaagcaaattagccagacat

SEQ ID NO: 5297166 - DNA, 25 bp, Homo sapien
tctatgaaaaatacaaaaaaagcaa

SEQ ID NO: 5297167 - DNA, 25 bp, Homo sapien
aatacaaaaaaagcaaattagccag

SEQ ID NO: 5297168 - DNA, 25 bp, Homo sapien
cccagctaattggtgactcactttt

SEQ ID NO: 5297169 - DNA, 25 bp, Homo sapien
tagacacacctgagaggtaataggg

SEQ ID NO: 5297170 - DNA, 25 bp, Homo sapien
tctactagctagatcagtgggacta

SEQ ID NO: 5297171 - DNA, 25 bp, Homo sapien
aggctaagatgagagaccggcttga

SEQ ID NO: 5297172 - DNA, 25 bp, Homo sapien
ggggtttgagacagaccatctgggc

SEQ ID NO: 5297173 - DNA, 25 bp, Homo sapien
gtaagtattatgtggactggcagga

SEQ ID NO: 5297174 - DNA, 25 bp, Homo sapien
aggggtttgagacagaccatctggg

SEQ ID NO: 5297175 - DNA, 25 bp, Homo sapien
aagtattatgtggactggcaggaaa

SEQ ID NO: 5297176 - DNA, 25 bp, Homo sapien
ccgaggcggacagattgcctgagct

SEQ ID NO: 5297177 - DNA, 25 bp, Homo sapien
gaggccgaggcggacagattgcctg

SEQ ID NO: 5297178 - DNA, 25 bp, Homo sapien
ggccgaggcggacagattgcctgag

SEQ ID NO: 5297179 - DNA, 25 bp, Homo sapien
caggagttcgcaaccagcctgggca

SEQ ID NO: 5297180 - DNA, 25 bp, Homo sapien
gttgtcttgagcatgtcacttaacc

SEQ ID NO: 5297181 - DNA, 25 bp, Homo sapien
tgttgtcttgagcatgtcacttaac

SEQ ID NO: 5297182 - DNA, 25 bp, Homo sapien
gtgttgtcttgagcatgtcacttaa

SEQ ID NO: 5297183 - DNA, 25 bp, Homo sapien
agtgttgtcttgagcatgtcactta

SEQ ID NO: 5297184 - DNA, 25 bp, Homo sapien
ttagtactccaactttaatgtacat

SEQ ID NO: 5297185 - DNA, 25 bp, Homo sapien
tgcaatgcttttattagtactccaa

SEQ ID NO: 5297186 - DNA, 25 bp, Homo sapien
ttgcaatgcttttattagtactcca

SEQ ID NO: 5297187 - DNA, 25 bp, Homo sapien
gatacttgttaagccattgaagatg

SEQ ID NO: 5297188 - DNA, 25 bp, Homo sapien
ttaaattatacttgactgctgtatt

SEQ ID NO: 5297189 - DNA, 25 bp, Homo sapien
tgtgatacttgttaagccattgaag

SEQ ID NO: 5297190 - DNA, 25 bp, Homo sapien
tatacttgactgctgtattttctct

SEQ ID NO: 5297191 - DNA, 25 bp, Homo sapien
tttgtcatacagaacaaaaactact

SEQ ID NO: 5297192 - DNA, 25 bp, Homo sapien
atttgtcatacagaacaaaaactac

SEQ ID NO: 5297193 - DNA, 25 bp, Homo sapien
tatttgtcatacagaacaaaaacta

SEQ ID NO: 5297194 - DNA, 25 bp, Homo sapien
aatatttgtcatacagaacaaaaac

SEQ ID NO: 5297195 - DNA, 25 bp, Homo sapien
tgtccggaaggttcttatacatcca

SEQ ID NO: 5297196 - DNA, 25 bp, Homo sapien
catgtaaatctacagtagcaactaa

SEQ ID NO: 5297197 - DNA, 25 bp, Homo sapien
aaaaaattgcacagaatacactcat

SEQ ID NO: 5297198 - DNA, 25 bp, Homo sapien
agaaataggttctgttgtccggaag

SEQ ID NO: 5297199 - DNA, 25 bp, Homo sapien
tcagtttcgatcttcaaactgtgcc

SEQ ID NO: 5297200 - DNA, 25 bp, Homo sapien
cagtttcgatcttcaaactgtgcct

SEQ ID NO: 5297201 - DNA, 25 bp, Homo sapien
gtttcgatcttcaaactgtgccttg

SEQ ID NO: 5297202 - DNA, 25 bp, Homo sapien
ttcgatcttcaaactgtgccttgtt

SEQ ID NO: 5297203 - DNA, 25 bp, Homo sapien
aacatagtaagaccccaactcttca

SEQ ID NO: 5297204 - DNA, 25 bp, Homo sapien
gcaacatagtaagaccccaactctt

SEQ ID NO: 5297205 - DNA, 25 bp, Homo sapien
catagtaagaccccaactcttcaaa

SEQ ID NO: 5297206 - DNA, 25 bp, Homo sapien
gaggatcacttccaagcctgggcaa

SEQ ID NO: 5297207 - DNA, 25 bp, Homo sapien
gcctaatcaacatggtaaaaccaca

SEQ ID NO: 5297208 - DNA, 25 bp, Homo sapien
ctaatcaacatggtaaaaccacatc

SEQ ID NO: 5297209 - DNA, 25 bp, Homo sapien
cagcctaatcaacatggtaaaacca

SEQ ID NO: 5297210 - DNA, 25 bp, Homo sapien
agcctaatcaacatggtaaaaccac

SEQ ID NO: 5297211 - DNA, 25 bp, Homo sapien
agaagggcgaaaagagtagaatagg

SEQ ID NO: 5297212 - DNA, 25 bp, Homo sapien
aatatattagtcttccctagaggaa

SEQ ID NO: 5297213 - DNA, 25 bp, Homo sapien
ctgagcaacatagcatccagcctgg

SEQ ID NO: 5297214 - DNA, 25 bp, Homo sapien
tagaataggggaataagggccaggc

SEQ ID NO: 5297215 - DNA, 25 bp, Homo sapien
tattttgctttctttactaactcca

SEQ ID NO: 5297216 - DNA, 25 bp, Homo sapien
ctccatttgtggacacaattatctt

SEQ ID NO: 5297217 - DNA, 25 bp, Homo sapien
taactccatttgtggacacaattat

SEQ ID NO: 5297218 - DNA, 25 bp, Homo sapien
ccatttgtggacacaattatcttac

SEQ ID NO: 5297219 - DNA, 25 bp, Homo sapien
taataagataggcacaactgtctga

SEQ ID NO: 5297220 - DNA, 25 bp, Homo sapien
ctgatccaggtaggcacgagttggc

SEQ ID NO: 5297221 - DNA, 25 bp, Homo sapien
ggcaaagactggagatctaccttct

SEQ ID NO: 5297222 - DNA, 25 bp, Homo sapien
tggagatctaccttctgctttgatg

SEQ ID NO: 5297223 - DNA, 25 bp, Homo sapien
tgatcacaacaaagacaatgcggca

SEQ ID NO: 5297224 - DNA, 25 bp, Homo sapien
tagtgagaccctgttaccattttta

SEQ ID NO: 5297225 - DNA, 25 bp, Homo sapien
tcctaacttccagtcacagtatacg

SEQ ID NO: 5297226 - DNA, 25 bp, Homo sapien
aactgagcctttgtaaaagttcagc

SEQ ID NO: 5297227 - DNA, 25 bp, Homo sapien
aaagatggaaatctagacctacaca

SEQ ID NO: 5297228 - DNA, 25 bp, Homo sapien
taccagcggatgtgaactacaagaa

SEQ ID NO: 5297229 - DNA, 25 bp, Homo sapien
tgggcaggaggaaaatgataccttt

SEQ ID NO: 5297230 - DNA, 25 bp, Homo sapien
tgtaggcacgtaccgtcacacccag

SEQ ID NO: 5297231 - DNA, 25 bp, Homo sapien
tacgtagcaacatcccaaaagatcg

SEQ ID NO: 5297232 - DNA, 25 bp, Homo sapien
tatccctcaagaatatgtgtttcgc

SEQ ID NO: 5297233 - DNA, 25 bp, Homo sapien
cgtctgtacaccaagaagcattagt

SEQ ID NO: 5297234 - DNA, 25 bp, Homo sapien
gatcgattaaaagccaccaagaaaa

SEQ ID NO: 5297235 - DNA, 25 bp, Homo sapien
ttctccagcttgcaagagacaacac

SEQ ID NO: 5297236 - DNA, 25 bp, Homo sapien
caaagttttcccttgtgcatagcca

SEQ ID NO: 5297237 - DNA, 25 bp, Homo sapien
tcagttcacgataacaaagttttcc

SEQ ID NO: 5297238 - DNA, 25 bp, Homo sapien
cctagtaaaagcagatcccaagttt

SEQ ID NO: 5297239 - DNA, 25 bp, Homo sapien
gagaccgtactcagagtgaggattt

SEQ ID NO: 5297240 - DNA, 25 bp, Homo sapien
tctgtgagaccgtactcagagtgag

SEQ ID NO: 5297241 - DNA, 25 bp, Homo sapien
cgttgtctgtgagaccgtactcaga

SEQ ID NO: 5297242 - DNA, 25 bp, Homo sapien
ctcaacgttgtctgtgagaccgtac

SEQ ID NO: 5297243 - DNA, 25 bp, Homo sapien
ccctgaatccacggcctcctgatac

SEQ ID NO: 5297244 - DNA, 25 bp, Homo sapien
ctgcgtttgtccctccagcatctgc

SEQ ID NO: 5297245 - DNA, 25 bp, Homo sapien
tgcgtttgtccctccagcatctgct

SEQ ID NO: 5297246 - DNA, 25 bp, Homo sapien
gtccctccagcatctgctctggctc

SEQ ID NO: 5297247 - DNA, 25 bp, Homo sapien
cctccagcatctgctctggctccat

SEQ ID NO: 5297248 - DNA, 25 bp, Homo sapien
ccctgcaagtcacagtccccggata

SEQ ID NO: 5297249 - DNA, 25 bp, Homo sapien
ctgcaagtcacagtccccggatacc

SEQ ID NO: 5297250 - DNA, 25 bp, Homo sapien
cctgcaagtcacagtccccggatac

SEQ ID NO: 5297251 - DNA, 25 bp, Homo sapien
gagcaccacgagcagtagagcagca

SEQ ID NO: 5297252 - DNA, 25 bp, Homo sapien
ctctacgacagtcccaagtacctag

SEQ ID NO: 5297253 - DNA, 25 bp, Homo sapien
cgggagcaccacgagcagtagagca

SEQ ID NO: 5297254 - DNA, 25 bp, Homo sapien
cgcctacatggggtctggaaactct

SEQ ID NO: 5297255 - DNA, 25 bp, Homo sapien
gccgttcgttcttaagagccctgca

SEQ ID NO: 5297256 - DNA, 25 bp, Homo sapien
cgcgcccaagccgttcgttcttaag

SEQ ID NO: 5297257 - DNA, 25 bp, Homo sapien
ttcgttcttaagagccctgcaccgc

SEQ ID NO: 5297258 - DNA, 25 bp, Homo sapien
caagccgttcgttcttaagagccct

SEQ ID NO: 5297259 - DNA, 25 bp, Homo sapien
tgctttatattttgcttatgtgtaa

SEQ ID NO: 5297260 - DNA, 25 bp, Homo sapien
ctgctttatattttgcttatgtgta

SEQ ID NO: 5297261 - DNA, 25 bp, Homo sapien
ctttatattttgcttatgtgtaaac

SEQ ID NO: 5297262 - DNA, 25 bp, Homo sapien
gctttatattttgcttatgtgtaaa

SEQ ID NO: 5297263 - DNA, 25 bp, Homo sapien
tgtgggtagacaagccggaaatctc

SEQ ID NO: 5297264 - DNA, 25 bp, Homo sapien
tctagggctaaaggatcaggcatcg

SEQ ID NO: 5297265 - DNA, 25 bp, Homo sapien
tcctgggtaacacaatggtggaggt

SEQ ID NO: 5297266 - DNA, 25 bp, Homo sapien
gctgaagttcaaagagtagactcat

SEQ ID NO: 5297267 - DNA, 25 bp, Homo sapien
tcttgtgtgacaaagctggttaaag

SEQ ID NO: 5297268 - DNA, 25 bp, Homo sapien
tgaaacctaaaatatacacttagat

SEQ ID NO: 5297269 - DNA, 25 bp, Homo sapien
tcactgcaggatgggtattagaaat

SEQ ID NO: 5297270 - DNA, 25 bp, Homo sapien
ttttgcaagggtgtaaaaggtgcta

SEQ ID NO: 5297271 - DNA, 25 bp, Homo sapien
tgtaattcattgcagattatacctc

SEQ ID NO: 5297272 - DNA, 25 bp, Homo sapien
taattcattgcagattatacctcag

SEQ ID NO: 5297273 - DNA, 25 bp, Homo sapien
ttcattgcagattatacctcagtaa

SEQ ID NO: 5297274 - DNA, 25 bp, Homo sapien
atgcctggctgttggtatactttaa

SEQ ID NO: 5297275 - DNA, 25 bp, Homo sapien
tagaagcagagttcccctatgttgc

SEQ ID NO: 5297276 - DNA, 25 bp, Homo sapien
tgtctttgccccctaaagtctggga

SEQ ID NO: 5297277 - DNA, 25 bp, Homo sapien
ctgtctttgccccctaaagtctggg

SEQ ID NO: 5297278 - DNA, 25 bp, Homo sapien
tcctgtctttgccccctaaagtctg

SEQ ID NO: 5297279 - DNA, 25 bp, Homo sapien
tataacctgtccttattactgagaa

SEQ ID NO: 5297280 - DNA, 25 bp, Homo sapien
aggaacacattgattgccatgtatt

SEQ ID NO: 5297281 - DNA, 25 bp, Homo sapien
ttcctataacctgtccttattactg

SEQ ID NO: 5297282 - DNA, 25 bp, Homo sapien
catgtattggggattgtattatacc

SEQ ID NO: 5297283 - DNA, 25 bp, Homo sapien
ggtagggcaagcataactacagtgc

SEQ ID NO: 5297284 - DNA, 25 bp, Homo sapien
gagagtaatttgtctggtgtgcaga

SEQ ID NO: 5297285 - DNA, 25 bp, Homo sapien
tgtaaatataactggtgcattgcaa

SEQ ID NO: 5297286 - DNA, 25 bp, Homo sapien
tagtttctgtcaaaccttacactgc

SEQ ID NO: 5297287 - DNA, 25 bp, Homo sapien
catcatagacaaagctagcatgcct

SEQ ID NO: 5297288 - DNA, 25 bp, Homo sapien
tatactttcataatcaccacccagg

SEQ ID NO: 5297289 - DNA, 25 bp, Homo sapien
tcatagtcatggacaacatttgtgt

SEQ ID NO: 5297290 - DNA, 25 bp, Homo sapien
tggattaccacaaagcgaatatact

SEQ ID NO: 5297291 - DNA, 25 bp, Homo sapien
ttgaagatgaaccagaaaacagact

SEQ ID NO: 5297292 - DNA, 25 bp, Homo sapien
gcgtacatacgttggaacaaggact

SEQ ID NO: 5297293 - DNA, 25 bp, Homo sapien
gaacgtcatcggctacagaaacagc

SEQ ID NO: 5297294 - DNA, 25 bp, Homo sapien
gcagcgtcagccctcaaactttaga

SEQ ID NO: 5297295 - DNA, 25 bp, Homo sapien
caagccagagctatgcatatgttag

SEQ ID NO: 5297296 - DNA, 25 bp, Homo sapien
gaagttgctttcctgatcaagtctg

SEQ ID NO: 5297297 - DNA, 25 bp, Homo sapien
gtctgaacttcagctagtgctagag

SEQ ID NO: 5297298 - DNA, 25 bp, Homo sapien
ggactatgtggttccagctcaactt

SEQ ID NO: 5297299 - DNA, 25 bp, Homo sapien
catgagtgtggaacttcttgtgcca

SEQ ID NO: 5297300 - DNA, 25 bp, Homo sapien
cacacagattaaaagggttcccact

SEQ ID NO: 5297301 - DNA, 25 bp, Homo sapien
caagactctttgataaaatggctaa

SEQ ID NO: 5297302 - DNA, 25 bp, Homo sapien
gtaattaattataacccatcagaag

SEQ ID NO: 5297303 - DNA, 25 bp, Homo sapien
tagtcggtccgagttcaaattctgc

SEQ ID NO: 5297304 - DNA, 25 bp, Homo sapien
tacaacacaggtaaaagcgcttcag

SEQ ID NO: 5297305 - DNA, 25 bp, Homo sapien
tcaggtcccgaccaatctctcggag

SEQ ID NO: 5297306 - DNA, 25 bp, Homo sapien
caaactatatgtaggactcaaggca

SEQ ID NO: 5297307 - DNA, 25 bp, Homo sapien
gagcctttgtacctaatttgcatat

SEQ ID NO: 5297308 - DNA, 25 bp, Homo sapien
gctgcacaaaacgaatacatacaat

SEQ ID NO: 5297309 - DNA, 25 bp, Homo sapien
tatcggctgtccttatcagaataac

SEQ ID NO: 5297310 - DNA, 25 bp, Homo sapien
tttcagccacagtgaatagcttgca

SEQ ID NO: 5297311 - DNA, 25 bp, Homo sapien
ggccagaagtgtttcacattttaga

SEQ ID NO: 5297312 - DNA, 25 bp, Homo sapien
taattctagccaggtaggtacccag

SEQ ID NO: 5297313 - DNA, 25 bp, Homo sapien
taaaattcgaaacgctcctatgagc

SEQ ID NO: 5297314 - DNA, 25 bp, Homo sapien
gcattatatgtatgggttgagcatc

SEQ ID NO: 5297315 - DNA, 25 bp, Homo sapien
cttctctgtatcgttccaatttgag

SEQ ID NO: 5297316 - DNA, 25 bp, Homo sapien
tcatctttgcacagaggccatacta

SEQ ID NO: 5297317 - DNA, 25 bp, Homo sapien
atctttgcacagaggccatactaat

SEQ ID NO: 5297318 - DNA, 25 bp, Homo sapien
atgtcatctttgcacagaggccata

SEQ ID NO: 5297319 - DNA, 25 bp, Homo sapien
aaacataatttatggaccgggcatg

SEQ ID NO: 5297320 - DNA, 25 bp, Homo sapien
taggatcatttgctgattatctact

SEQ ID NO: 5297321 - DNA, 25 bp, Homo sapien
aaaacataatttatggaccgggcat

SEQ ID NO: 5297322 - DNA, 25 bp, Homo sapien
aaataggatcatttgctgattatct

SEQ ID NO: 5297323 - DNA, 25 bp, Homo sapien
tatgcttcttgaataatacacattt

SEQ ID NO: 5297324 - DNA, 25 bp, Homo sapien
ctgaattatgtcttacaaactaaaa

SEQ ID NO: 5297325 - DNA, 25 bp, Homo sapien
cttcttgaataatacacattttggg

SEQ ID NO: 5297326 - DNA, 25 bp, Homo sapien
ctttgaggttctcctgaattatgtc

SEQ ID NO: 5297327 - DNA, 25 bp, Homo sapien
tgttcaggtaccaaacacagttctg

SEQ ID NO: 5297328 - DNA, 25 bp, Homo sapien
gaaatctgaactgccgtgtcctgag

SEQ ID NO: 5297329 - DNA, 25 bp, Homo sapien
tcactttcaaataggagcagcactt

SEQ ID NO: 5297330 - DNA, 25 bp, Homo sapien
tatgaaagaattggccctacgtcct

SEQ ID NO: 5297331 - DNA, 25 bp, Homo sapien
aatttatctcatattcagcgaatat

SEQ ID NO: 5297332 - DNA, 25 bp, Homo sapien
tgtgacccagaccaaaggtaacaca

SEQ ID NO: 5297333 - DNA, 25 bp, Homo sapien
ttgagaatctcttacatgccaggca

SEQ ID NO: 5297334 - DNA, 25 bp, Homo sapien
atactaagttaatatgcattcagta

SEQ ID NO: 5297335 - DNA, 25 bp, Homo sapien
taactaccaggcttaaaataatgag

SEQ ID NO: 5297336 - DNA, 25 bp, Homo sapien
aactaccaggcttaaaataatgagg

SEQ ID NO: 5297337 - DNA, 25 bp, Homo sapien
gattctcaaatacacccatgaaggc

SEQ ID NO: 5297338 - DNA, 25 bp, Homo sapien
tgctcacacgatttcccgccaaatt

SEQ ID NO: 5297339 - DNA, 25 bp, Homo sapien
ttaacttggataacacttggctaag

SEQ ID NO: 5297340 - DNA, 25 bp, Homo sapien
ccaacaagcctagcttcttgcagaa

SEQ ID NO: 5297341 - DNA, 25 bp, Homo sapien
tcagagggttctttccaaaaaatgc

SEQ ID NO: 5297342 - DNA, 25 bp, Homo sapien
cagagggttctttccaaaaaatgca

SEQ ID NO: 5297343 - DNA, 25 bp, Homo sapien
tcagagaagcgaatagagaacagag

SEQ ID NO: 5297344 - DNA, 25 bp, Homo sapien
ttatagtggcggcatggaccggtaa

SEQ ID NO: 5297345 - DNA, 25 bp, Homo sapien
tagtggcggcatggaccggtaatcc

SEQ ID NO: 5297346 - DNA, 25 bp, Homo sapien
agtggcggcatggaccggtaatccc

SEQ ID NO: 5297347 - DNA, 25 bp, Homo sapien
ggagtcagtaacaagaggcacagtc

SEQ ID NO: 5297348 - DNA, 25 bp, Homo sapien
gagactgcccttaggtaggagaaga

SEQ ID NO: 5297349 - DNA, 25 bp, Homo sapien
ctcaagcactgctaaagagactgcc

SEQ ID NO: 5297350 - DNA, 25 bp, Homo sapien
gacgctgagtactgattgagaagaa

SEQ ID NO: 5297351 - DNA, 25 bp, Homo sapien
aactaccagcatatgaatttctccg

SEQ ID NO: 5297352 - DNA, 25 bp, Homo sapien
ccctagtgggtctcaggtggtatct

SEQ ID NO: 5297353 - DNA, 25 bp, Homo sapien
cttgagtacctaggaagagagttgc

SEQ ID NO: 5297354 - DNA, 25 bp, Homo sapien
taacattttgaacaacttgccagaa

SEQ ID NO: 5297355 - DNA, 25 bp, Homo sapien
caaatgtttcaacaggctgctcagg

SEQ ID NO: 5297356 - DNA, 25 bp, Homo sapien
gagttgtgggacctcctccaaatgt

SEQ ID NO: 5297357 - DNA, 25 bp, Homo sapien
catcagtgcggtgagctgttctagc

SEQ ID NO: 5297358 - DNA, 25 bp, Homo sapien
tgttctagcacgttcatcctgtcga

SEQ ID NO: 5297359 - DNA, 25 bp, Homo sapien
gttcagggactggatggtctcaaaa

SEQ ID NO: 5297360 - DNA, 25 bp, Homo sapien
agcagttcagggactggatggtctc

SEQ ID NO: 5297361 - DNA, 25 bp, Homo sapien
gaaacaaagagcagttcagggactg

SEQ ID NO: 5297362 - DNA, 25 bp, Homo sapien
caaagagcagttcagggactggatg

SEQ ID NO: 5297363 - DNA, 25 bp, Homo sapien
tttccaggtaattttctgataaatc

SEQ ID NO: 5297364 - DNA, 25 bp, Homo sapien
tgataaatcaagaatgctcagtttg

SEQ ID NO: 5297365 - DNA, 25 bp, Homo sapien
gaatgctcagtttgaccaaattgtg

SEQ ID NO: 5297366 - DNA, 25 bp, Homo sapien
tcagttcatgaagagcttcatttcc

SEQ ID NO: 5297367 - DNA, 25 bp, Homo sapien
agctaagaattgcttagtgcttttc

SEQ ID NO: 5297368 - DNA, 25 bp, Homo sapien
aaaagacgtgtttgaatgacaaaga

SEQ ID NO: 5297369 - DNA, 25 bp, Homo sapien
taatagtaccagtctagctaagaat

SEQ ID NO: 5297370 - DNA, 25 bp, Homo sapien
gacacaaatatgttgaggtaatgga

SEQ ID NO: 5297371 - DNA, 25 bp, Homo sapien
cagggttcacttgacagagacttga

SEQ ID NO: 5297372 - DNA, 25 bp, Homo sapien
agcagcaggagactaattgaatttc

SEQ ID NO: 5297373 - DNA, 25 bp, Homo sapien
cagacaagtgggtcaaatgaaataa

SEQ ID NO: 5297374 - DNA, 25 bp, Homo sapien
ttccctctccaatgtcagacaagtg

SEQ ID NO: 5297375 - DNA, 25 bp, Homo sapien
tagatgaggacttggctccttggag

SEQ ID NO: 5297376 - DNA, 25 bp, Homo sapien
ccttggagtgcttctagtgcaactg

SEQ ID NO: 5297377 - DNA, 25 bp, Homo sapien
cagtttaggattggttaggcctcac

SEQ ID NO: 5297378 - DNA, 25 bp, Homo sapien
tcttgatggtactgtagcctacggg

SEQ ID NO: 5297379 - DNA, 25 bp, Homo sapien
gatacaaatatgagaacagaaatct

SEQ ID NO: 5297380 - DNA, 25 bp, Homo sapien
tctttatgttatccattatgagctt

SEQ ID NO: 5297381 - DNA, 25 bp, Homo sapien
ttacccaagctgtcagtcagaccac

SEQ ID NO: 5297382 - DNA, 25 bp, Homo sapien
gagctttgtaaggttcttcaagtta

SEQ ID NO: 5297383 - DNA, 25 bp, Homo sapien
cttcaagttacccaagctgtcagtc

SEQ ID NO: 5297384 - DNA, 25 bp, Homo sapien
gaataaatgttcttacaggtgctga

SEQ ID NO: 5297385 - DNA, 25 bp, Homo sapien
tgaaatcccggagtgtgacctccag

SEQ ID NO: 5297386 - DNA, 25 bp, Homo sapien
tccagggcacttgcacaattgggca

SEQ ID NO: 5297387 - DNA, 25 bp, Homo sapien
tccagttgaagaacaaagatacagc

SEQ ID NO: 5297388 - DNA, 25 bp, Homo sapien
aatggatgccacactctacaaagga

SEQ ID NO: 5297389 - DNA, 25 bp, Homo sapien
gcctcttggcgatggaaagtccgag

SEQ ID NO: 5297390 - DNA, 25 bp, Homo sapien
gatgacccacaggtgtaccggagca

SEQ ID NO: 5297391 - DNA, 25 bp, Homo sapien
ggtgcttcataacagccctggtggc

SEQ ID NO: 5297392 - DNA, 25 bp, Homo sapien
gagcatggcaattcgctgcagcaga

SEQ ID NO: 5297393 - DNA, 25 bp, Homo sapien
tcaaacttgtgggagaacacaccct

SEQ ID NO: 5297394 - DNA, 25 bp, Homo sapien
tatcagggcttcgatttctgggcag

SEQ ID NO: 5297395 - DNA, 25 bp, Homo sapien
cagtggtccaggctccgaatgaagt

SEQ ID NO: 5297396 - DNA, 25 bp, Homo sapien
tgagccaaatcgtccaagtctcctt

SEQ ID NO: 5297397 - DNA, 25 bp, Homo sapien
agccaaatcgtccaagtctccttct

SEQ ID NO: 5297398 - DNA, 25 bp, Homo sapien
gagccaaatcgtccaagtctccttc

SEQ ID NO: 5297399 - DNA, 25 bp, Homo sapien
ctgagccaaatcgtccaagtctcct

SEQ ID NO: 5297400 - DNA, 25 bp, Homo sapien
ctattagagaagaggtgatgttaaa

SEQ ID NO: 5297401 - DNA, 25 bp, Homo sapien
ttagagaagaggtgatgttaaagaa

SEQ ID NO: 5297402 - DNA, 25 bp, Homo sapien
tgttaaagaagacccaattctgtgt

SEQ ID NO: 5297403 - DNA, 25 bp, Homo sapien
acccaattctgtgtctcctcaaaac

SEQ ID NO: 5297404 - DNA, 25 bp, Homo sapien
gatgtttacttcttcgcgattcaga

SEQ ID NO: 5297405 - DNA, 25 bp, Homo sapien
gaaagaggttacaggactctgaacc

SEQ ID NO: 5297406 - DNA, 25 bp, Homo sapien
gaatgatccctctagcagcatcctg

SEQ ID NO: 5297407 - DNA, 25 bp, Homo sapien
gaggatagttccactccttaaggga

SEQ ID NO: 5297408 - DNA, 25 bp, Homo sapien
ggctcggctattgtcctttatgaaa

SEQ ID NO: 5297409 - DNA, 25 bp, Homo sapien
agggctcggctattgtcctttatga

SEQ ID NO: 5297410 - DNA, 25 bp, Homo sapien
ataagggctcggctattgtccttta

SEQ ID NO: 5297411 - DNA, 25 bp, Homo sapien
gctcggctattgtcctttatgaaat

SEQ ID NO: 5297412 - DNA, 25 bp, Homo sapien
gttctggatgaaagcttcccacctt

SEQ ID NO: 5297413 - DNA, 25 bp, Homo sapien
ttctggatgaaagcttcccaccttt

SEQ ID NO: 5297414 - DNA, 25 bp, Homo sapien
tgttctggatgaaagcttcccacct

SEQ ID NO: 5297415 - DNA, 25 bp, Homo sapien
caaaggtgatcccaatattgtcctc

SEQ ID NO: 5297416 - DNA, 25 bp, Homo sapien
gtcaaaggtgatcccaatattgtcc

SEQ ID NO: 5297417 - DNA, 25 bp, Homo sapien
aggtgatcccaatattgtcctcttt

SEQ ID NO: 5297418 - DNA, 25 bp, Homo sapien
ggtcaaaggtgatcccaatattgtc

SEQ ID NO: 5297419 - DNA, 25 bp, Homo sapien
catattcaatgtaagttgcagacgt

SEQ ID NO: 5297420 - DNA, 25 bp, Homo sapien
cacaatgtctgtgtaagtcactcat

SEQ ID NO: 5297421 - DNA, 25 bp, Homo sapien
ttagtatcctatgccccttcccagt

SEQ ID NO: 5297422 - DNA, 25 bp, Homo sapien
taactgtaccctttgatgagctgaa

SEQ ID NO: 5297423 - DNA, 25 bp, Homo sapien
cactcgtcaatgttaaggcttttgt

SEQ ID NO: 5297424 - DNA, 25 bp, Homo sapien
aggtttctcggcaggcaaatccagc

SEQ ID NO: 5297425 - DNA, 25 bp, Homo sapien
atgaagccccagcagacccgattaa

SEQ ID NO: 5297426 - DNA, 25 bp, Homo sapien
cagccaggcatgcaaatcacactcg

SEQ ID NO: 5297427 - DNA, 25 bp, Homo sapien
ttgtatttgctttccgtttcagtga

SEQ ID NO: 5297428 - DNA, 25 bp, Homo sapien
tatttgctttccgtttcagtgaggc

SEQ ID NO: 5297429 - DNA, 25 bp, Homo sapien
ccgtttcagtgaggcctcgagttct

SEQ ID NO: 5297430 - DNA, 25 bp, Homo sapien
gctttccgtttcagtgaggcctcga

SEQ ID NO: 5297431 - DNA, 25 bp, Homo sapien
gttttggtccactccaccgatgacg

SEQ ID NO: 5297432 - DNA, 25 bp, Homo sapien
gtcacacagggcaaacagatcacca

SEQ ID NO: 5297433 - DNA, 25 bp, Homo sapien
gacgtttgtgttcacagactccagg

SEQ ID NO: 5297434 - DNA, 25 bp, Homo sapien
caccctccggagtataaacagccag

SEQ ID NO: 5297435 - DNA, 25 bp, Homo sapien
tttcactagtattaattcaaaatta

SEQ ID NO: 5297436 - DNA, 25 bp, Homo sapien
ttcaaactacagtttgttacattat

SEQ ID NO: 5297437 - DNA, 25 bp, Homo sapien
tcaaactacagtttgttacattata

SEQ ID NO: 5297438 - DNA, 25 bp, Homo sapien
cttcaaactacagtttgttacatta

SEQ ID NO: 5297439 - DNA, 25 bp, Homo sapien
tatgcccccactaacggggacttca

SEQ ID NO: 5297440 - DNA, 25 bp, Homo sapien
tggtgcttagggaggaatatcaact

SEQ ID NO: 5297441 - DNA, 25 bp, Homo sapien
agatgtgagctaccagccaagccgt

SEQ ID NO: 5297442 - DNA, 25 bp, Homo sapien
tttaagtgtcagaacatgatgtttg

SEQ ID NO: 5297443 - DNA, 25 bp, Homo sapien
tcatctacatttggtagcatggtgc

SEQ ID NO: 5297444 - DNA, 25 bp, Homo sapien
gaatctacagctactacatttctga

SEQ ID NO: 5297445 - DNA, 25 bp, Homo sapien
gacaaagaggttatggctggcttct

SEQ ID NO: 5297446 - DNA, 25 bp, Homo sapien
gctagtctgtgggatgattatattc

SEQ ID NO: 5297447 - DNA, 25 bp, Homo sapien
gataacaagccactcttgtatgtaa

SEQ ID NO: 5297448 - DNA, 25 bp, Homo sapien
gaattggacattgatctaaaggata

SEQ ID NO: 5297449 - DNA, 25 bp, Homo sapien
tggttttaatagacaagtggtgaga

SEQ ID NO: 5297450 - DNA, 25 bp, Homo sapien
ttactacaaaatccgatgtgttttg

SEQ ID NO: 5297451 - DNA, 25 bp, Homo sapien
aatgccatcacttggttttaataga

SEQ ID NO: 5297452 - DNA, 25 bp, Homo sapien
ggctgcgtcactatgatctctgttt

SEQ ID NO: 5297453 - DNA, 25 bp, Homo sapien
tgtttccatgatcacattaccttcc

SEQ ID NO: 5297454 - DNA, 25 bp, Homo sapien
gatcacattaccttcccctctaatg

SEQ ID NO: 5297455 - DNA, 25 bp, Homo sapien
ttctggctgcgtcactatgatctct

SEQ ID NO: 5297456 - DNA, 25 bp, Homo sapien
tgtgtgtaggctgggaattcttgct

SEQ ID NO: 5297457 - DNA, 25 bp, Homo sapien
caaaattttacatgttccagatgga

SEQ ID NO: 5297458 - DNA, 25 bp, Homo sapien
tgccaaaagcacctggattggtaat

SEQ ID NO: 5297459 - DNA, 25 bp, Homo sapien
tcacacatgcttcgatacttccttg

SEQ ID NO: 5297460 - DNA, 25 bp, Homo sapien
cctaatagctaggattaccggtgcc

SEQ ID NO: 5297461 - DNA, 25 bp, Homo sapien
ctaatagctaggattaccggtgccc

SEQ ID NO: 5297462 - DNA, 25 bp, Homo sapien
tccctaatagctaggattaccggtg

SEQ ID NO: 5297463 - DNA, 25 bp, Homo sapien
cctccctaatagctaggattaccgg

SEQ ID NO: 5297464 - DNA, 25 bp, Homo sapien
tacagtttggaggttacattagaga

SEQ ID NO: 5297465 - DNA, 25 bp, Homo sapien
ttagaccaaaccatgtctttctggg

SEQ ID NO: 5297466 - DNA, 25 bp, Homo sapien
gagaatgttccctatacaaggcata

SEQ ID NO: 5297467 - DNA, 25 bp, Homo sapien
gatggcagtggtaaaacatttccct

SEQ ID NO: 5297468 - DNA, 25 bp, Homo sapien
tacacccggcctcttatatctattt

SEQ ID NO: 5297469 - DNA, 25 bp, Homo sapien
cacccggcctcttatatctattttc

SEQ ID NO: 5297470 - DNA, 25 bp, Homo sapien
acccggcctcttatatctattttct

SEQ ID NO: 5297471 - DNA, 25 bp, Homo sapien
ctacacccggcctcttatatctatt

SEQ ID NO: 5297472 - DNA, 25 bp, Homo sapien
gagggcgattagaataacctcaatt

SEQ ID NO: 5297473 - DNA, 25 bp, Homo sapien
catgaggcctaggtagaatgtttca

SEQ ID NO: 5297474 - DNA, 25 bp, Homo sapien
tattgcagagatgtatgcacttaga

SEQ ID NO: 5297475 - DNA, 25 bp, Homo sapien
cagtcagagtttggtgcaagaaaca

SEQ ID NO: 5297476 - DNA, 25 bp, Homo sapien
agaacagtactgaacctggccgggc

SEQ ID NO: 5297477 - DNA, 25 bp, Homo sapien
ctagaacagtactgaacctggccgg

SEQ ID NO: 5297478 - DNA, 25 bp, Homo sapien
aacagtactgaacctggccgggcgc

SEQ ID NO: 5297479 - DNA, 25 bp, Homo sapien
acctagaacagtactgaacctggcc

SEQ ID NO: 5297480 - DNA, 25 bp, Homo sapien
tgtttattctcacaccagagccgtg

SEQ ID NO: 5297481 - DNA, 25 bp, Homo sapien
gacttggctttttcagcggctgcag

SEQ ID NO: 5297482 - DNA, 25 bp, Homo sapien
tagccgcgggaccatcaaagtcatc

SEQ ID NO: 5297483 - DNA, 25 bp, Homo sapien
cccagtgtgattgtgctgagcgcag

SEQ ID NO: 5297484 - DNA, 25 bp, Homo sapien
atgattatgcagtagggtgtaggaa

SEQ ID NO: 5297485 - DNA, 25 bp, Homo sapien
gattatgcagtagggtgtaggaagg

SEQ ID NO: 5297486 - DNA, 25 bp, Homo sapien
tgattatgcagtagggtgtaggaag

SEQ ID NO: 5297487 - DNA, 25 bp, Homo sapien
ttatgcagtagggtgtaggaaggac

SEQ ID NO: 5297488 - DNA, 25 bp, Homo sapien
cacagctgtaactgttgttcagata

SEQ ID NO: 5297489 - DNA, 25 bp, Homo sapien
catcagagtatttgggtctggaggc

SEQ ID NO: 5297490 - DNA, 25 bp, Homo sapien
taactctcaagtcagtgtttttcct

SEQ ID NO: 5297491 - DNA, 25 bp, Homo sapien
gaaatgctgtttagcttctatccct

SEQ ID NO: 5297492 - DNA, 25 bp, Homo sapien
gaactctatgaaactggatctcgga

SEQ ID NO: 5297493 - DNA, 25 bp, Homo sapien
aatacagtatgcagagtcctagccc

SEQ ID NO: 5297494 - DNA, 25 bp, Homo sapien
gaaacagtgctgatggcaatggcca

SEQ ID NO: 5297495 - DNA, 25 bp, Homo sapien
gatctgggactaggaagtgctaccc

SEQ ID NO: 5297496 - DNA, 25 bp, Homo sapien
caaactgcccatttgtgaaaggtga

SEQ ID NO: 5297497 - DNA, 25 bp, Homo sapien
tctatcaggagacccaagctcagga

SEQ ID NO: 5297498 - DNA, 25 bp, Homo sapien
tagctgctgcaactaaacgaggaaa

SEQ ID NO: 5297499 - DNA, 25 bp, Homo sapien
tgattcaaggagaccaactttggcg

SEQ ID NO: 5297500 - DNA, 25 bp, Homo sapien
gacatgccctgttgaatccttgagt

SEQ ID NO: 5297501 - DNA, 25 bp, Homo sapien
caaatcttgctgtagtgaatggtgc

SEQ ID NO: 5297502 - DNA, 25 bp, Homo sapien
tgttggtaggactgcggacatgccc

SEQ ID NO: 5297503 - DNA, 25 bp, Homo sapien
tcaataactccttgtgctgacggaa

SEQ ID NO: 5297504 - DNA, 25 bp, Homo sapien
ctttgatgcacaaaacattggcatt

SEQ ID NO: 5297505 - DNA, 25 bp, Homo sapien
ctcaggtatgctttctggtaattct

SEQ ID NO: 5297506 - DNA, 25 bp, Homo sapien
tgttccctttagctaattggctata

SEQ ID NO: 5297507 - DNA, 25 bp, Homo sapien
tctgagtattgtaatgtggtacctc

SEQ ID NO: 5297508 - DNA, 25 bp, Homo sapien
aagatattgaaaactcggattgtgc

SEQ ID NO: 5297509 - DNA, 25 bp, Homo sapien
tctatagtatcaggatggcttattt

SEQ ID NO: 5297510 - DNA, 25 bp, Homo sapien
tgaaaactcggattgtgcaaaagat

SEQ ID NO: 5297511 - DNA, 25 bp, Homo sapien
aagatttctgattagttctatagta

SEQ ID NO: 5297512 - DNA, 25 bp, Homo sapien
gtccagtggtgctcacaaggctcaa

SEQ ID NO: 5297513 - DNA, 25 bp, Homo sapien
ggtggctgagtttagaattgaaact

SEQ ID NO: 5297514 - DNA, 25 bp, Homo sapien
gctaatgtggcattgatagagcagt

SEQ ID NO: 5297515 - DNA, 25 bp, Homo sapien
accttcattgtggattgagttccag

SEQ ID NO: 5297516 - DNA, 25 bp, Homo sapien
aactatgagttagcccctggaggag

SEQ ID NO: 5297517 - DNA, 25 bp, Homo sapien
ttcagctctagctacaggaatctat

SEQ ID NO: 5297518 - DNA, 25 bp, Homo sapien
agaaggtggtcagtttcctgtggaa

SEQ ID NO: 5297519 - DNA, 25 bp, Homo sapien
ggaaaagaattagcgttcagctcta

SEQ ID NO: 5297520 - DNA, 25 bp, Homo sapien
gagtttgtcgagtttcttgaatctg

SEQ ID NO: 5297521 - DNA, 25 bp, Homo sapien
cacatcaggccgacaatattacttt

SEQ ID NO: 5297522 - DNA, 25 bp, Homo sapien
taataacctttatgtgtcagtctgt

SEQ ID NO: 5297523 - DNA, 25 bp, Homo sapien
cactaaatttcgaaatattttggca

SEQ ID NO: 5297524 - DNA, 25 bp, Homo sapien
tttgtaagtaggatcagagcagctt

SEQ ID NO: 5297525 - DNA, 25 bp, Homo sapien
cattagaatagaattaaggtaccag

SEQ ID NO: 5297526 - DNA, 25 bp, Homo sapien
tcttggatgccagacaatgtaaatt

SEQ ID NO: 5297527 - DNA, 25 bp, Homo sapien
taatctaaggcaagacttactgtaa

SEQ ID NO: 5297528 - DNA, 25 bp, Homo sapien
tcactctgacctgtgtcagtatgtt

SEQ ID NO: 5297529 - DNA, 25 bp, Homo sapien
gcttttcttacctgattatgctatg

SEQ ID NO: 5297530 - DNA, 25 bp, Homo sapien
tagcaattagtattaagaagttgta

SEQ ID NO: 5297531 - DNA, 25 bp, Homo sapien
caaaactgtctataggcaattagca

SEQ ID NO: 5297532 - DNA, 25 bp, Homo sapien
aatacagaaattcatggcatgtgcc

SEQ ID NO: 5297533 - DNA, 25 bp, Homo sapien
cataattgtgctaaattagggaagt

SEQ ID NO: 5297534 - DNA, 25 bp, Homo sapien
ataaaagaccgggtcataattgtgc

SEQ ID NO: 5297535 - DNA, 25 bp, Homo sapien
aagagaattgagctagatgcagtgg

SEQ ID NO: 5297536 - DNA, 25 bp, Homo sapien
tcaaacccagtatgttctgtgacca

SEQ ID NO: 5297537 - DNA, 25 bp, Homo sapien
caaaacttctagatggacgtaacca

SEQ ID NO: 5297538 - DNA, 25 bp, Homo sapien
tatatgctgcctaaaagagatgtgc

SEQ ID NO: 5297539 - DNA, 25 bp, Homo sapien
tatgctggcctatacaaaaagtctc

SEQ ID NO: 5297540 - DNA, 25 bp, Homo sapien
ggtgagtgctccagttgtaacatct

SEQ ID NO: 5297541 - DNA, 25 bp, Homo sapien
caggaaaagccgaaggatagcgatc

SEQ ID NO: 5297542 - DNA, 25 bp, Homo sapien
ccagaaactgttgcggctgaacctc

SEQ ID NO: 5297543 - DNA, 25 bp, Homo sapien
tagcgatcagtttgaatgggtgacc

SEQ ID NO: 5297544 - DNA, 25 bp, Homo sapien
gatgatggtgtacttctaaggcgga

SEQ ID NO: 5297545 - DNA, 25 bp, Homo sapien
ttggaaattggagccttacacctca

SEQ ID NO: 5297546 - DNA, 25 bp, Homo sapien
ccaaactctagcgtgaatcaaactg

SEQ ID NO: 5297547 - DNA, 25 bp, Homo sapien
tagcactacacctttgacaactgat

SEQ ID NO: 5297548 - DNA, 25 bp, Homo sapien
tattgggccaaagggactggctttg

SEQ ID NO: 5297549 - DNA, 25 bp, Homo sapien
ttggaacaggctctacagcttctgg

SEQ ID NO: 5297550 - DNA, 25 bp, Homo sapien
tgtggaacaagccttaactaagcaa

SEQ ID NO: 5297551 - DNA, 25 bp, Homo sapien
gaagaacaacagttatattgggcca

SEQ ID NO: 5297552 - DNA, 25 bp, Homo sapien
gggcagaacagtaatgcccttcctt

SEQ ID NO: 5297553 - DNA, 25 bp, Homo sapien
tacataaatcccgtcagtagtgcgg

SEQ ID NO: 5297554 - DNA, 25 bp, Homo sapien
tccttctgtacttctcgagcttctc

SEQ ID NO: 5297555 - DNA, 25 bp, Homo sapien
gtgcggtaaatggagaagctcagtc

SEQ ID NO: 5297556 - DNA, 25 bp, Homo sapien
tcttgttagagccaggttttgccct

SEQ ID NO: 5297557 - DNA, 25 bp, Homo sapien
cctgaatgcagtcccttgaacgaga

SEQ ID NO: 5297558 - DNA, 25 bp, Homo sapien
tcactaagaggttaagtactgttcc

SEQ ID NO: 5297559 - DNA, 25 bp, Homo sapien
tgctcttagagcaagggagttaccc

SEQ ID NO: 5297560 - DNA, 25 bp, Homo sapien
tcttgcttcttaacatcttctgctg

SEQ ID NO: 5297561 - DNA, 25 bp, Homo sapien
gctgtagtgatgacagaagtaccag

SEQ ID NO: 5297562 - DNA, 25 bp, Homo sapien
cttctgctgtagtgatgacagaagt

SEQ ID NO: 5297563 - DNA, 25 bp, Homo sapien
gacagaagtaccagttttcccagaa

SEQ ID NO: 5297564 - DNA, 25 bp, Homo sapien
ttgagtagcctaatgaggaagaagt

SEQ ID NO: 5297565 - DNA, 25 bp, Homo sapien
cttcatgttgagtagcctaatgagg

SEQ ID NO: 5297566 - DNA, 25 bp, Homo sapien
catactcagagtcttcatgttgagt

SEQ ID NO: 5297567 - DNA, 25 bp, Homo sapien
taaaagtcttcatactcagagtctt

SEQ ID NO: 5297568 - DNA, 25 bp, Homo sapien
tgtacatttgctcattttgtgcttt

SEQ ID NO: 5297569 - DNA, 25 bp, Homo sapien
ttatattgtacatttgctcattttg

SEQ ID NO: 5297570 - DNA, 25 bp, Homo sapien
ttttatattgtacatttgctcattt

SEQ ID NO: 5297571 - DNA, 25 bp, Homo sapien
tattgtacatttgctcattttgtgc

SEQ ID NO: 5297572 - DNA, 25 bp, Homo sapien
aagacatgtgccactctatcgggca

SEQ ID NO: 5297573 - DNA, 25 bp, Homo sapien
tgttagccaaaatgaagacctgtgt

SEQ ID NO: 5297574 - DNA, 25 bp, Homo sapien
tgctggaattgcttcgggccattgc

SEQ ID NO: 5297575 - DNA, 25 bp, Homo sapien
gcccctttctacagagaacggtgaa

SEQ ID NO: 5297576 - DNA, 25 bp, Homo sapien
tataagacggcaccggtaaagacta

SEQ ID NO: 5297577 - DNA, 25 bp, Homo sapien
tactttcaaggtttaccatatagag

SEQ ID NO: 5297578 - DNA, 25 bp, Homo sapien
tctgctaatctgtgcagcctctgtt

SEQ ID NO: 5297579 - DNA, 25 bp, Homo sapien
tcgttgaaaccctcatggtctctgc

SEQ ID NO: 5297580 - DNA, 25 bp, Homo sapien
tccagatttggaggcctaaaggata

SEQ ID NO: 5297581 - DNA, 25 bp, Homo sapien
gaccaaactaccatggaagagactt

SEQ ID NO: 5297582 - DNA, 25 bp, Homo sapien
ttttggtactcatcagcactcttgc

SEQ ID NO: 5297583 - DNA, 25 bp, Homo sapien
gatagagctgtatatgtcttctccc

SEQ ID NO: 5297584 - DNA, 25 bp, Homo sapien
aatagagtacaagtgccatagcata

SEQ ID NO: 5297585 - DNA, 25 bp, Homo sapien
gaaatatattagaccatgtgtgcaa

SEQ ID NO: 5297586 - DNA, 25 bp, Homo sapien
tgtgtgcaaagcagtacaatcggga

SEQ ID NO: 5297587 - DNA, 25 bp, Homo sapien
gacagtgtaaacatgagtgaaccat

SEQ ID NO: 5297588 - DNA, 25 bp, Homo sapien
caaaaggaggattgtttatactaca

SEQ ID NO: 5297589 - DNA, 25 bp, Homo sapien
gattcaacgtatgcacaaagcagcg

SEQ ID NO: 5297590 - DNA, 25 bp, Homo sapien
aagcagcggataccatggtagcggc

SEQ ID NO: 5297591 - DNA, 25 bp, Homo sapien
ttctgtgcaatagtggaaacttcag

SEQ ID NO: 5297592 - DNA, 25 bp, Homo sapien
gggcagtgatcacaaccagattcaa

SEQ ID NO: 5297593 - DNA, 25 bp, Homo sapien
ggacttactcttttggtaccagaca

SEQ ID NO: 5297594 - DNA, 25 bp, Homo sapien
tgagatagtttatgcagccaccacc

SEQ ID NO: 5297595 - DNA, 25 bp, Homo sapien
cagacatccaaaagactgctgagat

SEQ ID NO: 5297596 - DNA, 25 bp, Homo sapien
ccagatgcgtctgatcaagaaccag

SEQ ID NO: 5297597 - DNA, 25 bp, Homo sapien
tttgtcagtattaaagtcacttgaa

SEQ ID NO: 5297598 - DNA, 25 bp, Homo sapien
taaagtcacttgaagaaaaatatgt

SEQ ID NO: 5297599 - DNA, 25 bp, Homo sapien
caagaaggcggctatgaaacccaaa

SEQ ID NO: 5297600 - DNA, 25 bp, Homo sapien
aaaactgggtgaatactccaagaag

SEQ ID NO: 5297601 - DNA, 25 bp, Homo sapien
gtaaattaccactacatgtctcagg

SEQ ID NO: 5297602 - DNA, 25 bp, Homo sapien
taaattaccactacatgtctcaggt

SEQ ID NO: 5297603 - DNA, 25 bp, Homo sapien
taagcgggtaggcaggactatgtct

SEQ ID NO: 5297604 - DNA, 25 bp, Homo sapien
gtaggcaggactatgtctcaccatg

SEQ ID NO: 5297605 - DNA, 25 bp, Homo sapien
agtgataagcgggtaggcaggacta

SEQ ID NO: 5297606 - DNA, 25 bp, Homo sapien
aggactatgtctcaccatgcagcag

SEQ ID NO: 5297607 - DNA, 25 bp, Homo sapien
gcagcaaagaactccccagtgactt

SEQ ID NO: 5297608 - DNA, 25 bp, Homo sapien
taatgcatgatcaggttaaacccag

SEQ ID NO: 5297609 - DNA, 25 bp, Homo sapien
gaaggcttggatcctgacactgacg

SEQ ID NO: 5297610 - DNA, 25 bp, Homo sapien
gagttgctgaaacttccctgccctg

SEQ ID NO: 5297611 - DNA, 25 bp, Homo sapien
aataaataaacattgtgatgtattc

SEQ ID NO: 5297612 - DNA, 25 bp, Homo sapien
gatacgtactatataagaatatcaa

SEQ ID NO: 5297613 - DNA, 25 bp, Homo sapien
tggggatggcaagagggccggatta

SEQ ID NO: 5297614 - DNA, 25 bp, Homo sapien
gcaaactcatcaatagtgacagcag

SEQ ID NO: 5297615 - DNA, 25 bp, Homo sapien
cacgatgcatggctcatcttttgta

SEQ ID NO: 5297616 - DNA, 25 bp, Homo sapien
gatgcatggctcatcttttgtattt

SEQ ID NO: 5297617 - DNA, 25 bp, Homo sapien
tctggtctctctatctaggatggaa

SEQ ID NO: 5297618 - DNA, 25 bp, Homo sapien
tgaatgttcacaaagaatagtgcca

SEQ ID NO: 5297619 - DNA, 25 bp, Homo sapien
ctgagtcgaggatatgtgaatgttc

SEQ ID NO: 5297620 - DNA, 25 bp, Homo sapien
ttccttttgggcatggattgtttcc

SEQ ID NO: 5297621 - DNA, 25 bp, Homo sapien
ttcaaaagaataacccagtgcacac

SEQ ID NO: 5297622 - DNA, 25 bp, Homo sapien
cattagctacaacatgcatcttata

SEQ ID NO: 5297623 - DNA, 25 bp, Homo sapien
agtggagcttctggcatttacatca

SEQ ID NO: 5297624 - DNA, 25 bp, Homo sapien
tctggtatggtcttgccttggattg

SEQ ID NO: 5297625 - DNA, 25 bp, Homo sapien
tccctttagcccttgcaactaccat

SEQ ID NO: 5297626 - DNA, 25 bp, Homo sapien
cctttagcccttgcaactaccattc

SEQ ID NO: 5297627 - DNA, 25 bp, Homo sapien
gttgtgcaaccatcagtattatcaa

SEQ ID NO: 5297628 - DNA, 25 bp, Homo sapien
agccactacggccagcctgctctgt

SEQ ID NO: 5297629 - DNA, 25 bp, Homo sapien
aggtgagcaccgttgcccatgccca

SEQ ID NO: 5297630 - DNA, 25 bp, Homo sapien
actgcaccattgttgctagcagaat

SEQ ID NO: 5297631 - DNA, 25 bp, Homo sapien
ctggtctgtgcactgcaccattgtt

SEQ ID NO: 5297632 - DNA, 25 bp, Homo sapien
aaggtgagcaccgttgcccatgccc

SEQ ID NO: 5297633 - DNA, 25 bp, Homo sapien
gttaagggtgagtgtaaacgctgga

SEQ ID NO: 5297634 - DNA, 25 bp, Homo sapien
agggtgagtgtaaacgctggaggag

SEQ ID NO: 5297635 - DNA, 25 bp, Homo sapien
taagggtgagtgtaaacgctggagg

SEQ ID NO: 5297636 - DNA, 25 bp, Homo sapien
ctgttaagggtgagtgtaaacgctg

SEQ ID NO: 5297637 - DNA, 25 bp, Homo sapien
gctacaacaatatacctgagactag

SEQ ID NO: 5297638 - DNA, 25 bp, Homo sapien
gcctcattgttcatggatggcactg

SEQ ID NO: 5297639 - DNA, 25 bp, Homo sapien
ggaggacacattcggactatagtaa

SEQ ID NO: 5297640 - DNA, 25 bp, Homo sapien
aaagtcctgcttatgagggctctgc

SEQ ID NO: 5297641 - DNA, 25 bp, Homo sapien
gtagagacacatttaccatattggt

SEQ ID NO: 5297642 - DNA, 25 bp, Homo sapien
agagacacatttaccatattggtca

SEQ ID NO: 5297643 - DNA, 25 bp, Homo sapien
agacacatttaccatattggtcagg

SEQ ID NO: 5297644 - DNA, 25 bp, Homo sapien
agtagagacacatttaccatattgg

SEQ ID NO: 5297645 - DNA, 25 bp, Homo sapien
tatttggggttcgttcattttgcca

SEQ ID NO: 5297646 - DNA, 25 bp, Homo sapien
tgctgcattatcaagagagttgcgt

SEQ ID NO: 5297647 - DNA, 25 bp, Homo sapien
ctttgcattggccttactatatttg

SEQ ID NO: 5297648 - DNA, 25 bp, Homo sapien
tatcaagagagttgcgtagtccact

SEQ ID NO: 5297649 - DNA, 25 bp, Homo sapien
atggttgccggcagttacactgaag

SEQ ID NO: 5297650 - DNA, 25 bp, Homo sapien
acactgaaggcttcaacggcaagtc

SEQ ID NO: 5297651 - DNA, 25 bp, Homo sapien
gaagtctgtttatactgcaatttga

SEQ ID NO: 5297652 - DNA, 25 bp, Homo sapien
taagtcgtgaagttctgtccctgtc

SEQ ID NO: 5297653 - DNA, 25 bp, Homo sapien
tttccaggaggacattgcattgaat

SEQ ID NO: 5297654 - DNA, 25 bp, Homo sapien
tgtccctgtccaagccgttgtgcct

SEQ ID NO: 5297655 - DNA, 25 bp, Homo sapien
ttagcaggactaattgagagttagc

SEQ ID NO: 5297656 - DNA, 25 bp, Homo sapien
caataatctgagagctgtagaggcc

SEQ ID NO: 5297657 - DNA, 25 bp, Homo sapien
gtgtagtaacaagccccaatgccaa

SEQ ID NO: 5297658 - DNA, 25 bp, Homo sapien
gagttagctaagttaaagactgtgt

SEQ ID NO: 5297659 - DNA, 25 bp, Homo sapien
tctccttgatcaggccacaccctgt

SEQ ID NO: 5297660 - DNA, 25 bp, Homo sapien
agaagcaataactgagcatctcctt

SEQ ID NO: 5297661 - DNA, 25 bp, Homo sapien
cctaaagtctgtcgtttctggggca

SEQ ID NO: 5297662 - DNA, 25 bp, Homo sapien
taactgagcatctccttgatcaggc

SEQ ID NO: 5297663 - DNA, 25 bp, Homo sapien
catattgccttaaaaagaagttggc

SEQ ID NO: 5297664 - DNA, 25 bp, Homo sapien
cttttctattagcatattgccttaa

SEQ ID NO: 5297665 - DNA, 25 bp, Homo sapien
tcttaaccactgcttcttttctatt

SEQ ID NO: 5297666 - DNA, 25 bp, Homo sapien
tttcttaaccactgcttcttttcta

SEQ ID NO: 5297667 - DNA, 25 bp, Homo sapien
gaaagcatcgacttatttgactgtg

SEQ ID NO: 5297668 - DNA, 25 bp, Homo sapien
tgaggacacagccattgaaagcatc

SEQ ID NO: 5297669 - DNA, 25 bp, Homo sapien
taggatggagccttagcacagatga

SEQ ID NO: 5297670 - DNA, 25 bp, Homo sapien
gactgtgttatcaagactgttctta

SEQ ID NO: 5297671 - DNA, 25 bp, Homo sapien
ctgagtcaacttcgccatctcttgg

SEQ ID NO: 5297672 - DNA, 25 bp, Homo sapien
gccctgtgccaacattgtgttctgt

SEQ ID NO: 5297673 - DNA, 25 bp, Homo sapien
ccctgtgccaacattgtgttctgtg

SEQ ID NO: 5297674 - DNA, 25 bp, Homo sapien
agtgacctctgagtcaacttcgcca

SEQ ID NO: 5297675 - DNA, 25 bp, Homo sapien
ctggtggccgcatccccaaatctct

SEQ ID NO: 5297676 - DNA, 25 bp, Homo sapien
cagccgccccgcccaggaagtgagg

SEQ ID NO: 5297677 - DNA, 25 bp, Homo sapien
cgcccaggaagtgaggggcgcttct

SEQ ID NO: 5297678 - DNA, 25 bp, Homo sapien
ccccgcccaggaagtgaggggcgct

SEQ ID NO: 5297679 - DNA, 25 bp, Homo sapien
agccgccccgcccaggaagtgaggg

SEQ ID NO: 5297680 - DNA, 25 bp, Homo sapien
cagaacagctgggaacaatttttag

SEQ ID NO: 5297681 - DNA, 25 bp, Homo sapien
aataacttacgtggaaaaggagcat

SEQ ID NO: 5297682 - DNA, 25 bp, Homo sapien
taaaggccctcacagtacggactgc

SEQ ID NO: 5297683 - DNA, 25 bp, Homo sapien
tacggactgccaacacatctgggtc

SEQ ID NO: 5297684 - DNA, 25 bp, Homo sapien
gcaaatgagtttcaattgaggcctc

SEQ ID NO: 5297685 - DNA, 25 bp, Homo sapien
gattagtaccttcacctatgagcag

SEQ ID NO: 5297686 - DNA, 25 bp, Homo sapien
ttctaatgcaggagtccccacacac

SEQ ID NO: 5297687 - DNA, 25 bp, Homo sapien
tatcagacatcagacaatatctagg

SEQ ID NO: 5297688 - DNA, 25 bp, Homo sapien
atgagacattgctctatgggctttc

SEQ ID NO: 5297689 - DNA, 25 bp, Homo sapien
ctttggtgcttaacaccctctgcat

SEQ ID NO: 5297690 - DNA, 25 bp, Homo sapien
cctctgcatgagacattgctctatg

SEQ ID NO: 5297691 - DNA, 25 bp, Homo sapien
tttctttggtgcttaacaccctctg

SEQ ID NO: 5297692 - DNA, 25 bp, Homo sapien
ggcagctcctcaattgaagagggcg

SEQ ID NO: 5297693 - DNA, 25 bp, Homo sapien
cctcaattgaagagggcgggattga

SEQ ID NO: 5297694 - DNA, 25 bp, Homo sapien
tgttacagggaccttcaggcacgtt

SEQ ID NO: 5297695 - DNA, 25 bp, Homo sapien
ctgttacagggaccttcaggcacgt

SEQ ID NO: 5297696 - DNA, 25 bp, Homo sapien
ggccctgatagtgccagattgttca

SEQ ID NO: 5297697 - DNA, 25 bp, Homo sapien
gattgttcatgctgccttaggcttt

SEQ ID NO: 5297698 - DNA, 25 bp, Homo sapien
ctgttaaactttgagagagcagctg

SEQ ID NO: 5297699 - DNA, 25 bp, Homo sapien
gctgggtgcttcttgtggccctgat

SEQ ID NO: 5297700 - DNA, 25 bp, Homo sapien
atcacagtaactggtggtcacccca

SEQ ID NO: 5297701 - DNA, 25 bp, Homo sapien
tacagatatagaagataccccgcac

SEQ ID NO: 5297702 - DNA, 25 bp, Homo sapien
tttagctcccctgagactaggagga

SEQ ID NO: 5297703 - DNA, 25 bp, Homo sapien
cgcacaaaccggcaggaaaatgatt

SEQ ID NO: 5297704 - DNA, 25 bp, Homo sapien
aggaaagggccagagttttgcttag

SEQ ID NO: 5297705 - DNA, 25 bp, Homo sapien
gaggagatgaggctgactgttaagc

SEQ ID NO: 5297706 - DNA, 25 bp, Homo sapien
tggtagatgaaaggaggacggcttc

SEQ ID NO: 5297707 - DNA, 25 bp, Homo sapien
agaagatggaccacatcttgttcaa

SEQ ID NO: 5297708 - DNA, 25 bp, Homo sapien
cagtatcaagaagacgggaaagagt

SEQ ID NO: 5297709 - DNA, 25 bp, Homo sapien
agtacagtatcaagaagacgggaaa

SEQ ID NO: 5297710 - DNA, 25 bp, Homo sapien
tacagtatcaagaagacgggaaaga

SEQ ID NO: 5297711 - DNA, 25 bp, Homo sapien
gtatcaagaagacgggaaagagtag

SEQ ID NO: 5297712 - DNA, 25 bp, Homo sapien
atttgatgctccctaagcactctga

SEQ ID NO: 5297713 - DNA, 25 bp, Homo sapien
cttcatcagcgttgagctcctggga

SEQ ID NO: 5297714 - DNA, 25 bp, Homo sapien
actctgatttcactcttagttggct

SEQ ID NO: 5297715 - DNA, 25 bp, Homo sapien
cttagttggctctgggtatggctga

SEQ ID NO: 5297716 - DNA, 25 bp, Homo sapien
caagggcacaacaccttactctgtt

SEQ ID NO: 5297717 - DNA, 25 bp, Homo sapien
ttcaagggcacaacaccttactctg

SEQ ID NO: 5297718 - DNA, 25 bp, Homo sapien
tcaagggcacaacaccttactctgt

SEQ ID NO: 5297719 - DNA, 25 bp, Homo sapien
ttttcaagggcacaacaccttactc

SEQ ID NO: 5297720 - DNA, 25 bp, Homo sapien
gtggaaaggcaagaccctcagcagg

SEQ ID NO: 5297721 - DNA, 25 bp, Homo sapien
cagccttgtgctgactggacctccg

SEQ ID NO: 5297722 - DNA, 25 bp, Homo sapien
tctgccgagctctcgtggaaaggca

SEQ ID NO: 5297723 - DNA, 25 bp, Homo sapien
tgctgactggacctccgggtctctg

SEQ ID NO: 5297724 - DNA, 25 bp, Homo sapien
cagttcctttgactgtgtaggctgt

SEQ ID NO: 5297725 - DNA, 25 bp, Homo sapien
tgacacatcatggtggatgtaaaag

SEQ ID NO: 5297726 - DNA, 25 bp, Homo sapien
cctttgactgtgtaggctgttggat

SEQ ID NO: 5297727 - DNA, 25 bp, Homo sapien
aattactcagttcctttgactgtgt

SEQ ID NO: 5297728 - DNA, 25 bp, Homo sapien
taggattccattgcaggagcacaga

SEQ ID NO: 5297729 - DNA, 25 bp, Homo sapien
aggattccattgcaggagcacagac

SEQ ID NO: 5297730 - DNA, 25 bp, Homo sapien
ctaggattccattgcaggagcacag

SEQ ID NO: 5297731 - DNA, 25 bp, Homo sapien
tccattctaaggattccaggacatg

SEQ ID NO: 5297732 - DNA, 25 bp, Homo sapien
caggacatgtaagggaagaatccag

SEQ ID NO: 5297733 - DNA, 25 bp, Homo sapien
cggcatcttagtctgaaaatggaga

SEQ ID NO: 5297734 - DNA, 25 bp, Homo sapien
agtattgccacagagcttcggcatc

SEQ ID NO: 5297735 - DNA, 25 bp, Homo sapien
ccaattgtccaattaaggccgccat

SEQ ID NO: 5297736 - DNA, 25 bp, Homo sapien
tgccaattgtccaattaaggccgcc

SEQ ID NO: 5297737 - DNA, 25 bp, Homo sapien
ttgccaattgtccaattaaggccgc

SEQ ID NO: 5297738 - DNA, 25 bp, Homo sapien
gccaattgtccaattaaggccgcca

SEQ ID NO: 5297739 - DNA, 25 bp, Homo sapien
tgaccttgcagtgttgaatcttctt

SEQ ID NO: 5297740 - DNA, 25 bp, Homo sapien
aagggttttcattgatcagaccata

SEQ ID NO: 5297741 - DNA, 25 bp, Homo sapien
tcttgaccttgcagtgttgaatctt

SEQ ID NO: 5297742 - DNA, 25 bp, Homo sapien
tcttgtatatctctggatgtcataa

SEQ ID NO: 5297743 - DNA, 25 bp, Homo sapien
accaggcacccttctgaattgcaga

SEQ ID NO: 5297744 - DNA, 25 bp, Homo sapien
tgtatcattacctgtgtgcaccagg

SEQ ID NO: 5297745 - DNA, 25 bp, Homo sapien
ttacctgtgtgcaccaggcaccctt

SEQ ID NO: 5297746 - DNA, 25 bp, Homo sapien
tcattacctgtgtgcaccaggcacc

SEQ ID NO: 5297747 - DNA, 25 bp, Homo sapien
tcttttgtatggagacgctgcctct

SEQ ID NO: 5297748 - DNA, 25 bp, Homo sapien
tgcaagcgggaaagagatcagaaac

SEQ ID NO: 5297749 - DNA, 25 bp, Homo sapien
tctcaggtgtgaacaatcagatgca

SEQ ID NO: 5297750 - DNA, 25 bp, Homo sapien
ttttagaagaaagggttgagctgac

SEQ ID NO: 5297751 - DNA, 25 bp, Homo sapien
tctgggagtgcagtaaaaatccttc

SEQ ID NO: 5297752 - DNA, 25 bp, Homo sapien
ctgagtgctagcaggaaagacatcc

SEQ ID NO: 5297753 - DNA, 25 bp, Homo sapien
tcagaggagcatgagacattccact

SEQ ID NO: 5297754 - DNA, 25 bp, Homo sapien
tgttgaccaggcacattgatgccta

SEQ ID NO: 5297755 - DNA, 25 bp, Homo sapien
tcacagctggacatttcgagggaag

SEQ ID NO: 5297756 - DNA, 25 bp, Homo sapien
cagctggacatttcgagggaagcgt

SEQ ID NO: 5297757 - DNA, 25 bp, Homo sapien
ggaagcgtgtgtgctccgttgacag

SEQ ID NO: 5297758 - DNA, 25 bp, Homo sapien
tgctccgttgacaggggctgactct

SEQ ID NO: 5297759 - DNA, 25 bp, Homo sapien
gttccctgttgttgcaaattgccag

SEQ ID NO: 5297760 - DNA, 25 bp, Homo sapien
tagttccctgttgttgcaaattgcc

SEQ ID NO: 5297761 - DNA, 25 bp, Homo sapien
agttccctgttgttgcaaattgcca

SEQ ID NO: 5297762 - DNA, 25 bp, Homo sapien
tggaggtgatgagggatgatgcgcg

SEQ ID NO: 5297763 - DNA, 25 bp, Homo sapien
ggtgatgagggatgatgcgcgtctt

SEQ ID NO: 5297764 - DNA, 25 bp, Homo sapien
gaggtgatgagggatgatgcgcgtc

SEQ ID NO: 5297765 - DNA, 25 bp, Homo sapien
ctggaggtgatgagggatgatgcgc

SEQ ID NO: 5297766 - DNA, 25 bp, Homo sapien
ccattttgtgcaatattaatttctc

SEQ ID NO: 5297767 - DNA, 25 bp, Homo sapien
gttatttatagggagtgggtgggca

SEQ ID NO: 5297768 - DNA, 25 bp, Homo sapien
gggtgggcacagtgcttatgactta

SEQ ID NO: 5297769 - DNA, 25 bp, Homo sapien
tagaatggaagacggtattccccga

SEQ ID NO: 5297770 - DNA, 25 bp, Homo sapien
cagcgatgtgtcacattctctctgc

SEQ ID NO: 5297771 - DNA, 25 bp, Homo sapien
tctctgccggaaactctcattctta

SEQ ID NO: 5297772 - DNA, 25 bp, Homo sapien
gcctttgactcagcgatgtgtcaca

SEQ ID NO: 5297773 - DNA, 25 bp, Homo sapien
gaaagcataacccagttctgacaaa

SEQ ID NO: 5297774 - DNA, 25 bp, Homo sapien
aacacactttttggagaggtgttgg

SEQ ID NO: 5297775 - DNA, 25 bp, Homo sapien
tttggagaggtgttggtatttggtg

SEQ ID NO: 5297776 - DNA, 25 bp, Homo sapien
ctttttggagaggtgttggtatttg

SEQ ID NO: 5297777 - DNA, 25 bp, Homo sapien
ggtcctggcaacacactttttggag

SEQ ID NO: 5297778 - DNA, 25 bp, Homo sapien
ctaattagttcagattggccctttc

SEQ ID NO: 5297779 - DNA, 25 bp, Homo sapien
cagctgagtctgattacctaattag

SEQ ID NO: 5297780 - DNA, 25 bp, Homo sapien
attacctaattagttcagattggcc

SEQ ID NO: 5297781 - DNA, 25 bp, Homo sapien
tttcagctgagtctgattacctaat

SEQ ID NO: 5297782 - DNA, 25 bp, Homo sapien
gtcagtccagctcggtccgtcccac

SEQ ID NO: 5297783 - DNA, 25 bp, Homo sapien
cagtccagctcggtccgtcccacag

SEQ ID NO: 5297784 - DNA, 25 bp, Homo sapien
gccagtcagtccagctcggtccgtc

SEQ ID NO: 5297785 - DNA, 25 bp, Homo sapien
agtcagtccagctcggtccgtccca

SEQ ID NO: 5297786 - DNA, 25 bp, Homo sapien
ggtccttcatcagaggtcagcgtag

SEQ ID NO: 5297787 - DNA, 25 bp, Homo sapien
caattccagaatccatttggtgcct

SEQ ID NO: 5297788 - DNA, 25 bp, Homo sapien
tctaaggagtgtagcagcagcaggc

SEQ ID NO: 5297789 - DNA, 25 bp, Homo sapien
gtagcatgacttaacaccaattcca

SEQ ID NO: 5297790 - DNA, 25 bp, Homo sapien
cattgtgttttagcttccgtggtta

SEQ ID NO: 5297791 - DNA, 25 bp, Homo sapien
ggactacagttagtgcctggctact

SEQ ID NO: 5297792 - DNA, 25 bp, Homo sapien
cagtgtgggcacttgatcacagaga

SEQ ID NO: 5297793 - DNA, 25 bp, Homo sapien
cagcatttcggattctggacacaga

SEQ ID NO: 5297794 - DNA, 25 bp, Homo sapien
gatttgcagtaatgcatgacctgag

SEQ ID NO: 5297795 - DNA, 25 bp, Homo sapien
cacaatgtcatgaggtagctactat

SEQ ID NO: 5297796 - DNA, 25 bp, Homo sapien
caggcttggcttccatagtgtgcac

SEQ ID NO: 5297797 - DNA, 25 bp, Homo sapien
ggctagaataggtcacgttaccctg

SEQ ID NO: 5297798 - DNA, 25 bp, Homo sapien
cttgtgctgtgcgtgcacgtgcgca

SEQ ID NO: 5297799 - DNA, 25 bp, Homo sapien
ttgtgctgtgcgtgcacgtgcgcat

SEQ ID NO: 5297800 - DNA, 25 bp, Homo sapien
tgggctccgcatttgccagtgtaaa

SEQ ID NO: 5297801 - DNA, 25 bp, Homo sapien
cttcatgggctccgcatttgccagt

SEQ ID NO: 5297802 - DNA, 25 bp, Homo sapien
catgggctccgcatttgccagtgta

SEQ ID NO: 5297803 - DNA, 25 bp, Homo sapien
gggctccgcatttgccagtgtaaat

SEQ ID NO: 5297804 - DNA, 25 bp, Homo sapien
gtatttcatggcatatatgtaccat

SEQ ID NO: 5297805 - DNA, 25 bp, Homo sapien
atatgtttctgcagaagacatgatc

SEQ ID NO: 5297806 - DNA, 25 bp, Homo sapien
agcctccagctccatatatgtttct

SEQ ID NO: 5297807 - DNA, 25 bp, Homo sapien
tgaacattcattcacgtgcatgtgt

SEQ ID NO: 5297808 - DNA, 25 bp, Homo sapien
ccccgtattccattcccatgacact

SEQ ID NO: 5297809 - DNA, 25 bp, Homo sapien
tcataccaggcctcttcatttccaa

SEQ ID NO: 5297810 - DNA, 25 bp, Homo sapien
gacactcccctcttaccacattctc

SEQ ID NO: 5297811 - DNA, 25 bp, Homo sapien
cccctcttaccacattctctcttcc

SEQ ID NO: 5297812 - DNA, 25 bp, Homo sapien
ggaactgcccacatcagtactagtg

SEQ ID NO: 5297813 - DNA, 25 bp, Homo sapien
gtggaactgcccacatcagtactag

SEQ ID NO: 5297814 - DNA, 25 bp, Homo sapien
ctgtggaactgcccacatcagtact

SEQ ID NO: 5297815 - DNA, 25 bp, Homo sapien
gaactgcccacatcagtactagtga

SEQ ID NO: 5297816 - DNA, 25 bp, Homo sapien
ctttaaaccacagagaggttgcttc

SEQ ID NO: 5297817 - DNA, 25 bp, Homo sapien
cccattgtttaagttggatgcacgc

SEQ ID NO: 5297818 - DNA, 25 bp, Homo sapien
cagcctgtaggtctctttaaaccgg

SEQ ID NO: 5297819 - DNA, 25 bp, Homo sapien
tgctgttgcggcattctggacgaat

SEQ ID NO: 5297820 - DNA, 25 bp, Homo sapien
tttattgtgcttcagcttacccttt

SEQ ID NO: 5297821 - DNA, 25 bp, Homo sapien
gcatattctgtaccctatttgtagt

SEQ ID NO: 5297822 - DNA, 25 bp, Homo sapien
acccgagcagcatattctgtaccct

SEQ ID NO: 5297823 - DNA, 25 bp, Homo sapien
ccctctaagtctctaaagtccattg

SEQ ID NO: 5297824 - DNA, 25 bp, Homo sapien
gaaatttggcattcaaacgacttcc

SEQ ID NO: 5297825 - DNA, 25 bp, Homo sapien
gatttagggctaggcaagacaacat

SEQ ID NO: 5297826 - DNA, 25 bp, Homo sapien
ccaaacatatattaggtaccgacca

SEQ ID NO: 5297827 - DNA, 25 bp, Homo sapien
taagctctagggatgagcaactgaa

SEQ ID NO: 5297828 - DNA, 25 bp, Homo sapien
ccagttagaaactatttgaggacct

SEQ ID NO: 5297829 - DNA, 25 bp, Homo sapien
cactctgtgcatagttgtaagaaca

SEQ ID NO: 5297830 - DNA, 25 bp, Homo sapien
tctgtatcttagagggaatgatcca

SEQ ID NO: 5297831 - DNA, 25 bp, Homo sapien
gttagacattcctatcactctgtgc

SEQ ID NO: 5297832 - DNA, 25 bp, Homo sapien
atcaaactgcaaggccgcggccagg

SEQ ID NO: 5297833 - DNA, 25 bp, Homo sapien
aacacagcagcctggaagctcgaac

SEQ ID NO: 5297834 - DNA, 25 bp, Homo sapien
gtaaacacagcagcctggaagctcg

SEQ ID NO: 5297835 - DNA, 25 bp, Homo sapien
acagcagcctggaagctcgaactgg

SEQ ID NO: 5297836 - DNA, 25 bp, Homo sapien
gaacgccacaaagatactccttgag

SEQ ID NO: 5297837 - DNA, 25 bp, Homo sapien
cgccacaaagatactccttgagaag

SEQ ID NO: 5297838 - DNA, 25 bp, Homo sapien
agagaacgccacaaagatactcctt

SEQ ID NO: 5297839 - DNA, 25 bp, Homo sapien
gagaacgccacaaagatactccttg

SEQ ID NO: 5297840 - DNA, 25 bp, Homo sapien
gccaacaaatgttgctgcgtttttc

SEQ ID NO: 5297841 - DNA, 25 bp, Homo sapien
cagccaacaaatgttgctgcgtttt

SEQ ID NO: 5297842 - DNA, 25 bp, Homo sapien
tgcagccaacaaatgttgctgcgtt

SEQ ID NO: 5297843 - DNA, 25 bp, Homo sapien
gcagccaacaaatgttgctgcgttt

SEQ ID NO: 5297844 - DNA, 25 bp, Homo sapien
gagatattgcccgtagtttcagagg

SEQ ID NO: 5297845 - DNA, 25 bp, Homo sapien
gttgatttcttgacccttagcaggg

SEQ ID NO: 5297846 - DNA, 25 bp, Homo sapien
taattatcagtcaaggaagtccagg

SEQ ID NO: 5297847 - DNA, 25 bp, Homo sapien
ccaagggccaatctaagaagtcaag

SEQ ID NO: 5297848 - DNA, 25 bp, Homo sapien
gacaaccagtgttgcaccagtagcc

SEQ ID NO: 5297849 - DNA, 25 bp, Homo sapien
ggttataggaagaccagaagcctcc

SEQ ID NO: 5297850 - DNA, 25 bp, Homo sapien
tccctgggtcagaatacttggctgc

SEQ ID NO: 5297851 - DNA, 25 bp, Homo sapien
gctggtctcgcttaaacatgctggc

SEQ ID NO: 5297852 - DNA, 25 bp, Homo sapien
tatggccaaggaacaacgggaagca

SEQ ID NO: 5297853 - DNA, 25 bp, Homo sapien
cagaattccttgactgcagccaaag

SEQ ID NO: 5297854 - DNA, 25 bp, Homo sapien
tatccagagcatacaaggtgtggct

SEQ ID NO: 5297855 - DNA, 25 bp, Homo sapien
cataggttcagtaaaaaggcccaga

SEQ ID NO: 5297856 - DNA, 25 bp, Homo sapien
tgtatcctaacactcatccccatag

SEQ ID NO: 5297857 - DNA, 25 bp, Homo sapien
gctttacctgcttcctagacctgta

SEQ ID NO: 5297858 - DNA, 25 bp, Homo sapien
tccccatagatactaagctgtaaag

SEQ ID NO: 5297859 - DNA, 25 bp, Homo sapien
ttactgccctaggtaagctgcctct

SEQ ID NO: 5297860 - DNA, 25 bp, Homo sapien
cgttcagggtgatatgtctgttgac

SEQ ID NO: 5297861 - DNA, 25 bp, Homo sapien
aaggtcagactagatcgggcacgtt

SEQ ID NO: 5297862 - DNA, 25 bp, Homo sapien
catccaaatactaactgggcccacc

SEQ ID NO: 5297863 - DNA, 25 bp, Homo sapien
ttccaaggtcagactagatcgggca

SEQ ID NO: 5297864 - DNA, 25 bp, Homo sapien
gatagaggtaattcttgggcagcag

SEQ ID NO: 5297865 - DNA, 25 bp, Homo sapien
cctgagcttgatccccaagccagtg

SEQ ID NO: 5297866 - DNA, 25 bp, Homo sapien
tgggcagcaggttggaaataaagag

SEQ ID NO: 5297867 - DNA, 25 bp, Homo sapien
aataagatggatataggtcctgagc

SEQ ID NO: 5297868 - DNA, 25 bp, Homo sapien
acaactgcgctctcccagtcgtgtg

SEQ ID NO: 5297869 - DNA, 25 bp, Homo sapien
tgactgccgtggagtccggcacacc

SEQ ID NO: 5297870 - DNA, 25 bp, Homo sapien
gtgactgccgtggagtccggcacac

SEQ ID NO: 5297871 - DNA, 25 bp, Homo sapien
cttggccaggaacaactgcgctctc

SEQ ID NO: 5297872 - DNA, 25 bp, Homo sapien
gctagctgaccttgcataccgtatg

SEQ ID NO: 5297873 - DNA, 25 bp, Homo sapien
gaagtaaacacttgccttgcagcca

SEQ ID NO: 5297874 - DNA, 25 bp, Homo sapien
tttgatgtcaacaacccgagtcctt

SEQ ID NO: 5297875 - DNA, 25 bp, Homo sapien
ccactatgagtggactggagataca

SEQ ID NO: 5297876 - DNA, 25 bp, Homo sapien
tagtcatctaatctgtgaatacaac

SEQ ID NO: 5297877 - DNA, 25 bp, Homo sapien
tgaatacaacacacccctttattag

SEQ ID NO: 5297878 - DNA, 25 bp, Homo sapien
gtttgttaccagtatatagagctaa

SEQ ID NO: 5297879 - DNA, 25 bp, Homo sapien
taagacttattcctaggtcttcaag

SEQ ID NO: 5297880 - DNA, 25 bp, Homo sapien
taatgtccgttcttagccaagctgc

SEQ ID NO: 5297881 - DNA, 25 bp, Homo sapien
tttggttgtgcagttccttggctac

SEQ ID NO: 5297882 - DNA, 25 bp, Homo sapien
tgctagcaggtgttaattggatccc

SEQ ID NO: 5297883 - DNA, 25 bp, Homo sapien
gggttatgcaattcccggcctggag

SEQ ID NO: 5297884 - DNA, 25 bp, Homo sapien
gcaatgtgcctacattgaagacaaa

SEQ ID NO: 5297885 - DNA, 25 bp, Homo sapien
gcctacattgaagacaaaacgctca

SEQ ID NO: 5297886 - DNA, 25 bp, Homo sapien
cacaccacatgcaatgtgcctacat

SEQ ID NO: 5297887 - DNA, 25 bp, Homo sapien
cattgaagacaaaacgctcaacaac

SEQ ID NO: 5297888 - DNA, 25 bp, Homo sapien
tacttgcataacctgttcctttggg

SEQ ID NO: 5297889 - DNA, 25 bp, Homo sapien
ggaacgttgatgttggctacagcta

SEQ ID NO: 5297890 - DNA, 25 bp, Homo sapien
gagaaatggtccctccattcagacc

SEQ ID NO: 5297891 - DNA, 25 bp, Homo sapien
aaattttaatgcactcgggaagaga

SEQ ID NO: 5297892 - DNA, 25 bp, Homo sapien
tgatggccctcgtagaattctccat

SEQ ID NO: 5297893 - DNA, 25 bp, Homo sapien
cgtaactttgatggccctcgtagaa

SEQ ID NO: 5297894 - DNA, 25 bp, Homo sapien
ctattgttcgtaactttgatggccc

SEQ ID NO: 5297895 - DNA, 25 bp, Homo sapien
gttccaggtcttctattgttcgtaa

SEQ ID NO: 5297896 - DNA, 25 bp, Homo sapien
ccacaacagggatttgctgctgaac

SEQ ID NO: 5297897 - DNA, 25 bp, Homo sapien
taatattcagggtcagtgtgaacgc

SEQ ID NO: 5297898 - DNA, 25 bp, Homo sapien
agtaatccggtaatcccacaacagg

SEQ ID NO: 5297899 - DNA, 25 bp, Homo sapien
gtgtgaacgcctccctgtgcacata

SEQ ID NO: 5297900 - DNA, 25 bp, Homo sapien
ctagtaaaatgcacagcgatattgc

SEQ ID NO: 5297901 - DNA, 25 bp, Homo sapien
aatgcacagcgatattgctgtgact

SEQ ID NO: 5297902 - DNA, 25 bp, Homo sapien
gtaaaatgcacagcgatattgctgt

SEQ ID NO: 5297903 - DNA, 25 bp, Homo sapien
aaaatgcacagcgatattgctgtga

SEQ ID NO: 5297904 - DNA, 25 bp, Homo sapien
cctcttctataggagatgatgtcat

SEQ ID NO: 5297905 - DNA, 25 bp, Homo sapien
ccctgtctaaacaaatggctagtct

SEQ ID NO: 5297906 - DNA, 25 bp, Homo sapien
tgagtaccgcaccaaccaatgttct

SEQ ID NO: 5297907 - DNA, 25 bp, Homo sapien
gaaattgtgtctccggaatcatcga

SEQ ID NO: 5297908 - DNA, 25 bp, Homo sapien
agggcacggcacttctgcgatcgag

SEQ ID NO: 5297909 - DNA, 25 bp, Homo sapien
ccgggccgcagcttagggtaatgtt

SEQ ID NO: 5297910 - DNA, 25 bp, Homo sapien
catatagtcaagttggagttatacc

SEQ ID NO: 5297911 - DNA, 25 bp, Homo sapien
tctgtcttgaagactcatatagtca

SEQ ID NO: 5297912 - DNA, 25 bp, Homo sapien
tggagttataccaactatggcatga

SEQ ID NO: 5297913 - DNA, 25 bp, Homo sapien
caatttggttgtttcctgaggtatg

SEQ ID NO: 5297914 - DNA, 25 bp, Homo sapien
agtgtgcacgctccttgcccaacaa

SEQ ID NO: 5297915 - DNA, 25 bp, Homo sapien
caaaaccatcggcattcttgaaagt

SEQ ID NO: 5297916 - DNA, 25 bp, Homo sapien
ttgtttcctgaggtatgaaaactgc

SEQ ID NO: 5297917 - DNA, 25 bp, Homo sapien
tatctgtcagtttcccaatatggca

SEQ ID NO: 5297918 - DNA, 25 bp, Homo sapien
caactgagagagtcttaacttgcta

SEQ ID NO: 5297919 - DNA, 25 bp, Homo sapien
gacagcatcatcagaatgttgccaa

SEQ ID NO: 5297920 - DNA, 25 bp, Homo sapien
ctgtggaggtatagtgcattctaac

SEQ ID NO: 5297921 - DNA, 25 bp, Homo sapien
gctgcaatgaatttcgattaaagat

SEQ ID NO: 5297922 - DNA, 25 bp, Homo sapien
tatcgaaatgccactggagaaagct

SEQ ID NO: 5297923 - DNA, 25 bp, Homo sapien
gaaagctgcaatgaatttcgattaa

SEQ ID NO: 5297924 - DNA, 25 bp, Homo sapien
tgccactggagaaagctgcaatgaa

SEQ ID NO: 5297925 - DNA, 25 bp, Homo sapien
tatatttacgttcatttcctcgtct

SEQ ID NO: 5297926 - DNA, 25 bp, Homo sapien
cctgattggaatcaccagcagtgtg

SEQ ID NO: 5297927 - DNA, 25 bp, Homo sapien
taccgttatatctttaacttgcctg

SEQ ID NO: 5297928 - DNA, 25 bp, Homo sapien
tcctcgtctttattgtataccgtta

SEQ ID NO: 5297929 - DNA, 25 bp, Homo sapien
cctgatttctgaccggttcctggag

SEQ ID NO: 5297930 - DNA, 25 bp, Homo sapien
cctggagcacttaaagtggagcaac

SEQ ID NO: 5297931 - DNA, 25 bp, Homo sapien
tgcctcactaggacttagcacaatg

SEQ ID NO: 5297932 - DNA, 25 bp, Homo sapien
gagcaactacttcacactcagcatg

SEQ ID NO: 5297933 - DNA, 25 bp, Homo sapien
cattgtcaacagctcaagggattgg

SEQ ID NO: 5297934 - DNA, 25 bp, Homo sapien
cacataggtcccactaagatgccca

SEQ ID NO: 5297935 - DNA, 25 bp, Homo sapien
aataaattgattacccaagggcagg

SEQ ID NO: 5297936 - DNA, 25 bp, Homo sapien
aattttatgacacagcagcccgatg

SEQ ID NO: 5297937 - DNA, 25 bp, Homo sapien
gggaataagagacgctggtgcctcc

SEQ ID NO: 5297938 - DNA, 25 bp, Homo sapien
taggctgtgccaaatttccccgcaa

SEQ ID NO: 5297939 - DNA, 25 bp, Homo sapien
caagagcgaatctctgtctcaggga

SEQ ID NO: 5297940 - DNA, 25 bp, Homo sapien
gaagtggaggctatcatccctagca

SEQ ID NO: 5297941 - DNA, 25 bp, Homo sapien
tcaaaggactgtgggaaatactcct

SEQ ID NO: 5297942 - DNA, 25 bp, Homo sapien
gactctcagtccagtgtgccttaca

SEQ ID NO: 5297943 - DNA, 25 bp, Homo sapien
cagccggtggtctcaaatcaaagga

SEQ ID NO: 5297944 - DNA, 25 bp, Homo sapien
agtgccggaaccatctgcttttaaa

SEQ ID NO: 5297945 - DNA, 25 bp, Homo sapien
gcatggtcgtgaaagctctcctaat

SEQ ID NO: 5297946 - DNA, 25 bp, Homo sapien
gtcttaccaattctgcgtcactagg

SEQ ID NO: 5297947 - DNA, 25 bp, Homo sapien
cactaggaagctatagcatggtcgt

SEQ ID NO: 5297948 - DNA, 25 bp, Homo sapien
tggatgggaccagaacttaacattt

SEQ ID NO: 5297949 - DNA, 25 bp, Homo sapien
tatttttgagttttcgtacatagga

SEQ ID NO: 5297950 - DNA, 25 bp, Homo sapien
cattttgtaggtctgatgatcactg

SEQ ID NO: 5297951 - DNA, 25 bp, Homo sapien
tgtaggtctgatgatcactgtcacc

SEQ ID NO: 5297952 - DNA, 25 bp, Homo sapien
ttcattttgtaggtctgatgatcac

SEQ ID NO: 5297953 - DNA, 25 bp, Homo sapien
ttttgtaggtctgatgatcactgtc

SEQ ID NO: 5297954 - DNA, 25 bp, Homo sapien
tgtgttcttacatccttatattcga

SEQ ID NO: 5297955 - DNA, 25 bp, Homo sapien
tcagaactatcagggcgaaatgtat

SEQ ID NO: 5297956 - DNA, 25 bp, Homo sapien
tcatttgtgttcttacatccttata

SEQ ID NO: 5297957 - DNA, 25 bp, Homo sapien
aggagctgcagatttcagaactatc

SEQ ID NO: 5297958 - DNA, 25 bp, Homo sapien
tagtctactgggcaattaaaggcaa

SEQ ID NO: 5297959 - DNA, 25 bp, Homo sapien
tagcaaaatgtaaggttcggtagcc

SEQ ID NO: 5297960 - DNA, 25 bp, Homo sapien
aatgtaaaacatcaactcagccagg

SEQ ID NO: 5297961 - DNA, 25 bp, Homo sapien
tctgcagcaataataaagggcctcc

SEQ ID NO: 5297962 - DNA, 25 bp, Homo sapien
tatactgataacctccatgctggaa

SEQ ID NO: 5297963 - DNA, 25 bp, Homo sapien
aactagtgtaatgtcttccctgtcc

SEQ ID NO: 5297964 - DNA, 25 bp, Homo sapien
gtccaaatccagaatgattatactg

SEQ ID NO: 5297965 - DNA, 25 bp, Homo sapien
gctggaaatgctgttcaaattgacc

SEQ ID NO: 5297966 - DNA, 25 bp, Homo sapien
tatctattgtcctgctggtagccac

SEQ ID NO: 5297967 - DNA, 25 bp, Homo sapien
ggtatctattgtcctgctggtagcc

SEQ ID NO: 5297968 - DNA, 25 bp, Homo sapien
gtatctattgtcctgctggtagcca

SEQ ID NO: 5297969 - DNA, 25 bp, Homo sapien
cctggtatccacttcctgtatatga

SEQ ID NO: 5297970 - DNA, 25 bp, Homo sapien
cgccttgatagccaccactgctgtg

SEQ ID NO: 5297971 - DNA, 25 bp, Homo sapien
ctccgccttgatagccaccactgct

SEQ ID NO: 5297972 - DNA, 25 bp, Homo sapien
ccactgctgtggccaccatgatagc

SEQ ID NO: 5297973 - DNA, 25 bp, Homo sapien
ctgctgtggccaccatgatagccac

SEQ ID NO: 5297974 - DNA, 25 bp, Homo sapien
tgtccagcctccttgatgcttattt

SEQ ID NO: 5297975 - DNA, 25 bp, Homo sapien
ctggctggaaacctgaatctcgata

SEQ ID NO: 5297976 - DNA, 25 bp, Homo sapien
gacctcctcgtcctccgtatgagga

SEQ ID NO: 5297977 - DNA, 25 bp, Homo sapien
ataaccaccatcttggtagccacct

SEQ ID NO: 5297978 - DNA, 25 bp, Homo sapien
tggaggttcgatttcattgggtcta

SEQ ID NO: 5297979 - DNA, 25 bp, Homo sapien
tgggtctaccacctctgtcaggcac

SEQ ID NO: 5297980 - DNA, 25 bp, Homo sapien
ggttcgatttcattgggtctaccac

SEQ ID NO: 5297981 - DNA, 25 bp, Homo sapien
gatttcattgggtctaccacctctg

SEQ ID NO: 5297982 - DNA, 25 bp, Homo sapien
cagaaataaatgcatttggaaaaaa

SEQ ID NO: 5297983 - DNA, 25 bp, Homo sapien
ttatgaacagaaataaatgcatttg

SEQ ID NO: 5297984 - DNA, 25 bp, Homo sapien
ctacagaataggaaagatattttaa

SEQ ID NO: 5297985 - DNA, 25 bp, Homo sapien
ttttatgaacagaaataaatgcatt

SEQ ID NO: 5297986 - DNA, 25 bp, Homo sapien
tgtccttaaaatctttgacaagtcc

SEQ ID NO: 5297987 - DNA, 25 bp, Homo sapien
taagactgaacgtttcggctggtaa

SEQ ID NO: 5297988 - DNA, 25 bp, Homo sapien
gggataagactgaacgtttcggctg

SEQ ID NO: 5297989 - DNA, 25 bp, Homo sapien
cttttctcttatagagccgctgctt

SEQ ID NO: 5297990 - DNA, 25 bp, Homo sapien
agccaaaggattgtacagtgacatc

SEQ ID NO: 5297991 - DNA, 25 bp, Homo sapien
ttctccggacttcatattcattggc

SEQ ID NO: 5297992 - DNA, 25 bp, Homo sapien
tagctctgtcagaccagccaaagga

SEQ ID NO: 5297993 - DNA, 25 bp, Homo sapien
catccaaacgttttattagcagctt

SEQ ID NO: 5297994 - DNA, 25 bp, Homo sapien
ctttcccacatgattaggtggaact

SEQ ID NO: 5297995 - DNA, 25 bp, Homo sapien
gctttcccacatgattaggtggaac

SEQ ID NO: 5297996 - DNA, 25 bp, Homo sapien
aggctttcccacatgattaggtgga

SEQ ID NO: 5297997 - DNA, 25 bp, Homo sapien
ggctttcccacatgattaggtggaa

SEQ ID NO: 5297998 - DNA, 25 bp, Homo sapien
tcaatcccgctgaagaattggaaca

SEQ ID NO: 5297999 - DNA, 25 bp, Homo sapien
cattcctagagcaatacatatgcct

SEQ ID NO: 5298000 - DNA, 25 bp, Homo sapien
tggctggaggtttggacattcctag

SEQ ID NO: 5298001 - DNA, 25 bp, Homo sapien
ggaacatagttatattggctggagg

SEQ ID NO: 5298002 - DNA, 25 bp, Homo sapien
taaggtttcattaggacactgccac

SEQ ID NO: 5298003 - DNA, 25 bp, Homo sapien
ccgaaggatcgaggtaagtaacatc

SEQ ID NO: 5298004 - DNA, 25 bp, Homo sapien
taagcgattctctttgaaaccgaag

SEQ ID NO: 5298005 - DNA, 25 bp, Homo sapien
caaatcttatgttgccctctggcta

SEQ ID NO: 5298006 - DNA, 25 bp, Homo sapien
tacgtaagggcaacactctgagaac

SEQ ID NO: 5298007 - DNA, 25 bp, Homo sapien
ggtcattagtaagcattccacacag

SEQ ID NO: 5298008 - DNA, 25 bp, Homo sapien
ccaatgaagagccaaacagagtcct

SEQ ID NO: 5298009 - DNA, 25 bp, Homo sapien
ttagaaagggagaatcggcagaagc

SEQ ID NO: 5298010 - DNA, 25 bp, Homo sapien
gtcagtttattagtcatggaaaaca

SEQ ID NO: 5298011 - DNA, 25 bp, Homo sapien
ggcagttcatctcccctagtagccc

SEQ ID NO: 5298012 - DNA, 25 bp, Homo sapien
ctcacctcaagctggaattcttcag

SEQ ID NO: 5298013 - DNA, 25 bp, Homo sapien
tgtcagtgaaagatacgggcagttc

SEQ ID NO: 5298014 - DNA, 25 bp, Homo sapien
tctgaatgagaaggcgcttggtcac

SEQ ID NO: 5298015 - DNA, 25 bp, Homo sapien
ccagtggccttgctccttgatgaaa

SEQ ID NO: 5298016 - DNA, 25 bp, Homo sapien
gaaacttcaccctcgtacttgctga

SEQ ID NO: 5298017 - DNA, 25 bp, Homo sapien
tattccctgtgacagatatgtcctc

SEQ ID NO: 5298018 - DNA, 25 bp, Homo sapien
tcactgtcccatgaatagccagtct

SEQ ID NO: 5298019 - DNA, 25 bp, Homo sapien
cacagagctcttttagaggcagctg

SEQ ID NO: 5298020 - DNA, 25 bp, Homo sapien
gctgggctaaaggtacctcgtctct

SEQ ID NO: 5298021 - DNA, 25 bp, Homo sapien
tcaaaggttcctacagtctctcaaa

SEQ ID NO: 5298022 - DNA, 25 bp, Homo sapien
tctcaaacatctggtcaagaggcag

SEQ ID NO: 5298023 - DNA, 25 bp, Homo sapien
tagttgcttgcacgttttcctctag

SEQ ID NO: 5298024 - DNA, 25 bp, Homo sapien
agactgcctgagagagcgctccatc

SEQ ID NO: 5298025 - DNA, 25 bp, Homo sapien
cagagcactcttaattcagacacca

SEQ ID NO: 5298026 - DNA, 25 bp, Homo sapien
catcttccaacaatgggcccttgta

SEQ ID NO: 5298027 - DNA, 25 bp, Homo sapien
atcttccaacgactccaagatgtca

SEQ ID NO: 5298028 - DNA, 25 bp, Homo sapien
cctagatcttccaacgactccaaga

SEQ ID NO: 5298029 - DNA, 25 bp, Homo sapien
tagatcttccaacgactccaagatg

SEQ ID NO: 5298030 - DNA, 25 bp, Homo sapien
gatcttccaacgactccaagatgtc

SEQ ID NO: 5298031 - DNA, 25 bp, Homo sapien
ctgtggtattcaaatttccgagtcg

SEQ ID NO: 5298032 - DNA, 25 bp, Homo sapien
gtattcaaatttccgagtcgtcagg

SEQ ID NO: 5298033 - DNA, 25 bp, Homo sapien
caaatttccgagtcgtcaggctccc

SEQ ID NO: 5298034 - DNA, 25 bp, Homo sapien
gctactgtggtattcaaatttccga

SEQ ID NO: 5298035 - DNA, 25 bp, Homo sapien
gcatgcgcgacttccccggaacttc

SEQ ID NO: 5298036 - DNA, 25 bp, Homo sapien
ccggaacttccaaatccacagctgg

SEQ ID NO: 5298037 - DNA, 25 bp, Homo sapien
tcgcgcatgcgcgacttccccggaa

SEQ ID NO: 5298038 - DNA, 25 bp, Homo sapien
gaacttccaaatccacagctggcgc

SEQ ID NO: 5298039 - DNA, 25 bp, Homo sapien
tccggagcgtgcgcaagaaacttgg

SEQ ID NO: 5298040 - DNA, 25 bp, Homo sapien
gtccggagcgtgcgcaagaaacttg

SEQ ID NO: 5298041 - DNA, 25 bp, Homo sapien
ccggagcgtgcgcaagaaacttggt

SEQ ID NO: 5298042 - DNA, 25 bp, Homo sapien
cggagcgtgcgcaagaaacttggtc

SEQ ID NO: 5298043 - DNA, 25 bp, Homo sapien
tctgaagtgggggtaggttttctgc

SEQ ID NO: 5298044 - DNA, 25 bp, Homo sapien
atctgaagtgggggtaggttttctg

SEQ ID NO: 5298045 - DNA, 25 bp, Homo sapien
gctgattgcaatcctggccaactca

SEQ ID NO: 5298046 - DNA, 25 bp, Homo sapien
gattgcaatcctggccaactcaacc

SEQ ID NO: 5298047 - DNA, 25 bp, Homo sapien
ttggctgattgcaatcctggccaac

SEQ ID NO: 5298048 - DNA, 25 bp, Homo sapien
ctgttcagtttgttgctgtctcttt

SEQ ID NO: 5298049 - DNA, 25 bp, Homo sapien
ttttaaaatttgcatccatgctgtt

SEQ ID NO: 5298050 - DNA, 25 bp, Homo sapien
taaaatttgcatccatgctgttgat

SEQ ID NO: 5298051 - DNA, 25 bp, Homo sapien
aaatttgcatccatgctgttgattg

SEQ ID NO: 5298052 - DNA, 25 bp, Homo sapien
ttaaaatttgcatccatgctgttga

SEQ ID NO: 5298053 - DNA, 25 bp, Homo sapien
aaagccaatggtatttgatgcctca

SEQ ID NO: 5298054 - DNA, 25 bp, Homo sapien
gatgcctcattgtgggttgcctcaa

SEQ ID NO: 5298055 - DNA, 25 bp, Homo sapien
agctctttgctgcagcggtcctcct

SEQ ID NO: 5298056 - DNA, 25 bp, Homo sapien
ccactaggtggctggtgaaaaagcc

SEQ ID NO: 5298057 - DNA, 25 bp, Homo sapien
ttcctttcagatggatctacagcaa

SEQ ID NO: 5298058 - DNA, 25 bp, Homo sapien
tagcctcagacccaccgcaaatgaa

SEQ ID NO: 5298059 - DNA, 25 bp, Homo sapien
ccaccgcaaatgaacctgtgttttt

SEQ ID NO: 5298060 - DNA, 25 bp, Homo sapien
tcagacccaccgcaaatgaacctgt

SEQ ID NO: 5298061 - DNA, 25 bp, Homo sapien
tcccaggatacaagcctattgaggt

SEQ ID NO: 5298062 - DNA, 25 bp, Homo sapien
cacagtatcgcctggtcagtctagc

SEQ ID NO: 5298063 - DNA, 25 bp, Homo sapien
gttagaatgagtgaccagaaacaca

SEQ ID NO: 5298064 - DNA, 25 bp, Homo sapien
tctccgggatttactgtcaaaagcc

SEQ ID NO: 5298065 - DNA, 25 bp, Homo sapien
gaagcctcccgctcactggaaatta

SEQ ID NO: 5298066 - DNA, 25 bp, Homo sapien
tttgataccgcgaagaacagttggg

SEQ ID NO: 5298067 - DNA, 25 bp, Homo sapien
acgctctgaaggacaccgtgttaaa

SEQ ID NO: 5298068 - DNA, 25 bp, Homo sapien
gacccagggtctgcgcttgaagcct

SEQ ID NO: 5298069 - DNA, 25 bp, Homo sapien
aagatggtcgggaaataggcagata

SEQ ID NO: 5298070 - DNA, 25 bp, Homo sapien
tgtggagctcatcaccgctggaggt

SEQ ID NO: 5298071 - DNA, 25 bp, Homo sapien
gagaactgggaaagtgcgatgaatt

SEQ ID NO: 5298072 - DNA, 25 bp, Homo sapien
gggaggtgcacagcacaccttcctc

SEQ ID NO: 5298073 - DNA, 25 bp, Homo sapien
gtgggcagagtacaccaggtcgccc

SEQ ID NO: 5298074 - DNA, 25 bp, Homo sapien
gagtacaccaggtcgcccacatagg

SEQ ID NO: 5298075 - DNA, 25 bp, Homo sapien
acggccgtcaggttggtcacagcca

SEQ ID NO: 5298076 - DNA, 25 bp, Homo sapien
cataggccagcaagttgacggccgt

SEQ ID NO: 5298077 - DNA, 25 bp, Homo sapien
gggtttctgtcgctgcagctcacat

SEQ ID NO: 5298078 - DNA, 25 bp, Homo sapien
agctcacatctctcgtctgccaggg

SEQ ID NO: 5298079 - DNA, 25 bp, Homo sapien
taggggtttctgtcgctgcagctca

SEQ ID NO: 5298080 - DNA, 25 bp, Homo sapien
tgtcgctgcagctcacatctctcgt

SEQ ID NO: 5298081 - DNA, 25 bp, Homo sapien
ctcagcaggatagtgagggccgcca

SEQ ID NO: 5298082 - DNA, 25 bp, Homo sapien
gtaagccacacaggcgatgccagag

SEQ ID NO: 5298083 - DNA, 25 bp, Homo sapien
ttgatgaacacgaagatgaggcagg

SEQ ID NO: 5298084 - DNA, 25 bp, Homo sapien
cagctcggaggccatgtagtcagtg

SEQ ID NO: 5298085 - DNA, 25 bp, Homo sapien
agttgcgccaaaacaaggggaagcg

SEQ ID NO: 5298086 - DNA, 25 bp, Homo sapien
gtgatggggaagttgcgccaaaaca

SEQ ID NO: 5298087 - DNA, 25 bp, Homo sapien
ccgagaggcacaagagggccgcata

SEQ ID NO: 5298088 - DNA, 25 bp, Homo sapien
acaagagggccgcatagcaggcaaa

SEQ ID NO: 5298089 - DNA, 25 bp, Homo sapien
agccgcccagctccacgaggaggat

SEQ ID NO: 5298090 - DNA, 25 bp, Homo sapien
tgggagccgcccagctccacgagga

SEQ ID NO: 5298091 - DNA, 25 bp, Homo sapien
ccagctccacgaggaggatgaccag

SEQ ID NO: 5298092 - DNA, 25 bp, Homo sapien
ccacgaggaggatgaccagggtcat

SEQ ID NO: 5298093 - DNA, 25 bp, Homo sapien
cagttacccataggccccttccagg

SEQ ID NO: 5298094 - DNA, 25 bp, Homo sapien
ttacccataggccccttccaggcgc

SEQ ID NO: 5298095 - DNA, 25 bp, Homo sapien
ccataggccccttccaggcgcccac

SEQ ID NO: 5298096 - DNA, 25 bp, Homo sapien
ccagttacccataggccccttccag

SEQ ID NO: 5298097 - DNA, 25 bp, Homo sapien
gctggatcagggccctagaggaccc

SEQ ID NO: 5298098 - DNA, 25 bp, Homo sapien
ttgggtgggtaacagtcaccggcat

SEQ ID NO: 5298099 - DNA, 25 bp, Homo sapien
ccctacgacggtgggggaccgcatg

SEQ ID NO: 5298100 - DNA, 25 bp, Homo sapien
ggaccgcatggtggtcgtgacggtt

SEQ ID NO: 5298101 - DNA, 25 bp, Homo sapien
gctgaggaactcacggagaaaaggt

SEQ ID NO: 5298102 - DNA, 25 bp, Homo sapien
ctgaggaactcacggagaaaaggtc

SEQ ID NO: 5298103 - DNA, 25 bp, Homo sapien
aggaactcacggagaaaaggtctgg

SEQ ID NO: 5298104 - DNA, 25 bp, Homo sapien
tggctgaggaactcacggagaaaag

SEQ ID NO: 5298105 - DNA, 25 bp, Homo sapien
caccccgtggaacaggaacatagca

SEQ ID NO: 5298106 - DNA, 25 bp, Homo sapien
gattaagtcacacgcctggaaaagg

SEQ ID NO: 5298107 - DNA, 25 bp, Homo sapien
gctgggaacagcgagagacaatgtc

SEQ ID NO: 5298108 - DNA, 25 bp, Homo sapien
acaggaacatagcaccgagcaggga

SEQ ID NO: 5298109 - DNA, 25 bp, Homo sapien
gattccctaggatggtctagtcgca

SEQ ID NO: 5298110 - DNA, 25 bp, Homo sapien
ccttcctctggtgtagattccctag

SEQ ID NO: 5298111 - DNA, 25 bp, Homo sapien
ggtctagtcgcaaattctcttggtc

SEQ ID NO: 5298112 - DNA, 25 bp, Homo sapien
tcttggtcctcgtactgctgcaaca

SEQ ID NO: 5298113 - DNA, 25 bp, Homo sapien
tattctctcagacgatctcatttca

SEQ ID NO: 5298114 - DNA, 25 bp, Homo sapien
ctcagacgatctcatttcattaatt

SEQ ID NO: 5298115 - DNA, 25 bp, Homo sapien
ttctctcagacgatctcatttcatt

SEQ ID NO: 5298116 - DNA, 25 bp, Homo sapien
ctctcagacgatctcatttcattaa

SEQ ID NO: 5298117 - DNA, 25 bp, Homo sapien
acctcttgaatttagctaatttcca

SEQ ID NO: 5298118 - DNA, 25 bp, Homo sapien
tgaatttagctaatttccaagttgt

SEQ ID NO: 5298119 - DNA, 25 bp, Homo sapien
gaacctcttgaatttagctaatttc

SEQ ID NO: 5298120 - DNA, 25 bp, Homo sapien
tcttgaatttagctaatttccaagt

SEQ ID NO: 5298121 - DNA, 25 bp, Homo sapien
ctccatccgttgactgccggctcag

SEQ ID NO: 5298122 - DNA, 25 bp, Homo sapien
ccatccgttgactgccggctcagtc

SEQ ID NO: 5298123 - DNA, 25 bp, Homo sapien
tccatccgttgactgccggctcagt

SEQ ID NO: 5298124 - DNA, 25 bp, Homo sapien
tgtgtcatctggatctgctaattca

SEQ ID NO: 5298125 - DNA, 25 bp, Homo sapien
tgtcatctggatctgctaattcatg

SEQ ID NO: 5298126 - DNA, 25 bp, Homo sapien
catctggatctgctaattcatgcat

SEQ ID NO: 5298127 - DNA, 25 bp, Homo sapien
cttgtgtgtcatctggatctgctaa

SEQ ID NO: 5298128 - DNA, 25 bp, Homo sapien
cgtcagatgaattgacggttgatcc

SEQ ID NO: 5298129 - DNA, 25 bp, Homo sapien
ggcgtcagatgaattgacggttgat

SEQ ID NO: 5298130 - DNA, 25 bp, Homo sapien
cagaagaggcgtcagatgaattgac

SEQ ID NO: 5298131 - DNA, 25 bp, Homo sapien
ctaagtcagaagaggcgtcagatga

SEQ ID NO: 5298132 - DNA, 25 bp, Homo sapien
ctgtaatagccgtcttcaagtttgt

SEQ ID NO: 5298133 - DNA, 25 bp, Homo sapien
tattctgtaatagccgtcttcaagt

SEQ ID NO: 5298134 - DNA, 25 bp, Homo sapien
ctgtattctgtaatagccgtcttca

SEQ ID NO: 5298135 - DNA, 25 bp, Homo sapien
caaaggctgagtgctggaaacactg

SEQ ID NO: 5298136 - DNA, 25 bp, Homo sapien
ccaaacactggggttatcagggagg

SEQ ID NO: 5298137 - DNA, 25 bp, Homo sapien
acactggggttatcagggagggcca

SEQ ID NO: 5298138 - DNA, 25 bp, Homo sapien
tggcccaaacactggggttatcagg

SEQ ID NO: 5298139 - DNA, 25 bp, Homo sapien
cctggcccaaacactggggttatca

SEQ ID NO: 5298140 - DNA, 25 bp, Homo sapien
gctaacttaatttggaattgtgacc

SEQ ID NO: 5298141 - DNA, 25 bp, Homo sapien
ttgtaatgctaacttaatttggaat

SEQ ID NO: 5298142 - DNA, 25 bp, Homo sapien
gtaatgctaacttaatttggaattg

SEQ ID NO: 5298143 - DNA, 25 bp, Homo sapien
aatgctaacttaatttggaattgtg

SEQ ID NO: 5298144 - DNA, 25 bp, Homo sapien
tcaaacctccgggacgagtgccaaa

SEQ ID NO: 5298145 - DNA, 25 bp, Homo sapien
tccagtcaaacctccgggacgagtg

SEQ ID NO: 5298146 - DNA, 25 bp, Homo sapien
gggacgagtgccaaatctaagtgtc

SEQ ID NO: 5298147 - DNA, 25 bp, Homo sapien
gccctgtgtctccaggtccagtcaa

SEQ ID NO: 5298148 - DNA, 25 bp, Homo sapien
agtctccctgagaggacttctggta

SEQ ID NO: 5298149 - DNA, 25 bp, Homo sapien
tgtagccttctccatttaattgcat

SEQ ID NO: 5298150 - DNA, 25 bp, Homo sapien
gacttctggtaaatgtagccttctc

SEQ ID NO: 5298151 - DNA, 25 bp, Homo sapien
gagaggacttctggtaaatgtagcc

SEQ ID NO: 5298152 - DNA, 25 bp, Homo sapien
aaaaaatataattgactcctatcct

SEQ ID NO: 5298153 - DNA, 25 bp, Homo sapien
ataattgactcctatcctcatcatc

SEQ ID NO: 5298154 - DNA, 25 bp, Homo sapien
aaaatataattgactcctatcctca

SEQ ID NO: 5298155 - DNA, 25 bp, Homo sapien
aatataattgactcctatcctcatc

SEQ ID NO: 5298156 - DNA, 25 bp, Homo sapien
tgcatcatcatgtggtggcgaatgg

SEQ ID NO: 5298157 - DNA, 25 bp, Homo sapien
gaccatgcacccttaaaggaagctt

SEQ ID NO: 5298158 - DNA, 25 bp, Homo sapien
catgtggtggcgaatggtgtcaaat

SEQ ID NO: 5298159 - DNA, 25 bp, Homo sapien
ggaccatgcacccttaaaggaagct

SEQ ID NO: 5298160 - DNA, 25 bp, Homo sapien
cattggctgctagacgggtaagagc

SEQ ID NO: 5298161 - DNA, 25 bp, Homo sapien
cacattggctgctagacgggtaaga

SEQ ID NO: 5298162 - DNA, 25 bp, Homo sapien
ttggctgctagacgggtaagagcaa

SEQ ID NO: 5298163 - DNA, 25 bp, Homo sapien
cccacattggctgctagacgggtaa

SEQ ID NO: 5298164 - DNA, 25 bp, Homo sapien
cacgcagtctataatgcctttgtat

SEQ ID NO: 5298165 - DNA, 25 bp, Homo sapien
acgcagtctataatgcctttgtatt

SEQ ID NO: 5298166 - DNA, 25 bp, Homo sapien
cagtctataatgcctttgtattgct

SEQ ID NO: 5298167 - DNA, 25 bp, Homo sapien
tctataatgcctttgtattgcttat

SEQ ID NO: 5298168 - DNA, 25 bp, Homo sapien
ggtgacttgtttgctggcatgctgc

SEQ ID NO: 5298169 - DNA, 25 bp, Homo sapien
tgacttgtttgctggcatgctgcac

SEQ ID NO: 5298170 - DNA, 25 bp, Homo sapien
gcggtgacttgtttgctggcatgct

SEQ ID NO: 5298171 - DNA, 25 bp, Homo sapien
ctgcggtgacttgtttgctggcatg

SEQ ID NO: 5298172 - DNA, 25 bp, Homo sapien
ttgacccgctggatgggcactacag

SEQ ID NO: 5298173 - DNA, 25 bp, Homo sapien
cgctggatgggcactacagccatct

SEQ ID NO: 5298174 - DNA, 25 bp, Homo sapien
gacccgctggatgggcactacagcc

SEQ ID NO: 5298175 - DNA, 25 bp, Homo sapien
cccgctggatgggcactacagccat

SEQ ID NO: 5298176 - DNA, 25 bp, Homo sapien
gctaagggacgggactgggctggga

SEQ ID NO: 5298177 - DNA, 25 bp, Homo sapien
ggctgctaagggacgggactgggct

SEQ ID NO: 5298178 - DNA, 25 bp, Homo sapien
aggctgctaagggacgggactgggc

SEQ ID NO: 5298179 - DNA, 25 bp, Homo sapien
ctgctaagggacgggactgggctgg

SEQ ID NO: 5298180 - DNA, 25 bp, Homo sapien
tttggccggcaaccctcaatttcat

SEQ ID NO: 5298181 - DNA, 25 bp, Homo sapien
ctttggccggcaaccctcaatttca

SEQ ID NO: 5298182 - DNA, 25 bp, Homo sapien
gctggttaactcttgactttctgga

SEQ ID NO: 5298183 - DNA, 25 bp, Homo sapien
tagtttctgatttcctgaacgctgg

SEQ ID NO: 5298184 - DNA, 25 bp, Homo sapien
gactttctggaacgttgtaccgcag

SEQ ID NO: 5298185 - DNA, 25 bp, Homo sapien
tggaacgttgtaccgcagcattact

SEQ ID NO: 5298186 - DNA, 25 bp, Homo sapien
gagagaatacgagtgtttatagagc

SEQ ID NO: 5298187 - DNA, 25 bp, Homo sapien
gaatacgagtgtttatagagccaca

SEQ ID NO: 5298188 - DNA, 25 bp, Homo sapien
cactggagagaatacgagtgtttat

SEQ ID NO: 5298189 - DNA, 25 bp, Homo sapien
acgagtgtttatagagccacagcag

SEQ ID NO: 5298190 - DNA, 25 bp, Homo sapien
cacttgtaccaggatgtttcgatgt

SEQ ID NO: 5298191 - DNA, 25 bp, Homo sapien
tggaatcccagttgtttatcgtttc

SEQ ID NO: 5298192 - DNA, 25 bp, Homo sapien
atttcccaagaagcaagaggttcag

SEQ ID NO: 5298193 - DNA, 25 bp, Homo sapien
tgctttgtagataagagcctgtggg

SEQ ID NO: 5298194 - DNA, 25 bp, Homo sapien
aggttgtttgagagcccaagtttga

SEQ ID NO: 5298195 - DNA, 25 bp, Homo sapien
tgaatcagttgcatgaataacaatt

SEQ ID NO: 5298196 - DNA, 25 bp, Homo sapien
gaatcagttgcatgaataacaattt

SEQ ID NO: 5298197 - DNA, 25 bp, Homo sapien
ctgaaggttgtttgagagcccaagt

SEQ ID NO: 5298198 - DNA, 25 bp, Homo sapien
ggaaaagggtttggatgatgcaggc

SEQ ID NO: 5298199 - DNA, 25 bp, Homo sapien
aaaagggtttggatgatgcaggcat

SEQ ID NO: 5298200 - DNA, 25 bp, Homo sapien
aagggtttggatgatgcaggcatcc

SEQ ID NO: 5298201 - DNA, 25 bp, Homo sapien
ggtttggatgatgcaggcatcccat

SEQ ID NO: 5298202 - DNA, 25 bp, Homo sapien
tggagtccttctggttaagaggaga

SEQ ID NO: 5298203 - DNA, 25 bp, Homo sapien
ttggagtccttctggttaagaggag

SEQ ID NO: 5298204 - DNA, 25 bp, Homo sapien
cgctgaggcgttgatcatagtaggc

SEQ ID NO: 5298205 - DNA, 25 bp, Homo sapien
catagtaggctttagtaggtttcac

SEQ ID NO: 5298206 - DNA, 25 bp, Homo sapien
tcagtgattagtgggatgcaaacag

SEQ ID NO: 5298207 - DNA, 25 bp, Homo sapien
tgcaaacaggtgattcgctgaggcg

SEQ ID NO: 5298208 - DNA, 25 bp, Homo sapien
cgctttcaacaattgggattctgtg

SEQ ID NO: 5298209 - DNA, 25 bp, Homo sapien
tcaacaattgggattctgtgtctct

SEQ ID NO: 5298210 - DNA, 25 bp, Homo sapien
gtctctctctgacttgagtatcttc

SEQ ID NO: 5298211 - DNA, 25 bp, Homo sapien
ctttcaacaattgggattctgtgtc

SEQ ID NO: 5298212 - DNA, 25 bp, Homo sapien
ttcccagacgggaagctgtgctgcc

SEQ ID NO: 5298213 - DNA, 25 bp, Homo sapien
agggaattcccagacgggaagctgt

SEQ ID NO: 5298214 - DNA, 25 bp, Homo sapien
tcccagacgggaagctgtgctgcct

SEQ ID NO: 5298215 - DNA, 25 bp, Homo sapien
cagggaattcccagacgggaagctg

SEQ ID NO: 5298216 - DNA, 25 bp, Homo sapien
gtgtctgtgacacttagagtccaag

SEQ ID NO: 5298217 - DNA, 25 bp, Homo sapien
caggaagtgggcttgtgcacgtgga

SEQ ID NO: 5298218 - DNA, 25 bp, Homo sapien
ctgtgcccgttcactgtgtctgtga

SEQ ID NO: 5298219 - DNA, 25 bp, Homo sapien
cacgtggaggcacagctttcaaaca

SEQ ID NO: 5298220 - DNA, 25 bp, Homo sapien
aacccccatatcagccctgaataat

SEQ ID NO: 5298221 - DNA, 25 bp, Homo sapien
acccccatatcagccctgaataatg

SEQ ID NO: 5298222 - DNA, 25 bp, Homo sapien
agtcttccatctcgtgtacgcctcc

SEQ ID NO: 5298223 - DNA, 25 bp, Homo sapien
cctcttcaggcgtaaggaaattctg

SEQ ID NO: 5298224 - DNA, 25 bp, Homo sapien
tcgtgtacgcctcctcttcaggcgt

SEQ ID NO: 5298225 - DNA, 25 bp, Homo sapien
caggcgtaaggaaattctgtatcat

SEQ ID NO: 5298226 - DNA, 25 bp, Homo sapien
gacaaattattctcagcgtctcttc

SEQ ID NO: 5298227 - DNA, 25 bp, Homo sapien
tacagtctgaaatacttggtcagcg

SEQ ID NO: 5298228 - DNA, 25 bp, Homo sapien
tattctcagcgtctcttctgtagcc

SEQ ID NO: 5298229 - DNA, 25 bp, Homo sapien
tcagcggtttgtaagagagacaaat

SEQ ID NO: 5298230 - DNA, 25 bp, Homo sapien
agtatcagccaatgggttttgcttc

SEQ ID NO: 5298231 - DNA, 25 bp, Homo sapien
cggcatttgattattagcactagtg

SEQ ID NO: 5298232 - DNA, 25 bp, Homo sapien
cagcaattcttgtgtcggcatttga

SEQ ID NO: 5298233 - DNA, 25 bp, Homo sapien
tcatagggttatcagagtatcagcc

SEQ ID NO: 5298234 - DNA, 25 bp, Homo sapien
ttccacaagatcataagcaggatct

SEQ ID NO: 5298235 - DNA, 25 bp, Homo sapien
aagatcataagcaggatcttgggtc

SEQ ID NO: 5298236 - DNA, 25 bp, Homo sapien
gcaattccacaagatcataagcagg

SEQ ID NO: 5298237 - DNA, 25 bp, Homo sapien
gggcaattccacaagatcataagca

SEQ ID NO: 5298238 - DNA, 25 bp, Homo sapien
tctttttcctgttaaccaggatgcc

SEQ ID NO: 5298239 - DNA, 25 bp, Homo sapien
ttttcctgttaaccaggatgcccat

SEQ ID NO: 5298240 - DNA, 25 bp, Homo sapien
tgctctttttcctgttaaccaggat

SEQ ID NO: 5298241 - DNA, 25 bp, Homo sapien
tttttcctgttaaccaggatgccca

SEQ ID NO: 5298242 - DNA, 25 bp, Homo sapien
tcaaatctcggtgagaaatcgagtg

SEQ ID NO: 5298243 - DNA, 25 bp, Homo sapien
caaatctcggtgagaaatcgagtgt

SEQ ID NO: 5298244 - DNA, 25 bp, Homo sapien
aatctcggtgagaaatcgagtgtgg

SEQ ID NO: 5298245 - DNA, 25 bp, Homo sapien
tctcggtgagaaatcgagtgtggaa

SEQ ID NO: 5298246 - DNA, 25 bp, Homo sapien
aattccatggcccttttcccactag

SEQ ID NO: 5298247 - DNA, 25 bp, Homo sapien
tgaacagattgtgctcccaattagc

SEQ ID NO: 5298248 - DNA, 25 bp, Homo sapien
gattatccttctggcagcattgact

SEQ ID NO: 5298249 - DNA, 25 bp, Homo sapien
gctggcgaatgaatactgagcctgg

SEQ ID NO: 5298250 - DNA, 25 bp, Homo sapien
ccgcaaggctcaggggtgcaccaga

SEQ ID NO: 5298251 - DNA, 25 bp, Homo sapien
gtggccagtaaggccgcaaggctca

SEQ ID NO: 5298252 - DNA, 25 bp, Homo sapien
gttgagcaggtggaatagtggccag

SEQ ID NO: 5298253 - DNA, 25 bp, Homo sapien
ggctcaggggtgcaccagaccctga

SEQ ID NO: 5298254 - DNA, 25 bp, Homo sapien
atttgggtactcaactatcctttca

SEQ ID NO: 5298255 - DNA, 25 bp, Homo sapien
ctatcctttcatggattgtattgtg

SEQ ID NO: 5298256 - DNA, 25 bp, Homo sapien
ggattggctctatgttcagtgccca

SEQ ID NO: 5298257 - DNA, 25 bp, Homo sapien
tcaactcagtaattcctggattggc

SEQ ID NO: 5298258 - DNA, 25 bp, Homo sapien
gggtctgtttgcatccactcttgga

SEQ ID NO: 5298259 - DNA, 25 bp, Homo sapien
gctagcattataagatgattctggg

SEQ ID NO: 5298260 - DNA, 25 bp, Homo sapien
atgattctgggtctgtttgcatcca

SEQ ID NO: 5298261 - DNA, 25 bp, Homo sapien
ctctgctagcattataagatgattc

SEQ ID NO: 5298262 - DNA, 25 bp, Homo sapien
tgtgagtgccaatggggtctttgta

SEQ ID NO: 5298263 - DNA, 25 bp, Homo sapien
ttatcgttatcttacagctgtactg

SEQ ID NO: 5298264 - DNA, 25 bp, Homo sapien
gggtctttgtaagacagagttatcg

SEQ ID NO: 5298265 - DNA, 25 bp, Homo sapien
ggacacatctgttcttatctctggg

SEQ ID NO: 5298266 - DNA, 25 bp, Homo sapien
tcctgtgcaattgaggaaggaacct

SEQ ID NO: 5298267 - DNA, 25 bp, Homo sapien
ggaagtccttcgagcctctggatct

SEQ ID NO: 5298268 - DNA, 25 bp, Homo sapien
tatcttgatggcttataagcctgaa

SEQ ID NO: 5298269 - DNA, 25 bp, Homo sapien
tataagcctgaagtaaggctcgtcc

SEQ ID NO: 5298270 - DNA, 25 bp, Homo sapien
taaggctcaaatggaaggcacccat

SEQ ID NO: 5298271 - DNA, 25 bp, Homo sapien
catgttatacaggatgtttaaagtg

SEQ ID NO: 5298272 - DNA, 25 bp, Homo sapien
caacagtaaggctcaaatggaaggc

SEQ ID NO: 5298273 - DNA, 25 bp, Homo sapien
tgatggcaacagtaaggctcaaatg

SEQ ID NO: 5298274 - DNA, 25 bp, Homo sapien
gctgtctttgactttctcagggcct

SEQ ID NO: 5298275 - DNA, 25 bp, Homo sapien
ctttggacttggtcttccgaaagcg

SEQ ID NO: 5298276 - DNA, 25 bp, Homo sapien
ccgaaagcgtgctcttttctgaatg

SEQ ID NO: 5298277 - DNA, 25 bp, Homo sapien
tcttggtcacaacattcaactttgg

SEQ ID NO: 5298278 - DNA, 25 bp, Homo sapien
tgtaaagttctggtattgttggtca

SEQ ID NO: 5298279 - DNA, 25 bp, Homo sapien
ctgtaaagttctggtattgttggtc

SEQ ID NO: 5298280 - DNA, 25 bp, Homo sapien
gtaaagttctggtattgttggtcat

SEQ ID NO: 5298281 - DNA, 25 bp, Homo sapien
gctgcctgatgactataacctggtg

SEQ ID NO: 5298282 - DNA, 25 bp, Homo sapien
taactggtgactgtggcttagtgac

SEQ ID NO: 5298283 - DNA, 25 bp, Homo sapien
cgaatagagactttgtggtggtaac

SEQ ID NO: 5298284 - DNA, 25 bp, Homo sapien
gacttgatgactagttgctgtgacc

SEQ ID NO: 5298285 - DNA, 25 bp, Homo sapien
tgaatgtgaactggtaataggtgac

SEQ ID NO: 5298286 - DNA, 25 bp, Homo sapien
gactgaactggtgaccgatgactgt

SEQ ID NO: 5298287 - DNA, 25 bp, Homo sapien
tgaatggagactttggtgtggcact

SEQ ID NO: 5298288 - DNA, 25 bp, Homo sapien
tgactgcggcttggatacccaaagg

SEQ ID NO: 5298289 - DNA, 25 bp, Homo sapien
gtccatcagctggtttaagaaccat

SEQ ID NO: 5298290 - DNA, 25 bp, Homo sapien
gaaaagtagtagtatgagaaacaaa

SEQ ID NO: 5298291 - DNA, 25 bp, Homo sapien
tgctcttttccaataggagaatcca

SEQ ID NO: 5298292 - DNA, 25 bp, Homo sapien
tgccagtaagctaagactaggaaga

SEQ ID NO: 5298293 - DNA, 25 bp, Homo sapien
tgctcatgtacatagacaatgtcat

SEQ ID NO: 5298294 - DNA, 25 bp, Homo sapien
tcctgcttgatctctgacgccactt

SEQ ID NO: 5298295 - DNA, 25 bp, Homo sapien
atcctgcttgatctctgacgccact

SEQ ID NO: 5298296 - DNA, 25 bp, Homo sapien
ttatcctgcttgatctctgacgcca

SEQ ID NO: 5298297 - DNA, 25 bp, Homo sapien
tatcctgcttgatctctgacgccac

SEQ ID NO: 5298298 - DNA, 25 bp, Homo sapien
gggaccgcctctctgttggaatgtt

SEQ ID NO: 5298299 - DNA, 25 bp, Homo sapien
gcctctctgttggaatgttacattt

SEQ ID NO: 5298300 - DNA, 25 bp, Homo sapien
gaccgcctctctgttggaatgttac

SEQ ID NO: 5298301 - DNA, 25 bp, Homo sapien
ccgcctctctgttggaatgttacat

SEQ ID NO: 5298302 - DNA, 25 bp, Homo sapien
tgtctgttcaccttgcttgggctga

SEQ ID NO: 5298303 - DNA, 25 bp, Homo sapien
ggcaccagctttaaccttacttgag

SEQ ID NO: 5298304 - DNA, 25 bp, Homo sapien
gcaacaatccgcaacctggatgtag

SEQ ID NO: 5298305 - DNA, 25 bp, Homo sapien
cttgggctgatgtcctgcatgggca

SEQ ID NO: 5298306 - DNA, 25 bp, Homo sapien
caagacctgggacatagttaattac

SEQ ID NO: 5298307 - DNA, 25 bp, Homo sapien
caagcagttactaggtatgtagcag

SEQ ID NO: 5298308 - DNA, 25 bp, Homo sapien
tgatgacaatagtgatggagaagga

SEQ ID NO: 5298309 - DNA, 25 bp, Homo sapien
tatcgcaggtgcctaacacaagacc

SEQ ID NO: 5298310 - DNA, 25 bp, Homo sapien
ttatctttcccgcattttgttctag

SEQ ID NO: 5298311 - DNA, 25 bp, Homo sapien
atctttcccgcattttgttctaggc

SEQ ID NO: 5298312 - DNA, 25 bp, Homo sapien
ctaggctaaacctgtttgagcattc

SEQ ID NO: 5298313 - DNA, 25 bp, Homo sapien
taaacctgtttgagcattcttcaaa

SEQ ID NO: 5298314 - DNA, 25 bp, Homo sapien
tccctgtgagtttgacattctccat

SEQ ID NO: 5298315 - DNA, 25 bp, Homo sapien
ggtgtggtcaataagagaaatttgg

SEQ ID NO: 5298316 - DNA, 25 bp, Homo sapien
gaggataccaaagagggccagcagt

SEQ ID NO: 5298317 - DNA, 25 bp, Homo sapien
tatggatgtgatgccgaaaacaagg

SEQ ID NO: 5298318 - DNA, 25 bp, Homo sapien
cagtaaatgaggtagtgacttcaga

SEQ ID NO: 5298319 - DNA, 25 bp, Homo sapien
ggccttatctggcatagggtgtccg

SEQ ID NO: 5298320 - DNA, 25 bp, Homo sapien
tctggcatagggtgtccgttttgca

SEQ ID NO: 5298321 - DNA, 25 bp, Homo sapien
gacaaaattgagtaattctggcttc

SEQ ID NO: 5298322 - DNA, 25 bp, Homo sapien
ggtgtccgttttgcactctctcttt

SEQ ID NO: 5298323 - DNA, 25 bp, Homo sapien
tcacagtccataagaggacttcggg

SEQ ID NO: 5298324 - DNA, 25 bp, Homo sapien
gaactcttgttcgttattatcattg

SEQ ID NO: 5298325 - DNA, 25 bp, Homo sapien
gggatctcatgcagtaacgtctttc

SEQ ID NO: 5298326 - DNA, 25 bp, Homo sapien
tcagtggatcttgccgaactcttgt

SEQ ID NO: 5298327 - DNA, 25 bp, Homo sapien
catcactattgtcgccaaatgaggc

SEQ ID NO: 5298328 - DNA, 25 bp, Homo sapien
taaatgcggtcacacatcactattg

SEQ ID NO: 5298329 - DNA, 25 bp, Homo sapien
tattgtcgccaaatgaggcttggca

SEQ ID NO: 5298330 - DNA, 25 bp, Homo sapien
ggtcacacatcactattgtcgccaa

SEQ ID NO: 5298331 - DNA, 25 bp, Homo sapien
gaatgctagtttcatgtaacagttc

SEQ ID NO: 5298332 - DNA, 25 bp, Homo sapien
gacgaatgtaactctaccacttttc

SEQ ID NO: 5298333 - DNA, 25 bp, Homo sapien
ttctctgtttgcaccaaatttgggc

SEQ ID NO: 5298334 - DNA, 25 bp, Homo sapien
tcttctccgaagtctccaggatgac

SEQ ID NO: 5298335 - DNA, 25 bp, Homo sapien
tgatgccacccacaccagcagcaca

SEQ ID NO: 5298336 - DNA, 25 bp, Homo sapien
ctgatgccacccacaccagcagcac

SEQ ID NO: 5298337 - DNA, 25 bp, Homo sapien
ccacccacaccagcagcacagtggc

SEQ ID NO: 5298338 - DNA, 25 bp, Homo sapien
cccacaccagcagcacagtggccat

SEQ ID NO: 5298339 - DNA, 25 bp, Homo sapien
gattctcatggaccccactgccatg

SEQ ID NO: 5298340 - DNA, 25 bp, Homo sapien
tcacttcaaagagaaggaccagatt

SEQ ID NO: 5298341 - DNA, 25 bp, Homo sapien
ttttccacagaggtgaatcacttca

SEQ ID NO: 5298342 - DNA, 25 bp, Homo sapien
ttccacagaggtgaatcacttcaaa

SEQ ID NO: 5298343 - DNA, 25 bp, Homo sapien
tgaacattggatgagtctatactag

SEQ ID NO: 5298344 - DNA, 25 bp, Homo sapien
tggtgcagacactcttggagttaca

SEQ ID NO: 5298345 - DNA, 25 bp, Homo sapien
tggagttacacactagtttaaaatg

SEQ ID NO: 5298346 - DNA, 25 bp, Homo sapien
caccctcatcattggtgcagacact

SEQ ID NO: 5298347 - DNA, 25 bp, Homo sapien
ttcttttatgaggaacgtcacggaa

SEQ ID NO: 5298348 - DNA, 25 bp, Homo sapien
tttatgaggaacgtcacggaatcaa

SEQ ID NO: 5298349 - DNA, 25 bp, Homo sapien
tcttttatgaggaacgtcacggaat

SEQ ID NO: 5298350 - DNA, 25 bp, Homo sapien
cttttatgaggaacgtcacggaatc

SEQ ID NO: 5298351 - DNA, 25 bp, Homo sapien
ttctggccttgagaatcaccttctg

SEQ ID NO: 5298352 - DNA, 25 bp, Homo sapien
gagaatcaccttctgtttattgtag

SEQ ID NO: 5298353 - DNA, 25 bp, Homo sapien
agggcaaactgacagccccaggcac

SEQ ID NO: 5298354 - DNA, 25 bp, Homo sapien
tgtttattgtagattgagggcaaac

SEQ ID NO: 5298355 - DNA, 25 bp, Homo sapien
taatctttactaggcattaaccaag

SEQ ID NO: 5298356 - DNA, 25 bp, Homo sapien
tgaccttgaggtacaaagaaagccc

SEQ ID NO: 5298357 - DNA, 25 bp, Homo sapien
tatatgcataatggatcacatatgc

SEQ ID NO: 5298358 - DNA, 25 bp, Homo sapien
caagtggtagacaatgaaaggatcc

SEQ ID NO: 5298359 - DNA, 25 bp, Homo sapien
acaacctttgcaccatgacagcccg

SEQ ID NO: 5298360 - DNA, 25 bp, Homo sapien
ttttcccacaacctttgcaccatga

SEQ ID NO: 5298361 - DNA, 25 bp, Homo sapien
acagcccggccacacttatctctgc

SEQ ID NO: 5298362 - DNA, 25 bp, Homo sapien
tttgcaccatgacagcccggccaca

SEQ ID NO: 5298363 - DNA, 25 bp, Homo sapien
gctgtaggtccagtacagctgaaca

SEQ ID NO: 5298364 - DNA, 25 bp, Homo sapien
actggccctgttgctagaggttgac

SEQ ID NO: 5298365 - DNA, 25 bp, Homo sapien
ccctgttgctagaggttgacgggtt

SEQ ID NO: 5298366 - DNA, 25 bp, Homo sapien
tgattcttcactggccctgttgcta

SEQ ID NO: 5298367 - DNA, 25 bp, Homo sapien
gctggccacaactgactgcccatac

SEQ ID NO: 5298368 - DNA, 25 bp, Homo sapien
ggatgaccagttcattaggacaggg

SEQ ID NO: 5298369 - DNA, 25 bp, Homo sapien
gatatgatgtaaggagtctatccct

SEQ ID NO: 5298370 - DNA, 25 bp, Homo sapien
ccacttttgcctggaggatatgatg

SEQ ID NO: 5298371 - DNA, 25 bp, Homo sapien
tcttaaatccgtgagctttgtctgt

SEQ ID NO: 5298372 - DNA, 25 bp, Homo sapien
taaggccataaacgctcctccctgt

SEQ ID NO: 5298373 - DNA, 25 bp, Homo sapien
tggtaaacagactcttgccatgctg

SEQ ID NO: 5298374 - DNA, 25 bp, Homo sapien
taccctgtgcttcattgacataagg

SEQ ID NO: 5298375 - DNA, 25 bp, Homo sapien
taagctgaaccctctactccattct

SEQ ID NO: 5298376 - DNA, 25 bp, Homo sapien
ccttgattcattagacagatagatg

SEQ ID NO: 5298377 - DNA, 25 bp, Homo sapien
tcatcctgccttaatagcaagtaag

SEQ ID NO: 5298378 - DNA, 25 bp, Homo sapien
gcaaggcaccttgattcattagaca

SEQ ID NO: 5298379 - DNA, 25 bp, Homo sapien
gcctcttgttagggacagagcaagg

SEQ ID NO: 5298380 - DNA, 25 bp, Homo sapien
ttcatttcccggaccataagcattt

SEQ ID NO: 5298381 - DNA, 25 bp, Homo sapien
tgattaatttcatttcccggaccat

SEQ ID NO: 5298382 - DNA, 25 bp, Homo sapien
taatttcatttcccggaccataagc

SEQ ID NO: 5298383 - DNA, 25 bp, Homo sapien
gattaatttcatttcccggaccata

SEQ ID NO: 5298384 - DNA, 25 bp, Homo sapien
tgtggtcccaaactcggtgaactct

SEQ ID NO: 5298385 - DNA, 25 bp, Homo sapien
tggtcccaaactcggtgaactctgc

SEQ ID NO: 5298386 - DNA, 25 bp, Homo sapien
gtcactgaggactccacggcatctg

SEQ ID NO: 5298387 - DNA, 25 bp, Homo sapien
tccacggcatctgtaaggttcatct

SEQ ID NO: 5298388 - DNA, 25 bp, Homo sapien
tacaaaggcaatgtaccagcattag

SEQ ID NO: 5298389 - DNA, 25 bp, Homo sapien
tatgaatggtaagtgagaagttcac

SEQ ID NO: 5298390 - DNA, 25 bp, Homo sapien
gaagttcactaaacctatgctccct

SEQ ID NO: 5298391 - DNA, 25 bp, Homo sapien
tgtaccagcattagaaaacttgtat

SEQ ID NO: 5298392 - DNA, 25 bp, Homo sapien
ctcctgctttaaggcccaactcaaa

SEQ ID NO: 5298393 - DNA, 25 bp, Homo sapien
tctggttgttcctctcttataacag

SEQ ID NO: 5298394 - DNA, 25 bp, Homo sapien
cttataacagatattctattttgca

SEQ ID NO: 5298395 - DNA, 25 bp, Homo sapien
tgttatgacttttaaactctggttg

SEQ ID NO: 5298396 - DNA, 25 bp, Homo sapien
tacccacatcttaatgttatgactt

SEQ ID NO: 5298397 - DNA, 25 bp, Homo sapien
cctgtagcttgttagccccttcatg

SEQ ID NO: 5298398 - DNA, 25 bp, Homo sapien
gtccctgtagcttgttagccccttc

SEQ ID NO: 5298399 - DNA, 25 bp, Homo sapien
tgtagcttgttagccccttcatggt

SEQ ID NO: 5298400 - DNA, 25 bp, Homo sapien
tgagggtctcactcaggtccctgta

SEQ ID NO: 5298401 - DNA, 25 bp, Homo sapien
gcagacacaggcagaagtctctggt

SEQ ID NO: 5298402 - DNA, 25 bp, Homo sapien
tctggttgagtaaaaggcccagtgt

SEQ ID NO: 5298403 - DNA, 25 bp, Homo sapien
ggcccagtgtgtgggcttgcaaaca

SEQ ID NO: 5298404 - DNA, 25 bp, Homo sapien
ggcagaagtctctggttgagtaaaa

SEQ ID NO: 5298405 - DNA, 25 bp, Homo sapien
taagggtactatgctcccctctggc

SEQ ID NO: 5298406 - DNA, 25 bp, Homo sapien
catgataaatactacctggttacca

SEQ ID NO: 5298407 - DNA, 25 bp, Homo sapien
ttactcaaggtccacgggcccttca

SEQ ID NO: 5298408 - DNA, 25 bp, Homo sapien
acttgttgctctactccactgtgac

SEQ ID NO: 5298409 - DNA, 25 bp, Homo sapien
gttaccagatacttagcagcaccag

SEQ ID NO: 5298410 - DNA, 25 bp, Homo sapien
gttgatctgtttgagcgatttatgc

SEQ ID NO: 5298411 - DNA, 25 bp, Homo sapien
tttgtcattaattgtaaagttacca

SEQ ID NO: 5298412 - DNA, 25 bp, Homo sapien
tttgtgacaatggttgatctgtttg

SEQ ID NO: 5298413 - DNA, 25 bp, Homo sapien
tggttcagagggtttagtttctcca

SEQ ID NO: 5298414 - DNA, 25 bp, Homo sapien
cagagggtttagtttctccacccat

SEQ ID NO: 5298415 - DNA, 25 bp, Homo sapien
tcagagggtttagtttctccaccca

SEQ ID NO: 5298416 - DNA, 25 bp, Homo sapien
gtttccagcattcctatctccttta

SEQ ID NO: 5298417 - DNA, 25 bp, Homo sapien
tagcatccacacttacttcctttcc

SEQ ID NO: 5298418 - DNA, 25 bp, Homo sapien
cttcctttcccagattaaatcccat

SEQ ID NO: 5298419 - DNA, 25 bp, Homo sapien
ctttagcatccacacttacttcctt

SEQ ID NO: 5298420 - DNA, 25 bp, Homo sapien
taaagatgactttatgccttgcctt

SEQ ID NO: 5298421 - DNA, 25 bp, Homo sapien
tctcgatgaaagtgttttagcctaa

SEQ ID NO: 5298422 - DNA, 25 bp, Homo sapien
cagcctctatcttcacgcgagcagg

SEQ ID NO: 5298423 - DNA, 25 bp, Homo sapien
cgcgagcagggggactactattttc

SEQ ID NO: 5298424 - DNA, 25 bp, Homo sapien
caacaatttctatgagtgtccagga

SEQ ID NO: 5298425 - DNA, 25 bp, Homo sapien
ttcacaagcatactgaggacatggc

SEQ ID NO: 5298426 - DNA, 25 bp, Homo sapien
ggcttccctctagtgcatgcatgct

SEQ ID NO: 5298427 - DNA, 25 bp, Homo sapien
cacagatgagttatatgtccacaac

SEQ ID NO: 5298428 - DNA, 25 bp, Homo sapien
gtatgtgactagaacaatggctgcc

SEQ ID NO: 5298429 - DNA, 25 bp, Homo sapien
tctccagagtgagggtaaaatgtcc

SEQ ID NO: 5298430 - DNA, 25 bp, Homo sapien
tatgttctgccttcaccactgtgta

SEQ ID NO: 5298431 - DNA, 25 bp, Homo sapien
tgagacaaactcaaagatggccttg

SEQ ID NO: 5298432 - DNA, 25 bp, Homo sapien
gttctctcgtcccttaaattctaca

SEQ ID NO: 5298433 - DNA, 25 bp, Homo sapien
tcttgaagttctctcgtcccttaaa

SEQ ID NO: 5298434 - DNA, 25 bp, Homo sapien
tgaagttctctcgtcccttaaattc

SEQ ID NO: 5298435 - DNA, 25 bp, Homo sapien
tctctcgtcccttaaattctacaac

SEQ ID NO: 5298436 - DNA, 25 bp, Homo sapien
tttatttctaaagatgaggtttcca

SEQ ID NO: 5298437 - DNA, 25 bp, Homo sapien
tccagtatttttatttctaaagatg

SEQ ID NO: 5298438 - DNA, 25 bp, Homo sapien
agtatttttatttctaaagatgagg

SEQ ID NO: 5298439 - DNA, 25 bp, Homo sapien
ccagtatttttatttctaaagatga

SEQ ID NO: 5298440 - DNA, 25 bp, Homo sapien
ggatgacgccttgtcgccgaagcaa

SEQ ID NO: 5298441 - DNA, 25 bp, Homo sapien
ccttgtcgccgaagcaagctgggtt

SEQ ID NO: 5298442 - DNA, 25 bp, Homo sapien
aagcaagctgggtttcctgtttgtt

SEQ ID NO: 5298443 - DNA, 25 bp, Homo sapien
cagaaaatgatatctggatgacgcc

SEQ ID NO: 5298444 - DNA, 25 bp, Homo sapien
cctacacaattaccgcatgcagtct

SEQ ID NO: 5298445 - DNA, 25 bp, Homo sapien
agcagataactgcttccaggatccc

SEQ ID NO: 5298446 - DNA, 25 bp, Homo sapien
gtctgctttactgtcccacaaaaga

SEQ ID NO: 5298447 - DNA, 25 bp, Homo sapien
aggcttgtcagcaccattgtcaagg

SEQ ID NO: 5298448 - DNA, 25 bp, Homo sapien
gagtaagcctgactgtggaatagga

SEQ ID NO: 5298449 - DNA, 25 bp, Homo sapien
gcctgactgtggaataggagccttt

SEQ ID NO: 5298450 - DNA, 25 bp, Homo sapien
ccttgagtaagcctgactgtggaat

SEQ ID NO: 5298451 - DNA, 25 bp, Homo sapien
gactgtggaataggagcctttacac

SEQ ID NO: 5298452 - DNA, 25 bp, Homo sapien
tagcgttaggagtatcagtgattgg

SEQ ID NO: 5298453 - DNA, 25 bp, Homo sapien
tgtgatagtaatagcgttaggagta

SEQ ID NO: 5298454 - DNA, 25 bp, Homo sapien
aaccagggatgctgcaattccagaa

SEQ ID NO: 5298455 - DNA, 25 bp, Homo sapien
ggatgctgcaattccagaataaagc

SEQ ID NO: 5298456 - DNA, 25 bp, Homo sapien
aacagtggtagcattgtcaaagcaa

SEQ ID NO: 5298457 - DNA, 25 bp, Homo sapien
tggacccatagctaccgccagggct

SEQ ID NO: 5298458 - DNA, 25 bp, Homo sapien
ctttttgatgtgaaagcagtgcatt

SEQ ID NO: 5298459 - DNA, 25 bp, Homo sapien
ttcataatcctttgaactggaccca

SEQ ID NO: 5298460 - DNA, 25 bp, Homo sapien
gaaagcagtgcatttcataatcctt

SEQ ID NO: 5298461 - DNA, 25 bp, Homo sapien
tgagagtagtcctggatctttttat

SEQ ID NO: 5298462 - DNA, 25 bp, Homo sapien
ctgagagtagtcctggatcttttta

SEQ ID NO: 5298463 - DNA, 25 bp, Homo sapien
gagagtagtcctggatctttttatt

SEQ ID NO: 5298464 - DNA, 25 bp, Homo sapien
gtgtgatcccacgacgtcctgagaa

SEQ ID NO: 5298465 - DNA, 25 bp, Homo sapien
gaaatcagtctgaacagtgtgatcc

SEQ ID NO: 5298466 - DNA, 25 bp, Homo sapien
gctgtgcctgttggaaatcagtctg

SEQ ID NO: 5298467 - DNA, 25 bp, Homo sapien
agtgtgatcccacgacgtcctgaga

SEQ ID NO: 5298468 - DNA, 25 bp, Homo sapien
cataatgacacctacttttagcaaa

SEQ ID NO: 5298469 - DNA, 25 bp, Homo sapien
aatttataaacattagcggtatatc

SEQ ID NO: 5298470 - DNA, 25 bp, Homo sapien
ggtatatctttatcctctcttagcc

SEQ ID NO: 5298471 - DNA, 25 bp, Homo sapien
caaagaggcttttgagaggtaagga

SEQ ID NO: 5298472 - DNA, 25 bp, Homo sapien
ctcttttgaacatttgtcagaggaa

SEQ ID NO: 5298473 - DNA, 25 bp, Homo sapien
taattgcattgctggggtttagctg

SEQ ID NO: 5298474 - DNA, 25 bp, Homo sapien
agtatacatgtaatacaagacaaat

SEQ ID NO: 5298475 - DNA, 25 bp, Homo sapien
caagacaaattgtggattgggtcca

SEQ ID NO: 5298476 - DNA, 25 bp, Homo sapien
tcttgaactaccattctcatctttc

SEQ ID NO: 5298477 - DNA, 25 bp, Homo sapien
acttatacaaattatgcaggccgca

SEQ ID NO: 5298478 - DNA, 25 bp, Homo sapien
gcaggccgcattcttgaactaccat

SEQ ID NO: 5298479 - DNA, 25 bp, Homo sapien
tatacaaattatgcaggccgcattc

SEQ ID NO: 5298480 - DNA, 25 bp, Homo sapien
ccaaattctcaccattctttcggag

SEQ ID NO: 5298481 - DNA, 25 bp, Homo sapien
gcctccctacagctttgcacatgga

SEQ ID NO: 5298482 - DNA, 25 bp, Homo sapien
ggagaaacaagccaagcctccctac

SEQ ID NO: 5298483 - DNA, 25 bp, Homo sapien
acagctttgcacatggaattctggg

SEQ ID NO: 5298484 - DNA, 25 bp, Homo sapien
gctgctgcgctgtccatcattgtca

SEQ ID NO: 5298485 - DNA, 25 bp, Homo sapien
cgagttggacacacattattagcac

SEQ ID NO: 5298486 - DNA, 25 bp, Homo sapien
tactgtgtctcttatcgagttggac

SEQ ID NO: 5298487 - DNA, 25 bp, Homo sapien
tagtaacagaagatagcagttctct

SEQ ID NO: 5298488 - DNA, 25 bp, Homo sapien
atatgggaactctgctgaattcttt

SEQ ID NO: 5298489 - DNA, 25 bp, Homo sapien
tatatgggaactctgctgaattctt

SEQ ID NO: 5298490 - DNA, 25 bp, Homo sapien
tctgccaagcagcaactgcaagagc

SEQ ID NO: 5298491 - DNA, 25 bp, Homo sapien
ttaccagcagacactcaaagcccat

SEQ ID NO: 5298492 - DNA, 25 bp, Homo sapien
catgtgggtcaatgttaccagcaga

SEQ ID NO: 5298493 - DNA, 25 bp, Homo sapien
ttaaatccgcaaagagagagatctc

SEQ ID NO: 5298494 - DNA, 25 bp, Homo sapien
taaccttctgttcacattattatgg

SEQ ID NO: 5298495 - DNA, 25 bp, Homo sapien
aaatggtcatagcttcatggttgtg

SEQ ID NO: 5298496 - DNA, 25 bp, Homo sapien
gagttctaaccttctgttcacatta

SEQ ID NO: 5298497 - DNA, 25 bp, Homo sapien
cttcatggttgtggcgtctgatttt

SEQ ID NO: 5298498 - DNA, 25 bp, Homo sapien
gccacgctgtcacaagctcctttaa

SEQ ID NO: 5298499 - DNA, 25 bp, Homo sapien
actgcaaagacgacccattgtgaag

SEQ ID NO: 5298500 - DNA, 25 bp, Homo sapien
gctcctttaaaatctcactagttgg

SEQ ID NO: 5298501 - DNA, 25 bp, Homo sapien
tgtgaagcctggcttagccacgctg

SEQ ID NO: 5298502 - DNA, 25 bp, Homo sapien
atacacactacttgggttaacagtt

SEQ ID NO: 5298503 - DNA, 25 bp, Homo sapien
ttatacacactacttgggttaacag

SEQ ID NO: 5298504 - DNA, 25 bp, Homo sapien
tatacacactacttgggttaacagt

SEQ ID NO: 5298505 - DNA, 25 bp, Homo sapien
caatgtattagacccaagtaggtgt

SEQ ID NO: 5298506 - DNA, 25 bp, Homo sapien
tcattcctcactcaatgtattagac

SEQ ID NO: 5298507 - DNA, 25 bp, Homo sapien
cctcactcaatgtattagacccaag

SEQ ID NO: 5298508 - DNA, 25 bp, Homo sapien
tagacccaagtaggtgttcacagtc

SEQ ID NO: 5298509 - DNA, 25 bp, Homo sapien
caaaatgcttgtaattcacagtcat

SEQ ID NO: 5298510 - DNA, 25 bp, Homo sapien
attcaaaatgcttgtaattcacagt

SEQ ID NO: 5298511 - DNA, 25 bp, Homo sapien
tgagctttctccaaattcaaaatgc

SEQ ID NO: 5298512 - DNA, 25 bp, Homo sapien
taaaatgagctttctccaaattcaa

SEQ ID NO: 5298513 - DNA, 25 bp, Homo sapien
tctagtcttttatacaaaagactca

SEQ ID NO: 5298514 - DNA, 25 bp, Homo sapien
ttctcttccaatccattttctagtc

SEQ ID NO: 5298515 - DNA, 25 bp, Homo sapien
ttatttacaactttctcttccaatc

SEQ ID NO: 5298516 - DNA, 25 bp, Homo sapien
ctcttccaatccattttctagtctt

SEQ ID NO: 5298517 - DNA, 25 bp, Homo sapien
ctaatctaatcaaagaggcgaccga

SEQ ID NO: 5298518 - DNA, 25 bp, Homo sapien
ggaaagcttttccactgttggagca

SEQ ID NO: 5298519 - DNA, 25 bp, Homo sapien
gaggcgaccgaattaggcttctgtt

SEQ ID NO: 5298520 - DNA, 25 bp, Homo sapien
atgaaaattatcctcttcaagatct

SEQ ID NO: 5298521 - DNA, 25 bp, Homo sapien
taatagccccgaacttacagatctg

SEQ ID NO: 5298522 - DNA, 25 bp, Homo sapien
aggttctatcacctgagacaacttt

SEQ ID NO: 5298523 - DNA, 25 bp, Homo sapien
tttctccacatagcctctaatagcc

SEQ ID NO: 5298524 - DNA, 25 bp, Homo sapien
cttacagatctgatagccaggttct

SEQ ID NO: 5298525 - DNA, 25 bp, Homo sapien
agtttgacagcttgtacgctcattg

SEQ ID NO: 5298526 - DNA, 25 bp, Homo sapien
ggtaagttaagacagaacgatcagt

SEQ ID NO: 5298527 - DNA, 25 bp, Homo sapien
ggtaaaatgttccacgtgattggct

SEQ ID NO: 5298528 - DNA, 25 bp, Homo sapien
catcagggactgctttattcgaaag

SEQ ID NO: 5298529 - DNA, 25 bp, Homo sapien
gaattagccagatatctaaaggaac

SEQ ID NO: 5298530 - DNA, 25 bp, Homo sapien
tatctaaaggaacctctggagttat

SEQ ID NO: 5298531 - DNA, 25 bp, Homo sapien
gaacctctggagttattaagcttca

SEQ ID NO: 5298532 - DNA, 25 bp, Homo sapien
cttctcttgattctgaattagccag

SEQ ID NO: 5298533 - DNA, 25 bp, Homo sapien
ctgtagttgctccaattcattagaa

SEQ ID NO: 5298534 - DNA, 25 bp, Homo sapien
cagcctatcttgcagttttctccaa

SEQ ID NO: 5298535 - DNA, 25 bp, Homo sapien
cattagaaagagttatgaaagcact

SEQ ID NO: 5298536 - DNA, 25 bp, Homo sapien
ctttttggcagcctatcttgcagtt

SEQ ID NO: 5298537 - DNA, 25 bp, Homo sapien
caaaatcttcagttgatggtaagag

SEQ ID NO: 5298538 - DNA, 25 bp, Homo sapien
cgagtaggtttgtataaaggctaca

SEQ ID NO: 5298539 - DNA, 25 bp, Homo sapien
ttggagatcagaccattcgagtagg

SEQ ID NO: 5298540 - DNA, 25 bp, Homo sapien
cttcagttgatggtaagagaacaac

SEQ ID NO: 5298541 - DNA, 25 bp, Homo sapien
acctttgccagtaagtgcgtcatta

SEQ ID NO: 5298542 - DNA, 25 bp, Homo sapien
tctcagggacatccacctttgccag

SEQ ID NO: 5298543 - DNA, 25 bp, Homo sapien
ccagtaagtgcgtcattaggccagt

SEQ ID NO: 5298544 - DNA, 25 bp, Homo sapien
agtgcgtcattaggccagtgtcaaa

SEQ ID NO: 5298545 - DNA, 25 bp, Homo sapien
tatgagattaccatactccttttct

SEQ ID NO: 5298546 - DNA, 25 bp, Homo sapien
tctctgtttatgagattaccatact

SEQ ID NO: 5298547 - DNA, 25 bp, Homo sapien
tgaaattaggtctctgtttatgaga

SEQ ID NO: 5298548 - DNA, 25 bp, Homo sapien
ctgtacttggtttgaaattaggtct

SEQ ID NO: 5298549 - DNA, 25 bp, Homo sapien
tattcatgagtgttattaaattgcc

SEQ ID NO: 5298550 - DNA, 25 bp, Homo sapien
attaaaaaactggcatccagatgta

SEQ ID NO: 5298551 - DNA, 25 bp, Homo sapien
aatcctattaatacgtaatccagag

SEQ ID NO: 5298552 - DNA, 25 bp, Homo sapien
aaatgtgcttacaatgtcctcagac

SEQ ID NO: 5298553 - DNA, 25 bp, Homo sapien
gtagcatcctaagaaaccgcctttg

SEQ ID NO: 5298554 - DNA, 25 bp, Homo sapien
cctaaggatgatactcaggctggat

SEQ ID NO: 5298555 - DNA, 25 bp, Homo sapien
atctgaatcttcactagaggaggtg

SEQ ID NO: 5298556 - DNA, 25 bp, Homo sapien
gtcaaagcaacattccctaaggatg

SEQ ID NO: 5298557 - DNA, 25 bp, Homo sapien
gattctaaacgcaggtataatgcca

SEQ ID NO: 5298558 - DNA, 25 bp, Homo sapien
gacttcttgtgtcactagttcgtgg

SEQ ID NO: 5298559 - DNA, 25 bp, Homo sapien
ttcacataagcttttggattctaaa

SEQ ID NO: 5298560 - DNA, 25 bp, Homo sapien
gcaatttgaatacaggatggcagga

SEQ ID NO: 5298561 - DNA, 25 bp, Homo sapien
gatctatgtttgcaagtctgtttcc

SEQ ID NO: 5298562 - DNA, 25 bp, Homo sapien
aagtggaattgggaatacagggtat

SEQ ID NO: 5298563 - DNA, 25 bp, Homo sapien
tacttgatctatgtttgcaagtctg

SEQ ID NO: 5298564 - DNA, 25 bp, Homo sapien
ttgcaagtctgtttccactaagaag

SEQ ID NO: 5298565 - DNA, 25 bp, Homo sapien
ttgagatctcatagtgccacgtata

SEQ ID NO: 5298566 - DNA, 25 bp, Homo sapien
tttatttctacatagagtgtatcac

SEQ ID NO: 5298567 - DNA, 25 bp, Homo sapien
catagagtgtatcactgtatgtttg

SEQ ID NO: 5298568 - DNA, 25 bp, Homo sapien
catagtgccacgtataatttatttc

SEQ ID NO: 5298569 - DNA, 25 bp, Homo sapien
ggcagatattttgaaggttgtgctg

SEQ ID NO: 5298570 - DNA, 25 bp, Homo sapien
tcaggcagatattttgaaggttgtg

SEQ ID NO: 5298571 - DNA, 25 bp, Homo sapien
cagatattttgaaggttgtgctggc

SEQ ID NO: 5298572 - DNA, 25 bp, Homo sapien
caggcagatattttgaaggttgtgc

SEQ ID NO: 5298573 - DNA, 25 bp, Homo sapien
ttccagcagctctaatctgtagtat

SEQ ID NO: 5298574 - DNA, 25 bp, Homo sapien
tattccagcagctctaatctgtagt

SEQ ID NO: 5298575 - DNA, 25 bp, Homo sapien
attaatgctgctactgtggattctc

SEQ ID NO: 5298576 - DNA, 25 bp, Homo sapien
tttattccagcagctctaatctgta

SEQ ID NO: 5298577 - DNA, 25 bp, Homo sapien
tggattctcctaatcctgtctgctg

SEQ ID NO: 5298578 - DNA, 25 bp, Homo sapien
gattctcctaatcctgtctgctgca

SEQ ID NO: 5298579 - DNA, 25 bp, Homo sapien
tttggattctcctaatcctgtctgc

SEQ ID NO: 5298580 - DNA, 25 bp, Homo sapien
attctcctaatcctgtctgctgcac

SEQ ID NO: 5298581 - DNA, 25 bp, Homo sapien
atgttcttatgaaagggctgccaga

SEQ ID NO: 5298582 - DNA, 25 bp, Homo sapien
caaagtgaataacaaaccttatact

SEQ ID NO: 5298583 - DNA, 25 bp, Homo sapien
gagtgggatgtcttacaatatcgtt

SEQ ID NO: 5298584 - DNA, 25 bp, Homo sapien
taattctattggtctgattatacca

SEQ ID NO: 5298585 - DNA, 25 bp, Homo sapien
gattggcatctcctcgtataaactc

SEQ ID NO: 5298586 - DNA, 25 bp, Homo sapien
tcacaagtacgggaaactggaatcc

SEQ ID NO: 5298587 - DNA, 25 bp, Homo sapien
tacgggaaactggaatccatattcc

SEQ ID NO: 5298588 - DNA, 25 bp, Homo sapien
tatcacagctcacaagtacgggaaa

SEQ ID NO: 5298589 - DNA, 25 bp, Homo sapien
ttttatgtagtcatgttttccttca

SEQ ID NO: 5298590 - DNA, 25 bp, Homo sapien
actgtacttacatgattacatgggt

SEQ ID NO: 5298591 - DNA, 25 bp, Homo sapien
ctttctatgctctcaattcttcagg

SEQ ID NO: 5298592 - DNA, 25 bp, Homo sapien
tacatgattacatgggtttctttct

SEQ ID NO: 5298593 - DNA, 25 bp, Homo sapien
caagaacaatcttctcgttcttcac

SEQ ID NO: 5298594 - DNA, 25 bp, Homo sapien
tctcgttcttcactgttggacccag

SEQ ID NO: 5298595 - DNA, 25 bp, Homo sapien
aagaacaatcttctcgttcttcact

SEQ ID NO: 5298596 - DNA, 25 bp, Homo sapien
cagaatatagtctatttattttccc

SEQ ID NO: 5298597 - DNA, 25 bp, Homo sapien
caacatcagaatatagtctatttat

SEQ ID NO: 5298598 - DNA, 25 bp, Homo sapien
tcaaggtagcctcccacaaatttag

SEQ ID NO: 5298599 - DNA, 25 bp, Homo sapien
tctttttcaaggtagcctcccacaa

SEQ ID NO: 5298600 - DNA, 25 bp, Homo sapien
caaccggaaagtcctttgagtgtgt

SEQ ID NO: 5298601 - DNA, 25 bp, Homo sapien
tgttttcttctcacggaggtgtgaa

SEQ ID NO: 5298602 - DNA, 25 bp, Homo sapien
tgtgaaggtgtgcagagtaccaata

SEQ ID NO: 5298603 - DNA, 25 bp, Homo sapien
gacttcagaaactcgtaagcactgt

SEQ ID NO: 5298604 - DNA, 25 bp, Homo sapien
tgggacccttgatttggatagcggt

SEQ ID NO: 5298605 - DNA, 25 bp, Homo sapien
tccctggaaattgtggctacagtca

SEQ ID NO: 5298606 - DNA, 25 bp, Homo sapien
tggatagcggtgttcaaatctgctg

SEQ ID NO: 5298607 - DNA, 25 bp, Homo sapien
ccctggaaattgtggctacagtcat

SEQ ID NO: 5298608 - DNA, 25 bp, Homo sapien
caaatctgtatggaagtaaagtggg

SEQ ID NO: 5298609 - DNA, 25 bp, Homo sapien
catttcattgaacttcgtagtcctc

SEQ ID NO: 5298610 - DNA, 25 bp, Homo sapien
tatgtatttgacatggatccaacat

SEQ ID NO: 5298611 - DNA, 25 bp, Homo sapien
tgtgaaagagctatgtctggtttca

SEQ ID NO: 5298612 - DNA, 25 bp, Homo sapien
tgaactggatggcacaataaaaaac

SEQ ID NO: 5298613 - DNA, 25 bp, Homo sapien
catgggcttgtaggttgaactggat

SEQ ID NO: 5298614 - DNA, 25 bp, Homo sapien
tggatggcacaataaaaaactggat

SEQ ID NO: 5298615 - DNA, 25 bp, Homo sapien
ctgtaggtaccatccatgggcttgt

SEQ ID NO: 5298616 - DNA, 25 bp, Homo sapien
gcaagtcaaggattcgtgacctcac

SEQ ID NO: 5298617 - DNA, 25 bp, Homo sapien
aagagaaaggctgagcttgcaagtc

SEQ ID NO: 5298618 - DNA, 25 bp, Homo sapien
gcttgcaagtcaaggattcgtgacc

SEQ ID NO: 5298619 - DNA, 25 bp, Homo sapien
tgagcttgcaagtcaaggattcgtg

SEQ ID NO: 5298620 - DNA, 25 bp, Homo sapien
ctatataagtaatactctctgggaa

SEQ ID NO: 5298621 - DNA, 25 bp, Homo sapien
tgtggcagcattgtgattctatata

SEQ ID NO: 5298622 - DNA, 25 bp, Homo sapien
agcactgtgtggcagcattgtgatt

SEQ ID NO: 5298623 - DNA, 25 bp, Homo sapien
tataagtaatactctctgggaacag

SEQ ID NO: 5298624 - DNA, 25 bp, Homo sapien
tcatggcaaggtcatggggatcaga

SEQ ID NO: 5298625 - DNA, 25 bp, Homo sapien
gatcatggcaaggtcatggggatca

SEQ ID NO: 5298626 - DNA, 25 bp, Homo sapien
catggcaaggtcatggggatcagaa

SEQ ID NO: 5298627 - DNA, 25 bp, Homo sapien
aggatcatggcaaggtcatggggat

SEQ ID NO: 5298628 - DNA, 25 bp, Homo sapien
tgcatgtcctaatgctctgttcagc

SEQ ID NO: 5298629 - DNA, 25 bp, Homo sapien
cctttgcatgtcctaatgctctgtt

SEQ ID NO: 5298630 - DNA, 25 bp, Homo sapien
gataatgctgtattagttaaggcct

SEQ ID NO: 5298631 - DNA, 25 bp, Homo sapien
attagttaaggcctttgcatgtcct

SEQ ID NO: 5298632 - DNA, 25 bp, Homo sapien
ccaaaaaagtcagtgatacagtgaa

SEQ ID NO: 5298633 - DNA, 25 bp, Homo sapien
aaaaagtcagtgatacagtgaacat

SEQ ID NO: 5298634 - DNA, 25 bp, Homo sapien
tcagtgatacagtgaacattcagac

SEQ ID NO: 5298635 - DNA, 25 bp, Homo sapien
cagtgatacagtgaacattcagact

SEQ ID NO: 5298636 - DNA, 25 bp, Homo sapien
aatggtctactctattcacagtaag

SEQ ID NO: 5298637 - DNA, 25 bp, Homo sapien
gtggctatttctaaggctgactata

SEQ ID NO: 5298638 - DNA, 25 bp, Homo sapien
gagttgtcagtctcaagatgtggct

SEQ ID NO: 5298639 - DNA, 25 bp, Homo sapien
tggctttccaaaggcgataaaatgt

SEQ ID NO: 5298640 - DNA, 25 bp, Homo sapien
ggactttccatagttctacaaagct

SEQ ID NO: 5298641 - DNA, 25 bp, Homo sapien
ctttccatagttctacaaagctgaa

SEQ ID NO: 5298642 - DNA, 25 bp, Homo sapien
ttacttgccttacttcattgactag

SEQ ID NO: 5298643 - DNA, 25 bp, Homo sapien
cattgactagtaagaaacttcatta

SEQ ID NO: 5298644 - DNA, 25 bp, Homo sapien
tgtaatcatttagctgttgagtcct

SEQ ID NO: 5298645 - DNA, 25 bp, Homo sapien
cattaactcgataactctagttata

SEQ ID NO: 5298646 - DNA, 25 bp, Homo sapien
ttggagtttttgcttccattgaagc

SEQ ID NO: 5298647 - DNA, 25 bp, Homo sapien
tcttcaccttctgtacaaaaagaaa

SEQ ID NO: 5298648 - DNA, 25 bp, Homo sapien
ttcttcaccttctgtacaaaaagaa

SEQ ID NO: 5298649 - DNA, 25 bp, Homo sapien
cttcttcagttttaccttcctcgca

SEQ ID NO: 5298650 - DNA, 25 bp, Homo sapien
ctattgcaaccatataacatcatct

SEQ ID NO: 5298651 - DNA, 25 bp, Homo sapien
tcagttttaccttcctcgcatgacc

SEQ ID NO: 5298652 - DNA, 25 bp, Homo sapien
tattgcaaccatataacatcatctt

SEQ ID NO: 5298653 - DNA, 25 bp, Homo sapien
tccccaaggatgtctcttagatctt

SEQ ID NO: 5298654 - DNA, 25 bp, Homo sapien
cagacttgtttgcttatcttgactg

SEQ ID NO: 5298655 - DNA, 25 bp, Homo sapien
gtctcttagatcttttcagacttgt

SEQ ID NO: 5298656 - DNA, 25 bp, Homo sapien
gaatttgaagttccccaaggatgtc

SEQ ID NO: 5298657 - DNA, 25 bp, Homo sapien
tcaagtgaaccgtagcagcaaggta

SEQ ID NO: 5298658 - DNA, 25 bp, Homo sapien
tttgacccagaaccatgctgaagtg

SEQ ID NO: 5298659 - DNA, 25 bp, Homo sapien
ggcccaccgagtgctatcaagtgaa

SEQ ID NO: 5298660 - DNA, 25 bp, Homo sapien
ttaaaccatgacctgttggcccacc

SEQ ID NO: 5298661 - DNA, 25 bp, Homo sapien
ttgtgcatgggaatgccactctttg

SEQ ID NO: 5298662 - DNA, 25 bp, Homo sapien
tgtgcatgggaatgccactctttga

SEQ ID NO: 5298663 - DNA, 25 bp, Homo sapien
ccaaatgcattgcagtcaacatgtc

SEQ ID NO: 5298664 - DNA, 25 bp, Homo sapien
caaatgcattgcagtcaacatgtcc

SEQ ID NO: 5298665 - DNA, 25 bp, Homo sapien
aaatgcattgcagtcaacatgtcca

SEQ ID NO: 5298666 - DNA, 25 bp, Homo sapien
aatgcattgcagtcaacatgtccat

SEQ ID NO: 5298667 - DNA, 25 bp, Homo sapien
tgacatgtgtaatagttcctcttcc

SEQ ID NO: 5298668 - DNA, 25 bp, Homo sapien
ccaaaattagtttatgaggactgaa

SEQ ID NO: 5298669 - DNA, 25 bp, Homo sapien
taacaatgtactgctccaaaattag

SEQ ID NO: 5298670 - DNA, 25 bp, Homo sapien
ggactgaagtcaacatgtagacgtg

SEQ ID NO: 5298671 - DNA, 25 bp, Homo sapien
aagggctccagtccaatcgccagtg

SEQ ID NO: 5298672 - DNA, 25 bp, Homo sapien
ttacaagtctttgaggctttctttg

SEQ ID NO: 5298673 - DNA, 25 bp, Homo sapien
cagtgagacaattagcctcatttcc

SEQ ID NO: 5298674 - DNA, 25 bp, Homo sapien
gtctctttgactcctattgccactt

SEQ ID NO: 5298675 - DNA, 25 bp, Homo sapien
aggtggggagcccaaaacttggcag

SEQ ID NO: 5298676 - DNA, 25 bp, Homo sapien
ttagctccaacatgtttatcaaaag

SEQ ID NO: 5298677 - DNA, 25 bp, Homo sapien
tgtttatcaaaagtgggacggtgag

SEQ ID NO: 5298678 - DNA, 25 bp, Homo sapien
gtgggacggtgaggtggggagccca

SEQ ID NO: 5298679 - DNA, 25 bp, Homo sapien
ggtttctgggtgagttccttcatct

SEQ ID NO: 5298680 - DNA, 25 bp, Homo sapien
catctcctgtggagagctctttact

SEQ ID NO: 5298681 - DNA, 25 bp, Homo sapien
ggagagctctttactgcctgtaggg

SEQ ID NO: 5298682 - DNA, 25 bp, Homo sapien
tcctgtggagagctctttactgcct

SEQ ID NO: 5298683 - DNA, 25 bp, Homo sapien
aaagtacacattgacttgtttactt

SEQ ID NO: 5298684 - DNA, 25 bp, Homo sapien
aagtacacattgacttgtttactta

SEQ ID NO: 5298685 - DNA, 25 bp, Homo sapien
atttgggtctgaactacagtcctca

SEQ ID NO: 5298686 - DNA, 25 bp, Homo sapien
aatttgggtctgaactacagtcctc

SEQ ID NO: 5298687 - DNA, 25 bp, Homo sapien
aaatttgggtctgaactacagtcct

SEQ ID NO: 5298688 - DNA, 25 bp, Homo sapien
ctcttctatttctccggcactcctc

SEQ ID NO: 5298689 - DNA, 25 bp, Homo sapien
gcctacctcttcagagcaaatgctt

SEQ ID NO: 5298690 - DNA, 25 bp, Homo sapien
agctcttctatttctccggcactcc

SEQ ID NO: 5298691 - DNA, 25 bp, Homo sapien
ctgcctacctcttcagagcaaatgc

SEQ ID NO: 5298692 - DNA, 25 bp, Homo sapien
taaattaataaggctctaagtttca

SEQ ID NO: 5298693 - DNA, 25 bp, Homo sapien
caccaggtgctggtaaattaataag

SEQ ID NO: 5298694 - DNA, 25 bp, Homo sapien
accaggtgctggtaaattaataagg

SEQ ID NO: 5298695 - DNA, 25 bp, Homo sapien
ctggtaaattaataaggctctaagt

SEQ ID NO: 5298696 - DNA, 25 bp, Homo sapien
ggtctaattgtactcaaatgtgatg

SEQ ID NO: 5298697 - DNA, 25 bp, Homo sapien
cttaggtctaattgtactcaaatgt

SEQ ID NO: 5298698 - DNA, 25 bp, Homo sapien
ttaggtctaattgtactcaaatgtg

SEQ ID NO: 5298699 - DNA, 25 bp, Homo sapien
tcttaggtctaattgtactcaaatg

SEQ ID NO: 5298700 - DNA, 25 bp, Homo sapien
caattttcttagggctgactcacgg

SEQ ID NO: 5298701 - DNA, 25 bp, Homo sapien
gcggcaagttttattaactgcacag

SEQ ID NO: 5298702 - DNA, 25 bp, Homo sapien
ctgactcacggaagacaaagctacc

SEQ ID NO: 5298703 - DNA, 25 bp, Homo sapien
ccaatgctagtttgtgattgaggac

SEQ ID NO: 5298704 - DNA, 25 bp, Homo sapien
cacctgttgttttcaactgtgctac

SEQ ID NO: 5298705 - DNA, 25 bp, Homo sapien
gataaatttctcctgatgggctgcc

SEQ ID NO: 5298706 - DNA, 25 bp, Homo sapien
tcaactgtgctacggatcctcaggg

SEQ ID NO: 5298707 - DNA, 25 bp, Homo sapien
ctcctgatgggctgccagtgggtca

SEQ ID NO: 5298708 - DNA, 25 bp, Homo sapien
ggtgcacacagatcttgccctcctt

SEQ ID NO: 5298709 - DNA, 25 bp, Homo sapien
tcagaagttcaattaccagcatcct

SEQ ID NO: 5298710 - DNA, 25 bp, Homo sapien
aaacatagctatgggcaagagccag

SEQ ID NO: 5298711 - DNA, 25 bp, Homo sapien
atcccagttggaaacatagctatgg

SEQ ID NO: 5298712 - DNA, 25 bp, Homo sapien
cacatgcattgttattggtaacaag

SEQ ID NO: 5298713 - DNA, 25 bp, Homo sapien
ggttttgaattgaccctctctcaca

SEQ ID NO: 5298714 - DNA, 25 bp, Homo sapien
ttgttattggtaacaagcatgttca

SEQ ID NO: 5298715 - DNA, 25 bp, Homo sapien
gccaggttttgaattgaccctctct

SEQ ID NO: 5298716 - DNA, 25 bp, Homo sapien
cctgttgttgccactgttagctatc

SEQ ID NO: 5298717 - DNA, 25 bp, Homo sapien
gtctaattgcctcctaatgctaaca

SEQ ID NO: 5298718 - DNA, 25 bp, Homo sapien
tgcctcctaatgctaacaatttttg

SEQ ID NO: 5298719 - DNA, 25 bp, Homo sapien
taatgctaacaatttttgcttgcct

SEQ ID NO: 5298720 - DNA, 25 bp, Homo sapien
acaaaatggtggactcttcttccaa

SEQ ID NO: 5298721 - DNA, 25 bp, Homo sapien
cttctctaagatcttggtgtcttga

SEQ ID NO: 5298722 - DNA, 25 bp, Homo sapien
caaaatggtggactcttcttccaat

SEQ ID NO: 5298723 - DNA, 25 bp, Homo sapien
gacaaaatggtggactcttcttcca

SEQ ID NO: 5298724 - DNA, 25 bp, Homo sapien
actttggtctgctgtaacctattca

SEQ ID NO: 5298725 - DNA, 25 bp, Homo sapien
tgtatttagtagcaactttggtctg

SEQ ID NO: 5298726 - DNA, 25 bp, Homo sapien
tctggatgacttcgaatagacctta

SEQ ID NO: 5298727 - DNA, 25 bp, Homo sapien
gaatagaccttaacatatattttcc

SEQ ID NO: 5298728 - DNA, 25 bp, Homo sapien
taaaccactcatgttgaacggactg

SEQ ID NO: 5298729 - DNA, 25 bp, Homo sapien
tgaccaaaggaagggcttacagttc

SEQ ID NO: 5298730 - DNA, 25 bp, Homo sapien
ggtcatcctgactgtgcacacaaca

SEQ ID NO: 5298731 - DNA, 25 bp, Homo sapien
tatgggataaaagctaccgtgctgg

SEQ ID NO: 5298732 - DNA, 25 bp, Homo sapien
tagaatctactcttcgcagttcctc

SEQ ID NO: 5298733 - DNA, 25 bp, Homo sapien
tactctcctgatactatcattaagc

SEQ ID NO: 5298734 - DNA, 25 bp, Homo sapien
tcctcaatctgtgacattgtcccgg

SEQ ID NO: 5298735 - DNA, 25 bp, Homo sapien
ttaagcactcaacaattgcgccttt

SEQ ID NO: 5298736 - DNA, 25 bp, Homo sapien
gctgcacagctcgtgaagcctggag

SEQ ID NO: 5298737 - DNA, 25 bp, Homo sapien
gaacatctctaacgctgcacagctc

SEQ ID NO: 5298738 - DNA, 25 bp, Homo sapien
tctgttgtgaacagcgactttatag

SEQ ID NO: 5298739 - DNA, 25 bp, Homo sapien
tgagaggcagattattggcatcaag

SEQ ID NO: 5298740 - DNA, 25 bp, Homo sapien
acatgtaccatttggaatcagaggg

SEQ ID NO: 5298741 - DNA, 25 bp, Homo sapien
tttgacatgcgcttgcttggtcgcc

SEQ ID NO: 5298742 - DNA, 25 bp, Homo sapien
tctatgagtcaacaaaactgtgtgc

SEQ ID NO: 5298743 - DNA, 25 bp, Homo sapien
cttaggtttgacttccagctttgac

SEQ ID NO: 5298744 - DNA, 25 bp, Homo sapien
tctctccttacattagtttcttcat

SEQ ID NO: 5298745 - DNA, 25 bp, Homo sapien
cttcagctggggtgtacctggtaac

SEQ ID NO: 5298746 - DNA, 25 bp, Homo sapien
tcagctggggtgtacctggtaacaa

SEQ ID NO: 5298747 - DNA, 25 bp, Homo sapien
tagtttcttcattaacagtgtttaa

SEQ ID NO: 5298748 - DNA, 25 bp, Homo sapien
taaccacagattcatcctgtatgcc

SEQ ID NO: 5298749 - DNA, 25 bp, Homo sapien
acctgtactgtagccacattagcta

SEQ ID NO: 5298750 - DNA, 25 bp, Homo sapien
gattcatcctgtatgcctttatcat

SEQ ID NO: 5298751 - DNA, 25 bp, Homo sapien
cacattagctaaccacagattcatc

SEQ ID NO: 5298752 - DNA, 25 bp, Homo sapien
ggcagatagaccaattaggcatttt

SEQ ID NO: 5298753 - DNA, 25 bp, Homo sapien
tttctgacagcagccaatgtcgtgg

SEQ ID NO: 5298754 - DNA, 25 bp, Homo sapien
tgagcatactctttagggcagatag

SEQ ID NO: 5298755 - DNA, 25 bp, Homo sapien
ctagggctgcattctgagcatactc

SEQ ID NO: 5298756 - DNA, 25 bp, Homo sapien
aagcatggaccggagaagggcacca

SEQ ID NO: 5298757 - DNA, 25 bp, Homo sapien
tatgtcgttgtagcatcgtgatggg

SEQ ID NO: 5298758 - DNA, 25 bp, Homo sapien
gagacagagcacagaacgcgtatgt

SEQ ID NO: 5298759 - DNA, 25 bp, Homo sapien
aaaggtaatgaagcatggaccggag

SEQ ID NO: 5298760 - DNA, 25 bp, Homo sapien
tagctagaacctcattcataaaatt

SEQ ID NO: 5298761 - DNA, 25 bp, Homo sapien
tttgccccttcaatattagctagaa

SEQ ID NO: 5298762 - DNA, 25 bp, Homo sapien
gctagaacctcattcataaaatttg

SEQ ID NO: 5298763 - DNA, 25 bp, Homo sapien
ttctctttgccccttcaatattagc

SEQ ID NO: 5298764 - DNA, 25 bp, Homo sapien
ttgccaacctcaacacttccaaagg

SEQ ID NO: 5298765 - DNA, 25 bp, Homo sapien
gtttggttcagtgagaatctcatag

SEQ ID NO: 5298766 - DNA, 25 bp, Homo sapien
gcttataggcaaagatgggccctta

SEQ ID NO: 5298767 - DNA, 25 bp, Homo sapien
caaagcaggtgctctaagcttagtg

SEQ ID NO: 5298768 - DNA, 25 bp, Homo sapien
tacttgatgtcctactgccagacat

SEQ ID NO: 5298769 - DNA, 25 bp, Homo sapien
gctacttgatgtcctactgccagac

SEQ ID NO: 5298770 - DNA, 25 bp, Homo sapien
accaggcaggtgctacttgatgtcc

SEQ ID NO: 5298771 - DNA, 25 bp, Homo sapien
ttaaccaggcaggtgctacttgatg

SEQ ID NO: 5298772 - DNA, 25 bp, Homo sapien
cccttgagaaattgaagttgaagag

SEQ ID NO: 5298773 - DNA, 25 bp, Homo sapien
gtggaaaatggtcaccatcaatttc

SEQ ID NO: 5298774 - DNA, 25 bp, Homo sapien
ttagtcccttgagaaattgaagttg

SEQ ID NO: 5298775 - DNA, 25 bp, Homo sapien
caatttcagcggctttggaaggcat

SEQ ID NO: 5298776 - DNA, 25 bp, Homo sapien
ggtaagagagttaggccaaatccca

SEQ ID NO: 5298777 - DNA, 25 bp, Homo sapien
caaacacagccatgtcagtaagaca

SEQ ID NO: 5298778 - DNA, 25 bp, Homo sapien
tcatccttccagctaatgtggccag

SEQ ID NO: 5298779 - DNA, 25 bp, Homo sapien
taagacaaggagtgagatctcacac

SEQ ID NO: 5298780 - DNA, 25 bp, Homo sapien
tggacgcaagttgcccttggaagga

SEQ ID NO: 5298781 - DNA, 25 bp, Homo sapien
gaagtggagaggcaatgcagcccca

SEQ ID NO: 5298782 - DNA, 25 bp, Homo sapien
taaaatctcagtcaaccccatagga

SEQ ID NO: 5298783 - DNA, 25 bp, Homo sapien
catgttggttagacaatggacgcaa

SEQ ID NO: 5298784 - DNA, 25 bp, Homo sapien
gcacaagtgacaggaataggcttcc

SEQ ID NO: 5298785 - DNA, 25 bp, Homo sapien
taataggagatcgataaagcttcac

SEQ ID NO: 5298786 - DNA, 25 bp, Homo sapien
aaggtgcagattcccggtccaaatt

SEQ ID NO: 5298787 - DNA, 25 bp, Homo sapien
tcatggtttgattcctgtgcagaca

SEQ ID NO: 5298788 - DNA, 25 bp, Homo sapien
tgagcagtcctgaaccaggttaggt

SEQ ID NO: 5298789 - DNA, 25 bp, Homo sapien
tcctgctgagcagtcctgaaccagg

SEQ ID NO: 5298790 - DNA, 25 bp, Homo sapien
ttaggttcggcaggtgcatcagtca

SEQ ID NO: 5298791 - DNA, 25 bp, Homo sapien
tcagtcaacagttcgggccagtaca

SEQ ID NO: 5298792 - DNA, 25 bp, Homo sapien
attctgtgcttccatcgtactgtaa

SEQ ID NO: 5298793 - DNA, 25 bp, Homo sapien
catgttttcccaactgaagcattac

SEQ ID NO: 5298794 - DNA, 25 bp, Homo sapien
tccatgaattcaacccactctttgc

SEQ ID NO: 5298795 - DNA, 25 bp, Homo sapien
gcattggctccaggtcaattcccca

SEQ ID NO: 5298796 - DNA, 25 bp, Homo sapien
gagagaactaaagggccatttggtg

SEQ ID NO: 5298797 - DNA, 25 bp, Homo sapien
gcagcaattaaggagagaactaaag

SEQ ID NO: 5298798 - DNA, 25 bp, Homo sapien
tcatcctctccaatgaacagcaggt

SEQ ID NO: 5298799 - DNA, 25 bp, Homo sapien
tcctttgttcttcggtctcctgcag

SEQ ID NO: 5298800 - DNA, 25 bp, Homo sapien
gcgtggacttaatgtttccttgtcc

SEQ ID NO: 5298801 - DNA, 25 bp, Homo sapien
gtggcgtggacttaatgtttccttg

SEQ ID NO: 5298802 - DNA, 25 bp, Homo sapien
ttgtccttgactatagaccctcctc

SEQ ID NO: 5298803 - DNA, 25 bp, Homo sapien
tccttgtccttgactatagaccctc

SEQ ID NO: 5298804 - DNA, 25 bp, Homo sapien
gctgctaggcaatccattactaaat

SEQ ID NO: 5298805 - DNA, 25 bp, Homo sapien
ccctaattcagtgctgctaggcaat

SEQ ID NO: 5298806 - DNA, 25 bp, Homo sapien
ttgcaaataactcccctccaagaag

SEQ ID NO: 5298807 - DNA, 25 bp, Homo sapien
agaagagttccatgcttttgaccat

SEQ ID NO: 5298808 - DNA, 25 bp, Homo sapien
ttgcaaataactcccctccaagaag

SEQ ID NO: 5298809 - DNA, 25 bp, Homo sapien
gctgctaggcaatccattactaaat

SEQ ID NO: 5298810 - DNA, 25 bp, Homo sapien
ccctaattcagtgctgctaggcaat

SEQ ID NO: 5298811 - DNA, 25 bp, Homo sapien
agaagagttccatgcttttgaccat

SEQ ID NO: 5298812 - DNA, 25 bp, Homo sapien
taaacaacattgttttctgcaaaac

SEQ ID NO: 5298813 - DNA, 25 bp, Homo sapien
cagggtaaacaacattgttttctgc

SEQ ID NO: 5298814 - DNA, 25 bp, Homo sapien
gggtaaacaacattgttttctgcaa

SEQ ID NO: 5298815 - DNA, 25 bp, Homo sapien
ctgcagggtaaacaacattgttttc

SEQ ID NO: 5298816 - DNA, 25 bp, Homo sapien
ggatccacaagacctcagcagctgc

SEQ ID NO: 5298817 - DNA, 25 bp, Homo sapien
atccacaagacctcagcagctgcca

SEQ ID NO: 5298818 - DNA, 25 bp, Homo sapien
tgggatccacaagacctcagcagct

SEQ ID NO: 5298819 - DNA, 25 bp, Homo sapien
ctgggatccacaagacctcagcagc

SEQ ID NO: 5298820 - DNA, 25 bp, Homo sapien
tcacagtattgattccgtttccact

SEQ ID NO: 5298821 - DNA, 25 bp, Homo sapien
ttccagctatgtctccttccagagc

SEQ ID NO: 5298822 - DNA, 25 bp, Homo sapien
cacagtattgattccgtttccactt

SEQ ID NO: 5298823 - DNA, 25 bp, Homo sapien
cagtattgattccgtttccactttt

SEQ ID NO: 5298824 - DNA, 25 bp, Homo sapien
aagtcaccaggtcaacaagacaagg

SEQ ID NO: 5298825 - DNA, 25 bp, Homo sapien
taccagacgtgtcagagcaagtcac

SEQ ID NO: 5298826 - DNA, 25 bp, Homo sapien
caagacaaggtggacagaagtagta

SEQ ID NO: 5298827 - DNA, 25 bp, Homo sapien
tcttctatgtcagagttgttaccag

SEQ ID NO: 5298828 - DNA, 25 bp, Homo sapien
taacccactcatagacaatccattg

SEQ ID NO: 5298829 - DNA, 25 bp, Homo sapien
tgtagaagctgttgaaacccttttc

SEQ ID NO: 5298830 - DNA, 25 bp, Homo sapien
ttgctcctgagtcctattaacccac

SEQ ID NO: 5298831 - DNA, 25 bp, Homo sapien
cctctatcaatgtcttcagctgccc

SEQ ID NO: 5298832 - DNA, 25 bp, Homo sapien
gcctaaggcctagagatttttcagc

SEQ ID NO: 5298833 - DNA, 25 bp, Homo sapien
tggtttaaggatgctcgcctaaggc

SEQ ID NO: 5298834 - DNA, 25 bp, Homo sapien
ctcatgtggtttaaggatgctcgcc

SEQ ID NO: 5298835 - DNA, 25 bp, Homo sapien
aaggatgctcgcctaaggcctagag

SEQ ID NO: 5298836 - DNA, 25 bp, Homo sapien
ccagtggtgccagcctgaaccctac

SEQ ID NO: 5298837 - DNA, 25 bp, Homo sapien
tggatcacctaggagacctctagca

SEQ ID NO: 5298838 - DNA, 25 bp, Homo sapien
ggaatccttccttattcagcttggg

SEQ ID NO: 5298839 - DNA, 25 bp, Homo sapien
cagtgagatatccttcgtggaatcc

SEQ ID NO: 5298840 - DNA, 25 bp, Homo sapien
tgggtcctccataggttaccagtga

SEQ ID NO: 5298841 - DNA, 25 bp, Homo sapien
gacgcgcattgactctgcattttca

SEQ ID NO: 5298842 - DNA, 25 bp, Homo sapien
acgcgcattgactctgcattttcaa

SEQ ID NO: 5298843 - DNA, 25 bp, Homo sapien
tgacgcgcattgactctgcattttc

SEQ ID NO: 5298844 - DNA, 25 bp, Homo sapien
ctgacgcgcattgactctgcatttt

SEQ ID NO: 5298845 - DNA, 25 bp, Homo sapien
tctcatgccccttctgctgaaagtg

SEQ ID NO: 5298846 - DNA, 25 bp, Homo sapien
tcaatccgccagagaggagcaaatg

SEQ ID NO: 5298847 - DNA, 25 bp, Homo sapien
ggagcaaatgatggcagctgtcatc

SEQ ID NO: 5298848 - DNA, 25 bp, Homo sapien
tgatggcagctgtcatctcatgccc

SEQ ID NO: 5298849 - DNA, 25 bp, Homo sapien
ggatctaagctcataaaagtgagca

SEQ ID NO: 5298850 - DNA, 25 bp, Homo sapien
aggatctaagctcataaaagtgagc

SEQ ID NO: 5298851 - DNA, 25 bp, Homo sapien
taggatctaagctcataaaagtgag

SEQ ID NO: 5298852 - DNA, 25 bp, Homo sapien
ctaggatctaagctcataaaagtga

SEQ ID NO: 5298853 - DNA, 25 bp, Homo sapien
cttttcttcacgatatgcttcactt

SEQ ID NO: 5298854 - DNA, 25 bp, Homo sapien
ccttttcttcacgatatgcttcact

SEQ ID NO: 5298855 - DNA, 25 bp, Homo sapien
tactgatgaaaacgggactcagatc

SEQ ID NO: 5298856 - DNA, 25 bp, Homo sapien
agttcgaattgtcatttgtcatgtc

SEQ ID NO: 5298857 - DNA, 25 bp, Homo sapien
tcccttgcaagagtaacggaataag

SEQ ID NO: 5298858 - DNA, 25 bp, Homo sapien
gagtaacggaataaggagcccacaa

SEQ ID NO: 5298859 - DNA, 25 bp, Homo sapien
gggacagacctgtgctggacactgt

SEQ ID NO: 5298860 - DNA, 25 bp, Homo sapien
ttgaggacatcagcttgagtgtcgg

SEQ ID NO: 5298861 - DNA, 25 bp, Homo sapien
tctaatgtcatgtgatacttctggg

SEQ ID NO: 5298862 - DNA, 25 bp, Homo sapien
agtgtcggtgctctttctaatgtca

SEQ ID NO: 5298863 - DNA, 25 bp, Homo sapien
tttcactgaactggttttcaatttc

SEQ ID NO: 5298864 - DNA, 25 bp, Homo sapien
catttcactgaactggttttcaatt

SEQ ID NO: 5298865 - DNA, 25 bp, Homo sapien
tcactgaactggttttcaatttcca

SEQ ID NO: 5298866 - DNA, 25 bp, Homo sapien
actgaactggttttcaatttccagc

SEQ ID NO: 5298867 - DNA, 25 bp, Homo sapien
tacacgtggaacatagggcctcagg

SEQ ID NO: 5298868 - DNA, 25 bp, Homo sapien
gcttggtgaggaatgtcagatccca

SEQ ID NO: 5298869 - DNA, 25 bp, Homo sapien
tccacactagggaaggctacacgtg

SEQ ID NO: 5298870 - DNA, 25 bp, Homo sapien
tatccgagtttgagcacggtgaaca

SEQ ID NO: 5298871 - DNA, 25 bp, Homo sapien
catttatttttcccactagaccagt

SEQ ID NO: 5298872 - DNA, 25 bp, Homo sapien
gcacatttatttttcccactagacc

SEQ ID NO: 5298873 - DNA, 25 bp, Homo sapien
acttctaagtgcacatttatttttc

SEQ ID NO: 5298874 - DNA, 25 bp, Homo sapien
cttctaagtgcacatttatttttcc

SEQ ID NO: 5298875 - DNA, 25 bp, Homo sapien
ggtgaaagagacagccacgtgattg

SEQ ID NO: 5298876 - DNA, 25 bp, Homo sapien
acagccacgtgattgtaggtgtcag

SEQ ID NO: 5298877 - DNA, 25 bp, Homo sapien
gacagttgttgtcgagcacggccac

SEQ ID NO: 5298878 - DNA, 25 bp, Homo sapien
taggtgtcagacagttgttgtcgag

SEQ ID NO: 5298879 - DNA, 25 bp, Homo sapien
gcacatctggattggtggaggcttt

SEQ ID NO: 5298880 - DNA, 25 bp, Homo sapien
ttcccagggagctggtactcatcta

SEQ ID NO: 5298881 - DNA, 25 bp, Homo sapien
catctggattggtggaggctttaaa

SEQ ID NO: 5298882 - DNA, 25 bp, Homo sapien
gctggtactcatctatgacttcttc

SEQ ID NO: 5298883 - DNA, 25 bp, Homo sapien
cccatgggccaaactgatcagaaat

SEQ ID NO: 5298884 - DNA, 25 bp, Homo sapien
gatgtagagattcggcagttgttga

SEQ ID NO: 5298885 - DNA, 25 bp, Homo sapien
caagtgggctagtaccagggctttg

SEQ ID NO: 5298886 - DNA, 25 bp, Homo sapien
tcttgggcaacttgaatatgagatg

SEQ ID NO: 5298887 - DNA, 25 bp, Homo sapien
caaagacctggatcctgcgaagtgc

SEQ ID NO: 5298888 - DNA, 25 bp, Homo sapien
tatcaccagggaccaccaaggtggg

SEQ ID NO: 5298889 - DNA, 25 bp, Homo sapien
catgtcactctgtgagaccgcttca

SEQ ID NO: 5298890 - DNA, 25 bp, Homo sapien
cagacactaagagaaccggaagcca

SEQ ID NO: 5298891 - DNA, 25 bp, Homo sapien
tagcttctagatatttcttccgtca

SEQ ID NO: 5298892 - DNA, 25 bp, Homo sapien
agcttctagatatttcttccgtcat

SEQ ID NO: 5298893 - DNA, 25 bp, Homo sapien
gatagcttctagatatttcttccgt

SEQ ID NO: 5298894 - DNA, 25 bp, Homo sapien
ctgatagcttctagatatttcttcc

SEQ ID NO: 5298895 - DNA, 25 bp, Homo sapien
gagaataacaaatcccgcatcactg

SEQ ID NO: 5298896 - DNA, 25 bp, Homo sapien
gctaaactctgcacctggttttcta

SEQ ID NO: 5298897 - DNA, 25 bp, Homo sapien
cagatgggacctaaatgcctttgaa

SEQ ID NO: 5298898 - DNA, 25 bp, Homo sapien
taagtacagctaaactctgcacctg

SEQ ID NO: 5298899 - DNA, 25 bp, Homo sapien
tctcttagcagctctaacagtggaa

SEQ ID NO: 5298900 - DNA, 25 bp, Homo sapien
ccacagtgaccggaaagagggagat

SEQ ID NO: 5298901 - DNA, 25 bp, Homo sapien
gtctcttagcagctctaacagtgga

SEQ ID NO: 5298902 - DNA, 25 bp, Homo sapien
gccacagtgaccggaaagagggaga

SEQ ID NO: 5298903 - DNA, 25 bp, Homo sapien
aagaacgtcatccacagcccttagg

SEQ ID NO: 5298904 - DNA, 25 bp, Homo sapien
tgaggaatgatgctagagtcacaca

SEQ ID NO: 5298905 - DNA, 25 bp, Homo sapien
ggttttttgaagaacgtcatccaca

SEQ ID NO: 5298906 - DNA, 25 bp, Homo sapien
ttcaccaaaattggtatgattatcc

SEQ ID NO: 5298907 - DNA, 25 bp, Homo sapien
gtcatccagctctggttttaccatg

SEQ ID NO: 5298908 - DNA, 25 bp, Homo sapien
catgctattgaattggtctccacag

SEQ ID NO: 5298909 - DNA, 25 bp, Homo sapien
tctccaaggcaattggtagaattcc

SEQ ID NO: 5298910 - DNA, 25 bp, Homo sapien
tccatacaacaagagctctttgagg

SEQ ID NO: 5298911 - DNA, 25 bp, Homo sapien
tctatggccacacatctgaacagga

SEQ ID NO: 5298912 - DNA, 25 bp, Homo sapien
cactaaggcttttgctctatggcca

SEQ ID NO: 5298913 - DNA, 25 bp, Homo sapien
tatggccacacatctgaacaggaga

SEQ ID NO: 5298914 - DNA, 25 bp, Homo sapien
ttgctctatggccacacatctgaac

SEQ ID NO: 5298915 - DNA, 25 bp, Homo sapien
tgcatccccaagatcactagtaagg

SEQ ID NO: 5298916 - DNA, 25 bp, Homo sapien
tgaagaaagcctccgtgactgggac

SEQ ID NO: 5298917 - DNA, 25 bp, Homo sapien
tgactggtgaaaaatgtgactaatt

SEQ ID NO: 5298918 - DNA, 25 bp, Homo sapien
ggacataaagagatgacagcattgt

SEQ ID NO: 5298919 - DNA, 25 bp, Homo sapien
atcttgttcttctagagctttctca

SEQ ID NO: 5298920 - DNA, 25 bp, Homo sapien
tttgcatggagctagggggcacttt

SEQ ID NO: 5298921 - DNA, 25 bp, Homo sapien
tgcatggagctagggggcactttgt

SEQ ID NO: 5298922 - DNA, 25 bp, Homo sapien
gcatcttgttcttctagagctttct

SEQ ID NO: 5298923 - DNA, 25 bp, Homo sapien
ttcgaatcggatatcagcccttgtc

SEQ ID NO: 5298924 - DNA, 25 bp, Homo sapien
tcttcgaatcggatatcagcccttg

SEQ ID NO: 5298925 - DNA, 25 bp, Homo sapien
cgaatcggatatcagcccttgtcat

SEQ ID NO: 5298926 - DNA, 25 bp, Homo sapien
ttcttcgaatcggatatcagccctt

SEQ ID NO: 5298927 - DNA, 25 bp, Homo sapien
ggtgccttatcagtccatatgcaaa

SEQ ID NO: 5298928 - DNA, 25 bp, Homo sapien
ggtaatcaataggaaactctgttgc

SEQ ID NO: 5298929 - DNA, 25 bp, Homo sapien
gcctgtatgaaatctaggatcctgg

SEQ ID NO: 5298930 - DNA, 25 bp, Homo sapien
ggaaactctgttgcatagacataaa

SEQ ID NO: 5298931 - DNA, 25 bp, Homo sapien
tcagctcggtggagacagcaagcaa

SEQ ID NO: 5298932 - DNA, 25 bp, Homo sapien
aggtggctttgactcgcgctgcaga

SEQ ID NO: 5298933 - DNA, 25 bp, Homo sapien
gattgctgtcattgccttccccgca

SEQ ID NO: 5298934 - DNA, 25 bp, Homo sapien
gatgagatgtcaaggcagggaacac

SEQ ID NO: 5298935 - DNA, 25 bp, Homo sapien
tctctgtgggagcaaggtttagtct

SEQ ID NO: 5298936 - DNA, 25 bp, Homo sapien
taaccccagagagttcaggctagtg

SEQ ID NO: 5298937 - DNA, 25 bp, Homo sapien
tctctggataataggcctgcaaggc

SEQ ID NO: 5298938 - DNA, 25 bp, Homo sapien
actctcgtatcgctaataaccctgg

SEQ ID NO: 5298939 - DNA, 25 bp, Homo sapien
aggggactaagcaccaggcctcagc

SEQ ID NO: 5298940 - DNA, 25 bp, Homo sapien
gagaggggactaagcaccaggcctc

SEQ ID NO: 5298941 - DNA, 25 bp, Homo sapien
gtcaatgcccaggaaaggacttagg

SEQ ID NO: 5298942 - DNA, 25 bp, Homo sapien
cacgccacagaagtcaatgcccagg

SEQ ID NO: 5298943 - DNA, 25 bp, Homo sapien
ctccttcacatccagcttccacggc

SEQ ID NO: 5298944 - DNA, 25 bp, Homo sapien
cttcacatccagcttccacggcaac

SEQ ID NO: 5298945 - DNA, 25 bp, Homo sapien
tccttcacatccagcttccacggca

SEQ ID NO: 5298946 - DNA, 25 bp, Homo sapien
tcacatccagcttccacggcaacag

SEQ ID NO: 5298947 - DNA, 25 bp, Homo sapien
agaaacatttttctcgtgtacagaa

SEQ ID NO: 5298948 - DNA, 25 bp, Homo sapien
aacatttttctcgtgtacagaattt

SEQ ID NO: 5298949 - DNA, 25 bp, Homo sapien
gaaacatttttctcgtgtacagaat

SEQ ID NO: 5298950 - DNA, 25 bp, Homo sapien
catttttctcgtgtacagaattttc

SEQ ID NO: 5298951 - DNA, 25 bp, Homo sapien
agaaaaggtgtagcatattctttat

SEQ ID NO: 5298952 - DNA, 25 bp, Homo sapien
gaaagaaaaggtgtagcatattctt

SEQ ID NO: 5298953 - DNA, 25 bp, Homo sapien
gaggtggcctaacaaaccagtgcct

SEQ ID NO: 5298954 - DNA, 25 bp, Homo sapien
taaatcctactccatagaggtggcc

SEQ ID NO: 5298955 - DNA, 25 bp, Homo sapien
tattggaaggcatagcaaaagcacc

SEQ ID NO: 5298956 - DNA, 25 bp, Homo sapien
ttacagttacatctccaaagtcaag

SEQ ID NO: 5298957 - DNA, 25 bp, Homo sapien
gggctcagtgcattgcaaccctgaa

SEQ ID NO: 5298958 - DNA, 25 bp, Homo sapien
ccagaagggagtgatgttcctgcaa

SEQ ID NO: 5298959 - DNA, 25 bp, Homo sapien
ttcctgcaatgagtcatttgggctc

SEQ ID NO: 5298960 - DNA, 25 bp, Homo sapien
ccctgaactcttggaagacactttt

SEQ ID NO: 5298961 - DNA, 25 bp, Homo sapien
tgctgagatatagccctggtaattg

SEQ ID NO: 5298962 - DNA, 25 bp, Homo sapien
tctgctcctttggtcgtcccaatac

SEQ ID NO: 5298963 - DNA, 25 bp, Homo sapien
caatacccacccagttgagtcttgc

SEQ ID NO: 5298964 - DNA, 25 bp, Homo sapien
tgagtcttgctgagatatagccctg

SEQ ID NO: 5298965 - DNA, 25 bp, Homo sapien
ctggtgaccaggaagaaaatagggg

SEQ ID NO: 5298966 - DNA, 25 bp, Homo sapien
tacatagacaccatcccaaatctca

SEQ ID NO: 5298967 - DNA, 25 bp, Homo sapien
catggtacactctttccctatcagg

SEQ ID NO: 5298968 - DNA, 25 bp, Homo sapien
aattgtcaattcagggtgctcttgt

SEQ ID NO: 5298969 - DNA, 25 bp, Homo sapien
ggggaaagtccacaaggttcagaga

SEQ ID NO: 5298970 - DNA, 25 bp, Homo sapien
catgtgtaattcctcgctgccactt

SEQ ID NO: 5298971 - DNA, 25 bp, Homo sapien
cgtgacttccatgtgtaattcctcg

SEQ ID NO: 5298972 - DNA, 25 bp, Homo sapien
ttttgcacttccgtgacttccatgt

SEQ ID NO: 5298973 - DNA, 25 bp, Homo sapien
taattcctcgctgccacttttgcaa

SEQ ID NO: 5298974 - DNA, 25 bp, Homo sapien
ttcaggaagctatcttgactctcag

SEQ ID NO: 5298975 - DNA, 25 bp, Homo sapien
ggaagctatcttgactctcagagtg

SEQ ID NO: 5298976 - DNA, 25 bp, Homo sapien
caggaagctatcttgactctcagag

SEQ ID NO: 5298977 - DNA, 25 bp, Homo sapien
aggaagctatcttgactctcagagt

SEQ ID NO: 5298978 - DNA, 25 bp, Homo sapien
ttacaaaaatgccaacagcatgctg

SEQ ID NO: 5298979 - DNA, 25 bp, Homo sapien
agaatcttgcccctaccttgtttat

SEQ ID NO: 5298980 - DNA, 25 bp, Homo sapien
gctgggtagtattgtagactcttcc

SEQ ID NO: 5298981 - DNA, 25 bp, Homo sapien
aacagcatgctgggtagtattgtag

SEQ ID NO: 5298982 - DNA, 25 bp, Homo sapien
cctttcttataagagcaactcaata

SEQ ID NO: 5298983 - DNA, 25 bp, Homo sapien
aatattacctttcttataagagcaa

SEQ ID NO: 5298984 - DNA, 25 bp, Homo sapien
ggaggacatctatcaggtgcctctc

SEQ ID NO: 5298985 - DNA, 25 bp, Homo sapien
ctggaggacatctatcaggtgcctc

SEQ ID NO: 5298986 - DNA, 25 bp, Homo sapien
gaaagagtagctttccatctgagct

SEQ ID NO: 5298987 - DNA, 25 bp, Homo sapien
gagtagctttccatctgagcttgta

SEQ ID NO: 5298988 - DNA, 25 bp, Homo sapien
atctgagcttgtaaccatctaagaa

SEQ ID NO: 5298989 - DNA, 25 bp, Homo sapien
ctgagcttgtaaccatctaagaaaa

SEQ ID NO: 5298990 - DNA, 25 bp, Homo sapien
tgcttccaaccatcttgcaagaaca

SEQ ID NO: 5298991 - DNA, 25 bp, Homo sapien
ccatcttgcaagaacaataccttcc

SEQ ID NO: 5298992 - DNA, 25 bp, Homo sapien
aacaataccttccttgtccacacac

SEQ ID NO: 5298993 - DNA, 25 bp, Homo sapien
tccaaccatcttgcaagaacaatac

SEQ ID NO: 5298994 - DNA, 25 bp, Homo sapien
gcctctattgttccatcagcaacac

SEQ ID NO: 5298995 - DNA, 25 bp, Homo sapien
ttcccctctagtgcctctattgttc

SEQ ID NO: 5298996 - DNA, 25 bp, Homo sapien
tagtgcctctattgttccatcagca

SEQ ID NO: 5298997 - DNA, 25 bp, Homo sapien
tcagcaacactaatgcaggggacag

SEQ ID NO: 5298998 - DNA, 25 bp, Homo sapien
tttaaaagctcatgccaaataggat

SEQ ID NO: 5298999 - DNA, 25 bp, Homo sapien
caaaattgaaaggtggactctgatg

SEQ ID NO: 5299000 - DNA, 25 bp, Homo sapien
cagagaatactttctgtccacaaaa

SEQ ID NO: 5299001 - DNA, 25 bp, Homo sapien
ctgatgattgacaaatgtgtttctc

SEQ ID NO: 5299002 - DNA, 25 bp, Homo sapien
tttgtgcatgtttccaggaaaggtg

SEQ ID NO: 5299003 - DNA, 25 bp, Homo sapien
tgtcaggggaagagtggcctttcat

SEQ ID NO: 5299004 - DNA, 25 bp, Homo sapien
tgcatgtttccaggaaaggtgtcag

SEQ ID NO: 5299005 - DNA, 25 bp, Homo sapien
aaggtgtcaggggaagagtggcctt

SEQ ID NO: 5299006 - DNA, 25 bp, Homo sapien
tgccagataattagaaccaagagct

SEQ ID NO: 5299007 - DNA, 25 bp, Homo sapien
ttgccagataattagaaccaagagc

SEQ ID NO: 5299008 - DNA, 25 bp, Homo sapien
gccagataattagaaccaagagctt

SEQ ID NO: 5299009 - DNA, 25 bp, Homo sapien
tttattccaacttctgatagactag

SEQ ID NO: 5299010 - DNA, 25 bp, Homo sapien
ttccaacttctgatagactagggtt

SEQ ID NO: 5299011 - DNA, 25 bp, Homo sapien
tattccaacttctgatagactaggg

SEQ ID NO: 5299012 - DNA, 25 bp, Homo sapien
ccaacttctgatagactagggtttt

SEQ ID NO: 5299013 - DNA, 25 bp, Homo sapien
tctatttaagtcaaaattgtgtgag

SEQ ID NO: 5299014 - DNA, 25 bp, Homo sapien
gggaggctaattgctataacaagcc

SEQ ID NO: 5299015 - DNA, 25 bp, Homo sapien
ggctaattgctataacaagccccaa

SEQ ID NO: 5299016 - DNA, 25 bp, Homo sapien
tcaaaattgtgtgaggggaggctaa

SEQ ID NO: 5299017 - DNA, 25 bp, Homo sapien
gatctatgggtgtagtgtcacgtct

SEQ ID NO: 5299018 - DNA, 25 bp, Homo sapien
cagtcttcggccttactccagggag

SEQ ID NO: 5299019 - DNA, 25 bp, Homo sapien
taggcgtgtagtaatccagtcttcg

SEQ ID NO: 5299020 - DNA, 25 bp, Homo sapien
caccacttttgtccgtgaactgaga

SEQ ID NO: 5299021 - DNA, 25 bp, Homo sapien
tacagccatcccaacggtcctcccc

SEQ ID NO: 5299022 - DNA, 25 bp, Homo sapien
gctacagccatcccaacggtcctcc

SEQ ID NO: 5299023 - DNA, 25 bp, Homo sapien
cagccatcccaacggtcctccccag

SEQ ID NO: 5299024 - DNA, 25 bp, Homo sapien
gccatcccaacggtcctccccagct

SEQ ID NO: 5299025 - DNA, 25 bp, Homo sapien
cttcgctggagaggtctcagggttc

SEQ ID NO: 5299026 - DNA, 25 bp, Homo sapien
taaagcacttaattaattcacttca

SEQ ID NO: 5299027 - DNA, 25 bp, Homo sapien
cagcttcgctggagaggtctcaggg

SEQ ID NO: 5299028 - DNA, 25 bp, Homo sapien
ttaaagcacttaattaattcacttc

SEQ ID NO: 5299029 - DNA, 25 bp, Homo sapien
tattcccagctcgaatggaagatgg

SEQ ID NO: 5299030 - DNA, 25 bp, Homo sapien
cccagctcgaatggaagatggattc

SEQ ID NO: 5299031 - DNA, 25 bp, Homo sapien
gtctattcccagctcgaatggaaga

SEQ ID NO: 5299032 - DNA, 25 bp, Homo sapien
tatctttcacaaagtctattcccag

SEQ ID NO: 5299033 - DNA, 25 bp, Homo sapien
atccagtgtgcggaggttccatgcc

SEQ ID NO: 5299034 - DNA, 25 bp, Homo sapien
gtgtgcggaggttccatgcctttgc

SEQ ID NO: 5299035 - DNA, 25 bp, Homo sapien
ttcccggagttcgatccggcgatac

SEQ ID NO: 5299036 - DNA, 25 bp, Homo sapien
tgcttccctttcccggagttcgatc

SEQ ID NO: 5299037 - DNA, 25 bp, Homo sapien
cctcccgaggctgcagccatcgccc

SEQ ID NO: 5299038 - DNA, 25 bp, Homo sapien
ccatcgccccggccccgagcttctg

SEQ ID NO: 5299039 - DNA, 25 bp, Homo sapien
catcgccccggccccgagcttctgg

SEQ ID NO: 5299040 - DNA, 25 bp, Homo sapien
cccgaggctgcagccatcgccccgg

SEQ ID NO: 5299041 - DNA, 25 bp, Homo sapien
gggacaccgcgactctcgctgctcg

SEQ ID NO: 5299042 - DNA, 25 bp, Homo sapien
gctgcggccacggtgccagcgagcg

SEQ ID NO: 5299043 - DNA, 25 bp, Homo sapien
cgccactcttcgaactccaatctgg

SEQ ID NO: 5299044 - DNA, 25 bp, Homo sapien
aatctggccccgaaggtgcagccgc

SEQ ID NO: 5299045 - DNA, 25 bp, Homo sapien
ggtgcgccgggctcggggaggagga

SEQ ID NO: 5299046 - DNA, 25 bp, Homo sapien
ggcacggccggctcggtgcgccggg

SEQ ID NO: 5299047 - DNA, 25 bp, Homo sapien
agctcggtggcacggccggctcggt

SEQ ID NO: 5299048 - DNA, 25 bp, Homo sapien
gccgcagctcggtggcacggccggc

SEQ ID NO: 5299049 - DNA, 25 bp, Homo sapien
gcgcggagcggacgccgcggatctt

SEQ ID NO: 5299050 - DNA, 25 bp, Homo sapien
agccataaacaagcgcccggaggag

SEQ ID NO: 5299051 - DNA, 25 bp, Homo sapien
gcggatcttgtgctgcgccaccgcg

SEQ ID NO: 5299052 - DNA, 25 bp, Homo sapien
aggagcggcgcaggagtgaggcgag

SEQ ID NO: 5299053 - DNA, 25 bp, Homo sapien
ccaactcgcatgagcgggaggagga

SEQ ID NO: 5299054 - DNA, 25 bp, Homo sapien
ggagaggctcagttttgagagccct

SEQ ID NO: 5299055 - DNA, 25 bp, Homo sapien
gagaggctcagttttgagagccctg

SEQ ID NO: 5299056 - DNA, 25 bp, Homo sapien
tggagctgggccaactcgcatgagc

SEQ ID NO: 5299057 - DNA, 25 bp, Homo sapien
ggagttggtgcttccaaggggtgat

SEQ ID NO: 5299058 - DNA, 25 bp, Homo sapien
atgctcattgtctggatctccttta

SEQ ID NO: 5299059 - DNA, 25 bp, Homo sapien
tggagttggtgcttccaaggggtga

SEQ ID NO: 5299060 - DNA, 25 bp, Homo sapien
tctggagttggtgcttccaaggggt

SEQ ID NO: 5299061 - DNA, 25 bp, Homo sapien
ttggtatttgtattcaaatgcctga

SEQ ID NO: 5299062 - DNA, 25 bp, Homo sapien
ttgctgcaccaaccacagcatttct

SEQ ID NO: 5299063 - DNA, 25 bp, Homo sapien
tttggtatttgtattcaaatgcctg

SEQ ID NO: 5299064 - DNA, 25 bp, Homo sapien
ctttgctgcaccaaccacagcattt

SEQ ID NO: 5299065 - DNA, 25 bp, Homo sapien
tcatggtactctgcgctgctcctct

SEQ ID NO: 5299066 - DNA, 25 bp, Homo sapien
gttgtccagtcccatcatgctgcag

SEQ ID NO: 5299067 - DNA, 25 bp, Homo sapien
tatgtcatggtactctgcgctgctc

SEQ ID NO: 5299068 - DNA, 25 bp, Homo sapien
agtcccatcatgctgcagccctaag

SEQ ID NO: 5299069 - DNA, 25 bp, Homo sapien
ggaggagttggaagcccttgagagg

SEQ ID NO: 5299070 - DNA, 25 bp, Homo sapien
tgggtttgagcgcagagtctacaga

SEQ ID NO: 5299071 - DNA, 25 bp, Homo sapien
ccttgagaggccagatcctgtgggt

SEQ ID NO: 5299072 - DNA, 25 bp, Homo sapien
ggatgcacatcctggagcttaattt

SEQ ID NO: 5299073 - DNA, 25 bp, Homo sapien
acaggaatctagagccctcccagtg

SEQ ID NO: 5299074 - DNA, 25 bp, Homo sapien
gacccctggcagttgagtgtcctgg

SEQ ID NO: 5299075 - DNA, 25 bp, Homo sapien
ctcccagtggtggtgtgaagcctct

SEQ ID NO: 5299076 - DNA, 25 bp, Homo sapien
tctggaatgtggcactctgacccct

SEQ ID NO: 5299077 - DNA, 25 bp, Homo sapien
tctttcattggtggacccacctgga

SEQ ID NO: 5299078 - DNA, 25 bp, Homo sapien
ctttcattggtggacccacctggac

SEQ ID NO: 5299079 - DNA, 25 bp, Homo sapien
ctggaccacacttgggtctgttacc

SEQ ID NO: 5299080 - DNA, 25 bp, Homo sapien
tgggtctgttacctccctcaaagag

SEQ ID NO: 5299081 - DNA, 25 bp, Homo sapien
attcttggagtgtgtagtaggaata

SEQ ID NO: 5299082 - DNA, 25 bp, Homo sapien
ttattgaatattggtggcaaatttt

SEQ ID NO: 5299083 - DNA, 25 bp, Homo sapien
gagtgtgtagtaggaataaataaga

SEQ ID NO: 5299084 - DNA, 25 bp, Homo sapien
tgtgtagtaggaataaataagacca

SEQ ID NO: 5299085 - DNA, 25 bp, Homo sapien
gaaagcagactgtattagattcctc

SEQ ID NO: 5299086 - DNA, 25 bp, Homo sapien
ttcctcctcgagcagaacggaatgc

SEQ ID NO: 5299087 - DNA, 25 bp, Homo sapien
acataggccttaagcttgaagcaga

SEQ ID NO: 5299088 - DNA, 25 bp, Homo sapien
cagctttgggaacataggccttaag

SEQ ID NO: 5299089 - DNA, 25 bp, Homo sapien
gaattaaacataacatccagtagtt

SEQ ID NO: 5299090 - DNA, 25 bp, Homo sapien
tgtggaacggtgttaccagaattaa

SEQ ID NO: 5299091 - DNA, 25 bp, Homo sapien
ttttcatgtggaacggtgttaccag

SEQ ID NO: 5299092 - DNA, 25 bp, Homo sapien
ggtgttaccagaattaaacataaca

SEQ ID NO: 5299093 - DNA, 25 bp, Homo sapien
catcataacagtatgctggagacat

SEQ ID NO: 5299094 - DNA, 25 bp, Homo sapien
tcagccctattcatatgtcaaccat

SEQ ID NO: 5299095 - DNA, 25 bp, Homo sapien
tttgcagaatgaaacggtgagatcc

SEQ ID NO: 5299096 - DNA, 25 bp, Homo sapien
catttatcattagcaaaaggtcact

SEQ ID NO: 5299097 - DNA, 25 bp, Homo sapien
ggagcaacactgacgcagaacacag

SEQ ID NO: 5299098 - DNA, 25 bp, Homo sapien
gaatcctggaatatgggagcaacac

SEQ ID NO: 5299099 - DNA, 25 bp, Homo sapien
tgttcaggtccatcaagactgtcgc

SEQ ID NO: 5299100 - DNA, 25 bp, Homo sapien
tgtggaatcatgatgtcccgtgaca

SEQ ID NO: 5299101 - DNA, 25 bp, Homo sapien
ctgtgtttgggaccaagggtgtatc

SEQ ID NO: 5299102 - DNA, 25 bp, Homo sapien
ttgggaccaagggtgtatctagcct

SEQ ID NO: 5299103 - DNA, 25 bp, Homo sapien
caagggtgtatctagccttaggctt

SEQ ID NO: 5299104 - DNA, 25 bp, Homo sapien
gaccaagggtgtatctagccttagg

SEQ ID NO: 5299105 - DNA, 25 bp, Homo sapien
tgcatacatataggcagcttctacc

SEQ ID NO: 5299106 - DNA, 25 bp, Homo sapien
gagtcctgtgcctttgcagttgcca

SEQ ID NO: 5299107 - DNA, 25 bp, Homo sapien
tttgttcgctttgaacagggtctcc

SEQ ID NO: 5299108 - DNA, 25 bp, Homo sapien
ttgaagtgttgtcactcttcggccc

SEQ ID NO: 5299109 - DNA, 25 bp, Homo sapien
tcaatcctgtagaaaccctccattc

SEQ ID NO: 5299110 - DNA, 25 bp, Homo sapien
ggttgtaatactactccctgtctca

SEQ ID NO: 5299111 - DNA, 25 bp, Homo sapien
tgccattgggttgtaatactactcc

SEQ ID NO: 5299112 - DNA, 25 bp, Homo sapien
ccagtccccactttatggtgcggta

SEQ ID NO: 5299113 - DNA, 25 bp, Homo sapien
tggcctttgtgagtataggctcttc

SEQ ID NO: 5299114 - DNA, 25 bp, Homo sapien
tgtggcctttgtgagtataggctct

SEQ ID NO: 5299115 - DNA, 25 bp, Homo sapien
ctttgtgagtataggctcttcctta

SEQ ID NO: 5299116 - DNA, 25 bp, Homo sapien
gcctttgtgagtataggctcttcct

SEQ ID NO: 5299117 - DNA, 25 bp, Homo sapien
ccaccgcttcagctttaatatcatt

SEQ ID NO: 5299118 - DNA, 25 bp, Homo sapien
cttgccatttggcagtccacccagg

SEQ ID NO: 5299119 - DNA, 25 bp, Homo sapien
gcttcagctttaatatcatttagcc

SEQ ID NO: 5299120 - DNA, 25 bp, Homo sapien
gctttaatatcatttagccaaccat

SEQ ID NO: 5299121 - DNA, 25 bp, Homo sapien
catgagtttgggtgaggctctcaca

SEQ ID NO: 5299122 - DNA, 25 bp, Homo sapien
cagaaagggcacgaatcatgtgtcc

SEQ ID NO: 5299123 - DNA, 25 bp, Homo sapien
tgtgtccagagctagaatccaggcc

SEQ ID NO: 5299124 - DNA, 25 bp, Homo sapien
tggctcggttttccagtcgaagaaa

SEQ ID NO: 5299125 - DNA, 25 bp, Homo sapien
actttccctgaggtcggattgtgtg

SEQ ID NO: 5299126 - DNA, 25 bp, Homo sapien
gctggctcctggacccatatttgca

SEQ ID NO: 5299127 - DNA, 25 bp, Homo sapien
actgcatcagcccatacatggctac

SEQ ID NO: 5299128 - DNA, 25 bp, Homo sapien
tccccttctgttgccacatcacttt

SEQ ID NO: 5299129 - DNA, 25 bp, Homo sapien
gaaggagtgttagcagccaggcaat

SEQ ID NO: 5299130 - DNA, 25 bp, Homo sapien
cccagatggttctggcggcctgaag

SEQ ID NO: 5299131 - DNA, 25 bp, Homo sapien
caagtagaaggttagtccagacatc

SEQ ID NO: 5299132 - DNA, 25 bp, Homo sapien
ccaggcaatggaggctttgctcaga

SEQ ID NO: 5299133 - DNA, 25 bp, Homo sapien
tggccagctctcgatgtgtgatatc

SEQ ID NO: 5299134 - DNA, 25 bp, Homo sapien
ttccgttcctgggacttggccagct

SEQ ID NO: 5299135 - DNA, 25 bp, Homo sapien
cctagacctacggaagtgaaggcag

SEQ ID NO: 5299136 - DNA, 25 bp, Homo sapien
cagccgtgaaagcagatgccattgt

SEQ ID NO: 5299137 - DNA, 25 bp, Homo sapien
tcatgtctccacttttgaaggcctc

SEQ ID NO: 5299138 - DNA, 25 bp, Homo sapien
tgtctccacttttgaaggcctcaag

SEQ ID NO: 5299139 - DNA, 25 bp, Homo sapien
tctccacttttgaaggcctcaagca

SEQ ID NO: 5299140 - DNA, 25 bp, Homo sapien
catgtctccacttttgaaggcctca

SEQ ID NO: 5299141 - DNA, 25 bp, Homo sapien
ttccggtgtgtagtagatccagtat

SEQ ID NO: 5299142 - DNA, 25 bp, Homo sapien
ggtgtgtagtagatccagtattgaa

SEQ ID NO: 5299143 - DNA, 25 bp, Homo sapien
tccggtgtgtagtagatccagtatt

SEQ ID NO: 5299144 - DNA, 25 bp, Homo sapien
ccggtgtgtagtagatccagtattg

SEQ ID NO: 5299145 - DNA, 25 bp, Homo sapien
tgcagaaggagcctactatggggaa

SEQ ID NO: 5299146 - DNA, 25 bp, Homo sapien
ctaggatacgggcagaggaagatca

SEQ ID NO: 5299147 - DNA, 25 bp, Homo sapien
gatgaggaatatgatggcttgctgc

SEQ ID NO: 5299148 - DNA, 25 bp, Homo sapien
atcagcacccacaccaggaggatac

SEQ ID NO: 5299149 - DNA, 25 bp, Homo sapien
agctgggcctgaaggttgaggtgct

SEQ ID NO: 5299150 - DNA, 25 bp, Homo sapien
tcaggggagtaagggacacaaggtg

SEQ ID NO: 5299151 - DNA, 25 bp, Homo sapien
gaggatcaggggagtaagggacaca

SEQ ID NO: 5299152 - DNA, 25 bp, Homo sapien
gcaaaggccctatcttgagctgggc

SEQ ID NO: 5299153 - DNA, 25 bp, Homo sapien
ctttcttgattaagatgctaatttc

SEQ ID NO: 5299154 - DNA, 25 bp, Homo sapien
tctttcttgattaagatgctaattt

SEQ ID NO: 5299155 - DNA, 25 bp, Homo sapien
tttgtggttctttcatcagctcttt

SEQ ID NO: 5299156 - DNA, 25 bp, Homo sapien
cttttgtggttctttcatcagctct

SEQ ID NO: 5299157 - DNA, 25 bp, Homo sapien
ggtgatagtggggtgtttaaagcca

SEQ ID NO: 5299158 - DNA, 25 bp, Homo sapien
tgatagtggggtgtttaaagccacc

SEQ ID NO: 5299159 - DNA, 25 bp, Homo sapien
gtgatagtggggtgtttaaagccac

SEQ ID NO: 5299160 - DNA, 25 bp, Homo sapien
gcccgtatttgccaggcttctgcgt

SEQ ID NO: 5299161 - DNA, 25 bp, Homo sapien
tgccaggcttctgcgtttagcaatt

SEQ ID NO: 5299162 - DNA, 25 bp, Homo sapien
cattcatgcgtgcagagagatcgat

SEQ ID NO: 5299163 - DNA, 25 bp, Homo sapien
tgctcaggtgggagcttaagatcca

SEQ ID NO: 5299164 - DNA, 25 bp, Homo sapien
ctaaattgtggttcatatgagctcg

SEQ ID NO: 5299165 - DNA, 25 bp, Homo sapien
catttgatgaactgtaaccgtgtac

SEQ ID NO: 5299166 - DNA, 25 bp, Homo sapien
tgagctcgtaatggtatagtggaca

SEQ ID NO: 5299167 - DNA, 25 bp, Homo sapien
tataaacccatgacttagcttcagg

SEQ ID NO: 5299168 - DNA, 25 bp, Homo sapien
ttcagtgctgtcagttactgtggac

SEQ ID NO: 5299169 - DNA, 25 bp, Homo sapien
tgtgcatgatccactgtgattcctg

SEQ ID NO: 5299170 - DNA, 25 bp, Homo sapien
ggcatttatcatcagggcgcaccct

SEQ ID NO: 5299171 - DNA, 25 bp, Homo sapien
tcatagggagatgtatacctcctgc

SEQ ID NO: 5299172 - DNA, 25 bp, Homo sapien
tctatgagttcttagtggcccgtac

SEQ ID NO: 5299173 - DNA, 25 bp, Homo sapien
tccaagtgtggagtttgtgcccagc

SEQ ID NO: 5299174 - DNA, 25 bp, Homo sapien
gcccagcatgtgaccgacaatacag

SEQ ID NO: 5299175 - DNA, 25 bp, Homo sapien
tgtaaaggcctggtgagtcagcgca

SEQ ID NO: 5299176 - DNA, 25 bp, Homo sapien
gccaccatctcagtgactcctggaa

SEQ ID NO: 5299177 - DNA, 25 bp, Homo sapien
tagctcaggagtaaaaacaaagtcc

SEQ ID NO: 5299178 - DNA, 25 bp, Homo sapien
gaattaacatttcaaggccttgccg

SEQ ID NO: 5299179 - DNA, 25 bp, Homo sapien
tcctacatcatggtcagtttcagag

SEQ ID NO: 5299180 - DNA, 25 bp, Homo sapien
catgaggtaagcagccccatggaag

SEQ ID NO: 5299181 - DNA, 25 bp, Homo sapien
ttgtattcttgcagagactttgttt

SEQ ID NO: 5299182 - DNA, 25 bp, Homo sapien
tccaggtccctgacgtagttgacgg

SEQ ID NO: 5299183 - DNA, 25 bp, Homo sapien
gtttgtctgagcatcccatgaggta

SEQ ID NO: 5299184 - DNA, 25 bp, Homo sapien
cagtaagttcaggtacaccaggaaa

SEQ ID NO: 5299185 - DNA, 25 bp, Homo sapien
cccagagaaaggaaccttcaaggag

SEQ ID NO: 5299186 - DNA, 25 bp, Homo sapien
tacaccaggaaaaggcgttgagtcc

SEQ ID NO: 5299187 - DNA, 25 bp, Homo sapien
tctgaaccacattcttgtgtgctag

SEQ ID NO: 5299188 - DNA, 25 bp, Homo sapien
taagatgaaatcgaagcagagctcg

SEQ ID NO: 5299189 - DNA, 25 bp, Homo sapien
tgagcccatcaacgtggaaggaagt

SEQ ID NO: 5299190 - DNA, 25 bp, Homo sapien
gaaggaagttgctgcccaatgtgtc

SEQ ID NO: 5299191 - DNA, 25 bp, Homo sapien
caagtagcgtgtcaggcccagttag

SEQ ID NO: 5299192 - DNA, 25 bp, Homo sapien
caggcagctaacaggtaaacagtaa

SEQ ID NO: 5299193 - DNA, 25 bp, Homo sapien
cagcagtgaaccaaatagcagtgca

SEQ ID NO: 5299194 - DNA, 25 bp, Homo sapien
cagtgcacacggagcttacgttgta

SEQ ID NO: 5299195 - DNA, 25 bp, Homo sapien
ttacgttgtagtagggagaagccag

SEQ ID NO: 5299196 - DNA, 25 bp, Homo sapien
gagcagcagctattaaacaccaaca

SEQ ID NO: 5299197 - DNA, 25 bp, Homo sapien
tgaggtctacctacagtccattccc

SEQ ID NO: 5299198 - DNA, 25 bp, Homo sapien
aataacttcagctagtccccttcag

SEQ ID NO: 5299199 - DNA, 25 bp, Homo sapien
ccaacaccatttgacgtgaaaaagc

SEQ ID NO: 5299200 - DNA, 25 bp, Homo sapien
tgatatcgtccatctccctagaggt

SEQ ID NO: 5299201 - DNA, 25 bp, Homo sapien
caaaccatcgaggagaggttgacct

SEQ ID NO: 5299202 - DNA, 25 bp, Homo sapien
ggcccacgcctagtgaaaatgatat

SEQ ID NO: 5299203 - DNA, 25 bp, Homo sapien
ccctagaggtaagcattgaaggcag

SEQ ID NO: 5299204 - DNA, 25 bp, Homo sapien
taagccatctctcaaacgtatgtat

SEQ ID NO: 5299205 - DNA, 25 bp, Homo sapien
tatgttcctagtcataagagcctgg

SEQ ID NO: 5299206 - DNA, 25 bp, Homo sapien
tgagcatttgtacattaggttaccc

SEQ ID NO: 5299207 - DNA, 25 bp, Homo sapien
tagtcactgtctcttgtagattccg

SEQ ID NO: 5299208 - DNA, 25 bp, Homo sapien
caagcaccaagtggaaaggtcgcaa

SEQ ID NO: 5299209 - DNA, 25 bp, Homo sapien
aatacatagtacttgcccagggctg

SEQ ID NO: 5299210 - DNA, 25 bp, Homo sapien
gataacaggctgcacccaagtgaag

SEQ ID NO: 5299211 - DNA, 25 bp, Homo sapien
gacattaaaacgtgatcacctggca

SEQ ID NO: 5299212 - DNA, 25 bp, Homo sapien
gatacccagtatgcttaacgtgaaa

SEQ ID NO: 5299213 - DNA, 25 bp, Homo sapien
tatcagtccaatgaacccctggtgt

SEQ ID NO: 5299214 - DNA, 25 bp, Homo sapien
cctggtgtaacaagaagtcccgtgc

SEQ ID NO: 5299215 - DNA, 25 bp, Homo sapien
ggttttcaatttgctcactggccag

SEQ ID NO: 5299216 - DNA, 25 bp, Homo sapien
tcatacccctagagatgatggctga

SEQ ID NO: 5299217 - DNA, 25 bp, Homo sapien
tggaattgtgaaagccgcctgtagc

SEQ ID NO: 5299218 - DNA, 25 bp, Homo sapien
tgcctttgcagtcatggtgtctcag

SEQ ID NO: 5299219 - DNA, 25 bp, Homo sapien
tacatttcttcagtacaaggcgtca

SEQ ID NO: 5299220 - DNA, 25 bp, Homo sapien
tcttccccttcgtagcattctggga

SEQ ID NO: 5299221 - DNA, 25 bp, Homo sapien
gcagctcagcatactctaataaacg

SEQ ID NO: 5299222 - DNA, 25 bp, Homo sapien
tcacatattgtagcgatgggttctg

SEQ ID NO: 5299223 - DNA, 25 bp, Homo sapien
cattctgggactaatcagggtttca

SEQ ID NO: 5299224 - DNA, 25 bp, Homo sapien
caaaactcccaaatataaggctctc

SEQ ID NO: 5299225 - DNA, 25 bp, Homo sapien
aatacaacacaaaactcccaaatat

SEQ ID NO: 5299226 - DNA, 25 bp, Homo sapien
cacaaaactcccaaatataaggctc

SEQ ID NO: 5299227 - DNA, 25 bp, Homo sapien
caacacaaaactcccaaatataagg

SEQ ID NO: 5299228 - DNA, 25 bp, Homo sapien
ttgaccagtggtgaaacaagcagca

SEQ ID NO: 5299229 - DNA, 25 bp, Homo sapien
tgtcggaaatctagcttggagccca

SEQ ID NO: 5299230 - DNA, 25 bp, Homo sapien
gcaagaagggtaatggtagccagct

SEQ ID NO: 5299231 - DNA, 25 bp, Homo sapien
gccattgatttgactggaaccagca

SEQ ID NO: 5299232 - DNA, 25 bp, Homo sapien
tacattacttcagaatcagccttgg

SEQ ID NO: 5299233 - DNA, 25 bp, Homo sapien
cacggcagcagccacgcgtacatta

SEQ ID NO: 5299234 - DNA, 25 bp, Homo sapien
tacttcagaatcagccttgggtact

SEQ ID NO: 5299235 - DNA, 25 bp, Homo sapien
gcagccacgcgtacattacttcaga

SEQ ID NO: 5299236 - DNA, 25 bp, Homo sapien
gcagaattagatgggtgctgcttcc

SEQ ID NO: 5299237 - DNA, 25 bp, Homo sapien
gctgcttccctaaggcatgcggtat

SEQ ID NO: 5299238 - DNA, 25 bp, Homo sapien
gcatgcggtataggtaggttcacaa

SEQ ID NO: 5299239 - DNA, 25 bp, Homo sapien
gatgggtgctgcttccctaaggcat

SEQ ID NO: 5299240 - DNA, 25 bp, Homo sapien
cagaatataatcagttaacaagctc

SEQ ID NO: 5299241 - DNA, 25 bp, Homo sapien
caagctcggaactttttcactgtcc

SEQ ID NO: 5299242 - DNA, 25 bp, Homo sapien
taatcagttaacaagctcggaactt

SEQ ID NO: 5299243 - DNA, 25 bp, Homo sapien
taacaagctcggaactttttcactg

SEQ ID NO: 5299244 - DNA, 25 bp, Homo sapien
ttcaatcattgtggccttaatcttc

SEQ ID NO: 5299245 - DNA, 25 bp, Homo sapien
attttagtggagtaagtccacaaga

SEQ ID NO: 5299246 - DNA, 25 bp, Homo sapien
gtggagtaagtccacaagaatttat

SEQ ID NO: 5299247 - DNA, 25 bp, Homo sapien
gtggccttaatcttccttaattata

SEQ ID NO: 5299248 - DNA, 25 bp, Homo sapien
ctgagagttgcttccctgatttaaa

SEQ ID NO: 5299249 - DNA, 25 bp, Homo sapien
ttaaaatttccaaacagtggagaca

SEQ ID NO: 5299250 - DNA, 25 bp, Homo sapien
tgggttatttacaaggagccttcgc

SEQ ID NO: 5299251 - DNA, 25 bp, Homo sapien
caaacagtggagacaaaaaaagagg

SEQ ID NO: 5299252 - DNA, 25 bp, Homo sapien
tccatgaagcagcatcgggcatctg

SEQ ID NO: 5299253 - DNA, 25 bp, Homo sapien
taaagtcaggtgtttaccaatcagc

SEQ ID NO: 5299254 - DNA, 25 bp, Homo sapien
catttgcggccatcataagagatac

SEQ ID NO: 5299255 - DNA, 25 bp, Homo sapien
tcctctgcactagggagaaacctgg

SEQ ID NO: 5299256 - DNA, 25 bp, Homo sapien
aagatcttcaacagacggtggtccg

SEQ ID NO: 5299257 - DNA, 25 bp, Homo sapien
tgaagatcttcaacagacggtggtc

SEQ ID NO: 5299258 - DNA, 25 bp, Homo sapien
gatcttcaacagacggtggtccgtt

SEQ ID NO: 5299259 - DNA, 25 bp, Homo sapien
cataaggaatgactgtagtcaaata

SEQ ID NO: 5299260 - DNA, 25 bp, Homo sapien
taacctcgtgccctaaatctcagct

SEQ ID NO: 5299261 - DNA, 25 bp, Homo sapien
tgtaaaggctcacaagtaacagcgc

SEQ ID NO: 5299262 - DNA, 25 bp, Homo sapien
ttacagtaactggatccctaagtcc

SEQ ID NO: 5299263 - DNA, 25 bp, Homo sapien
tatgctcatatagaaagccagtggt

SEQ ID NO: 5299264 - DNA, 25 bp, Homo sapien
cctgctccactgacagtctggaaga

SEQ ID NO: 5299265 - DNA, 25 bp, Homo sapien
aaaggccagaaatgatgtcctcctg

SEQ ID NO: 5299266 - DNA, 25 bp, Homo sapien
tgcccaattgtataatcgaatgttt

SEQ ID NO: 5299267 - DNA, 25 bp, Homo sapien
cgtctttttgacgtagacttcttgc

SEQ ID NO: 5299268 - DNA, 25 bp, Homo sapien
gaggaaaataaggataaccgagcac

SEQ ID NO: 5299269 - DNA, 25 bp, Homo sapien
ctgaatgacatttgagatcccttcc

SEQ ID NO: 5299270 - DNA, 25 bp, Homo sapien
ggtgtggcggaggccattctgaatg

SEQ ID NO: 5299271 - DNA, 25 bp, Homo sapien
gaatgacatttgagatcccttccat

SEQ ID NO: 5299272 - DNA, 25 bp, Homo sapien
aaggtgtggcggaggccattctgaa

SEQ ID NO: 5299273 - DNA, 25 bp, Homo sapien
gcagaaatgcgaactagaagatggc

SEQ ID NO: 5299274 - DNA, 25 bp, Homo sapien
gccactgccttggtgcagaaatgcg

SEQ ID NO: 5299275 - DNA, 25 bp, Homo sapien
tggcatacgcttcctggagagcaga

SEQ ID NO: 5299276 - DNA, 25 bp, Homo sapien
agagtggatcccatgtgccagccag

SEQ ID NO: 5299277 - DNA, 25 bp, Homo sapien
gagttcacgccacagctagtgtgca

SEQ ID NO: 5299278 - DNA, 25 bp, Homo sapien
gacgtatacacccatcctagatgag

SEQ ID NO: 5299279 - DNA, 25 bp, Homo sapien
taggttgacggaaaagagagacatc

SEQ ID NO: 5299280 - DNA, 25 bp, Homo sapien
gagagacatcccctcatttgctgga

SEQ ID NO: 5299281 - DNA, 25 bp, Homo sapien
gatttgttactagatactcagaggg

SEQ ID NO: 5299282 - DNA, 25 bp, Homo sapien
gctaagcaggtaggccataatgccc

SEQ ID NO: 5299283 - DNA, 25 bp, Homo sapien
aatggtcactcttacgctctactgg

SEQ ID NO: 5299284 - DNA, 25 bp, Homo sapien
aaacccattgtttgcctgtgcagtg

SEQ ID NO: 5299285 - DNA, 25 bp, Homo sapien
cccccatcctctgctcctccagatg

SEQ ID NO: 5299286 - DNA, 25 bp, Homo sapien
ccccccatcctctgctcctccagat

SEQ ID NO: 5299287 - DNA, 25 bp, Homo sapien
aaccccccatcctctgctcctccag

SEQ ID NO: 5299288 - DNA, 25 bp, Homo sapien
ctaaccccccatcctctgctcctcc

SEQ ID NO: 5299289 - DNA, 25 bp, Homo sapien
aacagcaataaatggaggatttaca

SEQ ID NO: 5299290 - DNA, 25 bp, Homo sapien
cagcaataaatggaggatttacatg

SEQ ID NO: 5299291 - DNA, 25 bp, Homo sapien
caataaatggaggatttacatgtaa

SEQ ID NO: 5299292 - DNA, 25 bp, Homo sapien
tctcagccaagtgttaacagcaata

SEQ ID NO: 5299293 - DNA, 25 bp, Homo sapien
ctaggccacatggctgatgtcactt

SEQ ID NO: 5299294 - DNA, 25 bp, Homo sapien
taggccacatggctgatgtcactta

SEQ ID NO: 5299295 - DNA, 25 bp, Homo sapien
aggccacatggctgatgtcacttac

SEQ ID NO: 5299296 - DNA, 25 bp, Homo sapien
tgtattccaacctcactgaaaaatc

SEQ ID NO: 5299297 - DNA, 25 bp, Homo sapien
cttcttgtattccaacctcactgaa

SEQ ID NO: 5299298 - DNA, 25 bp, Homo sapien
gtattccaacctcactgaaaaatca

SEQ ID NO: 5299299 - DNA, 25 bp, Homo sapien
cttgtattccaacctcactgaaaaa

SEQ ID NO: 5299300 - DNA, 25 bp, Homo sapien
gacgcctcctgcaaaacatcactta

SEQ ID NO: 5299301 - DNA, 25 bp, Homo sapien
gttcgacgcctcctgcaaaacatca

SEQ ID NO: 5299302 - DNA, 25 bp, Homo sapien
ccagtgttcgacgcctcctgcaaaa

SEQ ID NO: 5299303 - DNA, 25 bp, Homo sapien
agtgttcgacgcctcctgcaaaaca

SEQ ID NO: 5299304 - DNA, 25 bp, Homo sapien
taatggcagtctcaatttcttccag

SEQ ID NO: 5299305 - DNA, 25 bp, Homo sapien
cctcagagtactccttaatggcagt

SEQ ID NO: 5299306 - DNA, 25 bp, Homo sapien
gatttcatttaactcagacactgag

SEQ ID NO: 5299307 - DNA, 25 bp, Homo sapien
gttcatctcgtaaagccaactgctg

SEQ ID NO: 5299308 - DNA, 25 bp, Homo sapien
attccaagcaattaaattgactgtg

SEQ ID NO: 5299309 - DNA, 25 bp, Homo sapien
tattccaagcaattaaattgactgt

SEQ ID NO: 5299310 - DNA, 25 bp, Homo sapien
gagatcagatctgagtagaggtaag

SEQ ID NO: 5299311 - DNA, 25 bp, Homo sapien
agatcagatctgagtagaggtaagt

SEQ ID NO: 5299312 - DNA, 25 bp, Homo sapien
gccggtactagacctcttgagagtt

SEQ ID NO: 5299313 - DNA, 25 bp, Homo sapien
tgaaagccgatctgactgtgtaggg

SEQ ID NO: 5299314 - DNA, 25 bp, Homo sapien
catcttctgggtccggtgattcctg

SEQ ID NO: 5299315 - DNA, 25 bp, Homo sapien
aaagcattgaaagccgatctgactg

SEQ ID NO: 5299316 - DNA, 25 bp, Homo sapien
ctccattaaccaatggtgttcaggt

SEQ ID NO: 5299317 - DNA, 25 bp, Homo sapien
tctccattaaccaatggtgttcagg

SEQ ID NO: 5299318 - DNA, 25 bp, Homo sapien
tctgatgtatcaaagagcaaactgt

SEQ ID NO: 5299319 - DNA, 25 bp, Homo sapien
tcatcattaacacaggagacgatga

SEQ ID NO: 5299320 - DNA, 25 bp, Homo sapien
agtgcatatccagctgttctctcag

SEQ ID NO: 5299321 - DNA, 25 bp, Homo sapien
tcatcatctgatgtatcaaagagca

SEQ ID NO: 5299322 - DNA, 25 bp, Homo sapien
taatgggattaatgactggcacagt

SEQ ID NO: 5299323 - DNA, 25 bp, Homo sapien
gtcagtctgcaaagcttaatgggat

SEQ ID NO: 5299324 - DNA, 25 bp, Homo sapien
catagctactgaatactgggaaata

SEQ ID NO: 5299325 - DNA, 25 bp, Homo sapien
tatagagcacgcaagaagatctggc

SEQ ID NO: 5299326 - DNA, 25 bp, Homo sapien
aatgtgccagcaaggtgatggccct

SEQ ID NO: 5299327 - DNA, 25 bp, Homo sapien
caacatatcatgtctagcaggtcac

SEQ ID NO: 5299328 - DNA, 25 bp, Homo sapien
caaaggctagcatttttactgaggg

SEQ ID NO: 5299329 - DNA, 25 bp, Homo sapien
taaaggttctccagtattcacagga

SEQ ID NO: 5299330 - DNA, 25 bp, Homo sapien
tatgcgatgacttccagtctacagg

SEQ ID NO: 5299331 - DNA, 25 bp, Homo sapien
tacaggcatcacattcccataatta

SEQ ID NO: 5299332 - DNA, 25 bp, Homo sapien
ttcagagtaagcaagtgcaaggtcc

SEQ ID NO: 5299333 - DNA, 25 bp, Homo sapien
cataattatctgtcagggcattcca

SEQ ID NO: 5299334 - DNA, 25 bp, Homo sapien
gaagaaatgtttccagggtcacatg

SEQ ID NO: 5299335 - DNA, 25 bp, Homo sapien
caataggcagtaggcaacacttcca

SEQ ID NO: 5299336 - DNA, 25 bp, Homo sapien
cataactgggctgacaagaagtcct

SEQ ID NO: 5299337 - DNA, 25 bp, Homo sapien
aggtgaagccgtacagaaaactgcc

SEQ ID NO: 5299338 - DNA, 25 bp, Homo sapien
tgaatacgtttaatagcacccaagt

SEQ ID NO: 5299339 - DNA, 25 bp, Homo sapien
taaaactgaatacgtttaatagcac

SEQ ID NO: 5299340 - DNA, 25 bp, Homo sapien
aaactattccaatctctacctgttc

SEQ ID NO: 5299341 - DNA, 25 bp, Homo sapien
ctggtactaacttactatattaggt

SEQ ID NO: 5299342 - DNA, 25 bp, Homo sapien
tggcggcagcaagggaaaatgagga

SEQ ID NO: 5299343 - DNA, 25 bp, Homo sapien
agcccatcagatcttgtaagactta

SEQ ID NO: 5299344 - DNA, 25 bp, Homo sapien
ataagcccatcagatcttgtaagac

SEQ ID NO: 5299345 - DNA, 25 bp, Homo sapien
ctgataagcccatcagatcttgtaa

SEQ ID NO: 5299346 - DNA, 25 bp, Homo sapien
caggaggctgcgctccgtgatgggc

SEQ ID NO: 5299347 - DNA, 25 bp, Homo sapien
tgatgggccgcacggccgtcctcgg

SEQ ID NO: 5299348 - DNA, 25 bp, Homo sapien
atccgaggggcggaagcacaggctc

SEQ ID NO: 5299349 - DNA, 25 bp, Homo sapien
gcccggatccgaggggcggaagcac

SEQ ID NO: 5299350 - DNA, 25 bp, Homo sapien
gggctcgcgttacagttctcctggt

SEQ ID NO: 5299351 - DNA, 25 bp, Homo sapien
caggctcggggctcgcgttacagtt

SEQ ID NO: 5299352 - DNA, 25 bp, Homo sapien
gaaatcctgccagtccccgtccgcc

SEQ ID NO: 5299353 - DNA, 25 bp, Homo sapien
cgcgttacagttctcctggtccagg

SEQ ID NO: 5299354 - DNA, 25 bp, Homo sapien
ccggagcagtcgcgcgccccgccca

SEQ ID NO: 5299355 - DNA, 25 bp, Homo sapien
gccgcccggagcagtcgcgcgcccc

SEQ ID NO: 5299356 - DNA, 25 bp, Homo sapien
ccgcccggagcagtcgcgcgccccg

SEQ ID NO: 5299357 - DNA, 25 bp, Homo sapien
gcccggagcagtcgcgcgccccgcc

SEQ ID NO: 5299358 - DNA, 25 bp, Homo sapien
tcacgtgcaaagcactggctagatc

SEQ ID NO: 5299359 - DNA, 25 bp, Homo sapien
tctcacgtgcaaagcactggctaga

SEQ ID NO: 5299360 - DNA, 25 bp, Homo sapien
ctcacgtgcaaagcactggctagat

SEQ ID NO: 5299361 - DNA, 25 bp, Homo sapien
ctctcacgtgcaaagcactggctag

SEQ ID NO: 5299362 - DNA, 25 bp, Homo sapien
gattaagccagcgtcctgatcaggc

SEQ ID NO: 5299363 - DNA, 25 bp, Homo sapien
gaaggaaccaaggtgactggccacg

SEQ ID NO: 5299364 - DNA, 25 bp, Homo sapien
tggccacggctgcacccttacaagg

SEQ ID NO: 5299365 - DNA, 25 bp, Homo sapien
tcaatagctgggtagggaaaactgc

SEQ ID NO: 5299366 - DNA, 25 bp, Homo sapien
tctggtcccatcatgaaagggtgat

SEQ ID NO: 5299367 - DNA, 25 bp, Homo sapien
ggattgagggtattaactactggaa

SEQ ID NO: 5299368 - DNA, 25 bp, Homo sapien
caaagacaccagttttgtggaataa

SEQ ID NO: 5299369 - DNA, 25 bp, Homo sapien
taagtttgagataaagcgcagtaca

SEQ ID NO: 5299370 - DNA, 25 bp, Homo sapien
tggagtctgtaatcatttgtagttg

SEQ ID NO: 5299371 - DNA, 25 bp, Homo sapien
ctggagtctgtaatcatttgtagtt

SEQ ID NO: 5299372 - DNA, 25 bp, Homo sapien
gagtctgtaatcatttgtagttgtc

SEQ ID NO: 5299373 - DNA, 25 bp, Homo sapien
tctgtaatcatttgtagttgtctcc

SEQ ID NO: 5299374 - DNA, 25 bp, Homo sapien
ggtttgatgggtctgcccatcaggt

SEQ ID NO: 5299375 - DNA, 25 bp, Homo sapien
ctatgcatcataaattaaggccttt

SEQ ID NO: 5299376 - DNA, 25 bp, Homo sapien
ctgcccatcaggtgttgcaggtttc

SEQ ID NO: 5299377 - DNA, 25 bp, Homo sapien
ttgcaggtttcctgtgtagccacaa

SEQ ID NO: 5299378 - DNA, 25 bp, Homo sapien
taggagcaactagggttagagcaga

SEQ ID NO: 5299379 - DNA, 25 bp, Homo sapien
tccccacggcatgaaagtacttgtc

SEQ ID NO: 5299380 - DNA, 25 bp, Homo sapien
cagaggcattcaaaagaagcattga

SEQ ID NO: 5299381 - DNA, 25 bp, Homo sapien
tatctcactattgaccacatgatcc

SEQ ID NO: 5299382 - DNA, 25 bp, Homo sapien
gctaggtcatggactgaatgcttca

SEQ ID NO: 5299383 - DNA, 25 bp, Homo sapien
aacatttgttctgtaggagatggcc

SEQ ID NO: 5299384 - DNA, 25 bp, Homo sapien
caatcacatctattgacaatctgca

SEQ ID NO: 5299385 - DNA, 25 bp, Homo sapien
caccagcactcctgttgtcaagagg

SEQ ID NO: 5299386 - DNA, 25 bp, Homo sapien
gacctagggcagctctgtccaagct

SEQ ID NO: 5299387 - DNA, 25 bp, Homo sapien
aaccctatgtaacatggctgccaga

SEQ ID NO: 5299388 - DNA, 25 bp, Homo sapien
gagctattaatcacccaaccctatg

SEQ ID NO: 5299389 - DNA, 25 bp, Homo sapien
tcagagggtgtgtacctggcagaac

SEQ ID NO: 5299390 - DNA, 25 bp, Homo sapien
cctccacccgtgaactggcagtggg

SEQ ID NO: 5299391 - DNA, 25 bp, Homo sapien
gagatatcgcttgtcctcttttgac

SEQ ID NO: 5299392 - DNA, 25 bp, Homo sapien
cagtgggtctggtgcctcgtgggcc

SEQ ID NO: 5299393 - DNA, 25 bp, Homo sapien
tgggccatttctgagatatcgcttg

SEQ ID NO: 5299394 - DNA, 25 bp, Homo sapien
tcttgttgggccagaaatctgtgcc

SEQ ID NO: 5299395 - DNA, 25 bp, Homo sapien
cctcttgttgggccagaaatctgtg

SEQ ID NO: 5299396 - DNA, 25 bp, Homo sapien
gttgggccagaaatctgtgcccctc

SEQ ID NO: 5299397 - DNA, 25 bp, Homo sapien
tgggccagaaatctgtgcccctcac

SEQ ID NO: 5299398 - DNA, 25 bp, Homo sapien
tcgcattttgctgcatgagccctgc

SEQ ID NO: 5299399 - DNA, 25 bp, Homo sapien
tccctcctcgcattttgctgcatga

SEQ ID NO: 5299400 - DNA, 25 bp, Homo sapien
cctttctccaaggtagatacggatg

SEQ ID NO: 5299401 - DNA, 25 bp, Homo sapien
ggtagatacggatgcctggttccag

SEQ ID NO: 5299402 - DNA, 25 bp, Homo sapien
tgactgtagtcgtctgtccagtact

SEQ ID NO: 5299403 - DNA, 25 bp, Homo sapien
ttctgtgactgtagtcgtctgtcca

SEQ ID NO: 5299404 - DNA, 25 bp, Homo sapien
agggccacataaccttctgtgactg

SEQ ID NO: 5299405 - DNA, 25 bp, Homo sapien
ctgtagtcgtctgtccagtactttc

SEQ ID NO: 5299406 - DNA, 25 bp, Homo sapien
tgaccagctaatgcctgcaagagca

SEQ ID NO: 5299407 - DNA, 25 bp, Homo sapien
tgcaagagcagaccgaatggctgaa

SEQ ID NO: 5299408 - DNA, 25 bp, Homo sapien
ggaatactgtttgctgacctgctgt

SEQ ID NO: 5299409 - DNA, 25 bp, Homo sapien
ggctgaattccaacccgattccagg

SEQ ID NO: 5299410 - DNA, 25 bp, Homo sapien
tgttcttttcaggctcgcctccagc

SEQ ID NO: 5299411 - DNA, 25 bp, Homo sapien
tttcaggctcgcctccagcttgcag

SEQ ID NO: 5299412 - DNA, 25 bp, Homo sapien
tcttttcaggctcgcctccagcttg

SEQ ID NO: 5299413 - DNA, 25 bp, Homo sapien
ttcaggctcgcctccagcttgcagt

SEQ ID NO: 5299414 - DNA, 25 bp, Homo sapien
ctatgagctgatagacttggtggaa

SEQ ID NO: 5299415 - DNA, 25 bp, Homo sapien
gctgatagacttggtggaagtatac

SEQ ID NO: 5299416 - DNA, 25 bp, Homo sapien
tatgagctgatagacttggtggaag

SEQ ID NO: 5299417 - DNA, 25 bp, Homo sapien
gagctgatagacttggtggaagtat

SEQ ID NO: 5299418 - DNA, 25 bp, Homo sapien
gggatactcgtccactctccacatg

SEQ ID NO: 5299419 - DNA, 25 bp, Homo sapien
tctggtcagggcgagcagcttctat

SEQ ID NO: 5299420 - DNA, 25 bp, Homo sapien
gcttctatgagcttcacaattgcac

SEQ ID NO: 5299421 - DNA, 25 bp, Homo sapien
gaagccacaggacactaggatcaga

SEQ ID NO: 5299422 - DNA, 25 bp, Homo sapien
ctggacaaaaaggcttgagaatgag

SEQ ID NO: 5299423 - DNA, 25 bp, Homo sapien
acaaaaaggcttgagaatgagaaca

SEQ ID NO: 5299424 - DNA, 25 bp, Homo sapien
gacaaaaaggcttgagaatgagaac

SEQ ID NO: 5299425 - DNA, 25 bp, Homo sapien
tggacaaaaaggcttgagaatgaga

SEQ ID NO: 5299426 - DNA, 25 bp, Homo sapien
ctggccagggcaaggactccaaggc

SEQ ID NO: 5299427 - DNA, 25 bp, Homo sapien
ggccagggcaaggactccaaggcca

SEQ ID NO: 5299428 - DNA, 25 bp, Homo sapien
gccagggcaaggactccaaggccat

SEQ ID NO: 5299429 - DNA, 25 bp, Homo sapien
tggccagggcaaggactccaaggcc

SEQ ID NO: 5299430 - DNA, 25 bp, Homo sapien
caggcccatcctcagacagtcctcc

SEQ ID NO: 5299431 - DNA, 25 bp, Homo sapien
taaagcacaaatacccagatacagc

SEQ ID NO: 5299432 - DNA, 25 bp, Homo sapien
ggataaagcacaaatacccagatac

SEQ ID NO: 5299433 - DNA, 25 bp, Homo sapien
gacagtcctccaggataaagcacaa

SEQ ID NO: 5299434 - DNA, 25 bp, Homo sapien
tttaagggcaacctctccatctttg

SEQ ID NO: 5299435 - DNA, 25 bp, Homo sapien
tctccatctttgagcgggaaggagg

SEQ ID NO: 5299436 - DNA, 25 bp, Homo sapien
actttaaagcccaaagctggctcct

SEQ ID NO: 5299437 - DNA, 25 bp, Homo sapien
ggaaggagggcttagactgtctaaa

SEQ ID NO: 5299438 - DNA, 25 bp, Homo sapien
tcatgccagactcagctaagaagct

SEQ ID NO: 5299439 - DNA, 25 bp, Homo sapien
gctaagaagctaatttaggccgggc

SEQ ID NO: 5299440 - DNA, 25 bp, Homo sapien
gatactggtgacactctattcatgc

SEQ ID NO: 5299441 - DNA, 25 bp, Homo sapien
tggtgacactctattcatgccagac

SEQ ID NO: 5299442 - DNA, 25 bp, Homo sapien
cagggaggcctacttttaccattat

SEQ ID NO: 5299443 - DNA, 25 bp, Homo sapien
cacaattggttagtcaacagcttaa

SEQ ID NO: 5299444 - DNA, 25 bp, Homo sapien
tgtcaacttcatacacacaattggt

SEQ ID NO: 5299445 - DNA, 25 bp, Homo sapien
gaagagtaactcatgatcacatcaa

SEQ ID NO: 5299446 - DNA, 25 bp, Homo sapien
acctggctcctctctttatttgtaa

SEQ ID NO: 5299447 - DNA, 25 bp, Homo sapien
cagtattgtgggtcaaacttcccca

SEQ ID NO: 5299448 - DNA, 25 bp, Homo sapien
gaagcggaaaagctctcctgaccat

SEQ ID NO: 5299449 - DNA, 25 bp, Homo sapien
gatagccaacaaaggcagtaaaaag

SEQ ID NO: 5299450 - DNA, 25 bp, Homo sapien
tgaaaaatcactacatccaccagga

SEQ ID NO: 5299451 - DNA, 25 bp, Homo sapien
ggaccacggagcaacctctaaagga

SEQ ID NO: 5299452 - DNA, 25 bp, Homo sapien
gctttagttgagtacccaccctgga

SEQ ID NO: 5299453 - DNA, 25 bp, Homo sapien
ccttgttgggccttgaacagacagc

SEQ ID NO: 5299454 - DNA, 25 bp, Homo sapien
ccatgagtattaagggaaaagtgtt

SEQ ID NO: 5299455 - DNA, 25 bp, Homo sapien
taatgttacaatagttattgccatg

SEQ ID NO: 5299456 - DNA, 25 bp, Homo sapien
tgttacaatagttattgccatgagt

SEQ ID NO: 5299457 - DNA, 25 bp, Homo sapien
ttattgccatgagtattaagggaaa

SEQ ID NO: 5299458 - DNA, 25 bp, Homo sapien
tccgcagacgtaaaaccatcatggt

SEQ ID NO: 5299459 - DNA, 25 bp, Homo sapien
tgtgaccgaactacatgaccagaag

SEQ ID NO: 5299460 - DNA, 25 bp, Homo sapien
tctagaagctatcaggagtgtgacc

SEQ ID NO: 5299461 - DNA, 25 bp, Homo sapien
gactgccagcaactagaactgtgtg

SEQ ID NO: 5299462 - DNA, 25 bp, Homo sapien
aacatggtctgtgccttagggagct

SEQ ID NO: 5299463 - DNA, 25 bp, Homo sapien
ccttttatatggcaaggcaccaggc

SEQ ID NO: 5299464 - DNA, 25 bp, Homo sapien
tatcaattggacacctcaagggcac

SEQ ID NO: 5299465 - DNA, 25 bp, Homo sapien
ttgcctggaactacaaccttcaagt

SEQ ID NO: 5299466 - DNA, 25 bp, Homo sapien
aagatatgagaccaccgagtttttc

SEQ ID NO: 5299467 - DNA, 25 bp, Homo sapien
tattctgaaatacgtgggctatcga

SEQ ID NO: 5299468 - DNA, 25 bp, Homo sapien
gataacaaggaccaatgacaagcca

SEQ ID NO: 5299469 - DNA, 25 bp, Homo sapien
tcttgcttgttaaaaggctgaccaa

SEQ ID NO: 5299470 - DNA, 25 bp, Homo sapien
caaagggaagtagttggatgccagc

SEQ ID NO: 5299471 - DNA, 25 bp, Homo sapien
catctggaccactcttcacgtaagg

SEQ ID NO: 5299472 - DNA, 25 bp, Homo sapien
gaattgggaacctggtacatacact

SEQ ID NO: 5299473 - DNA, 25 bp, Homo sapien
aaaaagtcaatgtggagctggcatc

SEQ ID NO: 5299474 - DNA, 25 bp, Homo sapien
taactgattactgtaaagccacagc

SEQ ID NO: 5299475 - DNA, 25 bp, Homo sapien
taaagccacagctagatcccaaatc

SEQ ID NO: 5299476 - DNA, 25 bp, Homo sapien
tcccaaatctgacaaatattccaat

SEQ ID NO: 5299477 - DNA, 25 bp, Homo sapien
agccccaaatcagactatgttaatt

SEQ ID NO: 5299478 - DNA, 25 bp, Homo sapien
gaagatcaaacaatctggcccaggg

SEQ ID NO: 5299479 - DNA, 25 bp, Homo sapien
ggatacctattaatctgggctggaa

SEQ ID NO: 5299480 - DNA, 25 bp, Homo sapien
agagaggagctaactaacacccacc

SEQ ID NO: 5299481 - DNA, 25 bp, Homo sapien
tctgaattgatgacaccctgtggtc

SEQ ID NO: 5299482 - DNA, 25 bp, Homo sapien
cagtaatggagaggcaacttctgag

SEQ ID NO: 5299483 - DNA, 25 bp, Homo sapien
ggaataccgccagaatcaatgagtg

SEQ ID NO: 5299484 - DNA, 25 bp, Homo sapien
tactttgtcaacctggcatccctga

SEQ ID NO: 5299485 - DNA, 25 bp, Homo sapien
gcacaaagcgcatgaaatgtcccct

SEQ ID NO: 5299486 - DNA, 25 bp, Homo sapien
gttcaatggaaatagttcagtactg

SEQ ID NO: 5299487 - DNA, 25 bp, Homo sapien
catcctcactgtaaggctgcatttt

SEQ ID NO: 5299488 - DNA, 25 bp, Homo sapien
ggaaatagttcagtactgagaataa

SEQ ID NO: 5299489 - DNA, 25 bp, Homo sapien
tagttcagtactgagaataaaatat

SEQ ID NO: 5299490 - DNA, 25 bp, Homo sapien
ccagagatgtatccacagcatatga

SEQ ID NO: 5299491 - DNA, 25 bp, Homo sapien
agggtgctgcaagctcccagagatg

SEQ ID NO: 5299492 - DNA, 25 bp, Homo sapien
gcaaatgagctccatatgacagttg

SEQ ID NO: 5299493 - DNA, 25 bp, Homo sapien
tcaacagttccatttgcgctacagt

SEQ ID NO: 5299494 - DNA, 25 bp, Homo sapien
tgaacacatgtaggtgggtcacagg

SEQ ID NO: 5299495 - DNA, 25 bp, Homo sapien
tagatagcagggtcttcagaatccc

SEQ ID NO: 5299496 - DNA, 25 bp, Homo sapien
tacacaaagcagtctcttgagcctg

SEQ ID NO: 5299497 - DNA, 25 bp, Homo sapien
tcaggcaaatttagcacaagtctct

SEQ ID NO: 5299498 - DNA, 25 bp, Homo sapien
gagatatgccctgtttacccttaaa

SEQ ID NO: 5299499 - DNA, 25 bp, Homo sapien
aaagcagctgcgtgaagttaaccat

SEQ ID NO: 5299500 - DNA, 25 bp, Homo sapien
taaacttgtattcgctcaggcctgc

SEQ ID NO: 5299501 - DNA, 25 bp, Homo sapien
caggcctgcctagcgaattagaacc

SEQ ID NO: 5299502 - DNA, 25 bp, Homo sapien
gggtggaaagctacatcatgaatcg

SEQ ID NO: 5299503 - DNA, 25 bp, Homo sapien
cagctccagcactggctatatagca

SEQ ID NO: 5299504 - DNA, 25 bp, Homo sapien
gactttagccagtgcgtcagctcca

SEQ ID NO: 5299505 - DNA, 25 bp, Homo sapien
tgagctgtgaattcttggatacacg

SEQ ID NO: 5299506 - DNA, 25 bp, Homo sapien
gctaccatcgagtggatcagtttgc

SEQ ID NO: 5299507 - DNA, 25 bp, Homo sapien
gccagacatcaagtaaaggccattg

SEQ ID NO: 5299508 - DNA, 25 bp, Homo sapien
cttgtaacagcttctaggtgggcta

SEQ ID NO: 5299509 - DNA, 25 bp, Homo sapien
cattgggatcaactgctaaacttgt

SEQ ID NO: 5299510 - DNA, 25 bp, Homo sapien
ttgctttaataaaaatcaattctta

SEQ ID NO: 5299511 - DNA, 25 bp, Homo sapien
tgctttaataaaaatcaattcttaa

SEQ ID NO: 5299512 - DNA, 25 bp, Homo sapien
agagtaggatgactgatgactctat

SEQ ID NO: 5299513 - DNA, 25 bp, Homo sapien
agcagtgatgctgatcggaagagta

SEQ ID NO: 5299514 - DNA, 25 bp, Homo sapien
tgctgatcggaagagtaggatgact

SEQ ID NO: 5299515 - DNA, 25 bp, Homo sapien
tgcctgtcttcatgagcagtgatgc

SEQ ID NO: 5299516 - DNA, 25 bp, Homo sapien
tagtctagagccactaacgctgttc

SEQ ID NO: 5299517 - DNA, 25 bp, Homo sapien
gagactgaaaaagtaggccggccgc

SEQ ID NO: 5299518 - DNA, 25 bp, Homo sapien
gaattacacgctaaaggatctaggg

SEQ ID NO: 5299519 - DNA, 25 bp, Homo sapien
ttatacacacaatgagacaggcaag

SEQ ID NO: 5299520 - DNA, 25 bp, Homo sapien
tccacagaggcagggattcccagtt

SEQ ID NO: 5299521 - DNA, 25 bp, Homo sapien
aaaatgcttgtatatcccttgctga

SEQ ID NO: 5299522 - DNA, 25 bp, Homo sapien
taccatatggctcgggtcactgctc

SEQ ID NO: 5299523 - DNA, 25 bp, Homo sapien
gagaatgcgttgttgtgtttccatg

SEQ ID NO: 5299524 - DNA, 25 bp, Homo sapien
tgctgaacaggacaacaaacgctga

SEQ ID NO: 5299525 - DNA, 25 bp, Homo sapien
tgtgctgcactataagccaaacccc

SEQ ID NO: 5299526 - DNA, 25 bp, Homo sapien
cacttagtgctggagcaacctcagt

SEQ ID NO: 5299527 - DNA, 25 bp, Homo sapien
tgtattccataaacgcagagtgcca

SEQ ID NO: 5299528 - DNA, 25 bp, Homo sapien
cataagaatcataggggtcgatgtt

SEQ ID NO: 5299529 - DNA, 25 bp, Homo sapien
atcataggggtcgatgttgggatta

SEQ ID NO: 5299530 - DNA, 25 bp, Homo sapien
agtaccaccactgtaacactgctca

SEQ ID NO: 5299531 - DNA, 25 bp, Homo sapien
actgtaacactgctcaccattgctg

SEQ ID NO: 5299532 - DNA, 25 bp, Homo sapien
tatggaacccttcgtgaatctgtgt

SEQ ID NO: 5299533 - DNA, 25 bp, Homo sapien
gggtatctactaccaaaggaggcac

SEQ ID NO: 5299534 - DNA, 25 bp, Homo sapien
gtatctttccaattgtagggtatct

SEQ ID NO: 5299535 - DNA, 25 bp, Homo sapien
cttgtactgaggccttgctaatctc

SEQ ID NO: 5299536 - DNA, 25 bp, Homo sapien
tatagataggttctacatcaagaga

SEQ ID NO: 5299537 - DNA, 25 bp, Homo sapien
gaaagcaagggctcggatgccatca

SEQ ID NO: 5299538 - DNA, 25 bp, Homo sapien
tgttatcaaaacaggctcaatggga

SEQ ID NO: 5299539 - DNA, 25 bp, Homo sapien
gtcttcctcaatgcatctttattgt

SEQ ID NO: 5299540 - DNA, 25 bp, Homo sapien
caatgtaaacttagggttccatgtc

SEQ ID NO: 5299541 - DNA, 25 bp, Homo sapien
gatttgtaaagcctataccatttag

SEQ ID NO: 5299542 - DNA, 25 bp, Homo sapien
gactgtactggttaaagactggaga

SEQ ID NO: 5299543 - DNA, 25 bp, Homo sapien
aggcttctaactacactctatgatg

SEQ ID NO: 5299544 - DNA, 25 bp, Homo sapien
gaaatcacctaatgaacccatttct

SEQ ID NO: 5299545 - DNA, 25 bp, Homo sapien
caaaagacttactaatgggcttagc

SEQ ID NO: 5299546 - DNA, 25 bp, Homo sapien
ggtttacttaggcatccatcctaca

SEQ ID NO: 5299547 - DNA, 25 bp, Homo sapien
gagtgcttctttaccgtacctatgg

SEQ ID NO: 5299548 - DNA, 25 bp, Homo sapien
gatggttattgtagtagctctggct

SEQ ID NO: 5299549 - DNA, 25 bp, Homo sapien
gagtctgcttcattggccaccgtaa

SEQ ID NO: 5299550 - DNA, 25 bp, Homo sapien
gtaaggcctgctagttctccaagtc

SEQ ID NO: 5299551 - DNA, 25 bp, Homo sapien
atcataagttagtgagtctgcttca

SEQ ID NO: 5299552 - DNA, 25 bp, Homo sapien
atgatgaatgactttccagaagaag

SEQ ID NO: 5299553 - DNA, 25 bp, Homo sapien
gaccaagaagtatcagttatagaca

SEQ ID NO: 5299554 - DNA, 25 bp, Homo sapien
acacagcatatgaacattctttctg

SEQ ID NO: 5299555 - DNA, 25 bp, Homo sapien
gacaattaaatatacaatctatctc

SEQ ID NO: 5299556 - DNA, 25 bp, Homo sapien
aacaaaattatagagcacacacagc

SEQ ID NO: 5299557 - DNA, 25 bp, Homo sapien
aaggtgaacccacagatggctgcaa

SEQ ID NO: 5299558 - DNA, 25 bp, Homo sapien
ggaaggtgaacccacagatggctgc

SEQ ID NO: 5299559 - DNA, 25 bp, Homo sapien
ggtgaacccacagatggctgcaatg

SEQ ID NO: 5299560 - DNA, 25 bp, Homo sapien
gtgaacccacagatggctgcaatga

SEQ ID NO: 5299561 - DNA, 25 bp, Homo sapien
atcttgtagttttgacctattgggc

SEQ ID NO: 5299562 - DNA, 25 bp, Homo sapien
tcttgtagttttgacctattgggcc

SEQ ID NO: 5299563 - DNA, 25 bp, Homo sapien
ctgaaacagatcttcagtagttttt

SEQ ID NO: 5299564 - DNA, 25 bp, Homo sapien
tgaaacagatcttcagtagtttttc

SEQ ID NO: 5299565 - DNA, 25 bp, Homo sapien
atcttttgtatttcaagacattcat

SEQ ID NO: 5299566 - DNA, 25 bp, Homo sapien
aacacaaggaggtaatttagccttg

SEQ ID NO: 5299567 - DNA, 25 bp, Homo sapien
agcatacctttccagtctttcgcaa

SEQ ID NO: 5299568 - DNA, 25 bp, Homo sapien
cccctaagaagatgatttaagactg

SEQ ID NO: 5299569 - DNA, 25 bp, Homo sapien
aagggaggcccatattgtcaacgag

SEQ ID NO: 5299570 - DNA, 25 bp, Homo sapien
ttggtaattactccctggtccacat

SEQ ID NO: 5299571 - DNA, 25 bp, Homo sapien
tttggtaattactccctggtccaca

SEQ ID NO: 5299572 - DNA, 25 bp, Homo sapien
tgagtttggtaattactccctggtc

SEQ ID NO: 5299573 - DNA, 25 bp, Homo sapien
cattatagttaagatgttgccctcc

SEQ ID NO: 5299574 - DNA, 25 bp, Homo sapien
tagtaataagttcacagaatgctca

SEQ ID NO: 5299575 - DNA, 25 bp, Homo sapien
tgttgccctcctggtaaaatattaa

SEQ ID NO: 5299576 - DNA, 25 bp, Homo sapien
cctggataaagggtgctagtagtaa

SEQ ID NO: 5299577 - DNA, 25 bp, Homo sapien
ggttggatccagtatgcttccttac

SEQ ID NO: 5299578 - DNA, 25 bp, Homo sapien
tacttaacatctctggttggatcca

SEQ ID NO: 5299579 - DNA, 25 bp, Homo sapien
atctctggttggatccagtatgctt

SEQ ID NO: 5299580 - DNA, 25 bp, Homo sapien
ctctggttggatccagtatgcttcc

SEQ ID NO: 5299581 - DNA, 25 bp, Homo sapien
tgttccatcgcctgcacttctagat

SEQ ID NO: 5299582 - DNA, 25 bp, Homo sapien
tcaccgctgtcaggcaatgcttttt

SEQ ID NO: 5299583 - DNA, 25 bp, Homo sapien
tagagcttcttttgtatctcgatct

SEQ ID NO: 5299584 - DNA, 25 bp, Homo sapien
caagaagtcaaactcctttagagct

SEQ ID NO: 5299585 - DNA, 25 bp, Homo sapien
gcttactcacttcatgcaaaacaga

SEQ ID NO: 5299586 - DNA, 25 bp, Homo sapien
tcagtcacctttaccaacatgggcc

SEQ ID NO: 5299587 - DNA, 25 bp, Homo sapien
cctaagctctttatgaactgtctcc

SEQ ID NO: 5299588 - DNA, 25 bp, Homo sapien
tatctcagtttctctagacttcagc

SEQ ID NO: 5299589 - DNA, 25 bp, Homo sapien
gaaattatccagcacggaggcagaa

SEQ ID NO: 5299590 - DNA, 25 bp, Homo sapien
gaagtatcaatgacgcttttctctc

SEQ ID NO: 5299591 - DNA, 25 bp, Homo sapien
tatccagcacggaggcagaatctgt

SEQ ID NO: 5299592 - DNA, 25 bp, Homo sapien
aatctgcagctgcactttcaaggaa

SEQ ID NO: 5299593 - DNA, 25 bp, Homo sapien
attgctgtctctttaacttcagcct

SEQ ID NO: 5299594 - DNA, 25 bp, Homo sapien
aaagcccaacaaagctcgcactcgt

SEQ ID NO: 5299595 - DNA, 25 bp, Homo sapien
tcttccctgtccgtgacatcacttg

SEQ ID NO: 5299596 - DNA, 25 bp, Homo sapien
gcactcgtttagatttcacatctag

SEQ ID NO: 5299597 - DNA, 25 bp, Homo sapien
gtggctgcacttctgtttcattacc

SEQ ID NO: 5299598 - DNA, 25 bp, Homo sapien
gttttgttgtggctgcacttctgtt

SEQ ID NO: 5299599 - DNA, 25 bp, Homo sapien
gctgcacttctgtttcattaccttc

SEQ ID NO: 5299600 - DNA, 25 bp, Homo sapien
ttttgttgtggctgcacttctgttt

SEQ ID NO: 5299601 - DNA, 25 bp, Homo sapien
cccgtatttcaacttgtggtatttg

SEQ ID NO: 5299602 - DNA, 25 bp, Homo sapien
cagaatcatagcttggaggcttcat

SEQ ID NO: 5299603 - DNA, 25 bp, Homo sapien
gattcaattctgtcccgtatttcaa

SEQ ID NO: 5299604 - DNA, 25 bp, Homo sapien
gaggcttcatatctccctgattcaa

SEQ ID NO: 5299605 - DNA, 25 bp, Homo sapien
ttgatcctcctcacaagatccttct

SEQ ID NO: 5299606 - DNA, 25 bp, Homo sapien
ctttcctgtttaagagcatactcca

SEQ ID NO: 5299607 - DNA, 25 bp, Homo sapien
atactccaacattttgatcctcctc

SEQ ID NO: 5299608 - DNA, 25 bp, Homo sapien
tcctgtttaagagcatactccaaca

SEQ ID NO: 5299609 - DNA, 25 bp, Homo sapien
gaaatgctataggagatactggtat

SEQ ID NO: 5299610 - DNA, 25 bp, Homo sapien
tgctataggagatactggtatattc

SEQ ID NO: 5299611 - DNA, 25 bp, Homo sapien
ctctgaaatgctataggagatactg

SEQ ID NO: 5299612 - DNA, 25 bp, Homo sapien
gctataggagatactggtatattct

SEQ ID NO: 5299613 - DNA, 25 bp, Homo sapien
tgcaaatgggaacgtagaccagagc

SEQ ID NO: 5299614 - DNA, 25 bp, Homo sapien
tatatagccaacaaaccagcaattc

SEQ ID NO: 5299615 - DNA, 25 bp, Homo sapien
caagtgttagcagcaatatgggatc

SEQ ID NO: 5299616 - DNA, 25 bp, Homo sapien
tatgggatcacatactgcaaatggg

SEQ ID NO: 5299617 - DNA, 25 bp, Homo sapien
ctgagtttcaactatcacaatattc

SEQ ID NO: 5299618 - DNA, 25 bp, Homo sapien
gagtttcaactatcacaatattcac

SEQ ID NO: 5299619 - DNA, 25 bp, Homo sapien
gtttcaactatcacaatattcactt

SEQ ID NO: 5299620 - DNA, 25 bp, Homo sapien
tttcaactatcacaatattcacttc

SEQ ID NO: 5299621 - DNA, 25 bp, Homo sapien
ggagtaaagtgatgtgatctgggct

SEQ ID NO: 5299622 - DNA, 25 bp, Homo sapien
tggagtaaagtgatgtgatctgggc

SEQ ID NO: 5299623 - DNA, 25 bp, Homo sapien
ctggagtaaagtgatgtgatctggg

SEQ ID NO: 5299624 - DNA, 25 bp, Homo sapien
gagtacaggcatgtgttgaacaatg

SEQ ID NO: 5299625 - DNA, 25 bp, Homo sapien
cattccagaataaaccttttgagca

SEQ ID NO: 5299626 - DNA, 25 bp, Homo sapien
taaatctacaaggtggtcgaaggac

SEQ ID NO: 5299627 - DNA, 25 bp, Homo sapien
ggctgtaccttctctacgtttatgg

SEQ ID NO: 5299628 - DNA, 25 bp, Homo sapien
caagaaacgccaaagatccaaggac

SEQ ID NO: 5299629 - DNA, 25 bp, Homo sapien
ttttgtcagattggccaccgaggca

SEQ ID NO: 5299630 - DNA, 25 bp, Homo sapien
cggatcactgaaactggttcttggc

SEQ ID NO: 5299631 - DNA, 25 bp, Homo sapien
tttttaaaccttacagcgatcctgc

SEQ ID NO: 5299632 - DNA, 25 bp, Homo sapien
cacatttagctagatccctaaaggg

SEQ ID NO: 5299633 - DNA, 25 bp, Homo sapien
tagctagatccctaaagggcttatg

SEQ ID NO: 5299634 - DNA, 25 bp, Homo sapien
catttagctagatccctaaagggct

SEQ ID NO: 5299635 - DNA, 25 bp, Homo sapien
ctcacatttagctagatccctaaag

SEQ ID NO: 5299636 - DNA, 25 bp, Homo sapien
gaagacttgcaaatatcagatagac

SEQ ID NO: 5299637 - DNA, 25 bp, Homo sapien
gcgctgctaataaagatcaatctgt

SEQ ID NO: 5299638 - DNA, 25 bp, Homo sapien
tccacaccttttatagaatgcgctg

SEQ ID NO: 5299639 - DNA, 25 bp, Homo sapien
gactagatcgactaaatactacagc

SEQ ID NO: 5299640 - DNA, 25 bp, Homo sapien
tatgcaaggcaatgtaactaacttc

SEQ ID NO: 5299641 - DNA, 25 bp, Homo sapien
tcataagtatacaggcttagcccgt

SEQ ID NO: 5299642 - DNA, 25 bp, Homo sapien
gaaattggtgtgtatgccctggaag

SEQ ID NO: 5299643 - DNA, 25 bp, Homo sapien
tctctgactgcgatcatctaggtcc

SEQ ID NO: 5299644 - DNA, 25 bp, Homo sapien
gtcaacttctcgcctcgactcaagg

SEQ ID NO: 5299645 - DNA, 25 bp, Homo sapien
cacgttctgcggagactgtctctag

SEQ ID NO: 5299646 - DNA, 25 bp, Homo sapien
tcaaggcctgacacaacttctgttg

SEQ ID NO: 5299647 - DNA, 25 bp, Homo sapien
tccttgaagagaggggccaaagccg

SEQ ID NO: 5299648 - DNA, 25 bp, Homo sapien
ccaattagtaaaccgagagggcagc

SEQ ID NO: 5299649 - DNA, 25 bp, Homo sapien
aaaactactgccagcccaattagta

SEQ ID NO: 5299650 - DNA, 25 bp, Homo sapien
tgctccgcgtctctcaaaactactg

SEQ ID NO: 5299651 - DNA, 25 bp, Homo sapien
cagggcagcggacgatttgctccgc

SEQ ID NO: 5299652 - DNA, 25 bp, Homo sapien
gtgcaggatccccgggagactgtac

SEQ ID NO: 5299653 - DNA, 25 bp, Homo sapien
caggatccccgggagactgtactgg

SEQ ID NO: 5299654 - DNA, 25 bp, Homo sapien
ctctctccacctcgaagcgggccca

SEQ ID NO: 5299655 - DNA, 25 bp, Homo sapien
tctccacctcgaagcgggcccactc

SEQ ID NO: 5299656 - DNA, 25 bp, Homo sapien
agccccttggcaccgccggcgcccg

SEQ ID NO: 5299657 - DNA, 25 bp, Homo sapien
gagccccttggcaccgccggcgccc

SEQ ID NO: 5299658 - DNA, 25 bp, Homo sapien
ccggcgcccagcagcggaggcaaca

SEQ ID NO: 5299659 - DNA, 25 bp, Homo sapien
ggaggcaacagcggcggcaagcagc

SEQ ID NO: 5299660 - DNA, 25 bp, Homo sapien
tcccgcccacaccccagtcagcagg

SEQ ID NO: 5299661 - DNA, 25 bp, Homo sapien
ggcggccgcagatacccggggagct

SEQ ID NO: 5299662 - DNA, 25 bp, Homo sapien
caatctgcgggtcgctgtcgctctt

SEQ ID NO: 5299663 - DNA, 25 bp, Homo sapien
cctttctcttttgactcgaggggct

SEQ ID NO: 5299664 - DNA, 25 bp, Homo sapien
cattctgccaatctgcgggtcgctg

SEQ ID NO: 5299665 - DNA, 25 bp, Homo sapien
gactcgaggggctcaaacctgttac

SEQ ID NO: 5299666 - DNA, 25 bp, Homo sapien
ttgttgacagcccatctgaaaaact

SEQ ID NO: 5299667 - DNA, 25 bp, Homo sapien
tatcggttttctcttgcgctgggaa

SEQ ID NO: 5299668 - DNA, 25 bp, Homo sapien
tgaaaaactgctccgttgaagtttc

SEQ ID NO: 5299669 - DNA, 25 bp, Homo sapien
cctttctaagacaacgccgcagctt

SEQ ID NO: 5299670 - DNA, 25 bp, Homo sapien
gaggcagggaacgtaaagtagattc

SEQ ID NO: 5299671 - DNA, 25 bp, Homo sapien
cgaggactcatttacattttggcca

SEQ ID NO: 5299672 - DNA, 25 bp, Homo sapien
gctttacgaggactcatttacattt

SEQ ID NO: 5299673 - DNA, 25 bp, Homo sapien
ctttttttgctttacgaggactcat

SEQ ID NO: 5299674 - DNA, 25 bp, Homo sapien
gctctgaagctgtagcaagacttct

SEQ ID NO: 5299675 - DNA, 25 bp, Homo sapien
ccaatgagtgtaggctctattcaac

SEQ ID NO: 5299676 - DNA, 25 bp, Homo sapien
gcactcatttccaggtatagccact

SEQ ID NO: 5299677 - DNA, 25 bp, Homo sapien
tagccactttctcagcagacgacac

SEQ ID NO: 5299678 - DNA, 25 bp, Homo sapien
ccatcagaaagataaggacattttg

SEQ ID NO: 5299679 - DNA, 25 bp, Homo sapien
aatttagtaatttgatatgaaagct

SEQ ID NO: 5299680 - DNA, 25 bp, Homo sapien
aaagatccatcagaaagataaggac

SEQ ID NO: 5299681 - DNA, 25 bp, Homo sapien
tatgaaagctaaaagatccatcaga

SEQ ID NO: 5299682 - DNA, 25 bp, Homo sapien
gatacagtggccatcactaattagg

SEQ ID NO: 5299683 - DNA, 25 bp, Homo sapien
cacttaacctacttggaagcactat

SEQ ID NO: 5299684 - DNA, 25 bp, Homo sapien
gacagtatcaataggctgcccgact

SEQ ID NO: 5299685 - DNA, 25 bp, Homo sapien
aacagaacccataggtagcctggaa

SEQ ID NO: 5299686 - DNA, 25 bp, Homo sapien
tcgaacggcagtttctagacgcact

SEQ ID NO: 5299687 - DNA, 25 bp, Homo sapien
tgaaagcatgtggatacagaggtcc

SEQ ID NO: 5299688 - DNA, 25 bp, Homo sapien
tagacgcactttcaactcaggagca

SEQ ID NO: 5299689 - DNA, 25 bp, Homo sapien
tttggaagctgaacttgctgaggca

SEQ ID NO: 5299690 - DNA, 25 bp, Homo sapien
cctatgtccgactgatataaattcc

SEQ ID NO: 5299691 - DNA, 25 bp, Homo sapien
ccacctggtagaatgtatcttgaga

SEQ ID NO: 5299692 - DNA, 25 bp, Homo sapien
aaacactttacaattgccacctggt

SEQ ID NO: 5299693 - DNA, 25 bp, Homo sapien
tacgggcattctagaatcaggagat

SEQ ID NO: 5299694 - DNA, 25 bp, Homo sapien
ctagatcttaagggatgcatacatt

SEQ ID NO: 5299695 - DNA, 25 bp, Homo sapien
cgctaaaagctctatgttactggct

SEQ ID NO: 5299696 - DNA, 25 bp, Homo sapien
tattccttcttgaaccgctaaaagc

SEQ ID NO: 5299697 - DNA, 25 bp, Homo sapien
caccaagagcaaccagtgtttcaag

SEQ ID NO: 5299698 - DNA, 25 bp, Homo sapien
ggcacgattggaatgctggaagact

SEQ ID NO: 5299699 - DNA, 25 bp, Homo sapien
acttcatcaggtgtaggtacagagt

SEQ ID NO: 5299700 - DNA, 25 bp, Homo sapien
ccatgggtcgcatgaatttaatgca

SEQ ID NO: 5299701 - DNA, 25 bp, Homo sapien
tactagcagaccacaggaagagtgc

SEQ ID NO: 5299702 - DNA, 25 bp, Homo sapien
cattctgtaatgactggactcctat

SEQ ID NO: 5299703 - DNA, 25 bp, Homo sapien
agctaccatggccagcccttgttat

SEQ ID NO: 5299704 - DNA, 25 bp, Homo sapien
gagctaccatggccagcccttgtta

SEQ ID NO: 5299705 - DNA, 25 bp, Homo sapien
gcccttgttattcctatctatacac

SEQ ID NO: 5299706 - DNA, 25 bp, Homo sapien
ccagcccttgttattcctatctata

SEQ ID NO: 5299707 - DNA, 25 bp, Homo sapien
gttattgttgagtcacagaatgaga

SEQ ID NO: 5299708 - DNA, 25 bp, Homo sapien
aatataactgacacatactcatata

SEQ ID NO: 5299709 - DNA, 25 bp, Homo sapien
aaacataatatcaggccgagtgtgg

SEQ ID NO: 5299710 - DNA, 25 bp, Homo sapien
tattgctcatagttatcttactctc

SEQ ID NO: 5299711 - DNA, 25 bp, Homo sapien
tgtccactgtttttgaacgccagcc

SEQ ID NO: 5299712 - DNA, 25 bp, Homo sapien
tattccaggatgcaagcaagcgtgc

SEQ ID NO: 5299713 - DNA, 25 bp, Homo sapien
tgctacgaatcagagctgtccactg

SEQ ID NO: 5299714 - DNA, 25 bp, Homo sapien
ttgaagagctgcactgactggtgga

SEQ ID NO: 5299715 - DNA, 25 bp, Homo sapien
tctcccaatacggtacaggcctctt

SEQ ID NO: 5299716 - DNA, 25 bp, Homo sapien
gccgtactaaaatgaacatcagcag

SEQ ID NO: 5299717 - DNA, 25 bp, Homo sapien
ctatgtgacttggagagtctgacac

SEQ ID NO: 5299718 - DNA, 25 bp, Homo sapien
attttccaggaatgagaccaccgct

SEQ ID NO: 5299719 - DNA, 25 bp, Homo sapien
tccagtaaccaacagctggacagat

SEQ ID NO: 5299720 - DNA, 25 bp, Homo sapien
tcttgcaaataatcctgagcagctc

SEQ ID NO: 5299721 - DNA, 25 bp, Homo sapien
caggtcaatagaaggcggtgcaaaa

SEQ ID NO: 5299722 - DNA, 25 bp, Homo sapien
gagcagctcttactatctgttgtac

SEQ ID NO: 5299723 - DNA, 25 bp, Homo sapien
tgcaatatggactcgagcataaggg

SEQ ID NO: 5299724 - DNA, 25 bp, Homo sapien
catgctgtaacatgttcaatgggct

SEQ ID NO: 5299725 - DNA, 25 bp, Homo sapien
ggagtctagcaaggtatgtaaggcc

SEQ ID NO: 5299726 - DNA, 25 bp, Homo sapien
caaggtatgtaaggcctgcaggcat

SEQ ID NO: 5299727 - DNA, 25 bp, Homo sapien
gggaacaaagaaactgtatactcac

SEQ ID NO: 5299728 - DNA, 25 bp, Homo sapien
ggaacaaagaaactgtatactcaca

SEQ ID NO: 5299729 - DNA, 25 bp, Homo sapien
gaacaaagaaactgtatactcacac

SEQ ID NO: 5299730 - DNA, 25 bp, Homo sapien
ggggaacaaagaaactgtatactca

SEQ ID NO: 5299731 - DNA, 25 bp, Homo sapien
tagactctgagcacgtaaatcctgt

SEQ ID NO: 5299732 - DNA, 25 bp, Homo sapien
ctcctgatgcctggtttaaattgac

SEQ ID NO: 5299733 - DNA, 25 bp, Homo sapien
ggcaaagatttagcactacccactg

SEQ ID NO: 5299734 - DNA, 25 bp, Homo sapien
gacagatgtagaacgtttttgtaaa

SEQ ID NO: 5299735 - DNA, 25 bp, Homo sapien
ctatttaaccaaagtgccaccgcat

SEQ ID NO: 5299736 - DNA, 25 bp, Homo sapien
gggcccaggaattccgatagtgaag

SEQ ID NO: 5299737 - DNA, 25 bp, Homo sapien
caggaattccgatagtgaagtctag

SEQ ID NO: 5299738 - DNA, 25 bp, Homo sapien
aagtgccaccgcatggagaattggg

SEQ ID NO: 5299739 - DNA, 25 bp, Homo sapien
tgtatcaatagtttcaggggtataa

SEQ ID NO: 5299740 - DNA, 25 bp, Homo sapien
gtatcaatagtttcaggggtataaa

SEQ ID NO: 5299741 - DNA, 25 bp, Homo sapien
ctgtatcaatagtttcaggggtata

SEQ ID NO: 5299742 - DNA, 25 bp, Homo sapien
tactgctgatgtcactaagtattct

SEQ ID NO: 5299743 - DNA, 25 bp, Homo sapien
tgttcgctcatttatgaaccactaa

SEQ ID NO: 5299744 - DNA, 25 bp, Homo sapien
agggcttctcctctttataaagcca

SEQ ID NO: 5299745 - DNA, 25 bp, Homo sapien
ctcactgatgctagttttccagcct

SEQ ID NO: 5299746 - DNA, 25 bp, Homo sapien
tctttctatcacaaccagggaactc

SEQ ID NO: 5299747 - DNA, 25 bp, Homo sapien
ctatcacaaccagggaactctgttt

SEQ ID NO: 5299748 - DNA, 25 bp, Homo sapien
gtggctcctaaaaccctatcatctt

SEQ ID NO: 5299749 - DNA, 25 bp, Homo sapien
tgtttcctctactaacactgaggac

SEQ ID NO: 5299750 - DNA, 25 bp, Homo sapien
gcttcagccaacaaaaaagctctat

SEQ ID NO: 5299751 - DNA, 25 bp, Homo sapien
caactgttgttgctagtctataccg

SEQ ID NO: 5299752 - DNA, 25 bp, Homo sapien
tgcataatgacttgttacccatagc

SEQ ID NO: 5299753 - DNA, 25 bp, Homo sapien
tattggcacactaggaatctgaaat

SEQ ID NO: 5299754 - DNA, 25 bp, Homo sapien
ctaaccacaggcgactgagtgttgg

SEQ ID NO: 5299755 - DNA, 25 bp, Homo sapien
attcggctggtaaagtcaagagtgc

SEQ ID NO: 5299756 - DNA, 25 bp, Homo sapien
gaagctgactagaaaattcggctgg

SEQ ID NO: 5299757 - DNA, 25 bp, Homo sapien
ggcagttcatcgatggtaccacagt

SEQ ID NO: 5299758 - DNA, 25 bp, Homo sapien
gatattagaaagtatacactttggc

SEQ ID NO: 5299759 - DNA, 25 bp, Homo sapien
aaagataactgggtatagatattag

SEQ ID NO: 5299760 - DNA, 25 bp, Homo sapien
tagaaagtatacactttggctgggt

SEQ ID NO: 5299761 - DNA, 25 bp, Homo sapien
agataactgggtatagatattagaa

SEQ ID NO: 5299762 - DNA, 25 bp, Homo sapien
ttcttcacattataaatagtgttgc

SEQ ID NO: 5299763 - DNA, 25 bp, Homo sapien
atagtgttgcaagtaaacatttttg

SEQ ID NO: 5299764 - DNA, 25 bp, Homo sapien
tcttcacattataaatagtgttgca

SEQ ID NO: 5299765 - DNA, 25 bp, Homo sapien
ttatgactctgaatagacactgcca

SEQ ID NO: 5299766 - DNA, 25 bp, Homo sapien
aaaacaatagattgtggtttagtcg

SEQ ID NO: 5299767 - DNA, 25 bp, Homo sapien
aacaatagattgtggtttagtcgtt

SEQ ID NO: 5299768 - DNA, 25 bp, Homo sapien
acaatagattgtggtttagtcgtta

SEQ ID NO: 5299769 - DNA, 25 bp, Homo sapien
caatagattgtggtttagtcgttac

SEQ ID NO: 5299770 - DNA, 25 bp, Homo sapien
tgcccaagctttgagaacagccagt

SEQ ID NO: 5299771 - DNA, 25 bp, Homo sapien
gctttgagaacagccagtttttcca

SEQ ID NO: 5299772 - DNA, 25 bp, Homo sapien
gcccaagctttgagaacagccagtt

SEQ ID NO: 5299773 - DNA, 25 bp, Homo sapien
ctctgcccaagctttgagaacagcc

SEQ ID NO: 5299774 - DNA, 25 bp, Homo sapien
actctctcggtacagctggctggaa

SEQ ID NO: 5299775 - DNA, 25 bp, Homo sapien
caagaagattgtgtactcgacggag

SEQ ID NO: 5299776 - DNA, 25 bp, Homo sapien
tccacttcctatccatgtactacat

SEQ ID NO: 5299777 - DNA, 25 bp, Homo sapien
tcattgagatcactgacaactccac

SEQ ID NO: 5299778 - DNA, 25 bp, Homo sapien
ctggcaagctttcgctattatatct

SEQ ID NO: 5299779 - DNA, 25 bp, Homo sapien
tgatggtgtatcttgtgaaaaggct

SEQ ID NO: 5299780 - DNA, 25 bp, Homo sapien
tggtgtatcttgtgaaaaggctggt

SEQ ID NO: 5299781 - DNA, 25 bp, Homo sapien
cgctattatatctgatggtgtatct

SEQ ID NO: 5299782 - DNA, 25 bp, Homo sapien
ataatgtcttcaagcgcctggagcc

SEQ ID NO: 5299783 - DNA, 25 bp, Homo sapien
cagagagatgaagtaccaagaggtc

SEQ ID NO: 5299784 - DNA, 25 bp, Homo sapien
tatgatcagttgcagccatgaatgc

SEQ ID NO: 5299785 - DNA, 25 bp, Homo sapien
catgaatgccatgcgaatgaggtca

SEQ ID NO: 5299786 - DNA, 25 bp, Homo sapien
gcagcaaatactcgagtggcccagc

SEQ ID NO: 5299787 - DNA, 25 bp, Homo sapien
cacaaattgatgattcgacacaggc

SEQ ID NO: 5299788 - DNA, 25 bp, Homo sapien
gatttatcttcttcacctaacgtgg

SEQ ID NO: 5299789 - DNA, 25 bp, Homo sapien
gaagtttagcagaacgtgccaaggc

SEQ ID NO: 5299790 - DNA, 25 bp, Homo sapien
cataattttcgatctgtctcccggt

SEQ ID NO: 5299791 - DNA, 25 bp, Homo sapien
tatcagttcgagaactaaccccagg

SEQ ID NO: 5299792 - DNA, 25 bp, Homo sapien
gaagtccctcaagaccagtttctgt

SEQ ID NO: 5299793 - DNA, 25 bp, Homo sapien
tctcccggtctagcattccaaaaag

SEQ ID NO: 5299794 - DNA, 25 bp, Homo sapien
aatgaatttgtatggtattttggtg

SEQ ID NO: 5299795 - DNA, 25 bp, Homo sapien
tttttacaaatgaatttgtatggta

SEQ ID NO: 5299796 - DNA, 25 bp, Homo sapien
tacaaatgaatttgtatggtatttt

SEQ ID NO: 5299797 - DNA, 25 bp, Homo sapien
aatttttacaaatgaatttgtatgg

SEQ ID NO: 5299798 - DNA, 25 bp, Homo sapien
ggcaggccatgcctatggcatcagc

SEQ ID NO: 5299799 - DNA, 25 bp, Homo sapien
gagtccgaacttttggtatgtgcca

SEQ ID NO: 5299800 - DNA, 25 bp, Homo sapien
ctgctttccttctgagtccgaactt

SEQ ID NO: 5299801 - DNA, 25 bp, Homo sapien
gcaggccatgcctatggcatcagcc

SEQ ID NO: 5299802 - DNA, 25 bp, Homo sapien
tgtttatggcaactgacatgtagaa

SEQ ID NO: 5299803 - DNA, 25 bp, Homo sapien
gaagaccagctaggaatttaagcta

SEQ ID NO: 5299804 - DNA, 25 bp, Homo sapien
tctttgtatccaagcagcttctagg

SEQ ID NO: 5299805 - DNA, 25 bp, Homo sapien
tacacctagatatcagaagaccagc

SEQ ID NO: 5299806 - DNA, 25 bp, Homo sapien
acaaatgggaactacataagtgaac

SEQ ID NO: 5299807 - DNA, 25 bp, Homo sapien
gcaagttgccgaagacatgccacag

SEQ ID NO: 5299808 - DNA, 25 bp, Homo sapien
gctgctcgtcgaagtaacaaatggg

SEQ ID NO: 5299809 - DNA, 25 bp, Homo sapien
tattcacatacttccgctgcttctc

SEQ ID NO: 5299810 - DNA, 25 bp, Homo sapien
caatgttaggcgatttctctttaaa

SEQ ID NO: 5299811 - DNA, 25 bp, Homo sapien
tcataacaatgttaggcgatttctc

SEQ ID NO: 5299812 - DNA, 25 bp, Homo sapien
ctgtaaatcataacaatgttaggcg

SEQ ID NO: 5299813 - DNA, 25 bp, Homo sapien
atcttatttgcccaatgaatatata

SEQ ID NO: 5299814 - DNA, 25 bp, Homo sapien
gaaaggtccctgaatatagtacact

SEQ ID NO: 5299815 - DNA, 25 bp, Homo sapien
tctgaaaggtccctgaatatagtac

SEQ ID NO: 5299816 - DNA, 25 bp, Homo sapien
tcatctgaaaggtccctgaatatag

SEQ ID NO: 5299817 - DNA, 25 bp, Homo sapien
tttcatctgaaaggtccctgaatat

SEQ ID NO: 5299818 - DNA, 25 bp, Homo sapien
ccaccaaacaagaggaacgaattgt

SEQ ID NO: 5299819 - DNA, 25 bp, Homo sapien
acaaaggctaggaacaaggctagat

SEQ ID NO: 5299820 - DNA, 25 bp, Homo sapien
aaggcaagatatggcagctgcctga

SEQ ID NO: 5299821 - DNA, 25 bp, Homo sapien
tagattgacatgtcgtggtgcaaac

SEQ ID NO: 5299822 - DNA, 25 bp, Homo sapien
cagtagttattatagcacccaagca

SEQ ID NO: 5299823 - DNA, 25 bp, Homo sapien
taatgttggttccacatagccacga

SEQ ID NO: 5299824 - DNA, 25 bp, Homo sapien
tgaaggcggaactgtcaacagcaag

SEQ ID NO: 5299825 - DNA, 25 bp, Homo sapien
gccacgatacatcggaccactagaa

SEQ ID NO: 5299826 - DNA, 25 bp, Homo sapien
atttcatagagcaaataattttcca

SEQ ID NO: 5299827 - DNA, 25 bp, Homo sapien
cttaccacggtcatttttatttcat

SEQ ID NO: 5299828 - DNA, 25 bp, Homo sapien
gtcatttttatttcatagagcaaat

SEQ ID NO: 5299829 - DNA, 25 bp, Homo sapien
tttcatagagcaaataattttccaa

SEQ ID NO: 5299830 - DNA, 25 bp, Homo sapien
gccaatgaatgaccagtcctagata

SEQ ID NO: 5299831 - DNA, 25 bp, Homo sapien
gatgttgtcctgagcctattccacc

SEQ ID NO: 5299832 - DNA, 25 bp, Homo sapien
gatacaacatctcgagccgatttca

SEQ ID NO: 5299833 - DNA, 25 bp, Homo sapien
gatgtcccatcttgtgctagagcca

SEQ ID NO: 5299834 - DNA, 25 bp, Homo sapien
tgggccattctagcaataaaagttg

SEQ ID NO: 5299835 - DNA, 25 bp, Homo sapien
ggttgtccagaggacccataaccag

SEQ ID NO: 5299836 - DNA, 25 bp, Homo sapien
gggcagatttacgaacttcctcagg

SEQ ID NO: 5299837 - DNA, 25 bp, Homo sapien
ccataaccagtgtcagggcagattt

SEQ ID NO: 5299838 - DNA, 25 bp, Homo sapien
gacacctttagcttgtttaacacat

SEQ ID NO: 5299839 - DNA, 25 bp, Homo sapien
agcctgctggcggacacctttagct

SEQ ID NO: 5299840 - DNA, 25 bp, Homo sapien
gctggcggacacctttagcttgttt

SEQ ID NO: 5299841 - DNA, 25 bp, Homo sapien
gcacagcctgctggcggacaccttt

SEQ ID NO: 5299842 - DNA, 25 bp, Homo sapien
cgctgtaaggatttaaagctcaatt

SEQ ID NO: 5299843 - DNA, 25 bp, Homo sapien
aaatctccctgaggtcgctgtaagg

SEQ ID NO: 5299844 - DNA, 25 bp, Homo sapien
gctggttgaaaaccaaagtaggatc

SEQ ID NO: 5299845 - DNA, 25 bp, Homo sapien
tattaagccgcacagcctgctggtt

SEQ ID NO: 5299846 - DNA, 25 bp, Homo sapien
catcaatgactgagactccgagagg

SEQ ID NO: 5299847 - DNA, 25 bp, Homo sapien
agaagcatcaatgactgagactccg

SEQ ID NO: 5299848 - DNA, 25 bp, Homo sapien
caatgactgagactccgagagggag

SEQ ID NO: 5299849 - DNA, 25 bp, Homo sapien
atgaggaaacactacaccaaaaagg

SEQ ID NO: 5299850 - DNA, 25 bp, Homo sapien
aataaatagaggaaggatcatgctc

SEQ ID NO: 5299851 - DNA, 25 bp, Homo sapien
gaggaaggatcatgctccagagccc

SEQ ID NO: 5299852 - DNA, 25 bp, Homo sapien
taaatagaggaaggatcatgctcca

SEQ ID NO: 5299853 - DNA, 25 bp, Homo sapien
aaatagaggaaggatcatgctccag

SEQ ID NO: 5299854 - DNA, 25 bp, Homo sapien
gaattccgctaccagttctctaaga

SEQ ID NO: 5299855 - DNA, 25 bp, Homo sapien
ggctgagttgtcagtcaaagtgaat

SEQ ID NO: 5299856 - DNA, 25 bp, Homo sapien
cataatggcagagggatctgaggag

SEQ ID NO: 5299857 - DNA, 25 bp, Homo sapien
ggtcttcaattgatttatgatcagt

SEQ ID NO: 5299858 - DNA, 25 bp, Homo sapien
gcaacatgttcaacaggaataaaat

SEQ ID NO: 5299859 - DNA, 25 bp, Homo sapien
gctggttttaatatacaataatggt

SEQ ID NO: 5299860 - DNA, 25 bp, Homo sapien
gggtgccatagcatgcttgtagtcc

SEQ ID NO: 5299861 - DNA, 25 bp, Homo sapien
aaacagaacttcagatcagattaaa

SEQ ID NO: 5299862 - DNA, 25 bp, Homo sapien
gcctcataagttgcaacacagtcaa

SEQ ID NO: 5299863 - DNA, 25 bp, Homo sapien
cagtaaggagtcaacaagtatcagc

SEQ ID NO: 5299864 - DNA, 25 bp, Homo sapien
tgcccaataatgtacaatgaaccac

SEQ ID NO: 5299865 - DNA, 25 bp, Homo sapien
ttacagtatataggaagcatttcag

SEQ ID NO: 5299866 - DNA, 25 bp, Homo sapien
cattgcagcactagctttcagatga

SEQ ID NO: 5299867 - DNA, 25 bp, Homo sapien
agctccatgggctttcattacagat

SEQ ID NO: 5299868 - DNA, 25 bp, Homo sapien
tggaggtaacaaagccaagatatca

SEQ ID NO: 5299869 - DNA, 25 bp, Homo sapien
cataaagtcttaaacggaccattgc

SEQ ID NO: 5299870 - DNA, 25 bp, Homo sapien
ctaaaatatcaaaaacatagttggt

SEQ ID NO: 5299871 - DNA, 25 bp, Homo sapien
gacaatgtgcaacgaagctcctcat

SEQ ID NO: 5299872 - DNA, 25 bp, Homo sapien
gggtcatcaattttcgaatcacatc

SEQ ID NO: 5299873 - DNA, 25 bp, Homo sapien
gtgacatcatagtcatggcacattc

SEQ ID NO: 5299874 - DNA, 25 bp, Homo sapien
tcgaatcacatcttcagttagtagc

SEQ ID NO: 5299875 - DNA, 25 bp, Homo sapien
gagagtaaaggtgcccccttgcctg

SEQ ID NO: 5299876 - DNA, 25 bp, Homo sapien
tattggccccttagcaatagagcct

SEQ ID NO: 5299877 - DNA, 25 bp, Homo sapien
cagcacccggccactacatatattt

SEQ ID NO: 5299878 - DNA, 25 bp, Homo sapien
taaaacacctcctagatgtgtgaga

SEQ ID NO: 5299879 - DNA, 25 bp, Homo sapien
gctccagcacgaccttccaaagtta

SEQ ID NO: 5299880 - DNA, 25 bp, Homo sapien
cttgggcagatggtaacgaacgaca

SEQ ID NO: 5299881 - DNA, 25 bp, Homo sapien
gccacaataacaacatcttgggcag

SEQ ID NO: 5299882 - DNA, 25 bp, Homo sapien
caggtaaaagaatcgcctcgggcct

SEQ ID NO: 5299883 - DNA, 25 bp, Homo sapien
tcgtaaaagatcttcagcaatacta

SEQ ID NO: 5299884 - DNA, 25 bp, Homo sapien
agatagcctgctattttgggcagca

SEQ ID NO: 5299885 - DNA, 25 bp, Homo sapien
cagccagcttgggtgcgctgtaaag

SEQ ID NO: 5299886 - DNA, 25 bp, Homo sapien
gatcttcagcaatactaactaccat

SEQ ID NO: 5299887 - DNA, 25 bp, Homo sapien
taacatgttactagacttggacaaa

SEQ ID NO: 5299888 - DNA, 25 bp, Homo sapien
gtacaactgttatttgaccaccctg

SEQ ID NO: 5299889 - DNA, 25 bp, Homo sapien
ttataatagggtctgttaacaccat

SEQ ID NO: 5299890 - DNA, 25 bp, Homo sapien
cagtagctaggaccatgaagttggc

SEQ ID NO: 5299891 - DNA, 25 bp, Homo sapien
tatccactgacagcttctggtgagg

SEQ ID NO: 5299892 - DNA, 25 bp, Homo sapien
caaaggacactgatgtactccacct

SEQ ID NO: 5299893 - DNA, 25 bp, Homo sapien
ctttcctttggcatgaggaatgccc

SEQ ID NO: 5299894 - DNA, 25 bp, Homo sapien
tcaagttgttgagccgttctgcaca

SEQ ID NO: 5299895 - DNA, 25 bp, Homo sapien
actgaagtcacaatctccaaaagcc

SEQ ID NO: 5299896 - DNA, 25 bp, Homo sapien
gcagcactgaagtcacaatctccaa

SEQ ID NO: 5299897 - DNA, 25 bp, Homo sapien
acacagcgcaaacaccatgcagcag

SEQ ID NO: 5299898 - DNA, 25 bp, Homo sapien
tggaaaggtaatgccacagccacac

SEQ ID NO: 5299899 - DNA, 25 bp, Homo sapien
tgcaatgtctgctgcgccagatttg

SEQ ID NO: 5299900 - DNA, 25 bp, Homo sapien
tgtctgctgcgccagatttgttttc

SEQ ID NO: 5299901 - DNA, 25 bp, Homo sapien
aagctctgcaccaggctcccgagtt

SEQ ID NO: 5299902 - DNA, 25 bp, Homo sapien
tatagatgcttcttgaataagaggg

SEQ ID NO: 5299903 - DNA, 25 bp, Homo sapien
catgggacaggaacgtggcaaagct

SEQ ID NO: 5299904 - DNA, 25 bp, Homo sapien
tgttgcccgaggatgggaaaccaga

SEQ ID NO: 5299905 - DNA, 25 bp, Homo sapien
tgcccacagtagctcttaggataaa

SEQ ID NO: 5299906 - DNA, 25 bp, Homo sapien
gaaacacatcgtctggagtacacag

SEQ ID NO: 5299907 - DNA, 25 bp, Homo sapien
tctttcacacatacgtgttacaaac

SEQ ID NO: 5299908 - DNA, 25 bp, Homo sapien
aattctttcacacatacgtgttaca

SEQ ID NO: 5299909 - DNA, 25 bp, Homo sapien
tgcctggccaaaattctttcacaca

SEQ ID NO: 5299910 - DNA, 25 bp, Homo sapien
gccaaaattctttcacacatacgtg

SEQ ID NO: 5299911 - DNA, 25 bp, Homo sapien
taagacttcatcaaatgttgctcgc

SEQ ID NO: 5299912 - DNA, 25 bp, Homo sapien
tgaccctccacgcagaaatcctgtg

SEQ ID NO: 5299913 - DNA, 25 bp, Homo sapien
tcctgtggccatgagttctaagact

SEQ ID NO: 5299914 - DNA, 25 bp, Homo sapien
aactctcacttcacgattaacggac

SEQ ID NO: 5299915 - DNA, 25 bp, Homo sapien
aaatatatttctgaggcactctagc

SEQ ID NO: 5299916 - DNA, 25 bp, Homo sapien
caaatatatttctgaggcactctag

SEQ ID NO: 5299917 - DNA, 25 bp, Homo sapien
tatttctgaggcactctagcttaat

SEQ ID NO: 5299918 - DNA, 25 bp, Homo sapien
atatatttctgaggcactctagctt

SEQ ID NO: 5299919 - DNA, 25 bp, Homo sapien
gtgccagattccagtaccttataca

SEQ ID NO: 5299920 - DNA, 25 bp, Homo sapien
tgtgactacatcaaggaaaatgcca

SEQ ID NO: 5299921 - DNA, 25 bp, Homo sapien
tgctcacaggcacccctgagatatc

SEQ ID NO: 5299922 - DNA, 25 bp, Homo sapien
tctctacggaactgtgaagcaaagc

SEQ ID NO: 5299923 - DNA, 25 bp, Homo sapien
tcctaaaagtttagacactgccact

SEQ ID NO: 5299924 - DNA, 25 bp, Homo sapien
tctagttcagcagtccacataaata

SEQ ID NO: 5299925 - DNA, 25 bp, Homo sapien
gccttaaagcagagagtggctatat

SEQ ID NO: 5299926 - DNA, 25 bp, Homo sapien
cttcattctgtagttctagtagaca

SEQ ID NO: 5299927 - DNA, 25 bp, Homo sapien
agaaccagacttaccacctctcctg

SEQ ID NO: 5299928 - DNA, 25 bp, Homo sapien
gcttccagagatggaatagcaagaa

SEQ ID NO: 5299929 - DNA, 25 bp, Homo sapien
gtaaataacatcctataacatctgc

SEQ ID NO: 5299930 - DNA, 25 bp, Homo sapien
cctgagataaccaaaaaactcgaca

SEQ ID NO: 5299931 - DNA, 25 bp, Homo sapien
cctatcagtcaagagagacctggca

SEQ ID NO: 5299932 - DNA, 25 bp, Homo sapien
tcgaacagccattgacctatcagtc

SEQ ID NO: 5299933 - DNA, 25 bp, Homo sapien
aaatatcacgatgggaggaagctgc

SEQ ID NO: 5299934 - DNA, 25 bp, Homo sapien
cattaagatttcacttcgcccttga

SEQ ID NO: 5299935 - DNA, 25 bp, Homo sapien
gcagaaaacatccaacacatttaaa

SEQ ID NO: 5299936 - DNA, 25 bp, Homo sapien
tgggtctaatggtcttacctccaaa

SEQ ID NO: 5299937 - DNA, 25 bp, Homo sapien
tcatcttcttgtgactaactcaaac

SEQ ID NO: 5299938 - DNA, 25 bp, Homo sapien
tacctggcaagtaagaatagtcaat

SEQ ID NO: 5299939 - DNA, 25 bp, Homo sapien
taaaatgctccgacacaagccaccg

SEQ ID NO: 5299940 - DNA, 25 bp, Homo sapien
tttcataaaatgctccgacacaagc

SEQ ID NO: 5299941 - DNA, 25 bp, Homo sapien
caatagattatttaccgtttctgga

SEQ ID NO: 5299942 - DNA, 25 bp, Homo sapien
tggaaatgcgctgcccaacattctc

SEQ ID NO: 5299943 - DNA, 25 bp, Homo sapien
tatccccaatgctataaagggctgc

SEQ ID NO: 5299944 - DNA, 25 bp, Homo sapien
aattttgttggtaagtaggccgcag

SEQ ID NO: 5299945 - DNA, 25 bp, Homo sapien
aataattttcgtgtaggtggtccag

SEQ ID NO: 5299946 - DNA, 25 bp, Homo sapien
taggccgcagtgtcatctttatttc

SEQ ID NO: 5299947 - DNA, 25 bp, Homo sapien
tagcaataaactgtgggctaactcc

SEQ ID NO: 5299948 - DNA, 25 bp, Homo sapien
ttgcttcggtgatttgagccaaagc

SEQ ID NO: 5299949 - DNA, 25 bp, Homo sapien
gactttatcaagaaatcgcaaccat

SEQ ID NO: 5299950 - DNA, 25 bp, Homo sapien
gttggcagcaaccaagactttatca

SEQ ID NO: 5299951 - DNA, 25 bp, Homo sapien
aagaggccgccgcaagcctccgtgg

SEQ ID NO: 5299952 - DNA, 25 bp, Homo sapien
ggctactccaagaaccgcaagcggc

SEQ ID NO: 5299953 - DNA, 25 bp, Homo sapien
ggtccggaatgcacccgagaagcct

SEQ ID NO: 5299954 - DNA, 25 bp, Homo sapien
gtgacaacaccaggcggtccggaat

SEQ ID NO: 5299955 - DNA, 25 bp, Homo sapien
gatcagctgagctccgggggtagaa

SEQ ID NO: 5299956 - DNA, 25 bp, Homo sapien
ctcgtagtctggaagggaagatcag

SEQ ID NO: 5299957 - DNA, 25 bp, Homo sapien
cgtagtctggaagggaagatcagct

SEQ ID NO: 5299958 - DNA, 25 bp, Homo sapien
aagatcagctgagctccgggggtag

SEQ ID NO: 5299959 - DNA, 25 bp, Homo sapien
gatgatcatagaggtagtgccgaaa

SEQ ID NO: 5299960 - DNA, 25 bp, Homo sapien
ggaaatacctcctatgtcaccatag

SEQ ID NO: 5299961 - DNA, 25 bp, Homo sapien
tattttcctatgatctggcaccagc

SEQ ID NO: 5299962 - DNA, 25 bp, Homo sapien
taaaacagccattcttagaggtcac

SEQ ID NO: 5299963 - DNA, 25 bp, Homo sapien
gccactgagtgcaaaagcctgttga

SEQ ID NO: 5299964 - DNA, 25 bp, Homo sapien
tgggatgcatcatggaagcctccag

SEQ ID NO: 5299965 - DNA, 25 bp, Homo sapien
tgtcgatagatgtacagtcgcccca

SEQ ID NO: 5299966 - DNA, 25 bp, Homo sapien
gggcttactcgggaaacactgaata

SEQ ID NO: 5299967 - DNA, 25 bp, Homo sapien
agttgggtgtgttggtgtatgcatg

SEQ ID NO: 5299968 - DNA, 25 bp, Homo sapien
ttgggtgtgttggtgtatgcatgta

SEQ ID NO: 5299969 - DNA, 25 bp, Homo sapien
ttagttgggtgtgttggtgtatgca

SEQ ID NO: 5299970 - DNA, 25 bp, Homo sapien
tagttgggtgtgttggtgtatgcat

SEQ ID NO: 5299971 - DNA, 25 bp, Homo sapien
aaaggtatgtttctagggaggcaat

SEQ ID NO: 5299972 - DNA, 25 bp, Homo sapien
tgcccttagtcccacaaattatgta

SEQ ID NO: 5299973 - DNA, 25 bp, Homo sapien
catggacatgcaacctgtgcagttg

SEQ ID NO: 5299974 - DNA, 25 bp, Homo sapien
tgaacgagggccgtacagtttcatt

SEQ ID NO: 5299975 - DNA, 25 bp, Homo sapien
caaatgttctcaattgtcccgaaga

SEQ ID NO: 5299976 - DNA, 25 bp, Homo sapien
tacattctcactaactggccacatc

SEQ ID NO: 5299977 - DNA, 25 bp, Homo sapien
gacatcatgacacacttggcctcta

SEQ ID NO: 5299978 - DNA, 25 bp, Homo sapien
caaacacctgtgtactgtcatctag

SEQ ID NO: 5299979 - DNA, 25 bp, Homo sapien
tgaatacattaatgccgtccctggg

SEQ ID NO: 5299980 - DNA, 25 bp, Homo sapien
tagctactgccttacagcacggttg

SEQ ID NO: 5299981 - DNA, 25 bp, Homo sapien
tctattagttccctcaagagccggt

SEQ ID NO: 5299982 - DNA, 25 bp, Homo sapien
catatagttggaaggcccactgggc

SEQ ID NO: 5299983 - DNA, 25 bp, Homo sapien
cagaagcaggatactttttcagaag

SEQ ID NO: 5299984 - DNA, 25 bp, Homo sapien
gaaaactgcatatcagaagcaggat

SEQ ID NO: 5299985 - DNA, 25 bp, Homo sapien
tatctattgatattccctagcagat

SEQ ID NO: 5299986 - DNA, 25 bp, Homo sapien
tttccatctttagaacaaagagatg

SEQ ID NO: 5299987 - DNA, 25 bp, Homo sapien
tgttaggtcgatcctcaggtttctt

SEQ ID NO: 5299988 - DNA, 25 bp, Homo sapien
cttccacacagtcaaggtccttagt

SEQ ID NO: 5299989 - DNA, 25 bp, Homo sapien
caaggtccttagtatttcagatgtg

SEQ ID NO: 5299990 - DNA, 25 bp, Homo sapien
aacatgtgtgtcgttcatttttctc

SEQ ID NO: 5299991 - DNA, 25 bp, Homo sapien
atgccatcccgtaggtctgtgaaaa

SEQ ID NO: 5299992 - DNA, 25 bp, Homo sapien
tgatgccatcccgtaggtctgtgaa

SEQ ID NO: 5299993 - DNA, 25 bp, Homo sapien
gatgccatcccgtaggtctgtgaaa

SEQ ID NO: 5299994 - DNA, 25 bp, Homo sapien
taattctttctttgagataatttta

SEQ ID NO: 5299995 - DNA, 25 bp, Homo sapien
tgtttaattctttctttgagataat

SEQ ID NO: 5299996 - DNA, 25 bp, Homo sapien
ttcttgtttaattctttctttgaga

SEQ ID NO: 5299997 - DNA, 25 bp, Homo sapien
cttgtttaattctttctttgagata

SEQ ID NO: 5299998 - DNA, 25 bp, Homo sapien
ttcagcaagaattagccccaaagcg

SEQ ID NO: 5299999 - DNA, 25 bp, Homo sapien
gccccaaagcgtagaggtccacttc

SEQ ID NO: 5300000 - DNA, 25 bp, Homo sapien
tcctttccatagtcttgcgaagaaa

SEQ ID NO: 5300001 - DNA, 25 bp, Homo sapien
aagaattagccccaaagcgtagagg

SEQ ID NO: 5300002 - DNA, 25 bp, Homo sapien
tacataaatatccagccttctaaag

SEQ ID NO: 5300003 - DNA, 25 bp, Homo sapien
cctaggttcaaatctgtaccgccga

SEQ ID NO: 5300004 - DNA, 25 bp, Homo sapien
ctttgttatgctccttacataaata

SEQ ID NO: 5300005 - DNA, 25 bp, Homo sapien
tgaccaaaacatcttacaccacaaa

SEQ ID NO: 5300006 - DNA, 25 bp, Homo sapien
aagtctccaatctttacttgttttg

SEQ ID NO: 5300007 - DNA, 25 bp, Homo sapien
tatcgcaaagttcccttactccttg

SEQ ID NO: 5300008 - DNA, 25 bp, Homo sapien
tatctactaagaatatattacttgg

SEQ ID NO: 5300009 - DNA, 25 bp, Homo sapien
ttactccttgttcgctttccatcat

SEQ ID NO: 5300010 - DNA, 25 bp, Homo sapien
cacacagactctacgggataacaca

SEQ ID NO: 5300011 - DNA, 25 bp, Homo sapien
taacacacttatgagagggcctacc

SEQ ID NO: 5300012 - DNA, 25 bp, Homo sapien
ccagcccataggaggtattgaccaa

SEQ ID NO: 5300013 - DNA, 25 bp, Homo sapien
taacagtcagattggagcctaacac

SEQ ID NO: 5300014 - DNA, 25 bp, Homo sapien
cagcgcctttggtctagttcctaag

SEQ ID NO: 5300015 - DNA, 25 bp, Homo sapien
gaaatcaacaactgtagtagtgaga

SEQ ID NO: 5300016 - DNA, 25 bp, Homo sapien
ggtaaagaccattctctggcaaaac

SEQ ID NO: 5300017 - DNA, 25 bp, Homo sapien
acacttggagacttttgtaagaggg

SEQ ID NO: 5300018 - DNA, 25 bp, Homo sapien
tttgaatgtatataatccacccctt

SEQ ID NO: 5300019 - DNA, 25 bp, Homo sapien
ttgaatgtatataatccaccccttt

SEQ ID NO: 5300020 - DNA, 25 bp, Homo sapien
tgaatgtatataatccacccctttt

SEQ ID NO: 5300021 - DNA, 25 bp, Homo sapien
caaggtccctttatcacagaattcc

SEQ ID NO: 5300022 - DNA, 25 bp, Homo sapien
gaattccatttggatgaaaaggcac

SEQ ID NO: 5300023 - DNA, 25 bp, Homo sapien
catttggatgaaaaggcacttagtc

SEQ ID NO: 5300024 - DNA, 25 bp, Homo sapien
ttccatttggatgaaaaggcactta

SEQ ID NO: 5300025 - DNA, 25 bp, Homo sapien
ctgacataaaacatgagggtgcccc

SEQ ID NO: 5300026 - DNA, 25 bp, Homo sapien
gaatgggaccccattggcctcagga

SEQ ID NO: 5300027 - DNA, 25 bp, Homo sapien
gatgccagctctttaggatctccag

SEQ ID NO: 5300028 - DNA, 25 bp, Homo sapien
gattttagtgagaggactgtcccca

SEQ ID NO: 5300029 - DNA, 25 bp, Homo sapien
tgctctcaagagaatcatcactggt

SEQ ID NO: 5300030 - DNA, 25 bp, Homo sapien
tatttacatgatcaagttttgccaa

SEQ ID NO: 5300031 - DNA, 25 bp, Homo sapien
aaatccatcccaacagccattgtag

SEQ ID NO: 5300032 - DNA, 25 bp, Homo sapien
atccatcccaacagccattgtagtg

SEQ ID NO: 5300033 - DNA, 25 bp, Homo sapien
aagtctttccgtcaattctgtgttt

SEQ ID NO: 5300034 - DNA, 25 bp, Homo sapien
gaaaacttggccaaatccacctgag

SEQ ID NO: 5300035 - DNA, 25 bp, Homo sapien
aacgtaagtctttccgtcaattctg

SEQ ID NO: 5300036 - DNA, 25 bp, Homo sapien
gtaagtctttccgtcaattctgtgt

SEQ ID NO: 5300037 - DNA, 25 bp, Homo sapien
tcttgtccacagtatactttgtttc

SEQ ID NO: 5300038 - DNA, 25 bp, Homo sapien
caggaaggtcaaatctgggtgccaa

SEQ ID NO: 5300039 - DNA, 25 bp, Homo sapien
tttctttcatgtcaggaaggtcaaa

SEQ ID NO: 5300040 - DNA, 25 bp, Homo sapien
tcatgtcaggaaggtcaaatctggg

SEQ ID NO: 5300041 - DNA, 25 bp, Homo sapien
actatatacttaccgttctcctctg

SEQ ID NO: 5300042 - DNA, 25 bp, Homo sapien
ctatatacttaccgttctcctctgg

SEQ ID NO: 5300043 - DNA, 25 bp, Homo sapien
aactatatacttaccgttctcctct

SEQ ID NO: 5300044 - DNA, 25 bp, Homo sapien
tatatacttaccgttctcctctggc

SEQ ID NO: 5300045 - DNA, 25 bp, Homo sapien
ggaacctattccctcaagtcatgtc

SEQ ID NO: 5300046 - DNA, 25 bp, Homo sapien
ccacagtaatcgtggctgagggcac

SEQ ID NO: 5300047 - DNA, 25 bp, Homo sapien
tagtgccatggttcttgactgcatc

SEQ ID NO: 5300048 - DNA, 25 bp, Homo sapien
gagggcacctcatgtgcagaactct

SEQ ID NO: 5300049 - DNA, 25 bp, Homo sapien
tagtcaaagatttctcgacacatct

SEQ ID NO: 5300050 - DNA, 25 bp, Homo sapien
actctgctcaaataagggtgtacaa

SEQ ID NO: 5300051 - DNA, 25 bp, Homo sapien
ttcagatcaaaatatgttcaatgca

SEQ ID NO: 5300052 - DNA, 25 bp, Homo sapien
gtttacagtgtagcatgtgcacata

SEQ ID NO: 5300053 - DNA, 25 bp, Homo sapien
ttttgccttcctttgattatttctg

SEQ ID NO: 5300054 - DNA, 25 bp, Homo sapien
gccttcctttgattatttctgagac

SEQ ID NO: 5300055 - DNA, 25 bp, Homo sapien
tcctttgattatttctgagaccatt

SEQ ID NO: 5300056 - DNA, 25 bp, Homo sapien
cttcctttgattatttctgagacca

SEQ ID NO: 5300057 - DNA, 25 bp, Homo sapien
cataagcaacgaagaactgtttaaa

SEQ ID NO: 5300058 - DNA, 25 bp, Homo sapien
tatctgctgagaagtcaccttcaga

SEQ ID NO: 5300059 - DNA, 25 bp, Homo sapien
gaatttatctctgatgtatctgctg

SEQ ID NO: 5300060 - DNA, 25 bp, Homo sapien
aactgtcactgttagaatttatctc

SEQ ID NO: 5300061 - DNA, 25 bp, Homo sapien
cacgtagtagcaaaagaaccagagg

SEQ ID NO: 5300062 - DNA, 25 bp, Homo sapien
agtgtgctggtcactaaagagttgc

SEQ ID NO: 5300063 - DNA, 25 bp, Homo sapien
ggactcacacgtagtagcaaaagaa

SEQ ID NO: 5300064 - DNA, 25 bp, Homo sapien
gtcactaaagagttgctttgggact

SEQ ID NO: 5300065 - DNA, 25 bp, Homo sapien
tttagcggccaattgttttgcttcc

SEQ ID NO: 5300066 - DNA, 25 bp, Homo sapien
tatctgaagatatgcaagtttagcg

SEQ ID NO: 5300067 - DNA, 25 bp, Homo sapien
tagaacctgtaccaatactatattc

SEQ ID NO: 5300068 - DNA, 25 bp, Homo sapien
tcctgtttagtagaacctgtaccaa

SEQ ID NO: 5300069 - DNA, 25 bp, Homo sapien
tctgggcaattctattgataaggcc

SEQ ID NO: 5300070 - DNA, 25 bp, Homo sapien
gcctatgtaattccccatggataat

SEQ ID NO: 5300071 - DNA, 25 bp, Homo sapien
ccttctgaagaattcgttgttgtca

SEQ ID NO: 5300072 - DNA, 25 bp, Homo sapien
ttcataatttacagttagtcttttc

SEQ ID NO: 5300073 - DNA, 25 bp, Homo sapien
tctcttccatctattataacttgaa

SEQ ID NO: 5300074 - DNA, 25 bp, Homo sapien
tccttctttgatctaccttcacctt

SEQ ID NO: 5300075 - DNA, 25 bp, Homo sapien
tttggctgcggcattttttgcttcc

SEQ ID NO: 5300076 - DNA, 25 bp, Homo sapien
tttccttattaagtatctcaacagc

SEQ ID NO: 5300077 - DNA, 25 bp, Homo sapien
ttttatggctgccatatcatttttt

SEQ ID NO: 5300078 - DNA, 25 bp, Homo sapien
tggctgccatatcattttttatagc

SEQ ID NO: 5300079 - DNA, 25 bp, Homo sapien
tatggctgccatatcattttttata

SEQ ID NO: 5300080 - DNA, 25 bp, Homo sapien
ttttttatggctgccatatcatttt

SEQ ID NO: 5300081 - DNA, 25 bp, Homo sapien
tatgtattaagttcctccatgaaga

SEQ ID NO: 5300082 - DNA, 25 bp, Homo sapien
tcctatcatgtggaggtcctgaatt

SEQ ID NO: 5300083 - DNA, 25 bp, Homo sapien
taggcagttcttgatatttaagtac

SEQ ID NO: 5300084 - DNA, 25 bp, Homo sapien
ccctgcttctgacggtatgtattaa

SEQ ID NO: 5300085 - DNA, 25 bp, Homo sapien
caaaatgcacgcagataatcacgga

SEQ ID NO: 5300086 - DNA, 25 bp, Homo sapien
tggaagctttgtccaaaatgcacgc

SEQ ID NO: 5300087 - DNA, 25 bp, Homo sapien
taatcacggaagtgtggatgttgat

SEQ ID NO: 5300088 - DNA, 25 bp, Homo sapien
cacgcagataatcacggaagtgtgg

SEQ ID NO: 5300089 - DNA, 25 bp, Homo sapien
ctgctaaagttttgaggtcattaca

SEQ ID NO: 5300090 - DNA, 25 bp, Homo sapien
gctaaagttttgaggtcattacaat

SEQ ID NO: 5300091 - DNA, 25 bp, Homo sapien
agaactgctaaagttttgaggtcat

SEQ ID NO: 5300092 - DNA, 25 bp, Homo sapien
actgctaaagttttgaggtcattac

SEQ ID NO: 5300093 - DNA, 25 bp, Homo sapien
gacagacgagtgataccagcgaaga

SEQ ID NO: 5300094 - DNA, 25 bp, Homo sapien
tctaccaagtgtggagctgaatgcc

SEQ ID NO: 5300095 - DNA, 25 bp, Homo sapien
tattgggatggacctcgatgcctcg

SEQ ID NO: 5300096 - DNA, 25 bp, Homo sapien
tgaccgcaagtcacaaagtatgagc

SEQ ID NO: 5300097 - DNA, 25 bp, Homo sapien
tagacaggaatgtacatagcagcac

SEQ ID NO: 5300098 - DNA, 25 bp, Homo sapien
gaatgtaaaacaatacggttgctgg

SEQ ID NO: 5300099 - DNA, 25 bp, Homo sapien
acaacatggataggccaggcgccgt

SEQ ID NO: 5300100 - DNA, 25 bp, Homo sapien
aaactggacccctcaaacactgctg

SEQ ID NO: 5300101 - DNA, 25 bp, Homo sapien
tcatttatgaatggacactggttat

SEQ ID NO: 5300102 - DNA, 25 bp, Homo sapien
tggttatttcaaccttttggccatc

SEQ ID NO: 5300103 - DNA, 25 bp, Homo sapien
tatataagtggaattgaatcacatg

SEQ ID NO: 5300104 - DNA, 25 bp, Homo sapien
cacagtggttacacccatgttacat

SEQ ID NO: 5300105 - DNA, 25 bp, Homo sapien
ttgcactgataaaaattcttcacgg

SEQ ID NO: 5300106 - DNA, 25 bp, Homo sapien
tgataaaaattcttcacgggaagga

SEQ ID NO: 5300107 - DNA, 25 bp, Homo sapien
cactgataaaaattcttcacgggaa

SEQ ID NO: 5300108 - DNA, 25 bp, Homo sapien
gaaggaaatggctttcagtccccac

SEQ ID NO: 5300109 - DNA, 25 bp, Homo sapien
cttcggatcagcgtccgcgtcctga

SEQ ID NO: 5300110 - DNA, 25 bp, Homo sapien
cgctccacgatcctttccctggatt

SEQ ID NO: 5300111 - DNA, 25 bp, Homo sapien
ccaggggcttcggatcagcgtccgc

SEQ ID NO: 5300112 - DNA, 25 bp, Homo sapien
ccacacccgggctgcggacctgggc

SEQ ID NO: 5300113 - DNA, 25 bp, Homo sapien
cgccggccggagacccgcggcttcg

SEQ ID NO: 5300114 - DNA, 25 bp, Homo sapien
gccggagacccgcggcttcgggaga

SEQ ID NO: 5300115 - DNA, 25 bp, Homo sapien
tatatttgtgctcaaaaatgtccga

SEQ ID NO: 5300116 - DNA, 25 bp, Homo sapien
aatctaggcctgctgaattgactgg

SEQ ID NO: 5300117 - DNA, 25 bp, Homo sapien
aaggaaaataaatctaggcctgctg

SEQ ID NO: 5300118 - DNA, 25 bp, Homo sapien
tgctcaaaaatgtccgatgttatca

SEQ ID NO: 5300119 - DNA, 25 bp, Homo sapien
tcaaccctggcaatatgattcatac

SEQ ID NO: 5300120 - DNA, 25 bp, Homo sapien
gagggaggtgcctgctaagcactct

SEQ ID NO: 5300121 - DNA, 25 bp, Homo sapien
ggttctgaatttcactgaacaaatt

SEQ ID NO: 5300122 - DNA, 25 bp, Homo sapien
tccgagggaggtgcctgctaagcac

SEQ ID NO: 5300123 - DNA, 25 bp, Homo sapien
ggaggtgcctgctaagcactctttg

SEQ ID NO: 5300124 - DNA, 25 bp, Homo sapien
tttgcggaaaaggaatgggccgaca

SEQ ID NO: 5300125 - DNA, 25 bp, Homo sapien
cagcaccgtgtgtgtcctgagactt

SEQ ID NO: 5300126 - DNA, 25 bp, Homo sapien
tgctccccagttagaaagaatccca

SEQ ID NO: 5300127 - DNA, 25 bp, Homo sapien
tgagacttcgcacgcatggcttgga

SEQ ID NO: 5300128 - DNA, 25 bp, Homo sapien
cattgtcgccatcaagatgtttgtt

SEQ ID NO: 5300129 - DNA, 25 bp, Homo sapien
ctctttcaggtcttcatataatatg

SEQ ID NO: 5300130 - DNA, 25 bp, Homo sapien
ccaattgattgcaaaatcaaaatac

SEQ ID NO: 5300131 - DNA, 25 bp, Homo sapien
tataatatgaacttaacattgtcgc

SEQ ID NO: 5300132 - DNA, 25 bp, Homo sapien
aaaagatactgctgtatctttaggg

SEQ ID NO: 5300133 - DNA, 25 bp, Homo sapien
catgaactgtctgaagaattcatcc

SEQ ID NO: 5300134 - DNA, 25 bp, Homo sapien
caagagccatagcttggaatatcgg

SEQ ID NO: 5300135 - DNA, 25 bp, Homo sapien
cggggacatcgttgtggaaatgcaa

SEQ ID NO: 5300136 - DNA, 25 bp, Homo sapien
tgaggaaagtgttcctttggatgag

SEQ ID NO: 5300137 - DNA, 25 bp, Homo sapien
aggaaagtgttcctttggatgagta

SEQ ID NO: 5300138 - DNA, 25 bp, Homo sapien
gaggaaagtgttcctttggatgagt

SEQ ID NO: 5300139 - DNA, 25 bp, Homo sapien
gagttgccaaaatccttggtgatgg

SEQ ID NO: 5300140 - DNA, 25 bp, Homo sapien
cttggctttattctcgaagatagac

SEQ ID NO: 5300141 - DNA, 25 bp, Homo sapien
caggtaatttgtcatagtggaggtg

SEQ ID NO: 5300142 - DNA, 25 bp, Homo sapien
tattctcgaagatagacccaggtaa

SEQ ID NO: 5300143 - DNA, 25 bp, Homo sapien
acaatgtggagaatccagtttgaac

SEQ ID NO: 5300144 - DNA, 25 bp, Homo sapien
tgacaatgtggagaatccagtttga

SEQ ID NO: 5300145 - DNA, 25 bp, Homo sapien
gacaatgtggagaatccagtttgaa

SEQ ID NO: 5300146 - DNA, 25 bp, Homo sapien
atatattaattcactgacaatgtgg

SEQ ID NO: 5300147 - DNA, 25 bp, Homo sapien
gtaaggaatcccctgataggtgaaa

SEQ ID NO: 5300148 - DNA, 25 bp, Homo sapien
cactttggataagatgctagcacga

SEQ ID NO: 5300149 - DNA, 25 bp, Homo sapien
atttggatttatcagccatggtggc

SEQ ID NO: 5300150 - DNA, 25 bp, Homo sapien
gcttcgaaggtgtccagcgcttgga

SEQ ID NO: 5300151 - DNA, 25 bp, Homo sapien
ctggacagctgcacgcggatacggt

SEQ ID NO: 5300152 - DNA, 25 bp, Homo sapien
acagctgcacgcggatacggtacgg

SEQ ID NO: 5300153 - DNA, 25 bp, Homo sapien
gctgcacgcggatacggtacgggac

SEQ ID NO: 5300154 - DNA, 25 bp, Homo sapien
tggacagctgcacgcggatacggta

SEQ ID NO: 5300155 - DNA, 25 bp, Homo sapien
ggcagaatggtccattttcttcttg

SEQ ID NO: 5300156 - DNA, 25 bp, Homo sapien
aatgttggtgtattcttgggtcatc

SEQ ID NO: 5300157 - DNA, 25 bp, Homo sapien
cttgccactgttctttgcaggagcc

SEQ ID NO: 5300158 - DNA, 25 bp, Homo sapien
ttggtgtattcttgggtcatcacct

SEQ ID NO: 5300159 - DNA, 25 bp, Homo sapien
cggtcttctgcgtggggcctcgtca

SEQ ID NO: 5300160 - DNA, 25 bp, Homo sapien
tttcggggtccctagtgcgacgaga

SEQ ID NO: 5300161 - DNA, 25 bp, Homo sapien
cttcccatgggcggtcggatttcgg

SEQ ID NO: 5300162 - DNA, 25 bp, Homo sapien
gactctggcgagtggcttcccatgg

SEQ ID NO: 5300163 - DNA, 25 bp, Homo sapien
ccgggcctagcgttccgcgggctag

SEQ ID NO: 5300164 - DNA, 25 bp, Homo sapien
cagccgagggcaccagggaaccggg

SEQ ID NO: 5300165 - DNA, 25 bp, Homo sapien
tgcccgcgcgtgtcgcctgcaggcc

SEQ ID NO: 5300166 - DNA, 25 bp, Homo sapien
gcggccgggccgtgctccgtgcgtg

SEQ ID NO: 5300167 - DNA, 25 bp, Homo sapien
gagagacgttgctgcttgaaaccgc

SEQ ID NO: 5300168 - DNA, 25 bp, Homo sapien
tcagccccgtgtgatgttaactgca

SEQ ID NO: 5300169 - DNA, 25 bp, Homo sapien
tgaaaccgcgtagcctgcagacgct

SEQ ID NO: 5300170 - DNA, 25 bp, Homo sapien
ggcttgagcttgtgtccccgagtca

SEQ ID NO: 5300171 - DNA, 25 bp, Homo sapien
aattttaacaatgcttccacatgac

SEQ ID NO: 5300172 - DNA, 25 bp, Homo sapien
tgtatggaatcagagagctagatca

SEQ ID NO: 5300173 - DNA, 25 bp, Homo sapien
gaatcagagagctagatcaaaaaac

SEQ ID NO: 5300174 - DNA, 25 bp, Homo sapien
agagagctagatcaaaaaacatggt

SEQ ID NO: 5300175 - DNA, 25 bp, Homo sapien
tggaatgtatggaatcagagagcta

SEQ ID NO: 5300176 - DNA, 25 bp, Homo sapien
gtagaattttaatctataatttaca

SEQ ID NO: 5300177 - DNA, 25 bp, Homo sapien
tgtaagtagaattttaatctataat

SEQ ID NO: 5300178 - DNA, 25 bp, Homo sapien
taaaatgtttctttttcttgatgat

SEQ ID NO: 5300179 - DNA, 25 bp, Homo sapien
ttaaaatgtttctttttcttgatga

SEQ ID NO: 5300180 - DNA, 25 bp, Homo sapien
aaatgtttctttttcttgatgatac

SEQ ID NO: 5300181 - DNA, 25 bp, Homo sapien
aaaatgtttctttttcttgatgata

SEQ ID NO: 5300182 - DNA, 25 bp, Homo sapien
tgtgtagccagtcatcacgttcagc

SEQ ID NO: 5300183 - DNA, 25 bp, Homo sapien
tgtagccagtcatcacgttcagcct

SEQ ID NO: 5300184 - DNA, 25 bp, Homo sapien
ctgttgtgtagccagtcatcacgtt

SEQ ID NO: 5300185 - DNA, 25 bp, Homo sapien
acgttcagcctcccatctaagctgt

SEQ ID NO: 5300186 - DNA, 25 bp, Homo sapien
tccccaagcacttttactggtgaaa

SEQ ID NO: 5300187 - DNA, 25 bp, Homo sapien
gaaaagatgagtgtactaccacact

SEQ ID NO: 5300188 - DNA, 25 bp, Homo sapien
tgtggtttcccacccactatacaaa

SEQ ID NO: 5300189 - DNA, 25 bp, Homo sapien
cactgtagactcttggtggtcccac

SEQ ID NO: 5300190 - DNA, 25 bp, Homo sapien
ttgcattatctttgttagccatggc

SEQ ID NO: 5300191 - DNA, 25 bp, Homo sapien
gcattatctttgttagccatggcat

SEQ ID NO: 5300192 - DNA, 25 bp, Homo sapien
tgcattatctttgttagccatggca

SEQ ID NO: 5300193 - DNA, 25 bp, Homo sapien
tcatgccaatgttatcaaacttgga

SEQ ID NO: 5300194 - DNA, 25 bp, Homo sapien
gccaatgttatcaaacttggatccc

SEQ ID NO: 5300195 - DNA, 25 bp, Homo sapien
caatgttatcaaacttggatcccat

SEQ ID NO: 5300196 - DNA, 25 bp, Homo sapien
tgccaatgttatcaaacttggatcc

SEQ ID NO: 5300197 - DNA, 25 bp, Homo sapien
taggctggaatcatttaagtttctt

SEQ ID NO: 5300198 - DNA, 25 bp, Homo sapien
agatacaaataggctggaatcattt

SEQ ID NO: 5300199 - DNA, 25 bp, Homo sapien
tacaaataggctggaatcatttaag

SEQ ID NO: 5300200 - DNA, 25 bp, Homo sapien
caaataggctggaatcatttaagtt

SEQ ID NO: 5300201 - DNA, 25 bp, Homo sapien
cctaatagaactgttcagatgacaa

SEQ ID NO: 5300202 - DNA, 25 bp, Homo sapien
tatacttgggtaaaaacaattgcaa

SEQ ID NO: 5300203 - DNA, 25 bp, Homo sapien
ttatacttgggtaaaaacaattgca

SEQ ID NO: 5300204 - DNA, 25 bp, Homo sapien
aaaagctaacaacatcctaatagaa

SEQ ID NO: 5300205 - DNA, 25 bp, Homo sapien
tgttgtagtactccatgccatgttg

SEQ ID NO: 5300206 - DNA, 25 bp, Homo sapien
tcagcctcaagtatgtaacaccatg

SEQ ID NO: 5300207 - DNA, 25 bp, Homo sapien
tactctaacacctgtaaatgtaggg

SEQ ID NO: 5300208 - DNA, 25 bp, Homo sapien
tgacctcaacgagtaggcacttctg

SEQ ID NO: 5300209 - DNA, 25 bp, Homo sapien
acctaaatcttacagggcctataca

SEQ ID NO: 5300210 - DNA, 25 bp, Homo sapien
gagatatctatgctgagaattcacc

SEQ ID NO: 5300211 - DNA, 25 bp, Homo sapien
tgtggcaacgtgtttagtctcctta

SEQ ID NO: 5300212 - DNA, 25 bp, Homo sapien
aaatactacgttggatgtaaatggc

SEQ ID NO: 5300213 - DNA, 25 bp, Homo sapien
ctggaaatcctagccagtgcaactg

SEQ ID NO: 5300214 - DNA, 25 bp, Homo sapien
gcaaaccagtagcattgctatacac

SEQ ID NO: 5300215 - DNA, 25 bp, Homo sapien
caaaatcaatgtgcgcaaaccagta

SEQ ID NO: 5300216 - DNA, 25 bp, Homo sapien
tcaccgatgatatgatagcatacct

SEQ ID NO: 5300217 - DNA, 25 bp, Homo sapien
aaatcatctgtaccttttctcttgc

SEQ ID NO: 5300218 - DNA, 25 bp, Homo sapien
gtactgactttggagtggacttcaa

SEQ ID NO: 5300219 - DNA, 25 bp, Homo sapien
tactgactttggagtggacttcaag

SEQ ID NO: 5300220 - DNA, 25 bp, Homo sapien
tagtactgactttggagtggacttc

SEQ ID NO: 5300221 - DNA, 25 bp, Homo sapien
cttagtactgactttggagtggact

SEQ ID NO: 5300222 - DNA, 25 bp, Homo sapien
ttcatcatccatacttcctaaagaa

SEQ ID NO: 5300223 - DNA, 25 bp, Homo sapien
catacttcctaaagaaacttcatcg

SEQ ID NO: 5300224 - DNA, 25 bp, Homo sapien
catccatacttcctaaagaaacttc

SEQ ID NO: 5300225 - DNA, 25 bp, Homo sapien
ttcctaaagaaacttcatcgtcatc

SEQ ID NO: 5300226 - DNA, 25 bp, Homo sapien
caacttgtaatacaagaggaggcag

SEQ ID NO: 5300227 - DNA, 25 bp, Homo sapien
tgtaatacaagaggaggcagtattt

SEQ ID NO: 5300228 - DNA, 25 bp, Homo sapien
cttgtaatacaagaggaggcagtat

SEQ ID NO: 5300229 - DNA, 25 bp, Homo sapien
aaacacaacttgtaatacaagagga

SEQ ID NO: 5300230 - DNA, 25 bp, Homo sapien
ccagcaaaatccatatcatcctttc

SEQ ID NO: 5300231 - DNA, 25 bp, Homo sapien
gcaaaatccatatcatcctttccag

SEQ ID NO: 5300232 - DNA, 25 bp, Homo sapien
agcaaaatccatatcatcctttcca

SEQ ID NO: 5300233 - DNA, 25 bp, Homo sapien
caaaatccatatcatcctttccaga

SEQ ID NO: 5300234 - DNA, 25 bp, Homo sapien
atcatccacgtcttctatactttct

SEQ ID NO: 5300235 - DNA, 25 bp, Homo sapien
cacgtcttctatactttcttcatct

SEQ ID NO: 5300236 - DNA, 25 bp, Homo sapien
attcttcatcatccacgtcttctat

SEQ ID NO: 5300237 - DNA, 25 bp, Homo sapien
cttcatctgcatcccgtttttgttt

SEQ ID NO: 5300238 - DNA, 25 bp, Homo sapien
acacttcatccactggtatttggct

SEQ ID NO: 5300239 - DNA, 25 bp, Homo sapien
tggaaaaacacttcatccactggta

SEQ ID NO: 5300240 - DNA, 25 bp, Homo sapien
ttcttttgcaaggaactccttactg

SEQ ID NO: 5300241 - DNA, 25 bp, Homo sapien
tttgcaaggaactccttactgttca

SEQ ID NO: 5300242 - DNA, 25 bp, Homo sapien
caggaagatgacgaatatccttaat

SEQ ID NO: 5300243 - DNA, 25 bp, Homo sapien
tcttttcggctgcatcacaacacta

SEQ ID NO: 5300244 - DNA, 25 bp, Homo sapien
ttcttttcggctgcatcacaacact

SEQ ID NO: 5300245 - DNA, 25 bp, Homo sapien
gatgacgaatatccttaataaaatg

SEQ ID NO: 5300246 - DNA, 25 bp, Homo sapien
gggtcccctgaatactgaatatagt

SEQ ID NO: 5300247 - DNA, 25 bp, Homo sapien
gagtgaaatcctgcagtgggtcccc

SEQ ID NO: 5300248 - DNA, 25 bp, Homo sapien
caaaaatctcattagagtgaaatcc

SEQ ID NO: 5300249 - DNA, 25 bp, Homo sapien
ggtatacaaatcgatccaaaaatct

SEQ ID NO: 5300250 - DNA, 25 bp, Homo sapien
aaagggccacggagggatgaaaatg

SEQ ID NO: 5300251 - DNA, 25 bp, Homo sapien
gccacggagggatgaaaatgcacag

SEQ ID NO: 5300252 - DNA, 25 bp, Homo sapien
aagggccacggagggatgaaaatgc

SEQ ID NO: 5300253 - DNA, 25 bp, Homo sapien
gggccacggagggatgaaaatgcac

SEQ ID NO: 5300254 - DNA, 25 bp, Homo sapien
ggccgactcactaaaaaggtatcag

SEQ ID NO: 5300255 - DNA, 25 bp, Homo sapien
gaactcttagtggtctggccgcact

SEQ ID NO: 5300256 - DNA, 25 bp, Homo sapien
ctttattcaggataagctgcagcag

SEQ ID NO: 5300257 - DNA, 25 bp, Homo sapien
agtgccaccgtcaacacagtgatga

SEQ ID NO: 5300258 - DNA, 25 bp, Homo sapien
tttctactgaatggatcgtatttat

SEQ ID NO: 5300259 - DNA, 25 bp, Homo sapien
ttctactgaatggatcgtatttatt

SEQ ID NO: 5300260 - DNA, 25 bp, Homo sapien
ttatcaaagtgcacccaggaagcaa

SEQ ID NO: 5300261 - DNA, 25 bp, Homo sapien
tttcaaattatcaaagtgcacccag

SEQ ID NO: 5300262 - DNA, 25 bp, Homo sapien
catcagtttcaggaactgtttcctc

SEQ ID NO: 5300263 - DNA, 25 bp, Homo sapien
caaattatcaaagtgcacccaggaa

SEQ ID NO: 5300264 - DNA, 25 bp, Homo sapien
cacatataaatggtggcatctgttg

SEQ ID NO: 5300265 - DNA, 25 bp, Homo sapien
ttggaacacgtcatcaaccctggat

SEQ ID NO: 5300266 - DNA, 25 bp, Homo sapien
ggatctcagacacaagatataaagc

SEQ ID NO: 5300267 - DNA, 25 bp, Homo sapien
tgaagtaacctcttcacaaaagcct

SEQ ID NO: 5300268 - DNA, 25 bp, Homo sapien
taagtgacttacttgaaggtggcga

SEQ ID NO: 5300269 - DNA, 25 bp, Homo sapien
atttcatgtctcatattggaagggt

SEQ ID NO: 5300270 - DNA, 25 bp, Homo sapien
tataatttgtgcccatcagggaaac

SEQ ID NO: 5300271 - DNA, 25 bp, Homo sapien
taattctgaaatactaggtggtaga

SEQ ID NO: 5300272 - DNA, 25 bp, Homo sapien
tcaaaaggacgctggctgaaaatcc

SEQ ID NO: 5300273 - DNA, 25 bp, Homo sapien
gaaagtatccaaggccataaggcac

SEQ ID NO: 5300274 - DNA, 25 bp, Homo sapien
ccagtctgggaataagggtatgccc

SEQ ID NO: 5300275 - DNA, 25 bp, Homo sapien
tatttgagcggaagagtagcctttc

SEQ ID NO: 5300276 - DNA, 25 bp, Homo sapien
gcgctctacgcagcgcggaagcggc

SEQ ID NO: 5300277 - DNA, 25 bp, Homo sapien
tgggatctcggtcctggacgcccgc

SEQ ID NO: 5300278 - DNA, 25 bp, Homo sapien
cacatgcttcagaggctgggatctc

SEQ ID NO: 5300279 - DNA, 25 bp, Homo sapien
ggacgcccgcgctctacgcagcgcg

SEQ ID NO: 5300280 - DNA, 25 bp, Homo sapien
cttcggaactctccacgcctgatcc

SEQ ID NO: 5300281 - DNA, 25 bp, Homo sapien
aactctccacgcctgatcccgttcc

SEQ ID NO: 5300282 - DNA, 25 bp, Homo sapien
cggaactctccacgcctgatcccgt

SEQ ID NO: 5300283 - DNA, 25 bp, Homo sapien
tccacgcctgatcccgttccccgga

SEQ ID NO: 5300284 - DNA, 25 bp, Homo sapien
cagggagaacccattctcggcttca

SEQ ID NO: 5300285 - DNA, 25 bp, Homo sapien
ccaaggccgcttggcatggaactcc

SEQ ID NO: 5300286 - DNA, 25 bp, Homo sapien
ccaaaggctccttgactgcggccat

SEQ ID NO: 5300287 - DNA, 25 bp, Homo sapien
ttggtgcctccgagccgtaacactt

SEQ ID NO: 5300288 - DNA, 25 bp, Homo sapien
gcaaagcatacgcgcgtgaaactca

SEQ ID NO: 5300289 - DNA, 25 bp, Homo sapien
gggcaaagcatacgcgcgtgaaact

SEQ ID NO: 5300290 - DNA, 25 bp, Homo sapien
ggcgggcaaagcatacgcgcgtgaa

SEQ ID NO: 5300291 - DNA, 25 bp, Homo sapien
cgggcaaagcatacgcgcgtgaaac

SEQ ID NO: 5300292 - DNA, 25 bp, Homo sapien
tccccagattaggttagaggccagg

SEQ ID NO: 5300293 - DNA, 25 bp, Homo sapien
tataggcatcactgggctaccacag

SEQ ID NO: 5300294 - DNA, 25 bp, Homo sapien
taggcatcgtgctaaaacttgggat

SEQ ID NO: 5300295 - DNA, 25 bp, Homo sapien
tatgaggaatggtccagagcacagg

SEQ ID NO: 5300296 - DNA, 25 bp, Homo sapien
gatctgcacgatgttccaaaaggta

SEQ ID NO: 5300297 - DNA, 25 bp, Homo sapien
tagagcgaaatgctggatccccagt

SEQ ID NO: 5300298 - DNA, 25 bp, Homo sapien
taaagagaaggtcccgttagagcga

SEQ ID NO: 5300299 - DNA, 25 bp, Homo sapien
gttgtaccgatgacggagcagccca

SEQ ID NO: 5300300 - DNA, 25 bp, Homo sapien
tagtagtcaccagtgtttgttccca

SEQ ID NO: 5300301 - DNA, 25 bp, Homo sapien
tctacgttgctgaaaaggacgtgat

SEQ ID NO: 5300302 - DNA, 25 bp, Homo sapien
tactcagtagatagattttcagccc

SEQ ID NO: 5300303 - DNA, 25 bp, Homo sapien
ccagtgtttagctctaagtgagatg

SEQ ID NO: 5300304 - DNA, 25 bp, Homo sapien
taccaaggtctggtaaaataacaca

SEQ ID NO: 5300305 - DNA, 25 bp, Homo sapien
cacaaccaggtcaaacttttctttg

SEQ ID NO: 5300306 - DNA, 25 bp, Homo sapien
tatactagaaataggctcaggtttt

SEQ ID NO: 5300307 - DNA, 25 bp, Homo sapien
cttttctttggatacttatactaga

SEQ ID NO: 5300308 - DNA, 25 bp, Homo sapien
ttttacagactgaggaactgccgac

SEQ ID NO: 5300309 - DNA, 25 bp, Homo sapien
taatgacttaacactatggctgctg

SEQ ID NO: 5300310 - DNA, 25 bp, Homo sapien
tgtgtaaagccgagatctgcacctg

SEQ ID NO: 5300311 - DNA, 25 bp, Homo sapien
gcttcagggatgtcgaaaggccttc

SEQ ID NO: 5300312 - DNA, 25 bp, Homo sapien
taaggtcaagccaagtctgatagtc

SEQ ID NO: 5300313 - DNA, 25 bp, Homo sapien
gtaatgtaacgttctccaatgcgag

SEQ ID NO: 5300314 - DNA, 25 bp, Homo sapien
tatttcccagcgagcatcatcactt

SEQ ID NO: 5300315 - DNA, 25 bp, Homo sapien
catatcatctggattaggagccata

SEQ ID NO: 5300316 - DNA, 25 bp, Homo sapien
ctgtagccagggatgactaagagat

SEQ ID NO: 5300317 - DNA, 25 bp, Homo sapien
gatttgtcaacactgtaacgttttc

SEQ ID NO: 5300318 - DNA, 25 bp, Homo sapien
gagatttgtcaacactgtaacgttt

SEQ ID NO: 5300319 - DNA, 25 bp, Homo sapien
ccagggatgactaagagatttgtca

SEQ ID NO: 5300320 - DNA, 25 bp, Homo sapien
acctttgctccggagaacttcaggg

SEQ ID NO: 5300321 - DNA, 25 bp, Homo sapien
cacatatctagggaacggttgtaac

SEQ ID NO: 5300322 - DNA, 25 bp, Homo sapien
gacttttcaccaatgatgcgtgcaa

SEQ ID NO: 5300323 - DNA, 25 bp, Homo sapien
gagttcctaccacagatctcctgaa

SEQ ID NO: 5300324 - DNA, 25 bp, Homo sapien
agtgctacatgtagccaggacacag

SEQ ID NO: 5300325 - DNA, 25 bp, Homo sapien
aggacacagaagcacgatgccattg

SEQ ID NO: 5300326 - DNA, 25 bp, Homo sapien
tccatttcataggtcatgcaataaa

SEQ ID NO: 5300327 - DNA, 25 bp, Homo sapien
taagaaaaatcagagagtgctacat

SEQ ID NO: 5300328 - DNA, 25 bp, Homo sapien
aaatcacagtgcacaatattcttaa

SEQ ID NO: 5300329 - DNA, 25 bp, Homo sapien
aatcacagtgcacaatattcttaaa

SEQ ID NO: 5300330 - DNA, 25 bp, Homo sapien
atcacagtgcacaatattcttaaaa

SEQ ID NO: 5300331 - DNA, 25 bp, Homo sapien
aagccgacttttctcactggataga

SEQ ID NO: 5300332 - DNA, 25 bp, Homo sapien
tgtgtgaccatgaatttagtaattc

SEQ ID NO: 5300333 - DNA, 25 bp, Homo sapien
ccatgaatttagtaattcgttctgg

SEQ ID NO: 5300334 - DNA, 25 bp, Homo sapien
agtaattcgttctggaagccgactt

SEQ ID NO: 5300335 - DNA, 25 bp, Homo sapien
cgttctggggtttcaaacatacatt

SEQ ID NO: 5300336 - DNA, 25 bp, Homo sapien
ggtttacaatcccaggatggtgcaa

SEQ ID NO: 5300337 - DNA, 25 bp, Homo sapien
tacattccaggtttacaatcccagg

SEQ ID NO: 5300338 - DNA, 25 bp, Homo sapien
ttccaggtttacaatcccaggatgg

SEQ ID NO: 5300339 - DNA, 25 bp, Homo sapien
gctatgattgtctgaaatggcacag

SEQ ID NO: 5300340 - DNA, 25 bp, Homo sapien
cagttttactaatatctagatgtgc

SEQ ID NO: 5300341 - DNA, 25 bp, Homo sapien
gcaacttaagcagagaaacagtttt

SEQ ID NO: 5300342 - DNA, 25 bp, Homo sapien
tgcaagatacatgagcaacttaagc

SEQ ID NO: 5300343 - DNA, 25 bp, Homo sapien
ttatgagatcgttttccaagcagca

SEQ ID NO: 5300344 - DNA, 25 bp, Homo sapien
gtttatggagatatgaccccgtcgc

SEQ ID NO: 5300345 - DNA, 25 bp, Homo sapien
actgttttgctaggccatagttggc

SEQ ID NO: 5300346 - DNA, 25 bp, Homo sapien
gaaactcaaataccccatagtggtg

SEQ ID NO: 5300347 - DNA, 25 bp, Homo sapien
cacttcattacggagttgactttct

SEQ ID NO: 5300348 - DNA, 25 bp, Homo sapien
gtaaaatagccacttcattacggag

SEQ ID NO: 5300349 - DNA, 25 bp, Homo sapien
ggaatctcatcttatcaattacttt

SEQ ID NO: 5300350 - DNA, 25 bp, Homo sapien
ctttcttgttttgtggggaatctca

SEQ ID NO: 5300351 - DNA, 25 bp, Homo sapien
tattagggagttgtccacagactga

SEQ ID NO: 5300352 - DNA, 25 bp, Homo sapien
ggaacgaatgaagcaaactgacagc

SEQ ID NO: 5300353 - DNA, 25 bp, Homo sapien
tcagctgcattatctaaacaggaga

SEQ ID NO: 5300354 - DNA, 25 bp, Homo sapien
cagagtgatttaaccatgtacccac

SEQ ID NO: 5300355 - DNA, 25 bp, Homo sapien
ggcacaatcgtaagtctacttgaaa

SEQ ID NO: 5300356 - DNA, 25 bp, Homo sapien
gtctacttgaaaagactgaacaaat

SEQ ID NO: 5300357 - DNA, 25 bp, Homo sapien
aatgtgtgcatttttggtaagaagc

SEQ ID NO: 5300358 - DNA, 25 bp, Homo sapien
tcaatggcacaatcgtaagtctact

SEQ ID NO: 5300359 - DNA, 25 bp, Homo sapien
gttcctctgatgacaggaagtcctc

SEQ ID NO: 5300360 - DNA, 25 bp, Homo sapien
gaagtcctccagagatgtaactact

SEQ ID NO: 5300361 - DNA, 25 bp, Homo sapien
gagatgtaactactcttaaaactga

SEQ ID NO: 5300362 - DNA, 25 bp, Homo sapien
ctttgttcctctgatgacaggaagt

SEQ ID NO: 5300363 - DNA, 25 bp, Homo sapien
tactgtaccaagtcttagcaaggga

SEQ ID NO: 5300364 - DNA, 25 bp, Homo sapien
taagccctatgagctacacaggtca

SEQ ID NO: 5300365 - DNA, 25 bp, Homo sapien
gaatctgtagatgactgtgaaccac

SEQ ID NO: 5300366 - DNA, 25 bp, Homo sapien
gaaatcctctgctaagaaaactggc

SEQ ID NO: 5300367 - DNA, 25 bp, Homo sapien
tatgcaaacggctgtagttgcttac

SEQ ID NO: 5300368 - DNA, 25 bp, Homo sapien
ataatgtgtacaatatgcaaacggc

SEQ ID NO: 5300369 - DNA, 25 bp, Homo sapien
tgtgtacaatatgcaaacggctgta

SEQ ID NO: 5300370 - DNA, 25 bp, Homo sapien
tacaatatgcaaacggctgtagttg

SEQ ID NO: 5300371 - DNA, 25 bp, Homo sapien
cataaacgatgccaaactggcctga

SEQ ID NO: 5300372 - DNA, 25 bp, Homo sapien
tgccaaactggcctgaaccaagcac

SEQ ID NO: 5300373 - DNA, 25 bp, Homo sapien
agatctggtaaacagtactgatatc

SEQ ID NO: 5300374 - DNA, 25 bp, Homo sapien
gcaaagatctggtaaacagtactga

SEQ ID NO: 5300375 - DNA, 25 bp, Homo sapien
tacagagatacttgtagacaaatct

SEQ ID NO: 5300376 - DNA, 25 bp, Homo sapien
cacattctcctgaatctgacaatta

SEQ ID NO: 5300377 - DNA, 25 bp, Homo sapien
acagagatacttgtagacaaatctt

SEQ ID NO: 5300378 - DNA, 25 bp, Homo sapien
atacagagatacttgtagacaaatc

SEQ ID NO: 5300379 - DNA, 25 bp, Homo sapien
aaatctcgtggtgaagatatgcgga

SEQ ID NO: 5300380 - DNA, 25 bp, Homo sapien
caaaacagtgtggattgctgccttg

SEQ ID NO: 5300381 - DNA, 25 bp, Homo sapien
cagctctgtgctacatcaagtccaa

SEQ ID NO: 5300382 - DNA, 25 bp, Homo sapien
aacaggattatgagagctgtcccca

SEQ ID NO: 5300383 - DNA, 25 bp, Homo sapien
gatgggactttctaagcagtctaat

SEQ ID NO: 5300384 - DNA, 25 bp, Homo sapien
cagtcaatgatgatgggactttcta

SEQ ID NO: 5300385 - DNA, 25 bp, Homo sapien
gtcaagtctccaataatgcctcttt

SEQ ID NO: 5300386 - DNA, 25 bp, Homo sapien
ctgtcaagtctccaataatgcctct

SEQ ID NO: 5300387 - DNA, 25 bp, Homo sapien
gctgtcaagtctccaataatgcctc

SEQ ID NO: 5300388 - DNA, 25 bp, Homo sapien
caagtctccaataatgcctctttct

SEQ ID NO: 5300389 - DNA, 25 bp, Homo sapien
agcatattcaaatgtatttgattac

SEQ ID NO: 5300390 - DNA, 25 bp, Homo sapien
tagcatattcaaatgtatttgatta

SEQ ID NO: 5300391 - DNA, 25 bp, Homo sapien
ggtgtaatggaccatccacccttcc

SEQ ID NO: 5300392 - DNA, 25 bp, Homo sapien
caggttatccctgctggtgtaatgg

SEQ ID NO: 5300393 - DNA, 25 bp, Homo sapien
caaccctcattagcggaatattatt

SEQ ID NO: 5300394 - DNA, 25 bp, Homo sapien
tgtgcttgatggattgtacaaccct

SEQ ID NO: 5300395 - DNA, 25 bp, Homo sapien
aaactagctaggttcaccgggcgca

SEQ ID NO: 5300396 - DNA, 25 bp, Homo sapien
caaaaaccaactagctgggttctgg

SEQ ID NO: 5300397 - DNA, 25 bp, Homo sapien
caatgagcggaatagaaagtaccct

SEQ ID NO: 5300398 - DNA, 25 bp, Homo sapien
ggcagcatgatggactagcaaatcc

SEQ ID NO: 5300399 - DNA, 25 bp, Homo sapien
tgattgttttaacggcttcttcatc

SEQ ID NO: 5300400 - DNA, 25 bp, Homo sapien
tgtatctgttcccagactggaaggt

SEQ ID NO: 5300401 - DNA, 25 bp, Homo sapien
tgtgtcatccaaaccccgactacta

SEQ ID NO: 5300402 - DNA, 25 bp, Homo sapien
tctttccacatcgagatcagatgga

SEQ ID NO: 5300403 - DNA, 25 bp, Homo sapien
atcataaggcacaaagttaattaat

SEQ ID NO: 5300404 - DNA, 25 bp, Homo sapien
acacaaatcataaggcacaaagtta

SEQ ID NO: 5300405 - DNA, 25 bp, Homo sapien
caaatcataaggcacaaagttaatt

SEQ ID NO: 5300406 - DNA, 25 bp, Homo sapien
aaatcataaggcacaaagttaatta

SEQ ID NO: 5300407 - DNA, 25 bp, Homo sapien
gcagtctcttggtacttttgatgca

SEQ ID NO: 5300408 - DNA, 25 bp, Homo sapien
tccaaggcagtctcttggtactttt

SEQ ID NO: 5300409 - DNA, 25 bp, Homo sapien
tgatgcacagcgtttatggcagttg

SEQ ID NO: 5300410 - DNA, 25 bp, Homo sapien
tcttggtacttttgatgcacagcgt

SEQ ID NO: 5300411 - DNA, 25 bp, Homo sapien
cagattgggcgaccactccaagaag

SEQ ID NO: 5300412 - DNA, 25 bp, Homo sapien
cattccttggcgaaagaggcctttc

SEQ ID NO: 5300413 - DNA, 25 bp, Homo sapien
cagtactgacatatcgtgggacggg

SEQ ID NO: 5300414 - DNA, 25 bp, Homo sapien
ggcctttcagtaaccgcttgcagta

SEQ ID NO: 5300415 - DNA, 25 bp, Homo sapien
gaatcttgaaggcacatcgtttatg

SEQ ID NO: 5300416 - DNA, 25 bp, Homo sapien
gatacatttgacagacgtctctttc

SEQ ID NO: 5300417 - DNA, 25 bp, Homo sapien
gaggccgggtcctggtaaagataca

SEQ ID NO: 5300418 - DNA, 25 bp, Homo sapien
tgggaagggctacatattcaggctg

SEQ ID NO: 5300419 - DNA, 25 bp, Homo sapien
cacagtaatcacagaaagtaggagc

SEQ ID NO: 5300420 - DNA, 25 bp, Homo sapien
gtccttgacgtaccaatccccagag

SEQ ID NO: 5300421 - DNA, 25 bp, Homo sapien
tacatagagagtatgtggacgaatc

SEQ ID NO: 5300422 - DNA, 25 bp, Homo sapien
ggagctttgtaagaatgtacataga

SEQ ID NO: 5300423 - DNA, 25 bp, Homo sapien
agagacgaggtatgctgctcaggct

SEQ ID NO: 5300424 - DNA, 25 bp, Homo sapien
cgaattgcagcatttagtacagaaa

SEQ ID NO: 5300425 - DNA, 25 bp, Homo sapien
tgagccaccgttgccaggtattttt

SEQ ID NO: 5300426 - DNA, 25 bp, Homo sapien
tggtgatataacatgcctgaaagga

SEQ ID NO: 5300427 - DNA, 25 bp, Homo sapien
ctgaaagaaccacttccactaggtc

SEQ ID NO: 5300428 - DNA, 25 bp, Homo sapien
agaaccacttccactaggtctcctt

SEQ ID NO: 5300429 - DNA, 25 bp, Homo sapien
tttcatctgctgaggtaatcagctg

SEQ ID NO: 5300430 - DNA, 25 bp, Homo sapien
tctgctgaggtaatcagctgcaaaa

SEQ ID NO: 5300431 - DNA, 25 bp, Homo sapien
gcgaaagagaagaattttgtcatac

SEQ ID NO: 5300432 - DNA, 25 bp, Homo sapien
tggcgaaagagaagaattttgtcat

SEQ ID NO: 5300433 - DNA, 25 bp, Homo sapien
gtcatggcgaaagagaagaattttg

SEQ ID NO: 5300434 - DNA, 25 bp, Homo sapien
catggcgaaagagaagaattttgtc

SEQ ID NO: 5300435 - DNA, 25 bp, Homo sapien
aaacttactgctactccactcttag

SEQ ID NO: 5300436 - DNA, 25 bp, Homo sapien
taatcttaaacttactgctactcca

SEQ ID NO: 5300437 - DNA, 25 bp, Homo sapien
tcttaaacttactgctactccactc

SEQ ID NO: 5300438 - DNA, 25 bp, Homo sapien
tataatcttaaacttactgctactc

SEQ ID NO: 5300439 - DNA, 25 bp, Homo sapien
tcaggtatattgcaggaggcctttc

SEQ ID NO: 5300440 - DNA, 25 bp, Homo sapien
caagggcacctactgtcaacatgac

SEQ ID NO: 5300441 - DNA, 25 bp, Homo sapien
taactgttatgtccccataggcccc

SEQ ID NO: 5300442 - DNA, 25 bp, Homo sapien
ttctcattgcactctaccaagggca

SEQ ID NO: 5300443 - DNA, 25 bp, Homo sapien
gtaaaatagtgcctacttgcctact

SEQ ID NO: 5300444 - DNA, 25 bp, Homo sapien
ttcaccagtcccatctaagtatata

SEQ ID NO: 5300445 - DNA, 25 bp, Homo sapien
ttttctttcaccagtcccatctaag

SEQ ID NO: 5300446 - DNA, 25 bp, Homo sapien
tgttgaacaaaagttgtgaaagtgg

SEQ ID NO: 5300447 - DNA, 25 bp, Homo sapien
tacaaatgcccgattggtatatgaa

SEQ ID NO: 5300448 - DNA, 25 bp, Homo sapien
tccgcgatcccatggttactgcagc

SEQ ID NO: 5300449 - DNA, 25 bp, Homo sapien
gctacagggtatctacccgaaagaa

SEQ ID NO: 5300450 - DNA, 25 bp, Homo sapien
aggatccagcaatctcgctacaggg

SEQ ID NO: 5300451 - DNA, 25 bp, Homo sapien
ggtgacttgacattggagggacagc

SEQ ID NO: 5300452 - DNA, 25 bp, Homo sapien
gtgctgatgatagagacagaaggca

SEQ ID NO: 5300453 - DNA, 25 bp, Homo sapien
ccccaagtgctgatgatagagacag

SEQ ID NO: 5300454 - DNA, 25 bp, Homo sapien
agaggtgacttgacattggagggac

SEQ ID NO: 5300455 - DNA, 25 bp, Homo sapien
tagaataatcctgcagaaaactggt

SEQ ID NO: 5300456 - DNA, 25 bp, Homo sapien
tgggactcagctgctagctactgtg

SEQ ID NO: 5300457 - DNA, 25 bp, Homo sapien
tacggaaggatacaatgctctacag

SEQ ID NO: 5300458 - DNA, 25 bp, Homo sapien
taacaaggtatggagatgggactca

SEQ ID NO: 5300459 - DNA, 25 bp, Homo sapien
gaaactgtatgcactgagcctctgg

SEQ ID NO: 5300460 - DNA, 25 bp, Homo sapien
aatggtaacactctcccgtgtgagg

SEQ ID NO: 5300461 - DNA, 25 bp, Homo sapien
tcttaggacttgaacacggagaagc

SEQ ID NO: 5300462 - DNA, 25 bp, Homo sapien
gaagcttccattagagagtcgggca

SEQ ID NO: 5300463 - DNA, 25 bp, Homo sapien
tcagtcccatcaaaaagcagtcttg

SEQ ID NO: 5300464 - DNA, 25 bp, Homo sapien
tctgttaagccactcatgccgatac

SEQ ID NO: 5300465 - DNA, 25 bp, Homo sapien
gaatgggtccatcgagaaaagctga

SEQ ID NO: 5300466 - DNA, 25 bp, Homo sapien
taacagcagtaaagaaaatgaccgc

SEQ ID NO: 5300467 - DNA, 25 bp, Homo sapien
tccaggtcctaactaggcccaacaa

SEQ ID NO: 5300468 - DNA, 25 bp, Homo sapien
cctaactaggcccaacaatgcttag

SEQ ID NO: 5300469 - DNA, 25 bp, Homo sapien
aggtcctaactaggcccaacaatgc

SEQ ID NO: 5300470 - DNA, 25 bp, Homo sapien
atccaggtcctaactaggcccaaca

SEQ ID NO: 5300471 - DNA, 25 bp, Homo sapien
taatacaactaatttatcagaacaa

SEQ ID NO: 5300472 - DNA, 25 bp, Homo sapien
ctggcccaaattaactacttctact

SEQ ID NO: 5300473 - DNA, 25 bp, Homo sapien
gtaatattagccaaataacagtgtt

SEQ ID NO: 5300474 - DNA, 25 bp, Homo sapien
gtctcagtattaacacaaatagaag

SEQ ID NO: 5300475 - DNA, 25 bp, Homo sapien
gagtcaacgatgcaaagagacagac

SEQ ID NO: 5300476 - DNA, 25 bp, Homo sapien
tattaatggcatcttgaacccagtc

SEQ ID NO: 5300477 - DNA, 25 bp, Homo sapien
tataaactgcaagaggtgatatggc

SEQ ID NO: 5300478 - DNA, 25 bp, Homo sapien
tgaccgaaacagacatggccactgc

SEQ ID NO: 5300479 - DNA, 25 bp, Homo sapien
ttcaatgcaattctgaccagcgtcc

SEQ ID NO: 5300480 - DNA, 25 bp, Homo sapien
ctgaccagcgtcctaaagtccatgt

SEQ ID NO: 5300481 - DNA, 25 bp, Homo sapien
tttcaatgcaattctgaccagcgtc

SEQ ID NO: 5300482 - DNA, 25 bp, Homo sapien
tctgaccagcgtcctaaagtccatg

SEQ ID NO: 5300483 - DNA, 25 bp, Homo sapien
gatgttagtctctgcaccagtagta

SEQ ID NO: 5300484 - DNA, 25 bp, Homo sapien
catctggaccagtgacagttgaatc

SEQ ID NO: 5300485 - DNA, 25 bp, Homo sapien
ggttagcagccaatgagcaatttct

SEQ ID NO: 5300486 - DNA, 25 bp, Homo sapien
caagtttttcctgagagggctactc

SEQ ID NO: 5300487 - DNA, 25 bp, Homo sapien
gatgggtgtgattgaagacacagtt

SEQ ID NO: 5300488 - DNA, 25 bp, Homo sapien
gacacagttacgtccatgccatcaa

SEQ ID NO: 5300489 - DNA, 25 bp, Homo sapien
tcaaagatgacaccgatagtcttat

SEQ ID NO: 5300490 - DNA, 25 bp, Homo sapien
tcttatttcctgtggggatgggtgt

SEQ ID NO: 5300491 - DNA, 25 bp, Homo sapien
gacggcaaggcctatgcctctgact

SEQ ID NO: 5300492 - DNA, 25 bp, Homo sapien
gaaaagtcggcaggtcgcgcgcaca

SEQ ID NO: 5300493 - DNA, 25 bp, Homo sapien
gcacacacttgtcgcttgaatcgta

SEQ ID NO: 5300494 - DNA, 25 bp, Homo sapien
tatgtgtgcctgcagacggcaaggc

SEQ ID NO: 5300495 - DNA, 25 bp, Homo sapien
caggctcggcccgtcgtgagaaact

SEQ ID NO: 5300496 - DNA, 25 bp, Homo sapien
tctgagtaccggacgaggcgccagc

SEQ ID NO: 5300497 - DNA, 25 bp, Homo sapien
ccgccagcgtctgagtaccggacga

SEQ ID NO: 5300498 - DNA, 25 bp, Homo sapien
ggcccgtcgtgagaaactgcgcccg

SEQ ID NO: 5300499 - DNA, 25 bp, Homo sapien
gtaaggcgtccagagcagagagctg

SEQ ID NO: 5300500 - DNA, 25 bp, Homo sapien
tgtaaggcgtccagagcagagagct

SEQ ID NO: 5300501 - DNA, 25 bp, Homo sapien
ttgtaaggcgtccagagcagagagc

SEQ ID NO: 5300502 - DNA, 25 bp, Homo sapien
tcggcctttaaacgcgaatgtgacc

SEQ ID NO: 5300503 - DNA, 25 bp, Homo sapien
agctcggcgcccaaaccggcacgtc

SEQ ID NO: 5300504 - DNA, 25 bp, Homo sapien
aagcccgacgttccggtgactgcag

SEQ ID NO: 5300505 - DNA, 25 bp, Homo sapien
ccgtcggcctttaaacgcgaatgtg

SEQ ID NO: 5300506 - DNA, 25 bp, Homo sapien
ctaccaccaaagtggagtgcagtcc

SEQ ID NO: 5300507 - DNA, 25 bp, Homo sapien
ggagtgcagtccagaatcaccaaac

SEQ ID NO: 5300508 - DNA, 25 bp, Homo sapien
gagtgcagtccagaatcaccaaacc

SEQ ID NO: 5300509 - DNA, 25 bp, Homo sapien
aaacaaagtatgaccgtgtcgggtg

SEQ ID NO: 5300510 - DNA, 25 bp, Homo sapien
tgtcgggtgagtggggcgggagtgg

SEQ ID NO: 5300511 - DNA, 25 bp, Homo sapien
caaagtatgaccgtgtcgggtgagt

SEQ ID NO: 5300512 - DNA, 25 bp, Homo sapien
gggcgggagtgggagtcagcagcat

SEQ ID NO: 5300513 - DNA, 25 bp, Homo sapien
tgcagttggagagcttgtcccgcat

SEQ ID NO: 5300514 - DNA, 25 bp, Homo sapien
ctgcagttggagagcttgtcccgca

SEQ ID NO: 5300515 - DNA, 25 bp, Homo sapien
ttgtaatatatgtgctgtcgaagta

SEQ ID NO: 5300516 - DNA, 25 bp, Homo sapien
atatatgtgctgtcgaagtaagcac

SEQ ID NO: 5300517 - DNA, 25 bp, Homo sapien
tccaattgtaatatatgtgctgtcg

SEQ ID NO: 5300518 - DNA, 25 bp, Homo sapien
gccaggctagtcttctctatatcat

SEQ ID NO: 5300519 - DNA, 25 bp, Homo sapien
tctgaaactggagccagtagaaagt

SEQ ID NO: 5300520 - DNA, 25 bp, Homo sapien
aagggggtccgatgatcagaactgt

SEQ ID NO: 5300521 - DNA, 25 bp, Homo sapien
ttctgaaactggagccagtagaaag

SEQ ID NO: 5300522 - DNA, 25 bp, Homo sapien
gaaagttctgaagggggtccgatga

SEQ ID NO: 5300523 - DNA, 25 bp, Homo sapien
gaactagatgttactgggagatgac

SEQ ID NO: 5300524 - DNA, 25 bp, Homo sapien
gatgttactgggagatgactcagag

SEQ ID NO: 5300525 - DNA, 25 bp, Homo sapien
ctagatgttactgggagatgactca

SEQ ID NO: 5300526 - DNA, 25 bp, Homo sapien
tctgggaactagatgttactgggag

SEQ ID NO: 5300527 - DNA, 25 bp, Homo sapien
tgcctggtgccgtgttcagcagacg

SEQ ID NO: 5300528 - DNA, 25 bp, Homo sapien
gaagtggccgcctttgttagcttgg

SEQ ID NO: 5300529 - DNA, 25 bp, Homo sapien
ccctgttttggcattggagatcata

SEQ ID NO: 5300530 - DNA, 25 bp, Homo sapien
gaaggttggacaagcacctaggacg

SEQ ID NO: 5300531 - DNA, 25 bp, Homo sapien
gcgcagtcgacccaagggtggagaa

SEQ ID NO: 5300532 - DNA, 25 bp, Homo sapien
ttcccgggctcgtgaccgccagcgg

SEQ ID NO: 5300533 - DNA, 25 bp, Homo sapien
aagacaccggcgcgtcgtgggcacc

SEQ ID NO: 5300534 - DNA, 25 bp, Homo sapien
gagggaaggcgaaggacgcgcgttc

SEQ ID NO: 5300535 - DNA, 25 bp, Homo sapien
aggggggtcagtccgagtgcctcag

SEQ ID NO: 5300536 - DNA, 25 bp, Homo sapien
gcatccaggggggtcagtccgagtg

SEQ ID NO: 5300537 - DNA, 25 bp, Homo sapien
tccaggggggtcagtccgagtgcct

SEQ ID NO: 5300538 - DNA, 25 bp, Homo sapien
ggtcagtccgagtgcctcagcctgg

SEQ ID NO: 5300539 - DNA, 25 bp, Homo sapien
tctcgccggcggctgctgagccggg

SEQ ID NO: 5300540 - DNA, 25 bp, Homo sapien
gctctgcatactcgccggggtgcct

SEQ ID NO: 5300541 - DNA, 25 bp, Homo sapien
gcctcggccagtccggggctgttct

SEQ ID NO: 5300542 - DNA, 25 bp, Homo sapien
ggcacaggaaatgtgtctcgccggc

SEQ ID NO: 5300543 - DNA, 25 bp, Homo sapien
tatgggtctcgacacttagctgcaa

SEQ ID NO: 5300544 - DNA, 25 bp, Homo sapien
ccaagccagatttgtcactccagct

SEQ ID NO: 5300545 - DNA, 25 bp, Homo sapien
ccagctgatcttctttgatggtgaa

SEQ ID NO: 5300546 - DNA, 25 bp, Homo sapien
agctgcaaagatggcatcgaccccg

SEQ ID NO: 5300547 - DNA, 25 bp, Homo sapien
cataagcagcttaattcagtgaagg

SEQ ID NO: 5300548 - DNA, 25 bp, Homo sapien
taaacattagtcgacagtactgcat

SEQ ID NO: 5300549 - DNA, 25 bp, Homo sapien
gcctaaatgataagctcctttggag

SEQ ID NO: 5300550 - DNA, 25 bp, Homo sapien
catgagcctgttattgtagctcgag

SEQ ID NO: 5300551 - DNA, 25 bp, Homo sapien
ctggtgttggaaatgggagtttgtc

SEQ ID NO: 5300552 - DNA, 25 bp, Homo sapien
tgcagttggattctggtgttggaaa

SEQ ID NO: 5300553 - DNA, 25 bp, Homo sapien
atttccttgcagttggattctggtg

SEQ ID NO: 5300554 - DNA, 25 bp, Homo sapien
tccttgcagttggattctggtgttg

SEQ ID NO: 5300555 - DNA, 25 bp, Homo sapien
ctatagtagggcagcgtggattcct

SEQ ID NO: 5300556 - DNA, 25 bp, Homo sapien
gagcttgagcttgtgccttcttatg

SEQ ID NO: 5300557 - DNA, 25 bp, Homo sapien
ttggatcaatgattcttgaatttcc

SEQ ID NO: 5300558 - DNA, 25 bp, Homo sapien
tatggataacccactcaggagggtc

SEQ ID NO: 5300559 - DNA, 25 bp, Homo sapien
gagtggatgatactcctgcccttgg

SEQ ID NO: 5300560 - DNA, 25 bp, Homo sapien
ggatgatactcctgcccttgggatc

SEQ ID NO: 5300561 - DNA, 25 bp, Homo sapien
ctccttccgcaccgtggagaggcaa

SEQ ID NO: 5300562 - DNA, 25 bp, Homo sapien
aggcaaagggagtggatgatactcc

SEQ ID NO: 5300563 - DNA, 25 bp, Homo sapien
gcccggactaccgtagaagtctgaa

SEQ ID NO: 5300564 - DNA, 25 bp, Homo sapien
actgggtcagtaactctgaatgggc

SEQ ID NO: 5300565 - DNA, 25 bp, Homo sapien
tgaaatgtcttggtgcgttgggccc

SEQ ID NO: 5300566 - DNA, 25 bp, Homo sapien
tcagagttattctgaaagatcacca

SEQ ID NO: 5300567 - DNA, 25 bp, Homo sapien
tagagcagtgcttggtgatttttct

SEQ ID NO: 5300568 - DNA, 25 bp, Homo sapien
tcattgagaattgagggcgaaaatg

SEQ ID NO: 5300569 - DNA, 25 bp, Homo sapien
ttgagggcgaaaatgtcagtttctc

SEQ ID NO: 5300570 - DNA, 25 bp, Homo sapien
cacgtttatctgagctttgcaggtt

SEQ ID NO: 5300571 - DNA, 25 bp, Homo sapien
cactcatgcaacctttatacttatt

SEQ ID NO: 5300572 - DNA, 25 bp, Homo sapien
tcatgcaacctttatacttattcac

SEQ ID NO: 5300573 - DNA, 25 bp, Homo sapien
agttgtcactcatgcaacctttata

SEQ ID NO: 5300574 - DNA, 25 bp, Homo sapien
tgtcactcatgcaacctttatactt

SEQ ID NO: 5300575 - DNA, 25 bp, Homo sapien
tccaggacttcaaagcttggcatgg

SEQ ID NO: 5300576 - DNA, 25 bp, Homo sapien
gatccaggacttcaaagcttggcat

SEQ ID NO: 5300577 - DNA, 25 bp, Homo sapien
atccaggacttcaaagcttggcatg

SEQ ID NO: 5300578 - DNA, 25 bp, Homo sapien
agggaggtggctatttggacatata

SEQ ID NO: 5300579 - DNA, 25 bp, Homo sapien
tggacatatagtctgtagtggagac

SEQ ID NO: 5300580 - DNA, 25 bp, Homo sapien
agacaagttaacgaccctgcctggg

SEQ ID NO: 5300581 - DNA, 25 bp, Homo sapien
tatttaatgataaaactggccccag

SEQ ID NO: 5300582 - DNA, 25 bp, Homo sapien
gcatgggtgacagggacattgagaa

SEQ ID NO: 5300583 - DNA, 25 bp, Homo sapien
ctgagcctgaggatagactcctggg

SEQ ID NO: 5300584 - DNA, 25 bp, Homo sapien
actcctggggtgtcaatagcatggg

SEQ ID NO: 5300585 - DNA, 25 bp, Homo sapien
gctaggaggacgtctctgagcctga

SEQ ID NO: 5300586 - DNA, 25 bp, Homo sapien
agcaacacgcaaagctttcaccaca

SEQ ID NO: 5300587 - DNA, 25 bp, Homo sapien
ctcccagcaacacgcaaagctttca

SEQ ID NO: 5300588 - DNA, 25 bp, Homo sapien
gctcccagcaacacgcaaagctttc

SEQ ID NO: 5300589 - DNA, 25 bp, Homo sapien
ccagcaacacgcaaagctttcacca

SEQ ID NO: 5300590 - DNA, 25 bp, Homo sapien
cctaaatccatatagggcaggtcat

SEQ ID NO: 5300591 - DNA, 25 bp, Homo sapien
gcaggtcataagagctgaaagccca

SEQ ID NO: 5300592 - DNA, 25 bp, Homo sapien
tccatatagggcaggtcataagagc

SEQ ID NO: 5300593 - DNA, 25 bp, Homo sapien
taagagctgaaagcccaaccaactg

SEQ ID NO: 5300594 - DNA, 25 bp, Homo sapien
tgcatcatcgttgtgcaaggccatg

SEQ ID NO: 5300595 - DNA, 25 bp, Homo sapien
gtgcatcatcgttgtgcaaggccat

SEQ ID NO: 5300596 - DNA, 25 bp, Homo sapien
tgtgcatcatcgttgtgcaaggcca

SEQ ID NO: 5300597 - DNA, 25 bp, Homo sapien
tttgtgcatcatcgttgtgcaaggc

SEQ ID NO: 5300598 - DNA, 25 bp, Homo sapien
tttgcaccgtcacacgtgtggcagg

SEQ ID NO: 5300599 - DNA, 25 bp, Homo sapien
cgtcacacgtgtggcaggtgttatg

SEQ ID NO: 5300600 - DNA, 25 bp, Homo sapien
caccgtcacacgtgtggcaggtgtt

SEQ ID NO: 5300601 - DNA, 25 bp, Homo sapien
tgcaccgtcacacgtgtggcaggtg

SEQ ID NO: 5300602 - DNA, 25 bp, Homo sapien
ggaacggggctttgtacagaggaga

SEQ ID NO: 5300603 - DNA, 25 bp, Homo sapien
cttctgcaagagttctgatgagagg

SEQ ID NO: 5300604 - DNA, 25 bp, Homo sapien
tgcaagagttctgatgagaggcagc

SEQ ID NO: 5300605 - DNA, 25 bp, Homo sapien
gttctgatgagaggcagcaggtgtt

SEQ ID NO: 5300606 - DNA, 25 bp, Homo sapien
caaaatcgaaatggccaaatgcagg

SEQ ID NO: 5300607 - DNA, 25 bp, Homo sapien
aaaatcgaaatggccaaatgcaggc

SEQ ID NO: 5300608 - DNA, 25 bp, Homo sapien
gagattctactttgcaggaattgga

SEQ ID NO: 5300609 - DNA, 25 bp, Homo sapien
ctggtcctggatactctgggtattt

SEQ ID NO: 5300610 - DNA, 25 bp, Homo sapien
gtcctggatactctgggtatttctc

SEQ ID NO: 5300611 - DNA, 25 bp, Homo sapien
tggtcctggatactctgggtatttc

SEQ ID NO: 5300612 - DNA, 25 bp, Homo sapien
aaagggttcttattgctatcttggc

SEQ ID NO: 5300613 - DNA, 25 bp, Homo sapien
ttatgttcccatggtttggaagcca

SEQ ID NO: 5300614 - DNA, 25 bp, Homo sapien
tttttgcagagccactagtgcggca

SEQ ID NO: 5300615 - DNA, 25 bp, Homo sapien
gtgcggcatacaaagaaagggttct

SEQ ID NO: 5300616 - DNA, 25 bp, Homo sapien
taattttacactaccaccaacagcg

SEQ ID NO: 5300617 - DNA, 25 bp, Homo sapien
ttttacactaccaccaacagcgtat

SEQ ID NO: 5300618 - DNA, 25 bp, Homo sapien
actaccaccaacagcgtataagggt

SEQ ID NO: 5300619 - DNA, 25 bp, Homo sapien
tgaactaattttacactaccaccaa

SEQ ID NO: 5300620 - DNA, 25 bp, Homo sapien
cataatttgatatgaatagcactga

SEQ ID NO: 5300621 - DNA, 25 bp, Homo sapien
tatgaatagcacttgatgtgaatag

SEQ ID NO: 5300622 - DNA, 25 bp, Homo sapien
cttgatgtgaatagcattgaatatc

SEQ ID NO: 5300623 - DNA, 25 bp, Homo sapien
taggattggcttggctgttcatact

SEQ ID NO: 5300624 - DNA, 25 bp, Homo sapien
cagctgctggattgaactaggatct

SEQ ID NO: 5300625 - DNA, 25 bp, Homo sapien
ctaggatcttctagatcttgatgac

SEQ ID NO: 5300626 - DNA, 25 bp, Homo sapien
tggattaaggtcacagcagtgagag

SEQ ID NO: 5300627 - DNA, 25 bp, Homo sapien
ttaagagatctggattaaggtcaca

SEQ ID NO: 5300628 - DNA, 25 bp, Homo sapien
ctgctggataggaagggtgagggct

SEQ ID NO: 5300629 - DNA, 25 bp, Homo sapien
ctggataggaagggtgagggctagg

SEQ ID NO: 5300630 - DNA, 25 bp, Homo sapien
tgctggataggaagggtgagggcta

SEQ ID NO: 5300631 - DNA, 25 bp, Homo sapien
gctggataggaagggtgagggctag

SEQ ID NO: 5300632 - DNA, 25 bp, Homo sapien
ctgctgggggaatgcggttggcaga

SEQ ID NO: 5300633 - DNA, 25 bp, Homo sapien
atcatctgactctttcaggcttatc

SEQ ID NO: 5300634 - DNA, 25 bp, Homo sapien
ggcttatcaatatttcacacaaaga

SEQ ID NO: 5300635 - DNA, 25 bp, Homo sapien
gggaatgcggttggcagagaatatg

SEQ ID NO: 5300636 - DNA, 25 bp, Homo sapien
aacgccttggcacactgcctttgca

SEQ ID NO: 5300637 - DNA, 25 bp, Homo sapien
atggttcttgagaacgccttggcac

SEQ ID NO: 5300638 - DNA, 25 bp, Homo sapien
tcttgagaacgccttggcacactgc

SEQ ID NO: 5300639 - DNA, 25 bp, Homo sapien
tgagaacgccttggcacactgcctt

SEQ ID NO: 5300640 - DNA, 25 bp, Homo sapien
gggactactgctagacctggttcag

SEQ ID NO: 5300641 - DNA, 25 bp, Homo sapien
aaggatcaactttgggttggtagct

SEQ ID NO: 5300642 - DNA, 25 bp, Homo sapien
tagctgcaggggactactgctagac

SEQ ID NO: 5300643 - DNA, 25 bp, Homo sapien
tcaactttgggttggtagctgcagg

SEQ ID NO: 5300644 - DNA, 25 bp, Homo sapien
ttcccatcatttgatgatatcttag

SEQ ID NO: 5300645 - DNA, 25 bp, Homo sapien
ctgtgaaagtctcccctcgctgcct

SEQ ID NO: 5300646 - DNA, 25 bp, Homo sapien
tgtaaaagctccaatctcagtcctg

SEQ ID NO: 5300647 - DNA, 25 bp, Homo sapien
tattttgtaaaagctccaatctcag

SEQ ID NO: 5300648 - DNA, 25 bp, Homo sapien
taagtggaacttgttccaaagctgg

SEQ ID NO: 5300649 - DNA, 25 bp, Homo sapien
caatttcttgagagggggattcagc

SEQ ID NO: 5300650 - DNA, 25 bp, Homo sapien
cacaatcacaatttcttgagagggg

SEQ ID NO: 5300651 - DNA, 25 bp, Homo sapien
gcttttaagtcttcctcagcccact

SEQ ID NO: 5300652 - DNA, 25 bp, Homo sapien
gatttttccttgtattggctatcat

SEQ ID NO: 5300653 - DNA, 25 bp, Homo sapien
cttgcatgaatagagtttcagaatc

SEQ ID NO: 5300654 - DNA, 25 bp, Homo sapien
tctggcaaggtttgtcctgtcccct

SEQ ID NO: 5300655 - DNA, 25 bp, Homo sapien
ttgtcctgtcccctttgagatggtg

SEQ ID NO: 5300656 - DNA, 25 bp, Homo sapien
ccttgcatgaatagagtttcagaat

SEQ ID NO: 5300657 - DNA, 25 bp, Homo sapien
gccacttgctcgagcttctctcatt

SEQ ID NO: 5300658 - DNA, 25 bp, Homo sapien
gactgagatgccagtttccagttct

SEQ ID NO: 5300659 - DNA, 25 bp, Homo sapien
aagttcagtgctcaagcagactgag

SEQ ID NO: 5300660 - DNA, 25 bp, Homo sapien
tgccacacttgggatgggctcagta

SEQ ID NO: 5300661 - DNA, 25 bp, Homo sapien
gcctgctttgaccatgagaactgaa

SEQ ID NO: 5300662 - DNA, 25 bp, Homo sapien
caactctcgtttctcgctgactgct

SEQ ID NO: 5300663 - DNA, 25 bp, Homo sapien
ctagtaagtataagcccttcctggg

SEQ ID NO: 5300664 - DNA, 25 bp, Homo sapien
ttcattatcagaggagtccttctca

SEQ ID NO: 5300665 - DNA, 25 bp, Homo sapien
tattggactcttgtcgagctgacac

SEQ ID NO: 5300666 - DNA, 25 bp, Homo sapien
tgtcgagctgacacttgctgtacac

SEQ ID NO: 5300667 - DNA, 25 bp, Homo sapien
tctttccttattggactcttgtcga

SEQ ID NO: 5300668 - DNA, 25 bp, Homo sapien
cacttgctgtacacattccacaaag

SEQ ID NO: 5300669 - DNA, 25 bp, Homo sapien
tctgcacacttgtagggcggggatt

SEQ ID NO: 5300670 - DNA, 25 bp, Homo sapien
aattggatcacagagtgtccgaggg

SEQ ID NO: 5300671 - DNA, 25 bp, Homo sapien
ttgagttggatttgtctggtccact

SEQ ID NO: 5300672 - DNA, 25 bp, Homo sapien
taaggtaaagaaattggatcacaga

SEQ ID NO: 5300673 - DNA, 25 bp, Homo sapien
taggactggaagtagttttcaaatg

SEQ ID NO: 5300674 - DNA, 25 bp, Homo sapien
gactggaagtagttttcaaatgatc

SEQ ID NO: 5300675 - DNA, 25 bp, Homo sapien
ctggaagtagttttcaaatgatcga

SEQ ID NO: 5300676 - DNA, 25 bp, Homo sapien
ggaagtagttttcaaatgatcgaaa

SEQ ID NO: 5300677 - DNA, 25 bp, Homo sapien
tacacgttcattttataacgtttca

SEQ ID NO: 5300678 - DNA, 25 bp, Homo sapien
tgttttattacccactcatcgttgt

SEQ ID NO: 5300679 - DNA, 25 bp, Homo sapien
aatgttttattacccactcatcgtt

SEQ ID NO: 5300680 - DNA, 25 bp, Homo sapien
caaatgttttattacccactcatcg

SEQ ID NO: 5300681 - DNA, 25 bp, Homo sapien
aaatgttttattacccactcatcgt

SEQ ID NO: 5300682 - DNA, 25 bp, Homo sapien
cacatcaccaagtgcgtgatcttca

SEQ ID NO: 5300683 - DNA, 25 bp, Homo sapien
caaaactgagtcttcagttgccaca

SEQ ID NO: 5300684 - DNA, 25 bp, Homo sapien
tggtgcacagatatgaccaaaactg

SEQ ID NO: 5300685 - DNA, 25 bp, Homo sapien
tcagttgccacattgtaattttgaa

SEQ ID NO: 5300686 - DNA, 25 bp, Homo sapien
gatatgaccaaaactgagtcttcag

SEQ ID NO: 5300687 - DNA, 25 bp, Homo sapien
gaatctatcaaacccagtactggca

SEQ ID NO: 5300688 - DNA, 25 bp, Homo sapien
gaagttacggaaagcacacaatgcc

SEQ ID NO: 5300689 - DNA, 25 bp, Homo sapien
tgtggtccaacagaaaaaacactgg

SEQ ID NO: 5300690 - DNA, 25 bp, Homo sapien
ttactgggtcacaggtggctcgcca

SEQ ID NO: 5300691 - DNA, 25 bp, Homo sapien
tttttccaaaagtagagaggctcag

SEQ ID NO: 5300692 - DNA, 25 bp, Homo sapien
taagggctcatgtacatttcagaga

SEQ ID NO: 5300693 - DNA, 25 bp, Homo sapien
ggtgttcaagtcaggaagatgctca

SEQ ID NO: 5300694 - DNA, 25 bp, Homo sapien
aaagacatttgccttacagggatga

SEQ ID NO: 5300695 - DNA, 25 bp, Homo sapien
tcttgctcagaaaatgtcggagtgc

SEQ ID NO: 5300696 - DNA, 25 bp, Homo sapien
caaataacatatgtggtgtagccca

SEQ ID NO: 5300697 - DNA, 25 bp, Homo sapien
tgcaaatacagctccggaagccctt

SEQ ID NO: 5300698 - DNA, 25 bp, Homo sapien
gagaattcgctatggtgagcctaag

SEQ ID NO: 5300699 - DNA, 25 bp, Homo sapien
gaagaactcattatgcccagggaac

SEQ ID NO: 5300700 - DNA, 25 bp, Homo sapien
tgggatggtcaaacatgtcctcggc

SEQ ID NO: 5300701 - DNA, 25 bp, Homo sapien
tatctccaaagacatcgtgctggcc

SEQ ID NO: 5300702 - DNA, 25 bp, Homo sapien
gtcactggtgacaataagggcaaca

SEQ ID NO: 5300703 - DNA, 25 bp, Homo sapien
gaatgtctattttgcaagcgggaga

SEQ ID NO: 5300704 - DNA, 25 bp, Homo sapien
tagagagccagttacatcatccagt

SEQ ID NO: 5300705 - DNA, 25 bp, Homo sapien
ccaagtgaggcttcctagagagcca

SEQ ID NO: 5300706 - DNA, 25 bp, Homo sapien
ccttcctgaggttacggccaagtga

SEQ ID NO: 5300707 - DNA, 25 bp, Homo sapien
ggttcttatagttagccctttctca

SEQ ID NO: 5300708 - DNA, 25 bp, Homo sapien
cacaaactttctcctagttcttgga

SEQ ID NO: 5300709 - DNA, 25 bp, Homo sapien
tctttcccttcatagataacactgg

SEQ ID NO: 5300710 - DNA, 25 bp, Homo sapien
gcagctaggcttacagatgagcctc

SEQ ID NO: 5300711 - DNA, 25 bp, Homo sapien
aaaagtcaatatccagatctgcagg

SEQ ID NO: 5300712 - DNA, 25 bp, Homo sapien
tgcacagtataaaggagatcctgcc

SEQ ID NO: 5300713 - DNA, 25 bp, Homo sapien
ggttggcgccccactaacaatgtcc

SEQ ID NO: 5300714 - DNA, 25 bp, Homo sapien
tgtcaagccacttagtttcaaggag

SEQ ID NO: 5300715 - DNA, 25 bp, Homo sapien
gcattatccgctccgagacggcgtg

SEQ ID NO: 5300716 - DNA, 25 bp, Homo sapien
aagatgccgctttcgactccctaag

SEQ ID NO: 5300717 - DNA, 25 bp, Homo sapien
cccagtaggcgacttctctcggaga

SEQ ID NO: 5300718 - DNA, 25 bp, Homo sapien
ctgtgcgcagatccagccgagtctg

SEQ ID NO: 5300719 - DNA, 25 bp, Homo sapien
ggcggtgacccgcagggaagcgagg

SEQ ID NO: 5300720 - DNA, 25 bp, Homo sapien
agctgtgcgagtggcgggcggtgac

SEQ ID NO: 5300721 - DNA, 25 bp, Homo sapien
ctagctgtgcgagtggcgggcggtg

SEQ ID NO: 5300722 - DNA, 25 bp, Homo sapien
aagcgaggccacctgagtgcgccgc

SEQ ID NO: 5300723 - DNA, 25 bp, Homo sapien
gatgtcagtgaggatccaggacttg

SEQ ID NO: 5300724 - DNA, 25 bp, Homo sapien
tactgggctttccattgtatagggc

SEQ ID NO: 5300725 - DNA, 25 bp, Homo sapien
cagcagtactcatagtggagcctaa

SEQ ID NO: 5300726 - DNA, 25 bp, Homo sapien
taaagtggtgaaggatccgaggctc

SEQ ID NO: 5300727 - DNA, 25 bp, Homo sapien
caccaagtcaaatagattggaccac

SEQ ID NO: 5300728 - DNA, 25 bp, Homo sapien
agtcaaatagattggaccaccgcat

SEQ ID NO: 5300729 - DNA, 25 bp, Homo sapien
tccccagatcccattagtcaccaag

SEQ ID NO: 5300730 - DNA, 25 bp, Homo sapien
cattagtcaccaagtcaaatagatt

SEQ ID NO: 5300731 - DNA, 25 bp, Homo sapien
tatcactggtaatacccaagaagga

SEQ ID NO: 5300732 - DNA, 25 bp, Homo sapien
caccctggtgtcaacagaaattcct

SEQ ID NO: 5300733 - DNA, 25 bp, Homo sapien
ggcgagcctgagctattatcactgg

SEQ ID NO: 5300734 - DNA, 25 bp, Homo sapien
aatggatctgcaaaccttccctttg

SEQ ID NO: 5300735 - DNA, 25 bp, Homo sapien
ctgttgataagaagtggacagtgtc

SEQ ID NO: 5300736 - DNA, 25 bp, Homo sapien
catgtgtaaaactggcatctgagca

SEQ ID NO: 5300737 - DNA, 25 bp, Homo sapien
cagctgtgctaaggatggcgcctac

SEQ ID NO: 5300738 - DNA, 25 bp, Homo sapien
gaaaagcgaaaagcacgttgaacag

SEQ ID NO: 5300739 - DNA, 25 bp, Homo sapien
tcatttggcacaaaatcccatggca

SEQ ID NO: 5300740 - DNA, 25 bp, Homo sapien
gcactggcccctgtctggtgtagca

SEQ ID NO: 5300741 - DNA, 25 bp, Homo sapien
ctggtgtagcatcactgagaatttc

SEQ ID NO: 5300742 - DNA, 25 bp, Homo sapien
ctggaatccggcagcgtattcaagg

SEQ ID NO: 5300743 - DNA, 25 bp, Homo sapien
gtattcaaggttgctctcactgggc

SEQ ID NO: 5300744 - DNA, 25 bp, Homo sapien
agatagcaaatctttgaaaagctga

SEQ ID NO: 5300745 - DNA, 25 bp, Homo sapien
gaatggcttggatctgatatttcct

SEQ ID NO: 5300746 - DNA, 25 bp, Homo sapien
tctcttgaaaaggtttgatacagtc

SEQ ID NO: 5300747 - DNA, 25 bp, Homo sapien
ttttgtttggtgcttggcatctggt

SEQ ID NO: 5300748 - DNA, 25 bp, Homo sapien
gattgcaagaggcagcgtctcagag

SEQ ID NO: 5300749 - DNA, 25 bp, Homo sapien
tcaggcctgtttgggtgcacttggt

SEQ ID NO: 5300750 - DNA, 25 bp, Homo sapien
aagaggcagcgtctcagagctctgc

SEQ ID NO: 5300751 - DNA, 25 bp, Homo sapien
tggattcaggcctgtttgggtgcac

SEQ ID NO: 5300752 - DNA, 25 bp, Homo sapien
tagagccactgggaaagctgtttct

SEQ ID NO: 5300753 - DNA, 25 bp, Homo sapien
gaaagctgtttctctatgaactcac

SEQ ID NO: 5300754 - DNA, 25 bp, Homo sapien
ctgggaaagctgtttctctatgaac

SEQ ID NO: 5300755 - DNA, 25 bp, Homo sapien
gccactgggaaagctgtttctctat

SEQ ID NO: 5300756 - DNA, 25 bp, Homo sapien
gcagtgacagcagacaacatcaatg

SEQ ID NO: 5300757 - DNA, 25 bp, Homo sapien
tcagggcttcgcactgacattgcag

SEQ ID NO: 5300758 - DNA, 25 bp, Homo sapien
gatacaaagaagctgaggcatcagc

SEQ ID NO: 5300759 - DNA, 25 bp, Homo sapien
tgcagaggaacttgcaggtcccacc

SEQ ID NO: 5300760 - DNA, 25 bp, Homo sapien
gaagcaggaaaggaatccccaaatc

SEQ ID NO: 5300761 - DNA, 25 bp, Homo sapien
caaatcagaacttctccttgggccc

SEQ ID NO: 5300762 - DNA, 25 bp, Homo sapien
tctaggaatcttttctgctgtcagc

SEQ ID NO: 5300763 - DNA, 25 bp, Homo sapien
tccccaaatcagaacttctccttgg

SEQ ID NO: 5300764 - DNA, 25 bp, Homo sapien
aaatactttcaggtaattgttgtca

SEQ ID NO: 5300765 - DNA, 25 bp, Homo sapien
cattaggcagtttatatttactgta

SEQ ID NO: 5300766 - DNA, 25 bp, Homo sapien
tagaaggtcttgagttcgctgacgt

SEQ ID NO: 5300767 - DNA, 25 bp, Homo sapien
tgtcaaacaagagttgacaatttgc

SEQ ID NO: 5300768 - DNA, 25 bp, Homo sapien
gctgggttaggttatttgccagaca

SEQ ID NO: 5300769 - DNA, 25 bp, Homo sapien
gttaggttatttgccagacaaacaa

SEQ ID NO: 5300770 - DNA, 25 bp, Homo sapien
acaataatgacaaataaccttggaa

SEQ ID NO: 5300771 - DNA, 25 bp, Homo sapien
aggttatttgccagacaaacaataa

SEQ ID NO: 5300772 - DNA, 25 bp, Homo sapien
cctcagctgcgagtttagagaccat

SEQ ID NO: 5300773 - DNA, 25 bp, Homo sapien
cagcaaaagagcagtttcaacctgg

SEQ ID NO: 5300774 - DNA, 25 bp, Homo sapien
tttagagaccatattgggtggcagc

SEQ ID NO: 5300775 - DNA, 25 bp, Homo sapien
tagaggtcactatttcctacatcct

SEQ ID NO: 5300776 - DNA, 25 bp, Homo sapien
gattattatacacagccagggtaga

SEQ ID NO: 5300777 - DNA, 25 bp, Homo sapien
tagagtagagattggcatcccactg

SEQ ID NO: 5300778 - DNA, 25 bp, Homo sapien
tggcctagctcacccctgtatgatg

SEQ ID NO: 5300779 - DNA, 25 bp, Homo sapien
caggcttatgtgactcagaacgatc

SEQ ID NO: 5300780 - DNA, 25 bp, Homo sapien
gggatattcccaagaccctctctca

SEQ ID NO: 5300781 - DNA, 25 bp, Homo sapien
tccaaagaattacgtgtgtcagagc

SEQ ID NO: 5300782 - DNA, 25 bp, Homo sapien
gagctccctttatacccctgttcag

SEQ ID NO: 5300783 - DNA, 25 bp, Homo sapien
cctggatgtaagattatagcatatc

SEQ ID NO: 5300784 - DNA, 25 bp, Homo sapien
gttggagaaagactcactggtccca

SEQ ID NO: 5300785 - DNA, 25 bp, Homo sapien
cagtctcacccgaggtcatgttcac

SEQ ID NO: 5300786 - DNA, 25 bp, Homo sapien
tacaatggcaaccatgtaaaccatg

SEQ ID NO: 5300787 - DNA, 25 bp, Homo sapien
taatttggaccaggttcagctgggc

SEQ ID NO: 5300788 - DNA, 25 bp, Homo sapien
cctgggagtcacagggcatcaagaa

SEQ ID NO: 5300789 - DNA, 25 bp, Homo sapien
catagtgccagccaaaattcaaggg

SEQ ID NO: 5300790 - DNA, 25 bp, Homo sapien
ggcctgttccttattggcaagggca

SEQ ID NO: 5300791 - DNA, 25 bp, Homo sapien
gggccatcctcataatatatcacag

SEQ ID NO: 5300792 - DNA, 25 bp, Homo sapien
ccaggacatgctacaggtgaagaca

SEQ ID NO: 5300793 - DNA, 25 bp, Homo sapien
tgcaatgcctttggcggtcacagac

SEQ ID NO: 5300794 - DNA, 25 bp, Homo sapien
tgttgtctaggaaggcgccagagtc

SEQ ID NO: 5300795 - DNA, 25 bp, Homo sapien
gaagtggctggtaaaccccaaagca

SEQ ID NO: 5300796 - DNA, 25 bp, Homo sapien
aagacctaattcttacagggaccag

SEQ ID NO: 5300797 - DNA, 25 bp, Homo sapien
gtttaggctgctcagatacaccatg

SEQ ID NO: 5300798 - DNA, 25 bp, Homo sapien
gccttttgcaaagtcagccttcacc

SEQ ID NO: 5300799 - DNA, 25 bp, Homo sapien
tgtcatctgttgacctcccatcagt

SEQ ID NO: 5300800 - DNA, 25 bp, Homo sapien
tcatgaggggtgcttcaggttcatt

SEQ ID NO: 5300801 - DNA, 25 bp, Homo sapien
atcatgaggggtgcttcaggttcat

SEQ ID NO: 5300802 - DNA, 25 bp, Homo sapien
catttgcagtcacttttggtttatc

SEQ ID NO: 5300803 - DNA, 25 bp, Homo sapien
catgactggtgcctctagctctaag

SEQ ID NO: 5300804 - DNA, 25 bp, Homo sapien
gactttgaatccagaggaagaagtg

SEQ ID NO: 5300805 - DNA, 25 bp, Homo sapien
tctctgccggttggatttagttttc

SEQ ID NO: 5300806 - DNA, 25 bp, Homo sapien
cacatgcatcctggacatcaaaggg

SEQ ID NO: 5300807 - DNA, 25 bp, Homo sapien
acattggcattgtggcaaaagagca

SEQ ID NO: 5300808 - DNA, 25 bp, Homo sapien
gcctcgttcccaaagattccagaag

SEQ ID NO: 5300809 - DNA, 25 bp, Homo sapien
gacattggtcacagccagttgcctc

SEQ ID NO: 5300810 - DNA, 25 bp, Homo sapien
tacttctacctctgcgacatggtgg

SEQ ID NO: 5300811 - DNA, 25 bp, Homo sapien
tcaagatgtaataggaccaaggccc

SEQ ID NO: 5300812 - DNA, 25 bp, Homo sapien
ggttctgagtgtgaatcccggccac

SEQ ID NO: 5300813 - DNA, 25 bp, Homo sapien
gatgagaaaacagacgcaagagggc

SEQ ID NO: 5300814 - DNA, 25 bp, Homo sapien
gctgtatctgctgcggccattgggc

SEQ ID NO: 5300815 - DNA, 25 bp, Homo sapien
agcagccatcaagcagctgtatctg

SEQ ID NO: 5300816 - DNA, 25 bp, Homo sapien
gactcaatagcaagttgagttgctg

SEQ ID NO: 5300817 - DNA, 25 bp, Homo sapien
tgtttgtggctgtgactcaatagca

SEQ ID NO: 5300818 - DNA, 25 bp, Homo sapien
tgccagggctcgaagtacatttcag

SEQ ID NO: 5300819 - DNA, 25 bp, Homo sapien
gaaagtaaacgatgccaaaggccag

SEQ ID NO: 5300820 - DNA, 25 bp, Homo sapien
taaattgcttacacggatggacggg

SEQ ID NO: 5300821 - DNA, 25 bp, Homo sapien
tatccaacactaaggcatcagcagg

SEQ ID NO: 5300822 - DNA, 25 bp, Homo sapien
tttaaaatagcaacataagaagaat

SEQ ID NO: 5300823 - DNA, 25 bp, Homo sapien
tgagttcaggagtttaaaatagcaa

SEQ ID NO: 5300824 - DNA, 25 bp, Homo sapien
agttcaggagtttaaaatagcaaca

SEQ ID NO: 5300825 - DNA, 25 bp, Homo sapien
tcaggagtttaaaatagcaacataa

SEQ ID NO: 5300826 - DNA, 25 bp, Homo sapien
tcagttcgtgaaaacagcaaagatg

SEQ ID NO: 5300827 - DNA, 25 bp, Homo sapien
aaagatgtgtggcatgactagctcc

SEQ ID NO: 5300828 - DNA, 25 bp, Homo sapien
tcagggagggccacatagacatgag

SEQ ID NO: 5300829 - DNA, 25 bp, Homo sapien
aacttaagccttcccactcagggag

SEQ ID NO: 5300830 - DNA, 25 bp, Homo sapien
aaatgtaaggtttgacatttatatt

SEQ ID NO: 5300831 - DNA, 25 bp, Homo sapien
gaaatgtaaggtttgacatttatat

SEQ ID NO: 5300832 - DNA, 25 bp, Homo sapien
ccaccacaccaggttggaaatgtaa

SEQ ID NO: 5300833 - DNA, 25 bp, Homo sapien
tgaacaatggcccaagagcctaagg

SEQ ID NO: 5300834 - DNA, 25 bp, Homo sapien
taattgccaaggagaatgatggcct

SEQ ID NO: 5300835 - DNA, 25 bp, Homo sapien
ttaatatagtgcacaactcagcctg

SEQ ID NO: 5300836 - DNA, 25 bp, Homo sapien
tgaattaggacctctggacaccttg

SEQ ID NO: 5300837 - DNA, 25 bp, Homo sapien
tcgacagtaagcaaaggagtgtcct

SEQ ID NO: 5300838 - DNA, 25 bp, Homo sapien
gaagctgtgcctattcagggatcta

SEQ ID NO: 5300839 - DNA, 25 bp, Homo sapien
gagtgtcctgctatgaactccctga

SEQ ID NO: 5300840 - DNA, 25 bp, Homo sapien
tactccctgctcactgaagctgtgc

SEQ ID NO: 5300841 - DNA, 25 bp, Homo sapien
gatcttcttgccattgcatgtactt

SEQ ID NO: 5300842 - DNA, 25 bp, Homo sapien
tcaggtctcttcactgctcaacagt

SEQ ID NO: 5300843 - DNA, 25 bp, Homo sapien
tttttagtatgcgatcaggtctctt

SEQ ID NO: 5300844 - DNA, 25 bp, Homo sapien
agggactccccgtccactactgaat

SEQ ID NO: 5300845 - DNA, 25 bp, Homo sapien
ctctgactccggagtctggtttttc

SEQ ID NO: 5300846 - DNA, 25 bp, Homo sapien
taaacagtgtagtttgttcccactc

SEQ ID NO: 5300847 - DNA, 25 bp, Homo sapien
ttggaggacttgacatgccttttgt

SEQ ID NO: 5300848 - DNA, 25 bp, Homo sapien
gacttgacatgccttttgtgttctg

SEQ ID NO: 5300849 - DNA, 25 bp, Homo sapien
tccccagtgattacgccaaatgtta

SEQ ID NO: 5300850 - DNA, 25 bp, Homo sapien
aagactgatccccagtgattacgcc

SEQ ID NO: 5300851 - DNA, 25 bp, Homo sapien
ctgtaaagactgatccccagtgatt

SEQ ID NO: 5300852 - DNA, 25 bp, Homo sapien
ctgatccccagtgattacgccaaat

SEQ ID NO: 5300853 - DNA, 25 bp, Homo sapien
aatgcacagaatgacacccgttttt

SEQ ID NO: 5300854 - DNA, 25 bp, Homo sapien
ttttcaacaccgtgaatctaatgca

SEQ ID NO: 5300855 - DNA, 25 bp, Homo sapien
accgtgaatctaatgcacagaatga

SEQ ID NO: 5300856 - DNA, 25 bp, Homo sapien
gcacagaatgacacccgtttttaag

SEQ ID NO: 5300857 - DNA, 25 bp, Homo sapien
ggatcaagctcggtgtcagccccat

SEQ ID NO: 5300858 - DNA, 25 bp, Homo sapien
ttaggatcaagctcggtgtcagccc

SEQ ID NO: 5300859 - DNA, 25 bp, Homo sapien
ttacttaggatcaagctcggtgtca

SEQ ID NO: 5300860 - DNA, 25 bp, Homo sapien
ccacagggagcaataagggaaagag

SEQ ID NO: 5300861 - DNA, 25 bp, Homo sapien
tctcagctagaaaccctcctccctc

SEQ ID NO: 5300862 - DNA, 25 bp, Homo sapien
tcgcaggaacggctccggagagctt

SEQ ID NO: 5300863 - DNA, 25 bp, Homo sapien
tgaagaggggtaggctgcaggccca

SEQ ID NO: 5300864 - DNA, 25 bp, Homo sapien
tgcaggcccacagccgcagtctctc

SEQ ID NO: 5300865 - DNA, 25 bp, Homo sapien
ctgaatctccagaagccaatagaat

SEQ ID NO: 5300866 - DNA, 25 bp, Homo sapien
taaggctctaagtgaatatcgcaca

SEQ ID NO: 5300867 - DNA, 25 bp, Homo sapien
ccacaaatgtgataaggctctaagt

SEQ ID NO: 5300868 - DNA, 25 bp, Homo sapien
gttccttcttgaggaaggacgtctc

SEQ ID NO: 5300869 - DNA, 25 bp, Homo sapien
catctctgttatgccgcggctgcga

SEQ ID NO: 5300870 - DNA, 25 bp, Homo sapien
catcgtggagcatggaagtggttca

SEQ ID NO: 5300871 - DNA, 25 bp, Homo sapien
caacaggtgccgtgagaggctcaga

SEQ ID NO: 5300872 - DNA, 25 bp, Homo sapien
gcggctgcgatgttttaagtcccca

SEQ ID NO: 5300873 - DNA, 25 bp, Homo sapien
ttttaggtgcgtaagtattggccat

SEQ ID NO: 5300874 - DNA, 25 bp, Homo sapien
ggtggctcccgtgatgatattgatt

SEQ ID NO: 5300875 - DNA, 25 bp, Homo sapien
gatgatattgattttaggtgcgtaa

SEQ ID NO: 5300876 - DNA, 25 bp, Homo sapien
tttcttaatggtggctcccgtgatg

SEQ ID NO: 5300877 - DNA, 25 bp, Homo sapien
cgctggtatttcctcgcacgcggac

SEQ ID NO: 5300878 - DNA, 25 bp, Homo sapien
ggcccatagtggcttcccgggttca

SEQ ID NO: 5300879 - DNA, 25 bp, Homo sapien
cagtgaacacaggtgcgtgcgcagt

SEQ ID NO: 5300880 - DNA, 25 bp, Homo sapien
tccctggcgaagcttgagcctgcta

SEQ ID NO: 5300881 - DNA, 25 bp, Homo sapien
cgattctcgctgtcactttcaggtg

SEQ ID NO: 5300882 - DNA, 25 bp, Homo sapien
tttccaccttggttcgattctcgct

SEQ ID NO: 5300883 - DNA, 25 bp, Homo sapien
ccttggttcgattctcgctgtcact

SEQ ID NO: 5300884 - DNA, 25 bp, Homo sapien
gattctcgctgtcactttcaggtgc

SEQ ID NO: 5300885 - DNA, 25 bp, Homo sapien
gacaatcagaccttagtgcggctta

SEQ ID NO: 5300886 - DNA, 25 bp, Homo sapien
gacagtagtctcacaagagagggaa

SEQ ID NO: 5300887 - DNA, 25 bp, Homo sapien
ggtagatcatctaagctcagcgttc

SEQ ID NO: 5300888 - DNA, 25 bp, Homo sapien
gtttcccttcaggaccaagagcagg

SEQ ID NO: 5300889 - DNA, 25 bp, Homo sapien
cacatgccttgttcttttgacctga

SEQ ID NO: 5300890 - DNA, 25 bp, Homo sapien
cagggtggaaaaatctcaggtatct

SEQ ID NO: 5300891 - DNA, 25 bp, Homo sapien
tcatccattgacatagctctttagg

SEQ ID NO: 5300892 - DNA, 25 bp, Homo sapien
tgggaaaaacccaggtcagtgtgag

SEQ ID NO: 5300893 - DNA, 25 bp, Homo sapien
tgctgggatgtgcagtaagagaaca

SEQ ID NO: 5300894 - DNA, 25 bp, Homo sapien
ttaacaaggccttgatagacgtttc

SEQ ID NO: 5300895 - DNA, 25 bp, Homo sapien
ccaactggatttgcttgcgggctgt

SEQ ID NO: 5300896 - DNA, 25 bp, Homo sapien
tcctcaatatcagtgccaagctcta

SEQ ID NO: 5300897 - DNA, 25 bp, Homo sapien
tccaatggcctagataatggccaag

SEQ ID NO: 5300898 - DNA, 25 bp, Homo sapien
gtggtgctctcaaagctgatatgac

SEQ ID NO: 5300899 - DNA, 25 bp, Homo sapien
gggtccaatggcctagataatggcc

SEQ ID NO: 5300900 - DNA, 25 bp, Homo sapien
aagctgatatgacctgacttgtggg

SEQ ID NO: 5300901 - DNA, 25 bp, Homo sapien
cgtttccttgtctgccagcagctgc

SEQ ID NO: 5300902 - DNA, 25 bp, Homo sapien
tcgtttccttgtctgccagcagctg

SEQ ID NO: 5300903 - DNA, 25 bp, Homo sapien
agtgttgccatctcgtttccttgtc

SEQ ID NO: 5300904 - DNA, 25 bp, Homo sapien
gccatctcgtttccttgtctgccag

SEQ ID NO: 5300905 - DNA, 25 bp, Homo sapien
gctacctgccaatgtcagttcagct

SEQ ID NO: 5300906 - DNA, 25 bp, Homo sapien
ctacctgccaatgtcagttcagctt

SEQ ID NO: 5300907 - DNA, 25 bp, Homo sapien
tacctgccaatgtcagttcagcttc

SEQ ID NO: 5300908 - DNA, 25 bp, Homo sapien
tgaatagtgccactataaacataca

SEQ ID NO: 5300909 - DNA, 25 bp, Homo sapien
gaatagtgccactataaacatacat

SEQ ID NO: 5300910 - DNA, 25 bp, Homo sapien
aatagtgccactataaacatacatg

SEQ ID NO: 5300911 - DNA, 25 bp, Homo sapien
atagtgccactataaacatacatgt

SEQ ID NO: 5300912 - DNA, 25 bp, Homo sapien
aaggcctggagagtcatgacctagg

SEQ ID NO: 5300913 - DNA, 25 bp, Homo sapien
catctgtgagtgtggcacagtgaag

SEQ ID NO: 5300914 - DNA, 25 bp, Homo sapien
tttggtaccgcaagccctgtcatct

SEQ ID NO: 5300915 - DNA, 25 bp, Homo sapien
aagataaagagcctttggtaccgca

SEQ ID NO: 5300916 - DNA, 25 bp, Homo sapien
tgtaacctccgtgttggttcttaga

SEQ ID NO: 5300917 - DNA, 25 bp, Homo sapien
ctcggcctgaaatgtagaatggaca

SEQ ID NO: 5300918 - DNA, 25 bp, Homo sapien
gatgaagcagaaatcgatcagcaac

SEQ ID NO: 5300919 - DNA, 25 bp, Homo sapien
tgcactaattgaggcacatgtacct

SEQ ID NO: 5300920 - DNA, 25 bp, Homo sapien
gaataatccatagtaatagttgaaa

SEQ ID NO: 5300921 - DNA, 25 bp, Homo sapien
gttgaaataaagtgatacattagac

SEQ ID NO: 5300922 - DNA, 25 bp, Homo sapien
taattgaataatccatagtaatagt

SEQ ID NO: 5300923 - DNA, 25 bp, Homo sapien
cattagactatatttgctacaacat

SEQ ID NO: 5300924 - DNA, 25 bp, Homo sapien
cttttgccgcaagcatctgatgacg

SEQ ID NO: 5300925 - DNA, 25 bp, Homo sapien
tctgatgacgactgggcctacatac

SEQ ID NO: 5300926 - DNA, 25 bp, Homo sapien
atttaaatgtactgggcaagcctgc

SEQ ID NO: 5300927 - DNA, 25 bp, Homo sapien
tctccggtagaaacacaatgagggt

SEQ ID NO: 5300928 - DNA, 25 bp, Homo sapien
tgagctttatgctttcccagctacc

SEQ ID NO: 5300929 - DNA, 25 bp, Homo sapien
cccagctaccaaagtaattgccatc

SEQ ID NO: 5300930 - DNA, 25 bp, Homo sapien
catacatttcatttgagctttatgc

SEQ ID NO: 5300931 - DNA, 25 bp, Homo sapien
ctttggaagtttaattgcaatgaac

SEQ ID NO: 5300932 - DNA, 25 bp, Homo sapien
cagcttccaagactatcttctgatt

SEQ ID NO: 5300933 - DNA, 25 bp, Homo sapien
aaagcaggcattaatgttaactttc

SEQ ID NO: 5300934 - DNA, 25 bp, Homo sapien
tcttttccaaacagcttccaagact

SEQ ID NO: 5300935 - DNA, 25 bp, Homo sapien
caaaaagcaggcattaatgttaact

SEQ ID NO: 5300936 - DNA, 25 bp, Homo sapien
ttattcattgggcagacacagctta

SEQ ID NO: 5300937 - DNA, 25 bp, Homo sapien
tctgcatatgggagaccaatcttgg

SEQ ID NO: 5300938 - DNA, 25 bp, Homo sapien
agaaccgctgggtatggagcacacc

SEQ ID NO: 5300939 - DNA, 25 bp, Homo sapien
ctttggcaagcaaaagaggtacaac

SEQ ID NO: 5300940 - DNA, 25 bp, Homo sapien
cctcatctccgaagatgtgaatatt

SEQ ID NO: 5300941 - DNA, 25 bp, Homo sapien
cttaaacgctaattgagaagcagca

SEQ ID NO: 5300942 - DNA, 25 bp, Homo sapien
ctgaattttactcctcatctccgaa

SEQ ID NO: 5300943 - DNA, 25 bp, Homo sapien
taaacgctaattgagaagcagcaca

SEQ ID NO: 5300944 - DNA, 25 bp, Homo sapien
ttttggacagcactatcaaggagct

SEQ ID NO: 5300945 - DNA, 25 bp, Homo sapien
gacagcactatcaaggagctccatg

SEQ ID NO: 5300946 - DNA, 25 bp, Homo sapien
gctccatggactctctgagagtgac

SEQ ID NO: 5300947 - DNA, 25 bp, Homo sapien
ttggacagcactatcaaggagctcc

SEQ ID NO: 5300948 - DNA, 25 bp, Homo sapien
catgattcacagaccactggttgac

SEQ ID NO: 5300949 - DNA, 25 bp, Homo sapien
tagaaagttcttcgccaatgcaccg

SEQ ID NO: 5300950 - DNA, 25 bp, Homo sapien
gatcaaagttctccgggttaggcca

SEQ ID NO: 5300951 - DNA, 25 bp, Homo sapien
ccctgaaatcgcactggtgagccag

SEQ ID NO: 5300952 - DNA, 25 bp, Homo sapien
cacgacctgatccaattctgcctgc

SEQ ID NO: 5300953 - DNA, 25 bp, Homo sapien
atacaaggcagacggtccctcccca

SEQ ID NO: 5300954 - DNA, 25 bp, Homo sapien
cactcgagtctgcacatcaggatac

SEQ ID NO: 5300955 - DNA, 25 bp, Homo sapien
ttgggctggtcacccatacaaggca

SEQ ID NO: 5300956 - DNA, 25 bp, Homo sapien
cttaaataggctatctagctcagtg

SEQ ID NO: 5300957 - DNA, 25 bp, Homo sapien
ctttttcttaaataggctatctagc

SEQ ID NO: 5300958 - DNA, 25 bp, Homo sapien
gctcagtgactaaattaatatttct

SEQ ID NO: 5300959 - DNA, 25 bp, Homo sapien
tagctcagtgactaaattaatattt

SEQ ID NO: 5300960 - DNA, 25 bp, Homo sapien
tgcgaaacatttgcccctagggata

SEQ ID NO: 5300961 - DNA, 25 bp, Homo sapien
tatggatttcagatcaacaagggct

SEQ ID NO: 5300962 - DNA, 25 bp, Homo sapien
tagtgtgagtattcccgtgtaaaac

SEQ ID NO: 5300963 - DNA, 25 bp, Homo sapien
tacaggccgcccagttaaatatgga

SEQ ID NO: 5300964 - DNA, 25 bp, Homo sapien
gggccagaaacgtctgcaggcgcct

SEQ ID NO: 5300965 - DNA, 25 bp, Homo sapien
caccagggacctgttgaatccgtgc

SEQ ID NO: 5300966 - DNA, 25 bp, Homo sapien
gtgcttagtagagaccaacgtgggc

SEQ ID NO: 5300967 - DNA, 25 bp, Homo sapien
tccgctaactgagccaagcgcaggg

SEQ ID NO: 5300968 - DNA, 25 bp, Homo sapien
tgtcctggctggcgccgaagatgtc

SEQ ID NO: 5300969 - DNA, 25 bp, Homo sapien
tagtggccggtacgttctccaaatc

SEQ ID NO: 5300970 - DNA, 25 bp, Homo sapien
agcagccactgcagcgcggtggaca

SEQ ID NO: 5300971 - DNA, 25 bp, Homo sapien
agatgtcagtgatagtggccggtac

SEQ ID NO: 5300972 - DNA, 25 bp, Homo sapien
tgaagttgcggttgagctgctcgaa

SEQ ID NO: 5300973 - DNA, 25 bp, Homo sapien
gaaggctttcgcagtgcctcaagaa

SEQ ID NO: 5300974 - DNA, 25 bp, Homo sapien
cgaattcgcggaaaacggtgcgcac

SEQ ID NO: 5300975 - DNA, 25 bp, Homo sapien
tttccgcagagaggataaaggcgtc

SEQ ID NO: 5300976 - DNA, 25 bp, Homo sapien
cacacggcactcatgacgttggcca

SEQ ID NO: 5300977 - DNA, 25 bp, Homo sapien
cgaactcttcgttgtggctgagcag

SEQ ID NO: 5300978 - DNA, 25 bp, Homo sapien
gatctggaaaacgtcgccgtagcgc

SEQ ID NO: 5300979 - DNA, 25 bp, Homo sapien
tccagtgctccgagtagtggccgaa

SEQ ID NO: 5300980 - DNA, 25 bp, Homo sapien
acagagaggagaaggcgtgacactc

SEQ ID NO: 5300981 - DNA, 25 bp, Homo sapien
agagacaggagcgggcgccccacgc

SEQ ID NO: 5300982 - DNA, 25 bp, Homo sapien
cagagaggagaaggcgtgacactca

SEQ ID NO: 5300983 - DNA, 25 bp, Homo sapien
tgcagagacaggagcgggcgcccca

SEQ ID NO: 5300984 - DNA, 25 bp, Homo sapien
ggtcgccgggcagcgcctcggcaga

SEQ ID NO: 5300985 - DNA, 25 bp, Homo sapien
ccatctgaagaggtcgccgggcagc

SEQ ID NO: 5300986 - DNA, 25 bp, Homo sapien
aatccatctgaagaggtcgccgggc

SEQ ID NO: 5300987 - DNA, 25 bp, Homo sapien
aggtcgccgggcagcgcctcggcag

SEQ ID NO: 5300988 - DNA, 25 bp, Homo sapien
ctagggcaagacgtcaacaggaacc

SEQ ID NO: 5300989 - DNA, 25 bp, Homo sapien
tctcacaactggagtcgcagaagcg

SEQ ID NO: 5300990 - DNA, 25 bp, Homo sapien
tcgaggtttcctcacagcgttgaga

SEQ ID NO: 5300991 - DNA, 25 bp, Homo sapien
tgagtggcgtcaattcccatgccct

SEQ ID NO: 5300992 - DNA, 25 bp, Homo sapien
acctccaatcgaggccgcacggtgt

SEQ ID NO: 5300993 - DNA, 25 bp, Homo sapien
cagtgtagtggcagcggtttgcctc

SEQ ID NO: 5300994 - DNA, 25 bp, Homo sapien
ggtgtccccagaaccacgctcggta

SEQ ID NO: 5300995 - DNA, 25 bp, Homo sapien
tccattgtgcggtaaccgcgcttca

SEQ ID NO: 5300996 - DNA, 25 bp, Homo sapien
tgcagagaaggataaccgtgatgct

SEQ ID NO: 5300997 - DNA, 25 bp, Homo sapien
cgtgatgcttcacaggatacaagga

SEQ ID NO: 5300998 - DNA, 25 bp, Homo sapien
ccgctctaccggctctctgcctatg

SEQ ID NO: 5300999 - DNA, 25 bp, Homo sapien
tctctctttgcatggcaaggaagca

SEQ ID NO: 5301000 - DNA, 25 bp, Homo sapien
ggagaataagccatctctggtaggc

SEQ ID NO: 5301001 - DNA, 25 bp, Homo sapien
gcaggattcagtcatcaggcacatg

SEQ ID NO: 5301002 - DNA, 25 bp, Homo sapien
tctggtaggctcttgacatttgggt

SEQ ID NO: 5301003 - DNA, 25 bp, Homo sapien
cttgacatttgggtgggcaggattc

SEQ ID NO: 5301004 - DNA, 25 bp, Homo sapien
tgtttgatgaaaacgctatctgatt

SEQ ID NO: 5301005 - DNA, 25 bp, Homo sapien
cgaaacgaaactgtaaggcagacca

SEQ ID NO: 5301006 - DNA, 25 bp, Homo sapien
ctgctgccaaaggagtcacgaactg

SEQ ID NO: 5301007 - DNA, 25 bp, Homo sapien
gcctggtggccagatttctagcact

SEQ ID NO: 5301008 - DNA, 25 bp, Homo sapien
ggtgaagctcccaccgacttggcac

SEQ ID NO: 5301009 - DNA, 25 bp, Homo sapien
tccatacgaagggaagggacgccag

SEQ ID NO: 5301010 - DNA, 25 bp, Homo sapien
ccgacttggcacagtgatgattcca

SEQ ID NO: 5301011 - DNA, 25 bp, Homo sapien
gctcaacgtttgagcatgtgcctct

SEQ ID NO: 5301012 - DNA, 25 bp, Homo sapien
aagagcctgatgaggccatagtagg

SEQ ID NO: 5301013 - DNA, 25 bp, Homo sapien
tgactgttacggatgctttgtagcc

SEQ ID NO: 5301014 - DNA, 25 bp, Homo sapien
gctccacatcaggacccttaggtag

SEQ ID NO: 5301015 - DNA, 25 bp, Homo sapien
caccaagctatgctttcggtcagtc

SEQ ID NO: 5301016 - DNA, 25 bp, Homo sapien
ttctgagccttgagaaggtggcact

SEQ ID NO: 5301017 - DNA, 25 bp, Homo sapien
ggaaggcttcccagtttctgagcct

SEQ ID NO: 5301018 - DNA, 25 bp, Homo sapien
ttttcccattgtgctgagtcagcca

SEQ ID NO: 5301019 - DNA, 25 bp, Homo sapien
tgggttgtgcattttaagggtttga

SEQ ID NO: 5301020 - DNA, 25 bp, Homo sapien
agtgagacttttcgcattatagggc

SEQ ID NO: 5301021 - DNA, 25 bp, Homo sapien
tttcgcattatagggcccaactaga

SEQ ID NO: 5301022 - DNA, 25 bp, Homo sapien
cgtcctggtgtagtgagacttttcg

SEQ ID NO: 5301023 - DNA, 25 bp, Homo sapien
tatagggcccaactagagatccagt

SEQ ID NO: 5301024 - DNA, 25 bp, Homo sapien
tattgaggcattagcggcattctgc

SEQ ID NO: 5301025 - DNA, 25 bp, Homo sapien
tatgcttagtacctccagagagtgg

SEQ ID NO: 5301026 - DNA, 25 bp, Homo sapien
gagtctcaaattaagaatgccctgg

SEQ ID NO: 5301027 - DNA, 25 bp, Homo sapien
tccttcagctagagaagcgaggtcc

SEQ ID NO: 5301028 - DNA, 25 bp, Homo sapien
ggatcttctttgggccaggccaaac

SEQ ID NO: 5301029 - DNA, 25 bp, Homo sapien
ttactcccagtctgacagtggcttt

SEQ ID NO: 5301030 - DNA, 25 bp, Homo sapien
tgagctcagtccaacaggacacctg

SEQ ID NO: 5301031 - DNA, 25 bp, Homo sapien
cctcttcagatcctgttcttgagct

SEQ ID NO: 5301032 - DNA, 25 bp, Homo sapien
ggtataaggacaatacacccaggcc

SEQ ID NO: 5301033 - DNA, 25 bp, Homo sapien
aggtataaggacaatacacccaggc

SEQ ID NO: 5301034 - DNA, 25 bp, Homo sapien
aagaggtataaggacaatacaccca

SEQ ID NO: 5301035 - DNA, 25 bp, Homo sapien
gaggtataaggacaatacacccagg

SEQ ID NO: 5301036 - DNA, 25 bp, Homo sapien
ccacttcccgactggccccagtgtg

SEQ ID NO: 5301037 - DNA, 25 bp, Homo sapien
tgcaaagaacacgaattctttttta

SEQ ID NO: 5301038 - DNA, 25 bp, Homo sapien
tctaatgctctcccttcccttggcc

SEQ ID NO: 5301039 - DNA, 25 bp, Homo sapien
tgtccctgcaaagaacacgaattct

SEQ ID NO: 5301040 - DNA, 25 bp, Homo sapien
tgccttcttcccaagtcagcactcc

SEQ ID NO: 5301041 - DNA, 25 bp, Homo sapien
ggaagaaatgcctttgtgccttccc

SEQ ID NO: 5301042 - DNA, 25 bp, Homo sapien
ttcccaagtcagcactcctctcttc

SEQ ID NO: 5301043 - DNA, 25 bp, Homo sapien
ctgcaacaagggagcagccactgcc

SEQ ID NO: 5301044 - DNA, 25 bp, Homo sapien
catttgatctgttgacagtttcagc

SEQ ID NO: 5301045 - DNA, 25 bp, Homo sapien
tttgatctgttgacagtttcagcca

SEQ ID NO: 5301046 - DNA, 25 bp, Homo sapien
atttgatctgttgacagtttcagcc

SEQ ID NO: 5301047 - DNA, 25 bp, Homo sapien
gagggctcattagcttttgaaccag

SEQ ID NO: 5301048 - DNA, 25 bp, Homo sapien
taaggacctgggaatctagagggct

SEQ ID NO: 5301049 - DNA, 25 bp, Homo sapien
tagttcgtctccatgatcctgtgaa

SEQ ID NO: 5301050 - DNA, 25 bp, Homo sapien
ttgggaggatcagaagcttggtcct

SEQ ID NO: 5301051 - DNA, 25 bp, Homo sapien
gggccttacgaaaccagcatgagat

SEQ ID NO: 5301052 - DNA, 25 bp, Homo sapien
gaagtgatctctatccaagggaaga

SEQ ID NO: 5301053 - DNA, 25 bp, Homo sapien
ccatgcctggtacctagtgagtgct

SEQ ID NO: 5301054 - DNA, 25 bp, Homo sapien
gaagcatagagagcctgaccttgtc

SEQ ID NO: 5301055 - DNA, 25 bp, Homo sapien
catttcctcattttgggacagcaag

SEQ ID NO: 5301056 - DNA, 25 bp, Homo sapien
gttcttgctgccaacagttacgaca

SEQ ID NO: 5301057 - DNA, 25 bp, Homo sapien
cgacattttcagtagtcatgacagc

SEQ ID NO: 5301058 - DNA, 25 bp, Homo sapien
tttgggacagcaagaggtcatgttc

SEQ ID NO: 5301059 - DNA, 25 bp, Homo sapien
gaaggacatagaaagactgctcaag

SEQ ID NO: 5301060 - DNA, 25 bp, Homo sapien
aggcaaggaaggacatagaaagact

SEQ ID NO: 5301061 - DNA, 25 bp, Homo sapien
ggacatagaaagactgctcaagtgc

SEQ ID NO: 5301062 - DNA, 25 bp, Homo sapien
caaggaaggacatagaaagactgct

SEQ ID NO: 5301063 - DNA, 25 bp, Homo sapien
aacatgcggcatggttgcactcact

SEQ ID NO: 5301064 - DNA, 25 bp, Homo sapien
ggtgtactggtatgaccacccgaga

SEQ ID NO: 5301065 - DNA, 25 bp, Homo sapien
catcgctgagaaagataatggccct

SEQ ID NO: 5301066 - DNA, 25 bp, Homo sapien
ctgtgatgcagatgaaacatgcggc

SEQ ID NO: 5301067 - DNA, 25 bp, Homo sapien
tagtacacttgcatgttgagctggt

SEQ ID NO: 5301068 - DNA, 25 bp, Homo sapien
ggaaagagcccatagtacacttgca

SEQ ID NO: 5301069 - DNA, 25 bp, Homo sapien
ttgactcaacgtgcatgaggacttg

SEQ ID NO: 5301070 - DNA, 25 bp, Homo sapien
cccatgtaatgagctcatatccaaa

SEQ ID NO: 5301071 - DNA, 25 bp, Homo sapien
ttaatccagcaataactccaagaag

SEQ ID NO: 5301072 - DNA, 25 bp, Homo sapien
taaaatgcccatcgtttcacagtca

SEQ ID NO: 5301073 - DNA, 25 bp, Homo sapien
tcagagcacacaggccttcatgggc

SEQ ID NO: 5301074 - DNA, 25 bp, Homo sapien
tcatggctacctactacagagtgtc

SEQ ID NO: 5301075 - DNA, 25 bp, Homo sapien
cagttaaatatcagtcctgcctcag

SEQ ID NO: 5301076 - DNA, 25 bp, Homo sapien
agtcctgcctcagagaaacataaga

SEQ ID NO: 5301077 - DNA, 25 bp, Homo sapien
tcagtcctgcctcagagaaacataa

SEQ ID NO: 5301078 - DNA, 25 bp, Homo sapien
tatcagtcctgcctcagagaaacat

SEQ ID NO: 5301079 - DNA, 25 bp, Homo sapien
tactagactggccatctgatcccca

SEQ ID NO: 5301080 - DNA, 25 bp, Homo sapien
ctactagactggccatctgatcccc

SEQ ID NO: 5301081 - DNA, 25 bp, Homo sapien
cctgtatgacactccttgggctcca

SEQ ID NO: 5301082 - DNA, 25 bp, Homo sapien
tttctggaaacgaataaccagcctg

SEQ ID NO: 5301083 - DNA, 25 bp, Homo sapien
ggaaacgaataaccagcctgtatga

SEQ ID NO: 5301084 - DNA, 25 bp, Homo sapien
gaataaccagcctgtatgacactcc

SEQ ID NO: 5301085 - DNA, 25 bp, Homo sapien
cccagcttgactgtggagctggctt

SEQ ID NO: 5301086 - DNA, 25 bp, Homo sapien
cccccagcttgactgtggagctggc

SEQ ID NO: 5301087 - DNA, 25 bp, Homo sapien
ttgggctcttcaaatgcccccagct

SEQ ID NO: 5301088 - DNA, 25 bp, Homo sapien
ggctcttcaaatgcccccagcttga

SEQ ID NO: 5301089 - DNA, 25 bp, Homo sapien
aggggcctgtggtacttgggaatag

SEQ ID NO: 5301090 - DNA, 25 bp, Homo sapien
cagaggggcctgtggtacttgggaa

SEQ ID NO: 5301091 - DNA, 25 bp, Homo sapien
ccagaggggcctgtggtacttggga

SEQ ID NO: 5301092 - DNA, 25 bp, Homo sapien
cattaatttcccagaggggcctgtg

SEQ ID NO: 5301093 - DNA, 25 bp, Homo sapien
ggcccaccaggtgtcaacaactgta

SEQ ID NO: 5301094 - DNA, 25 bp, Homo sapien
caggtgtcaacaactgtagagttcc

SEQ ID NO: 5301095 - DNA, 25 bp, Homo sapien
ctgtaggtggcccaccaggtgtcaa

SEQ ID NO: 5301096 - DNA, 25 bp, Homo sapien
aactgtagagttccatcaagagtca

SEQ ID NO: 5301097 - DNA, 25 bp, Homo sapien
tgtggaatttcccatcctcggccgg

SEQ ID NO: 5301098 - DNA, 25 bp, Homo sapien
tagttggcgtgaagaaaggacatgt

SEQ ID NO: 5301099 - DNA, 25 bp, Homo sapien
aagggatttgcaaatagccagtagt

SEQ ID NO: 5301100 - DNA, 25 bp, Homo sapien
tactacagctcgctgtttgcagatc

SEQ ID NO: 5301101 - DNA, 25 bp, Homo sapien
gctgaagattgtttgaaatatcccg

SEQ ID NO: 5301102 - DNA, 25 bp, Homo sapien
tgagagctgaagattgtttgaaata

SEQ ID NO: 5301103 - DNA, 25 bp, Homo sapien
tgtttgaaatatcccgatgacctca

SEQ ID NO: 5301104 - DNA, 25 bp, Homo sapien
gattgtttgaaatatcccgatgacc

SEQ ID NO: 5301105 - DNA, 25 bp, Homo sapien
gcccattgagaagctttggtgagat

SEQ ID NO: 5301106 - DNA, 25 bp, Homo sapien
cagcccattgagaagctttggtgag

SEQ ID NO: 5301107 - DNA, 25 bp, Homo sapien
gtgagatgtgactaacaggccgtga

SEQ ID NO: 5301108 - DNA, 25 bp, Homo sapien
ctgacagcccattgagaagctttgg

SEQ ID NO: 5301109 - DNA, 25 bp, Homo sapien
gagtcccgatgcaacgccctgagtc

SEQ ID NO: 5301110 - DNA, 25 bp, Homo sapien
agaacggggagtcccgatgcaacgc

SEQ ID NO: 5301111 - DNA, 25 bp, Homo sapien
tgaaaagaatcgtaagaggtaggat

SEQ ID NO: 5301112 - DNA, 25 bp, Homo sapien
aagagttgaaaagaatcgtaagagg

SEQ ID NO: 5301113 - DNA, 25 bp, Homo sapien
tgcccacggagtgatgaagcagacc

SEQ ID NO: 5301114 - DNA, 25 bp, Homo sapien
ggacttcttcatgttgcctgcaaat

SEQ ID NO: 5301115 - DNA, 25 bp, Homo sapien
ttatctcttttcgaatcacagcgtt

SEQ ID NO: 5301116 - DNA, 25 bp, Homo sapien
aactcttgaaggacattttcttcta

SEQ ID NO: 5301117 - DNA, 25 bp, Homo sapien
ttctccttccccacgtgcttctcct

SEQ ID NO: 5301118 - DNA, 25 bp, Homo sapien
cttccccacgtgcttctcctctgtt

SEQ ID NO: 5301119 - DNA, 25 bp, Homo sapien
ccttccccacgtgcttctcctctgt

SEQ ID NO: 5301120 - DNA, 25 bp, Homo sapien
ctccttccccacgtgcttctcctct

SEQ ID NO: 5301121 - DNA, 25 bp, Homo sapien
catacccttctgactgcaatggagc

SEQ ID NO: 5301122 - DNA, 25 bp, Homo sapien
cggaaactccgccagagctgactta

SEQ ID NO: 5301123 - DNA, 25 bp, Homo sapien
ggacacggaattgaggccactgtga

SEQ ID NO: 5301124 - DNA, 25 bp, Homo sapien
catcaaagactgagagcgaggaccg

SEQ ID NO: 5301125 - DNA, 25 bp, Homo sapien
caatgccttagagctctcaactggg

SEQ ID NO: 5301126 - DNA, 25 bp, Homo sapien
gagtgggagcgaagatgtatcaacc

SEQ ID NO: 5301127 - DNA, 25 bp, Homo sapien
taggttttcccttatagagacagac

SEQ ID NO: 5301128 - DNA, 25 bp, Homo sapien
cagcattcataaaacagggtggcag

SEQ ID NO: 5301129 - DNA, 25 bp, Homo sapien
gggacactgtgttaaagagactcta

SEQ ID NO: 5301130 - DNA, 25 bp, Homo sapien
gacagttcagtttcccagatatgca

SEQ ID NO: 5301131 - DNA, 25 bp, Homo sapien
tttagcctaccacaggaccagattt

SEQ ID NO: 5301132 - DNA, 25 bp, Homo sapien
ccattgaattcccttggtgggcggg

SEQ ID NO: 5301133 - DNA, 25 bp, Homo sapien
gagtggagtccgtgaggagatgaac

SEQ ID NO: 5301134 - DNA, 25 bp, Homo sapien
atttgagttctcattgtacagcaag

SEQ ID NO: 5301135 - DNA, 25 bp, Homo sapien
aaaaaagagagtggagtccgtgagg

SEQ ID NO: 5301136 - DNA, 25 bp, Homo sapien
gagttctcattgtacagcaagcatg

SEQ ID NO: 5301137 - DNA, 25 bp, Homo sapien
tttaatctggcatgatgagacacct

SEQ ID NO: 5301138 - DNA, 25 bp, Homo sapien
tttgatagagtttgttacagactgc

SEQ ID NO: 5301139 - DNA, 25 bp, Homo sapien
gagtttgttacagactgccttatgt

SEQ ID NO: 5301140 - DNA, 25 bp, Homo sapien
tttcctccatcaaattatcacccag

SEQ ID NO: 5301141 - DNA, 25 bp, Homo sapien
tgtcctacatgtgtaagtgtgaaca

SEQ ID NO: 5301142 - DNA, 25 bp, Homo sapien
cagacggtcctgcttattgtcctac

SEQ ID NO: 5301143 - DNA, 25 bp, Homo sapien
acagcatttatgcagaccggcccag

SEQ ID NO: 5301144 - DNA, 25 bp, Homo sapien
gatgtgcaattccataccctatatg

SEQ ID NO: 5301145 - DNA, 25 bp, Homo sapien
cttgttattgttggatgacagtctc

SEQ ID NO: 5301146 - DNA, 25 bp, Homo sapien
gacagtctctgtcgctgtgctgatg

SEQ ID NO: 5301147 - DNA, 25 bp, Homo sapien
tcgacgtctagtaacttcaaacagt

SEQ ID NO: 5301148 - DNA, 25 bp, Homo sapien
tgctgatgaaagagcacggtgaacc

SEQ ID NO: 5301149 - DNA, 25 bp, Homo sapien
tagacaaggtttgttgacacagcac

SEQ ID NO: 5301150 - DNA, 25 bp, Homo sapien
ccggaggcagatacacaaaatggct

SEQ ID NO: 5301151 - DNA, 25 bp, Homo sapien
aggtaattccagcacaccggaggca

SEQ ID NO: 5301152 - DNA, 25 bp, Homo sapien
tgacatccataagcggtccacaggt

SEQ ID NO: 5301153 - DNA, 25 bp, Homo sapien
atccctacgggattgttcctcatag

SEQ ID NO: 5301154 - DNA, 25 bp, Homo sapien
ctgcttgccaatattaggaagaaac

SEQ ID NO: 5301155 - DNA, 25 bp, Homo sapien
gctttccgaaagcaccacttccaaa

SEQ ID NO: 5301156 - DNA, 25 bp, Homo sapien
tgaagacctgtctaccatccagcat

SEQ ID NO: 5301157 - DNA, 25 bp, Homo sapien
tgcccaccgtctgatacaatcaggc

SEQ ID NO: 5301158 - DNA, 25 bp, Homo sapien
tcctcacatgaaggcaaagtcggag

SEQ ID NO: 5301159 - DNA, 25 bp, Homo sapien
ccagaggatagtacagatttaggct

SEQ ID NO: 5301160 - DNA, 25 bp, Homo sapien
caactaagaatctatccagaggata

SEQ ID NO: 5301161 - DNA, 25 bp, Homo sapien
catgacaaggttacacaagacagct

SEQ ID NO: 5301162 - DNA, 25 bp, Homo sapien
tcaagctggtcctgataacgacggc

SEQ ID NO: 5301163 - DNA, 25 bp, Homo sapien
caatgaagccagtcagtcctgagat

SEQ ID NO: 5301164 - DNA, 25 bp, Homo sapien
gagatccaagtgttttcgctccaga

SEQ ID NO: 5301165 - DNA, 25 bp, Homo sapien
aaactcacttacaatacctcacagg

SEQ ID NO: 5301166 - DNA, 25 bp, Homo sapien
caaatatgactaacggaaactgaag

SEQ ID NO: 5301167 - DNA, 25 bp, Homo sapien
tggacagacagaattacagtattac

SEQ ID NO: 5301168 - DNA, 25 bp, Homo sapien
cataatagcacacaaaattgctggc

SEQ ID NO: 5301169 - DNA, 25 bp, Homo sapien
gcatcaaatttaaattttaggtaca

SEQ ID NO: 5301170 - DNA, 25 bp, Homo sapien
tcttctcactccagcatcaaattta

SEQ ID NO: 5301171 - DNA, 25 bp, Homo sapien
aatcttctcactccagcatcaaatt

SEQ ID NO: 5301172 - DNA, 25 bp, Homo sapien
ttctcactccagcatcaaatttaaa

SEQ ID NO: 5301173 - DNA, 25 bp, Homo sapien
tacttttacaataggtatctcttgc

SEQ ID NO: 5301174 - DNA, 25 bp, Homo sapien
ttccatacttttacaataggtatct

SEQ ID NO: 5301175 - DNA, 25 bp, Homo sapien
ttttacaataggtatctcttgctcc

SEQ ID NO: 5301176 - DNA, 25 bp, Homo sapien
tacaataggtatctcttgctcctgc

SEQ ID NO: 5301177 - DNA, 25 bp, Homo sapien
atatgccattattatgcaaaaaata

SEQ ID NO: 5301178 - DNA, 25 bp, Homo sapien
attctgattaacacaataagttatg

SEQ ID NO: 5301179 - DNA, 25 bp, Homo sapien
ttctgattaacacaataagttatgt

SEQ ID NO: 5301180 - DNA, 25 bp, Homo sapien
gccattattatgcaaaaaatactct

SEQ ID NO: 5301181 - DNA, 25 bp, Homo sapien
gcatggactttggatgtggaagttc

SEQ ID NO: 5301182 - DNA, 25 bp, Homo sapien
ctgaagcatggactttggatgtgga

SEQ ID NO: 5301183 - DNA, 25 bp, Homo sapien
ttcttctccttgatagattttgatg

SEQ ID NO: 5301184 - DNA, 25 bp, Homo sapien
ctttggatgtggaagttcttctcct

SEQ ID NO: 5301185 - DNA, 25 bp, Homo sapien
cccagatgttgtggctatgaggaga

SEQ ID NO: 5301186 - DNA, 25 bp, Homo sapien
ggtgagattcagaaatgtgctggct

SEQ ID NO: 5301187 - DNA, 25 bp, Homo sapien
agtctcctgcttgagtaaaggagac

SEQ ID NO: 5301188 - DNA, 25 bp, Homo sapien
cacattcccagatgttgtggctatg

SEQ ID NO: 5301189 - DNA, 25 bp, Homo sapien
cagatttcgaagctctcgtttaaag

SEQ ID NO: 5301190 - DNA, 25 bp, Homo sapien
taccaaattttcaggggcaagcagc

SEQ ID NO: 5301191 - DNA, 25 bp, Homo sapien
caagatctctacaagtgactttaga

SEQ ID NO: 5301192 - DNA, 25 bp, Homo sapien
caagcagcaatggaaccagatttcg

SEQ ID NO: 5301193 - DNA, 25 bp, Homo sapien
aacaattgtgtatgtgcttccttac

SEQ ID NO: 5301194 - DNA, 25 bp, Homo sapien
actttaagaccaggatgtggcaaaa

SEQ ID NO: 5301195 - DNA, 25 bp, Homo sapien
gatttgagaaacaattgtgtatgtg

SEQ ID NO: 5301196 - DNA, 25 bp, Homo sapien
tagttgcaactttaagaccaggatg

SEQ ID NO: 5301197 - DNA, 25 bp, Homo sapien
cacattttcttaaaccacaaaagat

SEQ ID NO: 5301198 - DNA, 25 bp, Homo sapien
cacccagccaaccccacattttctt

SEQ ID NO: 5301199 - DNA, 25 bp, Homo sapien
tagagacagggttggtcaggctgat

SEQ ID NO: 5301200 - DNA, 25 bp, Homo sapien
ccgcacccagccaaccccacatttt

SEQ ID NO: 5301201 - DNA, 25 bp, Homo sapien
tcataaggatagctccaatctcgaa

SEQ ID NO: 5301202 - DNA, 25 bp, Homo sapien
gctccaatctcgaatcaaaaacatt

SEQ ID NO: 5301203 - DNA, 25 bp, Homo sapien
atgttcataaggatagctccaatct

SEQ ID NO: 5301204 - DNA, 25 bp, Homo sapien
ggatagctccaatctcgaatcaaaa

SEQ ID NO: 5301205 - DNA, 25 bp, Homo sapien
ttctggtagatttcttccatcgcaa

SEQ ID NO: 5301206 - DNA, 25 bp, Homo sapien
tccatcgcaagtcttccatactctg

SEQ ID NO: 5301207 - DNA, 25 bp, Homo sapien
gatttcttccatcgcaagtcttcca

SEQ ID NO: 5301208 - DNA, 25 bp, Homo sapien
ggtagatttcttccatcgcaagtct

SEQ ID NO: 5301209 - DNA, 25 bp, Homo sapien
gaatattctgagacagattatatac

SEQ ID NO: 5301210 - DNA, 25 bp, Homo sapien
aagagacttagagggtccccaccag

SEQ ID NO: 5301211 - DNA, 25 bp, Homo sapien
gggtccccaccagcgtcacttagtg

SEQ ID NO: 5301212 - DNA, 25 bp, Homo sapien
cttagtgggtaatgacaaatatccc

SEQ ID NO: 5301213 - DNA, 25 bp, Homo sapien
cagcgtcacttagtgggtaatgaca

SEQ ID NO: 5301214 - DNA, 25 bp, Homo sapien
ttccactctgatggctaggtacttc

SEQ ID NO: 5301215 - DNA, 25 bp, Homo sapien
cttctttccactctgatggctaggt

SEQ ID NO: 5301216 - DNA, 25 bp, Homo sapien
cactctgatggctaggtacttcaaa

SEQ ID NO: 5301217 - DNA, 25 bp, Homo sapien
tctttccactctgatggctaggtac

SEQ ID NO: 5301218 - DNA, 25 bp, Homo sapien
tcctaaatgaaggtgctaaaaatcc

SEQ ID NO: 5301219 - DNA, 25 bp, Homo sapien
gagtaccacttgtcatagatacaga

SEQ ID NO: 5301220 - DNA, 25 bp, Homo sapien
gcctgaagaaactagaaccggatag

SEQ ID NO: 5301221 - DNA, 25 bp, Homo sapien
catattactgtgtctggtagccatc

SEQ ID NO: 5301222 - DNA, 25 bp, Homo sapien
ggacagagctagtcatagtgctcag

SEQ ID NO: 5301223 - DNA, 25 bp, Homo sapien
tagtgctcagagcaaacaccgttgc

SEQ ID NO: 5301224 - DNA, 25 bp, Homo sapien
agtctttgatagttgactggctatc

SEQ ID NO: 5301225 - DNA, 25 bp, Homo sapien
gctatcaaaggcaccctgggtatcc

SEQ ID NO: 5301226 - DNA, 25 bp, Homo sapien
ttgtttccaccaatccaactttgag

SEQ ID NO: 5301227 - DNA, 25 bp, Homo sapien
gttccattaggtctgtcaatcacaa

SEQ ID NO: 5301228 - DNA, 25 bp, Homo sapien
agccacctcgccatgtaaagcctgt

SEQ ID NO: 5301229 - DNA, 25 bp, Homo sapien
tcacaaatacttcattccaaacttg

SEQ ID NO: 5301230 - DNA, 25 bp, Homo sapien
ccttgcactgttgtaagttctgaca

SEQ ID NO: 5301231 - DNA, 25 bp, Homo sapien
aaactgctcctatcaaagtgccttg

SEQ ID NO: 5301232 - DNA, 25 bp, Homo sapien
tgtgctcctgatactccccatagat

SEQ ID NO: 5301233 - DNA, 25 bp, Homo sapien
tgcccaggctgataacaatccatct

SEQ ID NO: 5301234 - DNA, 25 bp, Homo sapien
aatagtgaataaatacagcccttgc

SEQ ID NO: 5301235 - DNA, 25 bp, Homo sapien
gccaaaaagacgttctacataatat

SEQ ID NO: 5301236 - DNA, 25 bp, Homo sapien
tacagcccttgccaaaaagacgttc

SEQ ID NO: 5301237 - DNA, 25 bp, Homo sapien
tgaataaatacagcccttgccaaaa

SEQ ID NO: 5301238 - DNA, 25 bp, Homo sapien
caccagccttaatgcttagtgaaag

SEQ ID NO: 5301239 - DNA, 25 bp, Homo sapien
cagaacaaaggtggcccttgagagc

SEQ ID NO: 5301240 - DNA, 25 bp, Homo sapien
gaattagagagcctcctagaatgca

SEQ ID NO: 5301241 - DNA, 25 bp, Homo sapien
ccttgagagccggagatagcagtaa

SEQ ID NO: 5301242 - DNA, 25 bp, Homo sapien
ccattgtaaactgattcctagattt

SEQ ID NO: 5301243 - DNA, 25 bp, Homo sapien
ctactaaattaagttttgaccattg

SEQ ID NO: 5301244 - DNA, 25 bp, Homo sapien
gaccattgtaaactgattcctagat

SEQ ID NO: 5301245 - DNA, 25 bp, Homo sapien
accattgtaaactgattcctagatt

SEQ ID NO: 5301246 - DNA, 25 bp, Homo sapien
taacagttcctacagacactggaat

SEQ ID NO: 5301247 - DNA, 25 bp, Homo sapien
atttttctaacagttcctacagaca

SEQ ID NO: 5301248 - DNA, 25 bp, Homo sapien
cctacagacactggaataatctatt

SEQ ID NO: 5301249 - DNA, 25 bp, Homo sapien
ggaataatctatttcactttgaaaa

SEQ ID NO: 5301250 - DNA, 25 bp, Homo sapien
aaaatcagctgacaaaaaattgtag

SEQ ID NO: 5301251 - DNA, 25 bp, Homo sapien
agcaaaaacccatcaacagttaaat

SEQ ID NO: 5301252 - DNA, 25 bp, Homo sapien
caaaaacccatcaacagttaaatgg

SEQ ID NO: 5301253 - DNA, 25 bp, Homo sapien
aatcagctgacaaaaaattgtagta

SEQ ID NO: 5301254 - DNA, 25 bp, Homo sapien
aaaataacgcaaaaacatgagtaca

SEQ ID NO: 5301255 - DNA, 25 bp, Homo sapien
cagtgaaatgaacctgtggtgaaaa

SEQ ID NO: 5301256 - DNA, 25 bp, Homo sapien
taagccaaacacataatacctatgg

SEQ ID NO: 5301257 - DNA, 25 bp, Homo sapien
catgagtacatctcaaagttataat

SEQ ID NO: 5301258 - DNA, 25 bp, Homo sapien
taagcaaataagaattagaagtggg

SEQ ID NO: 5301259 - DNA, 25 bp, Homo sapien
aagatttgtgcaccttttctgcatg

SEQ ID NO: 5301260 - DNA, 25 bp, Homo sapien
tacatttatctaaagcacaccccta

SEQ ID NO: 5301261 - DNA, 25 bp, Homo sapien
ggtagtaagggtgtatacctatgta

SEQ ID NO: 5301262 - DNA, 25 bp, Homo sapien
gaggcacattatccaaaaatcagat

SEQ ID NO: 5301263 - DNA, 25 bp, Homo sapien
catgatcagtttaagtggaggcaca

SEQ ID NO: 5301264 - DNA, 25 bp, Homo sapien
agagttccgtttgtgcagagattgc

SEQ ID NO: 5301265 - DNA, 25 bp, Homo sapien
tctcataggaaaagcatgacccacc

SEQ ID NO: 5301266 - DNA, 25 bp, Homo sapien
gaacagccactactaactgatcaga

SEQ ID NO: 5301267 - DNA, 25 bp, Homo sapien
tactgtctgtgacctacttggaaca

SEQ ID NO: 5301268 - DNA, 25 bp, Homo sapien
gataagtgatctaagcttccctccc

SEQ ID NO: 5301269 - DNA, 25 bp, Homo sapien
tgcactaaacagcttagacacagat

SEQ ID NO: 5301270 - DNA, 25 bp, Homo sapien
taccttatttcttacctcgaagaga

SEQ ID NO: 5301271 - DNA, 25 bp, Homo sapien
gaaagcctgaaatgatcgccatgaa

SEQ ID NO: 5301272 - DNA, 25 bp, Homo sapien
gctattgatactcaggtatatttga

SEQ ID NO: 5301273 - DNA, 25 bp, Homo sapien
aatgatcgccatgaaaaaactttac

SEQ ID NO: 5301274 - DNA, 25 bp, Homo sapien
gagggcccacccatgacagagatta

SEQ ID NO: 5301275 - DNA, 25 bp, Homo sapien
tagtcctagatgtcagggaaggccc

SEQ ID NO: 5301276 - DNA, 25 bp, Homo sapien
tgtaagtatctcctaagacccagtt

SEQ ID NO: 5301277 - DNA, 25 bp, Homo sapien
gcttgataatcaacagagggcccac

SEQ ID NO: 5301278 - DNA, 25 bp, Homo sapien
acttgggttagagccacaatgcctg

SEQ ID NO: 5301279 - DNA, 25 bp, Homo sapien
cagagatcatggatggctgcagaag

SEQ ID NO: 5301280 - DNA, 25 bp, Homo sapien
tatggcgatgaagaatcaagagctc

SEQ ID NO: 5301281 - DNA, 25 bp, Homo sapien
taggatatactcagacaacttgggt

SEQ ID NO: 5301282 - DNA, 25 bp, Homo sapien
ctatttttttaacaggcatggttgg

SEQ ID NO: 5301283 - DNA, 25 bp, Homo sapien
tttgtctatttttttaacaggcatg

SEQ ID NO: 5301284 - DNA, 25 bp, Homo sapien
acaggcatggttggtacttttttct

SEQ ID NO: 5301285 - DNA, 25 bp, Homo sapien
tgggttcaatttaaaagactattca

SEQ ID NO: 5301286 - DNA, 25 bp, Homo sapien
tgttatacatgtatctaagcatgaa

SEQ ID NO: 5301287 - DNA, 25 bp, Homo sapien
ttccctttacgaaaagctcctgcca

SEQ ID NO: 5301288 - DNA, 25 bp, Homo sapien
acatgtatctaagcatgaagtccag

SEQ ID NO: 5301289 - DNA, 25 bp, Homo sapien
tctaagcatgaagtccagtagaaat

SEQ ID NO: 5301290 - DNA, 25 bp, Homo sapien
tatgtgctcctgtagcaatatctgc

SEQ ID NO: 5301291 - DNA, 25 bp, Homo sapien
ctgtactggacatggtttcttcata

SEQ ID NO: 5301292 - DNA, 25 bp, Homo sapien
cagaatttactaggtcatcatcttc

SEQ ID NO: 5301293 - DNA, 25 bp, Homo sapien
ttaagatctcgtatgtgctcctgta

SEQ ID NO: 5301294 - DNA, 25 bp, Homo sapien
tgtatccatactaacaaaactgtta

SEQ ID NO: 5301295 - DNA, 25 bp, Homo sapien
tacagcacatttcaacttagacact

SEQ ID NO: 5301296 - DNA, 25 bp, Homo sapien
tatgaacggtctattcacaatctag

SEQ ID NO: 5301297 - DNA, 25 bp, Homo sapien
tagacactaaatgcttatcagaaac

SEQ ID NO: 5301298 - DNA, 25 bp, Homo sapien
acccagcctcggggaactctataat

SEQ ID NO: 5301299 - DNA, 25 bp, Homo sapien
cacccagcctcggggaactctataa

SEQ ID NO: 5301300 - DNA, 25 bp, Homo sapien
agaaaatctcacctcaagtcaagac

SEQ ID NO: 5301301 - DNA, 25 bp, Homo sapien
gaaaatctcacctcaagtcaagacc

SEQ ID NO: 5301302 - DNA, 25 bp, Homo sapien
tttaaaagcactccaatagcatgcc

SEQ ID NO: 5301303 - DNA, 25 bp, Homo sapien
caatagcatgcctaaagactaagac

SEQ ID NO: 5301304 - DNA, 25 bp, Homo sapien
taagactaccactaataagttcaaa

SEQ ID NO: 5301305 - DNA, 25 bp, Homo sapien
gcctaaagactaagactaccactaa

SEQ ID NO: 5301306 - DNA, 25 bp, Homo sapien
tactataccatgttccagggactgg

SEQ ID NO: 5301307 - DNA, 25 bp, Homo sapien
cagggactggaacatccttgaattc

SEQ ID NO: 5301308 - DNA, 25 bp, Homo sapien
gcataacagacccaagttagatttt

SEQ ID NO: 5301309 - DNA, 25 bp, Homo sapien
gattcaagtgtacgggaggatgcac

SEQ ID NO: 5301310 - DNA, 25 bp, Homo sapien
cactttcagagtgatcaggccttac

SEQ ID NO: 5301311 - DNA, 25 bp, Homo sapien
gatcaattcgcaccacagtgagaga

SEQ ID NO: 5301312 - DNA, 25 bp, Homo sapien
cagggagccaaggatcaggtgactt

SEQ ID NO: 5301313 - DNA, 25 bp, Homo sapien
tatcgtccaagtgactcgtaaacgg

SEQ ID NO: 5301314 - DNA, 25 bp, Homo sapien
gagccctggcctgcggactgcggtt

SEQ ID NO: 5301315 - DNA, 25 bp, Homo sapien
gacccggcagcaaggtgtctgctcc

SEQ ID NO: 5301316 - DNA, 25 bp, Homo sapien
cacaacccgcgcgaatgggttcggg

SEQ ID NO: 5301317 - DNA, 25 bp, Homo sapien
caggaagggtgtctaaggagctttc

SEQ ID NO: 5301318 - DNA, 25 bp, Homo sapien
ctggtgcggttgctgccctcgcgct

SEQ ID NO: 5301319 - DNA, 25 bp, Homo sapien
gcgcttgggtcgctggtccgtcgcc

SEQ ID NO: 5301320 - DNA, 25 bp, Homo sapien
ctagggaggtcgtggacgagacgtg

SEQ ID NO: 5301321 - DNA, 25 bp, Homo sapien
cgagacgtggttaaccgcggcgctt

SEQ ID NO: 5301322 - DNA, 25 bp, Homo sapien
cgccgccgctttatcaacctcccgg

SEQ ID NO: 5301323 - DNA, 25 bp, Homo sapien
attaactccccactgacgtcaaacg

SEQ ID NO: 5301324 - DNA, 25 bp, Homo sapien
gccgctttatcaacctcccgggagc

SEQ ID NO: 5301325 - DNA, 25 bp, Homo sapien
aacgccgccgccgctttatcaacct

SEQ ID NO: 5301326 - DNA, 25 bp, Homo sapien
taagtctaaaattcacagcatgcac

SEQ ID NO: 5301327 - DNA, 25 bp, Homo sapien
gtccaggtcttttcataagtctaaa

SEQ ID NO: 5301328 - DNA, 25 bp, Homo sapien
caaaataccattctaggtagggcat

SEQ ID NO: 5301329 - DNA, 25 bp, Homo sapien
cagatgtccgggtgtacaaacagct

SEQ ID NO: 5301330 - DNA, 25 bp, Homo sapien
gaagcactggaggtactacagagca

SEQ ID NO: 5301331 - DNA, 25 bp, Homo sapien
tacagtgactgtggctaatgaaccg

SEQ ID NO: 5301332 - DNA, 25 bp, Homo sapien
taggctccgttcgttgacctgaggg

SEQ ID NO: 5301333 - DNA, 25 bp, Homo sapien
gaaccgatttgccacaggcgaggct

SEQ ID NO: 5301334 - DNA, 25 bp, Homo sapien
gcaaagcctgcagaccgctgatgct

SEQ ID NO: 5301335 - DNA, 25 bp, Homo sapien
ttccctcagcactctcaagacagag

SEQ ID NO: 5301336 - DNA, 25 bp, Homo sapien
ctgacagtgcccataaagaaagcca

SEQ ID NO: 5301337 - DNA, 25 bp, Homo sapien
tgggtaccacagctgaggagaattc

SEQ ID NO: 5301338 - DNA, 25 bp, Homo sapien
gagattcagaggtggcttcactgta

SEQ ID NO: 5301339 - DNA, 25 bp, Homo sapien
caagccctttccgaggccctgggag

SEQ ID NO: 5301340 - DNA, 25 bp, Homo sapien
attatcttcagggtgcttcacttgt

SEQ ID NO: 5301341 - DNA, 25 bp, Homo sapien
tccacccttgaatacatccaaatgt

SEQ ID NO: 5301342 - DNA, 25 bp, Homo sapien
aaactcttcctgaagtcccaaccag

SEQ ID NO: 5301343 - DNA, 25 bp, Homo sapien
cggattcaagggcttgttcccttgg

SEQ ID NO: 5301344 - DNA, 25 bp, Homo sapien
cctgtctcaggccatttgtctgtca

SEQ ID NO: 5301345 - DNA, 25 bp, Homo sapien
tggagttggtctcagtgtttactaa

SEQ ID NO: 5301346 - DNA, 25 bp, Homo sapien
tgggattacacaacccctcactgga

SEQ ID NO: 5301347 - DNA, 25 bp, Homo sapien
aactggcaggctcgctggaacagaa

SEQ ID NO: 5301348 - DNA, 25 bp, Homo sapien
acaggctcttctagggttggtaggc

SEQ ID NO: 5301349 - DNA, 25 bp, Homo sapien
cactggatgtacaggcagaactggc

SEQ ID NO: 5301350 - DNA, 25 bp, Homo sapien
aaggaaagcaccatagcgcatctcc

SEQ ID NO: 5301351 - DNA, 25 bp, Homo sapien
ggaaagcaccatagcgcatctccat

SEQ ID NO: 5301352 - DNA, 25 bp, Homo sapien
ctttactgcgtgtagccaaaggaaa

SEQ ID NO: 5301353 - DNA, 25 bp, Homo sapien
ttactgcgtgtagccaaaggaaagc

SEQ ID NO: 5301354 - DNA, 25 bp, Homo sapien
tcttggacctcatcttcgacagagt

SEQ ID NO: 5301355 - DNA, 25 bp, Homo sapien
cagtgtgctactgtccaacaattca

SEQ ID NO: 5301356 - DNA, 25 bp, Homo sapien
ggcgtttttcagtaatgctgttcag

SEQ ID NO: 5301357 - DNA, 25 bp, Homo sapien
tgctgaagtcctagagtcttggacc

SEQ ID NO: 5301358 - DNA, 25 bp, Homo sapien
gtgccagctgccaacaatttttgga

SEQ ID NO: 5301359 - DNA, 25 bp, Homo sapien
tgctctgcaccataaattccggaga

SEQ ID NO: 5301360 - DNA, 25 bp, Homo sapien
gaaactgtagcatccagaacttaag

SEQ ID NO: 5301361 - DNA, 25 bp, Homo sapien
gaaatgtttgtaggaatccattcta

SEQ ID NO: 5301362 - DNA, 25 bp, Homo sapien
aaatagaggaatcaaagagctctcc

SEQ ID NO: 5301363 - DNA, 25 bp, Homo sapien
tcgtgtcactttcattctcttggca

SEQ ID NO: 5301364 - DNA, 25 bp, Homo sapien
gctttgggtgttaggaaggacacca

SEQ ID NO: 5301365 - DNA, 25 bp, Homo sapien
gaatgaacagtagcatcgtgtcact

SEQ ID NO: 5301366 - DNA, 25 bp, Homo sapien
gcagcttcctgtagactcttggaac

SEQ ID NO: 5301367 - DNA, 25 bp, Homo sapien
tctctttatgcagaaccattggttt

SEQ ID NO: 5301368 - DNA, 25 bp, Homo sapien
caatgcccgatccaaaccttagcag

SEQ ID NO: 5301369 - DNA, 25 bp, Homo sapien
gcagagccacggatatctctttatg

SEQ ID NO: 5301370 - DNA, 25 bp, Homo sapien
ggatatgggagccttgaacttgagc

SEQ ID NO: 5301371 - DNA, 25 bp, Homo sapien
tgtggctttggttaaattgcttgct

SEQ ID NO: 5301372 - DNA, 25 bp, Homo sapien
ctaaggatatgggagccttgaactt

SEQ ID NO: 5301373 - DNA, 25 bp, Homo sapien
gctttggttaaattgcttgctgtcc

SEQ ID NO: 5301374 - DNA, 25 bp, Homo sapien
tccttccatgaaccctggtagcact

SEQ ID NO: 5301375 - DNA, 25 bp, Homo sapien
ccaggacagatggatacttgaataa

SEQ ID NO: 5301376 - DNA, 25 bp, Homo sapien
tcttccccaggacagatggatactt

SEQ ID NO: 5301377 - DNA, 25 bp, Homo sapien
ggctggggccctgtttgttctagtc

SEQ ID NO: 5301378 - DNA, 25 bp, Homo sapien
ccaggatgtagatggaggtaaaacc

SEQ ID NO: 5301379 - DNA, 25 bp, Homo sapien
tttattgtcacactttaggcccagg

SEQ ID NO: 5301380 - DNA, 25 bp, Homo sapien
ttactaccacctatggactttgggc

SEQ ID NO: 5301381 - DNA, 25 bp, Homo sapien
taggcccaggattacactcagttaa

SEQ ID NO: 5301382 - DNA, 25 bp, Homo sapien
ctgtgttgtcataatgacttagcac

SEQ ID NO: 5301383 - DNA, 25 bp, Homo sapien
cttcagccccactgtgttgtcataa

SEQ ID NO: 5301384 - DNA, 25 bp, Homo sapien
cagcttcagccccactgtgttgtca

SEQ ID NO: 5301385 - DNA, 25 bp, Homo sapien
tgcagcttcagccccactgtgttgt

SEQ ID NO: 5301386 - DNA, 25 bp, Homo sapien
cgagtgtggtaagagaagctgactc

SEQ ID NO: 5301387 - DNA, 25 bp, Homo sapien
gaaacacgggaacagatctatgcct

SEQ ID NO: 5301388 - DNA, 25 bp, Homo sapien
taaggaagctcctatgagaaacacg

SEQ ID NO: 5301389 - DNA, 25 bp, Homo sapien
gctccggaaggtgcctctgccgttt

SEQ ID NO: 5301390 - DNA, 25 bp, Homo sapien
cccacgtttccccatagctgacagg

SEQ ID NO: 5301391 - DNA, 25 bp, Homo sapien
ccacgtttccccatagctgacaggg

SEQ ID NO: 5301392 - DNA, 25 bp, Homo sapien
acccacgtttccccatagctgacag

SEQ ID NO: 5301393 - DNA, 25 bp, Homo sapien
cacccacgtttccccatagctgaca

SEQ ID NO: 5301394 - DNA, 25 bp, Homo sapien
gccaagccttgtgctaaggactgga

SEQ ID NO: 5301395 - DNA, 25 bp, Homo sapien
aatgagccaagccttgtgctaagga

SEQ ID NO: 5301396 - DNA, 25 bp, Homo sapien
tgagccaagccttgtgctaaggact

SEQ ID NO: 5301397 - DNA, 25 bp, Homo sapien
aaatgaatcaacttgcttctgaagc

SEQ ID NO: 5301398 - DNA, 25 bp, Homo sapien
tgaattcatgaattctagggacgtg

SEQ ID NO: 5301399 - DNA, 25 bp, Homo sapien
tgcaatctctccctcataagtgagc

SEQ ID NO: 5301400 - DNA, 25 bp, Homo sapien
aatgatgatgatgcttctaggacac

SEQ ID NO: 5301401 - DNA, 25 bp, Homo sapien
ctagggacgtgttctacaatagtaa

SEQ ID NO: 5301402 - DNA, 25 bp, Homo sapien
aagaccactataaggactttccagg

SEQ ID NO: 5301403 - DNA, 25 bp, Homo sapien
agcacagggcggaggattataccga

SEQ ID NO: 5301404 - DNA, 25 bp, Homo sapien
catcacaaggctgcaaaccgcattt

SEQ ID NO: 5301405 - DNA, 25 bp, Homo sapien
attataccgaggaaccacacccatg

SEQ ID NO: 5301406 - DNA, 25 bp, Homo sapien
gattaacgagaatttcagatgccgt

SEQ ID NO: 5301407 - DNA, 25 bp, Homo sapien
cgagaatttcagatgccgtagcaat

SEQ ID NO: 5301408 - DNA, 25 bp, Homo sapien
gatgccgtagcaatttgaagggaaa

SEQ ID NO: 5301409 - DNA, 25 bp, Homo sapien
aaagcgctggaagattaacgagaat

SEQ ID NO: 5301410 - DNA, 25 bp, Homo sapien
cagctgaagctatcctgcagctgtg

SEQ ID NO: 5301411 - DNA, 25 bp, Homo sapien
caggcagccgggttcgtctttctct

SEQ ID NO: 5301412 - DNA, 25 bp, Homo sapien
cagaccagtgcagctgaagctatcc

SEQ ID NO: 5301413 - DNA, 25 bp, Homo sapien
cagctgtgcccttaagagaatgatg

SEQ ID NO: 5301414 - DNA, 25 bp, Homo sapien
gatttcatgaggtgggatatatcac

SEQ ID NO: 5301415 - DNA, 25 bp, Homo sapien
tacatatgccatgtagatcagctct

SEQ ID NO: 5301416 - DNA, 25 bp, Homo sapien
tggaagccaggctaacagaacagcc

SEQ ID NO: 5301417 - DNA, 25 bp, Homo sapien
tactcacgtccccttggtcaaagca

SEQ ID NO: 5301418 - DNA, 25 bp, Homo sapien
tctgtctttcaaggtagactagcaa

SEQ ID NO: 5301419 - DNA, 25 bp, Homo sapien
aaagcccctgacttcattcttcaca

SEQ ID NO: 5301420 - DNA, 25 bp, Homo sapien
caaggtagactagcaatggcatggt

SEQ ID NO: 5301421 - DNA, 25 bp, Homo sapien
tgcaaagcccctgacttcattcttc

SEQ ID NO: 5301422 - DNA, 25 bp, Homo sapien
tccatagcttgaccatgttgaaagg

SEQ ID NO: 5301423 - DNA, 25 bp, Homo sapien
taaaatcacgtttccatagcttgac

SEQ ID NO: 5301424 - DNA, 25 bp, Homo sapien
gaaaggtgataccacaagagtctac

SEQ ID NO: 5301425 - DNA, 25 bp, Homo sapien
cacaagagtctacctcactggttga

SEQ ID NO: 5301426 - DNA, 25 bp, Homo sapien
aaataatgggtgtgtccagaacgtc

SEQ ID NO: 5301427 - DNA, 25 bp, Homo sapien
taaagcgcctagagaggacactctg

SEQ ID NO: 5301428 - DNA, 25 bp, Homo sapien
caactggagtatttgcaggtcctac

SEQ ID NO: 5301429 - DNA, 25 bp, Homo sapien
tacacctgtgtgcacgccaagggtg

SEQ ID NO: 5301430 - DNA, 25 bp, Homo sapien
tccattgaggctcagactcttcaac

SEQ ID NO: 5301431 - DNA, 25 bp, Homo sapien
agccagtacagcaccacatctggaa

SEQ ID NO: 5301432 - DNA, 25 bp, Homo sapien
tcctttctcccggatgctattccag

SEQ ID NO: 5301433 - DNA, 25 bp, Homo sapien
cagtgtgggttgctttgccatcctc

SEQ ID NO: 5301434 - DNA, 25 bp, Homo sapien
cttgggaggaagctgcctgcagtga

SEQ ID NO: 5301435 - DNA, 25 bp, Homo sapien
agacagcagcaacacgagtcggagc

SEQ ID NO: 5301436 - DNA, 25 bp, Homo sapien
tctggtagcacctggtccctgactc

SEQ ID NO: 5301437 - DNA, 25 bp, Homo sapien
cacgagtcggagcaagcatctggta

SEQ ID NO: 5301438 - DNA, 25 bp, Homo sapien
ccaagctggttgaaatggttgtttc

SEQ ID NO: 5301439 - DNA, 25 bp, Homo sapien
aagctggttgaaatggttgtttcac

SEQ ID NO: 5301440 - DNA, 25 bp, Homo sapien
tgtccaagctggttgaaatggttgt

SEQ ID NO: 5301441 - DNA, 25 bp, Homo sapien
tttgtccaagctggttgaaatggtt

SEQ ID NO: 5301442 - DNA, 25 bp, Homo sapien
aagctcatccatgagactagcaaag

SEQ ID NO: 5301443 - DNA, 25 bp, Homo sapien
agctcatccatgagactagcaaaga

SEQ ID NO: 5301444 - DNA, 25 bp, Homo sapien
aaagctcatccatgagactagcaaa

SEQ ID NO: 5301445 - DNA, 25 bp, Homo sapien
cctgggatgaaggtgaccaatgcca

SEQ ID NO: 5301446 - DNA, 25 bp, Homo sapien
tgccactgcagggtctttagagcca

SEQ ID NO: 5301447 - DNA, 25 bp, Homo sapien
tggagtaagccagacagggcacgaa

SEQ ID NO: 5301448 - DNA, 25 bp, Homo sapien
tccactggctatggccggagacagt

SEQ ID NO: 5301449 - DNA, 25 bp, Homo sapien
gatgcagcagatccgcatgtccctt

SEQ ID NO: 5301450 - DNA, 25 bp, Homo sapien
agcagatccgcatgtcccttcgcgg

SEQ ID NO: 5301451 - DNA, 25 bp, Homo sapien
caccatgatgcgcaaggccatccga

SEQ ID NO: 5301452 - DNA, 25 bp, Homo sapien
gcaaggccatccgagggcacctgga

SEQ ID NO: 5301453 - DNA, 25 bp, Homo sapien
cttaacatcttcctcggggatccca

SEQ ID NO: 5301454 - DNA, 25 bp, Homo sapien
aaatattattagaggtcttaacatc

SEQ ID NO: 5301455 - DNA, 25 bp, Homo sapien
tccactccacagacactactcctgt

SEQ ID NO: 5301456 - DNA, 25 bp, Homo sapien
gcgagggctgcaggatggtcagcgg

SEQ ID NO: 5301457 - DNA, 25 bp, Homo sapien
tggcctcctattctggcacagttga

SEQ ID NO: 5301458 - DNA, 25 bp, Homo sapien
gctctggaccttggcattcttgaag

SEQ ID NO: 5301459 - DNA, 25 bp, Homo sapien
tgtgcccatagaagggaagcacttg

SEQ ID NO: 5301460 - DNA, 25 bp, Homo sapien
cacagttgactgtgagaccacgtgc

SEQ ID NO: 5301461 - DNA, 25 bp, Homo sapien
cacgagtcagcaagtttggcacgca

SEQ ID NO: 5301462 - DNA, 25 bp, Homo sapien
caaggaatagtctgaggcgggtatc

SEQ ID NO: 5301463 - DNA, 25 bp, Homo sapien
gctcggctcgcctgaaatggcttgt

SEQ ID NO: 5301464 - DNA, 25 bp, Homo sapien
ttaacactgcgcaccagacacatgg

SEQ ID NO: 5301465 - DNA, 25 bp, Homo sapien
tgacagccttaggacgacggcagcg

SEQ ID NO: 5301466 - DNA, 25 bp, Homo sapien
aaatgacagccttaggacgacggca

SEQ ID NO: 5301467 - DNA, 25 bp, Homo sapien
gcaggctccgcgcatgggtccgcgg

SEQ ID NO: 5301468 - DNA, 25 bp, Homo sapien
tgaattttcagaaggggcaagtaaa

SEQ ID NO: 5301469 - DNA, 25 bp, Homo sapien
tacccatgcagactgggtctgtctg

SEQ ID NO: 5301470 - DNA, 25 bp, Homo sapien
ctgtgactctagcttaggcttgatc

SEQ ID NO: 5301471 - DNA, 25 bp, Homo sapien
ctagcttaggcttgatctctttacc

SEQ ID NO: 5301472 - DNA, 25 bp, Homo sapien
tcaagtctcatcaactccctgtcta

SEQ ID NO: 5301473 - DNA, 25 bp, Homo sapien
tgcagccattctcaggacctgtatt

SEQ ID NO: 5301474 - DNA, 25 bp, Homo sapien
gccattctcaggacctgtatttgca

SEQ ID NO: 5301475 - DNA, 25 bp, Homo sapien
gagtactgaagttcactgatgctgg

SEQ ID NO: 5301476 - DNA, 25 bp, Homo sapien
gctgtctgtcccgtgatgctttgag

SEQ ID NO: 5301477 - DNA, 25 bp, Homo sapien
aattccacggctacacaacatgagg

SEQ ID NO: 5301478 - DNA, 25 bp, Homo sapien
gacactgcccaaaatacactgaagg

SEQ ID NO: 5301479 - DNA, 25 bp, Homo sapien
tgaatacgttgaaaagtgtcagccg

SEQ ID NO: 5301480 - DNA, 25 bp, Homo sapien
ggtgatactagctgccctagcatag

SEQ ID NO: 5301481 - DNA, 25 bp, Homo sapien
tgccttcttggtccggtagcaaatg

SEQ ID NO: 5301482 - DNA, 25 bp, Homo sapien
ggacgttccgcaggccttccagatc

SEQ ID NO: 5301483 - DNA, 25 bp, Homo sapien
gccggcccacctggtacaggtagga

SEQ ID NO: 5301484 - DNA, 25 bp, Homo sapien
ccggtagcaaatgcagtcccgccgg

SEQ ID NO: 5301485 - DNA, 25 bp, Homo sapien
cttggcaggtttatgggcgagagaa

SEQ ID NO: 5301486 - DNA, 25 bp, Homo sapien
agagaaagcggttcccagcctcctg

SEQ ID NO: 5301487 - DNA, 25 bp, Homo sapien
tatgggcgagagaaagcggttccca

SEQ ID NO: 5301488 - DNA, 25 bp, Homo sapien
tttatgggcgagagaaagcggttcc

SEQ ID NO: 5301489 - DNA, 25 bp, Homo sapien
accgtgaacactctgccccctgcca

SEQ ID NO: 5301490 - DNA, 25 bp, Homo sapien
cttctggaccaccgtgaacactctg

SEQ ID NO: 5301491 - DNA, 25 bp, Homo sapien
ttctggaccaccgtgaacactctgc

SEQ ID NO: 5301492 - DNA, 25 bp, Homo sapien
accaccgtgaacactctgccccctg

SEQ ID NO: 5301493 - DNA, 25 bp, Homo sapien
tcagcacatgcgttcttcacaagcg

SEQ ID NO: 5301494 - DNA, 25 bp, Homo sapien
tgcgttcttcacaagcgtaagaggg

SEQ ID NO: 5301495 - DNA, 25 bp, Homo sapien
gcacatgcgttcttcacaagcgtaa

SEQ ID NO: 5301496 - DNA, 25 bp, Homo sapien
gggtcagcacatgcgttcttcacaa

SEQ ID NO: 5301497 - DNA, 25 bp, Homo sapien
accctttgatccttcacatgtagat

SEQ ID NO: 5301498 - DNA, 25 bp, Homo sapien
ccacgaggttatgcacacagtagcc

SEQ ID NO: 5301499 - DNA, 25 bp, Homo sapien
cacgaggttatgcacacagtagccc

SEQ ID NO: 5301500 - DNA, 25 bp, Homo sapien
cctttgatccttcacatgtagatgg

SEQ ID NO: 5301501 - DNA, 25 bp, Homo sapien
caggtccagggttagcacaatgtat

SEQ ID NO: 5301502 - DNA, 25 bp, Homo sapien
gaagacacctatctggcaggtccag

SEQ ID NO: 5301503 - DNA, 25 bp, Homo sapien
agccagttccacagacttctaaggg

SEQ ID NO: 5301504 - DNA, 25 bp, Homo sapien
ttatgaatcatccaagaaggtcagg

SEQ ID NO: 5301505 - DNA, 25 bp, Homo sapien
acagatggatttctaagcagttacc

SEQ ID NO: 5301506 - DNA, 25 bp, Homo sapien
aggattagccaatccctacttagtg

SEQ ID NO: 5301507 - DNA, 25 bp, Homo sapien
tcacctgagtacttacaaaaaaggc

SEQ ID NO: 5301508 - DNA, 25 bp, Homo sapien
gaaaattccgtgaaacaaatccaca

SEQ ID NO: 5301509 - DNA, 25 bp, Homo sapien
gctgaagtgagaagtgcttgaagcc

SEQ ID NO: 5301510 - DNA, 25 bp, Homo sapien
taacccaaagtagcagtcctgaccc

SEQ ID NO: 5301511 - DNA, 25 bp, Homo sapien
gggcctggttcactcaaattagtaa

SEQ ID NO: 5301512 - DNA, 25 bp, Homo sapien
ggctgcagagttcttacgtctaagg

SEQ ID NO: 5301513 - DNA, 25 bp, Homo sapien
ccaggtgcagtagcattgtgtctgt

SEQ ID NO: 5301514 - DNA, 25 bp, Homo sapien
cagaggctacggaagaaggatcgct

SEQ ID NO: 5301515 - DNA, 25 bp, Homo sapien
tgtgtgttatgagagccagggtctt

SEQ ID NO: 5301516 - DNA, 25 bp, Homo sapien
tggccgtccagcaaatctataagaa

SEQ ID NO: 5301517 - DNA, 25 bp, Homo sapien
taccagctttaaggagcctcacatg

SEQ ID NO: 5301518 - DNA, 25 bp, Homo sapien
ccataacttgactaagaggaggtag

SEQ ID NO: 5301519 - DNA, 25 bp, Homo sapien
cccatgggatggaaccactgctgct

SEQ ID NO: 5301520 - DNA, 25 bp, Homo sapien
gttgatgtcaattgggaatcccatg

SEQ ID NO: 5301521 - DNA, 25 bp, Homo sapien
agtatcactgatagctactttgcag

SEQ ID NO: 5301522 - DNA, 25 bp, Homo sapien
gcagtatagggcttacacaccagtg

SEQ ID NO: 5301523 - DNA, 25 bp, Homo sapien
gaggaggaaggaacgtagacaacta

SEQ ID NO: 5301524 - DNA, 25 bp, Homo sapien
tgtataaatctatcagcaaggccca

SEQ ID NO: 5301525 - DNA, 25 bp, Homo sapien
aaatgaaataagtcctgccaacacc

SEQ ID NO: 5301526 - DNA, 25 bp, Homo sapien
catagcccagtatcgaacacagttc

SEQ ID NO: 5301527 - DNA, 25 bp, Homo sapien
tagagggctaaatgctggtccactg

SEQ ID NO: 5301528 - DNA, 25 bp, Homo sapien
acagttcacacagttacccttggca

SEQ ID NO: 5301529 - DNA, 25 bp, Homo sapien
tactgggttctgtgataagggtcta

SEQ ID NO: 5301530 - DNA, 25 bp, Homo sapien
tgtcaatacaaatggacagtgactt

SEQ ID NO: 5301531 - DNA, 25 bp, Homo sapien
actggactagaaacagaggcatgtc

SEQ ID NO: 5301532 - DNA, 25 bp, Homo sapien
gaatgcatactgtacacgtgtatcc

SEQ ID NO: 5301533 - DNA, 25 bp, Homo sapien
tacatattactgatggatccaagag

SEQ ID NO: 5301534 - DNA, 25 bp, Homo sapien
cataaattctaacatgctcttctct

SEQ ID NO: 5301535 - DNA, 25 bp, Homo sapien
cagaacaggatcttaaagtaagcaa

SEQ ID NO: 5301536 - DNA, 25 bp, Homo sapien
gcaaggcaacatgagatcaaccatt

SEQ ID NO: 5301537 - DNA, 25 bp, Homo sapien
attacagaacaggatcttaaagtaa

SEQ ID NO: 5301538 - DNA, 25 bp, Homo sapien
ttataaatgggatgatgtagaaaag

SEQ ID NO: 5301539 - DNA, 25 bp, Homo sapien
tataaatgggatgatgtagaaaagc

SEQ ID NO: 5301540 - DNA, 25 bp, Homo sapien
aagaaatatggtgaatataaagcag

SEQ ID NO: 5301541 - DNA, 25 bp, Homo sapien
aaacagttaatatttcacttcatca

SEQ ID NO: 5301542 - DNA, 25 bp, Homo sapien
aagaagtaaaattggccagatgcgg

SEQ ID NO: 5301543 - DNA, 25 bp, Homo sapien
caagatcaccttgaagtatcagagt

SEQ ID NO: 5301544 - DNA, 25 bp, Homo sapien
cagcttgggaagtaggtcaaagctg

SEQ ID NO: 5301545 - DNA, 25 bp, Homo sapien
tgggaagtaggtcaaagctggaatg

SEQ ID NO: 5301546 - DNA, 25 bp, Homo sapien
agcttgggaagtaggtcaaagctgg

SEQ ID NO: 5301547 - DNA, 25 bp, Homo sapien
gaagtaggtcaaagctggaatgtac

SEQ ID NO: 5301548 - DNA, 25 bp, Homo sapien
cacacccaataatgttcccctatta

SEQ ID NO: 5301549 - DNA, 25 bp, Homo sapien
caccacacccaataatgttccccta

SEQ ID NO: 5301550 - DNA, 25 bp, Homo sapien
accacacccaataatgttcccctat

SEQ ID NO: 5301551 - DNA, 25 bp, Homo sapien
ccacacccaataatgttcccctatt

SEQ ID NO: 5301552 - DNA, 25 bp, Homo sapien
ttcggaaggcggaggtgggcagatc

SEQ ID NO: 5301553 - DNA, 25 bp, Homo sapien
agcacttcggaaggcggaggtgggc

SEQ ID NO: 5301554 - DNA, 25 bp, Homo sapien
atgaggtccaggagttcgagaccag

SEQ ID NO: 5301555 - DNA, 25 bp, Homo sapien
cagcctggccaacgtggtgaaaccc

SEQ ID NO: 5301556 - DNA, 25 bp, Homo sapien
tcgtgccactactctacagtctggg

SEQ ID NO: 5301557 - DNA, 25 bp, Homo sapien
ccactactctacagtctgggggaca

SEQ ID NO: 5301558 - DNA, 25 bp, Homo sapien
tgccactactctacagtctggggga

SEQ ID NO: 5301559 - DNA, 25 bp, Homo sapien
agatcgtgccactactctacagtct

SEQ ID NO: 5301560 - DNA, 25 bp, Homo sapien
actattatggagacaaacaaacagg

SEQ ID NO: 5301561 - DNA, 25 bp, Homo sapien
ggtgcaacctttataaagtacaatc

SEQ ID NO: 5301562 - DNA, 25 bp, Homo sapien
ttttcatatatcacggttggtaacg

SEQ ID NO: 5301563 - DNA, 25 bp, Homo sapien
tgctaagagtgctgagcaatgaata

SEQ ID NO: 5301564 - DNA, 25 bp, Homo sapien
gaaggtgattccaacctcctggtac

SEQ ID NO: 5301565 - DNA, 25 bp, Homo sapien
cagcagggattgtggaagctatagc

SEQ ID NO: 5301566 - DNA, 25 bp, Homo sapien
aacatatgcatgtattgctttcctc

SEQ ID NO: 5301567 - DNA, 25 bp, Homo sapien
gctttcctctaaaatgatcagcagg

SEQ ID NO: 5301568 - DNA, 25 bp, Homo sapien
ggtaactgccactacataattacaa

SEQ ID NO: 5301569 - DNA, 25 bp, Homo sapien
atggtaactgccactacataattac

SEQ ID NO: 5301570 - DNA, 25 bp, Homo sapien
gatggtaactgccactacataatta

SEQ ID NO: 5301571 - DNA, 25 bp, Homo sapien
tggtaactgccactacataattaca

SEQ ID NO: 5301572 - DNA, 25 bp, Homo sapien
tatctgatagtgattcagtgccgta

SEQ ID NO: 5301573 - DNA, 25 bp, Homo sapien
tcccattctaatagcccagaaagtg

SEQ ID NO: 5301574 - DNA, 25 bp, Homo sapien
tcagtgccgtaagggcttctactgc

SEQ ID NO: 5301575 - DNA, 25 bp, Homo sapien
gcatcagttttgcactcccattcta

SEQ ID NO: 5301576 - DNA, 25 bp, Homo sapien
gtaagaacttcatggtcattacaca

SEQ ID NO: 5301577 - DNA, 25 bp, Homo sapien
tgtaagaacttcatggtcattacac

SEQ ID NO: 5301578 - DNA, 25 bp, Homo sapien
atgtaagaacttcatggtcattaca

SEQ ID NO: 5301579 - DNA, 25 bp, Homo sapien
taagaacttcatggtcattacacaa

SEQ ID NO: 5301580 - DNA, 25 bp, Homo sapien
ttatattcttagatgcttggccagc

SEQ ID NO: 5301581 - DNA, 25 bp, Homo sapien
cttggccagcacttgtaaagcgatt

SEQ ID NO: 5301582 - DNA, 25 bp, Homo sapien
aatctttgtagctgctggtaccatc

SEQ ID NO: 5301583 - DNA, 25 bp, Homo sapien
taatgcaaaacacaggagggtggct

SEQ ID NO: 5301584 - DNA, 25 bp, Homo sapien
gctctttctacagcatactcatcac

SEQ ID NO: 5301585 - DNA, 25 bp, Homo sapien
acagctctttctacagcatactcat

SEQ ID NO: 5301586 - DNA, 25 bp, Homo sapien
tttctacagcatactcatcacccat

SEQ ID NO: 5301587 - DNA, 25 bp, Homo sapien
ttctacagcatactcatcacccatt

SEQ ID NO: 5301588 - DNA, 25 bp, Homo sapien
taaccattacaactgaaccagaggg

SEQ ID NO: 5301589 - DNA, 25 bp, Homo sapien
gagagcccattctgtaacgacttgg

SEQ ID NO: 5301590 - DNA, 25 bp, Homo sapien
gaagcctgtggtaatggataagcaa

SEQ ID NO: 5301591 - DNA, 25 bp, Homo sapien
caagttcaggtgtatctcgagagcc

SEQ ID NO: 5301592 - DNA, 25 bp, Homo sapien
ggctcaatatcactagcacacatcc

SEQ ID NO: 5301593 - DNA, 25 bp, Homo sapien
gcaatatttgtaaaaaggctcaata

SEQ ID NO: 5301594 - DNA, 25 bp, Homo sapien
cgctgatctgaagggatacatttgt

SEQ ID NO: 5301595 - DNA, 25 bp, Homo sapien
tgttttgctgaagcgctgatctgaa

SEQ ID NO: 5301596 - DNA, 25 bp, Homo sapien
tctgcctctttattcgctctctttc

SEQ ID NO: 5301597 - DNA, 25 bp, Homo sapien
ctataccccaattctgcttacttcc

SEQ ID NO: 5301598 - DNA, 25 bp, Homo sapien
tgcctctttattcgctctctttcct

SEQ ID NO: 5301599 - DNA, 25 bp, Homo sapien
ctctgcctctttattcgctctcttt

SEQ ID NO: 5301600 - DNA, 25 bp, Homo sapien
atgtctaaacgaagaagggtgttct

SEQ ID NO: 5301601 - DNA, 25 bp, Homo sapien
tgtctaaacgaagaagggtgttctc

SEQ ID NO: 5301602 - DNA, 25 bp, Homo sapien
catgtctaaacgaagaagggtgttc

SEQ ID NO: 5301603 - DNA, 25 bp, Homo sapien
acaattttgacccaagtacttaatg

SEQ ID NO: 5301604 - DNA, 25 bp, Homo sapien
gaatcatactattagcttcaacagc

SEQ ID NO: 5301605 - DNA, 25 bp, Homo sapien
tcatactattagcttcaacagcaac

SEQ ID NO: 5301606 - DNA, 25 bp, Homo sapien
catactattagcttcaacagcaaca

SEQ ID NO: 5301607 - DNA, 25 bp, Homo sapien
ctgaatcatactattagcttcaaca

SEQ ID NO: 5301608 - DNA, 25 bp, Homo sapien
tattcactgcgtaacaggtcacgta

SEQ ID NO: 5301609 - DNA, 25 bp, Homo sapien
taataattcacttctaaatgacgag

SEQ ID NO: 5301610 - DNA, 25 bp, Homo sapien
taacagtgtgctataaaggaaagag

SEQ ID NO: 5301611 - DNA, 25 bp, Homo sapien
gaatcagacgattccaacttaaacc

SEQ ID NO: 5301612 - DNA, 25 bp, Homo sapien
tattaaaataagcttatctacacct

SEQ ID NO: 5301613 - DNA, 25 bp, Homo sapien
cactattaaaataagcttatctaca

SEQ ID NO: 5301614 - DNA, 25 bp, Homo sapien
taaacactattaaaataagcttatc

SEQ ID NO: 5301615 - DNA, 25 bp, Homo sapien
aacactattaaaataagcttatcta

SEQ ID NO: 5301616 - DNA, 25 bp, Homo sapien
taaaggagccaatcatctaaaagtc

SEQ ID NO: 5301617 - DNA, 25 bp, Homo sapien
atcaactgtaccaacccaaggccag

SEQ ID NO: 5301618 - DNA, 25 bp, Homo sapien
ctgggaattgagagttaaaggagcc

SEQ ID NO: 5301619 - DNA, 25 bp, Homo sapien
gggtctagccaaagctgcattacaa

SEQ ID NO: 5301620 - DNA, 25 bp, Homo sapien
cacttataggtgaagatgcatccca

SEQ ID NO: 5301621 - DNA, 25 bp, Homo sapien
tgttcagtgaccacaattgagaaaa

SEQ ID NO: 5301622 - DNA, 25 bp, Homo sapien
tgccacacagttagttgaacaattt

SEQ ID NO: 5301623 - DNA, 25 bp, Homo sapien
tatcctcacgaaatctagcacttat

SEQ ID NO: 5301624 - DNA, 25 bp, Homo sapien
caatttgaatctaagctgcacacag

SEQ ID NO: 5301625 - DNA, 25 bp, Homo sapien
ggttgagcattatcaattcccaaga

SEQ ID NO: 5301626 - DNA, 25 bp, Homo sapien
gcagatgaagtctagtttccgttag

SEQ ID NO: 5301627 - DNA, 25 bp, Homo sapien
taaatgggcacagtctatcatggtg

SEQ ID NO: 5301628 - DNA, 25 bp, Homo sapien
tgcagtcaaggtgaattgcgagtct

SEQ ID NO: 5301629 - DNA, 25 bp, Homo sapien
tgccgatgttgtgcatgatgaagtg

SEQ ID NO: 5301630 - DNA, 25 bp, Homo sapien
ggtgaattgcgagtctgagtttttc

SEQ ID NO: 5301631 - DNA, 25 bp, Homo sapien
ttcttaatgcctcgtccagcttggg

SEQ ID NO: 5301632 - DNA, 25 bp, Homo sapien
tagagaagcagtgtgcaagtttgca

SEQ ID NO: 5301633 - DNA, 25 bp, Homo sapien
tccatagagaagcagtgtgcaagtt

SEQ ID NO: 5301634 - DNA, 25 bp, Homo sapien
ctttccatagagaagcagtgtgcaa

SEQ ID NO: 5301635 - DNA, 25 bp, Homo sapien
gagaagcagtgtgcaagtttgcagt

SEQ ID NO: 5301636 - DNA, 25 bp, Homo sapien
gcttggagaaatgcaagtccttgaa

SEQ ID NO: 5301637 - DNA, 25 bp, Homo sapien
tgcttggagaaatgcaagtccttga

SEQ ID NO: 5301638 - DNA, 25 bp, Homo sapien
ctgcttggagaaatgcaagtccttg

SEQ ID NO: 5301639 - DNA, 25 bp, Homo sapien
ctgcgggcgtgcctgaatgtgtggg

SEQ ID NO: 5301640 - DNA, 25 bp, Homo sapien
tgcgggcgtgcctgaatgtgtgggc

SEQ ID NO: 5301641 - DNA, 25 bp, Homo sapien
gcactaatgttcaaggttattttcc

SEQ ID NO: 5301642 - DNA, 25 bp, Homo sapien
aatagctcagtacataccagtaggg

SEQ ID NO: 5301643 - DNA, 25 bp, Homo sapien
cattacatggccttttgcaacaaaa

SEQ ID NO: 5301644 - DNA, 25 bp, Homo sapien
gaattaactagctcatctcaggaaa

SEQ ID NO: 5301645 - DNA, 25 bp, Homo sapien
tcagcagatcaagtacattctaaaa

SEQ ID NO: 5301646 - DNA, 25 bp, Homo sapien
tcctaataacatttagacgagttgg

SEQ ID NO: 5301647 - DNA, 25 bp, Homo sapien
tagtgtagtcccaactgtcattgtc

SEQ ID NO: 5301648 - DNA, 25 bp, Homo sapien
caactgtcattgtcattcctaataa

SEQ ID NO: 5301649 - DNA, 25 bp, Homo sapien
tcttcccaaatatggtttagtgtag

SEQ ID NO: 5301650 - DNA, 25 bp, Homo sapien
gtaagttcaaactgcatatccaaag

SEQ ID NO: 5301651 - DNA, 25 bp, Homo sapien
taagttcaaactgcatatccaaagc

SEQ ID NO: 5301652 - DNA, 25 bp, Homo sapien
cagcatatatatcagctccattgag

SEQ ID NO: 5301653 - DNA, 25 bp, Homo sapien
agctccattgagtgctgctttagct

SEQ ID NO: 5301654 - DNA, 25 bp, Homo sapien
gtgcaacatccagcatatatatcag

SEQ ID NO: 5301655 - DNA, 25 bp, Homo sapien
gagtgctgctttagctttctgggca

SEQ ID NO: 5301656 - DNA, 25 bp, Homo sapien
gggaatcacttgaccaccctgggca

SEQ ID NO: 5301657 - DNA, 25 bp, Homo sapien
gataaaacataagtcccttgccaga

SEQ ID NO: 5301658 - DNA, 25 bp, Homo sapien
cagaggagataatggagcatggtcc

SEQ ID NO: 5301659 - DNA, 25 bp, Homo sapien
ggacaacttgcaaccttgaaacaga

SEQ ID NO: 5301660 - DNA, 25 bp, Homo sapien
caacagggttgcatacagtatataa

SEQ ID NO: 5301661 - DNA, 25 bp, Homo sapien
aatacgttgcactttgccaacaggg

SEQ ID NO: 5301662 - DNA, 25 bp, Homo sapien
cttgaatataacaatacgttgcact

SEQ ID NO: 5301663 - DNA, 25 bp, Homo sapien
tttgccaacagggttgcatacagta

SEQ ID NO: 5301664 - DNA, 25 bp, Homo sapien
ggatcatcagtatttcctggccgag

SEQ ID NO: 5301665 - DNA, 25 bp, Homo sapien
aatgtacacgggttcatctgcagca

SEQ ID NO: 5301666 - DNA, 25 bp, Homo sapien
gcagaagaactttgttgcctcctga

SEQ ID NO: 5301667 - DNA, 25 bp, Homo sapien
tttcaaattccactagagcctgtcg

SEQ ID NO: 5301668 - DNA, 25 bp, Homo sapien
cagaaactttatgatgacttccacc

SEQ ID NO: 5301669 - DNA, 25 bp, Homo sapien
gattcacagagtcctcgaacatgga

SEQ ID NO: 5301670 - DNA, 25 bp, Homo sapien
caaatttttccagcgcttccacgag

SEQ ID NO: 5301671 - DNA, 25 bp, Homo sapien
catggacgacgggtgaaacagaaac

SEQ ID NO: 5301672 - DNA, 25 bp, Homo sapien
gaatgtcagcctagctttaccacta

SEQ ID NO: 5301673 - DNA, 25 bp, Homo sapien
ggatccagccattcctaaaaccagt

SEQ ID NO: 5301674 - DNA, 25 bp, Homo sapien
gataagaagggataaatacgggctg

SEQ ID NO: 5301675 - DNA, 25 bp, Homo sapien
tagctgctagctataagaatgtcag

SEQ ID NO: 5301676 - DNA, 25 bp, Homo sapien
tgtaccttcaacataatgatcactc

SEQ ID NO: 5301677 - DNA, 25 bp, Homo sapien
tcaaagcactcaaggttaatcataa

SEQ ID NO: 5301678 - DNA, 25 bp, Homo sapien
gagcctttgtagaaccactatgttt

SEQ ID NO: 5301679 - DNA, 25 bp, Homo sapien
attatccattcatttctaagttaag

SEQ ID NO: 5301680 - DNA, 25 bp, Homo sapien
acaagacagtaaacttctatccggg

SEQ ID NO: 5301681 - DNA, 25 bp, Homo sapien
gaatgccatcattgtacctaacctg

SEQ ID NO: 5301682 - DNA, 25 bp, Homo sapien
tctgcttatatcagttcccgccggg

SEQ ID NO: 5301683 - DNA, 25 bp, Homo sapien
tgtgaacgaagaagcacaagacagt

SEQ ID NO: 5301684 - DNA, 25 bp, Homo sapien
tataaagggcttctaatgtgcgtct

SEQ ID NO: 5301685 - DNA, 25 bp, Homo sapien
tgtgtttaatgcaaccctgagctca

SEQ ID NO: 5301686 - DNA, 25 bp, Homo sapien
aaactgcaacgctgggtgactgacc

SEQ ID NO: 5301687 - DNA, 25 bp, Homo sapien
cgcttaagtgcaccaaaaaagggca

SEQ ID NO: 5301688 - DNA, 25 bp, Homo sapien
gactgaagagaaccggtggtcccga

SEQ ID NO: 5301689 - DNA, 25 bp, Homo sapien
taattacgggtctccataggaccga

SEQ ID NO: 5301690 - DNA, 25 bp, Homo sapien
agagctcccggtagaaccgacgcaa

SEQ ID NO: 5301691 - DNA, 25 bp, Homo sapien
tgtgaacgccaaggcataatctgtt

SEQ ID NO: 5301692 - DNA, 25 bp, Homo sapien
tcggtcttgagacgcttggcctggc

SEQ ID NO: 5301693 - DNA, 25 bp, Homo sapien
ccctcctcggtcttgagacgcttgg

SEQ ID NO: 5301694 - DNA, 25 bp, Homo sapien
ttcctcggccgagtagtcgatctcc

SEQ ID NO: 5301695 - DNA, 25 bp, Homo sapien
tcgccttcctcggccgagtagtcga

SEQ ID NO: 5301696 - DNA, 25 bp, Homo sapien
gatgccgccggccagtcctcgccgc

SEQ ID NO: 5301697 - DNA, 25 bp, Homo sapien
gcctcttctgcgagggtctccgcgg

SEQ ID NO: 5301698 - DNA, 25 bp, Homo sapien
gagggaccggctggcaggcgggtgg

SEQ ID NO: 5301699 - DNA, 25 bp, Homo sapien
cgcctcttctgcgagggtctccgcg

SEQ ID NO: 5301700 - DNA, 25 bp, Homo sapien
ctgagaagcgcggacggactgaggg

SEQ ID NO: 5301701 - DNA, 25 bp, Homo sapien
gagaagcgcggacggactgaggggg

SEQ ID NO: 5301702 - DNA, 25 bp, Homo sapien
aagcgcggacggactgaggggggcg

SEQ ID NO: 5301703 - DNA, 25 bp, Homo sapien
gaagcgcggacggactgaggggggc

SEQ ID NO: 5301704 - DNA, 25 bp, Homo sapien
gcaggatcgaatccagccgcagcct

SEQ ID NO: 5301705 - DNA, 25 bp, Homo sapien
ccgggttctgctccctattggcagg

SEQ ID NO: 5301706 - DNA, 25 bp, Homo sapien
ctgcccggaggagcgaatctaagga

SEQ ID NO: 5301707 - DNA, 25 bp, Homo sapien
tgtgagggccgttcgtcaaaagccg

SEQ ID NO: 5301708 - DNA, 25 bp, Homo sapien
aaccgttggcgctatgcggctccta

SEQ ID NO: 5301709 - DNA, 25 bp, Homo sapien
gaaaagccctaaaattgcaggcgat

SEQ ID NO: 5301710 - DNA, 25 bp, Homo sapien
caaaatctggtagaagtgggcggac

SEQ ID NO: 5301711 - DNA, 25 bp, Homo sapien
tgttaaccgccctgccgctaattta

SEQ ID NO: 5301712 - DNA, 25 bp, Homo sapien
cataccaactataatctgcactggc

SEQ ID NO: 5301713 - DNA, 25 bp, Homo sapien
cagaacaaagttaatctggtcaatg

SEQ ID NO: 5301714 - DNA, 25 bp, Homo sapien
catttcttgacaggaactgcctctg

SEQ ID NO: 5301715 - DNA, 25 bp, Homo sapien
caaaaatgtggcatttcttgacagg

SEQ ID NO: 5301716 - DNA, 25 bp, Homo sapien
tgcctctgctacgaccccattcaga

SEQ ID NO: 5301717 - DNA, 25 bp, Homo sapien
catcgtctggaataaaatttctgtg

SEQ ID NO: 5301718 - DNA, 25 bp, Homo sapien
ctcataagtgcaccatcgtctggaa

SEQ ID NO: 5301719 - DNA, 25 bp, Homo sapien
tccacactcataagtgcaccatcgt

SEQ ID NO: 5301720 - DNA, 25 bp, Homo sapien
cttcccactgcgatcctcagggtcc

SEQ ID NO: 5301721 - DNA, 25 bp, Homo sapien
cagccataaccagaggtcagaatgg

SEQ ID NO: 5301722 - DNA, 25 bp, Homo sapien
gatctgagcgtggataattccatga

SEQ ID NO: 5301723 - DNA, 25 bp, Homo sapien
caatttcccagacaggttatataaa

SEQ ID NO: 5301724 - DNA, 25 bp, Homo sapien
ttgagccatgcggaagatctgagcg

SEQ ID NO: 5301725 - DNA, 25 bp, Homo sapien
tgccttcttcaatccggtgtctaag

SEQ ID NO: 5301726 - DNA, 25 bp, Homo sapien
ttgagacgcaagtctgccttcttca

SEQ ID NO: 5301727 - DNA, 25 bp, Homo sapien
cacgcggtgagctcggcttttgaga

SEQ ID NO: 5301728 - DNA, 25 bp, Homo sapien
acgggaattgctcacgcggtgagct

SEQ ID NO: 5301729 - DNA, 25 bp, Homo sapien
tcattgtggcaaagcacagtaggct

SEQ ID NO: 5301730 - DNA, 25 bp, Homo sapien
aaaatcttctcatgctatccggttg

SEQ ID NO: 5301731 - DNA, 25 bp, Homo sapien
gtaggcttaacatgcactctaatgg

SEQ ID NO: 5301732 - DNA, 25 bp, Homo sapien
cagatgaaaatcacaacagggcata

SEQ ID NO: 5301733 - DNA, 25 bp, Homo sapien
tccccagctattgtattggtgtcta

SEQ ID NO: 5301734 - DNA, 25 bp, Homo sapien
ctgatacaagtacagctaccctgct

SEQ ID NO: 5301735 - DNA, 25 bp, Homo sapien
tatattatgtatctgggcgctccag

SEQ ID NO: 5301736 - DNA, 25 bp, Homo sapien
tgatctgttcagtgcagagaatggg

SEQ ID NO: 5301737 - DNA, 25 bp, Homo sapien
tagatgattgataagtgaggaaact

SEQ ID NO: 5301738 - DNA, 25 bp, Homo sapien
aaatgtcacattagcctcaccctgc

SEQ ID NO: 5301739 - DNA, 25 bp, Homo sapien
ccctgcatgctaggagatggacctg

SEQ ID NO: 5301740 - DNA, 25 bp, Homo sapien
gtctctatacagcagtagatgattg

SEQ ID NO: 5301741 - DNA, 25 bp, Homo sapien
gcaccagtacaattaacagctgact

SEQ ID NO: 5301742 - DNA, 25 bp, Homo sapien
tagagattcccatctagatacacca

SEQ ID NO: 5301743 - DNA, 25 bp, Homo sapien
tgagaaatactagaggaagtcctcc

SEQ ID NO: 5301744 - DNA, 25 bp, Homo sapien
aatgacatggtcaaagtgcttcaaa

SEQ ID NO: 5301745 - DNA, 25 bp, Homo sapien
cacaacttacatatgtcataaaatg

SEQ ID NO: 5301746 - DNA, 25 bp, Homo sapien
acttacatatgtcataaaatgttac

SEQ ID NO: 5301747 - DNA, 25 bp, Homo sapien
acacaacttacatatgtcataaaat

SEQ ID NO: 5301748 - DNA, 25 bp, Homo sapien
caacttacatatgtcataaaatgtt

SEQ ID NO: 5301749 - DNA, 25 bp, Homo sapien
caagaccattgagagtagaactccc

SEQ ID NO: 5301750 - DNA, 25 bp, Homo sapien
aaagtcccttaagatcctggccaag

SEQ ID NO: 5301751 - DNA, 25 bp, Homo sapien
tatgccacctagtagcctgaaagct

SEQ ID NO: 5301752 - DNA, 25 bp, Homo sapien
ggacaagcctaggtatctgcgcaac

SEQ ID NO: 5301753 - DNA, 25 bp, Homo sapien
tatattatcttactgctgtgaattt

SEQ ID NO: 5301754 - DNA, 25 bp, Homo sapien
aatccagatccattttgattagatg

SEQ ID NO: 5301755 - DNA, 25 bp, Homo sapien
gatggttgaattatctttcctaggt

SEQ ID NO: 5301756 - DNA, 25 bp, Homo sapien
ttacagacatcacaaatcccttata

SEQ ID NO: 5301757 - DNA, 25 bp, Homo sapien
tctgcgaggacttcctgatggggaa

SEQ ID NO: 5301758 - DNA, 25 bp, Homo sapien
ctgcgaggacttcctgatggggaac

SEQ ID NO: 5301759 - DNA, 25 bp, Homo sapien
ggacttgcacttctgcgaggacttc

SEQ ID NO: 5301760 - DNA, 25 bp, Homo sapien
tcaggacttgcacttctgcgaggac

SEQ ID NO: 5301761 - DNA, 25 bp, Homo sapien
cataaagaagcactaggcaggtaac

SEQ ID NO: 5301762 - DNA, 25 bp, Homo sapien
gggaaaaggcatctatcttaccaaa

SEQ ID NO: 5301763 - DNA, 25 bp, Homo sapien
tgtcaaaattgcaaggtcaacctgc

SEQ ID NO: 5301764 - DNA, 25 bp, Homo sapien
cttaagattaggctaccctggccag

SEQ ID NO: 5301765 - DNA, 25 bp, Homo sapien
gaggccacacttgacaggcaagatt

SEQ ID NO: 5301766 - DNA, 25 bp, Homo sapien
gccacacttgacaggcaagatttgg

SEQ ID NO: 5301767 - DNA, 25 bp, Homo sapien
tattttaatctatatagcaccaatt

SEQ ID NO: 5301768 - DNA, 25 bp, Homo sapien
ttaatctatatagcaccaattctcc

SEQ ID NO: 5301769 - DNA, 25 bp, Homo sapien
agatggagatctggactttgatcgg

SEQ ID NO: 5301770 - DNA, 25 bp, Homo sapien
ggagatggagatctggactttgatc

SEQ ID NO: 5301771 - DNA, 25 bp, Homo sapien
ttttggagatggagatctggacttt

SEQ ID NO: 5301772 - DNA, 25 bp, Homo sapien
ttggagatggagatctggactttga

SEQ ID NO: 5301773 - DNA, 25 bp, Homo sapien
gaaaaacatcctaccagttgttgct

SEQ ID NO: 5301774 - DNA, 25 bp, Homo sapien
caaataaggtactgtgttcccacta

SEQ ID NO: 5301775 - DNA, 25 bp, Homo sapien
gatttcaggatgcttctccatgcac

SEQ ID NO: 5301776 - DNA, 25 bp, Homo sapien
tgctttaagcacatcgatttcagga

SEQ ID NO: 5301777 - DNA, 25 bp, Homo sapien
aaatagacctggatcttgatcttga

SEQ ID NO: 5301778 - DNA, 25 bp, Homo sapien
gtcgtgaaatagacctggatcttga

SEQ ID NO: 5301779 - DNA, 25 bp, Homo sapien
tgaaatagacctggatcttgatctt

SEQ ID NO: 5301780 - DNA, 25 bp, Homo sapien
cgtgaaatagacctggatcttgatc

SEQ ID NO: 5301781 - DNA, 25 bp, Homo sapien
caaacactgtgtaatatccaaggga

SEQ ID NO: 5301782 - DNA, 25 bp, Homo sapien
aactaaacaagatgcaacacttgcc

SEQ ID NO: 5301783 - DNA, 25 bp, Homo sapien
cactgtattaggttggtcaggcata

SEQ ID NO: 5301784 - DNA, 25 bp, Homo sapien
tatcaatcagtccaaaggaatttcc

SEQ ID NO: 5301785 - DNA, 25 bp, Homo sapien
gcacagatccctcagctgggcactg

SEQ ID NO: 5301786 - DNA, 25 bp, Homo sapien
cacagatccctcagctgggcactgt

SEQ ID NO: 5301787 - DNA, 25 bp, Homo sapien
ggcacagatccctcagctgggcact

SEQ ID NO: 5301788 - DNA, 25 bp, Homo sapien
aaggcacagatccctcagctgggca

SEQ ID NO: 5301789 - DNA, 25 bp, Homo sapien
catctttcagagctagtatcatcca

SEQ ID NO: 5301790 - DNA, 25 bp, Homo sapien
gagctagtatcatccaatctgaagc

SEQ ID NO: 5301791 - DNA, 25 bp, Homo sapien
tcttttcctggtgctaataggcctt

SEQ ID NO: 5301792 - DNA, 25 bp, Homo sapien
tttgtcgggaaaatcaattaccatc

SEQ ID NO: 5301793 - DNA, 25 bp, Homo sapien
tcttctgagtgaagctgatcttgat

SEQ ID NO: 5301794 - DNA, 25 bp, Homo sapien
gatcttctgagtgaagctgatcttg

SEQ ID NO: 5301795 - DNA, 25 bp, Homo sapien
tagatcttctgagtgaagctgatct

SEQ ID NO: 5301796 - DNA, 25 bp, Homo sapien
ctagatcttctgagtgaagctgatc

SEQ ID NO: 5301797 - DNA, 25 bp, Homo sapien
gagagatagatcttgatcgtcgagg

SEQ ID NO: 5301798 - DNA, 25 bp, Homo sapien
ctacgaagagagatagatcttgatc

SEQ ID NO: 5301799 - DNA, 25 bp, Homo sapien
tagatcttgatcgtcgaggagatgc

SEQ ID NO: 5301800 - DNA, 25 bp, Homo sapien
cttgatcgtcgaggagatgctgacc

SEQ ID NO: 5301801 - DNA, 25 bp, Homo sapien
gaaacagtgcaagaccatttctaca

SEQ ID NO: 5301802 - DNA, 25 bp, Homo sapien
ctgctgcgtgagcgagagtatcgcc

SEQ ID NO: 5301803 - DNA, 25 bp, Homo sapien
ctgcgtgagcgagagtatcgccttc

SEQ ID NO: 5301804 - DNA, 25 bp, Homo sapien
tgctgcgtgagcgagagtatcgcct

SEQ ID NO: 5301805 - DNA, 25 bp, Homo sapien
gctgcgtgagcgagagtatcgcctt

SEQ ID NO: 5301806 - DNA, 25 bp, Homo sapien
ctctggatcgagaatgtgatctaga

SEQ ID NO: 5301807 - DNA, 25 bp, Homo sapien
tggatcgagaatgtgatctagaccg

SEQ ID NO: 5301808 - DNA, 25 bp, Homo sapien
tcgagaatgtgatctagaccgtgac

SEQ ID NO: 5301809 - DNA, 25 bp, Homo sapien
gatcgagaatgtgatctagaccgtg

SEQ ID NO: 5301810 - DNA, 25 bp, Homo sapien
ctctgggcctattagttgttgagta

SEQ ID NO: 5301811 - DNA, 25 bp, Homo sapien
tttaaatttagtgtctcatttggaa

SEQ ID NO: 5301812 - DNA, 25 bp, Homo sapien
tgtcagacaataactcgtttttaag

SEQ ID NO: 5301813 - DNA, 25 bp, Homo sapien
ttttaagagtttgtgtgcctctgct

SEQ ID NO: 5301814 - DNA, 25 bp, Homo sapien
tctttggcccatggtctagtagatc

SEQ ID NO: 5301815 - DNA, 25 bp, Homo sapien
tttgcaggtcgaccctctttggccc

SEQ ID NO: 5301816 - DNA, 25 bp, Homo sapien
tgttttcttcaatctaacgacgatc

SEQ ID NO: 5301817 - DNA, 25 bp, Homo sapien
tagaagtatctatagccgatcgctg

SEQ ID NO: 5301818 - DNA, 25 bp, Homo sapien
gaggcttgattgacgcaagaagatt

SEQ ID NO: 5301819 - DNA, 25 bp, Homo sapien
gaatgtggtcaatctggtgttcctc

SEQ ID NO: 5301820 - DNA, 25 bp, Homo sapien
gatttttctagttgggaatgtggtc

SEQ ID NO: 5301821 - DNA, 25 bp, Homo sapien
tgacagccaaatgagccaggtgagg

SEQ ID NO: 5301822 - DNA, 25 bp, Homo sapien
tgttacggcgatcaccgtctcaaat

SEQ ID NO: 5301823 - DNA, 25 bp, Homo sapien
ggcgatcaccgtctcaaattttctg

SEQ ID NO: 5301824 - DNA, 25 bp, Homo sapien
acggcgatcaccgtctcaaattttc

SEQ ID NO: 5301825 - DNA, 25 bp, Homo sapien
cgatcaccgtctcaaattttctgcc

SEQ ID NO: 5301826 - DNA, 25 bp, Homo sapien
tatcataaggctcgtgacattctga

SEQ ID NO: 5301827 - DNA, 25 bp, Homo sapien
tgctgatcacctcaaggtctaggag

SEQ ID NO: 5301828 - DNA, 25 bp, Homo sapien
caaggcgcctcagcatgatatcata

SEQ ID NO: 5301829 - DNA, 25 bp, Homo sapien
tgaagctaggtgtagatgactcgag

SEQ ID NO: 5301830 - DNA, 25 bp, Homo sapien
gattaactagaataccaaccattcc

SEQ ID NO: 5301831 - DNA, 25 bp, Homo sapien
aaaacactagtttctgccttgctaa

SEQ ID NO: 5301832 - DNA, 25 bp, Homo sapien
acactagtttctgccttgctaataa

SEQ ID NO: 5301833 - DNA, 25 bp, Homo sapien
ttacttgattaactagaataccaac

SEQ ID NO: 5301834 - DNA, 25 bp, Homo sapien
ctgcttcttcttcgccggctgtaac

SEQ ID NO: 5301835 - DNA, 25 bp, Homo sapien
acaatcataagcataatgtcccttt

SEQ ID NO: 5301836 - DNA, 25 bp, Homo sapien
gccggctgtaacgatgacaatcata

SEQ ID NO: 5301837 - DNA, 25 bp, Homo sapien
aatgtcccttttcgccacactcata

SEQ ID NO: 5301838 - DNA, 25 bp, Homo sapien
ggtctatcaaaacgtgatctccgag

SEQ ID NO: 5301839 - DNA, 25 bp, Homo sapien
ccgaggcatgcctgtcgatagttca

SEQ ID NO: 5301840 - DNA, 25 bp, Homo sapien
catttggatcaaagggacgtcgggc

SEQ ID NO: 5301841 - DNA, 25 bp, Homo sapien
acgtcgggcaggtggtctatcaaaa

SEQ ID NO: 5301842 - DNA, 25 bp, Homo sapien
tttaccaagccctaactccatctcc

SEQ ID NO: 5301843 - DNA, 25 bp, Homo sapien
tcagaatccaaatttagcactaagt

SEQ ID NO: 5301844 - DNA, 25 bp, Homo sapien
actccatctccgctatcttctttaa

SEQ ID NO: 5301845 - DNA, 25 bp, Homo sapien
ccagctatttaaggtctcttccaga

SEQ ID NO: 5301846 - DNA, 25 bp, Homo sapien
taggatcttcgaattccacaaaggc

SEQ ID NO: 5301847 - DNA, 25 bp, Homo sapien
gaccataataactgaaagccctttc

SEQ ID NO: 5301848 - DNA, 25 bp, Homo sapien
taactctcctttgccagcgccagtt

SEQ ID NO: 5301849 - DNA, 25 bp, Homo sapien
gaggatttctcgcaatccatacagt

SEQ ID NO: 5301850 - DNA, 25 bp, Homo sapien
gcagaaacgcgtggtaggatacacc

SEQ ID NO: 5301851 - DNA, 25 bp, Homo sapien
taaaacgggccatcctcaagattgg

SEQ ID NO: 5301852 - DNA, 25 bp, Homo sapien
gcacgttacgcaaaatctggcccaa

SEQ ID NO: 5301853 - DNA, 25 bp, Homo sapien
ggtgaaagtccgcaaatccctgaga

SEQ ID NO: 5301854 - DNA, 25 bp, Homo sapien
gccagtcgcagattacgtccccatt

SEQ ID NO: 5301855 - DNA, 25 bp, Homo sapien
gctgccaatttcgttctatctcaaa

SEQ ID NO: 5301856 - DNA, 25 bp, Homo sapien
cagagccataaaccgcgctggaaat

SEQ ID NO: 5301857 - DNA, 25 bp, Homo sapien
ttgacgagaacatgcagctcacagc

SEQ ID NO: 5301858 - DNA, 25 bp, Homo sapien
gaaagcgctgaggaaatgcgccacc

SEQ ID NO: 5301859 - DNA, 25 bp, Homo sapien
agctgcggccagatctgtccgctga

SEQ ID NO: 5301860 - DNA, 25 bp, Homo sapien
atctgtccgctgaagtggcgggaaa

SEQ ID NO: 5301861 - DNA, 25 bp, Homo sapien
ggtcctcaatgtgcgcaaaatggca

SEQ ID NO: 5301862 - DNA, 25 bp, Homo sapien
ctccgtaccgcccgtaacgcgacat

SEQ ID NO: 5301863 - DNA, 25 bp, Homo sapien
gcgtttatatatgcggccgctgcgc

SEQ ID NO: 5301864 - DNA, 25 bp, Homo sapien
ccagggctcgagtgacgcaaaagct

SEQ ID NO: 5301865 - DNA, 25 bp, Homo sapien
cgcgtgctcggctctttagcaagca

SEQ ID NO: 5301866 - DNA, 25 bp, Homo sapien
tgcgctttgcgcatgcgtcatctcg

SEQ ID NO: 5301867 - DNA, 25 bp, Homo sapien
aaacagccaagaaacgacgcggaag

SEQ ID NO: 5301868 - DNA, 25 bp, Homo sapien
cgcggaaggaactgaagagactaac

SEQ ID NO: 5301869 - DNA, 25 bp, Homo sapien
gaaacgacgcggaaggaactgaaga

SEQ ID NO: 5301870 - DNA, 25 bp, Homo sapien
gagctgggcggaaacagccaagaaa

SEQ ID NO: 5301871 - DNA, 25 bp, Homo sapien
ggcctacatatgagaacttaactgc

SEQ ID NO: 5301872 - DNA, 25 bp, Homo sapien
caccttagcgtcacagagtgctggc

SEQ ID NO: 5301873 - DNA, 25 bp, Homo sapien
accttagcgtcacagagtgctggca

SEQ ID NO: 5301874 - DNA, 25 bp, Homo sapien
actgtacccggcctacatatgagaa

SEQ ID NO: 5301875 - DNA, 25 bp, Homo sapien
ttccacgacagagtcttgctcaggc

SEQ ID NO: 5301876 - DNA, 25 bp, Homo sapien
agttaagtctaccctgccttcttct

SEQ ID NO: 5301877 - DNA, 25 bp, Homo sapien
tttttccacgacagagtcttgctca

SEQ ID NO: 5301878 - DNA, 25 bp, Homo sapien
accatcttggccagaggttggtctt

SEQ ID NO: 5301879 - DNA, 25 bp, Homo sapien
gataatgatgttaccgttcccagac

SEQ ID NO: 5301880 - DNA, 25 bp, Homo sapien
gcttttcaaaacagattgctggacc

SEQ ID NO: 5301881 - DNA, 25 bp, Homo sapien
ataacaagatggtatagcccagtgc

SEQ ID NO: 5301882 - DNA, 25 bp, Homo sapien
cagtagttctagttgggacccagga

SEQ ID NO: 5301883 - DNA, 25 bp, Homo sapien
tgtttcctggcaactgagtcctctg

SEQ ID NO: 5301884 - DNA, 25 bp, Homo sapien
tttgccatcagactaatgagctggg

SEQ ID NO: 5301885 - DNA, 25 bp, Homo sapien
ggcccggtgccttgatattggtaga

SEQ ID NO: 5301886 - DNA, 25 bp, Homo sapien
caaaacctgagtgcttgaaagggta

SEQ ID NO: 5301887 - DNA, 25 bp, Homo sapien
caagtcaagtttactcagtagccaa

SEQ ID NO: 5301888 - DNA, 25 bp, Homo sapien
acccctcacaagtcaagtttactca

SEQ ID NO: 5301889 - DNA, 25 bp, Homo sapien
tcacaagtcaagtttactcagtagc

SEQ ID NO: 5301890 - DNA, 25 bp, Homo sapien
ccctcacaagtcaagtttactcagt

SEQ ID NO: 5301891 - DNA, 25 bp, Homo sapien
ccaataggtctttagttcgaggtag

SEQ ID NO: 5301892 - DNA, 25 bp, Homo sapien
gggtatatacactgcctcagctgcc

SEQ ID NO: 5301893 - DNA, 25 bp, Homo sapien
gcaagctgggttttaggctctcacc

SEQ ID NO: 5301894 - DNA, 25 bp, Homo sapien
ttcccaggtgagctagaagcaggtg

SEQ ID NO: 5301895 - DNA, 25 bp, Homo sapien
gaagctgatcaagttcgcaacgaag

SEQ ID NO: 5301896 - DNA, 25 bp, Homo sapien
caattgtgctgatgatccgggatcc

SEQ ID NO: 5301897 - DNA, 25 bp, Homo sapien
tccgggatcctcgaggacacgtaca

SEQ ID NO: 5301898 - DNA, 25 bp, Homo sapien
gacacgtacacagatcaatgcttgg

SEQ ID NO: 5301899 - DNA, 25 bp, Homo sapien
caaacaagaccagcgggtacacaga

SEQ ID NO: 5301900 - DNA, 25 bp, Homo sapien
gaagcagctacaaaacggatccaac

SEQ ID NO: 5301901 - DNA, 25 bp, Homo sapien
gctgcagtctcggatgaatactcga

SEQ ID NO: 5301902 - DNA, 25 bp, Homo sapien
tcttctcgtggtacaacaggtaggg

SEQ ID NO: 5301903 - DNA, 25 bp, Homo sapien
tgatgtcactggcaacaaaaaggga

SEQ ID NO: 5301904 - DNA, 25 bp, Homo sapien
ctgtaacaaaaaacctcagatgatg

SEQ ID NO: 5301905 - DNA, 25 bp, Homo sapien
caaaaaacctcagatgatgacagtg

SEQ ID NO: 5301906 - DNA, 25 bp, Homo sapien
tgtcactggcaacaaaaagggaaca

SEQ ID NO: 5301907 - DNA, 25 bp, Homo sapien
tcaactcagctgattttggttgcat

SEQ ID NO: 5301908 - DNA, 25 bp, Homo sapien
catatccatcgttcttggtgacaaa

SEQ ID NO: 5301909 - DNA, 25 bp, Homo sapien
cactgatgaagggtgaatgtgtaca

SEQ ID NO: 5301910 - DNA, 25 bp, Homo sapien
tggtgacaaacttcaactcagctga

SEQ ID NO: 5301911 - DNA, 25 bp, Homo sapien
tggctctgggtgtctataccacatt

SEQ ID NO: 5301912 - DNA, 25 bp, Homo sapien
tataccacattgaggccatgtggga

SEQ ID NO: 5301913 - DNA, 25 bp, Homo sapien
gaccagagatctgagtatcccaatc

SEQ ID NO: 5301914 - DNA, 25 bp, Homo sapien
cagctgatgacactggaccagagat

SEQ ID NO: 5301915 - DNA, 25 bp, Homo sapien
tcttgctagtaacactgaatataat

SEQ ID NO: 5301916 - DNA, 25 bp, Homo sapien
tcttcttgctagtaacactgaatat

SEQ ID NO: 5301917 - DNA, 25 bp, Homo sapien
catttcttcttgctagtaacactga

SEQ ID NO: 5301918 - DNA, 25 bp, Homo sapien
ccacttttctattaggttctattag

SEQ ID NO: 5301919 - DNA, 25 bp, Homo sapien
tgcaaagtgaggtggccctagctcc

SEQ ID NO: 5301920 - DNA, 25 bp, Homo sapien
gatgagactggtgtcaccgactggc

SEQ ID NO: 5301921 - DNA, 25 bp, Homo sapien
ctttgatgaccatttcagggggacc

SEQ ID NO: 5301922 - DNA, 25 bp, Homo sapien
ctcttagccagggagaacaagtcac

SEQ ID NO: 5301923 - DNA, 25 bp, Homo sapien
tgggggctcctggcagaggatgtac

SEQ ID NO: 5301924 - DNA, 25 bp, Homo sapien
gctcctggcagaggatgtacacctg

SEQ ID NO: 5301925 - DNA, 25 bp, Homo sapien
tgctctccactgtagagagacagtg

SEQ ID NO: 5301926 - DNA, 25 bp, Homo sapien
ctgctctccactgtagagagacagt

SEQ ID NO: 5301927 - DNA, 25 bp, Homo sapien
tgcgcacttcctgttccatggcaaa

SEQ ID NO: 5301928 - DNA, 25 bp, Homo sapien
cactgagggttgtgccagaaaccgg

SEQ ID NO: 5301929 - DNA, 25 bp, Homo sapien
tgttccatggcaaagccctcaatgt

SEQ ID NO: 5301930 - DNA, 25 bp, Homo sapien
ttggcaatgcagtggtgggcaaagt

SEQ ID NO: 5301931 - DNA, 25 bp, Homo sapien
aatgagggtggtaaaggatggtgcc

SEQ ID NO: 5301932 - DNA, 25 bp, Homo sapien
tgagggtggtaaaggatggtgcctg

SEQ ID NO: 5301933 - DNA, 25 bp, Homo sapien
aaatgagggtggtaaaggatggtgc

SEQ ID NO: 5301934 - DNA, 25 bp, Homo sapien
ctaaatgagggtggtaaaggatggt

SEQ ID NO: 5301935 - DNA, 25 bp, Homo sapien
tttactcagtcttgaaaatgttggg

SEQ ID NO: 5301936 - DNA, 25 bp, Homo sapien
ggtcttgcagatacctcaggacttc

SEQ ID NO: 5301937 - DNA, 25 bp, Homo sapien
gccaggtcctgaatcttcatgtaga

SEQ ID NO: 5301938 - DNA, 25 bp, Homo sapien
tcaatatggcccacgctgtgcttgc

SEQ ID NO: 5301939 - DNA, 25 bp, Homo sapien
gggaatcccatgtttctctgcatat

SEQ ID NO: 5301940 - DNA, 25 bp, Homo sapien
ttgtagaactcagggatcctcccgg

SEQ ID NO: 5301941 - DNA, 25 bp, Homo sapien
atcactgcggcccttggactggttg

SEQ ID NO: 5301942 - DNA, 25 bp, Homo sapien
tcgtccatgttccatgggtgcttca

SEQ ID NO: 5301943 - DNA, 25 bp, Homo sapien
ctcccactgagcaatttccacttgt

SEQ ID NO: 5301944 - DNA, 25 bp, Homo sapien
ccacttgtttgcgggtgatgtaagg

SEQ ID NO: 5301945 - DNA, 25 bp, Homo sapien
ccctcccactgagcaatttccactt

SEQ ID NO: 5301946 - DNA, 25 bp, Homo sapien
cacttgtttgcgggtgatgtaaggc

SEQ ID NO: 5301947 - DNA, 25 bp, Homo sapien
ggaagagaggggcccaggaggtagc

SEQ ID NO: 5301948 - DNA, 25 bp, Homo sapien
ctgggaagagaggggcccaggaggt

SEQ ID NO: 5301949 - DNA, 25 bp, Homo sapien
aagagaggggcccaggaggtagcag

SEQ ID NO: 5301950 - DNA, 25 bp, Homo sapien
gagaggggcccaggaggtagcagtc

SEQ ID NO: 5301951 - DNA, 25 bp, Homo sapien
gattggaggtgcaattcctggtgcc

SEQ ID NO: 5301952 - DNA, 25 bp, Homo sapien
ctgggattggaggtgcaattcctgg

SEQ ID NO: 5301953 - DNA, 25 bp, Homo sapien
gtcttcatggctcagtgaaccactc

SEQ ID NO: 5301954 - DNA, 25 bp, Homo sapien
tctgtcttcatggctcagtgaacca

SEQ ID NO: 5301955 - DNA, 25 bp, Homo sapien
cacacagcattgctgatatcagctt

SEQ ID NO: 5301956 - DNA, 25 bp, Homo sapien
cctatatccgataacagttccgtga

SEQ ID NO: 5301957 - DNA, 25 bp, Homo sapien
tgaattgtcgtttgaggctggccat

SEQ ID NO: 5301958 - DNA, 25 bp, Homo sapien
gagcccttcccttgcaaaccctata

SEQ ID NO: 5301959 - DNA, 25 bp, Homo sapien
cagttccgtgaattgtcgtttgagg

SEQ ID NO: 5301960 - DNA, 25 bp, Homo sapien
tttgactggaattccaactccaagt

SEQ ID NO: 5301961 - DNA, 25 bp, Homo sapien
tgcggcactgtctactacctagctt

SEQ ID NO: 5301962 - DNA, 25 bp, Homo sapien
tgggtaggcctgattttccacgaaa

SEQ ID NO: 5301963 - DNA, 25 bp, Homo sapien
tactcaggcctagagtggttcgtgc

SEQ ID NO: 5301964 - DNA, 25 bp, Homo sapien
gaactcttccagacaagaagttttg

SEQ ID NO: 5301965 - DNA, 25 bp, Homo sapien
agtaattataacttgcacgcacgcc

SEQ ID NO: 5301966 - DNA, 25 bp, Homo sapien
tgcagaactcttccagacaagaagt

SEQ ID NO: 5301967 - DNA, 25 bp, Homo sapien
gcacgccttcttttgtacttagctg

SEQ ID NO: 5301968 - DNA, 25 bp, Homo sapien
agctttttctggttagcttcttctt

SEQ ID NO: 5301969 - DNA, 25 bp, Homo sapien
gggccagataatcactgtttgcgaa

SEQ ID NO: 5301970 - DNA, 25 bp, Homo sapien
ttgtagaagggccagataatcactg

SEQ ID NO: 5301971 - DNA, 25 bp, Homo sapien
gataatcactgtttgcgaatgcaaa

SEQ ID NO: 5301972 - DNA, 25 bp, Homo sapien
tgtgccccatcaggccagctaattt

SEQ ID NO: 5301973 - DNA, 25 bp, Homo sapien
gtgtgccccatcaggccagctaatt

SEQ ID NO: 5301974 - DNA, 25 bp, Homo sapien
taggtgtgccccatcaggccagcta

SEQ ID NO: 5301975 - DNA, 25 bp, Homo sapien
ggtgtgccccatcaggccagctaat

SEQ ID NO: 5301976 - DNA, 25 bp, Homo sapien
cagtgggtcagctaatgaaaggcaa

SEQ ID NO: 5301977 - DNA, 25 bp, Homo sapien
tgggtcttttagttccaagtggcaa

SEQ ID NO: 5301978 - DNA, 25 bp, Homo sapien
gctatatctaaaacctaacattctg

SEQ ID NO: 5301979 - DNA, 25 bp, Homo sapien
tatgacggtaaatggcaagctcaca

SEQ ID NO: 5301980 - DNA, 25 bp, Homo sapien
cattaatccaataataatatttctc

SEQ ID NO: 5301981 - DNA, 25 bp, Homo sapien
cgattcattaatccaataataatat

SEQ ID NO: 5301982 - DNA, 25 bp, Homo sapien
taatccaataataatatttctctac

SEQ ID NO: 5301983 - DNA, 25 bp, Homo sapien
ttcattaatccaataataatatttc

SEQ ID NO: 5301984 - DNA, 25 bp, Homo sapien
gtagtttctcatggcaatctaaacc

SEQ ID NO: 5301985 - DNA, 25 bp, Homo sapien
cagtagtttctcatggcaatctaaa

SEQ ID NO: 5301986 - DNA, 25 bp, Homo sapien
tctcatggcaatctaaaccaatgcc

SEQ ID NO: 5301987 - DNA, 25 bp, Homo sapien
tttctcatggcaatctaaaccaatg

SEQ ID NO: 5301988 - DNA, 25 bp, Homo sapien
atggtcctcttagagactccagttt

SEQ ID NO: 5301989 - DNA, 25 bp, Homo sapien
tggtcctcttagagactccagttta

SEQ ID NO: 5301990 - DNA, 25 bp, Homo sapien
gagactccagtttagatgaatgttg

SEQ ID NO: 5301991 - DNA, 25 bp, Homo sapien
tccaaacagcggaagatagacccaa

SEQ ID NO: 5301992 - DNA, 25 bp, Homo sapien
tcaatgagccgagagaacacagact

SEQ ID NO: 5301993 - DNA, 25 bp, Homo sapien
ttttgaggcacgaagagaatcggtg

SEQ ID NO: 5301994 - DNA, 25 bp, Homo sapien
gtttgccaattctcacatccacggg

SEQ ID NO: 5301995 - DNA, 25 bp, Homo sapien
tttctggtgggatgacacagaggaa

SEQ ID NO: 5301996 - DNA, 25 bp, Homo sapien
ttttatttctggtgggatgacacag

SEQ ID NO: 5301997 - DNA, 25 bp, Homo sapien
gggatgacacagaggaataatttct

SEQ ID NO: 5301998 - DNA, 25 bp, Homo sapien
tatttctggtgggatgacacagagg

SEQ ID NO: 5301999 - DNA, 25 bp, Homo sapien
tagagtgagaaacatttagaccttt

SEQ ID NO: 5302000 - DNA, 25 bp, Homo sapien
gattattggtggtcattcttagcca

SEQ ID NO: 5302001 - DNA, 25 bp, Homo sapien
catggaacttaatagagtgagaaac

SEQ ID NO: 5302002 - DNA, 25 bp, Homo sapien
gaatggtaaaggcaacactaaggat

SEQ ID NO: 5302003 - DNA, 25 bp, Homo sapien
gagatacaaaggtgtcctctagact

SEQ ID NO: 5302004 - DNA, 25 bp, Homo sapien
ttagacacagctgttccaatggcac

SEQ ID NO: 5302005 - DNA, 25 bp, Homo sapien
cctttgtagagcattagcttgagat

SEQ ID NO: 5302006 - DNA, 25 bp, Homo sapien
tagtgatggctagtgaataaatgga

SEQ ID NO: 5302007 - DNA, 25 bp, Homo sapien
ttttcccagaatcgataacatagac

SEQ ID NO: 5302008 - DNA, 25 bp, Homo sapien
ttataatcttagttactcctgcagg

SEQ ID NO: 5302009 - DNA, 25 bp, Homo sapien
taacatagacaacatcatcgatggt

SEQ ID NO: 5302010 - DNA, 25 bp, Homo sapien
aggaggttttacaaacacagcctgc

SEQ ID NO: 5302011 - DNA, 25 bp, Homo sapien
ctacgtctgttgttgaaaagagaat

SEQ ID NO: 5302012 - DNA, 25 bp, Homo sapien
gaaaagagaattagactgtagctgt

SEQ ID NO: 5302013 - DNA, 25 bp, Homo sapien
agactgtagctgttcataaagcatt

SEQ ID NO: 5302014 - DNA, 25 bp, Homo sapien
cgattactacgtctgttgttgaaaa

SEQ ID NO: 5302015 - DNA, 25 bp, Homo sapien
cacaatccactctaataaggcctct

SEQ ID NO: 5302016 - DNA, 25 bp, Homo sapien
ttttcaaaatccatgatggacattg

SEQ ID NO: 5302017 - DNA, 25 bp, Homo sapien
ggcctctattaattcaagattcacc

SEQ ID NO: 5302018 - DNA, 25 bp, Homo sapien
ggagggtaggagtgctttccatcca

SEQ ID NO: 5302019 - DNA, 25 bp, Homo sapien
gcactgcatctttgacagaatcctg

SEQ ID NO: 5302020 - DNA, 25 bp, Homo sapien
aatgcagttctgttccgccttgctt

SEQ ID NO: 5302021 - DNA, 25 bp, Homo sapien
gctgcttaaaatctaactgttgatc

SEQ ID NO: 5302022 - DNA, 25 bp, Homo sapien
gggagagccttaggtcttcttccac

SEQ ID NO: 5302023 - DNA, 25 bp, Homo sapien
atgccaggtcctttcactgaatctt

SEQ ID NO: 5302024 - DNA, 25 bp, Homo sapien
caccatgccaggtcctttcactgaa

SEQ ID NO: 5302025 - DNA, 25 bp, Homo sapien
ccatgccaggtcctttcactgaatc

SEQ ID NO: 5302026 - DNA, 25 bp, Homo sapien
tcactgaatcttaattaatatcttc

SEQ ID NO: 5302027 - DNA, 25 bp, Homo sapien
aaaattgatcaacaggaaatgtacg

SEQ ID NO: 5302028 - DNA, 25 bp, Homo sapien
cttgtcacagcaattgcatcttcca

SEQ ID NO: 5302029 - DNA, 25 bp, Homo sapien
aattgatcaacaggaaatgtacgac

SEQ ID NO: 5302030 - DNA, 25 bp, Homo sapien
aaaaaattgatcaacaggaaatgta

SEQ ID NO: 5302031 - DNA, 25 bp, Homo sapien
tctcttaaagcttgtcatgctaacg

SEQ ID NO: 5302032 - DNA, 25 bp, Homo sapien
aatagaaagcctgagaacacccatt

SEQ ID NO: 5302033 - DNA, 25 bp, Homo sapien
taaagcttgtcatgctaacgtccta

SEQ ID NO: 5302034 - DNA, 25 bp, Homo sapien
aaaatagaaagcctgagaacaccca

SEQ ID NO: 5302035 - DNA, 25 bp, Homo sapien
cagcgtttagagttgcactcattaa

SEQ ID NO: 5302036 - DNA, 25 bp, Homo sapien
tgaaaaaagctcagcgtttagagtt

SEQ ID NO: 5302037 - DNA, 25 bp, Homo sapien
ggcctctgcgatacaatgtccttca

SEQ ID NO: 5302038 - DNA, 25 bp, Homo sapien
tggtatagtaataacggggcaggaa

SEQ ID NO: 5302039 - DNA, 25 bp, Homo sapien
cctgaggatcaaacaaattcaacac

SEQ ID NO: 5302040 - DNA, 25 bp, Homo sapien
aaacacctgaggatcaaacaaattc

SEQ ID NO: 5302041 - DNA, 25 bp, Homo sapien
cgttcatagaacaatatgtcctgtt

SEQ ID NO: 5302042 - DNA, 25 bp, Homo sapien
aaaccattaacgttcatagaacaat

SEQ ID NO: 5302043 - DNA, 25 bp, Homo sapien
tatatggcacggtctacaccccatg

SEQ ID NO: 5302044 - DNA, 25 bp, Homo sapien
tctgcctggattactgggcttctcc

SEQ ID NO: 5302045 - DNA, 25 bp, Homo sapien
taatgctcttcgaatgtcagtctga

SEQ ID NO: 5302046 - DNA, 25 bp, Homo sapien
ctttgaggcatgcaccttgggtctt

SEQ ID NO: 5302047 - DNA, 25 bp, Homo sapien
tattcgtggtgcttaaggccctgga

SEQ ID NO: 5302048 - DNA, 25 bp, Homo sapien
taacataggccttccttgtggcaaa

SEQ ID NO: 5302049 - DNA, 25 bp, Homo sapien
tactagctgcatgaaactgaattgg

SEQ ID NO: 5302050 - DNA, 25 bp, Homo sapien
ttagtgttacagaccctggagatca

SEQ ID NO: 5302051 - DNA, 25 bp, Homo sapien
ctcagcagcactcccgtggtgcagt

SEQ ID NO: 5302052 - DNA, 25 bp, Homo sapien
agagctgtatctccttctagccttc

SEQ ID NO: 5302053 - DNA, 25 bp, Homo sapien
cactcccgtggtgcagtataacagt

SEQ ID NO: 5302054 - DNA, 25 bp, Homo sapien
cgtggtgcagtataacagtctggtg

SEQ ID NO: 5302055 - DNA, 25 bp, Homo sapien
tcaatctgtctgctccttatttggt

SEQ ID NO: 5302056 - DNA, 25 bp, Homo sapien
aaatattggaaacaccagcagttcc

SEQ ID NO: 5302057 - DNA, 25 bp, Homo sapien
tacagaggaaatttagtacaaccaa

SEQ ID NO: 5302058 - DNA, 25 bp, Homo sapien
ttacacatgaaagggcaatataaat

SEQ ID NO: 5302059 - DNA, 25 bp, Homo sapien
aaataacctgaaagtatatatccca

SEQ ID NO: 5302060 - DNA, 25 bp, Homo sapien
cctggccataagagttcttatacca

SEQ ID NO: 5302061 - DNA, 25 bp, Homo sapien
tgattaccaaaggtaatcattaatt

SEQ ID NO: 5302062 - DNA, 25 bp, Homo sapien
atatcccaaattgcccatgaatctc

SEQ ID NO: 5302063 - DNA, 25 bp, Homo sapien
caggaaataagcagagcatacaaac

SEQ ID NO: 5302064 - DNA, 25 bp, Homo sapien
ccgaatctggtatcccacggtcaga

SEQ ID NO: 5302065 - DNA, 25 bp, Homo sapien
taccttctcaggtggtccattcaga

SEQ ID NO: 5302066 - DNA, 25 bp, Homo sapien
tacagatgatgttggctaccttctc

SEQ ID NO: 5302067 - DNA, 25 bp, Homo sapien
ttagcaacgcgttcagcaacagaga

SEQ ID NO: 5302068 - DNA, 25 bp, Homo sapien
ataccacttatgacaaccacctggt

SEQ ID NO: 5302069 - DNA, 25 bp, Homo sapien
taccacttatgacaaccacctggtg

SEQ ID NO: 5302070 - DNA, 25 bp, Homo sapien
ccacttatgacaaccacctggtgct

SEQ ID NO: 5302071 - DNA, 25 bp, Homo sapien
cttatgacaaccacctggtgcttac

SEQ ID NO: 5302072 - DNA, 25 bp, Homo sapien
gggagtgattgcctctcttgcagaa

SEQ ID NO: 5302073 - DNA, 25 bp, Homo sapien
gcaataagttaagaatggtttctct

SEQ ID NO: 5302074 - DNA, 25 bp, Homo sapien
ttgcctctcttgcagaatggactgg

SEQ ID NO: 5302075 - DNA, 25 bp, Homo sapien
tcttcccaagcagggagtgattgcc

SEQ ID NO: 5302076 - DNA, 25 bp, Homo sapien
tttgttgggattggatgtagaagac

SEQ ID NO: 5302077 - DNA, 25 bp, Homo sapien
tgagttgtggaatctgtacattagt

SEQ ID NO: 5302078 - DNA, 25 bp, Homo sapien
gagtctctataccagtactgtccaa

SEQ ID NO: 5302079 - DNA, 25 bp, Homo sapien
tgcttagcacatatccagttcttcc

SEQ ID NO: 5302080 - DNA, 25 bp, Homo sapien
gtttctatcatcttacctacagtgc

SEQ ID NO: 5302081 - DNA, 25 bp, Homo sapien
gttatttttgggcagtcactacaac

SEQ ID NO: 5302082 - DNA, 25 bp, Homo sapien
gaagaatagtgttactgaggaactg

SEQ ID NO: 5302083 - DNA, 25 bp, Homo sapien
cagcgtagctctaagcaatatcaga

SEQ ID NO: 5302084 - DNA, 25 bp, Homo sapien
gagggcctagagagcatttaatcca

SEQ ID NO: 5302085 - DNA, 25 bp, Homo sapien
tactagctatgcgatcttgggcaca

SEQ ID NO: 5302086 - DNA, 25 bp, Homo sapien
cagaactttagaactggagggccta

SEQ ID NO: 5302087 - DNA, 25 bp, Homo sapien
tagaaacagaattggctaaaccact

SEQ ID NO: 5302088 - DNA, 25 bp, Homo sapien
ctctactataacaggtgcaggaccg

SEQ ID NO: 5302089 - DNA, 25 bp, Homo sapien
gcctgccagtcatatcttttggaaa

SEQ ID NO: 5302090 - DNA, 25 bp, Homo sapien
ggtgcaggaccgtcatcctcatctg

SEQ ID NO: 5302091 - DNA, 25 bp, Homo sapien
tcggaactgcttgcagattttacca

SEQ ID NO: 5302092 - DNA, 25 bp, Homo sapien
acaaaagaattatttggaatcactg

SEQ ID NO: 5302093 - DNA, 25 bp, Homo sapien
gaaacaaaagaattatttggaatca

SEQ ID NO: 5302094 - DNA, 25 bp, Homo sapien
atttgattagaaacaaaagaattat

SEQ ID NO: 5302095 - DNA, 25 bp, Homo sapien
cttctggaatttgattagaaacaaa

SEQ ID NO: 5302096 - DNA, 25 bp, Homo sapien
ggaataaaatgccacgagcggagct

SEQ ID NO: 5302097 - DNA, 25 bp, Homo sapien
gtttccgcaaatgtcaaggccttgt

SEQ ID NO: 5302098 - DNA, 25 bp, Homo sapien
tgtaaacgacaagccagaggtaggt

SEQ ID NO: 5302099 - DNA, 25 bp, Homo sapien
gagatgctctagtgatgctcccaca

SEQ ID NO: 5302100 - DNA, 25 bp, Homo sapien
taagccagcatattccaaaggatcc

SEQ ID NO: 5302101 - DNA, 25 bp, Homo sapien
tggccagtaccgctcatcgttacag

SEQ ID NO: 5302102 - DNA, 25 bp, Homo sapien
tcgttacagcaatcaggctcatcat

SEQ ID NO: 5302103 - DNA, 25 bp, Homo sapien
caaaggatccaagtcgggaacgagg

SEQ ID NO: 5302104 - DNA, 25 bp, Homo sapien
ttcattacaagggtttatctggaag

SEQ ID NO: 5302105 - DNA, 25 bp, Homo sapien
ttactgaatccatatgagcactgcc

SEQ ID NO: 5302106 - DNA, 25 bp, Homo sapien
gctcattcaacactacttctacttg

SEQ ID NO: 5302107 - DNA, 25 bp, Homo sapien
tatctggaaggttacagataaatca

SEQ ID NO: 5302108 - DNA, 25 bp, Homo sapien
gttcttgcaggtctcggagaagagc

SEQ ID NO: 5302109 - DNA, 25 bp, Homo sapien
tcttgcaggtctcggagaagagctt

SEQ ID NO: 5302110 - DNA, 25 bp, Homo sapien
caggtctcggagaagagctttcact

SEQ ID NO: 5302111 - DNA, 25 bp, Homo sapien
ttgcaggtctcggagaagagctttc

SEQ ID NO: 5302112 - DNA, 25 bp, Homo sapien
cattttgggcgtgactctcctttgc

SEQ ID NO: 5302113 - DNA, 25 bp, Homo sapien
ggtttccattttgggcgtgactctc

SEQ ID NO: 5302114 - DNA, 25 bp, Homo sapien
tgggtttccattttgggcgtgactc

SEQ ID NO: 5302115 - DNA, 25 bp, Homo sapien
atgtagagtctgaaggggtactttg

SEQ ID NO: 5302116 - DNA, 25 bp, Homo sapien
taggttgtaccatctggggttgtgt

SEQ ID NO: 5302117 - DNA, 25 bp, Homo sapien
aattggctacatcatacagcctagg

SEQ ID NO: 5302118 - DNA, 25 bp, Homo sapien
tagtctaggagcaattggctacatc

SEQ ID NO: 5302119 - DNA, 25 bp, Homo sapien
tgttgtaggttgtaccatctggggt

SEQ ID NO: 5302120 - DNA, 25 bp, Homo sapien
cccatattctactggaggcctttct

SEQ ID NO: 5302121 - DNA, 25 bp, Homo sapien
ccaccactcccatgagatttactgg

SEQ ID NO: 5302122 - DNA, 25 bp, Homo sapien
tcactgaagatacaaaagtcatctc

SEQ ID NO: 5302123 - DNA, 25 bp, Homo sapien
gatttactggcgtgactcctgcctc

SEQ ID NO: 5302124 - DNA, 25 bp, Homo sapien
acagacggagtcagagaacggagcc

SEQ ID NO: 5302125 - DNA, 25 bp, Homo sapien
catgcagcccaggtaaatttgtgta

SEQ ID NO: 5302126 - DNA, 25 bp, Homo sapien
ttcaccatggatacagggacctaag

SEQ ID NO: 5302127 - DNA, 25 bp, Homo sapien
tatctattccatctagcccgggaag

SEQ ID NO: 5302128 - DNA, 25 bp, Homo sapien
tgagcgtggacaacctcagcggcag

SEQ ID NO: 5302129 - DNA, 25 bp, Homo sapien
ttcaccggccccaggcagactggat

SEQ ID NO: 5302130 - DNA, 25 bp, Homo sapien
gagcccgccttggttcggtatcagg

SEQ ID NO: 5302131 - DNA, 25 bp, Homo sapien
cagactggatgaaacacactgggcc

SEQ ID NO: 5302132 - DNA, 25 bp, Homo sapien
tcacttgtccgcagaagtggaagac

SEQ ID NO: 5302133 - DNA, 25 bp, Homo sapien
cgcatcacttgtccgcagaagtgga

SEQ ID NO: 5302134 - DNA, 25 bp, Homo sapien
acaacgcgcatcacttgtccgcaga

SEQ ID NO: 5302135 - DNA, 25 bp, Homo sapien
cgtgcgcacaacgcgcatcacttgt

SEQ ID NO: 5302136 - DNA, 25 bp, Homo sapien
tggctcgcagagttgggtcccgagc

SEQ ID NO: 5302137 - DNA, 25 bp, Homo sapien
gctcgcagagttgggtcccgagccg

SEQ ID NO: 5302138 - DNA, 25 bp, Homo sapien
ctggctcgcagagttgggtcccgag

SEQ ID NO: 5302139 - DNA, 25 bp, Homo sapien
ctcgcagagttgggtcccgagccgg

SEQ ID NO: 5302140 - DNA, 25 bp, Homo sapien
gccaccctcacgattctcacttgga

SEQ ID NO: 5302141 - DNA, 25 bp, Homo sapien
tggccaccctcacgattctcacttg

SEQ ID NO: 5302142 - DNA, 25 bp, Homo sapien
gaggtgctgcccaagggtcagaggt

SEQ ID NO: 5302143 - DNA, 25 bp, Homo sapien
tgcccaagggtcagaggtccaaact

SEQ ID NO: 5302144 - DNA, 25 bp, Homo sapien
tatttcctgaccgtctagccgaggg

SEQ ID NO: 5302145 - DNA, 25 bp, Homo sapien
gcaaccaagtcgcacctggagctgt

SEQ ID NO: 5302146 - DNA, 25 bp, Homo sapien
tcgaactagcgtggagtcagaacct

SEQ ID NO: 5302147 - DNA, 25 bp, Homo sapien
gaagagctcctttaagtcgaactag

SEQ ID NO: 5302148 - DNA, 25 bp, Homo sapien
taatgtggaccacttcacaaatctg

SEQ ID NO: 5302149 - DNA, 25 bp, Homo sapien
atgtggaccacttcacaaatctgca

SEQ ID NO: 5302150 - DNA, 25 bp, Homo sapien
attttagtgtgtgttctgccaaagc

SEQ ID NO: 5302151 - DNA, 25 bp, Homo sapien
agtgtgtgttctgccaaagcaagta

SEQ ID NO: 5302152 - DNA, 25 bp, Homo sapien
tttcggtgtcaagaattgcttttag

SEQ ID NO: 5302153 - DNA, 25 bp, Homo sapien
tcggtgtcaagaattgcttttagaa

SEQ ID NO: 5302154 - DNA, 25 bp, Homo sapien
cttttcggtgtcaagaattgctttt

SEQ ID NO: 5302155 - DNA, 25 bp, Homo sapien
ttcggtgtcaagaattgcttttaga

SEQ ID NO: 5302156 - DNA, 25 bp, Homo sapien
taagcagctacctctaaacaataac

SEQ ID NO: 5302157 - DNA, 25 bp, Homo sapien
ggcatctatctgtagaaactcaaag

SEQ ID NO: 5302158 - DNA, 25 bp, Homo sapien
tatctttactagaataagcagctac

SEQ ID NO: 5302159 - DNA, 25 bp, Homo sapien
aatgctcattcagctaatattaggc

SEQ ID NO: 5302160 - DNA, 25 bp, Homo sapien
tggaaaccttgggagtatggatccc

SEQ ID NO: 5302161 - DNA, 25 bp, Homo sapien
tatggatccctgaacttgtagaagt

SEQ ID NO: 5302162 - DNA, 25 bp, Homo sapien
tgatgtgagctctgaactctttccc

SEQ ID NO: 5302163 - DNA, 25 bp, Homo sapien
gagtaattatagactcctttgagaa

SEQ ID NO: 5302164 - DNA, 25 bp, Homo sapien
ggggatgttttagcacctctgataa

SEQ ID NO: 5302165 - DNA, 25 bp, Homo sapien
gcacctctgataaattggtgccagg

SEQ ID NO: 5302166 - DNA, 25 bp, Homo sapien
ctctgataaattggtgccagggcag

SEQ ID NO: 5302167 - DNA, 25 bp, Homo sapien
atttctggggatgttttagcacctc

SEQ ID NO: 5302168 - DNA, 25 bp, Homo sapien
cagtctggattttcttctaccaatt

SEQ ID NO: 5302169 - DNA, 25 bp, Homo sapien
tcttctaccaattatttctccttta

SEQ ID NO: 5302170 - DNA, 25 bp, Homo sapien
ttatttctcctttaatctctacatc

SEQ ID NO: 5302171 - DNA, 25 bp, Homo sapien
tttctcctttaatctctacatccat

SEQ ID NO: 5302172 - DNA, 25 bp, Homo sapien
tgaagggtataagacatgagttgcc

SEQ ID NO: 5302173 - DNA, 25 bp, Homo sapien
cgagatccccaggtaggaatgccta

SEQ ID NO: 5302174 - DNA, 25 bp, Homo sapien
gagggttgagcaaaacttggttgac

SEQ ID NO: 5302175 - DNA, 25 bp, Homo sapien
aatgcctaaggcctgtgagtggact

SEQ ID NO: 5302176 - DNA, 25 bp, Homo sapien
ggaccatcgctgacccctgtcaagt

SEQ ID NO: 5302177 - DNA, 25 bp, Homo sapien
ttttagtacccagggaccatcgctg

SEQ ID NO: 5302178 - DNA, 25 bp, Homo sapien
gaaagtgctgtggttttagtaccca

SEQ ID NO: 5302179 - DNA, 25 bp, Homo sapien
gtcaagtatgcacgggctgtggacc

SEQ ID NO: 5302180 - DNA, 25 bp, Homo sapien
gcagcacccatatttgacaaagggt

SEQ ID NO: 5302181 - DNA, 25 bp, Homo sapien
ggctgacttgagcaccaaggaccat

SEQ ID NO: 5302182 - DNA, 25 bp, Homo sapien
tcacgtaaggggctgacttgagcac

SEQ ID NO: 5302183 - DNA, 25 bp, Homo sapien
caggagccaccttgtttctagcagc

SEQ ID NO: 5302184 - DNA, 25 bp, Homo sapien
agtccagatctgttcatgtaggaga

SEQ ID NO: 5302185 - DNA, 25 bp, Homo sapien
tggaatgaacgctgaatgaatgctt

SEQ ID NO: 5302186 - DNA, 25 bp, Homo sapien
gaggtaagtaccactattatatctt

SEQ ID NO: 5302187 - DNA, 25 bp, Homo sapien
gaaggtgcttagtccatgttagtgg

SEQ ID NO: 5302188 - DNA, 25 bp, Homo sapien
gaagatccacaagtcgaacagaagt

SEQ ID NO: 5302189 - DNA, 25 bp, Homo sapien
tattccgtatgactctgctagggca

SEQ ID NO: 5302190 - DNA, 25 bp, Homo sapien
gaagctcagacaataccttcgggcc

SEQ ID NO: 5302191 - DNA, 25 bp, Homo sapien
gttcagtgaactccacatgccctca

SEQ ID NO: 5302192 - DNA, 25 bp, Homo sapien
tggagctcgggaggtggcatgcaca

SEQ ID NO: 5302193 - DNA, 25 bp, Homo sapien
taaccggccgtaagcacagctcttt

SEQ ID NO: 5302194 - DNA, 25 bp, Homo sapien
aggcgagaggcctgcactaaccggc

SEQ ID NO: 5302195 - DNA, 25 bp, Homo sapien
tcgtgggagcgccttagtggaagtt

SEQ ID NO: 5302196 - DNA, 25 bp, Homo sapien
catcccggagatggacttcgagtcc

SEQ ID NO: 5302197 - DNA, 25 bp, Homo sapien
agagccttctggcaccgacgcagtt

SEQ ID NO: 5302198 - DNA, 25 bp, Homo sapien
cccgcggcctacgaagagttcgagt

SEQ ID NO: 5302199 - DNA, 25 bp, Homo sapien
agtacggcggcgagatcttcgcgct

SEQ ID NO: 5302200 - DNA, 25 bp, Homo sapien
cgttaattgcacatactggccagca

SEQ ID NO: 5302201 - DNA, 25 bp, Homo sapien
tctcctaacagtgtaagacatgcgt

SEQ ID NO: 5302202 - DNA, 25 bp, Homo sapien
tatatttgtggctgtttaccagaca

SEQ ID NO: 5302203 - DNA, 25 bp, Homo sapien
caataacagtgtatcaggaaccgtt

SEQ ID NO: 5302204 - DNA, 25 bp, Homo sapien
gattgcctccacgatactggtgctg

SEQ ID NO: 5302205 - DNA, 25 bp, Homo sapien
aatcagattgcctccacgatactgg

SEQ ID NO: 5302206 - DNA, 25 bp, Homo sapien
cctccacgatactggtgctgtcctt

SEQ ID NO: 5302207 - DNA, 25 bp, Homo sapien
tccatcaatcagattgcctccacga

SEQ ID NO: 5302208 - DNA, 25 bp, Homo sapien
ccaacaggatgggtgtttccttgcc

SEQ ID NO: 5302209 - DNA, 25 bp, Homo sapien
ggccaacaggatgggtgtttccttg

SEQ ID NO: 5302210 - DNA, 25 bp, Homo sapien
caggatgggtgtttccttgcccctt

SEQ ID NO: 5302211 - DNA, 25 bp, Homo sapien
caacaggatgggtgtttccttgccc

SEQ ID NO: 5302212 - DNA, 25 bp, Homo sapien
acttagtatgtccaagcctgcttca

SEQ ID NO: 5302213 - DNA, 25 bp, Homo sapien
gaagtcaaaagtcattacaagggct

SEQ ID NO: 5302214 - DNA, 25 bp, Homo sapien
tttaaaatatatctaggccctgacc

SEQ ID NO: 5302215 - DNA, 25 bp, Homo sapien
tacacctcacattcagtctatcagc

SEQ ID NO: 5302216 - DNA, 25 bp, Homo sapien
tgagaatcactaatgatttcaaaaa

SEQ ID NO: 5302217 - DNA, 25 bp, Homo sapien
aaatgagaatcactaatgatttcaa

SEQ ID NO: 5302218 - DNA, 25 bp, Homo sapien
aatgagaatcactaatgatttcaaa

SEQ ID NO: 5302219 - DNA, 25 bp, Homo sapien
taaatgagaatcactaatgatttca

SEQ ID NO: 5302220 - DNA, 25 bp, Homo sapien
tagggacactttgcatccaagaggg

SEQ ID NO: 5302221 - DNA, 25 bp, Homo sapien
cattagccgaagacatactgaaggg

SEQ ID NO: 5302222 - DNA, 25 bp, Homo sapien
aatcttagggacaatgaggctggcc

SEQ ID NO: 5302223 - DNA, 25 bp, Homo sapien
ttacatcaaagaccgaccgacagag

SEQ ID NO: 5302224 - DNA, 25 bp, Homo sapien
caacaaggtgcatgcatttcagtca

SEQ ID NO: 5302225 - DNA, 25 bp, Homo sapien
actctctaaggatggaatactgcac

SEQ ID NO: 5302226 - DNA, 25 bp, Homo sapien
caaggcgtaccacaaaacgtgcttt

SEQ ID NO: 5302227 - DNA, 25 bp, Homo sapien
tccagaactagaaaccaaggcgtac

SEQ ID NO: 5302228 - DNA, 25 bp, Homo sapien
atataataatttaatatatgccagc

SEQ ID NO: 5302229 - DNA, 25 bp, Homo sapien
taataatttaatatatgccagccaa

SEQ ID NO: 5302230 - DNA, 25 bp, Homo sapien
taatttaatatatgccagccaaaca

SEQ ID NO: 5302231 - DNA, 25 bp, Homo sapien
catataataatttaatatatgccag

SEQ ID NO: 5302232 - DNA, 25 bp, Homo sapien
tagagggatagctacgagccatgac

SEQ ID NO: 5302233 - DNA, 25 bp, Homo sapien
tcaacaaggtcaggtaccacagcct

SEQ ID NO: 5302234 - DNA, 25 bp, Homo sapien
gcctgtagtacagtgccgggccttg

SEQ ID NO: 5302235 - DNA, 25 bp, Homo sapien
ggactaccagtaaacttctgtggga

SEQ ID NO: 5302236 - DNA, 25 bp, Homo sapien
tcacttcacaaaaagaggactcctg

SEQ ID NO: 5302237 - DNA, 25 bp, Homo sapien
caattcctctaggtcggtctttcca

SEQ ID NO: 5302238 - DNA, 25 bp, Homo sapien
aaagtccctttatgattttcaggtg

SEQ ID NO: 5302239 - DNA, 25 bp, Homo sapien
ggactcctgcctattggccagaaaa

SEQ ID NO: 5302240 - DNA, 25 bp, Homo sapien
gaatgggcattctccaacagtggtg

SEQ ID NO: 5302241 - DNA, 25 bp, Homo sapien
gaaggtccacttcttgtgtcaatgg

SEQ ID NO: 5302242 - DNA, 25 bp, Homo sapien
agaagtgctttgtcgtggaggaaca

SEQ ID NO: 5302243 - DNA, 25 bp, Homo sapien
caggcggcccagcaatggaatgaag

SEQ ID NO: 5302244 - DNA, 25 bp, Homo sapien
aaggcattgccatggtcactttttt

SEQ ID NO: 5302245 - DNA, 25 bp, Homo sapien
gaaggcattgccatggtcacttttt

SEQ ID NO: 5302246 - DNA, 25 bp, Homo sapien
ttgagaaaacatcaggtgtcctcac

SEQ ID NO: 5302247 - DNA, 25 bp, Homo sapien
tctcgtggtggtaataagggagggc

SEQ ID NO: 5302248 - DNA, 25 bp, Homo sapien
gtctgagatagaggtccggtctgat

SEQ ID NO: 5302249 - DNA, 25 bp, Homo sapien
tattgaatatcgtggtgaataggct

SEQ ID NO: 5302250 - DNA, 25 bp, Homo sapien
taggcttttgatgtgggttgcctag

SEQ ID NO: 5302251 - DNA, 25 bp, Homo sapien
gaattaagtttaacagctggccaaa

SEQ ID NO: 5302252 - DNA, 25 bp, Homo sapien
cagatttactattaagggctcagat

SEQ ID NO: 5302253 - DNA, 25 bp, Homo sapien
tgtgccttcatacaaagcttcagga

SEQ ID NO: 5302254 - DNA, 25 bp, Homo sapien
gccaaggctggcatatgttttaaat

SEQ ID NO: 5302255 - DNA, 25 bp, Homo sapien
atggtgaagattctgctggggcaga

SEQ ID NO: 5302256 - DNA, 25 bp, Homo sapien
agtgcctttggttaaacttatagat

SEQ ID NO: 5302257 - DNA, 25 bp, Homo sapien
gcctttggttaaacttatagatgat

SEQ ID NO: 5302258 - DNA, 25 bp, Homo sapien
ttggttaaacttatagatgatacag

SEQ ID NO: 5302259 - DNA, 25 bp, Homo sapien
ggttaaacttatagatgatacagaa

SEQ ID NO: 5302260 - DNA, 25 bp, Homo sapien
tggcactattcaagacaacggaggc

SEQ ID NO: 5302261 - DNA, 25 bp, Homo sapien
ctcaaaggatgcaagggaaagaatc

SEQ ID NO: 5302262 - DNA, 25 bp, Homo sapien
caaaaattttaacggtgatggcact

SEQ ID NO: 5302263 - DNA, 25 bp, Homo sapien
taggctcccctttgcctgtaagcaa

SEQ ID NO: 5302264 - DNA, 25 bp, Homo sapien
atttagaaactgcatgtagctgcca

SEQ ID NO: 5302265 - DNA, 25 bp, Homo sapien
gccatcaggctaagtatattttgtg

SEQ ID NO: 5302266 - DNA, 25 bp, Homo sapien
gctgccagcattcccatatgcgcat

SEQ ID NO: 5302267 - DNA, 25 bp, Homo sapien
cagttgtctataatctatcctgcca

SEQ ID NO: 5302268 - DNA, 25 bp, Homo sapien
tgccagacccaagaagagttttagc

SEQ ID NO: 5302269 - DNA, 25 bp, Homo sapien
gcaaggtaccaatgctgccagaccc

SEQ ID NO: 5302270 - DNA, 25 bp, Homo sapien
taaagatagcacaagtgaaggcctc

SEQ ID NO: 5302271 - DNA, 25 bp, Homo sapien
tctaggatgttgcaagcaaggtacc

SEQ ID NO: 5302272 - DNA, 25 bp, Homo sapien
cagagtaacttggataaagacggta

SEQ ID NO: 5302273 - DNA, 25 bp, Homo sapien
acttggataaagacggtatcattgc

SEQ ID NO: 5302274 - DNA, 25 bp, Homo sapien
gccatggggcagagtaacttggata

SEQ ID NO: 5302275 - DNA, 25 bp, Homo sapien
gggcagagtaacttggataaagacg

SEQ ID NO: 5302276 - DNA, 25 bp, Homo sapien
aaaaaatgatatcatattgggaatt

SEQ ID NO: 5302277 - DNA, 25 bp, Homo sapien
tatcatattgggaatttaagattcc

SEQ ID NO: 5302278 - DNA, 25 bp, Homo sapien
tgttattgtcattgtcgttttaaag

SEQ ID NO: 5302279 - DNA, 25 bp, Homo sapien
ctttcattgatatattcaactcatc

SEQ ID NO: 5302280 - DNA, 25 bp, Homo sapien
gaaagccccaagagcattaaagtag

SEQ ID NO: 5302281 - DNA, 25 bp, Homo sapien
cattccagatttctaggcagcccta

SEQ ID NO: 5302282 - DNA, 25 bp, Homo sapien
gattgcctggttgtaaaagggagcc

SEQ ID NO: 5302283 - DNA, 25 bp, Homo sapien
ctgaaaatcaaaagcgaaagcccca

SEQ ID NO: 5302284 - DNA, 25 bp, Homo sapien
ccagatgacagacaaatggtcctca

SEQ ID NO: 5302285 - DNA, 25 bp, Homo sapien
taaactcacaaaagcctggtaaatg

SEQ ID NO: 5302286 - DNA, 25 bp, Homo sapien
ggtaccaatgccagtctagtgtggg

SEQ ID NO: 5302287 - DNA, 25 bp, Homo sapien
tactatacagtcagggttgaaacca

SEQ ID NO: 5302288 - DNA, 25 bp, Homo sapien
gctttcccagtgaagacgtgtaagt

SEQ ID NO: 5302289 - DNA, 25 bp, Homo sapien
tcagtaagactgcaagctttcccag

SEQ ID NO: 5302290 - DNA, 25 bp, Homo sapien
ggcagcactaagtacgtggccactt

SEQ ID NO: 5302291 - DNA, 25 bp, Homo sapien
aacaagtagtgagccagtggtcttt

SEQ ID NO: 5302292 - DNA, 25 bp, Homo sapien
gaaataggtattcactctggtggca

SEQ ID NO: 5302293 - DNA, 25 bp, Homo sapien
ttaagggattagcagaacacatgga

SEQ ID NO: 5302294 - DNA, 25 bp, Homo sapien
tctggtggcaaaacagtgggtagca

SEQ ID NO: 5302295 - DNA, 25 bp, Homo sapien
cactcgcacatctgttagttaggca

SEQ ID NO: 5302296 - DNA, 25 bp, Homo sapien
taaagattcagcactagtagagaac

SEQ ID NO: 5302297 - DNA, 25 bp, Homo sapien
ccttaatgatacaggcctatagctg

SEQ ID NO: 5302298 - DNA, 25 bp, Homo sapien
caggatccagagcactgcattctag

SEQ ID NO: 5302299 - DNA, 25 bp, Homo sapien
aatgatttcttcttcgctgcttagc

SEQ ID NO: 5302300 - DNA, 25 bp, Homo sapien
gaccttcagtcaccaaataatgcca

SEQ ID NO: 5302301 - DNA, 25 bp, Homo sapien
tattctcaagacaaatacactttat

SEQ ID NO: 5302302 - DNA, 25 bp, Homo sapien
gccaagtcatagtattctcaagaca

SEQ ID NO: 5302303 - DNA, 25 bp, Homo sapien
gtcaccaaataatgccaagtcatag

SEQ ID NO: 5302304 - DNA, 25 bp, Homo sapien
gcccagcccaaatatactttagatg

SEQ ID NO: 5302305 - DNA, 25 bp, Homo sapien
gacaacaaagactactgggtaacta

SEQ ID NO: 5302306 - DNA, 25 bp, Homo sapien
aacttcgaggttagtgcttctcaac

SEQ ID NO: 5302307 - DNA, 25 bp, Homo sapien
taaacaaataggattctggaccaaa

SEQ ID NO: 5302308 - DNA, 25 bp, Homo sapien
aagcacagatagtgtattagcagcc

SEQ ID NO: 5302309 - DNA, 25 bp, Homo sapien
gatggtgtaccctgactagtattca

SEQ ID NO: 5302310 - DNA, 25 bp, Homo sapien
aattgaagttatacatgtggctcac

SEQ ID NO: 5302311 - DNA, 25 bp, Homo sapien
tgtttcgctgcactgaaaagcacag

SEQ ID NO: 5302312 - DNA, 25 bp, Homo sapien
atagtactaacaaataccttaatgc

SEQ ID NO: 5302313 - DNA, 25 bp, Homo sapien
ctaacaaataccttaatgcacttag

SEQ ID NO: 5302314 - DNA, 25 bp, Homo sapien
tagtactaacaaataccttaatgca

SEQ ID NO: 5302315 - DNA, 25 bp, Homo sapien
tactaacaaataccttaatgcactt

SEQ ID NO: 5302316 - DNA, 25 bp, Homo sapien
gaaaagggctcgaatgatcggaatc

SEQ ID NO: 5302317 - DNA, 25 bp, Homo sapien
tcttgggtttgatggacgaacacca

SEQ ID NO: 5302318 - DNA, 25 bp, Homo sapien
caaacatctgtggtactggaagcac

SEQ ID NO: 5302319 - DNA, 25 bp, Homo sapien
gatcggaatcaaatacactgcaaac

SEQ ID NO: 5302320 - DNA, 25 bp, Homo sapien
cttctccatgctatttcccatcgga

SEQ ID NO: 5302321 - DNA, 25 bp, Homo sapien
gctatttcccatcggattcaagttt

SEQ ID NO: 5302322 - DNA, 25 bp, Homo sapien
tcgtggttctatttctagggatttg

SEQ ID NO: 5302323 - DNA, 25 bp, Homo sapien
tccatgctatttcccatcggattca

SEQ ID NO: 5302324 - DNA, 25 bp, Homo sapien
tccatgtctttttaggacctcaggg

SEQ ID NO: 5302325 - DNA, 25 bp, Homo sapien
taaggctgattttggtactgctgga

SEQ ID NO: 5302326 - DNA, 25 bp, Homo sapien
gacctcagggttgccttcttctgtt

SEQ ID NO: 5302327 - DNA, 25 bp, Homo sapien
tgattctactcgtaaacagtaaggc

SEQ ID NO: 5302328 - DNA, 25 bp, Homo sapien
cactacagctgtacactggacgagg

SEQ ID NO: 5302329 - DNA, 25 bp, Homo sapien
tctgacggccacacaagaggttgtt

SEQ ID NO: 5302330 - DNA, 25 bp, Homo sapien
taaaggctctggaaccagttctgct

SEQ ID NO: 5302331 - DNA, 25 bp, Homo sapien
tttgcaagcctgtcaaatgtgggac

SEQ ID NO: 5302332 - DNA, 25 bp, Homo sapien
cagaaggaggacacaagatcagagc

SEQ ID NO: 5302333 - DNA, 25 bp, Homo sapien
tattcttagcatgtagccctgggca

SEQ ID NO: 5302334 - DNA, 25 bp, Homo sapien
gacaggccaggatatgagaatcaat

SEQ ID NO: 5302335 - DNA, 25 bp, Homo sapien
ctgggcataacacatagaggcattc

SEQ ID NO: 5302336 - DNA, 25 bp, Homo sapien
tcaattcatgagcttcttctaaaat

SEQ ID NO: 5302337 - DNA, 25 bp, Homo sapien
catggtggattaatagacctgagtt

SEQ ID NO: 5302338 - DNA, 25 bp, Homo sapien
aaattttcttctggcgacttggtat

SEQ ID NO: 5302339 - DNA, 25 bp, Homo sapien
agtgatcttcactcaattcatgagc

SEQ ID NO: 5302340 - DNA, 25 bp, Homo sapien
caaggacaccattaaagttgttcaa

SEQ ID NO: 5302341 - DNA, 25 bp, Homo sapien
tgtgtggtctagtctgtaaacaggt

SEQ ID NO: 5302342 - DNA, 25 bp, Homo sapien
aataattcgactcaccacagctact

SEQ ID NO: 5302343 - DNA, 25 bp, Homo sapien
gtagaatctcaataattcgactcac

SEQ ID NO: 5302344 - DNA, 25 bp, Homo sapien
ggtggtatgtcgaatcattttcaga

SEQ ID NO: 5302345 - DNA, 25 bp, Homo sapien
caactaattctgatggctgtacagc

SEQ ID NO: 5302346 - DNA, 25 bp, Homo sapien
acacttccaactaattctgatggct

SEQ ID NO: 5302347 - DNA, 25 bp, Homo sapien
agagtgaggttggtggtatgtcgaa

SEQ ID NO: 5302348 - DNA, 25 bp, Homo sapien
caggtcaaaagtctctatgtgccca

SEQ ID NO: 5302349 - DNA, 25 bp, Homo sapien
tgtgcccaggtctgcttatatgcca

SEQ ID NO: 5302350 - DNA, 25 bp, Homo sapien
aatttctattgggtgtaaggtgagc

SEQ ID NO: 5302351 - DNA, 25 bp, Homo sapien
gtaaagtgagttgtcgagcaatttc

SEQ ID NO: 5302352 - DNA, 25 bp, Homo sapien
aatgtaatattatgacctggtccat

SEQ ID NO: 5302353 - DNA, 25 bp, Homo sapien
gacctggtccattgtctcttgcaat

SEQ ID NO: 5302354 - DNA, 25 bp, Homo sapien
tattttagtgatggattcaacccat

SEQ ID NO: 5302355 - DNA, 25 bp, Homo sapien
taatattatgacctggtccattgtc

SEQ ID NO: 5302356 - DNA, 25 bp, Homo sapien
caaaatcatagaagtggtgctctac

SEQ ID NO: 5302357 - DNA, 25 bp, Homo sapien
tccattcgttgcaaaagatatgcat

SEQ ID NO: 5302358 - DNA, 25 bp, Homo sapien
cccagtgccgacatacatttaatac

SEQ ID NO: 5302359 - DNA, 25 bp, Homo sapien
tcttccattcgttgcaaaagatatg

SEQ ID NO: 5302360 - DNA, 25 bp, Homo sapien
tctctatagctatgcgatcagcttc

SEQ ID NO: 5302361 - DNA, 25 bp, Homo sapien
ttctgcactcaagggttgatctcca

SEQ ID NO: 5302362 - DNA, 25 bp, Homo sapien
ttcagttctgcactcaagggttgat

SEQ ID NO: 5302363 - DNA, 25 bp, Homo sapien
gcgatcagcttctgttggctcaggc

SEQ ID NO: 5302364 - DNA, 25 bp, Homo sapien
atgttgtaagaaatgtccgaacaaa

SEQ ID NO: 5302365 - DNA, 25 bp, Homo sapien
tgcaaaaggatctgtatgttgtaag

SEQ ID NO: 5302366 - DNA, 25 bp, Homo sapien
tgttgtaagaaatgtccgaacaaaa

SEQ ID NO: 5302367 - DNA, 25 bp, Homo sapien
gaggtttgcaaaaggatctgtatgt

SEQ ID NO: 5302368 - DNA, 25 bp, Homo sapien
cagtggccactagagagatgctgag

SEQ ID NO: 5302369 - DNA, 25 bp, Homo sapien
tacagagtactccaagcatccttga

SEQ ID NO: 5302370 - DNA, 25 bp, Homo sapien
ccttctgaggctagagtgggttact

SEQ ID NO: 5302371 - DNA, 25 bp, Homo sapien
caaatctatttgtaaggtgaggcta

SEQ ID NO: 5302372 - DNA, 25 bp, Homo sapien
cttcctgtatgctgtacagggtttc

SEQ ID NO: 5302373 - DNA, 25 bp, Homo sapien
taaacactcccataatcatgactgt

SEQ ID NO: 5302374 - DNA, 25 bp, Homo sapien
gaattaagagtagtcttgccaaaaa

SEQ ID NO: 5302375 - DNA, 25 bp, Homo sapien
cagctggcagtgaaataaacactcc

SEQ ID NO: 5302376 - DNA, 25 bp, Homo sapien
tgactctcaaatccctacgctaagg

SEQ ID NO: 5302377 - DNA, 25 bp, Homo sapien
tacgctaaggtttccaccatgttca

SEQ ID NO: 5302378 - DNA, 25 bp, Homo sapien
taaaaccatgttgcagagagagatg

SEQ ID NO: 5302379 - DNA, 25 bp, Homo sapien
cacaccatgtcgctaaccactggag

SEQ ID NO: 5302380 - DNA, 25 bp, Homo sapien
tggtgaagcacaactaaatcggcag

SEQ ID NO: 5302381 - DNA, 25 bp, Homo sapien
caaatgagtctaggaaccccaaaca

SEQ ID NO: 5302382 - DNA, 25 bp, Homo sapien
gatctgttaccattgtagtgaggcc

SEQ ID NO: 5302383 - DNA, 25 bp, Homo sapien
tgagggataaagttggctgacacca

SEQ ID NO: 5302384 - DNA, 25 bp, Homo sapien
ataaatttagccaagtgacctcatt

SEQ ID NO: 5302385 - DNA, 25 bp, Homo sapien
gcacaataaacccatgcaggaaaga

SEQ ID NO: 5302386 - DNA, 25 bp, Homo sapien
tttttagatcccaataatgatgatt

SEQ ID NO: 5302387 - DNA, 25 bp, Homo sapien
tctcatctataactgatggtaaggt

SEQ ID NO: 5302388 - DNA, 25 bp, Homo sapien
catgtttggctcctacacgtgtaag

SEQ ID NO: 5302389 - DNA, 25 bp, Homo sapien
gatattctgcattgctagcaccagg

SEQ ID NO: 5302390 - DNA, 25 bp, Homo sapien
tttgctgactataaaaccgacatgc

SEQ ID NO: 5302391 - DNA, 25 bp, Homo sapien
gtacatatggtacgtaagcctctct

SEQ ID NO: 5302392 - DNA, 25 bp, Homo sapien
tctgaacattaagcaaagctgttat

SEQ ID NO: 5302393 - DNA, 25 bp, Homo sapien
ataccactctgaacattaagcaaag

SEQ ID NO: 5302394 - DNA, 25 bp, Homo sapien
taagcaaagctgttattgcttgttt

SEQ ID NO: 5302395 - DNA, 25 bp, Homo sapien
ctcagtcttcgttttgcaagacttt

SEQ ID NO: 5302396 - DNA, 25 bp, Homo sapien
ctgtaaagccaaaatgacaaatctg

SEQ ID NO: 5302397 - DNA, 25 bp, Homo sapien
tgacaaatctgaaccagtagtacat

SEQ ID NO: 5302398 - DNA, 25 bp, Homo sapien
agccaaaatgacaaatctgaaccag

SEQ ID NO: 5302399 - DNA, 25 bp, Homo sapien
taaagccaaaatgacaaatctgaac

SEQ ID NO: 5302400 - DNA, 25 bp, Homo sapien
tttattgaaagcctaaatgccagac

SEQ ID NO: 5302401 - DNA, 25 bp, Homo sapien
gataatagggctccattcttcacag

SEQ ID NO: 5302402 - DNA, 25 bp, Homo sapien
gaaagcctaaatgccagacactgta

SEQ ID NO: 5302403 - DNA, 25 bp, Homo sapien
cactgtaataggtatgagaattcaa

SEQ ID NO: 5302404 - DNA, 25 bp, Homo sapien
cttcaaaagttcaaagtaatggaga

SEQ ID NO: 5302405 - DNA, 25 bp, Homo sapien
agtaatggagacagtggtaaacagg

SEQ ID NO: 5302406 - DNA, 25 bp, Homo sapien
gggtaaaacatattgaacagcttct

SEQ ID NO: 5302407 - DNA, 25 bp, Homo sapien
gcttctttgaaaccttcgcctattg

SEQ ID NO: 5302408 - DNA, 25 bp, Homo sapien
tgaaaaccaggtcgcaaaatatctc

SEQ ID NO: 5302409 - DNA, 25 bp, Homo sapien
tacgattcatatggatcaaatgcca

SEQ ID NO: 5302410 - DNA, 25 bp, Homo sapien
gataactgactaaggaaacgatcat

SEQ ID NO: 5302411 - DNA, 25 bp, Homo sapien
gactaaggaaacgatcatgaaaacc

SEQ ID NO: 5302412 - DNA, 25 bp, Homo sapien
tagagtattatcaacaaacatggcc

SEQ ID NO: 5302413 - DNA, 25 bp, Homo sapien
tctcagtggtggacatgtactttcg

SEQ ID NO: 5302414 - DNA, 25 bp, Homo sapien
tctagcaagaggaataggacatcta

SEQ ID NO: 5302415 - DNA, 25 bp, Homo sapien
tctaatggctcagttaaaaagacca

SEQ ID NO: 5302416 - DNA, 25 bp, Homo sapien
gcattaatagacaatgtgcaacggt

SEQ ID NO: 5302417 - DNA, 25 bp, Homo sapien
tgtgcaacggtccatttccagatct

SEQ ID NO: 5302418 - DNA, 25 bp, Homo sapien
actgatcattgcctcttccccgtaa

SEQ ID NO: 5302419 - DNA, 25 bp, Homo sapien
gacaatgtgcaacggtccatttcca

SEQ ID NO: 5302420 - DNA, 25 bp, Homo sapien
tttaaccaggtatgacccagtgtca

SEQ ID NO: 5302421 - DNA, 25 bp, Homo sapien
ctctatgtgttaacaaaccttccta

SEQ ID NO: 5302422 - DNA, 25 bp, Homo sapien
tttggcattatctaagcatcctttg

SEQ ID NO: 5302423 - DNA, 25 bp, Homo sapien
tgctcaggcttcatagaggttttga

SEQ ID NO: 5302424 - DNA, 25 bp, Homo sapien
cactggacccaacccaagattttct

SEQ ID NO: 5302425 - DNA, 25 bp, Homo sapien
tatgcttcttagtgggagacttaat

SEQ ID NO: 5302426 - DNA, 25 bp, Homo sapien
taaaatgactttgcgggttcaggct

SEQ ID NO: 5302427 - DNA, 25 bp, Homo sapien
tccaaaccagaacctgctcttaaaa

SEQ ID NO: 5302428 - DNA, 25 bp, Homo sapien
tataaatggatcatattccttcact

SEQ ID NO: 5302429 - DNA, 25 bp, Homo sapien
caagctcaatgctgtatcataatga

SEQ ID NO: 5302430 - DNA, 25 bp, Homo sapien
gctaacttattaggactgactcatg

SEQ ID NO: 5302431 - DNA, 25 bp, Homo sapien
ggtatctgaatcacccaggtcctgg

SEQ ID NO: 5302432 - DNA, 25 bp, Homo sapien
cagaatgactcttaatgctaactta

SEQ ID NO: 5302433 - DNA, 25 bp, Homo sapien
cagacttttcgggtatataattgaa

SEQ ID NO: 5302434 - DNA, 25 bp, Homo sapien
tatgcagacttttcgggtatataat

SEQ ID NO: 5302435 - DNA, 25 bp, Homo sapien
gtaggcttttatgcagacttttcgg

SEQ ID NO: 5302436 - DNA, 25 bp, Homo sapien
ttcgggtatataattgaagtactta

SEQ ID NO: 5302437 - DNA, 25 bp, Homo sapien
tgtatcttctatatggcccagtaac

SEQ ID NO: 5302438 - DNA, 25 bp, Homo sapien
catctgtcatttctactgtatcttc

SEQ ID NO: 5302439 - DNA, 25 bp, Homo sapien
tcaaagcagcttcctactagtggat

SEQ ID NO: 5302440 - DNA, 25 bp, Homo sapien
catgtatatctactatgcgactaaa

SEQ ID NO: 5302441 - DNA, 25 bp, Homo sapien
cttctgcaaaggtgtacaatttgca

SEQ ID NO: 5302442 - DNA, 25 bp, Homo sapien
ggtcagtggtcttgtaactttctgg

SEQ ID NO: 5302443 - DNA, 25 bp, Homo sapien
gaataaaggacaattcaagaattcc

SEQ ID NO: 5302444 - DNA, 25 bp, Homo sapien
aaaacacattaattcagtgaggctg

SEQ ID NO: 5302445 - DNA, 25 bp, Homo sapien
taaatacccagtaaagtcactctcc

SEQ ID NO: 5302446 - DNA, 25 bp, Homo sapien
catagcgtactagaagacagcagga

SEQ ID NO: 5302447 - DNA, 25 bp, Homo sapien
tctgcatacaatctgttgtgacaca

SEQ ID NO: 5302448 - DNA, 25 bp, Homo sapien
tttgcaaatctctaacatagcgtac

SEQ ID NO: 5302449 - DNA, 25 bp, Homo sapien
ccttctaaccatcggcacaatcaag

SEQ ID NO: 5302450 - DNA, 25 bp, Homo sapien
cagtaccttttcatcgtcttaagaa

SEQ ID NO: 5302451 - DNA, 25 bp, Homo sapien
ttactatgcctcactcccaggaaac

SEQ ID NO: 5302452 - DNA, 25 bp, Homo sapien
atatttctgagatgcacccatgctg

SEQ ID NO: 5302453 - DNA, 25 bp, Homo sapien
taagtttgttctcctgaggtggaag

SEQ ID NO: 5302454 - DNA, 25 bp, Homo sapien
tttgaattggagacaaagggctctc

SEQ ID NO: 5302455 - DNA, 25 bp, Homo sapien
ggtggaaggctcttcgtcagttaaa

SEQ ID NO: 5302456 - DNA, 25 bp, Homo sapien
tattgtcgaatttctgccataaatg

SEQ ID NO: 5302457 - DNA, 25 bp, Homo sapien
tggtggtcaattttataacctagga

SEQ ID NO: 5302458 - DNA, 25 bp, Homo sapien
tctaagactgctactatgtaaacag

SEQ ID NO: 5302459 - DNA, 25 bp, Homo sapien
tcagcacacattgccactttaatat

SEQ ID NO: 5302460 - DNA, 25 bp, Homo sapien
tttcataatgccgtatatttcttac

SEQ ID NO: 5302461 - DNA, 25 bp, Homo sapien
ttgggcatcagctattgcccattta

SEQ ID NO: 5302462 - DNA, 25 bp, Homo sapien
gggcatcagctattgcccatttatc

SEQ ID NO: 5302463 - DNA, 25 bp, Homo sapien
tgggcatcagctattgcccatttat

SEQ ID NO: 5302464 - DNA, 25 bp, Homo sapien
gtccaaatgtttgtgcccctcccaa

SEQ ID NO: 5302465 - DNA, 25 bp, Homo sapien
gaaataccgaatcctagtcaatgag

SEQ ID NO: 5302466 - DNA, 25 bp, Homo sapien
tgctgaaacctaaactccactgtgg

SEQ ID NO: 5302467 - DNA, 25 bp, Homo sapien
cattagggacacacaaaatacccca

SEQ ID NO: 5302468 - DNA, 25 bp, Homo sapien
catctgaagcacttcggggctgagc

SEQ ID NO: 5302469 - DNA, 25 bp, Homo sapien
ggctgagcttggcatagcatattta

SEQ ID NO: 5302470 - DNA, 25 bp, Homo sapien
taattcttcaacatactgaagagca

SEQ ID NO: 5302471 - DNA, 25 bp, Homo sapien
gaagagcatcatcattagactcgag

SEQ ID NO: 5302472 - DNA, 25 bp, Homo sapien
agcacacagtatggcctgtcctact

SEQ ID NO: 5302473 - DNA, 25 bp, Homo sapien
tggatgaaagtgcacagtactcact

SEQ ID NO: 5302474 - DNA, 25 bp, Homo sapien
cagagcacacagtatggcctgtcct

SEQ ID NO: 5302475 - DNA, 25 bp, Homo sapien
tcagagcacacagtatggcctgtcc

SEQ ID NO: 5302476 - DNA, 25 bp, Homo sapien
tatggtccttatactcttactgggt

SEQ ID NO: 5302477 - DNA, 25 bp, Homo sapien
gatagtgatgttccaactgggcagg

SEQ ID NO: 5302478 - DNA, 25 bp, Homo sapien
caccccatttaggaagactttcttg

SEQ ID NO: 5302479 - DNA, 25 bp, Homo sapien
tactagaccctctgttaggtattgg

SEQ ID NO: 5302480 - DNA, 25 bp, Homo sapien
gaaaataacacgtgatgccaactgc

SEQ ID NO: 5302481 - DNA, 25 bp, Homo sapien
gatagtgttacagccaaagtgctcc

SEQ ID NO: 5302482 - DNA, 25 bp, Homo sapien
ggttaccctgtcaaatcttacggca

SEQ ID NO: 5302483 - DNA, 25 bp, Homo sapien
gaagccatgtacagctgattcagag

SEQ ID NO: 5302484 - DNA, 25 bp, Homo sapien
taggtgcttatcactctgaggttaa

SEQ ID NO: 5302485 - DNA, 25 bp, Homo sapien
cattttgtctctagtaagttccagc

SEQ ID NO: 5302486 - DNA, 25 bp, Homo sapien
caagtgtattcaagaaccccttggg

SEQ ID NO: 5302487 - DNA, 25 bp, Homo sapien
ttcatatcccttgctagctaatggc

SEQ ID NO: 5302488 - DNA, 25 bp, Homo sapien
caaattagaatttgttggctatcaa

SEQ ID NO: 5302489 - DNA, 25 bp, Homo sapien
aaacttggaagaattgtgataggct

SEQ ID NO: 5302490 - DNA, 25 bp, Homo sapien
attagctgggtttgggtggtcccag

SEQ ID NO: 5302491 - DNA, 25 bp, Homo sapien
tgataggctagctaaaatacaacct

SEQ ID NO: 5302492 - DNA, 25 bp, Homo sapien
tttgcccataacctctaagcaggag

SEQ ID NO: 5302493 - DNA, 25 bp, Homo sapien
tgccaacagatagcaactgtgatcc

SEQ ID NO: 5302494 - DNA, 25 bp, Homo sapien
ggaatggcaattcacaatacatgtg

SEQ ID NO: 5302495 - DNA, 25 bp, Homo sapien
gtgtgtctactgtctatcattggca

SEQ ID NO: 5302496 - DNA, 25 bp, Homo sapien
aggattctgggcccgaccactagaa

SEQ ID NO: 5302497 - DNA, 25 bp, Homo sapien
tgggcccgaccactagaaattctac

SEQ ID NO: 5302498 - DNA, 25 bp, Homo sapien
cttaaaccatgcataacaataaact

SEQ ID NO: 5302499 - DNA, 25 bp, Homo sapien
cagtggttcttaaaccatgcataac

SEQ ID NO: 5302500 - DNA, 25 bp, Homo sapien
ggctcactgcacatactgcttgtct

SEQ ID NO: 5302501 - DNA, 25 bp, Homo sapien
gtcttgatgtttcttgcgcacccca

SEQ ID NO: 5302502 - DNA, 25 bp, Homo sapien
tgtctgctttctcctaccagaatgt

SEQ ID NO: 5302503 - DNA, 25 bp, Homo sapien
gaggctgtcctcgaccattattttt

SEQ ID NO: 5302504 - DNA, 25 bp, Homo sapien
cttgaaagataggcactattttccc

SEQ ID NO: 5302505 - DNA, 25 bp, Homo sapien
cttccaatgatcttgaaagataggc

SEQ ID NO: 5302506 - DNA, 25 bp, Homo sapien
tgatcttgaaagataggcactattt

SEQ ID NO: 5302507 - DNA, 25 bp, Homo sapien
ttccaatgatcttgaaagataggca

SEQ ID NO: 5302508 - DNA, 25 bp, Homo sapien
ggtagatgggtacaggtcaacctga

SEQ ID NO: 5302509 - DNA, 25 bp, Homo sapien
tatggtgtttgcatctacacagaga

SEQ ID NO: 5302510 - DNA, 25 bp, Homo sapien
tcctgagaatatctagagactccag

SEQ ID NO: 5302511 - DNA, 25 bp, Homo sapien
tttgagaaactacttgaggactggt

SEQ ID NO: 5302512 - DNA, 25 bp, Homo sapien
tatgtggagctatttggctacccaa

SEQ ID NO: 5302513 - DNA, 25 bp, Homo sapien
ctgagaagctagatgtttatgtgga

SEQ ID NO: 5302514 - DNA, 25 bp, Homo sapien
gagctatttggctacccaaattcct

SEQ ID NO: 5302515 - DNA, 25 bp, Homo sapien
tgtttatgtggagctatttggctac

SEQ ID NO: 5302516 - DNA, 25 bp, Homo sapien
taaccaatctctatgagggatggga

SEQ ID NO: 5302517 - DNA, 25 bp, Homo sapien
tccaacaatttaggcaccaaccatg

SEQ ID NO: 5302518 - DNA, 25 bp, Homo sapien
gatctgacaggagacaagcctacgg

SEQ ID NO: 5302519 - DNA, 25 bp, Homo sapien
taaaatccctaagagctacctatac

SEQ ID NO: 5302520 - DNA, 25 bp, Homo sapien
gcatttttggtagggatggagtttc

SEQ ID NO: 5302521 - DNA, 25 bp, Homo sapien
ctggagtacagcagcgccatctcag

SEQ ID NO: 5302522 - DNA, 25 bp, Homo sapien
ctgcctcccaggcttgggctcaagt

SEQ ID NO: 5302523 - DNA, 25 bp, Homo sapien
ctcattgcaacctctgcctcccagg

SEQ ID NO: 5302524 - DNA, 25 bp, Homo sapien
gaaaccttctaaaagcgtgtgctga

SEQ ID NO: 5302525 - DNA, 25 bp, Homo sapien
cagaattacagaatgggcagcttca

SEQ ID NO: 5302526 - DNA, 25 bp, Homo sapien
tacacggtcatacagtggaagaaac

SEQ ID NO: 5302527 - DNA, 25 bp, Homo sapien
tgtgctgacaaaactcccactgcta

SEQ ID NO: 5302528 - DNA, 25 bp, Homo sapien
gtgcaatagttgcacagctctgtaa

SEQ ID NO: 5302529 - DNA, 25 bp, Homo sapien
ctatttagtcgtagaaatgaagtac

SEQ ID NO: 5302530 - DNA, 25 bp, Homo sapien
tggatggcataccaaaagcccaggc

SEQ ID NO: 5302531 - DNA, 25 bp, Homo sapien
tgggaatgaaaatatgcagctattc

SEQ ID NO: 5302532 - DNA, 25 bp, Homo sapien
atcccagctactcgggaggctgagg

SEQ ID NO: 5302533 - DNA, 25 bp, Homo sapien
cagctactcgggaggctgaggcagg

SEQ ID NO: 5302534 - DNA, 25 bp, Homo sapien
ggcgtggtggcaggccccataatcc

SEQ ID NO: 5302535 - DNA, 25 bp, Homo sapien
cccagctactcgggaggctgaggca

SEQ ID NO: 5302536 - DNA, 25 bp, Homo sapien
ttgacatgtgtacattgctggtagg

SEQ ID NO: 5302537 - DNA, 25 bp, Homo sapien
agagaaattgacatgtgtacattgc

SEQ ID NO: 5302538 - DNA, 25 bp, Homo sapien
tcattactggttagagaaatacaaa

SEQ ID NO: 5302539 - DNA, 25 bp, Homo sapien
aaaggacaccaactaagatgggata

SEQ ID NO: 5302540 - DNA, 25 bp, Homo sapien
cctaattgatcatgagaacgagcct

SEQ ID NO: 5302541 - DNA, 25 bp, Homo sapien
ggataatagactgagtgctgcagca

SEQ ID NO: 5302542 - DNA, 25 bp, Homo sapien
gactaatacaatgacaaaggctccc

SEQ ID NO: 5302543 - DNA, 25 bp, Homo sapien
gttcccgggagacacatcatttttc

SEQ ID NO: 5302544 - DNA, 25 bp, Homo sapien
tgacctctcagactcaagcaatgct

SEQ ID NO: 5302545 - DNA, 25 bp, Homo sapien
gctcccacctcagcctcccaagcag

SEQ ID NO: 5302546 - DNA, 25 bp, Homo sapien
gcagccttgacctctcagactcaag

SEQ ID NO: 5302547 - DNA, 25 bp, Homo sapien
tgcaatagcacaatcacacctcact

SEQ ID NO: 5302548 - DNA, 25 bp, Homo sapien
caatagccagttggagaagttcact

SEQ ID NO: 5302549 - DNA, 25 bp, Homo sapien
tcactcagtgagttactagatcctg

SEQ ID NO: 5302550 - DNA, 25 bp, Homo sapien
taaaatgtgctgttactcccctact

SEQ ID NO: 5302551 - DNA, 25 bp, Homo sapien
tcttgactggactattaaactaggc

SEQ ID NO: 5302552 - DNA, 25 bp, Homo sapien
tccgtcttccggtttcaagctattc

SEQ ID NO: 5302553 - DNA, 25 bp, Homo sapien
gccactgcgcccggccctgtcattt

SEQ ID NO: 5302554 - DNA, 25 bp, Homo sapien
cctccgtcttccggtttcaagctat

SEQ ID NO: 5302555 - DNA, 25 bp, Homo sapien
cactgcgcccggccctgtcatttac

SEQ ID NO: 5302556 - DNA, 25 bp, Homo sapien
gataggacttagactcatagatgcg

SEQ ID NO: 5302557 - DNA, 25 bp, Homo sapien
cagatacagtgggacattccagcca

SEQ ID NO: 5302558 - DNA, 25 bp, Homo sapien
tattcaggaaaagtagcagtccgga

SEQ ID NO: 5302559 - DNA, 25 bp, Homo sapien
ctttttagcctgagtgtcaagggca

SEQ ID NO: 5302560 - DNA, 25 bp, Homo sapien
gaaatgaacatacaggctctacctg

SEQ ID NO: 5302561 - DNA, 25 bp, Homo sapien
gcctaccagatgtcaagcactataa

SEQ ID NO: 5302562 - DNA, 25 bp, Homo sapien
gactcaattagagaagtcggaggag

SEQ ID NO: 5302563 - DNA, 25 bp, Homo sapien
gcactttagcataggttgaactcaa

SEQ ID NO: 5302564 - DNA, 25 bp, Homo sapien
tcaagccactaaaaccagcgtactg

SEQ ID NO: 5302565 - DNA, 25 bp, Homo sapien
cagctccgggctaagaccaagaaga

SEQ ID NO: 5302566 - DNA, 25 bp, Homo sapien
cagcgtactggacacctaaaacggt

SEQ ID NO: 5302567 - DNA, 25 bp, Homo sapien
caagaagacggaaaagtggcctgct

SEQ ID NO: 5302568 - DNA, 25 bp, Homo sapien
cacccggtggatgtcaacaccgaga

SEQ ID NO: 5302569 - DNA, 25 bp, Homo sapien
gtggatgtcaacaccgagagccagc

SEQ ID NO: 5302570 - DNA, 25 bp, Homo sapien
cccacacacccggtggatgtcaaca

SEQ ID NO: 5302571 - DNA, 25 bp, Homo sapien
ctctcaggggttggattatccggat

SEQ ID NO: 5302572 - DNA, 25 bp, Homo sapien
ctgaaaaactcgtagggcagctgct

SEQ ID NO: 5302573 - DNA, 25 bp, Homo sapien
tttttcagcgcaggcaccagtagtc

SEQ ID NO: 5302574 - DNA, 25 bp, Homo sapien
ccacttgggcgcgttctcttcgctg

SEQ ID NO: 5302575 - DNA, 25 bp, Homo sapien
ctttttcagcgcaggcaccagtagt

SEQ ID NO: 5302576 - DNA, 25 bp, Homo sapien
ctcgcagcgcggaacagggccgcgg

SEQ ID NO: 5302577 - DNA, 25 bp, Homo sapien
ccagggagccgcgagagggcgagct

SEQ ID NO: 5302578 - DNA, 25 bp, Homo sapien
ggcgagctcgcagcgcggaacaggg

SEQ ID NO: 5302579 - DNA, 25 bp, Homo sapien
gcgagagggcgagctcgcagcgcgg

SEQ ID NO: 5302580 - DNA, 25 bp, Homo sapien
gacacaggtaccagccgtggagaac

SEQ ID NO: 5302581 - DNA, 25 bp, Homo sapien
gccacccacccgacacaggtaccag

SEQ ID NO: 5302582 - DNA, 25 bp, Homo sapien
caggtaccagccgtggagaacggac

SEQ ID NO: 5302583 - DNA, 25 bp, Homo sapien
ggggcgaggcccgcgcctggccacc

SEQ ID NO: 5302584 - DNA, 25 bp, Homo sapien
tgggggaggacgtgtggagggacgc

SEQ ID NO: 5302585 - DNA, 25 bp, Homo sapien
acgtgtggagggacgctccggccgc

SEQ ID NO: 5302586 - DNA, 25 bp, Homo sapien
gctccgcgtagttgggactccgaaa

SEQ ID NO: 5302587 - DNA, 25 bp, Homo sapien
ctccgaaacgcaagagccccgggcg

SEQ ID NO: 5302588 - DNA, 25 bp, Homo sapien
gaacacgaagataaggactgcccag

SEQ ID NO: 5302589 - DNA, 25 bp, Homo sapien
gctctgtcacgaaacctactgctca

SEQ ID NO: 5302590 - DNA, 25 bp, Homo sapien
cgaactgaacctgctcgctactgag

SEQ ID NO: 5302591 - DNA, 25 bp, Homo sapien
agaagtcgcaccctggcaaagtggg

SEQ ID NO: 5302592 - DNA, 25 bp, Homo sapien
ctcactcgggctaagaggttgggca

SEQ ID NO: 5302593 - DNA, 25 bp, Homo sapien
aaaagcgtacattcactcactcggg

SEQ ID NO: 5302594 - DNA, 25 bp, Homo sapien
gaaacatgggttacagcctgggcta

SEQ ID NO: 5302595 - DNA, 25 bp, Homo sapien
ttttcactagcatggccgtttgggc

SEQ ID NO: 5302596 - DNA, 25 bp, Homo sapien
actagttgtaatcaattagttgtat

SEQ ID NO: 5302597 - DNA, 25 bp, Homo sapien
atacaccactgcactcagaccagcc

SEQ ID NO: 5302598 - DNA, 25 bp, Homo sapien
tagttgtaatcaattagttgtatac

SEQ ID NO: 5302599 - DNA, 25 bp, Homo sapien
gtatacaccactgcactcagaccag

SEQ ID NO: 5302600 - DNA, 25 bp, Homo sapien
acaaagctgtcaacaaactccaagg

SEQ ID NO: 5302601 - DNA, 25 bp, Homo sapien
tacaaagctgtcaacaaactccaag

SEQ ID NO: 5302602 - DNA, 25 bp, Homo sapien
caaagctgtcaacaaactccaaggt

SEQ ID NO: 5302603 - DNA, 25 bp, Homo sapien
ttacaaagctgtcaacaaactccaa

SEQ ID NO: 5302604 - DNA, 25 bp, Homo sapien
tgtgtccaacttagcggtgtctgtt

SEQ ID NO: 5302605 - DNA, 25 bp, Homo sapien
tccaacttagcggtgtctgttgaca

SEQ ID NO: 5302606 - DNA, 25 bp, Homo sapien
attcttagttgtgtccaacttagcg

SEQ ID NO: 5302607 - DNA, 25 bp, Homo sapien
tagttgtgtccaacttagcggtgtc

SEQ ID NO: 5302608 - DNA, 25 bp, Homo sapien
tattcctggaatgatacatcctctg

SEQ ID NO: 5302609 - DNA, 25 bp, Homo sapien
cctagtgagttggtctttgtagcca

SEQ ID NO: 5302610 - DNA, 25 bp, Homo sapien
gaaccaaggaataggctgtaccgcc

SEQ ID NO: 5302611 - DNA, 25 bp, Homo sapien
aaactagtagtagtccctgggatca

SEQ ID NO: 5302612 - DNA, 25 bp, Homo sapien
gtagagcgcggtccctagccaggcc

SEQ ID NO: 5302613 - DNA, 25 bp, Homo sapien
aagatgcaggactagtttcttccct

SEQ ID NO: 5302614 - DNA, 25 bp, Homo sapien
ggtggaaagatgcaggactagtttc

SEQ ID NO: 5302615 - DNA, 25 bp, Homo sapien
ttcttccctgtgaagcgggtagagc

SEQ ID NO: 5302616 - DNA, 25 bp, Homo sapien
catgatggcgcagtatttggacagc

SEQ ID NO: 5302617 - DNA, 25 bp, Homo sapien
gtatttggacagcatcaggaaggaa

SEQ ID NO: 5302618 - DNA, 25 bp, Homo sapien
cagtatttggacagcatcaggaagg

SEQ ID NO: 5302619 - DNA, 25 bp, Homo sapien
tggcgcagtatttggacagcatcag

SEQ ID NO: 5302620 - DNA, 25 bp, Homo sapien
tcctggtatgagaggcaacagttga

SEQ ID NO: 5302621 - DNA, 25 bp, Homo sapien
tggaaggtgatcaaattttaactgg

SEQ ID NO: 5302622 - DNA, 25 bp, Homo sapien
atgtggcttcctggtatgagaggca

SEQ ID NO: 5302623 - DNA, 25 bp, Homo sapien
gatcaaattttaactggaggacttg

SEQ ID NO: 5302624 - DNA, 25 bp, Homo sapien
gaacatgggctgatctctgtaaatg

SEQ ID NO: 5302625 - DNA, 25 bp, Homo sapien
taggtgcatgctgccctttgtgttt

SEQ ID NO: 5302626 - DNA, 25 bp, Homo sapien
tacagaggatggagaacatgggctg

SEQ ID NO: 5302627 - DNA, 25 bp, Homo sapien
tctgtaaatgagattctctaggtgc

SEQ ID NO: 5302628 - DNA, 25 bp, Homo sapien
tgggttgcaggcattgaaggaaggg

SEQ ID NO: 5302629 - DNA, 25 bp, Homo sapien
gggttgcaggcattgaaggaagggt

SEQ ID NO: 5302630 - DNA, 25 bp, Homo sapien
gttgcaggcattgaaggaagggtag

SEQ ID NO: 5302631 - DNA, 25 bp, Homo sapien
ggttgcaggcattgaaggaagggta

SEQ ID NO: 5302632 - DNA, 25 bp, Homo sapien
aatgtttgtcataacagtcaccata

SEQ ID NO: 5302633 - DNA, 25 bp, Homo sapien
ttctgcaatattggcccattgggta

SEQ ID NO: 5302634 - DNA, 25 bp, Homo sapien
tgggtagaatttggttcccagatgt

SEQ ID NO: 5302635 - DNA, 25 bp, Homo sapien
cccagatgtctgggtttcattcctt

SEQ ID NO: 5302636 - DNA, 25 bp, Homo sapien
gatcttggttttgagaaaaagccta

SEQ ID NO: 5302637 - DNA, 25 bp, Homo sapien
agatcttggttttgagaaaaagcct

SEQ ID NO: 5302638 - DNA, 25 bp, Homo sapien
cttggtgtccaccttgtctcacttt

SEQ ID NO: 5302639 - DNA, 25 bp, Homo sapien
tagcactttaacttttgagcggaag

SEQ ID NO: 5302640 - DNA, 25 bp, Homo sapien
atttattaagctagacaaatacaac

SEQ ID NO: 5302641 - DNA, 25 bp, Homo sapien
tacaactacaccagtacaaatgaaa

SEQ ID NO: 5302642 - DNA, 25 bp, Homo sapien
tcttccttcattacgtgcttttctt

SEQ ID NO: 5302643 - DNA, 25 bp, Homo sapien
gaatcaaagtaggagctctccagga

SEQ ID NO: 5302644 - DNA, 25 bp, Homo sapien
caggttaatctgtcatctggattca

SEQ ID NO: 5302645 - DNA, 25 bp, Homo sapien
aaaagaatcaaagtaggagctctcc

SEQ ID NO: 5302646 - DNA, 25 bp, Homo sapien
aaggcaaatgccaccatgcctgaat

SEQ ID NO: 5302647 - DNA, 25 bp, Homo sapien
caaatgccaccatgcctgaataatt

SEQ ID NO: 5302648 - DNA, 25 bp, Homo sapien
ggcaaatgccaccatgcctgaataa

SEQ ID NO: 5302649 - DNA, 25 bp, Homo sapien
atcatggctcactgcggccttcagc

SEQ ID NO: 5302650 - DNA, 25 bp, Homo sapien
gcctgcctggattaataactttctg

SEQ ID NO: 5302651 - DNA, 25 bp, Homo sapien
gaagacactgctaatgctgagctct

SEQ ID NO: 5302652 - DNA, 25 bp, Homo sapien
taattctgaagcattgagatgagct

SEQ ID NO: 5302653 - DNA, 25 bp, Homo sapien
tgagctgagtagaattgaggcttct

SEQ ID NO: 5302654 - DNA, 25 bp, Homo sapien
gagaaccactcgaacctggttggcg

SEQ ID NO: 5302655 - DNA, 25 bp, Homo sapien
gaaccactcgaacctggttggcgga

SEQ ID NO: 5302656 - DNA, 25 bp, Homo sapien
agaaccactcgaacctggttggcgg

SEQ ID NO: 5302657 - DNA, 25 bp, Homo sapien
aaccactcgaacctggttggcggag

SEQ ID NO: 5302658 - DNA, 25 bp, Homo sapien
acatctgagaacttttcctcaagag

SEQ ID NO: 5302659 - DNA, 25 bp, Homo sapien
cttcatgaagttcagagccacagga

SEQ ID NO: 5302660 - DNA, 25 bp, Homo sapien
ctgagaacttttcctcaagagtttc

SEQ ID NO: 5302661 - DNA, 25 bp, Homo sapien
catctgagaacttttcctcaagagt

SEQ ID NO: 5302662 - DNA, 25 bp, Homo sapien
tttaaagattgattgatgtcttggg

SEQ ID NO: 5302663 - DNA, 25 bp, Homo sapien
tgatgccatggaaaaacccgttact

SEQ ID NO: 5302664 - DNA, 25 bp, Homo sapien
gattgattgatgtcttgggattaat

SEQ ID NO: 5302665 - DNA, 25 bp, Homo sapien
gtatactgatgccatggaaaaaccc

SEQ ID NO: 5302666 - DNA, 25 bp, Homo sapien
ccagcagccatgctgccaggagagc

SEQ ID NO: 5302667 - DNA, 25 bp, Homo sapien
gaactgtccagcagccatgctgcca

SEQ ID NO: 5302668 - DNA, 25 bp, Homo sapien
cagggaactgtccagcagccatgct

SEQ ID NO: 5302669 - DNA, 25 bp, Homo sapien
tgtccagcagccatgctgccaggag

SEQ ID NO: 5302670 - DNA, 25 bp, Homo sapien
tcagcaactctgttgccataaaatg

SEQ ID NO: 5302671 - DNA, 25 bp, Homo sapien
gcaactctgttgccataaaatgcaa

SEQ ID NO: 5302672 - DNA, 25 bp, Homo sapien
acaattcagcaactctgttgccata

SEQ ID NO: 5302673 - DNA, 25 bp, Homo sapien
ctataacaattcagcaactctgttg

SEQ ID NO: 5302674 - DNA, 25 bp, Homo sapien
gagtatctcccacaagaagttcagg

SEQ ID NO: 5302675 - DNA, 25 bp, Homo sapien
gattatcagataaagttggtccaca

SEQ ID NO: 5302676 - DNA, 25 bp, Homo sapien
ggagctcggtaccatctcgtagcta

SEQ ID NO: 5302677 - DNA, 25 bp, Homo sapien
tatcgactgaagaaccatactgagt

SEQ ID NO: 5302678 - DNA, 25 bp, Homo sapien
aacgatcaggagctgtacaaatgca

SEQ ID NO: 5302679 - DNA, 25 bp, Homo sapien
ctgcctccaagtgggtggaagccaa

SEQ ID NO: 5302680 - DNA, 25 bp, Homo sapien
ttagtaaagtcgtcaggtagcccca

SEQ ID NO: 5302681 - DNA, 25 bp, Homo sapien
ggaacaattggaaagcagcccgact

SEQ ID NO: 5302682 - DNA, 25 bp, Homo sapien
gtgcaaacccgaagtcacaaatctt

SEQ ID NO: 5302683 - DNA, 25 bp, Homo sapien
tccttgcttagttattagaatattt

SEQ ID NO: 5302684 - DNA, 25 bp, Homo sapien
tcagaatttgtgcaaacccgaagtc

SEQ ID NO: 5302685 - DNA, 25 bp, Homo sapien
atcttgattattccttgcttagtta

SEQ ID NO: 5302686 - DNA, 25 bp, Homo sapien
ctgtaagatcattatttgattattt

SEQ ID NO: 5302687 - DNA, 25 bp, Homo sapien
ggcccacgatgctgtcagaatccat

SEQ ID NO: 5302688 - DNA, 25 bp, Homo sapien
cctggaacgatcagcaacactcctg

SEQ ID NO: 5302689 - DNA, 25 bp, Homo sapien
cggagctaacctggaacgatcagca

SEQ ID NO: 5302690 - DNA, 25 bp, Homo sapien
cctgagacggcccacgatgctgtca

SEQ ID NO: 5302691 - DNA, 25 bp, Homo sapien
gccataatacgcttttgatcactcc

SEQ ID NO: 5302692 - DNA, 25 bp, Homo sapien
aattaagagcttgaagtgtttgcca

SEQ ID NO: 5302693 - DNA, 25 bp, Homo sapien
acgcttttgatcactccatcagcaa

SEQ ID NO: 5302694 - DNA, 25 bp, Homo sapien
agtgtttgccataatacgcttttga

SEQ ID NO: 5302695 - DNA, 25 bp, Homo sapien
gatgttcaagtcaagcaaactggtg

SEQ ID NO: 5302696 - DNA, 25 bp, Homo sapien
tatagaatggctgaacatatctgtc

SEQ ID NO: 5302697 - DNA, 25 bp, Homo sapien
tatagacaggaaagcttaggataca

SEQ ID NO: 5302698 - DNA, 25 bp, Homo sapien
catacaacatcctatttagtgcagg

SEQ ID NO: 5302699 - DNA, 25 bp, Homo sapien
ggttctcttagattttgtagatcag

SEQ ID NO: 5302700 - DNA, 25 bp, Homo sapien
taatttttgcatgtggaatctgtcg

SEQ ID NO: 5302701 - DNA, 25 bp, Homo sapien
ataactctttaggtggttctcttag

SEQ ID NO: 5302702 - DNA, 25 bp, Homo sapien
tgcattatagtggtgacagctgaca

SEQ ID NO: 5302703 - DNA, 25 bp, Homo sapien
catttaaaagtgtatgatcacagta

SEQ ID NO: 5302704 - DNA, 25 bp, Homo sapien
aaaagtgtatgatcacagtattcaa

SEQ ID NO: 5302705 - DNA, 25 bp, Homo sapien
ctgaacacctcgatgaggttcacaa

SEQ ID NO: 5302706 - DNA, 25 bp, Homo sapien
aacacctcgatgaggttcacaagat

SEQ ID NO: 5302707 - DNA, 25 bp, Homo sapien
agctactacttgtccagaggttttg

SEQ ID NO: 5302708 - DNA, 25 bp, Homo sapien
aacatacgtatttctcttagtgcta

SEQ ID NO: 5302709 - DNA, 25 bp, Homo sapien
cttcaacatacgtatttctcttagt

SEQ ID NO: 5302710 - DNA, 25 bp, Homo sapien
ttttaacagctactacttgtccaga

SEQ ID NO: 5302711 - DNA, 25 bp, Homo sapien
tgcatttgaatacaaccccataaga

SEQ ID NO: 5302712 - DNA, 25 bp, Homo sapien
gcatttgaatacaaccccataagac

SEQ ID NO: 5302713 - DNA, 25 bp, Homo sapien
catttgaatacaaccccataagacc

SEQ ID NO: 5302714 - DNA, 25 bp, Homo sapien
tgaatacaaccccataagacccttc

SEQ ID NO: 5302715 - DNA, 25 bp, Homo sapien
gaagcttcgagcagcgccgaacagc

SEQ ID NO: 5302716 - DNA, 25 bp, Homo sapien
cacccacagggcgacggtgacgaag

SEQ ID NO: 5302717 - DNA, 25 bp, Homo sapien
agcgacttcggagccagcggaaccg

SEQ ID NO: 5302718 - DNA, 25 bp, Homo sapien
aggaggcgccgtgtacccagcgact

SEQ ID NO: 5302719 - DNA, 25 bp, Homo sapien
ctagctgcttctctcataaggaggc

SEQ ID NO: 5302720 - DNA, 25 bp, Homo sapien
tgtacaaatccatcaacccatttat

SEQ ID NO: 5302721 - DNA, 25 bp, Homo sapien
ctcataaggaggctcttcacaacca

SEQ ID NO: 5302722 - DNA, 25 bp, Homo sapien
tatcttcatgatacttgctctccag

SEQ ID NO: 5302723 - DNA, 25 bp, Homo sapien
taagttcctgtgatgtgtagtaacc

SEQ ID NO: 5302724 - DNA, 25 bp, Homo sapien
caagcatccattaatgttgcagtgg

SEQ ID NO: 5302725 - DNA, 25 bp, Homo sapien
catggtaccgctattctgtgattca

SEQ ID NO: 5302726 - DNA, 25 bp, Homo sapien
tataccaaaaagagccaaaagtgtg

SEQ ID NO: 5302727 - DNA, 25 bp, Homo sapien
tggggttatcagttggcctactttc

SEQ ID NO: 5302728 - DNA, 25 bp, Homo sapien
tgtggggttatcagttggcctactt

SEQ ID NO: 5302729 - DNA, 25 bp, Homo sapien
tgctgtggggttatcagttggccta

SEQ ID NO: 5302730 - DNA, 25 bp, Homo sapien
atttgctgtggggttatcagttggc

SEQ ID NO: 5302731 - DNA, 25 bp, Homo sapien
tgctcatttgatcgtgggcagaaat

SEQ ID NO: 5302732 - DNA, 25 bp, Homo sapien
tgattacagggccagttctagctct

SEQ ID NO: 5302733 - DNA, 25 bp, Homo sapien
ctaggccagtgttcttctaagagtc

SEQ ID NO: 5302734 - DNA, 25 bp, Homo sapien
caatatgtgcctctataaatgctgc

SEQ ID NO: 5302735 - DNA, 25 bp, Homo sapien
cctgaaaattcttgtgctatctgaa

SEQ ID NO: 5302736 - DNA, 25 bp, Homo sapien
atccaagcagcctgaaaattcttgt

SEQ ID NO: 5302737 - DNA, 25 bp, Homo sapien
gcagcctgaaaattcttgtgctatc

SEQ ID NO: 5302738 - DNA, 25 bp, Homo sapien
caagcagcctgaaaattcttgtgct

SEQ ID NO: 5302739 - DNA, 25 bp, Homo sapien
tagaaagtgtgagcccacttgtggg

SEQ ID NO: 5302740 - DNA, 25 bp, Homo sapien
tgttgtaacccagcatacctgcagg

SEQ ID NO: 5302741 - DNA, 25 bp, Homo sapien
ttagaaacatcgtagcagccacctt

SEQ ID NO: 5302742 - DNA, 25 bp, Homo sapien
gggtttgcctactagaagaagctaa

SEQ ID NO: 5302743 - DNA, 25 bp, Homo sapien
ctcattagatctaaaacttctacct

SEQ ID NO: 5302744 - DNA, 25 bp, Homo sapien
taaaacttctaccttgcattccatg

SEQ ID NO: 5302745 - DNA, 25 bp, Homo sapien
gatctaaaacttctaccttgcattc

SEQ ID NO: 5302746 - DNA, 25 bp, Homo sapien
agaaagctagcacactgtcttgtag

SEQ ID NO: 5302747 - DNA, 25 bp, Homo sapien
agccactgtgttcggcctgttttgg

SEQ ID NO: 5302748 - DNA, 25 bp, Homo sapien
aaaacaaatacagctggcatcccct

SEQ ID NO: 5302749 - DNA, 25 bp, Homo sapien
gcacaaaaatatacgtgtatccacc

SEQ ID NO: 5302750 - DNA, 25 bp, Homo sapien
aaagtgccagggttaaagccatgag

SEQ ID NO: 5302751 - DNA, 25 bp, Homo sapien
agtctttctacccatggacatgatg

SEQ ID NO: 5302752 - DNA, 25 bp, Homo sapien
taagagcagcttatcaagtggcaca

SEQ ID NO: 5302753 - DNA, 25 bp, Homo sapien
tgttgggattcttactgcagatcca

SEQ ID NO: 5302754 - DNA, 25 bp, Homo sapien
cctgtggattaactgaagaactggc

SEQ ID NO: 5302755 - DNA, 25 bp, Homo sapien
gctatgtctttgaaagcggattcca

SEQ ID NO: 5302756 - DNA, 25 bp, Homo sapien
gcccagcaggcctgttagcttcaga

SEQ ID NO: 5302757 - DNA, 25 bp, Homo sapien
gatcttgctttttgaccctggctat

SEQ ID NO: 5302758 - DNA, 25 bp, Homo sapien
gattatcaggtaccacaagcaatga

SEQ ID NO: 5302759 - DNA, 25 bp, Homo sapien
attgattcaatctggaaatcaaagg

SEQ ID NO: 5302760 - DNA, 25 bp, Homo sapien
gatgacaatttcctgctagatttta

SEQ ID NO: 5302761 - DNA, 25 bp, Homo sapien
ctattgattcaatctggaaatcaaa

SEQ ID NO: 5302762 - DNA, 25 bp, Homo sapien
aatcaaaggtgagttctgatgacaa

SEQ ID NO: 5302763 - DNA, 25 bp, Homo sapien
catacaaggatggtatctctctcca

SEQ ID NO: 5302764 - DNA, 25 bp, Homo sapien
agtccaagcatacaaggatggtatc

SEQ ID NO: 5302765 - DNA, 25 bp, Homo sapien
caagcatacaaggatggtatctctc

SEQ ID NO: 5302766 - DNA, 25 bp, Homo sapien
acatgagtaacatttgtctgtgggg

SEQ ID NO: 5302767 - DNA, 25 bp, Homo sapien
tacgggtttcctatacacagtgtcc

SEQ ID NO: 5302768 - DNA, 25 bp, Homo sapien
caatacccctagtgaagtgatggaa

SEQ ID NO: 5302769 - DNA, 25 bp, Homo sapien
tgtgctctcagtatcatgttttggc

SEQ ID NO: 5302770 - DNA, 25 bp, Homo sapien
aatgctcaagtctggtaattgctgc

SEQ ID NO: 5302771 - DNA, 25 bp, Homo sapien
gaccgtctcaaatcgaaccacttgg

SEQ ID NO: 5302772 - DNA, 25 bp, Homo sapien
caacacaaactaaagggtactcctg

SEQ ID NO: 5302773 - DNA, 25 bp, Homo sapien
taagtggacatggtataggaaaatc

SEQ ID NO: 5302774 - DNA, 25 bp, Homo sapien
ggtagaatttggattgaccgtctca

SEQ ID NO: 5302775 - DNA, 25 bp, Homo sapien
taattctatgagaatactataaaac

SEQ ID NO: 5302776 - DNA, 25 bp, Homo sapien
ctaaattatggactctcttttataa

SEQ ID NO: 5302777 - DNA, 25 bp, Homo sapien
gaatttataagtcacgtgtccaacc

SEQ ID NO: 5302778 - DNA, 25 bp, Homo sapien
ctggaagggaatttataagtcacgt

SEQ ID NO: 5302779 - DNA, 25 bp, Homo sapien
taagaggcctcattagagccaggcc

SEQ ID NO: 5302780 - DNA, 25 bp, Homo sapien
cgcccggcccatatagaagtcttga

SEQ ID NO: 5302781 - DNA, 25 bp, Homo sapien
cagagagacacggaaaggaaagcta

SEQ ID NO: 5302782 - DNA, 25 bp, Homo sapien
tgtactacaggttcactatctcaga

SEQ ID NO: 5302783 - DNA, 25 bp, Homo sapien
ccattctaatagaacaatgctagtc

SEQ ID NO: 5302784 - DNA, 25 bp, Homo sapien
taggtatttatggcccgtgtaagga

SEQ ID NO: 5302785 - DNA, 25 bp, Homo sapien
aatgctagtctgaagtgctccacat

SEQ ID NO: 5302786 - DNA, 25 bp, Homo sapien
attggttcaacccattctaatagaa

SEQ ID NO: 5302787 - DNA, 25 bp, Homo sapien
gtttcagggatttttgctgatacag

SEQ ID NO: 5302788 - DNA, 25 bp, Homo sapien
tttcagggatttttgctgatacaga

SEQ ID NO: 5302789 - DNA, 25 bp, Homo sapien
tatgtaggcaaacttagtatatgaa

SEQ ID NO: 5302790 - DNA, 25 bp, Homo sapien
aagtgagtacgtaatatatgtaggc

SEQ ID NO: 5302791 - DNA, 25 bp, Homo sapien
tatagatcagtgcacaaaggatgag

SEQ ID NO: 5302792 - DNA, 25 bp, Homo sapien
aaactggtgctgacatactagctca

SEQ ID NO: 5302793 - DNA, 25 bp, Homo sapien
tgaacttgtgtcctagctcccaaag

SEQ ID NO: 5302794 - DNA, 25 bp, Homo sapien
gaaacactgaacgactacaatggca

SEQ ID NO: 5302795 - DNA, 25 bp, Homo sapien
cccaggaggattaactgccaagttc

SEQ ID NO: 5302796 - DNA, 25 bp, Homo sapien
gaaccaagctcctgacagatttcgg

SEQ ID NO: 5302797 - DNA, 25 bp, Homo sapien
tatccaaggtcccatatctagtaag

SEQ ID NO: 5302798 - DNA, 25 bp, Homo sapien
tattcagcgtaggtaaaatcatacc

SEQ ID NO: 5302799 - DNA, 25 bp, Homo sapien
tggaggtgaaatacccttagagctg

SEQ ID NO: 5302800 - DNA, 25 bp, Homo sapien
aacagcagattctcaaggtactcga

SEQ ID NO: 5302801 - DNA, 25 bp, Homo sapien
gcataatcaaaaagccctggtaaat

SEQ ID NO: 5302802 - DNA, 25 bp, Homo sapien
gtttgtgtgctggaatagcaacagg

SEQ ID NO: 5302803 - DNA, 25 bp, Homo sapien
tagcaacaggtaacttttgcatttg

SEQ ID NO: 5302804 - DNA, 25 bp, Homo sapien
ggcagtattctgtcagggagtttgt

SEQ ID NO: 5302805 - DNA, 25 bp, Homo sapien
accatgtacaccttcgagggaatag

SEQ ID NO: 5302806 - DNA, 25 bp, Homo sapien
gatattgatagcaagcaattgttca

SEQ ID NO: 5302807 - DNA, 25 bp, Homo sapien
cagatattgatagcaagcaattgtt

SEQ ID NO: 5302808 - DNA, 25 bp, Homo sapien
caattgttcattacatacaaccatg

SEQ ID NO: 5302809 - DNA, 25 bp, Homo sapien
gagagccactgatgtacataattag

SEQ ID NO: 5302810 - DNA, 25 bp, Homo sapien
taaggacattactttatggaaacac

SEQ ID NO: 5302811 - DNA, 25 bp, Homo sapien
gaaacacatcaaggcctctaaggac

SEQ ID NO: 5302812 - DNA, 25 bp, Homo sapien
tggcaattcctacaactaagttact

SEQ ID NO: 5302813 - DNA, 25 bp, Homo sapien
aagtatctgatactacatcgatggt

SEQ ID NO: 5302814 - DNA, 25 bp, Homo sapien
taattcagtgttgaactgggttttc

SEQ ID NO: 5302815 - DNA, 25 bp, Homo sapien
tcagtacgtgttatcaaagtagcaa

SEQ ID NO: 5302816 - DNA, 25 bp, Homo sapien
attccagaccacatatcagtacgtg

SEQ ID NO: 5302817 - DNA, 25 bp, Homo sapien
gagttaggttctaggtgaaatgatc

SEQ ID NO: 5302818 - DNA, 25 bp, Homo sapien
gccatcgcgcctgaccctgaatttt

SEQ ID NO: 5302819 - DNA, 25 bp, Homo sapien
ttaggttctaggtgaaatgatcagt

SEQ ID NO: 5302820 - DNA, 25 bp, Homo sapien
gagccatcgcgcctgaccctgaatt

SEQ ID NO: 5302821 - DNA, 25 bp, Homo sapien
tcatctctcaccgtactgcaaacag

SEQ ID NO: 5302822 - DNA, 25 bp, Homo sapien
taaaactgatggtgtaatggctgca

SEQ ID NO: 5302823 - DNA, 25 bp, Homo sapien
tctgtactccagtcaaatgcccagt

SEQ ID NO: 5302824 - DNA, 25 bp, Homo sapien
gaatgaccactaatgattacggagg

SEQ ID NO: 5302825 - DNA, 25 bp, Homo sapien
aagttcattaagattgagggtataa

SEQ ID NO: 5302826 - DNA, 25 bp, Homo sapien
aatcccttcttcggcaccaaatatc

SEQ ID NO: 5302827 - DNA, 25 bp, Homo sapien
cttcttcggcaccaaatatcaagta

SEQ ID NO: 5302828 - DNA, 25 bp, Homo sapien
tcccttcttcggcaccaaatatcaa

SEQ ID NO: 5302829 - DNA, 25 bp, Homo sapien
ggctaaactgaagtacgctgagaac

SEQ ID NO: 5302830 - DNA, 25 bp, Homo sapien
taagagcattcctaaagtgcccaga

SEQ ID NO: 5302831 - DNA, 25 bp, Homo sapien
tataaacaatgaacctctctgagtg

SEQ ID NO: 5302832 - DNA, 25 bp, Homo sapien
actgaccctttctagcaccaattgg

SEQ ID NO: 5302833 - DNA, 25 bp, Homo sapien
ctgggtttatccatgatgatgcaca

SEQ ID NO: 5302834 - DNA, 25 bp, Homo sapien
gcactttaggtgttggaggaagacc

SEQ ID NO: 5302835 - DNA, 25 bp, Homo sapien
atatttttgaggatgcgcacatctt

SEQ ID NO: 5302836 - DNA, 25 bp, Homo sapien
gcgcacatcttattattgccaataa

SEQ ID NO: 5302837 - DNA, 25 bp, Homo sapien
aattaaaatgacatactttgtagat

SEQ ID NO: 5302838 - DNA, 25 bp, Homo sapien
gaggatgcgcacatcttattattgc

SEQ ID NO: 5302839 - DNA, 25 bp, Homo sapien
gatgtgacggctgtaaataatttca

SEQ ID NO: 5302840 - DNA, 25 bp, Homo sapien
gtaagcatgcttcaatatatcactg

SEQ ID NO: 5302841 - DNA, 25 bp, Homo sapien
tatcctatgatagagccatggacat

SEQ ID NO: 5302842 - DNA, 25 bp, Homo sapien
tgtgttacagtcactcagctgcatt

SEQ ID NO: 5302843 - DNA, 25 bp, Homo sapien
tctgttgttgacataatgagccatc

SEQ ID NO: 5302844 - DNA, 25 bp, Homo sapien
tgaaaggtttgtgcctctatgttca

SEQ ID NO: 5302845 - DNA, 25 bp, Homo sapien
ggtttgtgcctctatgttcattctg

SEQ ID NO: 5302846 - DNA, 25 bp, Homo sapien
tctcgttcaccatttaactggaagg

SEQ ID NO: 5302847 - DNA, 25 bp, Homo sapien
tctcagactgtgtcatagggaatcc

SEQ ID NO: 5302848 - DNA, 25 bp, Homo sapien
taaacacagaggagtctttacagtg

SEQ ID NO: 5302849 - DNA, 25 bp, Homo sapien
aatttgcattgtttccacaccgtag

SEQ ID NO: 5302850 - DNA, 25 bp, Homo sapien
tctccccatagtatgaaaacctggt

SEQ ID NO: 5302851 - DNA, 25 bp, Homo sapien
acatgggacatctcttgattgttcc

SEQ ID NO: 5302852 - DNA, 25 bp, Homo sapien
tctaggtggaacttgggatggcttt

SEQ ID NO: 5302853 - DNA, 25 bp, Homo sapien
tctgggaggtggtggtctaggtgga

SEQ ID NO: 5302854 - DNA, 25 bp, Homo sapien
ttgctgggctccctgacatgggaca

SEQ ID NO: 5302855 - DNA, 25 bp, Homo sapien
tggcaaaggaggtggaatttttgct

SEQ ID NO: 5302856 - DNA, 25 bp, Homo sapien
tggaatttttgctttcagagttgag

SEQ ID NO: 5302857 - DNA, 25 bp, Homo sapien
ctttggtggcaaaggaggtggaatt

SEQ ID NO: 5302858 - DNA, 25 bp, Homo sapien
ggtggaatttttgctttcagagttg

SEQ ID NO: 5302859 - DNA, 25 bp, Homo sapien
atcttctaaatgtgcgacgtgtcct

SEQ ID NO: 5302860 - DNA, 25 bp, Homo sapien
tgatgcaattcttcttcaacagact

SEQ ID NO: 5302861 - DNA, 25 bp, Homo sapien
gatgcaattcttcttcaacagactt

SEQ ID NO: 5302862 - DNA, 25 bp, Homo sapien
gctgatgcaattcttcttcaacaga

SEQ ID NO: 5302863 - DNA, 25 bp, Homo sapien
cgctgatgcaattcttcttcaacag

SEQ ID NO: 5302864 - DNA, 25 bp, Homo sapien
atgttggatctctctgcagaagcat

SEQ ID NO: 5302865 - DNA, 25 bp, Homo sapien
catgttggatctctctgcagaagca

SEQ ID NO: 5302866 - DNA, 25 bp, Homo sapien
ctttttaccgcaagttcatgcagca

SEQ ID NO: 5302867 - DNA, 25 bp, Homo sapien
taagcctgtatcagaccaggtcgag

SEQ ID NO: 5302868 - DNA, 25 bp, Homo sapien
tacactcttcgagcataaagactcg

SEQ ID NO: 5302869 - DNA, 25 bp, Homo sapien
ttctccagtggtgcacgggcaaaca

SEQ ID NO: 5302870 - DNA, 25 bp, Homo sapien
taactattacttattagaagagaat

SEQ ID NO: 5302871 - DNA, 25 bp, Homo sapien
tagaagagaatttaccttcaacatt

SEQ ID NO: 5302872 - DNA, 25 bp, Homo sapien
catctggcatttactactactatac

SEQ ID NO: 5302873 - DNA, 25 bp, Homo sapien
tagcttataggaaaagccatctggc

SEQ ID NO: 5302874 - DNA, 25 bp, Homo sapien
accttagtgagattagaattccaaa

SEQ ID NO: 5302875 - DNA, 25 bp, Homo sapien
ccttagtgagattagaattccaaag

SEQ ID NO: 5302876 - DNA, 25 bp, Homo sapien
agaaaaggagacaagcaagtataag

SEQ ID NO: 5302877 - DNA, 25 bp, Homo sapien
cttagtgagattagaattccaaaga

SEQ ID NO: 5302878 - DNA, 25 bp, Homo sapien
tgcattattacccttaaaactaagc

SEQ ID NO: 5302879 - DNA, 25 bp, Homo sapien
tctccagattgttattaaagccttt

SEQ ID NO: 5302880 - DNA, 25 bp, Homo sapien
tgcgaatccactatgagacaaactt

SEQ ID NO: 5302881 - DNA, 25 bp, Homo sapien
aactaaggaatctggaaaagcattt

SEQ ID NO: 5302882 - DNA, 25 bp, Homo sapien
tccttgtccatattccagttgcaga

SEQ ID NO: 5302883 - DNA, 25 bp, Homo sapien
ccttgtccatattccagttgcagat

SEQ ID NO: 5302884 - DNA, 25 bp, Homo sapien
cttgtccatattccagttgcagatc

SEQ ID NO: 5302885 - DNA, 25 bp, Homo sapien
gaaatgtgctttccaacaaccatga

SEQ ID NO: 5302886 - DNA, 25 bp, Homo sapien
gaaggatttcacgagttcatagtcc

SEQ ID NO: 5302887 - DNA, 25 bp, Homo sapien
acaccttccgacttaatgctgtggg

SEQ ID NO: 5302888 - DNA, 25 bp, Homo sapien
taaagagccactgtaatctaggcac

SEQ ID NO: 5302889 - DNA, 25 bp, Homo sapien
atcttatttacattagaatatagca

SEQ ID NO: 5302890 - DNA, 25 bp, Homo sapien
atcagggcttaacacaaaagccacc

SEQ ID NO: 5302891 - DNA, 25 bp, Homo sapien
tcagggcttaacacaaaagccacct

SEQ ID NO: 5302892 - DNA, 25 bp, Homo sapien
gagctgaaaacatgcaataacctag

SEQ ID NO: 5302893 - DNA, 25 bp, Homo sapien
cagcagttcattttagcgaatggga

SEQ ID NO: 5302894 - DNA, 25 bp, Homo sapien
gaaacacttgagtatgccagcataa

SEQ ID NO: 5302895 - DNA, 25 bp, Homo sapien
ggttgcaaagtcctaatttcagcag

SEQ ID NO: 5302896 - DNA, 25 bp, Homo sapien
gagacactttttaacgcagtagatg

SEQ ID NO: 5302897 - DNA, 25 bp, Homo sapien
caatagaattgatacagttcactac

SEQ ID NO: 5302898 - DNA, 25 bp, Homo sapien
tccccttgggagatttaagtctata

SEQ ID NO: 5302899 - DNA, 25 bp, Homo sapien
gaaaagcatatgaccaaaaacatct

SEQ ID NO: 5302900 - DNA, 25 bp, Homo sapien
gaatgtttatgtagcaaggtcttta

SEQ ID NO: 5302901 - DNA, 25 bp, Homo sapien
gccacaagcatttgtaagagatgaa

SEQ ID NO: 5302902 - DNA, 25 bp, Homo sapien
gtttttaccttggtgccaactgcca

SEQ ID NO: 5302903 - DNA, 25 bp, Homo sapien
taagatgagggccagacattctgga

SEQ ID NO: 5302904 - DNA, 25 bp, Homo sapien
aatttcactaattgtcattctagcc

SEQ ID NO: 5302905 - DNA, 25 bp, Homo sapien
atactagagtcaatttaaaaatttg

SEQ ID NO: 5302906 - DNA, 25 bp, Homo sapien
cgtgcccggctgagtatttgtaatt

SEQ ID NO: 5302907 - DNA, 25 bp, Homo sapien
cttttctacatggaggatattaata

SEQ ID NO: 5302908 - DNA, 25 bp, Homo sapien
tccctacttccaatgttggttctac

SEQ ID NO: 5302909 - DNA, 25 bp, Homo sapien
ttatgccattgaacacattccctct

SEQ ID NO: 5302910 - DNA, 25 bp, Homo sapien
ttccctacttccaatgttggttcta

SEQ ID NO: 5302911 - DNA, 25 bp, Homo sapien
tcttccctacttccaatgttggttc

SEQ ID NO: 5302912 - DNA, 25 bp, Homo sapien
cagattagatcttgcagtgtagtat

SEQ ID NO: 5302913 - DNA, 25 bp, Homo sapien
tcttgcagtgtagtatatttcttct

SEQ ID NO: 5302914 - DNA, 25 bp, Homo sapien
tagatcttgcagtgtagtatatttc

SEQ ID NO: 5302915 - DNA, 25 bp, Homo sapien
gattagatcttgcagtgtagtatat

SEQ ID NO: 5302916 - DNA, 25 bp, Homo sapien
ggctgggacctcgaatgtttttgaa

SEQ ID NO: 5302917 - DNA, 25 bp, Homo sapien
tactatgtatgcctcatctccctaa

SEQ ID NO: 5302918 - DNA, 25 bp, Homo sapien
tacacactgccacgtcaactaagtt

SEQ ID NO: 5302919 - DNA, 25 bp, Homo sapien
gactagcttttttggtcagtactaa

SEQ ID NO: 5302920 - DNA, 25 bp, Homo sapien
aacattctaaggctatactacttac

SEQ ID NO: 5302921 - DNA, 25 bp, Homo sapien
ctaacattctaaggctatactactt

SEQ ID NO: 5302922 - DNA, 25 bp, Homo sapien
taacattctaaggctatactactta

SEQ ID NO: 5302923 - DNA, 25 bp, Homo sapien
ttcttaagggtggatcaaatttcac

SEQ ID NO: 5302924 - DNA, 25 bp, Homo sapien
ggtggatcaaatttcacttggccaa

SEQ ID NO: 5302925 - DNA, 25 bp, Homo sapien
tttcttaagggtggatcaaatttca

SEQ ID NO: 5302926 - DNA, 25 bp, Homo sapien
taagggtggatcaaatttcacttgg

SEQ ID NO: 5302927 - DNA, 25 bp, Homo sapien
caataaagtcttaaccgctaaagct

SEQ ID NO: 5302928 - DNA, 25 bp, Homo sapien
attatatgtgtgtacaatcaagttc

SEQ ID NO: 5302929 - DNA, 25 bp, Homo sapien
aattatatgtgtgtacaatcaagtt

SEQ ID NO: 5302930 - DNA, 25 bp, Homo sapien
tacagggtacttgtggaagccagcc

SEQ ID NO: 5302931 - DNA, 25 bp, Homo sapien
gcctctggccaatagttacgtgaat

SEQ ID NO: 5302932 - DNA, 25 bp, Homo sapien
gctgatgtgaccaaaagaccagagc

SEQ ID NO: 5302933 - DNA, 25 bp, Homo sapien
tccacattggatcagcgttggctga

SEQ ID NO: 5302934 - DNA, 25 bp, Homo sapien
actgtacctgaactctgtggatgga

SEQ ID NO: 5302935 - DNA, 25 bp, Homo sapien
tgttggtcaatcatcccagtctgcg

SEQ ID NO: 5302936 - DNA, 25 bp, Homo sapien
aagttatgacaagcctctgccacag

SEQ ID NO: 5302937 - DNA, 25 bp, Homo sapien
tgtacaacccctgagtgcaaggatg

SEQ ID NO: 5302938 - DNA, 25 bp, Homo sapien
tctaaattaactgcaagtcacctct

SEQ ID NO: 5302939 - DNA, 25 bp, Homo sapien
ttctttcaattgagacactgtcgcc

SEQ ID NO: 5302940 - DNA, 25 bp, Homo sapien
catgcatatgcacttagaagttgag

SEQ ID NO: 5302941 - DNA, 25 bp, Homo sapien
tactatgctataaagggactgacaa

SEQ ID NO: 5302942 - DNA, 25 bp, Homo sapien
ctctcacgtttctacttgttgagtg

SEQ ID NO: 5302943 - DNA, 25 bp, Homo sapien
tttcttctctcacgtttctacttgt

SEQ ID NO: 5302944 - DNA, 25 bp, Homo sapien
tcttctctcacgtttctacttgttg

SEQ ID NO: 5302945 - DNA, 25 bp, Homo sapien
tctctcacgtttctacttgttgagt

SEQ ID NO: 5302946 - DNA, 25 bp, Homo sapien
taatctatgatcttattacccccca

SEQ ID NO: 5302947 - DNA, 25 bp, Homo sapien
tctgttaatctatgatcttattacc

SEQ ID NO: 5302948 - DNA, 25 bp, Homo sapien
atctatgatcttattaccccccaac

SEQ ID NO: 5302949 - DNA, 25 bp, Homo sapien
tgttaatctatgatcttattacccc

SEQ ID NO: 5302950 - DNA, 25 bp, Homo sapien
ataacctctgcctcccaggttcaag

SEQ ID NO: 5302951 - DNA, 25 bp, Homo sapien
atagctgggattacacgcatgagcc

SEQ ID NO: 5302952 - DNA, 25 bp, Homo sapien
aattctcttgccacagccccctgaa

SEQ ID NO: 5302953 - DNA, 25 bp, Homo sapien
acacgcatgagccaccatgcccggc

SEQ ID NO: 5302954 - DNA, 25 bp, Homo sapien
cagctttgttatgcaccaatttcag

SEQ ID NO: 5302955 - DNA, 25 bp, Homo sapien
cactagttccctacatcatggttca

SEQ ID NO: 5302956 - DNA, 25 bp, Homo sapien
ggatataggcagtccttgttttaca

SEQ ID NO: 5302957 - DNA, 25 bp, Homo sapien
aaaagatacttgctctgtgtcacag

SEQ ID NO: 5302958 - DNA, 25 bp, Homo sapien
gggtaatagagtaagactcatctca

SEQ ID NO: 5302959 - DNA, 25 bp, Homo sapien
gtcccatactaccatgcacatcaag

SEQ ID NO: 5302960 - DNA, 25 bp, Homo sapien
ctatcataagatggcaagctgggac

SEQ ID NO: 5302961 - DNA, 25 bp, Homo sapien
caaggactgcctgtatactaaataa

SEQ ID NO: 5302962 - DNA, 25 bp, Homo sapien
tgcccgctggtaaaagcaattccta

SEQ ID NO: 5302963 - DNA, 25 bp, Homo sapien
aatgtcttgtttaggcacttcccat

SEQ ID NO: 5302964 - DNA, 25 bp, Homo sapien
taactacagtgatttcaacaagtgg

SEQ ID NO: 5302965 - DNA, 25 bp, Homo sapien
tggattttgagacgtacatacagac

SEQ ID NO: 5302966 - DNA, 25 bp, Homo sapien
tactttatccaacagctcgattgcc

SEQ ID NO: 5302967 - DNA, 25 bp, Homo sapien
tcatcatcatcgaaatcatggtaag

SEQ ID NO: 5302968 - DNA, 25 bp, Homo sapien
catggtaagtggaatgatctggatt

SEQ ID NO: 5302969 - DNA, 25 bp, Homo sapien
tgccaaagaccgtgtcaaatgttgt

SEQ ID NO: 5302970 - DNA, 25 bp, Homo sapien
cagcagtaggtctttttttcggatt

SEQ ID NO: 5302971 - DNA, 25 bp, Homo sapien
tgtaataatttttcagcagtaggtc

SEQ ID NO: 5302972 - DNA, 25 bp, Homo sapien
ataatttttcagcagtaggtctttt

SEQ ID NO: 5302973 - DNA, 25 bp, Homo sapien
ttcagcagtaggtctttttttcgga

SEQ ID NO: 5302974 - DNA, 25 bp, Homo sapien
tcacaaagtgatgaaaactatttga

SEQ ID NO: 5302975 - DNA, 25 bp, Homo sapien
ttcacaaagtgatgaaaactatttg

SEQ ID NO: 5302976 - DNA, 25 bp, Homo sapien
cacaaagtgatgaaaactatttgac

SEQ ID NO: 5302977 - DNA, 25 bp, Homo sapien
tttcacaaagtgatgaaaactattt

SEQ ID NO: 5302978 - DNA, 25 bp, Homo sapien
gctttttgtcattagaaataatgct

SEQ ID NO: 5302979 - DNA, 25 bp, Homo sapien
tatcctttagtttaggaggctgaaa

SEQ ID NO: 5302980 - DNA, 25 bp, Homo sapien
taggaggctgaaaattgctttttgt

SEQ ID NO: 5302981 - DNA, 25 bp, Homo sapien
catttcattttatcctttagtttag

SEQ ID NO: 5302982 - DNA, 25 bp, Homo sapien
tgtaagtcaaacataggaggctgaa

SEQ ID NO: 5302983 - DNA, 25 bp, Homo sapien
gaagctctgcaagttctatggcagt

SEQ ID NO: 5302984 - DNA, 25 bp, Homo sapien
agatcacagagttgattgtaacccc

SEQ ID NO: 5302985 - DNA, 25 bp, Homo sapien
ctcattgggtgtaagtcaaacatag

SEQ ID NO: 5302986 - DNA, 25 bp, Homo sapien
tacggatggaggtagagcatttact

SEQ ID NO: 5302987 - DNA, 25 bp, Homo sapien
cgttagataagaacatgacaatggc

SEQ ID NO: 5302988 - DNA, 25 bp, Homo sapien
caatgtgttctggtggtttcttacc

SEQ ID NO: 5302989 - DNA, 25 bp, Homo sapien
ttctaaagatgagccaaaaaacctg

SEQ ID NO: 5302990 - DNA, 25 bp, Homo sapien
tagagaattcaacagtccaggctgg

SEQ ID NO: 5302991 - DNA, 25 bp, Homo sapien
taagatcttcaactgtcataacgca

SEQ ID NO: 5302992 - DNA, 25 bp, Homo sapien
gctagagatggcagaagttacaact

SEQ ID NO: 5302993 - DNA, 25 bp, Homo sapien
gaaagtactgttaattgactcagca

SEQ ID NO: 5302994 - DNA, 25 bp, Homo sapien
caatatggtgtgccaatgaaagact

SEQ ID NO: 5302995 - DNA, 25 bp, Homo sapien
gccaatgaaagacttccgtttggca

SEQ ID NO: 5302996 - DNA, 25 bp, Homo sapien
ccgtttggcaattgtagctgttatc

SEQ ID NO: 5302997 - DNA, 25 bp, Homo sapien
aagacttccgtttggcaattgtagc

SEQ ID NO: 5302998 - DNA, 25 bp, Homo sapien
ccaatttcacatgaccattatccgt

SEQ ID NO: 5302999 - DNA, 25 bp, Homo sapien
tatccgttaatagaatgttagctcc

SEQ ID NO: 5303000 - DNA, 25 bp, Homo sapien
cacatgaccattatccgttaataga

SEQ ID NO: 5303001 - DNA, 25 bp, Homo sapien
tgaccattatccgttaatagaatgt

SEQ ID NO: 5303002 - DNA, 25 bp, Homo sapien
catttttcctttactgtgaagataa

SEQ ID NO: 5303003 - DNA, 25 bp, Homo sapien
tatatctctgtgcatttttccttta

SEQ ID NO: 5303004 - DNA, 25 bp, Homo sapien
cctttactgtgaagataatataatc

SEQ ID NO: 5303005 - DNA, 25 bp, Homo sapien
ttcctttactgtgaagataatataa

SEQ ID NO: 5303006 - DNA, 25 bp, Homo sapien
tctctgctaacatatgcaatttgca

SEQ ID NO: 5303007 - DNA, 25 bp, Homo sapien
tgctaacatatgcaatttgcagttc

SEQ ID NO: 5303008 - DNA, 25 bp, Homo sapien
tgcagttctgacagaggtccagtta

SEQ ID NO: 5303009 - DNA, 25 bp, Homo sapien
acatatgcaatttgcagttctgaca

SEQ ID NO: 5303010 - DNA, 25 bp, Homo sapien
gatatagaacatgtattatgactag

SEQ ID NO: 5303011 - DNA, 25 bp, Homo sapien
cgatgtccaataggtttagctggct

SEQ ID NO: 5303012 - DNA, 25 bp, Homo sapien
tacatgttcactctaaagttccaat

SEQ ID NO: 5303013 - DNA, 25 bp, Homo sapien
gaatgaatgtctaaagtagtcactg

SEQ ID NO: 5303014 - DNA, 25 bp, Homo sapien
catgggtacagccaaaagagtgaac

SEQ ID NO: 5303015 - DNA, 25 bp, Homo sapien
ggtacgtgtcctacatgaccgtgca

SEQ ID NO: 5303016 - DNA, 25 bp, Homo sapien
aaatgccacatagaattcccactga

SEQ ID NO: 5303017 - DNA, 25 bp, Homo sapien
cacattgccacgaaaaggttatttg

SEQ ID NO: 5303018 - DNA, 25 bp, Homo sapien
aaagcctactctacagtttgtgaca

SEQ ID NO: 5303019 - DNA, 25 bp, Homo sapien
ttttgaatccctcggaatctggcag

SEQ ID NO: 5303020 - DNA, 25 bp, Homo sapien
aaatgactacaatatgcctctgcag

SEQ ID NO: 5303021 - DNA, 25 bp, Homo sapien
taccagcttagcattagccagcaaa

SEQ ID NO: 5303022 - DNA, 25 bp, Homo sapien
cgtgataaatatcctgtaaagaacc

SEQ ID NO: 5303023 - DNA, 25 bp, Homo sapien
caaaactccatgcaaatccaaagct

SEQ ID NO: 5303024 - DNA, 25 bp, Homo sapien
ccacaaaactccatgcaaatccaaa

SEQ ID NO: 5303025 - DNA, 25 bp, Homo sapien
tatcctgtaaagaaccacctccaca

SEQ ID NO: 5303026 - DNA, 25 bp, Homo sapien
aagctgtacaagagtggttacaacc

SEQ ID NO: 5303027 - DNA, 25 bp, Homo sapien
caaagctgtacaagagtggttacaa

SEQ ID NO: 5303028 - DNA, 25 bp, Homo sapien
aaagctgtacaagagtggttacaac

SEQ ID NO: 5303029 - DNA, 25 bp, Homo sapien
aatgcattaggtgatgaaatcatta

SEQ ID NO: 5303030 - DNA, 25 bp, Homo sapien
tcattattgcttttcaaaagggaaa

SEQ ID NO: 5303031 - DNA, 25 bp, Homo sapien
ttttgtttaatgcattaggtgatga

SEQ ID NO: 5303032 - DNA, 25 bp, Homo sapien
gtttaatgcattaggtgatgaaatc

SEQ ID NO: 5303033 - DNA, 25 bp, Homo sapien
taatttcttgctgcacaactgcaaa

SEQ ID NO: 5303034 - DNA, 25 bp, Homo sapien
gggtgtttacagtctttcatcataa

SEQ ID NO: 5303035 - DNA, 25 bp, Homo sapien
tccaaaataagcaacaatatttggg

SEQ ID NO: 5303036 - DNA, 25 bp, Homo sapien
cttgctgcacaactgcaaagtcttc

SEQ ID NO: 5303037 - DNA, 25 bp, Homo sapien
tagacccagggtcaagcaaggcttc

SEQ ID NO: 5303038 - DNA, 25 bp, Homo sapien
catggcagtgtccaagactgacagt

SEQ ID NO: 5303039 - DNA, 25 bp, Homo sapien
gactgacagtgcaacaacttgaaca

SEQ ID NO: 5303040 - DNA, 25 bp, Homo sapien
cagcagagctaatcactcaggagtc

SEQ ID NO: 5303041 - DNA, 25 bp, Homo sapien
gaagtcatcagaaaggcactaactg

SEQ ID NO: 5303042 - DNA, 25 bp, Homo sapien
gacactagcacaattatagacttgc

SEQ ID NO: 5303043 - DNA, 25 bp, Homo sapien
catactggagctaaaacttgtttca

SEQ ID NO: 5303044 - DNA, 25 bp, Homo sapien
aactgctgtggtactcggtctagac

SEQ ID NO: 5303045 - DNA, 25 bp, Homo sapien
tattactttaattgctgctaattca

SEQ ID NO: 5303046 - DNA, 25 bp, Homo sapien
attcaccagtgttaacattccgtgc

SEQ ID NO: 5303047 - DNA, 25 bp, Homo sapien
tactttaattgctgctaattcacca

SEQ ID NO: 5303048 - DNA, 25 bp, Homo sapien
taattcaccagtgttaacattccgt

SEQ ID NO: 5303049 - DNA, 25 bp, Homo sapien
ccaaagatctaagatatgaggcacc

SEQ ID NO: 5303050 - DNA, 25 bp, Homo sapien
gccaaagatctaagatatgaggcac

SEQ ID NO: 5303051 - DNA, 25 bp, Homo sapien
caaagatctaagatatgaggcaccg

SEQ ID NO: 5303052 - DNA, 25 bp, Homo sapien
cagccaaagatctaagatatgaggc

SEQ ID NO: 5303053 - DNA, 25 bp, Homo sapien
tgagaagaaattcagagtatgggtg

SEQ ID NO: 5303054 - DNA, 25 bp, Homo sapien
gaaattcagagtatgggtgattcta

SEQ ID NO: 5303055 - DNA, 25 bp, Homo sapien
agaaattcagagtatgggtgattct

SEQ ID NO: 5303056 - DNA, 25 bp, Homo sapien
aaatgctcccacaatgatgttctca

SEQ ID NO: 5303057 - DNA, 25 bp, Homo sapien
tctagtctgctgcaacactgatctg

SEQ ID NO: 5303058 - DNA, 25 bp, Homo sapien
taagcagctagatctagtctgctgc

SEQ ID NO: 5303059 - DNA, 25 bp, Homo sapien
cactgatctgaccaccattcttcaa

SEQ ID NO: 5303060 - DNA, 25 bp, Homo sapien
atgtgttactgccaaatagtattcc

SEQ ID NO: 5303061 - DNA, 25 bp, Homo sapien
cttgcacttggtgtaatgctttcag

SEQ ID NO: 5303062 - DNA, 25 bp, Homo sapien
cagactcatccatgtctcaaactca

SEQ ID NO: 5303063 - DNA, 25 bp, Homo sapien
agacccattcgcagtcactccatat

SEQ ID NO: 5303064 - DNA, 25 bp, Homo sapien
tagccacatgtacatggctcatgtc

SEQ ID NO: 5303065 - DNA, 25 bp, Homo sapien
tctaaaatagggatcagcaaacatg

SEQ ID NO: 5303066 - DNA, 25 bp, Homo sapien
ggcttggtcttggtagcatgtgcct

SEQ ID NO: 5303067 - DNA, 25 bp, Homo sapien
ctgagctgacatgaaaataggaaac

SEQ ID NO: 5303068 - DNA, 25 bp, Homo sapien
tattgaagaccaccaaggacgtacc

SEQ ID NO: 5303069 - DNA, 25 bp, Homo sapien
aacgtgttgaaatgccgtgtctaca

SEQ ID NO: 5303070 - DNA, 25 bp, Homo sapien
taagagactgcctatgatacaggga

SEQ ID NO: 5303071 - DNA, 25 bp, Homo sapien
tgaatatctgcaaggccttcccaag

SEQ ID NO: 5303072 - DNA, 25 bp, Homo sapien
catataatctacattagcattaaat

SEQ ID NO: 5303073 - DNA, 25 bp, Homo sapien
tctacattagcattaaatacacctt

SEQ ID NO: 5303074 - DNA, 25 bp, Homo sapien
tagcattaaatacacctttgagaaa

SEQ ID NO: 5303075 - DNA, 25 bp, Homo sapien
cattagcattaaatacacctttgag

SEQ ID NO: 5303076 - DNA, 25 bp, Homo sapien
ttgtgatccaccccctccgtctccc

SEQ ID NO: 5303077 - DNA, 25 bp, Homo sapien
cttgtgatccaccccctccgtctcc

SEQ ID NO: 5303078 - DNA, 25 bp, Homo sapien
ccttgtgatccaccccctccgtctc

SEQ ID NO: 5303079 - DNA, 25 bp, Homo sapien
caacatcatataccattagggacag

SEQ ID NO: 5303080 - DNA, 25 bp, Homo sapien
gtagtttggcccgtttcctgcatga

SEQ ID NO: 5303081 - DNA, 25 bp, Homo sapien
caactataagccaaagagtgaggcc

SEQ ID NO: 5303082 - DNA, 25 bp, Homo sapien
gaaagaccatgtatagacaccagga

SEQ ID NO: 5303083 - DNA, 25 bp, Homo sapien
taatagacattactgggactcctga

SEQ ID NO: 5303084 - DNA, 25 bp, Homo sapien
ttcttcctgatacgattcactgagg

SEQ ID NO: 5303085 - DNA, 25 bp, Homo sapien
ttctaggttaagagactgaagagtc

SEQ ID NO: 5303086 - DNA, 25 bp, Homo sapien
gaagaaacttggcacacccacctta

SEQ ID NO: 5303087 - DNA, 25 bp, Homo sapien
tgagaagtcatggagaactataaca

SEQ ID NO: 5303088 - DNA, 25 bp, Homo sapien
ggaaatacgctactcttcagattaa

SEQ ID NO: 5303089 - DNA, 25 bp, Homo sapien
gaatacaacacgagctctaaagaga

SEQ ID NO: 5303090 - DNA, 25 bp, Homo sapien
gcagtttacaattttccaggactga

SEQ ID NO: 5303091 - DNA, 25 bp, Homo sapien
ccacatttggcaacaacctcctctc

SEQ ID NO: 5303092 - DNA, 25 bp, Homo sapien
acaactaaatcaagactgctgccac

SEQ ID NO: 5303093 - DNA, 25 bp, Homo sapien
actaaatcaagactgctgccacatt

SEQ ID NO: 5303094 - DNA, 25 bp, Homo sapien
acatttggcaacaacctcctctctt

SEQ ID NO: 5303095 - DNA, 25 bp, Homo sapien
aatgctgtaccgctactggactttg

SEQ ID NO: 5303096 - DNA, 25 bp, Homo sapien
tggccagggaagagtgatttatctt

SEQ ID NO: 5303097 - DNA, 25 bp, Homo sapien
gaggccaagagttgagttggccagg

SEQ ID NO: 5303098 - DNA, 25 bp, Homo sapien
gaattctaaccttgtcaaaccagta

SEQ ID NO: 5303099 - DNA, 25 bp, Homo sapien
cgaggcctggtgggcagcagctccc

SEQ ID NO: 5303100 - DNA, 25 bp, Homo sapien
aggcctggtgggcagcagctcccaa

SEQ ID NO: 5303101 - DNA, 25 bp, Homo sapien
ggcctggtgggcagcagctcccaac

SEQ ID NO: 5303102 - DNA, 25 bp, Homo sapien
caccgaggcctggtgggcagcagct

SEQ ID NO: 5303103 - DNA, 25 bp, Homo sapien
ctagagcggacgaccccaggttggc

SEQ ID NO: 5303104 - DNA, 25 bp, Homo sapien
cactatggatgagcagtgtggcctg

SEQ ID NO: 5303105 - DNA, 25 bp, Homo sapien
ctgctgtccggttcgtcgcgctgac

SEQ ID NO: 5303106 - DNA, 25 bp, Homo sapien
tgaagcaggcaggtttgacaacacc

SEQ ID NO: 5303107 - DNA, 25 bp, Homo sapien
agcgtctcccgaggacaggcggcaa

SEQ ID NO: 5303108 - DNA, 25 bp, Homo sapien
ccaggcttggctgcgggtcgggatc

SEQ ID NO: 5303109 - DNA, 25 bp, Homo sapien
caagggctcggacgcccaggcttgg

SEQ ID NO: 5303110 - DNA, 25 bp, Homo sapien
agcagagcccttggcgtccgcagct

SEQ ID NO: 5303111 - DNA, 25 bp, Homo sapien
tgccgatgcgctgaatcagctcgaa

SEQ ID NO: 5303112 - DNA, 25 bp, Homo sapien
tgcgctgaatcagctcgaagtcctc

SEQ ID NO: 5303113 - DNA, 25 bp, Homo sapien
ggtgccgctgccgatgcgctgaatc

SEQ ID NO: 5303114 - DNA, 25 bp, Homo sapien
gctgccgatgcgctgaatcagctcg

SEQ ID NO: 5303115 - DNA, 25 bp, Homo sapien
tgcgggttccggcgggacaaatcga

SEQ ID NO: 5303116 - DNA, 25 bp, Homo sapien
ctgcgggttccggcgggacaaatcg

SEQ ID NO: 5303117 - DNA, 25 bp, Homo sapien
cctggtcacacccacaaggagagga

SEQ ID NO: 5303118 - DNA, 25 bp, Homo sapien
tcacgccgctgcggacgacgacaag

SEQ ID NO: 5303119 - DNA, 25 bp, Homo sapien
gcagcccctcgctcggggtgaaact

SEQ ID NO: 5303120 - DNA, 25 bp, Homo sapien
cggcggtcacaatcacccggctcca

SEQ ID NO: 5303121 - DNA, 25 bp, Homo sapien
tgtgaggtaactgccccacaactga

SEQ ID NO: 5303122 - DNA, 25 bp, Homo sapien
tgcatcctcgttctcatcccattgt

SEQ ID NO: 5303123 - DNA, 25 bp, Homo sapien
tgaggaggcagcttatagaatactt

SEQ ID NO: 5303124 - DNA, 25 bp, Homo sapien
caagactggcttggctggttaccag

SEQ ID NO: 5303125 - DNA, 25 bp, Homo sapien
gaatcacttgcacccaagaagtgga

SEQ ID NO: 5303126 - DNA, 25 bp, Homo sapien
agcttggccaaagctggtgaaactc

SEQ ID NO: 5303127 - DNA, 25 bp, Homo sapien
cacttgcacccaagaagtggaggtt

SEQ ID NO: 5303128 - DNA, 25 bp, Homo sapien
gaccagcttggccaaagctggtgaa

SEQ ID NO: 5303129 - DNA, 25 bp, Homo sapien
ggaccattttggtattcttccagag

SEQ ID NO: 5303130 - DNA, 25 bp, Homo sapien
tgctatggtcccttgttatttcttc

SEQ ID NO: 5303131 - DNA, 25 bp, Homo sapien
ctgctatggtcccttgttatttctt

SEQ ID NO: 5303132 - DNA, 25 bp, Homo sapien
tttggtattcttccagagaagcagg

SEQ ID NO: 5303133 - DNA, 25 bp, Homo sapien
ctctgatgaatgagcaaagtttaaa

SEQ ID NO: 5303134 - DNA, 25 bp, Homo sapien
ttgtgtttatgtgttctgggtaatg

SEQ ID NO: 5303135 - DNA, 25 bp, Homo sapien
tctctgatgaatgagcaaagtttaa

SEQ ID NO: 5303136 - DNA, 25 bp, Homo sapien
tgtttatgtgttctgggtaatggat

SEQ ID NO: 5303137 - DNA, 25 bp, Homo sapien
tggcaacatagctgggaagttgact

SEQ ID NO: 5303138 - DNA, 25 bp, Homo sapien
tgttgtttgtgacacccagaagagc

SEQ ID NO: 5303139 - DNA, 25 bp, Homo sapien
gaagttgactgcatgggttgtcata

SEQ ID NO: 5303140 - DNA, 25 bp, Homo sapien
ggatagtcagaatgtgtttaccagg

SEQ ID NO: 5303141 - DNA, 25 bp, Homo sapien
tttcctttagaccttggctggaaga

SEQ ID NO: 5303142 - DNA, 25 bp, Homo sapien
cttggctggaagatatctctttctc

SEQ ID NO: 5303143 - DNA, 25 bp, Homo sapien
ctttggaaactctataacttgtggt

SEQ ID NO: 5303144 - DNA, 25 bp, Homo sapien
ttttagttcttcagggcccatctga

SEQ ID NO: 5303145 - DNA, 25 bp, Homo sapien
gaaaaaagatgctagtggccataag

SEQ ID NO: 5303146 - DNA, 25 bp, Homo sapien
gcctggaaccctatagagctaaatg

SEQ ID NO: 5303147 - DNA, 25 bp, Homo sapien
gcaagacttccatttactaggctgt

SEQ ID NO: 5303148 - DNA, 25 bp, Homo sapien
tttatcttgtcgtacacacactcag

SEQ ID NO: 5303149 - DNA, 25 bp, Homo sapien
tctttgaaccaagattaagccacaa

SEQ ID NO: 5303150 - DNA, 25 bp, Homo sapien
tctccagagtgggtcactgattgtg

SEQ ID NO: 5303151 - DNA, 25 bp, Homo sapien
gcattgtaaacctaatccgcaacgc

SEQ ID NO: 5303152 - DNA, 25 bp, Homo sapien
cttgacccttggcttaataaggaga

SEQ ID NO: 5303153 - DNA, 25 bp, Homo sapien
tgcctactgccttcctgtgttaaga

SEQ ID NO: 5303154 - DNA, 25 bp, Homo sapien
tcaaggcacaacaaggattctcaat

SEQ ID NO: 5303155 - DNA, 25 bp, Homo sapien
tcttttccggctattcaatcaggct

SEQ ID NO: 5303156 - DNA, 25 bp, Homo sapien
cctaccttcgtttcagatgtggaaa

SEQ ID NO: 5303157 - DNA, 25 bp, Homo sapien
cataggacgacattccatttgagtc

SEQ ID NO: 5303158 - DNA, 25 bp, Homo sapien
cagaggagttaatatgcacaagcac

SEQ ID NO: 5303159 - DNA, 25 bp, Homo sapien
gttcagcagcagaggagttaatatg

SEQ ID NO: 5303160 - DNA, 25 bp, Homo sapien
tcatcctgtcacaaattggttcagc

SEQ ID NO: 5303161 - DNA, 25 bp, Homo sapien
gggaggtcactatatgatgcccaga

SEQ ID NO: 5303162 - DNA, 25 bp, Homo sapien
ggaggtcactatatgatgcccagaa

SEQ ID NO: 5303163 - DNA, 25 bp, Homo sapien
gaggtcactatatgatgcccagaac

SEQ ID NO: 5303164 - DNA, 25 bp, Homo sapien
aggtcactatatgatgcccagaact

SEQ ID NO: 5303165 - DNA, 25 bp, Homo sapien
caaggcctgttgctactgtgtgatg

SEQ ID NO: 5303166 - DNA, 25 bp, Homo sapien
tgatgtcatcatccgcaaggcctgt

SEQ ID NO: 5303167 - DNA, 25 bp, Homo sapien
cctgcctctcagtgcgagataaaca

SEQ ID NO: 5303168 - DNA, 25 bp, Homo sapien
cagagtgggcaaaatagcctatgat

SEQ ID NO: 5303169 - DNA, 25 bp, Homo sapien
taagggcgtgatggcctctactgga

SEQ ID NO: 5303170 - DNA, 25 bp, Homo sapien
gggcgtgatggcctctactggattc

SEQ ID NO: 5303171 - DNA, 25 bp, Homo sapien
aagggcgtgatggcctctactggat

SEQ ID NO: 5303172 - DNA, 25 bp, Homo sapien
ctaagggcgtgatggcctctactgg

SEQ ID NO: 5303173 - DNA, 25 bp, Homo sapien
ataaaagcatgcaactgacaatcta

SEQ ID NO: 5303174 - DNA, 25 bp, Homo sapien
aaagcatgcaactgacaatctatag

SEQ ID NO: 5303175 - DNA, 25 bp, Homo sapien
agcatgcaactgacaatctatagga

SEQ ID NO: 5303176 - DNA, 25 bp, Homo sapien
catgcaactgacaatctataggaca

SEQ ID NO: 5303177 - DNA, 25 bp, Homo sapien
ttgatttcgtttgcagctctgggcc

SEQ ID NO: 5303178 - DNA, 25 bp, Homo sapien
gaatttcccataactgctctggttg

SEQ ID NO: 5303179 - DNA, 25 bp, Homo sapien
gcactgccttgaaggctcatgctgg

SEQ ID NO: 5303180 - DNA, 25 bp, Homo sapien
tctgagcgcctgatccagtggcctg

SEQ ID NO: 5303181 - DNA, 25 bp, Homo sapien
cagccgtccaatgaatttgtgtcca

SEQ ID NO: 5303182 - DNA, 25 bp, Homo sapien
ctatgatgcctctggtgatttggaa

SEQ ID NO: 5303183 - DNA, 25 bp, Homo sapien
agacagttgcattctatgatgcctc

SEQ ID NO: 5303184 - DNA, 25 bp, Homo sapien
tgtgtccaattcgtcctccaaccct

SEQ ID NO: 5303185 - DNA, 25 bp, Homo sapien
cttcaaagctggttacatctctgaa

SEQ ID NO: 5303186 - DNA, 25 bp, Homo sapien
catttttgcccttcccaatctattc

SEQ ID NO: 5303187 - DNA, 25 bp, Homo sapien
aagagctctccttgataaaacatca

SEQ ID NO: 5303188 - DNA, 25 bp, Homo sapien
aaagctggttacatctctgaatggg

SEQ ID NO: 5303189 - DNA, 25 bp, Homo sapien
gccactcccggctggtgacatttgc

SEQ ID NO: 5303190 - DNA, 25 bp, Homo sapien
actattctaatctgtgtcccaggaa

SEQ ID NO: 5303191 - DNA, 25 bp, Homo sapien
tgccactcccggctggtgacatttg

SEQ ID NO: 5303192 - DNA, 25 bp, Homo sapien
tcaaactattctaatctgtgtccca

SEQ ID NO: 5303193 - DNA, 25 bp, Homo sapien
gcaccaggaaagtccttgggtctct

SEQ ID NO: 5303194 - DNA, 25 bp, Homo sapien
accaggaaagtccttgggtctctgg

SEQ ID NO: 5303195 - DNA, 25 bp, Homo sapien
tagcaccaggaaagtccttgggtct

SEQ ID NO: 5303196 - DNA, 25 bp, Homo sapien
gtagcaccaggaaagtccttgggtc

SEQ ID NO: 5303197 - DNA, 25 bp, Homo sapien
tgttcttgaagatttgcagattctg

SEQ ID NO: 5303198 - DNA, 25 bp, Homo sapien
ctagaacactagtgcacaccgggtc

SEQ ID NO: 5303199 - DNA, 25 bp, Homo sapien
ttcttgaagatttgcagattctgaa

SEQ ID NO: 5303200 - DNA, 25 bp, Homo sapien
acactagtgcacaccgggtctgttc

SEQ ID NO: 5303201 - DNA, 25 bp, Homo sapien
ttccatcagccttcttactgaaggc

SEQ ID NO: 5303202 - DNA, 25 bp, Homo sapien
tgaaggctgtatgccagctgatgtc

SEQ ID NO: 5303203 - DNA, 25 bp, Homo sapien
tgtctatgcacagcaaggtggcttc

SEQ ID NO: 5303204 - DNA, 25 bp, Homo sapien
ttctgggacacctgcttcaaacagg

SEQ ID NO: 5303205 - DNA, 25 bp, Homo sapien
tatttgcataatgtcaacacagttc

SEQ ID NO: 5303206 - DNA, 25 bp, Homo sapien
aacacagttctcaccatttgtgacc

SEQ ID NO: 5303207 - DNA, 25 bp, Homo sapien
gggagcaccacggagtctttgaccc

SEQ ID NO: 5303208 - DNA, 25 bp, Homo sapien
caactgcttcactctccatcagtat

SEQ ID NO: 5303209 - DNA, 25 bp, Homo sapien
acccacacctgagcttgtttgcatg

SEQ ID NO: 5303210 - DNA, 25 bp, Homo sapien
gtttcaaccctcagcctgatttctt

SEQ ID NO: 5303211 - DNA, 25 bp, Homo sapien
tctttagctgtttcaaccctcagcc

SEQ ID NO: 5303212 - DNA, 25 bp, Homo sapien
catttctttagctgtttcaaccctc

SEQ ID NO: 5303213 - DNA, 25 bp, Homo sapien
tcatgtcagttaaccaaggagggct

SEQ ID NO: 5303214 - DNA, 25 bp, Homo sapien
caaagaggagccgaatgacaggatc

SEQ ID NO: 5303215 - DNA, 25 bp, Homo sapien
gcgagaggcattgttctaaacacag

SEQ ID NO: 5303216 - DNA, 25 bp, Homo sapien
cttcctgcgagaggcattgttctaa

SEQ ID NO: 5303217 - DNA, 25 bp, Homo sapien
ctgttctaacttgttataataagtg

SEQ ID NO: 5303218 - DNA, 25 bp, Homo sapien
ctaacttgttataataagtgttatt

SEQ ID NO: 5303219 - DNA, 25 bp, Homo sapien
tgcctgctgttctaacttgttataa

SEQ ID NO: 5303220 - DNA, 25 bp, Homo sapien
ctatctgcctgctgttctaacttgt

SEQ ID NO: 5303221 - DNA, 25 bp, Homo sapien
gcatcatgctgtttctttaataaga

SEQ ID NO: 5303222 - DNA, 25 bp, Homo sapien
acactatcctgtcagcatcatgctg

SEQ ID NO: 5303223 - DNA, 25 bp, Homo sapien
catcatgctgtttctttaataagac

SEQ ID NO: 5303224 - DNA, 25 bp, Homo sapien
aaacactatcctgtcagcatcatgc

SEQ ID NO: 5303225 - DNA, 25 bp, Homo sapien
gcttgataagttccagaggctcatg

SEQ ID NO: 5303226 - DNA, 25 bp, Homo sapien
catgtgagtggacagatctagagag

SEQ ID NO: 5303227 - DNA, 25 bp, Homo sapien
ttcggctccagagctcatctgtggt

SEQ ID NO: 5303228 - DNA, 25 bp, Homo sapien
tttccaggtgaatgacgatgttttc

SEQ ID NO: 5303229 - DNA, 25 bp, Homo sapien
gacatctcagatacaatgtctactt

SEQ ID NO: 5303230 - DNA, 25 bp, Homo sapien
atgctgacaccagagtgctactgtg

SEQ ID NO: 5303231 - DNA, 25 bp, Homo sapien
gatggggtcctcttattaacagagc

SEQ ID NO: 5303232 - DNA, 25 bp, Homo sapien
tgctactgtgatggggtcctcttat

SEQ ID NO: 5303233 - DNA, 25 bp, Homo sapien
aaaatgtggacactctggtgaagcc

SEQ ID NO: 5303234 - DNA, 25 bp, Homo sapien
tgaccctcctcatagttccagatga

SEQ ID NO: 5303235 - DNA, 25 bp, Homo sapien
cagcccagggtactgaaggttcctg

SEQ ID NO: 5303236 - DNA, 25 bp, Homo sapien
catctgggtcatggcaaaatgtgga

SEQ ID NO: 5303237 - DNA, 25 bp, Homo sapien
ttggtcacacttctgtcatccgatg

SEQ ID NO: 5303238 - DNA, 25 bp, Homo sapien
tcacacttctgtcatccgatgacgg

SEQ ID NO: 5303239 - DNA, 25 bp, Homo sapien
tgtcatccgatgacggcctgtgtct

SEQ ID NO: 5303240 - DNA, 25 bp, Homo sapien
cgatgacggcctgtgtctgttccca

SEQ ID NO: 5303241 - DNA, 25 bp, Homo sapien
agggtttatacccattgacagggca

SEQ ID NO: 5303242 - DNA, 25 bp, Homo sapien
ccagggtttatacccattgacaggg

SEQ ID NO: 5303243 - DNA, 25 bp, Homo sapien
tttccagggtttatacccattgaca

SEQ ID NO: 5303244 - DNA, 25 bp, Homo sapien
tttatacccattgacagggcacttt

SEQ ID NO: 5303245 - DNA, 25 bp, Homo sapien
gaagattcgttggtgacatcttggt

SEQ ID NO: 5303246 - DNA, 25 bp, Homo sapien
tagaagattcgttggtgacatcttg

SEQ ID NO: 5303247 - DNA, 25 bp, Homo sapien
aagattcgttggtgacatcttggtc

SEQ ID NO: 5303248 - DNA, 25 bp, Homo sapien
tctagaagattcgttggtgacatct

SEQ ID NO: 5303249 - DNA, 25 bp, Homo sapien
ccaggactgcaacccaaagtcctgg

SEQ ID NO: 5303250 - DNA, 25 bp, Homo sapien
ttttcattctccaggactgcaaccc

SEQ ID NO: 5303251 - DNA, 25 bp, Homo sapien
cctggaagtgtccaggaaagctgca

SEQ ID NO: 5303252 - DNA, 25 bp, Homo sapien
cattctccaggactgcaacccaaag

SEQ ID NO: 5303253 - DNA, 25 bp, Homo sapien
gaaactggcttctctactagggtct

SEQ ID NO: 5303254 - DNA, 25 bp, Homo sapien
tctttccgggcagcgcttggaggta

SEQ ID NO: 5303255 - DNA, 25 bp, Homo sapien
tccttgccctgtaatggtgcagttg

SEQ ID NO: 5303256 - DNA, 25 bp, Homo sapien
ggtgcagttgttcctccccacgttg

SEQ ID NO: 5303257 - DNA, 25 bp, Homo sapien
ggactataagcacatattgccataa

SEQ ID NO: 5303258 - DNA, 25 bp, Homo sapien
gcacatattgccataaccagctaaa

SEQ ID NO: 5303259 - DNA, 25 bp, Homo sapien
agagaactgtccttgccacattgcc

SEQ ID NO: 5303260 - DNA, 25 bp, Homo sapien
tagagaactgtccttgccacattgc

SEQ ID NO: 5303261 - DNA, 25 bp, Homo sapien
gtacatggtcagtttctaatttcag

SEQ ID NO: 5303262 - DNA, 25 bp, Homo sapien
tctaatttcaggatggaaggcgttg

SEQ ID NO: 5303263 - DNA, 25 bp, Homo sapien
gaatttgctgtcatttatgttaaaa

SEQ ID NO: 5303264 - DNA, 25 bp, Homo sapien
gatggaaggcgttgaatttgctgtc

SEQ ID NO: 5303265 - DNA, 25 bp, Homo sapien
tgacttgatttgtcagagagccaga

SEQ ID NO: 5303266 - DNA, 25 bp, Homo sapien
tagacgccagagaaatcaaccaatc

SEQ ID NO: 5303267 - DNA, 25 bp, Homo sapien
cctgtcggctggctaaatgacttgt

SEQ ID NO: 5303268 - DNA, 25 bp, Homo sapien
gcagtaattgttcctcctgtcggct

SEQ ID NO: 5303269 - DNA, 25 bp, Homo sapien
gagggtcccggatggcctcattcat

SEQ ID NO: 5303270 - DNA, 25 bp, Homo sapien
tggctgtgttgaattggagggtccc

SEQ ID NO: 5303271 - DNA, 25 bp, Homo sapien
ggagggtcccggatggcctcattca

SEQ ID NO: 5303272 - DNA, 25 bp, Homo sapien
tgttgaattggagggtcccggatgg

SEQ ID NO: 5303273 - DNA, 25 bp, Homo sapien
gcttatactagtgaacgctgaattt

SEQ ID NO: 5303274 - DNA, 25 bp, Homo sapien
tagtgaacgctgaatttggaggctt

SEQ ID NO: 5303275 - DNA, 25 bp, Homo sapien
aggatgtttgctggcctagtaataa

SEQ ID NO: 5303276 - DNA, 25 bp, Homo sapien
ggcttgtaggatgtttgctggccta

SEQ ID NO: 5303277 - DNA, 25 bp, Homo sapien
gtccagaccctgtagcacggcagaa

SEQ ID NO: 5303278 - DNA, 25 bp, Homo sapien
agaccctgtagcacggcagaaaagc

SEQ ID NO: 5303279 - DNA, 25 bp, Homo sapien
agaagcaagtccagaccctgtagca

SEQ ID NO: 5303280 - DNA, 25 bp, Homo sapien
agcaagtccagaccctgtagcacgg

SEQ ID NO: 5303281 - DNA, 25 bp, Homo sapien
caataaggagttgtagcagaagtct

SEQ ID NO: 5303282 - DNA, 25 bp, Homo sapien
tgcccagcaggagctaatgctacac

SEQ ID NO: 5303283 - DNA, 25 bp, Homo sapien
caagtgtagcgagttacaattttat

SEQ ID NO: 5303284 - DNA, 25 bp, Homo sapien
tgctacactctttcaagtgaacatg

SEQ ID NO: 5303285 - DNA, 25 bp, Homo sapien
gttttcagcacaaactggagcttca

SEQ ID NO: 5303286 - DNA, 25 bp, Homo sapien
tcatgggggctttctcatcagagcc

SEQ ID NO: 5303287 - DNA, 25 bp, Homo sapien
gggctttctcatcagagcctttgcc

SEQ ID NO: 5303288 - DNA, 25 bp, Homo sapien
gggggctttctcatcagagcctttg

SEQ ID NO: 5303289 - DNA, 25 bp, Homo sapien
cctcaatcttatcaaagactggttt

SEQ ID NO: 5303290 - DNA, 25 bp, Homo sapien
tcctcaatcttatcaaagactggtt

SEQ ID NO: 5303291 - DNA, 25 bp, Homo sapien
cttctcaaagatgacacctccaaca

SEQ ID NO: 5303292 - DNA, 25 bp, Homo sapien
tgggtttgactgataatctgtttta

SEQ ID NO: 5303293 - DNA, 25 bp, Homo sapien
ggtttgactgataatctgttttaat

SEQ ID NO: 5303294 - DNA, 25 bp, Homo sapien
cctgggtttgactgataatctgttt

SEQ ID NO: 5303295 - DNA, 25 bp, Homo sapien
aatgagcctctcagtccagatgtgt

SEQ ID NO: 5303296 - DNA, 25 bp, Homo sapien
aaattggggctttcaaatgagcctc

SEQ ID NO: 5303297 - DNA, 25 bp, Homo sapien
acttggtttagactctgggaagcag

SEQ ID NO: 5303298 - DNA, 25 bp, Homo sapien
tttcaacttggtttagactctggga

SEQ ID NO: 5303299 - DNA, 25 bp, Homo sapien
aatcctgcctctgtgttttgaccac

SEQ ID NO: 5303300 - DNA, 25 bp, Homo sapien
tgttttgaccacagccggcagaaca

SEQ ID NO: 5303301 - DNA, 25 bp, Homo sapien
aaatcctgcctctgtgttttgacca

SEQ ID NO: 5303302 - DNA, 25 bp, Homo sapien
ttttgaccacagccggcagaacaga

SEQ ID NO: 5303303 - DNA, 25 bp, Homo sapien
tggatggattgtgaactgtatggat

SEQ ID NO: 5303304 - DNA, 25 bp, Homo sapien
cgtgacgatttttcctgtgatgtga

SEQ ID NO: 5303305 - DNA, 25 bp, Homo sapien
tatggatgtagggttgggctgtccg

SEQ ID NO: 5303306 - DNA, 25 bp, Homo sapien
gttgggctgtccgtgacgatttttc

SEQ ID NO: 5303307 - DNA, 25 bp, Homo sapien
gccatagggatgctgtgttcttaca

SEQ ID NO: 5303308 - DNA, 25 bp, Homo sapien
cggccatagggatgctgtgttctta

SEQ ID NO: 5303309 - DNA, 25 bp, Homo sapien
ggccatagggatgctgtgttcttac

SEQ ID NO: 5303310 - DNA, 25 bp, Homo sapien
tctcccagtactgaattggtttaga

SEQ ID NO: 5303311 - DNA, 25 bp, Homo sapien
tggtttagaaaacgtcagaggttca

SEQ ID NO: 5303312 - DNA, 25 bp, Homo sapien
gattccgggttgattttgattccca

SEQ ID NO: 5303313 - DNA, 25 bp, Homo sapien
ggttcaacagattggccataggcct

SEQ ID NO: 5303314 - DNA, 25 bp, Homo sapien
gcagccatcccgagaaggctctgaa

SEQ ID NO: 5303315 - DNA, 25 bp, Homo sapien
ttaacaggagcattttcactgcagg

SEQ ID NO: 5303316 - DNA, 25 bp, Homo sapien
caggcagactcggttgccttggtga

SEQ ID NO: 5303317 - DNA, 25 bp, Homo sapien
ttgccttggtgaagtccccgtgcat

SEQ ID NO: 5303318 - DNA, 25 bp, Homo sapien
agagaaagggctcccgtgatgtgac

SEQ ID NO: 5303319 - DNA, 25 bp, Homo sapien
tatggagaattacaggaccatccag

SEQ ID NO: 5303320 - DNA, 25 bp, Homo sapien
ctttggacctgatgttgtgagtgag

SEQ ID NO: 5303321 - DNA, 25 bp, Homo sapien
ggcccttgtcaatggtatggagaat

SEQ ID NO: 5303322 - DNA, 25 bp, Homo sapien
gatgataacacttcgcagtgcccga

SEQ ID NO: 5303323 - DNA, 25 bp, Homo sapien
aggtcctgcctctctatagcatagt

SEQ ID NO: 5303324 - DNA, 25 bp, Homo sapien
ccttccaaaagaacaggatggttct

SEQ ID NO: 5303325 - DNA, 25 bp, Homo sapien
gatggtaatatgtcctgaagctttc

SEQ ID NO: 5303326 - DNA, 25 bp, Homo sapien
cagagcactatggtaggtgctgctt

SEQ ID NO: 5303327 - DNA, 25 bp, Homo sapien
tcctccaaggcctaactgagacagc

SEQ ID NO: 5303328 - DNA, 25 bp, Homo sapien
tatggtaggtgctgcttctaaaatt

SEQ ID NO: 5303329 - DNA, 25 bp, Homo sapien
ctccaaggcctaactgagacagcat

SEQ ID NO: 5303330 - DNA, 25 bp, Homo sapien
ttttcttgacgctgctccccgtgag

SEQ ID NO: 5303331 - DNA, 25 bp, Homo sapien
ttggaagaaaagtggtgccgacctc

SEQ ID NO: 5303332 - DNA, 25 bp, Homo sapien
agactcgacttttctcacccgggct

SEQ ID NO: 5303333 - DNA, 25 bp, Homo sapien
ctgtattgtgcggatgctggtgtca

SEQ ID NO: 5303334 - DNA, 25 bp, Homo sapien
tcagacttgctactagggagattcc

SEQ ID NO: 5303335 - DNA, 25 bp, Homo sapien
tgagttgctgcaagaaagactcttg

SEQ ID NO: 5303336 - DNA, 25 bp, Homo sapien
ggaatgagttgctgcaagaaagact

SEQ ID NO: 5303337 - DNA, 25 bp, Homo sapien
cactgaaccaccctgctgctgtgtc

SEQ ID NO: 5303338 - DNA, 25 bp, Homo sapien
gggccatagatgaagcaagtagata

SEQ ID NO: 5303339 - DNA, 25 bp, Homo sapien
tagatgaagcaagtagatactaggt

SEQ ID NO: 5303340 - DNA, 25 bp, Homo sapien
gccatagatgaagcaagtagatact

SEQ ID NO: 5303341 - DNA, 25 bp, Homo sapien
aggggccatagatgaagcaagtaga

SEQ ID NO: 5303342 - DNA, 25 bp, Homo sapien
cctgcacattcgtgccttggtgact

SEQ ID NO: 5303343 - DNA, 25 bp, Homo sapien
tgggtctgaaaccagccaggctgtg

SEQ ID NO: 5303344 - DNA, 25 bp, Homo sapien
ggagcgctgaagccgatttcacccc

SEQ ID NO: 5303345 - DNA, 25 bp, Homo sapien
tgactagtggtgctctctgagacct

SEQ ID NO: 5303346 - DNA, 25 bp, Homo sapien
actttggaaaattcacgtacttctg

SEQ ID NO: 5303347 - DNA, 25 bp, Homo sapien
gcaggaagtcaccaggtgctcagac

SEQ ID NO: 5303348 - DNA, 25 bp, Homo sapien
tcaccaggtgctcagactttggaaa

SEQ ID NO: 5303349 - DNA, 25 bp, Homo sapien
tcctcagagagcaatctactgagcc

SEQ ID NO: 5303350 - DNA, 25 bp, Homo sapien
cagctctgggctacggatggtggct

SEQ ID NO: 5303351 - DNA, 25 bp, Homo sapien
acaggcaccggcttctggtgccgag

SEQ ID NO: 5303352 - DNA, 25 bp, Homo sapien
gcttaagtataaggcagctggaatg

SEQ ID NO: 5303353 - DNA, 25 bp, Homo sapien
tcttatcaacatattccttgtcaat

SEQ ID NO: 5303354 - DNA, 25 bp, Homo sapien
cttgccactggaaggtggtgagtgc

SEQ ID NO: 5303355 - DNA, 25 bp, Homo sapien
gctgctgccactaatggctttggga

SEQ ID NO: 5303356 - DNA, 25 bp, Homo sapien
cctaccatgaggctcttgccactgg

SEQ ID NO: 5303357 - DNA, 25 bp, Homo sapien
ctgctgctgccactaatggctttgg

SEQ ID NO: 5303358 - DNA, 25 bp, Homo sapien
tattagccggaccaagattgcacag

SEQ ID NO: 5303359 - DNA, 25 bp, Homo sapien
tctggcagagactccacggtatgac

SEQ ID NO: 5303360 - DNA, 25 bp, Homo sapien
tatccgtttattagccggaccaaga

SEQ ID NO: 5303361 - DNA, 25 bp, Homo sapien
gactccacggtatgactgtcctcac

SEQ ID NO: 5303362 - DNA, 25 bp, Homo sapien
tgtctttgtactggaatcgaaatca

SEQ ID NO: 5303363 - DNA, 25 bp, Homo sapien
gataaacagatcaaacgtgcttaag

SEQ ID NO: 5303364 - DNA, 25 bp, Homo sapien
gaagacctgttgttcaacctctgtc

SEQ ID NO: 5303365 - DNA, 25 bp, Homo sapien
cgtgcttaagagctaactcgtgaca

SEQ ID NO: 5303366 - DNA, 25 bp, Homo sapien
cgcaagtgtgggcaaatgttgccag

SEQ ID NO: 5303367 - DNA, 25 bp, Homo sapien
caagtgtgggcaaatgttgccagtg

SEQ ID NO: 5303368 - DNA, 25 bp, Homo sapien
tcacgcaagtgtgggcaaatgttgc

SEQ ID NO: 5303369 - DNA, 25 bp, Homo sapien
tgtcacgcaagtgtgggcaaatgtt

SEQ ID NO: 5303370 - DNA, 25 bp, Homo sapien
gatactggcttaattcagttattat

SEQ ID NO: 5303371 - DNA, 25 bp, Homo sapien
gcgaggtgacagtgtatgaatgctt

SEQ ID NO: 5303372 - DNA, 25 bp, Homo sapien
ttctatataaataagggcgaggtga

SEQ ID NO: 5303373 - DNA, 25 bp, Homo sapien
gaacataagcaacaaactgactttc

SEQ ID NO: 5303374 - DNA, 25 bp, Homo sapien
tacatttccgaaaatctgatagtta

SEQ ID NO: 5303375 - DNA, 25 bp, Homo sapien
tctgatagttaaaatatcccgtctg

SEQ ID NO: 5303376 - DNA, 25 bp, Homo sapien
cccgtctggtgttgattgtgataca

SEQ ID NO: 5303377 - DNA, 25 bp, Homo sapien
aatcaagtttaatatcaaaagaagt

SEQ ID NO: 5303378 - DNA, 25 bp, Homo sapien
taccaagcatgtgtacccatcagcc

SEQ ID NO: 5303379 - DNA, 25 bp, Homo sapien
cagcaaacttctgctgtacagctaa

SEQ ID NO: 5303380 - DNA, 25 bp, Homo sapien
gctctgtgggtgctatatgaatcct

SEQ ID NO: 5303381 - DNA, 25 bp, Homo sapien
gaatttggttacttggagctctgtg

SEQ ID NO: 5303382 - DNA, 25 bp, Homo sapien
cagtccagaagagtgcgacttctta

SEQ ID NO: 5303383 - DNA, 25 bp, Homo sapien
gaagagtgcgacttcttatatttac

SEQ ID NO: 5303384 - DNA, 25 bp, Homo sapien
ccagaagagtgcgacttcttatatt

SEQ ID NO: 5303385 - DNA, 25 bp, Homo sapien
ctacagtccagaagagtgcgacttc

SEQ ID NO: 5303386 - DNA, 25 bp, Homo sapien
ctttccaaggctaactttgtagcat

SEQ ID NO: 5303387 - DNA, 25 bp, Homo sapien
atatgaacgcatctgtctttccaag

SEQ ID NO: 5303388 - DNA, 25 bp, Homo sapien
atgaacgcatctgtctttccaaggc

SEQ ID NO: 5303389 - DNA, 25 bp, Homo sapien
gtctttccaaggctaactttgtagc

SEQ ID NO: 5303390 - DNA, 25 bp, Homo sapien
tactggcttcgaatgaagttgacgc

SEQ ID NO: 5303391 - DNA, 25 bp, Homo sapien
aagttgacgctgtcttgaatgcacc

SEQ ID NO: 5303392 - DNA, 25 bp, Homo sapien
tacaatctgtaaggcgcctgtggtg

SEQ ID NO: 5303393 - DNA, 25 bp, Homo sapien
caatggttccgccaacatgaagcac

SEQ ID NO: 5303394 - DNA, 25 bp, Homo sapien
gaacgtgctgatgtacctaaggaac

SEQ ID NO: 5303395 - DNA, 25 bp, Homo sapien
taagtgcggattccaccagagagct

SEQ ID NO: 5303396 - DNA, 25 bp, Homo sapien
aaaagtgacggaggagaagacccat

SEQ ID NO: 5303397 - DNA, 25 bp, Homo sapien
tgtcaaatgctatagggccggcatg

SEQ ID NO: 5303398 - DNA, 25 bp, Homo sapien
agatggggtcactccgtcacctggg

SEQ ID NO: 5303399 - DNA, 25 bp, Homo sapien
gatcatacctcaagctactggtgtc

SEQ ID NO: 5303400 - DNA, 25 bp, Homo sapien
tactggtgtcacctagttcatatac

SEQ ID NO: 5303401 - DNA, 25 bp, Homo sapien
tgtcacccaggtagcttgatcgcag

SEQ ID NO: 5303402 - DNA, 25 bp, Homo sapien
gattgcatgtcctttctcgaagagt

SEQ ID NO: 5303403 - DNA, 25 bp, Homo sapien
gaagagtccagctctgtagtacata

SEQ ID NO: 5303404 - DNA, 25 bp, Homo sapien
gagaatgcatagctcatgccaccag

SEQ ID NO: 5303405 - DNA, 25 bp, Homo sapien
gaaaccatctcaagcctctttggca

SEQ ID NO: 5303406 - DNA, 25 bp, Homo sapien
ataataatatcaacactttctgaag

SEQ ID NO: 5303407 - DNA, 25 bp, Homo sapien
aataatatcaacactttctgaaggc

SEQ ID NO: 5303408 - DNA, 25 bp, Homo sapien
taataatatcaacactttctgaagg

SEQ ID NO: 5303409 - DNA, 25 bp, Homo sapien
ataatatcaacactttctgaaggca

SEQ ID NO: 5303410 - DNA, 25 bp, Homo sapien
aacatttagggttgctaatattgtt

SEQ ID NO: 5303411 - DNA, 25 bp, Homo sapien
gaaaattgaagtacacaggattatt

SEQ ID NO: 5303412 - DNA, 25 bp, Homo sapien
caggattatttttgcgtaacagatt

SEQ ID NO: 5303413 - DNA, 25 bp, Homo sapien
tattacagtagggtcaaatatttac

SEQ ID NO: 5303414 - DNA, 25 bp, Homo sapien
tacacagtattttacggtatatatg

SEQ ID NO: 5303415 - DNA, 25 bp, Homo sapien
taaattgttggctttgggcctagca

SEQ ID NO: 5303416 - DNA, 25 bp, Homo sapien
cccaaccacgtgttctcatcgttta

SEQ ID NO: 5303417 - DNA, 25 bp, Homo sapien
tgtaccgtggtggtttgctacagat

SEQ ID NO: 5303418 - DNA, 25 bp, Homo sapien
ggtgggactacagccactacgcctg

SEQ ID NO: 5303419 - DNA, 25 bp, Homo sapien
aggtgggactacagccactacgcct

SEQ ID NO: 5303420 - DNA, 25 bp, Homo sapien
ttatattagttgagggtcataaaac

SEQ ID NO: 5303421 - DNA, 25 bp, Homo sapien
attagttgagggtcataaaacaaag

SEQ ID NO: 5303422 - DNA, 25 bp, Homo sapien
taaacgccagggatctcaggaaaat

SEQ ID NO: 5303423 - DNA, 25 bp, Homo sapien
cacggatactgtctaatgtgaggca

SEQ ID NO: 5303424 - DNA, 25 bp, Homo sapien
agcttactcctgtgtatctcacgga

SEQ ID NO: 5303425 - DNA, 25 bp, Homo sapien
ctggcagcaaacaactatgagatct

SEQ ID NO: 5303426 - DNA, 25 bp, Homo sapien
aaactatagaattgttgcttcccaa

SEQ ID NO: 5303427 - DNA, 25 bp, Homo sapien
ggttagactattagaagtaaactga

SEQ ID NO: 5303428 - DNA, 25 bp, Homo sapien
gaagtcatgctttacatgcttacga

SEQ ID NO: 5303429 - DNA, 25 bp, Homo sapien
gtaaactgagtattagtcccacaga

SEQ ID NO: 5303430 - DNA, 25 bp, Homo sapien
gattgtcccaagtacctagtaactg

SEQ ID NO: 5303431 - DNA, 25 bp, Homo sapien
agtaactgtgagtcgctgacatcag

SEQ ID NO: 5303432 - DNA, 25 bp, Homo sapien
ttcagattgtcccaagtacctagta

SEQ ID NO: 5303433 - DNA, 25 bp, Homo sapien
caagtacctagtaactgtgagtcgc

SEQ ID NO: 5303434 - DNA, 25 bp, Homo sapien
ttattacatatttcatgtagttaag

SEQ ID NO: 5303435 - DNA, 25 bp, Homo sapien
tatggggaaataaatattttaagca

SEQ ID NO: 5303436 - DNA, 25 bp, Homo sapien
aattattacatatttcatgtagtta

SEQ ID NO: 5303437 - DNA, 25 bp, Homo sapien
taaaattattacatatttcatgtag

SEQ ID NO: 5303438 - DNA, 25 bp, Homo sapien
cacacattggatctaaaacaaatgc

SEQ ID NO: 5303439 - DNA, 25 bp, Homo sapien
caagtccacacattggatctaaaac

SEQ ID NO: 5303440 - DNA, 25 bp, Homo sapien
tccaaaagtattgttccaagtccac

SEQ ID NO: 5303441 - DNA, 25 bp, Homo sapien
gtattgttccaagtccacacattgg

SEQ ID NO: 5303442 - DNA, 25 bp, Homo sapien
tgtcaggcccagtcgtgctcgagat

SEQ ID NO: 5303443 - DNA, 25 bp, Homo sapien
acagccaggtttcagtcagagccat

SEQ ID NO: 5303444 - DNA, 25 bp, Homo sapien
caggcccagtcgtgctcgagatagg

SEQ ID NO: 5303445 - DNA, 25 bp, Homo sapien
cactgtcaggcccagtcgtgctcga

SEQ ID NO: 5303446 - DNA, 25 bp, Homo sapien
gatcttaagtattccgcccaaagct

SEQ ID NO: 5303447 - DNA, 25 bp, Homo sapien
gaagcttcctccaggtatctcagca

SEQ ID NO: 5303448 - DNA, 25 bp, Homo sapien
taggcagaataatcggaacacacac

SEQ ID NO: 5303449 - DNA, 25 bp, Homo sapien
gaggaggtccctcagtagttttaga

SEQ ID NO: 5303450 - DNA, 25 bp, Homo sapien
gctattgtagatcgcagtccagctg

SEQ ID NO: 5303451 - DNA, 25 bp, Homo sapien
cacgctattgtagatcgcagtccag

SEQ ID NO: 5303452 - DNA, 25 bp, Homo sapien
tgcccacgctattgtagatcgcagt

SEQ ID NO: 5303453 - DNA, 25 bp, Homo sapien
ttgtagatcgcagtccagctgtctt

SEQ ID NO: 5303454 - DNA, 25 bp, Homo sapien
actgttcaaattaaaggcactggag

SEQ ID NO: 5303455 - DNA, 25 bp, Homo sapien
taggtatagggctgtgaaaaccatt

SEQ ID NO: 5303456 - DNA, 25 bp, Homo sapien
taatcagtagattaccatgaccaaa

SEQ ID NO: 5303457 - DNA, 25 bp, Homo sapien
tagggcagcctagaagccttttagg

SEQ ID NO: 5303458 - DNA, 25 bp, Homo sapien
aggaatccccaccacagagtaaatg

SEQ ID NO: 5303459 - DNA, 25 bp, Homo sapien
gaacacaggaatccccaccacagag

SEQ ID NO: 5303460 - DNA, 25 bp, Homo sapien
cacaggaatccccaccacagagtaa

SEQ ID NO: 5303461 - DNA, 25 bp, Homo sapien
ctgaacacaggaatccccaccacag

SEQ ID NO: 5303462 - DNA, 25 bp, Homo sapien
gaacaaacacagaagttagaatgga

SEQ ID NO: 5303463 - DNA, 25 bp, Homo sapien
aacacagaagttagaatggaacaag

SEQ ID NO: 5303464 - DNA, 25 bp, Homo sapien
cagaagttagaatggaacaagaaac

SEQ ID NO: 5303465 - DNA, 25 bp, Homo sapien
accaaattactgacaatttgaaatt

SEQ ID NO: 5303466 - DNA, 25 bp, Homo sapien
gaacctcaagaatatctggtccctg

SEQ ID NO: 5303467 - DNA, 25 bp, Homo sapien
ctgatactcgcaccccaagataact

SEQ ID NO: 5303468 - DNA, 25 bp, Homo sapien
aaagacttacctggagtgattccat

SEQ ID NO: 5303469 - DNA, 25 bp, Homo sapien
cattaaatggctgataggaattgaa

SEQ ID NO: 5303470 - DNA, 25 bp, Homo sapien
agtgtttcataatagcaattccaat

SEQ ID NO: 5303471 - DNA, 25 bp, Homo sapien
aagtgtttcataatagcaattccaa

SEQ ID NO: 5303472 - DNA, 25 bp, Homo sapien
gtgtttcataatagcaattccaatt

SEQ ID NO: 5303473 - DNA, 25 bp, Homo sapien
tgtttcataatagcaattccaatta

SEQ ID NO: 5303474 - DNA, 25 bp, Homo sapien
cagtacaccccatggcattaatgtc

SEQ ID NO: 5303475 - DNA, 25 bp, Homo sapien
tatgtcagctactataagcctatgt

SEQ ID NO: 5303476 - DNA, 25 bp, Homo sapien
tgcaagctgaaagattaactatgtc

SEQ ID NO: 5303477 - DNA, 25 bp, Homo sapien
tcctattcaaggcagtaaggctgta

SEQ ID NO: 5303478 - DNA, 25 bp, Homo sapien
tttaaggttgataaagtattcagac

SEQ ID NO: 5303479 - DNA, 25 bp, Homo sapien
gtttgactgattttaaggttgataa

SEQ ID NO: 5303480 - DNA, 25 bp, Homo sapien
gattttaaggttgataaagtattca

SEQ ID NO: 5303481 - DNA, 25 bp, Homo sapien
ggtttgactgattttaaggttgata

SEQ ID NO: 5303482 - DNA, 25 bp, Homo sapien
tggcctttaacatcactgaactttg

SEQ ID NO: 5303483 - DNA, 25 bp, Homo sapien
tgtaagggccaactgatgaggtctg

SEQ ID NO: 5303484 - DNA, 25 bp, Homo sapien
gctgagacctcatgtgcatttgcag

SEQ ID NO: 5303485 - DNA, 25 bp, Homo sapien
tggtgttcgctcttctctacattgc

SEQ ID NO: 5303486 - DNA, 25 bp, Homo sapien
gaggactatggtatcaggatttcca

SEQ ID NO: 5303487 - DNA, 25 bp, Homo sapien
tgcagagtagccactgaataagcac

SEQ ID NO: 5303488 - DNA, 25 bp, Homo sapien
actgaataagcacaaagctgaactg

SEQ ID NO: 5303489 - DNA, 25 bp, Homo sapien
aaaccccaaaagctgaggactatgg

SEQ ID NO: 5303490 - DNA, 25 bp, Homo sapien
gcataccattcctcttaaacatctg

SEQ ID NO: 5303491 - DNA, 25 bp, Homo sapien
taagaactaattgtctgcggctagt

SEQ ID NO: 5303492 - DNA, 25 bp, Homo sapien
gggcgacagactccactttaggatg

SEQ ID NO: 5303493 - DNA, 25 bp, Homo sapien
taagaaagtcattacttggaatggc

SEQ ID NO: 5303494 - DNA, 25 bp, Homo sapien
ggcctttccaatagttccactgcag

SEQ ID NO: 5303495 - DNA, 25 bp, Homo sapien
cctttccaatagttccactgcagcg

SEQ ID NO: 5303496 - DNA, 25 bp, Homo sapien
aaggcctttccaatagttccactgc

SEQ ID NO: 5303497 - DNA, 25 bp, Homo sapien
ttccaatagttccactgcagcgaca

SEQ ID NO: 5303498 - DNA, 25 bp, Homo sapien
agctggcagtccctattctcttcta

SEQ ID NO: 5303499 - DNA, 25 bp, Homo sapien
gaaatggcattcaaccaacttcctg

SEQ ID NO: 5303500 - DNA, 25 bp, Homo sapien
agttggttatcatctctctgagaaa

SEQ ID NO: 5303501 - DNA, 25 bp, Homo sapien
agtggtaaaatctctttgctccaga

SEQ ID NO: 5303502 - DNA, 25 bp, Homo sapien
agaaaaatcttgttgatcctctatt

SEQ ID NO: 5303503 - DNA, 25 bp, Homo sapien
tgttgatcctctattgaagctttaa

SEQ ID NO: 5303504 - DNA, 25 bp, Homo sapien
aaatcttgttgatcctctattgaag

SEQ ID NO: 5303505 - DNA, 25 bp, Homo sapien
tcttgttgatcctctattgaagctt

SEQ ID NO: 5303506 - DNA, 25 bp, Homo sapien
ttgctacacgaataacttcactttc

SEQ ID NO: 5303507 - DNA, 25 bp, Homo sapien
ttggagttcatattccatttaccat

SEQ ID NO: 5303508 - DNA, 25 bp, Homo sapien
taccataagaatattgtgcagaata

SEQ ID NO: 5303509 - DNA, 25 bp, Homo sapien
tttattaaattgctacacgaataac

SEQ ID NO: 5303510 - DNA, 25 bp, Homo sapien
catattcaaatcagaacaggtggtg

SEQ ID NO: 5303511 - DNA, 25 bp, Homo sapien
agaaataataagtggaaactgcttt

SEQ ID NO: 5303512 - DNA, 25 bp, Homo sapien
tggaaactgctttttaatcagcaaa

SEQ ID NO: 5303513 - DNA, 25 bp, Homo sapien
aatttcttcaacatattcaaatcag

SEQ ID NO: 5303514 - DNA, 25 bp, Homo sapien
cttttgtgggcttcccacactgtag

SEQ ID NO: 5303515 - DNA, 25 bp, Homo sapien
tcttcacgactccaacctttcactg

SEQ ID NO: 5303516 - DNA, 25 bp, Homo sapien
ttgtgggcttcccacactgtaggag

SEQ ID NO: 5303517 - DNA, 25 bp, Homo sapien
acaaaactgacataattcttcacga

SEQ ID NO: 5303518 - DNA, 25 bp, Homo sapien
gaaaggaatggtggcttctctcggc

SEQ ID NO: 5303519 - DNA, 25 bp, Homo sapien
ggaatggtggcttctctcggccgga

SEQ ID NO: 5303520 - DNA, 25 bp, Homo sapien
aaggaatggtggcttctctcggccg

SEQ ID NO: 5303521 - DNA, 25 bp, Homo sapien
aatggtggcttctctcggccggagc

SEQ ID NO: 5303522 - DNA, 25 bp, Homo sapien
cgaccgtcgcgtggaacagagaggg

SEQ ID NO: 5303523 - DNA, 25 bp, Homo sapien
agaggggcgccagcgacgctttccc

SEQ ID NO: 5303524 - DNA, 25 bp, Homo sapien
gggtcggcgaccgtcgcgtggaaca

SEQ ID NO: 5303525 - DNA, 25 bp, Homo sapien
ccagcgacgctttcccgcgtccacg

SEQ ID NO: 5303526 - DNA, 25 bp, Homo sapien
cccacctccccaggcgcgcagcgag

SEQ ID NO: 5303527 - DNA, 25 bp, Homo sapien
ccacctccccaggcgcgcagcgagg

SEQ ID NO: 5303528 - DNA, 25 bp, Homo sapien
ctgcgtggccgccagccgcgcccgc

SEQ ID NO: 5303529 - DNA, 25 bp, Homo sapien
ccagccgcgcccgcacctctcgcat

SEQ ID NO: 5303530 - DNA, 25 bp, Homo sapien
ccgccagccgcgcccgcacctctcg

SEQ ID NO: 5303531 - DNA, 25 bp, Homo sapien
tgcgtggccgccagccgcgcccgca

SEQ ID NO: 5303532 - DNA, 25 bp, Homo sapien
gcctcaggcccggaccctggctctc

SEQ ID NO: 5303533 - DNA, 25 bp, Homo sapien
ggccgcgacccgcagtgcagaagaa

SEQ ID NO: 5303534 - DNA, 25 bp, Homo sapien
gacccgcagtgcagaagaatcgggc

SEQ ID NO: 5303535 - DNA, 25 bp, Homo sapien
gtgcagaagaatcgggcgccagcct

SEQ ID NO: 5303536 - DNA, 25 bp, Homo sapien
tgtcctcttatagacccatgtgaga

SEQ ID NO: 5303537 - DNA, 25 bp, Homo sapien
tatgtttctgggtgtacgtagagcc

SEQ ID NO: 5303538 - DNA, 25 bp, Homo sapien
cgtagagccgtttgattgcagttgc

SEQ ID NO: 5303539 - DNA, 25 bp, Homo sapien
gaatttccttcgtatatatgaccag

SEQ ID NO: 5303540 - DNA, 25 bp, Homo sapien
tctgctgtgaccttatgcctctgtc

SEQ ID NO: 5303541 - DNA, 25 bp, Homo sapien
aagcctttattctctatagatggcc

SEQ ID NO: 5303542 - DNA, 25 bp, Homo sapien
tatagatggccctcccttgagtgca

SEQ ID NO: 5303543 - DNA, 25 bp, Homo sapien
tgtggcaatctctcactgttgcgct

SEQ ID NO: 5303544 - DNA, 25 bp, Homo sapien
cctggtgcaggtctgtcccctaccc

SEQ ID NO: 5303545 - DNA, 25 bp, Homo sapien
cttctagtgactcagcatgctgggt

SEQ ID NO: 5303546 - DNA, 25 bp, Homo sapien
ccaggcttctagtgactcagcatgc

SEQ ID NO: 5303547 - DNA, 25 bp, Homo sapien
ctgttcccaggcttctagtgactca

SEQ ID NO: 5303548 - DNA, 25 bp, Homo sapien
tactaatagtgtctaagagttccct

SEQ ID NO: 5303549 - DNA, 25 bp, Homo sapien
tgaggtctgagccataataaaatct

SEQ ID NO: 5303550 - DNA, 25 bp, Homo sapien
tatacctgttgacccatttacctgt

SEQ ID NO: 5303551 - DNA, 25 bp, Homo sapien
agtgcagtcgcatgaatgtagttca

SEQ ID NO: 5303552 - DNA, 25 bp, Homo sapien
gagaatccatagtagggacagaccc

SEQ ID NO: 5303553 - DNA, 25 bp, Homo sapien
tggcttccccagtagttccaaattg

SEQ ID NO: 5303554 - DNA, 25 bp, Homo sapien
ggacagaccctaactctgcaagaag

SEQ ID NO: 5303555 - DNA, 25 bp, Homo sapien
gatttgtcatcagtccatattggag

SEQ ID NO: 5303556 - DNA, 25 bp, Homo sapien
taatgagtatagaagagattttgct

SEQ ID NO: 5303557 - DNA, 25 bp, Homo sapien
aatgtcggcatcagaggatccacag

SEQ ID NO: 5303558 - DNA, 25 bp, Homo sapien
tgttaaatccacataatgtcggcat

SEQ ID NO: 5303559 - DNA, 25 bp, Homo sapien
ggagaagaccgatgaaggtaatgag

SEQ ID NO: 5303560 - DNA, 25 bp, Homo sapien
tatgtggtagtaagtattgcgttgt

SEQ ID NO: 5303561 - DNA, 25 bp, Homo sapien
gattcctgcttttagcaggacaaaa

SEQ ID NO: 5303562 - DNA, 25 bp, Homo sapien
tgcgttgtgactgtcaaatgtcatc

SEQ ID NO: 5303563 - DNA, 25 bp, Homo sapien
aatgtcatcagcttaacatctgatc

SEQ ID NO: 5303564 - DNA, 25 bp, Homo sapien
ttgatggtatcttcccaatgcaggg

SEQ ID NO: 5303565 - DNA, 25 bp, Homo sapien
gcagttgatggtatcttcccaatgc

SEQ ID NO: 5303566 - DNA, 25 bp, Homo sapien
gtatcttcccaatgcaggggtgcac

SEQ ID NO: 5303567 - DNA, 25 bp, Homo sapien
agttgatggtatcttcccaatgcag

SEQ ID NO: 5303568 - DNA, 25 bp, Homo sapien
accacggctgctctccgcatagaat

SEQ ID NO: 5303569 - DNA, 25 bp, Homo sapien
acacacagcgtcaagaccacggctg

SEQ ID NO: 5303570 - DNA, 25 bp, Homo sapien
tccgcatagaatctgcccaataagc

SEQ ID NO: 5303571 - DNA, 25 bp, Homo sapien
tgctgcaactgccagggactacagt

SEQ ID NO: 5303572 - DNA, 25 bp, Homo sapien
tctgcccatggttttaactacgatt

SEQ ID NO: 5303573 - DNA, 25 bp, Homo sapien
tctctgcccatggttttaactacga

SEQ ID NO: 5303574 - DNA, 25 bp, Homo sapien
ctgcccatggttttaactacgattt

SEQ ID NO: 5303575 - DNA, 25 bp, Homo sapien
tattagagttgcccagggttgactg

SEQ ID NO: 5303576 - DNA, 25 bp, Homo sapien
cctatggcatagtttaccatggaat

SEQ ID NO: 5303577 - DNA, 25 bp, Homo sapien
atggcatagtttaccatggaatgaa

SEQ ID NO: 5303578 - DNA, 25 bp, Homo sapien
ggcatagtttaccatggaatgaaaa

SEQ ID NO: 5303579 - DNA, 25 bp, Homo sapien
catagtttaccatggaatgaaaaag

SEQ ID NO: 5303580 - DNA, 25 bp, Homo sapien
caagtaagggtagaattcaaggtag

SEQ ID NO: 5303581 - DNA, 25 bp, Homo sapien
ctcagaattgtggaggcggtgagtg

SEQ ID NO: 5303582 - DNA, 25 bp, Homo sapien
ggtagaattcaaggtaggctcagaa

SEQ ID NO: 5303583 - DNA, 25 bp, Homo sapien
tcaaggtaggctcagaattgtggag

SEQ ID NO: 5303584 - DNA, 25 bp, Homo sapien
aactctgctcagttaaacaggacgt

SEQ ID NO: 5303585 - DNA, 25 bp, Homo sapien
tgctcagttaaacaggacgttcctg

SEQ ID NO: 5303586 - DNA, 25 bp, Homo sapien
taaacaggacgttcctgaagctgcc

SEQ ID NO: 5303587 - DNA, 25 bp, Homo sapien
cagttaaacaggacgttcctgaagc

SEQ ID NO: 5303588 - DNA, 25 bp, Homo sapien
cagcctcatgctgatgtattggagg

SEQ ID NO: 5303589 - DNA, 25 bp, Homo sapien
cctcatgctgatgtattggaggctc

SEQ ID NO: 5303590 - DNA, 25 bp, Homo sapien
tcatgctgatgtattggaggctcca

SEQ ID NO: 5303591 - DNA, 25 bp, Homo sapien
gccagcctcatgctgatgtattgga

SEQ ID NO: 5303592 - DNA, 25 bp, Homo sapien
gaaatcaatgcacaggtgaccttcc

SEQ ID NO: 5303593 - DNA, 25 bp, Homo sapien
aggaactcttgcaagtctggtgacc

SEQ ID NO: 5303594 - DNA, 25 bp, Homo sapien
cactggctgcgaataacaggaactc

SEQ ID NO: 5303595 - DNA, 25 bp, Homo sapien
aaagtcaagcaggacactcccactg

SEQ ID NO: 5303596 - DNA, 25 bp, Homo sapien
ctggctggccctcctattagtgcag

SEQ ID NO: 5303597 - DNA, 25 bp, Homo sapien
gattttgatttgtagccatggcaga

SEQ ID NO: 5303598 - DNA, 25 bp, Homo sapien
tgaagcaggacttgaagattttgat

SEQ ID NO: 5303599 - DNA, 25 bp, Homo sapien
cttcctgtaaagtaatgcattggct

SEQ ID NO: 5303600 - DNA, 25 bp, Homo sapien
ccgtctctgagtctgccattatcca

SEQ ID NO: 5303601 - DNA, 25 bp, Homo sapien
ccccaacttgatgatgtcgtgaaaa

SEQ ID NO: 5303602 - DNA, 25 bp, Homo sapien
atgtcgtgaaaatgccatgttcttc

SEQ ID NO: 5303603 - DNA, 25 bp, Homo sapien
aatgccatgttcttcccgtctctga

SEQ ID NO: 5303604 - DNA, 25 bp, Homo sapien
ttccagtgagcaaagatccatctag

SEQ ID NO: 5303605 - DNA, 25 bp, Homo sapien
cattagcagtcacagatggatggat

SEQ ID NO: 5303606 - DNA, 25 bp, Homo sapien
tccatctagacagcagtatctgcaa

SEQ ID NO: 5303607 - DNA, 25 bp, Homo sapien
atgatgattgactttgccattagca

SEQ ID NO: 5303608 - DNA, 25 bp, Homo sapien
aaacacaggaaatcatctcaacagc

SEQ ID NO: 5303609 - DNA, 25 bp, Homo sapien
ggtcactttatcttttcatgagaag

SEQ ID NO: 5303610 - DNA, 25 bp, Homo sapien
ttgaggtgcaaaaggggtcacttta

SEQ ID NO: 5303611 - DNA, 25 bp, Homo sapien
tctcaggagaagtgaactgataatg

SEQ ID NO: 5303612 - DNA, 25 bp, Homo sapien
atccaagaaggattattcattgtct

SEQ ID NO: 5303613 - DNA, 25 bp, Homo sapien
tccaagaaggattattcattgtctt

SEQ ID NO: 5303614 - DNA, 25 bp, Homo sapien
ccaagaaggattattcattgtcttt

SEQ ID NO: 5303615 - DNA, 25 bp, Homo sapien
tatcctccgtgggtttccaatgtga

SEQ ID NO: 5303616 - DNA, 25 bp, Homo sapien
tcagaagcagggtgtaatcatcctg

SEQ ID NO: 5303617 - DNA, 25 bp, Homo sapien
aagctggatctatgcttgtagtgaa

SEQ ID NO: 5303618 - DNA, 25 bp, Homo sapien
gaatgatattctcaagctggatcta

SEQ ID NO: 5303619 - DNA, 25 bp, Homo sapien
tatcactatttatccctgacatcct

SEQ ID NO: 5303620 - DNA, 25 bp, Homo sapien
ccaaaagatgatcccctctggactc

SEQ ID NO: 5303621 - DNA, 25 bp, Homo sapien
tgctccattttgaagccccaggcct

SEQ ID NO: 5303622 - DNA, 25 bp, Homo sapien
gaggcaacggagccccttgctccat

SEQ ID NO: 5303623 - DNA, 25 bp, Homo sapien
tccctggggcatacaagccattgct

SEQ ID NO: 5303624 - DNA, 25 bp, Homo sapien
cctggggcatacaagccattgcttt

SEQ ID NO: 5303625 - DNA, 25 bp, Homo sapien
atcttttctaggtctgggaaccctg

SEQ ID NO: 5303626 - DNA, 25 bp, Homo sapien
gcctccctggggcatacaagccatt

SEQ ID NO: 5303627 - DNA, 25 bp, Homo sapien
taaactccataaggaattgcgtcac

SEQ ID NO: 5303628 - DNA, 25 bp, Homo sapien
tttgtccgtcctcaatcctcctcct

SEQ ID NO: 5303629 - DNA, 25 bp, Homo sapien
tgatcacaggtgaaacaagctcttt

SEQ ID NO: 5303630 - DNA, 25 bp, Homo sapien
gaattgcgtcacacagaagggtcaa

SEQ ID NO: 5303631 - DNA, 25 bp, Homo sapien
ttttggccatacgatcattggtcag

SEQ ID NO: 5303632 - DNA, 25 bp, Homo sapien
agtctgcttgtaagggtcattttca

SEQ ID NO: 5303633 - DNA, 25 bp, Homo sapien
tttcaaaggatctgcagaccttgaa

SEQ ID NO: 5303634 - DNA, 25 bp, Homo sapien
catacgatcattggtcagttctagc

SEQ ID NO: 5303635 - DNA, 25 bp, Homo sapien
cacagtcctctgctcctgcagattt

SEQ ID NO: 5303636 - DNA, 25 bp, Homo sapien
cttctctcacagtcctctgctcctg

SEQ ID NO: 5303637 - DNA, 25 bp, Homo sapien
ttctctcacagtcctctgctcctgc

SEQ ID NO: 5303638 - DNA, 25 bp, Homo sapien
agtcctctgctcctgcagatttcat

SEQ ID NO: 5303639 - DNA, 25 bp, Homo sapien
aaattatcgaattgccttggagctc

SEQ ID NO: 5303640 - DNA, 25 bp, Homo sapien
ttaccccgagtaccataatggcaga

SEQ ID NO: 5303641 - DNA, 25 bp, Homo sapien
gagctcagggctttagtatttccag

SEQ ID NO: 5303642 - DNA, 25 bp, Homo sapien
taccaagatcaaggcatagaccact

SEQ ID NO: 5303643 - DNA, 25 bp, Homo sapien
catttattggtgatatggcagctgc

SEQ ID NO: 5303644 - DNA, 25 bp, Homo sapien
tccccacaggaatatggctgagtgt

SEQ ID NO: 5303645 - DNA, 25 bp, Homo sapien
tacaacatatctcaggcagcatgca

SEQ ID NO: 5303646 - DNA, 25 bp, Homo sapien
tgattacgacagagatgcttaccct

SEQ ID NO: 5303647 - DNA, 25 bp, Homo sapien
gagattacattcattggcagcaaag

SEQ ID NO: 5303648 - DNA, 25 bp, Homo sapien
tgcgtgcactcgaacggcaagtcgt

SEQ ID NO: 5303649 - DNA, 25 bp, Homo sapien
taccaatgtctcctcggtgtgagct

SEQ ID NO: 5303650 - DNA, 25 bp, Homo sapien
tattcagtgggaaacacaattgcca

SEQ ID NO: 5303651 - DNA, 25 bp, Homo sapien
gaaatcaaccactatggacggcaaa

SEQ ID NO: 5303652 - DNA, 25 bp, Homo sapien
ttgaaatagtctgagtgaaaccctg

SEQ ID NO: 5303653 - DNA, 25 bp, Homo sapien
tatttcccgtcacgaagtggccaga

SEQ ID NO: 5303654 - DNA, 25 bp, Homo sapien
tcagcgacagacaatggacactcaa

SEQ ID NO: 5303655 - DNA, 25 bp, Homo sapien
tcctgaaaaagagctaccattccaa

SEQ ID NO: 5303656 - DNA, 25 bp, Homo sapien
aaatatctgacaagtttggtttctc

SEQ ID NO: 5303657 - DNA, 25 bp, Homo sapien
caaaatatctgacaagtttggtttc

SEQ ID NO: 5303658 - DNA, 25 bp, Homo sapien
aagagctaccattccaaaatatctg

SEQ ID NO: 5303659 - DNA, 25 bp, Homo sapien
gggaagtcaggcaaagtagatcagc

SEQ ID NO: 5303660 - DNA, 25 bp, Homo sapien
taatcagttagagaaaggtgtccag

SEQ ID NO: 5303661 - DNA, 25 bp, Homo sapien
gcaatccttttagctcagtcagtca

SEQ ID NO: 5303662 - DNA, 25 bp, Homo sapien
tgagagaccctagaaaggagcctcc

SEQ ID NO: 5303663 - DNA, 25 bp, Homo sapien
gattgcttaaggcagacatccgctg

SEQ ID NO: 5303664 - DNA, 25 bp, Homo sapien
ccttggcagaagtcttagtaatcac

SEQ ID NO: 5303665 - DNA, 25 bp, Homo sapien
tcaactgctaggtggatgtgggtca

SEQ ID NO: 5303666 - DNA, 25 bp, Homo sapien
taagttgagcaactgtcgggacatg

SEQ ID NO: 5303667 - DNA, 25 bp, Homo sapien
gcttgacaagtgcattggtgaccca

SEQ ID NO: 5303668 - DNA, 25 bp, Homo sapien
gagactgtttttccaaccgtgcaca

SEQ ID NO: 5303669 - DNA, 25 bp, Homo sapien
gctgaagattcctcaccctctgaaa

SEQ ID NO: 5303670 - DNA, 25 bp, Homo sapien
caatatgggcagcagctggctcaca

SEQ ID NO: 5303671 - DNA, 25 bp, Homo sapien
tatcttgttccagtcacctttagaa

SEQ ID NO: 5303672 - DNA, 25 bp, Homo sapien
tctggaatgcctgttctaattctcc

SEQ ID NO: 5303673 - DNA, 25 bp, Homo sapien
tccttaggtaattatccagttgata

SEQ ID NO: 5303674 - DNA, 25 bp, Homo sapien
aacttgtggatccatcaatgaggca

SEQ ID NO: 5303675 - DNA, 25 bp, Homo sapien
ccatgtggtcaaagatgtcccggta

SEQ ID NO: 5303676 - DNA, 25 bp, Homo sapien
tagacgggctccagtatgtaatgca

SEQ ID NO: 5303677 - DNA, 25 bp, Homo sapien
caagggcaagtgtcctagacgggct

SEQ ID NO: 5303678 - DNA, 25 bp, Homo sapien
gctaaaatacgaacggcagaggacc

SEQ ID NO: 5303679 - DNA, 25 bp, Homo sapien
ccttgtggttcatttgggccagact

SEQ ID NO: 5303680 - DNA, 25 bp, Homo sapien
ggaaacgtgtgccaaaaacatgctt

SEQ ID NO: 5303681 - DNA, 25 bp, Homo sapien
gatcttcacattagagggagggcca

SEQ ID NO: 5303682 - DNA, 25 bp, Homo sapien
gccatctggtcatatcactgttagg

SEQ ID NO: 5303683 - DNA, 25 bp, Homo sapien
taagcaatcttagtacggagggttg

SEQ ID NO: 5303684 - DNA, 25 bp, Homo sapien
gggctgggctatatcttaactgtca

SEQ ID NO: 5303685 - DNA, 25 bp, Homo sapien
gcattcttggatttaactaggcgta

SEQ ID NO: 5303686 - DNA, 25 bp, Homo sapien
ggcgtatctgtctttgcagtcaaca

SEQ ID NO: 5303687 - DNA, 25 bp, Homo sapien
cataagctctttccctattgccggg

SEQ ID NO: 5303688 - DNA, 25 bp, Homo sapien
gaaaaacatgtcttgagcaatcact

SEQ ID NO: 5303689 - DNA, 25 bp, Homo sapien
taaaaggctaggtcgatgggcagca

SEQ ID NO: 5303690 - DNA, 25 bp, Homo sapien
taactgtaggtatgatctgtcccgc

SEQ ID NO: 5303691 - DNA, 25 bp, Homo sapien
taagactgtttattcccatggggaa

SEQ ID NO: 5303692 - DNA, 25 bp, Homo sapien
ttaagactgtttattcccatgggga

SEQ ID NO: 5303693 - DNA, 25 bp, Homo sapien
tattaagactgtttattcccatggg

SEQ ID NO: 5303694 - DNA, 25 bp, Homo sapien
attaagactgtttattcccatgggg

SEQ ID NO: 5303695 - DNA, 25 bp, Homo sapien
gggaagcataattctaaaaaatgtg

SEQ ID NO: 5303696 - DNA, 25 bp, Homo sapien
taattctaaaaaatgtgaaccactg

SEQ ID NO: 5303697 - DNA, 25 bp, Homo sapien
ttctaaaaaatgtgaaccactgagg

SEQ ID NO: 5303698 - DNA, 25 bp, Homo sapien
agcataattctaaaaaatgtgaacc

SEQ ID NO: 5303699 - DNA, 25 bp, Homo sapien
ttttgacagtttaggatcagggacc

SEQ ID NO: 5303700 - DNA, 25 bp, Homo sapien
tgggtgtaataccatcgggaccgcc

SEQ ID NO: 5303701 - DNA, 25 bp, Homo sapien
tgttagacggtcaaggagctctggt

SEQ ID NO: 5303702 - DNA, 25 bp, Homo sapien
caaaactccgtaggtagagctgaac

SEQ ID NO: 5303703 - DNA, 25 bp, Homo sapien
catccccttgggaagaaactgtact

SEQ ID NO: 5303704 - DNA, 25 bp, Homo sapien
tactgttttgactatatgatatatg

SEQ ID NO: 5303705 - DNA, 25 bp, Homo sapien
taatgcgaggcagaagttctacaag

SEQ ID NO: 5303706 - DNA, 25 bp, Homo sapien
gatatagacagaaatcgttaatgcg

SEQ ID NO: 5303707 - DNA, 25 bp, Homo sapien
tatatctcagcactgtaggacagac

SEQ ID NO: 5303708 - DNA, 25 bp, Homo sapien
tatgggcttatgatcctggatgcag

SEQ ID NO: 5303709 - DNA, 25 bp, Homo sapien
aacattgcatgaccgaagggttgac

SEQ ID NO: 5303710 - DNA, 25 bp, Homo sapien
tgttctcctgggacattaaaaagag

SEQ ID NO: 5303711 - DNA, 25 bp, Homo sapien
gaatatgctgtatcactagtgatta

SEQ ID NO: 5303712 - DNA, 25 bp, Homo sapien
tacagaatatgctgtatcactagtg

SEQ ID NO: 5303713 - DNA, 25 bp, Homo sapien
tgctgtatcactagtgattaaatca

SEQ ID NO: 5303714 - DNA, 25 bp, Homo sapien
gctgtatcactagtgattaaatcag

SEQ ID NO: 5303715 - DNA, 25 bp, Homo sapien
tcagcataagtagaggagacaacac

SEQ ID NO: 5303716 - DNA, 25 bp, Homo sapien
aatacagagggctaggaatgtctcc

SEQ ID NO: 5303717 - DNA, 25 bp, Homo sapien
gaagtctccgagaggtgaccaaagt

SEQ ID NO: 5303718 - DNA, 25 bp, Homo sapien
gactgccaggtatcacatgtttaaa

SEQ ID NO: 5303719 - DNA, 25 bp, Homo sapien
tgaacatgatgatgcccctgggaat

SEQ ID NO: 5303720 - DNA, 25 bp, Homo sapien
gagagtgcagcccttctagactgag

SEQ ID NO: 5303721 - DNA, 25 bp, Homo sapien
acttcggccctagtacagagtatgc

SEQ ID NO: 5303722 - DNA, 25 bp, Homo sapien
ctgagctgcaaagatggccctgcct

SEQ ID NO: 5303723 - DNA, 25 bp, Homo sapien
gaaaatgtacaagagccataggagc

SEQ ID NO: 5303724 - DNA, 25 bp, Homo sapien
aagaaaatgtacaagagccatagga

SEQ ID NO: 5303725 - DNA, 25 bp, Homo sapien
atgtacaagagccataggagcacaa

SEQ ID NO: 5303726 - DNA, 25 bp, Homo sapien
aaatgtacaagagccataggagcac

SEQ ID NO: 5303727 - DNA, 25 bp, Homo sapien
gacgttacctatggaggcgtctgca

SEQ ID NO: 5303728 - DNA, 25 bp, Homo sapien
cccattggctgcgtggtagatggca

SEQ ID NO: 5303729 - DNA, 25 bp, Homo sapien
cgatttctggcctccgccgatacag

SEQ ID NO: 5303730 - DNA, 25 bp, Homo sapien
caaaaatggtgaagagagtgacaga

SEQ ID NO: 5303731 - DNA, 25 bp, Homo sapien
ggtaattccctctgtatgctacagg

SEQ ID NO: 5303732 - DNA, 25 bp, Homo sapien
gaaacacctgagatgttattctaag

SEQ ID NO: 5303733 - DNA, 25 bp, Homo sapien
ccctctgtatgctacagggacaggt

SEQ ID NO: 5303734 - DNA, 25 bp, Homo sapien
aaacacctgagatgttattctaagc

SEQ ID NO: 5303735 - DNA, 25 bp, Homo sapien
cacctgatacattgcacactggact

SEQ ID NO: 5303736 - DNA, 25 bp, Homo sapien
tggcacctgatacattgcacactgg

SEQ ID NO: 5303737 - DNA, 25 bp, Homo sapien
cctggcacctgatacattgcacact

SEQ ID NO: 5303738 - DNA, 25 bp, Homo sapien
cccctggcacctgatacattgcaca

SEQ ID NO: 5303739 - DNA, 25 bp, Homo sapien
tttgctgccgcaccagaaggaaagg

SEQ ID NO: 5303740 - DNA, 25 bp, Homo sapien
aaccagtcctttaggctgacatgga

SEQ ID NO: 5303741 - DNA, 25 bp, Homo sapien
tctccctcaagccatgtatcagtag

SEQ ID NO: 5303742 - DNA, 25 bp, Homo sapien
cacacctgggtatgcagtgatttcc

SEQ ID NO: 5303743 - DNA, 25 bp, Homo sapien
gcatatgtgcctatcaaaagcctga

SEQ ID NO: 5303744 - DNA, 25 bp, Homo sapien
aaaagtaggccactgcatgcaacct

SEQ ID NO: 5303745 - DNA, 25 bp, Homo sapien
gacacttgaggacacgtgagacttg

SEQ ID NO: 5303746 - DNA, 25 bp, Homo sapien
tatcagggattggagcagagtttct

SEQ ID NO: 5303747 - DNA, 25 bp, Homo sapien
tcagagcacgtccatgaatgttata

SEQ ID NO: 5303748 - DNA, 25 bp, Homo sapien
gaatgttatactatctgctgtgcct

SEQ ID NO: 5303749 - DNA, 25 bp, Homo sapien
gagcacgtccatgaatgttatacta

SEQ ID NO: 5303750 - DNA, 25 bp, Homo sapien
cgtccatgaatgttatactatctgc

SEQ ID NO: 5303751 - DNA, 25 bp, Homo sapien
gatttgaattgatttaggagccagc

SEQ ID NO: 5303752 - DNA, 25 bp, Homo sapien
caataggccttggtctctgtactct

SEQ ID NO: 5303753 - DNA, 25 bp, Homo sapien
gaattgatttaggagccagcagtca

SEQ ID NO: 5303754 - DNA, 25 bp, Homo sapien
cctaatggttgtaatggatttgaat

SEQ ID NO: 5303755 - DNA, 25 bp, Homo sapien
ctgaccaatacggtgaaatcctctc

SEQ ID NO: 5303756 - DNA, 25 bp, Homo sapien
gaccaatacggtgaaatcctctctc

SEQ ID NO: 5303757 - DNA, 25 bp, Homo sapien
accaatacggtgaaatcctctctct

SEQ ID NO: 5303758 - DNA, 25 bp, Homo sapien
gcctgaccaatacggtgaaatcctc

SEQ ID NO: 5303759 - DNA, 25 bp, Homo sapien
gcctgtagcaactgggctttgtcac

SEQ ID NO: 5303760 - DNA, 25 bp, Homo sapien
tctccaatgaaagctgtcagtaggc

SEQ ID NO: 5303761 - DNA, 25 bp, Homo sapien
caagtgcgacgaacacgactgcagt

SEQ ID NO: 5303762 - DNA, 25 bp, Homo sapien
cagaatctttcaggccaatggtgca

SEQ ID NO: 5303763 - DNA, 25 bp, Homo sapien
cacgtaatcgaaacaggagggcagc

SEQ ID NO: 5303764 - DNA, 25 bp, Homo sapien
cacaggaataattagatcatgtttg

SEQ ID NO: 5303765 - DNA, 25 bp, Homo sapien
caggaataattagatcatgtttgta

SEQ ID NO: 5303766 - DNA, 25 bp, Homo sapien
tgagagatgtacacaggaataatta

SEQ ID NO: 5303767 - DNA, 25 bp, Homo sapien
aggaataattagatcatgtttgtaa

SEQ ID NO: 5303768 - DNA, 25 bp, Homo sapien
ttaagattgttactgtgtttctcca

SEQ ID NO: 5303769 - DNA, 25 bp, Homo sapien
tttaagattgttactgtgtttctcc

SEQ ID NO: 5303770 - DNA, 25 bp, Homo sapien
atttaagattgttactgtgtttctc

SEQ ID NO: 5303771 - DNA, 25 bp, Homo sapien
tcttctagacacactgaggctatgt

SEQ ID NO: 5303772 - DNA, 25 bp, Homo sapien
tttgctcatgagactagcatccttc

SEQ ID NO: 5303773 - DNA, 25 bp, Homo sapien
acagttctacctacttttgctcatg

SEQ ID NO: 5303774 - DNA, 25 bp, Homo sapien
gaacctcagtcaacatatgatttta

SEQ ID NO: 5303775 - DNA, 25 bp, Homo sapien
tcacaggaggcccaagtactgagct

SEQ ID NO: 5303776 - DNA, 25 bp, Homo sapien
caagaagattgccacagggttgact

SEQ ID NO: 5303777 - DNA, 25 bp, Homo sapien
gccattgaactgcagaacccactgt

SEQ ID NO: 5303778 - DNA, 25 bp, Homo sapien
ggcagaatcattatggtcacaggag

SEQ ID NO: 5303779 - DNA, 25 bp, Homo sapien
tgaaccaacgtaaaccactcctctg

SEQ ID NO: 5303780 - DNA, 25 bp, Homo sapien
tagactggtcatagaatgtttcctt

SEQ ID NO: 5303781 - DNA, 25 bp, Homo sapien
cttgttcttgagagtcataaaacta

SEQ ID NO: 5303782 - DNA, 25 bp, Homo sapien
tcttgagagtcataaaactatgtga

SEQ ID NO: 5303783 - DNA, 25 bp, Homo sapien
cagcactgacagtgatagcttcaat

SEQ ID NO: 5303784 - DNA, 25 bp, Homo sapien
agctgttagtcccaaccacaagggc

SEQ ID NO: 5303785 - DNA, 25 bp, Homo sapien
gttctctccagctgttagtcccaac

SEQ ID NO: 5303786 - DNA, 25 bp, Homo sapien
cagtgatagcttcaatgaactgttc

SEQ ID NO: 5303787 - DNA, 25 bp, Homo sapien
gaatccatgacagagtatcccatca

SEQ ID NO: 5303788 - DNA, 25 bp, Homo sapien
tagaatgtaataagaaatgacctcg

SEQ ID NO: 5303789 - DNA, 25 bp, Homo sapien
gaaacttgggacagttctctccaaa

SEQ ID NO: 5303790 - DNA, 25 bp, Homo sapien
cctaatgtagtggaaacttgggaca

SEQ ID NO: 5303791 - DNA, 25 bp, Homo sapien
gtatattgactgtactaaaatgtcc

SEQ ID NO: 5303792 - DNA, 25 bp, Homo sapien
atccaattttatcagctcaactgta

SEQ ID NO: 5303793 - DNA, 25 bp, Homo sapien
tgtaaactccggttgcaggcactct

SEQ ID NO: 5303794 - DNA, 25 bp, Homo sapien
ggcactctgcattcggtatattgac

SEQ ID NO: 5303795 - DNA, 25 bp, Homo sapien
gaattcataggattcttcaatgatc

SEQ ID NO: 5303796 - DNA, 25 bp, Homo sapien
tgatcacttccaacttggtgtgctc

SEQ ID NO: 5303797 - DNA, 25 bp, Homo sapien
ctctcccaggatggggcgccccatt

SEQ ID NO: 5303798 - DNA, 25 bp, Homo sapien
catttctgcaatgcgcctctcctct

SEQ ID NO: 5303799 - DNA, 25 bp, Homo sapien
ttctctagcatgaaccttcctgaag

SEQ ID NO: 5303800 - DNA, 25 bp, Homo sapien
ttacagtagagagaatcggatgttc

SEQ ID NO: 5303801 - DNA, 25 bp, Homo sapien
ctgcaatggtgattacagtagagag

SEQ ID NO: 5303802 - DNA, 25 bp, Homo sapien
gagaatcggatgttctctagcatga

SEQ ID NO: 5303803 - DNA, 25 bp, Homo sapien
agctgaatttgaacaggctttgttc

SEQ ID NO: 5303804 - DNA, 25 bp, Homo sapien
tgaatttgaacaggctttgttcctc

SEQ ID NO: 5303805 - DNA, 25 bp, Homo sapien
gagtcatgagatttgggattcagtg

SEQ ID NO: 5303806 - DNA, 25 bp, Homo sapien
agtcatgagatttgggattcagtgc

SEQ ID NO: 5303807 - DNA, 25 bp, Homo sapien
gaagctgcttttcgctgtagaccta

SEQ ID NO: 5303808 - DNA, 25 bp, Homo sapien
cttagaaagtaggaatggacaggcc

SEQ ID NO: 5303809 - DNA, 25 bp, Homo sapien
tcagctgcgcaagtccatgtaaaag

SEQ ID NO: 5303810 - DNA, 25 bp, Homo sapien
gacaggccagtgtagaaattcccaa

SEQ ID NO: 5303811 - DNA, 25 bp, Homo sapien
gaaactgcactctttctcatattcc

SEQ ID NO: 5303812 - DNA, 25 bp, Homo sapien
ttttggttcctcaagcacaagggag

SEQ ID NO: 5303813 - DNA, 25 bp, Homo sapien
tctcatattcctcacggtcaaatat

SEQ ID NO: 5303814 - DNA, 25 bp, Homo sapien
cacggtcaaatattctaatggtaat

SEQ ID NO: 5303815 - DNA, 25 bp, Homo sapien
ggcaaaacaaatggttggagtcaca

SEQ ID NO: 5303816 - DNA, 25 bp, Homo sapien
caaaacaaatggttggagtcacacg

SEQ ID NO: 5303817 - DNA, 25 bp, Homo sapien
aaaacaaatggttggagtcacacgc

SEQ ID NO: 5303818 - DNA, 25 bp, Homo sapien
aacaaatggttggagtcacacgctc

SEQ ID NO: 5303819 - DNA, 25 bp, Homo sapien
gagatctgtgccctgttacataggt

SEQ ID NO: 5303820 - DNA, 25 bp, Homo sapien
agatctgtgccctgttacataggtg

SEQ ID NO: 5303821 - DNA, 25 bp, Homo sapien
tgtgccctgttacataggtggaggg

SEQ ID NO: 5303822 - DNA, 25 bp, Homo sapien
atctgtgccctgttacataggtgga

SEQ ID NO: 5303823 - DNA, 25 bp, Homo sapien
caggcggggctctccaatctcaagg

SEQ ID NO: 5303824 - DNA, 25 bp, Homo sapien
accaggcggggctctccaatctcaa

SEQ ID NO: 5303825 - DNA, 25 bp, Homo sapien
atctcaaggaagaaggtcttgtttt

SEQ ID NO: 5303826 - DNA, 25 bp, Homo sapien
ccaatctcaaggaagaaggtcttgt

SEQ ID NO: 5303827 - DNA, 25 bp, Homo sapien
caatgagtgtttgtagacaacggaa

SEQ ID NO: 5303828 - DNA, 25 bp, Homo sapien
tggccaagtacaattctgatcaatg

SEQ ID NO: 5303829 - DNA, 25 bp, Homo sapien
caacggaattttaacagcatggcca

SEQ ID NO: 5303830 - DNA, 25 bp, Homo sapien
tagaagcctcttaaaccctgatttg

SEQ ID NO: 5303831 - DNA, 25 bp, Homo sapien
tgcactgtcacaaggactccagctc

SEQ ID NO: 5303832 - DNA, 25 bp, Homo sapien
gactgacggaaccttgaatgtcctc

SEQ ID NO: 5303833 - DNA, 25 bp, Homo sapien
tcacagttctgcagtagaaagaatc

SEQ ID NO: 5303834 - DNA, 25 bp, Homo sapien
tgagaacctacatccattttggctg

SEQ ID NO: 5303835 - DNA, 25 bp, Homo sapien
gatagcattgaaatatttcttaata

SEQ ID NO: 5303836 - DNA, 25 bp, Homo sapien
tatggaagtacattttggttctatt

SEQ ID NO: 5303837 - DNA, 25 bp, Homo sapien
aatatttcttaatatggccaaaatt

SEQ ID NO: 5303838 - DNA, 25 bp, Homo sapien
tggccaaaatttttatggaagtaca

SEQ ID NO: 5303839 - DNA, 25 bp, Homo sapien
caaacggtggtggtgctattctgta

SEQ ID NO: 5303840 - DNA, 25 bp, Homo sapien
tgaagcctagcctgacaaacggtgg

SEQ ID NO: 5303841 - DNA, 25 bp, Homo sapien
cactagcaggatacgcacagggatc

SEQ ID NO: 5303842 - DNA, 25 bp, Homo sapien
caactatggaaacttaatggcaacc

SEQ ID NO: 5303843 - DNA, 25 bp, Homo sapien
tttcaggcagccaaaatgaaggata

SEQ ID NO: 5303844 - DNA, 25 bp, Homo sapien
tgatcaagctattgtcacaaaatcc

SEQ ID NO: 5303845 - DNA, 25 bp, Homo sapien
cctattaactcaaagagtgattgca

SEQ ID NO: 5303846 - DNA, 25 bp, Homo sapien
tattcactccttactcatttcttga

SEQ ID NO: 5303847 - DNA, 25 bp, Homo sapien
tgcctggccgagatgcaatatcttg

SEQ ID NO: 5303848 - DNA, 25 bp, Homo sapien
taaagcacccatgtctgatttgtgg

SEQ ID NO: 5303849 - DNA, 25 bp, Homo sapien
ttgcaacgtgtctgtgtggtcctcc

SEQ ID NO: 5303850 - DNA, 25 bp, Homo sapien
tatcttgaaggcatcagggatcctg

SEQ ID NO: 5303851 - DNA, 25 bp, Homo sapien
gcctcttcagctatgaatcaggtga

SEQ ID NO: 5303852 - DNA, 25 bp, Homo sapien
caaaaggaattatagcctcttcagc

SEQ ID NO: 5303853 - DNA, 25 bp, Homo sapien
caggtgaagttttcctcacagtctc

SEQ ID NO: 5303854 - DNA, 25 bp, Homo sapien
tccttcccaggtcagtaagccatgc

SEQ ID NO: 5303855 - DNA, 25 bp, Homo sapien
ttgttgttgtgtaggcaacacaata

SEQ ID NO: 5303856 - DNA, 25 bp, Homo sapien
tgttgtgtaggcaacacaatagatg

SEQ ID NO: 5303857 - DNA, 25 bp, Homo sapien
gtgtaggcaacacaatagatgtcat

SEQ ID NO: 5303858 - DNA, 25 bp, Homo sapien
ttgtgtaggcaacacaatagatgtc

SEQ ID NO: 5303859 - DNA, 25 bp, Homo sapien
ccatttcctgttgctagctgtgctt

SEQ ID NO: 5303860 - DNA, 25 bp, Homo sapien
aactcattacaaattgcatgtaatt

SEQ ID NO: 5303861 - DNA, 25 bp, Homo sapien
actcattacaaattgcatgtaatta

SEQ ID NO: 5303862 - DNA, 25 bp, Homo sapien
cacttgctggctagctgatctggag

SEQ ID NO: 5303863 - DNA, 25 bp, Homo sapien
tgcttagccatcatcgccatttggg

SEQ ID NO: 5303864 - DNA, 25 bp, Homo sapien
tgggaaggtcctaaattgagcggcc

SEQ ID NO: 5303865 - DNA, 25 bp, Homo sapien
aattacagctatctgggcttccatg

SEQ ID NO: 5303866 - DNA, 25 bp, Homo sapien
aaggaatctacttactgtcagcagg

SEQ ID NO: 5303867 - DNA, 25 bp, Homo sapien
tgtgactgtgggcatacgaccttgc

SEQ ID NO: 5303868 - DNA, 25 bp, Homo sapien
tgactgatggagagctagaacctgg

SEQ ID NO: 5303869 - DNA, 25 bp, Homo sapien
cagtgggtacccatctatgtgctag

SEQ ID NO: 5303870 - DNA, 25 bp, Homo sapien
cctgagctttggacaattatattct

SEQ ID NO: 5303871 - DNA, 25 bp, Homo sapien
cctcccctgagctttggacaattat

SEQ ID NO: 5303872 - DNA, 25 bp, Homo sapien
cttacaattaattcttctgcagatc

SEQ ID NO: 5303873 - DNA, 25 bp, Homo sapien
gatcccctcacactgatctcctccc

SEQ ID NO: 5303874 - DNA, 25 bp, Homo sapien
tccgatgacttttcctgtataatgt

SEQ ID NO: 5303875 - DNA, 25 bp, Homo sapien
gagttgtccgatgacttttcctgta

SEQ ID NO: 5303876 - DNA, 25 bp, Homo sapien
ggctgggagttgtccgatgactttt

SEQ ID NO: 5303877 - DNA, 25 bp, Homo sapien
ccccaggggaagacgttactctgat

SEQ ID NO: 5303878 - DNA, 25 bp, Homo sapien
gaaagcactcgtcaattttagcctg

SEQ ID NO: 5303879 - DNA, 25 bp, Homo sapien
gatcgaggccttttcctactgctgg

SEQ ID NO: 5303880 - DNA, 25 bp, Homo sapien
tacagtgttcaaaggtagcttcctg

SEQ ID NO: 5303881 - DNA, 25 bp, Homo sapien
ttagcctgtctatgcaatgatcgag

SEQ ID NO: 5303882 - DNA, 25 bp, Homo sapien
tttatttctagggacattcattgag

SEQ ID NO: 5303883 - DNA, 25 bp, Homo sapien
acaggatgacgtgctgagtttcaga

SEQ ID NO: 5303884 - DNA, 25 bp, Homo sapien
ttcattgagaacaggatgacgtgct

SEQ ID NO: 5303885 - DNA, 25 bp, Homo sapien
gagtttcagatgtgatcagcttgcc

SEQ ID NO: 5303886 - DNA, 25 bp, Homo sapien
catatgttgatgagcaggcaattac

SEQ ID NO: 5303887 - DNA, 25 bp, Homo sapien
aaaaacagtataggattgagccctg

SEQ ID NO: 5303888 - DNA, 25 bp, Homo sapien
caaggtaatgccactctaatgctgt

SEQ ID NO: 5303889 - DNA, 25 bp, Homo sapien
aacactgggctgatgtgcaaggcac

SEQ ID NO: 5303890 - DNA, 25 bp, Homo sapien
agatgccatttctctatgtctgcgc

SEQ ID NO: 5303891 - DNA, 25 bp, Homo sapien
ttaacatgacaaacaacaaggaatt

SEQ ID NO: 5303892 - DNA, 25 bp, Homo sapien
tagttgttggttaatgtctgcaaat

SEQ ID NO: 5303893 - DNA, 25 bp, Homo sapien
aaatgtgagagcatgttaacatgac

SEQ ID NO: 5303894 - DNA, 25 bp, Homo sapien
ctgtgagtgggcagaaaaccagctg

SEQ ID NO: 5303895 - DNA, 25 bp, Homo sapien
gctgtgagtgggcagaaaaccagct

SEQ ID NO: 5303896 - DNA, 25 bp, Homo sapien
ggctgtgagtgggcagaaaaccagc

SEQ ID NO: 5303897 - DNA, 25 bp, Homo sapien
aaagtgttctggactaagtgtcagg

SEQ ID NO: 5303898 - DNA, 25 bp, Homo sapien
aggtcctagaagctcacaatgccac

SEQ ID NO: 5303899 - DNA, 25 bp, Homo sapien
tcaggttctcttgcaattatgagac

SEQ ID NO: 5303900 - DNA, 25 bp, Homo sapien
ccagctattggactatcatctctca

SEQ ID NO: 5303901 - DNA, 25 bp, Homo sapien
ccaaggtcggatgtagtgctcagca

SEQ ID NO: 5303902 - DNA, 25 bp, Homo sapien
ccttcaacaatataccagcgtgggt

SEQ ID NO: 5303903 - DNA, 25 bp, Homo sapien
gccactatatccaagagcgtatcag

SEQ ID NO: 5303904 - DNA, 25 bp, Homo sapien
catgttcctcagtgtgcaaagcacc

SEQ ID NO: 5303905 - DNA, 25 bp, Homo sapien
ggttctggacttggctaaagtgtaa

SEQ ID NO: 5303906 - DNA, 25 bp, Homo sapien
gcaccaaggctcctacctgtcattt

SEQ ID NO: 5303907 - DNA, 25 bp, Homo sapien
tgtaagggctttgatcttgttggta

SEQ ID NO: 5303908 - DNA, 25 bp, Homo sapien
cagattggtcctaaagcttgaaata

SEQ ID NO: 5303909 - DNA, 25 bp, Homo sapien
tcctgatgatatcccccaatggttg

SEQ ID NO: 5303910 - DNA, 25 bp, Homo sapien
caatggttgtaattgaaccagaaag

SEQ ID NO: 5303911 - DNA, 25 bp, Homo sapien
gcacagttctatagattaattacta

SEQ ID NO: 5303912 - DNA, 25 bp, Homo sapien
ccagtttctttagagtttagcacag

SEQ ID NO: 5303913 - DNA, 25 bp, Homo sapien
cagagttgaaatggaccctagaggt

SEQ ID NO: 5303914 - DNA, 25 bp, Homo sapien
ggcagtctccaacgtagatttctgg

SEQ ID NO: 5303915 - DNA, 25 bp, Homo sapien
ggctgctgaaagacctaaacatttg

SEQ ID NO: 5303916 - DNA, 25 bp, Homo sapien
tgatgttctgagctggaccacttcc

SEQ ID NO: 5303917 - DNA, 25 bp, Homo sapien
tcttgggctcgaataatcctctggc

SEQ ID NO: 5303918 - DNA, 25 bp, Homo sapien
tccatgtttactgctcgctgcacag

SEQ ID NO: 5303919 - DNA, 25 bp, Homo sapien
gtttctgcataagaccctcagtgct

SEQ ID NO: 5303920 - DNA, 25 bp, Homo sapien
tgcacaggcacctctcactagatgg

SEQ ID NO: 5303921 - DNA, 25 bp, Homo sapien
gatcagctacagaggtccttagccc

SEQ ID NO: 5303922 - DNA, 25 bp, Homo sapien
tctcaacttggaatataaataacag

SEQ ID NO: 5303923 - DNA, 25 bp, Homo sapien
catagaagataggtctgtggtctca

SEQ ID NO: 5303924 - DNA, 25 bp, Homo sapien
tctgtcaagctattcctcaaggaca

SEQ ID NO: 5303925 - DNA, 25 bp, Homo sapien
ccaaagctgatgactaaataagttc

SEQ ID NO: 5303926 - DNA, 25 bp, Homo sapien
cactggaggagaggtaataggaatt

SEQ ID NO: 5303927 - DNA, 25 bp, Homo sapien
aaattaatgtcagttatacccacag

SEQ ID NO: 5303928 - DNA, 25 bp, Homo sapien
caactctagttgtgatatagtctgc

SEQ ID NO: 5303929 - DNA, 25 bp, Homo sapien
ggaagcccaggccatcagtattctg

SEQ ID NO: 5303930 - DNA, 25 bp, Homo sapien
tagtccgacctaagagtgtgtggca

SEQ ID NO: 5303931 - DNA, 25 bp, Homo sapien
gaaaggcaggtcattctatcacacc

SEQ ID NO: 5303932 - DNA, 25 bp, Homo sapien
taacagcttgtgcttgcagaggcaa

SEQ ID NO: 5303933 - DNA, 25 bp, Homo sapien
ttatcataactaaacccagtggtgg

SEQ ID NO: 5303934 - DNA, 25 bp, Homo sapien
gagtccctaattgcactaggaactg

SEQ ID NO: 5303935 - DNA, 25 bp, Homo sapien
catggagattttgctcgagtaatgc

SEQ ID NO: 5303936 - DNA, 25 bp, Homo sapien
aatatagtctttgatccactggaaa

SEQ ID NO: 5303937 - DNA, 25 bp, Homo sapien
gcatgatacataacatataatagca

SEQ ID NO: 5303938 - DNA, 25 bp, Homo sapien
taataatggccaacttgtagagttg

SEQ ID NO: 5303939 - DNA, 25 bp, Homo sapien
aacttgtagagttgttgtgaataca

SEQ ID NO: 5303940 - DNA, 25 bp, Homo sapien
tggttgattcaagaggaagtcactt

SEQ ID NO: 5303941 - DNA, 25 bp, Homo sapien
tccattacagcaggataacatagct

SEQ ID NO: 5303942 - DNA, 25 bp, Homo sapien
taattatagcaacacccagaggaca

SEQ ID NO: 5303943 - DNA, 25 bp, Homo sapien
tatgtttcagaaggcggattgtcca

SEQ ID NO: 5303944 - DNA, 25 bp, Homo sapien
gacaatgtagagtagacgatgggca

SEQ ID NO: 5303945 - DNA, 25 bp, Homo sapien
tatcctagtgctgctcattaatttg

SEQ ID NO: 5303946 - DNA, 25 bp, Homo sapien
gcttgatttgaaggacaaccagtat

SEQ ID NO: 5303947 - DNA, 25 bp, Homo sapien
gatgaagcttcctacgaatggatga

SEQ ID NO: 5303948 - DNA, 25 bp, Homo sapien
gcttgatgtgaggagcttgatttga

SEQ ID NO: 5303949 - DNA, 25 bp, Homo sapien
taactaattatgaccatgaggcacc

SEQ ID NO: 5303950 - DNA, 25 bp, Homo sapien
tgcaaaagtgcatcaaagttgaagc

SEQ ID NO: 5303951 - DNA, 25 bp, Homo sapien
ggacagagaggccataagactcaaa

SEQ ID NO: 5303952 - DNA, 25 bp, Homo sapien
caacatattgtgtggtccttagggt

SEQ ID NO: 5303953 - DNA, 25 bp, Homo sapien
tgtgtccagtcctgcccagtaacag

SEQ ID NO: 5303954 - DNA, 25 bp, Homo sapien
tgtacatttgtttacgcactcaggc

SEQ ID NO: 5303955 - DNA, 25 bp, Homo sapien
aacgaaggatcttttcacactcagc

SEQ ID NO: 5303956 - DNA, 25 bp, Homo sapien
cactcagcaagggtaaagactgtct

SEQ ID NO: 5303957 - DNA, 25 bp, Homo sapien
tgctggtgtcatagtaagagcctga

SEQ ID NO: 5303958 - DNA, 25 bp, Homo sapien
aagagcctgatgctattattatctc

SEQ ID NO: 5303959 - DNA, 25 bp, Homo sapien
tggcttataaaagagaataacgaac

SEQ ID NO: 5303960 - DNA, 25 bp, Homo sapien
cagtaaggctagtgtttccaatgat

SEQ ID NO: 5303961 - DNA, 25 bp, Homo sapien
ccagatggttcatcagggatcactt

SEQ ID NO: 5303962 - DNA, 25 bp, Homo sapien
cagggatcactttaaaggtgtttgt

SEQ ID NO: 5303963 - DNA, 25 bp, Homo sapien
ggtgtttgttagatcctccctctca

SEQ ID NO: 5303964 - DNA, 25 bp, Homo sapien
caagagtcatcagctgccaatagca

SEQ ID NO: 5303965 - DNA, 25 bp, Homo sapien
agagctccatgctctttatctcagc

SEQ ID NO: 5303966 - DNA, 25 bp, Homo sapien
gaagattttcacatacccagcactg

SEQ ID NO: 5303967 - DNA, 25 bp, Homo sapien
tttcttgcacccagtgcttgaaacg

SEQ ID NO: 5303968 - DNA, 25 bp, Homo sapien
gaaacgcatcaaagtcagagctcca

SEQ ID NO: 5303969 - DNA, 25 bp, Homo sapien
gaacacggttagactttcattgaca

SEQ ID NO: 5303970 - DNA, 25 bp, Homo sapien
tcctaacaatagacgccgaagatag

SEQ ID NO: 5303971 - DNA, 25 bp, Homo sapien
gacgccgaagatagaacacggttag

SEQ ID NO: 5303972 - DNA, 25 bp, Homo sapien
ccttgacagcgttcctaacaataga

SEQ ID NO: 5303973 - DNA, 25 bp, Homo sapien
tctgatggttatctgagcaggcact

SEQ ID NO: 5303974 - DNA, 25 bp, Homo sapien
taaaaggagctgatttctgcactcc

SEQ ID NO: 5303975 - DNA, 25 bp, Homo sapien
tctgcactcccagggatgagcaagc

SEQ ID NO: 5303976 - DNA, 25 bp, Homo sapien
tatgcaattgagcagtagaggatgc

SEQ ID NO: 5303977 - DNA, 25 bp, Homo sapien
gactttctccatggtccggagctga

SEQ ID NO: 5303978 - DNA, 25 bp, Homo sapien
gacttggcttcaccttaacgactgg

SEQ ID NO: 5303979 - DNA, 25 bp, Homo sapien
gttttgtgaccagtgaactccgtgg

SEQ ID NO: 5303980 - DNA, 25 bp, Homo sapien
caaagcaaaccccttacactggtgt

SEQ ID NO: 5303981 - DNA, 25 bp, Homo sapien
ccagctctgatcagggctcctgcag

SEQ ID NO: 5303982 - DNA, 25 bp, Homo sapien
tctgatcagggctcctgcagggatt

SEQ ID NO: 5303983 - DNA, 25 bp, Homo sapien
gctctgatcagggctcctgcaggga

SEQ ID NO: 5303984 - DNA, 25 bp, Homo sapien
cagctctgatcagggctcctgcagg

SEQ ID NO: 5303985 - DNA, 25 bp, Homo sapien
tagagaatacgcatttggaaattga

SEQ ID NO: 5303986 - DNA, 25 bp, Homo sapien
agggcatagagaatacgcatttgga

SEQ ID NO: 5303987 - DNA, 25 bp, Homo sapien
tctgtaataacaacatctattcctt

SEQ ID NO: 5303988 - DNA, 25 bp, Homo sapien
catctagtgaactgtcaggtagggc

SEQ ID NO: 5303989 - DNA, 25 bp, Homo sapien
aatgatttggtgtatactatgtcat

SEQ ID NO: 5303990 - DNA, 25 bp, Homo sapien
tctgcgtacttctgaaagagcttgc

SEQ ID NO: 5303991 - DNA, 25 bp, Homo sapien
agaaaggcatttctagcgcccaggc

SEQ ID NO: 5303992 - DNA, 25 bp, Homo sapien
tgctaaaagggaggattacgatcca

SEQ ID NO: 5303993 - DNA, 25 bp, Homo sapien
gaaggccaaaatcgccctttctgcg

SEQ ID NO: 5303994 - DNA, 25 bp, Homo sapien
tggtagagtaacagtctcaagaaat

SEQ ID NO: 5303995 - DNA, 25 bp, Homo sapien
gaagttacatgatttaacaatctgt

SEQ ID NO: 5303996 - DNA, 25 bp, Homo sapien
atgaagctttaatgactcatcttca

SEQ ID NO: 5303997 - DNA, 25 bp, Homo sapien
gactcatcttcaattcaagaggagg

SEQ ID NO: 5303998 - DNA, 25 bp, Homo sapien
ctgccttgccacacccctgtagcag

SEQ ID NO: 5303999 - DNA, 25 bp, Homo sapien
agttattacccgcttagttgcacac

SEQ ID NO: 5304000 - DNA, 25 bp, Homo sapien
gaggaggagattttacttcaagagt

SEQ ID NO: 5304001 - DNA, 25 bp, Homo sapien
gcctgattggtggctagagttctca

SEQ ID NO: 5304002 - DNA, 25 bp, Homo sapien
tgtaccaataaccattcactcctgc

SEQ ID NO: 5304003 - DNA, 25 bp, Homo sapien
caatcactagcctactttttatttc

SEQ ID NO: 5304004 - DNA, 25 bp, Homo sapien
tgagctatcgttcccatcctaacca

SEQ ID NO: 5304005 - DNA, 25 bp, Homo sapien
gaacattgtattcagccccaaaaga

SEQ ID NO: 5304006 - DNA, 25 bp, Homo sapien
acaatagctcactgccatgggacca

SEQ ID NO: 5304007 - DNA, 25 bp, Homo sapien
ggcatgggatcccaacagatggatc

SEQ ID NO: 5304008 - DNA, 25 bp, Homo sapien
gatgaacaatctgagctctagaggg

SEQ ID NO: 5304009 - DNA, 25 bp, Homo sapien
tatgtgacaatcagcagaaggtctt

SEQ ID NO: 5304010 - DNA, 25 bp, Homo sapien
caatgggaattagaacagtgatgcc

SEQ ID NO: 5304011 - DNA, 25 bp, Homo sapien
aagtattgacaattgtatccccaag

SEQ ID NO: 5304012 - DNA, 25 bp, Homo sapien
gaaatgaatgaggtccccaacacgt

SEQ ID NO: 5304013 - DNA, 25 bp, Homo sapien
cattcatatgagaaaatcgaaggca

SEQ ID NO: 5304014 - DNA, 25 bp, Homo sapien
gagagtcaggctttcactcagccta

SEQ ID NO: 5304015 - DNA, 25 bp, Homo sapien
cacttgctaatagatatctaggttg

SEQ ID NO: 5304016 - DNA, 25 bp, Homo sapien
gattacttattcacttgctaataga

SEQ ID NO: 5304017 - DNA, 25 bp, Homo sapien
gaggagagtcaggctttcactcagc

SEQ ID NO: 5304018 - DNA, 25 bp, Homo sapien
tccagtaacatgtcccagagataga

SEQ ID NO: 5304019 - DNA, 25 bp, Homo sapien
gacaacctctgtgggtacctcactg

SEQ ID NO: 5304020 - DNA, 25 bp, Homo sapien
tatgtgtcatgaaacggacctgggc

SEQ ID NO: 5304021 - DNA, 25 bp, Homo sapien
tgttccccaagaaggacctgaatgt

SEQ ID NO: 5304022 - DNA, 25 bp, Homo sapien
tctcagattgatgcaaggcagtggt

SEQ ID NO: 5304023 - DNA, 25 bp, Homo sapien
cactcatacggagtaagtgctcaaa

SEQ ID NO: 5304024 - DNA, 25 bp, Homo sapien
taaaggaaagcaaccatacctcagg

SEQ ID NO: 5304025 - DNA, 25 bp, Homo sapien
gagtgcccaacatgtaatcttagtc

SEQ ID NO: 5304026 - DNA, 25 bp, Homo sapien
tgtttcatgttgtggataaccctaa

SEQ ID NO: 5304027 - DNA, 25 bp, Homo sapien
gaattcactttgatgcgtgtctcac

SEQ ID NO: 5304028 - DNA, 25 bp, Homo sapien
aaaccattatgtccactgcccttag

SEQ ID NO: 5304029 - DNA, 25 bp, Homo sapien
aatgggatttgcctaaaatcagacg

SEQ ID NO: 5304030 - DNA, 25 bp, Homo sapien
agctgactgacaagcagatctactg

SEQ ID NO: 5304031 - DNA, 25 bp, Homo sapien
gactgacaagcagatctactgcacc

SEQ ID NO: 5304032 - DNA, 25 bp, Homo sapien
gacaagcagatctactgcaccttct

SEQ ID NO: 5304033 - DNA, 25 bp, Homo sapien
actgaggatatcttgtctggatttt

SEQ ID NO: 5304034 - DNA, 25 bp, Homo sapien
ccaaggccttcagtaaattcggtca

SEQ ID NO: 5304035 - DNA, 25 bp, Homo sapien
ctgtaccaaggccttcagtaaattc

SEQ ID NO: 5304036 - DNA, 25 bp, Homo sapien
caaggccttcagtaaattcggtcat

SEQ ID NO: 5304037 - DNA, 25 bp, Homo sapien
tgtaccaaggccttcagtaaattcg

SEQ ID NO: 5304038 - DNA, 25 bp, Homo sapien
gagatctcagggtacatatacttcc

SEQ ID NO: 5304039 - DNA, 25 bp, Homo sapien
aaatgttgaggacagccctcctagg

SEQ ID NO: 5304040 - DNA, 25 bp, Homo sapien
tcttaagaattcatggacctgatac

SEQ ID NO: 5304041 - DNA, 25 bp, Homo sapien
taggaaagtctcactcagaattgac

SEQ ID NO: 5304042 - DNA, 25 bp, Homo sapien
tccagtcacgtctgtatccagtaag

SEQ ID NO: 5304043 - DNA, 25 bp, Homo sapien
gagaggcctcgatatgtctgttgca

SEQ ID NO: 5304044 - DNA, 25 bp, Homo sapien
caccaggattccacgttactaagga

SEQ ID NO: 5304045 - DNA, 25 bp, Homo sapien
ccaactctttgtggcttatctaata

SEQ ID NO: 5304046 - DNA, 25 bp, Homo sapien
caaagtcatcttctgcatatccttt

SEQ ID NO: 5304047 - DNA, 25 bp, Homo sapien
ggagacgctttgtacctgagaggaa

SEQ ID NO: 5304048 - DNA, 25 bp, Homo sapien
cctcagaacaggagacaacacggtg

SEQ ID NO: 5304049 - DNA, 25 bp, Homo sapien
cactgaagcgtgcactctgaaggag

SEQ ID NO: 5304050 - DNA, 25 bp, Homo sapien
gaacggcttgtgcaaaaacctcaga

SEQ ID NO: 5304051 - DNA, 25 bp, Homo sapien
tctggccatttcatacaaagggacc

SEQ ID NO: 5304052 - DNA, 25 bp, Homo sapien
tctgcagtcactgggaacacacgga

SEQ ID NO: 5304053 - DNA, 25 bp, Homo sapien
cacgtatcgggtaggaaggattgcc

SEQ ID NO: 5304054 - DNA, 25 bp, Homo sapien
tctggtgccccatcaagacaatctg

SEQ ID NO: 5304055 - DNA, 25 bp, Homo sapien
tagatagatagattccagggacaca

SEQ ID NO: 5304056 - DNA, 25 bp, Homo sapien
gccattctgtctaataggtactgga

SEQ ID NO: 5304057 - DNA, 25 bp, Homo sapien
cacaaaaccagtgttagcataaata

SEQ ID NO: 5304058 - DNA, 25 bp, Homo sapien
gcctggcctacatcttcttataatg

SEQ ID NO: 5304059 - DNA, 25 bp, Homo sapien
acagaggtgttgtcttggtgactca

SEQ ID NO: 5304060 - DNA, 25 bp, Homo sapien
tgttatttgagactaccccatgcaa

SEQ ID NO: 5304061 - DNA, 25 bp, Homo sapien
tcttgggaatgctcagagtgaccta

SEQ ID NO: 5304062 - DNA, 25 bp, Homo sapien
tgccttgggtgggtataatattcca

SEQ ID NO: 5304063 - DNA, 25 bp, Homo sapien
tatgtgctgtaaatgcaagaaagct

SEQ ID NO: 5304064 - DNA, 25 bp, Homo sapien
aacagacctccaaactcacttgtgg

SEQ ID NO: 5304065 - DNA, 25 bp, Homo sapien
tgtgtcactactaaactatgtgctg

SEQ ID NO: 5304066 - DNA, 25 bp, Homo sapien
taaaagaaccactgcagggatgatg

SEQ ID NO: 5304067 - DNA, 25 bp, Homo sapien
cagggctatatctttacacatccaa

SEQ ID NO: 5304068 - DNA, 25 bp, Homo sapien
agaattcagactttctaccatagaa

SEQ ID NO: 5304069 - DNA, 25 bp, Homo sapien
ggcatgtattctttcaaccctgatg

SEQ ID NO: 5304070 - DNA, 25 bp, Homo sapien
taccatagaatttggtggtccttct

SEQ ID NO: 5304071 - DNA, 25 bp, Homo sapien
tacatccattgtgctataatattct

SEQ ID NO: 5304072 - DNA, 25 bp, Homo sapien
gctataatattctaacacttcgctg

SEQ ID NO: 5304073 - DNA, 25 bp, Homo sapien
aacacttcgctgatctttgctgcac

SEQ ID NO: 5304074 - DNA, 25 bp, Homo sapien
actgactgacacctttacatccatt

SEQ ID NO: 5304075 - DNA, 25 bp, Homo sapien
atatcctctggaaacccgatctctg

SEQ ID NO: 5304076 - DNA, 25 bp, Homo sapien
aattgtctcccagcagaaagagttg

SEQ ID NO: 5304077 - DNA, 25 bp, Homo sapien
ggcaggcagattctgaggctgtgac

SEQ ID NO: 5304078 - DNA, 25 bp, Homo sapien
agatgggatgtgcaaaattgtctcc

SEQ ID NO: 5304079 - DNA, 25 bp, Homo sapien
ctgcagccagacaatacggttttac

SEQ ID NO: 5304080 - DNA, 25 bp, Homo sapien
aaccaggtccccagttggtctcctg

SEQ ID NO: 5304081 - DNA, 25 bp, Homo sapien
tacaacagaaccaggtccccagttg

SEQ ID NO: 5304082 - DNA, 25 bp, Homo sapien
cagacaatacggttttacaacagaa

SEQ ID NO: 5304083 - DNA, 25 bp, Homo sapien
aaaaccaggactatattcgtacatg

SEQ ID NO: 5304084 - DNA, 25 bp, Homo sapien
tatattcgtacatggaactgggatg

SEQ ID NO: 5304085 - DNA, 25 bp, Homo sapien
ccaggactatattcgtacatggaac

SEQ ID NO: 5304086 - DNA, 25 bp, Homo sapien
ctgagacaaaaaaccaggactatat

SEQ ID NO: 5304087 - DNA, 25 bp, Homo sapien
ggacttaaggctattcaggtgtgtg

SEQ ID NO: 5304088 - DNA, 25 bp, Homo sapien
agaagagagaagtcactttgtgctc

SEQ ID NO: 5304089 - DNA, 25 bp, Homo sapien
tgagaagagagaagtcactttgtgc

SEQ ID NO: 5304090 - DNA, 25 bp, Homo sapien
tatatggaaaggacttaaggctatt

SEQ ID NO: 5304091 - DNA, 25 bp, Homo sapien
tcctgtggaagagaaagctgcccgt

SEQ ID NO: 5304092 - DNA, 25 bp, Homo sapien
ctttcctgtggaagagaaagctgcc

SEQ ID NO: 5304093 - DNA, 25 bp, Homo sapien
ttcctgtggaagagaaagctgcccg

SEQ ID NO: 5304094 - DNA, 25 bp, Homo sapien
tgtggaagagaaagctgcccgtcat

SEQ ID NO: 5304095 - DNA, 25 bp, Homo sapien
tattttgccaatatggagccattag

SEQ ID NO: 5304096 - DNA, 25 bp, Homo sapien
tatctcaatagcaatgccaagaggt

SEQ ID NO: 5304097 - DNA, 25 bp, Homo sapien
cattaggaaagagctctagtaggtc

SEQ ID NO: 5304098 - DNA, 25 bp, Homo sapien
tcagcactggtgctctaagaggctt

SEQ ID NO: 5304099 - DNA, 25 bp, Homo sapien
aatttcctgagcaatgatggtccac

SEQ ID NO: 5304100 - DNA, 25 bp, Homo sapien
gattaaacttaatagaatttcctga

SEQ ID NO: 5304101 - DNA, 25 bp, Homo sapien
caatgatggtccacactggatctga

SEQ ID NO: 5304102 - DNA, 25 bp, Homo sapien
ttaaacttaatagaatttcctgagc

SEQ ID NO: 5304103 - DNA, 25 bp, Homo sapien
ggttggctgcactcggcaataccac

SEQ ID NO: 5304104 - DNA, 25 bp, Homo sapien
taacctggctacagctagatctggc

SEQ ID NO: 5304105 - DNA, 25 bp, Homo sapien
ggttgctccaaacatcaaaatcggg

SEQ ID NO: 5304106 - DNA, 25 bp, Homo sapien
aaatcaccctgcgtatgggatccaa

SEQ ID NO: 5304107 - DNA, 25 bp, Homo sapien
tctccataaagttagtcaaaacttc

SEQ ID NO: 5304108 - DNA, 25 bp, Homo sapien
atctccataaagttagtcaaaactt

SEQ ID NO: 5304109 - DNA, 25 bp, Homo sapien
gggcatcctagacgttatagctata

SEQ ID NO: 5304110 - DNA, 25 bp, Homo sapien
gacaaactacctaagagtaccttga

SEQ ID NO: 5304111 - DNA, 25 bp, Homo sapien
taagagtaccttgattattccttct

SEQ ID NO: 5304112 - DNA, 25 bp, Homo sapien
tgaaaccagatacaaaacatcgcag

SEQ ID NO: 5304113 - DNA, 25 bp, Homo sapien
aacagggactaactagacagtgctc

SEQ ID NO: 5304114 - DNA, 25 bp, Homo sapien
taatctacccatcatgctagcttgg

SEQ ID NO: 5304115 - DNA, 25 bp, Homo sapien
aaaagtccggcctgagtctcctgac

SEQ ID NO: 5304116 - DNA, 25 bp, Homo sapien
tagccctgctattcagaccacgaat

SEQ ID NO: 5304117 - DNA, 25 bp, Homo sapien
gaggttgactttaggttcccatctg

SEQ ID NO: 5304118 - DNA, 25 bp, Homo sapien
acagcacagaggttgactttaggtt

SEQ ID NO: 5304119 - DNA, 25 bp, Homo sapien
ggttgactttaggttcccatctgac

SEQ ID NO: 5304120 - DNA, 25 bp, Homo sapien
cacagaggttgactttaggttccca

SEQ ID NO: 5304121 - DNA, 25 bp, Homo sapien
agagggcagccaaactgtgacagga

SEQ ID NO: 5304122 - DNA, 25 bp, Homo sapien
gagtggacagcaacactgacagctc

SEQ ID NO: 5304123 - DNA, 25 bp, Homo sapien
ggttgctcctagagtggacagcaac

SEQ ID NO: 5304124 - DNA, 25 bp, Homo sapien
gacagctcatcatcatttattctca

SEQ ID NO: 5304125 - DNA, 25 bp, Homo sapien
accagtggcaagagccccatcaggt

SEQ ID NO: 5304126 - DNA, 25 bp, Homo sapien
ctaaacaccagtggcaagagcccca

SEQ ID NO: 5304127 - DNA, 25 bp, Homo sapien
aaacaccagtggcaagagccccatc

SEQ ID NO: 5304128 - DNA, 25 bp, Homo sapien
acaccagtggcaagagccccatcag

SEQ ID NO: 5304129 - DNA, 25 bp, Homo sapien
gactcagaacctcagtaactggctg

SEQ ID NO: 5304130 - DNA, 25 bp, Homo sapien
gagaaagttgactcagaacctcagt

SEQ ID NO: 5304131 - DNA, 25 bp, Homo sapien
aacctcagtaactggctgaaaggca

SEQ ID NO: 5304132 - DNA, 25 bp, Homo sapien
gcaccatgaccatcttcctcatttt

SEQ ID NO: 5304133 - DNA, 25 bp, Homo sapien
cctggcttggctcaacctttggcaa

SEQ ID NO: 5304134 - DNA, 25 bp, Homo sapien
caggaactgcaaggcactatgggaa

SEQ ID NO: 5304135 - DNA, 25 bp, Homo sapien
ccaaggcagttacgaagattatctc

SEQ ID NO: 5304136 - DNA, 25 bp, Homo sapien
gacttcccaccagaaatccagggca

SEQ ID NO: 5304137 - DNA, 25 bp, Homo sapien
ggaggacatctttcaagattaacta

SEQ ID NO: 5304138 - DNA, 25 bp, Homo sapien
catgtttaagtactgtaggttttga

SEQ ID NO: 5304139 - DNA, 25 bp, Homo sapien
gtggcgccatcagccatgtttaagt

SEQ ID NO: 5304140 - DNA, 25 bp, Homo sapien
catctttcaagattaactatgtaat

SEQ ID NO: 5304141 - DNA, 25 bp, Homo sapien
tgactccattgcacgatgacaaact

SEQ ID NO: 5304142 - DNA, 25 bp, Homo sapien
ctttcacttggatctgactgtatgg

SEQ ID NO: 5304143 - DNA, 25 bp, Homo sapien
atagtctgactccattgcacgatga

SEQ ID NO: 5304144 - DNA, 25 bp, Homo sapien
gcacgatgacaaactctttcacttg

SEQ ID NO: 5304145 - DNA, 25 bp, Homo sapien
atgttttctaagctgctaagagggc

SEQ ID NO: 5304146 - DNA, 25 bp, Homo sapien
taagctgctaagagggcagcacaac

SEQ ID NO: 5304147 - DNA, 25 bp, Homo sapien
ttttctaagctgctaagagggcagc

SEQ ID NO: 5304148 - DNA, 25 bp, Homo sapien
gctaagagggcagcacaactccatt

SEQ ID NO: 5304149 - DNA, 25 bp, Homo sapien
aaatgcctgcgtggtcatcatcaaa

SEQ ID NO: 5304150 - DNA, 25 bp, Homo sapien
gataacatttcctcgagctccagat

SEQ ID NO: 5304151 - DNA, 25 bp, Homo sapien
gaattcgagctctccacaagtgtcc

SEQ ID NO: 5304152 - DNA, 25 bp, Homo sapien
gagatccgaggcaagcaagtgtaga

SEQ ID NO: 5304153 - DNA, 25 bp, Homo sapien
ccagggccatcaaggtcaggttaga

SEQ ID NO: 5304154 - DNA, 25 bp, Homo sapien
ttcccacgatggtgctaggaccgag

SEQ ID NO: 5304155 - DNA, 25 bp, Homo sapien
gttagtcaaatcaccacctctgcgg

SEQ ID NO: 5304156 - DNA, 25 bp, Homo sapien
tctgcggataatggtaagggccaca

SEQ ID NO: 5304157 - DNA, 25 bp, Homo sapien
tgtacagagcctgtttttctgcagg

SEQ ID NO: 5304158 - DNA, 25 bp, Homo sapien
tgtgtacagagcctgtttttctgca

SEQ ID NO: 5304159 - DNA, 25 bp, Homo sapien
catctgtgtacagagcctgtttttc

SEQ ID NO: 5304160 - DNA, 25 bp, Homo sapien
tcttcacatctgtgtacagagcctg

SEQ ID NO: 5304161 - DNA, 25 bp, Homo sapien
tccttctcggtgtcggtcatatttt

SEQ ID NO: 5304162 - DNA, 25 bp, Homo sapien
tgttccttctcggtgtcggtcatat

SEQ ID NO: 5304163 - DNA, 25 bp, Homo sapien
aatgttccttctcggtgtcggtcat

SEQ ID NO: 5304164 - DNA, 25 bp, Homo sapien
aaatgttccttctcggtgtcggtca

SEQ ID NO: 5304165 - DNA, 25 bp, Homo sapien
tgctgattcaccaaatctccagtgg

SEQ ID NO: 5304166 - DNA, 25 bp, Homo sapien
tattcccagttcctagagcacagcc

SEQ ID NO: 5304167 - DNA, 25 bp, Homo sapien
tctccagtggtaaaccagaatctgg

SEQ ID NO: 5304168 - DNA, 25 bp, Homo sapien
aaagatgcaactctctaagggcagg

SEQ ID NO: 5304169 - DNA, 25 bp, Homo sapien
gacaaagttctaacaccaagtgtct

SEQ ID NO: 5304170 - DNA, 25 bp, Homo sapien
tgaaactcaccttagaaagaaacta

SEQ ID NO: 5304171 - DNA, 25 bp, Homo sapien
tctaaagttcctgacaatatactca

SEQ ID NO: 5304172 - DNA, 25 bp, Homo sapien
ctcaccttagaaagaaactagtcaa

SEQ ID NO: 5304173 - DNA, 25 bp, Homo sapien
gaacttattacctagctgggaagac

SEQ ID NO: 5304174 - DNA, 25 bp, Homo sapien
gggctagaaccatgagatagacaga

SEQ ID NO: 5304175 - DNA, 25 bp, Homo sapien
gatagacagacgtaatctctctcct

SEQ ID NO: 5304176 - DNA, 25 bp, Homo sapien
tatatagcaaagtgcgaggcactgg

SEQ ID NO: 5304177 - DNA, 25 bp, Homo sapien
cgtgaaaccacgtccaatgttctct

SEQ ID NO: 5304178 - DNA, 25 bp, Homo sapien
gtggagtgatctttcttgctcagcc

SEQ ID NO: 5304179 - DNA, 25 bp, Homo sapien
tacttcagcataggtgttctagacc

SEQ ID NO: 5304180 - DNA, 25 bp, Homo sapien
actttgctcagttgcagtggagtga

SEQ ID NO: 5304181 - DNA, 25 bp, Homo sapien
gagtgtgaatggattcttcctccgt

SEQ ID NO: 5304182 - DNA, 25 bp, Homo sapien
tccttttaaacagctcccgatcagg

SEQ ID NO: 5304183 - DNA, 25 bp, Homo sapien
tagtagaaaatacggcgcactccct

SEQ ID NO: 5304184 - DNA, 25 bp, Homo sapien
tccgttcctccacgctagtagaaaa

SEQ ID NO: 5304185 - DNA, 25 bp, Homo sapien
taaaacaccagttgctatcggccac

SEQ ID NO: 5304186 - DNA, 25 bp, Homo sapien
gaatctgaggccgaatctgatgcag

SEQ ID NO: 5304187 - DNA, 25 bp, Homo sapien
tatcggccactggtgtcgtttgcca

SEQ ID NO: 5304188 - DNA, 25 bp, Homo sapien
tctgatgcagactctcccgttgtag

SEQ ID NO: 5304189 - DNA, 25 bp, Homo sapien
tcgtggagacgtccccccatactta

SEQ ID NO: 5304190 - DNA, 25 bp, Homo sapien
ggcggaatggaagaaatagcctctt

SEQ ID NO: 5304191 - DNA, 25 bp, Homo sapien
cagggcagtcaccacgactgataga

SEQ ID NO: 5304192 - DNA, 25 bp, Homo sapien
caggaacctcagtttgcctccgcaa

SEQ ID NO: 5304193 - DNA, 25 bp, Homo sapien
tgatagattctgactccaggaacct

SEQ ID NO: 5304194 - DNA, 25 bp, Homo sapien
caggctctggttagctgacacagtc

SEQ ID NO: 5304195 - DNA, 25 bp, Homo sapien
gaacatgtatcgtcccctgtaaggg

SEQ ID NO: 5304196 - DNA, 25 bp, Homo sapien
tatctacaccggtgttctgcctggc

SEQ ID NO: 5304197 - DNA, 25 bp, Homo sapien
cacctgctctgcgatgacagacaga

SEQ ID NO: 5304198 - DNA, 25 bp, Homo sapien
gctagaatgaagtgacgtgatattg

SEQ ID NO: 5304199 - DNA, 25 bp, Homo sapien
agaatgaagtgacgtgatattggct

SEQ ID NO: 5304200 - DNA, 25 bp, Homo sapien
aggctagaatgaagtgacgtgatat

SEQ ID NO: 5304201 - DNA, 25 bp, Homo sapien
tagaatgaagtgacgtgatattggc

SEQ ID NO: 5304202 - DNA, 25 bp, Homo sapien
tgcacaccagggggacagttaatta

SEQ ID NO: 5304203 - DNA, 25 bp, Homo sapien
tggtgcacaccagggggacagttaa

SEQ ID NO: 5304204 - DNA, 25 bp, Homo sapien
gcacaccagggggacagttaattaa

SEQ ID NO: 5304205 - DNA, 25 bp, Homo sapien
gtgcacaccagggggacagttaatt

SEQ ID NO: 5304206 - DNA, 25 bp, Homo sapien
taaacgtgagggttggtactatcag

SEQ ID NO: 5304207 - DNA, 25 bp, Homo sapien
tgcaggcacattccaaggatgcgat

SEQ ID NO: 5304208 - DNA, 25 bp, Homo sapien
taggactaaagtgagcaactgcagg

SEQ ID NO: 5304209 - DNA, 25 bp, Homo sapien
cttttggactagatgtggaccacta

SEQ ID NO: 5304210 - DNA, 25 bp, Homo sapien
aaagagcccgcatcgccaagtcaat

SEQ ID NO: 5304211 - DNA, 25 bp, Homo sapien
caaaaaagagcccgcatcgccaagt

SEQ ID NO: 5304212 - DNA, 25 bp, Homo sapien
agcccgcatcgccaagtcaatccta

SEQ ID NO: 5304213 - DNA, 25 bp, Homo sapien
cgcatcgccaagtcaatcctaagcc

SEQ ID NO: 5304214 - DNA, 25 bp, Homo sapien
tctctgacttctgtgtcaataaccg

SEQ ID NO: 5304215 - DNA, 25 bp, Homo sapien
caataaccgagtcagaatctgtttt

SEQ ID NO: 5304216 - DNA, 25 bp, Homo sapien
ttttctggaacacagtctttgcctc

SEQ ID NO: 5304217 - DNA, 25 bp, Homo sapien
tttctggaacacagtctttgcctct

SEQ ID NO: 5304218 - DNA, 25 bp, Homo sapien
aacttattagcaatatacaggattc

SEQ ID NO: 5304219 - DNA, 25 bp, Homo sapien
ccactgatttcagaacaaagttcca

SEQ ID NO: 5304220 - DNA, 25 bp, Homo sapien
tatacaggattctcatcatcgcctc

SEQ ID NO: 5304221 - DNA, 25 bp, Homo sapien
ttagcaatatacaggattctcatca

SEQ ID NO: 5304222 - DNA, 25 bp, Homo sapien
gctgctttgcaacggcctgtttttg

SEQ ID NO: 5304223 - DNA, 25 bp, Homo sapien
ttgcatactctaagttcttcagaac

SEQ ID NO: 5304224 - DNA, 25 bp, Homo sapien
cgagctgctttgcaacggcctgttt

SEQ ID NO: 5304225 - DNA, 25 bp, Homo sapien
ctttgcaacggcctgtttttgcata

SEQ ID NO: 5304226 - DNA, 25 bp, Homo sapien
gtgatatctcaccccaggtaaaatg

SEQ ID NO: 5304227 - DNA, 25 bp, Homo sapien
ccactgctggttatataccctgcaa

SEQ ID NO: 5304228 - DNA, 25 bp, Homo sapien
tccactgctggttatataccctgca

SEQ ID NO: 5304229 - DNA, 25 bp, Homo sapien
tgtgatatctcaccccaggtaaaat

SEQ ID NO: 5304230 - DNA, 25 bp, Homo sapien
tcaagacatttcctcgtcctcatca

SEQ ID NO: 5304231 - DNA, 25 bp, Homo sapien
tgcctagtctcaggccttttgtgtc

SEQ ID NO: 5304232 - DNA, 25 bp, Homo sapien
tcagattccttaccagcacctttgc

SEQ ID NO: 5304233 - DNA, 25 bp, Homo sapien
gagaaatcctatagcctttctggct

SEQ ID NO: 5304234 - DNA, 25 bp, Homo sapien
aggtggagaaatcctatagcctttc

SEQ ID NO: 5304235 - DNA, 25 bp, Homo sapien
taaggaagaactagtcacacatgcg

SEQ ID NO: 5304236 - DNA, 25 bp, Homo sapien
tgtaatcaacctccgaactgctgag

SEQ ID NO: 5304237 - DNA, 25 bp, Homo sapien
acttcaacttgcgtaagaccccgtg

SEQ ID NO: 5304238 - DNA, 25 bp, Homo sapien
tagaagttccatcacaaaagcccgg

SEQ ID NO: 5304239 - DNA, 25 bp, Homo sapien
gctttggctgctcagtccgcatggg

SEQ ID NO: 5304240 - DNA, 25 bp, Homo sapien
tgctcagtccgcatgggctggatgt

SEQ ID NO: 5304241 - DNA, 25 bp, Homo sapien
tgggctggatgtgaaaaaagatccc

SEQ ID NO: 5304242 - DNA, 25 bp, Homo sapien
gatcccagtatgatgccttctctaa

SEQ ID NO: 5304243 - DNA, 25 bp, Homo sapien
gagggactttgcttttattgacagc

SEQ ID NO: 5304244 - DNA, 25 bp, Homo sapien
tgacagccatgacaactatatgcct

SEQ ID NO: 5304245 - DNA, 25 bp, Homo sapien
gccatgacaactatatgcctagcat

SEQ ID NO: 5304246 - DNA, 25 bp, Homo sapien
tctatatgggtaacacagagggact

SEQ ID NO: 5304247 - DNA, 25 bp, Homo sapien
caagaaggtacctctatgatgtggg

SEQ ID NO: 5304248 - DNA, 25 bp, Homo sapien
ttgttgaagtctctagatcctgtga

SEQ ID NO: 5304249 - DNA, 25 bp, Homo sapien
tagatcctgtgactttctggtggaa

SEQ ID NO: 5304250 - DNA, 25 bp, Homo sapien
gtctctagatcctgtgactttctgg

SEQ ID NO: 5304251 - DNA, 25 bp, Homo sapien
taaacttgaattatttctgttctag

SEQ ID NO: 5304252 - DNA, 25 bp, Homo sapien
tgttctagttatttcatccttactc

SEQ ID NO: 5304253 - DNA, 25 bp, Homo sapien
tagttatttcatccttactctgtgc

SEQ ID NO: 5304254 - DNA, 25 bp, Homo sapien
tatttcatccttactctgtgctaat

SEQ ID NO: 5304255 - DNA, 25 bp, Homo sapien
acacgtacccatcttggactgatgg

SEQ ID NO: 5304256 - DNA, 25 bp, Homo sapien
actgtgtcacacgtacccatcttgg

SEQ ID NO: 5304257 - DNA, 25 bp, Homo sapien
tttggtgaactgtgtcacacgtacc

SEQ ID NO: 5304258 - DNA, 25 bp, Homo sapien
ggtgaactgtgtcacacgtacccat

SEQ ID NO: 5304259 - DNA, 25 bp, Homo sapien
tgctttacatcaactctgtacatat

SEQ ID NO: 5304260 - DNA, 25 bp, Homo sapien
ttgtttgctttacatcaactctgta

SEQ ID NO: 5304261 - DNA, 25 bp, Homo sapien
tggcttttgcctgctatgttctttt

SEQ ID NO: 5304262 - DNA, 25 bp, Homo sapien
tttacatcaactctgtacatattca

SEQ ID NO: 5304263 - DNA, 25 bp, Homo sapien
gaaatagacagtaggaatcagtaac

SEQ ID NO: 5304264 - DNA, 25 bp, Homo sapien
ggtgttgtataatgtagccttctcc

SEQ ID NO: 5304265 - DNA, 25 bp, Homo sapien
gcttattagaagttctgaggctcat

SEQ ID NO: 5304266 - DNA, 25 bp, Homo sapien
tcagtaacattcatccggaggtggt

SEQ ID NO: 5304267 - DNA, 25 bp, Homo sapien
tcaacacgcacaaagaaaatgctgc

SEQ ID NO: 5304268 - DNA, 25 bp, Homo sapien
ttcaacacgcacaaagaaaatgctg

SEQ ID NO: 5304269 - DNA, 25 bp, Homo sapien
cttcaacacgcacaaagaaaatgct

SEQ ID NO: 5304270 - DNA, 25 bp, Homo sapien
caacacgcacaaagaaaatgctgca

SEQ ID NO: 5304271 - DNA, 25 bp, Homo sapien
agacctctattgttcctttcgcctc

SEQ ID NO: 5304272 - DNA, 25 bp, Homo sapien
tttcgcctctccttgttcttccatt

SEQ ID NO: 5304273 - DNA, 25 bp, Homo sapien
cagaaccctctctggataccagcgt

SEQ ID NO: 5304274 - DNA, 25 bp, Homo sapien
tccatttgtctcatggaatctcttt

SEQ ID NO: 5304275 - DNA, 25 bp, Homo sapien
catccatcaggaaagtcaggaaaac

SEQ ID NO: 5304276 - DNA, 25 bp, Homo sapien
gaatttttagcaaggtcatccatca

SEQ ID NO: 5304277 - DNA, 25 bp, Homo sapien
ttttagcaaggtcatccatcaggaa

SEQ ID NO: 5304278 - DNA, 25 bp, Homo sapien
aatttttagcaaggtcatccatcag

SEQ ID NO: 5304279 - DNA, 25 bp, Homo sapien
ttttttgtgcacaacccaattcaat

SEQ ID NO: 5304280 - DNA, 25 bp, Homo sapien
tttttgtgcacaacccaattcaatc

SEQ ID NO: 5304281 - DNA, 25 bp, Homo sapien
tccttttttgtgcacaacccaattc

SEQ ID NO: 5304282 - DNA, 25 bp, Homo sapien
ccttttttgtgcacaacccaattca

SEQ ID NO: 5304283 - DNA, 25 bp, Homo sapien
ttgtccttcagtgtatacagtaatg

SEQ ID NO: 5304284 - DNA, 25 bp, Homo sapien
cagtgtatacagtaatgaagttttt

SEQ ID NO: 5304285 - DNA, 25 bp, Homo sapien
caaattagtgtatttctatcttgaa

SEQ ID NO: 5304286 - DNA, 25 bp, Homo sapien
atagggaaaaatggcattgtccttc

SEQ ID NO: 5304287 - DNA, 25 bp, Homo sapien
gattataagctgattataagacagc

SEQ ID NO: 5304288 - DNA, 25 bp, Homo sapien
tgggctgatctgtgggattataagc

SEQ ID NO: 5304289 - DNA, 25 bp, Homo sapien
tataagctgattataagacagctga

SEQ ID NO: 5304290 - DNA, 25 bp, Homo sapien
gatctgtgggattataagctgatta

SEQ ID NO: 5304291 - DNA, 25 bp, Homo sapien
ttctactaccgtttcttttcaatga

SEQ ID NO: 5304292 - DNA, 25 bp, Homo sapien
tcaatgaaatggaacagtcaaatac

SEQ ID NO: 5304293 - DNA, 25 bp, Homo sapien
aatggaacagtcaaatacacttaaa

SEQ ID NO: 5304294 - DNA, 25 bp, Homo sapien
cttttcaatgaaatggaacagtcaa

SEQ ID NO: 5304295 - DNA, 25 bp, Homo sapien
caatcactgggtttctcgtaggtag

SEQ ID NO: 5304296 - DNA, 25 bp, Homo sapien
ttgctgaccaatcactgggtttctc

SEQ ID NO: 5304297 - DNA, 25 bp, Homo sapien
cactgggtttctcgtaggtagatct

SEQ ID NO: 5304298 - DNA, 25 bp, Homo sapien
cgtaggtagatctacttcattctga

SEQ ID NO: 5304299 - DNA, 25 bp, Homo sapien
tcatggtatttttgttctcccagaa

SEQ ID NO: 5304300 - DNA, 25 bp, Homo sapien
gcatagttgtgactcatgcttcagg

SEQ ID NO: 5304301 - DNA, 25 bp, Homo sapien
catgcttcaggggtgtgacatacgc

SEQ ID NO: 5304302 - DNA, 25 bp, Homo sapien
tggacactggcatagttgtgactca

SEQ ID NO: 5304303 - DNA, 25 bp, Homo sapien
gacatacgctatgctgaagccaggc

SEQ ID NO: 5304304 - DNA, 25 bp, Homo sapien
taaggaggatttagcacctgtgctt

SEQ ID NO: 5304305 - DNA, 25 bp, Homo sapien
acagagctgggtattcagaagtggc

SEQ ID NO: 5304306 - DNA, 25 bp, Homo sapien
gtttccctgaattgtgccataagga

SEQ ID NO: 5304307 - DNA, 25 bp, Homo sapien
tgacagagctgggtattcagaagtg

SEQ ID NO: 5304308 - DNA, 25 bp, Homo sapien
aagtccaggttattgaacccataca

SEQ ID NO: 5304309 - DNA, 25 bp, Homo sapien
ggttattgaacccatacattgtctc

SEQ ID NO: 5304310 - DNA, 25 bp, Homo sapien
cacaaggtgggttatcttgttcaac

SEQ ID NO: 5304311 - DNA, 25 bp, Homo sapien
ttcaactgactgttgagagacttgg

SEQ ID NO: 5304312 - DNA, 25 bp, Homo sapien
ttagaatatgccttcgccttgggcc

SEQ ID NO: 5304313 - DNA, 25 bp, Homo sapien
gccttgggccacttctgccatacaa

SEQ ID NO: 5304314 - DNA, 25 bp, Homo sapien
caaggtgggcaaccaagtatactgc

SEQ ID NO: 5304315 - DNA, 25 bp, Homo sapien
ctccatccctgaggaggattcctct

SEQ ID NO: 5304316 - DNA, 25 bp, Homo sapien
gcccttcacgctaatgtcacgagac

SEQ ID NO: 5304317 - DNA, 25 bp, Homo sapien
cgctaatgtcacgagacagcggcat

SEQ ID NO: 5304318 - DNA, 25 bp, Homo sapien
tgtactggggcccttcacgctaatg

SEQ ID NO: 5304319 - DNA, 25 bp, Homo sapien
ttcacgctaatgtcacgagacagcg

SEQ ID NO: 5304320 - DNA, 25 bp, Homo sapien
aaataattctcgaaagaaggcaagc

SEQ ID NO: 5304321 - DNA, 25 bp, Homo sapien
ctgagaggagtaatacatagaatac

SEQ ID NO: 5304322 - DNA, 25 bp, Homo sapien
cagatgacacgttgtacttaatagg

SEQ ID NO: 5304323 - DNA, 25 bp, Homo sapien
caaaagtagcaatgagaaaccaggt

SEQ ID NO: 5304324 - DNA, 25 bp, Homo sapien
cggggctatgtggttttgttattct

SEQ ID NO: 5304325 - DNA, 25 bp, Homo sapien
aatgtgtcggggctatgtggttttg

SEQ ID NO: 5304326 - DNA, 25 bp, Homo sapien
attcaccgccattctcctttatcct

SEQ ID NO: 5304327 - DNA, 25 bp, Homo sapien
tcaccgccattctcctttatcctga

SEQ ID NO: 5304328 - DNA, 25 bp, Homo sapien
tttttcgaggaccgtaggctacatc

SEQ ID NO: 5304329 - DNA, 25 bp, Homo sapien
ggaccgtaggctacatcttcagctc

SEQ ID NO: 5304330 - DNA, 25 bp, Homo sapien
tcgaggaccgtaggctacatcttca

SEQ ID NO: 5304331 - DNA, 25 bp, Homo sapien
ttttcgaggaccgtaggctacatct

SEQ ID NO: 5304332 - DNA, 25 bp, Homo sapien
tgatgggtttaatagacaggaaatc

SEQ ID NO: 5304333 - DNA, 25 bp, Homo sapien
caggaaatctgccatggagatgaca

SEQ ID NO: 5304334 - DNA, 25 bp, Homo sapien
cagggagaagctattttgagaactt

SEQ ID NO: 5304335 - DNA, 25 bp, Homo sapien
gaacttaacacagtatttaacatgg

SEQ ID NO: 5304336 - DNA, 25 bp, Homo sapien
tctcaaaatcccttaaactgttaca

SEQ ID NO: 5304337 - DNA, 25 bp, Homo sapien
gttacacttgtaaaattctggccca

SEQ ID NO: 5304338 - DNA, 25 bp, Homo sapien
aaaattctggcccattaggagacat

SEQ ID NO: 5304339 - DNA, 25 bp, Homo sapien
ttgggattcagcaaaattgtctcaa

SEQ ID NO: 5304340 - DNA, 25 bp, Homo sapien
gggctgaaaggtggttgttctatac

SEQ ID NO: 5304341 - DNA, 25 bp, Homo sapien
gctgaaaggtggttgttctatacta

SEQ ID NO: 5304342 - DNA, 25 bp, Homo sapien
tgaaaggtggttgttctatactaaa

SEQ ID NO: 5304343 - DNA, 25 bp, Homo sapien
ttagggctgaaaggtggttgttcta

SEQ ID NO: 5304344 - DNA, 25 bp, Homo sapien
ggtttccatatgacaacttgccact

SEQ ID NO: 5304345 - DNA, 25 bp, Homo sapien
tgagatccctttccgagtcagaagt

SEQ ID NO: 5304346 - DNA, 25 bp, Homo sapien
tcttctaagcacaaacacctggttt

SEQ ID NO: 5304347 - DNA, 25 bp, Homo sapien
gagaaattcagaggaccatacacag

SEQ ID NO: 5304348 - DNA, 25 bp, Homo sapien
cacatctagcctcagattgacatcc

SEQ ID NO: 5304349 - DNA, 25 bp, Homo sapien
catctagcctcagattgacatccat

SEQ ID NO: 5304350 - DNA, 25 bp, Homo sapien
acatctagcctcagattgacatcca

SEQ ID NO: 5304351 - DNA, 25 bp, Homo sapien
tcacatctagcctcagattgacatc

SEQ ID NO: 5304352 - DNA, 25 bp, Homo sapien
gagacttctatgacatgatctgcta

SEQ ID NO: 5304353 - DNA, 25 bp, Homo sapien
atctccaaagtcagtactaagggtg

SEQ ID NO: 5304354 - DNA, 25 bp, Homo sapien
cagtactaagggtgatctagttggg

SEQ ID NO: 5304355 - DNA, 25 bp, Homo sapien
caaagtcagtactaagggtgatcta

SEQ ID NO: 5304356 - DNA, 25 bp, Homo sapien
tcttcttaggcagtcaccaggaggc

SEQ ID NO: 5304357 - DNA, 25 bp, Homo sapien
ttcttcttaggcagtcaccaggagg

SEQ ID NO: 5304358 - DNA, 25 bp, Homo sapien
tgttcttcttaggcagtcaccagga

SEQ ID NO: 5304359 - DNA, 25 bp, Homo sapien
ttcttaggcagtcaccaggaggcat

SEQ ID NO: 5304360 - DNA, 25 bp, Homo sapien
tccatcactgtgacaggccacatca

SEQ ID NO: 5304361 - DNA, 25 bp, Homo sapien
caagcagagaagcattatatagaga

SEQ ID NO: 5304362 - DNA, 25 bp, Homo sapien
gtctcatccattaatttcagcaatg

SEQ ID NO: 5304363 - DNA, 25 bp, Homo sapien
ctagttcaactctcttccatcactg

SEQ ID NO: 5304364 - DNA, 25 bp, Homo sapien
ttcctgctttctgtttcatcgccat

SEQ ID NO: 5304365 - DNA, 25 bp, Homo sapien
cttcctgctttctgtttcatcgcca

SEQ ID NO: 5304366 - DNA, 25 bp, Homo sapien
cactgccttgtcattgggatcaaaa

SEQ ID NO: 5304367 - DNA, 25 bp, Homo sapien
tgccttgtcattgggatcaaaataa

SEQ ID NO: 5304368 - DNA, 25 bp, Homo sapien
ccttgtcattgggatcaaaataatg

SEQ ID NO: 5304369 - DNA, 25 bp, Homo sapien
cattgggatcaaaataatgaaatga

SEQ ID NO: 5304370 - DNA, 25 bp, Homo sapien
taaagaaggaccgtaatggtgtgat

SEQ ID NO: 5304371 - DNA, 25 bp, Homo sapien
tctagtgctttatccaagatacaga

SEQ ID NO: 5304372 - DNA, 25 bp, Homo sapien
cctggacgtcaggaaataatgtaag

SEQ ID NO: 5304373 - DNA, 25 bp, Homo sapien
gcatggacacaaaaactgagaccaa

SEQ ID NO: 5304374 - DNA, 25 bp, Homo sapien
ggactggctattaccatgttgccca

SEQ ID NO: 5304375 - DNA, 25 bp, Homo sapien
tgtgaaatgcaccttgataaaatgg

SEQ ID NO: 5304376 - DNA, 25 bp, Homo sapien
ttcttcttttcgtagggactggcta

SEQ ID NO: 5304377 - DNA, 25 bp, Homo sapien
tctcaacctgtatgccaccatgtgc

SEQ ID NO: 5304378 - DNA, 25 bp, Homo sapien
tatgcacttcggacaattatcagag

SEQ ID NO: 5304379 - DNA, 25 bp, Homo sapien
ctttcaaccggaggccagatggata

SEQ ID NO: 5304380 - DNA, 25 bp, Homo sapien
gataaagggagtcccagacctctca

SEQ ID NO: 5304381 - DNA, 25 bp, Homo sapien
cctaaacttggagcttatgggagag

SEQ ID NO: 5304382 - DNA, 25 bp, Homo sapien
gttgtagttgttgagttgagttcct

SEQ ID NO: 5304383 - DNA, 25 bp, Homo sapien
tttcttttagtagtaatgttgagca

SEQ ID NO: 5304384 - DNA, 25 bp, Homo sapien
ttgaaaaatgtctatctgtgtcctt

SEQ ID NO: 5304385 - DNA, 25 bp, Homo sapien
tgcttgtcatccattaaggtgtctt

SEQ ID NO: 5304386 - DNA, 25 bp, Homo sapien
tgttctcttcaaaattttctagatg

SEQ ID NO: 5304387 - DNA, 25 bp, Homo sapien
ttctcttcaaaattttctagatgtc

SEQ ID NO: 5304388 - DNA, 25 bp, Homo sapien
cttgttctcttcaaaattttctaga

SEQ ID NO: 5304389 - DNA, 25 bp, Homo sapien
tgtactcattgtcctctgcacacat

SEQ ID NO: 5304390 - DNA, 25 bp, Homo sapien
taatcgtgaagatttgtcacaaggg

SEQ ID NO: 5304391 - DNA, 25 bp, Homo sapien
tgttcacccactaggtctagtttgg

SEQ ID NO: 5304392 - DNA, 25 bp, Homo sapien
gtcacaagggttgcctcctccaaca

SEQ ID NO: 5304393 - DNA, 25 bp, Homo sapien
tatcttcccacgttataaatgcaaa

SEQ ID NO: 5304394 - DNA, 25 bp, Homo sapien
aaattcacgaatcgttttactctgc

SEQ ID NO: 5304395 - DNA, 25 bp, Homo sapien
tctgtttgggagcttgcaatggaca

SEQ ID NO: 5304396 - DNA, 25 bp, Homo sapien
tactctgccagtgctttttagacag

SEQ ID NO: 5304397 - DNA, 25 bp, Homo sapien
gctttttagacagtgctcctgggtc

SEQ ID NO: 5304398 - DNA, 25 bp, Homo sapien
gaaattaccagtggtatgtggcgcc

SEQ ID NO: 5304399 - DNA, 25 bp, Homo sapien
cttagcatgtggtgtccttgtacat

SEQ ID NO: 5304400 - DNA, 25 bp, Homo sapien
tgtggcgccaaaataaaaccaggtg

SEQ ID NO: 5304401 - DNA, 25 bp, Homo sapien
ttccgcaagaggatctgctgcttag

SEQ ID NO: 5304402 - DNA, 25 bp, Homo sapien
cactccaagctagtgagcttcttgg

SEQ ID NO: 5304403 - DNA, 25 bp, Homo sapien
tccaagctagtgagcttcttgggta

SEQ ID NO: 5304404 - DNA, 25 bp, Homo sapien
ctggcactccaagctagtgagcttc

SEQ ID NO: 5304405 - DNA, 25 bp, Homo sapien
agctagtgagcttcttgggtagttc

SEQ ID NO: 5304406 - DNA, 25 bp, Homo sapien
gatggatgattcattggcagatgac

SEQ ID NO: 5304407 - DNA, 25 bp, Homo sapien
ttgatggatgattcattggcagatg

SEQ ID NO: 5304408 - DNA, 25 bp, Homo sapien
tgatggatgattcattggcagatga

SEQ ID NO: 5304409 - DNA, 25 bp, Homo sapien
ctttgatggatgattcattggcaga

SEQ ID NO: 5304410 - DNA, 25 bp, Homo sapien
gctgcactcacaggaggaacttcta

SEQ ID NO: 5304411 - DNA, 25 bp, Homo sapien
cttttcaattagagctgcactcaca

SEQ ID NO: 5304412 - DNA, 25 bp, Homo sapien
aaccaagaagacattgaacagatcc

SEQ ID NO: 5304413 - DNA, 25 bp, Homo sapien
aagacattgaacagatccatcccag

SEQ ID NO: 5304414 - DNA, 25 bp, Homo sapien
aaagcaaatgtctgccctgtggagc

SEQ ID NO: 5304415 - DNA, 25 bp, Homo sapien
acatctggtggatcccgacagaaca

SEQ ID NO: 5304416 - DNA, 25 bp, Homo sapien
ggtggatcccgacagaacaggaaga

SEQ ID NO: 5304417 - DNA, 25 bp, Homo sapien
gcaatctctcttgttaatcagcggg

SEQ ID NO: 5304418 - DNA, 25 bp, Homo sapien
atggctcagatttcccattgtgtat

SEQ ID NO: 5304419 - DNA, 25 bp, Homo sapien
gagattctacctctattcctagttc

SEQ ID NO: 5304420 - DNA, 25 bp, Homo sapien
aagacctgggttgccacatggctca

SEQ ID NO: 5304421 - DNA, 25 bp, Homo sapien
attctacctctattcctagttcctg

SEQ ID NO: 5304422 - DNA, 25 bp, Homo sapien
catcttctagcatcaggatagttgc

SEQ ID NO: 5304423 - DNA, 25 bp, Homo sapien
tcttctagcatcaggatagttgcca

SEQ ID NO: 5304424 - DNA, 25 bp, Homo sapien
cttctagcatcaggatagttgccat

SEQ ID NO: 5304425 - DNA, 25 bp, Homo sapien
tcatcttctagcatcaggatagttg

SEQ ID NO: 5304426 - DNA, 25 bp, Homo sapien
attgtcttggaaacgcgggctcttt

SEQ ID NO: 5304427 - DNA, 25 bp, Homo sapien
tggtcattttcatggtattgatttt

SEQ ID NO: 5304428 - DNA, 25 bp, Homo sapien
ggtcattttcatggtattgattttt

SEQ ID NO: 5304429 - DNA, 25 bp, Homo sapien
ttaggattgtcttggaaacgcgggc

SEQ ID NO: 5304430 - DNA, 25 bp, Homo sapien
caggcaacatccttgttgtcatcca

SEQ ID NO: 5304431 - DNA, 25 bp, Homo sapien
cacaggcaacatccttgttgtcatc

SEQ ID NO: 5304432 - DNA, 25 bp, Homo sapien
gcaagggcatagtaaagcttgattt

SEQ ID NO: 5304433 - DNA, 25 bp, Homo sapien
caagaacatcctgccacactttgca

SEQ ID NO: 5304434 - DNA, 25 bp, Homo sapien
catattcattgttacgagtttcttc

SEQ ID NO: 5304435 - DNA, 25 bp, Homo sapien
tcatccatgttcctctatcaaagca

SEQ ID NO: 5304436 - DNA, 25 bp, Homo sapien
gcctcatctcctaatgctactgatg

SEQ ID NO: 5304437 - DNA, 25 bp, Homo sapien
actgcctcatctcctaatgctactg

SEQ ID NO: 5304438 - DNA, 25 bp, Homo sapien
ggctcttccagctcatgattggaaa

SEQ ID NO: 5304439 - DNA, 25 bp, Homo sapien
gatgttttaggctcttccagctcat

SEQ ID NO: 5304440 - DNA, 25 bp, Homo sapien
gcagaacctgcagtaagttcagtac

SEQ ID NO: 5304441 - DNA, 25 bp, Homo sapien
ttcattaatcacagcagaacctgca

SEQ ID NO: 5304442 - DNA, 25 bp, Homo sapien
acagcagaacctgcagtaagttcag

SEQ ID NO: 5304443 - DNA, 25 bp, Homo sapien
cattaatcacagcagaacctgcagt

SEQ ID NO: 5304444 - DNA, 25 bp, Homo sapien
agcaagtttcatgaacattgatgtc

SEQ ID NO: 5304445 - DNA, 25 bp, Homo sapien
gaacattgatgtctatgatgataca

SEQ ID NO: 5304446 - DNA, 25 bp, Homo sapien
catgaacattgatgtctatgatgat

SEQ ID NO: 5304447 - DNA, 25 bp, Homo sapien
gatgtctatgatgatacaatattta

SEQ ID NO: 5304448 - DNA, 25 bp, Homo sapien
tctatacttgccacgagatggtgag

SEQ ID NO: 5304449 - DNA, 25 bp, Homo sapien
catttgttgggtgactggttctata

SEQ ID NO: 5304450 - DNA, 25 bp, Homo sapien
cttgccacgagatggtgagattttt

SEQ ID NO: 5304451 - DNA, 25 bp, Homo sapien
gggtgactggttctatacttgccac

SEQ ID NO: 5304452 - DNA, 25 bp, Homo sapien
ccttactgatggctgatgatttatg

SEQ ID NO: 5304453 - DNA, 25 bp, Homo sapien
cagcagtcaccttccttactgatgg

SEQ ID NO: 5304454 - DNA, 25 bp, Homo sapien
gtgcatattaaccaaactcagtaga

SEQ ID NO: 5304455 - DNA, 25 bp, Homo sapien
gattgactggaactagaatgccttt

SEQ ID NO: 5304456 - DNA, 25 bp, Homo sapien
ggagaatgccttataaccacatgcc

SEQ ID NO: 5304457 - DNA, 25 bp, Homo sapien
ggtagagtaggagttcaggctctaa

SEQ ID NO: 5304458 - DNA, 25 bp, Homo sapien
aaatggtggacctttctctgggaga

SEQ ID NO: 5304459 - DNA, 25 bp, Homo sapien
caatatttatccctggtgtactgcc

SEQ ID NO: 5304460 - DNA, 25 bp, Homo sapien
tatcccgataacatgtgtttagtgt

SEQ ID NO: 5304461 - DNA, 25 bp, Homo sapien
catatcccgataacatgtgtttagt

SEQ ID NO: 5304462 - DNA, 25 bp, Homo sapien
cccgataacatgtgtttagtgtttt

SEQ ID NO: 5304463 - DNA, 25 bp, Homo sapien
cacccatatcccgataacatgtgtt

SEQ ID NO: 5304464 - DNA, 25 bp, Homo sapien
ctgtatttgcgactaactgtataac

SEQ ID NO: 5304465 - DNA, 25 bp, Homo sapien
cgaggactgtatttgcgactaactg

SEQ ID NO: 5304466 - DNA, 25 bp, Homo sapien
atttgcgactaactgtataacaggt

SEQ ID NO: 5304467 - DNA, 25 bp, Homo sapien
ctcgaggactgtatttgcgactaac

SEQ ID NO: 5304468 - DNA, 25 bp, Homo sapien
atattggcatggcatgctgctcccc

SEQ ID NO: 5304469 - DNA, 25 bp, Homo sapien
ctggtaatcactggatatattggca

SEQ ID NO: 5304470 - DNA, 25 bp, Homo sapien
ggtccaagtaggcactctgctggcg

SEQ ID NO: 5304471 - DNA, 25 bp, Homo sapien
cactctgctggcgtagtttctaaat

SEQ ID NO: 5304472 - DNA, 25 bp, Homo sapien
cttcttgccttgatctatttttcca

SEQ ID NO: 5304473 - DNA, 25 bp, Homo sapien
ttcatagcttttccataacttcttg

SEQ ID NO: 5304474 - DNA, 25 bp, Homo sapien
tttttccataccagttgtcatctcc

SEQ ID NO: 5304475 - DNA, 25 bp, Homo sapien
tttccataccagttgtcatctccta

SEQ ID NO: 5304476 - DNA, 25 bp, Homo sapien
catttgttgtagatggtctcagaca

SEQ ID NO: 5304477 - DNA, 25 bp, Homo sapien
atttgttgtagatggtctcagacac

SEQ ID NO: 5304478 - DNA, 25 bp, Homo sapien
cacttgaataattgtcagaaacaca

SEQ ID NO: 5304479 - DNA, 25 bp, Homo sapien
aaaaccagagtcacttgaataattg

SEQ ID NO: 5304480 - DNA, 25 bp, Homo sapien
catgctacgtaaaatgaggtcagtt

SEQ ID NO: 5304481 - DNA, 25 bp, Homo sapien
gaaacacatgctacgtaaaatgagg

SEQ ID NO: 5304482 - DNA, 25 bp, Homo sapien
aatcaacaggagtagaagttttcct

SEQ ID NO: 5304483 - DNA, 25 bp, Homo sapien
aatatcttctatggcattcaccaac

SEQ ID NO: 5304484 - DNA, 25 bp, Homo sapien
ggatgatgcccattatagccattca

SEQ ID NO: 5304485 - DNA, 25 bp, Homo sapien
ttcaccaacattgggatgatgccca

SEQ ID NO: 5304486 - DNA, 25 bp, Homo sapien
gaggggctgcagtagaataaagata

SEQ ID NO: 5304487 - DNA, 25 bp, Homo sapien
gtagaataaagataaccttccgaga

SEQ ID NO: 5304488 - DNA, 25 bp, Homo sapien
agataaccttccgagagaaaggtgt

SEQ ID NO: 5304489 - DNA, 25 bp, Homo sapien
gagaaaggtgtttagtaagtgtgaa

SEQ ID NO: 5304490 - DNA, 25 bp, Homo sapien
gaaattgtccacgaataaataagga

SEQ ID NO: 5304491 - DNA, 25 bp, Homo sapien
ctagtaggagaaattgtccacgaat

SEQ ID NO: 5304492 - DNA, 25 bp, Homo sapien
taaataaggattttatggccactct

SEQ ID NO: 5304493 - DNA, 25 bp, Homo sapien
taaggattttatggccactctgaaa

SEQ ID NO: 5304494 - DNA, 25 bp, Homo sapien
gacatcttgccttgtgtatcacaaa

SEQ ID NO: 5304495 - DNA, 25 bp, Homo sapien
catcttgccttgtgtatcacaaagc

SEQ ID NO: 5304496 - DNA, 25 bp, Homo sapien
cttgccttgtgtatcacaaagcctg

SEQ ID NO: 5304497 - DNA, 25 bp, Homo sapien
cagacatcttgccttgtgtatcaca

SEQ ID NO: 5304498 - DNA, 25 bp, Homo sapien
ttttggttgtgtctctgcccagctt

SEQ ID NO: 5304499 - DNA, 25 bp, Homo sapien
cttttttggttgtgtctctgcccag

SEQ ID NO: 5304500 - DNA, 25 bp, Homo sapien
gcttcagaaggaagggtaccagttc

SEQ ID NO: 5304501 - DNA, 25 bp, Homo sapien
tagcttcagaaggaagggtaccagt

SEQ ID NO: 5304502 - DNA, 25 bp, Homo sapien
gttcggcatataacagttctatacc

SEQ ID NO: 5304503 - DNA, 25 bp, Homo sapien
cagttctataccaaagcacctttga

SEQ ID NO: 5304504 - DNA, 25 bp, Homo sapien
gccacaggtatgttcggcatataac

SEQ ID NO: 5304505 - DNA, 25 bp, Homo sapien
tataacagttctataccaaagcacc

SEQ ID NO: 5304506 - DNA, 25 bp, Homo sapien
ccaaacgtttctcatttctttggct

SEQ ID NO: 5304507 - DNA, 25 bp, Homo sapien
catttctttggctttcagcggccat

SEQ ID NO: 5304508 - DNA, 25 bp, Homo sapien
ttgccttctttccaaacgtttctca

SEQ ID NO: 5304509 - DNA, 25 bp, Homo sapien
tctcatttctttggctttcagcggc

SEQ ID NO: 5304510 - DNA, 25 bp, Homo sapien
aacaagctttctctagctcttttcc

SEQ ID NO: 5304511 - DNA, 25 bp, Homo sapien
caagctttctctagctcttttccta

SEQ ID NO: 5304512 - DNA, 25 bp, Homo sapien
ccttagatgttggtccacatcagta

SEQ ID NO: 5304513 - DNA, 25 bp, Homo sapien
ttctgtgaccttagatgttggtcca

SEQ ID NO: 5304514 - DNA, 25 bp, Homo sapien
aagttgtaaccaatgtcccattaag

SEQ ID NO: 5304515 - DNA, 25 bp, Homo sapien
ttaagttgtaaccaatgtcccatta

SEQ ID NO: 5304516 - DNA, 25 bp, Homo sapien
gttgtaaccaatgtcccattaagaa

SEQ ID NO: 5304517 - DNA, 25 bp, Homo sapien
ttgtaaccaatgtcccattaagaaa

SEQ ID NO: 5304518 - DNA, 25 bp, Homo sapien
ttctatggtttgcatggcattttca

SEQ ID NO: 5304519 - DNA, 25 bp, Homo sapien
tctatggtttgcatggcattttcat

SEQ ID NO: 5304520 - DNA, 25 bp, Homo sapien
tcagaattcagttttgctaaggctc

SEQ ID NO: 5304521 - DNA, 25 bp, Homo sapien
agaattcagttttgctaaggctcac

SEQ ID NO: 5304522 - DNA, 25 bp, Homo sapien
cagaattcagttttgctaaggctca

SEQ ID NO: 5304523 - DNA, 25 bp, Homo sapien
gtgtgcacgttagccacaagagagg

SEQ ID NO: 5304524 - DNA, 25 bp, Homo sapien
agtgtgcacgttagccacaagagag

SEQ ID NO: 5304525 - DNA, 25 bp, Homo sapien
tttcataggtttgagaggtgaaatc

SEQ ID NO: 5304526 - DNA, 25 bp, Homo sapien
gaactattttcataggtttgagagg

SEQ ID NO: 5304527 - DNA, 25 bp, Homo sapien
atgctactgagcctgaactattttc

SEQ ID NO: 5304528 - DNA, 25 bp, Homo sapien
tgctactgagcctgaactattttca

SEQ ID NO: 5304529 - DNA, 25 bp, Homo sapien
gagataaccaccttttccgggatgc

SEQ ID NO: 5304530 - DNA, 25 bp, Homo sapien
tgggcatcaaggtctcctcagtgtc

SEQ ID NO: 5304531 - DNA, 25 bp, Homo sapien
gctgtttcctggtgtgcatgaatta

SEQ ID NO: 5304532 - DNA, 25 bp, Homo sapien
aaatctataggatacccaagacaag

SEQ ID NO: 5304533 - DNA, 25 bp, Homo sapien
cagaactgctgaccctagtgccatg

SEQ ID NO: 5304534 - DNA, 25 bp, Homo sapien
ctgccagaactgctgaccctagtgc

SEQ ID NO: 5304535 - DNA, 25 bp, Homo sapien
gccagaactgctgaccctagtgcca

SEQ ID NO: 5304536 - DNA, 25 bp, Homo sapien
aactgctgaccctagtgccatgcca

SEQ ID NO: 5304537 - DNA, 25 bp, Homo sapien
atatttgcaaaatggatctctgcac

SEQ ID NO: 5304538 - DNA, 25 bp, Homo sapien
aatatttgcaaaatggatctctgca

SEQ ID NO: 5304539 - DNA, 25 bp, Homo sapien
tatttgcaaaatggatctctgcaca

SEQ ID NO: 5304540 - DNA, 25 bp, Homo sapien
atttgcaaaatggatctctgcacat

SEQ ID NO: 5304541 - DNA, 25 bp, Homo sapien
tgtatgatactgactcccctaaccc

SEQ ID NO: 5304542 - DNA, 25 bp, Homo sapien
gattgtccactgtccaagcagccaa

SEQ ID NO: 5304543 - DNA, 25 bp, Homo sapien
taaccctccatttagcatcattgtt

SEQ ID NO: 5304544 - DNA, 25 bp, Homo sapien
ctgaagtggtccctttgtatgatac

SEQ ID NO: 5304545 - DNA, 25 bp, Homo sapien
gactccattgctgccaaagcttctg

SEQ ID NO: 5304546 - DNA, 25 bp, Homo sapien
agactccattgctgccaaagcttct

SEQ ID NO: 5304547 - DNA, 25 bp, Homo sapien
actccattgctgccaaagcttctgg

SEQ ID NO: 5304548 - DNA, 25 bp, Homo sapien
tcttcatgcacaagtgtgtcagaat

SEQ ID NO: 5304549 - DNA, 25 bp, Homo sapien
atcttcatgcacaagtgtgtcagaa

SEQ ID NO: 5304550 - DNA, 25 bp, Homo sapien
tgtaaccagtagtcatttacgagca

SEQ ID NO: 5304551 - DNA, 25 bp, Homo sapien
ttatgtaaccagtagtcatttacga

SEQ ID NO: 5304552 - DNA, 25 bp, Homo sapien
taaccagtagtcatttacgagcagg

SEQ ID NO: 5304553 - DNA, 25 bp, Homo sapien
tatgtaaccagtagtcatttacgag

SEQ ID NO: 5304554 - DNA, 25 bp, Homo sapien
ctatcaggaatactttagtagaaat

SEQ ID NO: 5304555 - DNA, 25 bp, Homo sapien
tctatcaggaatactttagtagaaa

SEQ ID NO: 5304556 - DNA, 25 bp, Homo sapien
ttttaaccagtgcatagctgcctca

SEQ ID NO: 5304557 - DNA, 25 bp, Homo sapien
tgccaaaggtgtacactggtcctca

SEQ ID NO: 5304558 - DNA, 25 bp, Homo sapien
tttcctagctggcaactggcggtct

SEQ ID NO: 5304559 - DNA, 25 bp, Homo sapien
caagaagatttgttgaccagatgtc

SEQ ID NO: 5304560 - DNA, 25 bp, Homo sapien
gtctactggagtaagaacaatttga

SEQ ID NO: 5304561 - DNA, 25 bp, Homo sapien
atttccttgcttctggtcccataat

SEQ ID NO: 5304562 - DNA, 25 bp, Homo sapien
tataagcatacagttctcttggaaa

SEQ ID NO: 5304563 - DNA, 25 bp, Homo sapien
tgcttcatcactctttcagcagaaa

SEQ ID NO: 5304564 - DNA, 25 bp, Homo sapien
taccatggcttttgactctccgaat

SEQ ID NO: 5304565 - DNA, 25 bp, Homo sapien
tgactctccgaatcaaaaccatcat

SEQ ID NO: 5304566 - DNA, 25 bp, Homo sapien
catggcttttgactctccgaatcaa

SEQ ID NO: 5304567 - DNA, 25 bp, Homo sapien
ttgactctccgaatcaaaaccatca

SEQ ID NO: 5304568 - DNA, 25 bp, Homo sapien
cctccagacggacattccaaacatg

SEQ ID NO: 5304569 - DNA, 25 bp, Homo sapien
cttccctccagacggacattccaaa

SEQ ID NO: 5304570 - DNA, 25 bp, Homo sapien
cagacggacattccaaacatgtttt

SEQ ID NO: 5304571 - DNA, 25 bp, Homo sapien
tccagacggacattccaaacatgtt

SEQ ID NO: 5304572 - DNA, 25 bp, Homo sapien
caaaagtgtgactgctacttctgac

SEQ ID NO: 5304573 - DNA, 25 bp, Homo sapien
tccacttctctgtagtaatctccaa

SEQ ID NO: 5304574 - DNA, 25 bp, Homo sapien
tatgctttggtgttatttagaggtc

SEQ ID NO: 5304575 - DNA, 25 bp, Homo sapien
taagaatttgatgtaaccttccact

SEQ ID NO: 5304576 - DNA, 25 bp, Homo sapien
ccttcccatgacctatttttgcata

SEQ ID NO: 5304577 - DNA, 25 bp, Homo sapien
ttcccatgacctatttttgcataac

SEQ ID NO: 5304578 - DNA, 25 bp, Homo sapien
tcccatgacctatttttgcataact

SEQ ID NO: 5304579 - DNA, 25 bp, Homo sapien
caccttcccatgacctatttttgca

SEQ ID NO: 5304580 - DNA, 25 bp, Homo sapien
gaaagtaagagttccagtgtggtca

SEQ ID NO: 5304581 - DNA, 25 bp, Homo sapien
cagaaagtaagagttccagtgtggt

SEQ ID NO: 5304582 - DNA, 25 bp, Homo sapien
tcagaaagtaagagttccagtgtgg

SEQ ID NO: 5304583 - DNA, 25 bp, Homo sapien
agaaagtaagagttccagtgtggtc

SEQ ID NO: 5304584 - DNA, 25 bp, Homo sapien
ctgctttctgatgacacccaaatgg

SEQ ID NO: 5304585 - DNA, 25 bp, Homo sapien
gctttctgatgacacccaaatggtg

SEQ ID NO: 5304586 - DNA, 25 bp, Homo sapien
cccaaatggtgaacacactcttgag

SEQ ID NO: 5304587 - DNA, 25 bp, Homo sapien
ggtgaacacactcttgagtccacct

SEQ ID NO: 5304588 - DNA, 25 bp, Homo sapien
caactgggttccacttggatggatc

SEQ ID NO: 5304589 - DNA, 25 bp, Homo sapien
ggatggatcagcaaagtattctcaa

SEQ ID NO: 5304590 - DNA, 25 bp, Homo sapien
tggccacgcacaacacaactgggtt

SEQ ID NO: 5304591 - DNA, 25 bp, Homo sapien
cagtggaagatgacccaaagccaat

SEQ ID NO: 5304592 - DNA, 25 bp, Homo sapien
gaggtccatagcttcatagctggat

SEQ ID NO: 5304593 - DNA, 25 bp, Homo sapien
ggtccatagcttcatagctggatat

SEQ ID NO: 5304594 - DNA, 25 bp, Homo sapien
ctagaggtccatagcttcatagctg

SEQ ID NO: 5304595 - DNA, 25 bp, Homo sapien
tagaggtccatagcttcatagctgg

SEQ ID NO: 5304596 - DNA, 25 bp, Homo sapien
attctccagtcctactgccgcttga

SEQ ID NO: 5304597 - DNA, 25 bp, Homo sapien
gtcctactgccgcttgataaccgag

SEQ ID NO: 5304598 - DNA, 25 bp, Homo sapien
tctgtcccttgtaccaacctcttgg

SEQ ID NO: 5304599 - DNA, 25 bp, Homo sapien
ttgataaccgagcattgacccacac

SEQ ID NO: 5304600 - DNA, 25 bp, Homo sapien
gctaactcaattatttcaaggcacc

SEQ ID NO: 5304601 - DNA, 25 bp, Homo sapien
gcccaaatttcagctaactcaatta

SEQ ID NO: 5304602 - DNA, 25 bp, Homo sapien
cttcaaagcccaaatttcagctaac

SEQ ID NO: 5304603 - DNA, 25 bp, Homo sapien
gcaaatgacccaacacttcaaagcc

SEQ ID NO: 5304604 - DNA, 25 bp, Homo sapien
ggatgctacggcatgttttcttgta

SEQ ID NO: 5304605 - DNA, 25 bp, Homo sapien
tcttgtattcttacattcaacctcc

SEQ ID NO: 5304606 - DNA, 25 bp, Homo sapien
ttgtattcttacattcaacctccat

SEQ ID NO: 5304607 - DNA, 25 bp, Homo sapien
catcaattttggatgctacggcatg

SEQ ID NO: 5304608 - DNA, 25 bp, Homo sapien
tacggcattcgaccaggacttgaaa

SEQ ID NO: 5304609 - DNA, 25 bp, Homo sapien
tggagaccctgagagattgcccaca

SEQ ID NO: 5304610 - DNA, 25 bp, Homo sapien
tgggaaaatctgctgcaccggtgaa

SEQ ID NO: 5304611 - DNA, 25 bp, Homo sapien
cagcaaacggctagtgggaatccat

SEQ ID NO: 5304612 - DNA, 25 bp, Homo sapien
tccaattgtctgtccaaggggctgt

SEQ ID NO: 5304613 - DNA, 25 bp, Homo sapien
tcacatccagcaatttccaattgtc

SEQ ID NO: 5304614 - DNA, 25 bp, Homo sapien
tccaaggggctgtctaggtccatat

SEQ ID NO: 5304615 - DNA, 25 bp, Homo sapien
ttattcacatccagcaatttccaat

SEQ ID NO: 5304616 - DNA, 25 bp, Homo sapien
accaggcagtgtctagacccagcag

SEQ ID NO: 5304617 - DNA, 25 bp, Homo sapien
tcaaagtcagcctccaacaaaacac

SEQ ID NO: 5304618 - DNA, 25 bp, Homo sapien
cacaaggtagtggaccataaacttc

SEQ ID NO: 5304619 - DNA, 25 bp, Homo sapien
cagctcttctggaacacatggggca

SEQ ID NO: 5304620 - DNA, 25 bp, Homo sapien
aatgacctgaaacgcaatgagaggg

SEQ ID NO: 5304621 - DNA, 25 bp, Homo sapien
tgcacggacaatggctcagacagga

SEQ ID NO: 5304622 - DNA, 25 bp, Homo sapien
tgcaggtaaagattgagtgcacgga

SEQ ID NO: 5304623 - DNA, 25 bp, Homo sapien
ccaaggcaatgacctgaaacgcaat

SEQ ID NO: 5304624 - DNA, 25 bp, Homo sapien
ctgaggctctaaaagttgcaaagaa

SEQ ID NO: 5304625 - DNA, 25 bp, Homo sapien
ttcagtaggacaggcccttttcaaa

SEQ ID NO: 5304626 - DNA, 25 bp, Homo sapien
tgttcagtaggacaggcccttttca

SEQ ID NO: 5304627 - DNA, 25 bp, Homo sapien
ttccttgttcagtaggacaggccct

SEQ ID NO: 5304628 - DNA, 25 bp, Homo sapien
tgtttcatcccacacttctgtctca

SEQ ID NO: 5304629 - DNA, 25 bp, Homo sapien
gtcattttcttcgagcacatcctcc

SEQ ID NO: 5304630 - DNA, 25 bp, Homo sapien
atcctcccagagaccatcctgtctg

SEQ ID NO: 5304631 - DNA, 25 bp, Homo sapien
tctgcaggcttcaggggtgtatctg

SEQ ID NO: 5304632 - DNA, 25 bp, Homo sapien
ttctgccttccatccagacttagag

SEQ ID NO: 5304633 - DNA, 25 bp, Homo sapien
tgcacagtgtgggtgctaggacttc

SEQ ID NO: 5304634 - DNA, 25 bp, Homo sapien
cttagagatccaggggccttcggtt

SEQ ID NO: 5304635 - DNA, 25 bp, Homo sapien
tccatccagacttagagatccaggg

SEQ ID NO: 5304636 - DNA, 25 bp, Homo sapien
gggaaagagactttgttatcatgat

SEQ ID NO: 5304637 - DNA, 25 bp, Homo sapien
gactttgttatcatgatcttgtatg

SEQ ID NO: 5304638 - DNA, 25 bp, Homo sapien
gaaagagactttgttatcatgatct

SEQ ID NO: 5304639 - DNA, 25 bp, Homo sapien
gagactttgttatcatgatcttgta

SEQ ID NO: 5304640 - DNA, 25 bp, Homo sapien
tgagtactgactccctttctaatgt

SEQ ID NO: 5304641 - DNA, 25 bp, Homo sapien
ggaacattcattaatcagagttgac

SEQ ID NO: 5304642 - DNA, 25 bp, Homo sapien
tgtgctttggacctacaggtgagtg

SEQ ID NO: 5304643 - DNA, 25 bp, Homo sapien
gagtgtatactctcggaaatccaaa

SEQ ID NO: 5304644 - DNA, 25 bp, Homo sapien
gctcaggcagtctaataggcaccat

SEQ ID NO: 5304645 - DNA, 25 bp, Homo sapien
tttcctcagtgggttctaaaccaca

SEQ ID NO: 5304646 - DNA, 25 bp, Homo sapien
cacaaaccagggaattctcacagcc

SEQ ID NO: 5304647 - DNA, 25 bp, Homo sapien
ttctcacagccttttacacgtaggg

SEQ ID NO: 5304648 - DNA, 25 bp, Homo sapien
cttcccggtgccttctacagctgag

SEQ ID NO: 5304649 - DNA, 25 bp, Homo sapien
ccttcccggtgccttctacagctga

SEQ ID NO: 5304650 - DNA, 25 bp, Homo sapien
tagaaaatcggactgatttacttga

SEQ ID NO: 5304651 - DNA, 25 bp, Homo sapien
ccagtctgagagcaggcgctagaaa

SEQ ID NO: 5304652 - DNA, 25 bp, Homo sapien
tttcggtcctctccaccagtctgag

SEQ ID NO: 5304653 - DNA, 25 bp, Homo sapien
aactatagactattctcctaagaaa

SEQ ID NO: 5304654 - DNA, 25 bp, Homo sapien
tcccttgacacttctagatttgatt

SEQ ID NO: 5304655 - DNA, 25 bp, Homo sapien
ctctcagaggttgcattattccctt

SEQ ID NO: 5304656 - DNA, 25 bp, Homo sapien
acttaagtcaatcctcccctcgtat

SEQ ID NO: 5304657 - DNA, 25 bp, Homo sapien
ttaagtcaatcctcccctcgtatct

SEQ ID NO: 5304658 - DNA, 25 bp, Homo sapien
ctcaccctgctcaactttcttaccc

SEQ ID NO: 5304659 - DNA, 25 bp, Homo sapien
tcaccctgctcaactttcttaccct

SEQ ID NO: 5304660 - DNA, 25 bp, Homo sapien
cagctccttacccctcacttctgaa

SEQ ID NO: 5304661 - DNA, 25 bp, Homo sapien
tttccaacaagaacctcaccctgct

SEQ ID NO: 5304662 - DNA, 25 bp, Homo sapien
cagccaggaaccacatgccttctgg

SEQ ID NO: 5304663 - DNA, 25 bp, Homo sapien
agccaggaaccacatgccttctggg

SEQ ID NO: 5304664 - DNA, 25 bp, Homo sapien
tcagccaggaaccacatgccttctg

SEQ ID NO: 5304665 - DNA, 25 bp, Homo sapien
tgagctttctgtgtgcaaccagcac

SEQ ID NO: 5304666 - DNA, 25 bp, Homo sapien
cctattggcagggtggtgtcgacct

SEQ ID NO: 5304667 - DNA, 25 bp, Homo sapien
tgtttctcctgaactaagagctatc

SEQ ID NO: 5304668 - DNA, 25 bp, Homo sapien
cccttgcctttagggcagacccaga

SEQ ID NO: 5304669 - DNA, 25 bp, Homo sapien
gaacatcctcaacttaacaaggaac

SEQ ID NO: 5304670 - DNA, 25 bp, Homo sapien
cacaggatcatatcaatcagtacag

SEQ ID NO: 5304671 - DNA, 25 bp, Homo sapien
aaaagaagtacacaccatgatcaag

SEQ ID NO: 5304672 - DNA, 25 bp, Homo sapien
gcaaggttggttcagtattctaaca

SEQ ID NO: 5304673 - DNA, 25 bp, Homo sapien
tgtgagtcacggcactgacccagaa

SEQ ID NO: 5304674 - DNA, 25 bp, Homo sapien
ggcattacccctacagaccacttgg

SEQ ID NO: 5304675 - DNA, 25 bp, Homo sapien
gaaacctcatggcaagccttggaga

SEQ ID NO: 5304676 - DNA, 25 bp, Homo sapien
ttaatgtggagctggaaccgacgac

SEQ ID NO: 5304677 - DNA, 25 bp, Homo sapien
acgcagtgataagcgcagaacggga

SEQ ID NO: 5304678 - DNA, 25 bp, Homo sapien
agcgctaggctctccacggtaatgg

SEQ ID NO: 5304679 - DNA, 25 bp, Homo sapien
gctaagtctcttaagggacgtctgg

SEQ ID NO: 5304680 - DNA, 25 bp, Homo sapien
cagaacgggaggtctctgaagcaag

SEQ ID NO: 5304681 - DNA, 25 bp, Homo sapien
aagtcccaacgctgggagtgtcagc

SEQ ID NO: 5304682 - DNA, 25 bp, Homo sapien
ctgaataagtcccaacgctgggagt

SEQ ID NO: 5304683 - DNA, 25 bp, Homo sapien
tgaataagtcccaacgctgggagtg

SEQ ID NO: 5304684 - DNA, 25 bp, Homo sapien
aataagtcccaacgctgggagtgtc

SEQ ID NO: 5304685 - DNA, 25 bp, Homo sapien
tacagtccctttaggcttttctctc

SEQ ID NO: 5304686 - DNA, 25 bp, Homo sapien
caattgctacagtccctttaggctt

SEQ ID NO: 5304687 - DNA, 25 bp, Homo sapien
ttctctcccgccaatcctcactctg

SEQ ID NO: 5304688 - DNA, 25 bp, Homo sapien
aaaggcggcagccaattgctacagt

SEQ ID NO: 5304689 - DNA, 25 bp, Homo sapien
gcatttctttggcttgcgctgcagt

SEQ ID NO: 5304690 - DNA, 25 bp, Homo sapien
cttgcgctgcagtccggatggagct

SEQ ID NO: 5304691 - DNA, 25 bp, Homo sapien
gggagcacggctccctggcccgatg

SEQ ID NO: 5304692 - DNA, 25 bp, Homo sapien
gcccgatgcccccggggtatgcaga

SEQ ID NO: 5304693 - DNA, 25 bp, Homo sapien
tttcaggatctcacacgaagtgctt

SEQ ID NO: 5304694 - DNA, 25 bp, Homo sapien
cgaagtgcttcgctttcccctgcag

SEQ ID NO: 5304695 - DNA, 25 bp, Homo sapien
ctttgtaaatagctgcattgcagca

SEQ ID NO: 5304696 - DNA, 25 bp, Homo sapien
tcccctgcagggatggtactctctg

SEQ ID NO: 5304697 - DNA, 25 bp, Homo sapien
aaattccacatgctaggccattgtg

SEQ ID NO: 5304698 - DNA, 25 bp, Homo sapien
caacagcaatgcgttcctcggccat

SEQ ID NO: 5304699 - DNA, 25 bp, Homo sapien
cacctccaacagcaatgcgttcctc

SEQ ID NO: 5304700 - DNA, 25 bp, Homo sapien
gcaaattccacatgctaggccattg

SEQ ID NO: 5304701 - DNA, 25 bp, Homo sapien
gaaacaaagaagtctatagctggtt

SEQ ID NO: 5304702 - DNA, 25 bp, Homo sapien
agtcaagtgaagcaaaggagataga

SEQ ID NO: 5304703 - DNA, 25 bp, Homo sapien
aagaaacaaagaagtctatagctgg

SEQ ID NO: 5304704 - DNA, 25 bp, Homo sapien
agtgaagcaaaggagatagagaaga

SEQ ID NO: 5304705 - DNA, 25 bp, Homo sapien
cagctggactcagagttaccagagt

SEQ ID NO: 5304706 - DNA, 25 bp, Homo sapien
ctggactcagagttaccagagtggc

SEQ ID NO: 5304707 - DNA, 25 bp, Homo sapien
tcacagaattgcagcaactgcaaaa

SEQ ID NO: 5304708 - DNA, 25 bp, Homo sapien
agaattgcagcaactgcaaaagcca

SEQ ID NO: 5304709 - DNA, 25 bp, Homo sapien
cttgcctggtacctggtttttctca

SEQ ID NO: 5304710 - DNA, 25 bp, Homo sapien
ggtttttctcatggccgctgccctg

SEQ ID NO: 5304711 - DNA, 25 bp, Homo sapien
gcctggtacctggtttttctcatgg

SEQ ID NO: 5304712 - DNA, 25 bp, Homo sapien
tggtttttctcatggccgctgccct

SEQ ID NO: 5304713 - DNA, 25 bp, Homo sapien
ttgcgtcaattgaggaaaatttgtc

SEQ ID NO: 5304714 - DNA, 25 bp, Homo sapien
taaacaagcggaacgtctttgcgct

SEQ ID NO: 5304715 - DNA, 25 bp, Homo sapien
tatttaatcaataggattgcgtcaa

SEQ ID NO: 5304716 - DNA, 25 bp, Homo sapien
ttgtctccagtgtaaacaagcggaa

SEQ ID NO: 5304717 - DNA, 25 bp, Homo sapien
cctccgggaaaactgtggcagccca

SEQ ID NO: 5304718 - DNA, 25 bp, Homo sapien
ctcctccgggaaaactgtggcagcc

SEQ ID NO: 5304719 - DNA, 25 bp, Homo sapien
ggcctcctccgggaaaactgtggca

SEQ ID NO: 5304720 - DNA, 25 bp, Homo sapien
tccgggaaaactgtggcagcccagc

SEQ ID NO: 5304721 - DNA, 25 bp, Homo sapien
gagtgttcaggaaggcagatattgg

SEQ ID NO: 5304722 - DNA, 25 bp, Homo sapien
tggtgctgtcaagaggcctggctgt

SEQ ID NO: 5304723 - DNA, 25 bp, Homo sapien
aaaagagcctttgtaattatgcctc

SEQ ID NO: 5304724 - DNA, 25 bp, Homo sapien
ggagaggggccttcagaaaccacaa

SEQ ID NO: 5304725 - DNA, 25 bp, Homo sapien
tgtcccagggaaactcatgcctgga

SEQ ID NO: 5304726 - DNA, 25 bp, Homo sapien
tttccatggcaagtttgtcccaggg

SEQ ID NO: 5304727 - DNA, 25 bp, Homo sapien
gacctggtctttctgtggcgttttc

SEQ ID NO: 5304728 - DNA, 25 bp, Homo sapien
gaatggtagctctacgacctggtct

SEQ ID NO: 5304729 - DNA, 25 bp, Homo sapien
gatggccacctggaacctgaattct

SEQ ID NO: 5304730 - DNA, 25 bp, Homo sapien
tatcatcgaaaggacatcagactgg

SEQ ID NO: 5304731 - DNA, 25 bp, Homo sapien
tatggaaatgaggtcacttaacccc

SEQ ID NO: 5304732 - DNA, 25 bp, Homo sapien
catgtggactctctatgtagcctga

SEQ ID NO: 5304733 - DNA, 25 bp, Homo sapien
tttcaaaggcaagcatcccgggaga

SEQ ID NO: 5304734 - DNA, 25 bp, Homo sapien
catctattgattcttcctttggaca

SEQ ID NO: 5304735 - DNA, 25 bp, Homo sapien
gattcttcctttggacactcaccta

SEQ ID NO: 5304736 - DNA, 25 bp, Homo sapien
ctaacatttcataacatctattgat

SEQ ID NO: 5304737 - DNA, 25 bp, Homo sapien
aacatctattgattcttcctttgga

SEQ ID NO: 5304738 - DNA, 25 bp, Homo sapien
ccagcattgcattctaggaaataga

SEQ ID NO: 5304739 - DNA, 25 bp, Homo sapien
cagttggtctcagctggtcgcacat

SEQ ID NO: 5304740 - DNA, 25 bp, Homo sapien
ggatgccagagatagcttcttgagg

SEQ ID NO: 5304741 - DNA, 25 bp, Homo sapien
tatcgtgacatctctaaggtctctg

SEQ ID NO: 5304742 - DNA, 25 bp, Homo sapien
taagtccacatcttaggtgtacgga

SEQ ID NO: 5304743 - DNA, 25 bp, Homo sapien
tgtacggagtttgtataaaatatga

SEQ ID NO: 5304744 - DNA, 25 bp, Homo sapien
tgttgttggtagaaatgttaagtcc

SEQ ID NO: 5304745 - DNA, 25 bp, Homo sapien
gaactctaatgtgtagaatttgcag

SEQ ID NO: 5304746 - DNA, 25 bp, Homo sapien
gccctggagtctcttccaagtagaa

SEQ ID NO: 5304747 - DNA, 25 bp, Homo sapien
agaaaatcacactctgtccttcagc

SEQ ID NO: 5304748 - DNA, 25 bp, Homo sapien
caagtagaaaatcacactctgtcct

SEQ ID NO: 5304749 - DNA, 25 bp, Homo sapien
cttccaagtagaaaatcacactctg

SEQ ID NO: 5304750 - DNA, 25 bp, Homo sapien
attccccagactgacactaatcggg

SEQ ID NO: 5304751 - DNA, 25 bp, Homo sapien
taatcgggggcacatctggcgtttg

SEQ ID NO: 5304752 - DNA, 25 bp, Homo sapien
ttagtcgagtcagcatgataacccg

SEQ ID NO: 5304753 - DNA, 25 bp, Homo sapien
tggcgtttggactgcatccagatgg

SEQ ID NO: 5304754 - DNA, 25 bp, Homo sapien
taaaagggattatgtctccactcac

SEQ ID NO: 5304755 - DNA, 25 bp, Homo sapien
gttgcagtcacgaattgcactgcta

SEQ ID NO: 5304756 - DNA, 25 bp, Homo sapien
ccaaagccaggataaaagggattat

SEQ ID NO: 5304757 - DNA, 25 bp, Homo sapien
gaggtaatcaagcaaaccaaagcca

SEQ ID NO: 5304758 - DNA, 25 bp, Homo sapien
agttctttccatggccgctggagca

SEQ ID NO: 5304759 - DNA, 25 bp, Homo sapien
actgcagaaggaagttctttccatg

SEQ ID NO: 5304760 - DNA, 25 bp, Homo sapien
cagaaggctgtctccaactgcagaa

SEQ ID NO: 5304761 - DNA, 25 bp, Homo sapien
gcaccctccccacttgtgggcacca

SEQ ID NO: 5304762 - DNA, 25 bp, Homo sapien
cagtgatcctctcctgtataaacct

SEQ ID NO: 5304763 - DNA, 25 bp, Homo sapien
ccaggtacagattatggaaatcagg

SEQ ID NO: 5304764 - DNA, 25 bp, Homo sapien
tgtataaacctccaggtacagatta

SEQ ID NO: 5304765 - DNA, 25 bp, Homo sapien
gtacagattatggaaatcaggaatc

SEQ ID NO: 5304766 - DNA, 25 bp, Homo sapien
gcagagatctgttcagcctttatcc

SEQ ID NO: 5304767 - DNA, 25 bp, Homo sapien
ccagctgctcaaataacaaagaggt

SEQ ID NO: 5304768 - DNA, 25 bp, Homo sapien
tacatccagcctccatacaaaggac

SEQ ID NO: 5304769 - DNA, 25 bp, Homo sapien
tacaaaggacaactatcatccacca

SEQ ID NO: 5304770 - DNA, 25 bp, Homo sapien
tttcagaaaaggcattccctgctgc

SEQ ID NO: 5304771 - DNA, 25 bp, Homo sapien
gctagataggccagtgtataaccac

SEQ ID NO: 5304772 - DNA, 25 bp, Homo sapien
caacaggccctagaaatagtgacca

SEQ ID NO: 5304773 - DNA, 25 bp, Homo sapien
aacaaaacagagcatggcgagctga

SEQ ID NO: 5304774 - DNA, 25 bp, Homo sapien
tggctcctcactttctaggagtctc

SEQ ID NO: 5304775 - DNA, 25 bp, Homo sapien
tcactttctaggagtctcagaggag

SEQ ID NO: 5304776 - DNA, 25 bp, Homo sapien
tgttagtaggataccaatccatggc

SEQ ID NO: 5304777 - DNA, 25 bp, Homo sapien
cctctgatgttccatctgttagtag

SEQ ID NO: 5304778 - DNA, 25 bp, Homo sapien
cccatgatacaaaaccagagcgaga

SEQ ID NO: 5304779 - DNA, 25 bp, Homo sapien
ggagacacccatgatacaaaaccag

SEQ ID NO: 5304780 - DNA, 25 bp, Homo sapien
caaaaccagagcgagatgaagacgc

SEQ ID NO: 5304781 - DNA, 25 bp, Homo sapien
agcgagatgaagacgctccactcac

SEQ ID NO: 5304782 - DNA, 25 bp, Homo sapien
caattagacaaaaggcctcaagaag

SEQ ID NO: 5304783 - DNA, 25 bp, Homo sapien
tacccaccacaattagacaaaaggc

SEQ ID NO: 5304784 - DNA, 25 bp, Homo sapien
cacattacccaccacaattagacaa

SEQ ID NO: 5304785 - DNA, 25 bp, Homo sapien
ccagaaaatttgctctatcttcccc

SEQ ID NO: 5304786 - DNA, 25 bp, Homo sapien
gatcacatcctagaagagtcactgg

SEQ ID NO: 5304787 - DNA, 25 bp, Homo sapien
ccttgggcaaagaggcgacactgga

SEQ ID NO: 5304788 - DNA, 25 bp, Homo sapien
ttggtccagccaggaagaatccgtc

SEQ ID NO: 5304789 - DNA, 25 bp, Homo sapien
aaaccagaggagcttgcaagaggcg

SEQ ID NO: 5304790 - DNA, 25 bp, Homo sapien
tctactccagattcttctccatcca

SEQ ID NO: 5304791 - DNA, 25 bp, Homo sapien
agactcctctctactccagattctt

SEQ ID NO: 5304792 - DNA, 25 bp, Homo sapien
cagggtccccagactcctctctact

SEQ ID NO: 5304793 - DNA, 25 bp, Homo sapien
acgacttgaaaggcagggtccccag

SEQ ID NO: 5304794 - DNA, 25 bp, Homo sapien
cacccaaatggttcagtcgctgaaa

SEQ ID NO: 5304795 - DNA, 25 bp, Homo sapien
atggttcagtcgctgaaaagcatgg

SEQ ID NO: 5304796 - DNA, 25 bp, Homo sapien
caggccacccaaatggttcagtcgc

SEQ ID NO: 5304797 - DNA, 25 bp, Homo sapien
tgaaaagcatggaaggaattcaggt

SEQ ID NO: 5304798 - DNA, 25 bp, Homo sapien
gagctgcagcctcataggagtggct

SEQ ID NO: 5304799 - DNA, 25 bp, Homo sapien
ccggcaagtgggaatgtgatctaca

SEQ ID NO: 5304800 - DNA, 25 bp, Homo sapien
gacacctgctcttccactggtcttt

SEQ ID NO: 5304801 - DNA, 25 bp, Homo sapien
gaaaatctctgagaagacacctgct

SEQ ID NO: 5304802 - DNA, 25 bp, Homo sapien
cttgagttccaaaagtaactgcaca

SEQ ID NO: 5304803 - DNA, 25 bp, Homo sapien
tacttgagttccaaaagtaactgca

SEQ ID NO: 5304804 - DNA, 25 bp, Homo sapien
gagttccaaaagtaactgcacaaat

SEQ ID NO: 5304805 - DNA, 25 bp, Homo sapien
aatgaaggtttctgactcagggtaa

SEQ ID NO: 5304806 - DNA, 25 bp, Homo sapien
tgcttcacggacaggcctcttatag

SEQ ID NO: 5304807 - DNA, 25 bp, Homo sapien
agtggccagcatgactgaagctaag

SEQ ID NO: 5304808 - DNA, 25 bp, Homo sapien
ctcttataggcatagatgacgaggg

SEQ ID NO: 5304809 - DNA, 25 bp, Homo sapien
actgaagctaagaggtaagcttccc

SEQ ID NO: 5304810 - DNA, 25 bp, Homo sapien
gggatctggccacactataagacaa

SEQ ID NO: 5304811 - DNA, 25 bp, Homo sapien
cacatcaagcgtctgggtggtgcca

SEQ ID NO: 5304812 - DNA, 25 bp, Homo sapien
gggaagcttctgacaatttcgatta

SEQ ID NO: 5304813 - DNA, 25 bp, Homo sapien
atttcgattaccgaaatcttcctgc

SEQ ID NO: 5304814 - DNA, 25 bp, Homo sapien
cccttgttgggtacttggctgagag

SEQ ID NO: 5304815 - DNA, 25 bp, Homo sapien
ccttgctttggttaccgcagatgtt

SEQ ID NO: 5304816 - DNA, 25 bp, Homo sapien
ctttggttaccgcagatgttggtcc

SEQ ID NO: 5304817 - DNA, 25 bp, Homo sapien
gttaccgcagatgttggtcctctcc

SEQ ID NO: 5304818 - DNA, 25 bp, Homo sapien
ccttctggtccgtaggtcagtggga

SEQ ID NO: 5304819 - DNA, 25 bp, Homo sapien
ggtctggacatcctcaccatgtgtg

SEQ ID NO: 5304820 - DNA, 25 bp, Homo sapien
ggtctccaggcccaatcgaggaata

SEQ ID NO: 5304821 - DNA, 25 bp, Homo sapien
gaaaatcaaagggacagtgcagagc

SEQ ID NO: 5304822 - DNA, 25 bp, Homo sapien
gtttcttctagaacaggcttgacct

SEQ ID NO: 5304823 - DNA, 25 bp, Homo sapien
acactccaaccttagggcttttgct

SEQ ID NO: 5304824 - DNA, 25 bp, Homo sapien
agccacactccaaccttagggcttt

SEQ ID NO: 5304825 - DNA, 25 bp, Homo sapien
tctagaacaggcttgacctgggtga

SEQ ID NO: 5304826 - DNA, 25 bp, Homo sapien
ccagggaagcggcagtccctcctgg

SEQ ID NO: 5304827 - DNA, 25 bp, Homo sapien
tttcccacgaccagggaagcggcag

SEQ ID NO: 5304828 - DNA, 25 bp, Homo sapien
agaggaggttctgcagagtttccca

SEQ ID NO: 5304829 - DNA, 25 bp, Homo sapien
tcttcgctcaggagtgctcaggaga

SEQ ID NO: 5304830 - DNA, 25 bp, Homo sapien
ccctggtgaccggttcaggagaact

SEQ ID NO: 5304831 - DNA, 25 bp, Homo sapien
acagatgcatctggatagctcatcc

SEQ ID NO: 5304832 - DNA, 25 bp, Homo sapien
cctgcagccaagagtccaagctgcc

SEQ ID NO: 5304833 - DNA, 25 bp, Homo sapien
gaccggttcaggagaactgcctgca

SEQ ID NO: 5304834 - DNA, 25 bp, Homo sapien
aaatccatggaagatccaccttcag

SEQ ID NO: 5304835 - DNA, 25 bp, Homo sapien
tgtaaattgaggcactatgaggcac

SEQ ID NO: 5304836 - DNA, 25 bp, Homo sapien
gaagatccaccttcagtgtcaatgg

SEQ ID NO: 5304837 - DNA, 25 bp, Homo sapien
tcagagcagccacatggtgtggatc

SEQ ID NO: 5304838 - DNA, 25 bp, Homo sapien
tcccacagcttttctcccctggtcc

SEQ ID NO: 5304839 - DNA, 25 bp, Homo sapien
cttcccacagcttttctcccctggt

SEQ ID NO: 5304840 - DNA, 25 bp, Homo sapien
cacagcttttctcccctggtccttg

SEQ ID NO: 5304841 - DNA, 25 bp, Homo sapien
tttctcccctggtccttgtggaaca

SEQ ID NO: 5304842 - DNA, 25 bp, Homo sapien
ttcagcaaacgctgtgtcctgggct

SEQ ID NO: 5304843 - DNA, 25 bp, Homo sapien
tgtacggtatagagacaagaccatg

SEQ ID NO: 5304844 - DNA, 25 bp, Homo sapien
gtatagagacaagaccatgctttat

SEQ ID NO: 5304845 - DNA, 25 bp, Homo sapien
gggtgtacggtatagagacaagacc

SEQ ID NO: 5304846 - DNA, 25 bp, Homo sapien
tacggtatagagacaagaccatgct

SEQ ID NO: 5304847 - DNA, 25 bp, Homo sapien
ggtctcacctggtttaatcacagca

SEQ ID NO: 5304848 - DNA, 25 bp, Homo sapien
tgatcaattacttgtgtctctccca

SEQ ID NO: 5304849 - DNA, 25 bp, Homo sapien
gggctctgcatatccaagctgtctt

SEQ ID NO: 5304850 - DNA, 25 bp, Homo sapien
cttagttagtctatccccgttgtgg

SEQ ID NO: 5304851 - DNA, 25 bp, Homo sapien
caggtgctcagattcggtaaagtac

SEQ ID NO: 5304852 - DNA, 25 bp, Homo sapien
ttctcagtgctacaggccctgctta

SEQ ID NO: 5304853 - DNA, 25 bp, Homo sapien
tcatagtcgtaaatatcagggctgc

SEQ ID NO: 5304854 - DNA, 25 bp, Homo sapien
tatgttccaaagcaggtccactaga

SEQ ID NO: 5304855 - DNA, 25 bp, Homo sapien
gagtataaatgcagcagtaagccag

SEQ ID NO: 5304856 - DNA, 25 bp, Homo sapien
tagagtaaacggaagtattttctca

SEQ ID NO: 5304857 - DNA, 25 bp, Homo sapien
cacccctagccaattgttgcatttt

SEQ ID NO: 5304858 - DNA, 25 bp, Homo sapien
ttctcaggtcgggacctgctgagat

SEQ ID NO: 5304859 - DNA, 25 bp, Homo sapien
gcctgaattacttccaccatccttc

SEQ ID NO: 5304860 - DNA, 25 bp, Homo sapien
cacagcctgaattacttccaccatc

SEQ ID NO: 5304861 - DNA, 25 bp, Homo sapien
ccacagcctgaattacttccaccat

SEQ ID NO: 5304862 - DNA, 25 bp, Homo sapien
cagcctgaattacttccaccatcct

SEQ ID NO: 5304863 - DNA, 25 bp, Homo sapien
agccagtgggaagtggggcccacca

SEQ ID NO: 5304864 - DNA, 25 bp, Homo sapien
agtgggaagtggggcccaccaggag

SEQ ID NO: 5304865 - DNA, 25 bp, Homo sapien
ctgagggaagccagtgggaagtggg

SEQ ID NO: 5304866 - DNA, 25 bp, Homo sapien
ccagtgggaagtggggcccaccagg

SEQ ID NO: 5304867 - DNA, 25 bp, Homo sapien
aagagatgggaatgcactgatttct

SEQ ID NO: 5304868 - DNA, 25 bp, Homo sapien
tgagccctggttgaatccaggggaa

SEQ ID NO: 5304869 - DNA, 25 bp, Homo sapien
cacaaagccatttgccagtccagag

SEQ ID NO: 5304870 - DNA, 25 bp, Homo sapien
agccatttgccagtccagagccaga

SEQ ID NO: 5304871 - DNA, 25 bp, Homo sapien
tgaggatcatcaaggagccctgaga

SEQ ID NO: 5304872 - DNA, 25 bp, Homo sapien
ttcaatcttatagccactttttgcc

SEQ ID NO: 5304873 - DNA, 25 bp, Homo sapien
gatggacaagaggatgttcatactc

SEQ ID NO: 5304874 - DNA, 25 bp, Homo sapien
gcctttaggagtccatggtataggg

SEQ ID NO: 5304875 - DNA, 25 bp, Homo sapien
cctggtagagcaatgggaaagcccc

SEQ ID NO: 5304876 - DNA, 25 bp, Homo sapien
cggaagctccggcatcctccatttc

SEQ ID NO: 5304877 - DNA, 25 bp, Homo sapien
ttctctcccggaagctccggcatcc

SEQ ID NO: 5304878 - DNA, 25 bp, Homo sapien
aagctccggcatcctccatttcaga

SEQ ID NO: 5304879 - DNA, 25 bp, Homo sapien
agcaacctgaaacaccccacccgca

SEQ ID NO: 5304880 - DNA, 25 bp, Homo sapien
cacagctcacgatcatccatccaca

SEQ ID NO: 5304881 - DNA, 25 bp, Homo sapien
acagctcacgatcatccatccacag

SEQ ID NO: 5304882 - DNA, 25 bp, Homo sapien
ccacagctcacgatcatccatccac

SEQ ID NO: 5304883 - DNA, 25 bp, Homo sapien
ctccagatcttttgctccagggagg

SEQ ID NO: 5304884 - DNA, 25 bp, Homo sapien
tcctgtcttccttaactccagatct

SEQ ID NO: 5304885 - DNA, 25 bp, Homo sapien
cctctgggcagctagagccaaacat

SEQ ID NO: 5304886 - DNA, 25 bp, Homo sapien
tagagccaaacattctctgggccct

SEQ ID NO: 5304887 - DNA, 25 bp, Homo sapien
atggttcatctgaatttctgctctt

SEQ ID NO: 5304888 - DNA, 25 bp, Homo sapien
tcatagactgtttatactgctggat

SEQ ID NO: 5304889 - DNA, 25 bp, Homo sapien
gagaagagagtggacatggttcatc

SEQ ID NO: 5304890 - DNA, 25 bp, Homo sapien
cagagtgggttctttaaaggctcct

SEQ ID NO: 5304891 - DNA, 25 bp, Homo sapien
ctttgtatcagtgatgaggatgaaa

SEQ ID NO: 5304892 - DNA, 25 bp, Homo sapien
aactttgtatcagtgatgaggatga

SEQ ID NO: 5304893 - DNA, 25 bp, Homo sapien
ttcaaactttgtatcagtgatgagg

SEQ ID NO: 5304894 - DNA, 25 bp, Homo sapien
caaactttgtatcagtgatgaggat

SEQ ID NO: 5304895 - DNA, 25 bp, Homo sapien
tgatgtgagggtggtcgcccacttt

SEQ ID NO: 5304896 - DNA, 25 bp, Homo sapien
tatattcagaggtgttggcgatgac

SEQ ID NO: 5304897 - DNA, 25 bp, Homo sapien
gacgataaagtccacggagtccacg

SEQ ID NO: 5304898 - DNA, 25 bp, Homo sapien
ccacgcagacatggtcaatagaagc

SEQ ID NO: 5304899 - DNA, 25 bp, Homo sapien
tctagctcagaaacgttaatatttc

SEQ ID NO: 5304900 - DNA, 25 bp, Homo sapien
gaacacaacaggcttcccgtgaatt

SEQ ID NO: 5304901 - DNA, 25 bp, Homo sapien
tggaggctcacaacgttcacagggt

SEQ ID NO: 5304902 - DNA, 25 bp, Homo sapien
gagaacactcaatggaacacaacag

SEQ ID NO: 5304903 - DNA, 25 bp, Homo sapien
cttggcacttgtacgtctgtcctgc

SEQ ID NO: 5304904 - DNA, 25 bp, Homo sapien
tcagctggtattgtctgcaaaacca

SEQ ID NO: 5304905 - DNA, 25 bp, Homo sapien
acttgtacgtctgtcctgcaggaca

SEQ ID NO: 5304906 - DNA, 25 bp, Homo sapien
agtgatgccactcagctggtattgt

SEQ ID NO: 5304907 - DNA, 25 bp, Homo sapien
gatgtgggagctgtgtgcggagcac

SEQ ID NO: 5304908 - DNA, 25 bp, Homo sapien
acgagctgtgctccattttacggct

SEQ ID NO: 5304909 - DNA, 25 bp, Homo sapien
ctgtgtgcggagcactccgcggaca

SEQ ID NO: 5304910 - DNA, 25 bp, Homo sapien
ccattttacggctgccgtctgatgt

SEQ ID NO: 5304911 - DNA, 25 bp, Homo sapien
cccagtcccatagtgacaaatcagg

SEQ ID NO: 5304912 - DNA, 25 bp, Homo sapien
tagtgacaaatcaggaataggagac

SEQ ID NO: 5304913 - DNA, 25 bp, Homo sapien
cccatagtgacaaatcaggaatagg

SEQ ID NO: 5304914 - DNA, 25 bp, Homo sapien
cagccccagtcccatagtgacaaat

SEQ ID NO: 5304915 - DNA, 25 bp, Homo sapien
agcttcctgaagtggagctgtcaga

SEQ ID NO: 5304916 - DNA, 25 bp, Homo sapien
cttcctgaagtggagctgtcagagg

SEQ ID NO: 5304917 - DNA, 25 bp, Homo sapien
ggcaagtattcctccagtcagaagg

SEQ ID NO: 5304918 - DNA, 25 bp, Homo sapien
cttctgccctcgccagaatggaatg

SEQ ID NO: 5304919 - DNA, 25 bp, Homo sapien
tctgccctcgccagaatggaatgaa

SEQ ID NO: 5304920 - DNA, 25 bp, Homo sapien
acttcaggggcgtctggaggcctga

SEQ ID NO: 5304921 - DNA, 25 bp, Homo sapien
gcctgagaactcatttgagcccaaa

SEQ ID NO: 5304922 - DNA, 25 bp, Homo sapien
tgcaaactttcaactatgggggctg

SEQ ID NO: 5304923 - DNA, 25 bp, Homo sapien
tgagcccaaagtatcactgaagctt

SEQ ID NO: 5304924 - DNA, 25 bp, Homo sapien
tctcagctgttataatgagagtcct

SEQ ID NO: 5304925 - DNA, 25 bp, Homo sapien
gtgaaatatccctcgttccccacag

SEQ ID NO: 5304926 - DNA, 25 bp, Homo sapien
ttccccacagcaatgaacaccctct

SEQ ID NO: 5304927 - DNA, 25 bp, Homo sapien
tctcgtcaccagactgctcttcatg

SEQ ID NO: 5304928 - DNA, 25 bp, Homo sapien
tgaaccacctcttgtctggggaccc

SEQ ID NO: 5304929 - DNA, 25 bp, Homo sapien
ttctttctgtttaaagtgcagcgtc

SEQ ID NO: 5304930 - DNA, 25 bp, Homo sapien
tgtttaaagtgcagcgtcttcccac

SEQ ID NO: 5304931 - DNA, 25 bp, Homo sapien
gtcttcccacagtcctagtaagcat

SEQ ID NO: 5304932 - DNA, 25 bp, Homo sapien
agtgcagcgtcttcccacagtccta

SEQ ID NO: 5304933 - DNA, 25 bp, Homo sapien
gcagaaccacccacaggttttccaa

SEQ ID NO: 5304934 - DNA, 25 bp, Homo sapien
ggccttctgatttgacaagctctga

SEQ ID NO: 5304935 - DNA, 25 bp, Homo sapien
ctgacttcttaggcgtttcttgagg

SEQ ID NO: 5304936 - DNA, 25 bp, Homo sapien
atgaggcagtccctggtcccacatc

SEQ ID NO: 5304937 - DNA, 25 bp, Homo sapien
agaacagtggcagtggctcttcccc

SEQ ID NO: 5304938 - DNA, 25 bp, Homo sapien
tgttactgggggagcctgttagagc

SEQ ID NO: 5304939 - DNA, 25 bp, Homo sapien
caggccctcagaacagtggcagtgg

SEQ ID NO: 5304940 - DNA, 25 bp, Homo sapien
gcctgttagagccaggccctcagaa

SEQ ID NO: 5304941 - DNA, 25 bp, Homo sapien
aattacactataagctcctgagggc

SEQ ID NO: 5304942 - DNA, 25 bp, Homo sapien
ttgtattagcccctgatggtttggg

SEQ ID NO: 5304943 - DNA, 25 bp, Homo sapien
cattctcctttgtattagcccctga

SEQ ID NO: 5304944 - DNA, 25 bp, Homo sapien
tgtaaggagcagtctttcttctggg

SEQ ID NO: 5304945 - DNA, 25 bp, Homo sapien
cgaaagtggtgaggcctcctgtgat

SEQ ID NO: 5304946 - DNA, 25 bp, Homo sapien
ctgtgatggactactggtttgctga

SEQ ID NO: 5304947 - DNA, 25 bp, Homo sapien
cacagtgtagcgaaagtggtgaggc

SEQ ID NO: 5304948 - DNA, 25 bp, Homo sapien
ctcctgtgatggactactggtttgc

SEQ ID NO: 5304949 - DNA, 25 bp, Homo sapien
atactccaaaagaggtgtctgagcc

SEQ ID NO: 5304950 - DNA, 25 bp, Homo sapien
tgagccttccagaccttgcacagac

SEQ ID NO: 5304951 - DNA, 25 bp, Homo sapien
gagccttccagaccttgcacagaca

SEQ ID NO: 5304952 - DNA, 25 bp, Homo sapien
gcacagacactgtggtctgagggct

SEQ ID NO: 5304953 - DNA, 25 bp, Homo sapien
actgtggtctgagggctgccagaag

SEQ ID NO: 5304954 - DNA, 25 bp, Homo sapien
cagctgatggctcctgtatgaagat

SEQ ID NO: 5304955 - DNA, 25 bp, Homo sapien
tccacctggtctttgagtgggtggg

SEQ ID NO: 5304956 - DNA, 25 bp, Homo sapien
ccagctgatggctcctgtatgaaga

SEQ ID NO: 5304957 - DNA, 25 bp, Homo sapien
acctggtctttgagtgggtgggcag

SEQ ID NO: 5304958 - DNA, 25 bp, Homo sapien
ttctcggaggaatcatggcttcctt

SEQ ID NO: 5304959 - DNA, 25 bp, Homo sapien
gttctcggaggaatcatggcttcct

SEQ ID NO: 5304960 - DNA, 25 bp, Homo sapien
gactccaccagacccagtgttctcg

SEQ ID NO: 5304961 - DNA, 25 bp, Homo sapien
ccagacccagtgttctcggaggaat

SEQ ID NO: 5304962 - DNA, 25 bp, Homo sapien
tccgtgggcacaaacgcactctttg

SEQ ID NO: 5304963 - DNA, 25 bp, Homo sapien
tttgcccaagctactagcatgcaca

SEQ ID NO: 5304964 - DNA, 25 bp, Homo sapien
cattcccttcatcggacacaatggc

SEQ ID NO: 5304965 - DNA, 25 bp, Homo sapien
aatggccccttcagacacgccgagg

SEQ ID NO: 5304966 - DNA, 25 bp, Homo sapien
ggcatgaacgagaagcggaacctct

SEQ ID NO: 5304967 - DNA, 25 bp, Homo sapien
gcatactcgagtttccggccaggaa

SEQ ID NO: 5304968 - DNA, 25 bp, Homo sapien
caaagtgacggacctggatgacgca

SEQ ID NO: 5304969 - DNA, 25 bp, Homo sapien
tataatgcctacaggtgacctccac

SEQ ID NO: 5304970 - DNA, 25 bp, Homo sapien
ttaggaaggcttgtgaatctgtccc

SEQ ID NO: 5304971 - DNA, 25 bp, Homo sapien
actcccgaccatgcgacgagggtga

SEQ ID NO: 5304972 - DNA, 25 bp, Homo sapien
tgatgaagaacattggtcctcagaa

SEQ ID NO: 5304973 - DNA, 25 bp, Homo sapien
tgtctgtcgcttacatttagtgtgg

SEQ ID NO: 5304974 - DNA, 25 bp, Homo sapien
gtaaggtgcaacagacaccccagga

SEQ ID NO: 5304975 - DNA, 25 bp, Homo sapien
gaggttgacgtgacatctctgctgc

SEQ ID NO: 5304976 - DNA, 25 bp, Homo sapien
tctcggatccctggatattggcccc

SEQ ID NO: 5304977 - DNA, 25 bp, Homo sapien
cagatttcccactgttctcggatcc

SEQ ID NO: 5304978 - DNA, 25 bp, Homo sapien
cattttagcttctgtacagtgaagc

SEQ ID NO: 5304979 - DNA, 25 bp, Homo sapien
ccttctccatgcaggacccgttgtg

SEQ ID NO: 5304980 - DNA, 25 bp, Homo sapien
gaatgcctcctattagttctttgtt

SEQ ID NO: 5304981 - DNA, 25 bp, Homo sapien
ttctgtacagtgaagcgtccctccc

SEQ ID NO: 5304982 - DNA, 25 bp, Homo sapien
tacttttaacgtgaggagaattaca

SEQ ID NO: 5304983 - DNA, 25 bp, Homo sapien
taacgtgaggagaattacaccactc

SEQ ID NO: 5304984 - DNA, 25 bp, Homo sapien
gatgtttacttttaacgtgaggaga

SEQ ID NO: 5304985 - DNA, 25 bp, Homo sapien
ttttaacgtgaggagaattacacca

SEQ ID NO: 5304986 - DNA, 25 bp, Homo sapien
cagctccctccttgacaagatcaaa

SEQ ID NO: 5304987 - DNA, 25 bp, Homo sapien
tctcagcctgcaaagtccattagaa

SEQ ID NO: 5304988 - DNA, 25 bp, Homo sapien
aaagcctgacctatttgcagcaaca

SEQ ID NO: 5304989 - DNA, 25 bp, Homo sapien
cagaggccagtgcaaacgcaggttc

SEQ ID NO: 5304990 - DNA, 25 bp, Homo sapien
tttcaaagacatgcaggctattacc

SEQ ID NO: 5304991 - DNA, 25 bp, Homo sapien
aatatcagtatgactgagttggctg

SEQ ID NO: 5304992 - DNA, 25 bp, Homo sapien
tatcagtatgactgagttggctgca

SEQ ID NO: 5304993 - DNA, 25 bp, Homo sapien
agtatgactgagttggctgcagccc

SEQ ID NO: 5304994 - DNA, 25 bp, Homo sapien
cagtatgactgagttggctgcagcc

SEQ ID NO: 5304995 - DNA, 25 bp, Homo sapien
tgcaagtgaaagaatacccaatcct

SEQ ID NO: 5304996 - DNA, 25 bp, Homo sapien
cagtttcttctgctatgtcagacag

SEQ ID NO: 5304997 - DNA, 25 bp, Homo sapien
tgcaggagatgcctactgagccagt

SEQ ID NO: 5304998 - DNA, 25 bp, Homo sapien
gacagtggatattggttacccttct

SEQ ID NO: 5304999 - DNA, 25 bp, Homo sapien
gcattggcacatgtttctagagacc

SEQ ID NO: 5305000 - DNA, 25 bp, Homo sapien
tcactggttgtaactatgactccct

SEQ ID NO: 5305001 - DNA, 25 bp, Homo sapien
tattccctgatggttgcaaaatggc

SEQ ID NO: 5305002 - DNA, 25 bp, Homo sapien
tctagacactatcatgcagggaagc

SEQ ID NO: 5305003 - DNA, 25 bp, Homo sapien
tcactgtgagttggctgcgtttctg

SEQ ID NO: 5305004 - DNA, 25 bp, Homo sapien
ggcaatgttggaagtgacatctcat

SEQ ID NO: 5305005 - DNA, 25 bp, Homo sapien
atctcattccctgacgctcctgagt

SEQ ID NO: 5305006 - DNA, 25 bp, Homo sapien
tgaaaggtctgccagggcctcctag

SEQ ID NO: 5305007 - DNA, 25 bp, Homo sapien
tccggagcagcgtccaggtcctcag

SEQ ID NO: 5305008 - DNA, 25 bp, Homo sapien
tcaggcccctcttgaacccttaggc

SEQ ID NO: 5305009 - DNA, 25 bp, Homo sapien
gtgtcgtgcgccaccccagaaggca

SEQ ID NO: 5305010 - DNA, 25 bp, Homo sapien
ttcgctgggccccacgcgtgtcgtg

SEQ ID NO: 5305011 - DNA, 25 bp, Homo sapien
cgcgcggcgccgcaggaggaatccc

SEQ ID NO: 5305012 - DNA, 25 bp, Homo sapien
cggcgccgcaggaggaatcccagcc

SEQ ID NO: 5305013 - DNA, 25 bp, Homo sapien
cgccctccccgaggcccgcgcggcg

SEQ ID NO: 5305014 - DNA, 25 bp, Homo sapien
gcgccgcaggaggaatcccagccat

SEQ ID NO: 5305015 - DNA, 25 bp, Homo sapien
caagactgcgccctgcacagattaa

SEQ ID NO: 5305016 - DNA, 25 bp, Homo sapien
cctaggtaccacgagggtcctggct

SEQ ID NO: 5305017 - DNA, 25 bp, Homo sapien
agcccagttgccggtggagcaagca

SEQ ID NO: 5305018 - DNA, 25 bp, Homo sapien
gcttttcgcacaggatcttagcacc

SEQ ID NO: 5305019 - DNA, 25 bp, Homo sapien
aattcttcccaggagctgcggagga

SEQ ID NO: 5305020 - DNA, 25 bp, Homo sapien
gactctctagttttgggtctgcaga

SEQ ID NO: 5305021 - DNA, 25 bp, Homo sapien
gaaagtgcagatgggttcgcaaacg

SEQ ID NO: 5305022 - DNA, 25 bp, Homo sapien
gagcagccagacacgtagtgatcag

SEQ ID NO: 5305023 - DNA, 25 bp, Homo sapien
cagcccctggttgtgatttgtcgtt

SEQ ID NO: 5305024 - DNA, 25 bp, Homo sapien
cgacaccgcgtgaatctggaaagcc

SEQ ID NO: 5305025 - DNA, 25 bp, Homo sapien
tggaaagccccgagtttcaacaggc

SEQ ID NO: 5305026 - DNA, 25 bp, Homo sapien
aggcccaaccatcggcggctttgca

SEQ ID NO: 5305027 - DNA, 25 bp, Homo sapien
gagtcccaaggccaagaactagacc

SEQ ID NO: 5305028 - DNA, 25 bp, Homo sapien
agagtcccaaggccaagaactagac

SEQ ID NO: 5305029 - DNA, 25 bp, Homo sapien
tagagtcccaaggccaagaactaga

SEQ ID NO: 5305030 - DNA, 25 bp, Homo sapien
ctagagtcccaaggccaagaactag

SEQ ID NO: 5305031 - DNA, 25 bp, Homo sapien
tcattctccacaggcgccacagcca

SEQ ID NO: 5305032 - DNA, 25 bp, Homo sapien
cttgcagcgagatccgcgccccccc

SEQ ID NO: 5305033 - DNA, 25 bp, Homo sapien
cgcctcattctccacaggcgccaca

SEQ ID NO: 5305034 - DNA, 25 bp, Homo sapien
cccaccccgcctcattctccacagg

SEQ ID NO: 5305035 - DNA, 25 bp, Homo sapien
ctgcctttagtcgacctgagtgatt

SEQ ID NO: 5305036 - DNA, 25 bp, Homo sapien
attcacattgaattcgatggctttc

SEQ ID NO: 5305037 - DNA, 25 bp, Homo sapien
tgcctttagtcgacctgagtgattg

SEQ ID NO: 5305038 - DNA, 25 bp, Homo sapien
gcctttagtcgacctgagtgattgc

SEQ ID NO: 5305039 - DNA, 25 bp, Homo sapien
ttagcttctctaccagcctttagtg

SEQ ID NO: 5305040 - DNA, 25 bp, Homo sapien
agagaggcaccggagagaacaaagt

SEQ ID NO: 5305041 - DNA, 25 bp, Homo sapien
caatgacacagttcaacagagaggc

SEQ ID NO: 5305042 - DNA, 25 bp, Homo sapien
cagcctttagtgagccaatgacaca

SEQ ID NO: 5305043 - DNA, 25 bp, Homo sapien
taaagtgcttggcacaatgctcttg

SEQ ID NO: 5305044 - DNA, 25 bp, Homo sapien
tcacctgtaatatgggtatcacgag

SEQ ID NO: 5305045 - DNA, 25 bp, Homo sapien
gaaatgtgcatcagcagatccaaat

SEQ ID NO: 5305046 - DNA, 25 bp, Homo sapien
gatcatgggacatttgggccagtaa

SEQ ID NO: 5305047 - DNA, 25 bp, Homo sapien
taagaataccacgtccagatggcca

SEQ ID NO: 5305048 - DNA, 25 bp, Homo sapien
gaataccacgtccagatggccagga

SEQ ID NO: 5305049 - DNA, 25 bp, Homo sapien
agaataccacgtccagatggccagg

SEQ ID NO: 5305050 - DNA, 25 bp, Homo sapien
ttaagaataccacgtccagatggcc

SEQ ID NO: 5305051 - DNA, 25 bp, Homo sapien
aactgctggggtatgcgggtctttc

SEQ ID NO: 5305052 - DNA, 25 bp, Homo sapien
ggcaccaggtacaagtagatttcac

SEQ ID NO: 5305053 - DNA, 25 bp, Homo sapien
cactgaagtcctcgagggactgagt

SEQ ID NO: 5305054 - DNA, 25 bp, Homo sapien
tacaagtagatttcactgaagtcct

SEQ ID NO: 5305055 - DNA, 25 bp, Homo sapien
aaaccactgagttctatctactccg

SEQ ID NO: 5305056 - DNA, 25 bp, Homo sapien
ggaagagaatctcaccttgccgtct

SEQ ID NO: 5305057 - DNA, 25 bp, Homo sapien
agttctatctactccggctcctgag

SEQ ID NO: 5305058 - DNA, 25 bp, Homo sapien
tgagcaccaagaccctgcttggaag

SEQ ID NO: 5305059 - DNA, 25 bp, Homo sapien
aaatggttgagtgaaggcaagatgc

SEQ ID NO: 5305060 - DNA, 25 bp, Homo sapien
gcaagatgcatgtcctgtaatagta

SEQ ID NO: 5305061 - DNA, 25 bp, Homo sapien
ttgagctaagcacggaagatgggct

SEQ ID NO: 5305062 - DNA, 25 bp, Homo sapien
gctgcgggctctgttattcctaata

SEQ ID NO: 5305063 - DNA, 25 bp, Homo sapien
acatccccacgttcccgccttgcct

SEQ ID NO: 5305064 - DNA, 25 bp, Homo sapien
gcaaagctcgcctgtaaaagcctaa

SEQ ID NO: 5305065 - DNA, 25 bp, Homo sapien
gtttggcaaagctcgcctgtaaaag

SEQ ID NO: 5305066 - DNA, 25 bp, Homo sapien
tgtaaaagcctaatccaaacagcat

SEQ ID NO: 5305067 - DNA, 25 bp, Homo sapien
cctttgatcaactctgatggttttt

SEQ ID NO: 5305068 - DNA, 25 bp, Homo sapien
ttgcacttcctttgatcaactctga

SEQ ID NO: 5305069 - DNA, 25 bp, Homo sapien
gcacttcctttgatcaactctgatg

SEQ ID NO: 5305070 - DNA, 25 bp, Homo sapien
cttcctttgatcaactctgatggtt

SEQ ID NO: 5305071 - DNA, 25 bp, Homo sapien
gcggctggagctgcgtctgtgctga

SEQ ID NO: 5305072 - DNA, 25 bp, Homo sapien
ggagctgcgtctgtgctgacctact

SEQ ID NO: 5305073 - DNA, 25 bp, Homo sapien
ctgtgctgacctacttgtcagtggg

SEQ ID NO: 5305074 - DNA, 25 bp, Homo sapien
gcgtctgtgctgacctacttgtcag

SEQ ID NO: 5305075 - DNA, 25 bp, Homo sapien
cagcctcttttgctgaggtgcccat

SEQ ID NO: 5305076 - DNA, 25 bp, Homo sapien
cacggagcgagagggcagcctcttt

SEQ ID NO: 5305077 - DNA, 25 bp, Homo sapien
aggctacacggagcgagagggcagc

SEQ ID NO: 5305078 - DNA, 25 bp, Homo sapien
ctacacggagcgagagggcagcctc

SEQ ID NO: 5305079 - DNA, 25 bp, Homo sapien
tcagaagcttgctcctcagccaaca

SEQ ID NO: 5305080 - DNA, 25 bp, Homo sapien
atcagaagcttgctcctcagccaac

SEQ ID NO: 5305081 - DNA, 25 bp, Homo sapien
tgctgtgactctttttgtcctggga

SEQ ID NO: 5305082 - DNA, 25 bp, Homo sapien
cagacaggatggtcatcttatttcc

SEQ ID NO: 5305083 - DNA, 25 bp, Homo sapien
taagggtgctgtgactctttttgtc

SEQ ID NO: 5305084 - DNA, 25 bp, Homo sapien
gcttttgctcagtaagggtgctgtg

SEQ ID NO: 5305085 - DNA, 25 bp, Homo sapien
caggccccggtggaaaattgtgaag

SEQ ID NO: 5305086 - DNA, 25 bp, Homo sapien
cagttttgttgtagggctagttgcc

SEQ ID NO: 5305087 - DNA, 25 bp, Homo sapien
cagcagagttatctccggcactcct

SEQ ID NO: 5305088 - DNA, 25 bp, Homo sapien
tgatgtcaacaaaggtaggcagggc

SEQ ID NO: 5305089 - DNA, 25 bp, Homo sapien
gcacttacagtaagaaagggcttca

SEQ ID NO: 5305090 - DNA, 25 bp, Homo sapien
cagtgatttgggcaggattgcaaca

SEQ ID NO: 5305091 - DNA, 25 bp, Homo sapien
caggtaattagggtgcatgcatgct

SEQ ID NO: 5305092 - DNA, 25 bp, Homo sapien
tacacgcacttcaaacactagctgg

SEQ ID NO: 5305093 - DNA, 25 bp, Homo sapien
cataatcaccgtagcatttactcct

SEQ ID NO: 5305094 - DNA, 25 bp, Homo sapien
catgaggctgtgagtcataatcacc

SEQ ID NO: 5305095 - DNA, 25 bp, Homo sapien
tatacaactatgacctggtttctcc

SEQ ID NO: 5305096 - DNA, 25 bp, Homo sapien
tcaccgtagcatttactcctaaatt

SEQ ID NO: 5305097 - DNA, 25 bp, Homo sapien
ctgtgattatagctctttcttccaa

SEQ ID NO: 5305098 - DNA, 25 bp, Homo sapien
tctggcgtctctgtgattatagctc

SEQ ID NO: 5305099 - DNA, 25 bp, Homo sapien
tcttccaattttgactagtctggcg

SEQ ID NO: 5305100 - DNA, 25 bp, Homo sapien
cattaggactcccaaggctagagag

SEQ ID NO: 5305101 - DNA, 25 bp, Homo sapien
atcttggtaaactttttgcaatcac

SEQ ID NO: 5305102 - DNA, 25 bp, Homo sapien
cagtttcctaatgatggatgtttag

SEQ ID NO: 5305103 - DNA, 25 bp, Homo sapien
caaaaagtagattcctgaccgggca

SEQ ID NO: 5305104 - DNA, 25 bp, Homo sapien
tgctagaacaaataacacctcagtg

SEQ ID NO: 5305105 - DNA, 25 bp, Homo sapien
ctttgaactaccagaagcgagcctg

SEQ ID NO: 5305106 - DNA, 25 bp, Homo sapien
tttgaactaccagaagcgagcctgt

SEQ ID NO: 5305107 - DNA, 25 bp, Homo sapien
tctttgaactaccagaagcgagcct

SEQ ID NO: 5305108 - DNA, 25 bp, Homo sapien
ttctttgaactaccagaagcgagcc

SEQ ID NO: 5305109 - DNA, 25 bp, Homo sapien
atgataccagcacgttcctccagag

SEQ ID NO: 5305110 - DNA, 25 bp, Homo sapien
aaggactgctcctgacaacagccag

SEQ ID NO: 5305111 - DNA, 25 bp, Homo sapien
cgggtctggtctctcaactgtgctt

SEQ ID NO: 5305112 - DNA, 25 bp, Homo sapien
gaaagctcttcagcgatgataccag

SEQ ID NO: 5305113 - DNA, 25 bp, Homo sapien
taagccgagatcactccactctact

SEQ ID NO: 5305114 - DNA, 25 bp, Homo sapien
gtaagccgagatcactccactctac

SEQ ID NO: 5305115 - DNA, 25 bp, Homo sapien
gccgagatcactccactctactcta

SEQ ID NO: 5305116 - DNA, 25 bp, Homo sapien
cgagatcactccactctactctagc

SEQ ID NO: 5305117 - DNA, 25 bp, Homo sapien
ttgagtcaataggaggagatgccct

SEQ ID NO: 5305118 - DNA, 25 bp, Homo sapien
tgtccagactatcgagtttcctctg

SEQ ID NO: 5305119 - DNA, 25 bp, Homo sapien
cagaaacaagaactcctattgagtc

SEQ ID NO: 5305120 - DNA, 25 bp, Homo sapien
ttattgggagcaggtatagctgtcc

SEQ ID NO: 5305121 - DNA, 25 bp, Homo sapien
aggaatgcgtagagcacgggccact

SEQ ID NO: 5305122 - DNA, 25 bp, Homo sapien
ctcccttaagtgcatatctcagttc

SEQ ID NO: 5305123 - DNA, 25 bp, Homo sapien
cctggctctcccttaagtgcatatc

SEQ ID NO: 5305124 - DNA, 25 bp, Homo sapien
cccaggtgggcaggaatgcgtagag

SEQ ID NO: 5305125 - DNA, 25 bp, Homo sapien
ggataactgagaccagcaactgctg

SEQ ID NO: 5305126 - DNA, 25 bp, Homo sapien
gaggaacttgggctcttccacggga

SEQ ID NO: 5305127 - DNA, 25 bp, Homo sapien
tgcggtctggccaacttgataagcc

SEQ ID NO: 5305128 - DNA, 25 bp, Homo sapien
tctcacttttgggtaaggacagccc

SEQ ID NO: 5305129 - DNA, 25 bp, Homo sapien
tgtcggtccgctgaatgaagtgccc

SEQ ID NO: 5305130 - DNA, 25 bp, Homo sapien
cctagagaacgagcgggtcaggctc

SEQ ID NO: 5305131 - DNA, 25 bp, Homo sapien
tcaggctcagcgtcggccactctgt

SEQ ID NO: 5305132 - DNA, 25 bp, Homo sapien
gcgctttccccgcaagatggacggt

SEQ ID NO: 5305133 - DNA, 25 bp, Homo sapien
gaacttttttccttccgcacacagc

SEQ ID NO: 5305134 - DNA, 25 bp, Homo sapien
cgcggactccggtggactgagggcc

SEQ ID NO: 5305135 - DNA, 25 bp, Homo sapien
gcacatgttcccttcgaggctgccg

SEQ ID NO: 5305136 - DNA, 25 bp, Homo sapien
ctgccgcccctccgcggactccggt

SEQ ID NO: 5305137 - DNA, 25 bp, Homo sapien
ggatcgccttcacccgaacagaggc

SEQ ID NO: 5305138 - DNA, 25 bp, Homo sapien
ggtggggatcgccttcacccgaaca

SEQ ID NO: 5305139 - DNA, 25 bp, Homo sapien
tcttcagggtacaaccttccaccac

SEQ ID NO: 5305140 - DNA, 25 bp, Homo sapien
ttccaccacctttccacatacacgc

SEQ ID NO: 5305141 - DNA, 25 bp, Homo sapien
gacctagaagcatcggagcatcatt

SEQ ID NO: 5305142 - DNA, 25 bp, Homo sapien
tcttcactttagatttgaaggcgac

SEQ ID NO: 5305143 - DNA, 25 bp, Homo sapien
tttgaaggcgactttccagtatcct

SEQ ID NO: 5305144 - DNA, 25 bp, Homo sapien
ttcagagtagtaggcaacttccttt

SEQ ID NO: 5305145 - DNA, 25 bp, Homo sapien
tgatgtttatagcttatggtttagg

SEQ ID NO: 5305146 - DNA, 25 bp, Homo sapien
ttttatggagaatggtccatgatgt

SEQ ID NO: 5305147 - DNA, 25 bp, Homo sapien
tatagcttatggtttaggaaacaaa

SEQ ID NO: 5305148 - DNA, 25 bp, Homo sapien
tttatggagaatggtccatgatgtt

SEQ ID NO: 5305149 - DNA, 25 bp, Homo sapien
aactgacaccccgtactgtgctgct

SEQ ID NO: 5305150 - DNA, 25 bp, Homo sapien
tgataccctgcactaaactgacacc

SEQ ID NO: 5305151 - DNA, 25 bp, Homo sapien
gcactggctgccttgatagctttag

SEQ ID NO: 5305152 - DNA, 25 bp, Homo sapien
tctgccagaatgacctccttacaca

SEQ ID NO: 5305153 - DNA, 25 bp, Homo sapien
ttggtacttaaagcaatttgggcta

SEQ ID NO: 5305154 - DNA, 25 bp, Homo sapien
tggtacttaaagcaatttgggctat

SEQ ID NO: 5305155 - DNA, 25 bp, Homo sapien
tacttaaagcaatttgggctatttg

SEQ ID NO: 5305156 - DNA, 25 bp, Homo sapien
cactccctggtttaagaactttcat

SEQ ID NO: 5305157 - DNA, 25 bp, Homo sapien
tcactccctggtttaagaactttca

SEQ ID NO: 5305158 - DNA, 25 bp, Homo sapien
attgtgaaatagttgcagaatttcc

SEQ ID NO: 5305159 - DNA, 25 bp, Homo sapien
tgtgaaatagttgcagaatttccct

SEQ ID NO: 5305160 - DNA, 25 bp, Homo sapien
tattgtgaaatagttgcagaatttc

SEQ ID NO: 5305161 - DNA, 25 bp, Homo sapien
ttgtgaaatagttgcagaatttccc

SEQ ID NO: 5305162 - DNA, 25 bp, Homo sapien
tgatgttcaagatcgcctgtcagct

SEQ ID NO: 5305163 - DNA, 25 bp, Homo sapien
gctgatgttttgaggcgtcttgcaa

SEQ ID NO: 5305164 - DNA, 25 bp, Homo sapien
tcagctcttgagtcacgagttcagc

SEQ ID NO: 5305165 - DNA, 25 bp, Homo sapien
tgaaatcactgtgctaaaggcggct

SEQ ID NO: 5305166 - DNA, 25 bp, Homo sapien
taaaaatgcctgtaattggtggtcg

SEQ ID NO: 5305167 - DNA, 25 bp, Homo sapien
tagacagatggattgagccccggga

SEQ ID NO: 5305168 - DNA, 25 bp, Homo sapien
catttgaggcattggtaaaagaacg

SEQ ID NO: 5305169 - DNA, 25 bp, Homo sapien
ctcagttattaagaaggaagcccat

SEQ ID NO: 5305170 - DNA, 25 bp, Homo sapien
tgatttgagctagatgaatccagct

SEQ ID NO: 5305171 - DNA, 25 bp, Homo sapien
gccaaggtaagaataagctacgcag

SEQ ID NO: 5305172 - DNA, 25 bp, Homo sapien
caaccagcaaaaatgtcaactcgcg

SEQ ID NO: 5305173 - DNA, 25 bp, Homo sapien
tacgcagttggttgccttctaagtg

SEQ ID NO: 5305174 - DNA, 25 bp, Homo sapien
gaagattcaaggtgaacagtaaaaa

SEQ ID NO: 5305175 - DNA, 25 bp, Homo sapien
gtttcctgtcttgccaacttcattg

SEQ ID NO: 5305176 - DNA, 25 bp, Homo sapien
ttcaaggtgaacagtaaaaatacag

SEQ ID NO: 5305177 - DNA, 25 bp, Homo sapien
tttacctagaaataaacgattgata

SEQ ID NO: 5305178 - DNA, 25 bp, Homo sapien
gccatccgacaggtataaggtaata

SEQ ID NO: 5305179 - DNA, 25 bp, Homo sapien
tatgtctttggagagactacaaaag

SEQ ID NO: 5305180 - DNA, 25 bp, Homo sapien
tattctcagttaaggaaatggccat

SEQ ID NO: 5305181 - DNA, 25 bp, Homo sapien
tcatccagtagcgtggtagacatgg

SEQ ID NO: 5305182 - DNA, 25 bp, Homo sapien
taaacaccgtgtcccaaatatctgc

SEQ ID NO: 5305183 - DNA, 25 bp, Homo sapien
gcactttctagtacaagcgactgca

SEQ ID NO: 5305184 - DNA, 25 bp, Homo sapien
gatactatatgctgctcccatggcc

SEQ ID NO: 5305185 - DNA, 25 bp, Homo sapien
gagtcccgtatcagttatctccagc

SEQ ID NO: 5305186 - DNA, 25 bp, Homo sapien
gccggattacgggttgactgtctct

SEQ ID NO: 5305187 - DNA, 25 bp, Homo sapien
gaaatgacttgattcaggggccgga

SEQ ID NO: 5305188 - DNA, 25 bp, Homo sapien
caaaacagaggatgtattgactcct

SEQ ID NO: 5305189 - DNA, 25 bp, Homo sapien
gagaaaacctctagtaaaggtcaga

SEQ ID NO: 5305190 - DNA, 25 bp, Homo sapien
tgcttgacttatgccaaaggtggcg

SEQ ID NO: 5305191 - DNA, 25 bp, Homo sapien
ggtgctggcttaattggatactcat

SEQ ID NO: 5305192 - DNA, 25 bp, Homo sapien
tggcgatgcagtaggcgcagaataa

SEQ ID NO: 5305193 - DNA, 25 bp, Homo sapien
gataggagacgatgaagacgtcact

SEQ ID NO: 5305194 - DNA, 25 bp, Homo sapien
gaggtgtagtgctgatccagttttc

SEQ ID NO: 5305195 - DNA, 25 bp, Homo sapien
gatgaccttgtgctaaatccttttt

SEQ ID NO: 5305196 - DNA, 25 bp, Homo sapien
ttaagcacacaggaaaccatctgag

SEQ ID NO: 5305197 - DNA, 25 bp, Homo sapien
tggcagctaaacagatatcacaaat

SEQ ID NO: 5305198 - DNA, 25 bp, Homo sapien
tgggatgtcaaggctatcatagtga

SEQ ID NO: 5305199 - DNA, 25 bp, Homo sapien
gggatgtcaaggctatcatagtgag

SEQ ID NO: 5305200 - DNA, 25 bp, Homo sapien
ggatgtcaaggctatcatagtgagc

SEQ ID NO: 5305201 - DNA, 25 bp, Homo sapien
tatgctagatgaactaagcccctgt

SEQ ID NO: 5305202 - DNA, 25 bp, Homo sapien
agtccaaggcctgtaagcatctcca

SEQ ID NO: 5305203 - DNA, 25 bp, Homo sapien
ttcaactaactagaagatgaggcct

SEQ ID NO: 5305204 - DNA, 25 bp, Homo sapien
taaccactgcaaatatagctgtcga

SEQ ID NO: 5305205 - DNA, 25 bp, Homo sapien
tgactagctggcaccataggtgtgt

SEQ ID NO: 5305206 - DNA, 25 bp, Homo sapien
cctgactagctggcaccataggtgt

SEQ ID NO: 5305207 - DNA, 25 bp, Homo sapien
taatttttcatagagctgaggtctc

SEQ ID NO: 5305208 - DNA, 25 bp, Homo sapien
tcccgaagtgatgagattaggcatg

SEQ ID NO: 5305209 - DNA, 25 bp, Homo sapien
aaactatccctaaggtacactgaat

SEQ ID NO: 5305210 - DNA, 25 bp, Homo sapien
cactgaatttgttaacttacaaaat

SEQ ID NO: 5305211 - DNA, 25 bp, Homo sapien
aactatccctaaggtacactgaatt

SEQ ID NO: 5305212 - DNA, 25 bp, Homo sapien
gacagatatcaatgcactggtgcga

SEQ ID NO: 5305213 - DNA, 25 bp, Homo sapien
aaggtgtctggccagaaggatctga

SEQ ID NO: 5305214 - DNA, 25 bp, Homo sapien
tgttataaggccttctgtccaggga

SEQ ID NO: 5305215 - DNA, 25 bp, Homo sapien
tggtgcgatcccacaatagaaaggt

SEQ ID NO: 5305216 - DNA, 25 bp, Homo sapien
aggccaaagccacccttctggagga

SEQ ID NO: 5305217 - DNA, 25 bp, Homo sapien
ttagtctactagagaggtgctgcct

SEQ ID NO: 5305218 - DNA, 25 bp, Homo sapien
tgccgttttcttacactaccagtgg

SEQ ID NO: 5305219 - DNA, 25 bp, Homo sapien
ttctggaggaccagcaagacccttc

SEQ ID NO: 5305220 - DNA, 25 bp, Homo sapien
tattcacacgctgtatggaagggtg

SEQ ID NO: 5305221 - DNA, 25 bp, Homo sapien
tactaatacgcaggaagcgttccag

SEQ ID NO: 5305222 - DNA, 25 bp, Homo sapien
gaatacagctctcagtgatcagcag

SEQ ID NO: 5305223 - DNA, 25 bp, Homo sapien
gtacatacttatcggagcgcgccag

SEQ ID NO: 5305224 - DNA, 25 bp, Homo sapien
tattgccttactcgtccctggtgac

SEQ ID NO: 5305225 - DNA, 25 bp, Homo sapien
tactaatccatgagaggctatcctg

SEQ ID NO: 5305226 - DNA, 25 bp, Homo sapien
tttaggaccacgaaggctgaagagc

SEQ ID NO: 5305227 - DNA, 25 bp, Homo sapien
gacagaatggctagtgggcaccaaa

SEQ ID NO: 5305228 - DNA, 25 bp, Homo sapien
tgccatgctcgcttgctgtaggtta

SEQ ID NO: 5305229 - DNA, 25 bp, Homo sapien
ccgactggctgagttacgagttgaa

SEQ ID NO: 5305230 - DNA, 25 bp, Homo sapien
tgaggtacacagaagccgactggct

SEQ ID NO: 5305231 - DNA, 25 bp, Homo sapien
gagttgaagccaggtactcccgcct

SEQ ID NO: 5305232 - DNA, 25 bp, Homo sapien
tgaaatcggttaaacttccagtaga

SEQ ID NO: 5305233 - DNA, 25 bp, Homo sapien
gcagaggaaccgctaggctggttca

SEQ ID NO: 5305234 - DNA, 25 bp, Homo sapien
gtagaagaacttaagactggcagaa

SEQ ID NO: 5305235 - DNA, 25 bp, Homo sapien
tactatccctacaaccacagcatgg

SEQ ID NO: 5305236 - DNA, 25 bp, Homo sapien
tcacaggagactccggagcctgcca

SEQ ID NO: 5305237 - DNA, 25 bp, Homo sapien
cagtgatgcccgtttggctggcact

SEQ ID NO: 5305238 - DNA, 25 bp, Homo sapien
ctgtcaacagtgatgcccgtttggc

SEQ ID NO: 5305239 - DNA, 25 bp, Homo sapien
ctggcactgggttggaatgatttga

SEQ ID NO: 5305240 - DNA, 25 bp, Homo sapien
tgcaagccagatgccttacagcagc

SEQ ID NO: 5305241 - DNA, 25 bp, Homo sapien
gtctctctacaagaaacatgcattg

SEQ ID NO: 5305242 - DNA, 25 bp, Homo sapien
aaaccagaagctggagccgtcaccg

SEQ ID NO: 5305243 - DNA, 25 bp, Homo sapien
gccgtcaccgtagagctctgtttca

SEQ ID NO: 5305244 - DNA, 25 bp, Homo sapien
ccgtgggaccaagcggtgcccactg

SEQ ID NO: 5305245 - DNA, 25 bp, Homo sapien
agaggaggcagtgcggaccgtggga

SEQ ID NO: 5305246 - DNA, 25 bp, Homo sapien
ttgaaactctccctgcacgtgtgca

SEQ ID NO: 5305247 - DNA, 25 bp, Homo sapien
ttctagcgcccgctctgctaccatg

SEQ ID NO: 5305248 - DNA, 25 bp, Homo sapien
agaattcatcttctggtccgcccct

SEQ ID NO: 5305249 - DNA, 25 bp, Homo sapien
cgcccctccgatgacggttggttgg

SEQ ID NO: 5305250 - DNA, 25 bp, Homo sapien
tggtccgcccctccgatgacggttg

SEQ ID NO: 5305251 - DNA, 25 bp, Homo sapien
tctggtccgcccctccgatgacggt

SEQ ID NO: 5305252 - DNA, 25 bp, Homo sapien
cgctcctcgtcttgcttccggttga

SEQ ID NO: 5305253 - DNA, 25 bp, Homo sapien
tgtcgttggtactcctcctcggatg

SEQ ID NO: 5305254 - DNA, 25 bp, Homo sapien
tccggttgatgtgtcgttggtactc

SEQ ID NO: 5305255 - DNA, 25 bp, Homo sapien
gcagagacagccgttccgtgtttct

SEQ ID NO: 5305256 - DNA, 25 bp, Homo sapien
gcctttccttgcgtgtctgggctga

SEQ ID NO: 5305257 - DNA, 25 bp, Homo sapien
tctgcctttccttgcgtgtctgggc

SEQ ID NO: 5305258 - DNA, 25 bp, Homo sapien
ccgtagagccttagtgtgattcaac

SEQ ID NO: 5305259 - DNA, 25 bp, Homo sapien
caagaccgtagagccttagtgtgat

SEQ ID NO: 5305260 - DNA, 25 bp, Homo sapien
gccttagtgtgattcaactccatcc

SEQ ID NO: 5305261 - DNA, 25 bp, Homo sapien
tagagccttagtgtgattcaactcc

SEQ ID NO: 5305262 - DNA, 25 bp, Homo sapien
cagtgaggaatctgacagcaggact

SEQ ID NO: 5305263 - DNA, 25 bp, Homo sapien
ccagtgaggaatctgacagcaggac

SEQ ID NO: 5305264 - DNA, 25 bp, Homo sapien
tggaggtgggtttaggtgttatctg

SEQ ID NO: 5305265 - DNA, 25 bp, Homo sapien
tgaaggccttgcccacatccaatcc

SEQ ID NO: 5305266 - DNA, 25 bp, Homo sapien
tatctgtgcggcagaggtaccatct

SEQ ID NO: 5305267 - DNA, 25 bp, Homo sapien
catccaatccaaaggggagagacat

SEQ ID NO: 5305268 - DNA, 25 bp, Homo sapien
aaaccacagacgcggccgttggcac

SEQ ID NO: 5305269 - DNA, 25 bp, Homo sapien
tccgttccacaccactcactcgaag

SEQ ID NO: 5305270 - DNA, 25 bp, Homo sapien
gattcaacgctaggctccgttccac

SEQ ID NO: 5305271 - DNA, 25 bp, Homo sapien
cacaccactcactcgaagcatgaga

SEQ ID NO: 5305272 - DNA, 25 bp, Homo sapien
tccatgtcctgattcaacgctaggc

SEQ ID NO: 5305273 - DNA, 25 bp, Homo sapien
cactgcactctgactgtgctcatca

SEQ ID NO: 5305274 - DNA, 25 bp, Homo sapien
tcatcattctgcaagcacgggaggc

SEQ ID NO: 5305275 - DNA, 25 bp, Homo sapien
attctgcaagcacgggaggccagga

SEQ ID NO: 5305276 - DNA, 25 bp, Homo sapien
ggccaggagcagtgtcgcctttctc

SEQ ID NO: 5305277 - DNA, 25 bp, Homo sapien
catggtggctgtacaactccaaata

SEQ ID NO: 5305278 - DNA, 25 bp, Homo sapien
agaactcattattagaacacctggg

SEQ ID NO: 5305279 - DNA, 25 bp, Homo sapien
gactgaaagtagatgagtgcttgct

SEQ ID NO: 5305280 - DNA, 25 bp, Homo sapien
tacacttgaggtgaactgtacagta

SEQ ID NO: 5305281 - DNA, 25 bp, Homo sapien
tgagcaagaggtcactgttctgtgc

SEQ ID NO: 5305282 - DNA, 25 bp, Homo sapien
gagtctgacaactgcattatggtta

SEQ ID NO: 5305283 - DNA, 25 bp, Homo sapien
tatgcttagtccttctgtagtctga

SEQ ID NO: 5305284 - DNA, 25 bp, Homo sapien
gagagagatatcactgcaaggctac

SEQ ID NO: 5305285 - DNA, 25 bp, Homo sapien
agataaaggagaatttgtggcacag

SEQ ID NO: 5305286 - DNA, 25 bp, Homo sapien
aaggagaatttgtggcacagctgca

SEQ ID NO: 5305287 - DNA, 25 bp, Homo sapien
ataaaggagaatttgtggcacagct

SEQ ID NO: 5305288 - DNA, 25 bp, Homo sapien
aggagaatttgtggcacagctgcat

SEQ ID NO: 5305289 - DNA, 25 bp, Homo sapien
tcaaaaatgcaacctcaagtccctg

SEQ ID NO: 5305290 - DNA, 25 bp, Homo sapien
gctttaactgtcgaatgagctctga

SEQ ID NO: 5305291 - DNA, 25 bp, Homo sapien
aggtattctctgttcccacggtgga

SEQ ID NO: 5305292 - DNA, 25 bp, Homo sapien
tccagggaaatcaggagcacaaaca

SEQ ID NO: 5305293 - DNA, 25 bp, Homo sapien
cgtttcaggtagacgggcacaccat

SEQ ID NO: 5305294 - DNA, 25 bp, Homo sapien
gtccggtaaagcatttggtcaggca

SEQ ID NO: 5305295 - DNA, 25 bp, Homo sapien
tgtttttgggctgcgaagccatgta

SEQ ID NO: 5305296 - DNA, 25 bp, Homo sapien
gtcagcgccatggtggtccggtaaa

SEQ ID NO: 5305297 - DNA, 25 bp, Homo sapien
tctattcgtttatggctcaaactaa

SEQ ID NO: 5305298 - DNA, 25 bp, Homo sapien
aagttctattcgtttatggctcaaa

SEQ ID NO: 5305299 - DNA, 25 bp, Homo sapien
tatataaagttctattcgtttatgg

SEQ ID NO: 5305300 - DNA, 25 bp, Homo sapien
tcgtttatggctcaaactaaaatca

SEQ ID NO: 5305301 - DNA, 25 bp, Homo sapien
taatcatacactgtggaatcggagg

SEQ ID NO: 5305302 - DNA, 25 bp, Homo sapien
ataatcatacactgtggaatcggag

SEQ ID NO: 5305303 - DNA, 25 bp, Homo sapien
aggctgtagtgagctgtgatcacgc

SEQ ID NO: 5305304 - DNA, 25 bp, Homo sapien
cactgtactccagcctgggcgacag

SEQ ID NO: 5305305 - DNA, 25 bp, Homo sapien
gagactctgtctcaaaataaaatta

SEQ ID NO: 5305306 - DNA, 25 bp, Homo sapien
aagatgacttgagcccaggcggtcg

SEQ ID NO: 5305307 - DNA, 25 bp, Homo sapien
tacaagtacgcttcaccatacccag

SEQ ID NO: 5305308 - DNA, 25 bp, Homo sapien
cactgtgatttaggactggagacca

SEQ ID NO: 5305309 - DNA, 25 bp, Homo sapien
taacggtaagctagacatcaccacc

SEQ ID NO: 5305310 - DNA, 25 bp, Homo sapien
tctgcagtgactcaattcatttggc

SEQ ID NO: 5305311 - DNA, 25 bp, Homo sapien
tcaccaatcatgctgaagccctccc

SEQ ID NO: 5305312 - DNA, 25 bp, Homo sapien
gtccaaaattcactcctaagcccat

SEQ ID NO: 5305313 - DNA, 25 bp, Homo sapien
tcctactagtgcctcacaaaattaa

SEQ ID NO: 5305314 - DNA, 25 bp, Homo sapien
caactctgcatcaagttgctctgca

SEQ ID NO: 5305315 - DNA, 25 bp, Homo sapien
taccaattcggtttcagtgagacca

SEQ ID NO: 5305316 - DNA, 25 bp, Homo sapien
ctcaggagtgagtctacagtgaact

SEQ ID NO: 5305317 - DNA, 25 bp, Homo sapien
tacagtacatgggtttgtccaaact

SEQ ID NO: 5305318 - DNA, 25 bp, Homo sapien
tgacagagggtacaagggaacttcc

SEQ ID NO: 5305319 - DNA, 25 bp, Homo sapien
ggagaacagagacgaactcgaccgc

SEQ ID NO: 5305320 - DNA, 25 bp, Homo sapien
cacttctcatgtccgagctggccag

SEQ ID NO: 5305321 - DNA, 25 bp, Homo sapien
cgcgactgcctgtcgccgaggctag

SEQ ID NO: 5305322 - DNA, 25 bp, Homo sapien
ccccgggaggtgcaaggagaacaga

SEQ ID NO: 5305323 - DNA, 25 bp, Homo sapien
gccaacttctgcgtgaagccactaa

SEQ ID NO: 5305324 - DNA, 25 bp, Homo sapien
catgctcctgccaacttctgcgtga

SEQ ID NO: 5305325 - DNA, 25 bp, Homo sapien
cttctgcgtgaagccactaaacttg

SEQ ID NO: 5305326 - DNA, 25 bp, Homo sapien
ctgcgggctataggcctccgaagcc

SEQ ID NO: 5305327 - DNA, 25 bp, Homo sapien
gagactcagcgcaaggacccggtgc

SEQ ID NO: 5305328 - DNA, 25 bp, Homo sapien
gacgcccagagtccggcttcccgca

SEQ ID NO: 5305329 - DNA, 25 bp, Homo sapien
ttcccgcatccgctgccaacgcgac

SEQ ID NO: 5305330 - DNA, 25 bp, Homo sapien
ggctgtggtcccgagactcagcgca

SEQ ID NO: 5305331 - DNA, 25 bp, Homo sapien
gaaggcgtctcttgctttaccgaac

SEQ ID NO: 5305332 - DNA, 25 bp, Homo sapien
caactcaagaaatgcgcaagcgctc

SEQ ID NO: 5305333 - DNA, 25 bp, Homo sapien
tctaagagagcacgcaaagtcgctg

SEQ ID NO: 5305334 - DNA, 25 bp, Homo sapien
catcgaagccggttgggaattccac

SEQ ID NO: 5305335 - DNA, 25 bp, Homo sapien
gttcaagagccccaagtattcagca

SEQ ID NO: 5305336 - DNA, 25 bp, Homo sapien
tgtaagccagcccaaagttgccact

SEQ ID NO: 5305337 - DNA, 25 bp, Homo sapien
ttcagcgaattcatgtaagccagcc

SEQ ID NO: 5305338 - DNA, 25 bp, Homo sapien
tcagcaccgccaatatgttgtaaag

SEQ ID NO: 5305339 - DNA, 25 bp, Homo sapien
ctttattgcggtacaggatgaacat

SEQ ID NO: 5305340 - DNA, 25 bp, Homo sapien
agctttattgcggtacaggatgaac

SEQ ID NO: 5305341 - DNA, 25 bp, Homo sapien
tgggattgcagttgccgggacagct

SEQ ID NO: 5305342 - DNA, 25 bp, Homo sapien
cagttgccgggacagctttattgcg

SEQ ID NO: 5305343 - DNA, 25 bp, Homo sapien
actatagtggttcttcttcctagcg

SEQ ID NO: 5305344 - DNA, 25 bp, Homo sapien
cacaggaagggtgactaaagggcca

SEQ ID NO: 5305345 - DNA, 25 bp, Homo sapien
taatcacctcctgcgtagatgtgag

SEQ ID NO: 5305346 - DNA, 25 bp, Homo sapien
ggccattctgcccattacagttaac

SEQ ID NO: 5305347 - DNA, 25 bp, Homo sapien
gagagggtatgacattcccaaaagc

SEQ ID NO: 5305348 - DNA, 25 bp, Homo sapien
agcgacacgcctgccgttagcatgg

SEQ ID NO: 5305349 - DNA, 25 bp, Homo sapien
tgaccaccgattggcactctgagcc

SEQ ID NO: 5305350 - DNA, 25 bp, Homo sapien
caagtcaaggggcactggccctggc

SEQ ID NO: 5305351 - DNA, 25 bp, Homo sapien
caagtcaataacaactccagttagt

SEQ ID NO: 5305352 - DNA, 25 bp, Homo sapien
cacatccccagcagtttccgtccat

SEQ ID NO: 5305353 - DNA, 25 bp, Homo sapien
ataacaactccagttagtgccccag

SEQ ID NO: 5305354 - DNA, 25 bp, Homo sapien
gttagtgccccaggcttctcacatc

SEQ ID NO: 5305355 - DNA, 25 bp, Homo sapien
agggaagtgtgtggtagctctgctg

SEQ ID NO: 5305356 - DNA, 25 bp, Homo sapien
gggaagtgtgtggtagctctgctgc

SEQ ID NO: 5305357 - DNA, 25 bp, Homo sapien
tgggcctgggtgaatcccctgaaga

SEQ ID NO: 5305358 - DNA, 25 bp, Homo sapien
gacgtggcgacttattcctctgaga

SEQ ID NO: 5305359 - DNA, 25 bp, Homo sapien
tattcgcagatctgagcgccatccc

SEQ ID NO: 5305360 - DNA, 25 bp, Homo sapien
tgagaaatgtttcgcatgctgctgc

SEQ ID NO: 5305361 - DNA, 25 bp, Homo sapien
ctcggctgccttttcgctgtgtgct

SEQ ID NO: 5305362 - DNA, 25 bp, Homo sapien
tgtatgttctcacagttgagttctg

SEQ ID NO: 5305363 - DNA, 25 bp, Homo sapien
tatgttctcacagttgagttctggg

SEQ ID NO: 5305364 - DNA, 25 bp, Homo sapien
ttgtgggctcggctgccttttcgct

SEQ ID NO: 5305365 - DNA, 25 bp, Homo sapien
aagcaagctgatgctatcttattta

SEQ ID NO: 5305366 - DNA, 25 bp, Homo sapien
ccatgtgaatgtcatgcaggaaaca

SEQ ID NO: 5305367 - DNA, 25 bp, Homo sapien
ttataaacaacagcaccaaaattgg

SEQ ID NO: 5305368 - DNA, 25 bp, Homo sapien
gctgatgctatcttatttagttcat

SEQ ID NO: 5305369 - DNA, 25 bp, Homo sapien
tctagcttgcaacagcatccttaag

SEQ ID NO: 5305370 - DNA, 25 bp, Homo sapien
gaccaaggattgaaacaaagtggca

SEQ ID NO: 5305371 - DNA, 25 bp, Homo sapien
gaagacaagcccctaatggttgcct

SEQ ID NO: 5305372 - DNA, 25 bp, Homo sapien
gggcaaagtgacctacctggttcaa

SEQ ID NO: 5305373 - DNA, 25 bp, Homo sapien
tctgaatgcttgttccccgatgcaa

SEQ ID NO: 5305374 - DNA, 25 bp, Homo sapien
cccctgtggtagactgagctgttct

SEQ ID NO: 5305375 - DNA, 25 bp, Homo sapien
tgagtgaaatgactccagcgggccc

SEQ ID NO: 5305376 - DNA, 25 bp, Homo sapien
agctgcagtcctttgcggagcccaa

SEQ ID NO: 5305377 - DNA, 25 bp, Homo sapien
cccattcagatagcatgattccaga

SEQ ID NO: 5305378 - DNA, 25 bp, Homo sapien
tcctataggaggactgtattttccc

SEQ ID NO: 5305379 - DNA, 25 bp, Homo sapien
ttttccttgatagggctgaacctcc

SEQ ID NO: 5305380 - DNA, 25 bp, Homo sapien
ccatcccaataaggtcaggctaggt

SEQ ID NO: 5305381 - DNA, 25 bp, Homo sapien
gataagggcatatccttcatcctgg

SEQ ID NO: 5305382 - DNA, 25 bp, Homo sapien
cagataagggcatatccttcatcct

SEQ ID NO: 5305383 - DNA, 25 bp, Homo sapien
taagggcatatccttcatcctggat

SEQ ID NO: 5305384 - DNA, 25 bp, Homo sapien
ataagggcatatccttcatcctgga

SEQ ID NO: 5305385 - DNA, 25 bp, Homo sapien
tcacagttaagtccatcgacagggc

SEQ ID NO: 5305386 - DNA, 25 bp, Homo sapien
tgcgacaatcaggacaagggcctct

SEQ ID NO: 5305387 - DNA, 25 bp, Homo sapien
tcttctcgggacatgggccgactgc

SEQ ID NO: 5305388 - DNA, 25 bp, Homo sapien
tctcagtcagcagagacgccagagg

SEQ ID NO: 5305389 - DNA, 25 bp, Homo sapien
tctaagtcataggtcatttggtaca

SEQ ID NO: 5305390 - DNA, 25 bp, Homo sapien
gtcaatggctttctaaaatgaagga

SEQ ID NO: 5305391 - DNA, 25 bp, Homo sapien
ggtacattaacatgtaagccatcag

SEQ ID NO: 5305392 - DNA, 25 bp, Homo sapien
tgtactccagatttatgctctagtc

SEQ ID NO: 5305393 - DNA, 25 bp, Homo sapien
ctagagactgccacaaatcagccat

SEQ ID NO: 5305394 - DNA, 25 bp, Homo sapien
tctagagactgccacaaatcagcca

SEQ ID NO: 5305395 - DNA, 25 bp, Homo sapien
ccttctagagactgccacaaatcag

SEQ ID NO: 5305396 - DNA, 25 bp, Homo sapien
cttctagagactgccacaaatcagc

SEQ ID NO: 5305397 - DNA, 25 bp, Homo sapien
caagggctttttgcaggtacaagga

SEQ ID NO: 5305398 - DNA, 25 bp, Homo sapien
aaggatctctcagggtgtcagggca

SEQ ID NO: 5305399 - DNA, 25 bp, Homo sapien
cagggcaaggcccgttgatggtcat

SEQ ID NO: 5305400 - DNA, 25 bp, Homo sapien
ccccagaatgggtcttcaagggctt

SEQ ID NO: 5305401 - DNA, 25 bp, Homo sapien
gtgggaatcaaattgctcagctgct

SEQ ID NO: 5305402 - DNA, 25 bp, Homo sapien
catttcatacccactgtgacggcta

SEQ ID NO: 5305403 - DNA, 25 bp, Homo sapien
tcacagggagataaccatttcatac

SEQ ID NO: 5305404 - DNA, 25 bp, Homo sapien
gaaatgcaagtcataatcacaggga

SEQ ID NO: 5305405 - DNA, 25 bp, Homo sapien
atgtgtgaagattaacctgctgggc

SEQ ID NO: 5305406 - DNA, 25 bp, Homo sapien
tgttaaacagttcccgcatgtgaca

SEQ ID NO: 5305407 - DNA, 25 bp, Homo sapien
catgaagcggcacgataaggtgaat

SEQ ID NO: 5305408 - DNA, 25 bp, Homo sapien
taatatggaggtgctatcatctgca

SEQ ID NO: 5305409 - DNA, 25 bp, Homo sapien
caggaattcagtggagaggctccta

SEQ ID NO: 5305410 - DNA, 25 bp, Homo sapien
ttaattcaggaattcagtggagagg

SEQ ID NO: 5305411 - DNA, 25 bp, Homo sapien
gaattcagtggagaggctcctacta

SEQ ID NO: 5305412 - DNA, 25 bp, Homo sapien
ttcaggaattcagtggagaggctcc

SEQ ID NO: 5305413 - DNA, 25 bp, Homo sapien
gaccaatgaagtgacgggcaagctt

SEQ ID NO: 5305414 - DNA, 25 bp, Homo sapien
gagtcaaaccgagtgtctgaagacc

SEQ ID NO: 5305415 - DNA, 25 bp, Homo sapien
gaacctcacgatgcactcggcagtg

SEQ ID NO: 5305416 - DNA, 25 bp, Homo sapien
atagagataatcacccaccagcagg

SEQ ID NO: 5305417 - DNA, 25 bp, Homo sapien
cattggagcaaaatggccgctagga

SEQ ID NO: 5305418 - DNA, 25 bp, Homo sapien
ctaaaaaggtcccagcagaaacgag

SEQ ID NO: 5305419 - DNA, 25 bp, Homo sapien
ccagcagaaacgaggccgaggactc

SEQ ID NO: 5305420 - DNA, 25 bp, Homo sapien
gaggccgaggactcccacattggag

SEQ ID NO: 5305421 - DNA, 25 bp, Homo sapien
gaatgaaaagttcactctctcaaag

SEQ ID NO: 5305422 - DNA, 25 bp, Homo sapien
aagtcattgggattggccacagaga

SEQ ID NO: 5305423 - DNA, 25 bp, Homo sapien
tcattaggatatgtggcaggacaac

SEQ ID NO: 5305424 - DNA, 25 bp, Homo sapien
gggctgctattattccgtcggatct

SEQ ID NO: 5305425 - DNA, 25 bp, Homo sapien
agggactgatgaccccctacaaaga

SEQ ID NO: 5305426 - DNA, 25 bp, Homo sapien
actgatgaccccctacaaagaaaca

SEQ ID NO: 5305427 - DNA, 25 bp, Homo sapien
aacagggactgatgaccccctacaa

SEQ ID NO: 5305428 - DNA, 25 bp, Homo sapien
ggaaacagggactgatgacccccta

SEQ ID NO: 5305429 - DNA, 25 bp, Homo sapien
atcaggctagggttgtacactttag

SEQ ID NO: 5305430 - DNA, 25 bp, Homo sapien
cctatcaggctagggttgtacactt

SEQ ID NO: 5305431 - DNA, 25 bp, Homo sapien
gaaattctaatcctagaccaagctc

SEQ ID NO: 5305432 - DNA, 25 bp, Homo sapien
aaacctatcaggctagggttgtaca

SEQ ID NO: 5305433 - DNA, 25 bp, Homo sapien
ttgccaagatcagcgtacgtgggag

SEQ ID NO: 5305434 - DNA, 25 bp, Homo sapien
cgtgggaggcttaaccatcttctgc

SEQ ID NO: 5305435 - DNA, 25 bp, Homo sapien
cagcgtacgtgggaggcttaaccat

SEQ ID NO: 5305436 - DNA, 25 bp, Homo sapien
ccaagatcagcgtacgtgggaggct

SEQ ID NO: 5305437 - DNA, 25 bp, Homo sapien
gaggactaaactcagttgtaaagta

SEQ ID NO: 5305438 - DNA, 25 bp, Homo sapien
catgctggagatccctcttccagag

SEQ ID NO: 5305439 - DNA, 25 bp, Homo sapien
caatgaggactaaactcagttgtaa

SEQ ID NO: 5305440 - DNA, 25 bp, Homo sapien
caacatgctggagatccctcttcca

SEQ ID NO: 5305441 - DNA, 25 bp, Homo sapien
gctccctcccagggccggcggagta

SEQ ID NO: 5305442 - DNA, 25 bp, Homo sapien
tgtagaaggagagctcgcacatccg

SEQ ID NO: 5305443 - DNA, 25 bp, Homo sapien
cagtagatcatctcgttgtagaagg

SEQ ID NO: 5305444 - DNA, 25 bp, Homo sapien
gaagtactcgttgcgctcgcggtcg

SEQ ID NO: 5305445 - DNA, 25 bp, Homo sapien
aggcctccgagtgccggtcgaagaa

SEQ ID NO: 5305446 - DNA, 25 bp, Homo sapien
caaagtgagcgggttcggaggcggc

SEQ ID NO: 5305447 - DNA, 25 bp, Homo sapien
tgcgggcgccgaatggagccgccgg

SEQ ID NO: 5305448 - DNA, 25 bp, Homo sapien
ggctcgagtatctccggcgctgcta

SEQ ID NO: 5305449 - DNA, 25 bp, Homo sapien
agcgctgagccccaccggctgggaa

SEQ ID NO: 5305450 - DNA, 25 bp, Homo sapien
tcatgtctgggtccccgccttcacc

SEQ ID NO: 5305451 - DNA, 25 bp, Homo sapien
catgtctgggtccccgccttcaccc

SEQ ID NO: 5305452 - DNA, 25 bp, Homo sapien
tgtgtaagcctgtctcaggcctgag

SEQ ID NO: 5305453 - DNA, 25 bp, Homo sapien
tcaacctcaacttgatgactggcag

SEQ ID NO: 5305454 - DNA, 25 bp, Homo sapien
tctgactgcaggagtgttgccctct

SEQ ID NO: 5305455 - DNA, 25 bp, Homo sapien
tttatagcaaaggacactgagaagc

SEQ ID NO: 5305456 - DNA, 25 bp, Homo sapien
gaataaggcaacgatccagcctcaa

SEQ ID NO: 5305457 - DNA, 25 bp, Homo sapien
tgctggagcctgaataaggcaacga

SEQ ID NO: 5305458 - DNA, 25 bp, Homo sapien
gctgctggagcctgaataaggcaac

SEQ ID NO: 5305459 - DNA, 25 bp, Homo sapien
gagcctgaataaggcaacgatccag

SEQ ID NO: 5305460 - DNA, 25 bp, Homo sapien
ctgcagtaaggccaccttccaggcc

SEQ ID NO: 5305461 - DNA, 25 bp, Homo sapien
tcctggcggggaccgaatactccat

SEQ ID NO: 5305462 - DNA, 25 bp, Homo sapien
ccaggcctgaaggcatcctggcggg

SEQ ID NO: 5305463 - DNA, 25 bp, Homo sapien
tgcagtaaggccaccttccaggcct

SEQ ID NO: 5305464 - DNA, 25 bp, Homo sapien
ttaaacacctattatgcatgaactc

SEQ ID NO: 5305465 - DNA, 25 bp, Homo sapien
tttttaaacacctattatgcatgaa

SEQ ID NO: 5305466 - DNA, 25 bp, Homo sapien
aaacacctattatgcatgaactcat

SEQ ID NO: 5305467 - DNA, 25 bp, Homo sapien
gcatgaactcatagggaatgggttc

SEQ ID NO: 5305468 - DNA, 25 bp, Homo sapien
ccaagggactgggactatactcact

SEQ ID NO: 5305469 - DNA, 25 bp, Homo sapien
ctcacttgggaggttactgattttt

SEQ ID NO: 5305470 - DNA, 25 bp, Homo sapien
tactcacttgggaggttactgattt

SEQ ID NO: 5305471 - DNA, 25 bp, Homo sapien
gactgggactatactcacttgggag

SEQ ID NO: 5305472 - DNA, 25 bp, Homo sapien
taacccgtgacattacaatcatccc

SEQ ID NO: 5305473 - DNA, 25 bp, Homo sapien
gccctgtggtcctgatggtcagccc

SEQ ID NO: 5305474 - DNA, 25 bp, Homo sapien
tcatcccctcttatccgtggttttg

SEQ ID NO: 5305475 - DNA, 25 bp, Homo sapien
ggaggccacccatacagtagagagg

SEQ ID NO: 5305476 - DNA, 25 bp, Homo sapien
gaaaaggtcaaactgcctccaggtg

SEQ ID NO: 5305477 - DNA, 25 bp, Homo sapien
gacaggttttggctggacggattct

SEQ ID NO: 5305478 - DNA, 25 bp, Homo sapien
tgggtgtcctttaccaaagcctcga

SEQ ID NO: 5305479 - DNA, 25 bp, Homo sapien
ggcttccagaagacgtacattatgt

SEQ ID NO: 5305480 - DNA, 25 bp, Homo sapien
gctccttgaagtgtctctgtaatac

SEQ ID NO: 5305481 - DNA, 25 bp, Homo sapien
aagcagctccttgaagtgtctctgt

SEQ ID NO: 5305482 - DNA, 25 bp, Homo sapien
ccttgaagtgtctctgtaatactca

SEQ ID NO: 5305483 - DNA, 25 bp, Homo sapien
gcagctccttgaagtgtctctgtaa

SEQ ID NO: 5305484 - DNA, 25 bp, Homo sapien
gacagttggttctgctcagcccagt

SEQ ID NO: 5305485 - DNA, 25 bp, Homo sapien
tgattgtgaactgtagggccctgtt

SEQ ID NO: 5305486 - DNA, 25 bp, Homo sapien
atacagtgcccgtctagagccaggg

SEQ ID NO: 5305487 - DNA, 25 bp, Homo sapien
taaacgatgacgcagttagggtggc

SEQ ID NO: 5305488 - DNA, 25 bp, Homo sapien
cacttagggccttttactgattgga

SEQ ID NO: 5305489 - DNA, 25 bp, Homo sapien
cctgattgtggaggccaatcttctt

SEQ ID NO: 5305490 - DNA, 25 bp, Homo sapien
ttcttaacttcgagtcagctgatgt

SEQ ID NO: 5305491 - DNA, 25 bp, Homo sapien
tttttgcaaggaactggtttacata

SEQ ID NO: 5305492 - DNA, 25 bp, Homo sapien
attctgcttttaggacttgatctta

SEQ ID NO: 5305493 - DNA, 25 bp, Homo sapien
tctgcttttaggacttgatcttaca

SEQ ID NO: 5305494 - DNA, 25 bp, Homo sapien
caattctgcttttaggacttgatct

SEQ ID NO: 5305495 - DNA, 25 bp, Homo sapien
agcaattctgcttttaggacttgat

SEQ ID NO: 5305496 - DNA, 25 bp, Homo sapien
tttttctgtgttgattttgctctcc

SEQ ID NO: 5305497 - DNA, 25 bp, Homo sapien
ttttctgtgttgattttgctctcct

SEQ ID NO: 5305498 - DNA, 25 bp, Homo sapien
cttttttctgtgttgattttgctct

SEQ ID NO: 5305499 - DNA, 25 bp, Homo sapien
ttttttctgtgttgattttgctctc

SEQ ID NO: 5305500 - DNA, 25 bp, Homo sapien
ttaaccatccccacaagtactgtac

SEQ ID NO: 5305501 - DNA, 25 bp, Homo sapien
tccccacaagtactgtactccatat

SEQ ID NO: 5305502 - DNA, 25 bp, Homo sapien
taaccatccccacaagtactgtact

SEQ ID NO: 5305503 - DNA, 25 bp, Homo sapien
acaagtactgtactccatatgttgt

SEQ ID NO: 5305504 - DNA, 25 bp, Homo sapien
caaaatctgatgttgagccagtggc

SEQ ID NO: 5305505 - DNA, 25 bp, Homo sapien
aatgatcatcccctgtagctttgtt

SEQ ID NO: 5305506 - DNA, 25 bp, Homo sapien
gccagtggcaataacttcagttact

SEQ ID NO: 5305507 - DNA, 25 bp, Homo sapien
ccttagatagcactttaacagtatg

SEQ ID NO: 5305508 - DNA, 25 bp, Homo sapien
aactgggcagccgataacctttggg

SEQ ID NO: 5305509 - DNA, 25 bp, Homo sapien
acctttgggatcgtagtggaaagca

SEQ ID NO: 5305510 - DNA, 25 bp, Homo sapien
gaagatgggacttctgcttctggtt

SEQ ID NO: 5305511 - DNA, 25 bp, Homo sapien
ggacaggtccttccaggatataata

SEQ ID NO: 5305512 - DNA, 25 bp, Homo sapien
gggccacgaaccgtacccatatgaa

SEQ ID NO: 5305513 - DNA, 25 bp, Homo sapien
agcaagaaatgaagctagtgaggaa

SEQ ID NO: 5305514 - DNA, 25 bp, Homo sapien
tgatcagtgatcttagaggtaacta

SEQ ID NO: 5305515 - DNA, 25 bp, Homo sapien
gaaccgtacccatatgaaaggataa

SEQ ID NO: 5305516 - DNA, 25 bp, Homo sapien
cctggcctctagtaccactcattta

SEQ ID NO: 5305517 - DNA, 25 bp, Homo sapien
taattcttgtcatgcagttagcaca

SEQ ID NO: 5305518 - DNA, 25 bp, Homo sapien
taatagctgttatcggccgggtgtg

SEQ ID NO: 5305519 - DNA, 25 bp, Homo sapien
tgtcatgcagttagcacagcgccca

SEQ ID NO: 5305520 - DNA, 25 bp, Homo sapien
ttctaatgctatggtgacagttgtc

SEQ ID NO: 5305521 - DNA, 25 bp, Homo sapien
tctaatgctatggtgacagttgtca

SEQ ID NO: 5305522 - DNA, 25 bp, Homo sapien
ctaatgctatggtgacagttgtcat

SEQ ID NO: 5305523 - DNA, 25 bp, Homo sapien
gaaaataccctcatgataaaggcca

SEQ ID NO: 5305524 - DNA, 25 bp, Homo sapien
gaataggatcctccccagtattttg

SEQ ID NO: 5305525 - DNA, 25 bp, Homo sapien
cttgagatttctgttagggcctgga

SEQ ID NO: 5305526 - DNA, 25 bp, Homo sapien
ggaagtgtggctcatctacctattt

SEQ ID NO: 5305527 - DNA, 25 bp, Homo sapien
taacgttctagattcagttgagcaa

SEQ ID NO: 5305528 - DNA, 25 bp, Homo sapien
acatcaatcatttgtcccctgggaa

SEQ ID NO: 5305529 - DNA, 25 bp, Homo sapien
taatctataggtacctggttttgca

SEQ ID NO: 5305530 - DNA, 25 bp, Homo sapien
cacatgtctatatgcagtcttggca

SEQ ID NO: 5305531 - DNA, 25 bp, Homo sapien
gaagttgaggtggaatgatcccttg

SEQ ID NO: 5305532 - DNA, 25 bp, Homo sapien
tgagaagttgaggtggaatgatccc

SEQ ID NO: 5305533 - DNA, 25 bp, Homo sapien
ctcacacctgttgagaagttgaggt

SEQ ID NO: 5305534 - DNA, 25 bp, Homo sapien
ggctcacacctgttgagaagttgag

SEQ ID NO: 5305535 - DNA, 25 bp, Homo sapien
tcgcttgaacctgggaggtggaggt

SEQ ID NO: 5305536 - DNA, 25 bp, Homo sapien
tgcagtgagccaagatcgtgccatt

SEQ ID NO: 5305537 - DNA, 25 bp, Homo sapien
gagactttgtctcaaaaagtaaata

SEQ ID NO: 5305538 - DNA, 25 bp, Homo sapien
gcactccagcctgggtcacaagagc

SEQ ID NO: 5305539 - DNA, 25 bp, Homo sapien
ctaccttccggggggttcatgcaat

SEQ ID NO: 5305540 - DNA, 25 bp, Homo sapien
agaaccttgagctccgagggccccg

SEQ ID NO: 5305541 - DNA, 25 bp, Homo sapien
ggtaataggccaggccagttggtct

SEQ ID NO: 5305542 - DNA, 25 bp, Homo sapien
gaggtaataggccaggccagttggt

SEQ ID NO: 5305543 - DNA, 25 bp, Homo sapien
ccggggaggtaataggccaggccag

SEQ ID NO: 5305544 - DNA, 25 bp, Homo sapien
tctgctgtgacagtgattggcgtct

SEQ ID NO: 5305545 - DNA, 25 bp, Homo sapien
caatttctaaggtgactctgctgtg

SEQ ID NO: 5305546 - DNA, 25 bp, Homo sapien
tccagttggttgaggcaccgtgtgc

SEQ ID NO: 5305547 - DNA, 25 bp, Homo sapien
tattggaagggacaaactggagagc

SEQ ID NO: 5305548 - DNA, 25 bp, Homo sapien
cacaatagcaaagaggatgagcgcc

SEQ ID NO: 5305549 - DNA, 25 bp, Homo sapien
taggagctctcgtcgctcactgggc

SEQ ID NO: 5305550 - DNA, 25 bp, Homo sapien
gaagcagatggtgtagacggccacc

SEQ ID NO: 5305551 - DNA, 25 bp, Homo sapien
acactgttgaggtaggtgaaggcca

SEQ ID NO: 5305552 - DNA, 25 bp, Homo sapien
tcaggagcaggtgcccgttgaggag

SEQ ID NO: 5305553 - DNA, 25 bp, Homo sapien
gggccggagaaggtgctcaggagca

SEQ ID NO: 5305554 - DNA, 25 bp, Homo sapien
cccacggaagcacggctcagcacgt

SEQ ID NO: 5305555 - DNA, 25 bp, Homo sapien
acggaagcacggctcagcacgtggt

SEQ ID NO: 5305556 - DNA, 25 bp, Homo sapien
gctggccgtgcggttggtggacagc

SEQ ID NO: 5305557 - DNA, 25 bp, Homo sapien
tggccgtgcggttggtggacagcat

SEQ ID NO: 5305558 - DNA, 25 bp, Homo sapien
caggtagcggttgagtgcgatggct

SEQ ID NO: 5305559 - DNA, 25 bp, Homo sapien
cttcaggtagcggttgagtgcgatg

SEQ ID NO: 5305560 - DNA, 25 bp, Homo sapien
gccccaaagcgccaggtctcatgga

SEQ ID NO: 5305561 - DNA, 25 bp, Homo sapien
gaggaggtagtagtccacgcggagg

SEQ ID NO: 5305562 - DNA, 25 bp, Homo sapien
ctgatcaggaggaagtcagcggcca

SEQ ID NO: 5305563 - DNA, 25 bp, Homo sapien
caaagcgccaggtctcatggaggag

SEQ ID NO: 5305564 - DNA, 25 bp, Homo sapien
ggaggtccagggccgcgtgtggatg

SEQ ID NO: 5305565 - DNA, 25 bp, Homo sapien
gggccgcgtgtggatgcagaagatg

SEQ ID NO: 5305566 - DNA, 25 bp, Homo sapien
caggaacaccgtgttggaggtccag

SEQ ID NO: 5305567 - DNA, 25 bp, Homo sapien
ccaggaacaccgtgttggaggtcca

SEQ ID NO: 5305568 - DNA, 25 bp, Homo sapien
agatggagagctcaggttatgaagt

SEQ ID NO: 5305569 - DNA, 25 bp, Homo sapien
gagggagatggagagctcaggttat

SEQ ID NO: 5305570 - DNA, 25 bp, Homo sapien
gagagctcaggttatgaagttccat

SEQ ID NO: 5305571 - DNA, 25 bp, Homo sapien
aaggcagacaccagcgaggaagagg

SEQ ID NO: 5305572 - DNA, 25 bp, Homo sapien
gcaaagtgggatgattggcactatc

SEQ ID NO: 5305573 - DNA, 25 bp, Homo sapien
gctcagggcaaagtgggatgattgg

SEQ ID NO: 5305574 - DNA, 25 bp, Homo sapien
tgattggcactatcagctggccacc

SEQ ID NO: 5305575 - DNA, 25 bp, Homo sapien
gattggcactatcagctggccacca

SEQ ID NO: 5305576 - DNA, 25 bp, Homo sapien
cagcattctcgcagccactgagaaa

SEQ ID NO: 5305577 - DNA, 25 bp, Homo sapien
tttcatcagcattctcgcagccact

SEQ ID NO: 5305578 - DNA, 25 bp, Homo sapien
tcagcattctcgcagccactgagaa

SEQ ID NO: 5305579 - DNA, 25 bp, Homo sapien
catcagcattctcgcagccactgag

SEQ ID NO: 5305580 - DNA, 25 bp, Homo sapien
gtacacggtgaagtaggccccatgg

SEQ ID NO: 5305581 - DNA, 25 bp, Homo sapien
gatggttccgaagtctgtgatggtc

SEQ ID NO: 5305582 - DNA, 25 bp, Homo sapien
tgatggtcccaagtccgggtacacg

SEQ ID NO: 5305583 - DNA, 25 bp, Homo sapien
caaatttctactgccatggcacggg

SEQ ID NO: 5305584 - DNA, 25 bp, Homo sapien
tcttagggccagtagccttttcagc

SEQ ID NO: 5305585 - DNA, 25 bp, Homo sapien
gaaggtcccgatgtctcttagggcc

SEQ ID NO: 5305586 - DNA, 25 bp, Homo sapien
agggccagtagccttttcagcaaag

SEQ ID NO: 5305587 - DNA, 25 bp, Homo sapien
tgacgaggaggttgaaggtcccgat

SEQ ID NO: 5305588 - DNA, 25 bp, Homo sapien
ccaggcatggagcatgcgtggatca

SEQ ID NO: 5305589 - DNA, 25 bp, Homo sapien
ataacagaccctccaacacgtccat

SEQ ID NO: 5305590 - DNA, 25 bp, Homo sapien
catgcgtggatcaagtcacacacac

SEQ ID NO: 5305591 - DNA, 25 bp, Homo sapien
tgcccatccacaaacagggatgccc

SEQ ID NO: 5305592 - DNA, 25 bp, Homo sapien
gccagtgatgactgcctgcggcaga

SEQ ID NO: 5305593 - DNA, 25 bp, Homo sapien
ggggggcacatgggaaggccagtga

SEQ ID NO: 5305594 - DNA, 25 bp, Homo sapien
ggggcacatgggaaggccagtgatg

SEQ ID NO: 5305595 - DNA, 25 bp, Homo sapien
atgactgcctgcggcagacccccag

SEQ ID NO: 5305596 - DNA, 25 bp, Homo sapien
tcttggtgtggaagtgctgcactga

SEQ ID NO: 5305597 - DNA, 25 bp, Homo sapien
aagcctttattgagggccttcttgg

SEQ ID NO: 5305598 - DNA, 25 bp, Homo sapien
gaagcctttattgagggccttcttg

SEQ ID NO: 5305599 - DNA, 25 bp, Homo sapien
gggccttcttggtgtggaagtgctg

SEQ ID NO: 5305600 - DNA, 25 bp, Homo sapien
gggtagaccacctggcaagactggc

SEQ ID NO: 5305601 - DNA, 25 bp, Homo sapien
atggcactcgagggtgcttggcaca

SEQ ID NO: 5305602 - DNA, 25 bp, Homo sapien
gtgacaacaatgtgcaggtctgtgg

SEQ ID NO: 5305603 - DNA, 25 bp, Homo sapien
gacacagcggcagtacacagagagg

SEQ ID NO: 5305604 - DNA, 25 bp, Homo sapien
gctgcttcaggccatggcaagaggg

SEQ ID NO: 5305605 - DNA, 25 bp, Homo sapien
tgtggctgcttcaggccatggcaag

SEQ ID NO: 5305606 - DNA, 25 bp, Homo sapien
tggctgcttcaggccatggcaagag

SEQ ID NO: 5305607 - DNA, 25 bp, Homo sapien
ctgtggctgcttcaggccatggcaa

SEQ ID NO: 5305608 - DNA, 25 bp, Homo sapien
gccttgtgttcgctcccaggcatac

SEQ ID NO: 5305609 - DNA, 25 bp, Homo sapien
gggccacagagccttgtgttcgctc

SEQ ID NO: 5305610 - DNA, 25 bp, Homo sapien
cacagacagggccacagagccttgt

SEQ ID NO: 5305611 - DNA, 25 bp, Homo sapien
cacagagccttgtgttcgctcccag

SEQ ID NO: 5305612 - DNA, 25 bp, Homo sapien
tcaggcgccgtccccccattgtcac

SEQ ID NO: 5305613 - DNA, 25 bp, Homo sapien
cccattgtcaccaccgaggagccct

SEQ ID NO: 5305614 - DNA, 25 bp, Homo sapien
ccattgtcaccaccgaggagccctc

SEQ ID NO: 5305615 - DNA, 25 bp, Homo sapien
ggcgccgtccccccattgtcaccac

SEQ ID NO: 5305616 - DNA, 25 bp, Homo sapien
gagaatcaaatggagactgttgggc

SEQ ID NO: 5305617 - DNA, 25 bp, Homo sapien
aatcaaatggagactgttgggcctc

SEQ ID NO: 5305618 - DNA, 25 bp, Homo sapien
caaatggagactgttgggcctcatc

SEQ ID NO: 5305619 - DNA, 25 bp, Homo sapien
aatggagactgttgggcctcatcac

SEQ ID NO: 5305620 - DNA, 25 bp, Homo sapien
ggccgaggagcgggctgatgccctc

SEQ ID NO: 5305621 - DNA, 25 bp, Homo sapien
ggttctgcaaccctgtccctgggcc

SEQ ID NO: 5305622 - DNA, 25 bp, Homo sapien
gaggagcgggctgatgccctctggc

SEQ ID NO: 5305623 - DNA, 25 bp, Homo sapien
aggccccaagagtgggccccgtgtg

SEQ ID NO: 5305624 - DNA, 25 bp, Homo sapien
ctgtctcaggccttcgctgctgcct

SEQ ID NO: 5305625 - DNA, 25 bp, Homo sapien
tctgtctcaggccttcgctgctgcc

SEQ ID NO: 5305626 - DNA, 25 bp, Homo sapien
acatgggagatggtcttgaacctgg

SEQ ID NO: 5305627 - DNA, 25 bp, Homo sapien
ggtgcttcttgccccacatgggaga

SEQ ID NO: 5305628 - DNA, 25 bp, Homo sapien
catgagggacgcatttccatcagct

SEQ ID NO: 5305629 - DNA, 25 bp, Homo sapien
gcacatgagggacgcatttccatca

SEQ ID NO: 5305630 - DNA, 25 bp, Homo sapien
gggcacatgagggacgcatttccat

SEQ ID NO: 5305631 - DNA, 25 bp, Homo sapien
cagggcacatgagggacgcatttcc

SEQ ID NO: 5305632 - DNA, 25 bp, Homo sapien
tttggcttccaagggtgtgactggc

SEQ ID NO: 5305633 - DNA, 25 bp, Homo sapien
gcttccaagggtgtgactggctgaa

SEQ ID NO: 5305634 - DNA, 25 bp, Homo sapien
ccttttggcttccaagggtgtgact

SEQ ID NO: 5305635 - DNA, 25 bp, Homo sapien
ctcccttttggcttccaagggtgtg

SEQ ID NO: 5305636 - DNA, 25 bp, Homo sapien
tccatgatggatcgtgtgctcagag

SEQ ID NO: 5305637 - DNA, 25 bp, Homo sapien
ggacatgggctccatgatggatcgt

SEQ ID NO: 5305638 - DNA, 25 bp, Homo sapien
aacaggctgagtggtgtgcctgcct

SEQ ID NO: 5305639 - DNA, 25 bp, Homo sapien
ggtctcataggtgtccccaaacagg

SEQ ID NO: 5305640 - DNA, 25 bp, Homo sapien
cacagcatgactatagtcggtgtcc

SEQ ID NO: 5305641 - DNA, 25 bp, Homo sapien
gcacccacagcatgactatagtcgg

SEQ ID NO: 5305642 - DNA, 25 bp, Homo sapien
ctgcacccacagcatgactatagtc

SEQ ID NO: 5305643 - DNA, 25 bp, Homo sapien
tgactatagtcggtgtcctcaggac

SEQ ID NO: 5305644 - DNA, 25 bp, Homo sapien
tgttctgtactgctcagagctgaag

SEQ ID NO: 5305645 - DNA, 25 bp, Homo sapien
ccgaggtccttgcagtagaaccact

SEQ ID NO: 5305646 - DNA, 25 bp, Homo sapien
ttctcaaacagaacgtccatggtgt

SEQ ID NO: 5305647 - DNA, 25 bp, Homo sapien
gggccaactgcgtgccgaggtcctt

SEQ ID NO: 5305648 - DNA, 25 bp, Homo sapien
aaacagaacgtccatggtgtcgccc

SEQ ID NO: 5305649 - DNA, 25 bp, Homo sapien
tgagagttggagcaaagttttggac

SEQ ID NO: 5305650 - DNA, 25 bp, Homo sapien
gggtgccaggaacgcctgttaactg

SEQ ID NO: 5305651 - DNA, 25 bp, Homo sapien
ttcagggtcatgattgcctttgaga

SEQ ID NO: 5305652 - DNA, 25 bp, Homo sapien
gaagccaacacgcagaagatgtccc

SEQ ID NO: 5305653 - DNA, 25 bp, Homo sapien
gaagagtgtggttttatcgcttctg

SEQ ID NO: 5305654 - DNA, 25 bp, Homo sapien
actgaggttactcttactcttgagt

SEQ ID NO: 5305655 - DNA, 25 bp, Homo sapien
tgtaaaagcatcacgtggtctaagc

SEQ ID NO: 5305656 - DNA, 25 bp, Homo sapien
caggattcggtgtggactttgccca

SEQ ID NO: 5305657 - DNA, 25 bp, Homo sapien
tcaaggttcacaacctcacgcagaa

SEQ ID NO: 5305658 - DNA, 25 bp, Homo sapien
ggtcacagagaacagaatccacccc

SEQ ID NO: 5305659 - DNA, 25 bp, Homo sapien
tctaggatcccttcagctgcagttt

SEQ ID NO: 5305660 - DNA, 25 bp, Homo sapien
cactcagtggccaggacgtgctttc

SEQ ID NO: 5305661 - DNA, 25 bp, Homo sapien
agccgccttcgctcaaccaccagcc

SEQ ID NO: 5305662 - DNA, 25 bp, Homo sapien
gtctccagccgccttcgctcaacca

SEQ ID NO: 5305663 - DNA, 25 bp, Homo sapien
gcccatctagctcggtctccagccg

SEQ ID NO: 5305664 - DNA, 25 bp, Homo sapien
agctcggtctccagccgccttcgct

SEQ ID NO: 5305665 - DNA, 25 bp, Homo sapien
gcaccctggcaggcaggaggaatat

SEQ ID NO: 5305666 - DNA, 25 bp, Homo sapien
ctgtggtgagtggggcaccctggca

SEQ ID NO: 5305667 - DNA, 25 bp, Homo sapien
tggtgagtggggcaccctggcaggc

SEQ ID NO: 5305668 - DNA, 25 bp, Homo sapien
ggtgagtggggcaccctggcaggca

SEQ ID NO: 5305669 - DNA, 25 bp, Homo sapien
ccggtgtttcccttgctccaggact

SEQ ID NO: 5305670 - DNA, 25 bp, Homo sapien
ctgccgaatgaccacatcccggtgt

SEQ ID NO: 5305671 - DNA, 25 bp, Homo sapien
cgaatgaccacatcccggtgtttcc

SEQ ID NO: 5305672 - DNA, 25 bp, Homo sapien
actcggagaaccatgtctccctcca

SEQ ID NO: 5305673 - DNA, 25 bp, Homo sapien
agaggtgctagctgtggaggcgtca

SEQ ID NO: 5305674 - DNA, 25 bp, Homo sapien
agctgtggaggcgtcactgcctgac

SEQ ID NO: 5305675 - DNA, 25 bp, Homo sapien
ctccactcatcagccacatgtccac

SEQ ID NO: 5305676 - DNA, 25 bp, Homo sapien
ggaggcgtcactgcctgaccaccag

SEQ ID NO: 5305677 - DNA, 25 bp, Homo sapien
cttcgatgtgatagtccttcctggt

SEQ ID NO: 5305678 - DNA, 25 bp, Homo sapien
ggggcctccgatgaacatgactttg

SEQ ID NO: 5305679 - DNA, 25 bp, Homo sapien
caccctcttcgatgtgatagtcctt

SEQ ID NO: 5305680 - DNA, 25 bp, Homo sapien
gtgttggggcctccgatgaacatga

SEQ ID NO: 5305681 - DNA, 25 bp, Homo sapien
ctgcaatgcgcaaagtgggggagac

SEQ ID NO: 5305682 - DNA, 25 bp, Homo sapien
aatgcgcaaagtgggggagacgttc

SEQ ID NO: 5305683 - DNA, 25 bp, Homo sapien
tgggggagacgttctaaaccatctc

SEQ ID NO: 5305684 - DNA, 25 bp, Homo sapien
caatgcgcaaagtgggggagacgtt

SEQ ID NO: 5305685 - DNA, 25 bp, Homo sapien
gagagcacgggtcccgtgggggcca

SEQ ID NO: 5305686 - DNA, 25 bp, Homo sapien
tgaagagagcacgggtcccgtgggg

SEQ ID NO: 5305687 - DNA, 25 bp, Homo sapien
gtgaagagagcacgggtcccgtggg

SEQ ID NO: 5305688 - DNA, 25 bp, Homo sapien
tggaggcatggctcagtggatgcag

SEQ ID NO: 5305689 - DNA, 25 bp, Homo sapien
tgtctgactataggaccctgcactc

SEQ ID NO: 5305690 - DNA, 25 bp, Homo sapien
ggaggcatggctcagtggatgcagg

SEQ ID NO: 5305691 - DNA, 25 bp, Homo sapien
gctgtctgactataggaccctgcac

SEQ ID NO: 5305692 - DNA, 25 bp, Homo sapien
tcctaacgcccagtactgcagaatg

SEQ ID NO: 5305693 - DNA, 25 bp, Homo sapien
aaggagactgccttgtgaagacgaa

SEQ ID NO: 5305694 - DNA, 25 bp, Homo sapien
gctgaatagtaacccctcctgtaaa

SEQ ID NO: 5305695 - DNA, 25 bp, Homo sapien
ctgcgcccggcttgaaagttgtttt

SEQ ID NO: 5305696 - DNA, 25 bp, Homo sapien
atctagctggcatgtggggccccgc

SEQ ID NO: 5305697 - DNA, 25 bp, Homo sapien
cagctggatggccaaccctgttggg

SEQ ID NO: 5305698 - DNA, 25 bp, Homo sapien
agctggatggccaaccctgttgggt

SEQ ID NO: 5305699 - DNA, 25 bp, Homo sapien
ggcagctggatggccaaccctgttg

SEQ ID NO: 5305700 - DNA, 25 bp, Homo sapien
gctggatggccaaccctgttgggtg

SEQ ID NO: 5305701 - DNA, 25 bp, Homo sapien
tggaaggagccccggttctccttca

SEQ ID NO: 5305702 - DNA, 25 bp, Homo sapien
gcagcgctgtcctcccgccgtcgga

SEQ ID NO: 5305703 - DNA, 25 bp, Homo sapien
tcgcagcgctgtcctcccgccgtcg

SEQ ID NO: 5305704 - DNA, 25 bp, Homo sapien
cagcgctgtcctcccgccgtcggag

SEQ ID NO: 5305705 - DNA, 25 bp, Homo sapien
cctcgcagcgctgtcctcccgccgt

SEQ ID NO: 5305706 - DNA, 25 bp, Homo sapien
attcaaggtgagccccagacctgct

SEQ ID NO: 5305707 - DNA, 25 bp, Homo sapien
cgcaggtcccgattcaaggtgagcc

SEQ ID NO: 5305708 - DNA, 25 bp, Homo sapien
agccgcacggcggtccccgcaggtc

SEQ ID NO: 5305709 - DNA, 25 bp, Homo sapien
ctcggcgaggggagcggtgcaggcg

SEQ ID NO: 5305710 - DNA, 25 bp, Homo sapien
tactcagttcgcacgcagctatggg

SEQ ID NO: 5305711 - DNA, 25 bp, Homo sapien
gaatttggcagatgtggacaccggc

SEQ ID NO: 5305712 - DNA, 25 bp, Homo sapien
taggcgtcttaggaacatactcagt

SEQ ID NO: 5305713 - DNA, 25 bp, Homo sapien
gacagccccgtgtgagagactctaa

SEQ ID NO: 5305714 - DNA, 25 bp, Homo sapien
cctttgcagtttagcttatggtcaa

SEQ ID NO: 5305715 - DNA, 25 bp, Homo sapien
tatactctgcttagaacgtagttca

SEQ ID NO: 5305716 - DNA, 25 bp, Homo sapien
tgttagtcaaatagtcttgatcttt

SEQ ID NO: 5305717 - DNA, 25 bp, Homo sapien
taggtcatgctattgtgttagtcaa

SEQ ID NO: 5305718 - DNA, 25 bp, Homo sapien
tgcctgtcctcactgtagctgggac

SEQ ID NO: 5305719 - DNA, 25 bp, Homo sapien
cacaaagtgctgtaatcacaaagtg

SEQ ID NO: 5305720 - DNA, 25 bp, Homo sapien
catattctgaatgtatgtcattaga

SEQ ID NO: 5305721 - DNA, 25 bp, Homo sapien
tgaatgtatgtcattagacgaaaac

SEQ ID NO: 5305722 - DNA, 25 bp, Homo sapien
caacatgccaagtatcaagatctct

SEQ ID NO: 5305723 - DNA, 25 bp, Homo sapien
acaccaacatgccaagtatcaagat

SEQ ID NO: 5305724 - DNA, 25 bp, Homo sapien
gccaagtatcaagatctctgccttc

SEQ ID NO: 5305725 - DNA, 25 bp, Homo sapien
aaaccaggtgtctttacatcccatg

SEQ ID NO: 5305726 - DNA, 25 bp, Homo sapien
gattttcagcatgatgccagcgcac

SEQ ID NO: 5305727 - DNA, 25 bp, Homo sapien
gtccaccagattttcagcatgatgc

SEQ ID NO: 5305728 - DNA, 25 bp, Homo sapien
cagattttcagcatgatgccagcgc

SEQ ID NO: 5305729 - DNA, 25 bp, Homo sapien
accagattttcagcatgatgccagc

SEQ ID NO: 5305730 - DNA, 25 bp, Homo sapien
ggtgtgggattttcggaggatccat

SEQ ID NO: 5305731 - DNA, 25 bp, Homo sapien
aggtgtgggattttcggaggatcca

SEQ ID NO: 5305732 - DNA, 25 bp, Homo sapien
gttcatcttcttgtccatcaccgga

SEQ ID NO: 5305733 - DNA, 25 bp, Homo sapien
catcttcttgtccatcaccggatga

SEQ ID NO: 5305734 - DNA, 25 bp, Homo sapien
tcttcttgtccatcaccggatgacc

SEQ ID NO: 5305735 - DNA, 25 bp, Homo sapien
atcaccggatgaccccatgccagca

SEQ ID NO: 5305736 - DNA, 25 bp, Homo sapien
gcggccactaaagccaccttcctaa

SEQ ID NO: 5305737 - DNA, 25 bp, Homo sapien
gttcctcggcaatcagggtgtgctt

SEQ ID NO: 5305738 - DNA, 25 bp, Homo sapien
tttcttagctttgcactcttgttcc

SEQ ID NO: 5305739 - DNA, 25 bp, Homo sapien
catgcggccactaaagccaccttcc

SEQ ID NO: 5305740 - DNA, 25 bp, Homo sapien
tatcctctggcatgtgcctcattct

SEQ ID NO: 5305741 - DNA, 25 bp, Homo sapien
gatcccgcatgtcttagatgggaga

SEQ ID NO: 5305742 - DNA, 25 bp, Homo sapien
gggccattgaatgctacctcatttc

SEQ ID NO: 5305743 - DNA, 25 bp, Homo sapien
attcttcctggcatggatcccgcat

SEQ ID NO: 5305744 - DNA, 25 bp, Homo sapien
agcccagatgtcatggaggaattca

SEQ ID NO: 5305745 - DNA, 25 bp, Homo sapien
tatgagtcccgggtactgtgagcag

SEQ ID NO: 5305746 - DNA, 25 bp, Homo sapien
gagcagtggccaagcttggcatttc

SEQ ID NO: 5305747 - DNA, 25 bp, Homo sapien
ttgtagcccagatgtcatggaggaa

SEQ ID NO: 5305748 - DNA, 25 bp, Homo sapien
cgggaagccgcccactggcagctgt

SEQ ID NO: 5305749 - DNA, 25 bp, Homo sapien
gggaagccgcccactggcagctgtg

SEQ ID NO: 5305750 - DNA, 25 bp, Homo sapien
agatcccccgctacccattaaaatg

SEQ ID NO: 5305751 - DNA, 25 bp, Homo sapien
gaatcactttggaagcctctgaatg

SEQ ID NO: 5305752 - DNA, 25 bp, Homo sapien
tggaagcctctgaatgcgtgctcac

SEQ ID NO: 5305753 - DNA, 25 bp, Homo sapien
actttggaagcctctgaatgcgtgc

SEQ ID NO: 5305754 - DNA, 25 bp, Homo sapien
cattccttgaacaccagatatgcgt

SEQ ID NO: 5305755 - DNA, 25 bp, Homo sapien
cattcattccttgaacaccagatat

SEQ ID NO: 5305756 - DNA, 25 bp, Homo sapien
tccttgaacaccagatatgcgttca

SEQ ID NO: 5305757 - DNA, 25 bp, Homo sapien
ttgaacaccagatatgcgttcatgt

SEQ ID NO: 5305758 - DNA, 25 bp, Homo sapien
gaggaccacagcgaagactcctaag

SEQ ID NO: 5305759 - DNA, 25 bp, Homo sapien
gcccggagagagtaagagacttatt

SEQ ID NO: 5305760 - DNA, 25 bp, Homo sapien
ttaagtgcctttcaggtcccaggag

SEQ ID NO: 5305761 - DNA, 25 bp, Homo sapien
tccagcagcggagtttctgaccctg

SEQ ID NO: 5305762 - DNA, 25 bp, Homo sapien
ctgtggaaccaataaaggagtagat

SEQ ID NO: 5305763 - DNA, 25 bp, Homo sapien
tgcagtcggggatcagtcagtatct

SEQ ID NO: 5305764 - DNA, 25 bp, Homo sapien
ggcagattctgcaaatgctacggga

SEQ ID NO: 5305765 - DNA, 25 bp, Homo sapien
ccaccgagggccaactctgctgctt

SEQ ID NO: 5305766 - DNA, 25 bp, Homo sapien
tccaaggagccctaatcctggcatg

SEQ ID NO: 5305767 - DNA, 25 bp, Homo sapien
ggcctcatccacaagtgctccaagg

SEQ ID NO: 5305768 - DNA, 25 bp, Homo sapien
gatcttgcgaggtgttgaccatccc

SEQ ID NO: 5305769 - DNA, 25 bp, Homo sapien
tccagatgtgtctctcagcttacaa

SEQ ID NO: 5305770 - DNA, 25 bp, Homo sapien
ctcggcgcgaagtcgcagaaggctc

SEQ ID NO: 5305771 - DNA, 25 bp, Homo sapien
tcccgtcacggccaggctaggcggc

SEQ ID NO: 5305772 - DNA, 25 bp, Homo sapien
tgcgcgctgcgctctttgcagggcc

SEQ ID NO: 5305773 - DNA, 25 bp, Homo sapien
cggctcgatcggctgcggaacagcc

SEQ ID NO: 5305774 - DNA, 25 bp, Homo sapien
tcttgtttctaactgctctgccgca

SEQ ID NO: 5305775 - DNA, 25 bp, Homo sapien
tatctcgttgccagaagtaaggagt

SEQ ID NO: 5305776 - DNA, 25 bp, Homo sapien
ttggatgttcgcaaccccttttgtg

SEQ ID NO: 5305777 - DNA, 25 bp, Homo sapien
ccttttgtgtatctcgttgccagaa

SEQ ID NO: 5305778 - DNA, 25 bp, Homo sapien
gaagcagctcgcagtggactctcaa

SEQ ID NO: 5305779 - DNA, 25 bp, Homo sapien
cccattggccgcaagcaggaagcag

SEQ ID NO: 5305780 - DNA, 25 bp, Homo sapien
gctacttgttgccaccgcgcgacat

SEQ ID NO: 5305781 - DNA, 25 bp, Homo sapien
cccttttccgagctacttgttgcca

SEQ ID NO: 5305782 - DNA, 25 bp, Homo sapien
tcttaggcgggtcctgtaactgcac

SEQ ID NO: 5305783 - DNA, 25 bp, Homo sapien
ttcttaggcgggtcctgtaactgca

SEQ ID NO: 5305784 - DNA, 25 bp, Homo sapien
ttctagtgctcttcttaggcgggtc

SEQ ID NO: 5305785 - DNA, 25 bp, Homo sapien
tccttctagtgctcttcttaggcgg

SEQ ID NO: 5305786 - DNA, 25 bp, Homo sapien
atccagcccctcgatgcagaacagg

SEQ ID NO: 5305787 - DNA, 25 bp, Homo sapien
tggaatgtgggaagggccgcccact

SEQ ID NO: 5305788 - DNA, 25 bp, Homo sapien
gtcctggtgccgggttcctcgccag

SEQ ID NO: 5305789 - DNA, 25 bp, Homo sapien
gaacaggaaccctatgccaactgga

SEQ ID NO: 5305790 - DNA, 25 bp, Homo sapien
tggctgcaggcagttcaaggcttgc

SEQ ID NO: 5305791 - DNA, 25 bp, Homo sapien
ctttgttgcagtcatagttacataa

SEQ ID NO: 5305792 - DNA, 25 bp, Homo sapien
aaggcttgcccactgcatcggttca

SEQ ID NO: 5305793 - DNA, 25 bp, Homo sapien
tcaatctgttgtgttgtctttttgt

SEQ ID NO: 5305794 - DNA, 25 bp, Homo sapien
tcctctctacgtggaacattttccc

SEQ ID NO: 5305795 - DNA, 25 bp, Homo sapien
gtcctctctacgtggaacattttcc

SEQ ID NO: 5305796 - DNA, 25 bp, Homo sapien
cagtcctctctacgtggaacatttt

SEQ ID NO: 5305797 - DNA, 25 bp, Homo sapien
ccagtcctctctacgtggaacattt

SEQ ID NO: 5305798 - DNA, 25 bp, Homo sapien
atggaaaataggtactccagaatga

SEQ ID NO: 5305799 - DNA, 25 bp, Homo sapien
ccctcatggaaaataggtactccag

SEQ ID NO: 5305800 - DNA, 25 bp, Homo sapien
catggaaaataggtactccagaatg

SEQ ID NO: 5305801 - DNA, 25 bp, Homo sapien
ctcatggaaaataggtactccagaa

SEQ ID NO: 5305802 - DNA, 25 bp, Homo sapien
ctagaccccgatatgtctttgaaca

SEQ ID NO: 5305803 - DNA, 25 bp, Homo sapien
tccattcttacatgaggtcccaatc

SEQ ID NO: 5305804 - DNA, 25 bp, Homo sapien
agaccccgatatgtctttgaacacc

SEQ ID NO: 5305805 - DNA, 25 bp, Homo sapien
cccaatcttaatttcatcagtcttg

SEQ ID NO: 5305806 - DNA, 25 bp, Homo sapien
agaccaatccttaatgcatcgtgaa

SEQ ID NO: 5305807 - DNA, 25 bp, Homo sapien
gtttatcaggtgaggcagatatttt

SEQ ID NO: 5305808 - DNA, 25 bp, Homo sapien
ttaagtttatcaggtgaggcagata

SEQ ID NO: 5305809 - DNA, 25 bp, Homo sapien
tctcttatatcaagaccaatcctta

SEQ ID NO: 5305810 - DNA, 25 bp, Homo sapien
ggtggcatatgcaagcatcatcgga

SEQ ID NO: 5305811 - DNA, 25 bp, Homo sapien
tatgcaagcatcatcggaattgatc

SEQ ID NO: 5305812 - DNA, 25 bp, Homo sapien
ggcatatgcaagcatcatcggaatt

SEQ ID NO: 5305813 - DNA, 25 bp, Homo sapien
ctgggtggcatatgcaagcatcatc

SEQ ID NO: 5305814 - DNA, 25 bp, Homo sapien
gtcgctagcaccggccttgacagtg

SEQ ID NO: 5305815 - DNA, 25 bp, Homo sapien
tgtcgctagcaccggccttgacagt

SEQ ID NO: 5305816 - DNA, 25 bp, Homo sapien
cgctagcaccggccttgacagtgga

SEQ ID NO: 5305817 - DNA, 25 bp, Homo sapien
tcgctagcaccggccttgacagtgg

SEQ ID NO: 5305818 - DNA, 25 bp, Homo sapien
atttctgtgggcccgctctgagccg

SEQ ID NO: 5305819 - DNA, 25 bp, Homo sapien
ctgtgggcccgctctgagccgccgt

SEQ ID NO: 5305820 - DNA, 25 bp, Homo sapien
gtgggcccgctctgagccgccgttt

SEQ ID NO: 5305821 - DNA, 25 bp, Homo sapien
aaggatttctgtgggcccgctctga

SEQ ID NO: 5305822 - DNA, 25 bp, Homo sapien
tcatctcccacgtcgggaaaaggga

SEQ ID NO: 5305823 - DNA, 25 bp, Homo sapien
gaatcatgggatttcccaccggccc

SEQ ID NO: 5305824 - DNA, 25 bp, Homo sapien
tggaccctaccaggacaagaatcgc

SEQ ID NO: 5305825 - DNA, 25 bp, Homo sapien
tccaggctgtttccgccaaatgaag

SEQ ID NO: 5305826 - DNA, 25 bp, Homo sapien
ccaattcatttcaggggtcatggga

SEQ ID NO: 5305827 - DNA, 25 bp, Homo sapien
gggaccattcttcacccaattcatt

SEQ ID NO: 5305828 - DNA, 25 bp, Homo sapien
gtgtctcttcgtggcgccagcaggt

SEQ ID NO: 5305829 - DNA, 25 bp, Homo sapien
gcagcattgcctttgcatgtgccgg

SEQ ID NO: 5305830 - DNA, 25 bp, Homo sapien
ctctctctgccacaacggtgtcccc

SEQ ID NO: 5305831 - DNA, 25 bp, Homo sapien
tctctctgccacaacggtgtccccc

SEQ ID NO: 5305832 - DNA, 25 bp, Homo sapien
tctctgccacaacggtgtcccccac

SEQ ID NO: 5305833 - DNA, 25 bp, Homo sapien
tctgccacaacggtgtcccccacca

SEQ ID NO: 5305834 - DNA, 25 bp, Homo sapien
ggatccagaaggcttgggtccttgt

SEQ ID NO: 5305835 - DNA, 25 bp, Homo sapien
ggaactggggatccagaaggcttgg

SEQ ID NO: 5305836 - DNA, 25 bp, Homo sapien
ctggggatccagaaggcttgggtcc

SEQ ID NO: 5305837 - DNA, 25 bp, Homo sapien
gagggaactggggatccagaaggct

SEQ ID NO: 5305838 - DNA, 25 bp, Homo sapien
tgtccctagctggaggctttgagct

SEQ ID NO: 5305839 - DNA, 25 bp, Homo sapien
gtgtccctagctggaggctttgagc

SEQ ID NO: 5305840 - DNA, 25 bp, Homo sapien
aggtgtccctagctggaggctttga

SEQ ID NO: 5305841 - DNA, 25 bp, Homo sapien
caggtgtccctagctggaggctttg

SEQ ID NO: 5305842 - DNA, 25 bp, Homo sapien
ctgggaagtcctccgggcttcctgg

SEQ ID NO: 5305843 - DNA, 25 bp, Homo sapien
agtcctccgggcttcctggggcctg

SEQ ID NO: 5305844 - DNA, 25 bp, Homo sapien
agaggaaggatttgatcaatgcctt

SEQ ID NO: 5305845 - DNA, 25 bp, Homo sapien
atccactcctcgctacactccagag

SEQ ID NO: 5305846 - DNA, 25 bp, Homo sapien
agaaagtgcatcttgccaccgctgg

SEQ ID NO: 5305847 - DNA, 25 bp, Homo sapien
taccttagtgtgcacaccatccact

SEQ ID NO: 5305848 - DNA, 25 bp, Homo sapien
ccctcccaaggcttcttagagtcag

SEQ ID NO: 5305849 - DNA, 25 bp, Homo sapien
ttccacggaccctcctagctgaaga

SEQ ID NO: 5305850 - DNA, 25 bp, Homo sapien
ctcctagctgaagatggccgctgcc

SEQ ID NO: 5305851 - DNA, 25 bp, Homo sapien
tcccaaggcttcttagagtcagctg

SEQ ID NO: 5305852 - DNA, 25 bp, Homo sapien
ctctgaacaccataagtctgatcat

SEQ ID NO: 5305853 - DNA, 25 bp, Homo sapien
agactctgaacaccataagtctgat

SEQ ID NO: 5305854 - DNA, 25 bp, Homo sapien
gactctgaacaccataagtctgatc

SEQ ID NO: 5305855 - DNA, 25 bp, Homo sapien
actctgaacaccataagtctgatca

SEQ ID NO: 5305856 - DNA, 25 bp, Homo sapien
gacagggcgagctcagttttctaac

SEQ ID NO: 5305857 - DNA, 25 bp, Homo sapien
tcaccagacattagagacagggcga

SEQ ID NO: 5305858 - DNA, 25 bp, Homo sapien
gttttctaactagctcttgcccctg

SEQ ID NO: 5305859 - DNA, 25 bp, Homo sapien
gtttgttgacatgaaactacccgtg

SEQ ID NO: 5305860 - DNA, 25 bp, Homo sapien
caggcatggatccagacaccaccac

SEQ ID NO: 5305861 - DNA, 25 bp, Homo sapien
ttgcccaggccgtgaagaagcgttt

SEQ ID NO: 5305862 - DNA, 25 bp, Homo sapien
atcctctgctgattccacgtaccta

SEQ ID NO: 5305863 - DNA, 25 bp, Homo sapien
tgctgattccacgtacctaccattg

SEQ ID NO: 5305864 - DNA, 25 bp, Homo sapien
ggggtgtctggcagcgtgtctgctg

SEQ ID NO: 5305865 - DNA, 25 bp, Homo sapien
gaacagggcaggcttttgggatgtg

SEQ ID NO: 5305866 - DNA, 25 bp, Homo sapien
ccctttgttcggagtgtgagagcgt

SEQ ID NO: 5305867 - DNA, 25 bp, Homo sapien
tgggtccctttgttcggagtgtgag

SEQ ID NO: 5305868 - DNA, 25 bp, Homo sapien
tggatgtgtgtctttgggtgtccat

SEQ ID NO: 5305869 - DNA, 25 bp, Homo sapien
aagtatgtcgatatttgtgtacaca

SEQ ID NO: 5305870 - DNA, 25 bp, Homo sapien
gctgccaaatgataagtatgtcgat

SEQ ID NO: 5305871 - DNA, 25 bp, Homo sapien
acagacaattgtgttttatccgaaa

SEQ ID NO: 5305872 - DNA, 25 bp, Homo sapien
acatatagaaacagacaattgtgtt

SEQ ID NO: 5305873 - DNA, 25 bp, Homo sapien
aggtgacattcatggttaacttcct

SEQ ID NO: 5305874 - DNA, 25 bp, Homo sapien
cattcatggttaacttcctgtctcc

SEQ ID NO: 5305875 - DNA, 25 bp, Homo sapien
tagcctggctatgaggctgagaggc

SEQ ID NO: 5305876 - DNA, 25 bp, Homo sapien
ttggtttctctgaccaggtgacatt

SEQ ID NO: 5305877 - DNA, 25 bp, Homo sapien
gagacagctccagttgtgtggatga

SEQ ID NO: 5305878 - DNA, 25 bp, Homo sapien
agttgtgtggatgagccccggtcct

SEQ ID NO: 5305879 - DNA, 25 bp, Homo sapien
gcattcccttctgcggagacagctc

SEQ ID NO: 5305880 - DNA, 25 bp, Homo sapien
cctcgtggcccaccagagagtggct

SEQ ID NO: 5305881 - DNA, 25 bp, Homo sapien
tggatgtaaggtggttgttgtagca

SEQ ID NO: 5305882 - DNA, 25 bp, Homo sapien
cctccaggatgagtttgccacatgg

SEQ ID NO: 5305883 - DNA, 25 bp, Homo sapien
tctgagcccgttgctcatccagtgg

SEQ ID NO: 5305884 - DNA, 25 bp, Homo sapien
caatcttgaggggcttcggttttag

SEQ ID NO: 5305885 - DNA, 25 bp, Homo sapien
ggcttggatggttcatgcagagggc

SEQ ID NO: 5305886 - DNA, 25 bp, Homo sapien
gcttggatggttcatgcagagggct

SEQ ID NO: 5305887 - DNA, 25 bp, Homo sapien
gggcttggatggttcatgcagaggg

SEQ ID NO: 5305888 - DNA, 25 bp, Homo sapien
tgcaagctgaatagctccttcatgg

SEQ ID NO: 5305889 - DNA, 25 bp, Homo sapien
catctgcaagctgaatagctccttc

SEQ ID NO: 5305890 - DNA, 25 bp, Homo sapien
atctgcaagctgaatagctccttca

SEQ ID NO: 5305891 - DNA, 25 bp, Homo sapien
tctgcaagctgaatagctccttcat

SEQ ID NO: 5305892 - DNA, 25 bp, Homo sapien
cagggcaggaaccattggtctgcat

SEQ ID NO: 5305893 - DNA, 25 bp, Homo sapien
tgtgtacagggcaggaaccattggt

SEQ ID NO: 5305894 - DNA, 25 bp, Homo sapien
tgtgtgtacagggcaggaaccattg

SEQ ID NO: 5305895 - DNA, 25 bp, Homo sapien
tgtacagggcaggaaccattggtct

SEQ ID NO: 5305896 - DNA, 25 bp, Homo sapien
gaggactttgatttgctgctaactt

SEQ ID NO: 5305897 - DNA, 25 bp, Homo sapien
ccgaggactttgatttgctgctaac

SEQ ID NO: 5305898 - DNA, 25 bp, Homo sapien
tctagagtgtcgatgggagtgagca

SEQ ID NO: 5305899 - DNA, 25 bp, Homo sapien
gctccgaggactttgatttgctgct

SEQ ID NO: 5305900 - DNA, 25 bp, Homo sapien
aatcatccgtcctaggaagcggata

SEQ ID NO: 5305901 - DNA, 25 bp, Homo sapien
cctgctcaatcatccgtcctaggaa

SEQ ID NO: 5305902 - DNA, 25 bp, Homo sapien
acctcctgggcggtcacgccctgct

SEQ ID NO: 5305903 - DNA, 25 bp, Homo sapien
gggcggtcacgccctgctcaatcat

SEQ ID NO: 5305904 - DNA, 25 bp, Homo sapien
gaaggagcagttcccatctgggtcc

SEQ ID NO: 5305905 - DNA, 25 bp, Homo sapien
catgcagcttttgctaggtgaggct

SEQ ID NO: 5305906 - DNA, 25 bp, Homo sapien
tacactgagcatcacaagcgaggca

SEQ ID NO: 5305907 - DNA, 25 bp, Homo sapien
cccctgtaggtgacgtgaggcctct

SEQ ID NO: 5305908 - DNA, 25 bp, Homo sapien
agtgtgcctggctggaccgactgtg

SEQ ID NO: 5305909 - DNA, 25 bp, Homo sapien
tagatcaggccgagtgtgcctggct

SEQ ID NO: 5305910 - DNA, 25 bp, Homo sapien
gtgtgcctggctggaccgactgtgg

SEQ ID NO: 5305911 - DNA, 25 bp, Homo sapien
aatcactagatcaggccgagtgtgc

SEQ ID NO: 5305912 - DNA, 25 bp, Homo sapien
tggcatgagtaccttgccttcccag

SEQ ID NO: 5305913 - DNA, 25 bp, Homo sapien
tttgccaagctgatagaatcaattt

SEQ ID NO: 5305914 - DNA, 25 bp, Homo sapien
caccggaggcgcaggataaaaggct

SEQ ID NO: 5305915 - DNA, 25 bp, Homo sapien
gtgaaggcacacacagacgttcgtg

SEQ ID NO: 5305916 - DNA, 25 bp, Homo sapien
gccccagaattggtagagcatgtca

SEQ ID NO: 5305917 - DNA, 25 bp, Homo sapien
tagctaaggccatgcagccagctgt

SEQ ID NO: 5305918 - DNA, 25 bp, Homo sapien
aattagagggcctgccttaggacac

SEQ ID NO: 5305919 - DNA, 25 bp, Homo sapien
agacattggacactcagcctaggca

SEQ ID NO: 5305920 - DNA, 25 bp, Homo sapien
gagggcaggactctcttcacaccat

SEQ ID NO: 5305921 - DNA, 25 bp, Homo sapien
aaggcaaagctattgcagaaaaacc

SEQ ID NO: 5305922 - DNA, 25 bp, Homo sapien
tgtttgtcatccgttcagctggcca

SEQ ID NO: 5305923 - DNA, 25 bp, Homo sapien
agagcagaggccacggtggtaatcc

SEQ ID NO: 5305924 - DNA, 25 bp, Homo sapien
gaactaactactgcgtggctactca

SEQ ID NO: 5305925 - DNA, 25 bp, Homo sapien
tgtgcccacatgtgttactgaaaca

SEQ ID NO: 5305926 - DNA, 25 bp, Homo sapien
caaataggtctacagtgccaagagc

SEQ ID NO: 5305927 - DNA, 25 bp, Homo sapien
aagagccttctttctgccaccgctg

SEQ ID NO: 5305928 - DNA, 25 bp, Homo sapien
ccatgacttagaacacctaaccatt

SEQ ID NO: 5305929 - DNA, 25 bp, Homo sapien
cggtcactcttgtgtctatcttcat

SEQ ID NO: 5305930 - DNA, 25 bp, Homo sapien
catcccatgacttagaacacctaac

SEQ ID NO: 5305931 - DNA, 25 bp, Homo sapien
tgaggatggatgaccagcggtcact

SEQ ID NO: 5305932 - DNA, 25 bp, Homo sapien
tgagttccgtgttgggccagctccg

SEQ ID NO: 5305933 - DNA, 25 bp, Homo sapien
agaggactgtactggtccctggaag

SEQ ID NO: 5305934 - DNA, 25 bp, Homo sapien
cctggaaggccaaccttgggctgct

SEQ ID NO: 5305935 - DNA, 25 bp, Homo sapien
tctctcacgggagaaagctcaggag

SEQ ID NO: 5305936 - DNA, 25 bp, Homo sapien
gctttccagccgatattctgtgggc

SEQ ID NO: 5305937 - DNA, 25 bp, Homo sapien
tagaaagaggctagcggtgcctgct

SEQ ID NO: 5305938 - DNA, 25 bp, Homo sapien
cagggttttccctgcaacttggatg

SEQ ID NO: 5305939 - DNA, 25 bp, Homo sapien
cagagtctttcgatgtgaatgcaac

SEQ ID NO: 5305940 - DNA, 25 bp, Homo sapien
gagcctggttctgtgtttaggaatt

SEQ ID NO: 5305941 - DNA, 25 bp, Homo sapien
caggcctgttggagagcctggttct

SEQ ID NO: 5305942 - DNA, 25 bp, Homo sapien
gttcaggcctgttggagagcctggt

SEQ ID NO: 5305943 - DNA, 25 bp, Homo sapien
agcctggttctgtgtttaggaattg

SEQ ID NO: 5305944 - DNA, 25 bp, Homo sapien
ggctcccgtggactgtcagaacttc

SEQ ID NO: 5305945 - DNA, 25 bp, Homo sapien
tcctttgcaaggctcccgtggactg

SEQ ID NO: 5305946 - DNA, 25 bp, Homo sapien
tggcccaggggacttgcctgctgtc

SEQ ID NO: 5305947 - DNA, 25 bp, Homo sapien
gacctgctggaaccactgggctcct

SEQ ID NO: 5305948 - DNA, 25 bp, Homo sapien
gatggtaggtttggagctgctgaag

SEQ ID NO: 5305949 - DNA, 25 bp, Homo sapien
ttcctggatggtgtgatgtgaggat

SEQ ID NO: 5305950 - DNA, 25 bp, Homo sapien
ggtagcatgggaccacgtgaagcca

SEQ ID NO: 5305951 - DNA, 25 bp, Homo sapien
ggaccacgtgaagccaacatcatga

SEQ ID NO: 5305952 - DNA, 25 bp, Homo sapien
tgatcacccatggtacagacaccct

SEQ ID NO: 5305953 - DNA, 25 bp, Homo sapien
gcaacagtcaccacttgtcctgatg

SEQ ID NO: 5305954 - DNA, 25 bp, Homo sapien
tctcaagccacactttgcctgatca

SEQ ID NO: 5305955 - DNA, 25 bp, Homo sapien
tcgggagactgttgaaagcaggtgc

SEQ ID NO: 5305956 - DNA, 25 bp, Homo sapien
ctgggggtgctgattcctgcctcat

SEQ ID NO: 5305957 - DNA, 25 bp, Homo sapien
tggccaggagggttgaatggctgac

SEQ ID NO: 5305958 - DNA, 25 bp, Homo sapien
ggtgctgattcctgcctcatggtgg

SEQ ID NO: 5305959 - DNA, 25 bp, Homo sapien
gtggccaggagggttgaatggctga

SEQ ID NO: 5305960 - DNA, 25 bp, Homo sapien
tctttcagatgttctgggctccctg

SEQ ID NO: 5305961 - DNA, 25 bp, Homo sapien
agcactggcggcttcttttcagcac

SEQ ID NO: 5305962 - DNA, 25 bp, Homo sapien
agtctttccataagacctggcccgg

SEQ ID NO: 5305963 - DNA, 25 bp, Homo sapien
ctagctccttcagggctaggtcctg

SEQ ID NO: 5305964 - DNA, 25 bp, Homo sapien
cccatttccagtgcgctcccacttg

SEQ ID NO: 5305965 - DNA, 25 bp, Homo sapien
gagccttcaggggacactaagttaa

SEQ ID NO: 5305966 - DNA, 25 bp, Homo sapien
ctaagttaagagacgatggctgtgc

SEQ ID NO: 5305967 - DNA, 25 bp, Homo sapien
tctgtgcggagccttcaggggacac

SEQ ID NO: 5305968 - DNA, 25 bp, Homo sapien
caaggtggtcgcttctcccaagcgg

SEQ ID NO: 5305969 - DNA, 25 bp, Homo sapien
accatggcttgcacctgcgcaggat

SEQ ID NO: 5305970 - DNA, 25 bp, Homo sapien
tcccaagcggtcatgtggttcaacg

SEQ ID NO: 5305971 - DNA, 25 bp, Homo sapien
gccgctctggatctaggaggccatc

SEQ ID NO: 5305972 - DNA, 25 bp, Homo sapien
cagaaaccagaccacaagggggtct

SEQ ID NO: 5305973 - DNA, 25 bp, Homo sapien
agaaaccagaccacaagggggtctg

SEQ ID NO: 5305974 - DNA, 25 bp, Homo sapien
tgaaacagaaaccagaccacaaggg

SEQ ID NO: 5305975 - DNA, 25 bp, Homo sapien
cgatgaaacagaaaccagaccacaa

SEQ ID NO: 5305976 - DNA, 25 bp, Homo sapien
gaaactcggccgtgctgggcttctg

SEQ ID NO: 5305977 - DNA, 25 bp, Homo sapien
cctccgagatagcaccagaaatgac

SEQ ID NO: 5305978 - DNA, 25 bp, Homo sapien
ttctgggtcaccaggacaagggaag

SEQ ID NO: 5305979 - DNA, 25 bp, Homo sapien
cagaaatgactgctagaaactcggc

SEQ ID NO: 5305980 - DNA, 25 bp, Homo sapien
gacgctaggaacctccatcgtaggg

SEQ ID NO: 5305981 - DNA, 25 bp, Homo sapien
aacctccatcgtagggaccgctgag

SEQ ID NO: 5305982 - DNA, 25 bp, Homo sapien
gctggatagggcagttcagacgcta

SEQ ID NO: 5305983 - DNA, 25 bp, Homo sapien
gctgagcttggcgtttcagacacag

SEQ ID NO: 5305984 - DNA, 25 bp, Homo sapien
taaaaggtcaatccacaaacccatc

SEQ ID NO: 5305985 - DNA, 25 bp, Homo sapien
agataatcctctaaaaggtcaatcc

SEQ ID NO: 5305986 - DNA, 25 bp, Homo sapien
atccagataatcctctaaaaggtca

SEQ ID NO: 5305987 - DNA, 25 bp, Homo sapien
tcctctaaaaggtcaatccacaaac

SEQ ID NO: 5305988 - DNA, 25 bp, Homo sapien
caaaggtactccaaagggaatgcta

SEQ ID NO: 5305989 - DNA, 25 bp, Homo sapien
gaaaatccgaagctggttcccagac

SEQ ID NO: 5305990 - DNA, 25 bp, Homo sapien
caagggtaatgcaaaggtaatggaa

SEQ ID NO: 5305991 - DNA, 25 bp, Homo sapien
aaacatatgagggaggataaaccct

SEQ ID NO: 5305992 - DNA, 25 bp, Homo sapien
acgtcacgagaaggaggagcaccgt

SEQ ID NO: 5305993 - DNA, 25 bp, Homo sapien
taaacatccgtcaacaggcgttggt

SEQ ID NO: 5305994 - DNA, 25 bp, Homo sapien
tgtgcataaaggtgtaccacgggaa

SEQ ID NO: 5305995 - DNA, 25 bp, Homo sapien
agctccaagtaatcctgacccaggg

SEQ ID NO: 5305996 - DNA, 25 bp, Homo sapien
aaaggttccttcgacatcaaatggc

SEQ ID NO: 5305997 - DNA, 25 bp, Homo sapien
tgccacatggtcttgaaggtactct

SEQ ID NO: 5305998 - DNA, 25 bp, Homo sapien
cctgggtttcagtctggtggtgcca

SEQ ID NO: 5305999 - DNA, 25 bp, Homo sapien
ggggccgctcccatgttgtcttcca

SEQ ID NO: 5306000 - DNA, 25 bp, Homo sapien
gacaagatggtaggttgggagtggg

SEQ ID NO: 5306001 - DNA, 25 bp, Homo sapien
aggagagtcccaggtgagctgcgtg

SEQ ID NO: 5306002 - DNA, 25 bp, Homo sapien
gagagtcccaggtgagctgcgtgca

SEQ ID NO: 5306003 - DNA, 25 bp, Homo sapien
ggagagtcccaggtgagctgcgtgc

SEQ ID NO: 5306004 - DNA, 25 bp, Homo sapien
aaggagagtcccaggtgagctgcgt

SEQ ID NO: 5306005 - DNA, 25 bp, Homo sapien
acgatgatttccacctcgatgggca

SEQ ID NO: 5306006 - DNA, 25 bp, Homo sapien
tgtgttgcgtgtctcctccggtggc

SEQ ID NO: 5306007 - DNA, 25 bp, Homo sapien
ccagggagccttggtaattaagacg

SEQ ID NO: 5306008 - DNA, 25 bp, Homo sapien
aactcggctgctggcgcattaggca

SEQ ID NO: 5306009 - DNA, 25 bp, Homo sapien
aaatccttgttatggagtctccgtg

SEQ ID NO: 5306010 - DNA, 25 bp, Homo sapien
ccagggctgtgactgtgaatgggtg

SEQ ID NO: 5306011 - DNA, 25 bp, Homo sapien
tctccgtgtctggttgtagccaggg

SEQ ID NO: 5306012 - DNA, 25 bp, Homo sapien
tccggaccatctgccttcgtggcga

SEQ ID NO: 5306013 - DNA, 25 bp, Homo sapien
ccggtcccagttagctgagctgcgt

SEQ ID NO: 5306014 - DNA, 25 bp, Homo sapien
gtcccagttagctgagctgcgtatc

SEQ ID NO: 5306015 - DNA, 25 bp, Homo sapien
tgggcccggtcccagttagctgagc

SEQ ID NO: 5306016 - DNA, 25 bp, Homo sapien
ggcccggtcccagttagctgagctg

SEQ ID NO: 5306017 - DNA, 25 bp, Homo sapien
ttcttgcagcactgactgttgctgc

SEQ ID NO: 5306018 - DNA, 25 bp, Homo sapien
cttcttgcagcactgactgttgctg

SEQ ID NO: 5306019 - DNA, 25 bp, Homo sapien
agcggacatgactgacttggaagga

SEQ ID NO: 5306020 - DNA, 25 bp, Homo sapien
tctccagcggacatgactgacttgg

SEQ ID NO: 5306021 - DNA, 25 bp, Homo sapien
ctgtctccagcggacatgactgact

SEQ ID NO: 5306022 - DNA, 25 bp, Homo sapien
tgtctgtctccagcggacatgactg

SEQ ID NO: 5306023 - DNA, 25 bp, Homo sapien
gaattgtgtctgacccgacctacgc

SEQ ID NO: 5306024 - DNA, 25 bp, Homo sapien
gaattcggcagggaaccttcagcac

SEQ ID NO: 5306025 - DNA, 25 bp, Homo sapien
gctgctgttggacccactcagggaa

SEQ ID NO: 5306026 - DNA, 25 bp, Homo sapien
ggactggaatcctcgctgcaaaaat

SEQ ID NO: 5306027 - DNA, 25 bp, Homo sapien
ggtcgcgggattgtctgctcctgcc

SEQ ID NO: 5306028 - DNA, 25 bp, Homo sapien
ccaataagccgtgatggtcgcggga

SEQ ID NO: 5306029 - DNA, 25 bp, Homo sapien
aggtgccgagtggagcccaataagc

SEQ ID NO: 5306030 - DNA, 25 bp, Homo sapien
ccagattcccatcgtccctctgtcc

SEQ ID NO: 5306031 - DNA, 25 bp, Homo sapien
ccagggaagacgcagcttgagcaag

SEQ ID NO: 5306032 - DNA, 25 bp, Homo sapien
tgagcaaggtcaccggcaggtaagt

SEQ ID NO: 5306033 - DNA, 25 bp, Homo sapien
tcccaggttagcgaagagtcactgc

SEQ ID NO: 5306034 - DNA, 25 bp, Homo sapien
tgcctcatggccttaagcccagggt

SEQ ID NO: 5306035 - DNA, 25 bp, Homo sapien
caggtcacacttagccactgtgttg

SEQ ID NO: 5306036 - DNA, 25 bp, Homo sapien
aggtcacacttagccactgtgttga

SEQ ID NO: 5306037 - DNA, 25 bp, Homo sapien
ctcatgactgccacttggggaacgg

SEQ ID NO: 5306038 - DNA, 25 bp, Homo sapien
tgccacttggggaacggccactctg

SEQ ID NO: 5306039 - DNA, 25 bp, Homo sapien
cccgcaacggacaccaagcaggcct

SEQ ID NO: 5306040 - DNA, 25 bp, Homo sapien
ccggctctcagaccttccggagctc

SEQ ID NO: 5306041 - DNA, 25 bp, Homo sapien
accttccggagctcccgcctgtgtc

SEQ ID NO: 5306042 - DNA, 25 bp, Homo sapien
ctgcccgcaacggacaccaagcagg

SEQ ID NO: 5306043 - DNA, 25 bp, Homo sapien
ggctaatgacgcttgtcacagagcg

SEQ ID NO: 5306044 - DNA, 25 bp, Homo sapien
gctgatgagtgattttggcagtcac

SEQ ID NO: 5306045 - DNA, 25 bp, Homo sapien
cctggatctcagttgtggctgatga

SEQ ID NO: 5306046 - DNA, 25 bp, Homo sapien
aggaactgagtctgctgccagtcac

SEQ ID NO: 5306047 - DNA, 25 bp, Homo sapien
gggctgagggcctaggaggcgagag

SEQ ID NO: 5306048 - DNA, 25 bp, Homo sapien
cctaggaggcgagagggtgatgtct

SEQ ID NO: 5306049 - DNA, 25 bp, Homo sapien
tgagggcctaggaggcgagagggtg

SEQ ID NO: 5306050 - DNA, 25 bp, Homo sapien
gcctaggaggcgagagggtgatgtc

SEQ ID NO: 5306051 - DNA, 25 bp, Homo sapien
gaaaataactgcagtgctgttagtg

SEQ ID NO: 5306052 - DNA, 25 bp, Homo sapien
tggctccagacccaattttaaaaga

SEQ ID NO: 5306053 - DNA, 25 bp, Homo sapien
aagaaaataactgcagtgctgttag

SEQ ID NO: 5306054 - DNA, 25 bp, Homo sapien
ctggctccagacccaattttaaaag

SEQ ID NO: 5306055 - DNA, 25 bp, Homo sapien
aggaatgaggggaagtcacctgctg

SEQ ID NO: 5306056 - DNA, 25 bp, Homo sapien
ggtccttgaggaatgaggggaagtc

SEQ ID NO: 5306057 - DNA, 25 bp, Homo sapien
tgccccatttcctggagaccttggg

SEQ ID NO: 5306058 - DNA, 25 bp, Homo sapien
caagttccgggctggggtccttgag

SEQ ID NO: 5306059 - DNA, 25 bp, Homo sapien
accacgtctggtcaagggtccctct

SEQ ID NO: 5306060 - DNA, 25 bp, Homo sapien
gtcttccaagccgtgcatgctcctg

SEQ ID NO: 5306061 - DNA, 25 bp, Homo sapien
tcttctggctgctcgttctgtttct

SEQ ID NO: 5306062 - DNA, 25 bp, Homo sapien
gcctgctctggtcttccaagccgtg

SEQ ID NO: 5306063 - DNA, 25 bp, Homo sapien
gccttgtgcttactgactccatggt

SEQ ID NO: 5306064 - DNA, 25 bp, Homo sapien
cagccttgtgcttactgactccatg

SEQ ID NO: 5306065 - DNA, 25 bp, Homo sapien
agccttgtgcttactgactccatgg

SEQ ID NO: 5306066 - DNA, 25 bp, Homo sapien
gaattgtagttcctagcttctctca

SEQ ID NO: 5306067 - DNA, 25 bp, Homo sapien
gccccacaagcagggcattctggga

SEQ ID NO: 5306068 - DNA, 25 bp, Homo sapien
tgtagttcctagcttctctcagagc

SEQ ID NO: 5306069 - DNA, 25 bp, Homo sapien
agaaaagatgtagccccacaagcag

SEQ ID NO: 5306070 - DNA, 25 bp, Homo sapien
cagtgcttcagtgtgggtggactca

SEQ ID NO: 5306071 - DNA, 25 bp, Homo sapien
gactcagaagccgtagggaccccac

SEQ ID NO: 5306072 - DNA, 25 bp, Homo sapien
tcagtgcttcagtgtgggtggactc

SEQ ID NO: 5306073 - DNA, 25 bp, Homo sapien
tgtgggtggactcagaagccgtagg

SEQ ID NO: 5306074 - DNA, 25 bp, Homo sapien
tcctgtcagcctggactcctgactt

SEQ ID NO: 5306075 - DNA, 25 bp, Homo sapien
acttcgatgcttgttcgcacatgca

SEQ ID NO: 5306076 - DNA, 25 bp, Homo sapien
tgcatggccacagctcgtttgctgt

SEQ ID NO: 5306077 - DNA, 25 bp, Homo sapien
gcatcttggaaggtgccctacacat

SEQ ID NO: 5306078 - DNA, 25 bp, Homo sapien
tgagaagcaagctggagacagctga

SEQ ID NO: 5306079 - DNA, 25 bp, Homo sapien
tatttgcacgagtcaaaactgcttc

SEQ ID NO: 5306080 - DNA, 25 bp, Homo sapien
gagtaaccctctggaggaccagcca

SEQ ID NO: 5306081 - DNA, 25 bp, Homo sapien
gaactctgtgagcaagcctgtgtgt

SEQ ID NO: 5306082 - DNA, 25 bp, Homo sapien
gaagggcaagacaccttctattggg

SEQ ID NO: 5306083 - DNA, 25 bp, Homo sapien
ccttttgcagtcaggttgcaccact

SEQ ID NO: 5306084 - DNA, 25 bp, Homo sapien
tttagaaagacacctaggaagggca

SEQ ID NO: 5306085 - DNA, 25 bp, Homo sapien
ccagggctggcttgatgcctatgcc

SEQ ID NO: 5306086 - DNA, 25 bp, Homo sapien
tctctggagtggagatgaatatcaa

SEQ ID NO: 5306087 - DNA, 25 bp, Homo sapien
gttcatgcttctctcggaaaccatc

SEQ ID NO: 5306088 - DNA, 25 bp, Homo sapien
tcggaaaccatcaagttttatgcag

SEQ ID NO: 5306089 - DNA, 25 bp, Homo sapien
aagttttatgcagtattcaggcagc

SEQ ID NO: 5306090 - DNA, 25 bp, Homo sapien
ccaggcattggtaaacagagtagtt

SEQ ID NO: 5306091 - DNA, 25 bp, Homo sapien
tccaagacaggcctgccaggttgtt

SEQ ID NO: 5306092 - DNA, 25 bp, Homo sapien
tgagattgcagttgagatgacagcc

SEQ ID NO: 5306093 - DNA, 25 bp, Homo sapien
gacagccaagggtgcagttatctga

SEQ ID NO: 5306094 - DNA, 25 bp, Homo sapien
gggaacatgcctagcacctctcaat

SEQ ID NO: 5306095 - DNA, 25 bp, Homo sapien
cccatcttgcgtcaagagggaaacc

SEQ ID NO: 5306096 - DNA, 25 bp, Homo sapien
tttgctatggcaagggggcttacta

SEQ ID NO: 5306097 - DNA, 25 bp, Homo sapien
tctcaatctcccatcttgcgtcaag

SEQ ID NO: 5306098 - DNA, 25 bp, Homo sapien
tggaaacaggatgtccaccgcaggc

SEQ ID NO: 5306099 - DNA, 25 bp, Homo sapien
gcagagctggcctaggtagggcact

SEQ ID NO: 5306100 - DNA, 25 bp, Homo sapien
caggagggaaacttccatagtttct

SEQ ID NO: 5306101 - DNA, 25 bp, Homo sapien
ccttgccagtggacagatctgtgtg

SEQ ID NO: 5306102 - DNA, 25 bp, Homo sapien
aggagagaacgcaaatggactgtcg

SEQ ID NO: 5306103 - DNA, 25 bp, Homo sapien
ggtgcctcctgtctcctctagggtg

SEQ ID NO: 5306104 - DNA, 25 bp, Homo sapien
gaagagcatcattcatctcagggct

SEQ ID NO: 5306105 - DNA, 25 bp, Homo sapien
caaacgagatcctgtacttgcagag

SEQ ID NO: 5306106 - DNA, 25 bp, Homo sapien
tatcgacgacttgctgctttcagca

SEQ ID NO: 5306107 - DNA, 25 bp, Homo sapien
tgagaatcagtgagtatcgacgact

SEQ ID NO: 5306108 - DNA, 25 bp, Homo sapien
tcagtgagtatcgacgacttgctgc

SEQ ID NO: 5306109 - DNA, 25 bp, Homo sapien
caacttgagaatcagtgagtatcga

SEQ ID NO: 5306110 - DNA, 25 bp, Homo sapien
gcatcttgcaccatctcctaaaggg

SEQ ID NO: 5306111 - DNA, 25 bp, Homo sapien
gcaccatctcctaaagggcgcaggg

SEQ ID NO: 5306112 - DNA, 25 bp, Homo sapien
tcttgcaccatctcctaaagggcgc

SEQ ID NO: 5306113 - DNA, 25 bp, Homo sapien
agcatcttgcaccatctcctaaagg

SEQ ID NO: 5306114 - DNA, 25 bp, Homo sapien
tgtccgtagggagcaaagccgtagg

SEQ ID NO: 5306115 - DNA, 25 bp, Homo sapien
cagctgtgggtgtccgtagggagca

SEQ ID NO: 5306116 - DNA, 25 bp, Homo sapien
ctgtgggtgtccgtagggagcaaag

SEQ ID NO: 5306117 - DNA, 25 bp, Homo sapien
gagcaaagccgtagggaaggccttg

SEQ ID NO: 5306118 - DNA, 25 bp, Homo sapien
cccgaaagaggttcctgatcgttca

SEQ ID NO: 5306119 - DNA, 25 bp, Homo sapien
gaaagaggttcctgatcgttcagga

SEQ ID NO: 5306120 - DNA, 25 bp, Homo sapien
ccaacccgaaagaggttcctgatcg

SEQ ID NO: 5306121 - DNA, 25 bp, Homo sapien
aagaggttcctgatcgttcaggacg

SEQ ID NO: 5306122 - DNA, 25 bp, Homo sapien
caaggttgacagtggaggtcccgct

SEQ ID NO: 5306123 - DNA, 25 bp, Homo sapien
ccagccgcatgtttcagagggttca

SEQ ID NO: 5306124 - DNA, 25 bp, Homo sapien
aaggccacgttctgcatgcggagct

SEQ ID NO: 5306125 - DNA, 25 bp, Homo sapien
gctgtatgcttctcctaggccggtg

SEQ ID NO: 5306126 - DNA, 25 bp, Homo sapien
ttctcattttactctctgtgacatc

SEQ ID NO: 5306127 - DNA, 25 bp, Homo sapien
gacatctttggacaagtcttaggtt

SEQ ID NO: 5306128 - DNA, 25 bp, Homo sapien
ctgctctgggcacgggctactggat

SEQ ID NO: 5306129 - DNA, 25 bp, Homo sapien
tcttaggttccaggccagttgattt

SEQ ID NO: 5306130 - DNA, 25 bp, Homo sapien
tgtagctagctcctcttgtgctgtc

SEQ ID NO: 5306131 - DNA, 25 bp, Homo sapien
ggctctagggagcaatgggcccctt

SEQ ID NO: 5306132 - DNA, 25 bp, Homo sapien
ctcagggctctagggagcaatgggc

SEQ ID NO: 5306133 - DNA, 25 bp, Homo sapien
gggccccttgtagctagctcctctt

SEQ ID NO: 5306134 - DNA, 25 bp, Homo sapien
tgatcttggacttctcagcccccag

SEQ ID NO: 5306135 - DNA, 25 bp, Homo sapien
cttgatcttggacttctcagccccc

SEQ ID NO: 5306136 - DNA, 25 bp, Homo sapien
atcttggacttctcagcccccagaa

SEQ ID NO: 5306137 - DNA, 25 bp, Homo sapien
caggaaccaaattggcagcaccttg

SEQ ID NO: 5306138 - DNA, 25 bp, Homo sapien
tttgttgcagacctacagtagtgca

SEQ ID NO: 5306139 - DNA, 25 bp, Homo sapien
gctttgttgcagacctacagtagtg

SEQ ID NO: 5306140 - DNA, 25 bp, Homo sapien
cagggcagctttgttgcagacctac

SEQ ID NO: 5306141 - DNA, 25 bp, Homo sapien
gcagctttgttgcagacctacagta

SEQ ID NO: 5306142 - DNA, 25 bp, Homo sapien
tccttaaagtgatctactcagctca

SEQ ID NO: 5306143 - DNA, 25 bp, Homo sapien
gtgatggcagctgccctctatgtct

SEQ ID NO: 5306144 - DNA, 25 bp, Homo sapien
cacactttaaactggtgtcgcagag

SEQ ID NO: 5306145 - DNA, 25 bp, Homo sapien
tgtctgtggtgtgccggcccctcat

SEQ ID NO: 5306146 - DNA, 25 bp, Homo sapien
tgcctcttcggatttctccaacctt

SEQ ID NO: 5306147 - DNA, 25 bp, Homo sapien
tcctatcttcgatctcaggtcctct

SEQ ID NO: 5306148 - DNA, 25 bp, Homo sapien
ggggccctttcccatgtagtgagcc

SEQ ID NO: 5306149 - DNA, 25 bp, Homo sapien
ctagctgcctcttcggatttctcca

SEQ ID NO: 5306150 - DNA, 25 bp, Homo sapien
gatgcacagttagctccatggaaag

SEQ ID NO: 5306151 - DNA, 25 bp, Homo sapien
gaatattccaacgtttcaacagggc

SEQ ID NO: 5306152 - DNA, 25 bp, Homo sapien
tctgagagacaaggtaggagctgca

SEQ ID NO: 5306153 - DNA, 25 bp, Homo sapien
tgcaagatggcgcactcacatgcct

SEQ ID NO: 5306154 - DNA, 25 bp, Homo sapien
tgggggaaggcagaagcttggatgc

SEQ ID NO: 5306155 - DNA, 25 bp, Homo sapien
aaggcagaagcttggatgcagagta

SEQ ID NO: 5306156 - DNA, 25 bp, Homo sapien
gggaaggcagaagcttggatgcaga

SEQ ID NO: 5306157 - DNA, 25 bp, Homo sapien
ggcagaagcttggatgcagagtagg

SEQ ID NO: 5306158 - DNA, 25 bp, Homo sapien
gcacaactatgggattgctcaaccc

SEQ ID NO: 5306159 - DNA, 25 bp, Homo sapien
gaagattaattaatgaaagtctgga

SEQ ID NO: 5306160 - DNA, 25 bp, Homo sapien
tggaagcctggcctgcacaactatg

SEQ ID NO: 5306161 - DNA, 25 bp, Homo sapien
gcctggcctgcacaactatgggatt

SEQ ID NO: 5306162 - DNA, 25 bp, Homo sapien
gccaccctagcacaccatgttctcc

SEQ ID NO: 5306163 - DNA, 25 bp, Homo sapien
cctgagctttcaaacctgcaccagc

SEQ ID NO: 5306164 - DNA, 25 bp, Homo sapien
gaaatgggctataaaacccatactc

SEQ ID NO: 5306165 - DNA, 25 bp, Homo sapien
aaaacccatactctcgccaccctag

SEQ ID NO: 5306166 - DNA, 25 bp, Homo sapien
tgtgcctgctatgggttctccattc

SEQ ID NO: 5306167 - DNA, 25 bp, Homo sapien
taattgtggttatcctgtttctaca

SEQ ID NO: 5306168 - DNA, 25 bp, Homo sapien
cttggaggacaacaaacaaggaagg

SEQ ID NO: 5306169 - DNA, 25 bp, Homo sapien
gaacttcatataaagatcagacaat

SEQ ID NO: 5306170 - DNA, 25 bp, Homo sapien
ttgagacagttgcagtaacggacag

SEQ ID NO: 5306171 - DNA, 25 bp, Homo sapien
gagacagttgcagtaacggacagga

SEQ ID NO: 5306172 - DNA, 25 bp, Homo sapien
tgagacagttgcagtaacggacagg

SEQ ID NO: 5306173 - DNA, 25 bp, Homo sapien
gggtaggggggattagcatgttcca

SEQ ID NO: 5306174 - DNA, 25 bp, Homo sapien
cttgggtaggggggattagcatgtt

SEQ ID NO: 5306175 - DNA, 25 bp, Homo sapien
ggtaggggggattagcatgttccat

SEQ ID NO: 5306176 - DNA, 25 bp, Homo sapien
ttgggtaggggggattagcatgttc

SEQ ID NO: 5306177 - DNA, 25 bp, Homo sapien
gtttgggaagagaatgtgcatttat

SEQ ID NO: 5306178 - DNA, 25 bp, Homo sapien
aagagaatgtgcatttatttgggta

SEQ ID NO: 5306179 - DNA, 25 bp, Homo sapien
ggaagagaatgtgcatttatttggg

SEQ ID NO: 5306180 - DNA, 25 bp, Homo sapien
tgggaagagaatgtgcatttatttg

SEQ ID NO: 5306181 - DNA, 25 bp, Homo sapien
caattaggtatgtctcatgaccaag

SEQ ID NO: 5306182 - DNA, 25 bp, Homo sapien
tagtggtggaatactcatctgaaca

SEQ ID NO: 5306183 - DNA, 25 bp, Homo sapien
gaacacatttaacagccagctagaa

SEQ ID NO: 5306184 - DNA, 25 bp, Homo sapien
gattgctagctttttgtcaatatcc

SEQ ID NO: 5306185 - DNA, 25 bp, Homo sapien
gagaatcaaaaagtcactgctcctt

SEQ ID NO: 5306186 - DNA, 25 bp, Homo sapien
gtaccccactggagagagaatcaaa

SEQ ID NO: 5306187 - DNA, 25 bp, Homo sapien
cttccttggctacaatgctggtgtc

SEQ ID NO: 5306188 - DNA, 25 bp, Homo sapien
ccatttgtccctcgggcttaatgta

SEQ ID NO: 5306189 - DNA, 25 bp, Homo sapien
tccggtctgaggatagaggcaccat

SEQ ID NO: 5306190 - DNA, 25 bp, Homo sapien
ccggtctgaggatagaggcaccatt

SEQ ID NO: 5306191 - DNA, 25 bp, Homo sapien
ctccggtctgaggatagaggcacca

SEQ ID NO: 5306192 - DNA, 25 bp, Homo sapien
gagcaccactcccatactcagtgga

SEQ ID NO: 5306193 - DNA, 25 bp, Homo sapien
gaggagcaccactcccatactcagt

SEQ ID NO: 5306194 - DNA, 25 bp, Homo sapien
ggaggagggagcgataccttcacat

SEQ ID NO: 5306195 - DNA, 25 bp, Homo sapien
ggagcgataccttcacatttctcca

SEQ ID NO: 5306196 - DNA, 25 bp, Homo sapien
atgagagggccatgacctccactcc

SEQ ID NO: 5306197 - DNA, 25 bp, Homo sapien
tgagagggccatgacctccactcca

SEQ ID NO: 5306198 - DNA, 25 bp, Homo sapien
cctctcaccaagctgattcaagtca

SEQ ID NO: 5306199 - DNA, 25 bp, Homo sapien
tctcaccaagctgattcaagtcaag

SEQ ID NO: 5306200 - DNA, 25 bp, Homo sapien
agtcaagtttgagccattcgcaacc

SEQ ID NO: 5306201 - DNA, 25 bp, Homo sapien
cattcgcaacccttagtactgcaag

SEQ ID NO: 5306202 - DNA, 25 bp, Homo sapien
cccaggtggtgacccgggaaagcag

SEQ ID NO: 5306203 - DNA, 25 bp, Homo sapien
caggagaagggcattggctggcttt

SEQ ID NO: 5306204 - DNA, 25 bp, Homo sapien
gaatgaaggcggatctgaaccgctg

SEQ ID NO: 5306205 - DNA, 25 bp, Homo sapien
tgaaggcggatctgaaccgctggct

SEQ ID NO: 5306206 - DNA, 25 bp, Homo sapien
tctactacaggtcttgcaacagtag

SEQ ID NO: 5306207 - DNA, 25 bp, Homo sapien
ccagatccgcattgtgatttttcca

SEQ ID NO: 5306208 - DNA, 25 bp, Homo sapien
gcaacagtagggttttctgtccttc

SEQ ID NO: 5306209 - DNA, 25 bp, Homo sapien
gttttctgtccttcccgtgtagctg

SEQ ID NO: 5306210 - DNA, 25 bp, Homo sapien
aaagtcgggacagcctgacgaagat

SEQ ID NO: 5306211 - DNA, 25 bp, Homo sapien
cgggacagcctgacgaagatattta

SEQ ID NO: 5306212 - DNA, 25 bp, Homo sapien
ccattggaaagtcgggacagcctga

SEQ ID NO: 5306213 - DNA, 25 bp, Homo sapien
gacagcctgacgaagatatttaaag

SEQ ID NO: 5306214 - DNA, 25 bp, Homo sapien
tgccatttcaaacaggctagtatat

SEQ ID NO: 5306215 - DNA, 25 bp, Homo sapien
tttcaaacaggctagtatatgagaa

SEQ ID NO: 5306216 - DNA, 25 bp, Homo sapien
ccatttcaaacaggctagtatatga

SEQ ID NO: 5306217 - DNA, 25 bp, Homo sapien
atttcaaacaggctagtatatgaga

SEQ ID NO: 5306218 - DNA, 25 bp, Homo sapien
cttgaagaagtcttgaggcttccga

SEQ ID NO: 5306219 - DNA, 25 bp, Homo sapien
aatggaaatcctgatccttgaagaa

SEQ ID NO: 5306220 - DNA, 25 bp, Homo sapien
ttccgaaatgggttgtgccagtggc

SEQ ID NO: 5306221 - DNA, 25 bp, Homo sapien
tctgatttccccaaaatggaaatcc

SEQ ID NO: 5306222 - DNA, 25 bp, Homo sapien
ccatcttagtctgaagatcttcact

SEQ ID NO: 5306223 - DNA, 25 bp, Homo sapien
cttggagctgagatctgaattcagc

SEQ ID NO: 5306224 - DNA, 25 bp, Homo sapien
tgaattcagcttcatccatcttagt

SEQ ID NO: 5306225 - DNA, 25 bp, Homo sapien
ttcatccatcttagtctgaagatct

SEQ ID NO: 5306226 - DNA, 25 bp, Homo sapien
cactcagatatccagtgggcagcag

SEQ ID NO: 5306227 - DNA, 25 bp, Homo sapien
acagggagctacgagcccactcaga

SEQ ID NO: 5306228 - DNA, 25 bp, Homo sapien
cgagcccactcagatatccagtggg

SEQ ID NO: 5306229 - DNA, 25 bp, Homo sapien
ggtggaggttcgaacagggagctac

SEQ ID NO: 5306230 - DNA, 25 bp, Homo sapien
tccactgatagaacagggtgggcct

SEQ ID NO: 5306231 - DNA, 25 bp, Homo sapien
gagccttgttctgtagagggaaacc

SEQ ID NO: 5306232 - DNA, 25 bp, Homo sapien
tcctttgggccaggtggagtcagca

SEQ ID NO: 5306233 - DNA, 25 bp, Homo sapien
ggagaaatctctccttcggtgctgg

SEQ ID NO: 5306234 - DNA, 25 bp, Homo sapien
cacgtccatcccgtgtgcgacagga

SEQ ID NO: 5306235 - DNA, 25 bp, Homo sapien
tgcgacaggattccatagagctggg

SEQ ID NO: 5306236 - DNA, 25 bp, Homo sapien
ctctagcccacgtccatcccgtgtg

SEQ ID NO: 5306237 - DNA, 25 bp, Homo sapien
tcccgtgtgcgacaggattccatag

SEQ ID NO: 5306238 - DNA, 25 bp, Homo sapien
tctaccctgtatgccagactgaagg

SEQ ID NO: 5306239 - DNA, 25 bp, Homo sapien
ttgctataaaactctgatggctggc

SEQ ID NO: 5306240 - DNA, 25 bp, Homo sapien
ccccagagtgaggtaccaggtacca

SEQ ID NO: 5306241 - DNA, 25 bp, Homo sapien
tcaaggatttcccattgcactaagg

SEQ ID NO: 5306242 - DNA, 25 bp, Homo sapien
cacgatgatgtatgaggagtctaca

SEQ ID NO: 5306243 - DNA, 25 bp, Homo sapien
gctgcaggcgcaagttttcatcatc

SEQ ID NO: 5306244 - DNA, 25 bp, Homo sapien
ccccggcgctctgtaatgaatggtg

SEQ ID NO: 5306245 - DNA, 25 bp, Homo sapien
gttttgaagactcaacacgatgatg

SEQ ID NO: 5306246 - DNA, 25 bp, Homo sapien
tggaaccaaccacagcaagtagggc

SEQ ID NO: 5306247 - DNA, 25 bp, Homo sapien
tcacagcagctctaatggacggagt

SEQ ID NO: 5306248 - DNA, 25 bp, Homo sapien
ggtttgcctcttcccatggtccctg

SEQ ID NO: 5306249 - DNA, 25 bp, Homo sapien
tgtttcaatgccatggcccagtgga

SEQ ID NO: 5306250 - DNA, 25 bp, Homo sapien
tccttcgccaaggacacaggactgt

SEQ ID NO: 5306251 - DNA, 25 bp, Homo sapien
acctgcgccacgacgaggaggaaat

SEQ ID NO: 5306252 - DNA, 25 bp, Homo sapien
cgtgggagagatgggcgcagcctct

SEQ ID NO: 5306253 - DNA, 25 bp, Homo sapien
aggaaaggcactgaatgagagaaca

SEQ ID NO: 5306254 - DNA, 25 bp, Homo sapien
aaaaaatgcaggttccaactcagcc

SEQ ID NO: 5306255 - DNA, 25 bp, Homo sapien
aagacccttgggcgagtcggtgtct

SEQ ID NO: 5306256 - DNA, 25 bp, Homo sapien
aatattattcttggtagctctgggc

SEQ ID NO: 5306257 - DNA, 25 bp, Homo sapien
aactcattccaagtcaataaaatat

SEQ ID NO: 5306258 - DNA, 25 bp, Homo sapien
aggaagaagcgggtcttcaaaatag

SEQ ID NO: 5306259 - DNA, 25 bp, Homo sapien
aagatcaggtacctgaggaagaagc

SEQ ID NO: 5306260 - DNA, 25 bp, Homo sapien
gaagaagcgggtcttcaaaatagaa

SEQ ID NO: 5306261 - DNA, 25 bp, Homo sapien
aaggggaggtcgttttcaagatcag

SEQ ID NO: 5306262 - DNA, 25 bp, Homo sapien
gaatctccccagatctcatcagggc

SEQ ID NO: 5306263 - DNA, 25 bp, Homo sapien
cttcctgaatctcatcagatccgaa

SEQ ID NO: 5306264 - DNA, 25 bp, Homo sapien
gtctcctcaagtacggagaggccag

SEQ ID NO: 5306265 - DNA, 25 bp, Homo sapien
ccaggagacaccaactctcaaggtc

SEQ ID NO: 5306266 - DNA, 25 bp, Homo sapien
cctggtctccactgatggggaacaa

SEQ ID NO: 5306267 - DNA, 25 bp, Homo sapien
gttcaggaggtttggcagccgagct

SEQ ID NO: 5306268 - DNA, 25 bp, Homo sapien
caaggcatgtgaccccctgggtcgg

SEQ ID NO: 5306269 - DNA, 25 bp, Homo sapien
tgctcaggtaacttgggttcaggag

SEQ ID NO: 5306270 - DNA, 25 bp, Homo sapien
gccaagggcaatgtgcagccacaca

SEQ ID NO: 5306271 - DNA, 25 bp, Homo sapien
gggcaatgtgcagccacacaaagcc

SEQ ID NO: 5306272 - DNA, 25 bp, Homo sapien
ttggccaagggcaatgtgcagccac

SEQ ID NO: 5306273 - DNA, 25 bp, Homo sapien
caagggcaatgtgcagccacacaaa

SEQ ID NO: 5306274 - DNA, 25 bp, Homo sapien
gatgcatttgacatccggttccttt

SEQ ID NO: 5306275 - DNA, 25 bp, Homo sapien
tcagatgcatttgacatccggttcc

SEQ ID NO: 5306276 - DNA, 25 bp, Homo sapien
ccctcagatgcatttgacatccggt

SEQ ID NO: 5306277 - DNA, 25 bp, Homo sapien
tgcatttgacatccggttcctttcc

SEQ ID NO: 5306278 - DNA, 25 bp, Homo sapien
cattctaacgcggtcaggccctttc

SEQ ID NO: 5306279 - DNA, 25 bp, Homo sapien
tgctccagccattctaacgcggtca

SEQ ID NO: 5306280 - DNA, 25 bp, Homo sapien
cagctgcccgccagatgggtcgggt

SEQ ID NO: 5306281 - DNA, 25 bp, Homo sapien
ccaggggagacccagtactcagttt

SEQ ID NO: 5306282 - DNA, 25 bp, Homo sapien
cagctgagccgggaccagagtccag

SEQ ID NO: 5306283 - DNA, 25 bp, Homo sapien
tcaacctcccctgaaacctcatgaa

SEQ ID NO: 5306284 - DNA, 25 bp, Homo sapien
agagtccaggccgaatgacttcaca

SEQ ID NO: 5306285 - DNA, 25 bp, Homo sapien
aactggggggatgcaggagcagctg

SEQ ID NO: 5306286 - DNA, 25 bp, Homo sapien
gatttcaaggagtattggtcaggta

SEQ ID NO: 5306287 - DNA, 25 bp, Homo sapien
catttagtacggtacatttgccaca

SEQ ID NO: 5306288 - DNA, 25 bp, Homo sapien
cttcttaggtctcccttggctgtga

SEQ ID NO: 5306289 - DNA, 25 bp, Homo sapien
taaactgctattgatatcagcccta

SEQ ID NO: 5306290 - DNA, 25 bp, Homo sapien
gactacagtcaacagcgaggcttga

SEQ ID NO: 5306291 - DNA, 25 bp, Homo sapien
gaggagcaggcccacataggccagt

SEQ ID NO: 5306292 - DNA, 25 bp, Homo sapien
caccattggtgtgcctagggtggca

SEQ ID NO: 5306293 - DNA, 25 bp, Homo sapien
ggttcaagtccaccacagaggagca

SEQ ID NO: 5306294 - DNA, 25 bp, Homo sapien
gggtcacataagctcagtggtagtt

SEQ ID NO: 5306295 - DNA, 25 bp, Homo sapien
taagctcagtggtagttcagccagg

SEQ ID NO: 5306296 - DNA, 25 bp, Homo sapien
tgaggggtcacataagctcagtggt

SEQ ID NO: 5306297 - DNA, 25 bp, Homo sapien
cacataagctcagtggtagttcagc

SEQ ID NO: 5306298 - DNA, 25 bp, Homo sapien
gcagacaggagggctgtacttctcc

SEQ ID NO: 5306299 - DNA, 25 bp, Homo sapien
cttgatgtaaagaagtcctcacttt

SEQ ID NO: 5306300 - DNA, 25 bp, Homo sapien
tctctgcagacaggagggctgtact

SEQ ID NO: 5306301 - DNA, 25 bp, Homo sapien
aagtcctcactttctctgcagacag

SEQ ID NO: 5306302 - DNA, 25 bp, Homo sapien
gataccacagttctggacatgcact

SEQ ID NO: 5306303 - DNA, 25 bp, Homo sapien
ggattccagcaagcctttcatagcg

SEQ ID NO: 5306304 - DNA, 25 bp, Homo sapien
tccatccaaaatgcagtaagccatg

SEQ ID NO: 5306305 - DNA, 25 bp, Homo sapien
gaggacactagaatggccaggctcc

SEQ ID NO: 5306306 - DNA, 25 bp, Homo sapien
cctgagagggttactaaaggcaaat

SEQ ID NO: 5306307 - DNA, 25 bp, Homo sapien
agaaagcctgagagggttactaaag

SEQ ID NO: 5306308 - DNA, 25 bp, Homo sapien
tgagaccaaatgtgttggtatggcc

SEQ ID NO: 5306309 - DNA, 25 bp, Homo sapien
gttggtatggccaagaaagcctgag

SEQ ID NO: 5306310 - DNA, 25 bp, Homo sapien
aggcctgtggtacaatgcaaggcga

SEQ ID NO: 5306311 - DNA, 25 bp, Homo sapien
actgggtccagtctgtcgcagtgga

SEQ ID NO: 5306312 - DNA, 25 bp, Homo sapien
aatgcaaggcgaccacatgtagttc

SEQ ID NO: 5306313 - DNA, 25 bp, Homo sapien
caagtccaactacctcacggaaggc

SEQ ID NO: 5306314 - DNA, 25 bp, Homo sapien
accagggcagatgagccaacaggag

SEQ ID NO: 5306315 - DNA, 25 bp, Homo sapien
tctcgcatggcaatgctgacagctg

SEQ ID NO: 5306316 - DNA, 25 bp, Homo sapien
gcattctggcgccagtggaaaccat

SEQ ID NO: 5306317 - DNA, 25 bp, Homo sapien
ttctgatcctcggtgaagcagctcc

SEQ ID NO: 5306318 - DNA, 25 bp, Homo sapien
ccggcctgccagctggggaagcttc

SEQ ID NO: 5306319 - DNA, 25 bp, Homo sapien
ccgccagccggcctgccagctgggg

SEQ ID NO: 5306320 - DNA, 25 bp, Homo sapien
ggcctgccagctggggaagcttcat

SEQ ID NO: 5306321 - DNA, 25 bp, Homo sapien
gccagccggcctgccagctggggaa

SEQ ID NO: 5306322 - DNA, 25 bp, Homo sapien
gaggtttcaagtgtgtccccgctcc

SEQ ID NO: 5306323 - DNA, 25 bp, Homo sapien
tcgaagactcttgccgaggtttcaa

SEQ ID NO: 5306324 - DNA, 25 bp, Homo sapien
ccctttgcaatactgaactcgaaga

SEQ ID NO: 5306325 - DNA, 25 bp, Homo sapien
tactgaactcgaagactcttgccga

SEQ ID NO: 5306326 - DNA, 25 bp, Homo sapien
agcccccactgcctgaatctgttct

SEQ ID NO: 5306327 - DNA, 25 bp, Homo sapien
gcagctggaactgaagtcatctggg

SEQ ID NO: 5306328 - DNA, 25 bp, Homo sapien
tgctgtcctgtatgggctcctcctt

SEQ ID NO: 5306329 - DNA, 25 bp, Homo sapien
caggcgctgtcctaggcacttactt

SEQ ID NO: 5306330 - DNA, 25 bp, Homo sapien
accaagggacttttatgctgctgca

SEQ ID NO: 5306331 - DNA, 25 bp, Homo sapien
ttttagtatacgtgctgctgaagcg

SEQ ID NO: 5306332 - DNA, 25 bp, Homo sapien
gctaatcttttctgtattgttccaa

SEQ ID NO: 5306333 - DNA, 25 bp, Homo sapien
taatatgaagtgcttcatgaatttg

SEQ ID NO: 5306334 - DNA, 25 bp, Homo sapien
catgtcatccttgcacaggggccat

SEQ ID NO: 5306335 - DNA, 25 bp, Homo sapien
aatgcagtccctctacaaggcagcc

SEQ ID NO: 5306336 - DNA, 25 bp, Homo sapien
taatatgtccaaggccaaatagctg

SEQ ID NO: 5306337 - DNA, 25 bp, Homo sapien
tccctaaaggaatcatcagaagctg

SEQ ID NO: 5306338 - DNA, 25 bp, Homo sapien
tgaagcctcccgacatgagtgtccc

SEQ ID NO: 5306339 - DNA, 25 bp, Homo sapien
gcatgatagtccatgtcccgtgaat

SEQ ID NO: 5306340 - DNA, 25 bp, Homo sapien
gcttctgtggactttatcaggccag

SEQ ID NO: 5306341 - DNA, 25 bp, Homo sapien
tgagccttaaagtccagaataggac

SEQ ID NO: 5306342 - DNA, 25 bp, Homo sapien
tcccgtgaatcttgtctggaatagc

SEQ ID NO: 5306343 - DNA, 25 bp, Homo sapien
gctttgaccctctataccaatcagc

SEQ ID NO: 5306344 - DNA, 25 bp, Homo sapien
tttgaccctctataccaatcagcta

SEQ ID NO: 5306345 - DNA, 25 bp, Homo sapien
gaccctctataccaatcagctatgg

SEQ ID NO: 5306346 - DNA, 25 bp, Homo sapien
cattaaagcaaccacattcccacag

SEQ ID NO: 5306347 - DNA, 25 bp, Homo sapien
ctggaggacaaagtgtagggtacac

SEQ ID NO: 5306348 - DNA, 25 bp, Homo sapien
tagcagaggtcacaaccaagctgaa

SEQ ID NO: 5306349 - DNA, 25 bp, Homo sapien
caattatgtgccaggtttgtagaag

SEQ ID NO: 5306350 - DNA, 25 bp, Homo sapien
ttctcatgggagttgtgaacatcca

SEQ ID NO: 5306351 - DNA, 25 bp, Homo sapien
aacctgagtcccatggatgctgctg

SEQ ID NO: 5306352 - DNA, 25 bp, Homo sapien
gccctgccaggtccactttgaatgg

SEQ ID NO: 5306353 - DNA, 25 bp, Homo sapien
cagtctctcaacctgagtcccatgg

SEQ ID NO: 5306354 - DNA, 25 bp, Homo sapien
gggactcttcagaagtgccctgcca

SEQ ID NO: 5306355 - DNA, 25 bp, Homo sapien
gaactggaccctcggcatgctggtt

SEQ ID NO: 5306356 - DNA, 25 bp, Homo sapien
ccaagatcacagaacagagctggaa

SEQ ID NO: 5306357 - DNA, 25 bp, Homo sapien
tgctggttgtatacaaaagcagaac

SEQ ID NO: 5306358 - DNA, 25 bp, Homo sapien
gacgtgcctgcctggttaaatgcct

SEQ ID NO: 5306359 - DNA, 25 bp, Homo sapien
tgtccctcggctatactctggaaaa

SEQ ID NO: 5306360 - DNA, 25 bp, Homo sapien
ggttttatgccagggttggtgccca

SEQ ID NO: 5306361 - DNA, 25 bp, Homo sapien
gaagagccgccatagatttccaaaa

SEQ ID NO: 5306362 - DNA, 25 bp, Homo sapien
cccaggtcggcagtgctggtcttca

SEQ ID NO: 5306363 - DNA, 25 bp, Homo sapien
agggtacactgagcaggctctttgg

SEQ ID NO: 5306364 - DNA, 25 bp, Homo sapien
gttccccagggtacactgagcaggc

SEQ ID NO: 5306365 - DNA, 25 bp, Homo sapien
cttgttccccagggtacactgagca

SEQ ID NO: 5306366 - DNA, 25 bp, Homo sapien
ggtacactgagcaggctctttggga

SEQ ID NO: 5306367 - DNA, 25 bp, Homo sapien
cagatgagagggccaataagatgcc

SEQ ID NO: 5306368 - DNA, 25 bp, Homo sapien
taggaggtagatccactcgaaagca

SEQ ID NO: 5306369 - DNA, 25 bp, Homo sapien
gatccactcgaaagcaatcaaagcc

SEQ ID NO: 5306370 - DNA, 25 bp, Homo sapien
ctggcattctaggaggtagatccac

SEQ ID NO: 5306371 - DNA, 25 bp, Homo sapien
caatcaaagccacggagtgtgtgat

SEQ ID NO: 5306372 - DNA, 25 bp, Homo sapien
attgcatccctgtgacctcccggtt

SEQ ID NO: 5306373 - DNA, 25 bp, Homo sapien
ccaggcattggctcgtgggaactcg

SEQ ID NO: 5306374 - DNA, 25 bp, Homo sapien
tgctctcgggtttgggtcccagtag

SEQ ID NO: 5306375 - DNA, 25 bp, Homo sapien
cagtagattctggaacatcccaccc

SEQ ID NO: 5306376 - DNA, 25 bp, Homo sapien
acttctgatcgctctggcggccact

SEQ ID NO: 5306377 - DNA, 25 bp, Homo sapien
ttggctagacttctgatcgctctgg

SEQ ID NO: 5306378 - DNA, 25 bp, Homo sapien
gcctctttggctagacttctgatcg

SEQ ID NO: 5306379 - DNA, 25 bp, Homo sapien
actccgcagtttcaccacgcctgct

SEQ ID NO: 5306380 - DNA, 25 bp, Homo sapien
aagacagcacagagtccttctccca

SEQ ID NO: 5306381 - DNA, 25 bp, Homo sapien
cagcacagagtccttctcccattgg

SEQ ID NO: 5306382 - DNA, 25 bp, Homo sapien
catcctcaccaggaagacagcacag

SEQ ID NO: 5306383 - DNA, 25 bp, Homo sapien
tcctcaccaggaagacagcacagag

SEQ ID NO: 5306384 - DNA, 25 bp, Homo sapien
attagccaggccccaactactcggg

SEQ ID NO: 5306385 - DNA, 25 bp, Homo sapien
atatattagccaggccccaactact

SEQ ID NO: 5306386 - DNA, 25 bp, Homo sapien
atgtaatatttgggccggctgtggt

SEQ ID NO: 5306387 - DNA, 25 bp, Homo sapien
atattagccaggccccaactactcg

SEQ ID NO: 5306388 - DNA, 25 bp, Homo sapien
atttgcaggtcctgccatggaagaa

SEQ ID NO: 5306389 - DNA, 25 bp, Homo sapien
ggtcctgccatggaagaagccggct

SEQ ID NO: 5306390 - DNA, 25 bp, Homo sapien
ccagcatttgcaggtcctgccatgg

SEQ ID NO: 5306391 - DNA, 25 bp, Homo sapien
agagccttctgtgagtccagcattt

SEQ ID NO: 5306392 - DNA, 25 bp, Homo sapien
caactgttcacagaggagctcccaa

SEQ ID NO: 5306393 - DNA, 25 bp, Homo sapien
ccactggaccattgtgggagctcag

SEQ ID NO: 5306394 - DNA, 25 bp, Homo sapien
caggtaccatgtgatacttgccttg

SEQ ID NO: 5306395 - DNA, 25 bp, Homo sapien
caacattgcaaggatgatagttttg

SEQ ID NO: 5306396 - DNA, 25 bp, Homo sapien
gtgccatgtgggaatagaagtgcat

SEQ ID NO: 5306397 - DNA, 25 bp, Homo sapien
tctggtgccatgtgggaatagaagt

SEQ ID NO: 5306398 - DNA, 25 bp, Homo sapien
ctggtgccatgtgggaatagaagtg

SEQ ID NO: 5306399 - DNA, 25 bp, Homo sapien
ggtgccatgtgggaatagaagtgca

SEQ ID NO: 5306400 - DNA, 25 bp, Homo sapien
caaggcctccgtgaggcctccagat

SEQ ID NO: 5306401 - DNA, 25 bp, Homo sapien
agaagtaacggatttgtggtcctca

SEQ ID NO: 5306402 - DNA, 25 bp, Homo sapien
ggcactgagaagtaacggatttgtg

SEQ ID NO: 5306403 - DNA, 25 bp, Homo sapien
aggcctccagatgcgttaggtgggc

SEQ ID NO: 5306404 - DNA, 25 bp, Homo sapien
gccccacgcaaagaggctctctgtg

SEQ ID NO: 5306405 - DNA, 25 bp, Homo sapien
agaggctctctgtgtactccgactt

SEQ ID NO: 5306406 - DNA, 25 bp, Homo sapien
tggagccccacgcaaagaggctctc

SEQ ID NO: 5306407 - DNA, 25 bp, Homo sapien
gaggctctctgtgtactccgacttc

SEQ ID NO: 5306408 - DNA, 25 bp, Homo sapien
ctagaagaagtgaccatgggaaaat

SEQ ID NO: 5306409 - DNA, 25 bp, Homo sapien
gctgtgggcaggtataatcccggaa

SEQ ID NO: 5306410 - DNA, 25 bp, Homo sapien
tgggcaggtataatcccggaagcct

SEQ ID NO: 5306411 - DNA, 25 bp, Homo sapien
ccacctgagcttggggatttctgca

SEQ ID NO: 5306412 - DNA, 25 bp, Homo sapien
tgagcttggggatttctgcactgtg

SEQ ID NO: 5306413 - DNA, 25 bp, Homo sapien
aaagcagagtcatgatggttgggca

SEQ ID NO: 5306414 - DNA, 25 bp, Homo sapien
tagaaagcagagtcatgatggttgg

SEQ ID NO: 5306415 - DNA, 25 bp, Homo sapien
agcagagtcatgatggttgggcaac

SEQ ID NO: 5306416 - DNA, 25 bp, Homo sapien
gaaagcagagtcatgatggttgggc

SEQ ID NO: 5306417 - DNA, 25 bp, Homo sapien
cctatgggctgagggctaactatca

SEQ ID NO: 5306418 - DNA, 25 bp, Homo sapien
ccggtctgagacacaattaggaact

SEQ ID NO: 5306419 - DNA, 25 bp, Homo sapien
tacaaagtaagctctgcgcaaggct

SEQ ID NO: 5306420 - DNA, 25 bp, Homo sapien
cttataggtttagcaaggtggcggc

SEQ ID NO: 5306421 - DNA, 25 bp, Homo sapien
gctgaagattggcaggcggcggcca

SEQ ID NO: 5306422 - DNA, 25 bp, Homo sapien
tcgtcggagatggagaggcggctga

SEQ ID NO: 5306423 - DNA, 25 bp, Homo sapien
tcagggagccgcttaggtagctgtc

SEQ ID NO: 5306424 - DNA, 25 bp, Homo sapien
ctgtcgcggtccgacagcgagtccg

SEQ ID NO: 5306425 - DNA, 25 bp, Homo sapien
gcgcgtcgaacacgggcgagtcgga

SEQ ID NO: 5306426 - DNA, 25 bp, Homo sapien
tggggggcgcgtcgaacacgggcga

SEQ ID NO: 5306427 - DNA, 25 bp, Homo sapien
ggggcgcgtcgaacacgggcgagtc

SEQ ID NO: 5306428 - DNA, 25 bp, Homo sapien
ctggggggcgcgtcgaacacgggcg

SEQ ID NO: 5306429 - DNA, 25 bp, Homo sapien
caaagttgtgggtctggatggcgag

SEQ ID NO: 5306430 - DNA, 25 bp, Homo sapien
cggccacggcggcaaagttgtgggt

SEQ ID NO: 5306431 - DNA, 25 bp, Homo sapien
ggcgagcggcgtgatgaggctgctg

SEQ ID NO: 5306432 - DNA, 25 bp, Homo sapien
ctgctgctgactgcggtagtaggcg

SEQ ID NO: 5306433 - DNA, 25 bp, Homo sapien
gttggcgcacgaggccgacgagcag

SEQ ID NO: 5306434 - DNA, 25 bp, Homo sapien
cgaaggcgttgttggcgcacgaggc

SEQ ID NO: 5306435 - DNA, 25 bp, Homo sapien
gaaggcgaaggcgttgttggcgcac

SEQ ID NO: 5306436 - DNA, 25 bp, Homo sapien
gcgttgttggcgcacgaggccgacg

SEQ ID NO: 5306437 - DNA, 25 bp, Homo sapien
cccccggtgccgtacagcagagcgg

SEQ ID NO: 5306438 - DNA, 25 bp, Homo sapien
gcccccggtgccgtacagcagagcg

SEQ ID NO: 5306439 - DNA, 25 bp, Homo sapien
gcgcccccggtgccgtacagcagag

SEQ ID NO: 5306440 - DNA, 25 bp, Homo sapien
cgcccccggtgccgtacagcagagc

SEQ ID NO: 5306441 - DNA, 25 bp, Homo sapien
cgaggccgaagagcaggagggcggc

SEQ ID NO: 5306442 - DNA, 25 bp, Homo sapien
aggacgaggccgaagagcaggaggg

SEQ ID NO: 5306443 - DNA, 25 bp, Homo sapien
ggaggagcaggacgaggccgaagag

SEQ ID NO: 5306444 - DNA, 25 bp, Homo sapien
caggacgaggccgaagagcaggagg

SEQ ID NO: 5306445 - DNA, 25 bp, Homo sapien
tcgtggaagccatgcgcgaactggc

SEQ ID NO: 5306446 - DNA, 25 bp, Homo sapien
tgtacttcggatggcgagtcaggct

SEQ ID NO: 5306447 - DNA, 25 bp, Homo sapien
cagaagccgatggtatgaaaggtgc

SEQ ID NO: 5306448 - DNA, 25 bp, Homo sapien
ccgctcgtccgcgttgtggatgaag

SEQ ID NO: 5306449 - DNA, 25 bp, Homo sapien
cgacggctccttaagggtgccgtag

SEQ ID NO: 5306450 - DNA, 25 bp, Homo sapien
aatcccggcgcgaagcccgagctgg

SEQ ID NO: 5306451 - DNA, 25 bp, Homo sapien
tctcgctaaacgagcggtcccggaa

SEQ ID NO: 5306452 - DNA, 25 bp, Homo sapien
tcttgtagcgcgtggagttgatctg

SEQ ID NO: 5306453 - DNA, 25 bp, Homo sapien
tatacacgcgcaaaaccagcaagat

SEQ ID NO: 5306454 - DNA, 25 bp, Homo sapien
tccaagaactacaacggctgctgcc

SEQ ID NO: 5306455 - DNA, 25 bp, Homo sapien
gccgcgctgggtttcgacacgtgat

SEQ ID NO: 5306456 - DNA, 25 bp, Homo sapien
gggcgctcggacactcttttgcaaa

SEQ ID NO: 5306457 - DNA, 25 bp, Homo sapien
cttgcacaagaagtcgacatcgtag

SEQ ID NO: 5306458 - DNA, 25 bp, Homo sapien
tcgacatcgtagaaggcggacagaa

SEQ ID NO: 5306459 - DNA, 25 bp, Homo sapien
aaggcggacagaagtgtggtcgaca

SEQ ID NO: 5306460 - DNA, 25 bp, Homo sapien
gaagtcgacatcgtagaaggcggac

SEQ ID NO: 5306461 - DNA, 25 bp, Homo sapien
aggagagggcgagtgcagcggcgcg

SEQ ID NO: 5306462 - DNA, 25 bp, Homo sapien
tgagccacgacgaataacgggcgag

SEQ ID NO: 5306463 - DNA, 25 bp, Homo sapien
agccgacggcagctcgcggactgct

SEQ ID NO: 5306464 - DNA, 25 bp, Homo sapien
ttctggatcccgcagtggccggagc

SEQ ID NO: 5306465 - DNA, 25 bp, Homo sapien
ccgcccaggctcagtaaacagggct

SEQ ID NO: 5306466 - DNA, 25 bp, Homo sapien
tttccgtctgctggtcgggccggcc

SEQ ID NO: 5306467 - DNA, 25 bp, Homo sapien
gcttgaaggcgacttagcgccacct

SEQ ID NO: 5306468 - DNA, 25 bp, Homo sapien
tcacatcacaagaccttgagccagg

SEQ ID NO: 5306469 - DNA, 25 bp, Homo sapien
ctgccccagagaaatcatgtggtct

SEQ ID NO: 5306470 - DNA, 25 bp, Homo sapien
gacctcagagggaccagtttcactt

SEQ ID NO: 5306471 - DNA, 25 bp, Homo sapien
ccaaattgacaaaagcgtaagggtg

SEQ ID NO: 5306472 - DNA, 25 bp, Homo sapien
gacatacctgggcaactgtggtctg

SEQ ID NO: 5306473 - DNA, 25 bp, Homo sapien
caggtgtgggctacacagtttccta

SEQ ID NO: 5306474 - DNA, 25 bp, Homo sapien
caccagctaggtcttagaacaaaaa

SEQ ID NO: 5306475 - DNA, 25 bp, Homo sapien
acaaaaagtgttaggttggcagctt

SEQ ID NO: 5306476 - DNA, 25 bp, Homo sapien
ctctcgaagagcgatgaattacatt

SEQ ID NO: 5306477 - DNA, 25 bp, Homo sapien
cagcccctacataaagccagaaaag

SEQ ID NO: 5306478 - DNA, 25 bp, Homo sapien
ttcacaaatctgaccaaatgggctg

SEQ ID NO: 5306479 - DNA, 25 bp, Homo sapien
tgtatgtgctaaaatccaactctct

SEQ ID NO: 5306480 - DNA, 25 bp, Homo sapien
tgtttgccaactaatccagccccta

SEQ ID NO: 5306481 - DNA, 25 bp, Homo sapien
ggagtcgcctcacttcctacagtag

SEQ ID NO: 5306482 - DNA, 25 bp, Homo sapien
gagtaaatctgcaacggagtcgcct

SEQ ID NO: 5306483 - DNA, 25 bp, Homo sapien
taggctgccctgaatgagtgaactg

SEQ ID NO: 5306484 - DNA, 25 bp, Homo sapien
gacgactggactcacagaagtaggg

SEQ ID NO: 5306485 - DNA, 25 bp, Homo sapien
gaatgcgtagtcttgtgaactccac

SEQ ID NO: 5306486 - DNA, 25 bp, Homo sapien
gaagagttaactgcctcgattctgc

SEQ ID NO: 5306487 - DNA, 25 bp, Homo sapien
cactgagaactagggtgtcttcccc

SEQ ID NO: 5306488 - DNA, 25 bp, Homo sapien
cgccagccggactttgagaggagac

SEQ ID NO: 5306489 - DNA, 25 bp, Homo sapien
agccccagtccagaccaagcagtac

SEQ ID NO: 5306490 - DNA, 25 bp, Homo sapien
aagcagtaccctgccagatgcaaga

SEQ ID NO: 5306491 - DNA, 25 bp, Homo sapien
tcagatgaaaaagccgaaagtcagt

SEQ ID NO: 5306492 - DNA, 25 bp, Homo sapien
ttgcctgtcaacatccatgtacaca

SEQ ID NO: 5306493 - DNA, 25 bp, Homo sapien
agagggacaatgcgttttgaaccct

SEQ ID NO: 5306494 - DNA, 25 bp, Homo sapien
tccaaatttctcataaagagggaca

SEQ ID NO: 5306495 - DNA, 25 bp, Homo sapien
cataaagagggacaatgcgttttga

SEQ ID NO: 5306496 - DNA, 25 bp, Homo sapien
tttctcataaagagggacaatgcgt

SEQ ID NO: 5306497 - DNA, 25 bp, Homo sapien
tgatgcatgctctccacacaggcca

SEQ ID NO: 5306498 - DNA, 25 bp, Homo sapien
atgctctccacacaggccacgaggt

SEQ ID NO: 5306499 - DNA, 25 bp, Homo sapien
ctgatgcatgctctccacacaggcc

SEQ ID NO: 5306500 - DNA, 25 bp, Homo sapien
tccacacaggccacgaggtcatcac

SEQ ID NO: 5306501 - DNA, 25 bp, Homo sapien
caggatgggcagtccaggggccaac

SEQ ID NO: 5306502 - DNA, 25 bp, Homo sapien
gcagtccaggggccaactggtccca

SEQ ID NO: 5306503 - DNA, 25 bp, Homo sapien
agggccagagcgatggaggcatcca

SEQ ID NO: 5306504 - DNA, 25 bp, Homo sapien
tggagcagatcacacaggacggcca

SEQ ID NO: 5306505 - DNA, 25 bp, Homo sapien
gagcaatgaatatactgctcagggc

SEQ ID NO: 5306506 - DNA, 25 bp, Homo sapien
aatgaatatactgctcagggccgac

SEQ ID NO: 5306507 - DNA, 25 bp, Homo sapien
aaaggtgagcaatgaatatactgct

SEQ ID NO: 5306508 - DNA, 25 bp, Homo sapien
ggtgagcaatgaatatactgctcag

SEQ ID NO: 5306509 - DNA, 25 bp, Homo sapien
tgcctggatttgactggtttgccct

SEQ ID NO: 5306510 - DNA, 25 bp, Homo sapien
ggctcactggagacgattaatcacc

SEQ ID NO: 5306511 - DNA, 25 bp, Homo sapien
tagaatgagtcataggcctgaaccc

SEQ ID NO: 5306512 - DNA, 25 bp, Homo sapien
taaaggcctcaggtaaaatcgctgc

SEQ ID NO: 5306513 - DNA, 25 bp, Homo sapien
ccgaaagacttactcggcacacagg

SEQ ID NO: 5306514 - DNA, 25 bp, Homo sapien
gaaagacttactcggcacacaggca

SEQ ID NO: 5306515 - DNA, 25 bp, Homo sapien
ccccgaaagacttactcggcacaca

SEQ ID NO: 5306516 - DNA, 25 bp, Homo sapien
gcccccgaaagacttactcggcaca

SEQ ID NO: 5306517 - DNA, 25 bp, Homo sapien
tccagataagtcccccaggacactt

SEQ ID NO: 5306518 - DNA, 25 bp, Homo sapien
cccaggacacttgccctttagtgtc

SEQ ID NO: 5306519 - DNA, 25 bp, Homo sapien
tttagtgtccccgttccccatgctg

SEQ ID NO: 5306520 - DNA, 25 bp, Homo sapien
agataagtcccccaggacacttgcc

SEQ ID NO: 5306521 - DNA, 25 bp, Homo sapien
cctcaggacgcaacgcagatcctgt

SEQ ID NO: 5306522 - DNA, 25 bp, Homo sapien
tgtccctcaggacgcaacgcagatc

SEQ ID NO: 5306523 - DNA, 25 bp, Homo sapien
ttttcacttagcctgccggcctgtc

SEQ ID NO: 5306524 - DNA, 25 bp, Homo sapien
gacgcaacgcagatcctgtggtgtt

SEQ ID NO: 5306525 - DNA, 25 bp, Homo sapien
tcttgaggggaaaatgtgattccag

SEQ ID NO: 5306526 - DNA, 25 bp, Homo sapien
cttcccaggcacaacctgccgcaga

SEQ ID NO: 5306527 - DNA, 25 bp, Homo sapien
cttgaggggaaaatgtgattccagg

SEQ ID NO: 5306528 - DNA, 25 bp, Homo sapien
tcccaggcacaacctgccgcagagc

SEQ ID NO: 5306529 - DNA, 25 bp, Homo sapien
gtggcaatctctggagctcagcagg

SEQ ID NO: 5306530 - DNA, 25 bp, Homo sapien
cagcaggaaagggtacggcacccat

SEQ ID NO: 5306531 - DNA, 25 bp, Homo sapien
tgcatttggtgacgattcctttggg

SEQ ID NO: 5306532 - DNA, 25 bp, Homo sapien
cacccatgggctgttcatgtgggct

SEQ ID NO: 5306533 - DNA, 25 bp, Homo sapien
tctttgtgaagcttcactggccctc

SEQ ID NO: 5306534 - DNA, 25 bp, Homo sapien
tttgtgaagcttcactggccctcat

SEQ ID NO: 5306535 - DNA, 25 bp, Homo sapien
gagttctttgtgaagcttcactggc

SEQ ID NO: 5306536 - DNA, 25 bp, Homo sapien
tggttccttctgagttctttgtgaa

SEQ ID NO: 5306537 - DNA, 25 bp, Homo sapien
acacagtgacatggagaacctggat

SEQ ID NO: 5306538 - DNA, 25 bp, Homo sapien
tggatccaaggttccttaaacctga

SEQ ID NO: 5306539 - DNA, 25 bp, Homo sapien
tggctgtaatgaactttcctccaag

SEQ ID NO: 5306540 - DNA, 25 bp, Homo sapien
gcactcgatgcttgtaccacactaa

SEQ ID NO: 5306541 - DNA, 25 bp, Homo sapien
gatagagaggactccctgattccca

SEQ ID NO: 5306542 - DNA, 25 bp, Homo sapien
catctggtagacaggtagaggtccc

SEQ ID NO: 5306543 - DNA, 25 bp, Homo sapien
gattcccagatcagtattctctctc

SEQ ID NO: 5306544 - DNA, 25 bp, Homo sapien
gagagtagagccaaatagctcagga

SEQ ID NO: 5306545 - DNA, 25 bp, Homo sapien
tctggcaaccttacacaagagacca

SEQ ID NO: 5306546 - DNA, 25 bp, Homo sapien
ggatatcgaccctcaagttttctca

SEQ ID NO: 5306547 - DNA, 25 bp, Homo sapien
aacttggcaactggaggatatcgac

SEQ ID NO: 5306548 - DNA, 25 bp, Homo sapien
tctttggacgacctcaatgaccagg

SEQ ID NO: 5306549 - DNA, 25 bp, Homo sapien
tcattcatctttggttggcttgacc

SEQ ID NO: 5306550 - DNA, 25 bp, Homo sapien
tctgtcagagtacaaggtttatacc

SEQ ID NO: 5306551 - DNA, 25 bp, Homo sapien
tacccgatatgtaaaggctcatgcc

SEQ ID NO: 5306552 - DNA, 25 bp, Homo sapien
ggaaaagtatcctactatggctgta

SEQ ID NO: 5306553 - DNA, 25 bp, Homo sapien
tcttccttagcaagcgaactctagg

SEQ ID NO: 5306554 - DNA, 25 bp, Homo sapien
gaactctaggtaatgtgcttagccc

SEQ ID NO: 5306555 - DNA, 25 bp, Homo sapien
tatcaaagtgacatagagctggatg

SEQ ID NO: 5306556 - DNA, 25 bp, Homo sapien
cattccttgtaaatttaggcttatc

SEQ ID NO: 5306557 - DNA, 25 bp, Homo sapien
tgggggcactccttgaaaggagagg

SEQ ID NO: 5306558 - DNA, 25 bp, Homo sapien
tgggactttgggggcactccttgaa

SEQ ID NO: 5306559 - DNA, 25 bp, Homo sapien
atgggactttgggggcactccttga

SEQ ID NO: 5306560 - DNA, 25 bp, Homo sapien
ctttgggggcactccttgaaaggag

SEQ ID NO: 5306561 - DNA, 25 bp, Homo sapien
tatggacaaggctgttcaaagagac

SEQ ID NO: 5306562 - DNA, 25 bp, Homo sapien
cctagatctactctggattgggaga

SEQ ID NO: 5306563 - DNA, 25 bp, Homo sapien
gctgtttgtagccaaggtggaaatt

SEQ ID NO: 5306564 - DNA, 25 bp, Homo sapien
ggtggaaatttcagattcctagatc

SEQ ID NO: 5306565 - DNA, 25 bp, Homo sapien
gcttgaaaccccagaaaatacttca

SEQ ID NO: 5306566 - DNA, 25 bp, Homo sapien
tgcttgaaaccccagaaaatacttc

SEQ ID NO: 5306567 - DNA, 25 bp, Homo sapien
tcatgcttgaaaccccagaaaatac

SEQ ID NO: 5306568 - DNA, 25 bp, Homo sapien
tcagaaagtccatttcaagatacac

SEQ ID NO: 5306569 - DNA, 25 bp, Homo sapien
gacagccctggttgtactccagtaa

SEQ ID NO: 5306570 - DNA, 25 bp, Homo sapien
gtactccagtaacttcagtacttca

SEQ ID NO: 5306571 - DNA, 25 bp, Homo sapien
gccctggttgtactccagtaacttc

SEQ ID NO: 5306572 - DNA, 25 bp, Homo sapien
tggttgtactccagtaacttcagta

SEQ ID NO: 5306573 - DNA, 25 bp, Homo sapien
gagggatgctcccaatagagtcagg

SEQ ID NO: 5306574 - DNA, 25 bp, Homo sapien
agggatgctcccaatagagtcaggc

SEQ ID NO: 5306575 - DNA, 25 bp, Homo sapien
gggatgctcccaatagagtcaggcc

SEQ ID NO: 5306576 - DNA, 25 bp, Homo sapien
aggagggatgctcccaatagagtca

SEQ ID NO: 5306577 - DNA, 25 bp, Homo sapien
aaatcctgcattgtgatatggcctt

SEQ ID NO: 5306578 - DNA, 25 bp, Homo sapien
gaaatcctgcattgtgatatggcct

SEQ ID NO: 5306579 - DNA, 25 bp, Homo sapien
agaaatcctgcattgtgatatggcc

SEQ ID NO: 5306580 - DNA, 25 bp, Homo sapien
tggcactcataactggccagcagat

SEQ ID NO: 5306581 - DNA, 25 bp, Homo sapien
ccagcagatcgaagacgggagcatt

SEQ ID NO: 5306582 - DNA, 25 bp, Homo sapien
ccagtgacgcactcgctgagatgca

SEQ ID NO: 5306583 - DNA, 25 bp, Homo sapien
cacctgcttttgcacatcatgggag

SEQ ID NO: 5306584 - DNA, 25 bp, Homo sapien
tgccagctcctctctacccgagtct

SEQ ID NO: 5306585 - DNA, 25 bp, Homo sapien
tctacccgagtctggattattctca

SEQ ID NO: 5306586 - DNA, 25 bp, Homo sapien
acccgagtctggattattctcaggg

SEQ ID NO: 5306587 - DNA, 25 bp, Homo sapien
tcctctctacccgagtctggattat

SEQ ID NO: 5306588 - DNA, 25 bp, Homo sapien
tttaggccaggcttggagataggta

SEQ ID NO: 5306589 - DNA, 25 bp, Homo sapien
ggaatttaggccaggcttggagata

SEQ ID NO: 5306590 - DNA, 25 bp, Homo sapien
gagataggtaggaggatatattcta

SEQ ID NO: 5306591 - DNA, 25 bp, Homo sapien
tattctagtaaagtgattcttaact

SEQ ID NO: 5306592 - DNA, 25 bp, Homo sapien
agacccggacagtgtgcgagtcagc

SEQ ID NO: 5306593 - DNA, 25 bp, Homo sapien
cccggacagtgtgcgagtcagcaag

SEQ ID NO: 5306594 - DNA, 25 bp, Homo sapien
tgtgcgagtcagcaagactgccacc

SEQ ID NO: 5306595 - DNA, 25 bp, Homo sapien
cagtgtgcgagtcagcaagactgcc

SEQ ID NO: 5306596 - DNA, 25 bp, Homo sapien
gagggtctgcctgcttgttctgaag

SEQ ID NO: 5306597 - DNA, 25 bp, Homo sapien
tagttggtatgaatcagtgaaaaac

SEQ ID NO: 5306598 - DNA, 25 bp, Homo sapien
tcttatttcaaagcgtactctcatg

SEQ ID NO: 5306599 - DNA, 25 bp, Homo sapien
cagtgaaaaacgctgtcccttgagc

SEQ ID NO: 5306600 - DNA, 25 bp, Homo sapien
tccatacttctaagggctgagggtg

SEQ ID NO: 5306601 - DNA, 25 bp, Homo sapien
aggctccatgattggtacagagtgg

SEQ ID NO: 5306602 - DNA, 25 bp, Homo sapien
gctccctgatgtccatacttctaag

SEQ ID NO: 5306603 - DNA, 25 bp, Homo sapien
tactcttaagtcctggaaatgtcat

SEQ ID NO: 5306604 - DNA, 25 bp, Homo sapien
gacctaaagccaattatgcaaaagg

SEQ ID NO: 5306605 - DNA, 25 bp, Homo sapien
tccaggccttctagaatcattaact

SEQ ID NO: 5306606 - DNA, 25 bp, Homo sapien
ttagggtgaggaagtctgaatgact

SEQ ID NO: 5306607 - DNA, 25 bp, Homo sapien
gagggccggctaaccatggcattat

SEQ ID NO: 5306608 - DNA, 25 bp, Homo sapien
gataactagatctgttaaggagcac

SEQ ID NO: 5306609 - DNA, 25 bp, Homo sapien
tgcttgcctattctacaggttccag

SEQ ID NO: 5306610 - DNA, 25 bp, Homo sapien
tacaggttccagaaagtgcccgtgg

SEQ ID NO: 5306611 - DNA, 25 bp, Homo sapien
gatcccaggatagctgtgctgcgtt

SEQ ID NO: 5306612 - DNA, 25 bp, Homo sapien
tcgaatgttgagctctccaagacct

SEQ ID NO: 5306613 - DNA, 25 bp, Homo sapien
gagattccacaagtatgtctccggt

SEQ ID NO: 5306614 - DNA, 25 bp, Homo sapien
gcagtccccatgttgagattaccca

SEQ ID NO: 5306615 - DNA, 25 bp, Homo sapien
tgttcccacagcagataaaggtctc

SEQ ID NO: 5306616 - DNA, 25 bp, Homo sapien
tagctattgggcaagtctggcaggt

SEQ ID NO: 5306617 - DNA, 25 bp, Homo sapien
tgccctggtgcggtatcactgagag

SEQ ID NO: 5306618 - DNA, 25 bp, Homo sapien
ttccaaatgctatcctgctgagagg

SEQ ID NO: 5306619 - DNA, 25 bp, Homo sapien
tgatctaggcgaaacctgccctggt

SEQ ID NO: 5306620 - DNA, 25 bp, Homo sapien
cttgtgacatggcagttgtcacggt

SEQ ID NO: 5306621 - DNA, 25 bp, Homo sapien
tattttcttgtgacatggcagttgt

SEQ ID NO: 5306622 - DNA, 25 bp, Homo sapien
cacggtttccgtggctgcatctcta

SEQ ID NO: 5306623 - DNA, 25 bp, Homo sapien
catggcagttgtcacggtttccgtg

SEQ ID NO: 5306624 - DNA, 25 bp, Homo sapien
tacgggattaaacatggcaggagag

SEQ ID NO: 5306625 - DNA, 25 bp, Homo sapien
gggcatggaagaggtacacaaaaat

SEQ ID NO: 5306626 - DNA, 25 bp, Homo sapien
gaatcatagcatgttaatacgggat

SEQ ID NO: 5306627 - DNA, 25 bp, Homo sapien
tcttgacacacggagtagcagtgag

SEQ ID NO: 5306628 - DNA, 25 bp, Homo sapien
gttaagcccatggaactgtgagcca

SEQ ID NO: 5306629 - DNA, 25 bp, Homo sapien
agtgtgtggcacttctccctgctct

SEQ ID NO: 5306630 - DNA, 25 bp, Homo sapien
catgggaagctgtgccttgcttccc

SEQ ID NO: 5306631 - DNA, 25 bp, Homo sapien
ctctgccatgggaagctgtgccttg

SEQ ID NO: 5306632 - DNA, 25 bp, Homo sapien
tactggtgaggacttcaacgacggc

SEQ ID NO: 5306633 - DNA, 25 bp, Homo sapien
gctcagcagctatcaattccctgtt

SEQ ID NO: 5306634 - DNA, 25 bp, Homo sapien
catgacaagatgaccagctgaaccc

SEQ ID NO: 5306635 - DNA, 25 bp, Homo sapien
gcctagactctgtaggaagatggtc

SEQ ID NO: 5306636 - DNA, 25 bp, Homo sapien
ttcttacccttggttttatctctgc

SEQ ID NO: 5306637 - DNA, 25 bp, Homo sapien
tgacagatctaaggaaattggacct

SEQ ID NO: 5306638 - DNA, 25 bp, Homo sapien
tagtgacctcctacgtttggctccc

SEQ ID NO: 5306639 - DNA, 25 bp, Homo sapien
cttttttagctcctagtgacctcct

SEQ ID NO: 5306640 - DNA, 25 bp, Homo sapien
gcaagtctcagagctacactctgaa

SEQ ID NO: 5306641 - DNA, 25 bp, Homo sapien
caagtctcagagctacactctgaat

SEQ ID NO: 5306642 - DNA, 25 bp, Homo sapien
aagtctcagagctacactctgaatt

SEQ ID NO: 5306643 - DNA, 25 bp, Homo sapien
tgcacaggaggttttgggggcaaac

SEQ ID NO: 5306644 - DNA, 25 bp, Homo sapien
ggttgcacaggaggttttgggggca

SEQ ID NO: 5306645 - DNA, 25 bp, Homo sapien
ttgcacaggaggttttgggggcaaa

SEQ ID NO: 5306646 - DNA, 25 bp, Homo sapien
caaggttgcacaggaggttttgggg

SEQ ID NO: 5306647 - DNA, 25 bp, Homo sapien
gaagcaatatccatcgtccagatca

SEQ ID NO: 5306648 - DNA, 25 bp, Homo sapien
cgtccagatcaagaactcctttggg

SEQ ID NO: 5306649 - DNA, 25 bp, Homo sapien
agatggacacagtgctccgtctggg

SEQ ID NO: 5306650 - DNA, 25 bp, Homo sapien
gtcagatggacacagtgctccgtct

SEQ ID NO: 5306651 - DNA, 25 bp, Homo sapien
cagggtccatgcagtggagaatttt

SEQ ID NO: 5306652 - DNA, 25 bp, Homo sapien
gtccatgcagtggagaattttcagt

SEQ ID NO: 5306653 - DNA, 25 bp, Homo sapien
ccatgcagtggagaattttcagtat

SEQ ID NO: 5306654 - DNA, 25 bp, Homo sapien
gggtccatgcagtggagaattttca

SEQ ID NO: 5306655 - DNA, 25 bp, Homo sapien
caatggctagtctggtgaggctctg

SEQ ID NO: 5306656 - DNA, 25 bp, Homo sapien
tcagggaaggcagattctaacagct

SEQ ID NO: 5306657 - DNA, 25 bp, Homo sapien
cccatgttgcacagcaagggtggca

SEQ ID NO: 5306658 - DNA, 25 bp, Homo sapien
ggcttccagtgttagtgagcgcact

SEQ ID NO: 5306659 - DNA, 25 bp, Homo sapien
aggcccaagggaatcccgttatcag

SEQ ID NO: 5306660 - DNA, 25 bp, Homo sapien
gggaatcccgttatcagctctgatc

SEQ ID NO: 5306661 - DNA, 25 bp, Homo sapien
caagggaatcccgttatcagctctg

SEQ ID NO: 5306662 - DNA, 25 bp, Homo sapien
agctctgatcctgagataatccctc

SEQ ID NO: 5306663 - DNA, 25 bp, Homo sapien
gcccagccaggcagtatctttataa

SEQ ID NO: 5306664 - DNA, 25 bp, Homo sapien
agagcacagtactatcatctccagg

SEQ ID NO: 5306665 - DNA, 25 bp, Homo sapien
gctgggatcttcaacctctgtgtca

SEQ ID NO: 5306666 - DNA, 25 bp, Homo sapien
ggcacagtcagaaatatggctcaga

SEQ ID NO: 5306667 - DNA, 25 bp, Homo sapien
tacttgcaacctcaactttgataga

SEQ ID NO: 5306668 - DNA, 25 bp, Homo sapien
caacctcaactttgatagatttggg

SEQ ID NO: 5306669 - DNA, 25 bp, Homo sapien
ttttctacttgcaacctcaactttg

SEQ ID NO: 5306670 - DNA, 25 bp, Homo sapien
tcaactttgatagatttgggtttct

SEQ ID NO: 5306671 - DNA, 25 bp, Homo sapien
agcagggatggcatcatacttagca

SEQ ID NO: 5306672 - DNA, 25 bp, Homo sapien
agcatgtcctgttctattatttagg

SEQ ID NO: 5306673 - DNA, 25 bp, Homo sapien
tattatttagggcagtctctctcct

SEQ ID NO: 5306674 - DNA, 25 bp, Homo sapien
gatggcatcatacttagcatgtcct

SEQ ID NO: 5306675 - DNA, 25 bp, Homo sapien
tgtgcttctgaggatactctaaaga

SEQ ID NO: 5306676 - DNA, 25 bp, Homo sapien
aaagactatcctggcagcccataaa

SEQ ID NO: 5306677 - DNA, 25 bp, Homo sapien
tcaagtgtaggattcccgatcggct

SEQ ID NO: 5306678 - DNA, 25 bp, Homo sapien
aaggaggatgtgcttctgaggatac

SEQ ID NO: 5306679 - DNA, 25 bp, Homo sapien
tctttcggcgaattggtccgaagaa

SEQ ID NO: 5306680 - DNA, 25 bp, Homo sapien
caggattgggaatcagaaatttgtc

SEQ ID NO: 5306681 - DNA, 25 bp, Homo sapien
aattggtccgaagaacaggattggg

SEQ ID NO: 5306682 - DNA, 25 bp, Homo sapien
ttctggttctttcggcgaattggtc

SEQ ID NO: 5306683 - DNA, 25 bp, Homo sapien
tctaataacacgctccagtcctggg

SEQ ID NO: 5306684 - DNA, 25 bp, Homo sapien
tccacgaagagggttctcggactcc

SEQ ID NO: 5306685 - DNA, 25 bp, Homo sapien
taaaagcctgtgacgtggaagctcc

SEQ ID NO: 5306686 - DNA, 25 bp, Homo sapien
ccttccctaagcgagtgactgatgt

SEQ ID NO: 5306687 - DNA, 25 bp, Homo sapien
tttaatccagtatgtcaaaaacatc

SEQ ID NO: 5306688 - DNA, 25 bp, Homo sapien
cacatctgaccttagttgccacatt

SEQ ID NO: 5306689 - DNA, 25 bp, Homo sapien
aacatctcattttggaccaaccaca

SEQ ID NO: 5306690 - DNA, 25 bp, Homo sapien
aaacatcattccaacacatacataa

SEQ ID NO: 5306691 - DNA, 25 bp, Homo sapien
gctctggtcaccaaacatggatttt

SEQ ID NO: 5306692 - DNA, 25 bp, Homo sapien
agtcaataggaagagaatatcaata

SEQ ID NO: 5306693 - DNA, 25 bp, Homo sapien
tatacagctctggtcaccaaacatg

SEQ ID NO: 5306694 - DNA, 25 bp, Homo sapien
aatatatacagctctggtcaccaaa

SEQ ID NO: 5306695 - DNA, 25 bp, Homo sapien
aagttatacttccaaccgggccatg

SEQ ID NO: 5306696 - DNA, 25 bp, Homo sapien
gaaggaatccagcactatgcggacg

SEQ ID NO: 5306697 - DNA, 25 bp, Homo sapien
tgctagagtatgatgggtgccccaa

SEQ ID NO: 5306698 - DNA, 25 bp, Homo sapien
tcaacaagatcatgggaggctccct

SEQ ID NO: 5306699 - DNA, 25 bp, Homo sapien
gcttcttgtcatggagccagcactg

SEQ ID NO: 5306700 - DNA, 25 bp, Homo sapien
tgttaaggtctctaagacacatggc

SEQ ID NO: 5306701 - DNA, 25 bp, Homo sapien
taatgaagcaatatcctagggacca

SEQ ID NO: 5306702 - DNA, 25 bp, Homo sapien
taggttgctactgtctgttaaggtc

SEQ ID NO: 5306703 - DNA, 25 bp, Homo sapien
gggggaggtgtgacggcagagttgc

SEQ ID NO: 5306704 - DNA, 25 bp, Homo sapien
ggaggtgtgacggcagagttgcatt

SEQ ID NO: 5306705 - DNA, 25 bp, Homo sapien
gaggtgtgacggcagagttgcattt

SEQ ID NO: 5306706 - DNA, 25 bp, Homo sapien
gggaggtgtgacggcagagttgcat

SEQ ID NO: 5306707 - DNA, 25 bp, Homo sapien
cagggttctgggtaggcattcagca

SEQ ID NO: 5306708 - DNA, 25 bp, Homo sapien
tgggtaggcattcagcaaggcccca

SEQ ID NO: 5306709 - DNA, 25 bp, Homo sapien
tgtttcccttaggattgctgctgct

SEQ ID NO: 5306710 - DNA, 25 bp, Homo sapien
ccagcagtctgcaaaaggtactggg

SEQ ID NO: 5306711 - DNA, 25 bp, Homo sapien
ggtgttattcccagaggcacccagg

SEQ ID NO: 5306712 - DNA, 25 bp, Homo sapien
ttgtggttacccaggaacgcagagc

SEQ ID NO: 5306713 - DNA, 25 bp, Homo sapien
cacacgggacaaatgtatcagggct

SEQ ID NO: 5306714 - DNA, 25 bp, Homo sapien
gctagtgagacttaggagggcctct

SEQ ID NO: 5306715 - DNA, 25 bp, Homo sapien
tggcccatgatacatcacatgcact

SEQ ID NO: 5306716 - DNA, 25 bp, Homo sapien
gacatctgagggtttccacaactgg

SEQ ID NO: 5306717 - DNA, 25 bp, Homo sapien
ccacaactggtctcttatcaaatct

SEQ ID NO: 5306718 - DNA, 25 bp, Homo sapien
tccctcagcttgatctcctcactgg

SEQ ID NO: 5306719 - DNA, 25 bp, Homo sapien
tatttttagagatgcacaggtggta

SEQ ID NO: 5306720 - DNA, 25 bp, Homo sapien
ttttagagatgcacaggtggtaaaa

SEQ ID NO: 5306721 - DNA, 25 bp, Homo sapien
atttttagagatgcacaggtggtaa

SEQ ID NO: 5306722 - DNA, 25 bp, Homo sapien
ttatttttagagatgcacaggtggt

SEQ ID NO: 5306723 - DNA, 25 bp, Homo sapien
tgttgtggcatatgttggaatttcc

SEQ ID NO: 5306724 - DNA, 25 bp, Homo sapien
gtgctgcgataacagctctaagcca

SEQ ID NO: 5306725 - DNA, 25 bp, Homo sapien
ttcgcttagcataatttctccaaga

SEQ ID NO: 5306726 - DNA, 25 bp, Homo sapien
gtctctaggtcttgactactctatg

SEQ ID NO: 5306727 - DNA, 25 bp, Homo sapien
ggtagtaacactaacacatgcgcct

SEQ ID NO: 5306728 - DNA, 25 bp, Homo sapien
taatctctgagttgccacggcacct

SEQ ID NO: 5306729 - DNA, 25 bp, Homo sapien
cttacagaggacctacggagggcct

SEQ ID NO: 5306730 - DNA, 25 bp, Homo sapien
tataatatctaacacaggactgggc

SEQ ID NO: 5306731 - DNA, 25 bp, Homo sapien
gatgtcagtcagctcgtgctggaag

SEQ ID NO: 5306732 - DNA, 25 bp, Homo sapien
tttggctttggtacaaacagtgatg

SEQ ID NO: 5306733 - DNA, 25 bp, Homo sapien
tccgtgtttggagtctgagtaggct

SEQ ID NO: 5306734 - DNA, 25 bp, Homo sapien
gaagtctgaattcgttccgtgtttg

SEQ ID NO: 5306735 - DNA, 25 bp, Homo sapien
aaagtcactgggctttgctttactt

SEQ ID NO: 5306736 - DNA, 25 bp, Homo sapien
cacccgacgtggagtctggagcaat

SEQ ID NO: 5306737 - DNA, 25 bp, Homo sapien
ggagcttctgttcttatgtggtgac

SEQ ID NO: 5306738 - DNA, 25 bp, Homo sapien
tgcacaaaaccaaccaccagggctt

SEQ ID NO: 5306739 - DNA, 25 bp, Homo sapien
caagactgtttttgaaacgcttggt

SEQ ID NO: 5306740 - DNA, 25 bp, Homo sapien
acaagactgtttttgaaacgcttgg

SEQ ID NO: 5306741 - DNA, 25 bp, Homo sapien
tcctgtgtgcgcagagaacagccag

SEQ ID NO: 5306742 - DNA, 25 bp, Homo sapien
agaacagccagggtgtgcacagggt

SEQ ID NO: 5306743 - DNA, 25 bp, Homo sapien
agtggtcctgtgtgcgcagagaaca

SEQ ID NO: 5306744 - DNA, 25 bp, Homo sapien
aacaagtggtcctgtgtgcgcagag

SEQ ID NO: 5306745 - DNA, 25 bp, Homo sapien
ctggcacgggtaggattctgatttt

SEQ ID NO: 5306746 - DNA, 25 bp, Homo sapien
tgcctggcacgggtaggattctgat

SEQ ID NO: 5306747 - DNA, 25 bp, Homo sapien
cctggcacgggtaggattctgattt

SEQ ID NO: 5306748 - DNA, 25 bp, Homo sapien
gcctggcacgggtaggattctgatt

SEQ ID NO: 5306749 - DNA, 25 bp, Homo sapien
tgctttagacatggagttaaggcgc

SEQ ID NO: 5306750 - DNA, 25 bp, Homo sapien
tctgagagagcttctgcgggctgca

SEQ ID NO: 5306751 - DNA, 25 bp, Homo sapien
ggcagggcttggcaactgctttaga

SEQ ID NO: 5306752 - DNA, 25 bp, Homo sapien
actaaaacagcaatggaaggagagg

SEQ ID NO: 5306753 - DNA, 25 bp, Homo sapien
catttggcacctaggatatgttatc

SEQ ID NO: 5306754 - DNA, 25 bp, Homo sapien
tatctcctatagagccttgctggag

SEQ ID NO: 5306755 - DNA, 25 bp, Homo sapien
tgtgctgggcaaattaatcaaagtg

SEQ ID NO: 5306756 - DNA, 25 bp, Homo sapien
taccttctaacatggtgtgctgggc

SEQ ID NO: 5306757 - DNA, 25 bp, Homo sapien
tcttagtggtctgtggtgattgtcc

SEQ ID NO: 5306758 - DNA, 25 bp, Homo sapien
tgttttgacttgaccactggacttc

SEQ ID NO: 5306759 - DNA, 25 bp, Homo sapien
gacgaatcatcttactacagctcat

SEQ ID NO: 5306760 - DNA, 25 bp, Homo sapien
tggcagtatcgttccttggcactat

SEQ ID NO: 5306761 - DNA, 25 bp, Homo sapien
ggattttaaacggtgcacctgtata

SEQ ID NO: 5306762 - DNA, 25 bp, Homo sapien
ttaaacggtgcacctgtatagagca

SEQ ID NO: 5306763 - DNA, 25 bp, Homo sapien
gactttacgaatactgtatacttag

SEQ ID NO: 5306764 - DNA, 25 bp, Homo sapien
tcattgtacaccaccgtagacttta

SEQ ID NO: 5306765 - DNA, 25 bp, Homo sapien
tccctttaatcttgttacagaactg

SEQ ID NO: 5306766 - DNA, 25 bp, Homo sapien
ctgctgggcagtaaacctcctgaac

SEQ ID NO: 5306767 - DNA, 25 bp, Homo sapien
gggcagtaaacctcctgaacttcta

SEQ ID NO: 5306768 - DNA, 25 bp, Homo sapien
gaggtatccctttaatcttgttaca

SEQ ID NO: 5306769 - DNA, 25 bp, Homo sapien
gaggatcctgtatctcctttcactt

SEQ ID NO: 5306770 - DNA, 25 bp, Homo sapien
ctttgtctcagacagtgtgagacac

SEQ ID NO: 5306771 - DNA, 25 bp, Homo sapien
cttcccatgataaaagagtcctttg

SEQ ID NO: 5306772 - DNA, 25 bp, Homo sapien
cctttcactttatgaacttcaaatt

SEQ ID NO: 5306773 - DNA, 25 bp, Homo sapien
tgctaaagtctactccagtttcggt

SEQ ID NO: 5306774 - DNA, 25 bp, Homo sapien
gctaaagtctactccagtttcggtc

SEQ ID NO: 5306775 - DNA, 25 bp, Homo sapien
cgtaaaggtaatgctaaagtctact

SEQ ID NO: 5306776 - DNA, 25 bp, Homo sapien
ctaaagtctactccagtttcggtct

SEQ ID NO: 5306777 - DNA, 25 bp, Homo sapien
gcccaacactactgttcccatcacg

SEQ ID NO: 5306778 - DNA, 25 bp, Homo sapien
actactgttcccatcacgtaaagat

SEQ ID NO: 5306779 - DNA, 25 bp, Homo sapien
aacactactgttcccatcacgtaaa

SEQ ID NO: 5306780 - DNA, 25 bp, Homo sapien
ccaacactactgttcccatcacgta

SEQ ID NO: 5306781 - DNA, 25 bp, Homo sapien
ttttccaggtgcaggctttttaatg

SEQ ID NO: 5306782 - DNA, 25 bp, Homo sapien
taatgatttcaaaggtagctttatg

SEQ ID NO: 5306783 - DNA, 25 bp, Homo sapien
caggtgcaggctttttaatgatttc

SEQ ID NO: 5306784 - DNA, 25 bp, Homo sapien
tttcaaaggtagctttatgtggaga

SEQ ID NO: 5306785 - DNA, 25 bp, Homo sapien
caacagagttcgaatggtattagga

SEQ ID NO: 5306786 - DNA, 25 bp, Homo sapien
catttcacgggagtggtagacaggt

SEQ ID NO: 5306787 - DNA, 25 bp, Homo sapien
ttttgccggaaacactggtcagtgc

SEQ ID NO: 5306788 - DNA, 25 bp, Homo sapien
acaaatgggaccaaggcacgagctg

SEQ ID NO: 5306789 - DNA, 25 bp, Homo sapien
tatctgcactagttctacaggtgac

SEQ ID NO: 5306790 - DNA, 25 bp, Homo sapien
tatcccaaatgatgttttgtatctg

SEQ ID NO: 5306791 - DNA, 25 bp, Homo sapien
caggagctgctccttatcccaaatg

SEQ ID NO: 5306792 - DNA, 25 bp, Homo sapien
ttctatctagcatggcctggaacat

SEQ ID NO: 5306793 - DNA, 25 bp, Homo sapien
tcaggttcgtgacacacatccaaaa

SEQ ID NO: 5306794 - DNA, 25 bp, Homo sapien
gacacacatccaaaacccttgtggg

SEQ ID NO: 5306795 - DNA, 25 bp, Homo sapien
tttgcatacatcaatgaccacacga

SEQ ID NO: 5306796 - DNA, 25 bp, Homo sapien
cacacgatgtggctgtcaggtttgt

SEQ ID NO: 5306797 - DNA, 25 bp, Homo sapien
tgcatgtgacacagcagtgaagaac

SEQ ID NO: 5306798 - DNA, 25 bp, Homo sapien
ctgcatgtgacacagcagtgaagaa

SEQ ID NO: 5306799 - DNA, 25 bp, Homo sapien
gcatgtgacacagcagtgaagaaca

SEQ ID NO: 5306800 - DNA, 25 bp, Homo sapien
tactagtctaggtgatcatgcccag

SEQ ID NO: 5306801 - DNA, 25 bp, Homo sapien
cacagcacacacttggtcaggtacc

SEQ ID NO: 5306802 - DNA, 25 bp, Homo sapien
gcaacctacagtctagtgtggaaga

SEQ ID NO: 5306803 - DNA, 25 bp, Homo sapien
gaaccagccaatgattctcaggcca

SEQ ID NO: 5306804 - DNA, 25 bp, Homo sapien
cacagtagctctcaggcatcatcat

SEQ ID NO: 5306805 - DNA, 25 bp, Homo sapien
ccacagtagctctcaggcatcatca

SEQ ID NO: 5306806 - DNA, 25 bp, Homo sapien
ccccacagtagctctcaggcatcat

SEQ ID NO: 5306807 - DNA, 25 bp, Homo sapien
cttccccacagtagctctcaggcat

SEQ ID NO: 5306808 - DNA, 25 bp, Homo sapien
taattattttgcatctacagagggt

SEQ ID NO: 5306809 - DNA, 25 bp, Homo sapien
tctgagggctacaaccactccaact

SEQ ID NO: 5306810 - DNA, 25 bp, Homo sapien
taattaatgcccctgaatgaccctc

SEQ ID NO: 5306811 - DNA, 25 bp, Homo sapien
tcaatctttctatagttggagccaa

SEQ ID NO: 5306812 - DNA, 25 bp, Homo sapien
gcttctctgataacaatctggcact

SEQ ID NO: 5306813 - DNA, 25 bp, Homo sapien
gctaggtattcgaagtcagagttca

SEQ ID NO: 5306814 - DNA, 25 bp, Homo sapien
taattaatggtagggacttgactcc

SEQ ID NO: 5306815 - DNA, 25 bp, Homo sapien
tgcttgaggtgaggaatgaaccacc

SEQ ID NO: 5306816 - DNA, 25 bp, Homo sapien
ctggatatatttttccacagtttct

SEQ ID NO: 5306817 - DNA, 25 bp, Homo sapien
atatttttccacagtttctgctaaa

SEQ ID NO: 5306818 - DNA, 25 bp, Homo sapien
gatatatttttccacagtttctgct

SEQ ID NO: 5306819 - DNA, 25 bp, Homo sapien
ttccacagtttctgctaaaacagat

SEQ ID NO: 5306820 - DNA, 25 bp, Homo sapien
cactgacagcgggaggaacctctgt

SEQ ID NO: 5306821 - DNA, 25 bp, Homo sapien
taaagcagtcgctaacagcatgggt

SEQ ID NO: 5306822 - DNA, 25 bp, Homo sapien
tataccaatgtttgagaggcagcgg

SEQ ID NO: 5306823 - DNA, 25 bp, Homo sapien
tatacacggtatcaggttcacaagc

SEQ ID NO: 5306824 - DNA, 25 bp, Homo sapien
gagctctttgactggaacttgaaac

SEQ ID NO: 5306825 - DNA, 25 bp, Homo sapien
tgcattcagagagccagtcaaggtt

SEQ ID NO: 5306826 - DNA, 25 bp, Homo sapien
tataagttctgtcccaagaggatgc

SEQ ID NO: 5306827 - DNA, 25 bp, Homo sapien
taaagggctttgtatctggatgcag

SEQ ID NO: 5306828 - DNA, 25 bp, Homo sapien
gtgatcaaagataacacagccacag

SEQ ID NO: 5306829 - DNA, 25 bp, Homo sapien
caaggcttggcgcaaacaaatagct

SEQ ID NO: 5306830 - DNA, 25 bp, Homo sapien
gtatatcaggaaacaaaaaccagtc

SEQ ID NO: 5306831 - DNA, 25 bp, Homo sapien
cagtctgcctgagtcatctctgtga

SEQ ID NO: 5306832 - DNA, 25 bp, Homo sapien
gaacaaaaggtcccatgctgagagc

SEQ ID NO: 5306833 - DNA, 25 bp, Homo sapien
cttggatgacgatttggttctccca

SEQ ID NO: 5306834 - DNA, 25 bp, Homo sapien
tccaacaccaaaagtaagagaaaca

SEQ ID NO: 5306835 - DNA, 25 bp, Homo sapien
gaagcgtagagtctctccaacacca

SEQ ID NO: 5306836 - DNA, 25 bp, Homo sapien
ctgtctactgtattggctacagttt

SEQ ID NO: 5306837 - DNA, 25 bp, Homo sapien
gtctactgtattggctacagtttcc

SEQ ID NO: 5306838 - DNA, 25 bp, Homo sapien
aaaggatagagttctgggaaacgag

SEQ ID NO: 5306839 - DNA, 25 bp, Homo sapien
atagagttctgggaaacgagagaaa

SEQ ID NO: 5306840 - DNA, 25 bp, Homo sapien
tatctctgaatgtccttcccttttc

SEQ ID NO: 5306841 - DNA, 25 bp, Homo sapien
ctgtcaatatctctgaatgtccttc

SEQ ID NO: 5306842 - DNA, 25 bp, Homo sapien
gtcaatatctctgaatgtccttccc

SEQ ID NO: 5306843 - DNA, 25 bp, Homo sapien
caatatctctgaatgtccttccctt

SEQ ID NO: 5306844 - DNA, 25 bp, Homo sapien
atttagccaccagttttatgttttg

SEQ ID NO: 5306845 - DNA, 25 bp, Homo sapien
ctaaatttagccaccagttttatgt

SEQ ID NO: 5306846 - DNA, 25 bp, Homo sapien
tttagccaccagttttatgttttga

SEQ ID NO: 5306847 - DNA, 25 bp, Homo sapien
actaaatttagccaccagttttatg

SEQ ID NO: 5306848 - DNA, 25 bp, Homo sapien
caaaggtgggccaggaaacacattt

SEQ ID NO: 5306849 - DNA, 25 bp, Homo sapien
ccatttgggcagcttacatgggtat

SEQ ID NO: 5306850 - DNA, 25 bp, Homo sapien
ggagaattcccaaatcactaaactg

SEQ ID NO: 5306851 - DNA, 25 bp, Homo sapien
catgtgtgcaaggtcccatttgggc

SEQ ID NO: 5306852 - DNA, 25 bp, Homo sapien
cttggcttatagctgcgtattagtc

SEQ ID NO: 5306853 - DNA, 25 bp, Homo sapien
tggctgtcagtatttcttggcttat

SEQ ID NO: 5306854 - DNA, 25 bp, Homo sapien
ggctgtcagtatttcttggcttata

SEQ ID NO: 5306855 - DNA, 25 bp, Homo sapien
ttatagctgcgtattagtccgtttt

SEQ ID NO: 5306856 - DNA, 25 bp, Homo sapien
tggtggaagacacctcttcacaggg

SEQ ID NO: 5306857 - DNA, 25 bp, Homo sapien
gtggaagacacctcttcacagggca

SEQ ID NO: 5306858 - DNA, 25 bp, Homo sapien
catggtggaagacacctcttcacag

SEQ ID NO: 5306859 - DNA, 25 bp, Homo sapien
tcatggtggaagacacctcttcaca

SEQ ID NO: 5306860 - DNA, 25 bp, Homo sapien
attcaaaagtaaccacatatcaggg

SEQ ID NO: 5306861 - DNA, 25 bp, Homo sapien
cacacacccaatgaaaggtgcaggc

SEQ ID NO: 5306862 - DNA, 25 bp, Homo sapien
gggaatgtagaaggttaccacacac

SEQ ID NO: 5306863 - DNA, 25 bp, Homo sapien
cagatatttaaagtctaggacattc

SEQ ID NO: 5306864 - DNA, 25 bp, Homo sapien
gtcaggaatgtgtactaaacatgcc

SEQ ID NO: 5306865 - DNA, 25 bp, Homo sapien
gctccctgagactaaagactatcta

SEQ ID NO: 5306866 - DNA, 25 bp, Homo sapien
acccagaatggtgtctagtacatag

SEQ ID NO: 5306867 - DNA, 25 bp, Homo sapien
gagcatcacataaccttagtcagga

SEQ ID NO: 5306868 - DNA, 25 bp, Homo sapien
tgagcttctactccgacacactgag

SEQ ID NO: 5306869 - DNA, 25 bp, Homo sapien
gagtagatgaacaggcaaactgcca

SEQ ID NO: 5306870 - DNA, 25 bp, Homo sapien
ccaaggaaatgaagtgagtctccca

SEQ ID NO: 5306871 - DNA, 25 bp, Homo sapien
caaagaagttcatgtgtccccatgg

SEQ ID NO: 5306872 - DNA, 25 bp, Homo sapien
cagactttcaacatagctgggagtc

SEQ ID NO: 5306873 - DNA, 25 bp, Homo sapien
gcttaatagccagacccaaaatcgt

SEQ ID NO: 5306874 - DNA, 25 bp, Homo sapien
tctgaagttagtagactgccacctc

SEQ ID NO: 5306875 - DNA, 25 bp, Homo sapien
gatattccaagatgagagtcctgtt

SEQ ID NO: 5306876 - DNA, 25 bp, Homo sapien
cttaggtgctgtattcatgtatgtc

SEQ ID NO: 5306877 - DNA, 25 bp, Homo sapien
aaaaatacttaggtgctgtattcat

SEQ ID NO: 5306878 - DNA, 25 bp, Homo sapien
aaacaatattgtttggcaactaact

SEQ ID NO: 5306879 - DNA, 25 bp, Homo sapien
aacaatattgtttggcaactaactt

SEQ ID NO: 5306880 - DNA, 25 bp, Homo sapien
gttcaacacactcaagatactaaga

SEQ ID NO: 5306881 - DNA, 25 bp, Homo sapien
gtacaccagagaacataactcactt

SEQ ID NO: 5306882 - DNA, 25 bp, Homo sapien
tacacaaagtacaggcattgaaagc

SEQ ID NO: 5306883 - DNA, 25 bp, Homo sapien
gcctacttagtggaattacttgaga

SEQ ID NO: 5306884 - DNA, 25 bp, Homo sapien
gagcttctgctatgtcaggcactgc

SEQ ID NO: 5306885 - DNA, 25 bp, Homo sapien
agcttctgctatgtcaggcactgct

SEQ ID NO: 5306886 - DNA, 25 bp, Homo sapien
gggtgaacaccacaacatctgttct

SEQ ID NO: 5306887 - DNA, 25 bp, Homo sapien
tcccttaagatgtgtttattctgca

SEQ ID NO: 5306888 - DNA, 25 bp, Homo sapien
tggtcataacagcaactaagttgat

SEQ ID NO: 5306889 - DNA, 25 bp, Homo sapien
ccattcattataagctgaggtttaa

SEQ ID NO: 5306890 - DNA, 25 bp, Homo sapien
ccaacaggtataaagagaccagccc

SEQ ID NO: 5306891 - DNA, 25 bp, Homo sapien
caaagcaaacagcccgtggagtcct

SEQ ID NO: 5306892 - DNA, 25 bp, Homo sapien
gctggcagctcttgtaaataaaagt

SEQ ID NO: 5306893 - DNA, 25 bp, Homo sapien
agccctcaaaacagatcaaagcaaa

SEQ ID NO: 5306894 - DNA, 25 bp, Homo sapien
cgtatttatatagggcgtgattgac

SEQ ID NO: 5306895 - DNA, 25 bp, Homo sapien
taaaaacacaggcaatgttaactag

SEQ ID NO: 5306896 - DNA, 25 bp, Homo sapien
gattgacaggtcagttattaacttc

SEQ ID NO: 5306897 - DNA, 25 bp, Homo sapien
caatgttaactagcaagaatgtttg

SEQ ID NO: 5306898 - DNA, 25 bp, Homo sapien
cccctagccagtaacgaacattttg

SEQ ID NO: 5306899 - DNA, 25 bp, Homo sapien
aatatgcaactgttggcatgacaag

SEQ ID NO: 5306900 - DNA, 25 bp, Homo sapien
ttgagcacccctagccagtaacgaa

SEQ ID NO: 5306901 - DNA, 25 bp, Homo sapien
gccagtaacgaacattttgccagaa

SEQ ID NO: 5306902 - DNA, 25 bp, Homo sapien
ccaaatagatgtcattttggatctg

SEQ ID NO: 5306903 - DNA, 25 bp, Homo sapien
gaccctacatatctaactgccaaat

SEQ ID NO: 5306904 - DNA, 25 bp, Homo sapien
ctacggatgactccttcatctgacc

SEQ ID NO: 5306905 - DNA, 25 bp, Homo sapien
tggcataaaataccacctacggatg

SEQ ID NO: 5306906 - DNA, 25 bp, Homo sapien
ctataagcgaaaaagggaggataca

SEQ ID NO: 5306907 - DNA, 25 bp, Homo sapien
ggaatgttacttaagcacctcttag

SEQ ID NO: 5306908 - DNA, 25 bp, Homo sapien
tgagtgacaagaataagactctaac

SEQ ID NO: 5306909 - DNA, 25 bp, Homo sapien
aaactgaacactcacgaatgagaaa

SEQ ID NO: 5306910 - DNA, 25 bp, Homo sapien
aggtacaattacacagtgaagctga

SEQ ID NO: 5306911 - DNA, 25 bp, Homo sapien
gatgtgtgttttaagactgtgagaa

SEQ ID NO: 5306912 - DNA, 25 bp, Homo sapien
tctgttccaggtacaattacacagt

SEQ ID NO: 5306913 - DNA, 25 bp, Homo sapien
tccaggtacaattacacagtgaagc

SEQ ID NO: 5306914 - DNA, 25 bp, Homo sapien
ctgctttaatcagtatcccgacagc

SEQ ID NO: 5306915 - DNA, 25 bp, Homo sapien
tcagtatcccgacagcagtattccc

SEQ ID NO: 5306916 - DNA, 25 bp, Homo sapien
tttaatcagtatcccgacagcagta

SEQ ID NO: 5306917 - DNA, 25 bp, Homo sapien
gtatcccgacagcagtattccccaa

SEQ ID NO: 5306918 - DNA, 25 bp, Homo sapien
ctcacatttcctaaactagtttcca

SEQ ID NO: 5306919 - DNA, 25 bp, Homo sapien
cttatcccctgacagtcagtgccag

SEQ ID NO: 5306920 - DNA, 25 bp, Homo sapien
ttatcccctgacagtcagtgccaga

SEQ ID NO: 5306921 - DNA, 25 bp, Homo sapien
taagatttagttccatcacacaaaa

SEQ ID NO: 5306922 - DNA, 25 bp, Homo sapien
gaatataactctagatcctcaagag

SEQ ID NO: 5306923 - DNA, 25 bp, Homo sapien
cctaagatttagttccatcacacaa

SEQ ID NO: 5306924 - DNA, 25 bp, Homo sapien
aagaagggaatagggctttgaatat

SEQ ID NO: 5306925 - DNA, 25 bp, Homo sapien
gatcaaggcactaaagagaagtgtg

SEQ ID NO: 5306926 - DNA, 25 bp, Homo sapien
tgttttggaatgttcatcctttgcc

SEQ ID NO: 5306927 - DNA, 25 bp, Homo sapien
ccaaaaattcttgtgatcaaggcac

SEQ ID NO: 5306928 - DNA, 25 bp, Homo sapien
tttaactccaaaaattcttgtgatc

SEQ ID NO: 5306929 - DNA, 25 bp, Homo sapien
tcttccaaagtagcaagacacttca

SEQ ID NO: 5306930 - DNA, 25 bp, Homo sapien
cctcttccaaagtagcaagacactt

SEQ ID NO: 5306931 - DNA, 25 bp, Homo sapien
accctcttccaaagtagcaagacac

SEQ ID NO: 5306932 - DNA, 25 bp, Homo sapien
cttccaaagtagcaagacacttcac

SEQ ID NO: 5306933 - DNA, 25 bp, Homo sapien
tatattcccaagaggatgtgtacaa

SEQ ID NO: 5306934 - DNA, 25 bp, Homo sapien
aaccgtatttcgtatgcattaagga

SEQ ID NO: 5306935 - DNA, 25 bp, Homo sapien
tacagatgtagccagctttaggcac

SEQ ID NO: 5306936 - DNA, 25 bp, Homo sapien
gttctgcaaatcaaaccgtatttcg

SEQ ID NO: 5306937 - DNA, 25 bp, Homo sapien
aattgcagccttagctccatcagca

SEQ ID NO: 5306938 - DNA, 25 bp, Homo sapien
gcccagaccggtgatgtaaaaccca

SEQ ID NO: 5306939 - DNA, 25 bp, Homo sapien
tattttctcccaggcgcgtatctct

SEQ ID NO: 5306940 - DNA, 25 bp, Homo sapien
gcgtatctctgaacaatgctctaag

SEQ ID NO: 5306941 - DNA, 25 bp, Homo sapien
gccaaagagattaactctttcattg

SEQ ID NO: 5306942 - DNA, 25 bp, Homo sapien
ctctgtatgtcatctgtaggcccag

SEQ ID NO: 5306943 - DNA, 25 bp, Homo sapien
acaaatccattctgcctttctttgg

SEQ ID NO: 5306944 - DNA, 25 bp, Homo sapien
ctgtactctgtatgtcatctgtagg

SEQ ID NO: 5306945 - DNA, 25 bp, Homo sapien
agtttagatgaaggatcactgcatt

SEQ ID NO: 5306946 - DNA, 25 bp, Homo sapien
tgtatgtagaaaggaattccagcac

SEQ ID NO: 5306947 - DNA, 25 bp, Homo sapien
ggaattccagcactgcgccttgtag

SEQ ID NO: 5306948 - DNA, 25 bp, Homo sapien
tgcgccttgtagcacagagtttaga

SEQ ID NO: 5306949 - DNA, 25 bp, Homo sapien
tgctacagtctaaggtcgtctcctg

SEQ ID NO: 5306950 - DNA, 25 bp, Homo sapien
ataatgctcctcaactgtcagtggg

SEQ ID NO: 5306951 - DNA, 25 bp, Homo sapien
ccagcttatagataatgctacagtc

SEQ ID NO: 5306952 - DNA, 25 bp, Homo sapien
cgaactgcaggacatgagaggtact

SEQ ID NO: 5306953 - DNA, 25 bp, Homo sapien
gtgactagatctatgatatccccaa

SEQ ID NO: 5306954 - DNA, 25 bp, Homo sapien
gggcctctgaatcaggctgactact

SEQ ID NO: 5306955 - DNA, 25 bp, Homo sapien
tgtagcagtaggaaaagccaagggc

SEQ ID NO: 5306956 - DNA, 25 bp, Homo sapien
tgactactaactcagtgactagatc

SEQ ID NO: 5306957 - DNA, 25 bp, Homo sapien
cccaaaataccactacctaatctag

SEQ ID NO: 5306958 - DNA, 25 bp, Homo sapien
aataccactacctaatctagttcct

SEQ ID NO: 5306959 - DNA, 25 bp, Homo sapien
cacccaaaataccactacctaatct

SEQ ID NO: 5306960 - DNA, 25 bp, Homo sapien
caaaataccactacctaatctagtt

SEQ ID NO: 5306961 - DNA, 25 bp, Homo sapien
gtgcctggactgcaaaaggtgttgt

SEQ ID NO: 5306962 - DNA, 25 bp, Homo sapien
tgtgcctggactgcaaaaggtgttg

SEQ ID NO: 5306963 - DNA, 25 bp, Homo sapien
tgcctggactgcaaaaggtgttgtt

SEQ ID NO: 5306964 - DNA, 25 bp, Homo sapien
ctgtgcctggactgcaaaaggtgtt

SEQ ID NO: 5306965 - DNA, 25 bp, Homo sapien
ttagcgcttaccatatgacagaaca

SEQ ID NO: 5306966 - DNA, 25 bp, Homo sapien
caagatgtggtgcaaaggacctcct

SEQ ID NO: 5306967 - DNA, 25 bp, Homo sapien
caacactcacacacataggtctagg

SEQ ID NO: 5306968 - DNA, 25 bp, Homo sapien
cactgtttagaacccaggtctaggg

SEQ ID NO: 5306969 - DNA, 25 bp, Homo sapien
tgtcctgttgcttgcgaaaatttac

SEQ ID NO: 5306970 - DNA, 25 bp, Homo sapien
caagtcatcttactgtcctgttgct

SEQ ID NO: 5306971 - DNA, 25 bp, Homo sapien
tcagtagcaagtcatcttactgtcc

SEQ ID NO: 5306972 - DNA, 25 bp, Homo sapien
cttactgtcctgttgcttgcgaaaa

SEQ ID NO: 5306973 - DNA, 25 bp, Homo sapien
gaagctggcacaacatgcctaaaag

SEQ ID NO: 5306974 - DNA, 25 bp, Homo sapien
taccagcaccatctgcgcagttaca

SEQ ID NO: 5306975 - DNA, 25 bp, Homo sapien
tgctccaccgtcaataatccatcag

SEQ ID NO: 5306976 - DNA, 25 bp, Homo sapien
agtaaagcaacttccttcatacttc

SEQ ID NO: 5306977 - DNA, 25 bp, Homo sapien
cacaacgattgcaaccttgattact

SEQ ID NO: 5306978 - DNA, 25 bp, Homo sapien
aacacaacgattgcaaccttgatta

SEQ ID NO: 5306979 - DNA, 25 bp, Homo sapien
aaaaaacacaacgattgcaaccttg

SEQ ID NO: 5306980 - DNA, 25 bp, Homo sapien
aaaacacaacgattgcaaccttgat

SEQ ID NO: 5306981 - DNA, 25 bp, Homo sapien
tattttggtgagcatgactgttgca

SEQ ID NO: 5306982 - DNA, 25 bp, Homo sapien
aattcccatggccaataagctataa

SEQ ID NO: 5306983 - DNA, 25 bp, Homo sapien
tccaaagattaaacaaactctgcct

SEQ ID NO: 5306984 - DNA, 25 bp, Homo sapien
aaagagcacgctgacaaaatggtac

SEQ ID NO: 5306985 - DNA, 25 bp, Homo sapien
tataaaaagggcattctgtacattt

SEQ ID NO: 5306986 - DNA, 25 bp, Homo sapien
acatgaattacagtatccattttat

SEQ ID NO: 5306987 - DNA, 25 bp, Homo sapien
aatgttctgcacagatttgcaacct

SEQ ID NO: 5306988 - DNA, 25 bp, Homo sapien
tgcacagatttgcaacctctaattt

SEQ ID NO: 5306989 - DNA, 25 bp, Homo sapien
aatattcaccacactagcattcaag

SEQ ID NO: 5306990 - DNA, 25 bp, Homo sapien
tatctcgaggctgaatctcattcag

SEQ ID NO: 5306991 - DNA, 25 bp, Homo sapien
gaatcatctgtaagcggcttgctga

SEQ ID NO: 5306992 - DNA, 25 bp, Homo sapien
caagtccttcatatcaaagctatca

SEQ ID NO: 5306993 - DNA, 25 bp, Homo sapien
cacagcactctagccggccttcttc

SEQ ID NO: 5306994 - DNA, 25 bp, Homo sapien
gtaaagacataataatcaaaccaca

SEQ ID NO: 5306995 - DNA, 25 bp, Homo sapien
tgtaggacatcaaaaggagcttctc

SEQ ID NO: 5306996 - DNA, 25 bp, Homo sapien
ccttcaggggatgagctctgaatga

SEQ ID NO: 5306997 - DNA, 25 bp, Homo sapien
tgtccattgggatgaggccttcagg

SEQ ID NO: 5306998 - DNA, 25 bp, Homo sapien
gacaccacagtggaaagcctgtagg

SEQ ID NO: 5306999 - DNA, 25 bp, Homo sapien
tcccaggacacattccaaccagagg

SEQ ID NO: 5307000 - DNA, 25 bp, Homo sapien
tccaaccagaggttaaagctcagaa

SEQ ID NO: 5307001 - DNA, 25 bp, Homo sapien
ttcaaagcaatagactgcattcctt

SEQ ID NO: 5307002 - DNA, 25 bp, Homo sapien
gacacattccaaccagaggttaaag

SEQ ID NO: 5307003 - DNA, 25 bp, Homo sapien
gaagcagagaattttcagcctgaga

SEQ ID NO: 5307004 - DNA, 25 bp, Homo sapien
cttctgcaaagctcctgttatacag

SEQ ID NO: 5307005 - DNA, 25 bp, Homo sapien
cctgttatacagtggactcgcccat

SEQ ID NO: 5307006 - DNA, 25 bp, Homo sapien
gactcgcccatacattggaaatgct

SEQ ID NO: 5307007 - DNA, 25 bp, Homo sapien
gtacttattcaacataaatccactg

SEQ ID NO: 5307008 - DNA, 25 bp, Homo sapien
tactgagactaagctattcgttttg

SEQ ID NO: 5307009 - DNA, 25 bp, Homo sapien
gtattatagctgactaaaatgttca

SEQ ID NO: 5307010 - DNA, 25 bp, Homo sapien
gaacccatggtgctcttatatgctg

SEQ ID NO: 5307011 - DNA, 25 bp, Homo sapien
gctgtcacacagtcgtatggtttgg

SEQ ID NO: 5307012 - DNA, 25 bp, Homo sapien
ttcagcaggtaggaagctgtcacac

SEQ ID NO: 5307013 - DNA, 25 bp, Homo sapien
cttgtgctgagctccaatgctgcct

SEQ ID NO: 5307014 - DNA, 25 bp, Homo sapien
acttgctgagttaagtaggcagaca

SEQ ID NO: 5307015 - DNA, 25 bp, Homo sapien
caaatgctaaaattttcacgtcttc

SEQ ID NO: 5307016 - DNA, 25 bp, Homo sapien
aaatgctaaaattttcacgtcttca

SEQ ID NO: 5307017 - DNA, 25 bp, Homo sapien
aaatgtacagctgtttttgataact

SEQ ID NO: 5307018 - DNA, 25 bp, Homo sapien
tcaaatgctaaaattttcacgtctt

SEQ ID NO: 5307019 - DNA, 25 bp, Homo sapien
tttggaaacgaccaacatcaatatc

SEQ ID NO: 5307020 - DNA, 25 bp, Homo sapien
aaacgaccaacatcaatatcatgac

SEQ ID NO: 5307021 - DNA, 25 bp, Homo sapien
tgtttggaaacgaccaacatcaata

SEQ ID NO: 5307022 - DNA, 25 bp, Homo sapien
tagtgtttggaaacgaccaacatca

SEQ ID NO: 5307023 - DNA, 25 bp, Homo sapien
taataggatgccctgtgaagaacac

SEQ ID NO: 5307024 - DNA, 25 bp, Homo sapien
taagcaaggcggacaacctgaggtc

SEQ ID NO: 5307025 - DNA, 25 bp, Homo sapien
gaatcatttcagcaggacacggtgg

SEQ ID NO: 5307026 - DNA, 25 bp, Homo sapien
gactgtgaatatcctcggctgcttg

SEQ ID NO: 5307027 - DNA, 25 bp, Homo sapien
ctgggacatgaaaaacttcagctat

SEQ ID NO: 5307028 - DNA, 25 bp, Homo sapien
gacatgaaaaacttcagctattgaa

SEQ ID NO: 5307029 - DNA, 25 bp, Homo sapien
cttctgggacatgaaaaacttcagc

SEQ ID NO: 5307030 - DNA, 25 bp, Homo sapien
gggacatgaaaaacttcagctattg

SEQ ID NO: 5307031 - DNA, 25 bp, Homo sapien
caggaaacaatgcttcaaaaagact

SEQ ID NO: 5307032 - DNA, 25 bp, Homo sapien
ggaaacaatgcttcaaaaagactgt

SEQ ID NO: 5307033 - DNA, 25 bp, Homo sapien
agctgaaaatctagtcgagtaggaa

SEQ ID NO: 5307034 - DNA, 25 bp, Homo sapien
tagtcgagtaggaagatccaggaaa

SEQ ID NO: 5307035 - DNA, 25 bp, Homo sapien
taactgactctaccaaagatccctg

SEQ ID NO: 5307036 - DNA, 25 bp, Homo sapien
tttcaaagaaatagggccattactg

SEQ ID NO: 5307037 - DNA, 25 bp, Homo sapien
tctcaggtgaaggacatgcaaccct

SEQ ID NO: 5307038 - DNA, 25 bp, Homo sapien
gaattatcctttaggtcccacaagc

SEQ ID NO: 5307039 - DNA, 25 bp, Homo sapien
accatgggccaagagtcattaatat

SEQ ID NO: 5307040 - DNA, 25 bp, Homo sapien
ttaatatcaagcctctgtaagtcat

SEQ ID NO: 5307041 - DNA, 25 bp, Homo sapien
aatatcaagcctctgtaagtcatct

SEQ ID NO: 5307042 - DNA, 25 bp, Homo sapien
catgggccaagagtcattaatatca

SEQ ID NO: 5307043 - DNA, 25 bp, Homo sapien
tacagcactggttccataacccagg

SEQ ID NO: 5307044 - DNA, 25 bp, Homo sapien
tgtaacagtcctccggtacagcact

SEQ ID NO: 5307045 - DNA, 25 bp, Homo sapien
cataacccaggctacatcaagtaga

SEQ ID NO: 5307046 - DNA, 25 bp, Homo sapien
caagtagagtaccaaagcaccagaa

SEQ ID NO: 5307047 - DNA, 25 bp, Homo sapien
aaagaaacagaagggtgctgtttgg

SEQ ID NO: 5307048 - DNA, 25 bp, Homo sapien
gaaacagaagggtgctgtttggtta

SEQ ID NO: 5307049 - DNA, 25 bp, Homo sapien
ggttaactcattctctggttcacgt

SEQ ID NO: 5307050 - DNA, 25 bp, Homo sapien
tcacgtttggatttactctgctcca

SEQ ID NO: 5307051 - DNA, 25 bp, Homo sapien
cagaacggccgtcatgaacagatgt

SEQ ID NO: 5307052 - DNA, 25 bp, Homo sapien
tgagagaacaggtcacagaacggcc

SEQ ID NO: 5307053 - DNA, 25 bp, Homo sapien
ccacttccctatgccttctgatggg

SEQ ID NO: 5307054 - DNA, 25 bp, Homo sapien
gaacagatgtggtagcccaattcca

SEQ ID NO: 5307055 - DNA, 25 bp, Homo sapien
gatctgttgccgcactcctggagac

SEQ ID NO: 5307056 - DNA, 25 bp, Homo sapien
caaagcaagcctaatgtatctatcc

SEQ ID NO: 5307057 - DNA, 25 bp, Homo sapien
gaaacaatttctgtgctccgattac

SEQ ID NO: 5307058 - DNA, 25 bp, Homo sapien
cctggagactggctgttaagattgt

SEQ ID NO: 5307059 - DNA, 25 bp, Homo sapien
tatattgaactgctacatgaaaggg

SEQ ID NO: 5307060 - DNA, 25 bp, Homo sapien
tctctttatgaactccctaaaacag

SEQ ID NO: 5307061 - DNA, 25 bp, Homo sapien
gggagactagggtttctactcattc

SEQ ID NO: 5307062 - DNA, 25 bp, Homo sapien
caggatacaatgtaggggcctctat

SEQ ID NO: 5307063 - DNA, 25 bp, Homo sapien
tgagctctagctattcgcagacatg

SEQ ID NO: 5307064 - DNA, 25 bp, Homo sapien
cagttgcagactgaagatgtccatg

SEQ ID NO: 5307065 - DNA, 25 bp, Homo sapien
gaggttctcccaggtatcagttgca

SEQ ID NO: 5307066 - DNA, 25 bp, Homo sapien
ctttattcttgcatcagacacgagg

SEQ ID NO: 5307067 - DNA, 25 bp, Homo sapien
aaggatgggaaagattgctcttgtc

SEQ ID NO: 5307068 - DNA, 25 bp, Homo sapien
taaggatgggaaagattgctcttgt

SEQ ID NO: 5307069 - DNA, 25 bp, Homo sapien
ctaaggatgggaaagattgctcttg

SEQ ID NO: 5307070 - DNA, 25 bp, Homo sapien
tattatgcaatgactactataatta

SEQ ID NO: 5307071 - DNA, 25 bp, Homo sapien
aagcacaataacaaagaccattact

SEQ ID NO: 5307072 - DNA, 25 bp, Homo sapien
atgactactataattatcagctgct

SEQ ID NO: 5307073 - DNA, 25 bp, Homo sapien
acaaagaccattactgtattatgca

SEQ ID NO: 5307074 - DNA, 25 bp, Homo sapien
ctgctaacatttttgctttttccct

SEQ ID NO: 5307075 - DNA, 25 bp, Homo sapien
tgctaacatttttgctttttcccta

SEQ ID NO: 5307076 - DNA, 25 bp, Homo sapien
aagtctcatgccactggtcaatcca

SEQ ID NO: 5307077 - DNA, 25 bp, Homo sapien
ggcaagtaataatcaatcacgtaag

SEQ ID NO: 5307078 - DNA, 25 bp, Homo sapien
ggtcaatccaagaactctcagcagt

SEQ ID NO: 5307079 - DNA, 25 bp, Homo sapien
tctgaagaatctttaccatgtactg

SEQ ID NO: 5307080 - DNA, 25 bp, Homo sapien
ggtgtctcagagcatccaatggatg

SEQ ID NO: 5307081 - DNA, 25 bp, Homo sapien
ccattcaggctgtccgttaggctcg

SEQ ID NO: 5307082 - DNA, 25 bp, Homo sapien
aaggatcagggacgaaatctgcacc

SEQ ID NO: 5307083 - DNA, 25 bp, Homo sapien
cagaaacatttccagcgttggctct

SEQ ID NO: 5307084 - DNA, 25 bp, Homo sapien
tgaagaaaaatgagccatgagccat

SEQ ID NO: 5307085 - DNA, 25 bp, Homo sapien
ctgaagaaaaatgagccatgagcca

SEQ ID NO: 5307086 - DNA, 25 bp, Homo sapien
catgtgcagtatccaagagcagggc

SEQ ID NO: 5307087 - DNA, 25 bp, Homo sapien
gaactcaaggtgaacaaaacatgtg

SEQ ID NO: 5307088 - DNA, 25 bp, Homo sapien
atgcttccgttctgccagtccaaca

SEQ ID NO: 5307089 - DNA, 25 bp, Homo sapien
aacatggcaagtgtcccctgacaga

SEQ ID NO: 5307090 - DNA, 25 bp, Homo sapien
tggtgcagtccactgaacgaagcag

SEQ ID NO: 5307091 - DNA, 25 bp, Homo sapien
cactcggggacactggtgcagtcca

SEQ ID NO: 5307092 - DNA, 25 bp, Homo sapien
actcggggacactggtgcagtccac

SEQ ID NO: 5307093 - DNA, 25 bp, Homo sapien
ctcggggacactggtgcagtccact

SEQ ID NO: 5307094 - DNA, 25 bp, Homo sapien
tcctgtctaaagcacatgatttggg

SEQ ID NO: 5307095 - DNA, 25 bp, Homo sapien
gacaaggtctagctaaactccccag

SEQ ID NO: 5307096 - DNA, 25 bp, Homo sapien
gaacaattgactctatctagcatgc

SEQ ID NO: 5307097 - DNA, 25 bp, Homo sapien
tgtgagatggacttacaggtgactg

SEQ ID NO: 5307098 - DNA, 25 bp, Homo sapien
atcttttcagacgggtgaaacatag

SEQ ID NO: 5307099 - DNA, 25 bp, Homo sapien
gtgaaacatagtcttaataaaaaga

SEQ ID NO: 5307100 - DNA, 25 bp, Homo sapien
agaataatagctaatccagatgtgc

SEQ ID NO: 5307101 - DNA, 25 bp, Homo sapien
gatgtgctctgtacagtctgtaaca

SEQ ID NO: 5307102 - DNA, 25 bp, Homo sapien
taatgaatattctggtagagtggaa

SEQ ID NO: 5307103 - DNA, 25 bp, Homo sapien
gccagataggcctgggtacaatttc

SEQ ID NO: 5307104 - DNA, 25 bp, Homo sapien
aggcctgggtacaatttctagtctg

SEQ ID NO: 5307105 - DNA, 25 bp, Homo sapien
gatgctgagcagccagataggcctg

SEQ ID NO: 5307106 - DNA, 25 bp, Homo sapien
tattttgccatatgggagaatcgga

SEQ ID NO: 5307107 - DNA, 25 bp, Homo sapien
catatgggagaatcggaagtcttcc

SEQ ID NO: 5307108 - DNA, 25 bp, Homo sapien
tttgccatatgggagaatcggaagt

SEQ ID NO: 5307109 - DNA, 25 bp, Homo sapien
acatattttgccatatgggagaatc

SEQ ID NO: 5307110 - DNA, 25 bp, Homo sapien
gtactttctgtactaacatcattga

SEQ ID NO: 5307111 - DNA, 25 bp, Homo sapien
ttctgtactaacatcattgaaactc

SEQ ID NO: 5307112 - DNA, 25 bp, Homo sapien
cttgtactttctgtactaacatcat

SEQ ID NO: 5307113 - DNA, 25 bp, Homo sapien
tgtactaacatcattgaaactctaa

SEQ ID NO: 5307114 - DNA, 25 bp, Homo sapien
tgaataatatgatttccagcacatt

SEQ ID NO: 5307115 - DNA, 25 bp, Homo sapien
ttgaataatatgatttccagcacat

SEQ ID NO: 5307116 - DNA, 25 bp, Homo sapien
gaataatatgatttccagcacattt

SEQ ID NO: 5307117 - DNA, 25 bp, Homo sapien
ttccaggatttcaattaaactcttc

SEQ ID NO: 5307118 - DNA, 25 bp, Homo sapien
caggatttcaattaaactcttctgc

SEQ ID NO: 5307119 - DNA, 25 bp, Homo sapien
cttccaggatttcaattaaactctt

SEQ ID NO: 5307120 - DNA, 25 bp, Homo sapien
taaactcttctgcagaaaatgaagc

SEQ ID NO: 5307121 - DNA, 25 bp, Homo sapien
ttttaagcagattattaacacttgc

SEQ ID NO: 5307122 - DNA, 25 bp, Homo sapien
catttttaagcagattattaacact

SEQ ID NO: 5307123 - DNA, 25 bp, Homo sapien
taagcagattattaacacttgctct

SEQ ID NO: 5307124 - DNA, 25 bp, Homo sapien
agcagattattaacacttgctctac

SEQ ID NO: 5307125 - DNA, 25 bp, Homo sapien
gacgagaagtaaaacggtgcatagc

SEQ ID NO: 5307126 - DNA, 25 bp, Homo sapien
gagtataagtcagtagtattcaatt

SEQ ID NO: 5307127 - DNA, 25 bp, Homo sapien
ctgaagacgagaagtaaaacggtgc

SEQ ID NO: 5307128 - DNA, 25 bp, Homo sapien
agtaaaacggtgcatagcctcaggt

SEQ ID NO: 5307129 - DNA, 25 bp, Homo sapien
ccaaacaactttgaatagtgggatc

SEQ ID NO: 5307130 - DNA, 25 bp, Homo sapien
tgccaatactttcttcaagggattc

SEQ ID NO: 5307131 - DNA, 25 bp, Homo sapien
gaatagtgggatcacacatgccatt

SEQ ID NO: 5307132 - DNA, 25 bp, Homo sapien
tgcctgctaagatatccaaacaact

SEQ ID NO: 5307133 - DNA, 25 bp, Homo sapien
acagcaaagaagctagatttttccc

SEQ ID NO: 5307134 - DNA, 25 bp, Homo sapien
tccgtgagttgcacacaatgtaaca

SEQ ID NO: 5307135 - DNA, 25 bp, Homo sapien
gatttgtgacactccatccgtgagt

SEQ ID NO: 5307136 - DNA, 25 bp, Homo sapien
cacacaatgtaacagcaaagaagct

SEQ ID NO: 5307137 - DNA, 25 bp, Homo sapien
ggcaaatggtcagcgcagcaacttg

SEQ ID NO: 5307138 - DNA, 25 bp, Homo sapien
ttcaaagtttcaaggtcctgatggc

SEQ ID NO: 5307139 - DNA, 25 bp, Homo sapien
ggtcagcgcagcaacttgcatttct

SEQ ID NO: 5307140 - DNA, 25 bp, Homo sapien
gtcctgatggcaaatggtcagcgca

SEQ ID NO: 5307141 - DNA, 25 bp, Homo sapien
ctcattagactaagaggaggtacta

SEQ ID NO: 5307142 - DNA, 25 bp, Homo sapien
taagaggaggtactaccgtgtcctg

SEQ ID NO: 5307143 - DNA, 25 bp, Homo sapien
tagactaagaggaggtactaccgtg

SEQ ID NO: 5307144 - DNA, 25 bp, Homo sapien
gaggaggtactaccgtgtcctgatt

SEQ ID NO: 5307145 - DNA, 25 bp, Homo sapien
tcttgctattagattagtaaaagtc

SEQ ID NO: 5307146 - DNA, 25 bp, Homo sapien
tcttgtcttgctattagattagtaa

SEQ ID NO: 5307147 - DNA, 25 bp, Homo sapien
tgctattagattagtaaaagtcagt

SEQ ID NO: 5307148 - DNA, 25 bp, Homo sapien
tagacttcttgtcttgctattagat

SEQ ID NO: 5307149 - DNA, 25 bp, Homo sapien
gcctggtccagtcccggaagcaggt

SEQ ID NO: 5307150 - DNA, 25 bp, Homo sapien
cgtctccgaggctcgcagcgcggtc

SEQ ID NO: 5307151 - DNA, 25 bp, Homo sapien
gaagcaggtctccttctacggcgtc

SEQ ID NO: 5307152 - DNA, 25 bp, Homo sapien
cgtctgagaagagtcgcaggcgcct

SEQ ID NO: 5307153 - DNA, 25 bp, Homo sapien
cacaaaaggcctgtgaagcacgcag

SEQ ID NO: 5307154 - DNA, 25 bp, Homo sapien
cagtgattctgatgctcagtccggg

SEQ ID NO: 5307155 - DNA, 25 bp, Homo sapien
aagcacgcagggctggaattctctc

SEQ ID NO: 5307156 - DNA, 25 bp, Homo sapien
tatatgcaaatgagccaattgtggc

SEQ ID NO: 5307157 - DNA, 25 bp, Homo sapien
ttggtgctgattctgcatgtggcca

SEQ ID NO: 5307158 - DNA, 25 bp, Homo sapien
ttttggtgctgattctgcatgtggc

SEQ ID NO: 5307159 - DNA, 25 bp, Homo sapien
agcctggggaggttttggtgctgat

SEQ ID NO: 5307160 - DNA, 25 bp, Homo sapien
gtgctgattctgcatgtggccacat

SEQ ID NO: 5307161 - DNA, 25 bp, Homo sapien
tgaataatcagttgagataagtcat

SEQ ID NO: 5307162 - DNA, 25 bp, Homo sapien
ctagtcaagtgtaatagtgaaaagt

SEQ ID NO: 5307163 - DNA, 25 bp, Homo sapien
gtcaagtgtaatagtgaaaagtggg

SEQ ID NO: 5307164 - DNA, 25 bp, Homo sapien
gataagtcattatcttcagacaagc

SEQ ID NO: 5307165 - DNA, 25 bp, Homo sapien
caatgtggagtcaatatgaaatatt

SEQ ID NO: 5307166 - DNA, 25 bp, Homo sapien
cactgtatcagaatttggactagcc

SEQ ID NO: 5307167 - DNA, 25 bp, Homo sapien
gaatgaagtacgtattttacactta

SEQ ID NO: 5307168 - DNA, 25 bp, Homo sapien
ttattgaatgaagtacgtattttac

SEQ ID NO: 5307169 - DNA, 25 bp, Homo sapien
cacagtcacgtattcgaggtctcca

SEQ ID NO: 5307170 - DNA, 25 bp, Homo sapien
tcaaagacgtatttgtaagcggtcc

SEQ ID NO: 5307171 - DNA, 25 bp, Homo sapien
tgagccggtacaggccatacatcat

SEQ ID NO: 5307172 - DNA, 25 bp, Homo sapien
caaatataacagtgtggcccagata

SEQ ID NO: 5307173 - DNA, 25 bp, Homo sapien
tttactgagctccaagagtatcact

SEQ ID NO: 5307174 - DNA, 25 bp, Homo sapien
aaacccaggaaatgctcccaagcaa

SEQ ID NO: 5307175 - DNA, 25 bp, Homo sapien
taagaaatcgttcctgttaggtgga

SEQ ID NO: 5307176 - DNA, 25 bp, Homo sapien
cctctgtgtcgaatgtgaatttggc

SEQ ID NO: 5307177 - DNA, 25 bp, Homo sapien
gaggtcgcttctcggtggcgtagag

SEQ ID NO: 5307178 - DNA, 25 bp, Homo sapien
tgcgctcccggttgggccactctag

SEQ ID NO: 5307179 - DNA, 25 bp, Homo sapien
gccttccggagctggcggctgcgct

SEQ ID NO: 5307180 - DNA, 25 bp, Homo sapien
gccactctagctgcgggaggtcgct

SEQ ID NO: 5307181 - DNA, 25 bp, Homo sapien
ttcataagtcacataaccctttctg

SEQ ID NO: 5307182 - DNA, 25 bp, Homo sapien
ggtattgtgcctggccccctatatt

SEQ ID NO: 5307183 - DNA, 25 bp, Homo sapien
aaagatgttttcataagtcacataa

SEQ ID NO: 5307184 - DNA, 25 bp, Homo sapien
tgttttcataagtcacataaccctt

SEQ ID NO: 5307185 - DNA, 25 bp, Homo sapien
ttctcatttcatgaaaagatctcag

SEQ ID NO: 5307186 - DNA, 25 bp, Homo sapien
tctcatttcatgaaaagatctcagt

SEQ ID NO: 5307187 - DNA, 25 bp, Homo sapien
tcatttcatgaaaagatctcagtca

SEQ ID NO: 5307188 - DNA, 25 bp, Homo sapien
ctcatttcatgaaaagatctcagtc

SEQ ID NO: 5307189 - DNA, 25 bp, Homo sapien
tttggagctgtacacgatatgacac

SEQ ID NO: 5307190 - DNA, 25 bp, Homo sapien
ctttttggagctgtacacgatatga

SEQ ID NO: 5307191 - DNA, 25 bp, Homo sapien
cggcactcatgactagtgcctcttt

SEQ ID NO: 5307192 - DNA, 25 bp, Homo sapien
ttggagctgtacacgatatgacaca

SEQ ID NO: 5307193 - DNA, 25 bp, Homo sapien
tatgtgaaactccacgaatttttgg

SEQ ID NO: 5307194 - DNA, 25 bp, Homo sapien
tcaattatccaacctaatggaaagg

SEQ ID NO: 5307195 - DNA, 25 bp, Homo sapien
tcactttggggggttagtttgatgc

SEQ ID NO: 5307196 - DNA, 25 bp, Homo sapien
caacctaatggaaaggagataggat

SEQ ID NO: 5307197 - DNA, 25 bp, Homo sapien
cctgtaagtcccagctgctcgggag

SEQ ID NO: 5307198 - DNA, 25 bp, Homo sapien
ccaggaggcggagcttgcagtgagc

SEQ ID NO: 5307199 - DNA, 25 bp, Homo sapien
gccgaggcaggagaatggtgtgaac

SEQ ID NO: 5307200 - DNA, 25 bp, Homo sapien
attcaaaaaaaattatccgggcatg

SEQ ID NO: 5307201 - DNA, 25 bp, Homo sapien
gaaagaacgcaacaaaatggtgaca

SEQ ID NO: 5307202 - DNA, 25 bp, Homo sapien
gacagagaagcaagaccctcaagga

SEQ ID NO: 5307203 - DNA, 25 bp, Homo sapien
tacacggatgctttcttaatggttg

SEQ ID NO: 5307204 - DNA, 25 bp, Homo sapien
aatatgccatttactgccagcgttg

SEQ ID NO: 5307205 - DNA, 25 bp, Homo sapien
ggtgcagtacatcttccggctctat

SEQ ID NO: 5307206 - DNA, 25 bp, Homo sapien
ctgagcctcctgtgtggtattagaa

SEQ ID NO: 5307207 - DNA, 25 bp, Homo sapien
gaaagcaggataacattaggtaacc

SEQ ID NO: 5307208 - DNA, 25 bp, Homo sapien
ggtgcgaggagtacattttcagagc

SEQ ID NO: 5307209 - DNA, 25 bp, Homo sapien
tccgcaggtgtcgtggctgactgca

SEQ ID NO: 5307210 - DNA, 25 bp, Homo sapien
tcctctctgctaggtatttggaaag

SEQ ID NO: 5307211 - DNA, 25 bp, Homo sapien
gcaaacagcccgaaactgagttctg

SEQ ID NO: 5307212 - DNA, 25 bp, Homo sapien
ttatacttcccgatttccgcaggtg

SEQ ID NO: 5307213 - DNA, 25 bp, Homo sapien
ggaatcaggaacaaatcgtctgctt

SEQ ID NO: 5307214 - DNA, 25 bp, Homo sapien
aaatcgtctgcttatacttttgctc

SEQ ID NO: 5307215 - DNA, 25 bp, Homo sapien
aagtaatcttgatccgcagccagga

SEQ ID NO: 5307216 - DNA, 25 bp, Homo sapien
ttattgtcagtggtagcctgtcaga

SEQ ID NO: 5307217 - DNA, 25 bp, Homo sapien
gattttggcccgtgctgaactgaga

SEQ ID NO: 5307218 - DNA, 25 bp, Homo sapien
ctgaactgagatagctgacattccc

SEQ ID NO: 5307219 - DNA, 25 bp, Homo sapien
aagaaccaagattttggcccgtgct

SEQ ID NO: 5307220 - DNA, 25 bp, Homo sapien
cattccccccagtaacatattttgc

SEQ ID NO: 5307221 - DNA, 25 bp, Homo sapien
gcaggaagccagatcatcccaaggg

SEQ ID NO: 5307222 - DNA, 25 bp, Homo sapien
tggaaattctaggttctgcaggaag

SEQ ID NO: 5307223 - DNA, 25 bp, Homo sapien
tgaagcccaaaaggttttggcctgc

SEQ ID NO: 5307224 - DNA, 25 bp, Homo sapien
atcccaagggttaatacctcatttg

SEQ ID NO: 5307225 - DNA, 25 bp, Homo sapien
caaaaagccatgtagacaaagtgat

SEQ ID NO: 5307226 - DNA, 25 bp, Homo sapien
gattattactggaatccttagtccc

SEQ ID NO: 5307227 - DNA, 25 bp, Homo sapien
tcatcctgtgagttgctgtttggga

SEQ ID NO: 5307228 - DNA, 25 bp, Homo sapien
taatatgccgaaggatcatcctgtg

SEQ ID NO: 5307229 - DNA, 25 bp, Homo sapien
tctccacgtagcaaatcaatatgtg

SEQ ID NO: 5307230 - DNA, 25 bp, Homo sapien
gatttaaggtaatagggtctgtcac

SEQ ID NO: 5307231 - DNA, 25 bp, Homo sapien
ggtatgtatcttcttagccttgcta

SEQ ID NO: 5307232 - DNA, 25 bp, Homo sapien
catatttacaggagagcgtggcagc

SEQ ID NO: 5307233 - DNA, 25 bp, Homo sapien
aaattatttgcagtacgtatggttc

SEQ ID NO: 5307234 - DNA, 25 bp, Homo sapien
cctcagtctttagcacacgtttctt

SEQ ID NO: 5307235 - DNA, 25 bp, Homo sapien
tgcagtacgtatggttctgacaccc

SEQ ID NO: 5307236 - DNA, 25 bp, Homo sapien
gacacccttgagaacagaattttca

SEQ ID NO: 5307237 - DNA, 25 bp, Homo sapien
tagtcacacgagtctcccataggtt

SEQ ID NO: 5307238 - DNA, 25 bp, Homo sapien
cactgttgagcccattcctacggtt

SEQ ID NO: 5307239 - DNA, 25 bp, Homo sapien
gacccctcgtgtggacatctgcatt

SEQ ID NO: 5307240 - DNA, 25 bp, Homo sapien
gatgtgatcaggtaactccgacccc

SEQ ID NO: 5307241 - DNA, 25 bp, Homo sapien
ttacattcttgggtccgctcagtca

SEQ ID NO: 5307242 - DNA, 25 bp, Homo sapien
acattcttgggtccgctcagtcaca

SEQ ID NO: 5307243 - DNA, 25 bp, Homo sapien
tcttgggtccgctcagtcacaattt

SEQ ID NO: 5307244 - DNA, 25 bp, Homo sapien
ttatttacattcttgggtccgctca

SEQ ID NO: 5307245 - DNA, 25 bp, Homo sapien
taagagcaagggactataaaccact

SEQ ID NO: 5307246 - DNA, 25 bp, Homo sapien
tcatttcagacgttcagagcagtca

SEQ ID NO: 5307247 - DNA, 25 bp, Homo sapien
gcttggatccaagaggcacaaatgg

SEQ ID NO: 5307248 - DNA, 25 bp, Homo sapien
cagtcatgcacagtcggcagcttca

SEQ ID NO: 5307249 - DNA, 25 bp, Homo sapien
ctacctgctaatgagatgatccctt

SEQ ID NO: 5307250 - DNA, 25 bp, Homo sapien
atgagatgatcccttattttgaaaa

SEQ ID NO: 5307251 - DNA, 25 bp, Homo sapien
tttgaaaacaactattcctaggatg

SEQ ID NO: 5307252 - DNA, 25 bp, Homo sapien
tattcctaggatgacaagagctgga

SEQ ID NO: 5307253 - DNA, 25 bp, Homo sapien
gttttctcaatgaattgaattcctt

SEQ ID NO: 5307254 - DNA, 25 bp, Homo sapien
gaattgaattccttgagtgaaggca

SEQ ID NO: 5307255 - DNA, 25 bp, Homo sapien
gaattccttgagtgaaggcacacat

SEQ ID NO: 5307256 - DNA, 25 bp, Homo sapien
aggttttctcaatgaattgaattcc

SEQ ID NO: 5307257 - DNA, 25 bp, Homo sapien
gattagttgtcacagaaacatttga

SEQ ID NO: 5307258 - DNA, 25 bp, Homo sapien
tagttgtcacagaaacatttgagct

SEQ ID NO: 5307259 - DNA, 25 bp, Homo sapien
ttagttgtcacagaaacatttgagc

SEQ ID NO: 5307260 - DNA, 25 bp, Homo sapien
tggattagttgtcacagaaacattt

SEQ ID NO: 5307261 - DNA, 25 bp, Homo sapien
tttttgagacacagtttcactctgc

SEQ ID NO: 5307262 - DNA, 25 bp, Homo sapien
tttgagacacagtttcactctgccg

SEQ ID NO: 5307263 - DNA, 25 bp, Homo sapien
tgagacacagtttcactctgccgcc

SEQ ID NO: 5307264 - DNA, 25 bp, Homo sapien
ctcactgcaacctcagcctcccaga

SEQ ID NO: 5307265 - DNA, 25 bp, Homo sapien
tacaagaatctcactgcaatatttt

SEQ ID NO: 5307266 - DNA, 25 bp, Homo sapien
cacaagtgaaattcagtccgtagaa

SEQ ID NO: 5307267 - DNA, 25 bp, Homo sapien
aattcagtccgtagaactcattgac

SEQ ID NO: 5307268 - DNA, 25 bp, Homo sapien
gaactcattgactacaagaatctca

SEQ ID NO: 5307269 - DNA, 25 bp, Homo sapien
aaatgaaattcagtaggctctggca

SEQ ID NO: 5307270 - DNA, 25 bp, Homo sapien
aatgaaattcagtaggctctggcaa

SEQ ID NO: 5307271 - DNA, 25 bp, Homo sapien
gaaattcagtaggctctggcaatag

SEQ ID NO: 5307272 - DNA, 25 bp, Homo sapien
tgaaattcagtaggctctggcaata

SEQ ID NO: 5307273 - DNA, 25 bp, Homo sapien
cagaaagttgaaggtaccaacgtag

SEQ ID NO: 5307274 - DNA, 25 bp, Homo sapien
tgaacagttcaaggtctaaggcaat

SEQ ID NO: 5307275 - DNA, 25 bp, Homo sapien
ttcacactcaacagtaccaggtcag

SEQ ID NO: 5307276 - DNA, 25 bp, Homo sapien
cctgattcccgataaaaaagacatt

SEQ ID NO: 5307277 - DNA, 25 bp, Homo sapien
tatcatgtgggctgtgagtttttcc

SEQ ID NO: 5307278 - DNA, 25 bp, Homo sapien
aaatatccaaatcgggcaacctcag

SEQ ID NO: 5307279 - DNA, 25 bp, Homo sapien
caacctcaggatgtaagcccagcgt

SEQ ID NO: 5307280 - DNA, 25 bp, Homo sapien
tggacgataccaagtagcacaagag

SEQ ID NO: 5307281 - DNA, 25 bp, Homo sapien
gacagcagagccactacactgttga

SEQ ID NO: 5307282 - DNA, 25 bp, Homo sapien
gttcccattggctgcaactcattgg

SEQ ID NO: 5307283 - DNA, 25 bp, Homo sapien
caggcttgttgaactctacaggcat

SEQ ID NO: 5307284 - DNA, 25 bp, Homo sapien
caactaaccgcagtaagcaggcttg

SEQ ID NO: 5307285 - DNA, 25 bp, Homo sapien
attaaattacttagacaatggtcac

SEQ ID NO: 5307286 - DNA, 25 bp, Homo sapien
gaattctaatagcatgtcccatgat

SEQ ID NO: 5307287 - DNA, 25 bp, Homo sapien
tgttgtgtcttgaattctaatagca

SEQ ID NO: 5307288 - DNA, 25 bp, Homo sapien
gaattcacctcccattttatgaatt

SEQ ID NO: 5307289 - DNA, 25 bp, Homo sapien
atgatgactgatataaacctctact

SEQ ID NO: 5307290 - DNA, 25 bp, Homo sapien
gacgtgcagtgcataggccagcatc

SEQ ID NO: 5307291 - DNA, 25 bp, Homo sapien
tcatctgccacttctggtagaggcc

SEQ ID NO: 5307292 - DNA, 25 bp, Homo sapien
tgaaaatcatggtggcaacaacgct

SEQ ID NO: 5307293 - DNA, 25 bp, Homo sapien
tggtcgctgacagctcgcagcacgg

SEQ ID NO: 5307294 - DNA, 25 bp, Homo sapien
tgaaggagacgcgtaatcactgcca

SEQ ID NO: 5307295 - DNA, 25 bp, Homo sapien
ttagcacattgcttcggacccgcag

SEQ ID NO: 5307296 - DNA, 25 bp, Homo sapien
tggcgcccacaaactggtaaaggag

SEQ ID NO: 5307297 - DNA, 25 bp, Homo sapien
taaaggagacctacgcggtcctgga

SEQ ID NO: 5307298 - DNA, 25 bp, Homo sapien
taggcagattctatcatctggactc

SEQ ID NO: 5307299 - DNA, 25 bp, Homo sapien
tgggtatccactgacgtcaggtcca

SEQ ID NO: 5307300 - DNA, 25 bp, Homo sapien
tcccgttccttgctttgggtatcca

SEQ ID NO: 5307301 - DNA, 25 bp, Homo sapien
aattgctgatttcttgtaggcagat

SEQ ID NO: 5307302 - DNA, 25 bp, Homo sapien
tcaaatccactagactggtgtcatc

SEQ ID NO: 5307303 - DNA, 25 bp, Homo sapien
ttgacccggccaaattgattccttg

SEQ ID NO: 5307304 - DNA, 25 bp, Homo sapien
ttctgatagtcatctctggcaagtt

SEQ ID NO: 5307305 - DNA, 25 bp, Homo sapien
tggcaagttcattgacccggccaaa

SEQ ID NO: 5307306 - DNA, 25 bp, Homo sapien
caaaagggtttgaatgttcaggaca

SEQ ID NO: 5307307 - DNA, 25 bp, Homo sapien
agaaaatcagctctccgaagctcag

SEQ ID NO: 5307308 - DNA, 25 bp, Homo sapien
aagggtaaccgcagtcattgaagaa

SEQ ID NO: 5307309 - DNA, 25 bp, Homo sapien
aagcatttccgctggcgtgccacag

SEQ ID NO: 5307310 - DNA, 25 bp, Homo sapien
caggcctgtggttggctcatcaaac

SEQ ID NO: 5307311 - DNA, 25 bp, Homo sapien
gagaaccacaattcggttcctgcga

SEQ ID NO: 5307312 - DNA, 25 bp, Homo sapien
ttcggttcctgcgagccagttccac

SEQ ID NO: 5307313 - DNA, 25 bp, Homo sapien
gttccaccaggaggacgacaatctg

SEQ ID NO: 5307314 - DNA, 25 bp, Homo sapien
aatcagtcggtctgccacatggctc

SEQ ID NO: 5307315 - DNA, 25 bp, Homo sapien
gctgggctgcgatggagacccggcg

SEQ ID NO: 5307316 - DNA, 25 bp, Homo sapien
cggcgccgctcacccgtggaaatgc

SEQ ID NO: 5307317 - DNA, 25 bp, Homo sapien
agctgtagttgccaatcagtcggtc

SEQ ID NO: 5307318 - DNA, 25 bp, Homo sapien
agcgtctcgcgcacggtgaggctgc

SEQ ID NO: 5307319 - DNA, 25 bp, Homo sapien
ggatggccagcagcgcggtgtagtg

SEQ ID NO: 5307320 - DNA, 25 bp, Homo sapien
ggaaggagccgggattgccgcggcg

SEQ ID NO: 5307321 - DNA, 25 bp, Homo sapien
tctcgcgcacggtgaggctgctcag

SEQ ID NO: 5307322 - DNA, 25 bp, Homo sapien
agcctcccggacatggcgtccagca

SEQ ID NO: 5307323 - DNA, 25 bp, Homo sapien
tccagcagcgtggttttcccggagc

SEQ ID NO: 5307324 - DNA, 25 bp, Homo sapien
ctgcaggacgtaggagaagcagtcc

SEQ ID NO: 5307325 - DNA, 25 bp, Homo sapien
agcgcccggccgttcacatacacct

SEQ ID NO: 5307326 - DNA, 25 bp, Homo sapien
ttagaatcctccttcccaagcttac

SEQ ID NO: 5307327 - DNA, 25 bp, Homo sapien
tttagaatcctccttcccaagctta

SEQ ID NO: 5307328 - DNA, 25 bp, Homo sapien
tcaagccaaatcctttttagaatcc

SEQ ID NO: 5307329 - DNA, 25 bp, Homo sapien
caagccaaatcctttttagaatcct

SEQ ID NO: 5307330 - DNA, 25 bp, Homo sapien
taggatgcacatgatctgcccgctc

SEQ ID NO: 5307331 - DNA, 25 bp, Homo sapien
cactgctgccggcaagatgtgatgt

SEQ ID NO: 5307332 - DNA, 25 bp, Homo sapien
tacaaggagacatctttgaggatct

SEQ ID NO: 5307333 - DNA, 25 bp, Homo sapien
ccgctctccacgtacaaggagacat

SEQ ID NO: 5307334 - DNA, 25 bp, Homo sapien
ggacaggctcctaacgtgtttcagt

SEQ ID NO: 5307335 - DNA, 25 bp, Homo sapien
aatgtcctgtccgtttggctgcgag

SEQ ID NO: 5307336 - DNA, 25 bp, Homo sapien
cactaaagagggagcccgaagtgcc

SEQ ID NO: 5307337 - DNA, 25 bp, Homo sapien
tagcgactgaggctgtctgccacgt

SEQ ID NO: 5307338 - DNA, 25 bp, Homo sapien
taggaggcatggaggatgcccaggc

SEQ ID NO: 5307339 - DNA, 25 bp, Homo sapien
cttggagacccatggaccctccggg

SEQ ID NO: 5307340 - DNA, 25 bp, Homo sapien
accctccgggggtcaaagatgagag

SEQ ID NO: 5307341 - DNA, 25 bp, Homo sapien
tttacttggagacccatggaccctc

SEQ ID NO: 5307342 - DNA, 25 bp, Homo sapien
ctgtttacttggagacccatggacc

SEQ ID NO: 5307343 - DNA, 25 bp, Homo sapien
accccggagtcccttgggacagcag

SEQ ID NO: 5307344 - DNA, 25 bp, Homo sapien
aaagctgggcaaattttctggtggc

SEQ ID NO: 5307345 - DNA, 25 bp, Homo sapien
gagcccgtggcagactgccctgcct

SEQ ID NO: 5307346 - DNA, 25 bp, Homo sapien
cttggccacggagaccattatctga

SEQ ID NO: 5307347 - DNA, 25 bp, Homo sapien
gactgtgacattcccagggtcacgg

SEQ ID NO: 5307348 - DNA, 25 bp, Homo sapien
tgatgtcaatgaccatcggcttcct

SEQ ID NO: 5307349 - DNA, 25 bp, Homo sapien
gatttccaacgacttccgagacctg

SEQ ID NO: 5307350 - DNA, 25 bp, Homo sapien
aaatgaggcttatggagactgtgac

SEQ ID NO: 5307351 - DNA, 25 bp, Homo sapien
ctagactgtgcaggaattgttggaa

SEQ ID NO: 5307352 - DNA, 25 bp, Homo sapien
tagactgtgcaggaattgttggaac

SEQ ID NO: 5307353 - DNA, 25 bp, Homo sapien
acactgccacgccttctcctgtatg

SEQ ID NO: 5307354 - DNA, 25 bp, Homo sapien
actgccacgccttctcctgtatgga

SEQ ID NO: 5307355 - DNA, 25 bp, Homo sapien
cttctcctgtatggacgtcctgcct

SEQ ID NO: 5307356 - DNA, 25 bp, Homo sapien
tctcctgtatggacgtcctgcctac

SEQ ID NO: 5307357 - DNA, 25 bp, Homo sapien
ctgtggtcccctaatggcgttaggc

SEQ ID NO: 5307358 - DNA, 25 bp, Homo sapien
cactgtggtcccctaatggcgttag

SEQ ID NO: 5307359 - DNA, 25 bp, Homo sapien
cttgtcactgtggtcccctaatggc

SEQ ID NO: 5307360 - DNA, 25 bp, Homo sapien
tgtcactgtggtcccctaatggcgt

SEQ ID NO: 5307361 - DNA, 25 bp, Homo sapien
aggccctgaggaagcgtgcaaggaa

SEQ ID NO: 5307362 - DNA, 25 bp, Homo sapien
ggaccaggggttcctcatagtggct

SEQ ID NO: 5307363 - DNA, 25 bp, Homo sapien
ctcatagtggcttagcacagcatac

SEQ ID NO: 5307364 - DNA, 25 bp, Homo sapien
tacagaccactttcctttggcccaa

SEQ ID NO: 5307365 - DNA, 25 bp, Homo sapien
ggcctttgcttgtttgcaaaatata

SEQ ID NO: 5307366 - DNA, 25 bp, Homo sapien
gatgaaatattttgttggttggcct

SEQ ID NO: 5307367 - DNA, 25 bp, Homo sapien
ggaatgcggggaaagtgatgaaata

SEQ ID NO: 5307368 - DNA, 25 bp, Homo sapien
tgcaaaatatatccaatgctcacac

SEQ ID NO: 5307369 - DNA, 25 bp, Homo sapien
acaagaaaaacagaacgtggtggct

SEQ ID NO: 5307370 - DNA, 25 bp, Homo sapien
cagaacgtggtggctcatgcctgta

SEQ ID NO: 5307371 - DNA, 25 bp, Homo sapien
acaacaagaaaaacagaacgtggtg

SEQ ID NO: 5307372 - DNA, 25 bp, Homo sapien
gaacgtggtggctcatgcctgtaat

SEQ ID NO: 5307373 - DNA, 25 bp, Homo sapien
caacaggaaagcgataaattaccgt

SEQ ID NO: 5307374 - DNA, 25 bp, Homo sapien
gctttgtaaagtccacgggcctgaa

SEQ ID NO: 5307375 - DNA, 25 bp, Homo sapien
tgcagctattagttcggccctcctt

SEQ ID NO: 5307376 - DNA, 25 bp, Homo sapien
cgtgattttgtactccctgcagcta

SEQ ID NO: 5307377 - DNA, 25 bp, Homo sapien
ctctgctcaagcagccgtggaagcc

SEQ ID NO: 5307378 - DNA, 25 bp, Homo sapien
tgctctgctcaagcagccgtggaag

SEQ ID NO: 5307379 - DNA, 25 bp, Homo sapien
gctctgctcaagcagccgtggaagc

SEQ ID NO: 5307380 - DNA, 25 bp, Homo sapien
ctgctctgctcaagcagccgtggaa

SEQ ID NO: 5307381 - DNA, 25 bp, Homo sapien
ggaaagccgcactatgtccactggg

SEQ ID NO: 5307382 - DNA, 25 bp, Homo sapien
tctgggcagtgctcaagggaaagcc

SEQ ID NO: 5307383 - DNA, 25 bp, Homo sapien
taccagagtccatatacagggccag

SEQ ID NO: 5307384 - DNA, 25 bp, Homo sapien
caaggcaaggtctcccctgatgtga

SEQ ID NO: 5307385 - DNA, 25 bp, Homo sapien
tgaccaagcacaagtaacaggccct

SEQ ID NO: 5307386 - DNA, 25 bp, Homo sapien
tatgaacagaggtgcttgaagccac

SEQ ID NO: 5307387 - DNA, 25 bp, Homo sapien
tataaagtaacaagcctagggcaga

SEQ ID NO: 5307388 - DNA, 25 bp, Homo sapien
tgaccgagactcaatttcagagacg

SEQ ID NO: 5307389 - DNA, 25 bp, Homo sapien
taaccaagtgcacagagttatggtc

SEQ ID NO: 5307390 - DNA, 25 bp, Homo sapien
aacagagcagggaaaccaaagagcc

SEQ ID NO: 5307391 - DNA, 25 bp, Homo sapien
aacactatcgatttttcccagagaa

SEQ ID NO: 5307392 - DNA, 25 bp, Homo sapien
cctgaaaaagtatggcttcacacag

SEQ ID NO: 5307393 - DNA, 25 bp, Homo sapien
caaaacaaagtatcgcctggttatt

SEQ ID NO: 5307394 - DNA, 25 bp, Homo sapien
tccctcaattttcttagctgctgtg

SEQ ID NO: 5307395 - DNA, 25 bp, Homo sapien
tacttcagcaaagatgcgtaacgct

SEQ ID NO: 5307396 - DNA, 25 bp, Homo sapien
cagtgctttagcagatgtgacatct

SEQ ID NO: 5307397 - DNA, 25 bp, Homo sapien
cgctttagaaacagatcatccaatt

SEQ ID NO: 5307398 - DNA, 25 bp, Homo sapien
ttctttgcagtcaaatgttcataca

SEQ ID NO: 5307399 - DNA, 25 bp, Homo sapien
tcaagataatccaggaactgttgtg

SEQ ID NO: 5307400 - DNA, 25 bp, Homo sapien
tcaacatcaagatcatcagctcaac

SEQ ID NO: 5307401 - DNA, 25 bp, Homo sapien
catgtcaattatgtagaaatctaca

SEQ ID NO: 5307402 - DNA, 25 bp, Homo sapien
tgttgtggagagggacatgtcaatt

SEQ ID NO: 5307403 - DNA, 25 bp, Homo sapien
tgatattgtcaaccgcaactccggc

SEQ ID NO: 5307404 - DNA, 25 bp, Homo sapien
ggaagctgctccgaaaattctggca

SEQ ID NO: 5307405 - DNA, 25 bp, Homo sapien
tgaggagctgaaccctttaagggct

SEQ ID NO: 5307406 - DNA, 25 bp, Homo sapien
gacagaggtgagacgttcagcaatc

SEQ ID NO: 5307407 - DNA, 25 bp, Homo sapien
catgagggaattgtatgcttcttcc

SEQ ID NO: 5307408 - DNA, 25 bp, Homo sapien
tcatgagggaattgtatgcttcttc

SEQ ID NO: 5307409 - DNA, 25 bp, Homo sapien
ttaattcaggaatcaattctaacac

SEQ ID NO: 5307410 - DNA, 25 bp, Homo sapien
tcaagtggtgaccataccaagaagt

SEQ ID NO: 5307411 - DNA, 25 bp, Homo sapien
tatgaaaaccgcaaattaacagtga

SEQ ID NO: 5307412 - DNA, 25 bp, Homo sapien
tttaggtgccacaactggttgatga

SEQ ID NO: 5307413 - DNA, 25 bp, Homo sapien
tcccaagggtagagagataacaacc

SEQ ID NO: 5307414 - DNA, 25 bp, Homo sapien
cgttactggataaacccatgatgga

SEQ ID NO: 5307415 - DNA, 25 bp, Homo sapien
tggaacactgttaacaggcatctta

SEQ ID NO: 5307416 - DNA, 25 bp, Homo sapien
tctgctgagtatttcccgccctact

SEQ ID NO: 5307417 - DNA, 25 bp, Homo sapien
tcccatctcaccaagaggagcaaaa

SEQ ID NO: 5307418 - DNA, 25 bp, Homo sapien
tttgtaagcaggtaaagcacagtac

SEQ ID NO: 5307419 - DNA, 25 bp, Homo sapien
catttccagtacagctaacagacga

SEQ ID NO: 5307420 - DNA, 25 bp, Homo sapien
gggctctcaatgcatacctgtgtaa

SEQ ID NO: 5307421 - DNA, 25 bp, Homo sapien
caatacttctgagcaaggcacgtac

SEQ ID NO: 5307422 - DNA, 25 bp, Homo sapien
caaaatcggggtttgttcagcaatt

SEQ ID NO: 5307423 - DNA, 25 bp, Homo sapien
tcggggtttgttcagcaattgcacc

SEQ ID NO: 5307424 - DNA, 25 bp, Homo sapien
gggtttgttcagcaattgcaccaca

SEQ ID NO: 5307425 - DNA, 25 bp, Homo sapien
gtttgttcagcaattgcaccacatc

SEQ ID NO: 5307426 - DNA, 25 bp, Homo sapien
tacgatcagaaattggtcccacgcc

SEQ ID NO: 5307427 - DNA, 25 bp, Homo sapien
taaaaactggaggtcaagcacatgg

SEQ ID NO: 5307428 - DNA, 25 bp, Homo sapien
tacacaaacacagccgttggcggga

SEQ ID NO: 5307429 - DNA, 25 bp, Homo sapien
cagccagcgcttgagaaagagacca

SEQ ID NO: 5307430 - DNA, 25 bp, Homo sapien
tggccaatctctccgccatgatgct

SEQ ID NO: 5307431 - DNA, 25 bp, Homo sapien
aatcagtgacaggtttataaattgc

SEQ ID NO: 5307432 - DNA, 25 bp, Homo sapien
gcctgcatccacaagttgaaggaaa

SEQ ID NO: 5307433 - DNA, 25 bp, Homo sapien
gcatcatccaccttgcctgcatcca

SEQ ID NO: 5307434 - DNA, 25 bp, Homo sapien
tctttcattagaacagtggtataac

SEQ ID NO: 5307435 - DNA, 25 bp, Homo sapien
aaaaatctttcattagaacagtggt

SEQ ID NO: 5307436 - DNA, 25 bp, Homo sapien
tcattagaacagtggtataactcac

SEQ ID NO: 5307437 - DNA, 25 bp, Homo sapien
aatctttcattagaacagtggtata

SEQ ID NO: 5307438 - DNA, 25 bp, Homo sapien
tctctgaagtaagcatattttcaat

SEQ ID NO: 5307439 - DNA, 25 bp, Homo sapien
taagtatgccaagccgaagtattgg

SEQ ID NO: 5307440 - DNA, 25 bp, Homo sapien
ttctgaataagtatgccaagccgaa

SEQ ID NO: 5307441 - DNA, 25 bp, Homo sapien
ttctattgcggcatctatgttatta

SEQ ID NO: 5307442 - DNA, 25 bp, Homo sapien
cacgggtcactgctaacctagaagg

SEQ ID NO: 5307443 - DNA, 25 bp, Homo sapien
ccaatgcctggatgacacgggtcac

SEQ ID NO: 5307444 - DNA, 25 bp, Homo sapien
tgttttcaacatcacccttcatggc

SEQ ID NO: 5307445 - DNA, 25 bp, Homo sapien
ggagtcttcgagtccatttaacatc

SEQ ID NO: 5307446 - DNA, 25 bp, Homo sapien
tgatccaatactgttttcagtgttg

SEQ ID NO: 5307447 - DNA, 25 bp, Homo sapien
gctgctgatccaatactgttttcag

SEQ ID NO: 5307448 - DNA, 25 bp, Homo sapien
ctgctgctgatccaatactgttttc

SEQ ID NO: 5307449 - DNA, 25 bp, Homo sapien
tgctgatccaatactgttttcagtg

SEQ ID NO: 5307450 - DNA, 25 bp, Homo sapien
taaagggtaccaatccagctgaaga

SEQ ID NO: 5307451 - DNA, 25 bp, Homo sapien
tataagatattagaggcccgaggaa

SEQ ID NO: 5307452 - DNA, 25 bp, Homo sapien
caagaatattgtcagctagggaggc

SEQ ID NO: 5307453 - DNA, 25 bp, Homo sapien
cagagcttccgtctatgagtgcgcg

SEQ ID NO: 5307454 - DNA, 25 bp, Homo sapien
gtgtgaagcccttgatgtgggtctc

SEQ ID NO: 5307455 - DNA, 25 bp, Homo sapien
ctttcaaataatcccgcctaacttg

SEQ ID NO: 5307456 - DNA, 25 bp, Homo sapien
gcagcatcgttcagtgtgaagccct

SEQ ID NO: 5307457 - DNA, 25 bp, Homo sapien
taacttgcgttatgatgaggcggct

SEQ ID NO: 5307458 - DNA, 25 bp, Homo sapien
taataaatggttgagcaccaaggtg

SEQ ID NO: 5307459 - DNA, 25 bp, Homo sapien
tattgctgcaaaatatcgacctgga

SEQ ID NO: 5307460 - DNA, 25 bp, Homo sapien
cgacctggagacagcttttgtgtta

SEQ ID NO: 5307461 - DNA, 25 bp, Homo sapien
actgttcgtatgttaaaaatattgc

SEQ ID NO: 5307462 - DNA, 25 bp, Homo sapien
ggtagctgaggccaatcaagcaatt

SEQ ID NO: 5307463 - DNA, 25 bp, Homo sapien
tctaagttcaaagtccatggtgtct

SEQ ID NO: 5307464 - DNA, 25 bp, Homo sapien
gctcccaccacaaaaggtacatgga

SEQ ID NO: 5307465 - DNA, 25 bp, Homo sapien
catacggaagaagaactaaggatca

SEQ ID NO: 5307466 - DNA, 25 bp, Homo sapien
tgttttgctcttttgcattcaggaa

SEQ ID NO: 5307467 - DNA, 25 bp, Homo sapien
gagattgctgtaggtttcagcatta

SEQ ID NO: 5307468 - DNA, 25 bp, Homo sapien
gtaggtttcagcattaaacacaatg

SEQ ID NO: 5307469 - DNA, 25 bp, Homo sapien
ttccattgcttgtgtaaaataatct

SEQ ID NO: 5307470 - DNA, 25 bp, Homo sapien
tcaacttacaagctcataacagagg

SEQ ID NO: 5307471 - DNA, 25 bp, Homo sapien
gatattgctggatcacttcaacaca

SEQ ID NO: 5307472 - DNA, 25 bp, Homo sapien
ggtaaactatcatgaaccatccttg

SEQ ID NO: 5307473 - DNA, 25 bp, Homo sapien
taacagagggttaaagacggtcata

SEQ ID NO: 5307474 - DNA, 25 bp, Homo sapien
taagtcctatctctatcctagagca

SEQ ID NO: 5307475 - DNA, 25 bp, Homo sapien
agcacttctaattggttgggcttac

SEQ ID NO: 5307476 - DNA, 25 bp, Homo sapien
tctatcctagagcacttctaattgg

SEQ ID NO: 5307477 - DNA, 25 bp, Homo sapien
ttaagtcctatctctatcctagagc

SEQ ID NO: 5307478 - DNA, 25 bp, Homo sapien
cactgctattagaaagaagaccacc

SEQ ID NO: 5307479 - DNA, 25 bp, Homo sapien
accccacactgctattagaaagaag

SEQ ID NO: 5307480 - DNA, 25 bp, Homo sapien
acactgctattagaaagaagaccac

SEQ ID NO: 5307481 - DNA, 25 bp, Homo sapien
tgctattagaaagaagaccaccccc

SEQ ID NO: 5307482 - DNA, 25 bp, Homo sapien
ttttttggttcaatcggcaggcaat

SEQ ID NO: 5307483 - DNA, 25 bp, Homo sapien
tgaggctgacgaagaattcagggaa

SEQ ID NO: 5307484 - DNA, 25 bp, Homo sapien
tgtggttgaggctgacgaagaattc

SEQ ID NO: 5307485 - DNA, 25 bp, Homo sapien
tcggcaggcaatcaatatatctttc

SEQ ID NO: 5307486 - DNA, 25 bp, Homo sapien
caggtacgtcaaacggaacttcctg

SEQ ID NO: 5307487 - DNA, 25 bp, Homo sapien
cttcctggttaccctctctaaggat

SEQ ID NO: 5307488 - DNA, 25 bp, Homo sapien
cttttcacgaggaataacattttct

SEQ ID NO: 5307489 - DNA, 25 bp, Homo sapien
cagactgcatcagctctttgccagt

SEQ ID NO: 5307490 - DNA, 25 bp, Homo sapien
aaatgattgcaagtgtgtaattctc

SEQ ID NO: 5307491 - DNA, 25 bp, Homo sapien
ggctgctgccgtatagtacacagct

SEQ ID NO: 5307492 - DNA, 25 bp, Homo sapien
cagctgtggtgtgtactaaaatgat

SEQ ID NO: 5307493 - DNA, 25 bp, Homo sapien
ttacaagtgacaaatctacaaacct

SEQ ID NO: 5307494 - DNA, 25 bp, Homo sapien
tacttctctataggattccactggc

SEQ ID NO: 5307495 - DNA, 25 bp, Homo sapien
tatccatttataacacggcagaagg

SEQ ID NO: 5307496 - DNA, 25 bp, Homo sapien
tagggctatcataaccagattatcc

SEQ ID NO: 5307497 - DNA, 25 bp, Homo sapien
ggtaggaagtatacaaatgtggtta

SEQ ID NO: 5307498 - DNA, 25 bp, Homo sapien
tgcaatttgaggaccaactgcctaa

SEQ ID NO: 5307499 - DNA, 25 bp, Homo sapien
taccaaactcagcattgtgtgcaag

SEQ ID NO: 5307500 - DNA, 25 bp, Homo sapien
tagagtggaatgttagtgctcaaac

SEQ ID NO: 5307501 - DNA, 25 bp, Homo sapien
gatcatcgttcaagccaaagtctta

SEQ ID NO: 5307502 - DNA, 25 bp, Homo sapien
gattgtagtacatctggtctctatc

SEQ ID NO: 5307503 - DNA, 25 bp, Homo sapien
ttttagcagattgtagtacatctgg

SEQ ID NO: 5307504 - DNA, 25 bp, Homo sapien
cagattgtagtacatctggtctcta

SEQ ID NO: 5307505 - DNA, 25 bp, Homo sapien
ttagcagattgtagtacatctggtc

SEQ ID NO: 5307506 - DNA, 25 bp, Homo sapien
taaaagtaagattaagagatagatc

SEQ ID NO: 5307507 - DNA, 25 bp, Homo sapien
aagtaagattaagagatagatctac

SEQ ID NO: 5307508 - DNA, 25 bp, Homo sapien
cttaaaagtaagattaagagataga

SEQ ID NO: 5307509 - DNA, 25 bp, Homo sapien
aaaagtaagattaagagatagatct

SEQ ID NO: 5307510 - DNA, 25 bp, Homo sapien
cagatcgagctctaatccctggagt

SEQ ID NO: 5307511 - DNA, 25 bp, Homo sapien
gccttgcagatcgagctctaatccc

SEQ ID NO: 5307512 - DNA, 25 bp, Homo sapien
ctgaagccttgcagatcgagctcta

SEQ ID NO: 5307513 - DNA, 25 bp, Homo sapien
tgcagatcgagctctaatccctgga

SEQ ID NO: 5307514 - DNA, 25 bp, Homo sapien
tcatttacacgctctctcttgaaca

SEQ ID NO: 5307515 - DNA, 25 bp, Homo sapien
aagaaaatgctttgcgaacttcaca

SEQ ID NO: 5307516 - DNA, 25 bp, Homo sapien
caataataaaccattggctttcgtt

SEQ ID NO: 5307517 - DNA, 25 bp, Homo sapien
tcaatgttacacaaagtaacagttg

SEQ ID NO: 5307518 - DNA, 25 bp, Homo sapien
aaattatccacttgaccaggtgtta

SEQ ID NO: 5307519 - DNA, 25 bp, Homo sapien
aaacctacatgtaagtggacctaca

SEQ ID NO: 5307520 - DNA, 25 bp, Homo sapien
gaaaatatggctgagcaagtccaat

SEQ ID NO: 5307521 - DNA, 25 bp, Homo sapien
ttatccccatagctagcacagaaca

SEQ ID NO: 5307522 - DNA, 25 bp, Homo sapien
ccttaaaggtggcattggcagattt

SEQ ID NO: 5307523 - DNA, 25 bp, Homo sapien
taaagggaggaacctctttgctgcc

SEQ ID NO: 5307524 - DNA, 25 bp, Homo sapien
tgacctctacacagtaaagaatggc

SEQ ID NO: 5307525 - DNA, 25 bp, Homo sapien
gagaatctcctgtcatgaaccctta

SEQ ID NO: 5307526 - DNA, 25 bp, Homo sapien
taaatgccaaacagttgcagacagc

SEQ ID NO: 5307527 - DNA, 25 bp, Homo sapien
taaataggccaggtttgtcacctac

SEQ ID NO: 5307528 - DNA, 25 bp, Homo sapien
taaatcttgagcatggtctgcagca

SEQ ID NO: 5307529 - DNA, 25 bp, Homo sapien
aatgggtccatcttctgcggaatgt

SEQ ID NO: 5307530 - DNA, 25 bp, Homo sapien
tcaccttgttcttggctcacaaagt

SEQ ID NO: 5307531 - DNA, 25 bp, Homo sapien
tttcaccttgttcttggctcacaaa

SEQ ID NO: 5307532 - DNA, 25 bp, Homo sapien
aaagaagagatcatagagcatcacc

SEQ ID NO: 5307533 - DNA, 25 bp, Homo sapien
ggcaaagaagagatcatagagcatc

SEQ ID NO: 5307534 - DNA, 25 bp, Homo sapien
ctcaagagcagtagataggtcgccc

SEQ ID NO: 5307535 - DNA, 25 bp, Homo sapien
tcatagcagtcaatggcgacctcaa

SEQ ID NO: 5307536 - DNA, 25 bp, Homo sapien
gaattagatcagtctcgcctttctc

SEQ ID NO: 5307537 - DNA, 25 bp, Homo sapien
tacacaagacatcatgaatccttgg

SEQ ID NO: 5307538 - DNA, 25 bp, Homo sapien
gatatttctgcgtttcagtcaaatt

SEQ ID NO: 5307539 - DNA, 25 bp, Homo sapien
gcgtttcagtcaaattcagctctcc

SEQ ID NO: 5307540 - DNA, 25 bp, Homo sapien
gacaacatccacactacatccacag

SEQ ID NO: 5307541 - DNA, 25 bp, Homo sapien
tttctgcgtttcagtcaaattcagc

SEQ ID NO: 5307542 - DNA, 25 bp, Homo sapien
taaagctgcgccatttagcatgtgg

SEQ ID NO: 5307543 - DNA, 25 bp, Homo sapien
tgctaaccctagagtcacgatggct

SEQ ID NO: 5307544 - DNA, 25 bp, Homo sapien
cgatggcttcatgcaactgttttac

SEQ ID NO: 5307545 - DNA, 25 bp, Homo sapien
caagtgtacagtgaccaatgggaaa

SEQ ID NO: 5307546 - DNA, 25 bp, Homo sapien
caatactcttacaaggcctacatac

SEQ ID NO: 5307547 - DNA, 25 bp, Homo sapien
gcctacatacttgccggtgtcaagg

SEQ ID NO: 5307548 - DNA, 25 bp, Homo sapien
gacagcagatgaatctaagcggtca

SEQ ID NO: 5307549 - DNA, 25 bp, Homo sapien
gcttgccatgctttgccaatactct

SEQ ID NO: 5307550 - DNA, 25 bp, Homo sapien
tctactttatcatgtcgacagcata

SEQ ID NO: 5307551 - DNA, 25 bp, Homo sapien
tctttcaagttcaaggcatcttcta

SEQ ID NO: 5307552 - DNA, 25 bp, Homo sapien
taaccatgtcggattcatattttgc

SEQ ID NO: 5307553 - DNA, 25 bp, Homo sapien
aatttattaaagctgcatagccacc

SEQ ID NO: 5307554 - DNA, 25 bp, Homo sapien
taatatgagttgctttaggacatct

SEQ ID NO: 5307555 - DNA, 25 bp, Homo sapien
tgtggactccaattcagatgatgta

SEQ ID NO: 5307556 - DNA, 25 bp, Homo sapien
ctcttctgaacaaagcactaatatg

SEQ ID NO: 5307557 - DNA, 25 bp, Homo sapien
gctttaggacatctcttataggttg

SEQ ID NO: 5307558 - DNA, 25 bp, Homo sapien
tcttactctcaaccaacaagtgagc

SEQ ID NO: 5307559 - DNA, 25 bp, Homo sapien
tactctcaaccaacaagtgagcatc

SEQ ID NO: 5307560 - DNA, 25 bp, Homo sapien
ttactctcaaccaacaagtgagcat

SEQ ID NO: 5307561 - DNA, 25 bp, Homo sapien
cttactctcaaccaacaagtgagca

SEQ ID NO: 5307562 - DNA, 25 bp, Homo sapien
ctttccaggagattacgaatgcctc

SEQ ID NO: 5307563 - DNA, 25 bp, Homo sapien
gaatgcctctgtagatattttcagg

SEQ ID NO: 5307564 - DNA, 25 bp, Homo sapien
aggaacatggtagctttccaggaga

SEQ ID NO: 5307565 - DNA, 25 bp, Homo sapien
caggagattacgaatgcctctgtag

SEQ ID NO: 5307566 - DNA, 25 bp, Homo sapien
gatggaagtattgtctcaaatgctc

SEQ ID NO: 5307567 - DNA, 25 bp, Homo sapien
cagctgatggaagtattgtctcaaa

SEQ ID NO: 5307568 - DNA, 25 bp, Homo sapien
ctgatggaagtattgtctcaaatgc

SEQ ID NO: 5307569 - DNA, 25 bp, Homo sapien
gaagtattgtctcaaatgctcctcc

SEQ ID NO: 5307570 - DNA, 25 bp, Homo sapien
tcatgctgtcaatcaagttataaag

SEQ ID NO: 5307571 - DNA, 25 bp, Homo sapien
caatcaagttataaagaaaatagcc

SEQ ID NO: 5307572 - DNA, 25 bp, Homo sapien
ctctgagtcactcatgctgtcaatc

SEQ ID NO: 5307573 - DNA, 25 bp, Homo sapien
gagtcactcatgctgtcaatcaagt

SEQ ID NO: 5307574 - DNA, 25 bp, Homo sapien
cgaggctcctggcaataacgtccat

SEQ ID NO: 5307575 - DNA, 25 bp, Homo sapien
taacgtccatccttgtacaacaatt

SEQ ID NO: 5307576 - DNA, 25 bp, Homo sapien
cctcgaggctcctggcaataacgtc

SEQ ID NO: 5307577 - DNA, 25 bp, Homo sapien
tcctggcaataacgtccatccttgt

SEQ ID NO: 5307578 - DNA, 25 bp, Homo sapien
gctccaaagatttatattcatagac

SEQ ID NO: 5307579 - DNA, 25 bp, Homo sapien
cgctccaaagatttatattcataga

SEQ ID NO: 5307580 - DNA, 25 bp, Homo sapien
tcgctccaaagatttatattcatag

SEQ ID NO: 5307581 - DNA, 25 bp, Homo sapien
ctcgctccaaagatttatattcata

SEQ ID NO: 5307582 - DNA, 25 bp, Homo sapien
taaacctttcaatggctcgaagcca

SEQ ID NO: 5307583 - DNA, 25 bp, Homo sapien
tgaatatctgtcaatcttaacttca

SEQ ID NO: 5307584 - DNA, 25 bp, Homo sapien
ctcccctttgaatatctgtcaatct

SEQ ID NO: 5307585 - DNA, 25 bp, Homo sapien
ccatgtgactcaaggtccaaatatc

SEQ ID NO: 5307586 - DNA, 25 bp, Homo sapien
gagactactcataaagacccctggg

SEQ ID NO: 5307587 - DNA, 25 bp, Homo sapien
tatgttcctggaaggaatccgctta

SEQ ID NO: 5307588 - DNA, 25 bp, Homo sapien
caatgcctcggcctgaaaaaccctt

SEQ ID NO: 5307589 - DNA, 25 bp, Homo sapien
gttacacaagtgctctgaattaggc

SEQ ID NO: 5307590 - DNA, 25 bp, Homo sapien
gagaaatatgctgaaagatccagtg

SEQ ID NO: 5307591 - DNA, 25 bp, Homo sapien
tcattatgcatacaacttcaagtgg

SEQ ID NO: 5307592 - DNA, 25 bp, Homo sapien
caaagggtattacagaggatgggca

SEQ ID NO: 5307593 - DNA, 25 bp, Homo sapien
ggtatgagagaaagtagacacggca

SEQ ID NO: 5307594 - DNA, 25 bp, Homo sapien
tcctgaagcctagcagtaggctact

SEQ ID NO: 5307595 - DNA, 25 bp, Homo sapien
gcagtaggctacttcttatagactg

SEQ ID NO: 5307596 - DNA, 25 bp, Homo sapien
tcttatagactgcagcgagatgggc

SEQ ID NO: 5307597 - DNA, 25 bp, Homo sapien
cagcgagatgggcaatgtatttgat

SEQ ID NO: 5307598 - DNA, 25 bp, Homo sapien
agtcagcctggtacacacactgagg

SEQ ID NO: 5307599 - DNA, 25 bp, Homo sapien
gagtcagcctggtacacacactgag

SEQ ID NO: 5307600 - DNA, 25 bp, Homo sapien
gcctgaaaaatcaagaggttgacaa

SEQ ID NO: 5307601 - DNA, 25 bp, Homo sapien
gaatggatgatatgataaaaggaaa

SEQ ID NO: 5307602 - DNA, 25 bp, Homo sapien
gcagctctcatggatccacctcgtg

SEQ ID NO: 5307603 - DNA, 25 bp, Homo sapien
tggatccacctcgtgagcccagatt

SEQ ID NO: 5307604 - DNA, 25 bp, Homo sapien
tggttcaaatcactaaccttgggca

SEQ ID NO: 5307605 - DNA, 25 bp, Homo sapien
gcctttagtcatctatcaatggaga

SEQ ID NO: 5307606 - DNA, 25 bp, Homo sapien
gatgagcattataaagcacactagt

SEQ ID NO: 5307607 - DNA, 25 bp, Homo sapien
cccaagttaggtagtactatccctg

SEQ ID NO: 5307608 - DNA, 25 bp, Homo sapien
tgctttcattgcgtgaaccaccctg

SEQ ID NO: 5307609 - DNA, 25 bp, Homo sapien
cataaaccgttttatcagtctggct

SEQ ID NO: 5307610 - DNA, 25 bp, Homo sapien
gtctggctttaacaaaacatataaa

SEQ ID NO: 5307611 - DNA, 25 bp, Homo sapien
tataaagaatatccacgtcttcagg

SEQ ID NO: 5307612 - DNA, 25 bp, Homo sapien
tacaaagtctaagttcccatttgct

SEQ ID NO: 5307613 - DNA, 25 bp, Homo sapien
atgataatacaaagtctaagttccc

SEQ ID NO: 5307614 - DNA, 25 bp, Homo sapien
tttgctgcttcacttctcaatccag

SEQ ID NO: 5307615 - DNA, 25 bp, Homo sapien
aaagtctaagttcccatttgctgct

SEQ ID NO: 5307616 - DNA, 25 bp, Homo sapien
ctgtcccaatcaacatcttcatgtg

SEQ ID NO: 5307617 - DNA, 25 bp, Homo sapien
tgcactgtcccaatcaacatcttca

SEQ ID NO: 5307618 - DNA, 25 bp, Homo sapien
caatcaacatcttcatgtgcctctt

SEQ ID NO: 5307619 - DNA, 25 bp, Homo sapien
tccaatgcactgtcccaatcaacat

SEQ ID NO: 5307620 - DNA, 25 bp, Homo sapien
tggctcgtgctgagtttacactatc

SEQ ID NO: 5307621 - DNA, 25 bp, Homo sapien
gctcgtgctgagtttacactatcaa

SEQ ID NO: 5307622 - DNA, 25 bp, Homo sapien
ctcgtgctgagtttacactatcaaa

SEQ ID NO: 5307623 - DNA, 25 bp, Homo sapien
ggctcgtgctgagtttacactatca

SEQ ID NO: 5307624 - DNA, 25 bp, Homo sapien
tcaggatgtactcccaattcttgca

SEQ ID NO: 5307625 - DNA, 25 bp, Homo sapien
tcctgaaagtcaggccaactggcta

SEQ ID NO: 5307626 - DNA, 25 bp, Homo sapien
ccaactggctagagatgcattattc

SEQ ID NO: 5307627 - DNA, 25 bp, Homo sapien
cccagggatatagatccatattcat

SEQ ID NO: 5307628 - DNA, 25 bp, Homo sapien
gggatatagatccatattcattaca

SEQ ID NO: 5307629 - DNA, 25 bp, Homo sapien
tggtgatggctaaatttgcagccag

SEQ ID NO: 5307630 - DNA, 25 bp, Homo sapien
atatctttcttggaggttggtgatg

SEQ ID NO: 5307631 - DNA, 25 bp, Homo sapien
atctttcttggaggttggtgatggc

SEQ ID NO: 5307632 - DNA, 25 bp, Homo sapien
ctttcttggaggttggtgatggcta

SEQ ID NO: 5307633 - DNA, 25 bp, Homo sapien
tcacacctagacgtggaagctaagg

SEQ ID NO: 5307634 - DNA, 25 bp, Homo sapien
tcctttaaaccagaagacggctgta

SEQ ID NO: 5307635 - DNA, 25 bp, Homo sapien
ggacaatactaacatgcctgaagag

SEQ ID NO: 5307636 - DNA, 25 bp, Homo sapien
cagcaggctgtcaggtcatgagtac

SEQ ID NO: 5307637 - DNA, 25 bp, Homo sapien
taatgaaattcagatgaaagaaatc

SEQ ID NO: 5307638 - DNA, 25 bp, Homo sapien
aatgaaattaatgaaattcagatga

SEQ ID NO: 5307639 - DNA, 25 bp, Homo sapien
gaaattaatgaaattcagatgaaag

SEQ ID NO: 5307640 - DNA, 25 bp, Homo sapien
ttaatgaaattcagatgaaagaaat

SEQ ID NO: 5307641 - DNA, 25 bp, Homo sapien
tgcgtgcaaactgtcatactggctc

SEQ ID NO: 5307642 - DNA, 25 bp, Homo sapien
taatactcaggaataagtatgcttt

SEQ ID NO: 5307643 - DNA, 25 bp, Homo sapien
ggctctgggaaccattacaaatcgg

SEQ ID NO: 5307644 - DNA, 25 bp, Homo sapien
aagaatccaattagatgtgcgtgca

SEQ ID NO: 5307645 - DNA, 25 bp, Homo sapien
tggccagaaatagtgaggtctgata

SEQ ID NO: 5307646 - DNA, 25 bp, Homo sapien
tgaggtctgataggaaaaccttcct

SEQ ID NO: 5307647 - DNA, 25 bp, Homo sapien
gacgtccaactagcaatggccagaa

SEQ ID NO: 5307648 - DNA, 25 bp, Homo sapien
ttttccttccgacgtccaactagca

SEQ ID NO: 5307649 - DNA, 25 bp, Homo sapien
tggctttaactttaagaatgtagta

SEQ ID NO: 5307650 - DNA, 25 bp, Homo sapien
agtagtctgttagcttctccacagg

SEQ ID NO: 5307651 - DNA, 25 bp, Homo sapien
taaagcacaatggagggtgaactgc

SEQ ID NO: 5307652 - DNA, 25 bp, Homo sapien
cttcttacagtagtctgttagcttc

SEQ ID NO: 5307653 - DNA, 25 bp, Homo sapien
agttttattggcgagtaaagcacaa

SEQ ID NO: 5307654 - DNA, 25 bp, Homo sapien
tattctaccacttctgagatgagca

SEQ ID NO: 5307655 - DNA, 25 bp, Homo sapien
gtcaccacattagctggattggcaa

SEQ ID NO: 5307656 - DNA, 25 bp, Homo sapien
ccaccgtttgacctgctgcaaatat

SEQ ID NO: 5307657 - DNA, 25 bp, Homo sapien
gatgagcattttaaaccccgcatcc

SEQ ID NO: 5307658 - DNA, 25 bp, Homo sapien
gtaaaatttgcaacgctacatcttc

SEQ ID NO: 5307659 - DNA, 25 bp, Homo sapien
gggcatgctagtaaaatttgcaacg

SEQ ID NO: 5307660 - DNA, 25 bp, Homo sapien
cttcctttgatacggggcatgctag

SEQ ID NO: 5307661 - DNA, 25 bp, Homo sapien
aagacacttgggccatcttcctttg

SEQ ID NO: 5307662 - DNA, 25 bp, Homo sapien
tgggcttatttaactgactttaaga

SEQ ID NO: 5307663 - DNA, 25 bp, Homo sapien
aaaataagaattgcaaacatcaaaa

SEQ ID NO: 5307664 - DNA, 25 bp, Homo sapien
tttttacactgcaaccaatgttcca

SEQ ID NO: 5307665 - DNA, 25 bp, Homo sapien
tcatccccatgtgttcattaactca

SEQ ID NO: 5307666 - DNA, 25 bp, Homo sapien
aataatttgcagtaaatcacggtcc

SEQ ID NO: 5307667 - DNA, 25 bp, Homo sapien
tgagacatactgaggatacccagct

SEQ ID NO: 5307668 - DNA, 25 bp, Homo sapien
taaggtgaagctcggacttctccac

SEQ ID NO: 5307669 - DNA, 25 bp, Homo sapien
atactgaggatacccagctttactg

SEQ ID NO: 5307670 - DNA, 25 bp, Homo sapien
gagttccagaaattagaagacaaag

SEQ ID NO: 5307671 - DNA, 25 bp, Homo sapien
attagaagacaaagttagagtgttt

SEQ ID NO: 5307672 - DNA, 25 bp, Homo sapien
agagagttccagaaattagaagaca

SEQ ID NO: 5307673 - DNA, 25 bp, Homo sapien
ctatagagagttccagaaattagaa

SEQ ID NO: 5307674 - DNA, 25 bp, Homo sapien
taatgcgaggtatgtgtctggacca

SEQ ID NO: 5307675 - DNA, 25 bp, Homo sapien
gcatatgcattcaataatgcgaggt

SEQ ID NO: 5307676 - DNA, 25 bp, Homo sapien
tgcttaacatggtcaatgtcgccct

SEQ ID NO: 5307677 - DNA, 25 bp, Homo sapien
gtctggaccaggctcaattccggca

SEQ ID NO: 5307678 - DNA, 25 bp, Homo sapien
ctgggagatccttagttttcataaa

SEQ ID NO: 5307679 - DNA, 25 bp, Homo sapien
ggcactgaatactgcctctgtaact

SEQ ID NO: 5307680 - DNA, 25 bp, Homo sapien
cacaagggcactgaatactgcctct

SEQ ID NO: 5307681 - DNA, 25 bp, Homo sapien
tgtaactgggagatccttagttttc

SEQ ID NO: 5307682 - DNA, 25 bp, Homo sapien
acaataagaagcaatcaatctctgg

SEQ ID NO: 5307683 - DNA, 25 bp, Homo sapien
tcaatatctcctacattacaataag

SEQ ID NO: 5307684 - DNA, 25 bp, Homo sapien
ctggcaccttcaatatctcctacat

SEQ ID NO: 5307685 - DNA, 25 bp, Homo sapien
gaagcaatcaatctctggtatgtca

SEQ ID NO: 5307686 - DNA, 25 bp, Homo sapien
gactttaagtaaagcattatagtga

SEQ ID NO: 5307687 - DNA, 25 bp, Homo sapien
tgccaggaaatcagttggtgagaat

SEQ ID NO: 5307688 - DNA, 25 bp, Homo sapien
tttggttgaatgtttgcttcctcca

SEQ ID NO: 5307689 - DNA, 25 bp, Homo sapien
gcattatagtgactcacatcataca

SEQ ID NO: 5307690 - DNA, 25 bp, Homo sapien
actacgtagtagaagcaaggcatga

SEQ ID NO: 5307691 - DNA, 25 bp, Homo sapien
caagagagaaccacaactacgtagt

SEQ ID NO: 5307692 - DNA, 25 bp, Homo sapien
atttctgaagtgtgtcccatatcct

SEQ ID NO: 5307693 - DNA, 25 bp, Homo sapien
tatcctatgagcaaattctgttctc

SEQ ID NO: 5307694 - DNA, 25 bp, Homo sapien
tttggcagcaatggcatacagcctg

SEQ ID NO: 5307695 - DNA, 25 bp, Homo sapien
ctgagcggcaggtatcattaaaaac

SEQ ID NO: 5307696 - DNA, 25 bp, Homo sapien
gaaagatctagtctcattagagccc

SEQ ID NO: 5307697 - DNA, 25 bp, Homo sapien
tagaagcttctttggaatgcggcca

SEQ ID NO: 5307698 - DNA, 25 bp, Homo sapien
tctaagcaatcttggtagcctcaag

SEQ ID NO: 5307699 - DNA, 25 bp, Homo sapien
agctacacgggataaacggcctcca

SEQ ID NO: 5307700 - DNA, 25 bp, Homo sapien
cgtctaatagttgtacatgtgcctg

SEQ ID NO: 5307701 - DNA, 25 bp, Homo sapien
tgtgtcctctaaaactcaatgtccc

SEQ ID NO: 5307702 - DNA, 25 bp, Homo sapien
cagaagagttgacgctccagaggca

SEQ ID NO: 5307703 - DNA, 25 bp, Homo sapien
tacacggtctaagaggaggcacaag

SEQ ID NO: 5307704 - DNA, 25 bp, Homo sapien
tctgcagtttaacgagagccccagg

SEQ ID NO: 5307705 - DNA, 25 bp, Homo sapien
tagtagtctggtacggctagaacgc

SEQ ID NO: 5307706 - DNA, 25 bp, Homo sapien
aactccattcaagagaacgcaggca

SEQ ID NO: 5307707 - DNA, 25 bp, Homo sapien
aaagtgatcataatccagcgtccag

SEQ ID NO: 5307708 - DNA, 25 bp, Homo sapien
ttaagtcatccgtggctcacccaaa

SEQ ID NO: 5307709 - DNA, 25 bp, Homo sapien
ggtggttactgatcaccaacggtga

SEQ ID NO: 5307710 - DNA, 25 bp, Homo sapien
accaccacccgacttcccaaagcag

SEQ ID NO: 5307711 - DNA, 25 bp, Homo sapien
tgaccatgggtaccccgagggcagt

SEQ ID NO: 5307712 - DNA, 25 bp, Homo sapien
cccctcatcttcgttgaccatgggt

SEQ ID NO: 5307713 - DNA, 25 bp, Homo sapien
accacccaagctggccaagtgtaag

SEQ ID NO: 5307714 - DNA, 25 bp, Homo sapien
gggccgccccggcacgcagcaacca

SEQ ID NO: 5307715 - DNA, 25 bp, Homo sapien
accaacgcgcggatctcagcagggc

SEQ ID NO: 5307716 - DNA, 25 bp, Homo sapien
cgcgagcggcgggcagataggaggc

SEQ ID NO: 5307717 - DNA, 25 bp, Homo sapien
ggcacgcagcaaccaacgcgcggat

SEQ ID NO: 5307718 - DNA, 25 bp, Homo sapien
tgctcgaacgtccccgcagcgggaa

SEQ ID NO: 5307719 - DNA, 25 bp, Homo sapien
gaacgtccccgcagcgggaagcacg

SEQ ID NO: 5307720 - DNA, 25 bp, Homo sapien
cagcgggaagcacgctccgccagaa

SEQ ID NO: 5307721 - DNA, 25 bp, Homo sapien
gggaagcacgctccgccagaaggac

SEQ ID NO: 5307722 - DNA, 25 bp, Homo sapien
ccatttgtaaagcaccatcctctaa

SEQ ID NO: 5307723 - DNA, 25 bp, Homo sapien
tccatttgtaaagcaccatcctcta

SEQ ID NO: 5307724 - DNA, 25 bp, Homo sapien
tgtatttcagtaaagccacatcgac

SEQ ID NO: 5307725 - DNA, 25 bp, Homo sapien
gcaaggttgagcagacaagctgaat

SEQ ID NO: 5307726 - DNA, 25 bp, Homo sapien
tctcaggcttcatggacacttctct

SEQ ID NO: 5307727 - DNA, 25 bp, Homo sapien
ttttcctgcaggtaaatcgcacagc

SEQ ID NO: 5307728 - DNA, 25 bp, Homo sapien
gatggctatgaaacattccccgaaa

SEQ ID NO: 5307729 - DNA, 25 bp, Homo sapien
tggatggctatgaaacattccccga

SEQ ID NO: 5307730 - DNA, 25 bp, Homo sapien
gaaacattccccgaaattctgagat

SEQ ID NO: 5307731 - DNA, 25 bp, Homo sapien
ccgaaattctgagatcttggaggtg

SEQ ID NO: 5307732 - DNA, 25 bp, Homo sapien
ggcactgggctgcatacctcctgca

SEQ ID NO: 5307733 - DNA, 25 bp, Homo sapien
tgggctgcatacctcctgcagttgc

SEQ ID NO: 5307734 - DNA, 25 bp, Homo sapien
cagatgagctccacgtcctttgcca

SEQ ID NO: 5307735 - DNA, 25 bp, Homo sapien
cgtcctttgccacccttggcttggg

SEQ ID NO: 5307736 - DNA, 25 bp, Homo sapien
tcagcagccgaataaatcagaccat

SEQ ID NO: 5307737 - DNA, 25 bp, Homo sapien
gccgaataaatcagaccattcttcc

SEQ ID NO: 5307738 - DNA, 25 bp, Homo sapien
gcagccgaataaatcagaccattct

SEQ ID NO: 5307739 - DNA, 25 bp, Homo sapien
ataaatcagaccattcttcctctcc

SEQ ID NO: 5307740 - DNA, 25 bp, Homo sapien
agggtgtgaccgatcctcagtggaa

SEQ ID NO: 5307741 - DNA, 25 bp, Homo sapien
tctgatgtgagaacagggaacgcct

SEQ ID NO: 5307742 - DNA, 25 bp, Homo sapien
cttctagatggaagcttccggctcc

SEQ ID NO: 5307743 - DNA, 25 bp, Homo sapien
tccggctccttctagagggaagcag

SEQ ID NO: 5307744 - DNA, 25 bp, Homo sapien
tgtcctctcgctcattcctttccct

SEQ ID NO: 5307745 - DNA, 25 bp, Homo sapien
tttccctctctcaagctggcccgca

SEQ ID NO: 5307746 - DNA, 25 bp, Homo sapien
tccctctctcaagctggcccgcaca

SEQ ID NO: 5307747 - DNA, 25 bp, Homo sapien
gtcctctcgctcattcctttccctc

SEQ ID NO: 5307748 - DNA, 25 bp, Homo sapien
tcctgttctggatcagtctggttgc

SEQ ID NO: 5307749 - DNA, 25 bp, Homo sapien
cagtctggttgctatttctacctgg

SEQ ID NO: 5307750 - DNA, 25 bp, Homo sapien
gacttgctcaatctcggcaaagagt

SEQ ID NO: 5307751 - DNA, 25 bp, Homo sapien
tctacctggatctcctgaaatttgt

SEQ ID NO: 5307752 - DNA, 25 bp, Homo sapien
cacagtgactcattggcacattggc

SEQ ID NO: 5307753 - DNA, 25 bp, Homo sapien
tggcctatagtgacaccaagactgt

SEQ ID NO: 5307754 - DNA, 25 bp, Homo sapien
cattcatgccagtagggtgttggtg

SEQ ID NO: 5307755 - DNA, 25 bp, Homo sapien
ggtgttggtggcctatagtgacacc

SEQ ID NO: 5307756 - DNA, 25 bp, Homo sapien
accttttcatagggcggcaggagag

SEQ ID NO: 5307757 - DNA, 25 bp, Homo sapien
ttaactcattccagggcacattggc

SEQ ID NO: 5307758 - DNA, 25 bp, Homo sapien
tcccaaacttcctgtcctcatattt

SEQ ID NO: 5307759 - DNA, 25 bp, Homo sapien
ggaaggcaccttttcatagggcggc

SEQ ID NO: 5307760 - DNA, 25 bp, Homo sapien
tggctttgcaggttacatccccgct

SEQ ID NO: 5307761 - DNA, 25 bp, Homo sapien
ctcttgagtactttgccgcttagga

SEQ ID NO: 5307762 - DNA, 25 bp, Homo sapien
ccaggccgtgctgatgcaacaggtg

SEQ ID NO: 5307763 - DNA, 25 bp, Homo sapien
aagttgctaaggcttgaggcttcca

SEQ ID NO: 5307764 - DNA, 25 bp, Homo sapien
gagctatttcacagtaaataattat

SEQ ID NO: 5307765 - DNA, 25 bp, Homo sapien
tatttctcttcggtgcagcacaagt

SEQ ID NO: 5307766 - DNA, 25 bp, Homo sapien
ctgatgtttagatatttctcttcgg

SEQ ID NO: 5307767 - DNA, 25 bp, Homo sapien
tagatatttctcttcggtgcagcac

SEQ ID NO: 5307768 - DNA, 25 bp, Homo sapien
ttctcttcggtgcagcacaagtttc

SEQ ID NO: 5307769 - DNA, 25 bp, Homo sapien
aacagttgaacagcagtggcactgt

SEQ ID NO: 5307770 - DNA, 25 bp, Homo sapien
tttaaacagttgaacagcagtggca

SEQ ID NO: 5307771 - DNA, 25 bp, Homo sapien
ttaaacagttgaacagcagtggcac

SEQ ID NO: 5307772 - DNA, 25 bp, Homo sapien
taaacagttgaacagcagtggcact

SEQ ID NO: 5307773 - DNA, 25 bp, Homo sapien
acattgcagaccgggcggcggggca

SEQ ID NO: 5307774 - DNA, 25 bp, Homo sapien
cctcacattgcagaccgggcggcgg

SEQ ID NO: 5307775 - DNA, 25 bp, Homo sapien
cgctcctcacattgcagaccgggcg

SEQ ID NO: 5307776 - DNA, 25 bp, Homo sapien
aggcgctcctcacattgcagaccgg

SEQ ID NO: 5307777 - DNA, 25 bp, Homo sapien
gcataacagggtactttttcaagaa

SEQ ID NO: 5307778 - DNA, 25 bp, Homo sapien
tataactgcataacagggtactttt

SEQ ID NO: 5307779 - DNA, 25 bp, Homo sapien
gttctgtaaagatgatgtattccaa

SEQ ID NO: 5307780 - DNA, 25 bp, Homo sapien
tgttctgtaaagatgatgtattcca

SEQ ID NO: 5307781 - DNA, 25 bp, Homo sapien
tggcaagagttcacggtgtctgact

SEQ ID NO: 5307782 - DNA, 25 bp, Homo sapien
caagagttcacggtgtctgactcct

SEQ ID NO: 5307783 - DNA, 25 bp, Homo sapien
attctggcaagagttcacggtgtct

SEQ ID NO: 5307784 - DNA, 25 bp, Homo sapien
ttattctggcaagagttcacggtgt

SEQ ID NO: 5307785 - DNA, 25 bp, Homo sapien
tagctgaggtcacggaggagcttct

SEQ ID NO: 5307786 - DNA, 25 bp, Homo sapien
tggcccggattacgcagccctcgtt

SEQ ID NO: 5307787 - DNA, 25 bp, Homo sapien
gggacagcgcagtaacgcccaatgg

SEQ ID NO: 5307788 - DNA, 25 bp, Homo sapien
agtagagagccgttcactgcccagt

SEQ ID NO: 5307789 - DNA, 25 bp, Homo sapien
cacaggatgttaattgggccaatga

SEQ ID NO: 5307790 - DNA, 25 bp, Homo sapien
tcctactgggcgttcggacaagtac

SEQ ID NO: 5307791 - DNA, 25 bp, Homo sapien
cggctccgggtcatttttagatcta

SEQ ID NO: 5307792 - DNA, 25 bp, Homo sapien
catttgggcaaaaggccctcctact

SEQ ID NO: 5307793 - DNA, 25 bp, Homo sapien
cagaaagggcaaaagcgctcttcct

SEQ ID NO: 5307794 - DNA, 25 bp, Homo sapien
gaaagggcaaaagcgctcttcctag

SEQ ID NO: 5307795 - DNA, 25 bp, Homo sapien
agggcaaaagcgctcttcctagttt

SEQ ID NO: 5307796 - DNA, 25 bp, Homo sapien
gcaaaagcgctcttcctagtttgca

SEQ ID NO: 5307797 - DNA, 25 bp, Homo sapien
tccaggacctctcataatggctgct

SEQ ID NO: 5307798 - DNA, 25 bp, Homo sapien
ggaccaatccagacacccagtatca

SEQ ID NO: 5307799 - DNA, 25 bp, Homo sapien
tccaaatgccatggcaaggtttgca

SEQ ID NO: 5307800 - DNA, 25 bp, Homo sapien
tgtccaagggtgtttcccattcctc

SEQ ID NO: 5307801 - DNA, 25 bp, Homo sapien
ctattaggatctatgcggttgccaa

SEQ ID NO: 5307802 - DNA, 25 bp, Homo sapien
tgaacccccaagctggtattcctgg

SEQ ID NO: 5307803 - DNA, 25 bp, Homo sapien
tcattgagaatggtctatcacatcc

SEQ ID NO: 5307804 - DNA, 25 bp, Homo sapien
gccctattcctacagtctgctctat

SEQ ID NO: 5307805 - DNA, 25 bp, Homo sapien
ttaggagcaaattctggtgttctgc

SEQ ID NO: 5307806 - DNA, 25 bp, Homo sapien
agcctctgctatgttccctcttccc

SEQ ID NO: 5307807 - DNA, 25 bp, Homo sapien
gtcagcctctgctatgttccctctt

SEQ ID NO: 5307808 - DNA, 25 bp, Homo sapien
ctgtcagcctctgctatgttccctc

SEQ ID NO: 5307809 - DNA, 25 bp, Homo sapien
agtcagtcatgctgaatcgggccac

SEQ ID NO: 5307810 - DNA, 25 bp, Homo sapien
gcctcagccttaacatcgcatgggg

SEQ ID NO: 5307811 - DNA, 25 bp, Homo sapien
agtcatgctgaatcgggccacaacc

SEQ ID NO: 5307812 - DNA, 25 bp, Homo sapien
ccttaacatcgcatggggcctgaca

SEQ ID NO: 5307813 - DNA, 25 bp, Homo sapien
gggctgcctcgagcatcagagccag

SEQ ID NO: 5307814 - DNA, 25 bp, Homo sapien
taccacctcctgaacttgctaactg

SEQ ID NO: 5307815 - DNA, 25 bp, Homo sapien
gtgttcaaagctaaatcttctctga

SEQ ID NO: 5307816 - DNA, 25 bp, Homo sapien
gttcaaagctaaatcttctctgatt

SEQ ID NO: 5307817 - DNA, 25 bp, Homo sapien
ctgatgcagacaacacttctctggc

SEQ ID NO: 5307818 - DNA, 25 bp, Homo sapien
tttatacctagtgcagtgtcctctg

SEQ ID NO: 5307819 - DNA, 25 bp, Homo sapien
gtcttttatacctagtgcagtgtcc

SEQ ID NO: 5307820 - DNA, 25 bp, Homo sapien
agcttttgatgacttcctcaatttg

SEQ ID NO: 5307821 - DNA, 25 bp, Homo sapien
ctcttctctgtatgcatgattccat

SEQ ID NO: 5307822 - DNA, 25 bp, Homo sapien
gctactcttctctgtatgcatgatt

SEQ ID NO: 5307823 - DNA, 25 bp, Homo sapien
tgctactcttctctgtatgcatgat

SEQ ID NO: 5307824 - DNA, 25 bp, Homo sapien
tactcttctctgtatgcatgattcc

SEQ ID NO: 5307825 - DNA, 25 bp, Homo sapien
gatatggaattatcagcccacctaa

SEQ ID NO: 5307826 - DNA, 25 bp, Homo sapien
aaactgttctcatgcctttctgtag

SEQ ID NO: 5307827 - DNA, 25 bp, Homo sapien
tcaataatacttcctgcggactgta

SEQ ID NO: 5307828 - DNA, 25 bp, Homo sapien
gacaagggtccctaaatgtcttcag

SEQ ID NO: 5307829 - DNA, 25 bp, Homo sapien
cccggacagtaaaacacacagtggt

SEQ ID NO: 5307830 - DNA, 25 bp, Homo sapien
gaaatgatccacactgctagtctgg

SEQ ID NO: 5307831 - DNA, 25 bp, Homo sapien
tctaggcggcgtctgttaaaaagca

SEQ ID NO: 5307832 - DNA, 25 bp, Homo sapien
taatggcccgagcatgtaatatcca

SEQ ID NO: 5307833 - DNA, 25 bp, Homo sapien
gtttctcgtttggagaattaacatg

SEQ ID NO: 5307834 - DNA, 25 bp, Homo sapien
tacacttttgtttctcgtttggaga

SEQ ID NO: 5307835 - DNA, 25 bp, Homo sapien
ctctattacacttttgtttctcgtt

SEQ ID NO: 5307836 - DNA, 25 bp, Homo sapien
cacttttgtttctcgtttggagaat

SEQ ID NO: 5307837 - DNA, 25 bp, Homo sapien
caagcccctgcaattccgggtggga

SEQ ID NO: 5307838 - DNA, 25 bp, Homo sapien
caaaatacggaaatgtcaagggctg

SEQ ID NO: 5307839 - DNA, 25 bp, Homo sapien
tcattgttagggaacatccgggcct

SEQ ID NO: 5307840 - DNA, 25 bp, Homo sapien
tatagctggactgctcgttggtccc

SEQ ID NO: 5307841 - DNA, 25 bp, Homo sapien
gcgagcgaggcgccctagacatctt

SEQ ID NO: 5307842 - DNA, 25 bp, Homo sapien
gcgcgagcgaggcgccctagacatc

SEQ ID NO: 5307843 - DNA, 25 bp, Homo sapien
gagcgaggcgccctagacatcttct

SEQ ID NO: 5307844 - DNA, 25 bp, Homo sapien
agcgaggcgccctagacatcttctc

SEQ ID NO: 5307845 - DNA, 25 bp, Homo sapien
cactgggtgtctgatttctgtgaag

SEQ ID NO: 5307846 - DNA, 25 bp, Homo sapien
gcagagctttcaacaccgttttctt

SEQ ID NO: 5307847 - DNA, 25 bp, Homo sapien
tgagctttcatactgtaagatttcc

SEQ ID NO: 5307848 - DNA, 25 bp, Homo sapien
gatttccccagtttctagtacatta

SEQ ID NO: 5307849 - DNA, 25 bp, Homo sapien
ccatcttagactgtcccatgtgcat

SEQ ID NO: 5307850 - DNA, 25 bp, Homo sapien
cactaccatcttagactgtcccatg

SEQ ID NO: 5307851 - DNA, 25 bp, Homo sapien
taccatcttagactgtcccatgtgc

SEQ ID NO: 5307852 - DNA, 25 bp, Homo sapien
ccaccactaccatcttagactgtcc

SEQ ID NO: 5307853 - DNA, 25 bp, Homo sapien
tacttgccaagtgacattcgatgaa

SEQ ID NO: 5307854 - DNA, 25 bp, Homo sapien
gtgacattcgatgaaatcagaccat

SEQ ID NO: 5307855 - DNA, 25 bp, Homo sapien
ctactgtgttgtattacttgccaag

SEQ ID NO: 5307856 - DNA, 25 bp, Homo sapien
cttgaacattcttcccgtgtggttt

SEQ ID NO: 5307857 - DNA, 25 bp, Homo sapien
gagtatgttctgtaaggtcctggaa

SEQ ID NO: 5307858 - DNA, 25 bp, Homo sapien
tacacattgtctaggaacaggctgg

SEQ ID NO: 5307859 - DNA, 25 bp, Homo sapien
cctggaatggtgttattagtatgtg

SEQ ID NO: 5307860 - DNA, 25 bp, Homo sapien
aacaggctggaagtgaagagtactt

SEQ ID NO: 5307861 - DNA, 25 bp, Homo sapien
aaagcttgcgatacattagccactg

SEQ ID NO: 5307862 - DNA, 25 bp, Homo sapien
gattgtgctgttcttaagccacgct

SEQ ID NO: 5307863 - DNA, 25 bp, Homo sapien
tatctgtgtcagtatccagtcaggg

SEQ ID NO: 5307864 - DNA, 25 bp, Homo sapien
gagttgccttttgagcccctgaaca

SEQ ID NO: 5307865 - DNA, 25 bp, Homo sapien
ggtttacgttatggcctgagcagca

SEQ ID NO: 5307866 - DNA, 25 bp, Homo sapien
tcagacctcagaaacgggatggaca

SEQ ID NO: 5307867 - DNA, 25 bp, Homo sapien
tattcctcacggcttggaagactgg

SEQ ID NO: 5307868 - DNA, 25 bp, Homo sapien
ggtcatgctggatcccgagtggcaa

SEQ ID NO: 5307869 - DNA, 25 bp, Homo sapien
tactgccaactaatttcgggttgct

SEQ ID NO: 5307870 - DNA, 25 bp, Homo sapien
tacttggtgagtattgaggctgaga

SEQ ID NO: 5307871 - DNA, 25 bp, Homo sapien
gcttaaaatatgtaactgccacgtg

SEQ ID NO: 5307872 - DNA, 25 bp, Homo sapien
aacaatatttcccagaagggcctga

SEQ ID NO: 5307873 - DNA, 25 bp, Homo sapien
caggctaaaatatccagagtggtcc

SEQ ID NO: 5307874 - DNA, 25 bp, Homo sapien
tatggtgcctagcacgtaagtcctc

SEQ ID NO: 5307875 - DNA, 25 bp, Homo sapien
ctaagaggaagcatcaacataaggg

SEQ ID NO: 5307876 - DNA, 25 bp, Homo sapien
gacttgatagcatggcaggccaggc

SEQ ID NO: 5307877 - DNA, 25 bp, Homo sapien
gtgcccggcccagtatcatccattt

SEQ ID NO: 5307878 - DNA, 25 bp, Homo sapien
tcttatccatcttttgtggtacaaa

SEQ ID NO: 5307879 - DNA, 25 bp, Homo sapien
tatatgtgttgcatacttaaatcta

SEQ ID NO: 5307880 - DNA, 25 bp, Homo sapien
ccatcttttgtggtacaaaatatta

SEQ ID NO: 5307881 - DNA, 25 bp, Homo sapien
gaaattgaacaattatgggctattt

SEQ ID NO: 5307882 - DNA, 25 bp, Homo sapien
aactgggttctccaataatgtccaa

SEQ ID NO: 5307883 - DNA, 25 bp, Homo sapien
caaattgtaatgttgccttgcttca

SEQ ID NO: 5307884 - DNA, 25 bp, Homo sapien
tgctttgacatctcactgttggaaa

SEQ ID NO: 5307885 - DNA, 25 bp, Homo sapien
tataacattgggcacggtacagagt

SEQ ID NO: 5307886 - DNA, 25 bp, Homo sapien
atctcatgtaagtgtgaaaacccaa

SEQ ID NO: 5307887 - DNA, 25 bp, Homo sapien
gcacatctcatgtaagtgtgaaaac

SEQ ID NO: 5307888 - DNA, 25 bp, Homo sapien
aatgtagtaacaaggctgaggggag

SEQ ID NO: 5307889 - DNA, 25 bp, Homo sapien
gggaggcacatctcatgtaagtgtg

SEQ ID NO: 5307890 - DNA, 25 bp, Homo sapien
tctccagagcaggtaaacagggtcc

SEQ ID NO: 5307891 - DNA, 25 bp, Homo sapien
tattcctggttagtagctgcatcgc

SEQ ID NO: 5307892 - DNA, 25 bp, Homo sapien
ggagggcacaccttccaagagacag

SEQ ID NO: 5307893 - DNA, 25 bp, Homo sapien
ccacttcggagagatgaggcataca

SEQ ID NO: 5307894 - DNA, 25 bp, Homo sapien
aagccctcaccagaagcagatactg

SEQ ID NO: 5307895 - DNA, 25 bp, Homo sapien
cagaagcagtctgaagccctcacca

SEQ ID NO: 5307896 - DNA, 25 bp, Homo sapien
cttccaccatgagcagaagcagtct

SEQ ID NO: 5307897 - DNA, 25 bp, Homo sapien
gaagccctcaccagaagcagatact

SEQ ID NO: 5307898 - DNA, 25 bp, Homo sapien
gttagatataaggacactgggctgg

SEQ ID NO: 5307899 - DNA, 25 bp, Homo sapien
ccaagtgttcagtggacagttagat

SEQ ID NO: 5307900 - DNA, 25 bp, Homo sapien
gcagaaccattgtctgagatgggag

SEQ ID NO: 5307901 - DNA, 25 bp, Homo sapien
ttaggtatgtagagttggagctgcc

SEQ ID NO: 5307902 - DNA, 25 bp, Homo sapien
gaccgtgatgtactatggattgcca

SEQ ID NO: 5307903 - DNA, 25 bp, Homo sapien
gaacagcgtgtatgaggttatcaca

SEQ ID NO: 5307904 - DNA, 25 bp, Homo sapien
tggtaagtcctcatgacagcagagt

SEQ ID NO: 5307905 - DNA, 25 bp, Homo sapien
ggttaatagtgtgcattcagcccct

SEQ ID NO: 5307906 - DNA, 25 bp, Homo sapien
gttgattagatttccagactctcag

SEQ ID NO: 5307907 - DNA, 25 bp, Homo sapien
tctatgcctgaacaccctgagttga

SEQ ID NO: 5307908 - DNA, 25 bp, Homo sapien
catagagaagtatgggtcctccaac

SEQ ID NO: 5307909 - DNA, 25 bp, Homo sapien
gccatgattacactccagggtgaac

SEQ ID NO: 5307910 - DNA, 25 bp, Homo sapien
ccatcagccatgtacgaaggttcca

SEQ ID NO: 5307911 - DNA, 25 bp, Homo sapien
tccatagtgacttctccgttttaca

SEQ ID NO: 5307912 - DNA, 25 bp, Homo sapien
cctgcattagctcccacaaagtagc

SEQ ID NO: 5307913 - DNA, 25 bp, Homo sapien
tattgagactccttacatgtgatgt

SEQ ID NO: 5307914 - DNA, 25 bp, Homo sapien
tgctgtttaatggagctccttgaca

SEQ ID NO: 5307915 - DNA, 25 bp, Homo sapien
tcccattatgagaggcaggcaacca

SEQ ID NO: 5307916 - DNA, 25 bp, Homo sapien
aagtcagacccacatccaacttggc

SEQ ID NO: 5307917 - DNA, 25 bp, Homo sapien
gaaaagaaccctacatcccaatgtc

SEQ ID NO: 5307918 - DNA, 25 bp, Homo sapien
gcataagaaaaaatcgggatacatg

SEQ ID NO: 5307919 - DNA, 25 bp, Homo sapien
aaaaatcgggatacatggaagatag

SEQ ID NO: 5307920 - DNA, 25 bp, Homo sapien
tacagaattccgtacatgcagtaac

SEQ ID NO: 5307921 - DNA, 25 bp, Homo sapien
acaacaattgcacaggagaacagac

SEQ ID NO: 5307922 - DNA, 25 bp, Homo sapien
taacaaaaacagacataagaaacac

SEQ ID NO: 5307923 - DNA, 25 bp, Homo sapien
gcttgcaacccagctatagctataa

SEQ ID NO: 5307924 - DNA, 25 bp, Homo sapien
taaaatagggcttccgaattatgtc

SEQ ID NO: 5307925 - DNA, 25 bp, Homo sapien
tatgaatgggttaaattagcctatt

SEQ ID NO: 5307926 - DNA, 25 bp, Homo sapien
tcatgactacgcatctaacagcttc

SEQ ID NO: 5307927 - DNA, 25 bp, Homo sapien
tagaaagtagtaactcaagtagaca

SEQ ID NO: 5307928 - DNA, 25 bp, Homo sapien
caaaaatcatgactacgcatctaac

SEQ ID NO: 5307929 - DNA, 25 bp, Homo sapien
aaagcattatatgagacaaaggcaa

SEQ ID NO: 5307930 - DNA, 25 bp, Homo sapien
gcacttcttatgtgagtggcactga

SEQ ID NO: 5307931 - DNA, 25 bp, Homo sapien
catggctgagtatggtacaaccgtt

SEQ ID NO: 5307932 - DNA, 25 bp, Homo sapien
taaagaccacatattgggaacctac

SEQ ID NO: 5307933 - DNA, 25 bp, Homo sapien
cactatcgtcaaaatgaaagggcat

SEQ ID NO: 5307934 - DNA, 25 bp, Homo sapien
cataatatgatttcgggccttcccg

SEQ ID NO: 5307935 - DNA, 25 bp, Homo sapien
tacttattgactcccagacaagccg

SEQ ID NO: 5307936 - DNA, 25 bp, Homo sapien
taagtaccaattctgccgacaaagg

SEQ ID NO: 5307937 - DNA, 25 bp, Homo sapien
caagtggcatttttctggacaaggg

SEQ ID NO: 5307938 - DNA, 25 bp, Homo sapien
tagaaattagaggatgactcactgc

SEQ ID NO: 5307939 - DNA, 25 bp, Homo sapien
tcctaggttaatgggcatgtgcatc

SEQ ID NO: 5307940 - DNA, 25 bp, Homo sapien
gatagcatcaatcagggatgaccag

SEQ ID NO: 5307941 - DNA, 25 bp, Homo sapien
taaactgctcaactgttctgactgg

SEQ ID NO: 5307942 - DNA, 25 bp, Homo sapien
ttcttaagatcctcgaaaacactgg

SEQ ID NO: 5307943 - DNA, 25 bp, Homo sapien
ctgtcaagtccaagttcctcgtaca

SEQ ID NO: 5307944 - DNA, 25 bp, Homo sapien
tcgtacaggaatttaatttgggctg

SEQ ID NO: 5307945 - DNA, 25 bp, Homo sapien
tatttcttaagatcctcgaaaacac

SEQ ID NO: 5307946 - DNA, 25 bp, Homo sapien
gtaaaatgccactgtttaagcttct

SEQ ID NO: 5307947 - DNA, 25 bp, Homo sapien
ttacctaaccgtgaagtcagcaatt

SEQ ID NO: 5307948 - DNA, 25 bp, Homo sapien
aatactttcattcgagagagaggca

SEQ ID NO: 5307949 - DNA, 25 bp, Homo sapien
aatagaaggcctttgtagtaaaatg

SEQ ID NO: 5307950 - DNA, 25 bp, Homo sapien
ctttttgtgagaatcctcaattaca

SEQ ID NO: 5307951 - DNA, 25 bp, Homo sapien
tttgtgagaatcctcaattacatga

SEQ ID NO: 5307952 - DNA, 25 bp, Homo sapien
atcctcaattacatgattgcctcca

SEQ ID NO: 5307953 - DNA, 25 bp, Homo sapien
gagaatcctcaattacatgattgcc

SEQ ID NO: 5307954 - DNA, 25 bp, Homo sapien
agaataatattaggggtctgatagc

SEQ ID NO: 5307955 - DNA, 25 bp, Homo sapien
tagaataatattaggggtctgatag

SEQ ID NO: 5307956 - DNA, 25 bp, Homo sapien
ctagaataatattaggggtctgata

SEQ ID NO: 5307957 - DNA, 25 bp, Homo sapien
gcatgtagtttcaaggcaaaaggga

SEQ ID NO: 5307958 - DNA, 25 bp, Homo sapien
tctgagagtcttatgccctggaaac

SEQ ID NO: 5307959 - DNA, 25 bp, Homo sapien
attcatgcagctaaacagtttgggc

SEQ ID NO: 5307960 - DNA, 25 bp, Homo sapien
cagctagctagaggaaattcatgca

SEQ ID NO: 5307961 - DNA, 25 bp, Homo sapien
tcctttcagaggtacccgttcatcg

SEQ ID NO: 5307962 - DNA, 25 bp, Homo sapien
tgtccttagcatgctccgcgatggc

SEQ ID NO: 5307963 - DNA, 25 bp, Homo sapien
ccttgagtttctcagtataacttac

SEQ ID NO: 5307964 - DNA, 25 bp, Homo sapien
cgttcatcgttttcatatgccgtta

SEQ ID NO: 5307965 - DNA, 25 bp, Homo sapien
tgatagggacagtaacgttttatgt

SEQ ID NO: 5307966 - DNA, 25 bp, Homo sapien
atagggacagtaacgttttatgtag

SEQ ID NO: 5307967 - DNA, 25 bp, Homo sapien
ttgatagggacagtaacgttttatg

SEQ ID NO: 5307968 - DNA, 25 bp, Homo sapien
gatagggacagtaacgttttatgta

SEQ ID NO: 5307969 - DNA, 25 bp, Homo sapien
tgttgagaacatccaagaaaggtgc

SEQ ID NO: 5307970 - DNA, 25 bp, Homo sapien
gtgttgagaacatccaagaaaggtg

SEQ ID NO: 5307971 - DNA, 25 bp, Homo sapien
ggtgttgagaacatccaagaaaggt

SEQ ID NO: 5307972 - DNA, 25 bp, Homo sapien
ttttcttagagtagcctatggcttc

SEQ ID NO: 5307973 - DNA, 25 bp, Homo sapien
gccgctgtgccagcccaaaaacatt

SEQ ID NO: 5307974 - DNA, 25 bp, Homo sapien
agagtagcctatggcttcacacctc

SEQ ID NO: 5307975 - DNA, 25 bp, Homo sapien
tcttagagtagcctatggcttcaca

SEQ ID NO: 5307976 - DNA, 25 bp, Homo sapien
tcagcgtgccactggaggcctaact

SEQ ID NO: 5307977 - DNA, 25 bp, Homo sapien
gagttttttagttaggcggccatca

SEQ ID NO: 5307978 - DNA, 25 bp, Homo sapien
tagaattacacaatgctcctgcaag

SEQ ID NO: 5307979 - DNA, 25 bp, Homo sapien
gaagcgtcttaatgcaagcctctaa

SEQ ID NO: 5307980 - DNA, 25 bp, Homo sapien
ataaaaggacatgattttggaaggc

SEQ ID NO: 5307981 - DNA, 25 bp, Homo sapien
gcgtgcctataagcccaactactcg

SEQ ID NO: 5307982 - DNA, 25 bp, Homo sapien
aaaggacatgattttggaaggctga

SEQ ID NO: 5307983 - DNA, 25 bp, Homo sapien
ggtgcgtgcctataagcccaactac

SEQ ID NO: 5307984 - DNA, 25 bp, Homo sapien
cagtatgctaatatccatccatcat

SEQ ID NO: 5307985 - DNA, 25 bp, Homo sapien
caccaggacccgcctctcaggcctg

SEQ ID NO: 5307986 - DNA, 25 bp, Homo sapien
gcagtatgctaatatccatccatca

SEQ ID NO: 5307987 - DNA, 25 bp, Homo sapien
ataagctccatatacatgtaccaag

SEQ ID NO: 5307988 - DNA, 25 bp, Homo sapien
tgtaccaagagaggtttcttctgca

SEQ ID NO: 5307989 - DNA, 25 bp, Homo sapien
gagtcagttttgtggaaaacagtca

SEQ ID NO: 5307990 - DNA, 25 bp, Homo sapien
ccaagagaggtttcttctgcaagtc

SEQ ID NO: 5307991 - DNA, 25 bp, Homo sapien
tgattgggtcttcatgcccagtttc

SEQ ID NO: 5307992 - DNA, 25 bp, Homo sapien
tttggcttctagacgtaaaacgcga

SEQ ID NO: 5307993 - DNA, 25 bp, Homo sapien
cgcgactagtctttgtgattgggtc

SEQ ID NO: 5307994 - DNA, 25 bp, Homo sapien
tctagacgtaaaacgcgactagtct

SEQ ID NO: 5307995 - DNA, 25 bp, Homo sapien
ccattatgaatccacaggcccaagg

SEQ ID NO: 5307996 - DNA, 25 bp, Homo sapien
tttgggtcagaatttgtatccatta

SEQ ID NO: 5307997 - DNA, 25 bp, Homo sapien
ctttgggtcagaatttgtatccatt

SEQ ID NO: 5307998 - DNA, 25 bp, Homo sapien
atccattatgaatccacaggcccaa

SEQ ID NO: 5307999 - DNA, 25 bp, Homo sapien
aacatgtccaagtctatcacttttg

SEQ ID NO: 5308000 - DNA, 25 bp, Homo sapien
aaaggagattgctgtgcttcagaaa

SEQ ID NO: 5308001 - DNA, 25 bp, Homo sapien
gcttcagaaatagaacacagtgatc

SEQ ID NO: 5308002 - DNA, 25 bp, Homo sapien
tttagagaccgaactgaatcatcag

SEQ ID NO: 5308003 - DNA, 25 bp, Homo sapien
tctggataagtactggtgggtccca

SEQ ID NO: 5308004 - DNA, 25 bp, Homo sapien
tttatggtgaggaaacgactgtctt

SEQ ID NO: 5308005 - DNA, 25 bp, Homo sapien
aaggaccccatgtattcgcttctgg

SEQ ID NO: 5308006 - DNA, 25 bp, Homo sapien
ggtcccaagggctcaggccatctat

SEQ ID NO: 5308007 - DNA, 25 bp, Homo sapien
tccctacatgagttgaaagtctttg

SEQ ID NO: 5308008 - DNA, 25 bp, Homo sapien
gaagcactatactaacataatgagt

SEQ ID NO: 5308009 - DNA, 25 bp, Homo sapien
tctgtattggatcacattaccatgt

SEQ ID NO: 5308010 - DNA, 25 bp, Homo sapien
tattataacaggtttaatggctacc

SEQ ID NO: 5308011 - DNA, 25 bp, Homo sapien
gcgttcattacgtttgttatcacca

SEQ ID NO: 5308012 - DNA, 25 bp, Homo sapien
tctggaaggtgtagaataaaacatc

SEQ ID NO: 5308013 - DNA, 25 bp, Homo sapien
aaagtggctcgatatacgtcatgac

SEQ ID NO: 5308014 - DNA, 25 bp, Homo sapien
tgacagcgaaggttcctctggaagg

SEQ ID NO: 5308015 - DNA, 25 bp, Homo sapien
tacacaggtagatgcttcagaatct

SEQ ID NO: 5308016 - DNA, 25 bp, Homo sapien
gaagcttccattacgggctgatcgc

SEQ ID NO: 5308017 - DNA, 25 bp, Homo sapien
tacaatcaatgaagggctggtctaa

SEQ ID NO: 5308018 - DNA, 25 bp, Homo sapien
aactggacacattcgggaaagaagc

SEQ ID NO: 5308019 - DNA, 25 bp, Homo sapien
ttcttcatctttggaacgaaccaag

SEQ ID NO: 5308020 - DNA, 25 bp, Homo sapien
tcttcatctttggaacgaaccaagc

SEQ ID NO: 5308021 - DNA, 25 bp, Homo sapien
aacgaaccaagcaacaaccttcttg

SEQ ID NO: 5308022 - DNA, 25 bp, Homo sapien
cgttttcttgtttaacaggctgaag

SEQ ID NO: 5308023 - DNA, 25 bp, Homo sapien
tctcactttttcaaatgcatccatg

SEQ ID NO: 5308024 - DNA, 25 bp, Homo sapien
catccatgttttctggaaggggttt

SEQ ID NO: 5308025 - DNA, 25 bp, Homo sapien
tattcttcttgtggctgtgtttcta

SEQ ID NO: 5308026 - DNA, 25 bp, Homo sapien
tacacacgcttcctgattttaagac

SEQ ID NO: 5308027 - DNA, 25 bp, Homo sapien
gtgaatgaggctaacttaggtctac

SEQ ID NO: 5308028 - DNA, 25 bp, Homo sapien
gaaaagatgctcactggccatgagt

SEQ ID NO: 5308029 - DNA, 25 bp, Homo sapien
gggatggtctacctgtactacaaga

SEQ ID NO: 5308030 - DNA, 25 bp, Homo sapien
tgagttccagaattacctgatgtga

SEQ ID NO: 5308031 - DNA, 25 bp, Homo sapien
ccagtgtcagtcaagttgtgagttc

SEQ ID NO: 5308032 - DNA, 25 bp, Homo sapien
ggtttagatcggcaacacttgatca

SEQ ID NO: 5308033 - DNA, 25 bp, Homo sapien
tggaaagcagaggtacttgccaata

SEQ ID NO: 5308034 - DNA, 25 bp, Homo sapien
tttatacttacttttgactagagac

SEQ ID NO: 5308035 - DNA, 25 bp, Homo sapien
gactagagacaattgagacttgaaa

SEQ ID NO: 5308036 - DNA, 25 bp, Homo sapien
tgggtgccatgacgcctagctaact

SEQ ID NO: 5308037 - DNA, 25 bp, Homo sapien
tgcctgcctcgatgtatatactctt

SEQ ID NO: 5308038 - DNA, 25 bp, Homo sapien
cttacatgagaagctccgacttggg

SEQ ID NO: 5308039 - DNA, 25 bp, Homo sapien
tcttctgctgcatgatatcaaagtc

SEQ ID NO: 5308040 - DNA, 25 bp, Homo sapien
ccgacttgggatgtttcttgctaac

SEQ ID NO: 5308041 - DNA, 25 bp, Homo sapien
ccaaggtgaggaatactatacttca

SEQ ID NO: 5308042 - DNA, 25 bp, Homo sapien
tcctatcaggctcaaactatgcagc

SEQ ID NO: 5308043 - DNA, 25 bp, Homo sapien
gattacagagtagtgggttctcaga

SEQ ID NO: 5308044 - DNA, 25 bp, Homo sapien
gccatgccccacttaggttatgaat

SEQ ID NO: 5308045 - DNA, 25 bp, Homo sapien
tatgcagcactgactctggcacaca

SEQ ID NO: 5308046 - DNA, 25 bp, Homo sapien
gcaaataagtacacagacttaatgg

SEQ ID NO: 5308047 - DNA, 25 bp, Homo sapien
gccctttggtcttacataattatga

SEQ ID NO: 5308048 - DNA, 25 bp, Homo sapien
tgttgagtgttaactaactgccagg

SEQ ID NO: 5308049 - DNA, 25 bp, Homo sapien
tcaggaactcagggctgtaaaaggt

SEQ ID NO: 5308050 - DNA, 25 bp, Homo sapien
ggtcttagctcctacacttaactgt

SEQ ID NO: 5308051 - DNA, 25 bp, Homo sapien
ctgggttgaggtcttagctcctaca

SEQ ID NO: 5308052 - DNA, 25 bp, Homo sapien
acttaactgtgtctccgggcctcag

SEQ ID NO: 5308053 - DNA, 25 bp, Homo sapien
tgaggtcttagctcctacacttaac

SEQ ID NO: 5308054 - DNA, 25 bp, Homo sapien
ccccaagaagacagtatgcaaggct

SEQ ID NO: 5308055 - DNA, 25 bp, Homo sapien
tatcaaaggtagaatgctgcgtcaa

SEQ ID NO: 5308056 - DNA, 25 bp, Homo sapien
cattagtcaaaaagcgaggacctgg

SEQ ID NO: 5308057 - DNA, 25 bp, Homo sapien
catagatcagatgcgctacgacgcc

SEQ ID NO: 5308058 - DNA, 25 bp, Homo sapien
gaatcagtccggctctggacacaaa

SEQ ID NO: 5308059 - DNA, 25 bp, Homo sapien
aattgagagaatcagtccggctctg

SEQ ID NO: 5308060 - DNA, 25 bp, Homo sapien
gagagaatcagtccggctctggaca

SEQ ID NO: 5308061 - DNA, 25 bp, Homo sapien
gcaaattgagagaatcagtccggct

SEQ ID NO: 5308062 - DNA, 25 bp, Homo sapien
aaggcaggccggagaacctgaagct

SEQ ID NO: 5308063 - DNA, 25 bp, Homo sapien
gagcaggtgtcaccgcaggcaagtc

SEQ ID NO: 5308064 - DNA, 25 bp, Homo sapien
cgcagcccacagaacgacaacttac

SEQ ID NO: 5308065 - DNA, 25 bp, Homo sapien
gcaagtccagccgaagtctgcgttc

SEQ ID NO: 5308066 - DNA, 25 bp, Homo sapien
cagagccgcctagagctggtttgca

SEQ ID NO: 5308067 - DNA, 25 bp, Homo sapien
tcaatctagcacgagcaacaggcag

SEQ ID NO: 5308068 - DNA, 25 bp, Homo sapien
tggtttgcagcacgccaatctacgt

SEQ ID NO: 5308069 - DNA, 25 bp, Homo sapien
ctaaaacaatgagggacagcgttcc

SEQ ID NO: 5308070 - DNA, 25 bp, Homo sapien
taaagatataagactgcaagccaag

SEQ ID NO: 5308071 - DNA, 25 bp, Homo sapien
cagtaggagatatatctgaattatc

SEQ ID NO: 5308072 - DNA, 25 bp, Homo sapien
tgacagtgaggctgcgtgacaaagt

SEQ ID NO: 5308073 - DNA, 25 bp, Homo sapien
catcttttatagttatcttcagtag

SEQ ID NO: 5308074 - DNA, 25 bp, Homo sapien
caacttgaacccgaatgccttttag

SEQ ID NO: 5308075 - DNA, 25 bp, Homo sapien
cagttggctccgtatgaaatagggc

SEQ ID NO: 5308076 - DNA, 25 bp, Homo sapien
gaaatagggccactagctgacagca

SEQ ID NO: 5308077 - DNA, 25 bp, Homo sapien
tctaggcaaggactgggcaaagcat

SEQ ID NO: 5308078 - DNA, 25 bp, Homo sapien
caatctgcttgtcctggtatactgg

SEQ ID NO: 5308079 - DNA, 25 bp, Homo sapien
tactggatcaggtgtagtctttgct

SEQ ID NO: 5308080 - DNA, 25 bp, Homo sapien
taacatagccccttctctaaggtac

SEQ ID NO: 5308081 - DNA, 25 bp, Homo sapien
aattatagatacgtcacatgctcac

SEQ ID NO: 5308082 - DNA, 25 bp, Homo sapien
taggaaaagataggaagttgtaatg

SEQ ID NO: 5308083 - DNA, 25 bp, Homo sapien
tactataagagctatcaacactgta

SEQ ID NO: 5308084 - DNA, 25 bp, Homo sapien
caaaatgctggataaataagagtct

SEQ ID NO: 5308085 - DNA, 25 bp, Homo sapien
cattgggtggcaaatgtagcatatc

SEQ ID NO: 5308086 - DNA, 25 bp, Homo sapien
cccctgggtctcagaagagaatact

SEQ ID NO: 5308087 - DNA, 25 bp, Homo sapien
tgattacgaaggcaccccacatact

SEQ ID NO: 5308088 - DNA, 25 bp, Homo sapien
tcaaatgggttttcaaggagccacg

SEQ ID NO: 5308089 - DNA, 25 bp, Homo sapien
ccaatgtttgactcagcagatgatg

SEQ ID NO: 5308090 - DNA, 25 bp, Homo sapien
ccaagcagggttactggggggatag

SEQ ID NO: 5308091 - DNA, 25 bp, Homo sapien
tttgcttaaagaggccccaagcagg

SEQ ID NO: 5308092 - DNA, 25 bp, Homo sapien
tcagacttctgcttcaatccctttg

SEQ ID NO: 5308093 - DNA, 25 bp, Homo sapien
agcagggttactggggggatagttg

SEQ ID NO: 5308094 - DNA, 25 bp, Homo sapien
tcttcttactttcagaccatcaaac

SEQ ID NO: 5308095 - DNA, 25 bp, Homo sapien
gcttttggtcttcctctccccatgc

SEQ ID NO: 5308096 - DNA, 25 bp, Homo sapien
tactttcagaccatcaaactccaaa

SEQ ID NO: 5308097 - DNA, 25 bp, Homo sapien
ggtcatgcaaccaaagtcttgaagt

SEQ ID NO: 5308098 - DNA, 25 bp, Homo sapien
tgaataatgctgacttacactgcgt

SEQ ID NO: 5308099 - DNA, 25 bp, Homo sapien
tacactgcgtctcactgatagctga

SEQ ID NO: 5308100 - DNA, 25 bp, Homo sapien
ggtgggtgaacataccccaggagca

SEQ ID NO: 5308101 - DNA, 25 bp, Homo sapien
gattttaaggtcatagcaggctcag

SEQ ID NO: 5308102 - DNA, 25 bp, Homo sapien
agtttagaggcattcaagcctgagc

SEQ ID NO: 5308103 - DNA, 25 bp, Homo sapien
tgagcagtttagaggcattcaagcc

SEQ ID NO: 5308104 - DNA, 25 bp, Homo sapien
tagaggcattcaagcctgagctgtc

SEQ ID NO: 5308105 - DNA, 25 bp, Homo sapien
caatgagcagtttagaggcattcaa

SEQ ID NO: 5308106 - DNA, 25 bp, Homo sapien
cactgtttttgacatcctttatatt

SEQ ID NO: 5308107 - DNA, 25 bp, Homo sapien
cttgaatggcatgtcagtggtcact

SEQ ID NO: 5308108 - DNA, 25 bp, Homo sapien
ttatatttgtccagtcagctctaaa

SEQ ID NO: 5308109 - DNA, 25 bp, Homo sapien
tgaatggcatgtcagtggtcactgt

SEQ ID NO: 5308110 - DNA, 25 bp, Homo sapien
atggtatgacctgctatcaacacta

SEQ ID NO: 5308111 - DNA, 25 bp, Homo sapien
ggtgaaatggtagctgaactgccaa

SEQ ID NO: 5308112 - DNA, 25 bp, Homo sapien
ccattggtgaaatggtagctgaact

SEQ ID NO: 5308113 - DNA, 25 bp, Homo sapien
ttggtgaaatggtagctgaactgcc

SEQ ID NO: 5308114 - DNA, 25 bp, Homo sapien
ggtatagcctgctgcacacataggc

SEQ ID NO: 5308115 - DNA, 25 bp, Homo sapien
tggtatagcctgctgcacacatagg

SEQ ID NO: 5308116 - DNA, 25 bp, Homo sapien
ctgccgctctgaggctacaaacctc

SEQ ID NO: 5308117 - DNA, 25 bp, Homo sapien
atgtggtatagcctgccgctctgag

SEQ ID NO: 5308118 - DNA, 25 bp, Homo sapien
ccattggcttccaggatatttaaaa

SEQ ID NO: 5308119 - DNA, 25 bp, Homo sapien
ttggtacaccattggcttccaggat

SEQ ID NO: 5308120 - DNA, 25 bp, Homo sapien
cttttggtacaccattggcttccag

SEQ ID NO: 5308121 - DNA, 25 bp, Homo sapien
cattggcttccaggatatttaaaaa

SEQ ID NO: 5308122 - DNA, 25 bp, Homo sapien
gaaatgtgaagcactggttaggaat

SEQ ID NO: 5308123 - DNA, 25 bp, Homo sapien
tttgaaatgtgaagcactggttagg

SEQ ID NO: 5308124 - DNA, 25 bp, Homo sapien
tttttgaaatgtgaagcactggtta

SEQ ID NO: 5308125 - DNA, 25 bp, Homo sapien
gtgaagcactggttaggaatttgag

SEQ ID NO: 5308126 - DNA, 25 bp, Homo sapien
ggcaatactggaccaactgcgaggg

SEQ ID NO: 5308127 - DNA, 25 bp, Homo sapien
ctaaacaactgctaccttgggcaat

SEQ ID NO: 5308128 - DNA, 25 bp, Homo sapien
gggactgttttcttgagacctggaa

SEQ ID NO: 5308129 - DNA, 25 bp, Homo sapien
tttcttgagacctggaaagctgttc

SEQ ID NO: 5308130 - DNA, 25 bp, Homo sapien
tccagttgagtgaacatgaggttct

SEQ ID NO: 5308131 - DNA, 25 bp, Homo sapien
cctggtgagtattgatgaaattctt

SEQ ID NO: 5308132 - DNA, 25 bp, Homo sapien
ggttctgaagtgtgactgtttatga

SEQ ID NO: 5308133 - DNA, 25 bp, Homo sapien
ggtacttgtcctgtgacaagcctgg

SEQ ID NO: 5308134 - DNA, 25 bp, Homo sapien
tgccactaccttgcaggacaatatt

SEQ ID NO: 5308135 - DNA, 25 bp, Homo sapien
cactaccttgcaggacaatattagc

SEQ ID NO: 5308136 - DNA, 25 bp, Homo sapien
ccttgcaggacaatattagctgatg

SEQ ID NO: 5308137 - DNA, 25 bp, Homo sapien
aggctgccactaccttgcaggacaa

SEQ ID NO: 5308138 - DNA, 25 bp, Homo sapien
cagtgcagagcagtgtgccgtaaaa

SEQ ID NO: 5308139 - DNA, 25 bp, Homo sapien
tgttgacttattctgacagtgcaga

SEQ ID NO: 5308140 - DNA, 25 bp, Homo sapien
tcttcaatcactatggatgttgact

SEQ ID NO: 5308141 - DNA, 25 bp, Homo sapien
ggacatcttcaatcactatggatgt

SEQ ID NO: 5308142 - DNA, 25 bp, Homo sapien
tgaatttccataagggagggtttga

SEQ ID NO: 5308143 - DNA, 25 bp, Homo sapien
gtggctctggtcactagtagaggct

SEQ ID NO: 5308144 - DNA, 25 bp, Homo sapien
taagggagggtttgatatactgcca

SEQ ID NO: 5308145 - DNA, 25 bp, Homo sapien
cagatcagtactggctttggtgtct

SEQ ID NO: 5308146 - DNA, 25 bp, Homo sapien
taacaaactacctacccatcttggc

SEQ ID NO: 5308147 - DNA, 25 bp, Homo sapien
caagtcttgtctctctggttattct

SEQ ID NO: 5308148 - DNA, 25 bp, Homo sapien
tctagtcatcgagaatcaacaagga

SEQ ID NO: 5308149 - DNA, 25 bp, Homo sapien
gaagtgctgcagatcatcctctact

SEQ ID NO: 5308150 - DNA, 25 bp, Homo sapien
tctcccactctaaactgtaggtcat

SEQ ID NO: 5308151 - DNA, 25 bp, Homo sapien
ctctcccactctaaactgtaggtca

SEQ ID NO: 5308152 - DNA, 25 bp, Homo sapien
atgatttctgccgtgtaagtgtagc

SEQ ID NO: 5308153 - DNA, 25 bp, Homo sapien
gccgtgtaagtgtagccaccagcac

SEQ ID NO: 5308154 - DNA, 25 bp, Homo sapien
ccagtatgatttctgccgtgtaagt

SEQ ID NO: 5308155 - DNA, 25 bp, Homo sapien
tctgccgtgtaagtgtagccaccag

SEQ ID NO: 5308156 - DNA, 25 bp, Homo sapien
tcatccctaaagagtccagcaggcc

SEQ ID NO: 5308157 - DNA, 25 bp, Homo sapien
tgatgacctgccactacggatctgc

SEQ ID NO: 5308158 - DNA, 25 bp, Homo sapien
tatggaatcgataaatctcatccct

SEQ ID NO: 5308159 - DNA, 25 bp, Homo sapien
tgctaatgctattcctgatgacctg

SEQ ID NO: 5308160 - DNA, 25 bp, Homo sapien
cacaaatcctaagggtaagtgagta

SEQ ID NO: 5308161 - DNA, 25 bp, Homo sapien
tacttcacaacatagaccacaaatc

SEQ ID NO: 5308162 - DNA, 25 bp, Homo sapien
agtgagtataaatcccttgggttgg

SEQ ID NO: 5308163 - DNA, 25 bp, Homo sapien
tgtgtccaaaatgtgttgaggggtc

SEQ ID NO: 5308164 - DNA, 25 bp, Homo sapien
atgcaaaagggagggcaagttttga

SEQ ID NO: 5308165 - DNA, 25 bp, Homo sapien
gcagtggaaagggatcatcaagaca

SEQ ID NO: 5308166 - DNA, 25 bp, Homo sapien
cagaggcacactgatcactctaaat

SEQ ID NO: 5308167 - DNA, 25 bp, Homo sapien
gggatcatcaagacagctgtccttg

SEQ ID NO: 5308168 - DNA, 25 bp, Homo sapien
tagaacaaagacatagggggcttct

SEQ ID NO: 5308169 - DNA, 25 bp, Homo sapien
tggccatacatttttgtcccagacc

SEQ ID NO: 5308170 - DNA, 25 bp, Homo sapien
catacatttttgtcccagacccagc

SEQ ID NO: 5308171 - DNA, 25 bp, Homo sapien
aacaaagacatagggggcttcttca

SEQ ID NO: 5308172 - DNA, 25 bp, Homo sapien
cacaaaaataccttgataaagagcc

SEQ ID NO: 5308173 - DNA, 25 bp, Homo sapien
gattcagtgacctatggtagtgcca

SEQ ID NO: 5308174 - DNA, 25 bp, Homo sapien
taaagagccaataccagcacaaaga

SEQ ID NO: 5308175 - DNA, 25 bp, Homo sapien
ttttaagactgacagccactgggcg

SEQ ID NO: 5308176 - DNA, 25 bp, Homo sapien
acattctttgactctattgcgaggt

SEQ ID NO: 5308177 - DNA, 25 bp, Homo sapien
ttctttgactctattgcgaggtaga

SEQ ID NO: 5308178 - DNA, 25 bp, Homo sapien
ctttgactctattgcgaggtagaag

SEQ ID NO: 5308179 - DNA, 25 bp, Homo sapien
tttaatgtacatcacattctttgac

SEQ ID NO: 5308180 - DNA, 25 bp, Homo sapien
cacatagtccaataagcaagtccag

SEQ ID NO: 5308181 - DNA, 25 bp, Homo sapien
cacagcacatagtccaataagcaag

SEQ ID NO: 5308182 - DNA, 25 bp, Homo sapien
ctgctcattgtattttaaaggcaca

SEQ ID NO: 5308183 - DNA, 25 bp, Homo sapien
tccaataagcaagtccagcaatacc

SEQ ID NO: 5308184 - DNA, 25 bp, Homo sapien
ggaagtcctagatcctcctccagaa

SEQ ID NO: 5308185 - DNA, 25 bp, Homo sapien
tggaagtcctagatcctcctccaga

SEQ ID NO: 5308186 - DNA, 25 bp, Homo sapien
gaagtcctagatcctcctccagaaa

SEQ ID NO: 5308187 - DNA, 25 bp, Homo sapien
gactttcacatcagggggtttgcat

SEQ ID NO: 5308188 - DNA, 25 bp, Homo sapien
ggttgaattactatgccctgcctgg

SEQ ID NO: 5308189 - DNA, 25 bp, Homo sapien
cctggtttccttgctattccattaa

SEQ ID NO: 5308190 - DNA, 25 bp, Homo sapien
tattccattaacatgccagatgact

SEQ ID NO: 5308191 - DNA, 25 bp, Homo sapien
tgcaaacactaaggcggttaccagt

SEQ ID NO: 5308192 - DNA, 25 bp, Homo sapien
tgtgcaaacactaaggcggttacca

SEQ ID NO: 5308193 - DNA, 25 bp, Homo sapien
accagtgtaacttaggtgcagctga

SEQ ID NO: 5308194 - DNA, 25 bp, Homo sapien
ttaccagtgtaacttaggtgcagct

SEQ ID NO: 5308195 - DNA, 25 bp, Homo sapien
catcacatcacaagccaagaacatt

SEQ ID NO: 5308196 - DNA, 25 bp, Homo sapien
caactgaggtaacatcacatcacaa

SEQ ID NO: 5308197 - DNA, 25 bp, Homo sapien
ggtaacatcacatcacaagccaaga

SEQ ID NO: 5308198 - DNA, 25 bp, Homo sapien
tctcaaacaactgaggtaacatcac

SEQ ID NO: 5308199 - DNA, 25 bp, Homo sapien
ttgaaaactgtcctaaggctagtgg

SEQ ID NO: 5308200 - DNA, 25 bp, Homo sapien
gctagtgggtgttcgctaaaaccaa

SEQ ID NO: 5308201 - DNA, 25 bp, Homo sapien
tgtcctaaggctagtgggtgttcgc

SEQ ID NO: 5308202 - DNA, 25 bp, Homo sapien
taaggctagtgggtgttcgctaaaa

SEQ ID NO: 5308203 - DNA, 25 bp, Homo sapien
ttctcagaatgccaaccagcagcac

SEQ ID NO: 5308204 - DNA, 25 bp, Homo sapien
gatggcatatttgttctagcttcat

SEQ ID NO: 5308205 - DNA, 25 bp, Homo sapien
ttttctcagaatgccaaccagcagc

SEQ ID NO: 5308206 - DNA, 25 bp, Homo sapien
ttaagatggcatatttgttctagct

SEQ ID NO: 5308207 - DNA, 25 bp, Homo sapien
tgcattcaatttaatggccttggaa

SEQ ID NO: 5308208 - DNA, 25 bp, Homo sapien
cagtaggacctcatttaccatgtag

SEQ ID NO: 5308209 - DNA, 25 bp, Homo sapien
ctggagaagccagtaggacctcatt

SEQ ID NO: 5308210 - DNA, 25 bp, Homo sapien
cattcaatttaatggccttggaatc

SEQ ID NO: 5308211 - DNA, 25 bp, Homo sapien
taaactatcaagcacttccccagga

SEQ ID NO: 5308212 - DNA, 25 bp, Homo sapien
caaggtcaagaagtgtcaactacta

SEQ ID NO: 5308213 - DNA, 25 bp, Homo sapien
aaatggatcacttgcccaacagtgg

SEQ ID NO: 5308214 - DNA, 25 bp, Homo sapien
ccctcatgatttgggacagctgtaa

SEQ ID NO: 5308215 - DNA, 25 bp, Homo sapien
aaaaattggatagtagctgtgtgga

SEQ ID NO: 5308216 - DNA, 25 bp, Homo sapien
attggatagtagctgtgtggattac

SEQ ID NO: 5308217 - DNA, 25 bp, Homo sapien
tccttcaaaaattggatagtagctg

SEQ ID NO: 5308218 - DNA, 25 bp, Homo sapien
cttcaaaaattggatagtagctgtg

SEQ ID NO: 5308219 - DNA, 25 bp, Homo sapien
cctttgtccatagcttctacatcat

SEQ ID NO: 5308220 - DNA, 25 bp, Homo sapien
ctttgtccatagcttctacatcatt

SEQ ID NO: 5308221 - DNA, 25 bp, Homo sapien
tcctttgtccatagcttctacatca

SEQ ID NO: 5308222 - DNA, 25 bp, Homo sapien
ctgaaacataactaaattctgcttt

SEQ ID NO: 5308223 - DNA, 25 bp, Homo sapien
ttgcaaacatgctcgggatttacca

SEQ ID NO: 5308224 - DNA, 25 bp, Homo sapien
tttgcaaacatgctcgggatttacc

SEQ ID NO: 5308225 - DNA, 25 bp, Homo sapien
gcaaacatgctcgggatttaccaac

SEQ ID NO: 5308226 - DNA, 25 bp, Homo sapien
tgcaaacatgctcgggatttaccaa

SEQ ID NO: 5308227 - DNA, 25 bp, Homo sapien
ctctgctctattatcagcaacatgc

SEQ ID NO: 5308228 - DNA, 25 bp, Homo sapien
ggcagaatgcaagccactcttgtct

SEQ ID NO: 5308229 - DNA, 25 bp, Homo sapien
cacagttggttcatggcagaatgca

SEQ ID NO: 5308230 - DNA, 25 bp, Homo sapien
tattatcagcaacatgcacagttgg

SEQ ID NO: 5308231 - DNA, 25 bp, Homo sapien
agaggacagcgacagacagttaaaa

SEQ ID NO: 5308232 - DNA, 25 bp, Homo sapien
gccagcttgtacaaagagataaaac

SEQ ID NO: 5308233 - DNA, 25 bp, Homo sapien
cttctgccagcttgtacaaagagat

SEQ ID NO: 5308234 - DNA, 25 bp, Homo sapien
cgacagacagttaaaagcctcttca

SEQ ID NO: 5308235 - DNA, 25 bp, Homo sapien
tctgaaggcccatttatgtctattt

SEQ ID NO: 5308236 - DNA, 25 bp, Homo sapien
taagcatatgcttcagttgacatct

SEQ ID NO: 5308237 - DNA, 25 bp, Homo sapien
ctaagacttggacgctttgtttgca

SEQ ID NO: 5308238 - DNA, 25 bp, Homo sapien
caagttaggcagtggtagacaacaa

SEQ ID NO: 5308239 - DNA, 25 bp, Homo sapien
cttaaagcgtccattctaggactca

SEQ ID NO: 5308240 - DNA, 25 bp, Homo sapien
gtcacttaaagcgtccattctagga

SEQ ID NO: 5308241 - DNA, 25 bp, Homo sapien
aagcgtccattctaggactcattcc

SEQ ID NO: 5308242 - DNA, 25 bp, Homo sapien
ctcaagtcacttaaagcgtccattc

SEQ ID NO: 5308243 - DNA, 25 bp, Homo sapien
gatggacatcagctgatcacagaaa

SEQ ID NO: 5308244 - DNA, 25 bp, Homo sapien
gatgctgtcgatcaaagccttagga

SEQ ID NO: 5308245 - DNA, 25 bp, Homo sapien
gaaaggtgctgcttcgatggacatc

SEQ ID NO: 5308246 - DNA, 25 bp, Homo sapien
ccttaggactgtcctccaggacgaa

SEQ ID NO: 5308247 - DNA, 25 bp, Homo sapien
ttaaacaacaaagatgccatgccag

SEQ ID NO: 5308248 - DNA, 25 bp, Homo sapien
tgccagcttttgaaatcagagagga

SEQ ID NO: 5308249 - DNA, 25 bp, Homo sapien
atcagagaggaaatctcagattctg

SEQ ID NO: 5308250 - DNA, 25 bp, Homo sapien
aacaacaaagatgccatgccagctt

SEQ ID NO: 5308251 - DNA, 25 bp, Homo sapien
ctaagaagtaaaagtggatgtcaac

SEQ ID NO: 5308252 - DNA, 25 bp, Homo sapien
tcacatactattgatgcatatagat

SEQ ID NO: 5308253 - DNA, 25 bp, Homo sapien
tatagcagttgtaggatattattca

SEQ ID NO: 5308254 - DNA, 25 bp, Homo sapien
ttctgtaagaataactaattcactg

SEQ ID NO: 5308255 - DNA, 25 bp, Homo sapien
acgatttggcccgttgtgttgaaca

SEQ ID NO: 5308256 - DNA, 25 bp, Homo sapien
cactatcctggacatatcgactcaa

SEQ ID NO: 5308257 - DNA, 25 bp, Homo sapien
tcgactcaatgtgattggatttcct

SEQ ID NO: 5308258 - DNA, 25 bp, Homo sapien
tgtgttgaacactatcctggacata

SEQ ID NO: 5308259 - DNA, 25 bp, Homo sapien
ggacaacacagtgccgtccagaaga

SEQ ID NO: 5308260 - DNA, 25 bp, Homo sapien
aatctattattggacaacacagtgc

SEQ ID NO: 5308261 - DNA, 25 bp, Homo sapien
tattattggacaacacagtgccgtc

SEQ ID NO: 5308262 - DNA, 25 bp, Homo sapien
gataaaatctattattggacaacac

SEQ ID NO: 5308263 - DNA, 25 bp, Homo sapien
cactcataactctggggcttgccat

SEQ ID NO: 5308264 - DNA, 25 bp, Homo sapien
agcactcataactctggggcttgcc

SEQ ID NO: 5308265 - DNA, 25 bp, Homo sapien
cagcactcataactctggggcttgc

SEQ ID NO: 5308266 - DNA, 25 bp, Homo sapien
gcactcataactctggggcttgcca

SEQ ID NO: 5308267 - DNA, 25 bp, Homo sapien
ccagggaagtaaaagagcttgcctg

SEQ ID NO: 5308268 - DNA, 25 bp, Homo sapien
cccagggaagtaaaagagcttgcct

SEQ ID NO: 5308269 - DNA, 25 bp, Homo sapien
agcccagggaagtaaaagagcttgc

SEQ ID NO: 5308270 - DNA, 25 bp, Homo sapien
gcccagggaagtaaaagagcttgcc

SEQ ID NO: 5308271 - DNA, 25 bp, Homo sapien
ccccaagattggttattggtcccat

SEQ ID NO: 5308272 - DNA, 25 bp, Homo sapien
cgtgcccggctggattgctgcaatt

SEQ ID NO: 5308273 - DNA, 25 bp, Homo sapien
gccagatgtcattaagagtccactt

SEQ ID NO: 5308274 - DNA, 25 bp, Homo sapien
cacaggtgcagtcatggaccaggca

SEQ ID NO: 5308275 - DNA, 25 bp, Homo sapien
gaaatgtaagtataactgccagatg

SEQ ID NO: 5308276 - DNA, 25 bp, Homo sapien
gccagtgggactgaagagtaccttc

SEQ ID NO: 5308277 - DNA, 25 bp, Homo sapien
cagagattggctagagttgcagtaa

SEQ ID NO: 5308278 - DNA, 25 bp, Homo sapien
tggaggagtgccactcaatgagtag

SEQ ID NO: 5308279 - DNA, 25 bp, Homo sapien
acatggtgataagatcagtgtgggc

SEQ ID NO: 5308280 - DNA, 25 bp, Homo sapien
tgcatgggagtgtatctccaaaggt

SEQ ID NO: 5308281 - DNA, 25 bp, Homo sapien
aagcacatgctctcacgagcatgca

SEQ ID NO: 5308282 - DNA, 25 bp, Homo sapien
ggtctgcaacagattagatacaaac

SEQ ID NO: 5308283 - DNA, 25 bp, Homo sapien
tcaccatcatctctagtcttccaag

SEQ ID NO: 5308284 - DNA, 25 bp, Homo sapien
ccctctgagcaaggacagtagtcct

SEQ ID NO: 5308285 - DNA, 25 bp, Homo sapien
taaacgcagattagactggaatcca

SEQ ID NO: 5308286 - DNA, 25 bp, Homo sapien
tgctaacagctgatactcaccctta

SEQ ID NO: 5308287 - DNA, 25 bp, Homo sapien
ccatctgaatcgtggccacacgcag

SEQ ID NO: 5308288 - DNA, 25 bp, Homo sapien
ccaggaacctcatccccatcaacag

SEQ ID NO: 5308289 - DNA, 25 bp, Homo sapien
gggcttgccagtgaagagcccagtc

SEQ ID NO: 5308290 - DNA, 25 bp, Homo sapien
gtgggcttgccagtgaagagcccag

SEQ ID NO: 5308291 - DNA, 25 bp, Homo sapien
tgggcttgccagtgaagagcccagt

SEQ ID NO: 5308292 - DNA, 25 bp, Homo sapien
ggcttgccagtgaagagcccagtcc

SEQ ID NO: 5308293 - DNA, 25 bp, Homo sapien
tgatgattgatagggtgactcactg

SEQ ID NO: 5308294 - DNA, 25 bp, Homo sapien
gctgatgattgatagggtgactcac

SEQ ID NO: 5308295 - DNA, 25 bp, Homo sapien
tgttgctgatgattgatagggtgac

SEQ ID NO: 5308296 - DNA, 25 bp, Homo sapien
tggtgagtggcttgttgttgctgat

SEQ ID NO: 5308297 - DNA, 25 bp, Homo sapien
cacccaaaggaataatgtggctttc

SEQ ID NO: 5308298 - DNA, 25 bp, Homo sapien
tccacccaaaggaataatgtggctt

SEQ ID NO: 5308299 - DNA, 25 bp, Homo sapien
ctccacccaaaggaataatgtggct

SEQ ID NO: 5308300 - DNA, 25 bp, Homo sapien
tccctggactcctccacccaaagga

SEQ ID NO: 5308301 - DNA, 25 bp, Homo sapien
tactgtgtgctgaccgggctggcac

SEQ ID NO: 5308302 - DNA, 25 bp, Homo sapien
gccggagcagtgagccgggggccac

SEQ ID NO: 5308303 - DNA, 25 bp, Homo sapien
ggctggcacgtgcagttgtgctcct

SEQ ID NO: 5308304 - DNA, 25 bp, Homo sapien
cccagcagcggggatactgtgtgct

SEQ ID NO: 5308305 - DNA, 25 bp, Homo sapien
tccccaatggaggagcggcgttttc

SEQ ID NO: 5308306 - DNA, 25 bp, Homo sapien
gctggaggactgtaagacgcctgat

SEQ ID NO: 5308307 - DNA, 25 bp, Homo sapien
gataatgccgctcttttccgctgtc

SEQ ID NO: 5308308 - DNA, 25 bp, Homo sapien
tgttggaatagagcgtaaccagctg

SEQ ID NO: 5308309 - DNA, 25 bp, Homo sapien
tattctcagtgctagataaagacca

SEQ ID NO: 5308310 - DNA, 25 bp, Homo sapien
taaagaccagggcaatgcaaaccag

SEQ ID NO: 5308311 - DNA, 25 bp, Homo sapien
caatgccaagtgatgggctaacatc

SEQ ID NO: 5308312 - DNA, 25 bp, Homo sapien
ctttggataaaacagcagtctattc

SEQ ID NO: 5308313 - DNA, 25 bp, Homo sapien
ccagacagttggtgaagttgttaca

SEQ ID NO: 5308314 - DNA, 25 bp, Homo sapien
cctgaggtgcttatttgtgaccttt

SEQ ID NO: 5308315 - DNA, 25 bp, Homo sapien
ctcagtgaaatcctcggggtggaac

SEQ ID NO: 5308316 - DNA, 25 bp, Homo sapien
cctctaacgtgttctctcagtgaaa

SEQ ID NO: 5308317 - DNA, 25 bp, Homo sapien
gaggactgcagagggcatttggagg

SEQ ID NO: 5308318 - DNA, 25 bp, Homo sapien
atcaattcgtcccacccttaatagg

SEQ ID NO: 5308319 - DNA, 25 bp, Homo sapien
cttaatagggcattttgccctccct

SEQ ID NO: 5308320 - DNA, 25 bp, Homo sapien
ccagggcagattaaggaggactgca

SEQ ID NO: 5308321 - DNA, 25 bp, Homo sapien
ccctccttgagagctccgggaggcc

SEQ ID NO: 5308322 - DNA, 25 bp, Homo sapien
agtgacctgggctgcactttgcccc

SEQ ID NO: 5308323 - DNA, 25 bp, Homo sapien
cagcctccctgaatccgatcggctt

SEQ ID NO: 5308324 - DNA, 25 bp, Homo sapien
atccgatcggcttccaacacagcag

SEQ ID NO: 5308325 - DNA, 25 bp, Homo sapien
tgccgcccacgctgggccactctgc

SEQ ID NO: 5308326 - DNA, 25 bp, Homo sapien
ctctgccgcccacgctgggccactc

SEQ ID NO: 5308327 - DNA, 25 bp, Homo sapien
ccactctgccttcccggtgggcacc

SEQ ID NO: 5308328 - DNA, 25 bp, Homo sapien
tctgccttcccggtgggcaccgagg

SEQ ID NO: 5308329 - DNA, 25 bp, Homo sapien
cacctccaggtacattagccttcat

SEQ ID NO: 5308330 - DNA, 25 bp, Homo sapien
gataaagtattgcaggctcaactct

SEQ ID NO: 5308331 - DNA, 25 bp, Homo sapien
taaagtattgcaggctcaactcttt

SEQ ID NO: 5308332 - DNA, 25 bp, Homo sapien
cagataaagtattgcaggctcaact

SEQ ID NO: 5308333 - DNA, 25 bp, Homo sapien
gtattgcaggctcaactcttttttc

SEQ ID NO: 5308334 - DNA, 25 bp, Homo sapien
gtcacttgcggcctgcacagtagga

SEQ ID NO: 5308335 - DNA, 25 bp, Homo sapien
ctctagaatctccaggacagcaatg

SEQ ID NO: 5308336 - DNA, 25 bp, Homo sapien
ggacagcaatgccaaaagatatttc

SEQ ID NO: 5308337 - DNA, 25 bp, Homo sapien
aggaccaaagtgaggctctagaatc

SEQ ID NO: 5308338 - DNA, 25 bp, Homo sapien
aggaccagcgtttccaagccgggct

SEQ ID NO: 5308339 - DNA, 25 bp, Homo sapien
tgagtttccccaaagccgtcggtgc

SEQ ID NO: 5308340 - DNA, 25 bp, Homo sapien
tccttttaattgtgacggtgcggcc

SEQ ID NO: 5308341 - DNA, 25 bp, Homo sapien
tcgggacggcccagaaacgctttgc

SEQ ID NO: 5308342 - DNA, 25 bp, Homo sapien
tcaggggctgagctccttagaaagc

SEQ ID NO: 5308343 - DNA, 25 bp, Homo sapien
gctgagctccttagaaagcttcggg

SEQ ID NO: 5308344 - DNA, 25 bp, Homo sapien
cgagccgcccgagaaagttttcaat

SEQ ID NO: 5308345 - DNA, 25 bp, Homo sapien
agttttcaattcgatggggctgcag

SEQ ID NO: 5308346 - DNA, 25 bp, Homo sapien
tgccgtcaataagcgtcagccccat

SEQ ID NO: 5308347 - DNA, 25 bp, Homo sapien
cacaaaagctcgacggaaattggag

SEQ ID NO: 5308348 - DNA, 25 bp, Homo sapien
ctttcagacaggacaacggatgcac

SEQ ID NO: 5308349 - DNA, 25 bp, Homo sapien
tttggaggcccttgtagctgccgtc

SEQ ID NO: 5308350 - DNA, 25 bp, Homo sapien
cttttgttgtgcctagtattctcag

SEQ ID NO: 5308351 - DNA, 25 bp, Homo sapien
actgtgggctgaagtggttcattac

SEQ ID NO: 5308352 - DNA, 25 bp, Homo sapien
cattcccactactgaaggtctgtaa

SEQ ID NO: 5308353 - DNA, 25 bp, Homo sapien
gtgcctagtattctcaggactccaa

SEQ ID NO: 5308354 - DNA, 25 bp, Homo sapien
taaatctttctggatgctgacagga

SEQ ID NO: 5308355 - DNA, 25 bp, Homo sapien
agaatctgacttcgggaatctgggc

SEQ ID NO: 5308356 - DNA, 25 bp, Homo sapien
catttgtgcagaagcgccctttgga

SEQ ID NO: 5308357 - DNA, 25 bp, Homo sapien
tctgataggagggagataccctgat

SEQ ID NO: 5308358 - DNA, 25 bp, Homo sapien
cacgtctgtgttctggcacttggaa

SEQ ID NO: 5308359 - DNA, 25 bp, Homo sapien
agtggagagactgcacgtctgtgtt

SEQ ID NO: 5308360 - DNA, 25 bp, Homo sapien
gcacttggaacatttctcggatggg

SEQ ID NO: 5308361 - DNA, 25 bp, Homo sapien
tctggaactgtgattaaagttggtg

SEQ ID NO: 5308362 - DNA, 25 bp, Homo sapien
caagagcacggatccagcagatact

SEQ ID NO: 5308363 - DNA, 25 bp, Homo sapien
gcacggatccagcagatactgcagc

SEQ ID NO: 5308364 - DNA, 25 bp, Homo sapien
gccaagagcacggatccagcagata

SEQ ID NO: 5308365 - DNA, 25 bp, Homo sapien
caggcgaatggagtggccaagagca

SEQ ID NO: 5308366 - DNA, 25 bp, Homo sapien
aaatctggcacttcacactctgcag

SEQ ID NO: 5308367 - DNA, 25 bp, Homo sapien
tgatgcaaatctggcacttcacact

SEQ ID NO: 5308368 - DNA, 25 bp, Homo sapien
ttcctccattgtcactctgaggttt

SEQ ID NO: 5308369 - DNA, 25 bp, Homo sapien
tgctccctcgcagtggtgatgcaaa

SEQ ID NO: 5308370 - DNA, 25 bp, Homo sapien
gcagatttcctccaagcaggcacaa

SEQ ID NO: 5308371 - DNA, 25 bp, Homo sapien
ttcctccaagcaggcacaaggctct

SEQ ID NO: 5308372 - DNA, 25 bp, Homo sapien
tgatgtcatctagcagatttcctcc

SEQ ID NO: 5308373 - DNA, 25 bp, Homo sapien
tctagccttttgatgtcatctagca

SEQ ID NO: 5308374 - DNA, 25 bp, Homo sapien
ccgtatgcctctccaccactgttgt

SEQ ID NO: 5308375 - DNA, 25 bp, Homo sapien
ggtgagaccgtatgcctctccacca

SEQ ID NO: 5308376 - DNA, 25 bp, Homo sapien
cccggtgagaccgtatgcctctcca

SEQ ID NO: 5308377 - DNA, 25 bp, Homo sapien
cgtatgcctctccaccactgttgtt

SEQ ID NO: 5308378 - DNA, 25 bp, Homo sapien
gcgagactcaggcaagaccccagga

SEQ ID NO: 5308379 - DNA, 25 bp, Homo sapien
ctgcatccgcgagactcaggcaaga

SEQ ID NO: 5308380 - DNA, 25 bp, Homo sapien
tcacatctcctggtacaaggtacag

SEQ ID NO: 5308381 - DNA, 25 bp, Homo sapien
tggagaaggctccataacggcccct

SEQ ID NO: 5308382 - DNA, 25 bp, Homo sapien
caaccttgatcactgtaggatccca

SEQ ID NO: 5308383 - DNA, 25 bp, Homo sapien
gagccacaagggtgttttaaaagca

SEQ ID NO: 5308384 - DNA, 25 bp, Homo sapien
ggtgcaaactgggtgagaccaacct

SEQ ID NO: 5308385 - DNA, 25 bp, Homo sapien
accccagagggcgacagggactttg

SEQ ID NO: 5308386 - DNA, 25 bp, Homo sapien
tgcaaagagattggcagagaactgg

SEQ ID NO: 5308387 - DNA, 25 bp, Homo sapien
gtggaacaggcactggagcgacaca

SEQ ID NO: 5308388 - DNA, 25 bp, Homo sapien
cagccagttgcagggactaaacaaa

SEQ ID NO: 5308389 - DNA, 25 bp, Homo sapien
aaatctgggcagatgagcaattggc

SEQ ID NO: 5308390 - DNA, 25 bp, Homo sapien
gacttggtcctatcagatgctgagc

SEQ ID NO: 5308391 - DNA, 25 bp, Homo sapien
ttggtcctatcagatgctgagcttg

SEQ ID NO: 5308392 - DNA, 25 bp, Homo sapien
gatcagacttggtcctatcagatgc

SEQ ID NO: 5308393 - DNA, 25 bp, Homo sapien
gctgatcagacttggtcctatcaga

SEQ ID NO: 5308394 - DNA, 25 bp, Homo sapien
aagagaggggtcaacaccaggtagg

SEQ ID NO: 5308395 - DNA, 25 bp, Homo sapien
gaagagaggggtcaacaccaggtag

SEQ ID NO: 5308396 - DNA, 25 bp, Homo sapien
agagaggggtcaacaccaggtaggg

SEQ ID NO: 5308397 - DNA, 25 bp, Homo sapien
caggtagggcctgggagcattcatc

SEQ ID NO: 5308398 - DNA, 25 bp, Homo sapien
aacgtctgaattcgccagtggctca

SEQ ID NO: 5308399 - DNA, 25 bp, Homo sapien
agatgcgacttaggtttttgcccat

SEQ ID NO: 5308400 - DNA, 25 bp, Homo sapien
cagtgtagataagtgaagatgcgac

SEQ ID NO: 5308401 - DNA, 25 bp, Homo sapien
gaggaaaactgaaatcaacgtctga

SEQ ID NO: 5308402 - DNA, 25 bp, Homo sapien
aaacgtggaagtcaatttgtgtggc

SEQ ID NO: 5308403 - DNA, 25 bp, Homo sapien
tgcagccctagcagaaacgtggaag

SEQ ID NO: 5308404 - DNA, 25 bp, Homo sapien
cgttttagcatattgagtggtccaa

SEQ ID NO: 5308405 - DNA, 25 bp, Homo sapien
tggctggtgcaagcgttttagcata

SEQ ID NO: 5308406 - DNA, 25 bp, Homo sapien
tatagtgatcttccaattagccgtg

SEQ ID NO: 5308407 - DNA, 25 bp, Homo sapien
tttgatagttctgctcgagaggcaa

SEQ ID NO: 5308408 - DNA, 25 bp, Homo sapien
gctgataaaactgcaagccatttgc

SEQ ID NO: 5308409 - DNA, 25 bp, Homo sapien
ggccaacagccagagtattttatct

SEQ ID NO: 5308410 - DNA, 25 bp, Homo sapien
cagatgtcttctatgaccccacacg

SEQ ID NO: 5308411 - DNA, 25 bp, Homo sapien
aagcatattatctgagacacagatg

SEQ ID NO: 5308412 - DNA, 25 bp, Homo sapien
gatgtcttctatgaccccacacgac

SEQ ID NO: 5308413 - DNA, 25 bp, Homo sapien
cgtaagcatattatctgagacacag

SEQ ID NO: 5308414 - DNA, 25 bp, Homo sapien
cgaataggcagttgtgtgaccagca

SEQ ID NO: 5308415 - DNA, 25 bp, Homo sapien
agtgcaggaaccactgagggttcga

SEQ ID NO: 5308416 - DNA, 25 bp, Homo sapien
cagcgaggtagtcagagccagtcgt

SEQ ID NO: 5308417 - DNA, 25 bp, Homo sapien
tgaccagcaatccagcgaggtagtc

SEQ ID NO: 5308418 - DNA, 25 bp, Homo sapien
ccattcaattctggaaggaccaacc

SEQ ID NO: 5308419 - DNA, 25 bp, Homo sapien
gtctcaggtcccagaagtctagagg

SEQ ID NO: 5308420 - DNA, 25 bp, Homo sapien
tcccatctgagcaacatatccagct

SEQ ID NO: 5308421 - DNA, 25 bp, Homo sapien
tgttccccattcaattctggaagga

SEQ ID NO: 5308422 - DNA, 25 bp, Homo sapien
cagaaagctgggtgggctcaaggag

SEQ ID NO: 5308423 - DNA, 25 bp, Homo sapien
tggagacagaaagctgggtgggctc

SEQ ID NO: 5308424 - DNA, 25 bp, Homo sapien
tcaaggagggaggtactggagtcat

SEQ ID NO: 5308425 - DNA, 25 bp, Homo sapien
agacagaaagctgggtgggctcaag

SEQ ID NO: 5308426 - DNA, 25 bp, Homo sapien
gcagctctggtaaagggtctaaaca

SEQ ID NO: 5308427 - DNA, 25 bp, Homo sapien
ccagcagctctggtaaagggtctaa

SEQ ID NO: 5308428 - DNA, 25 bp, Homo sapien
cagcagctctggtaaagggtctaaa

SEQ ID NO: 5308429 - DNA, 25 bp, Homo sapien
agctctggtaaagggtctaaacagc

SEQ ID NO: 5308430 - DNA, 25 bp, Homo sapien
tagctagcaggtgcaacagacccat

SEQ ID NO: 5308431 - DNA, 25 bp, Homo sapien
taccctgaagacaagggaccagacc

SEQ ID NO: 5308432 - DNA, 25 bp, Homo sapien
tgggacccctgataatgctgctgca

SEQ ID NO: 5308433 - DNA, 25 bp, Homo sapien
tctgaagccaccatgatcaggaagc

SEQ ID NO: 5308434 - DNA, 25 bp, Homo sapien
cacaaaacacacgtgtaacgtgagt

SEQ ID NO: 5308435 - DNA, 25 bp, Homo sapien
catattgccagacataattgacata

SEQ ID NO: 5308436 - DNA, 25 bp, Homo sapien
tatgacttaattgagttattcttag

SEQ ID NO: 5308437 - DNA, 25 bp, Homo sapien
agaattcctgagtagacaccatatt

SEQ ID NO: 5308438 - DNA, 25 bp, Homo sapien
aggccaggtgtgaaatgatgtcaga

SEQ ID NO: 5308439 - DNA, 25 bp, Homo sapien
tttgccaacatgagagtggagtagg

SEQ ID NO: 5308440 - DNA, 25 bp, Homo sapien
ggactcagaaggtgatggcagcaca

SEQ ID NO: 5308441 - DNA, 25 bp, Homo sapien
tgtggtgagccacgggtccaccttc

SEQ ID NO: 5308442 - DNA, 25 bp, Homo sapien
tagggtttaaaatagtcgctatgaa

SEQ ID NO: 5308443 - DNA, 25 bp, Homo sapien
tatgaaatttgctcctgccattggt

SEQ ID NO: 5308444 - DNA, 25 bp, Homo sapien
ttacaacgtacatcttaatatcccc

SEQ ID NO: 5308445 - DNA, 25 bp, Homo sapien
tgccagccccgagataacagcgctg

SEQ ID NO: 5308446 - DNA, 25 bp, Homo sapien
atggcttgttactaactgtgtacat

SEQ ID NO: 5308447 - DNA, 25 bp, Homo sapien
aatggcttgttactaactgtgtaca

SEQ ID NO: 5308448 - DNA, 25 bp, Homo sapien
ctgtaaatgttgagactggattgaa

SEQ ID NO: 5308449 - DNA, 25 bp, Homo sapien
taaatgttgagactggattgaacct

SEQ ID NO: 5308450 - DNA, 25 bp, Homo sapien
gggtggccggatggtctgtaaatgt

SEQ ID NO: 5308451 - DNA, 25 bp, Homo sapien
ttgagactggattgaacctttgccc

SEQ ID NO: 5308452 - DNA, 25 bp, Homo sapien
agtgcaatgttccacataaatgcag

SEQ ID NO: 5308453 - DNA, 25 bp, Homo sapien
tgtgttgctcattgaaaggtgcttg

SEQ ID NO: 5308454 - DNA, 25 bp, Homo sapien
tgctcattgaaaggtgcttgctctt

SEQ ID NO: 5308455 - DNA, 25 bp, Homo sapien
tgctctttgaaaagtgcaatgttcc

SEQ ID NO: 5308456 - DNA, 25 bp, Homo sapien
tctatgctgtttcttgcaggtaatc

SEQ ID NO: 5308457 - DNA, 25 bp, Homo sapien
tctctatgctgtttcttgcaggtaa

SEQ ID NO: 5308458 - DNA, 25 bp, Homo sapien
cttctctatgctgtttcttgcaggt

SEQ ID NO: 5308459 - DNA, 25 bp, Homo sapien
ctctatgctgtttcttgcaggtaat

SEQ ID NO: 5308460 - DNA, 25 bp, Homo sapien
tccttgataaaagggatgtggcatc

SEQ ID NO: 5308461 - DNA, 25 bp, Homo sapien
gcacggatctctacaggttcttcta

SEQ ID NO: 5308462 - DNA, 25 bp, Homo sapien
ttctaggttcaagggccatacattg

SEQ ID NO: 5308463 - DNA, 25 bp, Homo sapien
tcctaataggccactataaatgagt

SEQ ID NO: 5308464 - DNA, 25 bp, Homo sapien
catctttagctgacatgggttcttt

SEQ ID NO: 5308465 - DNA, 25 bp, Homo sapien
tgccatatcagtttaattatagctc

SEQ ID NO: 5308466 - DNA, 25 bp, Homo sapien
aaaatatccaagcaacttgaaatgt

SEQ ID NO: 5308467 - DNA, 25 bp, Homo sapien
gaacaggtttggaggcaattgtgaa

SEQ ID NO: 5308468 - DNA, 25 bp, Homo sapien
tcatggcatcaaaccacaccagttc

SEQ ID NO: 5308469 - DNA, 25 bp, Homo sapien
tgctccaaggtctaagataatcatg

SEQ ID NO: 5308470 - DNA, 25 bp, Homo sapien
taagataatcatggcatcaaaccac

SEQ ID NO: 5308471 - DNA, 25 bp, Homo sapien
actccaaagccctcttacaagatat

SEQ ID NO: 5308472 - DNA, 25 bp, Homo sapien
gctattaaaggtccgaagccccaca

SEQ ID NO: 5308473 - DNA, 25 bp, Homo sapien
ttatacccacttggccaaagctagg

SEQ ID NO: 5308474 - DNA, 25 bp, Homo sapien
tgtctaatacacatcaggctgccag

SEQ ID NO: 5308475 - DNA, 25 bp, Homo sapien
gagaagacagcgttacctaaggcaa

SEQ ID NO: 5308476 - DNA, 25 bp, Homo sapien
agcattgtatctgtggcctgtcctg

SEQ ID NO: 5308477 - DNA, 25 bp, Homo sapien
aagcattgtatctgtggcctgtcct

SEQ ID NO: 5308478 - DNA, 25 bp, Homo sapien
gatggcagctctaccgccaaggtct

SEQ ID NO: 5308479 - DNA, 25 bp, Homo sapien
cctgtcctgtaggaggatggcagct

SEQ ID NO: 5308480 - DNA, 25 bp, Homo sapien
ttcatagatcctgtcactgtctgag

SEQ ID NO: 5308481 - DNA, 25 bp, Homo sapien
gttgctttcatagatcctgtcactg

SEQ ID NO: 5308482 - DNA, 25 bp, Homo sapien
ctgcaccagtagtttgaccaagccc

SEQ ID NO: 5308483 - DNA, 25 bp, Homo sapien
gtagtttgaccaagcccatgcccca

SEQ ID NO: 5308484 - DNA, 25 bp, Homo sapien
catccccatggaagatttaagctga

SEQ ID NO: 5308485 - DNA, 25 bp, Homo sapien
ggtagcaaccagtaagagctgcctt

SEQ ID NO: 5308486 - DNA, 25 bp, Homo sapien
caaaaaaggagatctcccagggcat

SEQ ID NO: 5308487 - DNA, 25 bp, Homo sapien
taaagagattcctagttgcagacag

SEQ ID NO: 5308488 - DNA, 25 bp, Homo sapien
tgtgtggccaaagacctgtacaggg

SEQ ID NO: 5308489 - DNA, 25 bp, Homo sapien
gagagcaattggtgcaggtatccca

SEQ ID NO: 5308490 - DNA, 25 bp, Homo sapien
cctggccactgggagtataactgat

SEQ ID NO: 5308491 - DNA, 25 bp, Homo sapien
gatggtttctcaacccaagagacag

SEQ ID NO: 5308492 - DNA, 25 bp, Homo sapien
tctcgcaaaaagttaacctggctgg

SEQ ID NO: 5308493 - DNA, 25 bp, Homo sapien
tagtcctgggagtagcatgatggca

SEQ ID NO: 5308494 - DNA, 25 bp, Homo sapien
cattcagaccatagccggtgggcaa

SEQ ID NO: 5308495 - DNA, 25 bp, Homo sapien
tccggtggtgacgtgaaactcaaag

SEQ ID NO: 5308496 - DNA, 25 bp, Homo sapien
aatgaactgggcgtcttgcttccgc

SEQ ID NO: 5308497 - DNA, 25 bp, Homo sapien
gatgtgacgtgggatgcagtcctca

SEQ ID NO: 5308498 - DNA, 25 bp, Homo sapien
gaataagcaatcagccctctcagaa

SEQ ID NO: 5308499 - DNA, 25 bp, Homo sapien
gacgtcagcgctgtgactctgggca

SEQ ID NO: 5308500 - DNA, 25 bp, Homo sapien
cctctatgtgatttaggatttctgg

SEQ ID NO: 5308501 - DNA, 25 bp, Homo sapien
aattggagtaatggactcagcttct

SEQ ID NO: 5308502 - DNA, 25 bp, Homo sapien
ggttcattcttggtgccctggccaa

SEQ ID NO: 5308503 - DNA, 25 bp, Homo sapien
ttccctctatgtgatttaggatttc

SEQ ID NO: 5308504 - DNA, 25 bp, Homo sapien
agaattcagcttgggttgagatgtt

SEQ ID NO: 5308505 - DNA, 25 bp, Homo sapien
cagaattcagcttgggttgagatgt

SEQ ID NO: 5308506 - DNA, 25 bp, Homo sapien
tcagaattcagcttgggttgagatg

SEQ ID NO: 5308507 - DNA, 25 bp, Homo sapien
tagaatcgagtttccccaatcagaa

SEQ ID NO: 5308508 - DNA, 25 bp, Homo sapien
cgaacggttctagcttccgaatgaa

SEQ ID NO: 5308509 - DNA, 25 bp, Homo sapien
tgtgggcactacatagccctccgca

SEQ ID NO: 5308510 - DNA, 25 bp, Homo sapien
ttaagctgcaccactaaagcgaggt

SEQ ID NO: 5308511 - DNA, 25 bp, Homo sapien
tctttacagtcctcattgacatgca

SEQ ID NO: 5308512 - DNA, 25 bp, Homo sapien
cagtcctcattgacatgcaatatgg

SEQ ID NO: 5308513 - DNA, 25 bp, Homo sapien
attgacatgcaatatggcaagcttc

SEQ ID NO: 5308514 - DNA, 25 bp, Homo sapien
agcttttctttacagtcctcattga

SEQ ID NO: 5308515 - DNA, 25 bp, Homo sapien
tagcagagtaggaagctcgaagcgc

SEQ ID NO: 5308516 - DNA, 25 bp, Homo sapien
tgggatacacaggagcgcaagttca

SEQ ID NO: 5308517 - DNA, 25 bp, Homo sapien
gcaagttcaccgagttttccgcagt

SEQ ID NO: 5308518 - DNA, 25 bp, Homo sapien
gctatgctgcatacacaaggagcag

SEQ ID NO: 5308519 - DNA, 25 bp, Homo sapien
gcctcgtatgcaacaggttcctcca

SEQ ID NO: 5308520 - DNA, 25 bp, Homo sapien
tcctccaaagcggtatcattacaga

SEQ ID NO: 5308521 - DNA, 25 bp, Homo sapien
tgtttccaaggttacaaattgccga

SEQ ID NO: 5308522 - DNA, 25 bp, Homo sapien
gagaataaacacagttgacatcact

SEQ ID NO: 5308523 - DNA, 25 bp, Homo sapien
gattaggtaaaagggcgacgctcca

SEQ ID NO: 5308524 - DNA, 25 bp, Homo sapien
gcatctcgactgagtcagcctaggg

SEQ ID NO: 5308525 - DNA, 25 bp, Homo sapien
gtgacactgccttcaaggcccaggc

SEQ ID NO: 5308526 - DNA, 25 bp, Homo sapien
gacataacgcccgagcgcatctcga

SEQ ID NO: 5308527 - DNA, 25 bp, Homo sapien
agccccgagggctgtttgcgtgttg

SEQ ID NO: 5308528 - DNA, 25 bp, Homo sapien
tcaggccgctgacgcagccccgagg

SEQ ID NO: 5308529 - DNA, 25 bp, Homo sapien
gccacggcctcaggccgctgacgca

SEQ ID NO: 5308530 - DNA, 25 bp, Homo sapien
gccccgagggctgtttgcgtgttgg

SEQ ID NO: 5308531 - DNA, 25 bp, Homo sapien
cgagcaggccgcaccgcccggtggg

SEQ ID NO: 5308532 - DNA, 25 bp, Homo sapien
gtgggcgcacgtcaggcctccgcgg

SEQ ID NO: 5308533 - DNA, 25 bp, Homo sapien
cggccccgaaggcgcgagggacagc

SEQ ID NO: 5308534 - DNA, 25 bp, Homo sapien
gcccgggccagtgctcccctcggtc

SEQ ID NO: 5308535 - DNA, 25 bp, Homo sapien
gactccatgctgttgtccgtcggga

SEQ ID NO: 5308536 - DNA, 25 bp, Homo sapien
gaagtaggcgaccaacttcgccgcg

SEQ ID NO: 5308537 - DNA, 25 bp, Homo sapien
ctcccaagtggacggaagtaggcga

SEQ ID NO: 5308538 - DNA, 25 bp, Homo sapien
tcaggcacggagcccacagagcgag

SEQ ID NO: 5308539 - DNA, 25 bp, Homo sapien
tatgggatttttgccgtcggagcac

SEQ ID NO: 5308540 - DNA, 25 bp, Homo sapien
gatacctttggaggtgagacggcct

SEQ ID NO: 5308541 - DNA, 25 bp, Homo sapien
cacaatcagataatgcgtcccacca

SEQ ID NO: 5308542 - DNA, 25 bp, Homo sapien
gtcggagcacctcgtatccggcgcg

SEQ ID NO: 5308543 - DNA, 25 bp, Homo sapien
ctccgaagttttgccccgagtcttg

SEQ ID NO: 5308544 - DNA, 25 bp, Homo sapien
aattcgctccagtgactgtacacgg

SEQ ID NO: 5308545 - DNA, 25 bp, Homo sapien
aggctgtgagaaaacgagttgcttt

SEQ ID NO: 5308546 - DNA, 25 bp, Homo sapien
gtgataaatgttgcaacgggcatag

SEQ ID NO: 5308547 - DNA, 25 bp, Homo sapien
aatttccaggaattaactgtatcta

SEQ ID NO: 5308548 - DNA, 25 bp, Homo sapien
ccaggaattaactgtatctagaaaa

SEQ ID NO: 5308549 - DNA, 25 bp, Homo sapien
caaactcgctaaaatttccaggaat

SEQ ID NO: 5308550 - DNA, 25 bp, Homo sapien
ggaattaactgtatctagaaaaaga

SEQ ID NO: 5308551 - DNA, 25 bp, Homo sapien
gtttctagggcaactacatctgcag

SEQ ID NO: 5308552 - DNA, 25 bp, Homo sapien
gcagaaacatgtcctcctgtggcgt

SEQ ID NO: 5308553 - DNA, 25 bp, Homo sapien
gtggtcatccgacttgctggcccag

SEQ ID NO: 5308554 - DNA, 25 bp, Homo sapien
ctgtggcgttttccgggtagttgat

SEQ ID NO: 5308555 - DNA, 25 bp, Homo sapien
tcagatgagagagcgaggctcagaa

SEQ ID NO: 5308556 - DNA, 25 bp, Homo sapien
ctttcagatgagagagcgaggctca

SEQ ID NO: 5308557 - DNA, 25 bp, Homo sapien
gatgagagagcgaggctcagaagat

SEQ ID NO: 5308558 - DNA, 25 bp, Homo sapien
atgagagagcgaggctcagaagatg

SEQ ID NO: 5308559 - DNA, 25 bp, Homo sapien
catatctgacatacagggtattggg

SEQ ID NO: 5308560 - DNA, 25 bp, Homo sapien
actggttaggcaaagggagctcaca

SEQ ID NO: 5308561 - DNA, 25 bp, Homo sapien
gggtgaggacttcccaatatatcac

SEQ ID NO: 5308562 - DNA, 25 bp, Homo sapien
aaccgggaggtagccactagaactg

SEQ ID NO: 5308563 - DNA, 25 bp, Homo sapien
ttcagaatgcaaacccctaggtcaa

SEQ ID NO: 5308564 - DNA, 25 bp, Homo sapien
aaataagggccctccagcttctcag

SEQ ID NO: 5308565 - DNA, 25 bp, Homo sapien
tcacccagtcggctcaacaaagttt

SEQ ID NO: 5308566 - DNA, 25 bp, Homo sapien
tatgaatctcccagcagtgagtgag

SEQ ID NO: 5308567 - DNA, 25 bp, Homo sapien
gaccatcatctagggcgtctctcgg

SEQ ID NO: 5308568 - DNA, 25 bp, Homo sapien
tacgttccaggcatagtcaggtgac

SEQ ID NO: 5308569 - DNA, 25 bp, Homo sapien
catctggacaacagggtgtgcaccc

SEQ ID NO: 5308570 - DNA, 25 bp, Homo sapien
tgtgcacgtgcaaacgcgggacttt

SEQ ID NO: 5308571 - DNA, 25 bp, Homo sapien
tctcggggcgaatgatatgcacgtt

SEQ ID NO: 5308572 - DNA, 25 bp, Homo sapien
tctcctaggcctcgcaggagcagct

SEQ ID NO: 5308573 - DNA, 25 bp, Homo sapien
tggggcctcaccatccttcagggtc

SEQ ID NO: 5308574 - DNA, 25 bp, Homo sapien
cctagaggcctggatctggaagaat

SEQ ID NO: 5308575 - DNA, 25 bp, Homo sapien
tagaattagcctttcgggcctgcgc

SEQ ID NO: 5308576 - DNA, 25 bp, Homo sapien
ttcacgcgcgactagaagcggttcc

SEQ ID NO: 5308577 - DNA, 25 bp, Homo sapien
gcgatgtattcctccgctagaatta

SEQ ID NO: 5308578 - DNA, 25 bp, Homo sapien
gggcctgcgcgcctacaggtttcag

SEQ ID NO: 5308579 - DNA, 25 bp, Homo sapien
cgatggtcggtggttgtgtctctcc

SEQ ID NO: 5308580 - DNA, 25 bp, Homo sapien
tgacttaaggtcagtttgtttgaaa

SEQ ID NO: 5308581 - DNA, 25 bp, Homo sapien
ttgaaaagggagaacgtcagtccga

SEQ ID NO: 5308582 - DNA, 25 bp, Homo sapien
tctcctgagcattcgtacaaagtga

SEQ ID NO: 5308583 - DNA, 25 bp, Homo sapien
cccttgctgtgcgccctggtgctct

SEQ ID NO: 5308584 - DNA, 25 bp, Homo sapien
caagctgccccggtacccacttagg

SEQ ID NO: 5308585 - DNA, 25 bp, Homo sapien
cctccgccatgcagtctcccagacc

SEQ ID NO: 5308586 - DNA, 25 bp, Homo sapien
ggtcaaaggacccaggctccaggtc

SEQ ID NO: 5308587 - DNA, 25 bp, Homo sapien
cctggaggactacccccacgcccat

SEQ ID NO: 5308588 - DNA, 25 bp, Homo sapien
cagggtggagtcccgaccttggcat

SEQ ID NO: 5308589 - DNA, 25 bp, Homo sapien
gcagggtggagtcccgaccttggca

SEQ ID NO: 5308590 - DNA, 25 bp, Homo sapien
ggcagggtggagtcccgaccttggc

SEQ ID NO: 5308591 - DNA, 25 bp, Homo sapien
tttctctgaccatgccagacgcggc

SEQ ID NO: 5308592 - DNA, 25 bp, Homo sapien
ccggccacctgttgagaatccatgt

SEQ ID NO: 5308593 - DNA, 25 bp, Homo sapien
aggctccggactcagagctcgcgga

SEQ ID NO: 5308594 - DNA, 25 bp, Homo sapien
gatcgggcggctgtacaaccaagat

SEQ ID NO: 5308595 - DNA, 25 bp, Homo sapien
ccagagacgctcacgcgggcacggg

SEQ ID NO: 5308596 - DNA, 25 bp, Homo sapien
tggggtccagaaagtcctgagtgtg

SEQ ID NO: 5308597 - DNA, 25 bp, Homo sapien
tggttcctttccacgacctcccaga

SEQ ID NO: 5308598 - DNA, 25 bp, Homo sapien
gaggttaccaacctgaccaggccca

SEQ ID NO: 5308599 - DNA, 25 bp, Homo sapien
cttgagctccgactgtccagggaaa

SEQ ID NO: 5308600 - DNA, 25 bp, Homo sapien
gaaggctacacttcctgaggactga

SEQ ID NO: 5308601 - DNA, 25 bp, Homo sapien
gcctccctgggactagaagccaaag

SEQ ID NO: 5308602 - DNA, 25 bp, Homo sapien
tgtcagctgccccactaagaaaagg

SEQ ID NO: 5308603 - DNA, 25 bp, Homo sapien
tctctcttgggaatgggtaactgca

SEQ ID NO: 5308604 - DNA, 25 bp, Homo sapien
cgacaattgcttggagcgccagtcc

SEQ ID NO: 5308605 - DNA, 25 bp, Homo sapien
taaatgccagttggtccgggtacaa

SEQ ID NO: 5308606 - DNA, 25 bp, Homo sapien
taacaaggcgtacaaatgccgagcc

SEQ ID NO: 5308607 - DNA, 25 bp, Homo sapien
tgtacgggcgccaagtcccagatcc

SEQ ID NO: 5308608 - DNA, 25 bp, Homo sapien
atcgccggggccaggattgaagcgg

SEQ ID NO: 5308609 - DNA, 25 bp, Homo sapien
gattgaagcggggatgatggcagca

SEQ ID NO: 5308610 - DNA, 25 bp, Homo sapien
tctgcacaggtgacccggcctgtac

SEQ ID NO: 5308611 - DNA, 25 bp, Homo sapien
ggtcctggcgcacaaagctacacgc

SEQ ID NO: 5308612 - DNA, 25 bp, Homo sapien
cttcaggccagagccgaaaggcgct

SEQ ID NO: 5308613 - DNA, 25 bp, Homo sapien
tccaggaggcgggagtactgcttca

SEQ ID NO: 5308614 - DNA, 25 bp, Homo sapien
ctgcttcgcgttccggaaccgcggt

SEQ ID NO: 5308615 - DNA, 25 bp, Homo sapien
tattcacttcatccgggtggctggc

SEQ ID NO: 5308616 - DNA, 25 bp, Homo sapien
taagaataaatacccatgcctggcc

SEQ ID NO: 5308617 - DNA, 25 bp, Homo sapien
tcaatacgcgttgtacacgggccga

SEQ ID NO: 5308618 - DNA, 25 bp, Homo sapien
gaggcccggctcaagatgctgatta

SEQ ID NO: 5308619 - DNA, 25 bp, Homo sapien
tgccgacctggactatgtggagcct

SEQ ID NO: 5308620 - DNA, 25 bp, Homo sapien
ttgcacatcccattcaacaactctg

SEQ ID NO: 5308621 - DNA, 25 bp, Homo sapien
gaagtctcagagacagcggtagaga

SEQ ID NO: 5308622 - DNA, 25 bp, Homo sapien
gcggcccgacgtgcaaaccatgtgc

SEQ ID NO: 5308623 - DNA, 25 bp, Homo sapien
ggcggtggttggctctccctctcct

SEQ ID NO: 5308624 - DNA, 25 bp, Homo sapien
aggctgttgtcattagggcgattgc

SEQ ID NO: 5308625 - DNA, 25 bp, Homo sapien
tggaatcgctgaatcttgactcggc

SEQ ID NO: 5308626 - DNA, 25 bp, Homo sapien
tcattagggcgattgcggtggaatc

SEQ ID NO: 5308627 - DNA, 25 bp, Homo sapien
ggaaagtgaacctgggtccctatca

SEQ ID NO: 5308628 - DNA, 25 bp, Homo sapien
agagtgtgtgcttgcgacccgagta

SEQ ID NO: 5308629 - DNA, 25 bp, Homo sapien
gagaaatccactagcgtcagagaga

SEQ ID NO: 5308630 - DNA, 25 bp, Homo sapien
tgtgcgttgcaaaaccccgagagaa

SEQ ID NO: 5308631 - DNA, 25 bp, Homo sapien
tcttaatgatcggtcattttcccag

SEQ ID NO: 5308632 - DNA, 25 bp, Homo sapien
gacaatcattttcttcgtaagcacc

SEQ ID NO: 5308633 - DNA, 25 bp, Homo sapien
gaaattgcctgtatatgatattgct

SEQ ID NO: 5308634 - DNA, 25 bp, Homo sapien
tctgtcactgcctgtgtgggtactg

SEQ ID NO: 5308635 - DNA, 25 bp, Homo sapien
tcggtgctcctggtgtcgacttggc

SEQ ID NO: 5308636 - DNA, 25 bp, Homo sapien
tcctggtgtcgacttggcagtcaag

SEQ ID NO: 5308637 - DNA, 25 bp, Homo sapien
cgacttggcagtcaaggagaggcat

SEQ ID NO: 5308638 - DNA, 25 bp, Homo sapien
tggggttctcctcccactcggtgct

SEQ ID NO: 5308639 - DNA, 25 bp, Homo sapien
tgtagtattcttatgcaaaagctat

SEQ ID NO: 5308640 - DNA, 25 bp, Homo sapien
tctcactccctgtagggcgctttta

SEQ ID NO: 5308641 - DNA, 25 bp, Homo sapien
aagagggaccctgtcgctagcaaaa

SEQ ID NO: 5308642 - DNA, 25 bp, Homo sapien
caaaagcggagagtgagattgtagt

SEQ ID NO: 5308643 - DNA, 25 bp, Homo sapien
gagctgacaggttttgtcttctttt

SEQ ID NO: 5308644 - DNA, 25 bp, Homo sapien
catcccgagtagagctgacaggttt

SEQ ID NO: 5308645 - DNA, 25 bp, Homo sapien
atacaaggccgccaaaccccagcat

SEQ ID NO: 5308646 - DNA, 25 bp, Homo sapien
agcatccatcccgagtagagctgac

SEQ ID NO: 5308647 - DNA, 25 bp, Homo sapien
tccagggcgtgcatttgccaggcag

SEQ ID NO: 5308648 - DNA, 25 bp, Homo sapien
caatttccaaagcaaggaggattgg

SEQ ID NO: 5308649 - DNA, 25 bp, Homo sapien
tgagtgcgcccctacttagaaccag

SEQ ID NO: 5308650 - DNA, 25 bp, Homo sapien
agagctcccaagttctgtggcctgg

SEQ ID NO: 5308651 - DNA, 25 bp, Homo sapien
cttctggcgttccagtgagtccgca

SEQ ID NO: 5308652 - DNA, 25 bp, Homo sapien
atgcagcagccagtaggctggctcc

SEQ ID NO: 5308653 - DNA, 25 bp, Homo sapien
tctggcgttccagtgagtccgcacc

SEQ ID NO: 5308654 - DNA, 25 bp, Homo sapien
tggcgttccagtgagtccgcaccca

SEQ ID NO: 5308655 - DNA, 25 bp, Homo sapien
ttccagaggcttgaggaataatagc

SEQ ID NO: 5308656 - DNA, 25 bp, Homo sapien
aaataatgacaatccaagatttgca

SEQ ID NO: 5308657 - DNA, 25 bp, Homo sapien
ggaataatagccaacttggctattt

SEQ ID NO: 5308658 - DNA, 25 bp, Homo sapien
tgaggaataatagccaacttggcta

SEQ ID NO: 5308659 - DNA, 25 bp, Homo sapien
cccccagcgctggagctgagatgcc

SEQ ID NO: 5308660 - DNA, 25 bp, Homo sapien
ctggccccagtgtgcgggccccggt

SEQ ID NO: 5308661 - DNA, 25 bp, Homo sapien
tttccggccccagctgagctgaagc

SEQ ID NO: 5308662 - DNA, 25 bp, Homo sapien
tggccccagtgtgcgggccccggtg

SEQ ID NO: 5308663 - DNA, 25 bp, Homo sapien
ctccggccctttccggccccagctg

SEQ ID NO: 5308664 - DNA, 25 bp, Homo sapien
ggctccaatttctccggtcagctga

SEQ ID NO: 5308665 - DNA, 25 bp, Homo sapien
ggtcagctgagcacaactttccatt

SEQ ID NO: 5308666 - DNA, 25 bp, Homo sapien
ggagcagtactagcccggctccaat

SEQ ID NO: 5308667 - DNA, 25 bp, Homo sapien
cattcgagtgtattcatgcagcggc

SEQ ID NO: 5308668 - DNA, 25 bp, Homo sapien
ggggctcggcgggagcgggcaggaa

SEQ ID NO: 5308669 - DNA, 25 bp, Homo sapien
ggcggggctcggcgggagcgggcag

SEQ ID NO: 5308670 - DNA, 25 bp, Homo sapien
ggctcggcgggagcgggcaggaaca

SEQ ID NO: 5308671 - DNA, 25 bp, Homo sapien
ctgtgccgggcggggctcggcggga

SEQ ID NO: 5308672 - DNA, 25 bp, Homo sapien
ggaaatacttttctgagacgcctct

SEQ ID NO: 5308673 - DNA, 25 bp, Homo sapien
tgcgctcccgatagcgggggaaata

SEQ ID NO: 5308674 - DNA, 25 bp, Homo sapien
cggctacaccaacacactcgatgac

SEQ ID NO: 5308675 - DNA, 25 bp, Homo sapien
ttctctgtcttcctcgccgtgcgct

SEQ ID NO: 5308676 - DNA, 25 bp, Homo sapien
tcccacagcggaccggcctccgctt

SEQ ID NO: 5308677 - DNA, 25 bp, Homo sapien
gcctccgctcccacagcggaccggc

SEQ ID NO: 5308678 - DNA, 25 bp, Homo sapien
agagcggggatttcaggggcctccg

SEQ ID NO: 5308679 - DNA, 25 bp, Homo sapien
caggagaaagagcggggatttcagg

SEQ ID NO: 5308680 - DNA, 25 bp, Homo sapien
agtcctgtagggccaggtctcctcc

SEQ ID NO: 5308681 - DNA, 25 bp, Homo sapien
aagctcgagtcccaggctccaaatc

SEQ ID NO: 5308682 - DNA, 25 bp, Homo sapien
cctttgttctactgcacaataacag

SEQ ID NO: 5308683 - DNA, 25 bp, Homo sapien
tctactgcacaataacagctggcac

SEQ ID NO: 5308684 - DNA, 25 bp, Homo sapien
ggtgcgggaggacggtgaaagctcg

SEQ ID NO: 5308685 - DNA, 25 bp, Homo sapien
taccgagggtcagaagtgtcgcaag

SEQ ID NO: 5308686 - DNA, 25 bp, Homo sapien
acccagcgcgggaatgttccatttg

SEQ ID NO: 5308687 - DNA, 25 bp, Homo sapien
gaagcgtggcccgtgagaagggtac

SEQ ID NO: 5308688 - DNA, 25 bp, Homo sapien
gcaggctctgcgaaacttcagtgcg

SEQ ID NO: 5308689 - DNA, 25 bp, Homo sapien
ctcctagcgagcttggagtgtaggt

SEQ ID NO: 5308690 - DNA, 25 bp, Homo sapien
gggcctttcacatctgctcctagcg

SEQ ID NO: 5308691 - DNA, 25 bp, Homo sapien
atctgtgccagtgcgtgtctgcgtg

SEQ ID NO: 5308692 - DNA, 25 bp, Homo sapien
tgtaggtgcgaccagggcgcatctg

SEQ ID NO: 5308693 - DNA, 25 bp, Homo sapien
ttccgcggccggacgcccctcgcgc

SEQ ID NO: 5308694 - DNA, 25 bp, Homo sapien
gccggacgcccctcgcgctggctgt

SEQ ID NO: 5308695 - DNA, 25 bp, Homo sapien
cgcccctcgcgctggctgtgcgcac

SEQ ID NO: 5308696 - DNA, 25 bp, Homo sapien
gacgcccctcgcgctggctgtgcgc

SEQ ID NO: 5308697 - DNA, 25 bp, Homo sapien
tggtgcatagcatgcgaaccctccg

SEQ ID NO: 5308698 - DNA, 25 bp, Homo sapien
gactgcgcgctgtcttataccaaag

SEQ ID NO: 5308699 - DNA, 25 bp, Homo sapien
caccattttgcgtgggtaggaccct

SEQ ID NO: 5308700 - DNA, 25 bp, Homo sapien
tttactacttgatcccgtggctgcc

SEQ ID NO: 5308701 - DNA, 25 bp, Homo sapien
tcttcggcactattaacttcttgtc

SEQ ID NO: 5308702 - DNA, 25 bp, Homo sapien
gctaatatttcccttcttcggcact

SEQ ID NO: 5308703 - DNA, 25 bp, Homo sapien
tcttgcagatagatgcctctaggtc

SEQ ID NO: 5308704 - DNA, 25 bp, Homo sapien
ttcttgtcttgcagatagatgcctc

SEQ ID NO: 5308705 - DNA, 25 bp, Homo sapien
tcagtacacatcatgctccagttac

SEQ ID NO: 5308706 - DNA, 25 bp, Homo sapien
tttgccatgtctcacttcagtacac

SEQ ID NO: 5308707 - DNA, 25 bp, Homo sapien
tcaatattttagcacgagaaaggca

SEQ ID NO: 5308708 - DNA, 25 bp, Homo sapien
gcccgggcagcacttatcaatattt

SEQ ID NO: 5308709 - DNA, 25 bp, Homo sapien
cctggttgctgcctaactttcagcc

SEQ ID NO: 5308710 - DNA, 25 bp, Homo sapien
ttcagccgtgtgtccagcatatctg

SEQ ID NO: 5308711 - DNA, 25 bp, Homo sapien
taactttcagccgtgtgtccagcat

SEQ ID NO: 5308712 - DNA, 25 bp, Homo sapien
tgctgcctaactttcagccgtgtgt

SEQ ID NO: 5308713 - DNA, 25 bp, Homo sapien
ccataaggccagagtagtgcttgtc

SEQ ID NO: 5308714 - DNA, 25 bp, Homo sapien
taaggccagagtagtgcttgtcaca

SEQ ID NO: 5308715 - DNA, 25 bp, Homo sapien
cctggagtgcttttccataaggcca

SEQ ID NO: 5308716 - DNA, 25 bp, Homo sapien
tgcacctggagtgcttttccataag

SEQ ID NO: 5308717 - DNA, 25 bp, Homo sapien
catcagtgcccggtactggctttgg

SEQ ID NO: 5308718 - DNA, 25 bp, Homo sapien
ggagtgcttgcacattcatcagtgc

SEQ ID NO: 5308719 - DNA, 25 bp, Homo sapien
gtactggctttggatctctgatggc

SEQ ID NO: 5308720 - DNA, 25 bp, Homo sapien
cagagtggagtgcttgcacattcat

SEQ ID NO: 5308721 - DNA, 25 bp, Homo sapien
aggaaaggcgtatctctcatgggcc

SEQ ID NO: 5308722 - DNA, 25 bp, Homo sapien
gcccatgactctttccggagccttg

SEQ ID NO: 5308723 - DNA, 25 bp, Homo sapien
aggcgtatctctcatgggcccatga

SEQ ID NO: 5308724 - DNA, 25 bp, Homo sapien
tgggcccatgactctttccggagcc

SEQ ID NO: 5308725 - DNA, 25 bp, Homo sapien
atctccaagtggagggaatccgagc

SEQ ID NO: 5308726 - DNA, 25 bp, Homo sapien
gggaatccgagcctacgtttctcca

SEQ ID NO: 5308727 - DNA, 25 bp, Homo sapien
tagggaggaacggaatctccaagtg

SEQ ID NO: 5308728 - DNA, 25 bp, Homo sapien
gaacggaatctccaagtggagggaa

SEQ ID NO: 5308729 - DNA, 25 bp, Homo sapien
tccccaaaccctcgatatttctgat

SEQ ID NO: 5308730 - DNA, 25 bp, Homo sapien
catccccaaaccctcgatatttctg

SEQ ID NO: 5308731 - DNA, 25 bp, Homo sapien
ccccaaaccctcgatatttctgatt

SEQ ID NO: 5308732 - DNA, 25 bp, Homo sapien
ccaaaccctcgatatttctgattct

SEQ ID NO: 5308733 - DNA, 25 bp, Homo sapien
ggaaatgaggcgctgcaccttcttg

SEQ ID NO: 5308734 - DNA, 25 bp, Homo sapien
tgcaatgggaaatgaggcgctgcac

SEQ ID NO: 5308735 - DNA, 25 bp, Homo sapien
ctgtccataataccctctggtggga

SEQ ID NO: 5308736 - DNA, 25 bp, Homo sapien
cataataccctctggtgggaacagc

SEQ ID NO: 5308737 - DNA, 25 bp, Homo sapien
aaaacattgtcacatgaacgcatgg

SEQ ID NO: 5308738 - DNA, 25 bp, Homo sapien
attcagtggatagaattctgaaact

SEQ ID NO: 5308739 - DNA, 25 bp, Homo sapien
tattgttaacaaattgatgtagtgc

SEQ ID NO: 5308740 - DNA, 25 bp, Homo sapien
tgtcccactctaaggaaattcagtg

SEQ ID NO: 5308741 - DNA, 25 bp, Homo sapien
tatgtgcattcttcactacagaaaa

SEQ ID NO: 5308742 - DNA, 25 bp, Homo sapien
caaacaccatgatagtgaaaacagc

SEQ ID NO: 5308743 - DNA, 25 bp, Homo sapien
gaaatgacttgtggtcacttgtagg

SEQ ID NO: 5308744 - DNA, 25 bp, Homo sapien
ggatctcatgcagtacctctatgtg

SEQ ID NO: 5308745 - DNA, 25 bp, Homo sapien
tcaggtctcttcgtgctctccctca

SEQ ID NO: 5308746 - DNA, 25 bp, Homo sapien
caggtctcttcgtgctctccctcac

SEQ ID NO: 5308747 - DNA, 25 bp, Homo sapien
gttggtctgtgctacatcaacaaga

SEQ ID NO: 5308748 - DNA, 25 bp, Homo sapien
caagattctggagaatcttgtgttt

SEQ ID NO: 5308749 - DNA, 25 bp, Homo sapien
tctccgtggttggtctgtgctacat

SEQ ID NO: 5308750 - DNA, 25 bp, Homo sapien
tcatcttctccgtggttggtctgtg

SEQ ID NO: 5308751 - DNA, 25 bp, Homo sapien
tgctacacgtttgtgccttccttgg

SEQ ID NO: 5308752 - DNA, 25 bp, Homo sapien
ggtttggtgcccaacacatcttagt

SEQ ID NO: 5308753 - DNA, 25 bp, Homo sapien
ccatctgggttggaagctgacctgt

SEQ ID NO: 5308754 - DNA, 25 bp, Homo sapien
tctctaggtgatgtggtgctacacg

SEQ ID NO: 5308755 - DNA, 25 bp, Homo sapien
aaggactaatgtctcagccctcagg

SEQ ID NO: 5308756 - DNA, 25 bp, Homo sapien
aggaggacatcccacaaggactaat

SEQ ID NO: 5308757 - DNA, 25 bp, Homo sapien
gggtccttctatcatcctcagtctc

SEQ ID NO: 5308758 - DNA, 25 bp, Homo sapien
ctcagggtccttctatcatcctcag

SEQ ID NO: 5308759 - DNA, 25 bp, Homo sapien
tctgggctgctggaccgtgagtcat

SEQ ID NO: 5308760 - DNA, 25 bp, Homo sapien
gaatagccagcactggtagaaaccc

SEQ ID NO: 5308761 - DNA, 25 bp, Homo sapien
gcactggtagaaaccccttctgggc

SEQ ID NO: 5308762 - DNA, 25 bp, Homo sapien
ttctgggctgctggaccgtgagtca

SEQ ID NO: 5308763 - DNA, 25 bp, Homo sapien
tatccccagaggtgtaacggagact

SEQ ID NO: 5308764 - DNA, 25 bp, Homo sapien
gcggcaggccttcttcggacctatc

SEQ ID NO: 5308765 - DNA, 25 bp, Homo sapien
gatttagtctcatgtccgcctttgt

SEQ ID NO: 5308766 - DNA, 25 bp, Homo sapien
tctagggcagctagggtcgtctctt

SEQ ID NO: 5308767 - DNA, 25 bp, Homo sapien
gggcgggcatctgccaggcgaggga

SEQ ID NO: 5308768 - DNA, 25 bp, Homo sapien
ctggggcgggcatctgccaggcgag

SEQ ID NO: 5308769 - DNA, 25 bp, Homo sapien
gcgggcatctgccaggcgagggagc

SEQ ID NO: 5308770 - DNA, 25 bp, Homo sapien
gggcatctgccaggcgagggagctg

SEQ ID NO: 5308771 - DNA, 25 bp, Homo sapien
tgtggggaaacggcgtggaagacac

SEQ ID NO: 5308772 - DNA, 25 bp, Homo sapien
tggaagacaccccatcggagggcac

SEQ ID NO: 5308773 - DNA, 25 bp, Homo sapien
tcggagggcacccaatctgcctctg

SEQ ID NO: 5308774 - DNA, 25 bp, Homo sapien
aatctgcctctgcactcgattccat

SEQ ID NO: 5308775 - DNA, 25 bp, Homo sapien
gagactcccgcgaggtcgctcggaa

SEQ ID NO: 5308776 - DNA, 25 bp, Homo sapien
aaaccatttccgagttccagccgca

SEQ ID NO: 5308777 - DNA, 25 bp, Homo sapien
gttgccaaaagagactcccgcgagg

SEQ ID NO: 5308778 - DNA, 25 bp, Homo sapien
cagccgcagaggcacccgcggagtt

SEQ ID NO: 5308779 - DNA, 25 bp, Homo sapien
accaccgcgaccaggagttccttct

SEQ ID NO: 5308780 - DNA, 25 bp, Homo sapien
agtctcggctcggtagcctggtccc

SEQ ID NO: 5308781 - DNA, 25 bp, Homo sapien
ctggacgcgaggtctttcaggacca

SEQ ID NO: 5308782 - DNA, 25 bp, Homo sapien
gtctttcaggaccagtctcggctcg

SEQ ID NO: 5308783 - DNA, 25 bp, Homo sapien
gcagcggctccaggaaggagcacca

SEQ ID NO: 5308784 - DNA, 25 bp, Homo sapien
ggaggttcaggcggcaggaatggag

SEQ ID NO: 5308785 - DNA, 25 bp, Homo sapien
ttcaggcggcaggaatggagaggct

SEQ ID NO: 5308786 - DNA, 25 bp, Homo sapien
ggagaggctgatcctcctctagccc

SEQ ID NO: 5308787 - DNA, 25 bp, Homo sapien
atggagaggctgatcctcctctagc

SEQ ID NO: 5308788 - DNA, 25 bp, Homo sapien
ggtgcaatgcgatggcaccaccagc

SEQ ID NO: 5308789 - DNA, 25 bp, Homo sapien
ccactccctcaagataccatttggg

SEQ ID NO: 5308790 - DNA, 25 bp, Homo sapien
cttttcctggtgcaatgcgatggca

SEQ ID NO: 5308791 - DNA, 25 bp, Homo sapien
tttaacttttcctggtgcaatgcga

SEQ ID NO: 5308792 - DNA, 25 bp, Homo sapien
aactccaggcaaactgctgagatcc

SEQ ID NO: 5308793 - DNA, 25 bp, Homo sapien
actccaggcaaactgctgagatccc

SEQ ID NO: 5308794 - DNA, 25 bp, Homo sapien
tccaggcaaactgctgagatcccac

SEQ ID NO: 5308795 - DNA, 25 bp, Homo sapien
ctccaggcaaactgctgagatccca

SEQ ID NO: 5308796 - DNA, 25 bp, Homo sapien
ggtagcttagccagggcaccagtgc

SEQ ID NO: 5308797 - DNA, 25 bp, Homo sapien
gcaccagtgcgtggctgtgggtttg

SEQ ID NO: 5308798 - DNA, 25 bp, Homo sapien
cagcaatccatgctgcatggctggg

SEQ ID NO: 5308799 - DNA, 25 bp, Homo sapien
tcttgttctagcaggtcgatgggca

SEQ ID NO: 5308800 - DNA, 25 bp, Homo sapien
gagaggccgcaggaactgccttgac

SEQ ID NO: 5308801 - DNA, 25 bp, Homo sapien
gcaggaactgccttgaccggaattc

SEQ ID NO: 5308802 - DNA, 25 bp, Homo sapien
cagttcccgggaggacctgagctgt

SEQ ID NO: 5308803 - DNA, 25 bp, Homo sapien
tcccgggaggacctgagctgtccct

SEQ ID NO: 5308804 - DNA, 25 bp, Homo sapien
acagaagcaggtttgcgagctcgaa

SEQ ID NO: 5308805 - DNA, 25 bp, Homo sapien
agaagcaggtttgcgagctcgaata

SEQ ID NO: 5308806 - DNA, 25 bp, Homo sapien
cagaagcaggtttgcgagctcgaat

SEQ ID NO: 5308807 - DNA, 25 bp, Homo sapien
gaagcaggtttgcgagctcgaatac

SEQ ID NO: 5308808 - DNA, 25 bp, Homo sapien
caagtcgtgtgtataggaaggcgtc

SEQ ID NO: 5308809 - DNA, 25 bp, Homo sapien
gaatttcagtgccttcacctagcga

SEQ ID NO: 5308810 - DNA, 25 bp, Homo sapien
gctttggcatctccgaaggcacgta

SEQ ID NO: 5308811 - DNA, 25 bp, Homo sapien
tggctgtttcgggactcaccagaga

SEQ ID NO: 5308812 - DNA, 25 bp, Homo sapien
ttactagacgaaaagctgacacctg

SEQ ID NO: 5308813 - DNA, 25 bp, Homo sapien
gaacggtggcaagctagaaatctag

SEQ ID NO: 5308814 - DNA, 25 bp, Homo sapien
tcagcctgcgggtctttcagtacct

SEQ ID NO: 5308815 - DNA, 25 bp, Homo sapien
aacattcacatgagggcattacggg

SEQ ID NO: 5308816 - DNA, 25 bp, Homo sapien
ttgaggatggagtcctgcaggccat

SEQ ID NO: 5308817 - DNA, 25 bp, Homo sapien
caggtccacgaggttggctgacatg

SEQ ID NO: 5308818 - DNA, 25 bp, Homo sapien
agcccaggtccacgaggttggctga

SEQ ID NO: 5308819 - DNA, 25 bp, Homo sapien
gtggtgttgcagtgggtccgctcca

SEQ ID NO: 5308820 - DNA, 25 bp, Homo sapien
agctgcctaacaccgacttgccgct

SEQ ID NO: 5308821 - DNA, 25 bp, Homo sapien
cgctgccattcagcgggttgtggct

SEQ ID NO: 5308822 - DNA, 25 bp, Homo sapien
ggcgtccccgatggagtcttctcat

SEQ ID NO: 5308823 - DNA, 25 bp, Homo sapien
gggcggcgggctgaggagcagtgcg

SEQ ID NO: 5308824 - DNA, 25 bp, Homo sapien
tctgttcccataataagtttctctc

SEQ ID NO: 5308825 - DNA, 25 bp, Homo sapien
gattctgttcccataataagtttct

SEQ ID NO: 5308826 - DNA, 25 bp, Homo sapien
ttctgttcccataataagtttctct

SEQ ID NO: 5308827 - DNA, 25 bp, Homo sapien
ggattctgttcccataataagtttc

SEQ ID NO: 5308828 - DNA, 25 bp, Homo sapien
gcgaccgagtagttagttgacaact

SEQ ID NO: 5308829 - DNA, 25 bp, Homo sapien
ttagacaaatccctgctcgccgggt

SEQ ID NO: 5308830 - DNA, 25 bp, Homo sapien
cctgaattgctctgcccgctttaga

SEQ ID NO: 5308831 - DNA, 25 bp, Homo sapien
gatacaggcccacagttctgcgctg

SEQ ID NO: 5308832 - DNA, 25 bp, Homo sapien
ctcggccgcccggtcgcgctgccgc

SEQ ID NO: 5308833 - DNA, 25 bp, Homo sapien
cctcggccgcccggtcgcgctgccg

SEQ ID NO: 5308834 - DNA, 25 bp, Homo sapien
ttggcctcggccgcccggtcgcgct

SEQ ID NO: 5308835 - DNA, 25 bp, Homo sapien
tggcctcggccgcccggtcgcgctg

SEQ ID NO: 5308836 - DNA, 25 bp, Homo sapien
gtggtgaggcccgtgcctccgccag

SEQ ID NO: 5308837 - DNA, 25 bp, Homo sapien
cgtgcctccgccagctcacgcttct

SEQ ID NO: 5308838 - DNA, 25 bp, Homo sapien
tgtgtggtggtgaggcccgtgcctc

SEQ ID NO: 5308839 - DNA, 25 bp, Homo sapien
cagctcacgcttctcgcggggtgaa

SEQ ID NO: 5308840 - DNA, 25 bp, Homo sapien
agcacgctgcgactcttttccttga

SEQ ID NO: 5308841 - DNA, 25 bp, Homo sapien
aatttgcggcgcacgcggtatttgc

SEQ ID NO: 5308842 - DNA, 25 bp, Homo sapien
cctcgatgtagtgtgccttgagcca

SEQ ID NO: 5308843 - DNA, 25 bp, Homo sapien
ttgctcctgcgtgaagccgaaggtg

SEQ ID NO: 5308844 - DNA, 25 bp, Homo sapien
ctcaccgggccgcgcggtcccgcat

SEQ ID NO: 5308845 - DNA, 25 bp, Homo sapien
cctcaccgggccgcgcggtcccgca

SEQ ID NO: 5308846 - DNA, 25 bp, Homo sapien
gccggccgcgggtcccacgaagctc

SEQ ID NO: 5308847 - DNA, 25 bp, Homo sapien
cggtgagccccgagtcactgccgta

SEQ ID NO: 5308848 - DNA, 25 bp, Homo sapien
tgagccccgagtcactgccgtacgt

SEQ ID NO: 5308849 - DNA, 25 bp, Homo sapien
tcactgccgtacgtccccgcgccgg

SEQ ID NO: 5308850 - DNA, 25 bp, Homo sapien
ccagcctataaaggcggcagaaatc

SEQ ID NO: 5308851 - DNA, 25 bp, Homo sapien
cagacagtcccggagttctctgggc

SEQ ID NO: 5308852 - DNA, 25 bp, Homo sapien
gggcctggcgcgttccccagacagt

SEQ ID NO: 5308853 - DNA, 25 bp, Homo sapien
aatcccctgggtagactctggccct

SEQ ID NO: 5308854 - DNA, 25 bp, Homo sapien
cgtgtttcgttgaaagcgggcaggt

SEQ ID NO: 5308855 - DNA, 25 bp, Homo sapien
tgaggctccggtgcctccccacctg

SEQ ID NO: 5308856 - DNA, 25 bp, Homo sapien
ctgggcgacgtgtttcgttgaaagc

SEQ ID NO: 5308857 - DNA, 25 bp, Homo sapien
gcgacgtgtttcgttgaaagcgggc

SEQ ID NO: 5308858 - DNA, 25 bp, Homo sapien
aattctctgtgtcggagaacacgcc

SEQ ID NO: 5308859 - DNA, 25 bp, Homo sapien
gggctcacgagggatcttgttcaaa

SEQ ID NO: 5308860 - DNA, 25 bp, Homo sapien
ggtcgcactcttggaaccgcgcgaa

SEQ ID NO: 5308861 - DNA, 25 bp, Homo sapien
ggcccacaagagcaaacggtttaga

SEQ ID NO: 5308862 - DNA, 25 bp, Homo sapien
tcagaggaggctttgtctgccacag

SEQ ID NO: 5308863 - DNA, 25 bp, Homo sapien
tctccagggagtgggcgctaaatca

SEQ ID NO: 5308864 - DNA, 25 bp, Homo sapien
caatgccggcttcatgcaggtctgc

SEQ ID NO: 5308865 - DNA, 25 bp, Homo sapien
cagatgtggcagctggaatttctca

SEQ ID NO: 5308866 - DNA, 25 bp, Homo sapien
aaccagccggcacttcagaaggttg

SEQ ID NO: 5308867 - DNA, 25 bp, Homo sapien
cagaaggttggaactgttagccaca

SEQ ID NO: 5308868 - DNA, 25 bp, Homo sapien
taatcagttgccagagagacagccc

SEQ ID NO: 5308869 - DNA, 25 bp, Homo sapien
aacagcagcagggaattacctctgg

SEQ ID NO: 5308870 - DNA, 25 bp, Homo sapien
tccaagtgcaatgcattgagatgag

SEQ ID NO: 5308871 - DNA, 25 bp, Homo sapien
ggtccccattagacctggctcccaa

SEQ ID NO: 5308872 - DNA, 25 bp, Homo sapien
ttgttggattaacttggataccaga

SEQ ID NO: 5308873 - DNA, 25 bp, Homo sapien
ttgagatgagctgaactggtccctg

SEQ ID NO: 5308874 - DNA, 25 bp, Homo sapien
tgtgaggaagcgctgtgaattttac

SEQ ID NO: 5308875 - DNA, 25 bp, Homo sapien
acatgagatgtgtaaagaggggcaa

SEQ ID NO: 5308876 - DNA, 25 bp, Homo sapien
aaatcagcaaaccaagcagtcttaa

SEQ ID NO: 5308877 - DNA, 25 bp, Homo sapien
taaagaggggcaagatggaagaaaa

SEQ ID NO: 5308878 - DNA, 25 bp, Homo sapien
tgtcgacctgttccctttgataaag

SEQ ID NO: 5308879 - DNA, 25 bp, Homo sapien
gataaagctgagtccccataggtcg

SEQ ID NO: 5308880 - DNA, 25 bp, Homo sapien
cactggaggaacactcaggaagaga

SEQ ID NO: 5308881 - DNA, 25 bp, Homo sapien
aaaactgatgtctgtagcagtggcc

SEQ ID NO: 5308882 - DNA, 25 bp, Homo sapien
catgcccttcccgttattcctgtgt

SEQ ID NO: 5308883 - DNA, 25 bp, Homo sapien
acatgcctgcaggtctagccactct

SEQ ID NO: 5308884 - DNA, 25 bp, Homo sapien
gcctgcaggtctagccactctgaag

SEQ ID NO: 5308885 - DNA, 25 bp, Homo sapien
ggtagacatgcctgcaggtctagcc

SEQ ID NO: 5308886 - DNA, 25 bp, Homo sapien
agtgtccagctggtcattgtgcacc

SEQ ID NO: 5308887 - DNA, 25 bp, Homo sapien
gtccagctggtcattgtgcaccttg

SEQ ID NO: 5308888 - DNA, 25 bp, Homo sapien
agctggtcattgtgcaccttgcccc

SEQ ID NO: 5308889 - DNA, 25 bp, Homo sapien
tcagtgtccagctggtcattgtgca

SEQ ID NO: 5308890 - DNA, 25 bp, Homo sapien
taggcgtatagtttgcctctccaga

SEQ ID NO: 5308891 - DNA, 25 bp, Homo sapien
tctcctctggagtgccctctctgtt

SEQ ID NO: 5308892 - DNA, 25 bp, Homo sapien
tctctgattgtctgataggcgtata

SEQ ID NO: 5308893 - DNA, 25 bp, Homo sapien
acagagaacagggtccttgaaggca

SEQ ID NO: 5308894 - DNA, 25 bp, Homo sapien
caaggtcatacagcataatcggtct

SEQ ID NO: 5308895 - DNA, 25 bp, Homo sapien
gcagtcttcatatcaatcccaggag

SEQ ID NO: 5308896 - DNA, 25 bp, Homo sapien
gggtgtcctgcgtatcatctcatgc

SEQ ID NO: 5308897 - DNA, 25 bp, Homo sapien
taatcggtctcccttagtgctgaag

SEQ ID NO: 5308898 - DNA, 25 bp, Homo sapien
ttagatcgacagttcaatatgcaga

SEQ ID NO: 5308899 - DNA, 25 bp, Homo sapien
gactttcgaccatggcgagtctgca

SEQ ID NO: 5308900 - DNA, 25 bp, Homo sapien
gataatctttagatcgacagttcaa

SEQ ID NO: 5308901 - DNA, 25 bp, Homo sapien
aatgattctataggaagccagagtg

SEQ ID NO: 5308902 - DNA, 25 bp, Homo sapien
gaccactgttacatgagaacttaaa

SEQ ID NO: 5308903 - DNA, 25 bp, Homo sapien
ttaattcaaatcgactgagtcccat

SEQ ID NO: 5308904 - DNA, 25 bp, Homo sapien
cttttttaattcaaatcgactgagt

SEQ ID NO: 5308905 - DNA, 25 bp, Homo sapien
ttacatgagaacttaaactgatggg

SEQ ID NO: 5308906 - DNA, 25 bp, Homo sapien
tctgaaatctgatgcctcgtccaat

SEQ ID NO: 5308907 - DNA, 25 bp, Homo sapien
catccacctggcacgacagttgggt

SEQ ID NO: 5308908 - DNA, 25 bp, Homo sapien
ggagttgatcctagctttctcagca

SEQ ID NO: 5308909 - DNA, 25 bp, Homo sapien
tagagaggtctcatacagggaccac

SEQ ID NO: 5308910 - DNA, 25 bp, Homo sapien
tggatatcatgtgtgcctgctctgc

SEQ ID NO: 5308911 - DNA, 25 bp, Homo sapien
cttagacgtttttgcaagccacttc

SEQ ID NO: 5308912 - DNA, 25 bp, Homo sapien
gagtcccctgtggaagtggatatca

SEQ ID NO: 5308913 - DNA, 25 bp, Homo sapien
tctgctccctgaagacacaggtggt

SEQ ID NO: 5308914 - DNA, 25 bp, Homo sapien
agagactctggcaacatcctcagct

SEQ ID NO: 5308915 - DNA, 25 bp, Homo sapien
aacagagactctggcaacatcctca

SEQ ID NO: 5308916 - DNA, 25 bp, Homo sapien
aagaacagagactctggcaacatcc

SEQ ID NO: 5308917 - DNA, 25 bp, Homo sapien
cagagactctggcaacatcctcagc

SEQ ID NO: 5308918 - DNA, 25 bp, Homo sapien
aattgaagccacactgaacatcacc

SEQ ID NO: 5308919 - DNA, 25 bp, Homo sapien
cacgggaattgaagccacactgaac

SEQ ID NO: 5308920 - DNA, 25 bp, Homo sapien
ggtcacgggaattgaagccacactg

SEQ ID NO: 5308921 - DNA, 25 bp, Homo sapien
ccaaggtcacgggaattgaagccac

SEQ ID NO: 5308922 - DNA, 25 bp, Homo sapien
aacatggtgtccaagtgattcatat

SEQ ID NO: 5308923 - DNA, 25 bp, Homo sapien
tgacagccgcgaagtcccaacgaaa

SEQ ID NO: 5308924 - DNA, 25 bp, Homo sapien
cgcgaagtcccaacgaaagcttagg

SEQ ID NO: 5308925 - DNA, 25 bp, Homo sapien
ggaagcaactctattctctgagcta

SEQ ID NO: 5308926 - DNA, 25 bp, Homo sapien
cctgtggcaaatgaaaacccttgac

SEQ ID NO: 5308927 - DNA, 25 bp, Homo sapien
tgcacacgtgcatacgttcaggccc

SEQ ID NO: 5308928 - DNA, 25 bp, Homo sapien
tcttcattcggttctgcatcagccc

SEQ ID NO: 5308929 - DNA, 25 bp, Homo sapien
gttcaggccccagacttagacagtt

SEQ ID NO: 5308930 - DNA, 25 bp, Homo sapien
cagagctcagcggtattccttgggt

SEQ ID NO: 5308931 - DNA, 25 bp, Homo sapien
ttaaatgcagtgagtccatggggct

SEQ ID NO: 5308932 - DNA, 25 bp, Homo sapien
taaatgcagtgagtccatggggctt

SEQ ID NO: 5308933 - DNA, 25 bp, Homo sapien
aatgcagtgagtccatggggcttgg

SEQ ID NO: 5308934 - DNA, 25 bp, Homo sapien
aattaaatgcagtgagtccatgggg

SEQ ID NO: 5308935 - DNA, 25 bp, Homo sapien
catacacagggactcaagggtattc

SEQ ID NO: 5308936 - DNA, 25 bp, Homo sapien
tggccagaatggagagcttttccct

SEQ ID NO: 5308937 - DNA, 25 bp, Homo sapien
aaagccttggctcctacagcatggg

SEQ ID NO: 5308938 - DNA, 25 bp, Homo sapien
cttcatgactagagcgctggtgccc

SEQ ID NO: 5308939 - DNA, 25 bp, Homo sapien
agtctgccagcagatctccaaggag

SEQ ID NO: 5308940 - DNA, 25 bp, Homo sapien
tctgcgtgctgtcttcacatactgc

SEQ ID NO: 5308941 - DNA, 25 bp, Homo sapien
gagagctatccacatcacagtttct

SEQ ID NO: 5308942 - DNA, 25 bp, Homo sapien
caaaagtgatcagtccttgggtctg

SEQ ID NO: 5308943 - DNA, 25 bp, Homo sapien
caggaactaggagctcacctctgga

SEQ ID NO: 5308944 - DNA, 25 bp, Homo sapien
ggtgtgatccaactatacgagaggt

SEQ ID NO: 5308945 - DNA, 25 bp, Homo sapien
gacagaggcctttcttagtgtggga

SEQ ID NO: 5308946 - DNA, 25 bp, Homo sapien
tccctgttcacggaggagaggtcgc

SEQ ID NO: 5308947 - DNA, 25 bp, Homo sapien
catctatgcatcctataagcagcgg

SEQ ID NO: 5308948 - DNA, 25 bp, Homo sapien
gaaggttgacttatctaggtatccc

SEQ ID NO: 5308949 - DNA, 25 bp, Homo sapien
tagactacagtctccctgaaggttg

SEQ ID NO: 5308950 - DNA, 25 bp, Homo sapien
ggtatcccctatgaatggaacagag

SEQ ID NO: 5308951 - DNA, 25 bp, Homo sapien
tgtggaatgttgcttacagggctga

SEQ ID NO: 5308952 - DNA, 25 bp, Homo sapien
aaattcttgtaggatagaagcaggc

SEQ ID NO: 5308953 - DNA, 25 bp, Homo sapien
tcatgttgccttgaagaaccatcat

SEQ ID NO: 5308954 - DNA, 25 bp, Homo sapien
agaagcaggcctaactcgcccatga

SEQ ID NO: 5308955 - DNA, 25 bp, Homo sapien
tgctacatgaatgacttgatttatg

SEQ ID NO: 5308956 - DNA, 25 bp, Homo sapien
cttgctacatgaatgacttgattta

SEQ ID NO: 5308957 - DNA, 25 bp, Homo sapien
tacttgctacatgaatgacttgatt

SEQ ID NO: 5308958 - DNA, 25 bp, Homo sapien
tacatgaatgacttgatttatgttg

SEQ ID NO: 5308959 - DNA, 25 bp, Homo sapien
tcaggactgggctccaaagtgcaaa

SEQ ID NO: 5308960 - DNA, 25 bp, Homo sapien
aaagaggcaaaggatcgacagctgc

SEQ ID NO: 5308961 - DNA, 25 bp, Homo sapien
gcaaaggatcgacagctgctttggt

SEQ ID NO: 5308962 - DNA, 25 bp, Homo sapien
tggtcccatcaggactgggctccaa

SEQ ID NO: 5308963 - DNA, 25 bp, Homo sapien
gagaagagagatacgctcagggtcc

SEQ ID NO: 5308964 - DNA, 25 bp, Homo sapien
aaggagaagagagatacgctcaggg

SEQ ID NO: 5308965 - DNA, 25 bp, Homo sapien
caaggagaagagagatacgctcagg

SEQ ID NO: 5308966 - DNA, 25 bp, Homo sapien
ggagaagagagatacgctcagggtc

SEQ ID NO: 5308967 - DNA, 25 bp, Homo sapien
caacagtggtttatccgatttcatc
